United States Patent Application Publication US 2005/0244851 A1 - sequence listing, part 74

SEQ ID NO: 2879564 - DNA, 25 bp, Homo sapien
tgtagtgacatgatttctgctcact

SEQ ID NO: 2879565 - DNA, 25 bp, Homo sapien
ccagtgccggtaatatcatgaggaa

SEQ ID NO: 2879566 - DNA, 25 bp, Homo sapien
acttcatcatggttctaaagcccgg

SEQ ID NO: 2879567 - DNA, 25 bp, Homo sapien
taaagcccggtagcatcaaatggaa

SEQ ID NO: 2879568 - DNA, 25 bp, Homo sapien
cagataagcctgcagtgaacgtgaa

SEQ ID NO: 2879569 - DNA, 25 bp, Homo sapien
ccactcttgggctttacaaccctgt

SEQ ID NO: 2879570 - DNA, 25 bp, Homo sapien
ctcttgggctttacaaccctgttct

SEQ ID NO: 2879571 - DNA, 25 bp, Homo sapien
tctccccagcatggtctcagccaca

SEQ ID NO: 2879572 - DNA, 25 bp, Homo sapien
tcatctccgtgactgaacagcctct

SEQ ID NO: 2879573 - DNA, 25 bp, Homo sapien
tctggtgacacagctagggtcttcc

SEQ ID NO: 2879574 - DNA, 25 bp, Homo sapien
aaattatttccctaagtgcaggctg

SEQ ID NO: 2879575 - DNA, 25 bp, Homo sapien
caggaccccaggctacatatggaag

SEQ ID NO: 2879576 - DNA, 25 bp, Homo sapien
caggctgttgactgcgtatgccaaa

SEQ ID NO: 2879577 - DNA, 25 bp, Homo sapien
tttctcccaaaaatcggctgaaggc

SEQ ID NO: 2879578 - DNA, 25 bp, Homo sapien
gagatgactttgcttctgtgcacag

SEQ ID NO: 2879579 - DNA, 25 bp, Homo sapien
gagggtgacctcagcggcttttctc

SEQ ID NO: 2879580 - DNA, 25 bp, Homo sapien
tctgagggagttccccaatctgaag

SEQ ID NO: 2879581 - DNA, 25 bp, Homo sapien
tatggcaaacggttggtattgttaa

SEQ ID NO: 2879582 - DNA, 25 bp, Homo sapien
catattcttctactgcccttaactc

SEQ ID NO: 2879583 - DNA, 25 bp, Homo sapien
agtcctattaatccccatattcttc

SEQ ID NO: 2879584 - DNA, 25 bp, Homo sapien
ggagctatgataagttttatggcaa

SEQ ID NO: 2879585 - DNA, 25 bp, Homo sapien
tcatgtagaacccttaggtttgccc

SEQ ID NO: 2879586 - DNA, 25 bp, Homo sapien
taagaatgatgtgctctggcatgtc

SEQ ID NO: 2879587 - DNA, 25 bp, Homo sapien
tcacgggcatccatgcggctgatgg

SEQ ID NO: 2879588 - DNA, 25 bp, Homo sapien
agctgggccggacgactgtgcttct

SEQ ID NO: 2879589 - DNA, 25 bp, Homo sapien
tggtcccaggaagccgactgtaagc

SEQ ID NO: 2879590 - DNA, 25 bp, Homo sapien
tggctcgctgctgactgctggccat

SEQ ID NO: 2879591 - DNA, 25 bp, Homo sapien
taagctggctcgctgctgactgctg

SEQ ID NO: 2879592 - DNA, 25 bp, Homo sapien
agccgactgtaagctggctcgctgc

SEQ ID NO: 2879593 - DNA, 25 bp, Homo sapien
gagctaagggaaggcctcatcgcag

SEQ ID NO: 2879594 - DNA, 25 bp, Homo sapien
agcgggagaccctaatgtgccagag

SEQ ID NO: 2879595 - DNA, 25 bp, Homo sapien
tcaccagtgacagactttgcggcct

SEQ ID NO: 2879596 - DNA, 25 bp, Homo sapien
caggcggtctcaaggaaatgtccag

SEQ ID NO: 2879597 - DNA, 25 bp, Homo sapien
gcattccagtgttcgcgccagagac

SEQ ID NO: 2879598 - DNA, 25 bp, Homo sapien
gcgggcgcccaagtaaaagctcttc

SEQ ID NO: 2879599 - DNA, 25 bp, Homo sapien
gaagtatatgtggacttacgtgaaa

SEQ ID NO: 2879600 - DNA, 25 bp, Homo sapien
gctcttctaaaacggcctgactggg

SEQ ID NO: 2879601 - DNA, 25 bp, Homo sapien
cagggtctccctggctgctccccgt

SEQ ID NO: 2879602 - DNA, 25 bp, Homo sapien
tccctggctgctccccgtgcctggc

SEQ ID NO: 2879603 - DNA, 25 bp, Homo sapien
agggcctctgagctccgccagggtc

SEQ ID NO: 2879604 - DNA, 25 bp, Homo sapien
ctggaagagccggacccagggtcag

SEQ ID NO: 2879605 - DNA, 25 bp, Homo sapien
atcacccacacaggggagtccgtct

SEQ ID NO: 2879606 - DNA, 25 bp, Homo sapien
cagtgcttccagagggccgaaggct

SEQ ID NO: 2879607 - DNA, 25 bp, Homo sapien
tctggatcgagaggcgcagtgcttc

SEQ ID NO: 2879608 - DNA, 25 bp, Homo sapien
acacaggggagtccgtctggatcga

SEQ ID NO: 2879609 - DNA, 25 bp, Homo sapien
cggagggtggcggtgcggccctcct

SEQ ID NO: 2879610 - DNA, 25 bp, Homo sapien
tgcagggcctccttgtctgactgag

SEQ ID NO: 2879611 - DNA, 25 bp, Homo sapien
gggcctccttgtctgactgagggtt

SEQ ID NO: 2879612 - DNA, 25 bp, Homo sapien
cagggcctccttgtctgactgaggg

SEQ ID NO: 2879613 - DNA, 25 bp, Homo sapien
gttgaagagcttgtcctccgggtgc

SEQ ID NO: 2879614 - DNA, 25 bp, Homo sapien
cacctccacagacgtgttgaagagc

SEQ ID NO: 2879615 - DNA, 25 bp, Homo sapien
cagcacctccacagacgtgttgaag

SEQ ID NO: 2879616 - DNA, 25 bp, Homo sapien
gtcctccgggtgctcgatgttccca

SEQ ID NO: 2879617 - DNA, 25 bp, Homo sapien
ctgcaggggcagcgttccagcacag

SEQ ID NO: 2879618 - DNA, 25 bp, Homo sapien
ccgcccccatcgcagacccatggtg

SEQ ID NO: 2879619 - DNA, 25 bp, Homo sapien
gcccccatcgcagacccatggtgct

SEQ ID NO: 2879620 - DNA, 25 bp, Homo sapien
cccccatcgcagacccatggtgctg

SEQ ID NO: 2879621 - DNA, 25 bp, Homo sapien
ccccgcccccatcgcagacccatgg

SEQ ID NO: 2879622 - DNA, 25 bp, Homo sapien
aagtcctcgcgcaggtaggctttct

SEQ ID NO: 2879623 - DNA, 25 bp, Homo sapien
aaggcccagaagaagtcctcgcgca

SEQ ID NO: 2879624 - DNA, 25 bp, Homo sapien
ggtatgtcttcaggctcgtgctcac

SEQ ID NO: 2879625 - DNA, 25 bp, Homo sapien
tccagtcttagaggttggaagaagc

SEQ ID NO: 2879626 - DNA, 25 bp, Homo sapien
ttccgcagcgcctgctttccaaagt

SEQ ID NO: 2879627 - DNA, 25 bp, Homo sapien
ggcgggttcacatgctccttccgca

SEQ ID NO: 2879628 - DNA, 25 bp, Homo sapien
cttccgcagcgcctgctttccaaag

SEQ ID NO: 2879629 - DNA, 25 bp, Homo sapien
ctctgctggcgggttcacatgctcc

SEQ ID NO: 2879630 - DNA, 25 bp, Homo sapien
cagtgatggcgtgggccccgacctt

SEQ ID NO: 2879631 - DNA, 25 bp, Homo sapien
gcagtgatggcgtgggccccgacct

SEQ ID NO: 2879632 - DNA, 25 bp, Homo sapien
atggcgtgggccccgaccttgatcc

SEQ ID NO: 2879633 - DNA, 25 bp, Homo sapien
tgatggcgtgggccccgaccttgat

SEQ ID NO: 2879634 - DNA, 25 bp, Homo sapien
agccagcgaggagtgagtgcccacg

SEQ ID NO: 2879635 - DNA, 25 bp, Homo sapien
gccagcgaggagtgagtgcccacgt

SEQ ID NO: 2879636 - DNA, 25 bp, Homo sapien
ccagcgaggagtgagtgcccacgtg

SEQ ID NO: 2879637 - DNA, 25 bp, Homo sapien
cagccagcgaggagtgagtgcccac

SEQ ID NO: 2879638 - DNA, 25 bp, Homo sapien
cgcaggttggctttctgccggtcac

SEQ ID NO: 2879639 - DNA, 25 bp, Homo sapien
ctggaagagggacggtttgaagcgg

SEQ ID NO: 2879640 - DNA, 25 bp, Homo sapien
tgaagcggatccgcaggttggcttt

SEQ ID NO: 2879641 - DNA, 25 bp, Homo sapien
agggacggtttgaagcggatccgca

SEQ ID NO: 2879642 - DNA, 25 bp, Homo sapien
gcttgtcccggtagaacatgagaat

SEQ ID NO: 2879643 - DNA, 25 bp, Homo sapien
gggcttgtcccggtagaacatgaga

SEQ ID NO: 2879644 - DNA, 25 bp, Homo sapien
catgagaatgaactctacaatcagg

SEQ ID NO: 2879645 - DNA, 25 bp, Homo sapien
ggcttgtcccggtagaacatgagaa

SEQ ID NO: 2879646 - DNA, 25 bp, Homo sapien
gactgaaaggcaccgtcaggtaagg

SEQ ID NO: 2879647 - DNA, 25 bp, Homo sapien
ggcaggtgggactgaaaggcaccgt

SEQ ID NO: 2879648 - DNA, 25 bp, Homo sapien
caggtgggactgaaaggcaccgtca

SEQ ID NO: 2879649 - DNA, 25 bp, Homo sapien
ctgggcaaaggctcacagtggacac

SEQ ID NO: 2879650 - DNA, 25 bp, Homo sapien
caggatcatccagtcctctgaaggc

SEQ ID NO: 2879651 - DNA, 25 bp, Homo sapien
tccaggatcatccagtcctctgaag

SEQ ID NO: 2879652 - DNA, 25 bp, Homo sapien
tgctgcagtgcaaagttcttcatgg

SEQ ID NO: 2879653 - DNA, 25 bp, Homo sapien
gtagttgggcttggccacgatgtca

SEQ ID NO: 2879654 - DNA, 25 bp, Homo sapien
ctgcacgtagtagatgcctttggac

SEQ ID NO: 2879655 - DNA, 25 bp, Homo sapien
gatgcctttggactgcgcgtacatc

SEQ ID NO: 2879656 - DNA, 25 bp, Homo sapien
tgcctttggactgcgcgtacatcat

SEQ ID NO: 2879657 - DNA, 25 bp, Homo sapien
atgcctttggactgcgcgtacatca

SEQ ID NO: 2879658 - DNA, 25 bp, Homo sapien
cagtaatcgaggttctgtttggtcc

SEQ ID NO: 2879659 - DNA, 25 bp, Homo sapien
gaagcagtaatcgaggttctgtttg

SEQ ID NO: 2879660 - DNA, 25 bp, Homo sapien
atcgaggttctgtttggtcctccac

SEQ ID NO: 2879661 - DNA, 25 bp, Homo sapien
gaggaagcagtaatcgaggttctgt

SEQ ID NO: 2879662 - DNA, 25 bp, Homo sapien
cgggtcctcccatggagaattcagg

SEQ ID NO: 2879663 - DNA, 25 bp, Homo sapien
tgcacgggtcctcccatggagaatt

SEQ ID NO: 2879664 - DNA, 25 bp, Homo sapien
cacgggtcctcccatggagaattca

SEQ ID NO: 2879665 - DNA, 25 bp, Homo sapien
ccatgcacgggtcctcccatggaga

SEQ ID NO: 2879666 - DNA, 25 bp, Homo sapien
ccaggagcccagaatggatctccgt

SEQ ID NO: 2879667 - DNA, 25 bp, Homo sapien
aggagcccagaatggatctccgtgg

SEQ ID NO: 2879668 - DNA, 25 bp, Homo sapien
ccaaaggactctcggaggcgggaga

SEQ ID NO: 2879669 - DNA, 25 bp, Homo sapien
ggaggcgggagaagtcagggtagaa

SEQ ID NO: 2879670 - DNA, 25 bp, Homo sapien
gggggctcctctgaatgtcccccaa

SEQ ID NO: 2879671 - DNA, 25 bp, Homo sapien
ggggctcctctgaatgtcccccaac

SEQ ID NO: 2879672 - DNA, 25 bp, Homo sapien
cgggggctcctctgaatgtccccca

SEQ ID NO: 2879673 - DNA, 25 bp, Homo sapien
cgcgggggctcctctgaatgtcccc

SEQ ID NO: 2879674 - DNA, 25 bp, Homo sapien
caccacgatgaccgagtcctccttc

SEQ ID NO: 2879675 - DNA, 25 bp, Homo sapien
gcaccacgatgaccgagtcctcctt

SEQ ID NO: 2879676 - DNA, 25 bp, Homo sapien
ccacgatgaccgagtcctccttctc

SEQ ID NO: 2879677 - DNA, 25 bp, Homo sapien
cagcaccacgatgaccgagtcctcc

SEQ ID NO: 2879678 - DNA, 25 bp, Homo sapien
tgcagagtgtcagtcaggtacgagt

SEQ ID NO: 2879679 - DNA, 25 bp, Homo sapien
aggtacgagtgcacctcgcgccgca

SEQ ID NO: 2879680 - DNA, 25 bp, Homo sapien
gcgccgcacgctcgggatgcccatc

SEQ ID NO: 2879681 - DNA, 25 bp, Homo sapien
tgtcagtcaggtacgagtgcacctc

SEQ ID NO: 2879682 - DNA, 25 bp, Homo sapien
aggcccgacgctggaaagggtgcgg

SEQ ID NO: 2879683 - DNA, 25 bp, Homo sapien
gaggcccgacgctggaaagggtgcg

SEQ ID NO: 2879684 - DNA, 25 bp, Homo sapien
cagcacgtgccggtgtgagccgttc

SEQ ID NO: 2879685 - DNA, 25 bp, Homo sapien
cggtgtgagccgttccacggcttca

SEQ ID NO: 2879686 - DNA, 25 bp, Homo sapien
tgagccgttccacggcttcaatcgg

SEQ ID NO: 2879687 - DNA, 25 bp, Homo sapien
gcaggtgcagcacgtgccggtgtga

SEQ ID NO: 2879688 - DNA, 25 bp, Homo sapien
tgcctttctgacacggccctcttga

SEQ ID NO: 2879689 - DNA, 25 bp, Homo sapien
cgctggtaaacgtccacaacgtcgc

SEQ ID NO: 2879690 - DNA, 25 bp, Homo sapien
tgcgattgccgtctccgtctcgcag

SEQ ID NO: 2879691 - DNA, 25 bp, Homo sapien
ttaggcggccccaggtgcgattgcc

SEQ ID NO: 2879692 - DNA, 25 bp, Homo sapien
agctcattgacatctgttcttgtgc

SEQ ID NO: 2879693 - DNA, 25 bp, Homo sapien
caggtggtaggcaagccgtcacgag

SEQ ID NO: 2879694 - DNA, 25 bp, Homo sapien
tgtgccagcgcacacatctgggtgt

SEQ ID NO: 2879695 - DNA, 25 bp, Homo sapien
ggcggtctagagccaccctacgggc

SEQ ID NO: 2879696 - DNA, 25 bp, Homo sapien
aatacgatttccagacctaggtagg

SEQ ID NO: 2879697 - DNA, 25 bp, Homo sapien
agactgaatccgctccatccgttgg

SEQ ID NO: 2879698 - DNA, 25 bp, Homo sapien
gatcctaagcaagggctggaacagc

SEQ ID NO: 2879699 - DNA, 25 bp, Homo sapien
gattcttagcctcacgatggccccg

SEQ ID NO: 2879700 - DNA, 25 bp, Homo sapien
ttaagaagcctgaccgaactccctc

SEQ ID NO: 2879701 - DNA, 25 bp, Homo sapien
cctatgtggcctacaaggccttctg

SEQ ID NO: 2879702 - DNA, 25 bp, Homo sapien
tctgccaggcgagtctctgaaaacc

SEQ ID NO: 2879703 - DNA, 25 bp, Homo sapien
ctcctggtggctcggtgcccacagt

SEQ ID NO: 2879704 - DNA, 25 bp, Homo sapien
ggagccaggtagatcttccctgagg

SEQ ID NO: 2879705 - DNA, 25 bp, Homo sapien
ggcaaagttcagtcacctcagggca

SEQ ID NO: 2879706 - DNA, 25 bp, Homo sapien
tcaaggtcatgatcaggcaaagttc

SEQ ID NO: 2879707 - DNA, 25 bp, Homo sapien
caggaggtcgaagtgccaagtgacc

SEQ ID NO: 2879708 - DNA, 25 bp, Homo sapien
cacacgactgcctcagatggacagg

SEQ ID NO: 2879709 - DNA, 25 bp, Homo sapien
gcttgcctacttacagccactgccc

SEQ ID NO: 2879710 - DNA, 25 bp, Homo sapien
ctgcctagatgccagtccccgcttg

SEQ ID NO: 2879711 - DNA, 25 bp, Homo sapien
caccctggcaacagcctgcgcctta

SEQ ID NO: 2879712 - DNA, 25 bp, Homo sapien
tcgccaagaccggccagcggggcgg

SEQ ID NO: 2879713 - DNA, 25 bp, Homo sapien
cctccgcctgcaagagcgctgggcg

SEQ ID NO: 2879714 - DNA, 25 bp, Homo sapien
tccgcctgcaagagcgctgggcgca

SEQ ID NO: 2879715 - DNA, 25 bp, Homo sapien
caccctccgcctgcaagagcgctgg

SEQ ID NO: 2879716 - DNA, 25 bp, Homo sapien
tgcgcccgcggagtccggtccggag

SEQ ID NO: 2879717 - DNA, 25 bp, Homo sapien
gggtccccagctcagcgtcgggaca

SEQ ID NO: 2879718 - DNA, 25 bp, Homo sapien
tccggtccggagcacccacgggcgc

SEQ ID NO: 2879719 - DNA, 25 bp, Homo sapien
gtcgggacagctgcgcccgcggagt

SEQ ID NO: 2879720 - DNA, 25 bp, Homo sapien
ctttctggccgctgagtgccgcgta

SEQ ID NO: 2879721 - DNA, 25 bp, Homo sapien
ccgcgtaccaggacagcgagaggaa

SEQ ID NO: 2879722 - DNA, 25 bp, Homo sapien
gcagcagcgtcaggaaggtgccatt

SEQ ID NO: 2879723 - DNA, 25 bp, Homo sapien
gctgagtgccgcgtaccaggacagc

SEQ ID NO: 2879724 - DNA, 25 bp, Homo sapien
tcaggctcactgcagatatcagggg

SEQ ID NO: 2879725 - DNA, 25 bp, Homo sapien
tcagggcgcaagctttgtgccctgt

SEQ ID NO: 2879726 - DNA, 25 bp, Homo sapien
cgcaagctttgtgccctgtactcag

SEQ ID NO: 2879727 - DNA, 25 bp, Homo sapien
ctcactgcagatatcaggggcgcgg

SEQ ID NO: 2879728 - DNA, 25 bp, Homo sapien
gaagtgtcgaggccatttttggccc

SEQ ID NO: 2879729 - DNA, 25 bp, Homo sapien
gggctccgtgcccagtagaggtgca

SEQ ID NO: 2879730 - DNA, 25 bp, Homo sapien
gcagcttccggaggccgcctggact

SEQ ID NO: 2879731 - DNA, 25 bp, Homo sapien
ccgtgcccagtagaggtgcagtgca

SEQ ID NO: 2879732 - DNA, 25 bp, Homo sapien
caaggttgagggttggaactccaca

SEQ ID NO: 2879733 - DNA, 25 bp, Homo sapien
tctcggtttaggtcccatggcacgt

SEQ ID NO: 2879734 - DNA, 25 bp, Homo sapien
ggttgagggttggaactccacagcc

SEQ ID NO: 2879735 - DNA, 25 bp, Homo sapien
aaagcttgaccaggcccagccatag

SEQ ID NO: 2879736 - DNA, 25 bp, Homo sapien
cagatgctgaatctaagagggcaga

SEQ ID NO: 2879737 - DNA, 25 bp, Homo sapien
caagggactcatccccagacatggc

SEQ ID NO: 2879738 - DNA, 25 bp, Homo sapien
tctgaccataagagttcctgaccag

SEQ ID NO: 2879739 - DNA, 25 bp, Homo sapien
tcaagatgtcctagggaatggccct

SEQ ID NO: 2879740 - DNA, 25 bp, Homo sapien
cagtatagacggggtactcccggtg

SEQ ID NO: 2879741 - DNA, 25 bp, Homo sapien
cgctggcgctcctagagaaggccat

SEQ ID NO: 2879742 - DNA, 25 bp, Homo sapien
ccggtgcggcctgtcaccgctctgt

SEQ ID NO: 2879743 - DNA, 25 bp, Homo sapien
ggcgctggcgctcctagagaaggcc

SEQ ID NO: 2879744 - DNA, 25 bp, Homo sapien
gaggtcactgagatgggtggcagca

SEQ ID NO: 2879745 - DNA, 25 bp, Homo sapien
gcctccaggtaagaggtcactgaga

SEQ ID NO: 2879746 - DNA, 25 bp, Homo sapien
ggtcactgagatgggtggcagcagg

SEQ ID NO: 2879747 - DNA, 25 bp, Homo sapien
tccaggtaagaggtcactgagatgg

SEQ ID NO: 2879748 - DNA, 25 bp, Homo sapien
gccagcacctgtctgtaggccacag

SEQ ID NO: 2879749 - DNA, 25 bp, Homo sapien
cacgtggctctcaggcgcctgggct

SEQ ID NO: 2879750 - DNA, 25 bp, Homo sapien
tgctgagtcacgcttggccagcacc

SEQ ID NO: 2879751 - DNA, 25 bp, Homo sapien
ctgctcagaccgggccatagccggg

SEQ ID NO: 2879752 - DNA, 25 bp, Homo sapien
cagcctgtccaaaggttgtgttcag

SEQ ID NO: 2879753 - DNA, 25 bp, Homo sapien
acttctagttcaagatgacggtgga

SEQ ID NO: 2879754 - DNA, 25 bp, Homo sapien
cctgtggctacagggcgtgactgcc

SEQ ID NO: 2879755 - DNA, 25 bp, Homo sapien
ttaggcatgcggcagtgagaatcag

SEQ ID NO: 2879756 - DNA, 25 bp, Homo sapien
tgtagttaagcctgcttttacctct

SEQ ID NO: 2879757 - DNA, 25 bp, Homo sapien
tctattgaaataacaggaaagggct

SEQ ID NO: 2879758 - DNA, 25 bp, Homo sapien
tgctccccccttaaactctattgaa

SEQ ID NO: 2879759 - DNA, 25 bp, Homo sapien
tattacagatggaggtacttgtagt

SEQ ID NO: 2879760 - DNA, 25 bp, Homo sapien
ccagagaagtgtcctacagctcctg

SEQ ID NO: 2879761 - DNA, 25 bp, Homo sapien
ccctgctgagggaggttgaatgccc

SEQ ID NO: 2879762 - DNA, 25 bp, Homo sapien
tcccgaatgagcaatgggcccagca

SEQ ID NO: 2879763 - DNA, 25 bp, Homo sapien
aggcaccagcctgaaactgggcatc

SEQ ID NO: 2879764 - DNA, 25 bp, Homo sapien
gcaacgagcctggattgtaccactg

SEQ ID NO: 2879765 - DNA, 25 bp, Homo sapien
gagttgtgtacttatggccccagct

SEQ ID NO: 2879766 - DNA, 25 bp, Homo sapien
gaagcccaatataggatgagtagga

SEQ ID NO: 2879767 - DNA, 25 bp, Homo sapien
tgtaggaacaagtctagaagcccaa

SEQ ID NO: 2879768 - DNA, 25 bp, Homo sapien
gctcacgaagggcatccgcaatgtt

SEQ ID NO: 2879769 - DNA, 25 bp, Homo sapien
gaactatgacatcggagcggctctg

SEQ ID NO: 2879770 - DNA, 25 bp, Homo sapien
cagcagggtatgtgtttcgggtcac

SEQ ID NO: 2879771 - DNA, 25 bp, Homo sapien
ggctcctgcagaccaagaactatga

SEQ ID NO: 2879772 - DNA, 25 bp, Homo sapien
caatctaattaaatggcatcagcac

SEQ ID NO: 2879773 - DNA, 25 bp, Homo sapien
agcactttaaccaatgacgtttgca

SEQ ID NO: 2879774 - DNA, 25 bp, Homo sapien
ggcatcagcactttaaccaatgacg

SEQ ID NO: 2879775 - DNA, 25 bp, Homo sapien
taaatggcatcagcactttaaccaa

SEQ ID NO: 2879776 - DNA, 25 bp, Homo sapien
tattgttaatggttcttacagagta

SEQ ID NO: 2879777 - DNA, 25 bp, Homo sapien
ttgttaatggttcttacagagtatc

SEQ ID NO: 2879778 - DNA, 25 bp, Homo sapien
gttaatggttcttacagagtatctt

SEQ ID NO: 2879779 - DNA, 25 bp, Homo sapien
tgttaatggttcttacagagtatct

SEQ ID NO: 2879780 - DNA, 25 bp, Homo sapien
cgattaataacctgccagtcccaga

SEQ ID NO: 2879781 - DNA, 25 bp, Homo sapien
aacaagtgtatctcgattaataacc

SEQ ID NO: 2879782 - DNA, 25 bp, Homo sapien
tcctaacaagtgtatctcgattaat

SEQ ID NO: 2879783 - DNA, 25 bp, Homo sapien
tgtatctcgattaataacctgccag

SEQ ID NO: 2879784 - DNA, 25 bp, Homo sapien
tgtgggtcgaggattctgtgcctcc

SEQ ID NO: 2879785 - DNA, 25 bp, Homo sapien
tcttccccagttataaagaggtcac

SEQ ID NO: 2879786 - DNA, 25 bp, Homo sapien
cagggagtccttgcgtcccatgagg

SEQ ID NO: 2879787 - DNA, 25 bp, Homo sapien
acatcatcatcgaagtcttccccag

SEQ ID NO: 2879788 - DNA, 25 bp, Homo sapien
cagacccagatgtgacggggtgtgt

SEQ ID NO: 2879789 - DNA, 25 bp, Homo sapien
gtgacggggtgtgtggcccgaggaa

SEQ ID NO: 2879790 - DNA, 25 bp, Homo sapien
acagcggcagtgggcctgctgaggc

SEQ ID NO: 2879791 - DNA, 25 bp, Homo sapien
gacagcggcagtgggcctgctgagg

SEQ ID NO: 2879792 - DNA, 25 bp, Homo sapien
ggacagcggcagtgggcctgctgag

SEQ ID NO: 2879793 - DNA, 25 bp, Homo sapien
gaactttttctaggtggcaggacaa

SEQ ID NO: 2879794 - DNA, 25 bp, Homo sapien
tctgggggtcccttgcttagcctgt

SEQ ID NO: 2879795 - DNA, 25 bp, Homo sapien
ggcaggacaaattgcgcccatttag

SEQ ID NO: 2879796 - DNA, 25 bp, Homo sapien
tgcttagcctgtgctggaccagctg

SEQ ID NO: 2879797 - DNA, 25 bp, Homo sapien
tggatgggactccatagctccttcc

SEQ ID NO: 2879798 - DNA, 25 bp, Homo sapien
tgccttgtttcaccttccatgtcag

SEQ ID NO: 2879799 - DNA, 25 bp, Homo sapien
tgctggatgggactccatagctcct

SEQ ID NO: 2879800 - DNA, 25 bp, Homo sapien
tgctgccttgtttcaccttccatgt

SEQ ID NO: 2879801 - DNA, 25 bp, Homo sapien
gaaacttgacgttggctttgccact

SEQ ID NO: 2879802 - DNA, 25 bp, Homo sapien
tgtgtaagaacaatgccagggccca

SEQ ID NO: 2879803 - DNA, 25 bp, Homo sapien
tgaaagcagcgatagagtgggtccc

SEQ ID NO: 2879804 - DNA, 25 bp, Homo sapien
tagaatcaggttaccggtgcctaca

SEQ ID NO: 2879805 - DNA, 25 bp, Homo sapien
tcacatacaagagtccacagcaggg

SEQ ID NO: 2879806 - DNA, 25 bp, Homo sapien
cacgcagaatgagacgatggccctg

SEQ ID NO: 2879807 - DNA, 25 bp, Homo sapien
tcaagaacaagacaaatgggccagg

SEQ ID NO: 2879808 - DNA, 25 bp, Homo sapien
tacagacccgaggaaggagttggct

SEQ ID NO: 2879809 - DNA, 25 bp, Homo sapien
gggaccagagagaaactgtttgtca

SEQ ID NO: 2879810 - DNA, 25 bp, Homo sapien
gaccagagagaaactgtttgtcact

SEQ ID NO: 2879811 - DNA, 25 bp, Homo sapien
tgggaccagagagaaactgtttgtc

SEQ ID NO: 2879812 - DNA, 25 bp, Homo sapien
ccagagagaaactgtttgtcactga

SEQ ID NO: 2879813 - DNA, 25 bp, Homo sapien
gggtccccaggcgacctcagagcca

SEQ ID NO: 2879814 - DNA, 25 bp, Homo sapien
tcagagccacccgagtcctgcacgc

SEQ ID NO: 2879815 - DNA, 25 bp, Homo sapien
ggctggacggtgctcctgctccact

SEQ ID NO: 2879816 - DNA, 25 bp, Homo sapien
tgcacgccacggctgcacggaggct

SEQ ID NO: 2879817 - DNA, 25 bp, Homo sapien
tcactggtgccccactgctggaggc

SEQ ID NO: 2879818 - DNA, 25 bp, Homo sapien
ggccagggctggaacggagacgcac

SEQ ID NO: 2879819 - DNA, 25 bp, Homo sapien
ctgggccagggctggaacggagacg

SEQ ID NO: 2879820 - DNA, 25 bp, Homo sapien
ggaggcagcagaggccctgggccag

SEQ ID NO: 2879821 - DNA, 25 bp, Homo sapien
tttttctaggcaggtcttgactgaa

SEQ ID NO: 2879822 - DNA, 25 bp, Homo sapien
tttctaggcaggtcttgactgaagc

SEQ ID NO: 2879823 - DNA, 25 bp, Homo sapien
tctaggcaggtcttgactgaagcgg

SEQ ID NO: 2879824 - DNA, 25 bp, Homo sapien
tgaagcgggggcctggctcctccat

SEQ ID NO: 2879825 - DNA, 25 bp, Homo sapien
gatgaaggctgtttgctgaaacaca

SEQ ID NO: 2879826 - DNA, 25 bp, Homo sapien
ggctgtttgctgaaacacactcctg

SEQ ID NO: 2879827 - DNA, 25 bp, Homo sapien
tgtttgctgaaacacactcctgttc

SEQ ID NO: 2879828 - DNA, 25 bp, Homo sapien
tttggatgaaggctgtttgctgaaa

SEQ ID NO: 2879829 - DNA, 25 bp, Homo sapien
acttcagccagcgactctctgaggg

SEQ ID NO: 2879830 - DNA, 25 bp, Homo sapien
ttctagatacttcagccagcgactc

SEQ ID NO: 2879831 - DNA, 25 bp, Homo sapien
ccttttctagatacttcagccagcg

SEQ ID NO: 2879832 - DNA, 25 bp, Homo sapien
gcgactctctgagggctgcgatttt

SEQ ID NO: 2879833 - DNA, 25 bp, Homo sapien
ctgctggtgtcccacgttttcttct

SEQ ID NO: 2879834 - DNA, 25 bp, Homo sapien
gcctgctggtgtcccacgttttctt

SEQ ID NO: 2879835 - DNA, 25 bp, Homo sapien
tgctggtgtcccacgttttcttctt

SEQ ID NO: 2879836 - DNA, 25 bp, Homo sapien
tgtaacctccacgtctctcaacttt

SEQ ID NO: 2879837 - DNA, 25 bp, Homo sapien
tatcttttgctagaactctcctctg

SEQ ID NO: 2879838 - DNA, 25 bp, Homo sapien
tacaagcgtgaagtacgcatccagc

SEQ ID NO: 2879839 - DNA, 25 bp, Homo sapien
caattgtccactgcatatatataga

SEQ ID NO: 2879840 - DNA, 25 bp, Homo sapien
tctggatggctaggtggtgtcccct

SEQ ID NO: 2879841 - DNA, 25 bp, Homo sapien
gaggacgaccacctccaatagagga

SEQ ID NO: 2879842 - DNA, 25 bp, Homo sapien
tcctgaagctgtgcgcttggtcgaa

SEQ ID NO: 2879843 - DNA, 25 bp, Homo sapien
caatcaccagggttggttagctgat

SEQ ID NO: 2879844 - DNA, 25 bp, Homo sapien
aactttaaggcccagcaattgaaga

SEQ ID NO: 2879845 - DNA, 25 bp, Homo sapien
ggcccagcaattgaagatatattgc

SEQ ID NO: 2879846 - DNA, 25 bp, Homo sapien
attgaagatatattgctgcaaagag

SEQ ID NO: 2879847 - DNA, 25 bp, Homo sapien
tttctgcttgaggcttttcacacag

SEQ ID NO: 2879848 - DNA, 25 bp, Homo sapien
cctctctggattttggcttctacat

SEQ ID NO: 2879849 - DNA, 25 bp, Homo sapien
gcagctcaggtgcttcctctctgga

SEQ ID NO: 2879850 - DNA, 25 bp, Homo sapien
ttcaatcaccccagcagctcaggtg

SEQ ID NO: 2879851 - DNA, 25 bp, Homo sapien
gggcttcaatcaccccagcagctca

SEQ ID NO: 2879852 - DNA, 25 bp, Homo sapien
gttaatcagttctcataacccacca

SEQ ID NO: 2879853 - DNA, 25 bp, Homo sapien
cagtggagagttgtataccaacgtt

SEQ ID NO: 2879854 - DNA, 25 bp, Homo sapien
cataacccaccaccatcagacccgc

SEQ ID NO: 2879855 - DNA, 25 bp, Homo sapien
agccagttaaacttagcagtggaga

SEQ ID NO: 2879856 - DNA, 25 bp, Homo sapien
cgcctggccgagagttactttcttg

SEQ ID NO: 2879857 - DNA, 25 bp, Homo sapien
gacctcatcacaggtaatcaggtga

SEQ ID NO: 2879858 - DNA, 25 bp, Homo sapien
tatccagtcaagacgaaaacagggc

SEQ ID NO: 2879859 - DNA, 25 bp, Homo sapien
gactgccatattgtaagacgtggaa

SEQ ID NO: 2879860 - DNA, 25 bp, Homo sapien
ttggacatggcgtctacaatcagca

SEQ ID NO: 2879861 - DNA, 25 bp, Homo sapien
ggcagctctgaaacttgtccctgta

SEQ ID NO: 2879862 - DNA, 25 bp, Homo sapien
tctgaaacttgtccctgtagtagat

SEQ ID NO: 2879863 - DNA, 25 bp, Homo sapien
atcagcaccagagccttcaccataa

SEQ ID NO: 2879864 - DNA, 25 bp, Homo sapien
tgcaggaatcctaatgactgacggc

SEQ ID NO: 2879865 - DNA, 25 bp, Homo sapien
gaagcaacccacatggctgtctagg

SEQ ID NO: 2879866 - DNA, 25 bp, Homo sapien
tgctcctgagaaagacaaggccagg

SEQ ID NO: 2879867 - DNA, 25 bp, Homo sapien
tgtattctgcaaggcccaaagaccc

SEQ ID NO: 2879868 - DNA, 25 bp, Homo sapien
tttgagggctcaggtcccgctatcg

SEQ ID NO: 2879869 - DNA, 25 bp, Homo sapien
gacggaatttgagggctcaggtccc

SEQ ID NO: 2879870 - DNA, 25 bp, Homo sapien
gaatttgagggctcaggtcccgcta

SEQ ID NO: 2879871 - DNA, 25 bp, Homo sapien
gtacgagacggaatttgagggctca

SEQ ID NO: 2879872 - DNA, 25 bp, Homo sapien
ctcggaagcaggagctccgtgtctg

SEQ ID NO: 2879873 - DNA, 25 bp, Homo sapien
caggaagctcggaagcaggagctcc

SEQ ID NO: 2879874 - DNA, 25 bp, Homo sapien
gaacaggaagctcggaagcaggagc

SEQ ID NO: 2879875 - DNA, 25 bp, Homo sapien
aagctcggaagcaggagctccgtgt

SEQ ID NO: 2879876 - DNA, 25 bp, Homo sapien
acaagctttgcatgtccacttgaca

SEQ ID NO: 2879877 - DNA, 25 bp, Homo sapien
ggactgcttctctccacaagctttg

SEQ ID NO: 2879878 - DNA, 25 bp, Homo sapien
tgcaaaaaggactgcttctctccac

SEQ ID NO: 2879879 - DNA, 25 bp, Homo sapien
tccacaagctttgcatgtccacttg

SEQ ID NO: 2879880 - DNA, 25 bp, Homo sapien
cccgagaacgctgaagcgacgccat

SEQ ID NO: 2879881 - DNA, 25 bp, Homo sapien
agctgcagcagcgtagcacccgaga

SEQ ID NO: 2879882 - DNA, 25 bp, Homo sapien
agcacccgagaacgctgaagcgacg

SEQ ID NO: 2879883 - DNA, 25 bp, Homo sapien
agcgtagcacccgagaacgctgaag

SEQ ID NO: 2879884 - DNA, 25 bp, Homo sapien
agtcgccaggcagccaagcgcgtgc

SEQ ID NO: 2879885 - DNA, 25 bp, Homo sapien
gcgcgtgcgctctgcatttgtcccg

SEQ ID NO: 2879886 - DNA, 25 bp, Homo sapien
gcagccaagcgcgtgcgctctgcat

SEQ ID NO: 2879887 - DNA, 25 bp, Homo sapien
ctgcttgtgcagtcgccaggcagcc

SEQ ID NO: 2879888 - DNA, 25 bp, Homo sapien
ctatcaccaaaaaagcgaggtgttt

SEQ ID NO: 2879889 - DNA, 25 bp, Homo sapien
cgccgcaaccctgtgtggcttaggg

SEQ ID NO: 2879890 - DNA, 25 bp, Homo sapien
ctgtgtggcttagggttgtaacctc

SEQ ID NO: 2879891 - DNA, 25 bp, Homo sapien
caccgtacaaccctcggtgtctagg

SEQ ID NO: 2879892 - DNA, 25 bp, Homo sapien
agctttagttacccagagtcaacag

SEQ ID NO: 2879893 - DNA, 25 bp, Homo sapien
agtacctgagtttcaccttctgcag

SEQ ID NO: 2879894 - DNA, 25 bp, Homo sapien
ggaaaagagatgagtacagtacaag

SEQ ID NO: 2879895 - DNA, 25 bp, Homo sapien
gcagccacagagatatacaatagta

SEQ ID NO: 2879896 - DNA, 25 bp, Homo sapien
agtttcagctcctcatgcaaagtga

SEQ ID NO: 2879897 - DNA, 25 bp, Homo sapien
cacccactgtggaggactaagtgtc

SEQ ID NO: 2879898 - DNA, 25 bp, Homo sapien
aaagtgagggtatccttgtggctcc

SEQ ID NO: 2879899 - DNA, 25 bp, Homo sapien
aacccctgcccatgaagacctgtgg

SEQ ID NO: 2879900 - DNA, 25 bp, Homo sapien
catccacggatggagggactcagct

SEQ ID NO: 2879901 - DNA, 25 bp, Homo sapien
tgcccatgttcctcagtcaggaggt

SEQ ID NO: 2879902 - DNA, 25 bp, Homo sapien
tgagagcacgtgtacagccacgcct

SEQ ID NO: 2879903 - DNA, 25 bp, Homo sapien
cctgtaatgctaggcaggtgcagct

SEQ ID NO: 2879904 - DNA, 25 bp, Homo sapien
gcttttccgaggtgtgtgtctccgc

SEQ ID NO: 2879905 - DNA, 25 bp, Homo sapien
cacggactccgtcaggatggaggcc

SEQ ID NO: 2879906 - DNA, 25 bp, Homo sapien
ctcaaaggagatgcaccagtcggtg

SEQ ID NO: 2879907 - DNA, 25 bp, Homo sapien
tgttgtaaagcgtcttgcacagctc

SEQ ID NO: 2879908 - DNA, 25 bp, Homo sapien
ttgggaagatccttaatcgtctcct

SEQ ID NO: 2879909 - DNA, 25 bp, Homo sapien
tggcccacattcgaaggtagtgccg

SEQ ID NO: 2879910 - DNA, 25 bp, Homo sapien
tagtccggagagctggtccccttct

SEQ ID NO: 2879911 - DNA, 25 bp, Homo sapien
ttcgaaggtagtgccgatagtccgg

SEQ ID NO: 2879912 - DNA, 25 bp, Homo sapien
agcaagcaagggtgcctcaacgctg

SEQ ID NO: 2879913 - DNA, 25 bp, Homo sapien
tctttgtcatgtgagacggctgcgg

SEQ ID NO: 2879914 - DNA, 25 bp, Homo sapien
taagaacagcggcagagaatggcct

SEQ ID NO: 2879915 - DNA, 25 bp, Homo sapien
tctggcatggagttaccagggccct

SEQ ID NO: 2879916 - DNA, 25 bp, Homo sapien
tcctctctcctcacttccacttcct

SEQ ID NO: 2879917 - DNA, 25 bp, Homo sapien
cttccttcttgctcttcctgtggta

SEQ ID NO: 2879918 - DNA, 25 bp, Homo sapien
ctcctctctcctcacttccacttcc

SEQ ID NO: 2879919 - DNA, 25 bp, Homo sapien
tcttgctcttcctgtggtagtgctt

SEQ ID NO: 2879920 - DNA, 25 bp, Homo sapien
tgctgttgggactgcaagctcctgg

SEQ ID NO: 2879921 - DNA, 25 bp, Homo sapien
tatactccctgcgtgggaacatgca

SEQ ID NO: 2879922 - DNA, 25 bp, Homo sapien
acatttgccggaactggcgcgcact

SEQ ID NO: 2879923 - DNA, 25 bp, Homo sapien
caatgatgagggctatagaccagtc

SEQ ID NO: 2879924 - DNA, 25 bp, Homo sapien
ctgcttctgtagtttctgtccttga

SEQ ID NO: 2879925 - DNA, 25 bp, Homo sapien
tcaaggtcctcaagctcaagtcagc

SEQ ID NO: 2879926 - DNA, 25 bp, Homo sapien
aggtcctcaagctcaagtcagcctc

SEQ ID NO: 2879927 - DNA, 25 bp, Homo sapien
ctgtccttgaaatcaaggtcctcaa

SEQ ID NO: 2879928 - DNA, 25 bp, Homo sapien
tctcttttgagtcggttccttggtg

SEQ ID NO: 2879929 - DNA, 25 bp, Homo sapien
tcttttgagtcggttccttggtgtg

SEQ ID NO: 2879930 - DNA, 25 bp, Homo sapien
ctcttttgagtcggttccttggtgt

SEQ ID NO: 2879931 - DNA, 25 bp, Homo sapien
cttttgagtcggttccttggtgtgc

SEQ ID NO: 2879932 - DNA, 25 bp, Homo sapien
gcattatggtcggttttgcaagtgt

SEQ ID NO: 2879933 - DNA, 25 bp, Homo sapien
cattatggtcggttttgcaagtgtg

SEQ ID NO: 2879934 - DNA, 25 bp, Homo sapien
ggcattatggtcggttttgcaagtg

SEQ ID NO: 2879935 - DNA, 25 bp, Homo sapien
tggcattatggtcggttttgcaagt

SEQ ID NO: 2879936 - DNA, 25 bp, Homo sapien
tctttcacacgctccaatgacagca

SEQ ID NO: 2879937 - DNA, 25 bp, Homo sapien
acctacagcagacacggaggcggtg

SEQ ID NO: 2879938 - DNA, 25 bp, Homo sapien
catagcacagggatgagttctaaca

SEQ ID NO: 2879939 - DNA, 25 bp, Homo sapien
ggatcagatgctcccaacaggcttt

SEQ ID NO: 2879940 - DNA, 25 bp, Homo sapien
ggaaaagatccagatctgaggccag

SEQ ID NO: 2879941 - DNA, 25 bp, Homo sapien
ggcaggaaaagatccagatctgagg

SEQ ID NO: 2879942 - DNA, 25 bp, Homo sapien
gcaggaaaagatccagatctgaggc

SEQ ID NO: 2879943 - DNA, 25 bp, Homo sapien
caggaaaagatccagatctgaggcc

SEQ ID NO: 2879944 - DNA, 25 bp, Homo sapien
cctctgtgaaataatgggccgcctc

SEQ ID NO: 2879945 - DNA, 25 bp, Homo sapien
tgaggagctgtcctctgtgaaataa

SEQ ID NO: 2879946 - DNA, 25 bp, Homo sapien
ctgtgaaataatgggccgcctccag

SEQ ID NO: 2879947 - DNA, 25 bp, Homo sapien
tctgaggagctgtcctctgtgaaat

SEQ ID NO: 2879948 - DNA, 25 bp, Homo sapien
aattaggagtccagtgaatggcagc

SEQ ID NO: 2879949 - DNA, 25 bp, Homo sapien
tcatgctcctatgggcgcacaggaa

SEQ ID NO: 2879950 - DNA, 25 bp, Homo sapien
tctccctttgggtagctcagaggtc

SEQ ID NO: 2879951 - DNA, 25 bp, Homo sapien
aatacatgtcccaggtaaaaatcca

SEQ ID NO: 2879952 - DNA, 25 bp, Homo sapien
ctttgctggaggtcaccaagcagta

SEQ ID NO: 2879953 - DNA, 25 bp, Homo sapien
tttgctggaggtcaccaagcagtac

SEQ ID NO: 2879954 - DNA, 25 bp, Homo sapien
tgggtgagtgtagcgggcatgggcc

SEQ ID NO: 2879955 - DNA, 25 bp, Homo sapien
ccagggttgcggatcgcatggtcct

SEQ ID NO: 2879956 - DNA, 25 bp, Homo sapien
tgtagcgggcatgggccacaagccc

SEQ ID NO: 2879957 - DNA, 25 bp, Homo sapien
gcatggtcctgggtgagtgtagcgg

SEQ ID NO: 2879958 - DNA, 25 bp, Homo sapien
ggccatgtgacaggattctctagct

SEQ ID NO: 2879959 - DNA, 25 bp, Homo sapien
gaacttctggacaagtgggagaccc

SEQ ID NO: 2879960 - DNA, 25 bp, Homo sapien
aaatgcagcagtttcggttccagcc

SEQ ID NO: 2879961 - DNA, 25 bp, Homo sapien
tctgtgaagtgctcaagctcccgct

SEQ ID NO: 2879962 - DNA, 25 bp, Homo sapien
tgtcaggtccccgtggtacatcccg

SEQ ID NO: 2879963 - DNA, 25 bp, Homo sapien
tgggggaaggtgtagcttgtagagc

SEQ ID NO: 2879964 - DNA, 25 bp, Homo sapien
gggaaggtgtagcttgtagagcacc

SEQ ID NO: 2879965 - DNA, 25 bp, Homo sapien
tctctgtcaggtccccgtggtacat

SEQ ID NO: 2879966 - DNA, 25 bp, Homo sapien
tccttgaagttgatcagcgagtcct

SEQ ID NO: 2879967 - DNA, 25 bp, Homo sapien
ggcatcaatccggtactgctccagg

SEQ ID NO: 2879968 - DNA, 25 bp, Homo sapien
agcgagtccttgttttcgtccagga

SEQ ID NO: 2879969 - DNA, 25 bp, Homo sapien
tgtcaggctggcaaagagttcccgg

SEQ ID NO: 2879970 - DNA, 25 bp, Homo sapien
ccccagtactggctagccaggtgct

SEQ ID NO: 2879971 - DNA, 25 bp, Homo sapien
acccccagtactggctagccaggtg

SEQ ID NO: 2879972 - DNA, 25 bp, Homo sapien
cagtactggctagccaggtgcttgg

SEQ ID NO: 2879973 - DNA, 25 bp, Homo sapien
tgtgcggctgcacccccagtactgg

SEQ ID NO: 2879974 - DNA, 25 bp, Homo sapien
tgagacggtccagccgctaagcctg

SEQ ID NO: 2879975 - DNA, 25 bp, Homo sapien
ctgtgggacacggtctggtgagacg

SEQ ID NO: 2879976 - DNA, 25 bp, Homo sapien
tccagccgctaagcctgtgggtcga

SEQ ID NO: 2879977 - DNA, 25 bp, Homo sapien
acggtccagccgctaagcctgtggg

SEQ ID NO: 2879978 - DNA, 25 bp, Homo sapien
tcctgccctggctctgagctgtcac

SEQ ID NO: 2879979 - DNA, 25 bp, Homo sapien
gggtcctgccctggctctgagctgt

SEQ ID NO: 2879980 - DNA, 25 bp, Homo sapien
taggaacgggtcctgccctggctct

SEQ ID NO: 2879981 - DNA, 25 bp, Homo sapien
ctaggaacgggtcctgccctggctc

SEQ ID NO: 2879982 - DNA, 25 bp, Homo sapien
cagctcttcaatggagaaaccaatg

SEQ ID NO: 2879983 - DNA, 25 bp, Homo sapien
aaggtcctccagctcttcaatggag

SEQ ID NO: 2879984 - DNA, 25 bp, Homo sapien
aacaccatgtaaaggtcctccagct

SEQ ID NO: 2879985 - DNA, 25 bp, Homo sapien
ttaaacaccatgtaaaggtcctcca

SEQ ID NO: 2879986 - DNA, 25 bp, Homo sapien
caagggtgtgaaccgccctctcagt

SEQ ID NO: 2879987 - DNA, 25 bp, Homo sapien
agaagtacggcactctgtgagagca

SEQ ID NO: 2879988 - DNA, 25 bp, Homo sapien
agcatcctcggcagacaagggcaag

SEQ ID NO: 2879989 - DNA, 25 bp, Homo sapien
gaaacagggtatatagctggatcac

SEQ ID NO: 2879990 - DNA, 25 bp, Homo sapien
acactccgggctcctttccaggatg

SEQ ID NO: 2879991 - DNA, 25 bp, Homo sapien
tcagctcacactccgggctcctttc

SEQ ID NO: 2879992 - DNA, 25 bp, Homo sapien
tccgggctcctttccaggatgggcg

SEQ ID NO: 2879993 - DNA, 25 bp, Homo sapien
cactcagctcacactccgggctcct

SEQ ID NO: 2879994 - DNA, 25 bp, Homo sapien
gtgagggatactcatttggctcccg

SEQ ID NO: 2879995 - DNA, 25 bp, Homo sapien
aggtcgcagagtgagggatactcat

SEQ ID NO: 2879996 - DNA, 25 bp, Homo sapien
cctcaacgtgcagctgaggtcgcag

SEQ ID NO: 2879997 - DNA, 25 bp, Homo sapien
gtcctcaacgtgcagctgaggtcgc

SEQ ID NO: 2879998 - DNA, 25 bp, Homo sapien
tttaaaccgcatctgctcaatgtct

SEQ ID NO: 2879999 - DNA, 25 bp, Homo sapien
cctctgtttaaaccgcatctgctca

SEQ ID NO: 2880000 - DNA, 25 bp, Homo sapien
caaggactggatcactttcagcctc

SEQ ID NO: 2880001 - DNA, 25 bp, Homo sapien
gtcctccaaggactggatcactttc

SEQ ID NO: 2880002 - DNA, 25 bp, Homo sapien
ggaggtgcgggataggaggagagac

SEQ ID NO: 2880003 - DNA, 25 bp, Homo sapien
taggaggagagacactctgcttgtt

SEQ ID NO: 2880004 - DNA, 25 bp, Homo sapien
cctctgcaggggggtcatcgctgct

SEQ ID NO: 2880005 - DNA, 25 bp, Homo sapien
tgctcagcaaggcacggaggtgcgg

SEQ ID NO: 2880006 - DNA, 25 bp, Homo sapien
gaagtctctcgtgagctcttcgaag

SEQ ID NO: 2880007 - DNA, 25 bp, Homo sapien
tccatgttggcgtccaggacggcca

SEQ ID NO: 2880008 - DNA, 25 bp, Homo sapien
cttgatgccctcatagaaaaagcag

SEQ ID NO: 2880009 - DNA, 25 bp, Homo sapien
aaaagcagtcgacgatgaccacggc

SEQ ID NO: 2880010 - DNA, 25 bp, Homo sapien
actgccatagagcaggagcaccgag

SEQ ID NO: 2880011 - DNA, 25 bp, Homo sapien
tgtagtagtcgggcagcatgcgctc

SEQ ID NO: 2880012 - DNA, 25 bp, Homo sapien
ggagcaccgaggtcacgatgttcat

SEQ ID NO: 2880013 - DNA, 25 bp, Homo sapien
gcaccgaggtcacgatgttcattgc

SEQ ID NO: 2880014 - DNA, 25 bp, Homo sapien
gatggaacagagagtctgccaactc

SEQ ID NO: 2880015 - DNA, 25 bp, Homo sapien
gtctgccaactccttcaaactgggt

SEQ ID NO: 2880016 - DNA, 25 bp, Homo sapien
aatgtcaaaaggcaatttgtaggaa

SEQ ID NO: 2880017 - DNA, 25 bp, Homo sapien
cagagagtctgccaactccttcaaa

SEQ ID NO: 2880018 - DNA, 25 bp, Homo sapien
ggtctcgctcgatctcctctgtggc

SEQ ID NO: 2880019 - DNA, 25 bp, Homo sapien
caggctgtacttcccggtggacttc

SEQ ID NO: 2880020 - DNA, 25 bp, Homo sapien
gaaggcataggcagtcagcacccgc

SEQ ID NO: 2880021 - DNA, 25 bp, Homo sapien
gcaatccccagctcgttctggaagg

SEQ ID NO: 2880022 - DNA, 25 bp, Homo sapien
cgcgtcttggctgtgcggtacatgc

SEQ ID NO: 2880023 - DNA, 25 bp, Homo sapien
ttcaggaccagtgcccgcgtcttgg

SEQ ID NO: 2880024 - DNA, 25 bp, Homo sapien
cacgcccgtactcgaagaagtggat

SEQ ID NO: 2880025 - DNA, 25 bp, Homo sapien
gaggctctcagggatacccttcagg

SEQ ID NO: 2880026 - DNA, 25 bp, Homo sapien
gcggaagcctcgtgaacactccaga

SEQ ID NO: 2880027 - DNA, 25 bp, Homo sapien
aagcgcatctgagtgccgaggccta

SEQ ID NO: 2880028 - DNA, 25 bp, Homo sapien
gaggcctaggccaccgcggaagcct

SEQ ID NO: 2880029 - DNA, 25 bp, Homo sapien
tggccttcctcgcaattcccgggaa

SEQ ID NO: 2880030 - DNA, 25 bp, Homo sapien
ttggcgcctcctgcgcacagaagct

SEQ ID NO: 2880031 - DNA, 25 bp, Homo sapien
ccttggctccaaggtcctccatggg

SEQ ID NO: 2880032 - DNA, 25 bp, Homo sapien
ccctgggatgcggttggcgcctcct

SEQ ID NO: 2880033 - DNA, 25 bp, Homo sapien
ctccaaggtcctccatgggcgagtt

SEQ ID NO: 2880034 - DNA, 25 bp, Homo sapien
gagagcccagctcgaccagggccag

SEQ ID NO: 2880035 - DNA, 25 bp, Homo sapien
cctgagagtgatgctgtcttggcag

SEQ ID NO: 2880036 - DNA, 25 bp, Homo sapien
cagctgactgcctgaacttcttggc

SEQ ID NO: 2880037 - DNA, 25 bp, Homo sapien
gggggagagcccagctcgaccaggg

SEQ ID NO: 2880038 - DNA, 25 bp, Homo sapien
ctgttgactagtcacttttaacctg

SEQ ID NO: 2880039 - DNA, 25 bp, Homo sapien
tatttttctgttgactagtcacttt

SEQ ID NO: 2880040 - DNA, 25 bp, Homo sapien
tttctgttgactagtcacttttaac

SEQ ID NO: 2880041 - DNA, 25 bp, Homo sapien
atatttttctgttgactagtcactt

SEQ ID NO: 2880042 - DNA, 25 bp, Homo sapien
tcagcaggatgttctacgtacgggc

SEQ ID NO: 2880043 - DNA, 25 bp, Homo sapien
cattatctgtgggaggttatctggt

SEQ ID NO: 2880044 - DNA, 25 bp, Homo sapien
cgcaatatctttgtacagggtgtga

SEQ ID NO: 2880045 - DNA, 25 bp, Homo sapien
tttcccctgctgtggtcggtctgtg

SEQ ID NO: 2880046 - DNA, 25 bp, Homo sapien
tcgcatttcaacaggaatcaattaa

SEQ ID NO: 2880047 - DNA, 25 bp, Homo sapien
aaaatgatggagtggccaggcacgg

SEQ ID NO: 2880048 - DNA, 25 bp, Homo sapien
attaaaaaatgatggagtggccagg

SEQ ID NO: 2880049 - DNA, 25 bp, Homo sapien
taaaaaatgatggagtggccaggca

SEQ ID NO: 2880050 - DNA, 25 bp, Homo sapien
gagactctatggcacaagtgaccga

SEQ ID NO: 2880051 - DNA, 25 bp, Homo sapien
ttaagagacctatcaaccaagagtg

SEQ ID NO: 2880052 - DNA, 25 bp, Homo sapien
gagcttgctaaacgcctgcagcgga

SEQ ID NO: 2880053 - DNA, 25 bp, Homo sapien
tgatactgcagttctaccgtcaaga

SEQ ID NO: 2880054 - DNA, 25 bp, Homo sapien
ggaaggtcatgggaacaaagccgaa

SEQ ID NO: 2880055 - DNA, 25 bp, Homo sapien
tcagcctgaacgcctggcagggaag

SEQ ID NO: 2880056 - DNA, 25 bp, Homo sapien
gtgtacaggcctccacagtgtggct

SEQ ID NO: 2880057 - DNA, 25 bp, Homo sapien
aagccgaagtgtacaggcctccaca

SEQ ID NO: 2880058 - DNA, 25 bp, Homo sapien
agcaggagtgaggagtaccgggtgt

SEQ ID NO: 2880059 - DNA, 25 bp, Homo sapien
cagccagagaaggttcctcatgggc

SEQ ID NO: 2880060 - DNA, 25 bp, Homo sapien
aaggacagccagagaaggttcctca

SEQ ID NO: 2880061 - DNA, 25 bp, Homo sapien
caggagtgaggagtaccgggtgtgt

SEQ ID NO: 2880062 - DNA, 25 bp, Homo sapien
agaggctgtgatgttgctgggcagt

SEQ ID NO: 2880063 - DNA, 25 bp, Homo sapien
cagagaggctgtgatgttgctgggc

SEQ ID NO: 2880064 - DNA, 25 bp, Homo sapien
tgttgctgggcagtgtgggtctggg

SEQ ID NO: 2880065 - DNA, 25 bp, Homo sapien
ggtgcagagaggctgtgatgttgct

SEQ ID NO: 2880066 - DNA, 25 bp, Homo sapien
acacatccacccctaggcggaggcc

SEQ ID NO: 2880067 - DNA, 25 bp, Homo sapien
cagccggaaccatggggtcaggctc

SEQ ID NO: 2880068 - DNA, 25 bp, Homo sapien
ctgggcccaactcgaccctgctgct

SEQ ID NO: 2880069 - DNA, 25 bp, Homo sapien
ccagcggggaggctgatggatgccc

SEQ ID NO: 2880070 - DNA, 25 bp, Homo sapien
gatcctctgcaccaagaaatcacgg

SEQ ID NO: 2880071 - DNA, 25 bp, Homo sapien
tctgtgctagggtccacaacactgg

SEQ ID NO: 2880072 - DNA, 25 bp, Homo sapien
tttcaggttggcaaacaggaatgtc

SEQ ID NO: 2880073 - DNA, 25 bp, Homo sapien
gcagcacgctggagctgtcagcttt

SEQ ID NO: 2880074 - DNA, 25 bp, Homo sapien
caagttgcctgtgcctctaagggcc

SEQ ID NO: 2880075 - DNA, 25 bp, Homo sapien
gcttggctctgaacccctctgaggt

SEQ ID NO: 2880076 - DNA, 25 bp, Homo sapien
ggacaagctttcagtgggcacctct

SEQ ID NO: 2880077 - DNA, 25 bp, Homo sapien
gatgatgtagtgttcagcccagctg

SEQ ID NO: 2880078 - DNA, 25 bp, Homo sapien
tgctgtgggaggatacgccataaag

SEQ ID NO: 2880079 - DNA, 25 bp, Homo sapien
ggtgccaacatgctcccactgacat

SEQ ID NO: 2880080 - DNA, 25 bp, Homo sapien
ggagaggcgcacagaaggcctcaca

SEQ ID NO: 2880081 - DNA, 25 bp, Homo sapien
tagaggactctaagcagggtgccaa

SEQ ID NO: 2880082 - DNA, 25 bp, Homo sapien
atcacttgaatcctgaagtttgaga

SEQ ID NO: 2880083 - DNA, 25 bp, Homo sapien
gaggatcacttgaatcctgaagttt

SEQ ID NO: 2880084 - DNA, 25 bp, Homo sapien
ggatcacttgaatcctgaagtttga

SEQ ID NO: 2880085 - DNA, 25 bp, Homo sapien
ggaggatcacttgaatcctgaagtt

SEQ ID NO: 2880086 - DNA, 25 bp, Homo sapien
tcctccagtgtgagctagtcctgct

SEQ ID NO: 2880087 - DNA, 25 bp, Homo sapien
agctgcgtgcgcaaaagcctgcagg

SEQ ID NO: 2880088 - DNA, 25 bp, Homo sapien
ggtcagtacagtgccccggacagat

SEQ ID NO: 2880089 - DNA, 25 bp, Homo sapien
taggccgatacgtggcttttacctg

SEQ ID NO: 2880090 - DNA, 25 bp, Homo sapien
tgcagcttgtgtggccgtctagccg

SEQ ID NO: 2880091 - DNA, 25 bp, Homo sapien
tgcagcttgttgaacggcgtccaca

SEQ ID NO: 2880092 - DNA, 25 bp, Homo sapien
tgatgaggtggcaagcgtcctcctc

SEQ ID NO: 2880093 - DNA, 25 bp, Homo sapien
gaacgtggctcggtagcactcattc

SEQ ID NO: 2880094 - DNA, 25 bp, Homo sapien
gctccatgagcttgaaggtctcgcc

SEQ ID NO: 2880095 - DNA, 25 bp, Homo sapien
tctcgccgatgttgaggaacatgga

SEQ ID NO: 2880096 - DNA, 25 bp, Homo sapien
aagagctcctggtcgcgggtgtcca

SEQ ID NO: 2880097 - DNA, 25 bp, Homo sapien
ggcgttcttctccagacgcgttatg

SEQ ID NO: 2880098 - DNA, 25 bp, Homo sapien
tcccaaactgcttccgcatcttcag

SEQ ID NO: 2880099 - DNA, 25 bp, Homo sapien
tagaagcacaggtggttgaccgtca

SEQ ID NO: 2880100 - DNA, 25 bp, Homo sapien
agtagctgcaggagtagtaattcac

SEQ ID NO: 2880101 - DNA, 25 bp, Homo sapien
tcttgttctcttctgcgatgattcc

SEQ ID NO: 2880102 - DNA, 25 bp, Homo sapien
tattattatcatcgcccaattgctc

SEQ ID NO: 2880103 - DNA, 25 bp, Homo sapien
ggtttgttctgctgatgcgtttgtt

SEQ ID NO: 2880104 - DNA, 25 bp, Homo sapien
gatgcgtttgttgggcctggcatat

SEQ ID NO: 2880105 - DNA, 25 bp, Homo sapien
cttccttggcctatgagtcatttgg

SEQ ID NO: 2880106 - DNA, 25 bp, Homo sapien
ggagatagaggtaaccaggtctcac

SEQ ID NO: 2880107 - DNA, 25 bp, Homo sapien
tggagatagaggtaaccaggtctca

SEQ ID NO: 2880108 - DNA, 25 bp, Homo sapien
ggaattcacatgggcctgcccaaag

SEQ ID NO: 2880109 - DNA, 25 bp, Homo sapien
tgagaagagctgagaaagctggtaa

SEQ ID NO: 2880110 - DNA, 25 bp, Homo sapien
aagttctggtatcaggaattcacat

SEQ ID NO: 2880111 - DNA, 25 bp, Homo sapien
taatgtctgtccaggcttaggaagt

SEQ ID NO: 2880112 - DNA, 25 bp, Homo sapien
tctggagcaagttattttccagcca

SEQ ID NO: 2880113 - DNA, 25 bp, Homo sapien
tttgtgatctctttgcgggaagaac

SEQ ID NO: 2880114 - DNA, 25 bp, Homo sapien
cgaaggtggtgatatcttcctcact

SEQ ID NO: 2880115 - DNA, 25 bp, Homo sapien
gtgtatcttgcccttgacgaaggtg

SEQ ID NO: 2880116 - DNA, 25 bp, Homo sapien
gaatgaacacaaggatgaggagtga

SEQ ID NO: 2880117 - DNA, 25 bp, Homo sapien
atgaggagtgaatgacaccctgaat

SEQ ID NO: 2880118 - DNA, 25 bp, Homo sapien
cctgaatcattctcagctgtccggg

SEQ ID NO: 2880119 - DNA, 25 bp, Homo sapien
gtttctggggttttgcctgtactga

SEQ ID NO: 2880120 - DNA, 25 bp, Homo sapien
cttaggaacaagagcactacggcac

SEQ ID NO: 2880121 - DNA, 25 bp, Homo sapien
tgaaagaagctgctcgcatgcacgg

SEQ ID NO: 2880122 - DNA, 25 bp, Homo sapien
tcagattctgtaaggtggccgcgaa

SEQ ID NO: 2880123 - DNA, 25 bp, Homo sapien
gatcgattggcattgagctcacggc

SEQ ID NO: 2880124 - DNA, 25 bp, Homo sapien
gtgcagacacgtcatgtccagagga

SEQ ID NO: 2880125 - DNA, 25 bp, Homo sapien
taaaagcgtgtgcagacacgtcatg

SEQ ID NO: 2880126 - DNA, 25 bp, Homo sapien
gaggaaggatgggtctgtggagtct

SEQ ID NO: 2880127 - DNA, 25 bp, Homo sapien
aaggttagctggcatggcggacact

SEQ ID NO: 2880128 - DNA, 25 bp, Homo sapien
gcaggatgcggtaaggggccacgcg

SEQ ID NO: 2880129 - DNA, 25 bp, Homo sapien
tgtccagtagacctgggagtcctgg

SEQ ID NO: 2880130 - DNA, 25 bp, Homo sapien
cactgtccagtagacctgggagtcc

SEQ ID NO: 2880131 - DNA, 25 bp, Homo sapien
acacgccactgtccagtagacctgg

SEQ ID NO: 2880132 - DNA, 25 bp, Homo sapien
agcctgccgagcacagcacaagtgt

SEQ ID NO: 2880133 - DNA, 25 bp, Homo sapien
ataagcctgccgagcacagcacaag

SEQ ID NO: 2880134 - DNA, 25 bp, Homo sapien
cctgccgagcacagcacaagtgttt

SEQ ID NO: 2880135 - DNA, 25 bp, Homo sapien
ccgagcacagcacaagtgtttcaag

SEQ ID NO: 2880136 - DNA, 25 bp, Homo sapien
cgctttcttcatcgggcttgcagta

SEQ ID NO: 2880137 - DNA, 25 bp, Homo sapien
agtagcttcgaggttagccacaggg

SEQ ID NO: 2880138 - DNA, 25 bp, Homo sapien
gcgctgatgacaccctggcgcgctg

SEQ ID NO: 2880139 - DNA, 25 bp, Homo sapien
gaatatgacacactggcgcgctgat

SEQ ID NO: 2880140 - DNA, 25 bp, Homo sapien
aggagcccgagatccttgaagccca

SEQ ID NO: 2880141 - DNA, 25 bp, Homo sapien
acaggagcccgagatccttgaagcc

SEQ ID NO: 2880142 - DNA, 25 bp, Homo sapien
caggagcccgagatccttgaagccc

SEQ ID NO: 2880143 - DNA, 25 bp, Homo sapien
aacaggagcccgagatccttgaagc

SEQ ID NO: 2880144 - DNA, 25 bp, Homo sapien
gaggacagggcggtctcgccaactt

SEQ ID NO: 2880145 - DNA, 25 bp, Homo sapien
gccgaatccgggcagaagccgccgc

SEQ ID NO: 2880146 - DNA, 25 bp, Homo sapien
ctcgccaactttcggcggtgagatc

SEQ ID NO: 2880147 - DNA, 25 bp, Homo sapien
gagatcccgggaagctgcacggccc

SEQ ID NO: 2880148 - DNA, 25 bp, Homo sapien
tggccccggcgtcgctgcagcacga

SEQ ID NO: 2880149 - DNA, 25 bp, Homo sapien
tgcagcacgaagaaggggttggccc

SEQ ID NO: 2880150 - DNA, 25 bp, Homo sapien
ccccggcgtcgctgcagcacgaaga

SEQ ID NO: 2880151 - DNA, 25 bp, Homo sapien
cagcacgaagaaggggttggcccgc

SEQ ID NO: 2880152 - DNA, 25 bp, Homo sapien
acagcgcattggccaccagcacctc

SEQ ID NO: 2880153 - DNA, 25 bp, Homo sapien
agcgcattggccaccagcacctcct

SEQ ID NO: 2880154 - DNA, 25 bp, Homo sapien
gcacctcctccgggctcagccacat

SEQ ID NO: 2880155 - DNA, 25 bp, Homo sapien
ccacagcgcattggccaccagcacc

SEQ ID NO: 2880156 - DNA, 25 bp, Homo sapien
gaggcccgcgagacggaagcgcccg

SEQ ID NO: 2880157 - DNA, 25 bp, Homo sapien
gccgaggcccgcgagacggaagcgc

SEQ ID NO: 2880158 - DNA, 25 bp, Homo sapien
cgggccgaggcccgcgagacggaag

SEQ ID NO: 2880159 - DNA, 25 bp, Homo sapien
tcgcaccgggccgaggcccgcgaga

SEQ ID NO: 2880160 - DNA, 25 bp, Homo sapien
tgagatctgattgtcaagaaccagc

SEQ ID NO: 2880161 - DNA, 25 bp, Homo sapien
cagggaggcccgaaactgagctaat

SEQ ID NO: 2880162 - DNA, 25 bp, Homo sapien
tgtgctgcccagaacatttcaaagg

SEQ ID NO: 2880163 - DNA, 25 bp, Homo sapien
caaattctgcacatacgggtgtaca

SEQ ID NO: 2880164 - DNA, 25 bp, Homo sapien
agtacggtgggctctttcaatgacc

SEQ ID NO: 2880165 - DNA, 25 bp, Homo sapien
tgtgcatagtgagcaggaacctaga

SEQ ID NO: 2880166 - DNA, 25 bp, Homo sapien
tgagtataaaagctacggagggtcc

SEQ ID NO: 2880167 - DNA, 25 bp, Homo sapien
catatgtggcctagggcttgcacca

SEQ ID NO: 2880168 - DNA, 25 bp, Homo sapien
agccagcaatccgcagcctttctgc

SEQ ID NO: 2880169 - DNA, 25 bp, Homo sapien
acagccagcaatccgcagcctttct

SEQ ID NO: 2880170 - DNA, 25 bp, Homo sapien
cacagccagcaatccgcagcctttc

SEQ ID NO: 2880171 - DNA, 25 bp, Homo sapien
ccagcaatccgcagcctttctgctg

SEQ ID NO: 2880172 - DNA, 25 bp, Homo sapien
ggttcagtacctcccagtcattgga

SEQ ID NO: 2880173 - DNA, 25 bp, Homo sapien
ccgcctagagcttttgtggtacaga

SEQ ID NO: 2880174 - DNA, 25 bp, Homo sapien
caagttgcaggacgttcaaaggtgc

SEQ ID NO: 2880175 - DNA, 25 bp, Homo sapien
tcagaaccagtctgtgacgctccgc

SEQ ID NO: 2880176 - DNA, 25 bp, Homo sapien
gtgaacctttaacaatgccccagag

SEQ ID NO: 2880177 - DNA, 25 bp, Homo sapien
gaattccaaggagcagacataggca

SEQ ID NO: 2880178 - DNA, 25 bp, Homo sapien
cccaagatgagtgcaggtgacgacc

SEQ ID NO: 2880179 - DNA, 25 bp, Homo sapien
cccagggagctgtgtgaatattaca

SEQ ID NO: 2880180 - DNA, 25 bp, Homo sapien
cctgacagtgtgagccaatgttgac

SEQ ID NO: 2880181 - DNA, 25 bp, Homo sapien
gacagtgtgagccaatgttgacttt

SEQ ID NO: 2880182 - DNA, 25 bp, Homo sapien
cagtgtgagccaatgttgactttag

SEQ ID NO: 2880183 - DNA, 25 bp, Homo sapien
tgtgagccaatgttgactttagtca

SEQ ID NO: 2880184 - DNA, 25 bp, Homo sapien
cacacgagaggaagtgagagctagt

SEQ ID NO: 2880185 - DNA, 25 bp, Homo sapien
aaacacagcttctgaccgggcgtgg

SEQ ID NO: 2880186 - DNA, 25 bp, Homo sapien
tacatggagatacttcagcaggaca

SEQ ID NO: 2880187 - DNA, 25 bp, Homo sapien
ggagattctgcctccagcgcatggg

SEQ ID NO: 2880188 - DNA, 25 bp, Homo sapien
ttaacggcgagagaacactttgagt

SEQ ID NO: 2880189 - DNA, 25 bp, Homo sapien
tcagttaaaactagcttcagccggg

SEQ ID NO: 2880190 - DNA, 25 bp, Homo sapien
tgagcagcaaccacttgtcaaggag

SEQ ID NO: 2880191 - DNA, 25 bp, Homo sapien
cagttgcttgataacgtgcccatga

SEQ ID NO: 2880192 - DNA, 25 bp, Homo sapien
cagtgctcaaggcagtgcctcgtga

SEQ ID NO: 2880193 - DNA, 25 bp, Homo sapien
gtgaatgtgcctcgcagccaggcct

SEQ ID NO: 2880194 - DNA, 25 bp, Homo sapien
gaagccggcaggtgccagacctcag

SEQ ID NO: 2880195 - DNA, 25 bp, Homo sapien
aagcaaggctcatcagggttgtgag

SEQ ID NO: 2880196 - DNA, 25 bp, Homo sapien
ccctgggcagacatgcttaccacca

SEQ ID NO: 2880197 - DNA, 25 bp, Homo sapien
tcctcccttaggatgttaaaagtca

SEQ ID NO: 2880198 - DNA, 25 bp, Homo sapien
agtcaccaaagcttggccaggcgtg

SEQ ID NO: 2880199 - DNA, 25 bp, Homo sapien
tggaagccctggctatctggccttc

SEQ ID NO: 2880200 - DNA, 25 bp, Homo sapien
tcaccaaagcggaagcatttgcatt

SEQ ID NO: 2880201 - DNA, 25 bp, Homo sapien
gtggtgtaaatagctgactcctcag

SEQ ID NO: 2880202 - DNA, 25 bp, Homo sapien
ctggccctagacttgctgatcctgc

SEQ ID NO: 2880203 - DNA, 25 bp, Homo sapien
taaccgctgctggtggcaagacttg

SEQ ID NO: 2880204 - DNA, 25 bp, Homo sapien
ctgccagggtcccgacttagcaggg

SEQ ID NO: 2880205 - DNA, 25 bp, Homo sapien
taatgagaagttagtgtccctcctg

SEQ ID NO: 2880206 - DNA, 25 bp, Homo sapien
ctgtagctgagccagagagtgaccc

SEQ ID NO: 2880207 - DNA, 25 bp, Homo sapien
tattctaccgtgaatgtgtgcccca

SEQ ID NO: 2880208 - DNA, 25 bp, Homo sapien
gggtgtcaagccaggatccacagca

SEQ ID NO: 2880209 - DNA, 25 bp, Homo sapien
cagcttgggcgggttttcaatacca

SEQ ID NO: 2880210 - DNA, 25 bp, Homo sapien
aatgcaacattaatcctgggcccgg

SEQ ID NO: 2880211 - DNA, 25 bp, Homo sapien
cagtatgcatcgtaagcagggacca

SEQ ID NO: 2880212 - DNA, 25 bp, Homo sapien
tagacgtgttcacaggctgcaggga

SEQ ID NO: 2880213 - DNA, 25 bp, Homo sapien
actttcatacaccagactccgaggg

SEQ ID NO: 2880214 - DNA, 25 bp, Homo sapien
atgtccaaagaaggttcgatggtgg

SEQ ID NO: 2880215 - DNA, 25 bp, Homo sapien
gaaggttcgatggtggagaattcac

SEQ ID NO: 2880216 - DNA, 25 bp, Homo sapien
ggacaaggagtttcgatgaaagaag

SEQ ID NO: 2880217 - DNA, 25 bp, Homo sapien
ctcagctgtcccagccagtgccaac

SEQ ID NO: 2880218 - DNA, 25 bp, Homo sapien
aaaactcagctgtcccagccagtgc

SEQ ID NO: 2880219 - DNA, 25 bp, Homo sapien
tcaaaactcagctgtcccagccagt

SEQ ID NO: 2880220 - DNA, 25 bp, Homo sapien
cttcaaaactcagctgtcccagcca

SEQ ID NO: 2880221 - DNA, 25 bp, Homo sapien
tatcccagatctgctatcccccaaa

SEQ ID NO: 2880222 - DNA, 25 bp, Homo sapien
ccagatctgctatcccccaaaccac

SEQ ID NO: 2880223 - DNA, 25 bp, Homo sapien
atatcccagatctgctatcccccaa

SEQ ID NO: 2880224 - DNA, 25 bp, Homo sapien
tcccagatctgctatcccccaaacc

SEQ ID NO: 2880225 - DNA, 25 bp, Homo sapien
ctgattatggcacacttgtttaacc

SEQ ID NO: 2880226 - DNA, 25 bp, Homo sapien
agctctgtgacgatcagatttcaga

SEQ ID NO: 2880227 - DNA, 25 bp, Homo sapien
tgcctgtgaagctcacaacagtgtt

SEQ ID NO: 2880228 - DNA, 25 bp, Homo sapien
ctgtcagaatgggagcagactgttc

SEQ ID NO: 2880229 - DNA, 25 bp, Homo sapien
gatgtcaaaatgcattccacctcct

SEQ ID NO: 2880230 - DNA, 25 bp, Homo sapien
gaatcaacctcaaacggatgtcaaa

SEQ ID NO: 2880231 - DNA, 25 bp, Homo sapien
tggcgactcctttgattcccaaaaa

SEQ ID NO: 2880232 - DNA, 25 bp, Homo sapien
aagacatcatctgagttatggaggg

SEQ ID NO: 2880233 - DNA, 25 bp, Homo sapien
agtctcaggacttttatctgggtgc

SEQ ID NO: 2880234 - DNA, 25 bp, Homo sapien
cacatcggtgtcattctccaacatg

SEQ ID NO: 2880235 - DNA, 25 bp, Homo sapien
tctgggtgccacatcggtgtcattc

SEQ ID NO: 2880236 - DNA, 25 bp, Homo sapien
ggcatgtctgcacacctggaccttc

SEQ ID NO: 2880237 - DNA, 25 bp, Homo sapien
ttcagtcctcgcatttccttttgat

SEQ ID NO: 2880238 - DNA, 25 bp, Homo sapien
tattggtcattggtttcctgaacat

SEQ ID NO: 2880239 - DNA, 25 bp, Homo sapien
ctaatagttagatttcttgtggatc

SEQ ID NO: 2880240 - DNA, 25 bp, Homo sapien
ttccagttcatgaatcctctcttag

SEQ ID NO: 2880241 - DNA, 25 bp, Homo sapien
caatggaaggcctgggatggttatc

SEQ ID NO: 2880242 - DNA, 25 bp, Homo sapien
gagtttcatctcacaagcccaataa

SEQ ID NO: 2880243 - DNA, 25 bp, Homo sapien
taatttgacgttgctgatggtgacc

SEQ ID NO: 2880244 - DNA, 25 bp, Homo sapien
cattgcctctggaagtgacgtatca

SEQ ID NO: 2880245 - DNA, 25 bp, Homo sapien
gcaagcattcgtgcgtccgaattct

SEQ ID NO: 2880246 - DNA, 25 bp, Homo sapien
aagcaagcaagcattcgtgcgtccg

SEQ ID NO: 2880247 - DNA, 25 bp, Homo sapien
tgcgtccgaattctgagtgactctt

SEQ ID NO: 2880248 - DNA, 25 bp, Homo sapien
gcattcgtgcgtccgaattctgagt

SEQ ID NO: 2880249 - DNA, 25 bp, Homo sapien
tctaggctgttcctgccatagccgc

SEQ ID NO: 2880250 - DNA, 25 bp, Homo sapien
gtgtctaggctgttcctgccatagc

SEQ ID NO: 2880251 - DNA, 25 bp, Homo sapien
gctgttcctgccatagccgcgcggg

SEQ ID NO: 2880252 - DNA, 25 bp, Homo sapien
taggctgttcctgccatagccgcgc

SEQ ID NO: 2880253 - DNA, 25 bp, Homo sapien
caaacaaatgcaatctgggtctgcg

SEQ ID NO: 2880254 - DNA, 25 bp, Homo sapien
taaatcaactgaccatcctaagcgg

SEQ ID NO: 2880255 - DNA, 25 bp, Homo sapien
tgggtctgcgagcttcaaatcagcc

SEQ ID NO: 2880256 - DNA, 25 bp, Homo sapien
tagtaagtgtcaatccctgttcctc

SEQ ID NO: 2880257 - DNA, 25 bp, Homo sapien
ataaatgcttgtgtggcatgattgg

SEQ ID NO: 2880258 - DNA, 25 bp, Homo sapien
taaatgcttgtgtggcatgattggt

SEQ ID NO: 2880259 - DNA, 25 bp, Homo sapien
tcttagaggtgctttaatactccca

SEQ ID NO: 2880260 - DNA, 25 bp, Homo sapien
ggtgctgaaatctgccgctgttgtc

SEQ ID NO: 2880261 - DNA, 25 bp, Homo sapien
gaagtgaccctaactgaagggtggc

SEQ ID NO: 2880262 - DNA, 25 bp, Homo sapien
caggcccatggcgtgttgtttaaat

SEQ ID NO: 2880263 - DNA, 25 bp, Homo sapien
tgtatggctgtctcacaggaatcct

SEQ ID NO: 2880264 - DNA, 25 bp, Homo sapien
tgtccttgcatcaggtgtaaaaaca

SEQ ID NO: 2880265 - DNA, 25 bp, Homo sapien
gctttctgatgccttggattcctgc

SEQ ID NO: 2880266 - DNA, 25 bp, Homo sapien
tggttattacacaactctctagcaa

SEQ ID NO: 2880267 - DNA, 25 bp, Homo sapien
cactaggaatatctctctgctgaaa

SEQ ID NO: 2880268 - DNA, 25 bp, Homo sapien
gctctttataagaatcaagtccaaa

SEQ ID NO: 2880269 - DNA, 25 bp, Homo sapien
agcaagcaacttcgcagccactagg

SEQ ID NO: 2880270 - DNA, 25 bp, Homo sapien
ggccttagagcccattaccagctct

SEQ ID NO: 2880271 - DNA, 25 bp, Homo sapien
cacaactcgctgatcctgctctgtg

SEQ ID NO: 2880272 - DNA, 25 bp, Homo sapien
agaagggcctttgcgtactccctca

SEQ ID NO: 2880273 - DNA, 25 bp, Homo sapien
atcagtacgcacatgagggcatagc

SEQ ID NO: 2880274 - DNA, 25 bp, Homo sapien
tcactgtgtgccctaattatgccca

SEQ ID NO: 2880275 - DNA, 25 bp, Homo sapien
tggcggggccagaccaggtctccat

SEQ ID NO: 2880276 - DNA, 25 bp, Homo sapien
ctggcggggccagaccaggtctcca

SEQ ID NO: 2880277 - DNA, 25 bp, Homo sapien
gaataatgagctaccgttctctgca

SEQ ID NO: 2880278 - DNA, 25 bp, Homo sapien
gatctccggtcatgccactggatca

SEQ ID NO: 2880279 - DNA, 25 bp, Homo sapien
gaatccagcaatgggaaaagggctc

SEQ ID NO: 2880280 - DNA, 25 bp, Homo sapien
tctggtggacctgctacaagaagcc

SEQ ID NO: 2880281 - DNA, 25 bp, Homo sapien
cagtggcattggcttggctaacatt

SEQ ID NO: 2880282 - DNA, 25 bp, Homo sapien
caacttcaatggcactgcagtggca

SEQ ID NO: 2880283 - DNA, 25 bp, Homo sapien
gagctactatggtactgtgtcccac

SEQ ID NO: 2880284 - DNA, 25 bp, Homo sapien
taacaaccctgcgatatggtcctag

SEQ ID NO: 2880285 - DNA, 25 bp, Homo sapien
cttttaccgacgtgaagcctgccgt

SEQ ID NO: 2880286 - DNA, 25 bp, Homo sapien
gatgaacgcaaagtgggctcttccc

SEQ ID NO: 2880287 - DNA, 25 bp, Homo sapien
gctccagatgtgtgtgatgaacgca

SEQ ID NO: 2880288 - DNA, 25 bp, Homo sapien
tgcccatggagatagcgcttagact

SEQ ID NO: 2880289 - DNA, 25 bp, Homo sapien
cagagtgtgagggcactgaggaggc

SEQ ID NO: 2880290 - DNA, 25 bp, Homo sapien
gatgatcatgtagcagagtgtgagg

SEQ ID NO: 2880291 - DNA, 25 bp, Homo sapien
agcattcaagctagctgtggctctg

SEQ ID NO: 2880292 - DNA, 25 bp, Homo sapien
attagcattcaagctagctgtggct

SEQ ID NO: 2880293 - DNA, 25 bp, Homo sapien
caagattggcccaaggaagtgaagc

SEQ ID NO: 2880294 - DNA, 25 bp, Homo sapien
ttcttagtcaaaggctgaggagcac

SEQ ID NO: 2880295 - DNA, 25 bp, Homo sapien
tccctcaaatgcaacgaagcagacg

SEQ ID NO: 2880296 - DNA, 25 bp, Homo sapien
cagacgtcaacggaggtgtaagcca

SEQ ID NO: 2880297 - DNA, 25 bp, Homo sapien
gctcaaggccaagggagttgtcgcc

SEQ ID NO: 2880298 - DNA, 25 bp, Homo sapien
gaagaggtgagatccccgaagttcg

SEQ ID NO: 2880299 - DNA, 25 bp, Homo sapien
ccgaagttcgaagtggctcaaggcc

SEQ ID NO: 2880300 - DNA, 25 bp, Homo sapien
tggtgagcctttccatatcgaatgc

SEQ ID NO: 2880301 - DNA, 25 bp, Homo sapien
ggcactgtgggaggccgagaagggc

SEQ ID NO: 2880302 - DNA, 25 bp, Homo sapien
agatcacttgaggtcaggagtttga

SEQ ID NO: 2880303 - DNA, 25 bp, Homo sapien
gcacggtggctcacgcctgtaatcc

SEQ ID NO: 2880304 - DNA, 25 bp, Homo sapien
ttcaagtttctacactgttggccag

SEQ ID NO: 2880305 - DNA, 25 bp, Homo sapien
ggatccacgcaggatttgtggaaaa

SEQ ID NO: 2880306 - DNA, 25 bp, Homo sapien
ttcccagggccttcaatatattaag

SEQ ID NO: 2880307 - DNA, 25 bp, Homo sapien
gtacaatgttcactaagccagggat

SEQ ID NO: 2880308 - DNA, 25 bp, Homo sapien
tgttcactaagccagggatccacgc

SEQ ID NO: 2880309 - DNA, 25 bp, Homo sapien
cagtctcaaattcccatggcacatc

SEQ ID NO: 2880310 - DNA, 25 bp, Homo sapien
cctcgcttccacaaagctgggtggc

SEQ ID NO: 2880311 - DNA, 25 bp, Homo sapien
gagatcttcagtctcaaattcccat

SEQ ID NO: 2880312 - DNA, 25 bp, Homo sapien
atggcacatccctcgcttccacaaa

SEQ ID NO: 2880313 - DNA, 25 bp, Homo sapien
tattaaaggtcccagacaagaactc

SEQ ID NO: 2880314 - DNA, 25 bp, Homo sapien
tctatattgaaggtgagttgctctc

SEQ ID NO: 2880315 - DNA, 25 bp, Homo sapien
gaaacatacgttcatccacgcggca

SEQ ID NO: 2880316 - DNA, 25 bp, Homo sapien
ctgtctctatggaccctcggctgca

SEQ ID NO: 2880317 - DNA, 25 bp, Homo sapien
attgcttcctctgggcagtcaatgg

SEQ ID NO: 2880318 - DNA, 25 bp, Homo sapien
gggcagtcaatggtgaagcggtcct

SEQ ID NO: 2880319 - DNA, 25 bp, Homo sapien
tcagcacgctgagggaattaaaccc

SEQ ID NO: 2880320 - DNA, 25 bp, Homo sapien
tgagggaattaaacccattgcttcc

SEQ ID NO: 2880321 - DNA, 25 bp, Homo sapien
caacatgaggtacagaaagccacag

SEQ ID NO: 2880322 - DNA, 25 bp, Homo sapien
gacggtgagggaacagaaccgctta

SEQ ID NO: 2880323 - DNA, 25 bp, Homo sapien
ctgctgtgccgaatgcggagcgcca

SEQ ID NO: 2880324 - DNA, 25 bp, Homo sapien
cacagcaggtaacaccgactctggg

SEQ ID NO: 2880325 - DNA, 25 bp, Homo sapien
caagtccctggagttgttgtaccca

SEQ ID NO: 2880326 - DNA, 25 bp, Homo sapien
tctgaattgtgcgaccctggaacct

SEQ ID NO: 2880327 - DNA, 25 bp, Homo sapien
tggaacctgctatcggctcaccatc

SEQ ID NO: 2880328 - DNA, 25 bp, Homo sapien
tagtttcatgctccccagcttgaga

SEQ ID NO: 2880329 - DNA, 25 bp, Homo sapien
cgaaaccatagaacaagaattctcg

SEQ ID NO: 2880330 - DNA, 25 bp, Homo sapien
aagataaacgaaaccatagaacaag

SEQ ID NO: 2880331 - DNA, 25 bp, Homo sapien
catagaacaagaattctcgacctca

SEQ ID NO: 2880332 - DNA, 25 bp, Homo sapien
gataaacgaaaccatagaacaagaa

SEQ ID NO: 2880333 - DNA, 25 bp, Homo sapien
atgcacagcggacttggcctccaga

SEQ ID NO: 2880334 - DNA, 25 bp, Homo sapien
tccagaaagccacgaggtgggtggc

SEQ ID NO: 2880335 - DNA, 25 bp, Homo sapien
gaggccgcgtgccacatcgcatatt

SEQ ID NO: 2880336 - DNA, 25 bp, Homo sapien
tattggctacacctcggaaggccgt

SEQ ID NO: 2880337 - DNA, 25 bp, Homo sapien
agcacattaatatcattctttctca

SEQ ID NO: 2880338 - DNA, 25 bp, Homo sapien
aaagcacattaatatcattctttct

SEQ ID NO: 2880339 - DNA, 25 bp, Homo sapien
tctcaaacaaatgaagttgacatac

SEQ ID NO: 2880340 - DNA, 25 bp, Homo sapien
attctttctcaaacaaatgaagttg

SEQ ID NO: 2880341 - DNA, 25 bp, Homo sapien
ggagaattcggacgacatcattctg

SEQ ID NO: 2880342 - DNA, 25 bp, Homo sapien
tatagctctctatgcagactgcaca

SEQ ID NO: 2880343 - DNA, 25 bp, Homo sapien
cattctgcttatagctctctatgca

SEQ ID NO: 2880344 - DNA, 25 bp, Homo sapien
tatgcagactgcacaatgatcaaag

SEQ ID NO: 2880345 - DNA, 25 bp, Homo sapien
tcaatttactgatggctttcttggc

SEQ ID NO: 2880346 - DNA, 25 bp, Homo sapien
tgtcaatttactgatggctttcttg

SEQ ID NO: 2880347 - DNA, 25 bp, Homo sapien
ttgtcaatttactgatggctttctt

SEQ ID NO: 2880348 - DNA, 25 bp, Homo sapien
gtcaatttactgatggctttcttgg

SEQ ID NO: 2880349 - DNA, 25 bp, Homo sapien
caccattaggtgtgtaaatgccgtc

SEQ ID NO: 2880350 - DNA, 25 bp, Homo sapien
taggtcttcaattctccagcagtaa

SEQ ID NO: 2880351 - DNA, 25 bp, Homo sapien
gagaaggaatgcgtcacagctccac

SEQ ID NO: 2880352 - DNA, 25 bp, Homo sapien
tgcttatcgcatcatcaagtgtgaa

SEQ ID NO: 2880353 - DNA, 25 bp, Homo sapien
tggcaccaacaacccacagatgaag

SEQ ID NO: 2880354 - DNA, 25 bp, Homo sapien
tgtatactcaagcatgcccagggcc

SEQ ID NO: 2880355 - DNA, 25 bp, Homo sapien
gatggtgatccctaccctggaaaag

SEQ ID NO: 2880356 - DNA, 25 bp, Homo sapien
gctcactgaactgggacagctgcgt

SEQ ID NO: 2880357 - DNA, 25 bp, Homo sapien
gtgttttgcctatatgtgtacattg

SEQ ID NO: 2880358 - DNA, 25 bp, Homo sapien
ttccctattgtaatgatgttgacca

SEQ ID NO: 2880359 - DNA, 25 bp, Homo sapien
ggcacgcagcctccttacagtttta

SEQ ID NO: 2880360 - DNA, 25 bp, Homo sapien
tgagagaacattatatattccagat

SEQ ID NO: 2880361 - DNA, 25 bp, Homo sapien
aatatgtgggtctatgtgcggacac

SEQ ID NO: 2880362 - DNA, 25 bp, Homo sapien
gattgtgctgaatgtatacatccac

SEQ ID NO: 2880363 - DNA, 25 bp, Homo sapien
ttaagtcttccactgaacactgtgt

SEQ ID NO: 2880364 - DNA, 25 bp, Homo sapien
tagttagttttcactacatagggca

SEQ ID NO: 2880365 - DNA, 25 bp, Homo sapien
gcttttttggcctgctaatatggta

SEQ ID NO: 2880366 - DNA, 25 bp, Homo sapien
cacctggtcatgatgaatttatata

SEQ ID NO: 2880367 - DNA, 25 bp, Homo sapien
cagttttagcttttttggcctgcta

SEQ ID NO: 2880368 - DNA, 25 bp, Homo sapien
tatattcctggagtaaacatcacct

SEQ ID NO: 2880369 - DNA, 25 bp, Homo sapien
caacctatagtttgtttgatattgt

SEQ ID NO: 2880370 - DNA, 25 bp, Homo sapien
tattgttatcatagctgccccttga

SEQ ID NO: 2880371 - DNA, 25 bp, Homo sapien
tactctggtgtagtatctatttgct

SEQ ID NO: 2880372 - DNA, 25 bp, Homo sapien
catttccatcaagtcatctcctatt

SEQ ID NO: 2880373 - DNA, 25 bp, Homo sapien
catgtactacgtctggacacagttt

SEQ ID NO: 2880374 - DNA, 25 bp, Homo sapien
tgtgcatactaagccgtaagggtcc

SEQ ID NO: 2880375 - DNA, 25 bp, Homo sapien
gctttacatagcatactgtgcatac

SEQ ID NO: 2880376 - DNA, 25 bp, Homo sapien
tttgtttagactttcatggcatttc

SEQ ID NO: 2880377 - DNA, 25 bp, Homo sapien
tcttgatcgtcaaaagctacttctc

SEQ ID NO: 2880378 - DNA, 25 bp, Homo sapien
tgaagacctctatctatggtacaaa

SEQ ID NO: 2880379 - DNA, 25 bp, Homo sapien
tgcacccacataaaggctgcaaaag

SEQ ID NO: 2880380 - DNA, 25 bp, Homo sapien
cacattggatactacaggtatgcct

SEQ ID NO: 2880381 - DNA, 25 bp, Homo sapien
ttccagcactatgtggaacagaggg

SEQ ID NO: 2880382 - DNA, 25 bp, Homo sapien
tctttatgatatggatgccccttcc

SEQ ID NO: 2880383 - DNA, 25 bp, Homo sapien
gactgctccggctatgacttccagc

SEQ ID NO: 2880384 - DNA, 25 bp, Homo sapien
tagctgtgggtcatgtgtatctttc

SEQ ID NO: 2880385 - DNA, 25 bp, Homo sapien
gaataatttgggtctggtagaatga

SEQ ID NO: 2880386 - DNA, 25 bp, Homo sapien
tcagaagaactgacgttaattctcc

SEQ ID NO: 2880387 - DNA, 25 bp, Homo sapien
tattggaataatttgggtctggtag

SEQ ID NO: 2880388 - DNA, 25 bp, Homo sapien
ttgagggatcattactatttattgt

SEQ ID NO: 2880389 - DNA, 25 bp, Homo sapien
gatccatttaggttcaaggttaaca

SEQ ID NO: 2880390 - DNA, 25 bp, Homo sapien
cagtcgatctgtgtgtctaggtatc

SEQ ID NO: 2880391 - DNA, 25 bp, Homo sapien
ttcatggagttctatcatggtgcca

SEQ ID NO: 2880392 - DNA, 25 bp, Homo sapien
tgtttccatgtctgggactcctttg

SEQ ID NO: 2880393 - DNA, 25 bp, Homo sapien
cctggctgcactgttatttattgga

SEQ ID NO: 2880394 - DNA, 25 bp, Homo sapien
aatgcctggctgcactgttatttat

SEQ ID NO: 2880395 - DNA, 25 bp, Homo sapien
tgcctggctgcactgttatttattg

SEQ ID NO: 2880396 - DNA, 25 bp, Homo sapien
ggccccgaatgcctggctgcactgt

SEQ ID NO: 2880397 - DNA, 25 bp, Homo sapien
tggattgagttcagaagagttccct

SEQ ID NO: 2880398 - DNA, 25 bp, Homo sapien
ctcatgtggtattgctattagggta

SEQ ID NO: 2880399 - DNA, 25 bp, Homo sapien
tcataactggtctgtttgatcaggt

SEQ ID NO: 2880400 - DNA, 25 bp, Homo sapien
tgcatctactggcattaccacatgg

SEQ ID NO: 2880401 - DNA, 25 bp, Homo sapien
gactacatgcaagcaaaactgtgcc

SEQ ID NO: 2880402 - DNA, 25 bp, Homo sapien
tccaaaagtttctattgttactgat

SEQ ID NO: 2880403 - DNA, 25 bp, Homo sapien
ctaagaaacgccatctcactatatt

SEQ ID NO: 2880404 - DNA, 25 bp, Homo sapien
ttaggagcacgtttgtaaatttcca

SEQ ID NO: 2880405 - DNA, 25 bp, Homo sapien
atcaatttttaattgcctctggttg

SEQ ID NO: 2880406 - DNA, 25 bp, Homo sapien
tattgtttatcattaaggtttggcg

SEQ ID NO: 2880407 - DNA, 25 bp, Homo sapien
gtggtgaaatttaatctgcttacat

SEQ ID NO: 2880408 - DNA, 25 bp, Homo sapien
aatttcatttcaccagtttatgtct

SEQ ID NO: 2880409 - DNA, 25 bp, Homo sapien
gaattacgttcctttgatggtgtcc

SEQ ID NO: 2880410 - DNA, 25 bp, Homo sapien
cccattggagtgtgttactagggaa

SEQ ID NO: 2880411 - DNA, 25 bp, Homo sapien
catatatctccgtagacttgggaag

SEQ ID NO: 2880412 - DNA, 25 bp, Homo sapien
gggctacctggatctgttgtccata

SEQ ID NO: 2880413 - DNA, 25 bp, Homo sapien
aggcgtggcgctgcttcaactgaga

SEQ ID NO: 2880414 - DNA, 25 bp, Homo sapien
cccgaggaacagagccaacagttgc

SEQ ID NO: 2880415 - DNA, 25 bp, Homo sapien
ggatggccaatgcaccacttcctgg

SEQ ID NO: 2880416 - DNA, 25 bp, Homo sapien
caattccaagatggtatagcacagc

SEQ ID NO: 2880417 - DNA, 25 bp, Homo sapien
atgagaaacgggtggtggcttccaa

SEQ ID NO: 2880418 - DNA, 25 bp, Homo sapien
cctggggccctcaagacatgagaaa

SEQ ID NO: 2880419 - DNA, 25 bp, Homo sapien
acatgagaaacgggtggtggcttcc

SEQ ID NO: 2880420 - DNA, 25 bp, Homo sapien
tatattacatgttataggagggaaa

SEQ ID NO: 2880421 - DNA, 25 bp, Homo sapien
gacaatgtgctgcagaagcctccaa

SEQ ID NO: 2880422 - DNA, 25 bp, Homo sapien
tcccccatagattcctgacaatgtg

SEQ ID NO: 2880423 - DNA, 25 bp, Homo sapien
ttcccccatagattcctgacaatgt

SEQ ID NO: 2880424 - DNA, 25 bp, Homo sapien
ttcctgacaatgtgctgcagaagcc

SEQ ID NO: 2880425 - DNA, 25 bp, Homo sapien
tgaaacactgactaagacaaactac

SEQ ID NO: 2880426 - DNA, 25 bp, Homo sapien
aactccgctagccaaagtaccaaga

SEQ ID NO: 2880427 - DNA, 25 bp, Homo sapien
gtctaattaacacccagagaacatg

SEQ ID NO: 2880428 - DNA, 25 bp, Homo sapien
tggcctaacatcagaaaacacttgc

SEQ ID NO: 2880429 - DNA, 25 bp, Homo sapien
tgagtctaacagtttcctacagaac

SEQ ID NO: 2880430 - DNA, 25 bp, Homo sapien
caccaagtgctgtcgagagtgtgga

SEQ ID NO: 2880431 - DNA, 25 bp, Homo sapien
ggatcagtcatacatttctagcagg

SEQ ID NO: 2880432 - DNA, 25 bp, Homo sapien
tatgcacttatcttaacagcccaaa

SEQ ID NO: 2880433 - DNA, 25 bp, Homo sapien
ccaacactgcaagacctggcctgtg

SEQ ID NO: 2880434 - DNA, 25 bp, Homo sapien
cacgaaggaacacaacacgtcggat

SEQ ID NO: 2880435 - DNA, 25 bp, Homo sapien
ttaagggtaacagggcatcatatct

SEQ ID NO: 2880436 - DNA, 25 bp, Homo sapien
tccaatgagctccaatcaatccagg

SEQ ID NO: 2880437 - DNA, 25 bp, Homo sapien
tgagtgagggtaacaacatttttta

SEQ ID NO: 2880438 - DNA, 25 bp, Homo sapien
tagtaagatgcatggtcacgacaga

SEQ ID NO: 2880439 - DNA, 25 bp, Homo sapien
tggctgttacgaaccaatcactgtt

SEQ ID NO: 2880440 - DNA, 25 bp, Homo sapien
tcacgacagatgactgtgaactctg

SEQ ID NO: 2880441 - DNA, 25 bp, Homo sapien
tcggtggcattcgagttccaacagc

SEQ ID NO: 2880442 - DNA, 25 bp, Homo sapien
tattgacacgaagactagagagcca

SEQ ID NO: 2880443 - DNA, 25 bp, Homo sapien
gcatttgtgtacctgatcttctgaa

SEQ ID NO: 2880444 - DNA, 25 bp, Homo sapien
agtagaatatgagccatgctgaaga

SEQ ID NO: 2880445 - DNA, 25 bp, Homo sapien
gcaaaaatccacacgccctcaggag

SEQ ID NO: 2880446 - DNA, 25 bp, Homo sapien
tgatgcaaaaatccacacgccctca

SEQ ID NO: 2880447 - DNA, 25 bp, Homo sapien
tgctcttgatgcaaaaatccacacg

SEQ ID NO: 2880448 - DNA, 25 bp, Homo sapien
tccacacgccctcaggagcaaaggg

SEQ ID NO: 2880449 - DNA, 25 bp, Homo sapien
agtaagtcacggatgcggccacgct

SEQ ID NO: 2880450 - DNA, 25 bp, Homo sapien
acgctcccacgcacttccacgtctg

SEQ ID NO: 2880451 - DNA, 25 bp, Homo sapien
ttccacgtctggccgccagtactaa

SEQ ID NO: 2880452 - DNA, 25 bp, Homo sapien
caaacactgctagtaagtcacggat

SEQ ID NO: 2880453 - DNA, 25 bp, Homo sapien
gaagagaacaaatgagctgtctgag

SEQ ID NO: 2880454 - DNA, 25 bp, Homo sapien
tagctgagcagctgataaaggaaga

SEQ ID NO: 2880455 - DNA, 25 bp, Homo sapien
cagctgataaaggaagatccaggaa

SEQ ID NO: 2880456 - DNA, 25 bp, Homo sapien
ggcaagcccagtgtagctgagcagc

SEQ ID NO: 2880457 - DNA, 25 bp, Homo sapien
gaaagtgaagtctccccacgtggaa

SEQ ID NO: 2880458 - DNA, 25 bp, Homo sapien
aagcacgtgactacggagaggaaga

SEQ ID NO: 2880459 - DNA, 25 bp, Homo sapien
aagaacgcggtctgctgcacaaaac

SEQ ID NO: 2880460 - DNA, 25 bp, Homo sapien
ttccaggtggattctcaagttgccc

SEQ ID NO: 2880461 - DNA, 25 bp, Homo sapien
agcagtacacttcaattccaagctc

SEQ ID NO: 2880462 - DNA, 25 bp, Homo sapien
agtacacttcaattccaagctccat

SEQ ID NO: 2880463 - DNA, 25 bp, Homo sapien
cacagcagtacacttcaattccaag

SEQ ID NO: 2880464 - DNA, 25 bp, Homo sapien
gccacagcagtacacttcaattcca

SEQ ID NO: 2880465 - DNA, 25 bp, Homo sapien
tcatgctcactgcaattaatcttca

SEQ ID NO: 2880466 - DNA, 25 bp, Homo sapien
tcttcatgcccagctctaccctaca

SEQ ID NO: 2880467 - DNA, 25 bp, Homo sapien
tgatgcttgccaacatgccagctcc

SEQ ID NO: 2880468 - DNA, 25 bp, Homo sapien
tctaccctacacagccactaatgtg

SEQ ID NO: 2880469 - DNA, 25 bp, Homo sapien
cccctaagcctactcaatgggaaga

SEQ ID NO: 2880470 - DNA, 25 bp, Homo sapien
tgaaataacaagaccaaccgtcctc

SEQ ID NO: 2880471 - DNA, 25 bp, Homo sapien
ctccttggccatccctgaaataaca

SEQ ID NO: 2880472 - DNA, 25 bp, Homo sapien
ggtgatgtgaccaacttccacttaa

SEQ ID NO: 2880473 - DNA, 25 bp, Homo sapien
gctacatatgttggctaggtcaagt

SEQ ID NO: 2880474 - DNA, 25 bp, Homo sapien
ctgatatatgttggtgtgtctgaca

SEQ ID NO: 2880475 - DNA, 25 bp, Homo sapien
gtctggctcggctcttttatagaat

SEQ ID NO: 2880476 - DNA, 25 bp, Homo sapien
gctaaatccattatctgggaacact

SEQ ID NO: 2880477 - DNA, 25 bp, Homo sapien
gcagcttggcctatgtcacagagca

SEQ ID NO: 2880478 - DNA, 25 bp, Homo sapien
gatttagagtcacaagaggccttac

SEQ ID NO: 2880479 - DNA, 25 bp, Homo sapien
gagtatatgaaatctgcccgctggc

SEQ ID NO: 2880480 - DNA, 25 bp, Homo sapien
gagcacgtcagtggaaaacctggga

SEQ ID NO: 2880481 - DNA, 25 bp, Homo sapien
tgctgcattgatacaggcttcccat

SEQ ID NO: 2880482 - DNA, 25 bp, Homo sapien
catgagtcctctaggaacatatcta

SEQ ID NO: 2880483 - DNA, 25 bp, Homo sapien
taggagcccctaaatgtggactaca

SEQ ID NO: 2880484 - DNA, 25 bp, Homo sapien
taaaagactctcattctagctactt

SEQ ID NO: 2880485 - DNA, 25 bp, Homo sapien
tggatgagtcatggtaactggctcc

SEQ ID NO: 2880486 - DNA, 25 bp, Homo sapien
aagaaccgggtttgtggatcacagc

SEQ ID NO: 2880487 - DNA, 25 bp, Homo sapien
ccactgtttgatattaggagggaca

SEQ ID NO: 2880488 - DNA, 25 bp, Homo sapien
gcattgtggaaagcggcccgtgata

SEQ ID NO: 2880489 - DNA, 25 bp, Homo sapien
agatcccaagcctcatcttttttac

SEQ ID NO: 2880490 - DNA, 25 bp, Homo sapien
cacagtccactcagaagacagcagt

SEQ ID NO: 2880491 - DNA, 25 bp, Homo sapien
tcacagtccactcagaagacagcag

SEQ ID NO: 2880492 - DNA, 25 bp, Homo sapien
ctctttcgacagtgtcacagtccac

SEQ ID NO: 2880493 - DNA, 25 bp, Homo sapien
gtcacagtccactcagaagacagca

SEQ ID NO: 2880494 - DNA, 25 bp, Homo sapien
tttacatccttagaacgcaaatata

SEQ ID NO: 2880495 - DNA, 25 bp, Homo sapien
ggatgttctccatgacataataaaa

SEQ ID NO: 2880496 - DNA, 25 bp, Homo sapien
cttagaacgcaaatatatctgttgg

SEQ ID NO: 2880497 - DNA, 25 bp, Homo sapien
tccttagaacgcaaatatatctgtt

SEQ ID NO: 2880498 - DNA, 25 bp, Homo sapien
tcaatgccctccagcaaacgagctg

SEQ ID NO: 2880499 - DNA, 25 bp, Homo sapien
caaacgagctgcctgaacgcaaaga

SEQ ID NO: 2880500 - DNA, 25 bp, Homo sapien
gctgcctgaacgcaaagatgaccgt

SEQ ID NO: 2880501 - DNA, 25 bp, Homo sapien
gaacgcaaagatgaccgttccaagt

SEQ ID NO: 2880502 - DNA, 25 bp, Homo sapien
aggccgggctgtccacgacggaagc

SEQ ID NO: 2880503 - DNA, 25 bp, Homo sapien
ggctgtccacgacggaagcctcgac

SEQ ID NO: 2880504 - DNA, 25 bp, Homo sapien
cgggctgtccacgacggaagcctcg

SEQ ID NO: 2880505 - DNA, 25 bp, Homo sapien
agcaggccgggctgtccacgacgga

SEQ ID NO: 2880506 - DNA, 25 bp, Homo sapien
cccgcggtcgatgcgaaacgtgagc

SEQ ID NO: 2880507 - DNA, 25 bp, Homo sapien
gagtcaagcccgtagcgcccgcggt

SEQ ID NO: 2880508 - DNA, 25 bp, Homo sapien
tgtagtactcctggctcgcgttgtc

SEQ ID NO: 2880509 - DNA, 25 bp, Homo sapien
ccgtcacgttgatgagcgccgtgta

SEQ ID NO: 2880510 - DNA, 25 bp, Homo sapien
ctgcaggtcagcagggcgagcgcgg

SEQ ID NO: 2880511 - DNA, 25 bp, Homo sapien
tcggtcccaccgaatgggaggcgcc

SEQ ID NO: 2880512 - DNA, 25 bp, Homo sapien
gggtcagcggaacacaaagtccctc

SEQ ID NO: 2880513 - DNA, 25 bp, Homo sapien
tctcaggtcgcacgcgggcgtctct

SEQ ID NO: 2880514 - DNA, 25 bp, Homo sapien
caggagggttgtagaagcgtgcccc

SEQ ID NO: 2880515 - DNA, 25 bp, Homo sapien
ctgccccttgactgtagaaactcga

SEQ ID NO: 2880516 - DNA, 25 bp, Homo sapien
ccttgactgtagaaactcgaaccac

SEQ ID NO: 2880517 - DNA, 25 bp, Homo sapien
gccccttgactgtagaaactcgaac

SEQ ID NO: 2880518 - DNA, 25 bp, Homo sapien
aaactcgaaccaccttgactgtcag

SEQ ID NO: 2880519 - DNA, 25 bp, Homo sapien
cttcctgccaggtgaacgctggctg

SEQ ID NO: 2880520 - DNA, 25 bp, Homo sapien
tggtcagccgagagtctgacatgag

SEQ ID NO: 2880521 - DNA, 25 bp, Homo sapien
gggacaatgtgcagatcatttgtgg

SEQ ID NO: 2880522 - DNA, 25 bp, Homo sapien
caaaatagcttagtgggcaacgggc

SEQ ID NO: 2880523 - DNA, 25 bp, Homo sapien
cttttaagccaacattcaacacaag

SEQ ID NO: 2880524 - DNA, 25 bp, Homo sapien
ttttaagccaacattcaacacaaga

SEQ ID NO: 2880525 - DNA, 25 bp, Homo sapien
tcctcttcaacagattatatgcaag

SEQ ID NO: 2880526 - DNA, 25 bp, Homo sapien
cagattcctcttcaacagattatat

SEQ ID NO: 2880527 - DNA, 25 bp, Homo sapien
tcttcaacagattatatgcaagagg

SEQ ID NO: 2880528 - DNA, 25 bp, Homo sapien
caacagattatatgcaagaggtaaa

SEQ ID NO: 2880529 - DNA, 25 bp, Homo sapien
tcactagcaaactgcacgaaagtca

SEQ ID NO: 2880530 - DNA, 25 bp, Homo sapien
cttgcaaattctgttgacgtcagca

SEQ ID NO: 2880531 - DNA, 25 bp, Homo sapien
caaattctgttgacgtcagcatctg

SEQ ID NO: 2880532 - DNA, 25 bp, Homo sapien
aagctttcagtctctcctcacttgc

SEQ ID NO: 2880533 - DNA, 25 bp, Homo sapien
catgaaaggccttcgtcacaacttt

SEQ ID NO: 2880534 - DNA, 25 bp, Homo sapien
actttcttatcggtttcatcttcgt

SEQ ID NO: 2880535 - DNA, 25 bp, Homo sapien
accatgaaaggccttcgtcacaact

SEQ ID NO: 2880536 - DNA, 25 bp, Homo sapien
ttatcggtttcatcttcgtggttgt

SEQ ID NO: 2880537 - DNA, 25 bp, Homo sapien
cagtgaggaccccatttctctggct

SEQ ID NO: 2880538 - DNA, 25 bp, Homo sapien
ctgttccagtgaggaccccatttct

SEQ ID NO: 2880539 - DNA, 25 bp, Homo sapien
tgaggaccccatttctctggctgct

SEQ ID NO: 2880540 - DNA, 25 bp, Homo sapien
tgttccagtgaggaccccatttctc

SEQ ID NO: 2880541 - DNA, 25 bp, Homo sapien
ttttcatctatgtttttcaagagat

SEQ ID NO: 2880542 - DNA, 25 bp, Homo sapien
gcgagtttttcatctatgtttttca

SEQ ID NO: 2880543 - DNA, 25 bp, Homo sapien
ctgcgagtttttcatctatgttttt

SEQ ID NO: 2880544 - DNA, 25 bp, Homo sapien
ttcatctatgtttttcaagagatta

SEQ ID NO: 2880545 - DNA, 25 bp, Homo sapien
aaataatttgactgccacaaataca

SEQ ID NO: 2880546 - DNA, 25 bp, Homo sapien
ataatttgactgccacaaatacatt

SEQ ID NO: 2880547 - DNA, 25 bp, Homo sapien
taatttgactgccacaaatacatta

SEQ ID NO: 2880548 - DNA, 25 bp, Homo sapien
aataatttgactgccacaaatacat

SEQ ID NO: 2880549 - DNA, 25 bp, Homo sapien
aacctccaatgaaggctaacattca

SEQ ID NO: 2880550 - DNA, 25 bp, Homo sapien
ataaggaccacctaactgaagtccg

SEQ ID NO: 2880551 - DNA, 25 bp, Homo sapien
ggctaacattcaggcctgttgaatt

SEQ ID NO: 2880552 - DNA, 25 bp, Homo sapien
aggaccacctaactgaagtccgagg

SEQ ID NO: 2880553 - DNA, 25 bp, Homo sapien
aagtgatcagctggcttttcaggat

SEQ ID NO: 2880554 - DNA, 25 bp, Homo sapien
cagaaacgatcggaatcttcaggtg

SEQ ID NO: 2880555 - DNA, 25 bp, Homo sapien
cttccagaaacgatcggaatcttca

SEQ ID NO: 2880556 - DNA, 25 bp, Homo sapien
aaacgatcggaatcttcaggtgaag

SEQ ID NO: 2880557 - DNA, 25 bp, Homo sapien
ttcttgtcgaagaccacatcagctt

SEQ ID NO: 2880558 - DNA, 25 bp, Homo sapien
gcttcatagaatttacttttcttca

SEQ ID NO: 2880559 - DNA, 25 bp, Homo sapien
ttgtcgaagaccacatcagcttcat

SEQ ID NO: 2880560 - DNA, 25 bp, Homo sapien
gtcgaagaccacatcagcttcatag

SEQ ID NO: 2880561 - DNA, 25 bp, Homo sapien
aggctgcaagaaagggttcgggctc

SEQ ID NO: 2880562 - DNA, 25 bp, Homo sapien
cctgctggttgagggccttcgactg

SEQ ID NO: 2880563 - DNA, 25 bp, Homo sapien
tcctgctggttgagggccttcgact

SEQ ID NO: 2880564 - DNA, 25 bp, Homo sapien
caagaaagggttcgggctcctgctg

SEQ ID NO: 2880565 - DNA, 25 bp, Homo sapien
ctgagtcctggggagttaaaatggt

SEQ ID NO: 2880566 - DNA, 25 bp, Homo sapien
tcactgaagactctgtgtagtgggc

SEQ ID NO: 2880567 - DNA, 25 bp, Homo sapien
actgaagactctgtgtagtgggcca

SEQ ID NO: 2880568 - DNA, 25 bp, Homo sapien
gaagactctgtgtagtgggccatga

SEQ ID NO: 2880569 - DNA, 25 bp, Homo sapien
ggctgggtatgaggcatggctttac

SEQ ID NO: 2880570 - DNA, 25 bp, Homo sapien
tgaatgagacagtgcagggtcctcc

SEQ ID NO: 2880571 - DNA, 25 bp, Homo sapien
ttttgtcttgagcatgaatgagaca

SEQ ID NO: 2880572 - DNA, 25 bp, Homo sapien
atgaatgagacagtgcagggtcctc

SEQ ID NO: 2880573 - DNA, 25 bp, Homo sapien
ttgtcttgagcatgaatgagacagt

SEQ ID NO: 2880574 - DNA, 25 bp, Homo sapien
actgagtgggactccaccgctgagg

SEQ ID NO: 2880575 - DNA, 25 bp, Homo sapien
agtctgatactgagtgggactccac

SEQ ID NO: 2880576 - DNA, 25 bp, Homo sapien
gtctctgcccgttccccagatagga

SEQ ID NO: 2880577 - DNA, 25 bp, Homo sapien
ccaggacagccaagtctgatactga

SEQ ID NO: 2880578 - DNA, 25 bp, Homo sapien
tgggtggcgggactgccgtgtacac

SEQ ID NO: 2880579 - DNA, 25 bp, Homo sapien
gggtggcgggactgccgtgtacaca

SEQ ID NO: 2880580 - DNA, 25 bp, Homo sapien
ctgggtggcgggactgccgtgtaca

SEQ ID NO: 2880581 - DNA, 25 bp, Homo sapien
ttgtcctgttgacgcgttccacagc

SEQ ID NO: 2880582 - DNA, 25 bp, Homo sapien
ccagtttgtcctgttgacgcgttcc

SEQ ID NO: 2880583 - DNA, 25 bp, Homo sapien
ctgtcaccggaaagctatctcctgg

SEQ ID NO: 2880584 - DNA, 25 bp, Homo sapien
cagctgtcaccggaaagctatctcc

SEQ ID NO: 2880585 - DNA, 25 bp, Homo sapien
atctcacgtcgcaccgtgatgcctg

SEQ ID NO: 2880586 - DNA, 25 bp, Homo sapien
gctgcagagacaagctcgtcggcag

SEQ ID NO: 2880587 - DNA, 25 bp, Homo sapien
cagagacaagctcgtcggcagggca

SEQ ID NO: 2880588 - DNA, 25 bp, Homo sapien
ggctggcgcaggcatctcacgtcgc

SEQ ID NO: 2880589 - DNA, 25 bp, Homo sapien
accaagcaaggtctcgagcttgcag

SEQ ID NO: 2880590 - DNA, 25 bp, Homo sapien
cagtgttgtgtccttgccgaggatg

SEQ ID NO: 2880591 - DNA, 25 bp, Homo sapien
gcaaggtctcgagcttgcagtggtc

SEQ ID NO: 2880592 - DNA, 25 bp, Homo sapien
cctctggggcagtgttgtgtccttg

SEQ ID NO: 2880593 - DNA, 25 bp, Homo sapien
cataaaaggtctcctgtgcccgtat

SEQ ID NO: 2880594 - DNA, 25 bp, Homo sapien
atgtgccgcccgcacgtctggaggc

SEQ ID NO: 2880595 - DNA, 25 bp, Homo sapien
aaggtctcctgtgcccgtatggcca

SEQ ID NO: 2880596 - DNA, 25 bp, Homo sapien
aggcatgtgccgcccgcacgtctgg

SEQ ID NO: 2880597 - DNA, 25 bp, Homo sapien
gaggcagggctgtggacggcttctg

SEQ ID NO: 2880598 - DNA, 25 bp, Homo sapien
gcaaaatagtgaggcactccctggc

SEQ ID NO: 2880599 - DNA, 25 bp, Homo sapien
tcggcatttgcaaaatagtgaggca

SEQ ID NO: 2880600 - DNA, 25 bp, Homo sapien
cagcaggccacagggtcggcatttg

SEQ ID NO: 2880601 - DNA, 25 bp, Homo sapien
tcatgtcttccccaaaatagaagat

SEQ ID NO: 2880602 - DNA, 25 bp, Homo sapien
gggctctcactttcgtaagaagcca

SEQ ID NO: 2880603 - DNA, 25 bp, Homo sapien
gctctcactttcgtaagaagccaaa

SEQ ID NO: 2880604 - DNA, 25 bp, Homo sapien
tctttttctgtttggttctctgggc

SEQ ID NO: 2880605 - DNA, 25 bp, Homo sapien
tgggctctcactttcgtaagaagcc

SEQ ID NO: 2880606 - DNA, 25 bp, Homo sapien
ttgctcgaagggacactccacttgt

SEQ ID NO: 2880607 - DNA, 25 bp, Homo sapien
tagtgggtgatgctggcgtcttgct

SEQ ID NO: 2880608 - DNA, 25 bp, Homo sapien
gggcggtgtacaggtagtgggtgat

SEQ ID NO: 2880609 - DNA, 25 bp, Homo sapien
ggtgatgctggcgtcttgctcgaag

SEQ ID NO: 2880610 - DNA, 25 bp, Homo sapien
aagttgacgtgtccattgggaaggc

SEQ ID NO: 2880611 - DNA, 25 bp, Homo sapien
ctcaaagttgacgtgtccattggga

SEQ ID NO: 2880612 - DNA, 25 bp, Homo sapien
caaagttgacgtgtccattgggaag

SEQ ID NO: 2880613 - DNA, 25 bp, Homo sapien
gttgacgtgtccattgggaaggcgg

SEQ ID NO: 2880614 - DNA, 25 bp, Homo sapien
ctttgatgagcaggctgaagaaagg

SEQ ID NO: 2880615 - DNA, 25 bp, Homo sapien
ccttgcttctgacatgagaagttta

SEQ ID NO: 2880616 - DNA, 25 bp, Homo sapien
agcttggaggtcacccggataagtg

SEQ ID NO: 2880617 - DNA, 25 bp, Homo sapien
ctggtctccctgccctcgcagcagc

SEQ ID NO: 2880618 - DNA, 25 bp, Homo sapien
ccctgccctcgcagcagccaaacag

SEQ ID NO: 2880619 - DNA, 25 bp, Homo sapien
agggagcggtgggccgccccgcgca

SEQ ID NO: 2880620 - DNA, 25 bp, Homo sapien
aattccccgttgggtccatctggtg

SEQ ID NO: 2880621 - DNA, 25 bp, Homo sapien
gcagaaattccccgttgggtccatc

SEQ ID NO: 2880622 - DNA, 25 bp, Homo sapien
ggccgtcagggagcggtgggccgcc

SEQ ID NO: 2880623 - DNA, 25 bp, Homo sapien
tggagacagggctcatgttcatgcc

SEQ ID NO: 2880624 - DNA, 25 bp, Homo sapien
atgaaaaacttggccgtcctcactt

SEQ ID NO: 2880625 - DNA, 25 bp, Homo sapien
cctggagacagggctcatgttcatg

SEQ ID NO: 2880626 - DNA, 25 bp, Homo sapien
ctggagacagggctcatgttcatgc

SEQ ID NO: 2880627 - DNA, 25 bp, Homo sapien
cctctcgggggacccgtgcactggg

SEQ ID NO: 2880628 - DNA, 25 bp, Homo sapien
ctctcgggggacccgtgcactgggg

SEQ ID NO: 2880629 - DNA, 25 bp, Homo sapien
ccatgagggagttgaagttgccgat

SEQ ID NO: 2880630 - DNA, 25 bp, Homo sapien
aagaactcaatcacctgggccctct

SEQ ID NO: 2880631 - DNA, 25 bp, Homo sapien
gggccacgtcgatgaagaactcaat

SEQ ID NO: 2880632 - DNA, 25 bp, Homo sapien
atgaagaactcaatcacctgggccc

SEQ ID NO: 2880633 - DNA, 25 bp, Homo sapien
tcacataagcctccaggttgctggt

SEQ ID NO: 2880634 - DNA, 25 bp, Homo sapien
gcagatctcagttgccaccaggtag

SEQ ID NO: 2880635 - DNA, 25 bp, Homo sapien
tgttgaaccatttcacataagcctc

SEQ ID NO: 2880636 - DNA, 25 bp, Homo sapien
cagatctcagttgccaccaggtagc

SEQ ID NO: 2880637 - DNA, 25 bp, Homo sapien
tcctccctcgctgggtgggtgaccc

SEQ ID NO: 2880638 - DNA, 25 bp, Homo sapien
ctcggttgtcgtggtgcgcccccga

SEQ ID NO: 2880639 - DNA, 25 bp, Homo sapien
actcgggactcggttgtcgtggtgc

SEQ ID NO: 2880640 - DNA, 25 bp, Homo sapien
cacgtccaggctttccggggactcg

SEQ ID NO: 2880641 - DNA, 25 bp, Homo sapien
tggacaaactcctcaggcccgatgt

SEQ ID NO: 2880642 - DNA, 25 bp, Homo sapien
tcaggcccgatgtgccgcagccgct

SEQ ID NO: 2880643 - DNA, 25 bp, Homo sapien
gacaaactcctcaggcccgatgtgc

SEQ ID NO: 2880644 - DNA, 25 bp, Homo sapien
cctcaggcccgatgtgccgcagccg

SEQ ID NO: 2880645 - DNA, 25 bp, Homo sapien
agttccacgtgggtcagctgctggg

SEQ ID NO: 2880646 - DNA, 25 bp, Homo sapien
cttgtcggcacccaccagaccttct

SEQ ID NO: 2880647 - DNA, 25 bp, Homo sapien
ggagatgggcttgtcggcacccacc

SEQ ID NO: 2880648 - DNA, 25 bp, Homo sapien
cagttccacgtgggtcagctgctgg

SEQ ID NO: 2880649 - DNA, 25 bp, Homo sapien
cacctggcaagggatctggggtgaa

SEQ ID NO: 2880650 - DNA, 25 bp, Homo sapien
ccacctggcaagggatctggggtga

SEQ ID NO: 2880651 - DNA, 25 bp, Homo sapien
gccacctggcaagggatctggggtg

SEQ ID NO: 2880652 - DNA, 25 bp, Homo sapien
gctgtcagggaaatgattctgttca

SEQ ID NO: 2880653 - DNA, 25 bp, Homo sapien
ctgtcagggaaatgattctgttcac

SEQ ID NO: 2880654 - DNA, 25 bp, Homo sapien
gagctgtcagggaaatgattctgtt

SEQ ID NO: 2880655 - DNA, 25 bp, Homo sapien
agctgtcagggaaatgattctgttc

SEQ ID NO: 2880656 - DNA, 25 bp, Homo sapien
aatgcgtggataaacaccgccttca

SEQ ID NO: 2880657 - DNA, 25 bp, Homo sapien
tcatgaagggccgtagctggctcac

SEQ ID NO: 2880658 - DNA, 25 bp, Homo sapien
acacagccaactgcgggctgccctg

SEQ ID NO: 2880659 - DNA, 25 bp, Homo sapien
tccaccagcgtctgctgaatgcgtg

SEQ ID NO: 2880660 - DNA, 25 bp, Homo sapien
gacagtcagacgctctctccagcag

SEQ ID NO: 2880661 - DNA, 25 bp, Homo sapien
tgacagtcagacgctctctccagca

SEQ ID NO: 2880662 - DNA, 25 bp, Homo sapien
acagtcagacgctctctccagcagg

SEQ ID NO: 2880663 - DNA, 25 bp, Homo sapien
ctgacagtcagacgctctctccagc

SEQ ID NO: 2880664 - DNA, 25 bp, Homo sapien
cctcagtccctctccagtgctgctc

SEQ ID NO: 2880665 - DNA, 25 bp, Homo sapien
tgggctgccatgacactcctctggg

SEQ ID NO: 2880666 - DNA, 25 bp, Homo sapien
cagggtggcccgatgctgggaaggc

SEQ ID NO: 2880667 - DNA, 25 bp, Homo sapien
gaaccacggtcatggagaatggcct

SEQ ID NO: 2880668 - DNA, 25 bp, Homo sapien
ggctggatttggacgggccgtggtg

SEQ ID NO: 2880669 - DNA, 25 bp, Homo sapien
ttccctcccagctcggcagtgcctg

SEQ ID NO: 2880670 - DNA, 25 bp, Homo sapien
ggagaggtcaccagactccgcgttc

SEQ ID NO: 2880671 - DNA, 25 bp, Homo sapien
cttgataggccagaaagcggctgga

SEQ ID NO: 2880672 - DNA, 25 bp, Homo sapien
ggggtgcgggccgggaacaggcgca

SEQ ID NO: 2880673 - DNA, 25 bp, Homo sapien
ggtgcgggccgggaacaggcgcagg

SEQ ID NO: 2880674 - DNA, 25 bp, Homo sapien
gggtgcgggccgggaacaggcgcag

SEQ ID NO: 2880675 - DNA, 25 bp, Homo sapien
cttgggaaggtctcggtccactcgg

SEQ ID NO: 2880676 - DNA, 25 bp, Homo sapien
gcccgatagtcgactcttcctggaa

SEQ ID NO: 2880677 - DNA, 25 bp, Homo sapien
atgcggcccacgacgtccttaaggt

SEQ ID NO: 2880678 - DNA, 25 bp, Homo sapien
cacgacgtccttaaggtgcccgata

SEQ ID NO: 2880679 - DNA, 25 bp, Homo sapien
gggtgggcacgtgagcctcactgcg

SEQ ID NO: 2880680 - DNA, 25 bp, Homo sapien
tcactgcgcgtccttgcgggtctgg

SEQ ID NO: 2880681 - DNA, 25 bp, Homo sapien
tttctgcggttgacggctccatcct

SEQ ID NO: 2880682 - DNA, 25 bp, Homo sapien
ggggtgcgatcctgctctgcgccca

SEQ ID NO: 2880683 - DNA, 25 bp, Homo sapien
tcgatgaagaggcgagagctcagca

SEQ ID NO: 2880684 - DNA, 25 bp, Homo sapien
tcccggggctcgatgaagaggcgag

SEQ ID NO: 2880685 - DNA, 25 bp, Homo sapien
atgcacaggtggcagacccgggcca

SEQ ID NO: 2880686 - DNA, 25 bp, Homo sapien
ctgctgctgctcgatgcacaggtgg

SEQ ID NO: 2880687 - DNA, 25 bp, Homo sapien
gaggctgaggatggcgctccatcca

SEQ ID NO: 2880688 - DNA, 25 bp, Homo sapien
gcctgttcgccatctgtgggctcgg

SEQ ID NO: 2880689 - DNA, 25 bp, Homo sapien
catgtcggaggcactcagcgtctgt

SEQ ID NO: 2880690 - DNA, 25 bp, Homo sapien
gtgaccatgtcggaggcactcagcg

SEQ ID NO: 2880691 - DNA, 25 bp, Homo sapien
cactttgtgccagcttgagtccagt

SEQ ID NO: 2880692 - DNA, 25 bp, Homo sapien
cacctgagttgggtgcacctgagtg

SEQ ID NO: 2880693 - DNA, 25 bp, Homo sapien
cagtgaggacctgagtgggggcaca

SEQ ID NO: 2880694 - DNA, 25 bp, Homo sapien
gggcacacctgagttgggtgcacct

SEQ ID NO: 2880695 - DNA, 25 bp, Homo sapien
tgcaggacccatctcttgtctactc

SEQ ID NO: 2880696 - DNA, 25 bp, Homo sapien
aggacccatctcttgtctactcctc

SEQ ID NO: 2880697 - DNA, 25 bp, Homo sapien
attctccgtcttctcatggcctctc

SEQ ID NO: 2880698 - DNA, 25 bp, Homo sapien
tcattctccgtcttctcatggcctc

SEQ ID NO: 2880699 - DNA, 25 bp, Homo sapien
cttgaaagcccaggagccctcacag

SEQ ID NO: 2880700 - DNA, 25 bp, Homo sapien
taggccagtcttccttgaaagccca

SEQ ID NO: 2880701 - DNA, 25 bp, Homo sapien
gaaagcccaggagccctcacagtga

SEQ ID NO: 2880702 - DNA, 25 bp, Homo sapien
tctaggccagtcttccttgaaagcc

SEQ ID NO: 2880703 - DNA, 25 bp, Homo sapien
tgcggatggtgggaatgacattcac

SEQ ID NO: 2880704 - DNA, 25 bp, Homo sapien
ggctctgggaacacctgaactgatt

SEQ ID NO: 2880705 - DNA, 25 bp, Homo sapien
agaaatgagtcgctgctgtgccctc

SEQ ID NO: 2880706 - DNA, 25 bp, Homo sapien
tagagtcattcgtccaagctgaagt

SEQ ID NO: 2880707 - DNA, 25 bp, Homo sapien
tccttgtgtgtgtctccaggccctg

SEQ ID NO: 2880708 - DNA, 25 bp, Homo sapien
ggcatctctccttgtgtgtgtctcc

SEQ ID NO: 2880709 - DNA, 25 bp, Homo sapien
ctccttgtgtgtgtctccaggccct

SEQ ID NO: 2880710 - DNA, 25 bp, Homo sapien
tcaggcatctctccttgtgtgtgtc

SEQ ID NO: 2880711 - DNA, 25 bp, Homo sapien
tcctgcagcagttcaagagacagca

SEQ ID NO: 2880712 - DNA, 25 bp, Homo sapien
ctcctgcagcagttcaagagacagc

SEQ ID NO: 2880713 - DNA, 25 bp, Homo sapien
ccgctggcgctggcaaagtttctgg

SEQ ID NO: 2880714 - DNA, 25 bp, Homo sapien
gcgctggcaaagtttctgggacagc

SEQ ID NO: 2880715 - DNA, 25 bp, Homo sapien
tggcgctggcaaagtttctgggaca

SEQ ID NO: 2880716 - DNA, 25 bp, Homo sapien
gctggcgctggcaaagtttctggga

SEQ ID NO: 2880717 - DNA, 25 bp, Homo sapien
gccaaaaagacttgccaactgcacc

SEQ ID NO: 2880718 - DNA, 25 bp, Homo sapien
aggccagcactcgccacggggagct

SEQ ID NO: 2880719 - DNA, 25 bp, Homo sapien
actgctgttaaccaaggctctgtgt

SEQ ID NO: 2880720 - DNA, 25 bp, Homo sapien
acctgctagggccagaccacaacac

SEQ ID NO: 2880721 - DNA, 25 bp, Homo sapien
catagaattggttccgtgacaggat

SEQ ID NO: 2880722 - DNA, 25 bp, Homo sapien
aggatgtaattaccccacccctgag

SEQ ID NO: 2880723 - DNA, 25 bp, Homo sapien
tcacgcttcgagcatggctgctgct

SEQ ID NO: 2880724 - DNA, 25 bp, Homo sapien
cgtttcaagacccagatcagaggag

SEQ ID NO: 2880725 - DNA, 25 bp, Homo sapien
ccgaggaccccttttatgtgatgac

SEQ ID NO: 2880726 - DNA, 25 bp, Homo sapien
tatcctacttggttcactgggtttc

SEQ ID NO: 2880727 - DNA, 25 bp, Homo sapien
ctgggtttcctggatgtttatattc

SEQ ID NO: 2880728 - DNA, 25 bp, Homo sapien
tcttgctgctctcaatattctctat

SEQ ID NO: 2880729 - DNA, 25 bp, Homo sapien
caagggtcaaatgggcctctttgct

SEQ ID NO: 2880730 - DNA, 25 bp, Homo sapien
gcactgttgcaagggtcaaatgggc

SEQ ID NO: 2880731 - DNA, 25 bp, Homo sapien
ggcctctttgcttgggactacctct

SEQ ID NO: 2880732 - DNA, 25 bp, Homo sapien
tttgcttgggactacctctgctggc

SEQ ID NO: 2880733 - DNA, 25 bp, Homo sapien
aactcctgctgacagatcccgctgt

SEQ ID NO: 2880734 - DNA, 25 bp, Homo sapien
tgggctccatatggccttcaactcc

SEQ ID NO: 2880735 - DNA, 25 bp, Homo sapien
cttcaggagggcaacgcgcttggct

SEQ ID NO: 2880736 - DNA, 25 bp, Homo sapien
cctgagttatttttgggctccatat

SEQ ID NO: 2880737 - DNA, 25 bp, Homo sapien
gcccacgttctcaattacgtcctga

SEQ ID NO: 2880738 - DNA, 25 bp, Homo sapien
tcttggcccacgttctcaattacgt

SEQ ID NO: 2880739 - DNA, 25 bp, Homo sapien
tcaattacgtcctgagaacatactt

SEQ ID NO: 2880740 - DNA, 25 bp, Homo sapien
cacgttctcaattacgtcctgagaa

SEQ ID NO: 2880741 - DNA, 25 bp, Homo sapien
cccacgggtgtacttcattgaggtt

SEQ ID NO: 2880742 - DNA, 25 bp, Homo sapien
tcattgaggtttcaggaggggccaa

SEQ ID NO: 2880743 - DNA, 25 bp, Homo sapien
ttgaggtttcaggaggggccaagtg

SEQ ID NO: 2880744 - DNA, 25 bp, Homo sapien
acgggtgtacttcattgaggtttca

SEQ ID NO: 2880745 - DNA, 25 bp, Homo sapien
gggcctccagactggacaccctctg

SEQ ID NO: 2880746 - DNA, 25 bp, Homo sapien
cttccatgtgcagttggcctctggg

SEQ ID NO: 2880747 - DNA, 25 bp, Homo sapien
tggacaccctctgctccaggtgcct

SEQ ID NO: 2880748 - DNA, 25 bp, Homo sapien
ccagactggacaccctctgctccag

SEQ ID NO: 2880749 - DNA, 25 bp, Homo sapien
acacaggccagcctgtgctcaggac

SEQ ID NO: 2880750 - DNA, 25 bp, Homo sapien
attcacacaggccagcctgtgctca

SEQ ID NO: 2880751 - DNA, 25 bp, Homo sapien
ttccccattcacacaggccagcctg

SEQ ID NO: 2880752 - DNA, 25 bp, Homo sapien
acataggggcccatttccccattca

SEQ ID NO: 2880753 - DNA, 25 bp, Homo sapien
gacctgacgcgagctctgtggtcct

SEQ ID NO: 2880754 - DNA, 25 bp, Homo sapien
catcgccgtggcgtcttgaggacct

SEQ ID NO: 2880755 - DNA, 25 bp, Homo sapien
gcgtcttgaggacctgacgcgagct

SEQ ID NO: 2880756 - DNA, 25 bp, Homo sapien
ttgaggacctgacgcgagctctgtg

SEQ ID NO: 2880757 - DNA, 25 bp, Homo sapien
tagcggtaggttttgtgaaaatgcc

SEQ ID NO: 2880758 - DNA, 25 bp, Homo sapien
aatggacagtcaacttgttcctgat

SEQ ID NO: 2880759 - DNA, 25 bp, Homo sapien
gacttccagtaggatactgatagga

SEQ ID NO: 2880760 - DNA, 25 bp, Homo sapien
cccttctgtacctagtttgtgagga

SEQ ID NO: 2880761 - DNA, 25 bp, Homo sapien
cgtgaccactgctccacacggcact

SEQ ID NO: 2880762 - DNA, 25 bp, Homo sapien
ttgcctgttcctgctcgcggctgca

SEQ ID NO: 2880763 - DNA, 25 bp, Homo sapien
gctgcaccccagcactagagcaggt

SEQ ID NO: 2880764 - DNA, 25 bp, Homo sapien
cttccgtgaccactgctccacacgg

SEQ ID NO: 2880765 - DNA, 25 bp, Homo sapien
tgatggcccccgggatgcgggaggg

SEQ ID NO: 2880766 - DNA, 25 bp, Homo sapien
ggaggggaccaagccgggcagcagg

SEQ ID NO: 2880767 - DNA, 25 bp, Homo sapien
tgagtgagtgaatgatggcccccgg

SEQ ID NO: 2880768 - DNA, 25 bp, Homo sapien
tgagtgaatgatggcccccgggatg

SEQ ID NO: 2880769 - DNA, 25 bp, Homo sapien
ttcacctaaaggtaggccaggcagg

SEQ ID NO: 2880770 - DNA, 25 bp, Homo sapien
cacctaaaggtaggccaggcaggac

SEQ ID NO: 2880771 - DNA, 25 bp, Homo sapien
gattcacctaaaggtaggccaggca

SEQ ID NO: 2880772 - DNA, 25 bp, Homo sapien
ccgattcacctaaaggtaggccagg

SEQ ID NO: 2880773 - DNA, 25 bp, Homo sapien
actttaacaaattcgtcatcgtctt

SEQ ID NO: 2880774 - DNA, 25 bp, Homo sapien
aactttaacaaattcgtcatcgtct

SEQ ID NO: 2880775 - DNA, 25 bp, Homo sapien
ctttaacaaattcgtcatcgtcttt

SEQ ID NO: 2880776 - DNA, 25 bp, Homo sapien
tgcctgcgcaatctgcccggctggg

SEQ ID NO: 2880777 - DNA, 25 bp, Homo sapien
ttcggtgagtgcctgcgcaatctgc

SEQ ID NO: 2880778 - DNA, 25 bp, Homo sapien
cagcaaaagctcttcggtgagtgcc

SEQ ID NO: 2880779 - DNA, 25 bp, Homo sapien
cacaggctgttcatcggctccattt

SEQ ID NO: 2880780 - DNA, 25 bp, Homo sapien
tgaaaacagagcccatttgtccttc

SEQ ID NO: 2880781 - DNA, 25 bp, Homo sapien
gaaaacagagcccatttgtccttcc

SEQ ID NO: 2880782 - DNA, 25 bp, Homo sapien
ggtgacttgtctgagatgagggagg

SEQ ID NO: 2880783 - DNA, 25 bp, Homo sapien
gggtgacttgtctgagatgagggag

SEQ ID NO: 2880784 - DNA, 25 bp, Homo sapien
ctgggtgacttgtctgagatgaggg

SEQ ID NO: 2880785 - DNA, 25 bp, Homo sapien
tgggtgacttgtctgagatgaggga

SEQ ID NO: 2880786 - DNA, 25 bp, Homo sapien
gtgggaggtaagagcagcaggaagc

SEQ ID NO: 2880787 - DNA, 25 bp, Homo sapien
gggtggtgggaggtaagagcagcag

SEQ ID NO: 2880788 - DNA, 25 bp, Homo sapien
gtggtgggaggtaagagcagcagga

SEQ ID NO: 2880789 - DNA, 25 bp, Homo sapien
tggtgggaggtaagagcagcaggaa

SEQ ID NO: 2880790 - DNA, 25 bp, Homo sapien
tgcctgcaggatggcgaccagggcg

SEQ ID NO: 2880791 - DNA, 25 bp, Homo sapien
ccagggcggtggagcgtgctgagtg

SEQ ID NO: 2880792 - DNA, 25 bp, Homo sapien
ttgacaggaaaatcgggaaatggct

SEQ ID NO: 2880793 - DNA, 25 bp, Homo sapien
cttctccgaggattccgaaccagcc

SEQ ID NO: 2880794 - DNA, 25 bp, Homo sapien
ggcccacgctggcattggtggggtg

SEQ ID NO: 2880795 - DNA, 25 bp, Homo sapien
cattggtggggtgagggctcaggga

SEQ ID NO: 2880796 - DNA, 25 bp, Homo sapien
gggcccacgctggcattggtggggt

SEQ ID NO: 2880797 - DNA, 25 bp, Homo sapien
gcccacgctggcattggtggggtga

SEQ ID NO: 2880798 - DNA, 25 bp, Homo sapien
cagaggtgggaccccagcgttgcca

SEQ ID NO: 2880799 - DNA, 25 bp, Homo sapien
ccggtgcgagcctcggcgccgcgga

SEQ ID NO: 2880800 - DNA, 25 bp, Homo sapien
tgatagttgcaaggacagcctgcgg

SEQ ID NO: 2880801 - DNA, 25 bp, Homo sapien
agttgcaaggacagcctgcggctgc

SEQ ID NO: 2880802 - DNA, 25 bp, Homo sapien
gcacagctgcctgatagttgcaagg

SEQ ID NO: 2880803 - DNA, 25 bp, Homo sapien
atagttgcaaggacagcctgcggct

SEQ ID NO: 2880804 - DNA, 25 bp, Homo sapien
gcagacagcacctgctgggactgtg

SEQ ID NO: 2880805 - DNA, 25 bp, Homo sapien
gcgaggagccccttcacagcagaca

SEQ ID NO: 2880806 - DNA, 25 bp, Homo sapien
aggagggcgaggagccccttcacag

SEQ ID NO: 2880807 - DNA, 25 bp, Homo sapien
agggcgaggagccccttcacagcag

SEQ ID NO: 2880808 - DNA, 25 bp, Homo sapien
ctggcatgagcagtcccaagtggcc

SEQ ID NO: 2880809 - DNA, 25 bp, Homo sapien
tgcaggcacgggaagcacctcccga

SEQ ID NO: 2880810 - DNA, 25 bp, Homo sapien
aacttgtgactcgatggggccgtca

SEQ ID NO: 2880811 - DNA, 25 bp, Homo sapien
agagtgaaatctgcaggcacgggaa

SEQ ID NO: 2880812 - DNA, 25 bp, Homo sapien
cctccctggttagctatactcttag

SEQ ID NO: 2880813 - DNA, 25 bp, Homo sapien
cataaacatgttgttttgtgtcatc

SEQ ID NO: 2880814 - DNA, 25 bp, Homo sapien
tgggcagtggtttgtgattatcact

SEQ ID NO: 2880815 - DNA, 25 bp, Homo sapien
ttatcactgtaaagaactctcacct

SEQ ID NO: 2880816 - DNA, 25 bp, Homo sapien
ttattacatgggtggagactgaaag

SEQ ID NO: 2880817 - DNA, 25 bp, Homo sapien
tattacatgggtggagactgaaagg

SEQ ID NO: 2880818 - DNA, 25 bp, Homo sapien
tttattacatgggtggagactgaaa

SEQ ID NO: 2880819 - DNA, 25 bp, Homo sapien
agatagaactctgactcctcgccct

SEQ ID NO: 2880820 - DNA, 25 bp, Homo sapien
cttgatgcgatgcacgcaggaagct

SEQ ID NO: 2880821 - DNA, 25 bp, Homo sapien
ccttgatgcgatgcacgcaggaagc

SEQ ID NO: 2880822 - DNA, 25 bp, Homo sapien
ctcaggaatcagtttggcccctttc

SEQ ID NO: 2880823 - DNA, 25 bp, Homo sapien
tcaggaatcagtttggcccctttct

SEQ ID NO: 2880824 - DNA, 25 bp, Homo sapien
caggaatcagtttggcccctttctt

SEQ ID NO: 2880825 - DNA, 25 bp, Homo sapien
tgtcaatgagtgtgatgcagctcct

SEQ ID NO: 2880826 - DNA, 25 bp, Homo sapien
cggtacggaccagttcattcttgga

SEQ ID NO: 2880827 - DNA, 25 bp, Homo sapien
tcttggacacattgtcgacagcgtc

SEQ ID NO: 2880828 - DNA, 25 bp, Homo sapien
tacttccacttctcgtcgttgggcg

SEQ ID NO: 2880829 - DNA, 25 bp, Homo sapien
tgtttctcctcatggtactgtcaat

SEQ ID NO: 2880830 - DNA, 25 bp, Homo sapien
tgctcacggaccttaactctttttg

SEQ ID NO: 2880831 - DNA, 25 bp, Homo sapien
ccagtcttctagttattcgctcctt

SEQ ID NO: 2880832 - DNA, 25 bp, Homo sapien
cacgcacacagagttatatattata

SEQ ID NO: 2880833 - DNA, 25 bp, Homo sapien
caagatccttaaggacatgacaacc

SEQ ID NO: 2880834 - DNA, 25 bp, Homo sapien
tggttccatggtggataacaagatc

SEQ ID NO: 2880835 - DNA, 25 bp, Homo sapien
catgacaaccagaaatcgggcacta

SEQ ID NO: 2880836 - DNA, 25 bp, Homo sapien
cctgcctggcgctgtaagttggttc

SEQ ID NO: 2880837 - DNA, 25 bp, Homo sapien
actgcctgaaggcactgctctcaag

SEQ ID NO: 2880838 - DNA, 25 bp, Homo sapien
tgcctgaaggcactgctctcaaggc

SEQ ID NO: 2880839 - DNA, 25 bp, Homo sapien
ctgaaggcactgctctcaaggctgt

SEQ ID NO: 2880840 - DNA, 25 bp, Homo sapien
cctgaaggcactgctctcaaggctg

SEQ ID NO: 2880841 - DNA, 25 bp, Homo sapien
tttcttggaagaaggtcacagatgt

SEQ ID NO: 2880842 - DNA, 25 bp, Homo sapien
tgcctctcagtgtgaaacctcttgc

SEQ ID NO: 2880843 - DNA, 25 bp, Homo sapien
gccacaagcaccatgaatgacgtta

SEQ ID NO: 2880844 - DNA, 25 bp, Homo sapien
tgactggtgaattctcctggccacg

SEQ ID NO: 2880845 - DNA, 25 bp, Homo sapien
cacagacgtcagatgaacttggctc

SEQ ID NO: 2880846 - DNA, 25 bp, Homo sapien
cattaaatgcgggttgaagcagcac

SEQ ID NO: 2880847 - DNA, 25 bp, Homo sapien
ggaaataccagaggagtcacattag

SEQ ID NO: 2880848 - DNA, 25 bp, Homo sapien
cagacagactcgtacgtggttatcg

SEQ ID NO: 2880849 - DNA, 25 bp, Homo sapien
agcagcacccgctccgtgtttcaga

SEQ ID NO: 2880850 - DNA, 25 bp, Homo sapien
tgacacggtatgcacagccagggtt

SEQ ID NO: 2880851 - DNA, 25 bp, Homo sapien
gacagtcgtttccttcttggctgga

SEQ ID NO: 2880852 - DNA, 25 bp, Homo sapien
aagaccctggcaaatctaggctcag

SEQ ID NO: 2880853 - DNA, 25 bp, Homo sapien
ttgaaaccatttgcgtggcaccaag

SEQ ID NO: 2880854 - DNA, 25 bp, Homo sapien
gtggaagatggcctttccaggaaac

SEQ ID NO: 2880855 - DNA, 25 bp, Homo sapien
ggtggaagatggcctttccaggaaa

SEQ ID NO: 2880856 - DNA, 25 bp, Homo sapien
ggctccatctgtggcaagtggctcg

SEQ ID NO: 2880857 - DNA, 25 bp, Homo sapien
gcacagaggagcgagtgagcagaag

SEQ ID NO: 2880858 - DNA, 25 bp, Homo sapien
agtgagcagaagggcgtctgcgggt

SEQ ID NO: 2880859 - DNA, 25 bp, Homo sapien
gtctgcgggtgcctcgtcccccgtc

SEQ ID NO: 2880860 - DNA, 25 bp, Homo sapien
gcgtctgcgggtgcctcgtcccccg

SEQ ID NO: 2880861 - DNA, 25 bp, Homo sapien
cagaatgtcgactgaaaagcttcca

SEQ ID NO: 2880862 - DNA, 25 bp, Homo sapien
aaatcaagaacgtggtattggccga

SEQ ID NO: 2880863 - DNA, 25 bp, Homo sapien
ggtgtttccgcctcaatccaagtta

SEQ ID NO: 2880864 - DNA, 25 bp, Homo sapien
aattccactccaacgttaggccatg

SEQ ID NO: 2880865 - DNA, 25 bp, Homo sapien
taactgctcacctgaaatgatcttg

SEQ ID NO: 2880866 - DNA, 25 bp, Homo sapien
aaagtgctagatgggcaagtccaag

SEQ ID NO: 2880867 - DNA, 25 bp, Homo sapien
tgagagttccttcaatgctgacagg

SEQ ID NO: 2880868 - DNA, 25 bp, Homo sapien
caaaatctctagaagtgtggcttgc

SEQ ID NO: 2880869 - DNA, 25 bp, Homo sapien
gggtcccgtcgaggcatcaagactg

SEQ ID NO: 2880870 - DNA, 25 bp, Homo sapien
gaaatgtcattgatcgatgaagact

SEQ ID NO: 2880871 - DNA, 25 bp, Homo sapien
catcaagactgctgtctgtgtctga

SEQ ID NO: 2880872 - DNA, 25 bp, Homo sapien
ggccagcgtctgctcagtggacatg

SEQ ID NO: 2880873 - DNA, 25 bp, Homo sapien
catttctcggctctgtccttttgca

SEQ ID NO: 2880874 - DNA, 25 bp, Homo sapien
gacattgctgcaaatccaggcagcg

SEQ ID NO: 2880875 - DNA, 25 bp, Homo sapien
ctgaggcacgacattgctgcaaatc

SEQ ID NO: 2880876 - DNA, 25 bp, Homo sapien
gccatttctcggctctgtccttttg

SEQ ID NO: 2880877 - DNA, 25 bp, Homo sapien
tcagttaacaagcacctaagttctt

SEQ ID NO: 2880878 - DNA, 25 bp, Homo sapien
gctgaagttatataatctctagatg

SEQ ID NO: 2880879 - DNA, 25 bp, Homo sapien
tagatgcttgacacatacgtcatgt

SEQ ID NO: 2880880 - DNA, 25 bp, Homo sapien
gacacatacgtcatgttgaacataa

SEQ ID NO: 2880881 - DNA, 25 bp, Homo sapien
tgggaccagtacaaagggttatcaa

SEQ ID NO: 2880882 - DNA, 25 bp, Homo sapien
caaaaaggctggctattcatacagc

SEQ ID NO: 2880883 - DNA, 25 bp, Homo sapien
ccaggctggcatttcacatgttgct

SEQ ID NO: 2880884 - DNA, 25 bp, Homo sapien
tttaaatctgatgctagccaggctg

SEQ ID NO: 2880885 - DNA, 25 bp, Homo sapien
tgatcttttacaacaccattcttgc

SEQ ID NO: 2880886 - DNA, 25 bp, Homo sapien
tcccaatccatgacttctttgtaaa

SEQ ID NO: 2880887 - DNA, 25 bp, Homo sapien
ctgaaggctgatcttttacaacacc

SEQ ID NO: 2880888 - DNA, 25 bp, Homo sapien
tccatgacttctttgtaaattagct

SEQ ID NO: 2880889 - DNA, 25 bp, Homo sapien
tgggcatcataaatttgaggtggtg

SEQ ID NO: 2880890 - DNA, 25 bp, Homo sapien
caactgggcatcataaatttgaggt

SEQ ID NO: 2880891 - DNA, 25 bp, Homo sapien
tctttcttccaactgggcatcataa

SEQ ID NO: 2880892 - DNA, 25 bp, Homo sapien
cttccaactgggcatcataaatttg

SEQ ID NO: 2880893 - DNA, 25 bp, Homo sapien
tggagactggtagcaccaaagcgga

SEQ ID NO: 2880894 - DNA, 25 bp, Homo sapien
tggcctttctgtaactgggagcccc

SEQ ID NO: 2880895 - DNA, 25 bp, Homo sapien
aagagcaagcgacccaggtctcaga

SEQ ID NO: 2880896 - DNA, 25 bp, Homo sapien
cattcccgaggtactctgagctggg

SEQ ID NO: 2880897 - DNA, 25 bp, Homo sapien
ccaaggaaatataagcctggcctct

SEQ ID NO: 2880898 - DNA, 25 bp, Homo sapien
ctggacggacagacaagatccaagg

SEQ ID NO: 2880899 - DNA, 25 bp, Homo sapien
gacggacagacaagatccaaggaaa

SEQ ID NO: 2880900 - DNA, 25 bp, Homo sapien
caaggaaatataagcctggcctctc

SEQ ID NO: 2880901 - DNA, 25 bp, Homo sapien
caaacagtgatgtatgggtgacgca

SEQ ID NO: 2880902 - DNA, 25 bp, Homo sapien
ttcggcggggtcataccaaacagtg

SEQ ID NO: 2880903 - DNA, 25 bp, Homo sapien
gcttcgtctacagagatccgcttgt

SEQ ID NO: 2880904 - DNA, 25 bp, Homo sapien
catttttgataacagatctctggct

SEQ ID NO: 2880905 - DNA, 25 bp, Homo sapien
gaggaaggacctttttcatcgaaca

SEQ ID NO: 2880906 - DNA, 25 bp, Homo sapien
agtgccttcgtacctcagacttcag

SEQ ID NO: 2880907 - DNA, 25 bp, Homo sapien
cacagtttaccttcatgcggacaga

SEQ ID NO: 2880908 - DNA, 25 bp, Homo sapien
acaacctgaataagcaaagactggg

SEQ ID NO: 2880909 - DNA, 25 bp, Homo sapien
tattttgtctcgctcagattctgat

SEQ ID NO: 2880910 - DNA, 25 bp, Homo sapien
atgggaatatccaatctggaaagag

SEQ ID NO: 2880911 - DNA, 25 bp, Homo sapien
aatttgattccaggatactttggtc

SEQ ID NO: 2880912 - DNA, 25 bp, Homo sapien
ggtctgttttcgacataattcctca

SEQ ID NO: 2880913 - DNA, 25 bp, Homo sapien
tgtattcacagtacatgcggcagca

SEQ ID NO: 2880914 - DNA, 25 bp, Homo sapien
tatttaaacctatcgactaggccac

SEQ ID NO: 2880915 - DNA, 25 bp, Homo sapien
catgcggcagcatcacttgaataat

SEQ ID NO: 2880916 - DNA, 25 bp, Homo sapien
accccactggatcagcagcggaatt

SEQ ID NO: 2880917 - DNA, 25 bp, Homo sapien
caccttcccactctagttcaaaata

SEQ ID NO: 2880918 - DNA, 25 bp, Homo sapien
ttataactaagaatacctatagcaa

SEQ ID NO: 2880919 - DNA, 25 bp, Homo sapien
aaatgattaaacacgaaattagata

SEQ ID NO: 2880920 - DNA, 25 bp, Homo sapien
caacacaatgaagtctacacacctt

SEQ ID NO: 2880921 - DNA, 25 bp, Homo sapien
gctcactgaggcatgtcttagaaaa

SEQ ID NO: 2880922 - DNA, 25 bp, Homo sapien
cctagggaactggtacatgaactca

SEQ ID NO: 2880923 - DNA, 25 bp, Homo sapien
tacatcaccatgaaataacctaggg

SEQ ID NO: 2880924 - DNA, 25 bp, Homo sapien
caaaagacccgctcaggaaatgtgt

SEQ ID NO: 2880925 - DNA, 25 bp, Homo sapien
ctcaaacatactcccatcaggcttt

SEQ ID NO: 2880926 - DNA, 25 bp, Homo sapien
ctctcaaacatactcccatcaggct

SEQ ID NO: 2880927 - DNA, 25 bp, Homo sapien
ttctctcaaacatactcccatcagg

SEQ ID NO: 2880928 - DNA, 25 bp, Homo sapien
ttttctctcaaacatactcccatca

SEQ ID NO: 2880929 - DNA, 25 bp, Homo sapien
ctaaaatgcaccaaaaagtactcac

SEQ ID NO: 2880930 - DNA, 25 bp, Homo sapien
tactaaaatgcaccaaaaagtactc

SEQ ID NO: 2880931 - DNA, 25 bp, Homo sapien
aaaatgcaccaaaaagtactcacat

SEQ ID NO: 2880932 - DNA, 25 bp, Homo sapien
aatgcaccaaaaagtactcacattt

SEQ ID NO: 2880933 - DNA, 25 bp, Homo sapien
gactttgtcctcgtgagcgctcgtg

SEQ ID NO: 2880934 - DNA, 25 bp, Homo sapien
cgctcgtgtaagcaggtggtcatgc

SEQ ID NO: 2880935 - DNA, 25 bp, Homo sapien
cacagtctggagtggattttacgac

SEQ ID NO: 2880936 - DNA, 25 bp, Homo sapien
gaatgaaattgaaccacttggcttg

SEQ ID NO: 2880937 - DNA, 25 bp, Homo sapien
cccatgatgcaacccactgaccaga

SEQ ID NO: 2880938 - DNA, 25 bp, Homo sapien
cttggaatatcacacaacctttcac

SEQ ID NO: 2880939 - DNA, 25 bp, Homo sapien
tgccttggaatatcacacaaccttt

SEQ ID NO: 2880940 - DNA, 25 bp, Homo sapien
accagctctcccatgatgcaaccca

SEQ ID NO: 2880941 - DNA, 25 bp, Homo sapien
ctagctaagggtgacattttacaca

SEQ ID NO: 2880942 - DNA, 25 bp, Homo sapien
gattgctgacctctattttagcctt

SEQ ID NO: 2880943 - DNA, 25 bp, Homo sapien
atgattgctgacctctattttagcc

SEQ ID NO: 2880944 - DNA, 25 bp, Homo sapien
aaaataaattgctagctaagggtga

SEQ ID NO: 2880945 - DNA, 25 bp, Homo sapien
gcctccatggccaagtaccgggtcc

SEQ ID NO: 2880946 - DNA, 25 bp, Homo sapien
ggactttatggaggaccatttctgc

SEQ ID NO: 2880947 - DNA, 25 bp, Homo sapien
tgccatgatgcacccgacagaccag

SEQ ID NO: 2880948 - DNA, 25 bp, Homo sapien
actttatggaggaccatttctgcca

SEQ ID NO: 2880949 - DNA, 25 bp, Homo sapien
tttatggaggaccatttctgccatg

SEQ ID NO: 2880950 - DNA, 25 bp, Homo sapien
tggcggcacaggctggctggcttgc

SEQ ID NO: 2880951 - DNA, 25 bp, Homo sapien
ggctggctggcttgcaggactgcag

SEQ ID NO: 2880952 - DNA, 25 bp, Homo sapien
ttgcaggactgcaggtgaggccctg

SEQ ID NO: 2880953 - DNA, 25 bp, Homo sapien
cttgcaggactgcaggtgaggccct

SEQ ID NO: 2880954 - DNA, 25 bp, Homo sapien
aaaaaactcgagaccaccgctagag

SEQ ID NO: 2880955 - DNA, 25 bp, Homo sapien
cctcttccagccccggctatactca

SEQ ID NO: 2880956 - DNA, 25 bp, Homo sapien
ccaccgctagagcaatttctaaaca

SEQ ID NO: 2880957 - DNA, 25 bp, Homo sapien
gagaaaaaactcgagaccaccgcta

SEQ ID NO: 2880958 - DNA, 25 bp, Homo sapien
agcccatacccaggatgacttcggg

SEQ ID NO: 2880959 - DNA, 25 bp, Homo sapien
tcgggcgcccggtagtaccgtgtca

SEQ ID NO: 2880960 - DNA, 25 bp, Homo sapien
cacaacaatgttgctaggcttcaaa

SEQ ID NO: 2880961 - DNA, 25 bp, Homo sapien
catgaagttagtgcacgctgtccgg

SEQ ID NO: 2880962 - DNA, 25 bp, Homo sapien
acaaagacacgccagcactggtgct

SEQ ID NO: 2880963 - DNA, 25 bp, Homo sapien
cttcgccacaaagacacgccagcac

SEQ ID NO: 2880964 - DNA, 25 bp, Homo sapien
gccacaaagacacgccagcactggt

SEQ ID NO: 2880965 - DNA, 25 bp, Homo sapien
tcgccacaaagacacgccagcactg

SEQ ID NO: 2880966 - DNA, 25 bp, Homo sapien
tagtagatgtcccagatccccatct

SEQ ID NO: 2880967 - DNA, 25 bp, Homo sapien
gtagtagatgtcccagatccccatc

SEQ ID NO: 2880968 - DNA, 25 bp, Homo sapien
gcccttcacgcagagaaactgatgc

SEQ ID NO: 2880969 - DNA, 25 bp, Homo sapien
gactgagagcgcagtacctggctgt

SEQ ID NO: 2880970 - DNA, 25 bp, Homo sapien
ttaaaacaatgtattcttgcgcagt

SEQ ID NO: 2880971 - DNA, 25 bp, Homo sapien
gcagtatctgactgagagcgcagta

SEQ ID NO: 2880972 - DNA, 25 bp, Homo sapien
tcttgcgcagtatctgactgagagc

SEQ ID NO: 2880973 - DNA, 25 bp, Homo sapien
atgatccagctccatgtgaataacc

SEQ ID NO: 2880974 - DNA, 25 bp, Homo sapien
ccagctccatgtgaataacctgaca

SEQ ID NO: 2880975 - DNA, 25 bp, Homo sapien
gctccatgtgaataacctgacataa

SEQ ID NO: 2880976 - DNA, 25 bp, Homo sapien
gatccagctccatgtgaataacctg

SEQ ID NO: 2880977 - DNA, 25 bp, Homo sapien
gcatccattaattccataaccaaat

SEQ ID NO: 2880978 - DNA, 25 bp, Homo sapien
ttagcatccattaattccataacca

SEQ ID NO: 2880979 - DNA, 25 bp, Homo sapien
atccattaattccataaccaaatac

SEQ ID NO: 2880980 - DNA, 25 bp, Homo sapien
tagcatccattaattccataaccaa

SEQ ID NO: 2880981 - DNA, 25 bp, Homo sapien
acatcttgaaattcttctagagttt

SEQ ID NO: 2880982 - DNA, 25 bp, Homo sapien
attcttctagagttttttgtggtgt

SEQ ID NO: 2880983 - DNA, 25 bp, Homo sapien
tggtgtaaacacatttaacaaacta

SEQ ID NO: 2880984 - DNA, 25 bp, Homo sapien
tctagagttttttgtggtgtaaaca

SEQ ID NO: 2880985 - DNA, 25 bp, Homo sapien
tccttagcttatcctaggtctgaac

SEQ ID NO: 2880986 - DNA, 25 bp, Homo sapien
taggtctgaactcaatgtatctcca

SEQ ID NO: 2880987 - DNA, 25 bp, Homo sapien
aaccctgaagattaccacattattg

SEQ ID NO: 2880988 - DNA, 25 bp, Homo sapien
ccaatgttaatagccatttttatcc

SEQ ID NO: 2880989 - DNA, 25 bp, Homo sapien
atgagtttggttctgaaaaggacgg

SEQ ID NO: 2880990 - DNA, 25 bp, Homo sapien
tgattgacacattttaagaggacaa

SEQ ID NO: 2880991 - DNA, 25 bp, Homo sapien
cacgataagctctctttgcatgagt

SEQ ID NO: 2880992 - DNA, 25 bp, Homo sapien
aaggacggcttagtttcttgactgc

SEQ ID NO: 2880993 - DNA, 25 bp, Homo sapien
tcattcaaggtacttgcacatatga

SEQ ID NO: 2880994 - DNA, 25 bp, Homo sapien
catatgaagagcagagtgagttgtc

SEQ ID NO: 2880995 - DNA, 25 bp, Homo sapien
gcacaatccattagaacggttttgg

SEQ ID NO: 2880996 - DNA, 25 bp, Homo sapien
tggaaaatacagcaatgccagaata

SEQ ID NO: 2880997 - DNA, 25 bp, Homo sapien
tgtgtttttttcacaaataacagta

SEQ ID NO: 2880998 - DNA, 25 bp, Homo sapien
tggcaaggcactgcaatgatggcgc

SEQ ID NO: 2880999 - DNA, 25 bp, Homo sapien
catgcaagagactaacgttcagggt

SEQ ID NO: 2881000 - DNA, 25 bp, Homo sapien
ggctgaccgtcttaccatgcaagag

SEQ ID NO: 2881001 - DNA, 25 bp, Homo sapien
taacgattctgacgttctgggctgg

SEQ ID NO: 2881002 - DNA, 25 bp, Homo sapien
gacagtgaaggttgagtctgccact

SEQ ID NO: 2881003 - DNA, 25 bp, Homo sapien
acgttttaggacagtgaaggttgag

SEQ ID NO: 2881004 - DNA, 25 bp, Homo sapien
tttcagctgctggtaacgttttagg

SEQ ID NO: 2881005 - DNA, 25 bp, Homo sapien
gagtctgccacttgcacactataaa

SEQ ID NO: 2881006 - DNA, 25 bp, Homo sapien
tgcaatatcccgaagggtgggcaag

SEQ ID NO: 2881007 - DNA, 25 bp, Homo sapien
ctgcaatatcccgaagggtgggcaa

SEQ ID NO: 2881008 - DNA, 25 bp, Homo sapien
tatcccgaagggtgggcaagtttca

SEQ ID NO: 2881009 - DNA, 25 bp, Homo sapien
caatatcccgaagggtgggcaagtt

SEQ ID NO: 2881010 - DNA, 25 bp, Homo sapien
tagcaaaagatatgccatagtcagc

SEQ ID NO: 2881011 - DNA, 25 bp, Homo sapien
aaagatatgccatagtcagctagca

SEQ ID NO: 2881012 - DNA, 25 bp, Homo sapien
ctttatgcacgaaagtggtaagtat

SEQ ID NO: 2881013 - DNA, 25 bp, Homo sapien
gccatagtcagctagcaaccagtct

SEQ ID NO: 2881014 - DNA, 25 bp, Homo sapien
acttgctgggtagagggcgagtgaa

SEQ ID NO: 2881015 - DNA, 25 bp, Homo sapien
gcacattcggaatgtgacaagtcac

SEQ ID NO: 2881016 - DNA, 25 bp, Homo sapien
gacaagtcactagggacttgctggg

SEQ ID NO: 2881017 - DNA, 25 bp, Homo sapien
ctaaacccagtagggtgaagaagat

SEQ ID NO: 2881018 - DNA, 25 bp, Homo sapien
ctccgggagggatggcgcccgcaga

SEQ ID NO: 2881019 - DNA, 25 bp, Homo sapien
aggccggtgagcaggcccgcagccc

SEQ ID NO: 2881020 - DNA, 25 bp, Homo sapien
cggggctgctgacagccgggcggaa

SEQ ID NO: 2881021 - DNA, 25 bp, Homo sapien
gggctgctgacagccgggcggaagg

SEQ ID NO: 2881022 - DNA, 25 bp, Homo sapien
ggcggactggcggcgctgcgtgcta

SEQ ID NO: 2881023 - DNA, 25 bp, Homo sapien
gccgccgcgccacggggagagggcg

SEQ ID NO: 2881024 - DNA, 25 bp, Homo sapien
gctgcgtgctagtcactcctggctc

SEQ ID NO: 2881025 - DNA, 25 bp, Homo sapien
gccgccgccgcagtgggtgtgaggg

SEQ ID NO: 2881026 - DNA, 25 bp, Homo sapien
gggcgggcctcgcactcggttgctc

SEQ ID NO: 2881027 - DNA, 25 bp, Homo sapien
cgactggagcggcacgggagcccgc

SEQ ID NO: 2881028 - DNA, 25 bp, Homo sapien
agcccggcgtgctagggcccggtag

SEQ ID NO: 2881029 - DNA, 25 bp, Homo sapien
cttgtggcggtgaggcgactggagc

SEQ ID NO: 2881030 - DNA, 25 bp, Homo sapien
gcctctaagcgtggttgggattaac

SEQ ID NO: 2881031 - DNA, 25 bp, Homo sapien
tgggattaacctgtcgatggattca

SEQ ID NO: 2881032 - DNA, 25 bp, Homo sapien
gttttggatgtttatcctcaatgaa

SEQ ID NO: 2881033 - DNA, 25 bp, Homo sapien
agctggcctgtgaatatgctccgcc

SEQ ID NO: 2881034 - DNA, 25 bp, Homo sapien
gagagcagagttgcccacttgaaac

SEQ ID NO: 2881035 - DNA, 25 bp, Homo sapien
gaaactactctcttgcatgggatat

SEQ ID NO: 2881036 - DNA, 25 bp, Homo sapien
catagtacttttgattgtgcacgct

SEQ ID NO: 2881037 - DNA, 25 bp, Homo sapien
caagctgttttactatgggcaagga

SEQ ID NO: 2881038 - DNA, 25 bp, Homo sapien
actggacttataggaggcataggtg

SEQ ID NO: 2881039 - DNA, 25 bp, Homo sapien
caactggacttataggaggcatagg

SEQ ID NO: 2881040 - DNA, 25 bp, Homo sapien
aactggacttataggaggcataggt

SEQ ID NO: 2881041 - DNA, 25 bp, Homo sapien
gatgaacagtttggccgttaccacg

SEQ ID NO: 2881042 - DNA, 25 bp, Homo sapien
tacaggagcacgcagaacatgtggg

SEQ ID NO: 2881043 - DNA, 25 bp, Homo sapien
gcaaaagcacttgggtagaaggcac

SEQ ID NO: 2881044 - DNA, 25 bp, Homo sapien
gaagctgtcaagctctacaggagca

SEQ ID NO: 2881045 - DNA, 25 bp, Homo sapien
aatcagatgaaaggtggtgatggtc

SEQ ID NO: 2881046 - DNA, 25 bp, Homo sapien
gaatcagatgaaaggtggtgatggt

SEQ ID NO: 2881047 - DNA, 25 bp, Homo sapien
tcagatgaaaggtggtgatggtctt

SEQ ID NO: 2881048 - DNA, 25 bp, Homo sapien
tggaatcagatgaaaggtggtgatg

SEQ ID NO: 2881049 - DNA, 25 bp, Homo sapien
cattccacagttacagacttggcca

SEQ ID NO: 2881050 - DNA, 25 bp, Homo sapien
ccacagttacagacttggccagatt

SEQ ID NO: 2881051 - DNA, 25 bp, Homo sapien
ttccacagttacagacttggccaga

SEQ ID NO: 2881052 - DNA, 25 bp, Homo sapien
tcattccacagttacagacttggcc

SEQ ID NO: 2881053 - DNA, 25 bp, Homo sapien
cataagtacgcttctactgggccgg

SEQ ID NO: 2881054 - DNA, 25 bp, Homo sapien
gaaagtgactgttcaggaccccaaa

SEQ ID NO: 2881055 - DNA, 25 bp, Homo sapien
gtcaccaacctagagacctgcgtct

SEQ ID NO: 2881056 - DNA, 25 bp, Homo sapien
gaggcagattccttagtccagaagc

SEQ ID NO: 2881057 - DNA, 25 bp, Homo sapien
caaacttggaactttcagtatcgtc

SEQ ID NO: 2881058 - DNA, 25 bp, Homo sapien
cagtatcgtccttggagcacagtat

SEQ ID NO: 2881059 - DNA, 25 bp, Homo sapien
tgcagcggaatcacgctcaggatgc

SEQ ID NO: 2881060 - DNA, 25 bp, Homo sapien
gggcagctcaattgtcttatacgca

SEQ ID NO: 2881061 - DNA, 25 bp, Homo sapien
catttggcgaagcaaggatccttca

SEQ ID NO: 2881062 - DNA, 25 bp, Homo sapien
catctgcttgtcaatcagtgccagg

SEQ ID NO: 2881063 - DNA, 25 bp, Homo sapien
cttcataatgaccatgatgacgggc

SEQ ID NO: 2881064 - DNA, 25 bp, Homo sapien
tctgagtgcatgtaggttatctctt

SEQ ID NO: 2881065 - DNA, 25 bp, Homo sapien
accagcagcgatctctgcgtgtaga

SEQ ID NO: 2881066 - DNA, 25 bp, Homo sapien
ggcatagttgtagccccgccccatc

SEQ ID NO: 2881067 - DNA, 25 bp, Homo sapien
atcaccagcagcgatctctgcgtgt

SEQ ID NO: 2881068 - DNA, 25 bp, Homo sapien
agcagcgatctctgcgtgtagagct

SEQ ID NO: 2881069 - DNA, 25 bp, Homo sapien
tcctgttttgtagtgaaattcggtc

SEQ ID NO: 2881070 - DNA, 25 bp, Homo sapien
gaaattcggtcttcagacatcatca

SEQ ID NO: 2881071 - DNA, 25 bp, Homo sapien
tagtgaaattcggtcttcagacatc

SEQ ID NO: 2881072 - DNA, 25 bp, Homo sapien
ttgtagtgaaattcggtcttcagac

SEQ ID NO: 2881073 - DNA, 25 bp, Homo sapien
cctgcgttgatgtggacgccgcagt

SEQ ID NO: 2881074 - DNA, 25 bp, Homo sapien
tccggccctgcgttgatgtggacgc

SEQ ID NO: 2881075 - DNA, 25 bp, Homo sapien
cgatctccggccctgcgttgatgtg

SEQ ID NO: 2881076 - DNA, 25 bp, Homo sapien
cgccgcagtcggtctcgcgagagat

SEQ ID NO: 2881077 - DNA, 25 bp, Homo sapien
tgcccacggtgttggtgacgcccac

SEQ ID NO: 2881078 - DNA, 25 bp, Homo sapien
ctgcccacggtgttggtgacgccca

SEQ ID NO: 2881079 - DNA, 25 bp, Homo sapien
cgccaggagggtgtccgcggtctcg

SEQ ID NO: 2881080 - DNA, 25 bp, Homo sapien
gagagcgccgcggtccttacagtag

SEQ ID NO: 2881081 - DNA, 25 bp, Homo sapien
cttacagtagcgcagcgccaggagg

SEQ ID NO: 2881082 - DNA, 25 bp, Homo sapien
gcggtccttacagtagcgcagcgcc

SEQ ID NO: 2881083 - DNA, 25 bp, Homo sapien
gcccaggggccctctcagtgccgcg

SEQ ID NO: 2881084 - DNA, 25 bp, Homo sapien
cccaggggccctctcagtgccgcgc

SEQ ID NO: 2881085 - DNA, 25 bp, Homo sapien
ctgccgcccaggggccctctcagtg

SEQ ID NO: 2881086 - DNA, 25 bp, Homo sapien
ccgcccaggggccctctcagtgccg

SEQ ID NO: 2881087 - DNA, 25 bp, Homo sapien
caagttcaaccatcacaggaagctc

SEQ ID NO: 2881088 - DNA, 25 bp, Homo sapien
tgaaaaagcaaacgtcatccctgaa

SEQ ID NO: 2881089 - DNA, 25 bp, Homo sapien
ccagaaaatcactagcaagttcaac

SEQ ID NO: 2881090 - DNA, 25 bp, Homo sapien
agcaaacgtcatccctgaacacagg

SEQ ID NO: 2881091 - DNA, 25 bp, Homo sapien
ccacggcagcgtggtagctggttcc

SEQ ID NO: 2881092 - DNA, 25 bp, Homo sapien
tggttccacagccaatcacgatgag

SEQ ID NO: 2881093 - DNA, 25 bp, Homo sapien
gccaatcacgatgagccgtcggcat

SEQ ID NO: 2881094 - DNA, 25 bp, Homo sapien
cggcatcgtcgaatctccttcaagt

SEQ ID NO: 2881095 - DNA, 25 bp, Homo sapien
gattctggctgttcgaagatctcct

SEQ ID NO: 2881096 - DNA, 25 bp, Homo sapien
caaaattcacccgacctctcatagt

SEQ ID NO: 2881097 - DNA, 25 bp, Homo sapien
tcacccgacctctcatagtattgaa

SEQ ID NO: 2881098 - DNA, 25 bp, Homo sapien
catagtattgaaaactgattctggc

SEQ ID NO: 2881099 - DNA, 25 bp, Homo sapien
acagagggcaggagggctgtggcct

SEQ ID NO: 2881100 - DNA, 25 bp, Homo sapien
ggtggccacagagggcaggagggct

SEQ ID NO: 2881101 - DNA, 25 bp, Homo sapien
ccacagagggcaggagggctgtggc

SEQ ID NO: 2881102 - DNA, 25 bp, Homo sapien
ctgcagccccgccctggtggccaca

SEQ ID NO: 2881103 - DNA, 25 bp, Homo sapien
cgaggctgccgcacgtggactctgg

SEQ ID NO: 2881104 - DNA, 25 bp, Homo sapien
caggagctccaccaggcgcgctggc

SEQ ID NO: 2881105 - DNA, 25 bp, Homo sapien
ccgaggctgccgcacgtggactctg

SEQ ID NO: 2881106 - DNA, 25 bp, Homo sapien
aggagctccaccaggcgcgctggct

SEQ ID NO: 2881107 - DNA, 25 bp, Homo sapien
tgacccggtgaatggagagtttccc

SEQ ID NO: 2881108 - DNA, 25 bp, Homo sapien
tctggatggctcgagatgggtcatc

SEQ ID NO: 2881109 - DNA, 25 bp, Homo sapien
ccggttggtgtgctctatgatagcg

SEQ ID NO: 2881110 - DNA, 25 bp, Homo sapien
atgggtcatcactggccgagcgctt

SEQ ID NO: 2881111 - DNA, 25 bp, Homo sapien
ttctttggccctgcgacttgctgag

SEQ ID NO: 2881112 - DNA, 25 bp, Homo sapien
cacgatagctcacatggaaggatga

SEQ ID NO: 2881113 - DNA, 25 bp, Homo sapien
tcatgcaggtgctcctaggacaagg

SEQ ID NO: 2881114 - DNA, 25 bp, Homo sapien
tgaaaaactccctgtgtcttggctc

SEQ ID NO: 2881115 - DNA, 25 bp, Homo sapien
gcctcttcatccgtgtcttacagat

SEQ ID NO: 2881116 - DNA, 25 bp, Homo sapien
ccgtgtcttacagatattcttcaca

SEQ ID NO: 2881117 - DNA, 25 bp, Homo sapien
catccgtgtcttacagatattcttc

SEQ ID NO: 2881118 - DNA, 25 bp, Homo sapien
aagaattccacggccttgtcgccca

SEQ ID NO: 2881119 - DNA, 25 bp, Homo sapien
agcagctgtgctgttccggtacttc

SEQ ID NO: 2881120 - DNA, 25 bp, Homo sapien
tgtgctgttccggtacttcttgaga

SEQ ID NO: 2881121 - DNA, 25 bp, Homo sapien
ctgttccggtacttcttgagaaact

SEQ ID NO: 2881122 - DNA, 25 bp, Homo sapien
agctgtgctgttccggtacttcttg

SEQ ID NO: 2881123 - DNA, 25 bp, Homo sapien
tatttgctccggactccgatgagca

SEQ ID NO: 2881124 - DNA, 25 bp, Homo sapien
acgtcctgtataagatagggatctg

SEQ ID NO: 2881125 - DNA, 25 bp, Homo sapien
tataagatagggatctgttctgtgg

SEQ ID NO: 2881126 - DNA, 25 bp, Homo sapien
gagcttgtatttgctccggactccg

SEQ ID NO: 2881127 - DNA, 25 bp, Homo sapien
aggtagacttcatcataaagaggac

SEQ ID NO: 2881128 - DNA, 25 bp, Homo sapien
aagtgacaccccgtggatggaagtt

SEQ ID NO: 2881129 - DNA, 25 bp, Homo sapien
gatggaagtttagaatcttcacccc

SEQ ID NO: 2881130 - DNA, 25 bp, Homo sapien
tatattctctactttgtaggtgaca

SEQ ID NO: 2881131 - DNA, 25 bp, Homo sapien
tcttgaaaaccagcgcgaatgcacc

SEQ ID NO: 2881132 - DNA, 25 bp, Homo sapien
cactcttgaaaaccagcgcgaatgc

SEQ ID NO: 2881133 - DNA, 25 bp, Homo sapien
ttctcctgggtagtggacactcttg

SEQ ID NO: 2881134 - DNA, 25 bp, Homo sapien
tgggtagtggacactcttgaaaacc

SEQ ID NO: 2881135 - DNA, 25 bp, Homo sapien
tgtaacatcttaaggccaggctctg

SEQ ID NO: 2881136 - DNA, 25 bp, Homo sapien
tagaaacacatcctcgcttggtacc

SEQ ID NO: 2881137 - DNA, 25 bp, Homo sapien
tgaaggattccttggcacttgctgc

SEQ ID NO: 2881138 - DNA, 25 bp, Homo sapien
aaaagccacggactctaatgccagt

SEQ ID NO: 2881139 - DNA, 25 bp, Homo sapien
cgttgaaaacgtaatgtcctcagtt

SEQ ID NO: 2881140 - DNA, 25 bp, Homo sapien
gcttggcgatggtctctgtatctgt

SEQ ID NO: 2881141 - DNA, 25 bp, Homo sapien
gttgtcgaacacatatttaatcagc

SEQ ID NO: 2881142 - DNA, 25 bp, Homo sapien
gaatgactctctcgaccaacgttga

SEQ ID NO: 2881143 - DNA, 25 bp, Homo sapien
gtaatttgtgatgatcccattgtgg

SEQ ID NO: 2881144 - DNA, 25 bp, Homo sapien
tgatcccattgtggatgacaacaaa

SEQ ID NO: 2881145 - DNA, 25 bp, Homo sapien
tctttgtaatttgtgatgatcccat

SEQ ID NO: 2881146 - DNA, 25 bp, Homo sapien
cctcagatctttgtaatttgtgatg

SEQ ID NO: 2881147 - DNA, 25 bp, Homo sapien
gctattgagaaggaggttcatgtca

SEQ ID NO: 2881148 - DNA, 25 bp, Homo sapien
tgagaaggaggttcatgtcagatgt

SEQ ID NO: 2881149 - DNA, 25 bp, Homo sapien
ggttcatgtcagatgtgaagagaga

SEQ ID NO: 2881150 - DNA, 25 bp, Homo sapien
gaaggaggttcatgtcagatgtgaa

SEQ ID NO: 2881151 - DNA, 25 bp, Homo sapien
tcatctcagtctatgatcctatcat

SEQ ID NO: 2881152 - DNA, 25 bp, Homo sapien
catgcctggccggtgatattgtttc

SEQ ID NO: 2881153 - DNA, 25 bp, Homo sapien
tgctgggcgttcagacttccttaaa

SEQ ID NO: 2881154 - DNA, 25 bp, Homo sapien
tccttgtgtggtatagttgctgggc

SEQ ID NO: 2881155 - DNA, 25 bp, Homo sapien
caatgccgaagtgtgtctcaaactc

SEQ ID NO: 2881156 - DNA, 25 bp, Homo sapien
cccagcgcgtgtgggcaatgccgaa

SEQ ID NO: 2881157 - DNA, 25 bp, Homo sapien
tggctgttgacagcactggggaccc

SEQ ID NO: 2881158 - DNA, 25 bp, Homo sapien
ccacttttaagtccatgctgtcttg

SEQ ID NO: 2881159 - DNA, 25 bp, Homo sapien
tgcgaagcccggttttacagcacgg

SEQ ID NO: 2881160 - DNA, 25 bp, Homo sapien
gtgcaacctggtgtcgttacccaag

SEQ ID NO: 2881161 - DNA, 25 bp, Homo sapien
gaatctccattctccggcgctgttg

SEQ ID NO: 2881162 - DNA, 25 bp, Homo sapien
tggaatacggtcctagaaagcggcc

SEQ ID NO: 2881163 - DNA, 25 bp, Homo sapien
tgtaaagttcttcatcgagagcctt

SEQ ID NO: 2881164 - DNA, 25 bp, Homo sapien
tgattattcccatcgatcgccacac

SEQ ID NO: 2881165 - DNA, 25 bp, Homo sapien
ttcatcgagagccttgactttcccc

SEQ ID NO: 2881166 - DNA, 25 bp, Homo sapien
tttgacttcgtgattattcccatcg

SEQ ID NO: 2881167 - DNA, 25 bp, Homo sapien
ccgagtcgtagcctctgtactccag

SEQ ID NO: 2881168 - DNA, 25 bp, Homo sapien
ctcgtccgggggactctgtagttca

SEQ ID NO: 2881169 - DNA, 25 bp, Homo sapien
tgcaggcccttgatgagggtttcga

SEQ ID NO: 2881170 - DNA, 25 bp, Homo sapien
tgagggtttcgaagatctccttcct

SEQ ID NO: 2881171 - DNA, 25 bp, Homo sapien
gatggatgccacgagggttacaaga

SEQ ID NO: 2881172 - DNA, 25 bp, Homo sapien
agtaccccgggatggatgccacgag

SEQ ID NO: 2881173 - DNA, 25 bp, Homo sapien
cactggccagtaccccgggatggat

SEQ ID NO: 2881174 - DNA, 25 bp, Homo sapien
gatgccacgagggttacaagaaggt

SEQ ID NO: 2881175 - DNA, 25 bp, Homo sapien
ttcactcctgcacacgtcaggcgag

SEQ ID NO: 2881176 - DNA, 25 bp, Homo sapien
gtcaggcgagaacgttcggcacgct

SEQ ID NO: 2881177 - DNA, 25 bp, Homo sapien
tcaccacgagccctcttgcgtagtg

SEQ ID NO: 2881178 - DNA, 25 bp, Homo sapien
gcataaatctcattttcaccacgag

SEQ ID NO: 2881179 - DNA, 25 bp, Homo sapien
tgctttccaccggtgcttgaaccct

SEQ ID NO: 2881180 - DNA, 25 bp, Homo sapien
aggagtgaccgtgcggcacctggga

SEQ ID NO: 2881181 - DNA, 25 bp, Homo sapien
gcttctgggtacaggaggagtgacc

SEQ ID NO: 2881182 - DNA, 25 bp, Homo sapien
caggccggacctctggctggttctg

SEQ ID NO: 2881183 - DNA, 25 bp, Homo sapien
tcttgcccctcgacaagaggggccg

SEQ ID NO: 2881184 - DNA, 25 bp, Homo sapien
tgcccctcgacaagaggggccgggc

SEQ ID NO: 2881185 - DNA, 25 bp, Homo sapien
cttgcccctcgacaagaggggccgg

SEQ ID NO: 2881186 - DNA, 25 bp, Homo sapien
ttcttgcccctcgacaagaggggcc

SEQ ID NO: 2881187 - DNA, 25 bp, Homo sapien
gaggaccacacccatgagatcttcg

SEQ ID NO: 2881188 - DNA, 25 bp, Homo sapien
gggaggaccacacccatgagatctt

SEQ ID NO: 2881189 - DNA, 25 bp, Homo sapien
gaccacacccatgagatcttcgagt

SEQ ID NO: 2881190 - DNA, 25 bp, Homo sapien
tgccccttctttgaggggaggacca

SEQ ID NO: 2881191 - DNA, 25 bp, Homo sapien
gcaaagtcagagagaggcctttcat

SEQ ID NO: 2881192 - DNA, 25 bp, Homo sapien
accccggccctcagcaaagtcagag

SEQ ID NO: 2881193 - DNA, 25 bp, Homo sapien
ccggccctcagcaaagtcagagaga

SEQ ID NO: 2881194 - DNA, 25 bp, Homo sapien
ggccctcagcaaagtcagagagagg

SEQ ID NO: 2881195 - DNA, 25 bp, Homo sapien
ccgaggttcgggcagtgactgcctc

SEQ ID NO: 2881196 - DNA, 25 bp, Homo sapien
tcttccccgcgcaaagaggcggtaa

SEQ ID NO: 2881197 - DNA, 25 bp, Homo sapien
tccctctcgtggcttcgggccgagg

SEQ ID NO: 2881198 - DNA, 25 bp, Homo sapien
ggcagcgacccttctagggaccaga

SEQ ID NO: 2881199 - DNA, 25 bp, Homo sapien
cggctcgagggggtctgcccgttcg

SEQ ID NO: 2881200 - DNA, 25 bp, Homo sapien
tctcgggctccttcgcggctcgagg

SEQ ID NO: 2881201 - DNA, 25 bp, Homo sapien
tgcccgttcggacgctggggctcct

SEQ ID NO: 2881202 - DNA, 25 bp, Homo sapien
ttctcgggctccttcgcggctcgag

SEQ ID NO: 2881203 - DNA, 25 bp, Homo sapien
gggctccagctcccgtccgctcggc

SEQ ID NO: 2881204 - DNA, 25 bp, Homo sapien
gctccagctcccgtccgctcggcct

SEQ ID NO: 2881205 - DNA, 25 bp, Homo sapien
ccagctcccgtccgctcggcctcca

SEQ ID NO: 2881206 - DNA, 25 bp, Homo sapien
gcgggctccagctcccgtccgctcg

SEQ ID NO: 2881207 - DNA, 25 bp, Homo sapien
caggttggcccacagcaggcggtac

SEQ ID NO: 2881208 - DNA, 25 bp, Homo sapien
cttctctcctcaggttggcccacag

SEQ ID NO: 2881209 - DNA, 25 bp, Homo sapien
tctcctcaggttggcccacagcagg

SEQ ID NO: 2881210 - DNA, 25 bp, Homo sapien
tcccgtgtaaccctcttcttctctc

SEQ ID NO: 2881211 - DNA, 25 bp, Homo sapien
gagtgcagtgtagcgatcccggctc

SEQ ID NO: 2881212 - DNA, 25 bp, Homo sapien
gtgcagtgtagcgatcccggctcac

SEQ ID NO: 2881213 - DNA, 25 bp, Homo sapien
tgcagtgtagcgatcccggctcacc

SEQ ID NO: 2881214 - DNA, 25 bp, Homo sapien
tggagtgcagtgtagcgatcccggc

SEQ ID NO: 2881215 - DNA, 25 bp, Homo sapien
cccggaggctggcatatcctgacag

SEQ ID NO: 2881216 - DNA, 25 bp, Homo sapien
cggaggctggcatatcctgacagca

SEQ ID NO: 2881217 - DNA, 25 bp, Homo sapien
agccccggaggctggcatatcctga

SEQ ID NO: 2881218 - DNA, 25 bp, Homo sapien
gaggctggcatatcctgacagcagc

SEQ ID NO: 2881219 - DNA, 25 bp, Homo sapien
tcagagcgtggctaaagtcccccaa

SEQ ID NO: 2881220 - DNA, 25 bp, Homo sapien
agagcgtggctaaagtcccccaagg

SEQ ID NO: 2881221 - DNA, 25 bp, Homo sapien
ggttgctgccgctgattctggcctg

SEQ ID NO: 2881222 - DNA, 25 bp, Homo sapien
gggtgcccagggttgctgccgctga

SEQ ID NO: 2881223 - DNA, 25 bp, Homo sapien
tctggattccggaacgcgctggccg

SEQ ID NO: 2881224 - DNA, 25 bp, Homo sapien
ttccggaacgcgctggccggtcact

SEQ ID NO: 2881225 - DNA, 25 bp, Homo sapien
aacaccagagtgaatacacgtgtct

SEQ ID NO: 2881226 - DNA, 25 bp, Homo sapien
ttctctggattccggaacgcgctgg

SEQ ID NO: 2881227 - DNA, 25 bp, Homo sapien
ccagggcgatgagcagatgcattgc

SEQ ID NO: 2881228 - DNA, 25 bp, Homo sapien
cagatgcattgctgcagcgtgggtc

SEQ ID NO: 2881229 - DNA, 25 bp, Homo sapien
agagatggacaataaccagggcgat

SEQ ID NO: 2881230 - DNA, 25 bp, Homo sapien
tgctgagaacgggaatgacgcgcaa

SEQ ID NO: 2881231 - DNA, 25 bp, Homo sapien
ctcccggggactgcaagccagtgaa

SEQ ID NO: 2881232 - DNA, 25 bp, Homo sapien
gggactgcaagccagtgaaggactg

SEQ ID NO: 2881233 - DNA, 25 bp, Homo sapien
gctgcgggaaggtcgtgagtgctcc

SEQ ID NO: 2881234 - DNA, 25 bp, Homo sapien
gacaagttgtcacaaaggccaggca

SEQ ID NO: 2881235 - DNA, 25 bp, Homo sapien
gcgcttccccaccgatgccaatggc

SEQ ID NO: 2881236 - DNA, 25 bp, Homo sapien
ggtcatcatgtacattacaccacct

SEQ ID NO: 2881237 - DNA, 25 bp, Homo sapien
ttcctggaggggcgtccttgcacat

SEQ ID NO: 2881238 - DNA, 25 bp, Homo sapien
ctgcgcttccccaccgatgccaatg

SEQ ID NO: 2881239 - DNA, 25 bp, Homo sapien
cagtaaaggaatacaggcccgtggg

SEQ ID NO: 2881240 - DNA, 25 bp, Homo sapien
tactcgagtggaaactgacttagca

SEQ ID NO: 2881241 - DNA, 25 bp, Homo sapien
tggctgtcagtcgtcaagtcctgcc

SEQ ID NO: 2881242 - DNA, 25 bp, Homo sapien
taggagaagtgtgtctgcccggtac

SEQ ID NO: 2881243 - DNA, 25 bp, Homo sapien
tatttgtttattagagcagctagca

SEQ ID NO: 2881244 - DNA, 25 bp, Homo sapien
cctgtgaatcaagttatgcacgaag

SEQ ID NO: 2881245 - DNA, 25 bp, Homo sapien
tctactgtagaaactgaatgagtcc

SEQ ID NO: 2881246 - DNA, 25 bp, Homo sapien
ctgagccaacaaattcccatttctg

SEQ ID NO: 2881247 - DNA, 25 bp, Homo sapien
ctcttggagaccccgcatgggggtt

SEQ ID NO: 2881248 - DNA, 25 bp, Homo sapien
gaccccgcatgggggttctggacta

SEQ ID NO: 2881249 - DNA, 25 bp, Homo sapien
cgcatgggggttctggactaaccca

SEQ ID NO: 2881250 - DNA, 25 bp, Homo sapien
tgggggttctggactaacccactgc

SEQ ID NO: 2881251 - DNA, 25 bp, Homo sapien
catgttgtggcatcctgggacagtc

SEQ ID NO: 2881252 - DNA, 25 bp, Homo sapien
tgtgaggccaccagttcagtgcaca

SEQ ID NO: 2881253 - DNA, 25 bp, Homo sapien
taccccttcgggtatcctggagaca

SEQ ID NO: 2881254 - DNA, 25 bp, Homo sapien
ggagacaaacgccactcctcagctg

SEQ ID NO: 2881255 - DNA, 25 bp, Homo sapien
tattaagccttaagtcaaacagccc

SEQ ID NO: 2881256 - DNA, 25 bp, Homo sapien
ggctgcctgtatctggacttctcgt

SEQ ID NO: 2881257 - DNA, 25 bp, Homo sapien
caaggtcagcgcatggtaatctatc

SEQ ID NO: 2881258 - DNA, 25 bp, Homo sapien
gacttctcgtcacaggagtcagtaa

SEQ ID NO: 2881259 - DNA, 25 bp, Homo sapien
atcagcccagtcatttctctgctga

SEQ ID NO: 2881260 - DNA, 25 bp, Homo sapien
gaatcagcccagtcatttctctgct

SEQ ID NO: 2881261 - DNA, 25 bp, Homo sapien
tcatgaatcagcccagtcatttctc

SEQ ID NO: 2881262 - DNA, 25 bp, Homo sapien
tgaatcagcccagtcatttctctgc

SEQ ID NO: 2881263 - DNA, 25 bp, Homo sapien
aaacaccagagtttgccctgaacac

SEQ ID NO: 2881264 - DNA, 25 bp, Homo sapien
cttcaaacaccagagtttgccctga

SEQ ID NO: 2881265 - DNA, 25 bp, Homo sapien
acaccagagtttgccctgaacacct

SEQ ID NO: 2881266 - DNA, 25 bp, Homo sapien
cagcagctgctgtccgttacccagg

SEQ ID NO: 2881267 - DNA, 25 bp, Homo sapien
ggaataatattcgactgttcacgat

SEQ ID NO: 2881268 - DNA, 25 bp, Homo sapien
ggctccggtcaaatactgtgtttcg

SEQ ID NO: 2881269 - DNA, 25 bp, Homo sapien
cacgattgaatgtcttgtctttagg

SEQ ID NO: 2881270 - DNA, 25 bp, Homo sapien
tctttaggcagatcaagatactggc

SEQ ID NO: 2881271 - DNA, 25 bp, Homo sapien
caatgagcggccaggatgttggagc

SEQ ID NO: 2881272 - DNA, 25 bp, Homo sapien
cgaagggcggatggttgtgcccggc

SEQ ID NO: 2881273 - DNA, 25 bp, Homo sapien
tccgggcgctcgctggctgagggac

SEQ ID NO: 2881274 - DNA, 25 bp, Homo sapien
tgtgcccggcgacggcgcccaatga

SEQ ID NO: 2881275 - DNA, 25 bp, Homo sapien
cgactaaggcggcagaggagcggcg

SEQ ID NO: 2881276 - DNA, 25 bp, Homo sapien
gcgggcagccgaagcagtggctctc

SEQ ID NO: 2881277 - DNA, 25 bp, Homo sapien
cagccgaagcagtggctctcggagg

SEQ ID NO: 2881278 - DNA, 25 bp, Homo sapien
gaacaaagagcagcgactaaggcgg

SEQ ID NO: 2881279 - DNA, 25 bp, Homo sapien
gtgaatggtcatctcgctcgagctc

SEQ ID NO: 2881280 - DNA, 25 bp, Homo sapien
gttgttgccattgacagcgttgtga

SEQ ID NO: 2881281 - DNA, 25 bp, Homo sapien
aagagcctgctaaccaacacctgtg

SEQ ID NO: 2881282 - DNA, 25 bp, Homo sapien
ttttatagtattgcgaaggattcgg

SEQ ID NO: 2881283 - DNA, 25 bp, Homo sapien
cctgcaaaggtgtgtctggtctaga

SEQ ID NO: 2881284 - DNA, 25 bp, Homo sapien
cagccttgctaagctaaaagggaag

SEQ ID NO: 2881285 - DNA, 25 bp, Homo sapien
gaatgactcgagatgagcctgcaaa

SEQ ID NO: 2881286 - DNA, 25 bp, Homo sapien
gagcaaggcgatttggaggtcactt

SEQ ID NO: 2881287 - DNA, 25 bp, Homo sapien
gatcctggctcgctgcaactctcac

SEQ ID NO: 2881288 - DNA, 25 bp, Homo sapien
tcctggctcgctgcaactctcacct

SEQ ID NO: 2881289 - DNA, 25 bp, Homo sapien
gcccagctaatgtatcttattttaa

SEQ ID NO: 2881290 - DNA, 25 bp, Homo sapien
ctggctcgctgcaactctcacctcc

SEQ ID NO: 2881291 - DNA, 25 bp, Homo sapien
tgatttttgggtgagtgtcttttgg

SEQ ID NO: 2881292 - DNA, 25 bp, Homo sapien
ctgatttttgggtgagtgtcttttg

SEQ ID NO: 2881293 - DNA, 25 bp, Homo sapien
actgatttttgggtgagtgtctttt

SEQ ID NO: 2881294 - DNA, 25 bp, Homo sapien
agacacggcatttcaccttgttagc

SEQ ID NO: 2881295 - DNA, 25 bp, Homo sapien
tgcccgccaccaatgcccggataat

SEQ ID NO: 2881296 - DNA, 25 bp, Homo sapien
tagacacggcatttcaccttgttag

SEQ ID NO: 2881297 - DNA, 25 bp, Homo sapien
tagtagacacggcatttcaccttgt

SEQ ID NO: 2881298 - DNA, 25 bp, Homo sapien
tccaccatggcatgggccggagtcg

SEQ ID NO: 2881299 - DNA, 25 bp, Homo sapien
gggccggagtcgctggggtccgaga

SEQ ID NO: 2881300 - DNA, 25 bp, Homo sapien
caccatggcatgggccggagtcgct

SEQ ID NO: 2881301 - DNA, 25 bp, Homo sapien
gccggagtcgctggggtccgagagg

SEQ ID NO: 2881302 - DNA, 25 bp, Homo sapien
tcatgacaaacagggcaccatacca

SEQ ID NO: 2881303 - DNA, 25 bp, Homo sapien
taccatccttaacacagggtccagg

SEQ ID NO: 2881304 - DNA, 25 bp, Homo sapien
tcttggacaaccttcttgacccagg

SEQ ID NO: 2881305 - DNA, 25 bp, Homo sapien
aaacactagtaccttgcctggcata

SEQ ID NO: 2881306 - DNA, 25 bp, Homo sapien
gagtccctggatctttgctcaccag

SEQ ID NO: 2881307 - DNA, 25 bp, Homo sapien
gcaaaaggacgccatgtgagcatta

SEQ ID NO: 2881308 - DNA, 25 bp, Homo sapien
tgccatttagagatgaaaaccagct

SEQ ID NO: 2881309 - DNA, 25 bp, Homo sapien
ctggagctggttggactaatgagac

SEQ ID NO: 2881310 - DNA, 25 bp, Homo sapien
agaagtgtagtttgtatagctgtag

SEQ ID NO: 2881311 - DNA, 25 bp, Homo sapien
attttagaagtgtagtttgtatagc

SEQ ID NO: 2881312 - DNA, 25 bp, Homo sapien
aagtgtagtttgtatagctgtagta

SEQ ID NO: 2881313 - DNA, 25 bp, Homo sapien
tttagaagtgtagtttgtatagctg

SEQ ID NO: 2881314 - DNA, 25 bp, Homo sapien
cctcatgatataaggaatgggctca

SEQ ID NO: 2881315 - DNA, 25 bp, Homo sapien
cgttgttgttaccttatacctcatg

SEQ ID NO: 2881316 - DNA, 25 bp, Homo sapien
gtataacactcatatctttgccaaa

SEQ ID NO: 2881317 - DNA, 25 bp, Homo sapien
aattttatatttaggcaactgatgg

SEQ ID NO: 2881318 - DNA, 25 bp, Homo sapien
tacttggtgtcagactagtcagctg

SEQ ID NO: 2881319 - DNA, 25 bp, Homo sapien
tactgggaaggttgctgtagcagca

SEQ ID NO: 2881320 - DNA, 25 bp, Homo sapien
tggtccagttgacagctaagctgag

SEQ ID NO: 2881321 - DNA, 25 bp, Homo sapien
cactgtgcaggatgcatgaaaaggg

SEQ ID NO: 2881322 - DNA, 25 bp, Homo sapien
tagacgttgcagctggtcttggaac

SEQ ID NO: 2881323 - DNA, 25 bp, Homo sapien
aggaaggaagctagacgttgcagct

SEQ ID NO: 2881324 - DNA, 25 bp, Homo sapien
tggtcttggaacttcaactggtgtt

SEQ ID NO: 2881325 - DNA, 25 bp, Homo sapien
ttcaactggtgttcgcagtttccct

SEQ ID NO: 2881326 - DNA, 25 bp, Homo sapien
accaagctcccgtagcctaccatgt

SEQ ID NO: 2881327 - DNA, 25 bp, Homo sapien
caccaagctcccgtagcctaccatg

SEQ ID NO: 2881328 - DNA, 25 bp, Homo sapien
caagctcccgtagcctaccatgttc

SEQ ID NO: 2881329 - DNA, 25 bp, Homo sapien
ccaagctcccgtagcctaccatgtt

SEQ ID NO: 2881330 - DNA, 25 bp, Homo sapien
caggtgtagatgctccagtctcggc

SEQ ID NO: 2881331 - DNA, 25 bp, Homo sapien
ggttttcagccctcgcgggtgggca

SEQ ID NO: 2881332 - DNA, 25 bp, Homo sapien
tgctcttaaccacgtttattgagag

SEQ ID NO: 2881333 - DNA, 25 bp, Homo sapien
cagcgtcttgtcctcaggtgtagat

SEQ ID NO: 2881334 - DNA, 25 bp, Homo sapien
aagcagaagccgagcttgagtgccc

SEQ ID NO: 2881335 - DNA, 25 bp, Homo sapien
gaaagcagaagccgagcttgagtgc

SEQ ID NO: 2881336 - DNA, 25 bp, Homo sapien
ctggaaagcagaagccgagcttgag

SEQ ID NO: 2881337 - DNA, 25 bp, Homo sapien
agcagaagccgagcttgagtgcccc

SEQ ID NO: 2881338 - DNA, 25 bp, Homo sapien
cagccctgacgtagggccgggacac

SEQ ID NO: 2881339 - DNA, 25 bp, Homo sapien
tgcagctcggatgcgccccacccag

SEQ ID NO: 2881340 - DNA, 25 bp, Homo sapien
tggccgggaagggatgcccgcgcag

SEQ ID NO: 2881341 - DNA, 25 bp, Homo sapien
gtgcagttttgaggctggccgggaa

SEQ ID NO: 2881342 - DNA, 25 bp, Homo sapien
tgggagccctctatgaggtggttca

SEQ ID NO: 2881343 - DNA, 25 bp, Homo sapien
ttctgggagccctctatgaggtggt

SEQ ID NO: 2881344 - DNA, 25 bp, Homo sapien
agccctctatgaggtggttcacggg

SEQ ID NO: 2881345 - DNA, 25 bp, Homo sapien
acacacttctgggagccctctatga

SEQ ID NO: 2881346 - DNA, 25 bp, Homo sapien
cgactccagcgcagcgacaggctgg

SEQ ID NO: 2881347 - DNA, 25 bp, Homo sapien
tgagggtgccgagggggttggccag

SEQ ID NO: 2881348 - DNA, 25 bp, Homo sapien
cagcgcagcgacaggctgggccaca

SEQ ID NO: 2881349 - DNA, 25 bp, Homo sapien
gccgccgactccagcgcagcgacag

SEQ ID NO: 2881350 - DNA, 25 bp, Homo sapien
ccaggaaccgtcgcgccctgcccgg

SEQ ID NO: 2881351 - DNA, 25 bp, Homo sapien
aggaaccgtcgcgccctgcccggct

SEQ ID NO: 2881352 - DNA, 25 bp, Homo sapien
ggaaccgtcgcgccctgcccggctc

SEQ ID NO: 2881353 - DNA, 25 bp, Homo sapien
caggtccaggacgcgcccccgcggg

SEQ ID NO: 2881354 - DNA, 25 bp, Homo sapien
gctgcagggtcaccggagtggcctg

SEQ ID NO: 2881355 - DNA, 25 bp, Homo sapien
accggtgaactctgtgcagggtccg

SEQ ID NO: 2881356 - DNA, 25 bp, Homo sapien
tggcctgagggtggcggaaggaccg

SEQ ID NO: 2881357 - DNA, 25 bp, Homo sapien
gcagggtcaccggagtggcctgagg

SEQ ID NO: 2881358 - DNA, 25 bp, Homo sapien
ctgcaggacagggccacgcagagcc

SEQ ID NO: 2881359 - DNA, 25 bp, Homo sapien
gagctgcaggacagggccacgcaga

SEQ ID NO: 2881360 - DNA, 25 bp, Homo sapien
gagccccaggagggcggcgagcttc

SEQ ID NO: 2881361 - DNA, 25 bp, Homo sapien
gccccaggagggcggcgagcttcat

SEQ ID NO: 2881362 - DNA, 25 bp, Homo sapien
aggccacgaggcttcttatacccgg

SEQ ID NO: 2881363 - DNA, 25 bp, Homo sapien
ctgcccgggcaaggccacgaggctt

SEQ ID NO: 2881364 - DNA, 25 bp, Homo sapien
gaggcttcttatacccggtcctcgc

SEQ ID NO: 2881365 - DNA, 25 bp, Homo sapien
cgggcaaggccacgaggcttcttat

SEQ ID NO: 2881366 - DNA, 25 bp, Homo sapien
tctttgagatggaaacacagcccct

SEQ ID NO: 2881367 - DNA, 25 bp, Homo sapien
caatgctgggtggtcctttgtgcca

SEQ ID NO: 2881368 - DNA, 25 bp, Homo sapien
gatgaccttatacgtgcactcggca

SEQ ID NO: 2881369 - DNA, 25 bp, Homo sapien
tagactcagtacagctgtccctggg

SEQ ID NO: 2881370 - DNA, 25 bp, Homo sapien
agtggtcctcctcgcttggctccga

SEQ ID NO: 2881371 - DNA, 25 bp, Homo sapien
tgtgaagaaagtcacgcgggcagac

SEQ ID NO: 2881372 - DNA, 25 bp, Homo sapien
gacagctccccatactcgctgttgt

SEQ ID NO: 2881373 - DNA, 25 bp, Homo sapien
tgttgtaaaacacctggcctcctcg

SEQ ID NO: 2881374 - DNA, 25 bp, Homo sapien
gccacattctggccaggtcctttac

SEQ ID NO: 2881375 - DNA, 25 bp, Homo sapien
cagccacattctggccaggtccttt

SEQ ID NO: 2881376 - DNA, 25 bp, Homo sapien
cacattctggccaggtcctttacag

SEQ ID NO: 2881377 - DNA, 25 bp, Homo sapien
ctggtcacagccacattctggccag

SEQ ID NO: 2881378 - DNA, 25 bp, Homo sapien
tcagcagaccatgaaagggcgtctc

SEQ ID NO: 2881379 - DNA, 25 bp, Homo sapien
catattaccaaggaataactggtgg

SEQ ID NO: 2881380 - DNA, 25 bp, Homo sapien
tgatgtattactcatattaccaagg

SEQ ID NO: 2881381 - DNA, 25 bp, Homo sapien
ctcagcagaccatgaaagggcgtct

SEQ ID NO: 2881382 - DNA, 25 bp, Homo sapien
gccgctttcttgtctatgcctgctc

SEQ ID NO: 2881383 - DNA, 25 bp, Homo sapien
cgctttcttgtctatgcctgctctc

SEQ ID NO: 2881384 - DNA, 25 bp, Homo sapien
ccgctttcttgtctatgcctgctct

SEQ ID NO: 2881385 - DNA, 25 bp, Homo sapien
cgggagggaaactgcgatcttttca

SEQ ID NO: 2881386 - DNA, 25 bp, Homo sapien
gggaaactgcgatcttttcagagtc

SEQ ID NO: 2881387 - DNA, 25 bp, Homo sapien
ggaaactgcgatcttttcagagtcc

SEQ ID NO: 2881388 - DNA, 25 bp, Homo sapien
gagggaaactgcgatcttttcagag

SEQ ID NO: 2881389 - DNA, 25 bp, Homo sapien
ccgaggaggagccgtccttccactg

SEQ ID NO: 2881390 - DNA, 25 bp, Homo sapien
cgaggaggagccgtccttccactgg

SEQ ID NO: 2881391 - DNA, 25 bp, Homo sapien
ccccgaacctgccaccgaggaggag

SEQ ID NO: 2881392 - DNA, 25 bp, Homo sapien
accgaggaggagccgtccttccact

SEQ ID NO: 2881393 - DNA, 25 bp, Homo sapien
tgccatttgccttacgaattcctga

SEQ ID NO: 2881394 - DNA, 25 bp, Homo sapien
aaggacagtcgttgggttctgccat

SEQ ID NO: 2881395 - DNA, 25 bp, Homo sapien
tggcatcgcaggagggcccaaatgt

SEQ ID NO: 2881396 - DNA, 25 bp, Homo sapien
caccctggacttgcactttcaaagg

SEQ ID NO: 2881397 - DNA, 25 bp, Homo sapien
catggggaattcctcaaatgtcttc

SEQ ID NO: 2881398 - DNA, 25 bp, Homo sapien
agcctttgtaggtcgttggggtcat

SEQ ID NO: 2881399 - DNA, 25 bp, Homo sapien
atcctggaggaaccacgggtctcag

SEQ ID NO: 2881400 - DNA, 25 bp, Homo sapien
caggcacccgggaaaggacacccag

SEQ ID NO: 2881401 - DNA, 25 bp, Homo sapien
tcagcctgggcgatgtgtagggcca

SEQ ID NO: 2881402 - DNA, 25 bp, Homo sapien
agctgcgcggggccatgcagacctc

SEQ ID NO: 2881403 - DNA, 25 bp, Homo sapien
gccatggtggacacctgcgagaagc

SEQ ID NO: 2881404 - DNA, 25 bp, Homo sapien
tggcgctgcaggcttggcgggctgt

SEQ ID NO: 2881405 - DNA, 25 bp, Homo sapien
gagctgggtcacaagccggctccat

SEQ ID NO: 2881406 - DNA, 25 bp, Homo sapien
cttgagctgggtcacaagccggctc

SEQ ID NO: 2881407 - DNA, 25 bp, Homo sapien
gctgggtcacaagccggctccatcc

SEQ ID NO: 2881408 - DNA, 25 bp, Homo sapien
ttgagctgggtcacaagccggctcc

SEQ ID NO: 2881409 - DNA, 25 bp, Homo sapien
tccaccagctccgagaatgcaggtc

SEQ ID NO: 2881410 - DNA, 25 bp, Homo sapien
ccagcagttcagcatgatgcggcgt

SEQ ID NO: 2881411 - DNA, 25 bp, Homo sapien
gaccagcagttcagcatgatgcggc

SEQ ID NO: 2881412 - DNA, 25 bp, Homo sapien
ccgagaatgcaggtctcgccttggg

SEQ ID NO: 2881413 - DNA, 25 bp, Homo sapien
tcagccgctggcagaactcctcatt

SEQ ID NO: 2881414 - DNA, 25 bp, Homo sapien
tcctcattgatctgcaccccagggt

SEQ ID NO: 2881415 - DNA, 25 bp, Homo sapien
cattgatctgcaccccagggtacgg

SEQ ID NO: 2881416 - DNA, 25 bp, Homo sapien
ccttgtgccgtctctcagccgctgg

SEQ ID NO: 2881417 - DNA, 25 bp, Homo sapien
cacacgtcactctgcgtggtgtaca

SEQ ID NO: 2881418 - DNA, 25 bp, Homo sapien
tacaccttgtcgaagatgctttcag

SEQ ID NO: 2881419 - DNA, 25 bp, Homo sapien
acgtcactctgcgtggtgtacacct

SEQ ID NO: 2881420 - DNA, 25 bp, Homo sapien
cttgtcgaagatgctttcaggggcc

SEQ ID NO: 2881421 - DNA, 25 bp, Homo sapien
cacatactgcaccaagcgggtccat

SEQ ID NO: 2881422 - DNA, 25 bp, Homo sapien
gcaccaagcgggtccatctccagga

SEQ ID NO: 2881423 - DNA, 25 bp, Homo sapien
gcactctcaggctccatagggcagg

SEQ ID NO: 2881424 - DNA, 25 bp, Homo sapien
gagctccattcacaagacactccgc

SEQ ID NO: 2881425 - DNA, 25 bp, Homo sapien
tccacttcctttcggagcactgggc

SEQ ID NO: 2881426 - DNA, 25 bp, Homo sapien
acttcctttcggagcactgggcccg

SEQ ID NO: 2881427 - DNA, 25 bp, Homo sapien
tttcggagcactgggcccgccggtc

SEQ ID NO: 2881428 - DNA, 25 bp, Homo sapien
cccttctccacttccgaaatccact

SEQ ID NO: 2881429 - DNA, 25 bp, Homo sapien
cacttcctttcggagcactgggccc

SEQ ID NO: 2881430 - DNA, 25 bp, Homo sapien
tttcggagcactgggcctgccggtc

SEQ ID NO: 2881431 - DNA, 25 bp, Homo sapien
acttcctttcggagcactgggcccg

SEQ ID NO: 2881432 - DNA, 25 bp, Homo sapien
tccacttcctttcggagcactgggc

SEQ ID NO: 2881433 - DNA, 25 bp, Homo sapien
cttcctttcggagcactgggcctgc

SEQ ID NO: 2881434 - DNA, 25 bp, Homo sapien
tttcggagcactgggcctgccggtc

SEQ ID NO: 2881435 - DNA, 25 bp, Homo sapien
tcctttcggagcactgggcctgccg

SEQ ID NO: 2881436 - DNA, 25 bp, Homo sapien
tccacttcctttcggagcactgggc

SEQ ID NO: 2881437 - DNA, 25 bp, Homo sapien
agatcttcaccacgtcgctttccga

SEQ ID NO: 2881438 - DNA, 25 bp, Homo sapien
tcgctttccgacagcagaatgttcc

SEQ ID NO: 2881439 - DNA, 25 bp, Homo sapien
gacagcagaatgttccgagcagcca

SEQ ID NO: 2881440 - DNA, 25 bp, Homo sapien
tctttgtagatgtcccgggcaaggc

SEQ ID NO: 2881441 - DNA, 25 bp, Homo sapien
tggccacctggaagctgtagcagac

SEQ ID NO: 2881442 - DNA, 25 bp, Homo sapien
tagcagacaagatcttccatggtca

SEQ ID NO: 2881443 - DNA, 25 bp, Homo sapien
tcttccatggtcagcgggctcagcc

SEQ ID NO: 2881444 - DNA, 25 bp, Homo sapien
atggtcagcgggctcagccacaggt

SEQ ID NO: 2881445 - DNA, 25 bp, Homo sapien
gcgaagaggaccctgtcgctgctcc

SEQ ID NO: 2881446 - DNA, 25 bp, Homo sapien
cctcggtcttcgagaaccgcgcgaa

SEQ ID NO: 2881447 - DNA, 25 bp, Homo sapien
tggcgagctccaccatggcgcggaa

SEQ ID NO: 2881448 - DNA, 25 bp, Homo sapien
gtccgcgctgctcgggagacttctc

SEQ ID NO: 2881449 - DNA, 25 bp, Homo sapien
cagaactccacgatcaccatgaggg

SEQ ID NO: 2881450 - DNA, 25 bp, Homo sapien
aggttgccgtacttgcagaactcca

SEQ ID NO: 2881451 - DNA, 25 bp, Homo sapien
agttggagaggttgccgtacttgca

SEQ ID NO: 2881452 - DNA, 25 bp, Homo sapien
cccgcttggcgcgcaggaagttgga

SEQ ID NO: 2881453 - DNA, 25 bp, Homo sapien
tggttgccgatgtgaatgaggatct

SEQ ID NO: 2881454 - DNA, 25 bp, Homo sapien
ttgaccacgttgaggtggttgccga

SEQ ID NO: 2881455 - DNA, 25 bp, Homo sapien
agctccgacatcagcgcgcggtgct

SEQ ID NO: 2881456 - DNA, 25 bp, Homo sapien
gtgcacgccccgaggaggttgacca

SEQ ID NO: 2881457 - DNA, 25 bp, Homo sapien
ctggaggggacacgggcctcacacc

SEQ ID NO: 2881458 - DNA, 25 bp, Homo sapien
tggaggggacacgggcctcacaccg

SEQ ID NO: 2881459 - DNA, 25 bp, Homo sapien
taggctgccccttccgcccgctgac

SEQ ID NO: 2881460 - DNA, 25 bp, Homo sapien
cagctaggctgccccttccgcccgc

SEQ ID NO: 2881461 - DNA, 25 bp, Homo sapien
gccccttccgcccgctgaccccaca

SEQ ID NO: 2881462 - DNA, 25 bp, Homo sapien
ctgccccttccgcccgctgacccca

SEQ ID NO: 2881463 - DNA, 25 bp, Homo sapien
tgcccttgtggatgccgaaagcgga

SEQ ID NO: 2881464 - DNA, 25 bp, Homo sapien
gaaggcgccgtagccgagcactctc

SEQ ID NO: 2881465 - DNA, 25 bp, Homo sapien
cgaaggcgccgtagccgagcactct

SEQ ID NO: 2881466 - DNA, 25 bp, Homo sapien
cgaaagcggaggcttccaccacctt

SEQ ID NO: 2881467 - DNA, 25 bp, Homo sapien
gacaggtattcgcattgctcctcca

SEQ ID NO: 2881468 - DNA, 25 bp, Homo sapien
actggctggcatcgtaggacaggta

SEQ ID NO: 2881469 - DNA, 25 bp, Homo sapien
tctcgggggaattcccactggctgg

SEQ ID NO: 2881470 - DNA, 25 bp, Homo sapien
ggtagcccgtcttgatgtctgcgtg

SEQ ID NO: 2881471 - DNA, 25 bp, Homo sapien
gaagaagacagcgatgacgccggta

SEQ ID NO: 2881472 - DNA, 25 bp, Homo sapien
ccgacaaggatcacgatctccatgc

SEQ ID NO: 2881473 - DNA, 25 bp, Homo sapien
cgatgacgccggtaccgacaaggat

SEQ ID NO: 2881474 - DNA, 25 bp, Homo sapien
ccagaagaagacagcgatgacgccg

SEQ ID NO: 2881475 - DNA, 25 bp, Homo sapien
acgctgcacagatagcgtcccgcat

SEQ ID NO: 2881476 - DNA, 25 bp, Homo sapien
tggcggaggagttgacgcagccctt

SEQ ID NO: 2881477 - DNA, 25 bp, Homo sapien
atcctcctcgcgcacgcgctggatg

SEQ ID NO: 2881478 - DNA, 25 bp, Homo sapien
agcccttggcgttgcacacgctgca

SEQ ID NO: 2881479 - DNA, 25 bp, Homo sapien
aagcactgcatctccagcgagtcgc

SEQ ID NO: 2881480 - DNA, 25 bp, Homo sapien
gagtcgctcacgttcaccaggaggt

SEQ ID NO: 2881481 - DNA, 25 bp, Homo sapien
cgtctttgtaccacacgatgctggg

SEQ ID NO: 2881482 - DNA, 25 bp, Homo sapien
tcggtcaagttctgcgtgagccgag

SEQ ID NO: 2881483 - DNA, 25 bp, Homo sapien
tcttgcagtcgagcagaagcgggtt

SEQ ID NO: 2881484 - DNA, 25 bp, Homo sapien
cgtacttgtagctgtcggcttggca

SEQ ID NO: 2881485 - DNA, 25 bp, Homo sapien
tggccctctagtagctcctcggatg

SEQ ID NO: 2881486 - DNA, 25 bp, Homo sapien
cttggattcgatggtgaagccgtcg

SEQ ID NO: 2881487 - DNA, 25 bp, Homo sapien
cagacacgttggcattctggatcac

SEQ ID NO: 2881488 - DNA, 25 bp, Homo sapien
tggcccaccttgttggagaccacac

SEQ ID NO: 2881489 - DNA, 25 bp, Homo sapien
ggcccaccttgttggagaccacaca

SEQ ID NO: 2881490 - DNA, 25 bp, Homo sapien
gcattctggatcaccagcttgctca

SEQ ID NO: 2881491 - DNA, 25 bp, Homo sapien
tcgatggggttcacggcatcctgcg

SEQ ID NO: 2881492 - DNA, 25 bp, Homo sapien
gtgtccaggctctcgatggggttca

SEQ ID NO: 2881493 - DNA, 25 bp, Homo sapien
cagtcacggcactgtggcatgaggt

SEQ ID NO: 2881494 - DNA, 25 bp, Homo sapien
atcctgcgtggtcaccgccctccag

SEQ ID NO: 2881495 - DNA, 25 bp, Homo sapien
gactacgctgggcaaacatcttgca

SEQ ID NO: 2881496 - DNA, 25 bp, Homo sapien
accccgtaggccgtgcaggtgaggg

SEQ ID NO: 2881497 - DNA, 25 bp, Homo sapien
cggctgtgacgcgagtagatgctgg

SEQ ID NO: 2881498 - DNA, 25 bp, Homo sapien
ccagtgccactggatgctgagaggc

SEQ ID NO: 2881499 - DNA, 25 bp, Homo sapien
catgtggactgtggcgcccggacag

SEQ ID NO: 2881500 - DNA, 25 bp, Homo sapien
gctccaggctgatgttgcgcctcag

SEQ ID NO: 2881501 - DNA, 25 bp, Homo sapien
cacagggcgagggtgtaggtgcctg

SEQ ID NO: 2881502 - DNA, 25 bp, Homo sapien
ccagcagcggagttccacagggcga

SEQ ID NO: 2881503 - DNA, 25 bp, Homo sapien
gggactccagcagcttgtcggcctc

SEQ ID NO: 2881504 - DNA, 25 bp, Homo sapien
gatcggggatctgcggggactccag

SEQ ID NO: 2881505 - DNA, 25 bp, Homo sapien
ttgcagatcggggatctgcggggac

SEQ ID NO: 2881506 - DNA, 25 bp, Homo sapien
gcagatcggggatctgcggggactc

SEQ ID NO: 2881507 - DNA, 25 bp, Homo sapien
cctttgagccactcgacgctgatga

SEQ ID NO: 2881508 - DNA, 25 bp, Homo sapien
tgagccactcgacgctgatgaaggg

SEQ ID NO: 2881509 - DNA, 25 bp, Homo sapien
gtcctttgagccactcgacgctgat

SEQ ID NO: 2881510 - DNA, 25 bp, Homo sapien
cactcgacgctgatgaagggatttt

SEQ ID NO: 2881511 - DNA, 25 bp, Homo sapien
tgggagcgtcgctcgggcacccact

SEQ ID NO: 2881512 - DNA, 25 bp, Homo sapien
caatgacctcggtgctctcccgaaa

SEQ ID NO: 2881513 - DNA, 25 bp, Homo sapien
catacgagcccaggtcgtgctggct

SEQ ID NO: 2881514 - DNA, 25 bp, Homo sapien
gatgccgttgttggccttgcacaca

SEQ ID NO: 2881515 - DNA, 25 bp, Homo sapien
tcctgcacagctaccccaccgaagg

SEQ ID NO: 2881516 - DNA, 25 bp, Homo sapien
taccccaccgaaggcacacctccca

SEQ ID NO: 2881517 - DNA, 25 bp, Homo sapien
gcacagctaccccaccgaaggcaca

SEQ ID NO: 2881518 - DNA, 25 bp, Homo sapien
agctaccccaccgaaggcacacctc

SEQ ID NO: 2881519 - DNA, 25 bp, Homo sapien
ttaaactcagcccacacggtgcagt

SEQ ID NO: 2881520 - DNA, 25 bp, Homo sapien
aaggtgacacctgagttaaactcag

SEQ ID NO: 2881521 - DNA, 25 bp, Homo sapien
agctggatgtcatagagctcgttgc

SEQ ID NO: 2881522 - DNA, 25 bp, Homo sapien
gcagctccagcgacttcctgggcaa

SEQ ID NO: 2881523 - DNA, 25 bp, Homo sapien
cgtctggccacagcaccgagctttg

SEQ ID NO: 2881524 - DNA, 25 bp, Homo sapien
tccccaggtggtctcgcactgcagg

SEQ ID NO: 2881525 - DNA, 25 bp, Homo sapien
cagtggcgtggacacgagcatgccc

SEQ ID NO: 2881526 - DNA, 25 bp, Homo sapien
actgcaggtacagggcatcgtgcag

SEQ ID NO: 2881527 - DNA, 25 bp, Homo sapien
ccttcctgttgaccaagagcgtgtc

SEQ ID NO: 2881528 - DNA, 25 bp, Homo sapien
gggcacccacatggcgtccttcctg

SEQ ID NO: 2881529 - DNA, 25 bp, Homo sapien
cggggatggacaccagacagggcac

SEQ ID NO: 2881530 - DNA, 25 bp, Homo sapien
tgttgaccaagagcgtgtcaggctt

SEQ ID NO: 2881531 - DNA, 25 bp, Homo sapien
tctcacgaacacgtaggagctggcg

SEQ ID NO: 2881532 - DNA, 25 bp, Homo sapien
aacaccttgcagtagggcctggcgt

SEQ ID NO: 2881533 - DNA, 25 bp, Homo sapien
tacttgtagtagcagacgtagctgc

SEQ ID NO: 2881534 - DNA, 25 bp, Homo sapien
tggcatgtacctcgtgcagcagcaa

SEQ ID NO: 2881535 - DNA, 25 bp, Homo sapien
actcctccgtgatgttcaaggtcgg

SEQ ID NO: 2881536 - DNA, 25 bp, Homo sapien
atggacaggctgtcaccggtgtcga

SEQ ID NO: 2881537 - DNA, 25 bp, Homo sapien
ggtcatggagtagccactcaccagg

SEQ ID NO: 2881538 - DNA, 25 bp, Homo sapien
caccggtgtcgatgacgtgtgactc

SEQ ID NO: 2881539 - DNA, 25 bp, Homo sapien
ctgggcattctgcatcgcaagcgca

SEQ ID NO: 2881540 - DNA, 25 bp, Homo sapien
ctgggctgtgacttggcacgacgtt

SEQ ID NO: 2881541 - DNA, 25 bp, Homo sapien
ctgtgacttggcacgacgttgatgg

SEQ ID NO: 2881542 - DNA, 25 bp, Homo sapien
ttctcagccagcaccgcgtggcctg

SEQ ID NO: 2881543 - DNA, 25 bp, Homo sapien
cctgaatgcttggtttgctacagct

SEQ ID NO: 2881544 - DNA, 25 bp, Homo sapien
tcctgaatgcttggtttgctacagc

SEQ ID NO: 2881545 - DNA, 25 bp, Homo sapien
ccctgtgttgtcgtcagagcatggg

SEQ ID NO: 2881546 - DNA, 25 bp, Homo sapien
tcactgtgaccctgtgttgtcgtca

SEQ ID NO: 2881547 - DNA, 25 bp, Homo sapien
gtccctttggggcagaatggagaca

SEQ ID NO: 2881548 - DNA, 25 bp, Homo sapien
ctggtgcttatcttgtgggtgagtt

SEQ ID NO: 2881549 - DNA, 25 bp, Homo sapien
ggccctgaaggctcatttacagcag

SEQ ID NO: 2881550 - DNA, 25 bp, Homo sapien
tacagcagtccctttggggcagaat

SEQ ID NO: 2881551 - DNA, 25 bp, Homo sapien
gctgctaaatcggggccaccagctc

SEQ ID NO: 2881552 - DNA, 25 bp, Homo sapien
ccagtgctgctaaatcggggccacc

SEQ ID NO: 2881553 - DNA, 25 bp, Homo sapien
cagtgctgctaaatcggggccacca

SEQ ID NO: 2881554 - DNA, 25 bp, Homo sapien
gtgctgctaaatcggggccaccagc

SEQ ID NO: 2881555 - DNA, 25 bp, Homo sapien
tcctcagtgtgaccggaaaacccag

SEQ ID NO: 2881556 - DNA, 25 bp, Homo sapien
tggtgcgggcctcagacagggccgg

SEQ ID NO: 2881557 - DNA, 25 bp, Homo sapien
ccgtgggctagggtggtgcgggcct

SEQ ID NO: 2881558 - DNA, 25 bp, Homo sapien
tcctccgggaatgaatgcccgcatc

SEQ ID NO: 2881559 - DNA, 25 bp, Homo sapien
gagggggaagcccgcctcgagcgcc

SEQ ID NO: 2881560 - DNA, 25 bp, Homo sapien
ggagggggaagcccgcctcgagcgc

SEQ ID NO: 2881561 - DNA, 25 bp, Homo sapien
tcaagtgccagcgtgcacctgcacc

SEQ ID NO: 2881562 - DNA, 25 bp, Homo sapien
cccggccagccccacgctcgggcgg

SEQ ID NO: 2881563 - DNA, 25 bp, Homo sapien
gccagccccacgctcgggcgggtgg

SEQ ID NO: 2881564 - DNA, 25 bp, Homo sapien
cgggtggcccgttcgccgcgctcac

SEQ ID NO: 2881565 - DNA, 25 bp, Homo sapien
ggcgggtggcccgttcgccgcgctc

SEQ ID NO: 2881566 - DNA, 25 bp, Homo sapien
ggcagagccacagtcgcaggcacag

SEQ ID NO: 2881567 - DNA, 25 bp, Homo sapien
gctcggggctgaaagtgtccgcgcg

SEQ ID NO: 2881568 - DNA, 25 bp, Homo sapien
ctgcgcgtgggtccgacccgagcgg

SEQ ID NO: 2881569 - DNA, 25 bp, Homo sapien
ggtccgacccgagcggccgcggctc

SEQ ID NO: 2881570 - DNA, 25 bp, Homo sapien
cgcggctcggggctgaaagtgtccg

SEQ ID NO: 2881571 - DNA, 25 bp, Homo sapien
tccacgccggctttacgatcagtaa

SEQ ID NO: 2881572 - DNA, 25 bp, Homo sapien
ttaaggttctcccgtcactgaggcc

SEQ ID NO: 2881573 - DNA, 25 bp, Homo sapien
actgaggccagcatgcgctgaccac

SEQ ID NO: 2881574 - DNA, 25 bp, Homo sapien
aaagggcatcaataccctgaggcgg

SEQ ID NO: 2881575 - DNA, 25 bp, Homo sapien
gttgtcctcgcagcgttaaggcgag

SEQ ID NO: 2881576 - DNA, 25 bp, Homo sapien
tcgttgtcctcgcagcgttaaggcg

SEQ ID NO: 2881577 - DNA, 25 bp, Homo sapien
tgtcctcgcagcgttaaggcgagtc

SEQ ID NO: 2881578 - DNA, 25 bp, Homo sapien
cctcgcagcgttaaggcgagtctgg

SEQ ID NO: 2881579 - DNA, 25 bp, Homo sapien
tccgggcgccggacgagctccttta

SEQ ID NO: 2881580 - DNA, 25 bp, Homo sapien
cagagcccgcgtgtgcgcgatgtgg

SEQ ID NO: 2881581 - DNA, 25 bp, Homo sapien
cgagctcctttatcagaaagggcag

SEQ ID NO: 2881582 - DNA, 25 bp, Homo sapien
ttcagggcctccggtgcgcgcagtc

SEQ ID NO: 2881583 - DNA, 25 bp, Homo sapien
cggctcttctgcccttgtcctggcc

SEQ ID NO: 2881584 - DNA, 25 bp, Homo sapien
ttgtcctggccgcacagcaggggct

SEQ ID NO: 2881585 - DNA, 25 bp, Homo sapien
ctgcccttgtcctggccgcacagca

SEQ ID NO: 2881586 - DNA, 25 bp, Homo sapien
tcttctgcccttgtcctggccgcac

SEQ ID NO: 2881587 - DNA, 25 bp, Homo sapien
tcacggcatagcacaggcatcgcct

SEQ ID NO: 2881588 - DNA, 25 bp, Homo sapien
gtggcattcggcaccatcacggcat

SEQ ID NO: 2881589 - DNA, 25 bp, Homo sapien
tcgggacatttcacctggacctttg

SEQ ID NO: 2881590 - DNA, 25 bp, Homo sapien
gcgattacgaaaagtgctgtcaggg

SEQ ID NO: 2881591 - DNA, 25 bp, Homo sapien
taatgccatgggctactgcactgaa

SEQ ID NO: 2881592 - DNA, 25 bp, Homo sapien
cagagtcacagcactcgggagtgat

SEQ ID NO: 2881593 - DNA, 25 bp, Homo sapien
taagccaagttactccagcagttgc

SEQ ID NO: 2881594 - DNA, 25 bp, Homo sapien
cacatgggcctatgcttcagagcca

SEQ ID NO: 2881595 - DNA, 25 bp, Homo sapien
gcagggccctcgaggttaatgagac

SEQ ID NO: 2881596 - DNA, 25 bp, Homo sapien
aggccgccgaatgacctggaagcca

SEQ ID NO: 2881597 - DNA, 25 bp, Homo sapien
tgagagctggcagcgctcgctcgat

SEQ ID NO: 2881598 - DNA, 25 bp, Homo sapien
gggccctcgaggttaatgagacaca

SEQ ID NO: 2881599 - DNA, 25 bp, Homo sapien
ctgctcgcaggagacaacccagata

SEQ ID NO: 2881600 - DNA, 25 bp, Homo sapien
tcgcaggagacaacccagatagatc

SEQ ID NO: 2881601 - DNA, 25 bp, Homo sapien
ggagacaacccagatagatcaaaag

SEQ ID NO: 2881602 - DNA, 25 bp, Homo sapien
caggagacaacccagatagatcaaa

SEQ ID NO: 2881603 - DNA, 25 bp, Homo sapien
cgcacttggtatcaagattctcccg

SEQ ID NO: 2881604 - DNA, 25 bp, Homo sapien
tggtatcaagattctcccgatctgg

SEQ ID NO: 2881605 - DNA, 25 bp, Homo sapien
caagattctcccgatctggtgaagg

SEQ ID NO: 2881606 - DNA, 25 bp, Homo sapien
ccgatctggtgaaggcagtgttgct

SEQ ID NO: 2881607 - DNA, 25 bp, Homo sapien
aggatgaagtgttgactgatgcggg

SEQ ID NO: 2881608 - DNA, 25 bp, Homo sapien
ctgatgcggggatggaattttgttt

SEQ ID NO: 2881609 - DNA, 25 bp, Homo sapien
ttgactgatgcggggatggaatttt

SEQ ID NO: 2881610 - DNA, 25 bp, Homo sapien
aaggatgaagtgttgactgatgcgg

SEQ ID NO: 2881611 - DNA, 25 bp, Homo sapien
aggtcccaagaatccagcgagggaa

SEQ ID NO: 2881612 - DNA, 25 bp, Homo sapien
cgagtgtgctgcctggatcaggtcc

SEQ ID NO: 2881613 - DNA, 25 bp, Homo sapien
cagcgagggaaaccgccaattctgg

SEQ ID NO: 2881614 - DNA, 25 bp, Homo sapien
aatccagcgagggaaaccgccaatt

SEQ ID NO: 2881615 - DNA, 25 bp, Homo sapien
gctgaaggacctctggcagccttgg

SEQ ID NO: 2881616 - DNA, 25 bp, Homo sapien
ggacacaggactggcgtgtgtggag

SEQ ID NO: 2881617 - DNA, 25 bp, Homo sapien
tgagagcacgggcggagctgctgct

SEQ ID NO: 2881618 - DNA, 25 bp, Homo sapien
ggaggtgggtgagagcacgggcgga

SEQ ID NO: 2881619 - DNA, 25 bp, Homo sapien
gtgaagggcaggcaatggacgccat

SEQ ID NO: 2881620 - DNA, 25 bp, Homo sapien
tccgtaggctgaacaacaccgggtg

SEQ ID NO: 2881621 - DNA, 25 bp, Homo sapien
gggtgagccttactgcaaactctag

SEQ ID NO: 2881622 - DNA, 25 bp, Homo sapien
gtctgggtgatgaatgacattatga

SEQ ID NO: 2881623 - DNA, 25 bp, Homo sapien
catgttttgagtgtgaaacttttct

SEQ ID NO: 2881624 - DNA, 25 bp, Homo sapien
caacgtcagagtggtctgaagtgtg

SEQ ID NO: 2881625 - DNA, 25 bp, Homo sapien
tgaagtgtgggacactgaagaatgt

SEQ ID NO: 2881626 - DNA, 25 bp, Homo sapien
agtgtagcaacgtcagagtggtctg

SEQ ID NO: 2881627 - DNA, 25 bp, Homo sapien
ctgaagtgtgggacactgaagaatg

SEQ ID NO: 2881628 - DNA, 25 bp, Homo sapien
tgtgcgtagattcctgctgatccaa

SEQ ID NO: 2881629 - DNA, 25 bp, Homo sapien
tatgcgctctaaatctgtgcgtaga

SEQ ID NO: 2881630 - DNA, 25 bp, Homo sapien
ggcgcatatgcgctctaaatctgtg

SEQ ID NO: 2881631 - DNA, 25 bp, Homo sapien
gggcaaattaggatcagggcgcata

SEQ ID NO: 2881632 - DNA, 25 bp, Homo sapien
aaaataaagacagctgttgacatct

SEQ ID NO: 2881633 - DNA, 25 bp, Homo sapien
aaataaagacagctgttgacatctt

SEQ ID NO: 2881634 - DNA, 25 bp, Homo sapien
agaaaataaagacagctgttgacat

SEQ ID NO: 2881635 - DNA, 25 bp, Homo sapien
gaaaataaagacagctgttgacatc

SEQ ID NO: 2881636 - DNA, 25 bp, Homo sapien
ggcagcaatggtataaacaagagga

SEQ ID NO: 2881637 - DNA, 25 bp, Homo sapien
gagtagttactcttcagctgaagac

SEQ ID NO: 2881638 - DNA, 25 bp, Homo sapien
gttccatagaacagcaagaccacca

SEQ ID NO: 2881639 - DNA, 25 bp, Homo sapien
gaatctgagagtagttactcttcag

SEQ ID NO: 2881640 - DNA, 25 bp, Homo sapien
ctggaagggcaaggatgatcacacg

SEQ ID NO: 2881641 - DNA, 25 bp, Homo sapien
ttcaattcagttgggccggtgtcca

SEQ ID NO: 2881642 - DNA, 25 bp, Homo sapien
ggatgatcacacgagcaattaacat

SEQ ID NO: 2881643 - DNA, 25 bp, Homo sapien
tccacgcaggacagcttgacaatga

SEQ ID NO: 2881644 - DNA, 25 bp, Homo sapien
aaatggtggttagtgaagagtgaaa

SEQ ID NO: 2881645 - DNA, 25 bp, Homo sapien
aaatggtccacacggcggtggccac

SEQ ID NO: 2881646 - DNA, 25 bp, Homo sapien
agaaatggtccacacggcggtggcc

SEQ ID NO: 2881647 - DNA, 25 bp, Homo sapien
tccacacggcggtggccacacagag

SEQ ID NO: 2881648 - DNA, 25 bp, Homo sapien
cagatctgttggtgcatgattgtaa

SEQ ID NO: 2881649 - DNA, 25 bp, Homo sapien
attgtaacatagtgaaggggccagc

SEQ ID NO: 2881650 - DNA, 25 bp, Homo sapien
agtggcagatctgttggtgcatgat

SEQ ID NO: 2881651 - DNA, 25 bp, Homo sapien
gatctgttggtgcatgattgtaaca

SEQ ID NO: 2881652 - DNA, 25 bp, Homo sapien
acggtccacagccatgatagcaaga

SEQ ID NO: 2881653 - DNA, 25 bp, Homo sapien
catctgaaggacaatgcaggtggtg

SEQ ID NO: 2881654 - DNA, 25 bp, Homo sapien
tacagaatactgaaccatgcagcct

SEQ ID NO: 2881655 - DNA, 25 bp, Homo sapien
tgagagctttcggaggaagaagtac

SEQ ID NO: 2881656 - DNA, 25 bp, Homo sapien
agccggtagtccagcagagagacca

SEQ ID NO: 2881657 - DNA, 25 bp, Homo sapien
tgtagaacccggagacaaacagaga

SEQ ID NO: 2881658 - DNA, 25 bp, Homo sapien
agacaaacagagaaaggatgaactc

SEQ ID NO: 2881659 - DNA, 25 bp, Homo sapien
gtagaacccggagacaaacagagaa

SEQ ID NO: 2881660 - DNA, 25 bp, Homo sapien
tgagaagccaactaagatgaagtct

SEQ ID NO: 2881661 - DNA, 25 bp, Homo sapien
ccaactaagatgaagtcttcccctg

SEQ ID NO: 2881662 - DNA, 25 bp, Homo sapien
gaagccaactaagatgaagtcttcc

SEQ ID NO: 2881663 - DNA, 25 bp, Homo sapien
ttctgagaagccaactaagatgaag

SEQ ID NO: 2881664 - DNA, 25 bp, Homo sapien
tgtagcacttgaaatagaatcaagt

SEQ ID NO: 2881665 - DNA, 25 bp, Homo sapien
tgaaatagaatcaagtgtactctat

SEQ ID NO: 2881666 - DNA, 25 bp, Homo sapien
gcacttgaaatagaatcaagtgtac

SEQ ID NO: 2881667 - DNA, 25 bp, Homo sapien
tttgtagcacttgaaatagaatcaa

SEQ ID NO: 2881668 - DNA, 25 bp, Homo sapien
aaaagaccacgtatatcaataatga

SEQ ID NO: 2881669 - DNA, 25 bp, Homo sapien
cttttaaaagaccacgtatatcaat

SEQ ID NO: 2881670 - DNA, 25 bp, Homo sapien
agcttttaaaagaccacgtatatca

SEQ ID NO: 2881671 - DNA, 25 bp, Homo sapien
tttaaaagaccacgtatatcaataa

SEQ ID NO: 2881672 - DNA, 25 bp, Homo sapien
tcagatagctaagtctatagtgacg

SEQ ID NO: 2881673 - DNA, 25 bp, Homo sapien
tgagacattgatccatgctaaaacg

SEQ ID NO: 2881674 - DNA, 25 bp, Homo sapien
tatgattccacgtatgtgaagtgaa

SEQ ID NO: 2881675 - DNA, 25 bp, Homo sapien
tatagtgacgaagttgtagtttgct

SEQ ID NO: 2881676 - DNA, 25 bp, Homo sapien
aggatggagcctctccaagatgtga

SEQ ID NO: 2881677 - DNA, 25 bp, Homo sapien
ttcatcctgttgatctggtgctgaa

SEQ ID NO: 2881678 - DNA, 25 bp, Homo sapien
tcatcctgttgatctggtgctgaaa

SEQ ID NO: 2881679 - DNA, 25 bp, Homo sapien
catcctgttgatctggtgctgaaag

SEQ ID NO: 2881680 - DNA, 25 bp, Homo sapien
attcatcctgttgatctggtgctga

SEQ ID NO: 2881681 - DNA, 25 bp, Homo sapien
ggtgaccacaggtatcggctggtgg

SEQ ID NO: 2881682 - DNA, 25 bp, Homo sapien
cacaggtatcggctggtggcaaatt

SEQ ID NO: 2881683 - DNA, 25 bp, Homo sapien
gaccacaggtatcggctggtggcaa

SEQ ID NO: 2881684 - DNA, 25 bp, Homo sapien
caggtatcggctggtggcaaatttg

SEQ ID NO: 2881685 - DNA, 25 bp, Homo sapien
ccataagggcaaaggcaactcttct

SEQ ID NO: 2881686 - DNA, 25 bp, Homo sapien
gaaaagaatttgatacggatggaag

SEQ ID NO: 2881687 - DNA, 25 bp, Homo sapien
gaatttgatacggatggaagactcc

SEQ ID NO: 2881688 - DNA, 25 bp, Homo sapien
ggcaaaggcaactcttctcttaata

SEQ ID NO: 2881689 - DNA, 25 bp, Homo sapien
cccttcacgtccttgtttcttagtg

SEQ ID NO: 2881690 - DNA, 25 bp, Homo sapien
atagtactttccacagagccccctt

SEQ ID NO: 2881691 - DNA, 25 bp, Homo sapien
cgtccttgtttcttagtgtataaat

SEQ ID NO: 2881692 - DNA, 25 bp, Homo sapien
tataaatgagaggattgagaatggg

SEQ ID NO: 2881693 - DNA, 25 bp, Homo sapien
tggattggagatatgtgtagatggc

SEQ ID NO: 2881694 - DNA, 25 bp, Homo sapien
gtagatggctgagccataaaaaagg

SEQ ID NO: 2881695 - DNA, 25 bp, Homo sapien
tggatggattggagatatgtgtaga

SEQ ID NO: 2881696 - DNA, 25 bp, Homo sapien
atgtgtagatggctgagccataaaa

SEQ ID NO: 2881697 - DNA, 25 bp, Homo sapien
ttctgcgcccagccgttgacttcac

SEQ ID NO: 2881698 - DNA, 25 bp, Homo sapien
tttctgcgcccagccgttgacttca

SEQ ID NO: 2881699 - DNA, 25 bp, Homo sapien
ctttctgcgcccagccgttgacttc

SEQ ID NO: 2881700 - DNA, 25 bp, Homo sapien
tgtgtccgcacaagccaacttcaga

SEQ ID NO: 2881701 - DNA, 25 bp, Homo sapien
tgcaggaacagccacgactatgact

SEQ ID NO: 2881702 - DNA, 25 bp, Homo sapien
tatgactcgggccacaaacatcttg

SEQ ID NO: 2881703 - DNA, 25 bp, Homo sapien
tgattcagtcgatggccacagagag

SEQ ID NO: 2881704 - DNA, 25 bp, Homo sapien
cctcctatactgagcacaagctaca

SEQ ID NO: 2881705 - DNA, 25 bp, Homo sapien
caagctacaacattatttcgcagga

SEQ ID NO: 2881706 - DNA, 25 bp, Homo sapien
ctatactgagcacaagctacaacat

SEQ ID NO: 2881707 - DNA, 25 bp, Homo sapien
acaagctacaacattatttcgcagg

SEQ ID NO: 2881708 - DNA, 25 bp, Homo sapien
accagctctttgacaggtccttaga

SEQ ID NO: 2881709 - DNA, 25 bp, Homo sapien
cagctctttgacaggtccttagaaa

SEQ ID NO: 2881710 - DNA, 25 bp, Homo sapien
ccagctctttgacaggtccttagaa

SEQ ID NO: 2881711 - DNA, 25 bp, Homo sapien
agctctttgacaggtccttagaaat

SEQ ID NO: 2881712 - DNA, 25 bp, Homo sapien
tagaaccagtctcctagatgacact

SEQ ID NO: 2881713 - DNA, 25 bp, Homo sapien
catgtcagtggaaagagtatggttc

SEQ ID NO: 2881714 - DNA, 25 bp, Homo sapien
cccacccttggatgctgatgagtaa

SEQ ID NO: 2881715 - DNA, 25 bp, Homo sapien
ggcaaaatattcctcgttggatcat

SEQ ID NO: 2881716 - DNA, 25 bp, Homo sapien
cagttctacccagggaattgtgacc

SEQ ID NO: 2881717 - DNA, 25 bp, Homo sapien
tctgtgagcttccaagagaggagga

SEQ ID NO: 2881718 - DNA, 25 bp, Homo sapien
tcccgcagccaaggaatgagacctg

SEQ ID NO: 2881719 - DNA, 25 bp, Homo sapien
gagacctgacctcgtgctaagaaga

SEQ ID NO: 2881720 - DNA, 25 bp, Homo sapien
cacgcgtaaacacacgttaagggag

SEQ ID NO: 2881721 - DNA, 25 bp, Homo sapien
tgtaatacgaaaagccagtagctgg

SEQ ID NO: 2881722 - DNA, 25 bp, Homo sapien
tgaggaagacgtctggaaggataca

SEQ ID NO: 2881723 - DNA, 25 bp, Homo sapien
tgctctgagggcttcgtctccgttt

SEQ ID NO: 2881724 - DNA, 25 bp, Homo sapien
tgaggccaaccctggtatcagctgt

SEQ ID NO: 2881725 - DNA, 25 bp, Homo sapien
tatcagctgtgtaccctgaggctcc

SEQ ID NO: 2881726 - DNA, 25 bp, Homo sapien
cggcacgtcataaagggcactcaat

SEQ ID NO: 2881727 - DNA, 25 bp, Homo sapien
tttgggagtccaagcgccactgtga

SEQ ID NO: 2881728 - DNA, 25 bp, Homo sapien
tcctgccatggcgtcctggcctgtg

SEQ ID NO: 2881729 - DNA, 25 bp, Homo sapien
ccatggcgtcctggcctgtgaggac

SEQ ID NO: 2881730 - DNA, 25 bp, Homo sapien
tcctctccatcctgccatggcgtcc

SEQ ID NO: 2881731 - DNA, 25 bp, Homo sapien
tctccatcctgccatggcgtcctgg

SEQ ID NO: 2881732 - DNA, 25 bp, Homo sapien
ccacctggtcactgctccacctcat

SEQ ID NO: 2881733 - DNA, 25 bp, Homo sapien
ggagcctgtgtgtcaaaccccaggg

SEQ ID NO: 2881734 - DNA, 25 bp, Homo sapien
caggcagatcgaattctgtcttcta

SEQ ID NO: 2881735 - DNA, 25 bp, Homo sapien
aagggacaggcagatcgaattctgt

SEQ ID NO: 2881736 - DNA, 25 bp, Homo sapien
tgatctgactcccttgagaacggga

SEQ ID NO: 2881737 - DNA, 25 bp, Homo sapien
gaactataaactgctaggctgcaag

SEQ ID NO: 2881738 - DNA, 25 bp, Homo sapien
caggacgtggacatttctggcccca

SEQ ID NO: 2881739 - DNA, 25 bp, Homo sapien
tcaagagagcgaacgttgccaaact

SEQ ID NO: 2881740 - DNA, 25 bp, Homo sapien
tggaaggtgacaataccccggtagc

SEQ ID NO: 2881741 - DNA, 25 bp, Homo sapien
aagctgtccctgcccgtatactgca

SEQ ID NO: 2881742 - DNA, 25 bp, Homo sapien
acccccgacttaaggtcatccatga

SEQ ID NO: 2881743 - DNA, 25 bp, Homo sapien
attccagctaggatcatagccctcc

SEQ ID NO: 2881744 - DNA, 25 bp, Homo sapien
taggtggcccgaaagtactcgaaga

SEQ ID NO: 2881745 - DNA, 25 bp, Homo sapien
tggtcaaagaactgcccgtggctca

SEQ ID NO: 2881746 - DNA, 25 bp, Homo sapien
tcccgctgcaggtaagacaggtcca

SEQ ID NO: 2881747 - DNA, 25 bp, Homo sapien
agatctcagggcgtatgcaggcccg

SEQ ID NO: 2881748 - DNA, 25 bp, Homo sapien
ccgagggccgataatgcagcagctt

SEQ ID NO: 2881749 - DNA, 25 bp, Homo sapien
tggcgcgcgatcttgtagtagccct

SEQ ID NO: 2881750 - DNA, 25 bp, Homo sapien
tagtagccctggaacttgcggtggt

SEQ ID NO: 2881751 - DNA, 25 bp, Homo sapien
aacagtgctgcggtcacaggcgatg

SEQ ID NO: 2881752 - DNA, 25 bp, Homo sapien
tgctgggcgcgtccagaagaagagg

SEQ ID NO: 2881753 - DNA, 25 bp, Homo sapien
ggtcgccatcgagagcgctgactga

SEQ ID NO: 2881754 - DNA, 25 bp, Homo sapien
gctgactgagggtggcctgccaggt

SEQ ID NO: 2881755 - DNA, 25 bp, Homo sapien
aggccacaaagaggatagcgcccca

SEQ ID NO: 2881756 - DNA, 25 bp, Homo sapien
ccaggggacggttcaaggctgccct

SEQ ID NO: 2881757 - DNA, 25 bp, Homo sapien
agggatgcctcctctggactatggg

SEQ ID NO: 2881758 - DNA, 25 bp, Homo sapien
tgcctcctctggactatgggattag

SEQ ID NO: 2881759 - DNA, 25 bp, Homo sapien
cctctggactatgggattaggaggc

SEQ ID NO: 2881760 - DNA, 25 bp, Homo sapien
aaaccgtcacacaaaggctcgtggc

SEQ ID NO: 2881761 - DNA, 25 bp, Homo sapien
aagcaaaccgtcacacaaaggctcg

SEQ ID NO: 2881762 - DNA, 25 bp, Homo sapien
acacaaaggctcgtggctccatgcc

SEQ ID NO: 2881763 - DNA, 25 bp, Homo sapien
agagagaaagcaaaccgtcacacaa

SEQ ID NO: 2881764 - DNA, 25 bp, Homo sapien
tctgcacacatagagagcaaatgga

SEQ ID NO: 2881765 - DNA, 25 bp, Homo sapien
tagaggaccaggatagatgcaactt

SEQ ID NO: 2881766 - DNA, 25 bp, Homo sapien
cataaaactgccgaaaatagaaact

SEQ ID NO: 2881767 - DNA, 25 bp, Homo sapien
agggcagtagggtagttactacaca

SEQ ID NO: 2881768 - DNA, 25 bp, Homo sapien
gaagctatttccacacgaagtttct

SEQ ID NO: 2881769 - DNA, 25 bp, Homo sapien
ggcacatcagcaaggcaaattgaga

SEQ ID NO: 2881770 - DNA, 25 bp, Homo sapien
gatattgcccatagctctgaagagc

SEQ ID NO: 2881771 - DNA, 25 bp, Homo sapien
agatgatctgtttgccctgaattcc

SEQ ID NO: 2881772 - DNA, 25 bp, Homo sapien
acgacgtgtatcacacacctgctct

SEQ ID NO: 2881773 - DNA, 25 bp, Homo sapien
ctgacgacgtgtatcacacacctgc

SEQ ID NO: 2881774 - DNA, 25 bp, Homo sapien
tgacgacgtgtatcacacacctgct

SEQ ID NO: 2881775 - DNA, 25 bp, Homo sapien
gacgacgtgtatcacacacctgctc

SEQ ID NO: 2881776 - DNA, 25 bp, Homo sapien
aaagactctatgacctctgtgccca

SEQ ID NO: 2881777 - DNA, 25 bp, Homo sapien
agtgcttggcacatgtatgaggttc

SEQ ID NO: 2881778 - DNA, 25 bp, Homo sapien
catgtatgaggttcaagtggctgga

SEQ ID NO: 2881779 - DNA, 25 bp, Homo sapien
ttaggaaaaaagactctatgacctc

SEQ ID NO: 2881780 - DNA, 25 bp, Homo sapien
gtgcccaggcgcgtcccaagcgctg

SEQ ID NO: 2881781 - DNA, 25 bp, Homo sapien
ggccgcctcgcctttcgactcgcca

SEQ ID NO: 2881782 - DNA, 25 bp, Homo sapien
gcttctcagtcaacccaggacccaa

SEQ ID NO: 2881783 - DNA, 25 bp, Homo sapien
ggagtcggctttccggctccctggc

SEQ ID NO: 2881784 - DNA, 25 bp, Homo sapien
caggagtaaagtctggccgggagga

SEQ ID NO: 2881785 - DNA, 25 bp, Homo sapien
tcgccagcgatcaggtctgaggcct

SEQ ID NO: 2881786 - DNA, 25 bp, Homo sapien
agcgcacagagccagtttcgccagc

SEQ ID NO: 2881787 - DNA, 25 bp, Homo sapien
gcctggattccacgaggccggtgca

SEQ ID NO: 2881788 - DNA, 25 bp, Homo sapien
gtgagggtgggtagccgaggactac

SEQ ID NO: 2881789 - DNA, 25 bp, Homo sapien
tgagggtgggtagccgaggactaca

SEQ ID NO: 2881790 - DNA, 25 bp, Homo sapien
gagggtgggtagccgaggactacag

SEQ ID NO: 2881791 - DNA, 25 bp, Homo sapien
tgtacacggccctggatacttttca

SEQ ID NO: 2881792 - DNA, 25 bp, Homo sapien
cgatgttattgtttcctgtgtacac

SEQ ID NO: 2881793 - DNA, 25 bp, Homo sapien
cacgtagagcaacatcgatgttatt

SEQ ID NO: 2881794 - DNA, 25 bp, Homo sapien
gctcctcgtaacaacttgtaaggga

SEQ ID NO: 2881795 - DNA, 25 bp, Homo sapien
ccagtgtactcatctggataagatt

SEQ ID NO: 2881796 - DNA, 25 bp, Homo sapien
ctgaatagtagcctccgcgaactcg

SEQ ID NO: 2881797 - DNA, 25 bp, Homo sapien
gagtaatggagaggtgtagcttcca

SEQ ID NO: 2881798 - DNA, 25 bp, Homo sapien
ttcctgaatagtagcctccgcgaac

SEQ ID NO: 2881799 - DNA, 25 bp, Homo sapien
aggcacagcaagacattaagtggga

SEQ ID NO: 2881800 - DNA, 25 bp, Homo sapien
cacagcaagacattaagtgggaaat

SEQ ID NO: 2881801 - DNA, 25 bp, Homo sapien
gcacagcaagacattaagtgggaaa

SEQ ID NO: 2881802 - DNA, 25 bp, Homo sapien
ggcacagcaagacattaagtgggaa

SEQ ID NO: 2881803 - DNA, 25 bp, Homo sapien
gtctcagttgctctccaggagatca

SEQ ID NO: 2881804 - DNA, 25 bp, Homo sapien
tcttatccaggtccaaagtccatgg

SEQ ID NO: 2881805 - DNA, 25 bp, Homo sapien
caccaaagtgcagcttctctcttct

SEQ ID NO: 2881806 - DNA, 25 bp, Homo sapien
cagatccaccaaagtgcagcttctc

SEQ ID NO: 2881807 - DNA, 25 bp, Homo sapien
actgcagacttcagtgcccctctca

SEQ ID NO: 2881808 - DNA, 25 bp, Homo sapien
cactgcagacttcagtgcccctctc

SEQ ID NO: 2881809 - DNA, 25 bp, Homo sapien
agacttcagtgcccctctcaggggt

SEQ ID NO: 2881810 - DNA, 25 bp, Homo sapien
ctgcagacttcagtgcccctctcag

SEQ ID NO: 2881811 - DNA, 25 bp, Homo sapien
tggtgatggacagatcccagatact

SEQ ID NO: 2881812 - DNA, 25 bp, Homo sapien
tccactgtgagaactggcccatctg

SEQ ID NO: 2881813 - DNA, 25 bp, Homo sapien
ccttattaagctcagagtctggtga

SEQ ID NO: 2881814 - DNA, 25 bp, Homo sapien
cattcagctgccttattaagctcag

SEQ ID NO: 2881815 - DNA, 25 bp, Homo sapien
ctggggctcatgagaagaaacaggc

SEQ ID NO: 2881816 - DNA, 25 bp, Homo sapien
gaagaaacaggccttagaagcggca

SEQ ID NO: 2881817 - DNA, 25 bp, Homo sapien
caggccttagaagcggcatggccca

SEQ ID NO: 2881818 - DNA, 25 bp, Homo sapien
atgagaagaaacaggccttagaagc

SEQ ID NO: 2881819 - DNA, 25 bp, Homo sapien
taaatcctttccagaccgagatgct

SEQ ID NO: 2881820 - DNA, 25 bp, Homo sapien
taaaagatggatcgtacccgttctc

SEQ ID NO: 2881821 - DNA, 25 bp, Homo sapien
tctcaccacagaaaagtaaccggag

SEQ ID NO: 2881822 - DNA, 25 bp, Homo sapien
cactccgcaaggttatacaaagcac

SEQ ID NO: 2881823 - DNA, 25 bp, Homo sapien
gtttaaggcccaagtcctgcttgca

SEQ ID NO: 2881824 - DNA, 25 bp, Homo sapien
ctccaagtttattcgtaaacacaca

SEQ ID NO: 2881825 - DNA, 25 bp, Homo sapien
ggctactcccgagaacactctcctg

SEQ ID NO: 2881826 - DNA, 25 bp, Homo sapien
cactctcctggaatgtttaaggccc

SEQ ID NO: 2881827 - DNA, 25 bp, Homo sapien
ccgcgggtcgcaatccaggccccag

SEQ ID NO: 2881828 - DNA, 25 bp, Homo sapien
gccccgtctcggctaggagccgcgg

SEQ ID NO: 2881829 - DNA, 25 bp, Homo sapien
gcccgccgcgggtcgcaatccaggc

SEQ ID NO: 2881830 - DNA, 25 bp, Homo sapien
gcccgccccgtctcggctaggagcc

SEQ ID NO: 2881831 - DNA, 25 bp, Homo sapien
agtgggccccggcaacgcagcgttc

SEQ ID NO: 2881832 - DNA, 25 bp, Homo sapien
cagaaccaggttgtgagaaggaagc

SEQ ID NO: 2881833 - DNA, 25 bp, Homo sapien
gagactgttctacagccactgttca

SEQ ID NO: 2881834 - DNA, 25 bp, Homo sapien
caccacgggagcgagggaggtgggt

SEQ ID NO: 2881835 - DNA, 25 bp, Homo sapien
taaagtctgggaactcgtgtcgaaa

SEQ ID NO: 2881836 - DNA, 25 bp, Homo sapien
ggaagcctcgcatctccatcagaag

SEQ ID NO: 2881837 - DNA, 25 bp, Homo sapien
caaatgcggagttccctagggctct

SEQ ID NO: 2881838 - DNA, 25 bp, Homo sapien
tagctgggccaaaagtctggtcttg

SEQ ID NO: 2881839 - DNA, 25 bp, Homo sapien
tcccaactcagtcccctcacagata

SEQ ID NO: 2881840 - DNA, 25 bp, Homo sapien
ccaaatatgcatgctcaagtccctt

SEQ ID NO: 2881841 - DNA, 25 bp, Homo sapien
caggcccacatgtccaattccctgc

SEQ ID NO: 2881842 - DNA, 25 bp, Homo sapien
ttttggagggaacacccaaatatgc

SEQ ID NO: 2881843 - DNA, 25 bp, Homo sapien
aaatggcaggccagaagtcttccac

SEQ ID NO: 2881844 - DNA, 25 bp, Homo sapien
tgtctcccggttatttcgtggctct

SEQ ID NO: 2881845 - DNA, 25 bp, Homo sapien
tcagcagtcccgttctcaggaaatg

SEQ ID NO: 2881846 - DNA, 25 bp, Homo sapien
aagcctccgaaagcttgtctcccgg

SEQ ID NO: 2881847 - DNA, 25 bp, Homo sapien
gctgtcaggatgagctttcgttgcc

SEQ ID NO: 2881848 - DNA, 25 bp, Homo sapien
tcaaatgccacgctcctcgaaagtg

SEQ ID NO: 2881849 - DNA, 25 bp, Homo sapien
cgttgccctacgttggaattcactg

SEQ ID NO: 2881850 - DNA, 25 bp, Homo sapien
tggaattcactgtggcacagctgtc

SEQ ID NO: 2881851 - DNA, 25 bp, Homo sapien
ctgcagggatgaagtagacaggagc

SEQ ID NO: 2881852 - DNA, 25 bp, Homo sapien
gggatgaagtagacaggagcagcca

SEQ ID NO: 2881853 - DNA, 25 bp, Homo sapien
ggatgaagtagacaggagcagccat

SEQ ID NO: 2881854 - DNA, 25 bp, Homo sapien
cagggatgaagtagacaggagcagc

SEQ ID NO: 2881855 - DNA, 25 bp, Homo sapien
cataaacgtggcagggcaatagaat

SEQ ID NO: 2881856 - DNA, 25 bp, Homo sapien
gaaaaagcgtacgatgacaccctag

SEQ ID NO: 2881857 - DNA, 25 bp, Homo sapien
taaagcagctccagtgatggccgca

SEQ ID NO: 2881858 - DNA, 25 bp, Homo sapien
gcatcctagttgtgttcctgaaaaa

SEQ ID NO: 2881859 - DNA, 25 bp, Homo sapien
taatgacaggcaccgctgtctttgg

SEQ ID NO: 2881860 - DNA, 25 bp, Homo sapien
ctcctataatgacaggcaccgctgt

SEQ ID NO: 2881861 - DNA, 25 bp, Homo sapien
gacaggcaccgctgtctttggcaag

SEQ ID NO: 2881862 - DNA, 25 bp, Homo sapien
cctataatgacaggcaccgctgtct

SEQ ID NO: 2881863 - DNA, 25 bp, Homo sapien
caatcctgaagtacaagtgctttac

SEQ ID NO: 2881864 - DNA, 25 bp, Homo sapien
tgtgtcgaggcagctagcaacacaa

SEQ ID NO: 2881865 - DNA, 25 bp, Homo sapien
tagcaacacaatcctgaagtacaag

SEQ ID NO: 2881866 - DNA, 25 bp, Homo sapien
gaggcagctagcaacacaatcctga

SEQ ID NO: 2881867 - DNA, 25 bp, Homo sapien
cttggtgtaggtaatgtagaggttc

SEQ ID NO: 2881868 - DNA, 25 bp, Homo sapien
tgtggagaagctcaaaatgtgttcc

SEQ ID NO: 2881869 - DNA, 25 bp, Homo sapien
gagccttggtcttctagttaggcca

SEQ ID NO: 2881870 - DNA, 25 bp, Homo sapien
aaacaggccaaagcaacatgaggac

SEQ ID NO: 2881871 - DNA, 25 bp, Homo sapien
tctctttcgggtgacaggagaagca

SEQ ID NO: 2881872 - DNA, 25 bp, Homo sapien
tcacctgaaagttgccccttcactt

SEQ ID NO: 2881873 - DNA, 25 bp, Homo sapien
cattgcattggccagagacttgaaa

SEQ ID NO: 2881874 - DNA, 25 bp, Homo sapien
gtcatcacctgaaagttgccccttc

SEQ ID NO: 2881875 - DNA, 25 bp, Homo sapien
aagtgaagtcactgggttgtcccca

SEQ ID NO: 2881876 - DNA, 25 bp, Homo sapien
tatgtgatgcgagcacagtgcctcc

SEQ ID NO: 2881877 - DNA, 25 bp, Homo sapien
tatcgtggaacagcttgtgtgaccg

SEQ ID NO: 2881878 - DNA, 25 bp, Homo sapien
ggcgagatccggagcaaccttctta

SEQ ID NO: 2881879 - DNA, 25 bp, Homo sapien
ttctcatttactcgggtggctgggt

SEQ ID NO: 2881880 - DNA, 25 bp, Homo sapien
tgggcctccatttcagacgttcatc

SEQ ID NO: 2881881 - DNA, 25 bp, Homo sapien
tgtctgagattaagcctaagccacc

SEQ ID NO: 2881882 - DNA, 25 bp, Homo sapien
gagctccctccctgatgactacaga

SEQ ID NO: 2881883 - DNA, 25 bp, Homo sapien
tctttaaggttagagggaaggcgca

SEQ ID NO: 2881884 - DNA, 25 bp, Homo sapien
gctgcatcaccctagaaacgtggct

SEQ ID NO: 2881885 - DNA, 25 bp, Homo sapien
gctttgggctgtggaaacgctgcct

SEQ ID NO: 2881886 - DNA, 25 bp, Homo sapien
ttcacaaaagcagactagggcgggc

SEQ ID NO: 2881887 - DNA, 25 bp, Homo sapien
tcaggtcagcgccgcccttgcgatg

SEQ ID NO: 2881888 - DNA, 25 bp, Homo sapien
ggcgccatcgcgcagcttcctggtt

SEQ ID NO: 2881889 - DNA, 25 bp, Homo sapien
cgcccttgcgatggcgggagagcag

SEQ ID NO: 2881890 - DNA, 25 bp, Homo sapien
ccttccggacacaggccgggagaag

SEQ ID NO: 2881891 - DNA, 25 bp, Homo sapien
tcttgtaaattagaaccggcctatg

SEQ ID NO: 2881892 - DNA, 25 bp, Homo sapien
cctcaggccgcggtgttcttgtaaa

SEQ ID NO: 2881893 - DNA, 25 bp, Homo sapien
attagaaccggcctatgcgccaagc

SEQ ID NO: 2881894 - DNA, 25 bp, Homo sapien
gcctatgcgccaagcgcgggtctcg

SEQ ID NO: 2881895 - DNA, 25 bp, Homo sapien
gcaaatctcaacacaattcaaagga

SEQ ID NO: 2881896 - DNA, 25 bp, Homo sapien
ttcactaaggttaaacacatgctgg

SEQ ID NO: 2881897 - DNA, 25 bp, Homo sapien
catgcggcatctgcagaacatgcat

SEQ ID NO: 2881898 - DNA, 25 bp, Homo sapien
taaataagccatggaatctgttgtg

SEQ ID NO: 2881899 - DNA, 25 bp, Homo sapien
gacttccaggtaagagttgtcctcc

SEQ ID NO: 2881900 - DNA, 25 bp, Homo sapien
gcaagataccactcaggaacatcca

SEQ ID NO: 2881901 - DNA, 25 bp, Homo sapien
tctaggcagccttctaaggacctta

SEQ ID NO: 2881902 - DNA, 25 bp, Homo sapien
ttgcagcccgacaaagacaaaacat

SEQ ID NO: 2881903 - DNA, 25 bp, Homo sapien
tctcatttctgaatcccacggagga

SEQ ID NO: 2881904 - DNA, 25 bp, Homo sapien
cctctcatttctgaatcccacggag

SEQ ID NO: 2881905 - DNA, 25 bp, Homo sapien
tcatttctgaatcccacggaggaaa

SEQ ID NO: 2881906 - DNA, 25 bp, Homo sapien
ttctgaatcccacggaggaaaattc

SEQ ID NO: 2881907 - DNA, 25 bp, Homo sapien
caaagagagagtgagccctgaacaa

SEQ ID NO: 2881908 - DNA, 25 bp, Homo sapien
tgtcaaaatcctctccacggtagaa

SEQ ID NO: 2881909 - DNA, 25 bp, Homo sapien
actttacctcgccacaaggagctgg

SEQ ID NO: 2881910 - DNA, 25 bp, Homo sapien
taggaatccctgaatcacttctgtc

SEQ ID NO: 2881911 - DNA, 25 bp, Homo sapien
tcctatctcctgttagacttgtaag

SEQ ID NO: 2881912 - DNA, 25 bp, Homo sapien
ttgagttcggagagacttggtaagc

SEQ ID NO: 2881913 - DNA, 25 bp, Homo sapien
aactttctgatggtgattacgtaac

SEQ ID NO: 2881914 - DNA, 25 bp, Homo sapien
cccactgaccaatgtgtaattggga

SEQ ID NO: 2881915 - DNA, 25 bp, Homo sapien
attccctccctcataggttctcttc

SEQ ID NO: 2881916 - DNA, 25 bp, Homo sapien
cctccctcataggttctcttctggg

SEQ ID NO: 2881917 - DNA, 25 bp, Homo sapien
tctgggatgtgccactataacttcc

SEQ ID NO: 2881918 - DNA, 25 bp, Homo sapien
ggatgtgccactataacttcccaca

SEQ ID NO: 2881919 - DNA, 25 bp, Homo sapien
aagacttgagtgtgagatgtatgcc

SEQ ID NO: 2881920 - DNA, 25 bp, Homo sapien
tgtgctggtcaaggactgatctata

SEQ ID NO: 2881921 - DNA, 25 bp, Homo sapien
cactcacaattatagggctgcttcc

SEQ ID NO: 2881922 - DNA, 25 bp, Homo sapien
ttacatcggtatggcttctttccag

SEQ ID NO: 2881923 - DNA, 25 bp, Homo sapien
gaaaggagagagctgtaactgaaag

SEQ ID NO: 2881924 - DNA, 25 bp, Homo sapien
ccttcccacacctatcacacacata

SEQ ID NO: 2881925 - DNA, 25 bp, Homo sapien
gatcctcttgtgctgagaaaggaga

SEQ ID NO: 2881926 - DNA, 25 bp, Homo sapien
tggatcctcttgtgctgagaaagga

SEQ ID NO: 2881927 - DNA, 25 bp, Homo sapien
gagagagagatgtatgctttcccac

SEQ ID NO: 2881928 - DNA, 25 bp, Homo sapien
tctcacactcgtcacacttaaaggg

SEQ ID NO: 2881929 - DNA, 25 bp, Homo sapien
gattcgtttatgtactttaaggcca

SEQ ID NO: 2881930 - DNA, 25 bp, Homo sapien
ggttcggtatgtgatgaaggccttc

SEQ ID NO: 2881931 - DNA, 25 bp, Homo sapien
gaatgcttttatggactgcgaggcc

SEQ ID NO: 2881932 - DNA, 25 bp, Homo sapien
tatggagcctcctgtggactttgag

SEQ ID NO: 2881933 - DNA, 25 bp, Homo sapien
tgaggcctgagctgttcctgaaagc

SEQ ID NO: 2881934 - DNA, 25 bp, Homo sapien
tagagcgtgagatataggctttccc

SEQ ID NO: 2881935 - DNA, 25 bp, Homo sapien
tatggaccctaaggccagagctgtt

SEQ ID NO: 2881936 - DNA, 25 bp, Homo sapien
ggttttcccacagatgtcgcattca

SEQ ID NO: 2881937 - DNA, 25 bp, Homo sapien
ccgtgtggatccttttgtggactct

SEQ ID NO: 2881938 - DNA, 25 bp, Homo sapien
tttgtggacccgaaggctcgagctg

SEQ ID NO: 2881939 - DNA, 25 bp, Homo sapien
ctgtagactagggtaggaggttcca

SEQ ID NO: 2881940 - DNA, 25 bp, Homo sapien
tgtgatatgctgtgggctcagatgc

SEQ ID NO: 2881941 - DNA, 25 bp, Homo sapien
taatgttctccacacgtttgccttg

SEQ ID NO: 2881942 - DNA, 25 bp, Homo sapien
tgctgattgcttccctgatgctgct

SEQ ID NO: 2881943 - DNA, 25 bp, Homo sapien
cttttggccacttagatgctgcatt

SEQ ID NO: 2881944 - DNA, 25 bp, Homo sapien
ccacttttggccacttagatgctgc

SEQ ID NO: 2881945 - DNA, 25 bp, Homo sapien
gccacttagatgctgcatttccaac

SEQ ID NO: 2881946 - DNA, 25 bp, Homo sapien
ttggccacttagatgctgcatttcc

SEQ ID NO: 2881947 - DNA, 25 bp, Homo sapien
ccatgtgccatgtaccggtttttaa

SEQ ID NO: 2881948 - DNA, 25 bp, Homo sapien
gacaaaatttctgcccctgtggaac

SEQ ID NO: 2881949 - DNA, 25 bp, Homo sapien
taagtactagggatacaacaatgaa

SEQ ID NO: 2881950 - DNA, 25 bp, Homo sapien
catactgtgtgacaggtaccatgtg

SEQ ID NO: 2881951 - DNA, 25 bp, Homo sapien
ggtatcagggagaaggctatgaaac

SEQ ID NO: 2881952 - DNA, 25 bp, Homo sapien
gggagaaggctatgaaaccatgaag

SEQ ID NO: 2881953 - DNA, 25 bp, Homo sapien
gaaggctatgaaaccatgaagacag

SEQ ID NO: 2881954 - DNA, 25 bp, Homo sapien
tcagggagaaggctatgaaaccatg

SEQ ID NO: 2881955 - DNA, 25 bp, Homo sapien
cttccaaactacatacgaccaacaa

SEQ ID NO: 2881956 - DNA, 25 bp, Homo sapien
gagtctaatagcctggttacatcag

SEQ ID NO: 2881957 - DNA, 25 bp, Homo sapien
cagttttcaacacgcagcatgagtc

SEQ ID NO: 2881958 - DNA, 25 bp, Homo sapien
tacatacgaccaacaacctctgggc

SEQ ID NO: 2881959 - DNA, 25 bp, Homo sapien
acttccgcgccctctctgggacgct

SEQ ID NO: 2881960 - DNA, 25 bp, Homo sapien
agcgggacaaaagcgcggaccgcac

SEQ ID NO: 2881961 - DNA, 25 bp, Homo sapien
ccgccagcgggacaaaagcgcggac

SEQ ID NO: 2881962 - DNA, 25 bp, Homo sapien
caaaagcgcggaccgcacggccgga

SEQ ID NO: 2881963 - DNA, 25 bp, Homo sapien
ctggttcctgaacacgtgattcatt

SEQ ID NO: 2881964 - DNA, 25 bp, Homo sapien
ggttcctgaacacgtgattcattgc

SEQ ID NO: 2881965 - DNA, 25 bp, Homo sapien
cgtgattcattgccaggtgtgggtg

SEQ ID NO: 2881966 - DNA, 25 bp, Homo sapien
tggttcctgaacacgtgattcattg

SEQ ID NO: 2881967 - DNA, 25 bp, Homo sapien
gggaggggcgcaggacagcgctggg

SEQ ID NO: 2881968 - DNA, 25 bp, Homo sapien
atgggggaatccgggaggggcgcag

SEQ ID NO: 2881969 - DNA, 25 bp, Homo sapien
gggaatccgggaggggcgcaggaca

SEQ ID NO: 2881970 - DNA, 25 bp, Homo sapien
gggcgcaggacagcgctgggctggg

SEQ ID NO: 2881971 - DNA, 25 bp, Homo sapien
cgaagaacgtctgggcgagttagca

SEQ ID NO: 2881972 - DNA, 25 bp, Homo sapien
aacgtctgggcgagttagcaggcag

SEQ ID NO: 2881973 - DNA, 25 bp, Homo sapien
gaacgtctgggcgagttagcaggca

SEQ ID NO: 2881974 - DNA, 25 bp, Homo sapien
ctcgaagaacgtctgggcgagttag

SEQ ID NO: 2881975 - DNA, 25 bp, Homo sapien
tgtggctgatgctattgtctagctc

SEQ ID NO: 2881976 - DNA, 25 bp, Homo sapien
gatgctattgtctagctccccggta

SEQ ID NO: 2881977 - DNA, 25 bp, Homo sapien
gctgatgctattgtctagctccccg

SEQ ID NO: 2881978 - DNA, 25 bp, Homo sapien
tattgtctagctccccggtagccat

SEQ ID NO: 2881979 - DNA, 25 bp, Homo sapien
aattagatgtcaatggaatgtatct

SEQ ID NO: 2881980 - DNA, 25 bp, Homo sapien
ttagatgtcaatggaatgtatctca

SEQ ID NO: 2881981 - DNA, 25 bp, Homo sapien
attagatgtcaatggaatgtatctc

SEQ ID NO: 2881982 - DNA, 25 bp, Homo sapien
gaaactcacaccctgctgataggaa

SEQ ID NO: 2881983 - DNA, 25 bp, Homo sapien
atacccagtgttggccacaatgtgc

SEQ ID NO: 2881984 - DNA, 25 bp, Homo sapien
gataccattcctacctattggagtg

SEQ ID NO: 2881985 - DNA, 25 bp, Homo sapien
gctacacagatgacaggcacatgaa

SEQ ID NO: 2881986 - DNA, 25 bp, Homo sapien
ttgttgggaccaaatggggtatcta

SEQ ID NO: 2881987 - DNA, 25 bp, Homo sapien
tgttgggaccaaatggggtatctat

SEQ ID NO: 2881988 - DNA, 25 bp, Homo sapien
ttttgcagatctatgtcaccttgtt

SEQ ID NO: 2881989 - DNA, 25 bp, Homo sapien
taagttttttgaccaatgcatctct

SEQ ID NO: 2881990 - DNA, 25 bp, Homo sapien
ttattccatggttcccggcaatcct

SEQ ID NO: 2881991 - DNA, 25 bp, Homo sapien
atggttcccggcaatcctcaggctc

SEQ ID NO: 2881992 - DNA, 25 bp, Homo sapien
gcttccgcaggcatgttttttgatg

SEQ ID NO: 2881993 - DNA, 25 bp, Homo sapien
aaagctggaattctcttattccatg

SEQ ID NO: 2881994 - DNA, 25 bp, Homo sapien
tttcttccgcgagccggctttcctc

SEQ ID NO: 2881995 - DNA, 25 bp, Homo sapien
gcgagccggctttcctccatcgctt

SEQ ID NO: 2881996 - DNA, 25 bp, Homo sapien
ttctgaggggcctttcttccgcgag

SEQ ID NO: 2881997 - DNA, 25 bp, Homo sapien
cggctttcctccatcgcttcccaca

SEQ ID NO: 2881998 - DNA, 25 bp, Homo sapien
cctgggttcctgcaccgagtggtgc

SEQ ID NO: 2881999 - DNA, 25 bp, Homo sapien
cggtgcccgagtgggccgcgtaggc

SEQ ID NO: 2882000 - DNA, 25 bp, Homo sapien
gacgcactgcgcagacaacaaagct

SEQ ID NO: 2882001 - DNA, 25 bp, Homo sapien
tgcagcgttctacgcggtccgggac

SEQ ID NO: 2882002 - DNA, 25 bp, Homo sapien
ctggtgaacagaatcgaggaatggt

SEQ ID NO: 2882003 - DNA, 25 bp, Homo sapien
agttgccgtcctccctggtgaacag

SEQ ID NO: 2882004 - DNA, 25 bp, Homo sapien
gtcctccctggtgaacagaatcgag

SEQ ID NO: 2882005 - DNA, 25 bp, Homo sapien
ctagagttgccgtcctccctggtga

SEQ ID NO: 2882006 - DNA, 25 bp, Homo sapien
ggagccgccccctcccgagcgccat

SEQ ID NO: 2882007 - DNA, 25 bp, Homo sapien
gtttgacgccgggcaccagaggagc

SEQ ID NO: 2882008 - DNA, 25 bp, Homo sapien
cagaggagccgccccctcccgagcg

SEQ ID NO: 2882009 - DNA, 25 bp, Homo sapien
tttgacgccgggcaccagaggagcc

SEQ ID NO: 2882010 - DNA, 25 bp, Homo sapien
tgacatttctcaggaccccttattt

SEQ ID NO: 2882011 - DNA, 25 bp, Homo sapien
atctttaaagacagactcgacggag

SEQ ID NO: 2882012 - DNA, 25 bp, Homo sapien
caaagcaaaaagtactcatctttaa

SEQ ID NO: 2882013 - DNA, 25 bp, Homo sapien
tcgacggagggaccggaaatcagaa

SEQ ID NO: 2882014 - DNA, 25 bp, Homo sapien
tcaagcatgtgatacgtctagggca

SEQ ID NO: 2882015 - DNA, 25 bp, Homo sapien
gcagctaagctaaactcccatgaga

SEQ ID NO: 2882016 - DNA, 25 bp, Homo sapien
gcatacaacttggagccacgcagct

SEQ ID NO: 2882017 - DNA, 25 bp, Homo sapien
tagtcagtcagatacaagccaatgc

SEQ ID NO: 2882018 - DNA, 25 bp, Homo sapien
tccacgcccgtttcccaggcggctg

SEQ ID NO: 2882019 - DNA, 25 bp, Homo sapien
gctcccgctccacgcccgtttccca

SEQ ID NO: 2882020 - DNA, 25 bp, Homo sapien
gctggggcgcggttccctcccgcac

SEQ ID NO: 2882021 - DNA, 25 bp, Homo sapien
tggggcgcggttccctcccgcacgc

SEQ ID NO: 2882022 - DNA, 25 bp, Homo sapien
tcagagacgtgaaaccatgggatgt

SEQ ID NO: 2882023 - DNA, 25 bp, Homo sapien
taattctaaaccatccctgtgagcc

SEQ ID NO: 2882024 - DNA, 25 bp, Homo sapien
gacagcggctggcaactatctaatt

SEQ ID NO: 2882025 - DNA, 25 bp, Homo sapien
cactgcagagctgggtaagttctgg

SEQ ID NO: 2882026 - DNA, 25 bp, Homo sapien
taagatctggtatcccttctaggct

SEQ ID NO: 2882027 - DNA, 25 bp, Homo sapien
cccaggaagcttgtgatttcaggca

SEQ ID NO: 2882028 - DNA, 25 bp, Homo sapien
tccttcagataacgcacccggtgag

SEQ ID NO: 2882029 - DNA, 25 bp, Homo sapien
tgcagatttccacctttgagctaag

SEQ ID NO: 2882030 - DNA, 25 bp, Homo sapien
gaacatcaggatgaataatgacagg

SEQ ID NO: 2882031 - DNA, 25 bp, Homo sapien
caggagagattataacacactgaat

SEQ ID NO: 2882032 - DNA, 25 bp, Homo sapien
ccatgagttcatgctgatactcaaa

SEQ ID NO: 2882033 - DNA, 25 bp, Homo sapien
gacatctaccagatcatccaagtga

SEQ ID NO: 2882034 - DNA, 25 bp, Homo sapien
cagtccacatcaggctgaggacctc

SEQ ID NO: 2882035 - DNA, 25 bp, Homo sapien
ccagtcctcccgtggagtgtagcct

SEQ ID NO: 2882036 - DNA, 25 bp, Homo sapien
tgttcccagtaacaatgcgaagatt

SEQ ID NO: 2882037 - DNA, 25 bp, Homo sapien
ccgtggagtgtagccttggaaaaga

SEQ ID NO: 2882038 - DNA, 25 bp, Homo sapien
ggcccggtggaccacttggatccca

SEQ ID NO: 2882039 - DNA, 25 bp, Homo sapien
tagcagccggtacttggcaaatcca

SEQ ID NO: 2882040 - DNA, 25 bp, Homo sapien
tttcaggacttaacttgtgttccca

SEQ ID NO: 2882041 - DNA, 25 bp, Homo sapien
agaagaggcttcacctagcagccgg

SEQ ID NO: 2882042 - DNA, 25 bp, Homo sapien
ggaccgagtggggacagagagggtc

SEQ ID NO: 2882043 - DNA, 25 bp, Homo sapien
gcgggggaccgagtggggacagaga

SEQ ID NO: 2882044 - DNA, 25 bp, Homo sapien
gagcgggggaccgagtggggacaga

SEQ ID NO: 2882045 - DNA, 25 bp, Homo sapien
ctgagcgggggaccgagtggggaca

SEQ ID NO: 2882046 - DNA, 25 bp, Homo sapien
gaagaaagaacaaggccaaagggca

SEQ ID NO: 2882047 - DNA, 25 bp, Homo sapien
agccctgctcgacagaggtccggat

SEQ ID NO: 2882048 - DNA, 25 bp, Homo sapien
gatgtggagccacggtctctggcat

SEQ ID NO: 2882049 - DNA, 25 bp, Homo sapien
aagaacaaggccaaagggcagccct

SEQ ID NO: 2882050 - DNA, 25 bp, Homo sapien
tccgaagagactggagccttaatcc

SEQ ID NO: 2882051 - DNA, 25 bp, Homo sapien
cacgcctccgaagagactggagcct

SEQ ID NO: 2882052 - DNA, 25 bp, Homo sapien
cgcctccgaagagactggagcctta

SEQ ID NO: 2882053 - DNA, 25 bp, Homo sapien
gaacccacgcctccgaagagactgg

SEQ ID NO: 2882054 - DNA, 25 bp, Homo sapien
gaatccacagggcatcgcagaacca

SEQ ID NO: 2882055 - DNA, 25 bp, Homo sapien
ccccggcagagaaggttcgcgaagc

SEQ ID NO: 2882056 - DNA, 25 bp, Homo sapien
ggccaacaaggcgtcgaggcgaatc

SEQ ID NO: 2882057 - DNA, 25 bp, Homo sapien
aagcgcaggtctcgggatttgcttt

SEQ ID NO: 2882058 - DNA, 25 bp, Homo sapien
gggaggcggcgtgagaggaggggaa

SEQ ID NO: 2882059 - DNA, 25 bp, Homo sapien
ggaggcggcgtgagaggaggggaag

SEQ ID NO: 2882060 - DNA, 25 bp, Homo sapien
gaggagctttggctgggcaaaacat

SEQ ID NO: 2882061 - DNA, 25 bp, Homo sapien
ctcagtgagcatgccgtccaagtca

SEQ ID NO: 2882062 - DNA, 25 bp, Homo sapien
tgccaaggtgaaaaatccagcgtgt

SEQ ID NO: 2882063 - DNA, 25 bp, Homo sapien
tccatgtcacagtccaagggctcag

SEQ ID NO: 2882064 - DNA, 25 bp, Homo sapien
ggagaaggtccattctgccataacc

SEQ ID NO: 2882065 - DNA, 25 bp, Homo sapien
gcctctcctggtggagaaggtccat

SEQ ID NO: 2882066 - DNA, 25 bp, Homo sapien
gtccattctgccataaccactgcag

SEQ ID NO: 2882067 - DNA, 25 bp, Homo sapien
tctcctggtggagaaggtccattct

SEQ ID NO: 2882068 - DNA, 25 bp, Homo sapien
cacttgcaaaggtgtcttcactggg

SEQ ID NO: 2882069 - DNA, 25 bp, Homo sapien
tacacagttacacggactcacagct

SEQ ID NO: 2882070 - DNA, 25 bp, Homo sapien
cgtaacttgatttgtgctcctggag

SEQ ID NO: 2882071 - DNA, 25 bp, Homo sapien
aaccgactgttggattgggctactc

SEQ ID NO: 2882072 - DNA, 25 bp, Homo sapien
tcaggattgcttgtctcagactggg

SEQ ID NO: 2882073 - DNA, 25 bp, Homo sapien
tttggctgggcgaattcagactggt

SEQ ID NO: 2882074 - DNA, 25 bp, Homo sapien
tggcacaaaggagtagctggcgtct

SEQ ID NO: 2882075 - DNA, 25 bp, Homo sapien
tgaggagataagactgagatcactc

SEQ ID NO: 2882076 - DNA, 25 bp, Homo sapien
aatgtgcgtccccatctccaagata

SEQ ID NO: 2882077 - DNA, 25 bp, Homo sapien
cccacagaatgtgcgtccccatctc

SEQ ID NO: 2882078 - DNA, 25 bp, Homo sapien
acagaatgtgcgtccccatctccaa

SEQ ID NO: 2882079 - DNA, 25 bp, Homo sapien
tgcgtccccatctccaagatagtct

SEQ ID NO: 2882080 - DNA, 25 bp, Homo sapien
tataatgggtgaaagtctcccagta

SEQ ID NO: 2882081 - DNA, 25 bp, Homo sapien
ctataatgggtgaaagtctcccagt

SEQ ID NO: 2882082 - DNA, 25 bp, Homo sapien
gaaatgcactccagctattaaagtc

SEQ ID NO: 2882083 - DNA, 25 bp, Homo sapien
gcactccagctattaaagtcatcat

SEQ ID NO: 2882084 - DNA, 25 bp, Homo sapien
gttccagggcgaaatgcactccagc

SEQ ID NO: 2882085 - DNA, 25 bp, Homo sapien
cagggcgaaatgcactccagctatt

SEQ ID NO: 2882086 - DNA, 25 bp, Homo sapien
tgcaggatgcttttttcgtggcagc

SEQ ID NO: 2882087 - DNA, 25 bp, Homo sapien
gatgcagctcttgtcctaagagatc

SEQ ID NO: 2882088 - DNA, 25 bp, Homo sapien
tccgagcgcatttgctgctgctgtc

SEQ ID NO: 2882089 - DNA, 25 bp, Homo sapien
cagcttgacttaggctccgagcgca

SEQ ID NO: 2882090 - DNA, 25 bp, Homo sapien
cagaagatgacgaagtgaattcctg

SEQ ID NO: 2882091 - DNA, 25 bp, Homo sapien
agctctcgtcggccctggtgctgag

SEQ ID NO: 2882092 - DNA, 25 bp, Homo sapien
ctgaggtcggcgtgggacaggctgc

SEQ ID NO: 2882093 - DNA, 25 bp, Homo sapien
gttccttcattctgcgcgcgagtca

SEQ ID NO: 2882094 - DNA, 25 bp, Homo sapien
ggcgtccgcaaaagtcctcgctgtc

SEQ ID NO: 2882095 - DNA, 25 bp, Homo sapien
tcccggcgtccgcaaaagtcctcgc

SEQ ID NO: 2882096 - DNA, 25 bp, Homo sapien
ccggcgtccgcaaaagtcctcgctg

SEQ ID NO: 2882097 - DNA, 25 bp, Homo sapien
gcagcaggctcgggttgctcatgaa

SEQ ID NO: 2882098 - DNA, 25 bp, Homo sapien
gggcgctggtggagccgtttcccag

SEQ ID NO: 2882099 - DNA, 25 bp, Homo sapien
gaaggcggtggttctgcgatgccct

SEQ ID NO: 2882100 - DNA, 25 bp, Homo sapien
gtggttctgcgatgccctgtggatt

SEQ ID NO: 2882101 - DNA, 25 bp, Homo sapien
tgctggaaggcggtggttctgcgat

SEQ ID NO: 2882102 - DNA, 25 bp, Homo sapien
tcccggcatcgggaattccatttgg

SEQ ID NO: 2882103 - DNA, 25 bp, Homo sapien
cggcatcgggaattccatttggcat

SEQ ID NO: 2882104 - DNA, 25 bp, Homo sapien
ctttcccggcatcgggaattccatt

SEQ ID NO: 2882105 - DNA, 25 bp, Homo sapien
gctttcccggcatcgggaattccat

SEQ ID NO: 2882106 - DNA, 25 bp, Homo sapien
gcatccatccactggacgggctttg

SEQ ID NO: 2882107 - DNA, 25 bp, Homo sapien
ccatccactggacgggctttgtggg

SEQ ID NO: 2882108 - DNA, 25 bp, Homo sapien
gtgcatccatccactggacgggctt

SEQ ID NO: 2882109 - DNA, 25 bp, Homo sapien
atccatccactggacgggctttgtg

SEQ ID NO: 2882110 - DNA, 25 bp, Homo sapien
ctttcgcgtgtgaggcgaacgtgat

SEQ ID NO: 2882111 - DNA, 25 bp, Homo sapien
gggacctttcgcgtgtgaggcgaac

SEQ ID NO: 2882112 - DNA, 25 bp, Homo sapien
gaacgtgataaccactacactacgg

SEQ ID NO: 2882113 - DNA, 25 bp, Homo sapien
ccggggacctttcgcgtgtgaggcg

SEQ ID NO: 2882114 - DNA, 25 bp, Homo sapien
tcagttcttcaaaggtgctgatggc

SEQ ID NO: 2882115 - DNA, 25 bp, Homo sapien
caacggtgtagatgcctttttctcc

SEQ ID NO: 2882116 - DNA, 25 bp, Homo sapien
ttcttcaaaggtgctgatggctgat

SEQ ID NO: 2882117 - DNA, 25 bp, Homo sapien
ctgatgtgggaaggcaacggtgtag

SEQ ID NO: 2882118 - DNA, 25 bp, Homo sapien
ccaggtggagatagcagtgggatgt

SEQ ID NO: 2882119 - DNA, 25 bp, Homo sapien
aggtggagatagcagtgggatgttc

SEQ ID NO: 2882120 - DNA, 25 bp, Homo sapien
gcatcatacatgtgacaaatcttca

SEQ ID NO: 2882121 - DNA, 25 bp, Homo sapien
cattccaatcaggtggtcagtgttt

SEQ ID NO: 2882122 - DNA, 25 bp, Homo sapien
tcaagttgttcattcaacttatggg

SEQ ID NO: 2882123 - DNA, 25 bp, Homo sapien
caacttatggggagattttgcatca

SEQ ID NO: 2882124 - DNA, 25 bp, Homo sapien
agtgctggctgccaatcctgcagcg

SEQ ID NO: 2882125 - DNA, 25 bp, Homo sapien
ggctgccaatcctgcagcggtccag

SEQ ID NO: 2882126 - DNA, 25 bp, Homo sapien
tgctggctgccaatcctgcagcggt

SEQ ID NO: 2882127 - DNA, 25 bp, Homo sapien
tggctgccaatcctgcagcggtcca

SEQ ID NO: 2882128 - DNA, 25 bp, Homo sapien
cctgagcagagcgtattcggagcac

SEQ ID NO: 2882129 - DNA, 25 bp, Homo sapien
gaaaaagtgatccacgctccttgag

SEQ ID NO: 2882130 - DNA, 25 bp, Homo sapien
tgagccacagtaaggtaagcccatg

SEQ ID NO: 2882131 - DNA, 25 bp, Homo sapien
gaagtccagcgtccaggtagatgag

SEQ ID NO: 2882132 - DNA, 25 bp, Homo sapien
agtctggctgtgggaaaagatgccc

SEQ ID NO: 2882133 - DNA, 25 bp, Homo sapien
ccatacccagagagtggacatagga

SEQ ID NO: 2882134 - DNA, 25 bp, Homo sapien
ggaggacactcgtattcctgtgaca

SEQ ID NO: 2882135 - DNA, 25 bp, Homo sapien
gacataggatcatttcatgagaccc

SEQ ID NO: 2882136 - DNA, 25 bp, Homo sapien
caacagcgtatgctctgagagatgc

SEQ ID NO: 2882137 - DNA, 25 bp, Homo sapien
agacaccggcgccttaatccggagc

SEQ ID NO: 2882138 - DNA, 25 bp, Homo sapien
aattcgaacccatgcctccgaagac

SEQ ID NO: 2882139 - DNA, 25 bp, Homo sapien
cgccttaatccggagccttagaccg

SEQ ID NO: 2882140 - DNA, 25 bp, Homo sapien
cctccgaagacaccggcgccttaat

SEQ ID NO: 2882141 - DNA, 25 bp, Homo sapien
cacgcctccgaagagactggagcct

SEQ ID NO: 2882142 - DNA, 25 bp, Homo sapien
tccgaagagactggagccttaatcc

SEQ ID NO: 2882143 - DNA, 25 bp, Homo sapien
cgcctccgaagagactggagcctta

SEQ ID NO: 2882144 - DNA, 25 bp, Homo sapien
gaacccacgcctccgaagagactgg

SEQ ID NO: 2882145 - DNA, 25 bp, Homo sapien
tatacagggagttccggcgggccca

SEQ ID NO: 2882146 - DNA, 25 bp, Homo sapien
ctccgctgcgtctggcgctgcaaga

SEQ ID NO: 2882147 - DNA, 25 bp, Homo sapien
gctgataccaatcctgctgcggtct

SEQ ID NO: 2882148 - DNA, 25 bp, Homo sapien
gatatctagagttcttccaaacact

SEQ ID NO: 2882149 - DNA, 25 bp, Homo sapien
gaaagagtcgcggaaaactgcactc

SEQ ID NO: 2882150 - DNA, 25 bp, Homo sapien
cgcgccgcggtggagtcctgagcgc

SEQ ID NO: 2882151 - DNA, 25 bp, Homo sapien
gtgtgcggcggcgacccaagaattt

SEQ ID NO: 2882152 - DNA, 25 bp, Homo sapien
tgagcgcccccgagcggtcacgtgt

SEQ ID NO: 2882153 - DNA, 25 bp, Homo sapien
tttcgcgtgttaggcgaacgtgatg

SEQ ID NO: 2882154 - DNA, 25 bp, Homo sapien
taggcgaacgtgatgaccactacac

SEQ ID NO: 2882155 - DNA, 25 bp, Homo sapien
cgcgtgttaggcgaacgtgatgacc

SEQ ID NO: 2882156 - DNA, 25 bp, Homo sapien
cgtgatgaccactacactacggaaa

SEQ ID NO: 2882157 - DNA, 25 bp, Homo sapien
agtctcctatccacgattctttcca

SEQ ID NO: 2882158 - DNA, 25 bp, Homo sapien
cgctggacatctttcgggatcaaaa

SEQ ID NO: 2882159 - DNA, 25 bp, Homo sapien
tgttgcttccgggacggctcgctta

SEQ ID NO: 2882160 - DNA, 25 bp, Homo sapien
cagcactcccggaaatcttggtgat

SEQ ID NO: 2882161 - DNA, 25 bp, Homo sapien
ggacctctcgcacccaaagcgagaa

SEQ ID NO: 2882162 - DNA, 25 bp, Homo sapien
ccaaagcgagaatcatacccctaga

SEQ ID NO: 2882163 - DNA, 25 bp, Homo sapien
tgaacccgggacctctcgcacccaa

SEQ ID NO: 2882164 - DNA, 25 bp, Homo sapien
acccaaagcgagaatcataccccta

SEQ ID NO: 2882165 - DNA, 25 bp, Homo sapien
tcagccaggtgacccgtgagtgtac

SEQ ID NO: 2882166 - DNA, 25 bp, Homo sapien
gagcggctgtaacgcccagactctg

SEQ ID NO: 2882167 - DNA, 25 bp, Homo sapien
tctcttcgatgattatggggaccgc

SEQ ID NO: 2882168 - DNA, 25 bp, Homo sapien
cgaggcctgaggttcatccacctgt

SEQ ID NO: 2882169 - DNA, 25 bp, Homo sapien
ccccacacacaagcagacgcacgca

SEQ ID NO: 2882170 - DNA, 25 bp, Homo sapien
acacccccacacacaagcagacgca

SEQ ID NO: 2882171 - DNA, 25 bp, Homo sapien
acccccacacacaagcagacgcacg

SEQ ID NO: 2882172 - DNA, 25 bp, Homo sapien
tgccaacacccccacacacaagcag

SEQ ID NO: 2882173 - DNA, 25 bp, Homo sapien
tagttaagccgtcaggtagctcgcc

SEQ ID NO: 2882174 - DNA, 25 bp, Homo sapien
tagtgcccgaacgtgctggcaggct

SEQ ID NO: 2882175 - DNA, 25 bp, Homo sapien
cacggctttcgtcgggagggtatct

SEQ ID NO: 2882176 - DNA, 25 bp, Homo sapien
gagcgaatccatcccggtcttgacc

SEQ ID NO: 2882177 - DNA, 25 bp, Homo sapien
tgaaagcgaatgtgacaggtagagc

SEQ ID NO: 2882178 - DNA, 25 bp, Homo sapien
tgtgacaggtagagccgttactccc

SEQ ID NO: 2882179 - DNA, 25 bp, Homo sapien
ttactcccgggtcatgaatgtggcc

SEQ ID NO: 2882180 - DNA, 25 bp, Homo sapien
gcttttccgtgttaactccacagga

SEQ ID NO: 2882181 - DNA, 25 bp, Homo sapien
agccgcagaccagagcctcagcgcg

SEQ ID NO: 2882182 - DNA, 25 bp, Homo sapien
agccgccaagcgcagagccgcagac

SEQ ID NO: 2882183 - DNA, 25 bp, Homo sapien
cgcaaacaaacgcatggcgggaagg

SEQ ID NO: 2882184 - DNA, 25 bp, Homo sapien
gcgcgtcggggaacgccgcaaacaa

SEQ ID NO: 2882185 - DNA, 25 bp, Homo sapien
cagcgagatttgaactcgcgaccct

SEQ ID NO: 2882186 - DNA, 25 bp, Homo sapien
caggccccagcgagatttgaactcg

SEQ ID NO: 2882187 - DNA, 25 bp, Homo sapien
gccccagcgagatttgaactcgcga

SEQ ID NO: 2882188 - DNA, 25 bp, Homo sapien
cgagatttgaactcgcgaccctggt

SEQ ID NO: 2882189 - DNA, 25 bp, Homo sapien
ggctgttggtttccttttgacacaa

SEQ ID NO: 2882190 - DNA, 25 bp, Homo sapien
tttgacacaaaagcagttgacgctg

SEQ ID NO: 2882191 - DNA, 25 bp, Homo sapien
cacaaaagcagttgacgctgtcgcc

SEQ ID NO: 2882192 - DNA, 25 bp, Homo sapien
gacacaaaagcagttgacgctgtcg

SEQ ID NO: 2882193 - DNA, 25 bp, Homo sapien
tggacccaagctcctcccacggccg

SEQ ID NO: 2882194 - DNA, 25 bp, Homo sapien
caagctcctcccacggccgcagcca

SEQ ID NO: 2882195 - DNA, 25 bp, Homo sapien
gtggctgctggacccaagctcctcc

SEQ ID NO: 2882196 - DNA, 25 bp, Homo sapien
cctcggccgagttctgtggctgctg

SEQ ID NO: 2882197 - DNA, 25 bp, Homo sapien
cacgtgttggttgtcgcattggtca

SEQ ID NO: 2882198 - DNA, 25 bp, Homo sapien
caagcagcgtttgtactttggcact

SEQ ID NO: 2882199 - DNA, 25 bp, Homo sapien
cgggcttgtcactcaaagacgggac

SEQ ID NO: 2882200 - DNA, 25 bp, Homo sapien
gataacaaacgtggttggcccaggc

SEQ ID NO: 2882201 - DNA, 25 bp, Homo sapien
tccacagcgtagaaggacacggctc

SEQ ID NO: 2882202 - DNA, 25 bp, Homo sapien
gcacgcccttaagatccagagagag

SEQ ID NO: 2882203 - DNA, 25 bp, Homo sapien
gaacacgcgctcctggaagttgacg

SEQ ID NO: 2882204 - DNA, 25 bp, Homo sapien
gccagattcgcaagtaggtgcccgt

SEQ ID NO: 2882205 - DNA, 25 bp, Homo sapien
taacaataatacagtggaggccggg

SEQ ID NO: 2882206 - DNA, 25 bp, Homo sapien
gaaccgaccatatgcaaaaccctga

SEQ ID NO: 2882207 - DNA, 25 bp, Homo sapien
tgagcactactacgattgaggccct

SEQ ID NO: 2882208 - DNA, 25 bp, Homo sapien
gccactaattgatcactgcggacgg

SEQ ID NO: 2882209 - DNA, 25 bp, Homo sapien
tcctctttctccagctctccccgaa

SEQ ID NO: 2882210 - DNA, 25 bp, Homo sapien
ctcctctttctccagctctccccga

SEQ ID NO: 2882211 - DNA, 25 bp, Homo sapien
tctttctccagctctccccgaaggt

SEQ ID NO: 2882212 - DNA, 25 bp, Homo sapien
ttctccagctctccccgaaggtcct

SEQ ID NO: 2882213 - DNA, 25 bp, Homo sapien
agagaaacattccagactttattct

SEQ ID NO: 2882214 - DNA, 25 bp, Homo sapien
ctttgaacttcttcagcatcccttt

SEQ ID NO: 2882215 - DNA, 25 bp, Homo sapien
tcatctcagaagagactgtggttgg

SEQ ID NO: 2882216 - DNA, 25 bp, Homo sapien
ttaagacaaaggtcttgagagaaac

SEQ ID NO: 2882217 - DNA, 25 bp, Homo sapien
cagctgggtgatctcaaccccgagc

SEQ ID NO: 2882218 - DNA, 25 bp, Homo sapien
ctcccgggacagttcctccaggcgg

SEQ ID NO: 2882219 - DNA, 25 bp, Homo sapien
gacagttcctccaggcggcctagca

SEQ ID NO: 2882220 - DNA, 25 bp, Homo sapien
gggtgatctcaaccccgagctgggc

SEQ ID NO: 2882221 - DNA, 25 bp, Homo sapien
acataacatttggccagtggcctga

SEQ ID NO: 2882222 - DNA, 25 bp, Homo sapien
ttgaacatggagacataacatttgg

SEQ ID NO: 2882223 - DNA, 25 bp, Homo sapien
tctgaacaagctgtagtctggacac

SEQ ID NO: 2882224 - DNA, 25 bp, Homo sapien
ggcactcaatatgtcccaccaggaa

SEQ ID NO: 2882225 - DNA, 25 bp, Homo sapien
gcatacaccggattttttactcgag

SEQ ID NO: 2882226 - DNA, 25 bp, Homo sapien
gaagaaaagtccgatgccagtgacc

SEQ ID NO: 2882227 - DNA, 25 bp, Homo sapien
tccgcaggccctaactggtatgtta

SEQ ID NO: 2882228 - DNA, 25 bp, Homo sapien
taatatcagagtgactgagcgtcct

SEQ ID NO: 2882229 - DNA, 25 bp, Homo sapien
gaaatcgattctgcggttccatagc

SEQ ID NO: 2882230 - DNA, 25 bp, Homo sapien
gttccattacaagatgcttccgcag

SEQ ID NO: 2882231 - DNA, 25 bp, Homo sapien
aggcctctgtaatgtcccacggggg

SEQ ID NO: 2882232 - DNA, 25 bp, Homo sapien
tcaggcctctgtaatgtcccacggg

SEQ ID NO: 2882233 - DNA, 25 bp, Homo sapien
tctgtaatgtcccacggggggcctg

SEQ ID NO: 2882234 - DNA, 25 bp, Homo sapien
gcctctgtaatgtcccacggggggc

SEQ ID NO: 2882235 - DNA, 25 bp, Homo sapien
tttccgtggaccggaacacctcaca

SEQ ID NO: 2882236 - DNA, 25 bp, Homo sapien
tgaaacacaagctccggcagcccta

SEQ ID NO: 2882237 - DNA, 25 bp, Homo sapien
ggttacactgcgaggtgactctgaa

SEQ ID NO: 2882238 - DNA, 25 bp, Homo sapien
tgactctgaaggtctcgggatcttg

SEQ ID NO: 2882239 - DNA, 25 bp, Homo sapien
gaagtcatctctacaggctacaggt

SEQ ID NO: 2882240 - DNA, 25 bp, Homo sapien
acagtcagacggctctaggtgcgcg

SEQ ID NO: 2882241 - DNA, 25 bp, Homo sapien
gggactttgagcagagcccgcttcg

SEQ ID NO: 2882242 - DNA, 25 bp, Homo sapien
aggctagaggctccgaacagacagg

SEQ ID NO: 2882243 - DNA, 25 bp, Homo sapien
cccagaatcgacagcgttggcacag

SEQ ID NO: 2882244 - DNA, 25 bp, Homo sapien
atggcgcgtccgtcgtcctggcagt

SEQ ID NO: 2882245 - DNA, 25 bp, Homo sapien
ggacaccggctcacgaaagagctct

SEQ ID NO: 2882246 - DNA, 25 bp, Homo sapien
agcgccctatgcaggcgcggcagaa

SEQ ID NO: 2882247 - DNA, 25 bp, Homo sapien
gagcttgaagggttcgccatgctgc

SEQ ID NO: 2882248 - DNA, 25 bp, Homo sapien
tggacctcacaggacgcggagctgg

SEQ ID NO: 2882249 - DNA, 25 bp, Homo sapien
tgggcgccgagggcccactgggaga

SEQ ID NO: 2882250 - DNA, 25 bp, Homo sapien
gctctccgcgcacccagatctggtc

SEQ ID NO: 2882251 - DNA, 25 bp, Homo sapien
atctggtcgcgcctgggcggccact

SEQ ID NO: 2882252 - DNA, 25 bp, Homo sapien
tcaagacccgctggtttggagtcag

SEQ ID NO: 2882253 - DNA, 25 bp, Homo sapien
aactcttgccctgcgatgccgggtt

SEQ ID NO: 2882254 - DNA, 25 bp, Homo sapien
cggaggacgctggaacaactcttgc

SEQ ID NO: 2882255 - DNA, 25 bp, Homo sapien
aaaacaaaacgtagcatcctgcaca

SEQ ID NO: 2882256 - DNA, 25 bp, Homo sapien
ctcaggtcatccgccagcctccgcg

SEQ ID NO: 2882257 - DNA, 25 bp, Homo sapien
tccctcgtagctgggtagctgggat

SEQ ID NO: 2882258 - DNA, 25 bp, Homo sapien
aggtcatccgccagcctccgcgtcc

SEQ ID NO: 2882259 - DNA, 25 bp, Homo sapien
agcctccctcgtagctgggtagctg

SEQ ID NO: 2882260 - DNA, 25 bp, Homo sapien
agagggaggccgacggtcacgcctt

SEQ ID NO: 2882261 - DNA, 25 bp, Homo sapien
ggctgatggtcctcttgaccgccct

SEQ ID NO: 2882262 - DNA, 25 bp, Homo sapien
aagccgacgagctgcaagtgaggat

SEQ ID NO: 2882263 - DNA, 25 bp, Homo sapien
cgacggtcacgccttggagaggctg

SEQ ID NO: 2882264 - DNA, 25 bp, Homo sapien
ctttcgcgtgttaggcgaacgtgat

SEQ ID NO: 2882265 - DNA, 25 bp, Homo sapien
acctttcgcgtgttaggcgaacgtg

SEQ ID NO: 2882266 - DNA, 25 bp, Homo sapien
cgtgttaggcgaacgtgataaccac

SEQ ID NO: 2882267 - DNA, 25 bp, Homo sapien
cgcgtgttaggcgaacgtgataacc

SEQ ID NO: 2882268 - DNA, 25 bp, Homo sapien
cgtggggctcgaacccacgaccctg

SEQ ID NO: 2882269 - DNA, 25 bp, Homo sapien
tcatgctctaccgactgagctagcc

SEQ ID NO: 2882270 - DNA, 25 bp, Homo sapien
ggctcgaacccacgaccctgagatt

SEQ ID NO: 2882271 - DNA, 25 bp, Homo sapien
tcgaacccacgaccctgagattaag

SEQ ID NO: 2882272 - DNA, 25 bp, Homo sapien
ctttcgcgtgtgaggcgaacgtgat

SEQ ID NO: 2882273 - DNA, 25 bp, Homo sapien
gaacgtgataaccactacactacgg

SEQ ID NO: 2882274 - DNA, 25 bp, Homo sapien
gggacctttcgcgtgtgaggcgaac

SEQ ID NO: 2882275 - DNA, 25 bp, Homo sapien
ccggggacctttcgcgtgtgaggcg

SEQ ID NO: 2882276 - DNA, 25 bp, Homo sapien
tctgagtcctccacaacgaagtcgt

SEQ ID NO: 2882277 - DNA, 25 bp, Homo sapien
caatatggtccaggtgattcggcag

SEQ ID NO: 2882278 - DNA, 25 bp, Homo sapien
tctgcgaggtagacgaagaggccat

SEQ ID NO: 2882279 - DNA, 25 bp, Homo sapien
aagtcgtctgcctagaagggccgga

SEQ ID NO: 2882280 - DNA, 25 bp, Homo sapien
cattttcgggggtagggatcaggct

SEQ ID NO: 2882281 - DNA, 25 bp, Homo sapien
agggatcaggctttgacccatcttg

SEQ ID NO: 2882282 - DNA, 25 bp, Homo sapien
gtagggatcaggctttgacccatct

SEQ ID NO: 2882283 - DNA, 25 bp, Homo sapien
tagggatcaggctttgacccatctt

SEQ ID NO: 2882284 - DNA, 25 bp, Homo sapien
tattcccaggacatcaaggagactt

SEQ ID NO: 2882285 - DNA, 25 bp, Homo sapien
gagactttcaataggtgtgttccca

SEQ ID NO: 2882286 - DNA, 25 bp, Homo sapien
cctgaaaaaggtgagcaagtcgtat

SEQ ID NO: 2882287 - DNA, 25 bp, Homo sapien
gcgattatacccagtgaaaagcatg

SEQ ID NO: 2882288 - DNA, 25 bp, Homo sapien
tgggcttctacaacgcagagactct

SEQ ID NO: 2882289 - DNA, 25 bp, Homo sapien
cagtgagaaaccaaggcgctttggt

SEQ ID NO: 2882290 - DNA, 25 bp, Homo sapien
gctccacagaacagacgctgctgag

SEQ ID NO: 2882291 - DNA, 25 bp, Homo sapien
tttcttccgggtgctctccaagggc

SEQ ID NO: 2882292 - DNA, 25 bp, Homo sapien
acttgcagctttcgccctctgcttt

SEQ ID NO: 2882293 - DNA, 25 bp, Homo sapien
cccttttccagcactcaaccaagga

SEQ ID NO: 2882294 - DNA, 25 bp, Homo sapien
ggagagccttgggtataatctattt

SEQ ID NO: 2882295 - DNA, 25 bp, Homo sapien
tcccctttgttcagtggagctggct

SEQ ID NO: 2882296 - DNA, 25 bp, Homo sapien
ccaggttgtccgtgtagccagcaaa

SEQ ID NO: 2882297 - DNA, 25 bp, Homo sapien
aggttgtccgtgtagccagcaaaca

SEQ ID NO: 2882298 - DNA, 25 bp, Homo sapien
tcacctgccacactcgcaccaggtt

SEQ ID NO: 2882299 - DNA, 25 bp, Homo sapien
cactcgcaccaggttgtccgtgtag

SEQ ID NO: 2882300 - DNA, 25 bp, Homo sapien
ctttttttgagatccgtccaccttg

SEQ ID NO: 2882301 - DNA, 25 bp, Homo sapien
ttttttgagatccgtccaccttgct

SEQ ID NO: 2882302 - DNA, 25 bp, Homo sapien
gaaatgacagtgacaggtcaggctg

SEQ ID NO: 2882303 - DNA, 25 bp, Homo sapien
tgcagtctcactagattcagcccaa

SEQ ID NO: 2882304 - DNA, 25 bp, Homo sapien
gccagcttgtaagtggtggttatgt

SEQ ID NO: 2882305 - DNA, 25 bp, Homo sapien
tgtgccacaacgccgggtagactgt

SEQ ID NO: 2882306 - DNA, 25 bp, Homo sapien
gtaagaaaccgctctcatttcaaca

SEQ ID NO: 2882307 - DNA, 25 bp, Homo sapien
cgggtagactgtaagaaaccgctct

SEQ ID NO: 2882308 - DNA, 25 bp, Homo sapien
ttcactttatgccaaggacactgct

SEQ ID NO: 2882309 - DNA, 25 bp, Homo sapien
gcagaatcacctgagaggacagacc

SEQ ID NO: 2882310 - DNA, 25 bp, Homo sapien
cattcactggcatggcaaacgaggg

SEQ ID NO: 2882311 - DNA, 25 bp, Homo sapien
ggtattaattgaaggctgacagcca

SEQ ID NO: 2882312 - DNA, 25 bp, Homo sapien
cagttcatctacaatgatctttccc

SEQ ID NO: 2882313 - DNA, 25 bp, Homo sapien
agttcatctacaatgatctttccct

SEQ ID NO: 2882314 - DNA, 25 bp, Homo sapien
ttcagttcatctacaatgatctttc

SEQ ID NO: 2882315 - DNA, 25 bp, Homo sapien
tcagttcatctacaatgatctttcc

SEQ ID NO: 2882316 - DNA, 25 bp, Homo sapien
ggaatgtacaggactgcacaccaca

SEQ ID NO: 2882317 - DNA, 25 bp, Homo sapien
gaggctgagaaagcttagctcccag

SEQ ID NO: 2882318 - DNA, 25 bp, Homo sapien
ggaaggatggtttgctactgacatc

SEQ ID NO: 2882319 - DNA, 25 bp, Homo sapien
caaaatgtcattacgtggaggctga

SEQ ID NO: 2882320 - DNA, 25 bp, Homo sapien
catctagcgtgtaaaggtgtttgcc

SEQ ID NO: 2882321 - DNA, 25 bp, Homo sapien
agcacagggcgttgatgatgtcccc

SEQ ID NO: 2882322 - DNA, 25 bp, Homo sapien
cagcacacagccagtagcggttagg

SEQ ID NO: 2882323 - DNA, 25 bp, Homo sapien
cacacagccagtagcggttagggct

SEQ ID NO: 2882324 - DNA, 25 bp, Homo sapien
ggacacaggtaaggtaaatcaggac

SEQ ID NO: 2882325 - DNA, 25 bp, Homo sapien
gacacaggtaaggtaaatcaggaca

SEQ ID NO: 2882326 - DNA, 25 bp, Homo sapien
ctggacacaggtaaggtaaatcagg

SEQ ID NO: 2882327 - DNA, 25 bp, Homo sapien
tggacacaggtaaggtaaatcagga

SEQ ID NO: 2882328 - DNA, 25 bp, Homo sapien
agatgttaattctgcccatctcaag

SEQ ID NO: 2882329 - DNA, 25 bp, Homo sapien
caagaaaccaactttaggctgggtg

SEQ ID NO: 2882330 - DNA, 25 bp, Homo sapien
actccaatcatttctgaaaaccagg

SEQ ID NO: 2882331 - DNA, 25 bp, Homo sapien
gcttctttgaaagctaatgactcaa

SEQ ID NO: 2882332 - DNA, 25 bp, Homo sapien
ttgctgaaagtaatctttggaaaca

SEQ ID NO: 2882333 - DNA, 25 bp, Homo sapien
tatctcattatcctcctaaaaccat

SEQ ID NO: 2882334 - DNA, 25 bp, Homo sapien
ccatcttggctaatgtttgccattt

SEQ ID NO: 2882335 - DNA, 25 bp, Homo sapien
ctttggaaacatattctcagattgc

SEQ ID NO: 2882336 - DNA, 25 bp, Homo sapien
gttagagacgctggctaagtgctcc

SEQ ID NO: 2882337 - DNA, 25 bp, Homo sapien
taagtgctccttccatgacgctgtc

SEQ ID NO: 2882338 - DNA, 25 bp, Homo sapien
gtcttccactgagtaggagacgcct

SEQ ID NO: 2882339 - DNA, 25 bp, Homo sapien
tccactgagtaggagacgccttgtc

SEQ ID NO: 2882340 - DNA, 25 bp, Homo sapien
gagacagtcaccgtgttcagatagc

SEQ ID NO: 2882341 - DNA, 25 bp, Homo sapien
atctggagagacagtcaccgtgttc

SEQ ID NO: 2882342 - DNA, 25 bp, Homo sapien
catctggagagacagtcaccgtgtt

SEQ ID NO: 2882343 - DNA, 25 bp, Homo sapien
tggccaatgtggttggtcttcagct

SEQ ID NO: 2882344 - DNA, 25 bp, Homo sapien
gacttggagtgtatgaccacctggg

SEQ ID NO: 2882345 - DNA, 25 bp, Homo sapien
catgtcctggccacttcacgttaga

SEQ ID NO: 2882346 - DNA, 25 bp, Homo sapien
tgcagtgtgctgacttacaagggac

SEQ ID NO: 2882347 - DNA, 25 bp, Homo sapien
tcttgatgagctagggtcaggccca

SEQ ID NO: 2882348 - DNA, 25 bp, Homo sapien
tgctgctgttgggcgagaagcggac

SEQ ID NO: 2882349 - DNA, 25 bp, Homo sapien
ttgggcgagaagcggacacaagaca

SEQ ID NO: 2882350 - DNA, 25 bp, Homo sapien
gctgttgggcgagaagcggacacaa

SEQ ID NO: 2882351 - DNA, 25 bp, Homo sapien
gggcgagaagcggacacaagacacc

SEQ ID NO: 2882352 - DNA, 25 bp, Homo sapien
aggaaattagggcaaacagtcctat

SEQ ID NO: 2882353 - DNA, 25 bp, Homo sapien
atgaaatgctagacctcccagccct

SEQ ID NO: 2882354 - DNA, 25 bp, Homo sapien
cagtcctatcccatgaaatgctaga

SEQ ID NO: 2882355 - DNA, 25 bp, Homo sapien
tagggcaaacagtcctatcccatga

SEQ ID NO: 2882356 - DNA, 25 bp, Homo sapien
catcggcttctgagctgcggcaact

SEQ ID NO: 2882357 - DNA, 25 bp, Homo sapien
tctgagctgcggcaactccctttca

SEQ ID NO: 2882358 - DNA, 25 bp, Homo sapien
cgcctgtaatcttctcagacaccca

SEQ ID NO: 2882359 - DNA, 25 bp, Homo sapien
agacacccaaccatcggcttctgag

SEQ ID NO: 2882360 - DNA, 25 bp, Homo sapien
cacccagggtattccatagcttgat

SEQ ID NO: 2882361 - DNA, 25 bp, Homo sapien
cacacacccagggtattccatagct

SEQ ID NO: 2882362 - DNA, 25 bp, Homo sapien
ggttttatctcgagatccagagaca

SEQ ID NO: 2882363 - DNA, 25 bp, Homo sapien
catagcttgatggttttatctcgag

SEQ ID NO: 2882364 - DNA, 25 bp, Homo sapien
tggcccacaaatcgcctcgtggtgg

SEQ ID NO: 2882365 - DNA, 25 bp, Homo sapien
ttggtatggcccacaaatcgcctcg

SEQ ID NO: 2882366 - DNA, 25 bp, Homo sapien
cacaaatcgcctcgtggtggtgccc

SEQ ID NO: 2882367 - DNA, 25 bp, Homo sapien
acatccttggtatggcccacaaatc

SEQ ID NO: 2882368 - DNA, 25 bp, Homo sapien
cactctcattcaacggtcagactca

SEQ ID NO: 2882369 - DNA, 25 bp, Homo sapien
actgagtatatgaaagagaagagcc

SEQ ID NO: 2882370 - DNA, 25 bp, Homo sapien
gagggaggagtttgtcattctcaga

SEQ ID NO: 2882371 - DNA, 25 bp, Homo sapien
cctggatttggctctgatcacagag

SEQ ID NO: 2882372 - DNA, 25 bp, Homo sapien
cccttcagaattgcaggacatgtcc

SEQ ID NO: 2882373 - DNA, 25 bp, Homo sapien
agaattgcaggacatgtcctcactc

SEQ ID NO: 2882374 - DNA, 25 bp, Homo sapien
tggggattggctgacaatgccatct

SEQ ID NO: 2882375 - DNA, 25 bp, Homo sapien
tcctcactcccacttggggattggc

SEQ ID NO: 2882376 - DNA, 25 bp, Homo sapien
gagctttcaaggtaaaacatgttca

SEQ ID NO: 2882377 - DNA, 25 bp, Homo sapien
catcttctgtaggtgtgctctgctt

SEQ ID NO: 2882378 - DNA, 25 bp, Homo sapien
acatgttcaaactgctgcccactca

SEQ ID NO: 2882379 - DNA, 25 bp, Homo sapien
tcccaaatggactggatctcccctg

SEQ ID NO: 2882380 - DNA, 25 bp, Homo sapien
gccccagagctaagtgagcagctac

SEQ ID NO: 2882381 - DNA, 25 bp, Homo sapien
ttcccaaggccccagagctaagtga

SEQ ID NO: 2882382 - DNA, 25 bp, Homo sapien
ccagattcttcccaaggccccagag

SEQ ID NO: 2882383 - DNA, 25 bp, Homo sapien
tctgcccagattcttcccaaggccc

SEQ ID NO: 2882384 - DNA, 25 bp, Homo sapien
ccagaggcgcagggttccatcccag

SEQ ID NO: 2882385 - DNA, 25 bp, Homo sapien
cagaggcgcagggttccatcccagg

SEQ ID NO: 2882386 - DNA, 25 bp, Homo sapien
caaactggccatctgaggagataac

SEQ ID NO: 2882387 - DNA, 25 bp, Homo sapien
ggaattccatagttggtctcatccc

SEQ ID NO: 2882388 - DNA, 25 bp, Homo sapien
tgaccccgcagagcacgctgtggaa

SEQ ID NO: 2882389 - DNA, 25 bp, Homo sapien
agttggtctcatccctggtcagttt

SEQ ID NO: 2882390 - DNA, 25 bp, Homo sapien
ctaacaaagtgggagtgaccccgca

SEQ ID NO: 2882391 - DNA, 25 bp, Homo sapien
cacttcaggcgctacaggattggat

SEQ ID NO: 2882392 - DNA, 25 bp, Homo sapien
gcgtctaaacgcagtcaggaacaca

SEQ ID NO: 2882393 - DNA, 25 bp, Homo sapien
taggccgacacttgagccacgaggt

SEQ ID NO: 2882394 - DNA, 25 bp, Homo sapien
tcttaacagtgtagcagcaaagcgg

SEQ ID NO: 2882395 - DNA, 25 bp, Homo sapien
ctccccacgagccttgggccgggcg

SEQ ID NO: 2882396 - DNA, 25 bp, Homo sapien
tcagcaccgacactcagatggcatg

SEQ ID NO: 2882397 - DNA, 25 bp, Homo sapien
gatttcagcaccgacactcagatgg

SEQ ID NO: 2882398 - DNA, 25 bp, Homo sapien
gcaccgacactcagatggcatgttg

SEQ ID NO: 2882399 - DNA, 25 bp, Homo sapien
ctggatttcagcaccgacactcaga

SEQ ID NO: 2882400 - DNA, 25 bp, Homo sapien
gagaggatcatgtccgggaactgcg

SEQ ID NO: 2882401 - DNA, 25 bp, Homo sapien
gttacccagccgttgtggcccttga

SEQ ID NO: 2882402 - DNA, 25 bp, Homo sapien
tggcccttgagggtgccacgaaggg

SEQ ID NO: 2882403 - DNA, 25 bp, Homo sapien
aactgcggggtagtagcgatctggg

SEQ ID NO: 2882404 - DNA, 25 bp, Homo sapien
tagagaaactagcaccacaacctct

SEQ ID NO: 2882405 - DNA, 25 bp, Homo sapien
gatggcttagagaaactagcaccac

SEQ ID NO: 2882406 - DNA, 25 bp, Homo sapien
actggatggcttagagaaactagca

SEQ ID NO: 2882407 - DNA, 25 bp, Homo sapien
gcttagagaaactagcaccacaacc

SEQ ID NO: 2882408 - DNA, 25 bp, Homo sapien
gatggcggcgccatgtaatgcaaaa

SEQ ID NO: 2882409 - DNA, 25 bp, Homo sapien
gaaattgcaaggcatcacagtcccg

SEQ ID NO: 2882410 - DNA, 25 bp, Homo sapien
tgcaaaatggcgagccccatgatac

SEQ ID NO: 2882411 - DNA, 25 bp, Homo sapien
tacatttctgctcaagatggcggcg

SEQ ID NO: 2882412 - DNA, 25 bp, Homo sapien
accttggcaatgtctgctagaaagc

SEQ ID NO: 2882413 - DNA, 25 bp, Homo sapien
gcctggagaagaaccttggcaatgt

SEQ ID NO: 2882414 - DNA, 25 bp, Homo sapien
gaaccttggcaatgtctgctagaaa

SEQ ID NO: 2882415 - DNA, 25 bp, Homo sapien
gccttgaaggcctggagaagaacct

SEQ ID NO: 2882416 - DNA, 25 bp, Homo sapien
gttcccctgccttccgccgcagtct

SEQ ID NO: 2882417 - DNA, 25 bp, Homo sapien
ggaggctgtagacgcccaggtgtgc

SEQ ID NO: 2882418 - DNA, 25 bp, Homo sapien
gcagtctcccttgggctttccggga

SEQ ID NO: 2882419 - DNA, 25 bp, Homo sapien
tgccggaggctgtagacgcccaggt

SEQ ID NO: 2882420 - DNA, 25 bp, Homo sapien
accctcccgctaaccagcttgctgc

SEQ ID NO: 2882421 - DNA, 25 bp, Homo sapien
tcaccctcccgctaaccagcttgct

SEQ ID NO: 2882422 - DNA, 25 bp, Homo sapien
ctcccgctaaccagcttgctgcccc

SEQ ID NO: 2882423 - DNA, 25 bp, Homo sapien
ttcaccctcccgctaaccagcttgc

SEQ ID NO: 2882424 - DNA, 25 bp, Homo sapien
ctggaggcccctacctgccttttgg

SEQ ID NO: 2882425 - DNA, 25 bp, Homo sapien
ccatacaaggtaagagtcccaagga

SEQ ID NO: 2882426 - DNA, 25 bp, Homo sapien
tccagcctcacggaggtgggaagct

SEQ ID NO: 2882427 - DNA, 25 bp, Homo sapien
ctgggtccaccgttcttctgggtct

SEQ ID NO: 2882428 - DNA, 25 bp, Homo sapien
taagatgatgagcaaaatccttact

SEQ ID NO: 2882429 - DNA, 25 bp, Homo sapien
tgagcaaaatccttactgtctccct

SEQ ID NO: 2882430 - DNA, 25 bp, Homo sapien
tgtctccctgcaaaatccgtgtggc

SEQ ID NO: 2882431 - DNA, 25 bp, Homo sapien
cgtgtggcttcctctggcgtgtccc

SEQ ID NO: 2882432 - DNA, 25 bp, Homo sapien
ctgggcgtggtagcacatgcttgta

SEQ ID NO: 2882433 - DNA, 25 bp, Homo sapien
cagcctggccaacaattaaaattac

SEQ ID NO: 2882434 - DNA, 25 bp, Homo sapien
cctggccaacaattaaaattacatt

SEQ ID NO: 2882435 - DNA, 25 bp, Homo sapien
tgggcgtggtagcacatgcttgtaa

SEQ ID NO: 2882436 - DNA, 25 bp, Homo sapien
gaactagactttggttgtacagaac

SEQ ID NO: 2882437 - DNA, 25 bp, Homo sapien
taaataggatttgatagccactagc

SEQ ID NO: 2882438 - DNA, 25 bp, Homo sapien
tgtgatccacgtgtatcagaagtga

SEQ ID NO: 2882439 - DNA, 25 bp, Homo sapien
aaatattaccttacagcctaccgct

SEQ ID NO: 2882440 - DNA, 25 bp, Homo sapien
gaaacagtgggctccctaaagctga

SEQ ID NO: 2882441 - DNA, 25 bp, Homo sapien
aatgaatcatgcagtctaggctcag

SEQ ID NO: 2882442 - DNA, 25 bp, Homo sapien
gatagtaaggctgttaaatgtctga

SEQ ID NO: 2882443 - DNA, 25 bp, Homo sapien
cctgtatcaggtctttatgccaaaa

SEQ ID NO: 2882444 - DNA, 25 bp, Homo sapien
gaagatgagatccagggtacagcca

SEQ ID NO: 2882445 - DNA, 25 bp, Homo sapien
tttcagatgtgtagccaatctgaag

SEQ ID NO: 2882446 - DNA, 25 bp, Homo sapien
tagaggaacaagtttaaacagtctg

SEQ ID NO: 2882447 - DNA, 25 bp, Homo sapien
aaacagtctgacttgtgatacagca

SEQ ID NO: 2882448 - DNA, 25 bp, Homo sapien
tgaggcctgcacatcggtatgaaac

SEQ ID NO: 2882449 - DNA, 25 bp, Homo sapien
tagattttaagaacaagctcaggag

SEQ ID NO: 2882450 - DNA, 25 bp, Homo sapien
gaacggcgaaattggtgtttgccca

SEQ ID NO: 2882451 - DNA, 25 bp, Homo sapien
tcagatgatgtgatagccatgtcac

SEQ ID NO: 2882452 - DNA, 25 bp, Homo sapien
tacaatttcctccaactcggttcat

SEQ ID NO: 2882453 - DNA, 25 bp, Homo sapien
cagcaaggctgaagatttccagtag

SEQ ID NO: 2882454 - DNA, 25 bp, Homo sapien
cacagtttgctgtagtgccattaag

SEQ ID NO: 2882455 - DNA, 25 bp, Homo sapien
gcatttagatcttcaaaaagcaggg

SEQ ID NO: 2882456 - DNA, 25 bp, Homo sapien
tcaagtagaaggctcacgaaaacag

SEQ ID NO: 2882457 - DNA, 25 bp, Homo sapien
gcacacccacagttttgaaagcctt

SEQ ID NO: 2882458 - DNA, 25 bp, Homo sapien
gctttcacggcttggaagattcctg

SEQ ID NO: 2882459 - DNA, 25 bp, Homo sapien
cagagaatcgggctttgcagaacac

SEQ ID NO: 2882460 - DNA, 25 bp, Homo sapien
gccatttttagctacctcaaaggag

SEQ ID NO: 2882461 - DNA, 25 bp, Homo sapien
tctagcttgcagagtcaagacgaac

SEQ ID NO: 2882462 - DNA, 25 bp, Homo sapien
gttatgcctgatccccaataagtga

SEQ ID NO: 2882463 - DNA, 25 bp, Homo sapien
gacgaactctaactcatgggatgga

SEQ ID NO: 2882464 - DNA, 25 bp, Homo sapien
ttactgattataggccttgctgtga

SEQ ID NO: 2882465 - DNA, 25 bp, Homo sapien
gctttcttgctctatctgaagtatt

SEQ ID NO: 2882466 - DNA, 25 bp, Homo sapien
tgattataggccttgctgtgaatgc

SEQ ID NO: 2882467 - DNA, 25 bp, Homo sapien
gaagtattcccaccagagttgtttc

SEQ ID NO: 2882468 - DNA, 25 bp, Homo sapien
gaatgaaagagacacccaggcatgg

SEQ ID NO: 2882469 - DNA, 25 bp, Homo sapien
gtgtcttaactgtgcacttaacaat

SEQ ID NO: 2882470 - DNA, 25 bp, Homo sapien
gtaaaattctaaatcatgcgactat

SEQ ID NO: 2882471 - DNA, 25 bp, Homo sapien
gaaggaagtgacaatgaactgccta

SEQ ID NO: 2882472 - DNA, 25 bp, Homo sapien
gatactttagttatcaccttgggtg

SEQ ID NO: 2882473 - DNA, 25 bp, Homo sapien
gaaaacatggtactaggatttgtcc

SEQ ID NO: 2882474 - DNA, 25 bp, Homo sapien
tcaggttaatgtaacagaggtagca

SEQ ID NO: 2882475 - DNA, 25 bp, Homo sapien
gaggtagcagtgacttatggttaga

SEQ ID NO: 2882476 - DNA, 25 bp, Homo sapien
tcccagggaattggtcaaggactca

SEQ ID NO: 2882477 - DNA, 25 bp, Homo sapien
tagcagtagtggtccgcttccagtg

SEQ ID NO: 2882478 - DNA, 25 bp, Homo sapien
gaggttgacacctgcccaagactag

SEQ ID NO: 2882479 - DNA, 25 bp, Homo sapien
cccactgaaggtagagatgcaatcc

SEQ ID NO: 2882480 - DNA, 25 bp, Homo sapien
cccccacattccctcatttctctca

SEQ ID NO: 2882481 - DNA, 25 bp, Homo sapien
ccactcccttcatccccccacattc

SEQ ID NO: 2882482 - DNA, 25 bp, Homo sapien
atccccccacattccctcatttctc

SEQ ID NO: 2882483 - DNA, 25 bp, Homo sapien
tttccactcccttcatccccccaca

SEQ ID NO: 2882484 - DNA, 25 bp, Homo sapien
caagttgggacgaaagctgcgacgt

SEQ ID NO: 2882485 - DNA, 25 bp, Homo sapien
ggtcaggtctcaagcctcctaggta

SEQ ID NO: 2882486 - DNA, 25 bp, Homo sapien
ggtggatgtcaggatacagctcttc

SEQ ID NO: 2882487 - DNA, 25 bp, Homo sapien
gcacatctggcgaattatctggacc

SEQ ID NO: 2882488 - DNA, 25 bp, Homo sapien
ccgatacaacacctctcgaatggag

SEQ ID NO: 2882489 - DNA, 25 bp, Homo sapien
tcatcttggtcttggaacaactctt

SEQ ID NO: 2882490 - DNA, 25 bp, Homo sapien
tacaacacctctcgaatggagccgt

SEQ ID NO: 2882491 - DNA, 25 bp, Homo sapien
ctgtcaccgagccagagttcatcgt

SEQ ID NO: 2882492 - DNA, 25 bp, Homo sapien
ctcctcccattcatcttcctcctcg

SEQ ID NO: 2882493 - DNA, 25 bp, Homo sapien
cattcatcttcctcctcgttctggt

SEQ ID NO: 2882494 - DNA, 25 bp, Homo sapien
ttcctcctcgttctggtcctcctcg

SEQ ID NO: 2882495 - DNA, 25 bp, Homo sapien
tcctcgttctggtcctcctcgtcct

SEQ ID NO: 2882496 - DNA, 25 bp, Homo sapien
gaagtaatccaagcagatggcacac

SEQ ID NO: 2882497 - DNA, 25 bp, Homo sapien
ttgaagtaatccaagcagatggcac

SEQ ID NO: 2882498 - DNA, 25 bp, Homo sapien
aagcagatggcacacaccgcttcct

SEQ ID NO: 2882499 - DNA, 25 bp, Homo sapien
taatccaagcagatggcacacaccg

SEQ ID NO: 2882500 - DNA, 25 bp, Homo sapien
ctgggagtagtggcataaccagcca

SEQ ID NO: 2882501 - DNA, 25 bp, Homo sapien
tgggagtagtggcataaccagccat

SEQ ID NO: 2882502 - DNA, 25 bp, Homo sapien
ggcctgcctccaaactactctggtg

SEQ ID NO: 2882503 - DNA, 25 bp, Homo sapien
ggtgacccgaggctgtcctcaacct

SEQ ID NO: 2882504 - DNA, 25 bp, Homo sapien
taccctcagggtgtgccctacactg

SEQ ID NO: 2882505 - DNA, 25 bp, Homo sapien
ggtgtagatacgtcagcttggagct

SEQ ID NO: 2882506 - DNA, 25 bp, Homo sapien
gcccttctgcggccaaccaggtgac

SEQ ID NO: 2882507 - DNA, 25 bp, Homo sapien
cccttctgcggccaaccaggtgaca

SEQ ID NO: 2882508 - DNA, 25 bp, Homo sapien
ccttctgcggccaaccaggtgacac

SEQ ID NO: 2882509 - DNA, 25 bp, Homo sapien
tgacagcagcgctggttccgttggc

SEQ ID NO: 2882510 - DNA, 25 bp, Homo sapien
gagggtgggtaggtgcatggagggt

SEQ ID NO: 2882511 - DNA, 25 bp, Homo sapien
gaggccaagtagtaggagccttgga

SEQ ID NO: 2882512 - DNA, 25 bp, Homo sapien
gcgtcggcgctaatggtggcagcag

SEQ ID NO: 2882513 - DNA, 25 bp, Homo sapien
ggaacacttcccacaggcgttggga

SEQ ID NO: 2882514 - DNA, 25 bp, Homo sapien
ggtcctggtcttggcggtctcagtc

SEQ ID NO: 2882515 - DNA, 25 bp, Homo sapien
ttcccacaggcgttgggaagccaca

SEQ ID NO: 2882516 - DNA, 25 bp, Homo sapien
gggtcctggtcttggcggtctcagt

SEQ ID NO: 2882517 - DNA, 25 bp, Homo sapien
caggtaagcatcgtgacactcagtg

SEQ ID NO: 2882518 - DNA, 25 bp, Homo sapien
tcgtgacactcagtgaattttgttt

SEQ ID NO: 2882519 - DNA, 25 bp, Homo sapien
gcatcgtgacactcagtgaattttg

SEQ ID NO: 2882520 - DNA, 25 bp, Homo sapien
taagcatcgtgacactcagtgaatt

SEQ ID NO: 2882521 - DNA, 25 bp, Homo sapien
gaggagaaagagtgtgcgttcaagg

SEQ ID NO: 2882522 - DNA, 25 bp, Homo sapien
atctcgggagtcatagaagtcttct

SEQ ID NO: 2882523 - DNA, 25 bp, Homo sapien
aggagaaagagtgtgcgttcaaggg

SEQ ID NO: 2882524 - DNA, 25 bp, Homo sapien
tcgggagtcatagaagtcttctatg

SEQ ID NO: 2882525 - DNA, 25 bp, Homo sapien
acatctggctagtttcttttatttt

SEQ ID NO: 2882526 - DNA, 25 bp, Homo sapien
accacatctggctagtttcttttat

SEQ ID NO: 2882527 - DNA, 25 bp, Homo sapien
aggctggccacaaattcctggtctc

SEQ ID NO: 2882528 - DNA, 25 bp, Homo sapien
atagatggggtcttgttgtgttggc

SEQ ID NO: 2882529 - DNA, 25 bp, Homo sapien
taataactggtgtggtgttgtgcac

SEQ ID NO: 2882530 - DNA, 25 bp, Homo sapien
ctgagatgagaggataccttgagct

SEQ ID NO: 2882531 - DNA, 25 bp, Homo sapien
tggtgttgtgcacctagagttccaa

SEQ ID NO: 2882532 - DNA, 25 bp, Homo sapien
tagagttccaactactagggaagct

SEQ ID NO: 2882533 - DNA, 25 bp, Homo sapien
tccagtaggtgacctcacagtgact

SEQ ID NO: 2882534 - DNA, 25 bp, Homo sapien
tgatttccagtaggtgacctcacag

SEQ ID NO: 2882535 - DNA, 25 bp, Homo sapien
gatgctggtgatttccagtaggtga

SEQ ID NO: 2882536 - DNA, 25 bp, Homo sapien
tggtgatttccagtaggtgacctca

SEQ ID NO: 2882537 - DNA, 25 bp, Homo sapien
gtatgtcatgtcacgacatactgcc

SEQ ID NO: 2882538 - DNA, 25 bp, Homo sapien
tcatgtcacgacatactgccgctgc

SEQ ID NO: 2882539 - DNA, 25 bp, Homo sapien
tgtcatgtcacgacatactgccgct

SEQ ID NO: 2882540 - DNA, 25 bp, Homo sapien
gtcacgacatactgccgctgcacga

SEQ ID NO: 2882541 - DNA, 25 bp, Homo sapien
caggtgcaaaacttcctcgagtcag

SEQ ID NO: 2882542 - DNA, 25 bp, Homo sapien
ggtgcaaaacttcctcgagtcagcc

SEQ ID NO: 2882543 - DNA, 25 bp, Homo sapien
gcaaaacttcctcgagtcagcctct

SEQ ID NO: 2882544 - DNA, 25 bp, Homo sapien
tgcaaaacttcctcgagtcagcctc

SEQ ID NO: 2882545 - DNA, 25 bp, Homo sapien
gcacaatgaaaaatatcgcccacga

SEQ ID NO: 2882546 - DNA, 25 bp, Homo sapien
aatgaaaaatatcgcccacgatcaa

SEQ ID NO: 2882547 - DNA, 25 bp, Homo sapien
tttaatgacggtcatggcaactttt

SEQ ID NO: 2882548 - DNA, 25 bp, Homo sapien
aacaggtttaatgacggtcatggca

SEQ ID NO: 2882549 - DNA, 25 bp, Homo sapien
agatgtgtgcatagtgggcctggag

SEQ ID NO: 2882550 - DNA, 25 bp, Homo sapien
gtgtgcatagtgggcctggagggcg

SEQ ID NO: 2882551 - DNA, 25 bp, Homo sapien
gaagatgtgtgcatagtgggcctgg

SEQ ID NO: 2882552 - DNA, 25 bp, Homo sapien
ggggaagatgtgtgcatagtgggcc

SEQ ID NO: 2882553 - DNA, 25 bp, Homo sapien
ccggcactggtccagggtacgtgca

SEQ ID NO: 2882554 - DNA, 25 bp, Homo sapien
ctgagcctgtcctcggcttctccac

SEQ ID NO: 2882555 - DNA, 25 bp, Homo sapien
cagggccggcactggtccagggtac

SEQ ID NO: 2882556 - DNA, 25 bp, Homo sapien
ggccggcactggtccagggtacgtg

SEQ ID NO: 2882557 - DNA, 25 bp, Homo sapien
ttcgtcactcgctatgacctcgctg

SEQ ID NO: 2882558 - DNA, 25 bp, Homo sapien
tgtgctcttcgtcactcgctatgac

SEQ ID NO: 2882559 - DNA, 25 bp, Homo sapien
ctcttcgtcactcgctatgacctcg

SEQ ID NO: 2882560 - DNA, 25 bp, Homo sapien
tgctcttcgtcactcgctatgacct

SEQ ID NO: 2882561 - DNA, 25 bp, Homo sapien
gaaggccaggttgtatttctgcatc

SEQ ID NO: 2882562 - DNA, 25 bp, Homo sapien
ctggaaggccaggttgtatttctgc

SEQ ID NO: 2882563 - DNA, 25 bp, Homo sapien
cagcatctggctgacggtccggtta

SEQ ID NO: 2882564 - DNA, 25 bp, Homo sapien
gctgacggtccggttatcctggttg

SEQ ID NO: 2882565 - DNA, 25 bp, Homo sapien
ccgcctgctgaagatcatgagcgcc

SEQ ID NO: 2882566 - DNA, 25 bp, Homo sapien
ggccaccggatgtggtccttgtctg

SEQ ID NO: 2882567 - DNA, 25 bp, Homo sapien
ccgccagggcctggtgccgcctgct

SEQ ID NO: 2882568 - DNA, 25 bp, Homo sapien
ccttgtctgatttgttggggctgcg

SEQ ID NO: 2882569 - DNA, 25 bp, Homo sapien
caaagtgtgtggggttgcgggccct

SEQ ID NO: 2882570 - DNA, 25 bp, Homo sapien
ggccgcccagggtcaacactccctg

SEQ ID NO: 2882571 - DNA, 25 bp, Homo sapien
ccagggtcaacactccctgtcccac

SEQ ID NO: 2882572 - DNA, 25 bp, Homo sapien
cgcccagggtcaacactccctgtcc

SEQ ID NO: 2882573 - DNA, 25 bp, Homo sapien
ctggtggacgctcatgagcaacggc

SEQ ID NO: 2882574 - DNA, 25 bp, Homo sapien
tggacgctcatgagcaacggctgcc

SEQ ID NO: 2882575 - DNA, 25 bp, Homo sapien
gacgctcatgagcaacggctgccaa

SEQ ID NO: 2882576 - DNA, 25 bp, Homo sapien
tggtggacgctcatgagcaacggct

SEQ ID NO: 2882577 - DNA, 25 bp, Homo sapien
caggagaacacggccgcagagtgac

SEQ ID NO: 2882578 - DNA, 25 bp, Homo sapien
taccaggagaacacggccgcagagt

SEQ ID NO: 2882579 - DNA, 25 bp, Homo sapien
ggagaacacggccgcagagtgacct

SEQ ID NO: 2882580 - DNA, 25 bp, Homo sapien
agaacacggccgcagagtgaccttc

SEQ ID NO: 2882581 - DNA, 25 bp, Homo sapien
ctaaagcgtgaactcctagcagggc

SEQ ID NO: 2882582 - DNA, 25 bp, Homo sapien
cacattggtttcacagctgcaggac

SEQ ID NO: 2882583 - DNA, 25 bp, Homo sapien
gctgagcaccgatacaaagaaagac

SEQ ID NO: 2882584 - DNA, 25 bp, Homo sapien
gctgcaggacaagttcgagcatctt

SEQ ID NO: 2882585 - DNA, 25 bp, Homo sapien
gggctgtgattagcagctctcttcc

SEQ ID NO: 2882586 - DNA, 25 bp, Homo sapien
tgatgccgtactggatctggttcat

SEQ ID NO: 2882587 - DNA, 25 bp, Homo sapien
gtctgcagtgatgccgtactggatc

SEQ ID NO: 2882588 - DNA, 25 bp, Homo sapien
atcactttggccactaccctctggg

SEQ ID NO: 2882589 - DNA, 25 bp, Homo sapien
tcagttgggtgcaatgtctgccttc

SEQ ID NO: 2882590 - DNA, 25 bp, Homo sapien
tctgtgtggccatttgctgttgcca

SEQ ID NO: 2882591 - DNA, 25 bp, Homo sapien
gggtgcaatgtctgccttctgtgtg

SEQ ID NO: 2882592 - DNA, 25 bp, Homo sapien
ttctgtgtggccatttgctgttgcc

SEQ ID NO: 2882593 - DNA, 25 bp, Homo sapien
cagtccataggcttctggttgtaaa

SEQ ID NO: 2882594 - DNA, 25 bp, Homo sapien
cttccgcttgatcgaatcagtgctt

SEQ ID NO: 2882595 - DNA, 25 bp, Homo sapien
gcatgctgcatgaagttctcatggc

SEQ ID NO: 2882596 - DNA, 25 bp, Homo sapien
tctgttggtgtttgccctaggtcta

SEQ ID NO: 2882597 - DNA, 25 bp, Homo sapien
aaccttctgatgaggtcactgagtg

SEQ ID NO: 2882598 - DNA, 25 bp, Homo sapien
gcccatagcagtgtcctgttgtgtc

SEQ ID NO: 2882599 - DNA, 25 bp, Homo sapien
gtagtagttacaacactgagactgc

SEQ ID NO: 2882600 - DNA, 25 bp, Homo sapien
agactgcccatagcagtgtcctgtt

SEQ ID NO: 2882601 - DNA, 25 bp, Homo sapien
acactgagactgcccatagcagtgt

SEQ ID NO: 2882602 - DNA, 25 bp, Homo sapien
ggttcagccctggctgacacagggc

SEQ ID NO: 2882603 - DNA, 25 bp, Homo sapien
ctgtgggggttcagccctggctgac

SEQ ID NO: 2882604 - DNA, 25 bp, Homo sapien
ttcagccctggctgacacagggctg

SEQ ID NO: 2882605 - DNA, 25 bp, Homo sapien
tgggggttcagccctggctgacaca

SEQ ID NO: 2882606 - DNA, 25 bp, Homo sapien
tacttttcgtcatgtcatatagttt

SEQ ID NO: 2882607 - DNA, 25 bp, Homo sapien
ttacttttcgtcatgtcatatagtt

SEQ ID NO: 2882608 - DNA, 25 bp, Homo sapien
tcctgccaccttggcatctcaaaat

SEQ ID NO: 2882609 - DNA, 25 bp, Homo sapien
tgtcactattttccacatattctgg

SEQ ID NO: 2882610 - DNA, 25 bp, Homo sapien
cactattttccacatattctggaaa

SEQ ID NO: 2882611 - DNA, 25 bp, Homo sapien
tttttattgtcactattttccacat

SEQ ID NO: 2882612 - DNA, 25 bp, Homo sapien
tagaagggtaaattaatgtctcatt

SEQ ID NO: 2882613 - DNA, 25 bp, Homo sapien
gggtaaattaatgtctcatttacca

SEQ ID NO: 2882614 - DNA, 25 bp, Homo sapien
gtgatagagattagaagggtaaatt

SEQ ID NO: 2882615 - DNA, 25 bp, Homo sapien
gattagaagggtaaattaatgtctc

SEQ ID NO: 2882616 - DNA, 25 bp, Homo sapien
taaaacgtgctctgggcgtcctgtg

SEQ ID NO: 2882617 - DNA, 25 bp, Homo sapien
acccagtagctagagaagtgctgga

SEQ ID NO: 2882618 - DNA, 25 bp, Homo sapien
cagaggctttggtgagtcattgtca

SEQ ID NO: 2882619 - DNA, 25 bp, Homo sapien
tctgggcgtcctgtggtggctacca

SEQ ID NO: 2882620 - DNA, 25 bp, Homo sapien
atgcatgatcttccactgtgcctcc

SEQ ID NO: 2882621 - DNA, 25 bp, Homo sapien
tctcaggctctggcagaggagtccc

SEQ ID NO: 2882622 - DNA, 25 bp, Homo sapien
ctgtgtgcaggagaaagctctcagg

SEQ ID NO: 2882623 - DNA, 25 bp, Homo sapien
cccaggggaaggatgcatgatcttc

SEQ ID NO: 2882624 - DNA, 25 bp, Homo sapien
tcccaatctgaggtccaatgctctc

SEQ ID NO: 2882625 - DNA, 25 bp, Homo sapien
tcagactcccaatctgaggtccaat

SEQ ID NO: 2882626 - DNA, 25 bp, Homo sapien
agactcccaatctgaggtccaatgc

SEQ ID NO: 2882627 - DNA, 25 bp, Homo sapien
gactcccaatctgaggtccaatgct

SEQ ID NO: 2882628 - DNA, 25 bp, Homo sapien
agtcatggaaaagccagcggggacc

SEQ ID NO: 2882629 - DNA, 25 bp, Homo sapien
ataagtcaatacagtagtaagagtc

SEQ ID NO: 2882630 - DNA, 25 bp, Homo sapien
cttttatatatactaaggtttcaca

SEQ ID NO: 2882631 - DNA, 25 bp, Homo sapien
cacagcaatacatgttagcaacttt

SEQ ID NO: 2882632 - DNA, 25 bp, Homo sapien
tcttggaacaaattccaaacaagaa

SEQ ID NO: 2882633 - DNA, 25 bp, Homo sapien
actgaaagggacaggcctttcttgg

SEQ ID NO: 2882634 - DNA, 25 bp, Homo sapien
tagggaaaatcaccatcaggctggg

SEQ ID NO: 2882635 - DNA, 25 bp, Homo sapien
ggagtaaatagggaaaatcaccatc

SEQ ID NO: 2882636 - DNA, 25 bp, Homo sapien
actgaggtaactaacgacggcggca

SEQ ID NO: 2882637 - DNA, 25 bp, Homo sapien
cgctacggttactaattgtgtgcac

SEQ ID NO: 2882638 - DNA, 25 bp, Homo sapien
ccccaggattgtggagtgagaacgt

SEQ ID NO: 2882639 - DNA, 25 bp, Homo sapien
tgtgtgcacctagccctgtagctgt

SEQ ID NO: 2882640 - DNA, 25 bp, Homo sapien
gcctcaagctcccgggctcaaggaa

SEQ ID NO: 2882641 - DNA, 25 bp, Homo sapien
cctcaagctcccgggctcaaggaat

SEQ ID NO: 2882642 - DNA, 25 bp, Homo sapien
agcctcaagctcccgggctcaagga

SEQ ID NO: 2882643 - DNA, 25 bp, Homo sapien
gcctacttggaatatctatcgcctt

SEQ ID NO: 2882644 - DNA, 25 bp, Homo sapien
aaatatacagtaggcaattgccaac

SEQ ID NO: 2882645 - DNA, 25 bp, Homo sapien
caggctgtcgttcctctgtatggct

SEQ ID NO: 2882646 - DNA, 25 bp, Homo sapien
ttgctttatgctagaaccgttccga

SEQ ID NO: 2882647 - DNA, 25 bp, Homo sapien
aggatttattttccgttctcacagg

SEQ ID NO: 2882648 - DNA, 25 bp, Homo sapien
tgggaattgtgatccaaagcttttc

SEQ ID NO: 2882649 - DNA, 25 bp, Homo sapien
cttcagcactgggaattgtgatcca

SEQ ID NO: 2882650 - DNA, 25 bp, Homo sapien
ttaaggacacacctgagaaaagaac

SEQ ID NO: 2882651 - DNA, 25 bp, Homo sapien
tgagcagacctgcatgtctgcggtc

SEQ ID NO: 2882652 - DNA, 25 bp, Homo sapien
gagcagacctgcatgtctgcggtca

SEQ ID NO: 2882653 - DNA, 25 bp, Homo sapien
gttccttcgtggggcagctggtctc

SEQ ID NO: 2882654 - DNA, 25 bp, Homo sapien
gggacagagggactgtcttcctcca

SEQ ID NO: 2882655 - DNA, 25 bp, Homo sapien
tctccagggcagcaagagagaccaa

SEQ ID NO: 2882656 - DNA, 25 bp, Homo sapien
agcaggttggctctggttccttcgt

SEQ ID NO: 2882657 - DNA, 25 bp, Homo sapien
ttttagactcttgttttagaaagca

SEQ ID NO: 2882658 - DNA, 25 bp, Homo sapien
cttatcaggcaagaaaggagaggtt

SEQ ID NO: 2882659 - DNA, 25 bp, Homo sapien
tataacgatgtgtatcttaacccca

SEQ ID NO: 2882660 - DNA, 25 bp, Homo sapien
gctctgtgcatcctctgtacgctgg

SEQ ID NO: 2882661 - DNA, 25 bp, Homo sapien
tggccagaacctctccatcgtgggt

SEQ ID NO: 2882662 - DNA, 25 bp, Homo sapien
tacgacgactacactctgagcaaga

SEQ ID NO: 2882663 - DNA, 25 bp, Homo sapien
gaactgatggtgcttaactggcgct

SEQ ID NO: 2882664 - DNA, 25 bp, Homo sapien
caagagcatcctgtagtgccccaag

SEQ ID NO: 2882665 - DNA, 25 bp, Homo sapien
ggcgggcgtcctgtcactatactat

SEQ ID NO: 2882666 - DNA, 25 bp, Homo sapien
tcactgagcgaagtgtatggtctta

SEQ ID NO: 2882667 - DNA, 25 bp, Homo sapien
tctgtgtgtctcagagggagtcccg

SEQ ID NO: 2882668 - DNA, 25 bp, Homo sapien
gacttctggagatcttcactgagcg

SEQ ID NO: 2882669 - DNA, 25 bp, Homo sapien
ggagtcccgtgatggagatgaacat

SEQ ID NO: 2882670 - DNA, 25 bp, Homo sapien
ctgggcagacgtggctgctggccat

SEQ ID NO: 2882671 - DNA, 25 bp, Homo sapien
gaaggtgaggcaaaagcttcctgtc

SEQ ID NO: 2882672 - DNA, 25 bp, Homo sapien
aggaaggtgaggcaaaagcttcctg

SEQ ID NO: 2882673 - DNA, 25 bp, Homo sapien
gtgaggcaaaagcttcctgtctgct

SEQ ID NO: 2882674 - DNA, 25 bp, Homo sapien
gacaccatcatcattagtcttttcc

SEQ ID NO: 2882675 - DNA, 25 bp, Homo sapien
accatcatcattagtcttttccacc

SEQ ID NO: 2882676 - DNA, 25 bp, Homo sapien
acaccatcatcattagtcttttcca

SEQ ID NO: 2882677 - DNA, 25 bp, Homo sapien
tcagacaccatcatcattagtcttt

SEQ ID NO: 2882678 - DNA, 25 bp, Homo sapien
gctctttgcacctccgtccctcaag

SEQ ID NO: 2882679 - DNA, 25 bp, Homo sapien
ccccgggaactagagcgcctttcat

SEQ ID NO: 2882680 - DNA, 25 bp, Homo sapien
tccgtccctcaaggtgctgctgtcc

SEQ ID NO: 2882681 - DNA, 25 bp, Homo sapien
tttgcacctccgtccctcaaggtgc

SEQ ID NO: 2882682 - DNA, 25 bp, Homo sapien
agttcattccgcgtgaacttgatgg

SEQ ID NO: 2882683 - DNA, 25 bp, Homo sapien
ctggagttcattccgcgtgaacttg

SEQ ID NO: 2882684 - DNA, 25 bp, Homo sapien
ttcattccgcgtgaacttgatggag

SEQ ID NO: 2882685 - DNA, 25 bp, Homo sapien
cttgctggagttcattccgcgtgaa

SEQ ID NO: 2882686 - DNA, 25 bp, Homo sapien
gacacagagatctttgttcacatgt

SEQ ID NO: 2882687 - DNA, 25 bp, Homo sapien
tttgtgtacgtgcacatcaaagcac

SEQ ID NO: 2882688 - DNA, 25 bp, Homo sapien
gtgtacgtgcacatcaaagcacagc

SEQ ID NO: 2882689 - DNA, 25 bp, Homo sapien
tgaactgagatgtttgtgtacgtgc

SEQ ID NO: 2882690 - DNA, 25 bp, Homo sapien
tctgtaatgctagccccaaccctgt

SEQ ID NO: 2882691 - DNA, 25 bp, Homo sapien
tatccgggagtcttagctacaaatt

SEQ ID NO: 2882692 - DNA, 25 bp, Homo sapien
caaattgtccaataccctcaggtca

SEQ ID NO: 2882693 - DNA, 25 bp, Homo sapien
ctcccggagccgagaacgcagagag

SEQ ID NO: 2882694 - DNA, 25 bp, Homo sapien
agccgagaacgcagagagctgaagc

SEQ ID NO: 2882695 - DNA, 25 bp, Homo sapien
tccggtctgcggttgagatgagcca

SEQ ID NO: 2882696 - DNA, 25 bp, Homo sapien
ggtttgtgccacaggtacaggccga

SEQ ID NO: 2882697 - DNA, 25 bp, Homo sapien
caatgtggagctaggtacctgctga

SEQ ID NO: 2882698 - DNA, 25 bp, Homo sapien
tttttggcagaaaacgctaggcgca

SEQ ID NO: 2882699 - DNA, 25 bp, Homo sapien
aatcagtgtcagaacggaagatgcc

SEQ ID NO: 2882700 - DNA, 25 bp, Homo sapien
aatcctggagtataaagttgccctg

SEQ ID NO: 2882701 - DNA, 25 bp, Homo sapien
tgaaggcggtgaaataactgactgc

SEQ ID NO: 2882702 - DNA, 25 bp, Homo sapien
tgaatctggttaggtttatgggccc

SEQ ID NO: 2882703 - DNA, 25 bp, Homo sapien
gtaggaatagctactccaaactctg

SEQ ID NO: 2882704 - DNA, 25 bp, Homo sapien
ggggtcagacctggacaaggttcag

SEQ ID NO: 2882705 - DNA, 25 bp, Homo sapien
gaatagctactccaaactctgatct

SEQ ID NO: 2882706 - DNA, 25 bp, Homo sapien
attaaattcaaagtacattgccttt

SEQ ID NO: 2882707 - DNA, 25 bp, Homo sapien
cacatatttatcatgtgacagagtt

SEQ ID NO: 2882708 - DNA, 25 bp, Homo sapien
gaaaacacatatttatcatgtgaca

SEQ ID NO: 2882709 - DNA, 25 bp, Homo sapien
aacacatatttatcatgtgacagag

SEQ ID NO: 2882710 - DNA, 25 bp, Homo sapien
ctgaaaacacatatttatcatgtga

SEQ ID NO: 2882711 - DNA, 25 bp, Homo sapien
agacatttccactcttcaggggaga

SEQ ID NO: 2882712 - DNA, 25 bp, Homo sapien
agggtccagacatttccactcttca

SEQ ID NO: 2882713 - DNA, 25 bp, Homo sapien
cagacatttccactcttcaggggag

SEQ ID NO: 2882714 - DNA, 25 bp, Homo sapien
gtccagacatttccactcttcaggg

SEQ ID NO: 2882715 - DNA, 25 bp, Homo sapien
tggctgctgtctcatgtatcttcaa

SEQ ID NO: 2882716 - DNA, 25 bp, Homo sapien
ccaggtctgggttagagatcacaaa

SEQ ID NO: 2882717 - DNA, 25 bp, Homo sapien
tctcatgtatcttcaaattgcaggg

SEQ ID NO: 2882718 - DNA, 25 bp, Homo sapien
atcttcaaattgcagggctctttta

SEQ ID NO: 2882719 - DNA, 25 bp, Homo sapien
gcgataaagtggacattggctctcc

SEQ ID NO: 2882720 - DNA, 25 bp, Homo sapien
aacagcagtcagattatgcagccca

SEQ ID NO: 2882721 - DNA, 25 bp, Homo sapien
gattatgcagcccattataagcgat

SEQ ID NO: 2882722 - DNA, 25 bp, Homo sapien
tataagcgataaagtggacattggc

SEQ ID NO: 2882723 - DNA, 25 bp, Homo sapien
catcaagtgacctgcagggaaacac

SEQ ID NO: 2882724 - DNA, 25 bp, Homo sapien
tcagctatagtccaaaagtggtcct

SEQ ID NO: 2882725 - DNA, 25 bp, Homo sapien
gatatttaatctttccatggcccag

SEQ ID NO: 2882726 - DNA, 25 bp, Homo sapien
cccaggtagttagtagaagccaatc

SEQ ID NO: 2882727 - DNA, 25 bp, Homo sapien
tacagcatggtgcaatccaggagaa

SEQ ID NO: 2882728 - DNA, 25 bp, Homo sapien
aacttgcaatgaaacgagatggcgc

SEQ ID NO: 2882729 - DNA, 25 bp, Homo sapien
cataagacgcaatcctgacgtggtg

SEQ ID NO: 2882730 - DNA, 25 bp, Homo sapien
attagatatgcccagcgcagcctga

SEQ ID NO: 2882731 - DNA, 25 bp, Homo sapien
taaacccaagggcattctgataagg

SEQ ID NO: 2882732 - DNA, 25 bp, Homo sapien
taaggtgtctgcacctgaagaagac

SEQ ID NO: 2882733 - DNA, 25 bp, Homo sapien
cacaaaagatgcatactttcaccac

SEQ ID NO: 2882734 - DNA, 25 bp, Homo sapien
agaagaggcacaaaagatgcatact

SEQ ID NO: 2882735 - DNA, 25 bp, Homo sapien
gacaataggatgtatgaggatgaat

SEQ ID NO: 2882736 - DNA, 25 bp, Homo sapien
agacaataggatgtatgaggatgaa

SEQ ID NO: 2882737 - DNA, 25 bp, Homo sapien
aaagacaataggatgtatgaggatg

SEQ ID NO: 2882738 - DNA, 25 bp, Homo sapien
aataggatgtatgaggatgaattac

SEQ ID NO: 2882739 - DNA, 25 bp, Homo sapien
caccataggcatctgtggtcttccc

SEQ ID NO: 2882740 - DNA, 25 bp, Homo sapien
ttccaagagacatggccaccatagg

SEQ ID NO: 2882741 - DNA, 25 bp, Homo sapien
gagacatggccaccataggcatctg

SEQ ID NO: 2882742 - DNA, 25 bp, Homo sapien
catggccaccataggcatctgtggt

SEQ ID NO: 2882743 - DNA, 25 bp, Homo sapien
tcccgtgaggctctaccctatacct

SEQ ID NO: 2882744 - DNA, 25 bp, Homo sapien
tcttaatgccataaggatttggtgt

SEQ ID NO: 2882745 - DNA, 25 bp, Homo sapien
gtaaacaagaagagtgctttagcat

SEQ ID NO: 2882746 - DNA, 25 bp, Homo sapien
ctttcccatcaatatcagctttcca

SEQ ID NO: 2882747 - DNA, 25 bp, Homo sapien
cactggaccgtatacttgaaaatgt

SEQ ID NO: 2882748 - DNA, 25 bp, Homo sapien
caccactggaccgtatacttgaaaa

SEQ ID NO: 2882749 - DNA, 25 bp, Homo sapien
tacttaacaccactggaccgtatac

SEQ ID NO: 2882750 - DNA, 25 bp, Homo sapien
aattaatctaagagatccattgcaa

SEQ ID NO: 2882751 - DNA, 25 bp, Homo sapien
aggtcttggctgaaaggagaacata

SEQ ID NO: 2882752 - DNA, 25 bp, Homo sapien
gtcttggctgaaaggagaacatata

SEQ ID NO: 2882753 - DNA, 25 bp, Homo sapien
tcttggctgaaaggagaacatatag

SEQ ID NO: 2882754 - DNA, 25 bp, Homo sapien
ggtcttggctgaaaggagaacatat

SEQ ID NO: 2882755 - DNA, 25 bp, Homo sapien
aactccattattaactcctttctgc

SEQ ID NO: 2882756 - DNA, 25 bp, Homo sapien
tcattcacacgtttacagccttttc

SEQ ID NO: 2882757 - DNA, 25 bp, Homo sapien
tgtccacatttctcgtatcttttca

SEQ ID NO: 2882758 - DNA, 25 bp, Homo sapien
tggaatgaatcttctatcccctgca

SEQ ID NO: 2882759 - DNA, 25 bp, Homo sapien
tattttgctctgggtagttgacaag

SEQ ID NO: 2882760 - DNA, 25 bp, Homo sapien
tttgctctgggtagttgacaagcac

SEQ ID NO: 2882761 - DNA, 25 bp, Homo sapien
cttatcttatgtttgtttgaatttg

SEQ ID NO: 2882762 - DNA, 25 bp, Homo sapien
taaaaactttaacacatgtattaca

SEQ ID NO: 2882763 - DNA, 25 bp, Homo sapien
tgtacatttaaagggtttctctcca

SEQ ID NO: 2882764 - DNA, 25 bp, Homo sapien
catttaaagggtttctctccagtat

SEQ ID NO: 2882765 - DNA, 25 bp, Homo sapien
atttaaagggtttctctccagtatg

SEQ ID NO: 2882766 - DNA, 25 bp, Homo sapien
tgagttaggtgtgacatgtaaaacg

SEQ ID NO: 2882767 - DNA, 25 bp, Homo sapien
gattgtggaccctgtaaagctttgc

SEQ ID NO: 2882768 - DNA, 25 bp, Homo sapien
tgttcattcagtggattgtggaccc

SEQ ID NO: 2882769 - DNA, 25 bp, Homo sapien
cagtggattgtggaccctgtaaagc

SEQ ID NO: 2882770 - DNA, 25 bp, Homo sapien
ttgcggaccatatgaaagctttgcc

SEQ ID NO: 2882771 - DNA, 25 bp, Homo sapien
ttcattcagggctgtggaccgagta

SEQ ID NO: 2882772 - DNA, 25 bp, Homo sapien
cattcagggctgtggaccgagtaaa

SEQ ID NO: 2882773 - DNA, 25 bp, Homo sapien
ttcattcaggcttgcggaccatatg

SEQ ID NO: 2882774 - DNA, 25 bp, Homo sapien
agggatgaggaccaattgaaggctt

SEQ ID NO: 2882775 - DNA, 25 bp, Homo sapien
agtaagggatgaggaccaattgaag

SEQ ID NO: 2882776 - DNA, 25 bp, Homo sapien
ttagtaagggatgaggaccaattga

SEQ ID NO: 2882777 - DNA, 25 bp, Homo sapien
taagggatgaggaccaattgaaggc

SEQ ID NO: 2882778 - DNA, 25 bp, Homo sapien
tgtacagtaagggttgagggccgat

SEQ ID NO: 2882779 - DNA, 25 bp, Homo sapien
tacagtaagggttgagggccgatta

SEQ ID NO: 2882780 - DNA, 25 bp, Homo sapien
tgtgtacagtaagggttgagggccg

SEQ ID NO: 2882781 - DNA, 25 bp, Homo sapien
cttgtgtacagtaagggttgagggc

SEQ ID NO: 2882782 - DNA, 25 bp, Homo sapien
atttgctgtgtaaagacactggaat

SEQ ID NO: 2882783 - DNA, 25 bp, Homo sapien
gaaatgtcattcaactatgttcctt

SEQ ID NO: 2882784 - DNA, 25 bp, Homo sapien
gacactggaattagagattactaga

SEQ ID NO: 2882785 - DNA, 25 bp, Homo sapien
gtcattcaactatgttccttgccag

SEQ ID NO: 2882786 - DNA, 25 bp, Homo sapien
agcattcatgacttagaaatgtgtg

SEQ ID NO: 2882787 - DNA, 25 bp, Homo sapien
atttatttgcggaaagagatgctac

SEQ ID NO: 2882788 - DNA, 25 bp, Homo sapien
gctacatgttcaaagataaatatgg

SEQ ID NO: 2882789 - DNA, 25 bp, Homo sapien
taagccatgaatagatacacatact

SEQ ID NO: 2882790 - DNA, 25 bp, Homo sapien
caatgcccctgcagacagtaaagta

SEQ ID NO: 2882791 - DNA, 25 bp, Homo sapien
tataaataacctcaaacactccagt

SEQ ID NO: 2882792 - DNA, 25 bp, Homo sapien
tctaatcagaacatagaaagtctgt

SEQ ID NO: 2882793 - DNA, 25 bp, Homo sapien
gtgtgaggcatacatagctgggaat

SEQ ID NO: 2882794 - DNA, 25 bp, Homo sapien
gaggagtactttttggcatgcacca

SEQ ID NO: 2882795 - DNA, 25 bp, Homo sapien
gaataaaaacgtgtgaatgccggga

SEQ ID NO: 2882796 - DNA, 25 bp, Homo sapien
gacaacagtgatggtagcaagggca

SEQ ID NO: 2882797 - DNA, 25 bp, Homo sapien
aatgccgggagcagtcatctgccac

SEQ ID NO: 2882798 - DNA, 25 bp, Homo sapien
gtcagactccccaaccaatggtgtg

SEQ ID NO: 2882799 - DNA, 25 bp, Homo sapien
gtgagaaaactcaacgtctaaatga

SEQ ID NO: 2882800 - DNA, 25 bp, Homo sapien
tacacacactaaacataaaaacata

SEQ ID NO: 2882801 - DNA, 25 bp, Homo sapien
aatgaaagataacgaacttggacct

SEQ ID NO: 2882802 - DNA, 25 bp, Homo sapien
tagacattacatagatacagcacat

SEQ ID NO: 2882803 - DNA, 25 bp, Homo sapien
aaaagaatccagtagctataagatg

SEQ ID NO: 2882804 - DNA, 25 bp, Homo sapien
cagtcgactgagaatcctttttttc

SEQ ID NO: 2882805 - DNA, 25 bp, Homo sapien
gattattggcctctcatgcatgtat

SEQ ID NO: 2882806 - DNA, 25 bp, Homo sapien
tctaaacaaaaccatgataggactg

SEQ ID NO: 2882807 - DNA, 25 bp, Homo sapien
taaacaaaaccatgataggactgtg

SEQ ID NO: 2882808 - DNA, 25 bp, Homo sapien
aattatttctatatgggccttttag

SEQ ID NO: 2882809 - DNA, 25 bp, Homo sapien
aaacaaaaccatgataggactgtgt

SEQ ID NO: 2882810 - DNA, 25 bp, Homo sapien
taaatgttccagtggctccacccca

SEQ ID NO: 2882811 - DNA, 25 bp, Homo sapien
aacagcagtctgatctccctcaggg

SEQ ID NO: 2882812 - DNA, 25 bp, Homo sapien
aggtgggtccctagtccattgcagg

SEQ ID NO: 2882813 - DNA, 25 bp, Homo sapien
gggcctatgaaagggttcctggcaa

SEQ ID NO: 2882814 - DNA, 25 bp, Homo sapien
cagcagtgaatagactagggcctga

SEQ ID NO: 2882815 - DNA, 25 bp, Homo sapien
cctctgccagcagtgaatagactag

SEQ ID NO: 2882816 - DNA, 25 bp, Homo sapien
tctgccagcagtgaatagactaggg

SEQ ID NO: 2882817 - DNA, 25 bp, Homo sapien
gactagggcctgatgaagaagccat

SEQ ID NO: 2882818 - DNA, 25 bp, Homo sapien
gactcctgcggtgaagacatggaag

SEQ ID NO: 2882819 - DNA, 25 bp, Homo sapien
cattgctaggacagcgtcgtggtag

SEQ ID NO: 2882820 - DNA, 25 bp, Homo sapien
cacgaggaggtattgggattgactc

SEQ ID NO: 2882821 - DNA, 25 bp, Homo sapien
cttttactccggattctgcgttgcg

SEQ ID NO: 2882822 - DNA, 25 bp, Homo sapien
ctgcgagtgaaggagaccccgcggg

SEQ ID NO: 2882823 - DNA, 25 bp, Homo sapien
gtgtagccgggaccgagctgagggc

SEQ ID NO: 2882824 - DNA, 25 bp, Homo sapien
cattaatcctccgaactctcaagtg

SEQ ID NO: 2882825 - DNA, 25 bp, Homo sapien
tccgaactctcaagtgtagccggga

SEQ ID NO: 2882826 - DNA, 25 bp, Homo sapien
tcttctcgcctgtcccctgctttgc

SEQ ID NO: 2882827 - DNA, 25 bp, Homo sapien
ccctcttctcgcctgtcccctgctt

SEQ ID NO: 2882828 - DNA, 25 bp, Homo sapien
cttctcgcctgtcccctgctttgcg

SEQ ID NO: 2882829 - DNA, 25 bp, Homo sapien
accctcttctcgcctgtcccctgct

SEQ ID NO: 2882830 - DNA, 25 bp, Homo sapien
aatgagtagcgagtgtgaccaacag

SEQ ID NO: 2882831 - DNA, 25 bp, Homo sapien
caggcaccactttatcaggcaggca

SEQ ID NO: 2882832 - DNA, 25 bp, Homo sapien
gacttaatgagtagcgagtgtgacc

SEQ ID NO: 2882833 - DNA, 25 bp, Homo sapien
caggaaaggtgacttaatgagtagc

SEQ ID NO: 2882834 - DNA, 25 bp, Homo sapien
aaaaggataagtaggatttctgtct

SEQ ID NO: 2882835 - DNA, 25 bp, Homo sapien
aaaggataagtaggatttctgtctc

SEQ ID NO: 2882836 - DNA, 25 bp, Homo sapien
aggataagtaggatttctgtctctc

SEQ ID NO: 2882837 - DNA, 25 bp, Homo sapien
tgttccctccaatgaaggaaaatat

SEQ ID NO: 2882838 - DNA, 25 bp, Homo sapien
cctccaatgaaggaaaatattgttt

SEQ ID NO: 2882839 - DNA, 25 bp, Homo sapien
tccctccaatgaaggaaaatattgt

SEQ ID NO: 2882840 - DNA, 25 bp, Homo sapien
ttgttccctccaatgaaggaaaata

SEQ ID NO: 2882841 - DNA, 25 bp, Homo sapien
tcagcttagtcaagtccacttgaat

SEQ ID NO: 2882842 - DNA, 25 bp, Homo sapien
ggagcccactgaatagccagcccca

SEQ ID NO: 2882843 - DNA, 25 bp, Homo sapien
ttgctattacactgccagaagtgag

SEQ ID NO: 2882844 - DNA, 25 bp, Homo sapien
tctgttgctattacactgccagaag

SEQ ID NO: 2882845 - DNA, 25 bp, Homo sapien
ccactgaatagccagccccaggact

SEQ ID NO: 2882846 - DNA, 25 bp, Homo sapien
tgcttagcctgtggccactccaagg

SEQ ID NO: 2882847 - DNA, 25 bp, Homo sapien
caaatggctcaaggacctggttaca

SEQ ID NO: 2882848 - DNA, 25 bp, Homo sapien
tcggtttagctgttggaagttggcc

SEQ ID NO: 2882849 - DNA, 25 bp, Homo sapien
tccctttccgtctgaggagtggtgg

SEQ ID NO: 2882850 - DNA, 25 bp, Homo sapien
cccagagtcttagatacgaatcatc

SEQ ID NO: 2882851 - DNA, 25 bp, Homo sapien
ctaaggagcgggagcagagcgatga

SEQ ID NO: 2882852 - DNA, 25 bp, Homo sapien
aggagtgtcccagagtcttagatac

SEQ ID NO: 2882853 - DNA, 25 bp, Homo sapien
gagcgggagcagagcgatgaggccc

SEQ ID NO: 2882854 - DNA, 25 bp, Homo sapien
cagacaccagcgtattcaggaacag

SEQ ID NO: 2882855 - DNA, 25 bp, Homo sapien
agaactaagagaagcgctgtgcgca

SEQ ID NO: 2882856 - DNA, 25 bp, Homo sapien
catttcccgccggttccgatgaggc

SEQ ID NO: 2882857 - DNA, 25 bp, Homo sapien
tctaaaagatgcgaacagacaccag

SEQ ID NO: 2882858 - DNA, 25 bp, Homo sapien
cctggcgacacagcgaagactccgt

SEQ ID NO: 2882859 - DNA, 25 bp, Homo sapien
gcctggcgacacagcgaagactccg

SEQ ID NO: 2882860 - DNA, 25 bp, Homo sapien
tcaggaggctgagcaggtgaatcgc

SEQ ID NO: 2882861 - DNA, 25 bp, Homo sapien
aggaggctgagcaggtgaatcgctt

SEQ ID NO: 2882862 - DNA, 25 bp, Homo sapien
actcaggaggctgagcaggtgaatc

SEQ ID NO: 2882863 - DNA, 25 bp, Homo sapien
ctactcaggaggctgagcaggtgaa

SEQ ID NO: 2882864 - DNA, 25 bp, Homo sapien
tagatctcaacagaacttcagtagg

SEQ ID NO: 2882865 - DNA, 25 bp, Homo sapien
aaatccaggttgcacatgtatgtac

SEQ ID NO: 2882866 - DNA, 25 bp, Homo sapien
tagataccttaaatcagtggtggcc

SEQ ID NO: 2882867 - DNA, 25 bp, Homo sapien
agtggtggccaaccctttgaatgtg

SEQ ID NO: 2882868 - DNA, 25 bp, Homo sapien
caaagtaccgtattatcataagtga

SEQ ID NO: 2882869 - DNA, 25 bp, Homo sapien
tacctgaggtaatagatgtgttcac

SEQ ID NO: 2882870 - DNA, 25 bp, Homo sapien
ttcagcattagatcagcaaaatagc

SEQ ID NO: 2882871 - DNA, 25 bp, Homo sapien
ttgatggtgattgttagtgcctgag

SEQ ID NO: 2882872 - DNA, 25 bp, Homo sapien
gcacacgtcatcaagacttcctaag

SEQ ID NO: 2882873 - DNA, 25 bp, Homo sapien
tcaagacttcctaaggctgtgtcag

SEQ ID NO: 2882874 - DNA, 25 bp, Homo sapien
cgtcatcaagacttcctaaggctgt

SEQ ID NO: 2882875 - DNA, 25 bp, Homo sapien
aagacttcctaaggctgtgtcaggg

SEQ ID NO: 2882876 - DNA, 25 bp, Homo sapien
tattactaaaaatttgtatgagaac

SEQ ID NO: 2882877 - DNA, 25 bp, Homo sapien
catattactaaaaatttgtatgaga

SEQ ID NO: 2882878 - DNA, 25 bp, Homo sapien
ttactaaaaatttgtatgagaacaa

SEQ ID NO: 2882879 - DNA, 25 bp, Homo sapien
cttctatcttaacatattactaaaa

SEQ ID NO: 2882880 - DNA, 25 bp, Homo sapien
tccccggtagtcagtagaagccaaa

SEQ ID NO: 2882881 - DNA, 25 bp, Homo sapien
tctagagaggcctcaaaaagcttcc

SEQ ID NO: 2882882 - DNA, 25 bp, Homo sapien
tgtacacactcagggactcagagag

SEQ ID NO: 2882883 - DNA, 25 bp, Homo sapien
tatcaagagacctgcaaggagacac

SEQ ID NO: 2882884 - DNA, 25 bp, Homo sapien
tggaatggccaatatcaagcaaaca

SEQ ID NO: 2882885 - DNA, 25 bp, Homo sapien
tctacttctgagcatcctattcaaa

SEQ ID NO: 2882886 - DNA, 25 bp, Homo sapien
gaaagtgatgcagcccctaaaaaat

SEQ ID NO: 2882887 - DNA, 25 bp, Homo sapien
gatgaattgaaacccttgtgcactg

SEQ ID NO: 2882888 - DNA, 25 bp, Homo sapien
gaactctagtactctcttggtggga

SEQ ID NO: 2882889 - DNA, 25 bp, Homo sapien
catttagtcagtcccgagtaagaaa

SEQ ID NO: 2882890 - DNA, 25 bp, Homo sapien
catttgacagaagttaacacccaga

SEQ ID NO: 2882891 - DNA, 25 bp, Homo sapien
tgtggtgcacatacataacagagta

SEQ ID NO: 2882892 - DNA, 25 bp, Homo sapien
tgaactgcgccacacatagggatcg

SEQ ID NO: 2882893 - DNA, 25 bp, Homo sapien
caaaggagggcatcacacattaacc

SEQ ID NO: 2882894 - DNA, 25 bp, Homo sapien
ttccttaagcaaaccaggaggtggc

SEQ ID NO: 2882895 - DNA, 25 bp, Homo sapien
taccagttgtaggtgtccaggtcct

SEQ ID NO: 2882896 - DNA, 25 bp, Homo sapien
tacctgctggaaatatactgtagca

SEQ ID NO: 2882897 - DNA, 25 bp, Homo sapien
tttaaatggcccaccaggtgaccaa

SEQ ID NO: 2882898 - DNA, 25 bp, Homo sapien
acctgctggaaatatactgtagcat

SEQ ID NO: 2882899 - DNA, 25 bp, Homo sapien
taaaacagtagagcgaatgcagaga

SEQ ID NO: 2882900 - DNA, 25 bp, Homo sapien
tacgagtggctatatcaaacaaaag

SEQ ID NO: 2882901 - DNA, 25 bp, Homo sapien
attgttaccgctagaaagtatccgg

SEQ ID NO: 2882902 - DNA, 25 bp, Homo sapien
cagagctaccgtaattaaaatggca

SEQ ID NO: 2882903 - DNA, 25 bp, Homo sapien
tacagcagttatgccctgacaaaag

SEQ ID NO: 2882904 - DNA, 25 bp, Homo sapien
ccctgatcagtcatagtgtggaaga

SEQ ID NO: 2882905 - DNA, 25 bp, Homo sapien
tattaagagggcatgcacttgcttg

SEQ ID NO: 2882906 - DNA, 25 bp, Homo sapien
gaaaggccttgacatgttggtcctg

SEQ ID NO: 2882907 - DNA, 25 bp, Homo sapien
atatttgcaaggacacggatgaacc

SEQ ID NO: 2882908 - DNA, 25 bp, Homo sapien
taaggcttcatgcactggtcttggc

SEQ ID NO: 2882909 - DNA, 25 bp, Homo sapien
tgtccctttacagatcagtatcgga

SEQ ID NO: 2882910 - DNA, 25 bp, Homo sapien
tggatataacacctaaggctcagga

SEQ ID NO: 2882911 - DNA, 25 bp, Homo sapien
tgcagctcttccttcccacaaatat

SEQ ID NO: 2882912 - DNA, 25 bp, Homo sapien
actgcagctcttccttcccacaaat

SEQ ID NO: 2882913 - DNA, 25 bp, Homo sapien
cagctcttccttcccacaaatatag

SEQ ID NO: 2882914 - DNA, 25 bp, Homo sapien
ctcttccttcccacaaatatagcat

SEQ ID NO: 2882915 - DNA, 25 bp, Homo sapien
aggttttgggtgaaatgagaacaca

SEQ ID NO: 2882916 - DNA, 25 bp, Homo sapien
ttttgggtgaaatgagaacacacag

SEQ ID NO: 2882917 - DNA, 25 bp, Homo sapien
tgtccaaaggttttgggtgaaatga

SEQ ID NO: 2882918 - DNA, 25 bp, Homo sapien
ctgtccaaaggttttgggtgaaatg

SEQ ID NO: 2882919 - DNA, 25 bp, Homo sapien
gaaaaactttgacacatatattaga

SEQ ID NO: 2882920 - DNA, 25 bp, Homo sapien
aattctattataaccacctttctgc

SEQ ID NO: 2882921 - DNA, 25 bp, Homo sapien
tttctgggtagttaataagcattgg

SEQ ID NO: 2882922 - DNA, 25 bp, Homo sapien
tcatgtccacgtttctcatgtcctt

SEQ ID NO: 2882923 - DNA, 25 bp, Homo sapien
tgaggaccgagtaaagcctttacca

SEQ ID NO: 2882924 - DNA, 25 bp, Homo sapien
tgtcgtaagagttgtggacctatta

SEQ ID NO: 2882925 - DNA, 25 bp, Homo sapien
ttatgtgtcgtaagagttgtggacc

SEQ ID NO: 2882926 - DNA, 25 bp, Homo sapien
ccacattcttcgcatgagaagggtt

SEQ ID NO: 2882927 - DNA, 25 bp, Homo sapien
tggattctcttatgtgtcgtaagag

SEQ ID NO: 2882928 - DNA, 25 bp, Homo sapien
tttttccagagtgaattctcttgtg

SEQ ID NO: 2882929 - DNA, 25 bp, Homo sapien
acatttgtagggattttttccagag

SEQ ID NO: 2882930 - DNA, 25 bp, Homo sapien
ttctcttgtgtacattaagggttga

SEQ ID NO: 2882931 - DNA, 25 bp, Homo sapien
tctcttgtgtacattaagggttgag

SEQ ID NO: 2882932 - DNA, 25 bp, Homo sapien
ttttcttatgattatgcaggtttgc

SEQ ID NO: 2882933 - DNA, 25 bp, Homo sapien
ttcttatgattatgcaggtttgcaa

SEQ ID NO: 2882934 - DNA, 25 bp, Homo sapien
tttcttatgattatgcaggtttgca

SEQ ID NO: 2882935 - DNA, 25 bp, Homo sapien
ctcttatgttgaggaaggttggagt

SEQ ID NO: 2882936 - DNA, 25 bp, Homo sapien
gttctcttatgttgaggaaggttgg

SEQ ID NO: 2882937 - DNA, 25 bp, Homo sapien
tgtatcaaagtaacccatctatgcc

SEQ ID NO: 2882938 - DNA, 25 bp, Homo sapien
tgtaaaagttcatgaatacgcctgt

SEQ ID NO: 2882939 - DNA, 25 bp, Homo sapien
gaacatgtacgtcatgcatcatgca

SEQ ID NO: 2882940 - DNA, 25 bp, Homo sapien
ccttgagtaaggttcacacacaatc

SEQ ID NO: 2882941 - DNA, 25 bp, Homo sapien
ccaaacacaattgcttggtctacaa

SEQ ID NO: 2882942 - DNA, 25 bp, Homo sapien
gtctgtacatgtttgccagaagaga

SEQ ID NO: 2882943 - DNA, 25 bp, Homo sapien
tacatgtttgccagaagagatgcca

SEQ ID NO: 2882944 - DNA, 25 bp, Homo sapien
caaacacaattgcttggtctacaat

SEQ ID NO: 2882945 - DNA, 25 bp, Homo sapien
gaagacatttaggtagccaagagac

SEQ ID NO: 2882946 - DNA, 25 bp, Homo sapien
aagcaagtcgttagagacctagaaa

SEQ ID NO: 2882947 - DNA, 25 bp, Homo sapien
gatatccaggaattgaacacagccc

SEQ ID NO: 2882948 - DNA, 25 bp, Homo sapien
ataaagcaagtcgttagagacctag

SEQ ID NO: 2882949 - DNA, 25 bp, Homo sapien
ggatatccaggaattgaacacagcc

SEQ ID NO: 2882950 - DNA, 25 bp, Homo sapien
cggcaaaatgctggttactggatgc

SEQ ID NO: 2882951 - DNA, 25 bp, Homo sapien
taaaatatctcgacaggtggagcca

SEQ ID NO: 2882952 - DNA, 25 bp, Homo sapien
cgtaaatacagttgactaagttcag

SEQ ID NO: 2882953 - DNA, 25 bp, Homo sapien
gactagtcaccatgtacggtatatg

SEQ ID NO: 2882954 - DNA, 25 bp, Homo sapien
tagagaatctcatttggtatcggga

SEQ ID NO: 2882955 - DNA, 25 bp, Homo sapien
gcataattcatactggcttggttga

SEQ ID NO: 2882956 - DNA, 25 bp, Homo sapien
catgtgtctagtagtatctgggaga

SEQ ID NO: 2882957 - DNA, 25 bp, Homo sapien
tcattttggatacatggttcaggag

SEQ ID NO: 2882958 - DNA, 25 bp, Homo sapien
tctgcatatcaagggaaacgcttag

SEQ ID NO: 2882959 - DNA, 25 bp, Homo sapien
taatcacaagggaccatgaatagcc

SEQ ID NO: 2882960 - DNA, 25 bp, Homo sapien
tagtggagtacaaatgccaaccagg

SEQ ID NO: 2882961 - DNA, 25 bp, Homo sapien
gacagtttaaccacagtatgagcaa

SEQ ID NO: 2882962 - DNA, 25 bp, Homo sapien
aacagctggagatcatgtggtttgc

SEQ ID NO: 2882963 - DNA, 25 bp, Homo sapien
cagctggagatcatgtggtttgcct

SEQ ID NO: 2882964 - DNA, 25 bp, Homo sapien
gctggagatcatgtggtttgcctac

SEQ ID NO: 2882965 - DNA, 25 bp, Homo sapien
acagctggagatcatgtggtttgcc

SEQ ID NO: 2882966 - DNA, 25 bp, Homo sapien
ttctgggtatttgtgtgtgagattg

SEQ ID NO: 2882967 - DNA, 25 bp, Homo sapien
catttttattgccataccaacttga

SEQ ID NO: 2882968 - DNA, 25 bp, Homo sapien
gccataccaacttgacaatgataca

SEQ ID NO: 2882969 - DNA, 25 bp, Homo sapien
ttgtgtgtgagattgggccaaagac

SEQ ID NO: 2882970 - DNA, 25 bp, Homo sapien
taacctacaattccaccactgagaa

SEQ ID NO: 2882971 - DNA, 25 bp, Homo sapien
aacctacaattccaccactgagaat

SEQ ID NO: 2882972 - DNA, 25 bp, Homo sapien
aataacctacaattccaccactgag

SEQ ID NO: 2882973 - DNA, 25 bp, Homo sapien
aaataacctacaattccaccactga

SEQ ID NO: 2882974 - DNA, 25 bp, Homo sapien
gttgggctttttccacactgccagc

SEQ ID NO: 2882975 - DNA, 25 bp, Homo sapien
tccacactgccagccagagtctaat

SEQ ID NO: 2882976 - DNA, 25 bp, Homo sapien
tcctggtttgattctcccaaagttg

SEQ ID NO: 2882977 - DNA, 25 bp, Homo sapien
tggtttgattctcccaaagttgggc

SEQ ID NO: 2882978 - DNA, 25 bp, Homo sapien
catggaatggctgttttgtcgaggc

SEQ ID NO: 2882979 - DNA, 25 bp, Homo sapien
ttgggtgagacctccaaaccatggt

SEQ ID NO: 2882980 - DNA, 25 bp, Homo sapien
agttctaatttctccctgggatggg

SEQ ID NO: 2882981 - DNA, 25 bp, Homo sapien
tgttctaaggccaacagagttctaa

SEQ ID NO: 2882982 - DNA, 25 bp, Homo sapien
tatataacagtaatcgacatactaa

SEQ ID NO: 2882983 - DNA, 25 bp, Homo sapien
aaagcaagtacacatactttacagt

SEQ ID NO: 2882984 - DNA, 25 bp, Homo sapien
tgtcacaaaatacgagattaatata

SEQ ID NO: 2882985 - DNA, 25 bp, Homo sapien
tcaaggttatcaataagaaacgtta

SEQ ID NO: 2882986 - DNA, 25 bp, Homo sapien
ttgatgaaggtattgctggtaagtg

SEQ ID NO: 2882987 - DNA, 25 bp, Homo sapien
gaaggtattgctggtaagtgtccat

SEQ ID NO: 2882988 - DNA, 25 bp, Homo sapien
gatgaaggtattgctggtaagtgtc

SEQ ID NO: 2882989 - DNA, 25 bp, Homo sapien
ccattttgatgaaggtattgctggt

SEQ ID NO: 2882990 - DNA, 25 bp, Homo sapien
aagtgccactgctaccccaaggcag

SEQ ID NO: 2882991 - DNA, 25 bp, Homo sapien
tctgcagctatgtcatggtgcctgg

SEQ ID NO: 2882992 - DNA, 25 bp, Homo sapien
gacatcatctgaagcaagtgccact

SEQ ID NO: 2882993 - DNA, 25 bp, Homo sapien
gatcagcctcaggtctatggcatct

SEQ ID NO: 2882994 - DNA, 25 bp, Homo sapien
agccatggcagatgagaagagcttc

SEQ ID NO: 2882995 - DNA, 25 bp, Homo sapien
gccatggcagatgagaagagcttca

SEQ ID NO: 2882996 - DNA, 25 bp, Homo sapien
ctgctggctcttagcacgtttctca

SEQ ID NO: 2882997 - DNA, 25 bp, Homo sapien
tttctgctggctcttagcacgtttc

SEQ ID NO: 2882998 - DNA, 25 bp, Homo sapien
atattgactggcatgttaaagatca

SEQ ID NO: 2882999 - DNA, 25 bp, Homo sapien
tattgactggcatgttaaagatcac

SEQ ID NO: 2883000 - DNA, 25 bp, Homo sapien
tatctttgctcttgtctttgacttg

SEQ ID NO: 2883001 - DNA, 25 bp, Homo sapien
taaaatatctttgctcttgtctttg

SEQ ID NO: 2883002 - DNA, 25 bp, Homo sapien
aaacatattctcctctcgacaaggc

SEQ ID NO: 2883003 - DNA, 25 bp, Homo sapien
caagtgcttgatgacaaacatattc

SEQ ID NO: 2883004 - DNA, 25 bp, Homo sapien
ttttaggcattgcatgagacatggg

SEQ ID NO: 2883005 - DNA, 25 bp, Homo sapien
gcctttaatgtatctgcgtgtcaaa

SEQ ID NO: 2883006 - DNA, 25 bp, Homo sapien
cagtgtgctgttgcactttaatgaa

SEQ ID NO: 2883007 - DNA, 25 bp, Homo sapien
gcactttaatgaagatatcttttcc

SEQ ID NO: 2883008 - DNA, 25 bp, Homo sapien
gcttacagtggcctttccaaaatta

SEQ ID NO: 2883009 - DNA, 25 bp, Homo sapien
gtcagtcactagtggagcttacagt

SEQ ID NO: 2883010 - DNA, 25 bp, Homo sapien
tccagagagaaaccttcagcaattg

SEQ ID NO: 2883011 - DNA, 25 bp, Homo sapien
gcaggtattttgtacttgccctcac

SEQ ID NO: 2883012 - DNA, 25 bp, Homo sapien
tccaagaatttacagagttgcccaa

SEQ ID NO: 2883013 - DNA, 25 bp, Homo sapien
cacagatttaacaggatgatagtcc

SEQ ID NO: 2883014 - DNA, 25 bp, Homo sapien
cctgggcatgtaacaaggatctcta

SEQ ID NO: 2883015 - DNA, 25 bp, Homo sapien
tacactgctagtaaagagataccca

SEQ ID NO: 2883016 - DNA, 25 bp, Homo sapien
atctctaggacagggcccaaaactc

SEQ ID NO: 2883017 - DNA, 25 bp, Homo sapien
gctcaaggccattcaactagtctct

SEQ ID NO: 2883018 - DNA, 25 bp, Homo sapien
ggagcacttgactctacctgtacca

SEQ ID NO: 2883019 - DNA, 25 bp, Homo sapien
gagagaatgagggaacccagtgaaa

SEQ ID NO: 2883020 - DNA, 25 bp, Homo sapien
aaccatcagatctctcaggaggact

SEQ ID NO: 2883021 - DNA, 25 bp, Homo sapien
catgagaatcatgtgaactacagtt

SEQ ID NO: 2883022 - DNA, 25 bp, Homo sapien
aaagtattggggaaactgccgccat

SEQ ID NO: 2883023 - DNA, 25 bp, Homo sapien
gactggccactgtcagccaagccag

SEQ ID NO: 2883024 - DNA, 25 bp, Homo sapien
tggactggccactgtcagccaagcc

SEQ ID NO: 2883025 - DNA, 25 bp, Homo sapien
gggccggggcggacagcatgggcat

SEQ ID NO: 2883026 - DNA, 25 bp, Homo sapien
ctggccactgtcagccaagccaggg

SEQ ID NO: 2883027 - DNA, 25 bp, Homo sapien
tcacagagctgagttgggtgtgcag

SEQ ID NO: 2883028 - DNA, 25 bp, Homo sapien
cagagctgagttgggtgtgcagccc

SEQ ID NO: 2883029 - DNA, 25 bp, Homo sapien
agctgagttgggtgtgcagccctcc

SEQ ID NO: 2883030 - DNA, 25 bp, Homo sapien
cacagagctgagttgggtgtgcagc

SEQ ID NO: 2883031 - DNA, 25 bp, Homo sapien
ggttgaatgcaatctggccccactg

SEQ ID NO: 2883032 - DNA, 25 bp, Homo sapien
taggggagcccttgaccatggttga

SEQ ID NO: 2883033 - DNA, 25 bp, Homo sapien
ttcaggaatttgtcaccagttaacc

SEQ ID NO: 2883034 - DNA, 25 bp, Homo sapien
accagttaaccagcctgtgactctg

SEQ ID NO: 2883035 - DNA, 25 bp, Homo sapien
agggatgtcgtagagtcttagctac

SEQ ID NO: 2883036 - DNA, 25 bp, Homo sapien
tgaggggtggaagcaggtcggtgag

SEQ ID NO: 2883037 - DNA, 25 bp, Homo sapien
aagcaggtcggtgaggccctaaccg

SEQ ID NO: 2883038 - DNA, 25 bp, Homo sapien
gatgtcgtagagtcttagctacgaa

SEQ ID NO: 2883039 - DNA, 25 bp, Homo sapien
gctgcactttgccacaaaattgtgg

SEQ ID NO: 2883040 - DNA, 25 bp, Homo sapien
gactgtagatcccaaatagagaaac

SEQ ID NO: 2883041 - DNA, 25 bp, Homo sapien
gaaatatagtctaactgctctagaa

SEQ ID NO: 2883042 - DNA, 25 bp, Homo sapien
cacggaagtggaataactgatggct

SEQ ID NO: 2883043 - DNA, 25 bp, Homo sapien
gaacaactcttatctggttatgaac

SEQ ID NO: 2883044 - DNA, 25 bp, Homo sapien
ctcaaatgtctcaaataactcactg

SEQ ID NO: 2883045 - DNA, 25 bp, Homo sapien
gaggaacaaacccttgataagtcat

SEQ ID NO: 2883046 - DNA, 25 bp, Homo sapien
gaattagactttcttgtcagactga

SEQ ID NO: 2883047 - DNA, 25 bp, Homo sapien
acatgatgctgaattcaaccattta

SEQ ID NO: 2883048 - DNA, 25 bp, Homo sapien
gctgaattcaaccatttattcatgt

SEQ ID NO: 2883049 - DNA, 25 bp, Homo sapien
atgatgctgaattcaaccatttatt

SEQ ID NO: 2883050 - DNA, 25 bp, Homo sapien
atgctgaattcaaccatttattcat

SEQ ID NO: 2883051 - DNA, 25 bp, Homo sapien
atctctatatacattctgctgggca

SEQ ID NO: 2883052 - DNA, 25 bp, Homo sapien
ctatatacattctgctgggcaggat

SEQ ID NO: 2883053 - DNA, 25 bp, Homo sapien
ctctatatacattctgctgggcagg

SEQ ID NO: 2883054 - DNA, 25 bp, Homo sapien
tgctgggcaggatccagacatttcc

SEQ ID NO: 2883055 - DNA, 25 bp, Homo sapien
ctgtctcatgtgtcttcccattaaa

SEQ ID NO: 2883056 - DNA, 25 bp, Homo sapien
gcagaaaatacagtcttgttgatac

SEQ ID NO: 2883057 - DNA, 25 bp, Homo sapien
ttgatacatggtaccagaaaaactg

SEQ ID NO: 2883058 - DNA, 25 bp, Homo sapien
ccagaatacaaggtaaactaatctt

SEQ ID NO: 2883059 - DNA, 25 bp, Homo sapien
aactgggtatccacaagtgaaagaa

SEQ ID NO: 2883060 - DNA, 25 bp, Homo sapien
taaagaactttaaataacctgagca

SEQ ID NO: 2883061 - DNA, 25 bp, Homo sapien
ctaaacccaaaaacattctcataag

SEQ ID NO: 2883062 - DNA, 25 bp, Homo sapien
caaaaacattctcataagatgtctg

SEQ ID NO: 2883063 - DNA, 25 bp, Homo sapien
taaacccaaaaacattctcataaga

SEQ ID NO: 2883064 - DNA, 25 bp, Homo sapien
aaacattctcataagatgtctgcat

SEQ ID NO: 2883065 - DNA, 25 bp, Homo sapien
ccaagagcctctgcactttgtgcct

SEQ ID NO: 2883066 - DNA, 25 bp, Homo sapien
ttgaaatactcaatgaccaagagcc

SEQ ID NO: 2883067 - DNA, 25 bp, Homo sapien
actcaatgaccaagagcctctgcac

SEQ ID NO: 2883068 - DNA, 25 bp, Homo sapien
tctctttgaaatactcaatgaccaa

SEQ ID NO: 2883069 - DNA, 25 bp, Homo sapien
ttattcacacttttagagcctttcc

SEQ ID NO: 2883070 - DNA, 25 bp, Homo sapien
cttattcacacttttagagcctttc

SEQ ID NO: 2883071 - DNA, 25 bp, Homo sapien
ccagtatgtcttatgttgtttgaat

SEQ ID NO: 2883072 - DNA, 25 bp, Homo sapien
tccagtatgtcttatgttgtttgaa

SEQ ID NO: 2883073 - DNA, 25 bp, Homo sapien
cagtatgtcttatgttgtttgaatt

SEQ ID NO: 2883074 - DNA, 25 bp, Homo sapien
ggaacttgcgaaatgatctgccaca

SEQ ID NO: 2883075 - DNA, 25 bp, Homo sapien
tccagcatgtattcccttatgttaa

SEQ ID NO: 2883076 - DNA, 25 bp, Homo sapien
ggaggaacttgcgaaatgatctgcc

SEQ ID NO: 2883077 - DNA, 25 bp, Homo sapien
gttggaggaacttgcgaaatgatct

SEQ ID NO: 2883078 - DNA, 25 bp, Homo sapien
gttcttcacatgaggggtttctctc

SEQ ID NO: 2883079 - DNA, 25 bp, Homo sapien
gtaaagattctgacacgttcttcac

SEQ ID NO: 2883080 - DNA, 25 bp, Homo sapien
acacgttcttcacatgaggggtttc

SEQ ID NO: 2883081 - DNA, 25 bp, Homo sapien
cttgaggatgaggtaaagattctga

SEQ ID NO: 2883082 - DNA, 25 bp, Homo sapien
tcagaactgtggattgtctcaaggc

SEQ ID NO: 2883083 - DNA, 25 bp, Homo sapien
cagaactgtggattgtctcaaggct

SEQ ID NO: 2883084 - DNA, 25 bp, Homo sapien
gaactgtggattgtctcaaggcttt

SEQ ID NO: 2883085 - DNA, 25 bp, Homo sapien
aactgtggattgtctcaaggctttg

SEQ ID NO: 2883086 - DNA, 25 bp, Homo sapien
gaatgctcctgtgtataataaggct

SEQ ID NO: 2883087 - DNA, 25 bp, Homo sapien
ctcttgtttattaagggatgaggat

SEQ ID NO: 2883088 - DNA, 25 bp, Homo sapien
ggtgtgaagatctataaaaggcgtt

SEQ ID NO: 2883089 - DNA, 25 bp, Homo sapien
aggtgtgaagatctataaaaggcgt

SEQ ID NO: 2883090 - DNA, 25 bp, Homo sapien
gaaaagtccgtatgtgtttgcagga

SEQ ID NO: 2883091 - DNA, 25 bp, Homo sapien
tgcgcctggcctactctgatggatt

SEQ ID NO: 2883092 - DNA, 25 bp, Homo sapien
ccagctcacatcgtaaataataaag

SEQ ID NO: 2883093 - DNA, 25 bp, Homo sapien
gcaggacaagacactacatgttcaa

SEQ ID NO: 2883094 - DNA, 25 bp, Homo sapien
caaaacatctccatgacttaaaaga

SEQ ID NO: 2883095 - DNA, 25 bp, Homo sapien
taccatctgggagtaaggagcgcct

SEQ ID NO: 2883096 - DNA, 25 bp, Homo sapien
gatctttatgtcctccctaagtttg

SEQ ID NO: 2883097 - DNA, 25 bp, Homo sapien
catgcacaattaatgccatttcttc

SEQ ID NO: 2883098 - DNA, 25 bp, Homo sapien
gagtgcccttattgctttctgctgg

SEQ ID NO: 2883099 - DNA, 25 bp, Homo sapien
tcacatttgataccccattgcaggg

SEQ ID NO: 2883100 - DNA, 25 bp, Homo sapien
catcttggcatttctggtagcccca

SEQ ID NO: 2883101 - DNA, 25 bp, Homo sapien
cagaaacaagaattatggagtgccc

SEQ ID NO: 2883102 - DNA, 25 bp, Homo sapien
tggctacccgacatgtgagatcctg

SEQ ID NO: 2883103 - DNA, 25 bp, Homo sapien
gagatcctgccactaaagttgctgc

SEQ ID NO: 2883104 - DNA, 25 bp, Homo sapien
tgactccaagaagggtgactgacgc

SEQ ID NO: 2883105 - DNA, 25 bp, Homo sapien
cacagatgtataggagtgcctggcc

SEQ ID NO: 2883106 - DNA, 25 bp, Homo sapien
aggaagcatcaaccgggacaatgga

SEQ ID NO: 2883107 - DNA, 25 bp, Homo sapien
tgaggtagtaaagggtaacagcaag

SEQ ID NO: 2883108 - DNA, 25 bp, Homo sapien
agcaaggaagcatcaaccgggacaa

SEQ ID NO: 2883109 - DNA, 25 bp, Homo sapien
ttagtcgatctggtgtgaggtagta

SEQ ID NO: 2883110 - DNA, 25 bp, Homo sapien
gctattcctatagtggcacctgaga

SEQ ID NO: 2883111 - DNA, 25 bp, Homo sapien
caaactacagccacgagataatcaa

SEQ ID NO: 2883112 - DNA, 25 bp, Homo sapien
ccacgagataatcaacttgttggtg

SEQ ID NO: 2883113 - DNA, 25 bp, Homo sapien
ttgaggaggcaataattatgccagc

SEQ ID NO: 2883114 - DNA, 25 bp, Homo sapien
taatgtggtgctcatgctagaggta

SEQ ID NO: 2883115 - DNA, 25 bp, Homo sapien
cataaagtatgtgggctggtcagaa

SEQ ID NO: 2883116 - DNA, 25 bp, Homo sapien
tgtgctctaaagataaaccttgggt

SEQ ID NO: 2883117 - DNA, 25 bp, Homo sapien
gaatctccctgtaaaaagtctctgt

SEQ ID NO: 2883118 - DNA, 25 bp, Homo sapien
cggaagactcagaagcagttgctca

SEQ ID NO: 2883119 - DNA, 25 bp, Homo sapien
cacattttgtactagcggaagactc

SEQ ID NO: 2883120 - DNA, 25 bp, Homo sapien
tataaagagggtgtagtacctgtac

SEQ ID NO: 2883121 - DNA, 25 bp, Homo sapien
tataggccattaaagcgaagaagag

SEQ ID NO: 2883122 - DNA, 25 bp, Homo sapien
cttcttttttacccacataggatct

SEQ ID NO: 2883123 - DNA, 25 bp, Homo sapien
tcttttttacccacataggatctta

SEQ ID NO: 2883124 - DNA, 25 bp, Homo sapien
tttacccacataggatcttactttg

SEQ ID NO: 2883125 - DNA, 25 bp, Homo sapien
tcagggacaggggctatcacgtctg

SEQ ID NO: 2883126 - DNA, 25 bp, Homo sapien
ggctatcacgtctggatccaggatc

SEQ ID NO: 2883127 - DNA, 25 bp, Homo sapien
taggggcactgtcctacccatcctt

SEQ ID NO: 2883128 - DNA, 25 bp, Homo sapien
ctaggggcactgtcctacccatcct

SEQ ID NO: 2883129 - DNA, 25 bp, Homo sapien
gcaaatgcttggcaccctgtaagta

SEQ ID NO: 2883130 - DNA, 25 bp, Homo sapien
catgctgaggaaagccaaagtgcgc

SEQ ID NO: 2883131 - DNA, 25 bp, Homo sapien
gaagcagagccacctaattcaccag

SEQ ID NO: 2883132 - DNA, 25 bp, Homo sapien
agtgcgccagtttacagacagctca

SEQ ID NO: 2883133 - DNA, 25 bp, Homo sapien
ctgggcgacccgttgagccgcggag

SEQ ID NO: 2883134 - DNA, 25 bp, Homo sapien
gacaccgtcgaggacgaagccgggc

SEQ ID NO: 2883135 - DNA, 25 bp, Homo sapien
gggcggacaccgtcgaggacgaagc

SEQ ID NO: 2883136 - DNA, 25 bp, Homo sapien
gcgcccctgggcgacccgttgagcc

SEQ ID NO: 2883137 - DNA, 25 bp, Homo sapien
cgcgcggtcgctttgaggtcggccg

SEQ ID NO: 2883138 - DNA, 25 bp, Homo sapien
ggtctgcccggcgatggcgacgctg

SEQ ID NO: 2883139 - DNA, 25 bp, Homo sapien
gatggcgacgctgcagccgctggag

SEQ ID NO: 2883140 - DNA, 25 bp, Homo sapien
ccaccggggatctcggcgggacctg

SEQ ID NO: 2883141 - DNA, 25 bp, Homo sapien
gcgggtcaccgttgctgaggacacc

SEQ ID NO: 2883142 - DNA, 25 bp, Homo sapien
gaggagggctttggtgcgggtcacc

SEQ ID NO: 2883143 - DNA, 25 bp, Homo sapien
ctttggtgcgggtcaccgttgctga

SEQ ID NO: 2883144 - DNA, 25 bp, Homo sapien
ggtcaccgttgctgaggacaccctc

SEQ ID NO: 2883145 - DNA, 25 bp, Homo sapien
cacgggagtcggtcgcgcatcccca

SEQ ID NO: 2883146 - DNA, 25 bp, Homo sapien
acgggagtcggtcgcgcatccccag

SEQ ID NO: 2883147 - DNA, 25 bp, Homo sapien
tcacgggagtcggtcgcgcatcccc

SEQ ID NO: 2883148 - DNA, 25 bp, Homo sapien
gggagtcggtcgcgcatccccagcg

SEQ ID NO: 2883149 - DNA, 25 bp, Homo sapien
acagctctccctgacgcgcgaggag

SEQ ID NO: 2883150 - DNA, 25 bp, Homo sapien
agcctagttgggtgcacagctctcc

SEQ ID NO: 2883151 - DNA, 25 bp, Homo sapien
agctctccctgacgcgcgaggagca

SEQ ID NO: 2883152 - DNA, 25 bp, Homo sapien
tcctcacagagcctagttgggtgca

SEQ ID NO: 2883153 - DNA, 25 bp, Homo sapien
ggcctcccacaactgagaacgcaga

SEQ ID NO: 2883154 - DNA, 25 bp, Homo sapien
atgaagcccctaacccgcggtctgg

SEQ ID NO: 2883155 - DNA, 25 bp, Homo sapien
aaggcctcccacaactgagaacgca

SEQ ID NO: 2883156 - DNA, 25 bp, Homo sapien
gagatgaagcccctaacccgcggtc

SEQ ID NO: 2883157 - DNA, 25 bp, Homo sapien
ttctgaagtattcgggagtcttagc

SEQ ID NO: 2883158 - DNA, 25 bp, Homo sapien
gaagtattcgggagtcttagctacc

SEQ ID NO: 2883159 - DNA, 25 bp, Homo sapien
ccacttctgaagtattcgggagtct

SEQ ID NO: 2883160 - DNA, 25 bp, Homo sapien
agtattcgggagtcttagctaccaa

SEQ ID NO: 2883161 - DNA, 25 bp, Homo sapien
cgccagctccgatgagacctcctca

SEQ ID NO: 2883162 - DNA, 25 bp, Homo sapien
gccagctccgatgagacctcctcag

SEQ ID NO: 2883163 - DNA, 25 bp, Homo sapien
tttcccgccagctccgatgagacct

SEQ ID NO: 2883164 - DNA, 25 bp, Homo sapien
ccatttcccgccagctccgatgaga

SEQ ID NO: 2883165 - DNA, 25 bp, Homo sapien
cagcttctcccacagctcctcccac

SEQ ID NO: 2883166 - DNA, 25 bp, Homo sapien
cacagcttctcccacagctcctccc

SEQ ID NO: 2883167 - DNA, 25 bp, Homo sapien
acagcttctcccacagctcctccca

SEQ ID NO: 2883168 - DNA, 25 bp, Homo sapien
aattcttgtagcacatgagggatgc

SEQ ID NO: 2883169 - DNA, 25 bp, Homo sapien
tcttgtagcacatgagggatgcact

SEQ ID NO: 2883170 - DNA, 25 bp, Homo sapien
cgttgaattcttgtagcacatgagg

SEQ ID NO: 2883171 - DNA, 25 bp, Homo sapien
taacgttgaattcttgtagcacatg

SEQ ID NO: 2883172 - DNA, 25 bp, Homo sapien
aattagaagcagttacaagtatatt

SEQ ID NO: 2883173 - DNA, 25 bp, Homo sapien
ccctggactataaagctgccctgaa

SEQ ID NO: 2883174 - DNA, 25 bp, Homo sapien
aggcagacggaactgatagaaagct

SEQ ID NO: 2883175 - DNA, 25 bp, Homo sapien
aagcttgaagattgcaaccctggac

SEQ ID NO: 2883176 - DNA, 25 bp, Homo sapien
gaagttggagacggtggcaatgtct

SEQ ID NO: 2883177 - DNA, 25 bp, Homo sapien
agacggtggcaatgtctgagtaagt

SEQ ID NO: 2883178 - DNA, 25 bp, Homo sapien
ctataaggttacagaagttggagac

SEQ ID NO: 2883179 - DNA, 25 bp, Homo sapien
tggcaatgtctgagtaagtctgtat

SEQ ID NO: 2883180 - DNA, 25 bp, Homo sapien
aacaccgttatcacaacacaaatac

SEQ ID NO: 2883181 - DNA, 25 bp, Homo sapien
gaagcttttggacttcggcagtctg

SEQ ID NO: 2883182 - DNA, 25 bp, Homo sapien
tgaagcttttggacttcggcagtct

SEQ ID NO: 2883183 - DNA, 25 bp, Homo sapien
aagcttttggacttcggcagtctgt

SEQ ID NO: 2883184 - DNA, 25 bp, Homo sapien
tctctatacaaattctgctggtcag

SEQ ID NO: 2883185 - DNA, 25 bp, Homo sapien
tctatacaaattctgctggtcaggg

SEQ ID NO: 2883186 - DNA, 25 bp, Homo sapien
atacaaattctgctggtcagggtcc

SEQ ID NO: 2883187 - DNA, 25 bp, Homo sapien
catctctatacaaattctgctggtc

SEQ ID NO: 2883188 - DNA, 25 bp, Homo sapien
gggggtctggctacgatcttatgta

SEQ ID NO: 2883189 - DNA, 25 bp, Homo sapien
ggctacgatcttatgtatcttcaca

SEQ ID NO: 2883190 - DNA, 25 bp, Homo sapien
tctggctacgatcttatgtatcttc

SEQ ID NO: 2883191 - DNA, 25 bp, Homo sapien
gggtctggctacgatcttatgtatc

SEQ ID NO: 2883192 - DNA, 25 bp, Homo sapien
aacactaagtagaaaagaggcaaca

SEQ ID NO: 2883193 - DNA, 25 bp, Homo sapien
gaagatgcccctatttgtgaacatg

SEQ ID NO: 2883194 - DNA, 25 bp, Homo sapien
taagcgataaagtggacattagctc

SEQ ID NO: 2883195 - DNA, 25 bp, Homo sapien
gaattcttggatttaacagcatgga

SEQ ID NO: 2883196 - DNA, 25 bp, Homo sapien
ttatatagctacagagagatacatc

SEQ ID NO: 2883197 - DNA, 25 bp, Homo sapien
gaacaattgagagcttaatatacac

SEQ ID NO: 2883198 - DNA, 25 bp, Homo sapien
taatgttctatgctggttaatgaca

SEQ ID NO: 2883199 - DNA, 25 bp, Homo sapien
gaatctcaacagacttcctactaag

SEQ ID NO: 2883200 - DNA, 25 bp, Homo sapien
agtaagtcatttgaaagttcctaat

SEQ ID NO: 2883201 - DNA, 25 bp, Homo sapien
gctggagtacacaatagaactaaaa

SEQ ID NO: 2883202 - DNA, 25 bp, Homo sapien
caagctttaacagaagactcagttc

SEQ ID NO: 2883203 - DNA, 25 bp, Homo sapien
ccaaatacatatgctggagtacaca

SEQ ID NO: 2883204 - DNA, 25 bp, Homo sapien
tttgcaacaatgcatgaacaaaatg

SEQ ID NO: 2883205 - DNA, 25 bp, Homo sapien
caaaagtacacagattactaatttt

SEQ ID NO: 2883206 - DNA, 25 bp, Homo sapien
caatgcatgaacaaaatgagttata

SEQ ID NO: 2883207 - DNA, 25 bp, Homo sapien
agttataaaaaagaaggagagctgg

SEQ ID NO: 2883208 - DNA, 25 bp, Homo sapien
tctcgcaagagccaaacagcaggag

SEQ ID NO: 2883209 - DNA, 25 bp, Homo sapien
tgtgatcaacgctcagtaacggtca

SEQ ID NO: 2883210 - DNA, 25 bp, Homo sapien
tagtagttacgtgaccaggatccaa

SEQ ID NO: 2883211 - DNA, 25 bp, Homo sapien
cagattatgaaggatcaggcaaacc

SEQ ID NO: 2883212 - DNA, 25 bp, Homo sapien
acatatcggaacatatggcatagca

SEQ ID NO: 2883213 - DNA, 25 bp, Homo sapien
tttgaatctttgacatgccatgcgc

SEQ ID NO: 2883214 - DNA, 25 bp, Homo sapien
aaagagactccccagtaaaatacag

SEQ ID NO: 2883215 - DNA, 25 bp, Homo sapien
caactgtgacttatgaagagctggc

SEQ ID NO: 2883216 - DNA, 25 bp, Homo sapien
caactttgacacttgctttacactg

SEQ ID NO: 2883217 - DNA, 25 bp, Homo sapien
atgaattattttatgcttagcaaag

SEQ ID NO: 2883218 - DNA, 25 bp, Homo sapien
ccacattcttcacaagtaaaaggtt

SEQ ID NO: 2883219 - DNA, 25 bp, Homo sapien
tgaggatgtggtaaagatgctgcca

SEQ ID NO: 2883220 - DNA, 25 bp, Homo sapien
ttttatgcttagcaaagtgtgagga

SEQ ID NO: 2883221 - DNA, 25 bp, Homo sapien
ttatgttcattcaggaccctggacc

SEQ ID NO: 2883222 - DNA, 25 bp, Homo sapien
tttcttatgttgactcaggagcgaa

SEQ ID NO: 2883223 - DNA, 25 bp, Homo sapien
tatgttgactccgatctgtggaccg

SEQ ID NO: 2883224 - DNA, 25 bp, Homo sapien
caggagcgaaaattgtttaaaggct

SEQ ID NO: 2883225 - DNA, 25 bp, Homo sapien
tcaggtgtgagaaccgtttaaaggc

SEQ ID NO: 2883226 - DNA, 25 bp, Homo sapien
tggatcatccaaaggtttgccacat

SEQ ID NO: 2883227 - DNA, 25 bp, Homo sapien
tatgtttattcaccggtgagggctg

SEQ ID NO: 2883228 - DNA, 25 bp, Homo sapien
tttgtggaccattcacaggctttgc

SEQ ID NO: 2883229 - DNA, 25 bp, Homo sapien
tgaggtaaagaactttgccacgttc

SEQ ID NO: 2883230 - DNA, 25 bp, Homo sapien
tgtgtacaacaaaatccatgagaga

SEQ ID NO: 2883231 - DNA, 25 bp, Homo sapien
gaatgaattatcttgtgcacagtaa

SEQ ID NO: 2883232 - DNA, 25 bp, Homo sapien
tgtttaagaagcctggagtatggct

SEQ ID NO: 2883233 - DNA, 25 bp, Homo sapien
gcaagctttgtcacactttccacgt

SEQ ID NO: 2883234 - DNA, 25 bp, Homo sapien
aatatactttaaatgtagtatctct

SEQ ID NO: 2883235 - DNA, 25 bp, Homo sapien
tactttaaatgtagtatctcttcaa

SEQ ID NO: 2883236 - DNA, 25 bp, Homo sapien
ctttaaatgtagtatctcttcaaaa

SEQ ID NO: 2883237 - DNA, 25 bp, Homo sapien
tctctaataggttcaactttggatt

SEQ ID NO: 2883238 - DNA, 25 bp, Homo sapien
gaagtattcaggatgcataaatgta

SEQ ID NO: 2883239 - DNA, 25 bp, Homo sapien
caacatatgggaatgatattcttca

SEQ ID NO: 2883240 - DNA, 25 bp, Homo sapien
tgtcattcaactatgttaccattgt

SEQ ID NO: 2883241 - DNA, 25 bp, Homo sapien
tgtcaactacaaaaaagcctctctg

SEQ ID NO: 2883242 - DNA, 25 bp, Homo sapien
tatagctctagcatgagcaccagac

SEQ ID NO: 2883243 - DNA, 25 bp, Homo sapien
taatgccatttgttcgccacagatt

SEQ ID NO: 2883244 - DNA, 25 bp, Homo sapien
gaacagtgacaaactagccataacg

SEQ ID NO: 2883245 - DNA, 25 bp, Homo sapien
cattcataatgagttggttctgcag

SEQ ID NO: 2883246 - DNA, 25 bp, Homo sapien
tcttactctgttggcaggctgcact

SEQ ID NO: 2883247 - DNA, 25 bp, Homo sapien
gcactgcagtggcacaacatcagct

SEQ ID NO: 2883248 - DNA, 25 bp, Homo sapien
tactctgttggcaggctgcactgca

SEQ ID NO: 2883249 - DNA, 25 bp, Homo sapien
tgttgttgagacgggtcttactctg

SEQ ID NO: 2883250 - DNA, 25 bp, Homo sapien
aacaacacatagttgcctaggagga

SEQ ID NO: 2883251 - DNA, 25 bp, Homo sapien
tgaaataagccagagagtagaatgc

SEQ ID NO: 2883252 - DNA, 25 bp, Homo sapien
gggcatctggagacatgtctgtaaa

SEQ ID NO: 2883253 - DNA, 25 bp, Homo sapien
tcatcacgtgagtttttcaaccaag

SEQ ID NO: 2883254 - DNA, 25 bp, Homo sapien
tgtaataagtgttatctctagagtc

SEQ ID NO: 2883255 - DNA, 25 bp, Homo sapien
tagagtcaaagttgcctgtgttgtg

SEQ ID NO: 2883256 - DNA, 25 bp, Homo sapien
taagaatgtgtttaagataatcatg

SEQ ID NO: 2883257 - DNA, 25 bp, Homo sapien
tttgtgtctgaagagggattttact

SEQ ID NO: 2883258 - DNA, 25 bp, Homo sapien
tctgtatattttatacgttttgcac

SEQ ID NO: 2883259 - DNA, 25 bp, Homo sapien
gcaggcaagtgacatagcaataggg

SEQ ID NO: 2883260 - DNA, 25 bp, Homo sapien
gcaagtgacatagcaatagggctgc

SEQ ID NO: 2883261 - DNA, 25 bp, Homo sapien
aagtgacatagcaatagggctgctg

SEQ ID NO: 2883262 - DNA, 25 bp, Homo sapien
caggcaagtgacatagcaatagggc

SEQ ID NO: 2883263 - DNA, 25 bp, Homo sapien
gtgtcttgtgtaactatcccacagc

SEQ ID NO: 2883264 - DNA, 25 bp, Homo sapien
tgtgccagtgcagataagtcaagag

SEQ ID NO: 2883265 - DNA, 25 bp, Homo sapien
gaatctgtctcttgataggaacgac

SEQ ID NO: 2883266 - DNA, 25 bp, Homo sapien
gctgggactcaggatcaacgttggc

SEQ ID NO: 2883267 - DNA, 25 bp, Homo sapien
tctgtgtaactcaatatcatcttac

SEQ ID NO: 2883268 - DNA, 25 bp, Homo sapien
ggcttttctcagatgctattctcca

SEQ ID NO: 2883269 - DNA, 25 bp, Homo sapien
cctgcctaacttctgtgtaactcaa

SEQ ID NO: 2883270 - DNA, 25 bp, Homo sapien
ccttggctaatcaaaggttgaggcg

SEQ ID NO: 2883271 - DNA, 25 bp, Homo sapien
cccgctaagggtgttgtatctgtgc

SEQ ID NO: 2883272 - DNA, 25 bp, Homo sapien
ttatctttggacctaattgccaggc

SEQ ID NO: 2883273 - DNA, 25 bp, Homo sapien
cctaagtgggacagtctcttctgat

SEQ ID NO: 2883274 - DNA, 25 bp, Homo sapien
tgcccaagcaaaaccgacagcaggt

SEQ ID NO: 2883275 - DNA, 25 bp, Homo sapien
ttccccacttcaggggtgtagcaga

SEQ ID NO: 2883276 - DNA, 25 bp, Homo sapien
gctgaggccgaatcacggaggcctc

SEQ ID NO: 2883277 - DNA, 25 bp, Homo sapien
gcagagtctcagctaggaatcatcc

SEQ ID NO: 2883278 - DNA, 25 bp, Homo sapien
ggccgaatcacggaggcctccctga

SEQ ID NO: 2883279 - DNA, 25 bp, Homo sapien
cctggacaagattcagcagagggtg

SEQ ID NO: 2883280 - DNA, 25 bp, Homo sapien
ttctaagcctgacaaagagagattt

SEQ ID NO: 2883281 - DNA, 25 bp, Homo sapien
gacagtgggccctaggcttctgctc

SEQ ID NO: 2883282 - DNA, 25 bp, Homo sapien
gagtggcagtaggagtagccacccc

SEQ ID NO: 2883283 - DNA, 25 bp, Homo sapien
tctcattaagtatctggaagccctc

SEQ ID NO: 2883284 - DNA, 25 bp, Homo sapien
ctcattaagtatctggaagccctca

SEQ ID NO: 2883285 - DNA, 25 bp, Homo sapien
tcctcacccagggaaccagatttct

SEQ ID NO: 2883286 - DNA, 25 bp, Homo sapien
cccagggaaccagatttctgaagtt

SEQ ID NO: 2883287 - DNA, 25 bp, Homo sapien
aggatccagacatttccactctcct

SEQ ID NO: 2883288 - DNA, 25 bp, Homo sapien
aaaacacatatttatcaaaggacag

SEQ ID NO: 2883289 - DNA, 25 bp, Homo sapien
gctatcctcccagctctgcctccct

SEQ ID NO: 2883290 - DNA, 25 bp, Homo sapien
tatcctcccagctctgcctccctga

SEQ ID NO: 2883291 - DNA, 25 bp, Homo sapien
atcctcccagctctgcctccctgag

SEQ ID NO: 2883292 - DNA, 25 bp, Homo sapien
cctcccagctctgcctccctgagag

SEQ ID NO: 2883293 - DNA, 25 bp, Homo sapien
tgaatcttcgggacacttacgtggc

SEQ ID NO: 2883294 - DNA, 25 bp, Homo sapien
caaaaactctgcttcgaactcatgg

SEQ ID NO: 2883295 - DNA, 25 bp, Homo sapien
ggttagtgctacagatactggccca

SEQ ID NO: 2883296 - DNA, 25 bp, Homo sapien
aatccatgggtgagctttggtgcac

SEQ ID NO: 2883297 - DNA, 25 bp, Homo sapien
gccatcatggtgtcaggaacgctaa

SEQ ID NO: 2883298 - DNA, 25 bp, Homo sapien
tatgcagccgtgaaaggactgggca

SEQ ID NO: 2883299 - DNA, 25 bp, Homo sapien
catcagtaaggcaacagcgtgacaa

SEQ ID NO: 2883300 - DNA, 25 bp, Homo sapien
cccatcagtggtgcttctagacgag

SEQ ID NO: 2883301 - DNA, 25 bp, Homo sapien
taggtacagttgagataagggccat

SEQ ID NO: 2883302 - DNA, 25 bp, Homo sapien
tttcaggtcctagggtatattcacg

SEQ ID NO: 2883303 - DNA, 25 bp, Homo sapien
taagggccataaggagttccccaga

SEQ ID NO: 2883304 - DNA, 25 bp, Homo sapien
taatctcatcttggcgtagccccag

SEQ ID NO: 2883305 - DNA, 25 bp, Homo sapien
ccttgtatataagttgaaaagtagg

SEQ ID NO: 2883306 - DNA, 25 bp, Homo sapien
agtaggtttttgaagagatatattc

SEQ ID NO: 2883307 - DNA, 25 bp, Homo sapien
ggtttttgaagagatatattcgaaa

SEQ ID NO: 2883308 - DNA, 25 bp, Homo sapien
ttccttgtatataagttgaaaagta

SEQ ID NO: 2883309 - DNA, 25 bp, Homo sapien
gatgaatttatccttggcctcagat

SEQ ID NO: 2883310 - DNA, 25 bp, Homo sapien
ggagctatatggaatccggccacca

SEQ ID NO: 2883311 - DNA, 25 bp, Homo sapien
cacggacgattcttcaaggtagctc

SEQ ID NO: 2883312 - DNA, 25 bp, Homo sapien
cagctggacgcatagccgacattga

SEQ ID NO: 2883313 - DNA, 25 bp, Homo sapien
ggccaagccgcatccttttaaatta

SEQ ID NO: 2883314 - DNA, 25 bp, Homo sapien
tctgtggcgccattcaaatctcaca

SEQ ID NO: 2883315 - DNA, 25 bp, Homo sapien
ggtactctctttgccataatgagtg

SEQ ID NO: 2883316 - DNA, 25 bp, Homo sapien
cttctttggtagtggtaatggctgc

SEQ ID NO: 2883317 - DNA, 25 bp, Homo sapien
catcagggcccttgcatctgtcact

SEQ ID NO: 2883318 - DNA, 25 bp, Homo sapien
agttttggagggcaactgcaggctc

SEQ ID NO: 2883319 - DNA, 25 bp, Homo sapien
tgaaaaaggtgcctcagagagcaag

SEQ ID NO: 2883320 - DNA, 25 bp, Homo sapien
gtcactgttgtaatctgtgcctgca

SEQ ID NO: 2883321 - DNA, 25 bp, Homo sapien
gacattcagtgaaacatgccagaaa

SEQ ID NO: 2883322 - DNA, 25 bp, Homo sapien
tatctatgtatgcaaagcaggagct

SEQ ID NO: 2883323 - DNA, 25 bp, Homo sapien
taccttccgaaagcaaattatgcac

SEQ ID NO: 2883324 - DNA, 25 bp, Homo sapien
tgcagtggaatacggctctaccttc

SEQ ID NO: 2883325 - DNA, 25 bp, Homo sapien
tgcatcgaaacatacagtcattact

SEQ ID NO: 2883326 - DNA, 25 bp, Homo sapien
caaatcagtacatctgtataagcgt

SEQ ID NO: 2883327 - DNA, 25 bp, Homo sapien
tataataggctgatgctccacctga

SEQ ID NO: 2883328 - DNA, 25 bp, Homo sapien
taagcgtttccctttcaattacaga

SEQ ID NO: 2883329 - DNA, 25 bp, Homo sapien
agcccaaggacctggttataatgtt

SEQ ID NO: 2883330 - DNA, 25 bp, Homo sapien
tctttggacctgtcaggctgtaact

SEQ ID NO: 2883331 - DNA, 25 bp, Homo sapien
gaagaccgtgagtgtgagttgtcca

SEQ ID NO: 2883332 - DNA, 25 bp, Homo sapien
catgtacctgcacttctgttcccag

SEQ ID NO: 2883333 - DNA, 25 bp, Homo sapien
aaggaaacctctcagcagtaagagg

SEQ ID NO: 2883334 - DNA, 25 bp, Homo sapien
ttcatttattacacctaggcctaag

SEQ ID NO: 2883335 - DNA, 25 bp, Homo sapien
gttattacctatgagtgcccaaggg

SEQ ID NO: 2883336 - DNA, 25 bp, Homo sapien
taggcctaagttgcgacagtccctt

SEQ ID NO: 2883337 - DNA, 25 bp, Homo sapien
gactaaaatagttactgcaacaggc

SEQ ID NO: 2883338 - DNA, 25 bp, Homo sapien
aaaatagttactgcaacaggctgct

SEQ ID NO: 2883339 - DNA, 25 bp, Homo sapien
taaaatagttactgcaacaggctgc

SEQ ID NO: 2883340 - DNA, 25 bp, Homo sapien
ctaaaatagttactgcaacaggctg

SEQ ID NO: 2883341 - DNA, 25 bp, Homo sapien
gccgcctctaagcaataacgccagg

SEQ ID NO: 2883342 - DNA, 25 bp, Homo sapien
ggctccaggtagccgcctctaagca

SEQ ID NO: 2883343 - DNA, 25 bp, Homo sapien
agcaataacgccaggccttatcgtc

SEQ ID NO: 2883344 - DNA, 25 bp, Homo sapien
gcagccgcgcttccggctccaggta

SEQ ID NO: 2883345 - DNA, 25 bp, Homo sapien
aggctggatgcggaaccgaccccac

SEQ ID NO: 2883346 - DNA, 25 bp, Homo sapien
taggctggatgcggaaccgacccca

SEQ ID NO: 2883347 - DNA, 25 bp, Homo sapien
ctaggctggatgcggaaccgacccc

SEQ ID NO: 2883348 - DNA, 25 bp, Homo sapien
tacgcaacaggtagcgaaagtcccg

SEQ ID NO: 2883349 - DNA, 25 bp, Homo sapien
agaatccccgaaggaagaccgcgat

SEQ ID NO: 2883350 - DNA, 25 bp, Homo sapien
ctggcagaggaacgaacgggagccg

SEQ ID NO: 2883351 - DNA, 25 bp, Homo sapien
tagcacctcgatcgctacgcaacag

SEQ ID NO: 2883352 - DNA, 25 bp, Homo sapien
cagccgagggttcgggcgctggggg

SEQ ID NO: 2883353 - DNA, 25 bp, Homo sapien
tgggggctccgctccgtgttccgct

SEQ ID NO: 2883354 - DNA, 25 bp, Homo sapien
gcgctgggggctccgctccgtgttc

SEQ ID NO: 2883355 - DNA, 25 bp, Homo sapien
gctgggggctccgctccgtgttccg

SEQ ID NO: 2883356 - DNA, 25 bp, Homo sapien
tccgagcagcgaggctcagaaaaaa

SEQ ID NO: 2883357 - DNA, 25 bp, Homo sapien
ggagcgccgagaagaaatccgagca

SEQ ID NO: 2883358 - DNA, 25 bp, Homo sapien
gagaagaaatccgagcagcgaggct

SEQ ID NO: 2883359 - DNA, 25 bp, Homo sapien
gaaatccgagcagcgaggctcagaa

SEQ ID NO: 2883360 - DNA, 25 bp, Homo sapien
tcaggaaggaaggtcgaagtggggc

SEQ ID NO: 2883361 - DNA, 25 bp, Homo sapien
tggggaccataatggaagagaccac

SEQ ID NO: 2883362 - DNA, 25 bp, Homo sapien
gaaaagagacgctggagcggttaaa

SEQ ID NO: 2883363 - DNA, 25 bp, Homo sapien
gccagtagaggtggttgccacaaag

SEQ ID NO: 2883364 - DNA, 25 bp, Homo sapien
ggatcccaggtatggacacagctta

SEQ ID NO: 2883365 - DNA, 25 bp, Homo sapien
tgcgtttacatggtcagcggctggc

SEQ ID NO: 2883366 - DNA, 25 bp, Homo sapien
cgatgtgtgcaagtggtccagaacc

SEQ ID NO: 2883367 - DNA, 25 bp, Homo sapien
aatataagagaccaaaacgcgaggg

SEQ ID NO: 2883368 - DNA, 25 bp, Homo sapien
aggcgacttgtacttggtaggtagt

SEQ ID NO: 2883369 - DNA, 25 bp, Homo sapien
tgcgatatctacataacccaaccca

SEQ ID NO: 2883370 - DNA, 25 bp, Homo sapien
ccaaaaggaggcgacttgtacttgg

SEQ ID NO: 2883371 - DNA, 25 bp, Homo sapien
gatatctacataacccaacccaaaa

SEQ ID NO: 2883372 - DNA, 25 bp, Homo sapien
agcgtggtccagttagaactggctc

SEQ ID NO: 2883373 - DNA, 25 bp, Homo sapien
tgtgtagggcataaatttcacaccc

SEQ ID NO: 2883374 - DNA, 25 bp, Homo sapien
cttgattcgaggcatagtaactgta

SEQ ID NO: 2883375 - DNA, 25 bp, Homo sapien
gtggctttgcttcagccacaaaact

SEQ ID NO: 2883376 - DNA, 25 bp, Homo sapien
aacacaaaatcatctctcaaggcat

SEQ ID NO: 2883377 - DNA, 25 bp, Homo sapien
caaactgggcagagcgtaaactact

SEQ ID NO: 2883378 - DNA, 25 bp, Homo sapien
ccaagaaaaggtgctagggcattta

SEQ ID NO: 2883379 - DNA, 25 bp, Homo sapien
tggcagtggagataccagctcagtc

SEQ ID NO: 2883380 - DNA, 25 bp, Homo sapien
tactcggcccagtttccataggact

SEQ ID NO: 2883381 - DNA, 25 bp, Homo sapien
tcagcaatttgcaaagtgaactggg

SEQ ID NO: 2883382 - DNA, 25 bp, Homo sapien
cctaaagcgtgaactttcagcaatt

SEQ ID NO: 2883383 - DNA, 25 bp, Homo sapien
ggaggccactgggatagtctcttct

SEQ ID NO: 2883384 - DNA, 25 bp, Homo sapien
gaaagcagtcctaaagcgtgaactt

SEQ ID NO: 2883385 - DNA, 25 bp, Homo sapien
ggctgggtcaatgttaggacagtaa

SEQ ID NO: 2883386 - DNA, 25 bp, Homo sapien
catccctagtactggtggctgggtc

SEQ ID NO: 2883387 - DNA, 25 bp, Homo sapien
gattctggtgaaaaactgtaaactc

SEQ ID NO: 2883388 - DNA, 25 bp, Homo sapien
tgagcataaagctagggcatcccta

SEQ ID NO: 2883389 - DNA, 25 bp, Homo sapien
tgaggttgttccatcatattccaca

SEQ ID NO: 2883390 - DNA, 25 bp, Homo sapien
aatctgacacgaaaaatgaggttgt

SEQ ID NO: 2883391 - DNA, 25 bp, Homo sapien
gcagtgcaggagaattgaggttcct

SEQ ID NO: 2883392 - DNA, 25 bp, Homo sapien
ttcctgatgacgtcgacaaagccag

SEQ ID NO: 2883393 - DNA, 25 bp, Homo sapien
aaataaataggctggacacagcagc

SEQ ID NO: 2883394 - DNA, 25 bp, Homo sapien
cacaacaaaatctatgtcattaaaa

SEQ ID NO: 2883395 - DNA, 25 bp, Homo sapien
gcattggattaaacttttgctaata

SEQ ID NO: 2883396 - DNA, 25 bp, Homo sapien
gcaagaccccacgtctataataaat

SEQ ID NO: 2883397 - DNA, 25 bp, Homo sapien
tactttatccaaatgcctcgtgaca

SEQ ID NO: 2883398 - DNA, 25 bp, Homo sapien
tcgctcagcttctgcccaatcaggg

SEQ ID NO: 2883399 - DNA, 25 bp, Homo sapien
ccccaggtagtggaggattaatatg

SEQ ID NO: 2883400 - DNA, 25 bp, Homo sapien
gatcttcatcagcacgctgtccatc

SEQ ID NO: 2883401 - DNA, 25 bp, Homo sapien
ggtttcctttcaaacgcagaactga

SEQ ID NO: 2883402 - DNA, 25 bp, Homo sapien
tggtcaccacaaagaaccagcaaat

SEQ ID NO: 2883403 - DNA, 25 bp, Homo sapien
agaggtgtattcacctcctcggtgg

SEQ ID NO: 2883404 - DNA, 25 bp, Homo sapien
ttcctgtttcagacatgccatggtc

SEQ ID NO: 2883405 - DNA, 25 bp, Homo sapien
tacgtggctaaatctctcttcaggg

SEQ ID NO: 2883406 - DNA, 25 bp, Homo sapien
aacaatagcatgagagaaccgtgcc

SEQ ID NO: 2883407 - DNA, 25 bp, Homo sapien
tttagaatcagtagaaccaatgcta

SEQ ID NO: 2883408 - DNA, 25 bp, Homo sapien
gctgcggttaactagccccatctat

SEQ ID NO: 2883409 - DNA, 25 bp, Homo sapien
gacaatgacgctgattacctagggt

SEQ ID NO: 2883410 - DNA, 25 bp, Homo sapien
gctataactatgaacctggaaaaac

SEQ ID NO: 2883411 - DNA, 25 bp, Homo sapien
caggcacacgagaccatatggtttc

SEQ ID NO: 2883412 - DNA, 25 bp, Homo sapien
cctggcctagaaatgaagtcttgat

SEQ ID NO: 2883413 - DNA, 25 bp, Homo sapien
ctgttggacgtgctttggatgtcgg

SEQ ID NO: 2883414 - DNA, 25 bp, Homo sapien
tgttggacgtgctttggatgtcgga

SEQ ID NO: 2883415 - DNA, 25 bp, Homo sapien
aagtgctatcgccagtgtcgcagcc

SEQ ID NO: 2883416 - DNA, 25 bp, Homo sapien
tggaatcggtaagccaagtgctatc

SEQ ID NO: 2883417 - DNA, 25 bp, Homo sapien
tccttccacaactgggaataggagg

SEQ ID NO: 2883418 - DNA, 25 bp, Homo sapien
ggaggctccctacactgtcttttgg

SEQ ID NO: 2883419 - DNA, 25 bp, Homo sapien
ctgccaatggtgatagttcaaagtt

SEQ ID NO: 2883420 - DNA, 25 bp, Homo sapien
tgctgccaatggtgatagttcaaag

SEQ ID NO: 2883421 - DNA, 25 bp, Homo sapien
gtgctgccaatggtgatagttcaaa

SEQ ID NO: 2883422 - DNA, 25 bp, Homo sapien
gctgccaatggtgatagttcaaagt

SEQ ID NO: 2883423 - DNA, 25 bp, Homo sapien
atgatccgcctgccttggcctccca

SEQ ID NO: 2883424 - DNA, 25 bp, Homo sapien
ggtcttcaattcctgacttcatgat

SEQ ID NO: 2883425 - DNA, 25 bp, Homo sapien
ctggtcttcaattcctgacttcatg

SEQ ID NO: 2883426 - DNA, 25 bp, Homo sapien
tggtcttcaattcctgacttcatga

SEQ ID NO: 2883427 - DNA, 25 bp, Homo sapien
taggaggccggtttacatctcagcg

SEQ ID NO: 2883428 - DNA, 25 bp, Homo sapien
tcagcgcaagcttgtggacgttcac

SEQ ID NO: 2883429 - DNA, 25 bp, Homo sapien
caaataggagtcgacttcctccggg

SEQ ID NO: 2883430 - DNA, 25 bp, Homo sapien
tttcagctgaaagccccggagtcgt

SEQ ID NO: 2883431 - DNA, 25 bp, Homo sapien
gatccccgacggtgtagacaatggg

SEQ ID NO: 2883432 - DNA, 25 bp, Homo sapien
cctttaacaggctggtttcctctca

SEQ ID NO: 2883433 - DNA, 25 bp, Homo sapien
ggtttcctctcatatccactgtggt

SEQ ID NO: 2883434 - DNA, 25 bp, Homo sapien
aaggatccccgacggtgtagacaat

SEQ ID NO: 2883435 - DNA, 25 bp, Homo sapien
agactggacgccaccgagggactgc

SEQ ID NO: 2883436 - DNA, 25 bp, Homo sapien
ctggacgccaccgagggactgcacg

SEQ ID NO: 2883437 - DNA, 25 bp, Homo sapien
ctgtgggttctaaaacgtatttcag

SEQ ID NO: 2883438 - DNA, 25 bp, Homo sapien
cgagggactgcacgggcctggctgt

SEQ ID NO: 2883439 - DNA, 25 bp, Homo sapien
ctgcaagcacacccgactgctgcag

SEQ ID NO: 2883440 - DNA, 25 bp, Homo sapien
gcacacccgactgctgcaggcacca

SEQ ID NO: 2883441 - DNA, 25 bp, Homo sapien
cacccgactgctgcaggcaccaagt

SEQ ID NO: 2883442 - DNA, 25 bp, Homo sapien
tgcaagcacacccgactgctgcagg

SEQ ID NO: 2883443 - DNA, 25 bp, Homo sapien
gcatgaactcatacgcctgcaggcc

SEQ ID NO: 2883444 - DNA, 25 bp, Homo sapien
tgctgtggcacaagtccctgagcat

SEQ ID NO: 2883445 - DNA, 25 bp, Homo sapien
ggcaccaggtccctgagcgtgaacc

SEQ ID NO: 2883446 - DNA, 25 bp, Homo sapien
aggtccctgagcgtgaacccacacg

SEQ ID NO: 2883447 - DNA, 25 bp, Homo sapien
gtactgcctgagaaccttggagccc

SEQ ID NO: 2883448 - DNA, 25 bp, Homo sapien
tacagtctgatccagttcccatgca

SEQ ID NO: 2883449 - DNA, 25 bp, Homo sapien
tcagggacaagctcagcgtcttcag

SEQ ID NO: 2883450 - DNA, 25 bp, Homo sapien
tgggccacttgtgcactcagggaca

SEQ ID NO: 2883451 - DNA, 25 bp, Homo sapien
aaatatttggctgagttatcaaatc

SEQ ID NO: 2883452 - DNA, 25 bp, Homo sapien
tttggctgagttatcaaatcaatgc

SEQ ID NO: 2883453 - DNA, 25 bp, Homo sapien
tatcaaatcaatgcaacacctgagc

SEQ ID NO: 2883454 - DNA, 25 bp, Homo sapien
caaatcaatgcaacacctgagccat

SEQ ID NO: 2883455 - DNA, 25 bp, Homo sapien
gcatccacagactgctgggcttgga

SEQ ID NO: 2883456 - DNA, 25 bp, Homo sapien
gctgggcttggagaaacccacttaa

SEQ ID NO: 2883457 - DNA, 25 bp, Homo sapien
agcagcatccacagactgctgggct

SEQ ID NO: 2883458 - DNA, 25 bp, Homo sapien
ataagcccagctcccgctctcgtgt

SEQ ID NO: 2883459 - DNA, 25 bp, Homo sapien
gaagtagcacgaactttcagctgag

SEQ ID NO: 2883460 - DNA, 25 bp, Homo sapien
aagaaccaggatcaccaaataaaag

SEQ ID NO: 2883461 - DNA, 25 bp, Homo sapien
gctcagcctttctgcgcagtgcctg

SEQ ID NO: 2883462 - DNA, 25 bp, Homo sapien
tgcacacaatgacgtgaacggccga

SEQ ID NO: 2883463 - DNA, 25 bp, Homo sapien
gccgaggccagcaccatcaccccac

SEQ ID NO: 2883464 - DNA, 25 bp, Homo sapien
tcacacacagcagcgccgaggccag

SEQ ID NO: 2883465 - DNA, 25 bp, Homo sapien
acaatcacacacagcagcgccgagg

SEQ ID NO: 2883466 - DNA, 25 bp, Homo sapien
aatcacacacagcagcgccgaggcc

SEQ ID NO: 2883467 - DNA, 25 bp, Homo sapien
cacgagcacgttggtcagaacagac

SEQ ID NO: 2883468 - DNA, 25 bp, Homo sapien
ccacgagcacgttggtcagaacaga

SEQ ID NO: 2883469 - DNA, 25 bp, Homo sapien
ggtgtttccacccacgagcacgttg

SEQ ID NO: 2883470 - DNA, 25 bp, Homo sapien
cttggggtgtttccacccacgagca

SEQ ID NO: 2883471 - DNA, 25 bp, Homo sapien
ctgagcagaaggactacgtcacact

SEQ ID NO: 2883472 - DNA, 25 bp, Homo sapien
aaataacaagaacaacctgagcaga

SEQ ID NO: 2883473 - DNA, 25 bp, Homo sapien
aaggactacgtcacactcccaggaa

SEQ ID NO: 2883474 - DNA, 25 bp, Homo sapien
taacaagaacaacctgagcagaagg

SEQ ID NO: 2883475 - DNA, 25 bp, Homo sapien
ggataaggctgctccacgtccttcc

SEQ ID NO: 2883476 - DNA, 25 bp, Homo sapien
tgggataaggctgctccacgtcctt

SEQ ID NO: 2883477 - DNA, 25 bp, Homo sapien
gctgctccacgtccttccctgaggc

SEQ ID NO: 2883478 - DNA, 25 bp, Homo sapien
cctgggataaggctgctccacgtcc

SEQ ID NO: 2883479 - DNA, 25 bp, Homo sapien
tggtaacagtcgcaggaacctagct

SEQ ID NO: 2883480 - DNA, 25 bp, Homo sapien
tgtgaccgccagctctttacaatca

SEQ ID NO: 2883481 - DNA, 25 bp, Homo sapien
gcaggaacctagctttccaagaact

SEQ ID NO: 2883482 - DNA, 25 bp, Homo sapien
tacaatcaccttggtaacagtcgca

SEQ ID NO: 2883483 - DNA, 25 bp, Homo sapien
caaagctgtgagtgtctcggtcaga

SEQ ID NO: 2883484 - DNA, 25 bp, Homo sapien
caagcgtggcacagatcatcctggc

SEQ ID NO: 2883485 - DNA, 25 bp, Homo sapien
cccagctaacgaatgaaggtgtccg

SEQ ID NO: 2883486 - DNA, 25 bp, Homo sapien
tggtaactacatactgcgtgcagct

SEQ ID NO: 2883487 - DNA, 25 bp, Homo sapien
aggaaagtgcactttgtaagagacg

SEQ ID NO: 2883488 - DNA, 25 bp, Homo sapien
gcactttgtaagagacggtctgata

SEQ ID NO: 2883489 - DNA, 25 bp, Homo sapien
taagagacggtctgataacgacaca

SEQ ID NO: 2883490 - DNA, 25 bp, Homo sapien
ggtctgataacgacacacatcttgc

SEQ ID NO: 2883491 - DNA, 25 bp, Homo sapien
ctggcgcccaggctcaagacgtggc

SEQ ID NO: 2883492 - DNA, 25 bp, Homo sapien
taagaaggtctagctctgaccacct

SEQ ID NO: 2883493 - DNA, 25 bp, Homo sapien
tagacacagggtgttcacaaggaag

SEQ ID NO: 2883494 - DNA, 25 bp, Homo sapien
ccgccgtccccaacagaataagaag

SEQ ID NO: 2883495 - DNA, 25 bp, Homo sapien
cttgttccacacagaggccacacgg

SEQ ID NO: 2883496 - DNA, 25 bp, Homo sapien
cacacagaggccacacggaggctca

SEQ ID NO: 2883497 - DNA, 25 bp, Homo sapien
acacagaggccacacggaggctcac

SEQ ID NO: 2883498 - DNA, 25 bp, Homo sapien
ttccacacagaggccacacggaggc

SEQ ID NO: 2883499 - DNA, 25 bp, Homo sapien
ccgtggcctttgtctcgctccagga

SEQ ID NO: 2883500 - DNA, 25 bp, Homo sapien
gtggcctttgtctcgctccaggaca

SEQ ID NO: 2883501 - DNA, 25 bp, Homo sapien
gcctttgtctcgctccaggacatca

SEQ ID NO: 2883502 - DNA, 25 bp, Homo sapien
gcttccgtggcctttgtctcgctcc

SEQ ID NO: 2883503 - DNA, 25 bp, Homo sapien
agcaccatccacttctcgcggcctc

SEQ ID NO: 2883504 - DNA, 25 bp, Homo sapien
cagcaccatccacttctcgcggcct

SEQ ID NO: 2883505 - DNA, 25 bp, Homo sapien
ctggtttagggagcgcagcagccgg

SEQ ID NO: 2883506 - DNA, 25 bp, Homo sapien
gcagccggcagcaggccagtattag

SEQ ID NO: 2883507 - DNA, 25 bp, Homo sapien
gcagcaggccagtattagccacgga

SEQ ID NO: 2883508 - DNA, 25 bp, Homo sapien
ctgtctggtttagggagcgcagcag

SEQ ID NO: 2883509 - DNA, 25 bp, Homo sapien
gtgagccagtggccgaggtcaggcc

SEQ ID NO: 2883510 - DNA, 25 bp, Homo sapien
cgaggtcaggccggtgagcccactg

SEQ ID NO: 2883511 - DNA, 25 bp, Homo sapien
ggtgagccagtggccgaggtcaggc

SEQ ID NO: 2883512 - DNA, 25 bp, Homo sapien
ccgaggtcaggccggtgagcccact

SEQ ID NO: 2883513 - DNA, 25 bp, Homo sapien
tcggccgtagaaagtctggcctgtg

SEQ ID NO: 2883514 - DNA, 25 bp, Homo sapien
gaagagcttggcaggtgaccaatcg

SEQ ID NO: 2883515 - DNA, 25 bp, Homo sapien
ttcagatctcaaatactatcccatt

SEQ ID NO: 2883516 - DNA, 25 bp, Homo sapien
gcaggtgaccaatcggccgtagaaa

SEQ ID NO: 2883517 - DNA, 25 bp, Homo sapien
caggagttctctgcagtgacgggac

SEQ ID NO: 2883518 - DNA, 25 bp, Homo sapien
aggaatcctcacgtgctcaccaaga

SEQ ID NO: 2883519 - DNA, 25 bp, Homo sapien
tctgcctcagcaggtatgaagtcac

SEQ ID NO: 2883520 - DNA, 25 bp, Homo sapien
gacgggaccgcaacccttgctgtta

SEQ ID NO: 2883521 - DNA, 25 bp, Homo sapien
tagttaatgcttagcctcccacaag

SEQ ID NO: 2883522 - DNA, 25 bp, Homo sapien
tggaaaggaaacgtgcaggcacaca

SEQ ID NO: 2883523 - DNA, 25 bp, Homo sapien
gatgacttggctaaccgaggttttc

SEQ ID NO: 2883524 - DNA, 25 bp, Homo sapien
gaaggacccatctgcgatgacttgg

SEQ ID NO: 2883525 - DNA, 25 bp, Homo sapien
ctctggagtggggaccaaccaaagt

SEQ ID NO: 2883526 - DNA, 25 bp, Homo sapien
tctggagtggggaccaaccaaagtc

SEQ ID NO: 2883527 - DNA, 25 bp, Homo sapien
aatctacaccaagtggctttcaaag

SEQ ID NO: 2883528 - DNA, 25 bp, Homo sapien
caagatcaatctacaccaagtggct

SEQ ID NO: 2883529 - DNA, 25 bp, Homo sapien
tggaaaatgccagcattacgtaaac

SEQ ID NO: 2883530 - DNA, 25 bp, Homo sapien
taaacaaacagcgacaagatcaatc

SEQ ID NO: 2883531 - DNA, 25 bp, Homo sapien
agagagctcggctttgtggtcagag

SEQ ID NO: 2883532 - DNA, 25 bp, Homo sapien
aggacagagagctcggctttgtggt

SEQ ID NO: 2883533 - DNA, 25 bp, Homo sapien
cagagagctcggctttgtggtcaga

SEQ ID NO: 2883534 - DNA, 25 bp, Homo sapien
gacagagagctcggctttgtggtca

SEQ ID NO: 2883535 - DNA, 25 bp, Homo sapien
tcccgatggccgcccggtagcagta

SEQ ID NO: 2883536 - DNA, 25 bp, Homo sapien
gatggccgcccggtagcagtagacg

SEQ ID NO: 2883537 - DNA, 25 bp, Homo sapien
tggaaatgtccttgctgtccggccg

SEQ ID NO: 2883538 - DNA, 25 bp, Homo sapien
cacgggaaccggacactcccgatgg

SEQ ID NO: 2883539 - DNA, 25 bp, Homo sapien
gtaaagtggctctatgcaccccgtg

SEQ ID NO: 2883540 - DNA, 25 bp, Homo sapien
tacactccagtagctgttgacacaa

SEQ ID NO: 2883541 - DNA, 25 bp, Homo sapien
aaaaagtgctaacaacgcagctggt

SEQ ID NO: 2883542 - DNA, 25 bp, Homo sapien
agtgaagtggttccacgcgccccgt

SEQ ID NO: 2883543 - DNA, 25 bp, Homo sapien
tgttctgtgaaaataggctgcctaa

SEQ ID NO: 2883544 - DNA, 25 bp, Homo sapien
gagggtcacccacatgttacaagct

SEQ ID NO: 2883545 - DNA, 25 bp, Homo sapien
cactgggacggtcactgtcagagca

SEQ ID NO: 2883546 - DNA, 25 bp, Homo sapien
tattgctgctggataattaccctgg

SEQ ID NO: 2883547 - DNA, 25 bp, Homo sapien
cccgtgaacagaatgccaaggacaa

SEQ ID NO: 2883548 - DNA, 25 bp, Homo sapien
tgaacagaatgccaaggacaaagac

SEQ ID NO: 2883549 - DNA, 25 bp, Homo sapien
cgtgaacagaatgccaaggacaaag

SEQ ID NO: 2883550 - DNA, 25 bp, Homo sapien
gtgcccgtgaacagaatgccaagga

SEQ ID NO: 2883551 - DNA, 25 bp, Homo sapien
aatctcagctgcatcgtgtctcagg

SEQ ID NO: 2883552 - DNA, 25 bp, Homo sapien
ggctgccagaagaactaatccacta

SEQ ID NO: 2883553 - DNA, 25 bp, Homo sapien
caagaggctaaatgctaagaccgga

SEQ ID NO: 2883554 - DNA, 25 bp, Homo sapien
gcttgaccaaaccaataatgcatca

SEQ ID NO: 2883555 - DNA, 25 bp, Homo sapien
gagttcagcgtaattcaccatgcca

SEQ ID NO: 2883556 - DNA, 25 bp, Homo sapien
agttcagcgtaattcaccatgccac

SEQ ID NO: 2883557 - DNA, 25 bp, Homo sapien
cttataaaatacacgagagttcagc

SEQ ID NO: 2883558 - DNA, 25 bp, Homo sapien
taaaatacacgagagttcagcgtaa

SEQ ID NO: 2883559 - DNA, 25 bp, Homo sapien
cgtgtcttaaacaaccggctgtact

SEQ ID NO: 2883560 - DNA, 25 bp, Homo sapien
aacgtgatgtctgtgcttcctgaac

SEQ ID NO: 2883561 - DNA, 25 bp, Homo sapien
gggcatgaacgagaacaattattac

SEQ ID NO: 2883562 - DNA, 25 bp, Homo sapien
cagtctgctgtcttaagcacccaca

SEQ ID NO: 2883563 - DNA, 25 bp, Homo sapien
tgcacatgcctcctgggtacgagac

SEQ ID NO: 2883564 - DNA, 25 bp, Homo sapien
gatgggtctttaaacaccggacaga

SEQ ID NO: 2883565 - DNA, 25 bp, Homo sapien
gacctcacggtagagaccaaaatgc

SEQ ID NO: 2883566 - DNA, 25 bp, Homo sapien
ctcagcctgggagtcggcactggaa

SEQ ID NO: 2883567 - DNA, 25 bp, Homo sapien
acagaaaatcctgcaactgtgggct

SEQ ID NO: 2883568 - DNA, 25 bp, Homo sapien
aaatcctgcaactgtgggctgttcc

SEQ ID NO: 2883569 - DNA, 25 bp, Homo sapien
cttcaggatcagggggacagacata

SEQ ID NO: 2883570 - DNA, 25 bp, Homo sapien
taaagacagaaaatcctgcaactgt

SEQ ID NO: 2883571 - DNA, 25 bp, Homo sapien
acagacttctgtaacttcacgccta

SEQ ID NO: 2883572 - DNA, 25 bp, Homo sapien
cacagacttctgtaacttcacgcct

SEQ ID NO: 2883573 - DNA, 25 bp, Homo sapien
cagacttctgtaacttcacgcctac

SEQ ID NO: 2883574 - DNA, 25 bp, Homo sapien
gaggccacctggcttgaacgtgctg

SEQ ID NO: 2883575 - DNA, 25 bp, Homo sapien
gggacacccttgtgccttgcgtgga

SEQ ID NO: 2883576 - DNA, 25 bp, Homo sapien
cagataaggaaacgaaggtgtggca

SEQ ID NO: 2883577 - DNA, 25 bp, Homo sapien
gatctgttaaggaactgcccagtcg

SEQ ID NO: 2883578 - DNA, 25 bp, Homo sapien
gcaaacaggcagaagcagtaggaga

SEQ ID NO: 2883579 - DNA, 25 bp, Homo sapien
tccctttccatgcagagagctgtgg

SEQ ID NO: 2883580 - DNA, 25 bp, Homo sapien
tatccctgttgtcttaggccccagc

SEQ ID NO: 2883581 - DNA, 25 bp, Homo sapien
tatcaagctcaacgaagatccctct

SEQ ID NO: 2883582 - DNA, 25 bp, Homo sapien
cctttgacttggcttgccctgagac

SEQ ID NO: 2883583 - DNA, 25 bp, Homo sapien
agagaccctgcctctctgcgcaggc

SEQ ID NO: 2883584 - DNA, 25 bp, Homo sapien
ctctgatgtctgtcacttgcctgtc

SEQ ID NO: 2883585 - DNA, 25 bp, Homo sapien
tggatcccaaaaaggggtcttctga

SEQ ID NO: 2883586 - DNA, 25 bp, Homo sapien
ccactccaagaccacacctttccac

SEQ ID NO: 2883587 - DNA, 25 bp, Homo sapien
tctgtcaaggttctggccagtcccg

SEQ ID NO: 2883588 - DNA, 25 bp, Homo sapien
tggtctggtcaaacttcatctgtca

SEQ ID NO: 2883589 - DNA, 25 bp, Homo sapien
cacagcttaccctgctcctagtgat

SEQ ID NO: 2883590 - DNA, 25 bp, Homo sapien
gtaactccctgcaggatgcaagcgc

SEQ ID NO: 2883591 - DNA, 25 bp, Homo sapien
ccatctacggtgaggtgctgccagt

SEQ ID NO: 2883592 - DNA, 25 bp, Homo sapien
gactgtgccacatctaagacccttg

SEQ ID NO: 2883593 - DNA, 25 bp, Homo sapien
tgggctgaagactagaacgggcacc

SEQ ID NO: 2883594 - DNA, 25 bp, Homo sapien
ggcttacgtatcagaccatgaggac

SEQ ID NO: 2883595 - DNA, 25 bp, Homo sapien
gtgtaggcagcccagataaccacgc

SEQ ID NO: 2883596 - DNA, 25 bp, Homo sapien
cacggacacacgtgtggtcagaggt

SEQ ID NO: 2883597 - DNA, 25 bp, Homo sapien
gccggcacggacacacgtgtggtca

SEQ ID NO: 2883598 - DNA, 25 bp, Homo sapien
cacgccggcacggacacacgtgtgg

SEQ ID NO: 2883599 - DNA, 25 bp, Homo sapien
cagccacgatgttagcgtgagccac

SEQ ID NO: 2883600 - DNA, 25 bp, Homo sapien
cctcacaacacgtggcatcaacagc

SEQ ID NO: 2883601 - DNA, 25 bp, Homo sapien
cacgatgttagcgtgagccacgatg

SEQ ID NO: 2883602 - DNA, 25 bp, Homo sapien
tcacaacacgtggcatcaacagcca

SEQ ID NO: 2883603 - DNA, 25 bp, Homo sapien
tcaggaagtgcactaagtggctggc

SEQ ID NO: 2883604 - DNA, 25 bp, Homo sapien
cgaagcctgcggagatgtccacggt

SEQ ID NO: 2883605 - DNA, 25 bp, Homo sapien
cgtacgtcccaaacgctgtcaggag

SEQ ID NO: 2883606 - DNA, 25 bp, Homo sapien
acgtaggtgtctaagcccacgaagc

SEQ ID NO: 2883607 - DNA, 25 bp, Homo sapien
cttgatctgggatcccccggggaca

SEQ ID NO: 2883608 - DNA, 25 bp, Homo sapien
cccccggtggaacttctgcacgaag

SEQ ID NO: 2883609 - DNA, 25 bp, Homo sapien
gggacatctgcacaaagctgccagg

SEQ ID NO: 2883610 - DNA, 25 bp, Homo sapien
gatgaggggctgcactgcacccttg

SEQ ID NO: 2883611 - DNA, 25 bp, Homo sapien
gacacctctgcggaatgtcgacagg

SEQ ID NO: 2883612 - DNA, 25 bp, Homo sapien
tcatgggaggacgtaggagccctcc

SEQ ID NO: 2883613 - DNA, 25 bp, Homo sapien
ttcagcacacgcagaaatgcatagg

SEQ ID NO: 2883614 - DNA, 25 bp, Homo sapien
agtcagcaccgcgagagcgacggtt

SEQ ID NO: 2883615 - DNA, 25 bp, Homo sapien
caagtcagagaaagacgtcccaggg

SEQ ID NO: 2883616 - DNA, 25 bp, Homo sapien
aatcgaagtctggaaggacgtctcc

SEQ ID NO: 2883617 - DNA, 25 bp, Homo sapien
taagagatgaaaagtgcctggtcca

SEQ ID NO: 2883618 - DNA, 25 bp, Homo sapien
aaaccgcaatctgcaagcaccaggg

SEQ ID NO: 2883619 - DNA, 25 bp, Homo sapien
atactctccagttgatcaaaatgct

SEQ ID NO: 2883620 - DNA, 25 bp, Homo sapien
gctttcacctcacttaatatttgtc

SEQ ID NO: 2883621 - DNA, 25 bp, Homo sapien
tactctccagttgatcaaaatgctt

SEQ ID NO: 2883622 - DNA, 25 bp, Homo sapien
aatgctttcacctcacttaatattt

SEQ ID NO: 2883623 - DNA, 25 bp, Homo sapien
agcaggcagcccggggtgccagccc

SEQ ID NO: 2883624 - DNA, 25 bp, Homo sapien
aggggagcaggcagcccggggtgcc

SEQ ID NO: 2883625 - DNA, 25 bp, Homo sapien
ggggagcaggcagcccggggtgcca

SEQ ID NO: 2883626 - DNA, 25 bp, Homo sapien
ggagcaggcagcccggggtgccagc

SEQ ID NO: 2883627 - DNA, 25 bp, Homo sapien
ttcccaccactttagcaaagagcca

SEQ ID NO: 2883628 - DNA, 25 bp, Homo sapien
agaagatggcggcttgctgttccca

SEQ ID NO: 2883629 - DNA, 25 bp, Homo sapien
gcggcttgctgttcccaccacttta

SEQ ID NO: 2883630 - DNA, 25 bp, Homo sapien
tgctgttcccaccactttagcaaag

SEQ ID NO: 2883631 - DNA, 25 bp, Homo sapien
agggcaccgcgttccttcttctgca

SEQ ID NO: 2883632 - DNA, 25 bp, Homo sapien
acatccagtcactatggtgctggga

SEQ ID NO: 2883633 - DNA, 25 bp, Homo sapien
tctgcacacacatccagtcactatg

SEQ ID NO: 2883634 - DNA, 25 bp, Homo sapien
tagctcttgcccttggagtagaggg

SEQ ID NO: 2883635 - DNA, 25 bp, Homo sapien
agaaaatgtgtattagcacatgcca

SEQ ID NO: 2883636 - DNA, 25 bp, Homo sapien
gtagcagaagcaagcatgactcagt

SEQ ID NO: 2883637 - DNA, 25 bp, Homo sapien
gaatagaacaaatcagtgcgtagca

SEQ ID NO: 2883638 - DNA, 25 bp, Homo sapien
atagaacaaatcagtgcgtagcaga

SEQ ID NO: 2883639 - DNA, 25 bp, Homo sapien
gtgcgtagcagaagcaagcatgact

SEQ ID NO: 2883640 - DNA, 25 bp, Homo sapien
ttgccgtgaagaatacacagacagc

SEQ ID NO: 2883641 - DNA, 25 bp, Homo sapien
cagacagcagctgtaatgagcaggt

SEQ ID NO: 2883642 - DNA, 25 bp, Homo sapien
gagatgtcaccaaaacgatgtacgt

SEQ ID NO: 2883643 - DNA, 25 bp, Homo sapien
caggtgcattccctcgtagagaagt

SEQ ID NO: 2883644 - DNA, 25 bp, Homo sapien
ttactgcttagtctaaattcaggta

SEQ ID NO: 2883645 - DNA, 25 bp, Homo sapien
caaagaaagttatccatcaactttg

SEQ ID NO: 2883646 - DNA, 25 bp, Homo sapien
cagcagactttaagcatgtattatt

SEQ ID NO: 2883647 - DNA, 25 bp, Homo sapien
ctaaattcaggtagagcagtcaaag

SEQ ID NO: 2883648 - DNA, 25 bp, Homo sapien
tctgtgctccctaaggtaatctggg

SEQ ID NO: 2883649 - DNA, 25 bp, Homo sapien
ggtcacaccatagcttattcagagg

SEQ ID NO: 2883650 - DNA, 25 bp, Homo sapien
tgtaaccctcataaaccaaagcgcc

SEQ ID NO: 2883651 - DNA, 25 bp, Homo sapien
tgaactcggctgaaacaatactctt

SEQ ID NO: 2883652 - DNA, 25 bp, Homo sapien
ggtaaaagttccattcagggtgcaa

SEQ ID NO: 2883653 - DNA, 25 bp, Homo sapien
tgcatcaggacatgaaagttcattg

SEQ ID NO: 2883654 - DNA, 25 bp, Homo sapien
ttttccaaacaacaatgcagatgtt

SEQ ID NO: 2883655 - DNA, 25 bp, Homo sapien
cagggtgcaagacaggtcaatgtgt

SEQ ID NO: 2883656 - DNA, 25 bp, Homo sapien
ggcttatttgcaaatattttcatgt

SEQ ID NO: 2883657 - DNA, 25 bp, Homo sapien
atttggcttatttgcaaatattttc

SEQ ID NO: 2883658 - DNA, 25 bp, Homo sapien
cttatttgcaaatattttcatgtaa

SEQ ID NO: 2883659 - DNA, 25 bp, Homo sapien
tggcttatttgcaaatattttcatg

SEQ ID NO: 2883660 - DNA, 25 bp, Homo sapien
gtccatggcagaccacgggtattca

SEQ ID NO: 2883661 - DNA, 25 bp, Homo sapien
tgtggctggtcaaaggcccagtcca

SEQ ID NO: 2883662 - DNA, 25 bp, Homo sapien
catggcagaccacgggtattcacaa

SEQ ID NO: 2883663 - DNA, 25 bp, Homo sapien
tgctgtggagctcaggcggctggtg

SEQ ID NO: 2883664 - DNA, 25 bp, Homo sapien
ctttgttaggtgacgaatgacaacc

SEQ ID NO: 2883665 - DNA, 25 bp, Homo sapien
tgtgtatagacccagctttgttagg

SEQ ID NO: 2883666 - DNA, 25 bp, Homo sapien
tcggctcctgccgttgttgcaaatg

SEQ ID NO: 2883667 - DNA, 25 bp, Homo sapien
ctggcacaggagactaacttcggct

SEQ ID NO: 2883668 - DNA, 25 bp, Homo sapien
tctggtagactatatggtagcaagt

SEQ ID NO: 2883669 - DNA, 25 bp, Homo sapien
tatggtagcaagtggccagaccacc

SEQ ID NO: 2883670 - DNA, 25 bp, Homo sapien
gtttctggtagactatatggtagca

SEQ ID NO: 2883671 - DNA, 25 bp, Homo sapien
tagactatatggtagcaagtggcca

SEQ ID NO: 2883672 - DNA, 25 bp, Homo sapien
acttgactctggtgctgaccgggcc

SEQ ID NO: 2883673 - DNA, 25 bp, Homo sapien
agtcatcattactccaaagcattat

SEQ ID NO: 2883674 - DNA, 25 bp, Homo sapien
gtcatcattactccaaagcattatt

SEQ ID NO: 2883675 - DNA, 25 bp, Homo sapien
actctggtgctgaccgggccggcac

SEQ ID NO: 2883676 - DNA, 25 bp, Homo sapien
cagcaaggtggagccgtttcgggag

SEQ ID NO: 2883677 - DNA, 25 bp, Homo sapien
gtggagccgtttcgggagagcgctg

SEQ ID NO: 2883678 - DNA, 25 bp, Homo sapien
caaggtggagccgtttcgggagagc

SEQ ID NO: 2883679 - DNA, 25 bp, Homo sapien
cacagcaaggtggagccgtttcggg

SEQ ID NO: 2883680 - DNA, 25 bp, Homo sapien
ctgcatgcaggttccctgaatgctg

SEQ ID NO: 2883681 - DNA, 25 bp, Homo sapien
aatgctgtgtcatgtccgtgttggg

SEQ ID NO: 2883682 - DNA, 25 bp, Homo sapien
agtgctgagctgcatgcaggttccc

SEQ ID NO: 2883683 - DNA, 25 bp, Homo sapien
gaatgctgtgtcatgtccgtgttgg

SEQ ID NO: 2883684 - DNA, 25 bp, Homo sapien
ggtgcaggaggaatccgtgcagggc

SEQ ID NO: 2883685 - DNA, 25 bp, Homo sapien
aggaggaatccgtgcagggcattgt

SEQ ID NO: 2883686 - DNA, 25 bp, Homo sapien
ccagggtgcaggaggaatccgtgca

SEQ ID NO: 2883687 - DNA, 25 bp, Homo sapien
tgcaggaggaatccgtgcagggcat

SEQ ID NO: 2883688 - DNA, 25 bp, Homo sapien
tacgtgtatatgtgaacctgtgctc

SEQ ID NO: 2883689 - DNA, 25 bp, Homo sapien
tgtgtatatggacacgtgctcacac

SEQ ID NO: 2883690 - DNA, 25 bp, Homo sapien
tatgaacacgtgctcacatgtgtac

SEQ ID NO: 2883691 - DNA, 25 bp, Homo sapien
catgctcacgcgtgtgcaggtatgc

SEQ ID NO: 2883692 - DNA, 25 bp, Homo sapien
ttactcctgcttggtgtcctgaggc

SEQ ID NO: 2883693 - DNA, 25 bp, Homo sapien
tactcctgcttggtgtcctgaggca

SEQ ID NO: 2883694 - DNA, 25 bp, Homo sapien
cctttccttggtcggagcgggtgct

SEQ ID NO: 2883695 - DNA, 25 bp, Homo sapien
attgtgaagatcaaactgcaggtga

SEQ ID NO: 2883696 - DNA, 25 bp, Homo sapien
gccttggcaacatgaatttgaacca

SEQ ID NO: 2883697 - DNA, 25 bp, Homo sapien
ttttgactgaaaacgcaattaaaca

SEQ ID NO: 2883698 - DNA, 25 bp, Homo sapien
tcagttactgcgaagcttggggatc

SEQ ID NO: 2883699 - DNA, 25 bp, Homo sapien
gccagtgtcctctccttgctatgtg

SEQ ID NO: 2883700 - DNA, 25 bp, Homo sapien
gtgtcctctccttgctatgtggatg

SEQ ID NO: 2883701 - DNA, 25 bp, Homo sapien
actgcgaagcttggggatctggtca

SEQ ID NO: 2883702 - DNA, 25 bp, Homo sapien
ccgcgggcgccaggttcgagccccg

SEQ ID NO: 2883703 - DNA, 25 bp, Homo sapien
cgccaggttcgagccccggctcggc

SEQ ID NO: 2883704 - DNA, 25 bp, Homo sapien
gcgccaggttcgagccccggctcgg

SEQ ID NO: 2883705 - DNA, 25 bp, Homo sapien
cgggcgccaggttcgagccccggct

SEQ ID NO: 2883706 - DNA, 25 bp, Homo sapien
cctcgcagcgatagcagttgaagta

SEQ ID NO: 2883707 - DNA, 25 bp, Homo sapien
cagatggcttccgagaaaggtaggc

SEQ ID NO: 2883708 - DNA, 25 bp, Homo sapien
tatttaacgctgcaattagccggca

SEQ ID NO: 2883709 - DNA, 25 bp, Homo sapien
tgaattaattcacgtgcacccgcgt

SEQ ID NO: 2883710 - DNA, 25 bp, Homo sapien
caaaactgagttacatctcagtggg

SEQ ID NO: 2883711 - DNA, 25 bp, Homo sapien
agtgggatcccacaaaactgagtta

SEQ ID NO: 2883712 - DNA, 25 bp, Homo sapien
tctgtgtagagcactcggagcggca

SEQ ID NO: 2883713 - DNA, 25 bp, Homo sapien
cgtgtgccgcaaggactgaatgaaa

SEQ ID NO: 2883714 - DNA, 25 bp, Homo sapien
cagtaaccagcgatgaatgagcccc

SEQ ID NO: 2883715 - DNA, 25 bp, Homo sapien
caaatgttggtggaattctgctcag

SEQ ID NO: 2883716 - DNA, 25 bp, Homo sapien
gataggtgttactcatgaaccggca

SEQ ID NO: 2883717 - DNA, 25 bp, Homo sapien
catgcagcaacgtggaaaagtctcc

SEQ ID NO: 2883718 - DNA, 25 bp, Homo sapien
cacacttcggtctgggaatgcaaaa

SEQ ID NO: 2883719 - DNA, 25 bp, Homo sapien
gatgttcacagaagacttgtccttg

SEQ ID NO: 2883720 - DNA, 25 bp, Homo sapien
taccacttctaaggatgtacccaag

SEQ ID NO: 2883721 - DNA, 25 bp, Homo sapien
tattaaggctgacaacaccgtgggc

SEQ ID NO: 2883722 - DNA, 25 bp, Homo sapien
gatgtcaacctcagatggctttgca

SEQ ID NO: 2883723 - DNA, 25 bp, Homo sapien
ttgaaaaacacaggacactaaagct

SEQ ID NO: 2883724 - DNA, 25 bp, Homo sapien
tcatctctggagtgcaagcttggtt

SEQ ID NO: 2883725 - DNA, 25 bp, Homo sapien
gaagttggcattactctgacactga

SEQ ID NO: 2883726 - DNA, 25 bp, Homo sapien
cagggataggcctcctctcgtcact

SEQ ID NO: 2883727 - DNA, 25 bp, Homo sapien
gggataggcctcctctcgtcactct

SEQ ID NO: 2883728 - DNA, 25 bp, Homo sapien
agcagggataggcctcctctcgtca

SEQ ID NO: 2883729 - DNA, 25 bp, Homo sapien
agggataggcctcctctcgtcactc

SEQ ID NO: 2883730 - DNA, 25 bp, Homo sapien
gaataacgatggtcgtccatctggc

SEQ ID NO: 2883731 - DNA, 25 bp, Homo sapien
tggtcgtccatctggctcatgggtc

SEQ ID NO: 2883732 - DNA, 25 bp, Homo sapien
ctgccccagaataacgatggtcgtc

SEQ ID NO: 2883733 - DNA, 25 bp, Homo sapien
tcatgggtcttgagtggctccagtt

SEQ ID NO: 2883734 - DNA, 25 bp, Homo sapien
tcgtgacctggaattgcaaggccat

SEQ ID NO: 2883735 - DNA, 25 bp, Homo sapien
aatctggatttgtggtgagtcgttc

SEQ ID NO: 2883736 - DNA, 25 bp, Homo sapien
gtgagtcgttcctccgaaggcagca

SEQ ID NO: 2883737 - DNA, 25 bp, Homo sapien
gaaggcagcacgcagtcgtgacctg

SEQ ID NO: 2883738 - DNA, 25 bp, Homo sapien
tatagaaaggttatccaacaggtag

SEQ ID NO: 2883739 - DNA, 25 bp, Homo sapien
ctacttgtcatcaaatatagaaagg

SEQ ID NO: 2883740 - DNA, 25 bp, Homo sapien
caggtagctagaaaggtgacttatg

SEQ ID NO: 2883741 - DNA, 25 bp, Homo sapien
gtccccgtgacacgtccccagatgg

SEQ ID NO: 2883742 - DNA, 25 bp, Homo sapien
ggaaggagtcatccgctgacagaca

SEQ ID NO: 2883743 - DNA, 25 bp, Homo sapien
aaaagatggccgcacgcgtggaggg

SEQ ID NO: 2883744 - DNA, 25 bp, Homo sapien
acgcgtggagggacgacggaggaag

SEQ ID NO: 2883745 - DNA, 25 bp, Homo sapien
gtcatccgctgacagacaggaaaaa

SEQ ID NO: 2883746 - DNA, 25 bp, Homo sapien
aaggagtcacccgctgaccgacggg

SEQ ID NO: 2883747 - DNA, 25 bp, Homo sapien
tttgctgaaaagatggccgcagcat

SEQ ID NO: 2883748 - DNA, 25 bp, Homo sapien
ggaaggagtcacccgctgaccgacg

SEQ ID NO: 2883749 - DNA, 25 bp, Homo sapien
agcatggagggacaacggaggaagg

SEQ ID NO: 2883750 - DNA, 25 bp, Homo sapien
atgtgtcaatcatcttccttgtgtc

SEQ ID NO: 2883751 - DNA, 25 bp, Homo sapien
gtcactcacaactggggctggcgct

SEQ ID NO: 2883752 - DNA, 25 bp, Homo sapien
ttcctcagaggagacgagtgcctct

SEQ ID NO: 2883753 - DNA, 25 bp, Homo sapien
cgctctggggcgttgtcactcacaa

SEQ ID NO: 2883754 - DNA, 25 bp, Homo sapien
tgccttcgctgagcagttaaacgct

SEQ ID NO: 2883755 - DNA, 25 bp, Homo sapien
ggagagactcctgctgccgttgagt

SEQ ID NO: 2883756 - DNA, 25 bp, Homo sapien
tctcagcgggcagaaaccatcgctc

SEQ ID NO: 2883757 - DNA, 25 bp, Homo sapien
taaatctcagctccagatggatact

SEQ ID NO: 2883758 - DNA, 25 bp, Homo sapien
gagactcctgctgccgttgagtgga

SEQ ID NO: 2883759 - DNA, 25 bp, Homo sapien
ggacaggttgaggtgcagcttggag

SEQ ID NO: 2883760 - DNA, 25 bp, Homo sapien
gggcgcaggcaccacctcctcgcag

SEQ ID NO: 2883761 - DNA, 25 bp, Homo sapien
gtgggacaggttgaggtgcagcttg

SEQ ID NO: 2883762 - DNA, 25 bp, Homo sapien
cgcaggcaccacctcctcgcagcgg

SEQ ID NO: 2883763 - DNA, 25 bp, Homo sapien
ccggtgggggatccagtccgtctca

SEQ ID NO: 2883764 - DNA, 25 bp, Homo sapien
aaccggtgtgatgcgaagcagccct

SEQ ID NO: 2883765 - DNA, 25 bp, Homo sapien
tggaggggacgatggcacagagagc

SEQ ID NO: 2883766 - DNA, 25 bp, Homo sapien
gccctggccggtgggggatccagtc

SEQ ID NO: 2883767 - DNA, 25 bp, Homo sapien
tgtggcaggtgctagtgcccccgat

SEQ ID NO: 2883768 - DNA, 25 bp, Homo sapien
atgaagacgggtgcagacgacacgc

SEQ ID NO: 2883769 - DNA, 25 bp, Homo sapien
gtgcagacgacacgccacagaggac

SEQ ID NO: 2883770 - DNA, 25 bp, Homo sapien
tctggtttgttctcgccaagaagaa

SEQ ID NO: 2883771 - DNA, 25 bp, Homo sapien
gtgggaccgcagagctggagaggcc

SEQ ID NO: 2883772 - DNA, 25 bp, Homo sapien
gtgaaatgagctaagcgcatcttga

SEQ ID NO: 2883773 - DNA, 25 bp, Homo sapien
taagcgcatcttgagtgggaccgca

SEQ ID NO: 2883774 - DNA, 25 bp, Homo sapien
tgagctaagcgcatcttgagtggga

SEQ ID NO: 2883775 - DNA, 25 bp, Homo sapien
ctccaggcacgcatggactcccagg

SEQ ID NO: 2883776 - DNA, 25 bp, Homo sapien
gctccaggcacgcatggactcccag

SEQ ID NO: 2883777 - DNA, 25 bp, Homo sapien
tccagtgggaagacgatctcggagt

SEQ ID NO: 2883778 - DNA, 25 bp, Homo sapien
tgtccggctgcacgctgaaaagcct

SEQ ID NO: 2883779 - DNA, 25 bp, Homo sapien
cgccgttgcgctggcggtacatgaa

SEQ ID NO: 2883780 - DNA, 25 bp, Homo sapien
tcccaaagtactggcgggcaaaatc

SEQ ID NO: 2883781 - DNA, 25 bp, Homo sapien
aggctgcctgggcctcttgcagcct

SEQ ID NO: 2883782 - DNA, 25 bp, Homo sapien
tcatccagcaagagcggaggctgcc

SEQ ID NO: 2883783 - DNA, 25 bp, Homo sapien
gctgcctgggcctcttgcagcctcc

SEQ ID NO: 2883784 - DNA, 25 bp, Homo sapien
gcctgggcctcttgcagcctcctta

SEQ ID NO: 2883785 - DNA, 25 bp, Homo sapien
gctcagaaaccgctgcacagtcaga

SEQ ID NO: 2883786 - DNA, 25 bp, Homo sapien
tccagccttgtagagaccaccatag

SEQ ID NO: 2883787 - DNA, 25 bp, Homo sapien
tgccctcgctgtgaactcttgcagg

SEQ ID NO: 2883788 - DNA, 25 bp, Homo sapien
caccataggactgagtcgaagggtc

SEQ ID NO: 2883789 - DNA, 25 bp, Homo sapien
tctcttcttcatagtctctccccat

SEQ ID NO: 2883790 - DNA, 25 bp, Homo sapien
ttctcttcttcatagtctctcccca

SEQ ID NO: 2883791 - DNA, 25 bp, Homo sapien
cctatttgtcaccttctcttcttca

SEQ ID NO: 2883792 - DNA, 25 bp, Homo sapien
tttgtcaccttctcttcttcatagt

SEQ ID NO: 2883793 - DNA, 25 bp, Homo sapien
ccatagccatgtgggctggcattga

SEQ ID NO: 2883794 - DNA, 25 bp, Homo sapien
ctgcaggacactcctacactcttcc

SEQ ID NO: 2883795 - DNA, 25 bp, Homo sapien
ccctccggccacgtcgggcttcctg

SEQ ID NO: 2883796 - DNA, 25 bp, Homo sapien
cttcctggatgcctgttgagcctgc

SEQ ID NO: 2883797 - DNA, 25 bp, Homo sapien
cggccacgtcgggcttcctggatgc

SEQ ID NO: 2883798 - DNA, 25 bp, Homo sapien
tgccattcatgatgggtgtggccag

SEQ ID NO: 2883799 - DNA, 25 bp, Homo sapien
catgatcaccgccacgacgtctttg

SEQ ID NO: 2883800 - DNA, 25 bp, Homo sapien
tcttcgtcttcgctggtgaagaatg

SEQ ID NO: 2883801 - DNA, 25 bp, Homo sapien
cttgtagtcagtgagctcgtcagca

SEQ ID NO: 2883802 - DNA, 25 bp, Homo sapien
cgcggcgcgtctcgcagttgtggag

SEQ ID NO: 2883803 - DNA, 25 bp, Homo sapien
gtggcaaaattcaggtacttcaaga

SEQ ID NO: 2883804 - DNA, 25 bp, Homo sapien
aggtagctcaggtgatagatcttca

SEQ ID NO: 2883805 - DNA, 25 bp, Homo sapien
gatagatcttcaggtacaacgtggc

SEQ ID NO: 2883806 - DNA, 25 bp, Homo sapien
cagctgggcggtgagaattgctcca

SEQ ID NO: 2883807 - DNA, 25 bp, Homo sapien
ttgctccactaagccgaacaggcag

SEQ ID NO: 2883808 - DNA, 25 bp, Homo sapien
tgggcggtgagaattgctccactaa

SEQ ID NO: 2883809 - DNA, 25 bp, Homo sapien
ggtgagaattgctccactaagccga

SEQ ID NO: 2883810 - DNA, 25 bp, Homo sapien
cttgcagcgagccaccgggtcctga

SEQ ID NO: 2883811 - DNA, 25 bp, Homo sapien
cccttgcagcgagccaccgggtcct

SEQ ID NO: 2883812 - DNA, 25 bp, Homo sapien
tccgcccttgcagcgagccaccggg

SEQ ID NO: 2883813 - DNA, 25 bp, Homo sapien
tgcagcgagccaccgggtcctgacg

SEQ ID NO: 2883814 - DNA, 25 bp, Homo sapien
tgtgggtcgctgttggccgtgctcg

SEQ ID NO: 2883815 - DNA, 25 bp, Homo sapien
ctcggggcttcgctacggcagacgg

SEQ ID NO: 2883816 - DNA, 25 bp, Homo sapien
gcttcgctacggcagacggactgct

SEQ ID NO: 2883817 - DNA, 25 bp, Homo sapien
ggactgctgtgccagcgtggatctc

SEQ ID NO: 2883818 - DNA, 25 bp, Homo sapien
ggaatggctcttccaacctccgacc

SEQ ID NO: 2883819 - DNA, 25 bp, Homo sapien
actgactgaagtgcaggcgtcttca

SEQ ID NO: 2883820 - DNA, 25 bp, Homo sapien
cgtgtggcgggtggattttcgctgc

SEQ ID NO: 2883821 - DNA, 25 bp, Homo sapien
gcgggtggattttcgctgccggctc

SEQ ID NO: 2883822 - DNA, 25 bp, Homo sapien
tggccgcagtcacagtcatggagct

SEQ ID NO: 2883823 - DNA, 25 bp, Homo sapien
gatgggtgtggaccctcctcactgg

SEQ ID NO: 2883824 - DNA, 25 bp, Homo sapien
agtcaccgtcgtggagccgccctgg

SEQ ID NO: 2883825 - DNA, 25 bp, Homo sapien
tgactcctgcctcaccgatgggtgt

SEQ ID NO: 2883826 - DNA, 25 bp, Homo sapien
ccgctgggtcttctaccgcatggtg

SEQ ID NO: 2883827 - DNA, 25 bp, Homo sapien
ctgcctcctcacactcgcggcggcc

SEQ ID NO: 2883828 - DNA, 25 bp, Homo sapien
gccgctgggtcttctaccgcatggt

SEQ ID NO: 2883829 - DNA, 25 bp, Homo sapien
ctgagagtgaagcattgctgacgca

SEQ ID NO: 2883830 - DNA, 25 bp, Homo sapien
gctgacgcactccacgaggtcctgg

SEQ ID NO: 2883831 - DNA, 25 bp, Homo sapien
cacaggcccctggttgctgggtcag

SEQ ID NO: 2883832 - DNA, 25 bp, Homo sapien
cactcaggacatcccgctgcacagg

SEQ ID NO: 2883833 - DNA, 25 bp, Homo sapien
ggctccgtggccaggtttcatctga

SEQ ID NO: 2883834 - DNA, 25 bp, Homo sapien
gcttgacaggcaaacatccgaccag

SEQ ID NO: 2883835 - DNA, 25 bp, Homo sapien
gctttgagaacatcgggccgtggtt

SEQ ID NO: 2883836 - DNA, 25 bp, Homo sapien
tggaatctgtcgctttgagcttgac

SEQ ID NO: 2883837 - DNA, 25 bp, Homo sapien
aggaggcccacggagtaccgctcgc

SEQ ID NO: 2883838 - DNA, 25 bp, Homo sapien
gcccgcaccgtgtagaaggccttgt

SEQ ID NO: 2883839 - DNA, 25 bp, Homo sapien
tcgcagttgaggtaggcccgcaccg

SEQ ID NO: 2883840 - DNA, 25 bp, Homo sapien
tgtggaactgcctctcgatgtccgt

SEQ ID NO: 2883841 - DNA, 25 bp, Homo sapien
catcagcacagaccacacgtcaaaa

SEQ ID NO: 2883842 - DNA, 25 bp, Homo sapien
gtgcgtgggcccgagtacggctggg

SEQ ID NO: 2883843 - DNA, 25 bp, Homo sapien
gcacagaccacacgtcaaaaaattc

SEQ ID NO: 2883844 - DNA, 25 bp, Homo sapien
tgggcccgagtacggctgggactct

SEQ ID NO: 2883845 - DNA, 25 bp, Homo sapien
gacgtagtcgatcactttgtagaag

SEQ ID NO: 2883846 - DNA, 25 bp, Homo sapien
ccttgccgtggaggacgtagtcgat

SEQ ID NO: 2883847 - DNA, 25 bp, Homo sapien
gaggacgtagtcgatcactttgtag

SEQ ID NO: 2883848 - DNA, 25 bp, Homo sapien
ccgtggaggacgtagtcgatcactt

SEQ ID NO: 2883849 - DNA, 25 bp, Homo sapien
ctgccacgtagcttggaaggccgct

SEQ ID NO: 2883850 - DNA, 25 bp, Homo sapien
cagggcccagtgatcggctgagggt

SEQ ID NO: 2883851 - DNA, 25 bp, Homo sapien
agggcccagtgatcggctgagggtg

SEQ ID NO: 2883852 - DNA, 25 bp, Homo sapien
ttctgccacgtagcttggaaggccg

SEQ ID NO: 2883853 - DNA, 25 bp, Homo sapien
tggggactccagacagcacgggact

SEQ ID NO: 2883854 - DNA, 25 bp, Homo sapien
ctgtggggactccagacagcacggg

SEQ ID NO: 2883855 - DNA, 25 bp, Homo sapien
ggctgtggggactccagacagcacg

SEQ ID NO: 2883856 - DNA, 25 bp, Homo sapien
ggactccagacagcacgggactcac

SEQ ID NO: 2883857 - DNA, 25 bp, Homo sapien
ttcatccaaaacagcggaaggtctg

SEQ ID NO: 2883858 - DNA, 25 bp, Homo sapien
agaaaaacgatttcatccaaaacag

SEQ ID NO: 2883859 - DNA, 25 bp, Homo sapien
cagcggaaggtctgttatgatctaa

SEQ ID NO: 2883860 - DNA, 25 bp, Homo sapien
agcatcagaaaaacgatttcatcca

SEQ ID NO: 2883861 - DNA, 25 bp, Homo sapien
tttgaacatttcgtcagcggaagca

SEQ ID NO: 2883862 - DNA, 25 bp, Homo sapien
atttcgtcagcggaagcattcatga

SEQ ID NO: 2883863 - DNA, 25 bp, Homo sapien
tcagcggaagcattcatgatgttac

SEQ ID NO: 2883864 - DNA, 25 bp, Homo sapien
gaaatttgaacatttcgtcagcgga

SEQ ID NO: 2883865 - DNA, 25 bp, Homo sapien
gcgggagcggtgtccagagctgagc

SEQ ID NO: 2883866 - DNA, 25 bp, Homo sapien
tgcgggagcggtgtccagagctgag

SEQ ID NO: 2883867 - DNA, 25 bp, Homo sapien
ctgcgggagcggtgtccagagctga

SEQ ID NO: 2883868 - DNA, 25 bp, Homo sapien
ctgttcgtcaaagggcttcccgtct

SEQ ID NO: 2883869 - DNA, 25 bp, Homo sapien
atgagccacccggagtcgtccaggg

SEQ ID NO: 2883870 - DNA, 25 bp, Homo sapien
catgagaacctcgtcctgttcgtca

SEQ ID NO: 2883871 - DNA, 25 bp, Homo sapien
cttgttgacgatgggcatggacagc

SEQ ID NO: 2883872 - DNA, 25 bp, Homo sapien
catcttgtcgtaggtgtcggtgttc

SEQ ID NO: 2883873 - DNA, 25 bp, Homo sapien
tgtgcgatgtccttgcggttctcca

SEQ ID NO: 2883874 - DNA, 25 bp, Homo sapien
gatgagctggatctcgtccctgtcg

SEQ ID NO: 2883875 - DNA, 25 bp, Homo sapien
tcacgtggtaaaggaccatgtcctg

SEQ ID NO: 2883876 - DNA, 25 bp, Homo sapien
gatttcgcccagctcgtcctcatcg

SEQ ID NO: 2883877 - DNA, 25 bp, Homo sapien
caggatttcgcccagctcgtcctca

SEQ ID NO: 2883878 - DNA, 25 bp, Homo sapien
gtcctcatcgcagtcagcaggctcc

SEQ ID NO: 2883879 - DNA, 25 bp, Homo sapien
tcgtcctcatcgcagtcagcaggct

SEQ ID NO: 2883880 - DNA, 25 bp, Homo sapien
ggatctggaactttcggaccacgcc

SEQ ID NO: 2883881 - DNA, 25 bp, Homo sapien
aggtccagttcggtgcactccaggt

SEQ ID NO: 2883882 - DNA, 25 bp, Homo sapien
cagctcgtagtacatctggatgcca

SEQ ID NO: 2883883 - DNA, 25 bp, Homo sapien
cgtagatgtcaaatgtggtgggccc

SEQ ID NO: 2883884 - DNA, 25 bp, Homo sapien
ctatgcgccctgcggtgtctcccac

SEQ ID NO: 2883885 - DNA, 25 bp, Homo sapien
gactatgcgccctgcggtgtctccc

SEQ ID NO: 2883886 - DNA, 25 bp, Homo sapien
tgactatgcgccctgcggtgtctcc

SEQ ID NO: 2883887 - DNA, 25 bp, Homo sapien
ctgactatgcgccctgcggtgtctc

SEQ ID NO: 2883888 - DNA, 25 bp, Homo sapien
cgtctcctggacttcccgatcttcc

SEQ ID NO: 2883889 - DNA, 25 bp, Homo sapien
gtctcctggacttcccgatcttccc

SEQ ID NO: 2883890 - DNA, 25 bp, Homo sapien
catgagcagcgtgaacatcgtctgg

SEQ ID NO: 2883891 - DNA, 25 bp, Homo sapien
tgatggagaacaggaaccgcaccag

SEQ ID NO: 2883892 - DNA, 25 bp, Homo sapien
catcgtctgggccacgttgaagccg

SEQ ID NO: 2883893 - DNA, 25 bp, Homo sapien
gttgtggtaggtgattctccggtac

SEQ ID NO: 2883894 - DNA, 25 bp, Homo sapien
ggagggcctgcacaaccctggtgat

SEQ ID NO: 2883895 - DNA, 25 bp, Homo sapien
gcctgcacaaccctggtgattctgg

SEQ ID NO: 2883896 - DNA, 25 bp, Homo sapien
gggcctgcacaaccctggtgattct

SEQ ID NO: 2883897 - DNA, 25 bp, Homo sapien
gcacaaccctggtgattctggcagc

SEQ ID NO: 2883898 - DNA, 25 bp, Homo sapien
acagggccaccttgctcaccggtcc

SEQ ID NO: 2883899 - DNA, 25 bp, Homo sapien
agacagggccaccttgctcaccggt

SEQ ID NO: 2883900 - DNA, 25 bp, Homo sapien
gacagggccaccttgctcaccggtc

SEQ ID NO: 2883901 - DNA, 25 bp, Homo sapien
gagacagggccaccttgctcaccgg

SEQ ID NO: 2883902 - DNA, 25 bp, Homo sapien
tccaggtccgtgtagtagctcttca

SEQ ID NO: 2883903 - DNA, 25 bp, Homo sapien
ccgcggtggtcgatgtcatggcaca

SEQ ID NO: 2883904 - DNA, 25 bp, Homo sapien
ccggctgtcaccatggcgaaggcct

SEQ ID NO: 2883905 - DNA, 25 bp, Homo sapien
tacaggttgttggtgccgcggtggt

SEQ ID NO: 2883906 - DNA, 25 bp, Homo sapien
gaagcctaattcacgccaagggcgt

SEQ ID NO: 2883907 - DNA, 25 bp, Homo sapien
gatttagggctaattcacatgcccg

SEQ ID NO: 2883908 - DNA, 25 bp, Homo sapien
tggactccactttctacatagcctg

SEQ ID NO: 2883909 - DNA, 25 bp, Homo sapien
catagcctgctatgcgaagcctaat

SEQ ID NO: 2883910 - DNA, 25 bp, Homo sapien
tcctccgagagcaggaacttcccaa

SEQ ID NO: 2883911 - DNA, 25 bp, Homo sapien
tccgagagcaggaacttcccaaact

SEQ ID NO: 2883912 - DNA, 25 bp, Homo sapien
tccaaaatcgaggagccgtggagct

SEQ ID NO: 2883913 - DNA, 25 bp, Homo sapien
ttcccaaactccaggtggtgccgct

SEQ ID NO: 2883914 - DNA, 25 bp, Homo sapien
cagaaaccgagggtgagtataccaa

SEQ ID NO: 2883915 - DNA, 25 bp, Homo sapien
cagaaccctgctccgcaggatacgg

SEQ ID NO: 2883916 - DNA, 25 bp, Homo sapien
aggatacggccctgccgtcctgcgg

SEQ ID NO: 2883917 - DNA, 25 bp, Homo sapien
tgccgtcctgcggacgctgcgtccc

SEQ ID NO: 2883918 - DNA, 25 bp, Homo sapien
acccctaatccgcctgctgctcagg

SEQ ID NO: 2883919 - DNA, 25 bp, Homo sapien
gggacccctaatccgcctgctgctc

SEQ ID NO: 2883920 - DNA, 25 bp, Homo sapien
tgggcgggacccctaatccgcctgc

SEQ ID NO: 2883921 - DNA, 25 bp, Homo sapien
ggcgggacccctaatccgcctgctg

SEQ ID NO: 2883922 - DNA, 25 bp, Homo sapien
gcgtcaggcgccctgcggccacctc

SEQ ID NO: 2883923 - DNA, 25 bp, Homo sapien
aggttatgcccagcgcgtcaggcgc

SEQ ID NO: 2883924 - DNA, 25 bp, Homo sapien
ggaggttatgcccagcgcgtcaggc

SEQ ID NO: 2883925 - DNA, 25 bp, Homo sapien
gcggaggttatgcccagcgcgtcag

SEQ ID NO: 2883926 - DNA, 25 bp, Homo sapien
tacagggccaggtccgtggcgatga

SEQ ID NO: 2883927 - DNA, 25 bp, Homo sapien
gcgatgatggcgatgtccatcaggt

SEQ ID NO: 2883928 - DNA, 25 bp, Homo sapien
tggcgatgtccatcaggtggatcac

SEQ ID NO: 2883929 - DNA, 25 bp, Homo sapien
gtggatcacgtgctcgtgctgccgc

SEQ ID NO: 2883930 - DNA, 25 bp, Homo sapien
gggacaggtactccacccagctctt

SEQ ID NO: 2883931 - DNA, 25 bp, Homo sapien
cttccgggtcgtctccagggacagg

SEQ ID NO: 2883932 - DNA, 25 bp, Homo sapien
gactcatccacgatcttctgaaaca

SEQ ID NO: 2883933 - DNA, 25 bp, Homo sapien
tcttggactcatccacgatcttctg

SEQ ID NO: 2883934 - DNA, 25 bp, Homo sapien
cagacaggtcgcaggctgtcatcat

SEQ ID NO: 2883935 - DNA, 25 bp, Homo sapien
gatggcagacaggtcgcaggctgtc

SEQ ID NO: 2883936 - DNA, 25 bp, Homo sapien
tggcagacaggtcgcaggctgtcat

SEQ ID NO: 2883937 - DNA, 25 bp, Homo sapien
gcagacaggtcgcaggctgtcatca

SEQ ID NO: 2883938 - DNA, 25 bp, Homo sapien
gaactcagcagccacgagaagtgcg

SEQ ID NO: 2883939 - DNA, 25 bp, Homo sapien
actcagcagccacgagaagtgcgac

SEQ ID NO: 2883940 - DNA, 25 bp, Homo sapien
cagaactcagcagccacgagaagtg

SEQ ID NO: 2883941 - DNA, 25 bp, Homo sapien
aactcagcagccacgagaagtgcga

SEQ ID NO: 2883942 - DNA, 25 bp, Homo sapien
ggccgccttgttccggtccatcata

SEQ ID NO: 2883943 - DNA, 25 bp, Homo sapien
ggagctcggccgccttgttccggtc

SEQ ID NO: 2883944 - DNA, 25 bp, Homo sapien
cgatgaagcccacttgcagcttggg

SEQ ID NO: 2883945 - DNA, 25 bp, Homo sapien
aagtcgatgaagcccacttgcagct

SEQ ID NO: 2883946 - DNA, 25 bp, Homo sapien
tgtgagtccacgcgactccagcccg

SEQ ID NO: 2883947 - DNA, 25 bp, Homo sapien
cgtgtgagtccacgcgactccagcc

SEQ ID NO: 2883948 - DNA, 25 bp, Homo sapien
tgagtccacgcgactccagcccgcg

SEQ ID NO: 2883949 - DNA, 25 bp, Homo sapien
cccgtgtgagtccacgcgactccag

SEQ ID NO: 2883950 - DNA, 25 bp, Homo sapien
ctttcctattgttctgcagtcggtc

SEQ ID NO: 2883951 - DNA, 25 bp, Homo sapien
tctcttcgtggaaacgagagaactc

SEQ ID NO: 2883952 - DNA, 25 bp, Homo sapien
catgggcaggatctcttcgtggaaa

SEQ ID NO: 2883953 - DNA, 25 bp, Homo sapien
cagtcggtcgaacatgggcaggatc

SEQ ID NO: 2883954 - DNA, 25 bp, Homo sapien
ttctcctccagagccttcactttgg

SEQ ID NO: 2883955 - DNA, 25 bp, Homo sapien
ctttcttggctgccaccctctcctc

SEQ ID NO: 2883956 - DNA, 25 bp, Homo sapien
tcctccagagccttcactttggcct

SEQ ID NO: 2883957 - DNA, 25 bp, Homo sapien
cagagccttcactttggcctcatac

SEQ ID NO: 2883958 - DNA, 25 bp, Homo sapien
gtgctgggccgccattgcaaatttc

SEQ ID NO: 2883959 - DNA, 25 bp, Homo sapien
gggtgctgggccgccattgcaaatt

SEQ ID NO: 2883960 - DNA, 25 bp, Homo sapien
ggtgctgggccgccattgcaaattt

SEQ ID NO: 2883961 - DNA, 25 bp, Homo sapien
tgctgggccgccattgcaaatttct

SEQ ID NO: 2883962 - DNA, 25 bp, Homo sapien
cttgtagcaaatagccacaggcaga

SEQ ID NO: 2883963 - DNA, 25 bp, Homo sapien
taggctacagtttattcacagttgg

SEQ ID NO: 2883964 - DNA, 25 bp, Homo sapien
ttcacagttggcttcagtttataaa

SEQ ID NO: 2883965 - DNA, 25 bp, Homo sapien
gcagaacccaaatcctagtgggtga

SEQ ID NO: 2883966 - DNA, 25 bp, Homo sapien
cccagtggtaactatccaaaaatgg

SEQ ID NO: 2883967 - DNA, 25 bp, Homo sapien
tcctaaactggatgagaaacggcct

SEQ ID NO: 2883968 - DNA, 25 bp, Homo sapien
cagtgatttcagagttcatggaccc

SEQ ID NO: 2883969 - DNA, 25 bp, Homo sapien
catgtgtggctgcaaatgttctcag

SEQ ID NO: 2883970 - DNA, 25 bp, Homo sapien
gtgtggcttccgctatcattttacc

SEQ ID NO: 2883971 - DNA, 25 bp, Homo sapien
gcttccgctatcattttaccacaga

SEQ ID NO: 2883972 - DNA, 25 bp, Homo sapien
tgggtcaaatgtagtgtggcttccg

SEQ ID NO: 2883973 - DNA, 25 bp, Homo sapien
tggcttccgctatcattttaccaca

SEQ ID NO: 2883974 - DNA, 25 bp, Homo sapien
caggctcaccaatatttaatcatgg

SEQ ID NO: 2883975 - DNA, 25 bp, Homo sapien
aatgccttggagctcacatcatgag

SEQ ID NO: 2883976 - DNA, 25 bp, Homo sapien
taacataataccgatttcaactggg

SEQ ID NO: 2883977 - DNA, 25 bp, Homo sapien
tcaactgggaagtccgtttctttgc

SEQ ID NO: 2883978 - DNA, 25 bp, Homo sapien
cctgttcgcagaggacgagtgagcc

SEQ ID NO: 2883979 - DNA, 25 bp, Homo sapien
cgaaaacggctgcttcttggtgaaa

SEQ ID NO: 2883980 - DNA, 25 bp, Homo sapien
aaatggctgttcgagtgctgaggtc

SEQ ID NO: 2883981 - DNA, 25 bp, Homo sapien
gagcgtgaccccgatagtggaatca

SEQ ID NO: 2883982 - DNA, 25 bp, Homo sapien
tactccgccctgttcctcggtgtgg

SEQ ID NO: 2883983 - DNA, 25 bp, Homo sapien
cctcggtgtggcctacggagccacg

SEQ ID NO: 2883984 - DNA, 25 bp, Homo sapien
gctcggctttcctgtggagctcctg

SEQ ID NO: 2883985 - DNA, 25 bp, Homo sapien
cggagccacgcgctacagtgagtga

SEQ ID NO: 2883986 - DNA, 25 bp, Homo sapien
caggtctctccgctcatcaaggtga

SEQ ID NO: 2883987 - DNA, 25 bp, Homo sapien
atggtgccaccggtgcaggtctctc

SEQ ID NO: 2883988 - DNA, 25 bp, Homo sapien
cgctccgcgcaagaagacagagtgc

SEQ ID NO: 2883989 - DNA, 25 bp, Homo sapien
gctccgtctgcaggttgtgcttccg

SEQ ID NO: 2883990 - DNA, 25 bp, Homo sapien
ctgcactcggctcacactccgctcc

SEQ ID NO: 2883991 - DNA, 25 bp, Homo sapien
caggccaccctcgggtgggcgcggt

SEQ ID NO: 2883992 - DNA, 25 bp, Homo sapien
caccctcgggtgggcgcggtccgcg

SEQ ID NO: 2883993 - DNA, 25 bp, Homo sapien
ggctcacactccgctcccaggaccc

SEQ ID NO: 2883994 - DNA, 25 bp, Homo sapien
gcccctcttcgggacagaagtgatg

SEQ ID NO: 2883995 - DNA, 25 bp, Homo sapien
ttagcgagacccgagccatagttct

SEQ ID NO: 2883996 - DNA, 25 bp, Homo sapien
ggaggccttgcgtcactactgcatg

SEQ ID NO: 2883997 - DNA, 25 bp, Homo sapien
gacacacagctaccgggaggtggac

SEQ ID NO: 2883998 - DNA, 25 bp, Homo sapien
gacttcctagtttctcagccagaga

SEQ ID NO: 2883999 - DNA, 25 bp, Homo sapien
ttcctaacgggccacaagctggtac

SEQ ID NO: 2884000 - DNA, 25 bp, Homo sapien
tggagctcgggcaatcatgctccct

SEQ ID NO: 2884001 - DNA, 25 bp, Homo sapien
actggccttggtatacccagctcag

SEQ ID NO: 2884002 - DNA, 25 bp, Homo sapien
ggcaggagtcttcagggactgccag

SEQ ID NO: 2884003 - DNA, 25 bp, Homo sapien
gcaggagtcttcagggactgccagc

SEQ ID NO: 2884004 - DNA, 25 bp, Homo sapien
aggcaggagtcttcagggactgcca

SEQ ID NO: 2884005 - DNA, 25 bp, Homo sapien
ccgagggccaagatggttctgtgcc

SEQ ID NO: 2884006 - DNA, 25 bp, Homo sapien
aggccgtctgccctggcggaagcgg

SEQ ID NO: 2884007 - DNA, 25 bp, Homo sapien
tggatccagtgtgcacctgcggctt

SEQ ID NO: 2884008 - DNA, 25 bp, Homo sapien
tgcggcttcctcagcgagcagtaga

SEQ ID NO: 2884009 - DNA, 25 bp, Homo sapien
ctgttggtggtgtcagacatcagag

SEQ ID NO: 2884010 - DNA, 25 bp, Homo sapien
gcctacaggctgagtggagaacaag

SEQ ID NO: 2884011 - DNA, 25 bp, Homo sapien
gcagtaggtaacaggacccagggca

SEQ ID NO: 2884012 - DNA, 25 bp, Homo sapien
agaacaagcttttggagccccccag

SEQ ID NO: 2884013 - DNA, 25 bp, Homo sapien
aggacagttcagactccggctgcca

SEQ ID NO: 2884014 - DNA, 25 bp, Homo sapien
cactccctacaaggacaggcttggg

SEQ ID NO: 2884015 - DNA, 25 bp, Homo sapien
cacaacgctgctgtgggtgactgca

SEQ ID NO: 2884016 - DNA, 25 bp, Homo sapien
actgcagctggtcaccgggcttctg

SEQ ID NO: 2884017 - DNA, 25 bp, Homo sapien
ctgctttgatgcgtctgcccagggc

SEQ ID NO: 2884018 - DNA, 25 bp, Homo sapien
ctttgatgcgtctgcccagggcccc

SEQ ID NO: 2884019 - DNA, 25 bp, Homo sapien
tgctttgatgcgtctgcccagggcc

SEQ ID NO: 2884020 - DNA, 25 bp, Homo sapien
tgcctgctttgatgcgtctgcccag

SEQ ID NO: 2884021 - DNA, 25 bp, Homo sapien
aactcagatgaagggtggacctcag

SEQ ID NO: 2884022 - DNA, 25 bp, Homo sapien
cttaactcagatgaagggtggacct

SEQ ID NO: 2884023 - DNA, 25 bp, Homo sapien
taactcagatgaagggtggacctca

SEQ ID NO: 2884024 - DNA, 25 bp, Homo sapien
ctcagatgaagggtggacctcagcc

SEQ ID NO: 2884025 - DNA, 25 bp, Homo sapien
gacattggatgaggctctctgggcc

SEQ ID NO: 2884026 - DNA, 25 bp, Homo sapien
gaagacattggatgaggctctctgg

SEQ ID NO: 2884027 - DNA, 25 bp, Homo sapien
tggagaagacattggatgaggctct

SEQ ID NO: 2884028 - DNA, 25 bp, Homo sapien
cattggatgaggctctctgggcccg

SEQ ID NO: 2884029 - DNA, 25 bp, Homo sapien
ccagggaggcataggtgtccttcag

SEQ ID NO: 2884030 - DNA, 25 bp, Homo sapien
tcaggtcctccttgtcaatgaagcc

SEQ ID NO: 2884031 - DNA, 25 bp, Homo sapien
atgaagccatctcggttctgatcca

SEQ ID NO: 2884032 - DNA, 25 bp, Homo sapien
gaggcataggtgtccttcaggtcct

SEQ ID NO: 2884033 - DNA, 25 bp, Homo sapien
gtgggcctctgaggcgcgggccctg

SEQ ID NO: 2884034 - DNA, 25 bp, Homo sapien
ctccaagggctctgaggcgttctgc

SEQ ID NO: 2884035 - DNA, 25 bp, Homo sapien
ccctggctccattcgaggaggggcc

SEQ ID NO: 2884036 - DNA, 25 bp, Homo sapien
ggaggacctctgtgttcgcctcctc

SEQ ID NO: 2884037 - DNA, 25 bp, Homo sapien
ccagctcgtcgtccttgacgttggt

SEQ ID NO: 2884038 - DNA, 25 bp, Homo sapien
agctcgtcgtccttgacgttggtct

SEQ ID NO: 2884039 - DNA, 25 bp, Homo sapien
ttctccccaaacaggttcagaaaca

SEQ ID NO: 2884040 - DNA, 25 bp, Homo sapien
gcttctccccaaacaggttcagaaa

SEQ ID NO: 2884041 - DNA, 25 bp, Homo sapien
cgttaagaatggtctcctcggcgtc

SEQ ID NO: 2884042 - DNA, 25 bp, Homo sapien
ccgtccgggtccagcatcttgaagg

SEQ ID NO: 2884043 - DNA, 25 bp, Homo sapien
cagcatcttgaaggcgttaagaatg

SEQ ID NO: 2884044 - DNA, 25 bp, Homo sapien
tttcccgtccgggtccagcatcttg

SEQ ID NO: 2884045 - DNA, 25 bp, Homo sapien
ggccatcacttctgggggagccgct

SEQ ID NO: 2884046 - DNA, 25 bp, Homo sapien
ccggcgcctagcaggagctgaagat

SEQ ID NO: 2884047 - DNA, 25 bp, Homo sapien
aggttacaggccagcgcctggtact

SEQ ID NO: 2884048 - DNA, 25 bp, Homo sapien
gacagagccggaaggaggttacagg

SEQ ID NO: 2884049 - DNA, 25 bp, Homo sapien
aggttgtactcgctcactgcactcc

SEQ ID NO: 2884050 - DNA, 25 bp, Homo sapien
gggccccaggttgtactcgctcact

SEQ ID NO: 2884051 - DNA, 25 bp, Homo sapien
cccaggttgtactcgctcactgcac

SEQ ID NO: 2884052 - DNA, 25 bp, Homo sapien
cagcgcgggctgatgcgggggtgca

SEQ ID NO: 2884053 - DNA, 25 bp, Homo sapien
cgccgtcatcttgtcagcctgggac

SEQ ID NO: 2884054 - DNA, 25 bp, Homo sapien
tccgccgtcatcttgtcagcctggg

SEQ ID NO: 2884055 - DNA, 25 bp, Homo sapien
ctcttccgccgtcatcttgtcagcc

SEQ ID NO: 2884056 - DNA, 25 bp, Homo sapien
ttccgccgtcatcttgtcagcctgg

SEQ ID NO: 2884057 - DNA, 25 bp, Homo sapien
ctccacccagctgaccccgggagcc

SEQ ID NO: 2884058 - DNA, 25 bp, Homo sapien
ctcccctcgtgggcttggcagggaa

SEQ ID NO: 2884059 - DNA, 25 bp, Homo sapien
cctcccctcgtgggcttggcaggga

SEQ ID NO: 2884060 - DNA, 25 bp, Homo sapien
gggtggcccggcattagtctcgccc

SEQ ID NO: 2884061 - DNA, 25 bp, Homo sapien
ccgcccctccggctgggacagacgc

SEQ ID NO: 2884062 - DNA, 25 bp, Homo sapien
ggctccggaccgcacagctgtgagc

SEQ ID NO: 2884063 - DNA, 25 bp, Homo sapien
tgggacagacgctcaggccgcggag

SEQ ID NO: 2884064 - DNA, 25 bp, Homo sapien
agcagcgtcggggaggaccgtgtgg

SEQ ID NO: 2884065 - DNA, 25 bp, Homo sapien
gcagcgtcggggaggaccgtgtggg

SEQ ID NO: 2884066 - DNA, 25 bp, Homo sapien
tctcctccccgtgggtgatcacgta

SEQ ID NO: 2884067 - DNA, 25 bp, Homo sapien
aggttgcccgccacatcgatggagg

SEQ ID NO: 2884068 - DNA, 25 bp, Homo sapien
tagctgagcgccttgtagtccaggt

SEQ ID NO: 2884069 - DNA, 25 bp, Homo sapien
gaggcgaactggaacatctggtcca

SEQ ID NO: 2884070 - DNA, 25 bp, Homo sapien
cgtccaggtttattgacccggctgg

SEQ ID NO: 2884071 - DNA, 25 bp, Homo sapien
agcgtccaggtttattgacccggct

SEQ ID NO: 2884072 - DNA, 25 bp, Homo sapien
tccaagcgtccaggtttattgaccc

SEQ ID NO: 2884073 - DNA, 25 bp, Homo sapien
caagcgtccaggtttattgacccgg

SEQ ID NO: 2884074 - DNA, 25 bp, Homo sapien
cccgcggaagaacctgtctggcagg

SEQ ID NO: 2884075 - DNA, 25 bp, Homo sapien
gagggacccacagcagagaggccat

SEQ ID NO: 2884076 - DNA, 25 bp, Homo sapien
gcggaagaacctgtctggcaggccc

SEQ ID NO: 2884077 - DNA, 25 bp, Homo sapien
cggggcggtggagggacccacagca

SEQ ID NO: 2884078 - DNA, 25 bp, Homo sapien
gcttgaggatgcattcacgttgtca

SEQ ID NO: 2884079 - DNA, 25 bp, Homo sapien
ggcgctgtcccgcatgggctatcag

SEQ ID NO: 2884080 - DNA, 25 bp, Homo sapien
tctgggtgtgccgactcagtcccgg

SEQ ID NO: 2884081 - DNA, 25 bp, Homo sapien
tctctgtaaaaggatgggccttcca

SEQ ID NO: 2884082 - DNA, 25 bp, Homo sapien
gagccgagcgccgcgtcgggggcgc

SEQ ID NO: 2884083 - DNA, 25 bp, Homo sapien
tgcgggcgagcaaggcgcacgcggg

SEQ ID NO: 2884084 - DNA, 25 bp, Homo sapien
gagcaaggcgcacgcggggtccgcg

SEQ ID NO: 2884085 - DNA, 25 bp, Homo sapien
ggggctgcgggcgagcaaggcgcac

SEQ ID NO: 2884086 - DNA, 25 bp, Homo sapien
ctgggctggggtcgcgaccttccca

SEQ ID NO: 2884087 - DNA, 25 bp, Homo sapien
ctgggctggggtcgcgaccttccca

SEQ ID NO: 2884088 - DNA, 25 bp, Homo sapien
gctcctcgattttgccacagagccg

SEQ ID NO: 2884089 - DNA, 25 bp, Homo sapien
gccacagagccgctgtagtctagag

SEQ ID NO: 2884090 - DNA, 25 bp, Homo sapien
agagccgctgtagtctagagagtgc

SEQ ID NO: 2884091 - DNA, 25 bp, Homo sapien
cgattttgccacagagccgctgtag

SEQ ID NO: 2884092 - DNA, 25 bp, Homo sapien
caggccacacaggacccacaaggcc

SEQ ID NO: 2884093 - DNA, 25 bp, Homo sapien
acacaggacccacaaggccacagcc

SEQ ID NO: 2884094 - DNA, 25 bp, Homo sapien
cacacaggacccacaaggccacagc

SEQ ID NO: 2884095 - DNA, 25 bp, Homo sapien
aggccacacaggacccacaaggcca

SEQ ID NO: 2884096 - DNA, 25 bp, Homo sapien
cagaccacacaggacccatgaagcc

SEQ ID NO: 2884097 - DNA, 25 bp, Homo sapien
ccacacaggacccatgaagccacag

SEQ ID NO: 2884098 - DNA, 25 bp, Homo sapien
cacaggacccatgaagccacagccc

SEQ ID NO: 2884099 - DNA, 25 bp, Homo sapien
caggacccatgaagccacagccccc

SEQ ID NO: 2884100 - DNA, 25 bp, Homo sapien
aggaagcaaatgcggccgaacggcc

SEQ ID NO: 2884101 - DNA, 25 bp, Homo sapien
gcaaatgcggccgaacggccacgag

SEQ ID NO: 2884102 - DNA, 25 bp, Homo sapien
aaggagaggaagcaaatgcggccga

SEQ ID NO: 2884103 - DNA, 25 bp, Homo sapien
aaatgcggccgaacggccacgagtg

SEQ ID NO: 2884104 - DNA, 25 bp, Homo sapien
agcaaggctcctgtccggagccgct

SEQ ID NO: 2884105 - DNA, 25 bp, Homo sapien
gccgctcacaggtgagtccaggatg

SEQ ID NO: 2884106 - DNA, 25 bp, Homo sapien
cggagccgctcacaggtgagtccag

SEQ ID NO: 2884107 - DNA, 25 bp, Homo sapien
tgtccggagccgctcacaggtgagt

SEQ ID NO: 2884108 - DNA, 25 bp, Homo sapien
agcaccgacgcccagttctcacact

SEQ ID NO: 2884109 - DNA, 25 bp, Homo sapien
agcaccgacgcccagttctcacact

SEQ ID NO: 2884110 - DNA, 25 bp, Homo sapien
ccagttctcacactcgcagtgtcca

SEQ ID NO: 2884111 - DNA, 25 bp, Homo sapien
agttctcacactcgcagtgtccaca

SEQ ID NO: 2884112 - DNA, 25 bp, Homo sapien
cagttctcacactcgcagtgtccac

SEQ ID NO: 2884113 - DNA, 25 bp, Homo sapien
agcaccgacgcccagttctcacact

SEQ ID NO: 2884114 - DNA, 25 bp, Homo sapien
agttctcacactcgcagtgtccaca

SEQ ID NO: 2884115 - DNA, 25 bp, Homo sapien
cccagcaccgacacccagttctcac

SEQ ID NO: 2884116 - DNA, 25 bp, Homo sapien
ccagttctcacactcgcagtgtcca

SEQ ID NO: 2884117 - DNA, 25 bp, Homo sapien
accgacgcccagttctcacacagtg

SEQ ID NO: 2884118 - DNA, 25 bp, Homo sapien
cagttctcacactcacagtgtctag

SEQ ID NO: 2884119 - DNA, 25 bp, Homo sapien
ttctcacactcgcagtgtccacagg

SEQ ID NO: 2884120 - DNA, 25 bp, Homo sapien
tgtctagagggtcccagcaccgacg

SEQ ID NO: 2884121 - DNA, 25 bp, Homo sapien
tgcttggcatactccggcagcaggg

SEQ ID NO: 2884122 - DNA, 25 bp, Homo sapien
gccacatcggcgtcctcatgaggcg

SEQ ID NO: 2884123 - DNA, 25 bp, Homo sapien
tcatgaggcgacagcacgtccaggg

SEQ ID NO: 2884124 - DNA, 25 bp, Homo sapien
cctcgtgcttggcatactccggcag

SEQ ID NO: 2884125 - DNA, 25 bp, Homo sapien
cctccccagcggcacacaggtgctg

SEQ ID NO: 2884126 - DNA, 25 bp, Homo sapien
tccccagcggcacacaggtgctgtg

SEQ ID NO: 2884127 - DNA, 25 bp, Homo sapien
gcggcacacaggtgctgtgtgccac

SEQ ID NO: 2884128 - DNA, 25 bp, Homo sapien
cagcggcacacaggtgctgtgtgcc

SEQ ID NO: 2884129 - DNA, 25 bp, Homo sapien
tgcatacacacagatgctgctctca

SEQ ID NO: 2884130 - DNA, 25 bp, Homo sapien
gtcccacgccccgtgtgtcctgcac

SEQ ID NO: 2884131 - DNA, 25 bp, Homo sapien
tacacacagatgctgctctcacaca

SEQ ID NO: 2884132 - DNA, 25 bp, Homo sapien
agacaccgtcccacgccccgtgtgt

SEQ ID NO: 2884133 - DNA, 25 bp, Homo sapien
aggaaaaacgtatcatcctgaacac

SEQ ID NO: 2884134 - DNA, 25 bp, Homo sapien
tcctgaacactaagaggcagcggct

SEQ ID NO: 2884135 - DNA, 25 bp, Homo sapien
aaagcgaaggatgatattaaggaaa

SEQ ID NO: 2884136 - DNA, 25 bp, Homo sapien
gcagcggctgttctctgcgtaagga

SEQ ID NO: 2884137 - DNA, 25 bp, Homo sapien
ctgagtgtggacccggcgcggacgg

SEQ ID NO: 2884138 - DNA, 25 bp, Homo sapien
tgagtgtggacccggcgcggacggg

SEQ ID NO: 2884139 - DNA, 25 bp, Homo sapien
atgacgcgagtgtggacccagcgca

SEQ ID NO: 2884140 - DNA, 25 bp, Homo sapien
gacgggcgatgactgagtgtggacc

SEQ ID NO: 2884141 - DNA, 25 bp, Homo sapien
tggcgatgtcgcgagtgtggacccg

SEQ ID NO: 2884142 - DNA, 25 bp, Homo sapien
ggcgatgactgagtgtggacccggc

SEQ ID NO: 2884143 - DNA, 25 bp, Homo sapien
ctgccctgagtctttctgccggggc

SEQ ID NO: 2884144 - DNA, 25 bp, Homo sapien
gagtctttctgccggggctctgcca

SEQ ID NO: 2884145 - DNA, 25 bp, Homo sapien
ccctgagtctttctgccggggctct

SEQ ID NO: 2884146 - DNA, 25 bp, Homo sapien
agtctttctgccggggctctgccat

SEQ ID NO: 2884147 - DNA, 25 bp, Homo sapien
ctctcgtcccaaggccacgtgggcc

SEQ ID NO: 2884148 - DNA, 25 bp, Homo sapien
tcgctctcgtcccaaggccacgtgg

SEQ ID NO: 2884149 - DNA, 25 bp, Homo sapien
tcttcgctctcgtcccaaggccacg

SEQ ID NO: 2884150 - DNA, 25 bp, Homo sapien
gctctcgtcccaaggccacgtgggc

SEQ ID NO: 2884151 - DNA, 25 bp, Homo sapien
cgccttctggtccatggcccccaca

SEQ ID NO: 2884152 - DNA, 25 bp, Homo sapien
tccgccttctggtccatggccccca

SEQ ID NO: 2884153 - DNA, 25 bp, Homo sapien
ccgtggagcttcaccttccctgcct

SEQ ID NO: 2884154 - DNA, 25 bp, Homo sapien
ctgtccaccagggtgctccgtggag

SEQ ID NO: 2884155 - DNA, 25 bp, Homo sapien
gtccgcaatacgcacctcacacggc

SEQ ID NO: 2884156 - DNA, 25 bp, Homo sapien
cgcggccggcggtccgcaatacgca

SEQ ID NO: 2884157 - DNA, 25 bp, Homo sapien
ccggcggtccgcaatacgcacctca

SEQ ID NO: 2884158 - DNA, 25 bp, Homo sapien
ggcggtccgcaatacgcacctcaca

SEQ ID NO: 2884159 - DNA, 25 bp, Homo sapien
cttcggcagcccacggagccacagc

SEQ ID NO: 2884160 - DNA, 25 bp, Homo sapien
gcagcccacggagccacagcgcaga

SEQ ID NO: 2884161 - DNA, 25 bp, Homo sapien
cggcagcccacggagccacagcgca

SEQ ID NO: 2884162 - DNA, 25 bp, Homo sapien
agcccacggagccacagcgcagagc

SEQ ID NO: 2884163 - DNA, 25 bp, Homo sapien
caaataagagcagaacccacagcag

SEQ ID NO: 2884164 - DNA, 25 bp, Homo sapien
gggacgagcgctgaggctggacagg

SEQ ID NO: 2884165 - DNA, 25 bp, Homo sapien
gcagcgactcgggtttcccctgggc

SEQ ID NO: 2884166 - DNA, 25 bp, Homo sapien
ggacgagcgctgaggctggacagga

SEQ ID NO: 2884167 - DNA, 25 bp, Homo sapien
cactgagcctggtgttgggctcagt

SEQ ID NO: 2884168 - DNA, 25 bp, Homo sapien
agacgtgcaccaagggccccggcgt

SEQ ID NO: 2884169 - DNA, 25 bp, Homo sapien
gcgtgggcactgagcctggtgttgg

SEQ ID NO: 2884170 - DNA, 25 bp, Homo sapien
aagggccccggcgtgggcactgagc

SEQ ID NO: 2884171 - DNA, 25 bp, Homo sapien
cccagaggaggggtgaatttcaggg

SEQ ID NO: 2884172 - DNA, 25 bp, Homo sapien
aggcccaaggcatcggagacagcag

SEQ ID NO: 2884173 - DNA, 25 bp, Homo sapien
ggctggtctcggtgcctgtcgggcg

SEQ ID NO: 2884174 - DNA, 25 bp, Homo sapien
ctcggtgcctgtcgggcgtctctga

SEQ ID NO: 2884175 - DNA, 25 bp, Homo sapien
ccaggcccaaggcatcggagacagc

SEQ ID NO: 2884176 - DNA, 25 bp, Homo sapien
tggggtccctgctacattgtgacgc

SEQ ID NO: 2884177 - DNA, 25 bp, Homo sapien
cctggggtccctgctacattgtgac

SEQ ID NO: 2884178 - DNA, 25 bp, Homo sapien
gacgcctggggtccctgctacattg

SEQ ID NO: 2884179 - DNA, 25 bp, Homo sapien
cgcctggggtccctgctacattgtg

SEQ ID NO: 2884180 - DNA, 25 bp, Homo sapien
gtgtgactgccacaactccgccatt

SEQ ID NO: 2884181 - DNA, 25 bp, Homo sapien
gcgtcatggatgtgtgactgccaca

SEQ ID NO: 2884182 - DNA, 25 bp, Homo sapien
aactccgccattcctactggaactt

SEQ ID NO: 2884183 - DNA, 25 bp, Homo sapien
tcacttcgcgtcatggatgtgtgac

SEQ ID NO: 2884184 - DNA, 25 bp, Homo sapien
ctccgctagacgtccgcgtgtccgt

SEQ ID NO: 2884185 - DNA, 25 bp, Homo sapien
tcccacgcgacgctgcctcctggct

SEQ ID NO: 2884186 - DNA, 25 bp, Homo sapien
tccctctgccggggcatggaggctt

SEQ ID NO: 2884187 - DNA, 25 bp, Homo sapien
tcctggctccgcacgcggactcgct

SEQ ID NO: 2884188 - DNA, 25 bp, Homo sapien
tgacgaccacgcccactcgggaggg

SEQ ID NO: 2884189 - DNA, 25 bp, Homo sapien
gcgccctgacgaccacgcccactcg

SEQ ID NO: 2884190 - DNA, 25 bp, Homo sapien
ccaccccgcgccctgacgaccacgc

SEQ ID NO: 2884191 - DNA, 25 bp, Homo sapien
gagccccgccttaccaacctgagga

SEQ ID NO: 2884192 - DNA, 25 bp, Homo sapien
gagacttccaaagtcaaatcctccc

SEQ ID NO: 2884193 - DNA, 25 bp, Homo sapien
tgtgaggttcgggagacctgatgca

SEQ ID NO: 2884194 - DNA, 25 bp, Homo sapien
agagacttccaaagtcaaatcctcc

SEQ ID NO: 2884195 - DNA, 25 bp, Homo sapien
ggggctgtgaggttcgggagacctg

SEQ ID NO: 2884196 - DNA, 25 bp, Homo sapien
atgcgtgacaccacttccgtcatca

SEQ ID NO: 2884197 - DNA, 25 bp, Homo sapien
cagtcccacgaagcagctgagagct

SEQ ID NO: 2884198 - DNA, 25 bp, Homo sapien
gcagcaggcacgagtttccctcagt

SEQ ID NO: 2884199 - DNA, 25 bp, Homo sapien
aagccgcgacccaaactgctgcatg

SEQ ID NO: 2884200 - DNA, 25 bp, Homo sapien
gccggcgcggcttccacggtgtctc

SEQ ID NO: 2884201 - DNA, 25 bp, Homo sapien
gggccggcgcggcttccacggtgtc

SEQ ID NO: 2884202 - DNA, 25 bp, Homo sapien
ggccggcgcggcttccacggtgtct

SEQ ID NO: 2884203 - DNA, 25 bp, Homo sapien
gcaggatccccgagctgtctgtctt

SEQ ID NO: 2884204 - DNA, 25 bp, Homo sapien
gaggcaggatccccgagctgtctgt

SEQ ID NO: 2884205 - DNA, 25 bp, Homo sapien
ggcaggatccccgagctgtctgtct

SEQ ID NO: 2884206 - DNA, 25 bp, Homo sapien
agagaggcaggatccccgagctgtc

SEQ ID NO: 2884207 - DNA, 25 bp, Homo sapien
tgaggactgaggagggtccataaag

SEQ ID NO: 2884208 - DNA, 25 bp, Homo sapien
tctcctcctgcagtgaggactgagg

SEQ ID NO: 2884209 - DNA, 25 bp, Homo sapien
ctcccccgcactggcttctctctgt

SEQ ID NO: 2884210 - DNA, 25 bp, Homo sapien
ttctctctgtgcccaacaccccctc

SEQ ID NO: 2884211 - DNA, 25 bp, Homo sapien
tgatgtgggcgttgatgtcccacag

SEQ ID NO: 2884212 - DNA, 25 bp, Homo sapien
tgtgcagacactcggtcaccgtggt

SEQ ID NO: 2884213 - DNA, 25 bp, Homo sapien
aggcggcaggtgatgtgggcgttga

SEQ ID NO: 2884214 - DNA, 25 bp, Homo sapien
tggcgtcgatgaggtacccgctgca

SEQ ID NO: 2884215 - DNA, 25 bp, Homo sapien
taaaagcgtgtggtaacacaaaagc

SEQ ID NO: 2884216 - DNA, 25 bp, Homo sapien
ctaaaagcgtgtggtaacacaaaag

SEQ ID NO: 2884217 - DNA, 25 bp, Homo sapien
aagcgtgtggtaacacaaaagccaa

SEQ ID NO: 2884218 - DNA, 25 bp, Homo sapien
aaagcgtgtggtaacacaaaagcca

SEQ ID NO: 2884219 - DNA, 25 bp, Homo sapien
ttcaagatcgtctctgcccctggtc

SEQ ID NO: 2884220 - DNA, 25 bp, Homo sapien
cccacaggacctttagcgtgaaatg

SEQ ID NO: 2884221 - DNA, 25 bp, Homo sapien
tgagcactgtcacagcggctactgg

SEQ ID NO: 2884222 - DNA, 25 bp, Homo sapien
tgtgtttcgctctcctaagcgaggc

SEQ ID NO: 2884223 - DNA, 25 bp, Homo sapien
tcaggttagcataagagccgagcct

SEQ ID NO: 2884224 - DNA, 25 bp, Homo sapien
tcaagagacgcacacagcggtcgtc

SEQ ID NO: 2884225 - DNA, 25 bp, Homo sapien
tcaggtgtgaggacgcacatcaggt

SEQ ID NO: 2884226 - DNA, 25 bp, Homo sapien
cacttagaaaaacactcaggtccag

SEQ ID NO: 2884227 - DNA, 25 bp, Homo sapien
gacagtatcttctacgtacaactag

SEQ ID NO: 2884228 - DNA, 25 bp, Homo sapien
gccgttctggtctcaggagcaatga

SEQ ID NO: 2884229 - DNA, 25 bp, Homo sapien
tgaacacgggcgtctctgagctcgt

SEQ ID NO: 2884230 - DNA, 25 bp, Homo sapien
tgtgttaggagagcgtctagagcca

SEQ ID NO: 2884231 - DNA, 25 bp, Homo sapien
ctggtggatcacaatcctgcaggtg

SEQ ID NO: 2884232 - DNA, 25 bp, Homo sapien
tggctctggtggatcacaatcctgc

SEQ ID NO: 2884233 - DNA, 25 bp, Homo sapien
ggtggctctggtggatcacaatcct

SEQ ID NO: 2884234 - DNA, 25 bp, Homo sapien
gctctggtggatcacaatcctgcag

SEQ ID NO: 2884235 - DNA, 25 bp, Homo sapien
ctgctgacgtccaggcaagagttgc

SEQ ID NO: 2884236 - DNA, 25 bp, Homo sapien
catggtacggggagcatttcccttc

SEQ ID NO: 2884237 - DNA, 25 bp, Homo sapien
tccaggcaagagttgccttctccag

SEQ ID NO: 2884238 - DNA, 25 bp, Homo sapien
atctgaacgacctcccaaatctgtg

SEQ ID NO: 2884239 - DNA, 25 bp, Homo sapien
gtcccgtgcgctcaggggacaccgc

SEQ ID NO: 2884240 - DNA, 25 bp, Homo sapien
tgccggacaccccagattccccacg

SEQ ID NO: 2884241 - DNA, 25 bp, Homo sapien
tcccgtgcgctcaggggacaccgcc

SEQ ID NO: 2884242 - DNA, 25 bp, Homo sapien
gcttctgtctgccggacaccccaga

SEQ ID NO: 2884243 - DNA, 25 bp, Homo sapien
aatttgtaaacaatatcttgcatgg

SEQ ID NO: 2884244 - DNA, 25 bp, Homo sapien
aatatcttgcatggttctgtcatga

SEQ ID NO: 2884245 - DNA, 25 bp, Homo sapien
aacaatatcttgcatggttctgtca

SEQ ID NO: 2884246 - DNA, 25 bp, Homo sapien
gtaaacaatatcttgcatggttctg

SEQ ID NO: 2884247 - DNA, 25 bp, Homo sapien
gcccaatttgtgatagaactccctc

SEQ ID NO: 2884248 - DNA, 25 bp, Homo sapien
caatttgtgatagaactccctctgc

SEQ ID NO: 2884249 - DNA, 25 bp, Homo sapien
cccaatttgtgatagaactccctct

SEQ ID NO: 2884250 - DNA, 25 bp, Homo sapien
ccaatttgtgatagaactccctctg

SEQ ID NO: 2884251 - DNA, 25 bp, Homo sapien
cattccgatgggaatctaagtgctg

SEQ ID NO: 2884252 - DNA, 25 bp, Homo sapien
attccgatgggaatctaagtgctgt

SEQ ID NO: 2884253 - DNA, 25 bp, Homo sapien
ttccgatgggaatctaagtgctgtt

SEQ ID NO: 2884254 - DNA, 25 bp, Homo sapien
tccgatgggaatctaagtgctgttt

SEQ ID NO: 2884255 - DNA, 25 bp, Homo sapien
ttaagaaaaggcctcatgcagggga

SEQ ID NO: 2884256 - DNA, 25 bp, Homo sapien
taagaaaaggcctcatgcaggggat

SEQ ID NO: 2884257 - DNA, 25 bp, Homo sapien
ctcatgcaggggattcccggggctt

SEQ ID NO: 2884258 - DNA, 25 bp, Homo sapien
gtgggaggggccggcagacagcgcc

SEQ ID NO: 2884259 - DNA, 25 bp, Homo sapien
tcccgtgagtgcgtgtgggaggggc

SEQ ID NO: 2884260 - DNA, 25 bp, Homo sapien
ttcccccacgttctcccgtgagtgc

SEQ ID NO: 2884261 - DNA, 25 bp, Homo sapien
ccgtgagtgcgtgtgggaggggccg

SEQ ID NO: 2884262 - DNA, 25 bp, Homo sapien
ccacgttcccactggtaccaggagt

SEQ ID NO: 2884263 - DNA, 25 bp, Homo sapien
tgaggaggaacgccttgaaccctaa

SEQ ID NO: 2884264 - DNA, 25 bp, Homo sapien
ggagtgaggaggaacgccttgaacc

SEQ ID NO: 2884265 - DNA, 25 bp, Homo sapien
cccacgttcccactggtaccaggag

SEQ ID NO: 2884266 - DNA, 25 bp, Homo sapien
ttctgacaggactgcttggttccca

SEQ ID NO: 2884267 - DNA, 25 bp, Homo sapien
ttggttcccagactcgcttcctaac

SEQ ID NO: 2884268 - DNA, 25 bp, Homo sapien
ccccggagcggagtaagcgtcaaag

SEQ ID NO: 2884269 - DNA, 25 bp, Homo sapien
gaaagccgtccgcaaagtgtctgca

SEQ ID NO: 2884270 - DNA, 25 bp, Homo sapien
acaaacagaacatagcgcaccatga

SEQ ID NO: 2884271 - DNA, 25 bp, Homo sapien
cttttagcacaaacagaacatagcg

SEQ ID NO: 2884272 - DNA, 25 bp, Homo sapien
gaacatagcgcaccatgaaatccaa

SEQ ID NO: 2884273 - DNA, 25 bp, Homo sapien
tagcacaaacagaacatagcgcacc

SEQ ID NO: 2884274 - DNA, 25 bp, Homo sapien
ctctttgtttgaactgtcgtctgct

SEQ ID NO: 2884275 - DNA, 25 bp, Homo sapien
ctgctcgtcgctgcggtggtagtcg

SEQ ID NO: 2884276 - DNA, 25 bp, Homo sapien
cgcggcctctttgtttgaactgtcg

SEQ ID NO: 2884277 - DNA, 25 bp, Homo sapien
gtttgaactgtcgtctgctttggtt

SEQ ID NO: 2884278 - DNA, 25 bp, Homo sapien
tgcagcgacccccgggccccgccca

SEQ ID NO: 2884279 - DNA, 25 bp, Homo sapien
gcgatgttagtacaagagaatcggg

SEQ ID NO: 2884280 - DNA, 25 bp, Homo sapien
aaggcctccgtaacacagctgaaac

SEQ ID NO: 2884281 - DNA, 25 bp, Homo sapien
gcagagaccaacagcaactgtagcg

SEQ ID NO: 2884282 - DNA, 25 bp, Homo sapien
gggggttagagcgaaaacacactga

SEQ ID NO: 2884283 - DNA, 25 bp, Homo sapien
ctcatcacgaagttatagacgcgga

SEQ ID NO: 2884284 - DNA, 25 bp, Homo sapien
aatctggaacaaaccctcggatgac

SEQ ID NO: 2884285 - DNA, 25 bp, Homo sapien
ttcatccgagtgactgaggagggct

SEQ ID NO: 2884286 - DNA, 25 bp, Homo sapien
cggacgtggcgaagcacaaatccaa

SEQ ID NO: 2884287 - DNA, 25 bp, Homo sapien
ggcctgcgcccgtcagatgatggag

SEQ ID NO: 2884288 - DNA, 25 bp, Homo sapien
gctgaacaaacctagagctggagcc

SEQ ID NO: 2884289 - DNA, 25 bp, Homo sapien
ctgctctgagttggctgctgaacaa

SEQ ID NO: 2884290 - DNA, 25 bp, Homo sapien
tggagaagaggtcggctgtgaagcc

SEQ ID NO: 2884291 - DNA, 25 bp, Homo sapien
caccatcttccaggaggatccccat

SEQ ID NO: 2884292 - DNA, 25 bp, Homo sapien
ctgtgcagggggcaccatcttccag

SEQ ID NO: 2884293 - DNA, 25 bp, Homo sapien
ggggcaccatcttccaggaggatcc

SEQ ID NO: 2884294 - DNA, 25 bp, Homo sapien
ggcaccatcttccaggaggatcccc

SEQ ID NO: 2884295 - DNA, 25 bp, Homo sapien
ttgtggttcgacagaggacaaagcc

SEQ ID NO: 2884296 - DNA, 25 bp, Homo sapien
gacaaagcctactgaagtgagagaa

SEQ ID NO: 2884297 - DNA, 25 bp, Homo sapien
catcagggacgtgttcagaagagcc

SEQ ID NO: 2884298 - DNA, 25 bp, Homo sapien
ggagggcactggcaatcccgaggct

SEQ ID NO: 2884299 - DNA, 25 bp, Homo sapien
ctacacatcggcctgcctgggaaca

SEQ ID NO: 2884300 - DNA, 25 bp, Homo sapien
ctcgaaatgcaactctgattgtaaa

SEQ ID NO: 2884301 - DNA, 25 bp, Homo sapien
ctctgattgtaaagagggcactgca

SEQ ID NO: 2884302 - DNA, 25 bp, Homo sapien
agacctgtcgctgtctatggctaca

SEQ ID NO: 2884303 - DNA, 25 bp, Homo sapien
tattatggcacagtttacacacacc

SEQ ID NO: 2884304 - DNA, 25 bp, Homo sapien
gaaaacgcagacacacatgggcggg

SEQ ID NO: 2884305 - DNA, 25 bp, Homo sapien
gatcatcgccatggcagtctcagat

SEQ ID NO: 2884306 - DNA, 25 bp, Homo sapien
cagatttgcatacatacaggaggtg

SEQ ID NO: 2884307 - DNA, 25 bp, Homo sapien
tgaggcagcggggtctgcagtgcat

SEQ ID NO: 2884308 - DNA, 25 bp, Homo sapien
aggcagccgccgtctccgactcagg

SEQ ID NO: 2884309 - DNA, 25 bp, Homo sapien
tgcacagatgaacgcgggcctgcat

SEQ ID NO: 2884310 - DNA, 25 bp, Homo sapien
ccgccgtctccgactcagggaacag

SEQ ID NO: 2884311 - DNA, 25 bp, Homo sapien
cacagacttacagtgactttggact

SEQ ID NO: 2884312 - DNA, 25 bp, Homo sapien
tggagtttggcggaagaagtgagaa

SEQ ID NO: 2884313 - DNA, 25 bp, Homo sapien
gggcacagacttacagtgactttgg

SEQ ID NO: 2884314 - DNA, 25 bp, Homo sapien
gcgccgggccaactttggatttcta

SEQ ID NO: 2884315 - DNA, 25 bp, Homo sapien
gatcagacatctgctttgacttcaa

SEQ ID NO: 2884316 - DNA, 25 bp, Homo sapien
ctttttgagatcagacatctgcttt

SEQ ID NO: 2884317 - DNA, 25 bp, Homo sapien
tcagacatctgctttgacttcaaca

SEQ ID NO: 2884318 - DNA, 25 bp, Homo sapien
tgagatcagacatctgctttgactt

SEQ ID NO: 2884319 - DNA, 25 bp, Homo sapien
cagcccgcgcagtttgctgctgtta

SEQ ID NO: 2884320 - DNA, 25 bp, Homo sapien
tgctgttacactccaggcagatgct

SEQ ID NO: 2884321 - DNA, 25 bp, Homo sapien
gtttgctgctgttacactccaggca

SEQ ID NO: 2884322 - DNA, 25 bp, Homo sapien
cttcagcccgcgcagtttgctgctg

SEQ ID NO: 2884323 - DNA, 25 bp, Homo sapien
ttcagatgcaagacggtcgcctggg

SEQ ID NO: 2884324 - DNA, 25 bp, Homo sapien
ggcgatgaacttcttcagatgcaag

SEQ ID NO: 2884325 - DNA, 25 bp, Homo sapien
ctcgttaaaggatgaaaggttgagt

SEQ ID NO: 2884326 - DNA, 25 bp, Homo sapien
gttgagttttttggcgatgaacttc

SEQ ID NO: 2884327 - DNA, 25 bp, Homo sapien
tttccagtgcgccatgctgcagagc

SEQ ID NO: 2884328 - DNA, 25 bp, Homo sapien
gagtcgcacggcctacagccttttc

SEQ ID NO: 2884329 - DNA, 25 bp, Homo sapien
agtccagagcggatgtcaggtcgcc

SEQ ID NO: 2884330 - DNA, 25 bp, Homo sapien
gggcttctctacttagtaacaggga

SEQ ID NO: 2884331 - DNA, 25 bp, Homo sapien
gatctcctcgttgcataaaatgtcc

SEQ ID NO: 2884332 - DNA, 25 bp, Homo sapien
cttgaatctccacctagtgacaacc

SEQ ID NO: 2884333 - DNA, 25 bp, Homo sapien
tccacctagtgacaaccacgaactt

SEQ ID NO: 2884334 - DNA, 25 bp, Homo sapien
cacgaacttgagtgtgtggtccttg

SEQ ID NO: 2884335 - DNA, 25 bp, Homo sapien
ccatcttgggtctgtagtgcagcag

SEQ ID NO: 2884336 - DNA, 25 bp, Homo sapien
agtccatcttgggtctgtagtgcag

SEQ ID NO: 2884337 - DNA, 25 bp, Homo sapien
agcaagtccatcttgggtctgtagt

SEQ ID NO: 2884338 - DNA, 25 bp, Homo sapien
atcttgggtctgtagtgcagcagga

SEQ ID NO: 2884339 - DNA, 25 bp, Homo sapien
gagcatcactctccctgcaaggctg

SEQ ID NO: 2884340 - DNA, 25 bp, Homo sapien
tgtcagaaggtgactcagaaccgtg

SEQ ID NO: 2884341 - DNA, 25 bp, Homo sapien
cagaaccgtgttgcctggagcatca

SEQ ID NO: 2884342 - DNA, 25 bp, Homo sapien
aggcaatgttcttaagcgcggcggc

SEQ ID NO: 2884343 - DNA, 25 bp, Homo sapien
tcaataacttaggaaggattcaata

SEQ ID NO: 2884344 - DNA, 25 bp, Homo sapien
acttgaggcttatcatgaaacctaa

SEQ ID NO: 2884345 - DNA, 25 bp, Homo sapien
gattcaataaaagtccaactacact

SEQ ID NO: 2884346 - DNA, 25 bp, Homo sapien
tcataatgttaatggaaacctcttt

SEQ ID NO: 2884347 - DNA, 25 bp, Homo sapien
aaacggcggcactcaacaatttggg

SEQ ID NO: 2884348 - DNA, 25 bp, Homo sapien
catgtcagaaatcccgacgtggcgt

SEQ ID NO: 2884349 - DNA, 25 bp, Homo sapien
tgagtaactcaaaccgtcctgggag

SEQ ID NO: 2884350 - DNA, 25 bp, Homo sapien
taacggtgcaaccaactgaggctga

SEQ ID NO: 2884351 - DNA, 25 bp, Homo sapien
taacacacggttgtacagaatgctt

SEQ ID NO: 2884352 - DNA, 25 bp, Homo sapien
caggaaaatgcctaagttctaacgt

SEQ ID NO: 2884353 - DNA, 25 bp, Homo sapien
ttcttattccgccacacaggaaaat

SEQ ID NO: 2884354 - DNA, 25 bp, Homo sapien
aaaactgcactgtgataacacacgg

SEQ ID NO: 2884355 - DNA, 25 bp, Homo sapien
taacgcggttacaaaagcagggtca

SEQ ID NO: 2884356 - DNA, 25 bp, Homo sapien
gcctgtaaataaagctggaccactg

SEQ ID NO: 2884357 - DNA, 25 bp, Homo sapien
tccaacgactaaggctgcaaggtca

SEQ ID NO: 2884358 - DNA, 25 bp, Homo sapien
catgaaaactgcatcggtgagaccg

SEQ ID NO: 2884359 - DNA, 25 bp, Homo sapien
aaccaaacagctgaatgtacatatt

SEQ ID NO: 2884360 - DNA, 25 bp, Homo sapien
tgaggtggccccacagcgtggcccg

SEQ ID NO: 2884361 - DNA, 25 bp, Homo sapien
ggtggccccacagcgtggcccgagg

SEQ ID NO: 2884362 - DNA, 25 bp, Homo sapien
aggtggccccacagcgtggcccgag

SEQ ID NO: 2884363 - DNA, 25 bp, Homo sapien
ggccccacagcgtggcccgaggcat

SEQ ID NO: 2884364 - DNA, 25 bp, Homo sapien
taaacattcacgtacaacgtgggac

SEQ ID NO: 2884365 - DNA, 25 bp, Homo sapien
ccctttgaatcgctgtgaacactgt

SEQ ID NO: 2884366 - DNA, 25 bp, Homo sapien
gcagctccgctcttgtggtctgagg

SEQ ID NO: 2884367 - DNA, 25 bp, Homo sapien
ggttggcttgtacccagaacgtcca

SEQ ID NO: 2884368 - DNA, 25 bp, Homo sapien
ctgtcccgtacaaattatggtatca

SEQ ID NO: 2884369 - DNA, 25 bp, Homo sapien
tgtggtggcgcagtaatgacttcct

SEQ ID NO: 2884370 - DNA, 25 bp, Homo sapien
cattgatcatgttaaggtcatgtga

SEQ ID NO: 2884371 - DNA, 25 bp, Homo sapien
tgtgatttagctatgtgcactaaac

SEQ ID NO: 2884372 - DNA, 25 bp, Homo sapien
ccaacattgctttcgtctgggaaaa

SEQ ID NO: 2884373 - DNA, 25 bp, Homo sapien
ccatgggagtggacatttacacgga

SEQ ID NO: 2884374 - DNA, 25 bp, Homo sapien
tcgtctgccgtacgctgctggtaaa

SEQ ID NO: 2884375 - DNA, 25 bp, Homo sapien
tttacacggaggctacgcacatctc

SEQ ID NO: 2884376 - DNA, 25 bp, Homo sapien
ggtctgagcgtacacatatgtagca

SEQ ID NO: 2884377 - DNA, 25 bp, Homo sapien
cagttgacacacctatgggaatcag

SEQ ID NO: 2884378 - DNA, 25 bp, Homo sapien
ggctgcctgagtggtccatccaata

SEQ ID NO: 2884379 - DNA, 25 bp, Homo sapien
gccgcctgaagcaaatcgagacatt

SEQ ID NO: 2884380 - DNA, 25 bp, Homo sapien
cttgtgttccagcgattcgcctgct

SEQ ID NO: 2884381 - DNA, 25 bp, Homo sapien
tatgcccagcctaagtcaattaagt

SEQ ID NO: 2884382 - DNA, 25 bp, Homo sapien
gcctaagtcaattaagtcaagtcta

SEQ ID NO: 2884383 - DNA, 25 bp, Homo sapien
ttaagtcaagtctaagactgaacct

SEQ ID NO: 2884384 - DNA, 25 bp, Homo sapien
tagactgcaatactaacgaccgacg

SEQ ID NO: 2884385 - DNA, 25 bp, Homo sapien
aagtctccacgtgtttcgggccagg

SEQ ID NO: 2884386 - DNA, 25 bp, Homo sapien
gagttttatcttgacaggcgccgcc

SEQ ID NO: 2884387 - DNA, 25 bp, Homo sapien
gacagggcgtcctctcgtagaacct

SEQ ID NO: 2884388 - DNA, 25 bp, Homo sapien
aggcaccggacgctggagaccctgc

SEQ ID NO: 2884389 - DNA, 25 bp, Homo sapien
cacggccgtgttcacttctaaacta

SEQ ID NO: 2884390 - DNA, 25 bp, Homo sapien
cagctggcgcgtgtgtggcctaatc

SEQ ID NO: 2884391 - DNA, 25 bp, Homo sapien
tttgcttcttacgaacgccacggcc

SEQ ID NO: 2884392 - DNA, 25 bp, Homo sapien
ggaaggatcccacaccgtttgcaga

SEQ ID NO: 2884393 - DNA, 25 bp, Homo sapien
tggctaggacgagaaccaatctgct

SEQ ID NO: 2884394 - DNA, 25 bp, Homo sapien
gacctgggaggttcctttgctcaca

SEQ ID NO: 2884395 - DNA, 25 bp, Homo sapien
tcctgggctggatacacatgttgcc

SEQ ID NO: 2884396 - DNA, 25 bp, Homo sapien
ctgcagtacccgggccgaaaagcgg

SEQ ID NO: 2884397 - DNA, 25 bp, Homo sapien
gcagtttctgttgcgctcctggctg

SEQ ID NO: 2884398 - DNA, 25 bp, Homo sapien
tggctgcgcccaattcccagctttt

SEQ ID NO: 2884399 - DNA, 25 bp, Homo sapien
tctgtgccgggagagcaaatggcac

SEQ ID NO: 2884400 - DNA, 25 bp, Homo sapien
agagctagactatttgctgagcacc

SEQ ID NO: 2884401 - DNA, 25 bp, Homo sapien
cgacagagctagactatttgctgag

SEQ ID NO: 2884402 - DNA, 25 bp, Homo sapien
tttcccatggaacgccagactctcc

SEQ ID NO: 2884403 - DNA, 25 bp, Homo sapien
ccgctctggcccagcgttcagcact

SEQ ID NO: 2884404 - DNA, 25 bp, Homo sapien
ctggcccagcgttcagcactgacat

SEQ ID NO: 2884405 - DNA, 25 bp, Homo sapien
gtgtttcccatggaacgccagactc

SEQ ID NO: 2884406 - DNA, 25 bp, Homo sapien
taaaatgagccccactgagtactca

SEQ ID NO: 2884407 - DNA, 25 bp, Homo sapien
aaaatgagccccactgagtactcac

SEQ ID NO: 2884408 - DNA, 25 bp, Homo sapien
ctaaaatgagccccactgagtactc

SEQ ID NO: 2884409 - DNA, 25 bp, Homo sapien
ccgtttcagtaagggcgtgagacag

SEQ ID NO: 2884410 - DNA, 25 bp, Homo sapien
agccacagggcccgtttccttgagg

SEQ ID NO: 2884411 - DNA, 25 bp, Homo sapien
cagggcccgtttcagtaagggcgtg

SEQ ID NO: 2884412 - DNA, 25 bp, Homo sapien
cagccacagggcccgtttccttgag

SEQ ID NO: 2884413 - DNA, 25 bp, Homo sapien
tgatggtcatgaagtggtcacacat

SEQ ID NO: 2884414 - DNA, 25 bp, Homo sapien
ggttctgagagttacggaggacgcc

SEQ ID NO: 2884415 - DNA, 25 bp, Homo sapien
ttctgagagttacggaggacgccta

SEQ ID NO: 2884416 - DNA, 25 bp, Homo sapien
ttgggttctgagagttacggaggac

SEQ ID NO: 2884417 - DNA, 25 bp, Homo sapien
aagttgggttctgagagttacggag

SEQ ID NO: 2884418 - DNA, 25 bp, Homo sapien
gcggctttcctggcctcggcggtgt

SEQ ID NO: 2884419 - DNA, 25 bp, Homo sapien
ctttcctggcctcggcggtgtggac

SEQ ID NO: 2884420 - DNA, 25 bp, Homo sapien
ggctttcctggcctcggcggtgtgg

SEQ ID NO: 2884421 - DNA, 25 bp, Homo sapien
atggcgcggctttcctggcctcggc

SEQ ID NO: 2884422 - DNA, 25 bp, Homo sapien
tgctggactcgcacggggagcgcag

SEQ ID NO: 2884423 - DNA, 25 bp, Homo sapien
ccgctttgctgccatcagacgctgc

SEQ ID NO: 2884424 - DNA, 25 bp, Homo sapien
catcagacgctgctggactcgcacg

SEQ ID NO: 2884425 - DNA, 25 bp, Homo sapien
cccgctttgctgccatcagacgctg

SEQ ID NO: 2884426 - DNA, 25 bp, Homo sapien
cctgggttcagtggagaagctgtcc

SEQ ID NO: 2884427 - DNA, 25 bp, Homo sapien
tccttgtccccggagagtggtacgc

SEQ ID NO: 2884428 - DNA, 25 bp, Homo sapien
tgtccccggagagtggtacgctgtt

SEQ ID NO: 2884429 - DNA, 25 bp, Homo sapien
cttgtccccggagagtggtacgctg

SEQ ID NO: 2884430 - DNA, 25 bp, Homo sapien
ttcagtcacgatggacagtgtccgg

SEQ ID NO: 2884431 - DNA, 25 bp, Homo sapien
gtctagcgggcaggtccagtgactc

SEQ ID NO: 2884432 - DNA, 25 bp, Homo sapien
agtgtccggcagtgaatgcccctca

SEQ ID NO: 2884433 - DNA, 25 bp, Homo sapien
ggtccagtgactccggtggttcagt

SEQ ID NO: 2884434 - DNA, 25 bp, Homo sapien
cagagcaccccacattggctttgca

SEQ ID NO: 2884435 - DNA, 25 bp, Homo sapien
gggctccacgctgagtgcttcccag

SEQ ID NO: 2884436 - DNA, 25 bp, Homo sapien
cagagcacgttgaggctcggagcca

SEQ ID NO: 2884437 - DNA, 25 bp, Homo sapien
agcaaccgggcaggcgtcgctcagc

SEQ ID NO: 2884438 - DNA, 25 bp, Homo sapien
aggccccgagccagaactggtgttc

SEQ ID NO: 2884439 - DNA, 25 bp, Homo sapien
cccctgcagccacacggccacccac

SEQ ID NO: 2884440 - DNA, 25 bp, Homo sapien
cctgcagccacacggccacccacgc

SEQ ID NO: 2884441 - DNA, 25 bp, Homo sapien
gcagccacacggccacccacgcagc

SEQ ID NO: 2884442 - DNA, 25 bp, Homo sapien
tgcagccacacggccacccacgcag

SEQ ID NO: 2884443 - DNA, 25 bp, Homo sapien
ggaagcagagcaatcgccatggagt

SEQ ID NO: 2884444 - DNA, 25 bp, Homo sapien
aggaagaacactcgctcccggccat

SEQ ID NO: 2884445 - DNA, 25 bp, Homo sapien
cttgcgtgtgagttctgacccctgg

SEQ ID NO: 2884446 - DNA, 25 bp, Homo sapien
gagcaatcgccatggagtttgtgat

SEQ ID NO: 2884447 - DNA, 25 bp, Homo sapien
caggcaggggcctgcttagggtgac

SEQ ID NO: 2884448 - DNA, 25 bp, Homo sapien
gaaggccaggcaggggcctgcttag

SEQ ID NO: 2884449 - DNA, 25 bp, Homo sapien
aggccaggcaggggcctgcttaggg

SEQ ID NO: 2884450 - DNA, 25 bp, Homo sapien
gccaggcaggggcctgcttagggtg

SEQ ID NO: 2884451 - DNA, 25 bp, Homo sapien
ctggcgccaggcgcctctgagcgat

SEQ ID NO: 2884452 - DNA, 25 bp, Homo sapien
cctgcagaggcttcagacaccccag

SEQ ID NO: 2884453 - DNA, 25 bp, Homo sapien
agggtccagcccacaaggtattgcg

SEQ ID NO: 2884454 - DNA, 25 bp, Homo sapien
ggacagaagcccctcacgaaggact

SEQ ID NO: 2884455 - DNA, 25 bp, Homo sapien
ctccgttacaccgaaagtgagcccg

SEQ ID NO: 2884456 - DNA, 25 bp, Homo sapien
aggaaacagcgactccgttacaccg

SEQ ID NO: 2884457 - DNA, 25 bp, Homo sapien
gtgccgcgtccgctgcagaggaaat

SEQ ID NO: 2884458 - DNA, 25 bp, Homo sapien
cggcctgcgggtctctggctgcgag

SEQ ID NO: 2884459 - DNA, 25 bp, Homo sapien
tgtcccctcccaggtcctgaggaga

SEQ ID NO: 2884460 - DNA, 25 bp, Homo sapien
gctgtcccctcccaggtcctgagga

SEQ ID NO: 2884461 - DNA, 25 bp, Homo sapien
ccttgctgtcccctcccaggtcctg

SEQ ID NO: 2884462 - DNA, 25 bp, Homo sapien
ttgctgtcccctcccaggtcctgag

SEQ ID NO: 2884463 - DNA, 25 bp, Homo sapien
tctttcttggacccgaacatctcac

SEQ ID NO: 2884464 - DNA, 25 bp, Homo sapien
ctctttcttggacccgaacatctca

SEQ ID NO: 2884465 - DNA, 25 bp, Homo sapien
ctggtgtggccaagtggcccgtggg

SEQ ID NO: 2884466 - DNA, 25 bp, Homo sapien
tggcagaggccttttgccgcgtcac

SEQ ID NO: 2884467 - DNA, 25 bp, Homo sapien
ttttgccgcgtcaccaccttctgcc

SEQ ID NO: 2884468 - DNA, 25 bp, Homo sapien
ccctggtgtggccaagtggcccgtg

SEQ ID NO: 2884469 - DNA, 25 bp, Homo sapien
ggctgcccactccacacgtgtgtcc

SEQ ID NO: 2884470 - DNA, 25 bp, Homo sapien
ccaggctgcccactccacacgtgtg

SEQ ID NO: 2884471 - DNA, 25 bp, Homo sapien
ctcagagagaggccacacagggcca

SEQ ID NO: 2884472 - DNA, 25 bp, Homo sapien
tcagagagaggccacacagggccag

SEQ ID NO: 2884473 - DNA, 25 bp, Homo sapien
gcttctcccgtatcacctcgtggga

SEQ ID NO: 2884474 - DNA, 25 bp, Homo sapien
ttctcccgtatcacctcgtgggagc

SEQ ID NO: 2884475 - DNA, 25 bp, Homo sapien
agcttctcccgtatcacctcgtggg

SEQ ID NO: 2884476 - DNA, 25 bp, Homo sapien
gcagcttctcccgtatcacctcgtg

SEQ ID NO: 2884477 - DNA, 25 bp, Homo sapien
cagagggcgcagccacgtccacagt

SEQ ID NO: 2884478 - DNA, 25 bp, Homo sapien
cacgtccacagtcagcaccaaactg

SEQ ID NO: 2884479 - DNA, 25 bp, Homo sapien
acgtccacagtcagcaccaaactgc

SEQ ID NO: 2884480 - DNA, 25 bp, Homo sapien
agggcgcagccacgtccacagtcag

SEQ ID NO: 2884481 - DNA, 25 bp, Homo sapien
cttggggacaccaatctcagggctc

SEQ ID NO: 2884482 - DNA, 25 bp, Homo sapien
ttggggacaccaatctcagggctct

SEQ ID NO: 2884483 - DNA, 25 bp, Homo sapien
gagctggggactctcagcccaagga

SEQ ID NO: 2884484 - DNA, 25 bp, Homo sapien
cgcgtgcggccgtggcctgaagggc

SEQ ID NO: 2884485 - DNA, 25 bp, Homo sapien
aggggcccccggtgatgtgagctgg

SEQ ID NO: 2884486 - DNA, 25 bp, Homo sapien
tcagcccaaggatgccgcgtgcggc

SEQ ID NO: 2884487 - DNA, 25 bp, Homo sapien
agtgcaggacacgtcaagggaagca

SEQ ID NO: 2884488 - DNA, 25 bp, Homo sapien
gacgcagtccgggtgtctgagccca

SEQ ID NO: 2884489 - DNA, 25 bp, Homo sapien
cagtccagcttatgaggatgcaggt

SEQ ID NO: 2884490 - DNA, 25 bp, Homo sapien
gtgctcgttcttgctgccgcgctgg

SEQ ID NO: 2884491 - DNA, 25 bp, Homo sapien
acctgctctgctcggtgctgaaacg

SEQ ID NO: 2884492 - DNA, 25 bp, Homo sapien
tctgctcggtgctgaaacgctagga

SEQ ID NO: 2884493 - DNA, 25 bp, Homo sapien
tcggtgctgaaacgctaggatcatc

SEQ ID NO: 2884494 - DNA, 25 bp, Homo sapien
tgctgaaacgctaggatcatccatg

SEQ ID NO: 2884495 - DNA, 25 bp, Homo sapien
tggagctgctgagcgtcctgccggg

SEQ ID NO: 2884496 - DNA, 25 bp, Homo sapien
caaagctttgcccaccgagtcctgg

SEQ ID NO: 2884497 - DNA, 25 bp, Homo sapien
cccaaagctttgcccaccgagtcct

SEQ ID NO: 2884498 - DNA, 25 bp, Homo sapien
aaagctttgcccaccgagtcctgga

SEQ ID NO: 2884499 - DNA, 25 bp, Homo sapien
ctgtcagtttggacaaagattccag

SEQ ID NO: 2884500 - DNA, 25 bp, Homo sapien
cctccttctgtcagtttggacaaag

SEQ ID NO: 2884501 - DNA, 25 bp, Homo sapien
catggcagggacaccgatttcctcc

SEQ ID NO: 2884502 - DNA, 25 bp, Homo sapien
ccttctgtcagtttggacaaagatt

SEQ ID NO: 2884503 - DNA, 25 bp, Homo sapien
tgaaaggcccaggatgcaccatctt

SEQ ID NO: 2884504 - DNA, 25 bp, Homo sapien
actgaggctccattctgcacgtggg

SEQ ID NO: 2884505 - DNA, 25 bp, Homo sapien
catccttgccgggttgtaatgcata

SEQ ID NO: 2884506 - DNA, 25 bp, Homo sapien
tgtgactatgctccgtcctgcacgt

SEQ ID NO: 2884507 - DNA, 25 bp, Homo sapien
cagcaggtcactggtccggggtagg

SEQ ID NO: 2884508 - DNA, 25 bp, Homo sapien
tgcagcaggtcactggtccggggta

SEQ ID NO: 2884509 - DNA, 25 bp, Homo sapien
gcagcaggtcactggtccggggtag

SEQ ID NO: 2884510 - DNA, 25 bp, Homo sapien
ctgagcctctggttatgtgtggaga

SEQ ID NO: 2884511 - DNA, 25 bp, Homo sapien
agcgggtggccggtccaggctaggc

SEQ ID NO: 2884512 - DNA, 25 bp, Homo sapien
cctctggttatgtgtggagagcagc

SEQ ID NO: 2884513 - DNA, 25 bp, Homo sapien
gggcctgagcctctggttatgtgtg

SEQ ID NO: 2884514 - DNA, 25 bp, Homo sapien
ctattttccgatgactgctgtgtct

SEQ ID NO: 2884515 - DNA, 25 bp, Homo sapien
cagtgtggatccactcgcccaggtg

SEQ ID NO: 2884516 - DNA, 25 bp, Homo sapien
ccaaggtggcctccgggctgtcggg

SEQ ID NO: 2884517 - DNA, 25 bp, Homo sapien
accttgccgtggttggattgttgca

SEQ ID NO: 2884518 - DNA, 25 bp, Homo sapien
ccggcacgtggtgggccacgctgct

SEQ ID NO: 2884519 - DNA, 25 bp, Homo sapien
tatttggtgtttcgggcgtggcctc

SEQ ID NO: 2884520 - DNA, 25 bp, Homo sapien
cctggtgtttgcaccgcactttgta

SEQ ID NO: 2884521 - DNA, 25 bp, Homo sapien
tcctcccgcaattgtcacgtctgtg

SEQ ID NO: 2884522 - DNA, 25 bp, Homo sapien
ctggctccacggctcagtatgatgc

SEQ ID NO: 2884523 - DNA, 25 bp, Homo sapien
ggctccacggctcagtatgatgctg

SEQ ID NO: 2884524 - DNA, 25 bp, Homo sapien
ctccacggctcagtatgatgctggg

SEQ ID NO: 2884525 - DNA, 25 bp, Homo sapien
aagccggagcttccccggcagcctg

SEQ ID NO: 2884526 - DNA, 25 bp, Homo sapien
caccatgggagaactcgagcatgag

SEQ ID NO: 2884527 - DNA, 25 bp, Homo sapien
gaagccccaccatgggagaactcga

SEQ ID NO: 2884528 - DNA, 25 bp, Homo sapien
agccgggaagccccaccatgggaga

SEQ ID NO: 2884529 - DNA, 25 bp, Homo sapien
cagggacaggccgagccgggaagcc

SEQ ID NO: 2884530 - DNA, 25 bp, Homo sapien
tgtgaagacctcactcgcaggaccc

SEQ ID NO: 2884531 - DNA, 25 bp, Homo sapien
ctgtggccgtgaggccggactatcc

SEQ ID NO: 2884532 - DNA, 25 bp, Homo sapien
tctgccttcacgtccagggtcatgg

SEQ ID NO: 2884533 - DNA, 25 bp, Homo sapien
ttgtgccaccaaagccgcctgtgaa

SEQ ID NO: 2884534 - DNA, 25 bp, Homo sapien
gcacagcttcgtctctgttggctgt

SEQ ID NO: 2884535 - DNA, 25 bp, Homo sapien
tctgttggctgtagaatgggaacgg

SEQ ID NO: 2884536 - DNA, 25 bp, Homo sapien
tgcgcacagcttcgtctctgttggc

SEQ ID NO: 2884537 - DNA, 25 bp, Homo sapien
tgtgcgcacagcttcgtctctgttg

SEQ ID NO: 2884538 - DNA, 25 bp, Homo sapien
ggcactgcgcggtttccatgtgatg

SEQ ID NO: 2884539 - DNA, 25 bp, Homo sapien
ggctgggcctgcgctccgtgctgct

SEQ ID NO: 2884540 - DNA, 25 bp, Homo sapien
acagccccacagaggacactcctgc

SEQ ID NO: 2884541 - DNA, 25 bp, Homo sapien
cctgagctgcctgtgttgattttgg

SEQ ID NO: 2884542 - DNA, 25 bp, Homo sapien
tgcgggtcccgctcggttaggagcc

SEQ ID NO: 2884543 - DNA, 25 bp, Homo sapien
gtgcgggtcccgctcggttaggagc

SEQ ID NO: 2884544 - DNA, 25 bp, Homo sapien
tctgtgtgcgggtcccgctcggtta

SEQ ID NO: 2884545 - DNA, 25 bp, Homo sapien
cagggacctcaaggtagtggctccc

SEQ ID NO: 2884546 - DNA, 25 bp, Homo sapien
gccgtgcagcacatgcaccggcaga

SEQ ID NO: 2884547 - DNA, 25 bp, Homo sapien
gcagcacatgcaccggcagaagccg

SEQ ID NO: 2884548 - DNA, 25 bp, Homo sapien
agacgtgccgcgccgtgcagcacat

SEQ ID NO: 2884549 - DNA, 25 bp, Homo sapien
ctctgtgtgcgggtcccactcggtt

SEQ ID NO: 2884550 - DNA, 25 bp, Homo sapien
cgtgcgacacggttctgaagatctt

SEQ ID NO: 2884551 - DNA, 25 bp, Homo sapien
atggaatctcgaggccccctttcgt

SEQ ID NO: 2884552 - DNA, 25 bp, Homo sapien
agaaaatggaatctcgaggccccct

SEQ ID NO: 2884553 - DNA, 25 bp, Homo sapien
cccctttcgtgcgacacggttctga

SEQ ID NO: 2884554 - DNA, 25 bp, Homo sapien
gagggtgacggtggctgctctgtag

SEQ ID NO: 2884555 - DNA, 25 bp, Homo sapien
cagagggtgacggtggctgctctgt

SEQ ID NO: 2884556 - DNA, 25 bp, Homo sapien
gagcagagggtgacggtggctgctc

SEQ ID NO: 2884557 - DNA, 25 bp, Homo sapien
tcgtggccttcaggggtgtggagtg

SEQ ID NO: 2884558 - DNA, 25 bp, Homo sapien
tcctgcgctgcgcttctagggcctc

SEQ ID NO: 2884559 - DNA, 25 bp, Homo sapien
ctggactctgacacccgctcctgcg

SEQ ID NO: 2884560 - DNA, 25 bp, Homo sapien
ccgctcctgcgctgcgcttctaggg

SEQ ID NO: 2884561 - DNA, 25 bp, Homo sapien
gctgcgcttctagggcctcctccag

SEQ ID NO: 2884562 - DNA, 25 bp, Homo sapien
taccggggcctcgtcaaggctcctg

SEQ ID NO: 2884563 - DNA, 25 bp, Homo sapien
cggcccttcccgtgcgcataccggg

SEQ ID NO: 2884564 - DNA, 25 bp, Homo sapien
tgtctgtcagtcaatctcttgttgt

SEQ ID NO: 2884565 - DNA, 25 bp, Homo sapien
ctcctgtgtgtgttcggttgaggtg

SEQ ID NO: 2884566 - DNA, 25 bp, Homo sapien
caaggggcgtccattgtccacttcc

SEQ ID NO: 2884567 - DNA, 25 bp, Homo sapien
ctgaaacgtcaaactggcggaaaag

SEQ ID NO: 2884568 - DNA, 25 bp, Homo sapien
gggttccccagacttgagcgtgtcc

SEQ ID NO: 2884569 - DNA, 25 bp, Homo sapien
ttgagcgtgtcccacggcggctttc

SEQ ID NO: 2884570 - DNA, 25 bp, Homo sapien
tccagcgcctgttgccagggttgtc

SEQ ID NO: 2884571 - DNA, 25 bp, Homo sapien
cctgacgtgggtggcggatgggtgc

SEQ ID NO: 2884572 - DNA, 25 bp, Homo sapien
gatgggtgcttgacgtggccgagaa

SEQ ID NO: 2884573 - DNA, 25 bp, Homo sapien
gatgtgccgcttgtgtttctcagtg

SEQ ID NO: 2884574 - DNA, 25 bp, Homo sapien
gccgcagaggtggacaactccaggt

SEQ ID NO: 2884575 - DNA, 25 bp, Homo sapien
cagaggtggacaactccaggtccct

SEQ ID NO: 2884576 - DNA, 25 bp, Homo sapien
gaagagaggccgcagaggtggacaa

SEQ ID NO: 2884577 - DNA, 25 bp, Homo sapien
agaggccgcagaggtggacaactcc

SEQ ID NO: 2884578 - DNA, 25 bp, Homo sapien
catcgtctcctcgtggagctgcggg

SEQ ID NO: 2884579 - DNA, 25 bp, Homo sapien
tggctgtgaaacatgcccggcatct

SEQ ID NO: 2884580 - DNA, 25 bp, Homo sapien
agtagttctgtgagaggcccacgct

SEQ ID NO: 2884581 - DNA, 25 bp, Homo sapien
caagctgtgttggtcttagcgggaa

SEQ ID NO: 2884582 - DNA, 25 bp, Homo sapien
cgggagcttgacagccggaagttca

SEQ ID NO: 2884583 - DNA, 25 bp, Homo sapien
gaagttcatcgcaagcccggcgacg

SEQ ID NO: 2884584 - DNA, 25 bp, Homo sapien
tccgcttgagtcagcccggccggga

SEQ ID NO: 2884585 - DNA, 25 bp, Homo sapien
gcgggaatcgcctcggcgactgttc

SEQ ID NO: 2884586 - DNA, 25 bp, Homo sapien
gagctggactggggcgctgaactac

SEQ ID NO: 2884587 - DNA, 25 bp, Homo sapien
gggagctggactggggcgctgaact

SEQ ID NO: 2884588 - DNA, 25 bp, Homo sapien
ggagctggactggggcgctgaacta

SEQ ID NO: 2884589 - DNA, 25 bp, Homo sapien
cgggagctggactggggcgctgaac

SEQ ID NO: 2884590 - DNA, 25 bp, Homo sapien
gctccctggagctaagggtgccgaa

SEQ ID NO: 2884591 - DNA, 25 bp, Homo sapien
tccatccgctttaggctgctcaaga

SEQ ID NO: 2884592 - DNA, 25 bp, Homo sapien
taagttcatggcctccagatgagtg

SEQ ID NO: 2884593 - DNA, 25 bp, Homo sapien
gaagctattcttggtgaggtcacca

SEQ ID NO: 2884594 - DNA, 25 bp, Homo sapien
agctgcatcccaccagttttaaatg

SEQ ID NO: 2884595 - DNA, 25 bp, Homo sapien
tagtttcataaggtgattgctgagg

SEQ ID NO: 2884596 - DNA, 25 bp, Homo sapien
tttctagtttcataaggtgattgct

SEQ ID NO: 2884597 - DNA, 25 bp, Homo sapien
gctgcatcccaccagttttaaatgc

SEQ ID NO: 2884598 - DNA, 25 bp, Homo sapien
tcctggaaccctgctaaactcacga

SEQ ID NO: 2884599 - DNA, 25 bp, Homo sapien
cctcatcacgttggctagaatttct

SEQ ID NO: 2884600 - DNA, 25 bp, Homo sapien
tgctagtacgtagaaatagaattga

SEQ ID NO: 2884601 - DNA, 25 bp, Homo sapien
actcacgagtagctctttttataga

SEQ ID NO: 2884602 - DNA, 25 bp, Homo sapien
ggatggtgagtgcttgcttcaggct

SEQ ID NO: 2884603 - DNA, 25 bp, Homo sapien
cacattcttgagggatggtgagtgc

SEQ ID NO: 2884604 - DNA, 25 bp, Homo sapien
ggaaggtaggtcagggcacattctt

SEQ ID NO: 2884605 - DNA, 25 bp, Homo sapien
cattcttgagggatggtgagtgctt

SEQ ID NO: 2884606 - DNA, 25 bp, Homo sapien
cgctcctggaggtcggccatgcagc

SEQ ID NO: 2884607 - DNA, 25 bp, Homo sapien
tggaggtcggccatgcagcctcagc

SEQ ID NO: 2884608 - DNA, 25 bp, Homo sapien
gagtgtgcctgtggggcgctcctgg

SEQ ID NO: 2884609 - DNA, 25 bp, Homo sapien
gggcgctcctggaggtcggccatgc

SEQ ID NO: 2884610 - DNA, 25 bp, Homo sapien
ggccgctgcctggcggttacaggag

SEQ ID NO: 2884611 - DNA, 25 bp, Homo sapien
gccgctgcctggcggttacaggagc

SEQ ID NO: 2884612 - DNA, 25 bp, Homo sapien
cccggtgtatccagtgcctgctctg

SEQ ID NO: 2884613 - DNA, 25 bp, Homo sapien
gggcagtcccccggtgtatccagtg

SEQ ID NO: 2884614 - DNA, 25 bp, Homo sapien
agtcccccggtgtatccagtgcctg

SEQ ID NO: 2884615 - DNA, 25 bp, Homo sapien
ccccggtgtatccagtgcctgctct

SEQ ID NO: 2884616 - DNA, 25 bp, Homo sapien
atgcgttgggagcactggatcccct

SEQ ID NO: 2884617 - DNA, 25 bp, Homo sapien
agcatgcgttgggagcactggatcc

SEQ ID NO: 2884618 - DNA, 25 bp, Homo sapien
tgagcatgcgttgggagcactggat

SEQ ID NO: 2884619 - DNA, 25 bp, Homo sapien
cactgaagctgagcatgcgttggga

SEQ ID NO: 2884620 - DNA, 25 bp, Homo sapien
gcaggcctaagcaggggccccgtac

SEQ ID NO: 2884621 - DNA, 25 bp, Homo sapien
gagagcaagagacgcttgttggatt

SEQ ID NO: 2884622 - DNA, 25 bp, Homo sapien
ggacccaaggatgctggcaagacct

SEQ ID NO: 2884623 - DNA, 25 bp, Homo sapien
tgggcccccctaagctgcctgagga

SEQ ID NO: 2884624 - DNA, 25 bp, Homo sapien
ctgttctggggagatctccgtgtgg

SEQ ID NO: 2884625 - DNA, 25 bp, Homo sapien
ggagatctccgtgtgggtcacaggc

SEQ ID NO: 2884626 - DNA, 25 bp, Homo sapien
ggggagatctccgtgtgggtcacag

SEQ ID NO: 2884627 - DNA, 25 bp, Homo sapien
tctggggagatctccgtgtgggtca

SEQ ID NO: 2884628 - DNA, 25 bp, Homo sapien
ctaagcctcagaagcttcgaggcgt

SEQ ID NO: 2884629 - DNA, 25 bp, Homo sapien
accctgtgccaggtcgagcctcggg

SEQ ID NO: 2884630 - DNA, 25 bp, Homo sapien
gggaccctatatcttcgcagggcca

SEQ ID NO: 2884631 - DNA, 25 bp, Homo sapien
cttcgaggcgtgcagggtcagcacc

SEQ ID NO: 2884632 - DNA, 25 bp, Homo sapien
gggtgggagtgtccccgctgagacg

SEQ ID NO: 2884633 - DNA, 25 bp, Homo sapien
cgctggccgcgtttactcagagcag

SEQ ID NO: 2884634 - DNA, 25 bp, Homo sapien
ctcagagcagctacgtaaggggcct

SEQ ID NO: 2884635 - DNA, 25 bp, Homo sapien
tgccctcccgcagaggaaacttctg

SEQ ID NO: 2884636 - DNA, 25 bp, Homo sapien
caagagcactgctgtcagagcccag

SEQ ID NO: 2884637 - DNA, 25 bp, Homo sapien
ggtcatcaggtagacggcaatccgt

SEQ ID NO: 2884638 - DNA, 25 bp, Homo sapien
gaagcctctgtacacttctgtcgaa

SEQ ID NO: 2884639 - DNA, 25 bp, Homo sapien
gcaatccgtgttgccagaagcctct

SEQ ID NO: 2884640 - DNA, 25 bp, Homo sapien
caggccactgtcacgatgagaaagg

SEQ ID NO: 2884641 - DNA, 25 bp, Homo sapien
caagtgtgtcgtctgttttcccaac

SEQ ID NO: 2884642 - DNA, 25 bp, Homo sapien
aagtgtgtcgtctgttttcccaaca

SEQ ID NO: 2884643 - DNA, 25 bp, Homo sapien
gcaagtgtgtcgtctgttttcccaa

SEQ ID NO: 2884644 - DNA, 25 bp, Homo sapien
ggcaagtgtgtcgtctgttttccca

SEQ ID NO: 2884645 - DNA, 25 bp, Homo sapien
ggagggagggcatcacagccatgat

SEQ ID NO: 2884646 - DNA, 25 bp, Homo sapien
gggagggcatcacagccatgatgcg

SEQ ID NO: 2884647 - DNA, 25 bp, Homo sapien
gagggcatcacagccatgatgcggc

SEQ ID NO: 2884648 - DNA, 25 bp, Homo sapien
gagggagggagggcatcacagccat

SEQ ID NO: 2884649 - DNA, 25 bp, Homo sapien
tgtaaggcaggaaggtgatggtcat

SEQ ID NO: 2884650 - DNA, 25 bp, Homo sapien
cgtgtaaggcaggaaggtgatggtc

SEQ ID NO: 2884651 - DNA, 25 bp, Homo sapien
aaggcaggaaggtgatggtcatcat

SEQ ID NO: 2884652 - DNA, 25 bp, Homo sapien
taaggcaggaaggtgatggtcatca

SEQ ID NO: 2884653 - DNA, 25 bp, Homo sapien
atcagggaaggtcaccattaacgaa

SEQ ID NO: 2884654 - DNA, 25 bp, Homo sapien
tcagggaaggtcaccattaacgaaa

SEQ ID NO: 2884655 - DNA, 25 bp, Homo sapien
acatcagggaaggtcaccattaacg

SEQ ID NO: 2884656 - DNA, 25 bp, Homo sapien
catcagggaaggtcaccattaacga

SEQ ID NO: 2884657 - DNA, 25 bp, Homo sapien
cgtgtcgtcggtacagagccctgtg

SEQ ID NO: 2884658 - DNA, 25 bp, Homo sapien
tgcgggaagtggaatgcgtacccca

SEQ ID NO: 2884659 - DNA, 25 bp, Homo sapien
tgcccaggacgtgtcgtcggtacag

SEQ ID NO: 2884660 - DNA, 25 bp, Homo sapien
agaagatggccgctgcaaagcacag

SEQ ID NO: 2884661 - DNA, 25 bp, Homo sapien
cctccacaggggtccgaggccaggc

SEQ ID NO: 2884662 - DNA, 25 bp, Homo sapien
tgcagggagacaaaccgcaggtcag

SEQ ID NO: 2884663 - DNA, 25 bp, Homo sapien
cagggagacaaaccgcaggtcagtg

SEQ ID NO: 2884664 - DNA, 25 bp, Homo sapien
agacaaaccgcaggtcagtgccctc

SEQ ID NO: 2884665 - DNA, 25 bp, Homo sapien
gatgacagtcaccatcagcaggtaa

SEQ ID NO: 2884666 - DNA, 25 bp, Homo sapien
agccggtgaccttgctgacataggg

SEQ ID NO: 2884667 - DNA, 25 bp, Homo sapien
tgacagtcaccatcagcaggtaaga

SEQ ID NO: 2884668 - DNA, 25 bp, Homo sapien
tgtctctgcaccagccggtgacctt

SEQ ID NO: 2884669 - DNA, 25 bp, Homo sapien
tcgtggaggtcaaacgagaagactt

SEQ ID NO: 2884670 - DNA, 25 bp, Homo sapien
gcgtggccacgatggcgtagactcc

SEQ ID NO: 2884671 - DNA, 25 bp, Homo sapien
cgtagactccgtcgctgaaggcttc

SEQ ID NO: 2884672 - DNA, 25 bp, Homo sapien
cgctccttgctgagtggctcgtgga

SEQ ID NO: 2884673 - DNA, 25 bp, Homo sapien
tgacctcacacaaaactctaggcat

SEQ ID NO: 2884674 - DNA, 25 bp, Homo sapien
gatgagacgccagggactcaagaca

SEQ ID NO: 2884675 - DNA, 25 bp, Homo sapien
agacacattggccacctgatagctg

SEQ ID NO: 2884676 - DNA, 25 bp, Homo sapien
gcaccccatcctcggctgtgcttgg

SEQ ID NO: 2884677 - DNA, 25 bp, Homo sapien
ttcaaacattacgatggccgggcac

SEQ ID NO: 2884678 - DNA, 25 bp, Homo sapien
agacgcgcgctctaacagacgaaga

SEQ ID NO: 2884679 - DNA, 25 bp, Homo sapien
tcacagtgctgaactatgacgaggg

SEQ ID NO: 2884680 - DNA, 25 bp, Homo sapien
aacgtgacgactgagacgagacgcg

SEQ ID NO: 2884681 - DNA, 25 bp, Homo sapien
gaaattccatagaaactggcaccct

SEQ ID NO: 2884682 - DNA, 25 bp, Homo sapien
cagaaagccgggaacagtgtcgtcc

SEQ ID NO: 2884683 - DNA, 25 bp, Homo sapien
gatgaaccatgtggacttcccagtg

SEQ ID NO: 2884684 - DNA, 25 bp, Homo sapien
gggcttgcctccacggttctcagat

SEQ ID NO: 2884685 - DNA, 25 bp, Homo sapien
agtggtgggcgaaccacagcagtcc

SEQ ID NO: 2884686 - DNA, 25 bp, Homo sapien
gaagatgatggtgcagctgacacgc

SEQ ID NO: 2884687 - DNA, 25 bp, Homo sapien
tggccttgcgcacatgcaggaagag

SEQ ID NO: 2884688 - DNA, 25 bp, Homo sapien
ccagcttggcgaacatgagcacatg

SEQ ID NO: 2884689 - DNA, 25 bp, Homo sapien
actgtgggtcgtcctggcccgtggg

SEQ ID NO: 2884690 - DNA, 25 bp, Homo sapien
aggcccacgagcaggcgcagcaaca

SEQ ID NO: 2884691 - DNA, 25 bp, Homo sapien
cacgagcaggcgcagcaacaggaag

SEQ ID NO: 2884692 - DNA, 25 bp, Homo sapien
ctgggactgtgggtcgtcctggccc

SEQ ID NO: 2884693 - DNA, 25 bp, Homo sapien
taagagcatgatatttcacaatgaa

SEQ ID NO: 2884694 - DNA, 25 bp, Homo sapien
tgcggcctgcccgtgacttggcttc

SEQ ID NO: 2884695 - DNA, 25 bp, Homo sapien
taggcaaatgccataaagcacattt

SEQ ID NO: 2884696 - DNA, 25 bp, Homo sapien
aaaaccaggccacgcaagaaccact

SEQ ID NO: 2884697 - DNA, 25 bp, Homo sapien
tgggaggtgcggacagcatctccat

SEQ ID NO: 2884698 - DNA, 25 bp, Homo sapien
tgcggtcaaaccgagcccacgtgga

SEQ ID NO: 2884699 - DNA, 25 bp, Homo sapien
gtctcgcgtgggaggcgcctgtctg

SEQ ID NO: 2884700 - DNA, 25 bp, Homo sapien
aacgccgcgcgtgcggcgtccggag

SEQ ID NO: 2884701 - DNA, 25 bp, Homo sapien
ggagaagtctggcccggctgcggtc

SEQ ID NO: 2884702 - DNA, 25 bp, Homo sapien
gtggacgcggctctcaaaggacacc

SEQ ID NO: 2884703 - DNA, 25 bp, Homo sapien
agcgccacctgaacaagacccgtgg

SEQ ID NO: 2884704 - DNA, 25 bp, Homo sapien
tcctatccacagttaggcccacggg

SEQ ID NO: 2884705 - DNA, 25 bp, Homo sapien
ccccgttgcagtgaggacagcggtc

SEQ ID NO: 2884706 - DNA, 25 bp, Homo sapien
ggatacagcttattccagagggagg

SEQ ID NO: 2884707 - DNA, 25 bp, Homo sapien
tagtgggcctgaggattacctttcg

SEQ ID NO: 2884708 - DNA, 25 bp, Homo sapien
taaaaaccagccatgctagtgggcc

SEQ ID NO: 2884709 - DNA, 25 bp, Homo sapien
gatgaaagggtatcctagcaagctg

SEQ ID NO: 2884710 - DNA, 25 bp, Homo sapien
tgcagagggcttgtgccagcctggt

SEQ ID NO: 2884711 - DNA, 25 bp, Homo sapien
cagagggcttgtgccagcctggtcc

SEQ ID NO: 2884712 - DNA, 25 bp, Homo sapien
gggcttgtgccagcctggtccacgt

SEQ ID NO: 2884713 - DNA, 25 bp, Homo sapien
cttgtgccagcctggtccacgtcat

SEQ ID NO: 2884714 - DNA, 25 bp, Homo sapien
ttctgtattcttaatgcactggcct

SEQ ID NO: 2884715 - DNA, 25 bp, Homo sapien
ggcgtcttgatcctggagagatcac

SEQ ID NO: 2884716 - DNA, 25 bp, Homo sapien
gccttgggcgtcttgatcctggaga

SEQ ID NO: 2884717 - DNA, 25 bp, Homo sapien
ttgatcctggagagatcacccctcc

SEQ ID NO: 2884718 - DNA, 25 bp, Homo sapien
gagaattaaggtgagccgctcaccg

SEQ ID NO: 2884719 - DNA, 25 bp, Homo sapien
ggaatatgccttgtacattgtgcaa

SEQ ID NO: 2884720 - DNA, 25 bp, Homo sapien
gaagtcctcactgcacggtgctgga

SEQ ID NO: 2884721 - DNA, 25 bp, Homo sapien
gccttaaatcacctcaagccctgag

SEQ ID NO: 2884722 - DNA, 25 bp, Homo sapien
ggccacgcgtgctcggggactgcgg

SEQ ID NO: 2884723 - DNA, 25 bp, Homo sapien
ttcgggctgcactgccggttccgcc

SEQ ID NO: 2884724 - DNA, 25 bp, Homo sapien
tccgcctccgggtcggagtctgggc

SEQ ID NO: 2884725 - DNA, 25 bp, Homo sapien
agtctgggcgcgcaccccatgtgac

SEQ ID NO: 2884726 - DNA, 25 bp, Homo sapien
cagaagcgccgcaggggccacagcg

SEQ ID NO: 2884727 - DNA, 25 bp, Homo sapien
cgcgtccacatgcaccaggtgcggg

SEQ ID NO: 2884728 - DNA, 25 bp, Homo sapien
tgtgctcctccagaagcgccgcagg

SEQ ID NO: 2884729 - DNA, 25 bp, Homo sapien
gcgcgggccgcgtccacatgcacca

SEQ ID NO: 2884730 - DNA, 25 bp, Homo sapien
cagctgaggacgtactggtcagcct

SEQ ID NO: 2884731 - DNA, 25 bp, Homo sapien
cagtgggtccggacctgcttgatgc

SEQ ID NO: 2884732 - DNA, 25 bp, Homo sapien
ccacataggcgaggttgagctgctg

SEQ ID NO: 2884733 - DNA, 25 bp, Homo sapien
atgccgcggtgagggacggcgccca

SEQ ID NO: 2884734 - DNA, 25 bp, Homo sapien
gaagcccaccgtgccccatgcaggg

SEQ ID NO: 2884735 - DNA, 25 bp, Homo sapien
gccagcaaggacacgctctccccaa

SEQ ID NO: 2884736 - DNA, 25 bp, Homo sapien
caggaagcccaccgtgccccatgca

SEQ ID NO: 2884737 - DNA, 25 bp, Homo sapien
aggaagcccaccgtgccccatgcag

SEQ ID NO: 2884738 - DNA, 25 bp, Homo sapien
ccaggtgcggcgcagccaaccctga

SEQ ID NO: 2884739 - DNA, 25 bp, Homo sapien
gagccaggtgcggcgcagccaaccc

SEQ ID NO: 2884740 - DNA, 25 bp, Homo sapien
aggtgcggcgcagccaaccctgagc

SEQ ID NO: 2884741 - DNA, 25 bp, Homo sapien
agccaggtgcggcgcagccaaccct

SEQ ID NO: 2884742 - DNA, 25 bp, Homo sapien
cctcaggtgcagtggccctacccag

SEQ ID NO: 2884743 - DNA, 25 bp, Homo sapien
agccctcaggtgcagtggccctacc

SEQ ID NO: 2884744 - DNA, 25 bp, Homo sapien
tcagccctcaggtgcagtggcccta

SEQ ID NO: 2884745 - DNA, 25 bp, Homo sapien
ctcaggtgcagtggccctacccagc

SEQ ID NO: 2884746 - DNA, 25 bp, Homo sapien
agggtggccacctgcaccagcgtca

SEQ ID NO: 2884747 - DNA, 25 bp, Homo sapien
ggtggccacctgcaccagcgtcagg

SEQ ID NO: 2884748 - DNA, 25 bp, Homo sapien
acagggtggccacctgcaccagcgt

SEQ ID NO: 2884749 - DNA, 25 bp, Homo sapien
gccacctgcaccagcgtcagggccc

SEQ ID NO: 2884750 - DNA, 25 bp, Homo sapien
ggccgctgtactatgccaacaagga

SEQ ID NO: 2884751 - DNA, 25 bp, Homo sapien
gatgccacagagttcgagggcctcg

SEQ ID NO: 2884752 - DNA, 25 bp, Homo sapien
gacacggccttctacgaggatgcca

SEQ ID NO: 2884753 - DNA, 25 bp, Homo sapien
cacctgtatgctggtcagcacagag

SEQ ID NO: 2884754 - DNA, 25 bp, Homo sapien
tcacgctgatgaccgggctttacca

SEQ ID NO: 2884755 - DNA, 25 bp, Homo sapien
ttttggccatccacgagggcaaggc

SEQ ID NO: 2884756 - DNA, 25 bp, Homo sapien
gcatgtctccgtgggcatcttcagc

SEQ ID NO: 2884757 - DNA, 25 bp, Homo sapien
catcgcctactcattgctggccggg

SEQ ID NO: 2884758 - DNA, 25 bp, Homo sapien
cagggcccagcgtccatccataccg

SEQ ID NO: 2884759 - DNA, 25 bp, Homo sapien
gcccagcgtccatccataccgggca

SEQ ID NO: 2884760 - DNA, 25 bp, Homo sapien
cagcgtccatccataccgggcaggg

SEQ ID NO: 2884761 - DNA, 25 bp, Homo sapien
gggcccagcgtccatccataccggg

SEQ ID NO: 2884762 - DNA, 25 bp, Homo sapien
cattctgacggtaggcacatgtgcg

SEQ ID NO: 2884763 - DNA, 25 bp, Homo sapien
ggcttggtgtcgtaatcccatctca

SEQ ID NO: 2884764 - DNA, 25 bp, Homo sapien
gaggctacagggtggttttcagcca

SEQ ID NO: 2884765 - DNA, 25 bp, Homo sapien
cgcagagccaataggccggagctga

SEQ ID NO: 2884766 - DNA, 25 bp, Homo sapien
cccagagctgaaggtttacctgtgc

SEQ ID NO: 2884767 - DNA, 25 bp, Homo sapien
cacgtgtgggcctaatttagttcac

SEQ ID NO: 2884768 - DNA, 25 bp, Homo sapien
tgctgggtccagtcagaccaggact

SEQ ID NO: 2884769 - DNA, 25 bp, Homo sapien
agcttacccttattttcacgtgtgg

SEQ ID NO: 2884770 - DNA, 25 bp, Homo sapien
cacccaaggcgcctctgagtgtcat

SEQ ID NO: 2884771 - DNA, 25 bp, Homo sapien
agcatcagagatgtccctggcctga

SEQ ID NO: 2884772 - DNA, 25 bp, Homo sapien
atgtccctggcctgacacccaaggc

SEQ ID NO: 2884773 - DNA, 25 bp, Homo sapien
cctagcggggggagccccagcatca

SEQ ID NO: 2884774 - DNA, 25 bp, Homo sapien
ctaaggctaccatgcaacgggacca

SEQ ID NO: 2884775 - DNA, 25 bp, Homo sapien
gatggtcagcgagggacctctctga

SEQ ID NO: 2884776 - DNA, 25 bp, Homo sapien
gcgtcgtcagggaatgggaatcttt

SEQ ID NO: 2884777 - DNA, 25 bp, Homo sapien
gccctgccactgcacttgcggatgg

SEQ ID NO: 2884778 - DNA, 25 bp, Homo sapien
tccaggtacccgtccaggtgggtga

SEQ ID NO: 2884779 - DNA, 25 bp, Homo sapien
caggtacccgtccaggtgggtgaag

SEQ ID NO: 2884780 - DNA, 25 bp, Homo sapien
cagggcaagggggtgcaggcgggct

SEQ ID NO: 2884781 - DNA, 25 bp, Homo sapien
agggtgggcagggcaagggggtgca

SEQ ID NO: 2884782 - DNA, 25 bp, Homo sapien
tgggagggcagagcccacagctcac

SEQ ID NO: 2884783 - DNA, 25 bp, Homo sapien
ctgggagggcagagcccacagctca

SEQ ID NO: 2884784 - DNA, 25 bp, Homo sapien
ttccactcaaacacctgctgcttgt

SEQ ID NO: 2884785 - DNA, 25 bp, Homo sapien
tggagaccaagtccttccactcaaa

SEQ ID NO: 2884786 - DNA, 25 bp, Homo sapien
gaagtggcccgaggcgctgcccatc

SEQ ID NO: 2884787 - DNA, 25 bp, Homo sapien
ctgctgcttgtcctcaaagtcagtg

SEQ ID NO: 2884788 - DNA, 25 bp, Homo sapien
gggcctgcgccgaccaccaacctat

SEQ ID NO: 2884789 - DNA, 25 bp, Homo sapien
gccgaccaccaacctatcccttgtc

SEQ ID NO: 2884790 - DNA, 25 bp, Homo sapien
cagcagcctgcgtgataggggtgca

SEQ ID NO: 2884791 - DNA, 25 bp, Homo sapien
cgtgataggggtgcaacctgcccag

SEQ ID NO: 2884792 - DNA, 25 bp, Homo sapien
tcgcctcagtgactcccacggaggg

SEQ ID NO: 2884793 - DNA, 25 bp, Homo sapien
tcagtgactcccacggagggagggt

SEQ ID NO: 2884794 - DNA, 25 bp, Homo sapien
gtgaatctcgcctcagtgactccca

SEQ ID NO: 2884795 - DNA, 25 bp, Homo sapien
gcacaggtgaatctcgcctcagtga

SEQ ID NO: 2884796 - DNA, 25 bp, Homo sapien
cttgcatggtcatggagacgttgtc

SEQ ID NO: 2884797 - DNA, 25 bp, Homo sapien
tctggctcattccacgtctcgaagt

SEQ ID NO: 2884798 - DNA, 25 bp, Homo sapien
tcaaagtcgtggtggtctggctcat

SEQ ID NO: 2884799 - DNA, 25 bp, Homo sapien
ggaaacatgcgccagtccgtaccta

SEQ ID NO: 2884800 - DNA, 25 bp, Homo sapien
gggatgagcggcttagcctctgctc

SEQ ID NO: 2884801 - DNA, 25 bp, Homo sapien
gatgagcggcttagcctctgctcct

SEQ ID NO: 2884802 - DNA, 25 bp, Homo sapien
atgagcggcttagcctctgctcctg

SEQ ID NO: 2884803 - DNA, 25 bp, Homo sapien
ctggggatgagcggcttagcctctg

SEQ ID NO: 2884804 - DNA, 25 bp, Homo sapien
ctgggccgggggagcactgcgtcta

SEQ ID NO: 2884805 - DNA, 25 bp, Homo sapien
gggccgggggagcactgcgtctaca

SEQ ID NO: 2884806 - DNA, 25 bp, Homo sapien
tgggccgggggagcactgcgtctac

SEQ ID NO: 2884807 - DNA, 25 bp, Homo sapien
ggccgggggagcactgcgtctacac

SEQ ID NO: 2884808 - DNA, 25 bp, Homo sapien
gaccctccgagcaggcatcgtagta

SEQ ID NO: 2884809 - DNA, 25 bp, Homo sapien
aagaagttggtaccgtcgtggcagt

SEQ ID NO: 2884810 - DNA, 25 bp, Homo sapien
gagatgtagtccagccgcacgcccg

SEQ ID NO: 2884811 - DNA, 25 bp, Homo sapien
gcccgcctccccagtgaagaagttg

SEQ ID NO: 2884812 - DNA, 25 bp, Homo sapien
acagcggctgagggcgcagaacacc

SEQ ID NO: 2884813 - DNA, 25 bp, Homo sapien
gcacagcggctgagggcgcagaaca

SEQ ID NO: 2884814 - DNA, 25 bp, Homo sapien
gggcacagcggctgagggcgcagaa

SEQ ID NO: 2884815 - DNA, 25 bp, Homo sapien
ggggcacagcggctgagggcgcaga

SEQ ID NO: 2884816 - DNA, 25 bp, Homo sapien
accatggccgcgtaggtcacgtccg

SEQ ID NO: 2884817 - DNA, 25 bp, Homo sapien
cgggtccgcctcgtcgttgtaaatg

SEQ ID NO: 2884818 - DNA, 25 bp, Homo sapien
tgccggatctgctgcgcgacgacct

SEQ ID NO: 2884819 - DNA, 25 bp, Homo sapien
agggaccagcccaccagcgggtccg

SEQ ID NO: 2884820 - DNA, 25 bp, Homo sapien
tgggaccgggtggcgcggccaccgc

SEQ ID NO: 2884821 - DNA, 25 bp, Homo sapien
ccaccgctcgcctgtcccgtctcgg

SEQ ID NO: 2884822 - DNA, 25 bp, Homo sapien
gcgcgcagggcgttgggccggccca

SEQ ID NO: 2884823 - DNA, 25 bp, Homo sapien
tgtcccgtctcgggaggaaggtggc

SEQ ID NO: 2884824 - DNA, 25 bp, Homo sapien
cattgtcgttgctcaggagcgcgta

SEQ ID NO: 2884825 - DNA, 25 bp, Homo sapien
ttgcgcaacagctgcacgtgcggcg

SEQ ID NO: 2884826 - DNA, 25 bp, Homo sapien
tggtagctcaggaaggcattgtcgt

SEQ ID NO: 2884827 - DNA, 25 bp, Homo sapien
ccatggccgtgagcaccggcttgcg

SEQ ID NO: 2884828 - DNA, 25 bp, Homo sapien
ccccgcagcggggccttcgcaggag

SEQ ID NO: 2884829 - DNA, 25 bp, Homo sapien
tccccgcagcggggccttcgcagga

SEQ ID NO: 2884830 - DNA, 25 bp, Homo sapien
ctccccttggtgaaggagtccccag

SEQ ID NO: 2884831 - DNA, 25 bp, Homo sapien
cagggtcaccgcgacgctgcggttg

SEQ ID NO: 2884832 - DNA, 25 bp, Homo sapien
ttgctgtccaggacggtcccggcct

SEQ ID NO: 2884833 - DNA, 25 bp, Homo sapien
ccaggacgcccaccgtgtggttgct

SEQ ID NO: 2884834 - DNA, 25 bp, Homo sapien
tcgctcgcgtagatcagcaccgcgg

SEQ ID NO: 2884835 - DNA, 25 bp, Homo sapien
gcatgcgccggaactgctctgccgt

SEQ ID NO: 2884836 - DNA, 25 bp, Homo sapien
tccaggtagcgcgtgacgtagacca

SEQ ID NO: 2884837 - DNA, 25 bp, Homo sapien
atgcgccggaactgctctgccgtgg

SEQ ID NO: 2884838 - DNA, 25 bp, Homo sapien
agcccgttgtccaggtagcgcgtga

SEQ ID NO: 2884839 - DNA, 25 bp, Homo sapien
tcggcccgacctcagggcgaacgcc

SEQ ID NO: 2884840 - DNA, 25 bp, Homo sapien
gagctggggacgctcggcccgacct

SEQ ID NO: 2884841 - DNA, 25 bp, Homo sapien
ggcgcagtggccggtcctcagggtt

SEQ ID NO: 2884842 - DNA, 25 bp, Homo sapien
ctcccacccacaccgcctcggagcc

SEQ ID NO: 2884843 - DNA, 25 bp, Homo sapien
ggggcgcagggtcaggcggccgccg

SEQ ID NO: 2884844 - DNA, 25 bp, Homo sapien
caaaagcgacggcagccgcagcgcg

SEQ ID NO: 2884845 - DNA, 25 bp, Homo sapien
gggcgcagggtcaggcggccgccgg

SEQ ID NO: 2884846 - DNA, 25 bp, Homo sapien
cagcgcggggcgcagggtcaggcgg

SEQ ID NO: 2884847 - DNA, 25 bp, Homo sapien
tgcccgggcggcttctcggggcgcg

SEQ ID NO: 2884848 - DNA, 25 bp, Homo sapien
ctgcccgggcggcttctcggggcgc

SEQ ID NO: 2884849 - DNA, 25 bp, Homo sapien
gcggcttctcggggcgcgcacacac

SEQ ID NO: 2884850 - DNA, 25 bp, Homo sapien
cgggcggcttctcggggcgcgcaca

SEQ ID NO: 2884851 - DNA, 25 bp, Homo sapien
gaagggctgtgatggcgtcggggaa

SEQ ID NO: 2884852 - DNA, 25 bp, Homo sapien
agggctgtgatggcgtcggggaagg

SEQ ID NO: 2884853 - DNA, 25 bp, Homo sapien
ggctgtgatggcgtcggggaagggg

SEQ ID NO: 2884854 - DNA, 25 bp, Homo sapien
gccgcggcgcgggttaggggactgc

SEQ ID NO: 2884855 - DNA, 25 bp, Homo sapien
gttcatccgaccagaccagaaccag

SEQ ID NO: 2884856 - DNA, 25 bp, Homo sapien
gagcccacgtgttcatccgaccaga

SEQ ID NO: 2884857 - DNA, 25 bp, Homo sapien
ttggagcccacgtgttcatccgacc

SEQ ID NO: 2884858 - DNA, 25 bp, Homo sapien
acgtgttcatccgaccagaccagaa

SEQ ID NO: 2884859 - DNA, 25 bp, Homo sapien
gacccagggacctgcctaggaccag

SEQ ID NO: 2884860 - DNA, 25 bp, Homo sapien
acccagggacctgcctaggaccagg

SEQ ID NO: 2884861 - DNA, 25 bp, Homo sapien
cagggacctgcctaggaccaggcag

SEQ ID NO: 2884862 - DNA, 25 bp, Homo sapien
ccagggacctgcctaggaccaggca

SEQ ID NO: 2884863 - DNA, 25 bp, Homo sapien
actggatctcgtatgtccacaggca

SEQ ID NO: 2884864 - DNA, 25 bp, Homo sapien
gaacacaaagaggttgaaggtcgat

SEQ ID NO: 2884865 - DNA, 25 bp, Homo sapien
ggtgtacgccttaccgtcctgagag

SEQ ID NO: 2884866 - DNA, 25 bp, Homo sapien
gaaggtcgatggcttcctgctgacc

SEQ ID NO: 2884867 - DNA, 25 bp, Homo sapien
tcgaactcggtaggagccagagaca

SEQ ID NO: 2884868 - DNA, 25 bp, Homo sapien
tagtccagggctcgaactcggtagg

SEQ ID NO: 2884869 - DNA, 25 bp, Homo sapien
tcgggcccagtagtccagggctcga

SEQ ID NO: 2884870 - DNA, 25 bp, Homo sapien
gctcgaactcggtaggagccagaga

SEQ ID NO: 2884871 - DNA, 25 bp, Homo sapien
tcatggattgcccggggatgggggc

SEQ ID NO: 2884872 - DNA, 25 bp, Homo sapien
gatgggggccctcttggcacaggga

SEQ ID NO: 2884873 - DNA, 25 bp, Homo sapien
catggattgcccggggatgggggcc

SEQ ID NO: 2884874 - DNA, 25 bp, Homo sapien
cggggatgggggccctcttggcaca

SEQ ID NO: 2884875 - DNA, 25 bp, Homo sapien
cgctgactgccggtggaggtgcaac

SEQ ID NO: 2884876 - DNA, 25 bp, Homo sapien
ccccagctcgctgactgccggtgga

SEQ ID NO: 2884877 - DNA, 25 bp, Homo sapien
ctgactgccggtggaggtgcaaccc

SEQ ID NO: 2884878 - DNA, 25 bp, Homo sapien
gcagccccagctcgctgactgccgg

SEQ ID NO: 2884879 - DNA, 25 bp, Homo sapien
ttgcaaagggggtgatgggagggca

SEQ ID NO: 2884880 - DNA, 25 bp, Homo sapien
aatatattgcaaagggggtgatggg

SEQ ID NO: 2884881 - DNA, 25 bp, Homo sapien
tatattgcaaagggggtgatgggag

SEQ ID NO: 2884882 - DNA, 25 bp, Homo sapien
tattgcaaagggggtgatgggaggg

SEQ ID NO: 2884883 - DNA, 25 bp, Homo sapien
tggggtacgggagtcttccctcatg

SEQ ID NO: 2884884 - DNA, 25 bp, Homo sapien
gtacgggagtcttccctcatgcagc

SEQ ID NO: 2884885 - DNA, 25 bp, Homo sapien
caccctccaccgtgctggggtacgg

SEQ ID NO: 2884886 - DNA, 25 bp, Homo sapien
caccgtgctggggtacgggagtctt

SEQ ID NO: 2884887 - DNA, 25 bp, Homo sapien
gagggtccctcgtgggtctctgtcc

SEQ ID NO: 2884888 - DNA, 25 bp, Homo sapien
tgaccgtcactttgcctccagagga

SEQ ID NO: 2884889 - DNA, 25 bp, Homo sapien
tccatctctgtaaactgtcatcaag

SEQ ID NO: 2884890 - DNA, 25 bp, Homo sapien
gccatgtctcaaatccggagccaag

SEQ ID NO: 2884891 - DNA, 25 bp, Homo sapien
aggcctcacagaggcggcatctcag

SEQ ID NO: 2884892 - DNA, 25 bp, Homo sapien
tcacagaggcggcatctcaggaaca

SEQ ID NO: 2884893 - DNA, 25 bp, Homo sapien
gggcaggcctcacagaggcggcatc

SEQ ID NO: 2884894 - DNA, 25 bp, Homo sapien
caggcctcacagaggcggcatctca

SEQ ID NO: 2884895 - DNA, 25 bp, Homo sapien
ctgccccggggcagaagaggcagga

SEQ ID NO: 2884896 - DNA, 25 bp, Homo sapien
ggatcctcgcttgcccgcgacagca

SEQ ID NO: 2884897 - DNA, 25 bp, Homo sapien
ttcgctagcacggatcctcgcttgc

SEQ ID NO: 2884898 - DNA, 25 bp, Homo sapien
ccaggcgcgcaggttcgctagcacg

SEQ ID NO: 2884899 - DNA, 25 bp, Homo sapien
gcgcaggttcgctagcacggatcct

SEQ ID NO: 2884900 - DNA, 25 bp, Homo sapien
gctgccggacacaggtgcgtggaaa

SEQ ID NO: 2884901 - DNA, 25 bp, Homo sapien
gcccgtgggagagcggcgctgaact

SEQ ID NO: 2884902 - DNA, 25 bp, Homo sapien
aggaggcagcgctcccacagatgtg

SEQ ID NO: 2884903 - DNA, 25 bp, Homo sapien
aacttcccggacagctggcgaggag

SEQ ID NO: 2884904 - DNA, 25 bp, Homo sapien
ctgtcccacaaggagccagcagcgc

SEQ ID NO: 2884905 - DNA, 25 bp, Homo sapien
gtcccacaaggagccagcagcgccg

SEQ ID NO: 2884906 - DNA, 25 bp, Homo sapien
gcagcgccggggcccacctgccgcc

SEQ ID NO: 2884907 - DNA, 25 bp, Homo sapien
agcgccggggcccacctgccgccct

SEQ ID NO: 2884908 - DNA, 25 bp, Homo sapien
ctgggccagcgtgggcgtcgcgagg

SEQ ID NO: 2884909 - DNA, 25 bp, Homo sapien
aggtgcgctcggacggcccatcctg

SEQ ID NO: 2884910 - DNA, 25 bp, Homo sapien
tcgcgagggcggatggaggtgcgct

SEQ ID NO: 2884911 - DNA, 25 bp, Homo sapien
ggccgtcccaaggtgctggttccca

SEQ ID NO: 2884912 - DNA, 25 bp, Homo sapien
tcagaagggggcggactggacggcc

SEQ ID NO: 2884913 - DNA, 25 bp, Homo sapien
gccgcgggagcttcgaggcttccag

SEQ ID NO: 2884914 - DNA, 25 bp, Homo sapien
cagaagggggcggactggacggccg

SEQ ID NO: 2884915 - DNA, 25 bp, Homo sapien
ggtcgggtcctcaactctcgagaca

SEQ ID NO: 2884916 - DNA, 25 bp, Homo sapien
ccgggtcgggtcctcaactctcgag

SEQ ID NO: 2884917 - DNA, 25 bp, Homo sapien
gccgggcccagaccgctctctggtt

SEQ ID NO: 2884918 - DNA, 25 bp, Homo sapien
tgcccgcggcagtctgacctctgcg

SEQ ID NO: 2884919 - DNA, 25 bp, Homo sapien
gggcgccgcatcccgccgccccgcg

SEQ ID NO: 2884920 - DNA, 25 bp, Homo sapien
gtgcgctccgcggtcatcgccgccc

SEQ ID NO: 2884921 - DNA, 25 bp, Homo sapien
ccgcggcgtgcgctccgcggtcatc

SEQ ID NO: 2884922 - DNA, 25 bp, Homo sapien
gctccgcggtcatcgccgccccggg

SEQ ID NO: 2884923 - DNA, 25 bp, Homo sapien
tctccaaacaccgtctggattcctg

SEQ ID NO: 2884924 - DNA, 25 bp, Homo sapien
gcagacaaagggtttacactaatta

SEQ ID NO: 2884925 - DNA, 25 bp, Homo sapien
ggccctgcccgcaggacacacaaca

SEQ ID NO: 2884926 - DNA, 25 bp, Homo sapien
gattcctggcgcttgtaactccggc

SEQ ID NO: 2884927 - DNA, 25 bp, Homo sapien
taacacgtggaactgggagataccg

SEQ ID NO: 2884928 - DNA, 25 bp, Homo sapien
ccgtcactaacacgtggaactggga

SEQ ID NO: 2884929 - DNA, 25 bp, Homo sapien
attgggggcgccgtcactaacacgt

SEQ ID NO: 2884930 - DNA, 25 bp, Homo sapien
gtggaactgggagataccgccctcc

SEQ ID NO: 2884931 - DNA, 25 bp, Homo sapien
ggagcagcaacagggggctcggcgt

SEQ ID NO: 2884932 - DNA, 25 bp, Homo sapien
gcagcaacagggggctcggcgtcat

SEQ ID NO: 2884933 - DNA, 25 bp, Homo sapien
gagcagcaacagggggctcggcgtc

SEQ ID NO: 2884934 - DNA, 25 bp, Homo sapien
agcagcaacagggggctcggcgtca

SEQ ID NO: 2884935 - DNA, 25 bp, Homo sapien
agcacagcgtgtgcccagaggcacg

SEQ ID NO: 2884936 - DNA, 25 bp, Homo sapien
tcggtgccatgagcacgtaccaggc

SEQ ID NO: 2884937 - DNA, 25 bp, Homo sapien
gctgccacttagatgtcggtgccat

SEQ ID NO: 2884938 - DNA, 25 bp, Homo sapien
gagtctgcgggcacacgtcacccat

SEQ ID NO: 2884939 - DNA, 25 bp, Homo sapien
gactggtggacacagcgcggacaat

SEQ ID NO: 2884940 - DNA, 25 bp, Homo sapien
agcacccgaacgtgcccatataagg

SEQ ID NO: 2884941 - DNA, 25 bp, Homo sapien
catataaggccaggttggatgcggc

SEQ ID NO: 2884942 - DNA, 25 bp, Homo sapien
ctgagtggtcaacacgcccaaaggg

SEQ ID NO: 2884943 - DNA, 25 bp, Homo sapien
gagcctccctggccgagtggccaga

SEQ ID NO: 2884944 - DNA, 25 bp, Homo sapien
tggcataaggcccacctggtcaccg

SEQ ID NO: 2884945 - DNA, 25 bp, Homo sapien
aagtccaggccgctggccatggtag

SEQ ID NO: 2884946 - DNA, 25 bp, Homo sapien
agtatggcctgagtgcccacacagc

SEQ ID NO: 2884947 - DNA, 25 bp, Homo sapien
cacgaagaggcgggctctgccgccc

SEQ ID NO: 2884948 - DNA, 25 bp, Homo sapien
gaagaggcgggctctgccgcccact

SEQ ID NO: 2884949 - DNA, 25 bp, Homo sapien
cgtctccacgaagaggcgggctctg

SEQ ID NO: 2884950 - DNA, 25 bp, Homo sapien
ctgaggaggacgaaggcgaaggggg

SEQ ID NO: 2884951 - DNA, 25 bp, Homo sapien
ggaaagcagcttgatcccagctccc

SEQ ID NO: 2884952 - DNA, 25 bp, Homo sapien
cagggcctttgccacgcaaagccag

SEQ ID NO: 2884953 - DNA, 25 bp, Homo sapien
tggatatcctcagccccaaggccgc

SEQ ID NO: 2884954 - DNA, 25 bp, Homo sapien
cctttgccacgcaaagccagggctg

SEQ ID NO: 2884955 - DNA, 25 bp, Homo sapien
tatgatctgagtgtagcgatgtgcc

SEQ ID NO: 2884956 - DNA, 25 bp, Homo sapien
cctaacgaaggtgcacagtgggctg

SEQ ID NO: 2884957 - DNA, 25 bp, Homo sapien
gaaacacacttggatggacctcgcg

SEQ ID NO: 2884958 - DNA, 25 bp, Homo sapien
gattccagaacttatgacccagcgg

SEQ ID NO: 2884959 - DNA, 25 bp, Homo sapien
cacctcagcccgctgcacacgggcc

SEQ ID NO: 2884960 - DNA, 25 bp, Homo sapien
cacgtccacctcagcccgctgcaca

SEQ ID NO: 2884961 - DNA, 25 bp, Homo sapien
ccacctcagcccgctgcacacgggc

SEQ ID NO: 2884962 - DNA, 25 bp, Homo sapien
tccacctcagcccgctgcacacggg

SEQ ID NO: 2884963 - DNA, 25 bp, Homo sapien
tggggcaaaggagtccaccctgggc

SEQ ID NO: 2884964 - DNA, 25 bp, Homo sapien
agccggggtccagtctgcgggcaca

SEQ ID NO: 2884965 - DNA, 25 bp, Homo sapien
accctgggccgagcagcaagcccgg

SEQ ID NO: 2884966 - DNA, 25 bp, Homo sapien
tctcccagcacggccgcagttcctg

SEQ ID NO: 2884967 - DNA, 25 bp, Homo sapien
atggccgccagggagagtggcaggc

SEQ ID NO: 2884968 - DNA, 25 bp, Homo sapien
ggcaccctggggcttgaccagcagc

SEQ ID NO: 2884969 - DNA, 25 bp, Homo sapien
tgtgggtatccctctccctcctgtg

SEQ ID NO: 2884970 - DNA, 25 bp, Homo sapien
tgtgctgacccgctgaggctgtcac

SEQ ID NO: 2884971 - DNA, 25 bp, Homo sapien
aggtatgccttggcccgtgaagccc

SEQ ID NO: 2884972 - DNA, 25 bp, Homo sapien
tgccttggcccgtgaagcccctcct

SEQ ID NO: 2884973 - DNA, 25 bp, Homo sapien
cttggcccgtgaagcccctcctctc

SEQ ID NO: 2884974 - DNA, 25 bp, Homo sapien
gtatgccttggcccgtgaagcccct

SEQ ID NO: 2884975 - DNA, 25 bp, Homo sapien
ctgcgtcaggcaccctggtgcatgg

SEQ ID NO: 2884976 - DNA, 25 bp, Homo sapien
acacagtgatgcctgcgtcaggcac

SEQ ID NO: 2884977 - DNA, 25 bp, Homo sapien
cacacagtgatgcctgcgtcaggca

SEQ ID NO: 2884978 - DNA, 25 bp, Homo sapien
cgtcaggcaccctggtgcatggtac

SEQ ID NO: 2884979 - DNA, 25 bp, Homo sapien
gatgctggtcaacaacacagcaggg

SEQ ID NO: 2884980 - DNA, 25 bp, Homo sapien
gctgatgctggtcaacaacacagca

SEQ ID NO: 2884981 - DNA, 25 bp, Homo sapien
tgctggtcaacaacacagcagggtg

SEQ ID NO: 2884982 - DNA, 25 bp, Homo sapien
gctggtcaacaacacagcagggtgg

SEQ ID NO: 2884983 - DNA, 25 bp, Homo sapien
gggccgcgtgttcctccaatacaca

SEQ ID NO: 2884984 - DNA, 25 bp, Homo sapien
tgtgacgtctcccactggcgtcttc

SEQ ID NO: 2884985 - DNA, 25 bp, Homo sapien
ttaacagtggccctgtgacgtctcc

SEQ ID NO: 2884986 - DNA, 25 bp, Homo sapien
ggcgtcttcagacactcagggagca

SEQ ID NO: 2884987 - DNA, 25 bp, Homo sapien
gcagaacaccaagaggtagcagctg

SEQ ID NO: 2884988 - DNA, 25 bp, Homo sapien
gtgcagaacaccaagaggtagcagc

SEQ ID NO: 2884989 - DNA, 25 bp, Homo sapien
cgtgcagaacaccaagaggtagcag

SEQ ID NO: 2884990 - DNA, 25 bp, Homo sapien
tgcagaacaccaagaggtagcagct

SEQ ID NO: 2884991 - DNA, 25 bp, Homo sapien
tgacagtgtccatcccgcactgcag

SEQ ID NO: 2884992 - DNA, 25 bp, Homo sapien
tctccatgtcggagaggcggccgca

SEQ ID NO: 2884993 - DNA, 25 bp, Homo sapien
tctcgccagcccatgggtgacagtg

SEQ ID NO: 2884994 - DNA, 25 bp, Homo sapien
catgggtgacagtgtccatcccgca

SEQ ID NO: 2884995 - DNA, 25 bp, Homo sapien
cctgagcctgtgcaatgtgtggatg

SEQ ID NO: 2884996 - DNA, 25 bp, Homo sapien
acaagcaaccgagcacggcgggctg

SEQ ID NO: 2884997 - DNA, 25 bp, Homo sapien
gcacccacgtctgtgtcaatatcag

SEQ ID NO: 2884998 - DNA, 25 bp, Homo sapien
tgtgtggatgagagtctgtgcagca

SEQ ID NO: 2884999 - DNA, 25 bp, Homo sapien
cgggcctgagctccacctgggtcac

SEQ ID NO: 2885000 - DNA, 25 bp, Homo sapien
ctcgggcctgagctccacctgggtc

SEQ ID NO: 2885001 - DNA, 25 bp, Homo sapien
tcgggcctgagctccacctgggtca

SEQ ID NO: 2885002 - DNA, 25 bp, Homo sapien
tgggaccgaggaacagtcagcgagg

SEQ ID NO: 2885003 - DNA, 25 bp, Homo sapien
gaccgaggaacagtcagcgaggagg

SEQ ID NO: 2885004 - DNA, 25 bp, Homo sapien
ctgcgggtgggaccgaggaacagtc

SEQ ID NO: 2885005 - DNA, 25 bp, Homo sapien
cgggtgggaccgaggaacagtcagc

SEQ ID NO: 2885006 - DNA, 25 bp, Homo sapien
gtagttgacgctcaggctgccgaag

SEQ ID NO: 2885007 - DNA, 25 bp, Homo sapien
tgcggccatccttggtccacatggt

SEQ ID NO: 2885008 - DNA, 25 bp, Homo sapien
ggaccaccttgtccgccatctttgg

SEQ ID NO: 2885009 - DNA, 25 bp, Homo sapien
ccagcacgacgagggtgtagttgac

SEQ ID NO: 2885010 - DNA, 25 bp, Homo sapien
gctggctggcggggtcctcttgacc

SEQ ID NO: 2885011 - DNA, 25 bp, Homo sapien
tggctggcggggtcctcttgacccc

SEQ ID NO: 2885012 - DNA, 25 bp, Homo sapien
tgctggctggcggggtcctcttgac

SEQ ID NO: 2885013 - DNA, 25 bp, Homo sapien
ctggctggcggggtcctcttgaccc

SEQ ID NO: 2885014 - DNA, 25 bp, Homo sapien
tggagggctgtgtgaagcgcggtcg

SEQ ID NO: 2885015 - DNA, 25 bp, Homo sapien
cttggagggctgtgtgaagcgcggt

SEQ ID NO: 2885016 - DNA, 25 bp, Homo sapien
ttggagggctgtgtgaagcgcggtc

SEQ ID NO: 2885017 - DNA, 25 bp, Homo sapien
gagggctgtgtgaagcgcggtcgtg

SEQ ID NO: 2885018 - DNA, 25 bp, Homo sapien
ttcgacacgcggcaggtgtatttgc

SEQ ID NO: 2885019 - DNA, 25 bp, Homo sapien
tgtatttgccgctgtcctccggccg

SEQ ID NO: 2885020 - DNA, 25 bp, Homo sapien
tcatccacgtgatgtcgggccgagg

SEQ ID NO: 2885021 - DNA, 25 bp, Homo sapien
gcgtcaaggcctggtcgtccttcat

SEQ ID NO: 2885022 - DNA, 25 bp, Homo sapien
gtcgctgcgcaccttgcactggaag

SEQ ID NO: 2885023 - DNA, 25 bp, Homo sapien
tacatgcccgcatcgtcctggcggg

SEQ ID NO: 2885024 - DNA, 25 bp, Homo sapien
ttggcgccaaggcagatgtacatgc

SEQ ID NO: 2885025 - DNA, 25 bp, Homo sapien
cagcttattgaggtaggagccgtcg

SEQ ID NO: 2885026 - DNA, 25 bp, Homo sapien
tccgggcaccagcatggtgtggcgt

SEQ ID NO: 2885027 - DNA, 25 bp, Homo sapien
aggggaacgccgacacaaagaccag

SEQ ID NO: 2885028 - DNA, 25 bp, Homo sapien
gggctgtggagacggtgcccctggg

SEQ ID NO: 2885029 - DNA, 25 bp, Homo sapien
ctccctcggcagatgacctggccag

SEQ ID NO: 2885030 - DNA, 25 bp, Homo sapien
tgtggagacggtgcccctgggctgc

SEQ ID NO: 2885031 - DNA, 25 bp, Homo sapien
ccgaggacgaggaggccacaggtgg

SEQ ID NO: 2885032 - DNA, 25 bp, Homo sapien
cacaggtggccctggcggttttggg

SEQ ID NO: 2885033 - DNA, 25 bp, Homo sapien
tagtggccgaggacgaggaggccac

SEQ ID NO: 2885034 - DNA, 25 bp, Homo sapien
gccacaggtggccctggcggttttg

SEQ ID NO: 2885035 - DNA, 25 bp, Homo sapien
ctgagggcggccaacgagggaaggt

SEQ ID NO: 2885036 - DNA, 25 bp, Homo sapien
cgcgggggtgcacggcttcttctgg

SEQ ID NO: 2885037 - DNA, 25 bp, Homo sapien
tgaagacagcgccggctgggatgcc

SEQ ID NO: 2885038 - DNA, 25 bp, Homo sapien
agggaaggtccttgtctccgctgcg

SEQ ID NO: 2885039 - DNA, 25 bp, Homo sapien
cctgggcccagtaagtgctgggggg

SEQ ID NO: 2885040 - DNA, 25 bp, Homo sapien
gggcctgggcccagtaagtgctggg

SEQ ID NO: 2885041 - DNA, 25 bp, Homo sapien
tgggcctgggcccagtaagtgctgg

SEQ ID NO: 2885042 - DNA, 25 bp, Homo sapien
ctagcactgatagtggatgtgctgg

SEQ ID NO: 2885043 - DNA, 25 bp, Homo sapien
ccttgccctccacgtgtgagtgtgt

SEQ ID NO: 2885044 - DNA, 25 bp, Homo sapien
tgtggatgtctgtgtagagtttggg

SEQ ID NO: 2885045 - DNA, 25 bp, Homo sapien
tggatgtgctggtggaccttgccct

SEQ ID NO: 2885046 - DNA, 25 bp, Homo sapien
tgcacgtgtgtgtccggataccata

SEQ ID NO: 2885047 - DNA, 25 bp, Homo sapien
tgcgtccagacagcatatccgtgtg

SEQ ID NO: 2885048 - DNA, 25 bp, Homo sapien
tgtgtgtccaggcaatatccgtgca

SEQ ID NO: 2885049 - DNA, 25 bp, Homo sapien
gcttatctgtgtgcccaggcggcat

SEQ ID NO: 2885050 - DNA, 25 bp, Homo sapien
gtccaggcagcatatctgcgcctgt

SEQ ID NO: 2885051 - DNA, 25 bp, Homo sapien
agacagcatatctgcgtgtgtccag

SEQ ID NO: 2885052 - DNA, 25 bp, Homo sapien
tgcgtgtgtgtgtgactagacagca

SEQ ID NO: 2885053 - DNA, 25 bp, Homo sapien
ggcagcatatctgcgcctgtgcacg

SEQ ID NO: 2885054 - DNA, 25 bp, Homo sapien
tgtgagtgttgaggcagcattatct

SEQ ID NO: 2885055 - DNA, 25 bp, Homo sapien
aggcagcatatctgcgtgcgtgtgt

SEQ ID NO: 2885056 - DNA, 25 bp, Homo sapien
gtgtccaggcaatatctgcacgtgt

SEQ ID NO: 2885057 - DNA, 25 bp, Homo sapien
caggcaatatctgcacgtgtgtgag

SEQ ID NO: 2885058 - DNA, 25 bp, Homo sapien
gggaaagtccctcatcaactatgag

SEQ ID NO: 2885059 - DNA, 25 bp, Homo sapien
caaggcaggtggcaaaaatagccgc

SEQ ID NO: 2885060 - DNA, 25 bp, Homo sapien
ggcacacgtactgcaggcttcacgg

SEQ ID NO: 2885061 - DNA, 25 bp, Homo sapien
atggctgaaagaccaggcgggtccc

SEQ ID NO: 2885062 - DNA, 25 bp, Homo sapien
tctcagaaccagagcgggtcaggaa

SEQ ID NO: 2885063 - DNA, 25 bp, Homo sapien
gggaaaagctctcagaaccagagcg

SEQ ID NO: 2885064 - DNA, 25 bp, Homo sapien
tcaggaagcgcgctgcacgccagca

SEQ ID NO: 2885065 - DNA, 25 bp, Homo sapien
gaagcgcgctgcacgccagcaggac

SEQ ID NO: 2885066 - DNA, 25 bp, Homo sapien
gcctgaagctgtcaccgtccaagga

SEQ ID NO: 2885067 - DNA, 25 bp, Homo sapien
gtccaaggagtcaggacttcctcag

SEQ ID NO: 2885068 - DNA, 25 bp, Homo sapien
agctgtcaccgtccaaggagtcagg

SEQ ID NO: 2885069 - DNA, 25 bp, Homo sapien
accgtccaaggagtcaggacttcct

SEQ ID NO: 2885070 - DNA, 25 bp, Homo sapien
cggcgcagggcacagacgcgtgctg

SEQ ID NO: 2885071 - DNA, 25 bp, Homo sapien
tgccgtgacggagatgcgggaaacg

SEQ ID NO: 2885072 - DNA, 25 bp, Homo sapien
cttgggagtgtggacgtgcagatgt

SEQ ID NO: 2885073 - DNA, 25 bp, Homo sapien
gtgcagatgtgacgagggagccggc

SEQ ID NO: 2885074 - DNA, 25 bp, Homo sapien
gtcctcgaagcacacggggcctctg

SEQ ID NO: 2885075 - DNA, 25 bp, Homo sapien
gcctcaagtcctcgaagcacacggg

SEQ ID NO: 2885076 - DNA, 25 bp, Homo sapien
aagtcctcgaagcacacggggcctc

SEQ ID NO: 2885077 - DNA, 25 bp, Homo sapien
cctcgaagcacacggggcctctgtg

SEQ ID NO: 2885078 - DNA, 25 bp, Homo sapien
gtgcttggccggagcagaccactgt

SEQ ID NO: 2885079 - DNA, 25 bp, Homo sapien
ccggagcagaccactgtcagaagcg

SEQ ID NO: 2885080 - DNA, 25 bp, Homo sapien
ctttcaggtgcttggccggagcaga

SEQ ID NO: 2885081 - DNA, 25 bp, Homo sapien
gaccactgtcagaagcgcagtcctg

SEQ ID NO: 2885082 - DNA, 25 bp, Homo sapien
tcaccaccccttttgtcggctgtgg

SEQ ID NO: 2885083 - DNA, 25 bp, Homo sapien
tgtggccctggccaaatcaccagag

SEQ ID NO: 2885084 - DNA, 25 bp, Homo sapien
ctgtggagagtggagcttcaccacc

SEQ ID NO: 2885085 - DNA, 25 bp, Homo sapien
tggccctggccaaatcaccagaggc

SEQ ID NO: 2885086 - DNA, 25 bp, Homo sapien
tcacacgctgacggcctcagccaca

SEQ ID NO: 2885087 - DNA, 25 bp, Homo sapien
aggacggccgtgcccactctcttgg

SEQ ID NO: 2885088 - DNA, 25 bp, Homo sapien
tcaggggtctcagggcatctgaggt

SEQ ID NO: 2885089 - DNA, 25 bp, Homo sapien
acagaatccatgtcggcctgcgtgc

SEQ ID NO: 2885090 - DNA, 25 bp, Homo sapien
tccaccgctaccccggactcaggcc

SEQ ID NO: 2885091 - DNA, 25 bp, Homo sapien
tgccggctgggccagatgcggctgc

SEQ ID NO: 2885092 - DNA, 25 bp, Homo sapien
cgcctccaccgctaccccggactca

SEQ ID NO: 2885093 - DNA, 25 bp, Homo sapien
ctcctggaggacccgggcacacagc

SEQ ID NO: 2885094 - DNA, 25 bp, Homo sapien
tcagggcagattcccaccggtcccc

SEQ ID NO: 2885095 - DNA, 25 bp, Homo sapien
agccccacatggcatcagggcagat

SEQ ID NO: 2885096 - DNA, 25 bp, Homo sapien
aggcagacggagcatcctggagtcc

SEQ ID NO: 2885097 - DNA, 25 bp, Homo sapien
gaccccagaggcagacggagcatcc

SEQ ID NO: 2885098 - DNA, 25 bp, Homo sapien
gggtaggcggtcccaaaacagctgc

SEQ ID NO: 2885099 - DNA, 25 bp, Homo sapien
cgggtaggcggtcccaaaacagctg

SEQ ID NO: 2885100 - DNA, 25 bp, Homo sapien
acaggagcctcctttaaagtaggca

SEQ ID NO: 2885101 - DNA, 25 bp, Homo sapien
ttggccgatgccacaggagcctcct

SEQ ID NO: 2885102 - DNA, 25 bp, Homo sapien
gagcctcctttaaagtaggcagtgc

SEQ ID NO: 2885103 - DNA, 25 bp, Homo sapien
cttggccgatgccacaggagcctcc

SEQ ID NO: 2885104 - DNA, 25 bp, Homo sapien
gagcagacaggcagcgcttccatgt

SEQ ID NO: 2885105 - DNA, 25 bp, Homo sapien
accactgcatcgtccttggcgacga

SEQ ID NO: 2885106 - DNA, 25 bp, Homo sapien
tccgctctgagaggcaccgcggctt

SEQ ID NO: 2885107 - DNA, 25 bp, Homo sapien
gaagtgaaccacgactgcgtgttcc

SEQ ID NO: 2885108 - DNA, 25 bp, Homo sapien
acttccgggtcaacagtggcctcag

SEQ ID NO: 2885109 - DNA, 25 bp, Homo sapien
gactgattagtgcagacggactccg

SEQ ID NO: 2885110 - DNA, 25 bp, Homo sapien
tgtgatgttagctcaacttgaccac

SEQ ID NO: 2885111 - DNA, 25 bp, Homo sapien
gaaggaagccgttcactggactgat

SEQ ID NO: 2885112 - DNA, 25 bp, Homo sapien
cagtcctccagccttcgtgcccacc

SEQ ID NO: 2885113 - DNA, 25 bp, Homo sapien
ctgaaagatgagcacccagccaccc

SEQ ID NO: 2885114 - DNA, 25 bp, Homo sapien
gtcctccagccttcgtgcccaccag

SEQ ID NO: 2885115 - DNA, 25 bp, Homo sapien
agccacccgctctgcccccttccag

SEQ ID NO: 2885116 - DNA, 25 bp, Homo sapien
cagagatgctccgagcattcatgat

SEQ ID NO: 2885117 - DNA, 25 bp, Homo sapien
tcttgaatttattaggattccacct

SEQ ID NO: 2885118 - DNA, 25 bp, Homo sapien
tgaatttattaggattccacctctg

SEQ ID NO: 2885119 - DNA, 25 bp, Homo sapien
agatgctccgagcattcatgatgtt

SEQ ID NO: 2885120 - DNA, 25 bp, Homo sapien
cttgctatccagctgctgatgattc

SEQ ID NO: 2885121 - DNA, 25 bp, Homo sapien
agtgaggctgaaactcagctgggac

SEQ ID NO: 2885122 - DNA, 25 bp, Homo sapien
gctgggactggccagttcgtttcca

SEQ ID NO: 2885123 - DNA, 25 bp, Homo sapien
gattcagatggcttacatattctct

SEQ ID NO: 2885124 - DNA, 25 bp, Homo sapien
tactgctcttcaggatgacgcctgg

SEQ ID NO: 2885125 - DNA, 25 bp, Homo sapien
agctctgggtggctttcgggccttc

SEQ ID NO: 2885126 - DNA, 25 bp, Homo sapien
gaaggactcctcaggattctccaag

SEQ ID NO: 2885127 - DNA, 25 bp, Homo sapien
gacgcctggtgtgacttgattctca

SEQ ID NO: 2885128 - DNA, 25 bp, Homo sapien
tgctcccaatctgtcatcattggta

SEQ ID NO: 2885129 - DNA, 25 bp, Homo sapien
tagcatcgctaaaaaccaagaacac

SEQ ID NO: 2885130 - DNA, 25 bp, Homo sapien
catcattggtatttctctgaaccac

SEQ ID NO: 2885131 - DNA, 25 bp, Homo sapien
catgttaccgatgtggtgccctagc

SEQ ID NO: 2885132 - DNA, 25 bp, Homo sapien
tggcagctctgggttcacaggttcc

SEQ ID NO: 2885133 - DNA, 25 bp, Homo sapien
cagtctcagaacctgcgctggcagc

SEQ ID NO: 2885134 - DNA, 25 bp, Homo sapien
ttcacaggttcctgtgggttgagga

SEQ ID NO: 2885135 - DNA, 25 bp, Homo sapien
gatggtggcagaagcggcctcgtgg

SEQ ID NO: 2885136 - DNA, 25 bp, Homo sapien
cagtagacagactttgcacagtgct

SEQ ID NO: 2885137 - DNA, 25 bp, Homo sapien
gctgggtcatgagaacgctcctgtt

SEQ ID NO: 2885138 - DNA, 25 bp, Homo sapien
tataccagacgtgtggcatttccca

SEQ ID NO: 2885139 - DNA, 25 bp, Homo sapien
taacctctcgtgcaacagtagacag

SEQ ID NO: 2885140 - DNA, 25 bp, Homo sapien
ggtgttgagttcacttggcttcagc

SEQ ID NO: 2885141 - DNA, 25 bp, Homo sapien
ctttaacacccgcagtggccatgtg

SEQ ID NO: 2885142 - DNA, 25 bp, Homo sapien
gtgttgagttcacttggcttcagcg

SEQ ID NO: 2885143 - DNA, 25 bp, Homo sapien
ttaacacccgcagtggccatgtgct

SEQ ID NO: 2885144 - DNA, 25 bp, Homo sapien
gtggctcctgttgtcaggtcttaat

SEQ ID NO: 2885145 - DNA, 25 bp, Homo sapien
gatgatggacatgaggcaccatggc

SEQ ID NO: 2885146 - DNA, 25 bp, Homo sapien
atggctggcctcttagtggcctttc

SEQ ID NO: 2885147 - DNA, 25 bp, Homo sapien
caaagctggtgcgttagtggctcct

SEQ ID NO: 2885148 - DNA, 25 bp, Homo sapien
tgtgcatctcagcatgtccaccagg

SEQ ID NO: 2885149 - DNA, 25 bp, Homo sapien
tgcatctcagcatgtccaccaggcc

SEQ ID NO: 2885150 - DNA, 25 bp, Homo sapien
gtgcatctcagcatgtccaccaggc

SEQ ID NO: 2885151 - DNA, 25 bp, Homo sapien
gtgtgcatctcagcatgtccaccag

SEQ ID NO: 2885152 - DNA, 25 bp, Homo sapien
cctccagagaggattcccatgtgct

SEQ ID NO: 2885153 - DNA, 25 bp, Homo sapien
catacctggtatcgcctgcattttc

SEQ ID NO: 2885154 - DNA, 25 bp, Homo sapien
ttttcttccactctcgctggaggga

SEQ ID NO: 2885155 - DNA, 25 bp, Homo sapien
tatcctcaggaatccaaatctgcct

SEQ ID NO: 2885156 - DNA, 25 bp, Homo sapien
gcaggacttgagaagcgtcggcaaa

SEQ ID NO: 2885157 - DNA, 25 bp, Homo sapien
cgcttgcctgcagggtggaatgttc

SEQ ID NO: 2885158 - DNA, 25 bp, Homo sapien
gcgcgtctgctggtaggttcctcca

SEQ ID NO: 2885159 - DNA, 25 bp, Homo sapien
tcctccacgaacatgtgaagctgag

SEQ ID NO: 2885160 - DNA, 25 bp, Homo sapien
cctcattcacaccaagtccccttgg

SEQ ID NO: 2885161 - DNA, 25 bp, Homo sapien
caggccgtgcgctccagggtggttt

SEQ ID NO: 2885162 - DNA, 25 bp, Homo sapien
ctgttatcacagacatcagagccac

SEQ ID NO: 2885163 - DNA, 25 bp, Homo sapien
cagaagttgcttgagttcataaaac

SEQ ID NO: 2885164 - DNA, 25 bp, Homo sapien
gaaccagatcgatctgtgacagctt

SEQ ID NO: 2885165 - DNA, 25 bp, Homo sapien
ttcagttgctcccatttctggtcca

SEQ ID NO: 2885166 - DNA, 25 bp, Homo sapien
ccagaaggccatggaaccagatcga

SEQ ID NO: 2885167 - DNA, 25 bp, Homo sapien
catggaaccagatcgatctgtgaca

SEQ ID NO: 2885168 - DNA, 25 bp, Homo sapien
cgcttgcgccgtcggaccttgtgga

SEQ ID NO: 2885169 - DNA, 25 bp, Homo sapien
cagggttgatttcctccattcctta

SEQ ID NO: 2885170 - DNA, 25 bp, Homo sapien
aggagagccccgtggatcccgcaca

SEQ ID NO: 2885171 - DNA, 25 bp, Homo sapien
tggactcgattgctctgcaccaggg

SEQ ID NO: 2885172 - DNA, 25 bp, Homo sapien
caaagctaggtggtttccctgagaa

SEQ ID NO: 2885173 - DNA, 25 bp, Homo sapien
cagtgaaagggacaaaagaccagaa

SEQ ID NO: 2885174 - DNA, 25 bp, Homo sapien
ggcagagtcataatccttcaacagg

SEQ ID NO: 2885175 - DNA, 25 bp, Homo sapien
tacaggacctttcagaacgatgagc

SEQ ID NO: 2885176 - DNA, 25 bp, Homo sapien
tactccagcccaaacgacctgggag

SEQ ID NO: 2885177 - DNA, 25 bp, Homo sapien
caaacgacctgggagacgagtcaca

SEQ ID NO: 2885178 - DNA, 25 bp, Homo sapien
ggcgggacgttggtgctcgcggtgc

SEQ ID NO: 2885179 - DNA, 25 bp, Homo sapien
ttggtgctcgcggtgcgttcctccg

SEQ ID NO: 2885180 - DNA, 25 bp, Homo sapien
cacaactagtccaagtcgaatttca

SEQ ID NO: 2885181 - DNA, 25 bp, Homo sapien
caactagtccaagtcgaatttcaaa

SEQ ID NO: 2885182 - DNA, 25 bp, Homo sapien
ttcacaactagtccaagtcgaattt

SEQ ID NO: 2885183 - DNA, 25 bp, Homo sapien
tagtccaagtcgaatttcaaataac

SEQ ID NO: 2885184 - DNA, 25 bp, Homo sapien
gaaccaggtataggtacagatcaaa

SEQ ID NO: 2885185 - DNA, 25 bp, Homo sapien
cctggctaatatgggcaccaccaac

SEQ ID NO: 2885186 - DNA, 25 bp, Homo sapien
caggtataggtacagatcaaaagcc

SEQ ID NO: 2885187 - DNA, 25 bp, Homo sapien
catgaaccaggtataggtacagatc

SEQ ID NO: 2885188 - DNA, 25 bp, Homo sapien
gaaattcaggcatcatgtagcccag

SEQ ID NO: 2885189 - DNA, 25 bp, Homo sapien
tacagcaatgggacataggcagaca

SEQ ID NO: 2885190 - DNA, 25 bp, Homo sapien
cggaaaaggtccaagagttccatct

SEQ ID NO: 2885191 - DNA, 25 bp, Homo sapien
tcaagttacctagtaaacgagagtg

SEQ ID NO: 2885192 - DNA, 25 bp, Homo sapien
gtggtgtctggttacgagtagcttc

SEQ ID NO: 2885193 - DNA, 25 bp, Homo sapien
tgtctggttacgagtagcttcttta

SEQ ID NO: 2885194 - DNA, 25 bp, Homo sapien
tggttacgagtagcttctttagtgg

SEQ ID NO: 2885195 - DNA, 25 bp, Homo sapien
ttcattctgtttatggccgagtagt

SEQ ID NO: 2885196 - DNA, 25 bp, Homo sapien
gtatgatcaatgagaaaaaagggcc

SEQ ID NO: 2885197 - DNA, 25 bp, Homo sapien
ctgttaccctcagaataggagcagg

SEQ ID NO: 2885198 - DNA, 25 bp, Homo sapien
gaggaactctttagtgaatctggat

SEQ ID NO: 2885199 - DNA, 25 bp, Homo sapien
aaaagggccaggtcctagaggactg

SEQ ID NO: 2885200 - DNA, 25 bp, Homo sapien
atgctgacgatgtctggaccagggc

SEQ ID NO: 2885201 - DNA, 25 bp, Homo sapien
gagactcttcaaaacgttataggga

SEQ ID NO: 2885202 - DNA, 25 bp, Homo sapien
tagaagtcagcgtagtggctccctt

SEQ ID NO: 2885203 - DNA, 25 bp, Homo sapien
tctgtgagaatgtgctgagctgtac

SEQ ID NO: 2885204 - DNA, 25 bp, Homo sapien
cccaggagtgttgctgatacctggc

SEQ ID NO: 2885205 - DNA, 25 bp, Homo sapien
gagtgttgctgatacctggccttac

SEQ ID NO: 2885206 - DNA, 25 bp, Homo sapien
caggagtgttgctgatacctggcct

SEQ ID NO: 2885207 - DNA, 25 bp, Homo sapien
ggagtgttgctgatacctggcctta

SEQ ID NO: 2885208 - DNA, 25 bp, Homo sapien
tgtgcaatcttaagcaacatggatg

SEQ ID NO: 2885209 - DNA, 25 bp, Homo sapien
tgcaagattccacttacatatggta

SEQ ID NO: 2885210 - DNA, 25 bp, Homo sapien
gatttctagatttcggtactcagtg

SEQ ID NO: 2885211 - DNA, 25 bp, Homo sapien
gagtgtaaagttccagttaagcaag

SEQ ID NO: 2885212 - DNA, 25 bp, Homo sapien
gatgcacggggatgggggagacttg

SEQ ID NO: 2885213 - DNA, 25 bp, Homo sapien
ggatagtaaccctgaagctgtgatg

SEQ ID NO: 2885214 - DNA, 25 bp, Homo sapien
tgggatagtaaccctgaagctgtga

SEQ ID NO: 2885215 - DNA, 25 bp, Homo sapien
agctgtgatgcacggggatggggga

SEQ ID NO: 2885216 - DNA, 25 bp, Homo sapien
catgatatccacagtgttctaagct

SEQ ID NO: 2885217 - DNA, 25 bp, Homo sapien
atatccacagtgttctaagctctcc

SEQ ID NO: 2885218 - DNA, 25 bp, Homo sapien
tgatatccacagtgttctaagctct

SEQ ID NO: 2885219 - DNA, 25 bp, Homo sapien
tccatgatatccacagtgttctaag

SEQ ID NO: 2885220 - DNA, 25 bp, Homo sapien
atccatggtgtcctaagctctccct

SEQ ID NO: 2885221 - DNA, 25 bp, Homo sapien
ctaagctctccccatcggtgccatt

SEQ ID NO: 2885222 - DNA, 25 bp, Homo sapien
taagctctccccatcggtgccattt

SEQ ID NO: 2885223 - DNA, 25 bp, Homo sapien
tctccccatcggtgccatttccaag

SEQ ID NO: 2885224 - DNA, 25 bp, Homo sapien
ccccatcggtgccatttccaagata

SEQ ID NO: 2885225 - DNA, 25 bp, Homo sapien
gatatccacggcgtcctgagctctc

SEQ ID NO: 2885226 - DNA, 25 bp, Homo sapien
tttccatgatatccgcggcgtcctg

SEQ ID NO: 2885227 - DNA, 25 bp, Homo sapien
ccccgtcggtgccatttccatgata

SEQ ID NO: 2885228 - DNA, 25 bp, Homo sapien
tgagctctccccgtcggtgccattt

SEQ ID NO: 2885229 - DNA, 25 bp, Homo sapien
ccatgatatccacggtgttctaagc

SEQ ID NO: 2885230 - DNA, 25 bp, Homo sapien
ttccatgatatccacggtgttctaa

SEQ ID NO: 2885231 - DNA, 25 bp, Homo sapien
tccatgatatccacggtgttctaag

SEQ ID NO: 2885232 - DNA, 25 bp, Homo sapien
cttccatgatatccacggtgttcta

SEQ ID NO: 2885233 - DNA, 25 bp, Homo sapien
ggcattctaagctctccccgtcggt

SEQ ID NO: 2885234 - DNA, 25 bp, Homo sapien
gcattctaagctctccccgtcggtg

SEQ ID NO: 2885235 - DNA, 25 bp, Homo sapien
ggtgttctaaactctcgctgtgggt

SEQ ID NO: 2885236 - DNA, 25 bp, Homo sapien
gcgttctaaactctccccatcggtg

SEQ ID NO: 2885237 - DNA, 25 bp, Homo sapien
tgttctaaactctcgctgtgggtgc

SEQ ID NO: 2885238 - DNA, 25 bp, Homo sapien
gttctaaactctcgctgtgggtgcc

SEQ ID NO: 2885239 - DNA, 25 bp, Homo sapien
agcatgcagccagatgtggatgcat

SEQ ID NO: 2885240 - DNA, 25 bp, Homo sapien
gcatgcagccagatgtggatgcatc

SEQ ID NO: 2885241 - DNA, 25 bp, Homo sapien
aagcatgcagccagatgtggatgca

SEQ ID NO: 2885242 - DNA, 25 bp, Homo sapien
caggtgtgcacacgctcagggcagt

SEQ ID NO: 2885243 - DNA, 25 bp, Homo sapien
ccttcgcaggtttggaagtgcctgc

SEQ ID NO: 2885244 - DNA, 25 bp, Homo sapien
tcagagtaaagtcagggcgagcctg

SEQ ID NO: 2885245 - DNA, 25 bp, Homo sapien
gctgtcagtgtccactttgatctca

SEQ ID NO: 2885246 - DNA, 25 bp, Homo sapien
taaagtggctggtgccatcatgcca

SEQ ID NO: 2885247 - DNA, 25 bp, Homo sapien
agtcacagctgtagacccagacctc

SEQ ID NO: 2885248 - DNA, 25 bp, Homo sapien
tagctctctgcagacttaggcatcc

SEQ ID NO: 2885249 - DNA, 25 bp, Homo sapien
tcagtgatgacaccacggtccatct

SEQ ID NO: 2885250 - DNA, 25 bp, Homo sapien
gaagcttggcccctgaggtaaatag

SEQ ID NO: 2885251 - DNA, 25 bp, Homo sapien
aaatagccctgggtagccggctgtt

SEQ ID NO: 2885252 - DNA, 25 bp, Homo sapien
catcagctggatgggctcacccagg

SEQ ID NO: 2885253 - DNA, 25 bp, Homo sapien
caacgatctcatcccacgggaagct

SEQ ID NO: 2885254 - DNA, 25 bp, Homo sapien
caagacaggagcacaagtcgcacgt

SEQ ID NO: 2885255 - DNA, 25 bp, Homo sapien
aaagtaatgacccatcctgcgaaag

SEQ ID NO: 2885256 - DNA, 25 bp, Homo sapien
gaagacattccaagcgacacactgg

SEQ ID NO: 2885257 - DNA, 25 bp, Homo sapien
taacaccatggtgagttccacacgt

SEQ ID NO: 2885258 - DNA, 25 bp, Homo sapien
tgaagacggctacactaaacagtgg

SEQ ID NO: 2885259 - DNA, 25 bp, Homo sapien
ggaacttgcctaggatcgcacagga

SEQ ID NO: 2885260 - DNA, 25 bp, Homo sapien
tcagggcgtgagctcaaaaagaacc

SEQ ID NO: 2885261 - DNA, 25 bp, Homo sapien
taggccaacaagtaaccctgcagtg

SEQ ID NO: 2885262 - DNA, 25 bp, Homo sapien
tcgaagaagaggctgagtgcgtccc

SEQ ID NO: 2885263 - DNA, 25 bp, Homo sapien
cagaaccatgcgctactgtggagcc

SEQ ID NO: 2885264 - DNA, 25 bp, Homo sapien
tggagatctgaaaaacccctggctt

SEQ ID NO: 2885265 - DNA, 25 bp, Homo sapien
cacaggacgatcagaagctcagaca

SEQ ID NO: 2885266 - DNA, 25 bp, Homo sapien
gttattcgggtaaatgtagcagctg

SEQ ID NO: 2885267 - DNA, 25 bp, Homo sapien
gatgtgggagttccaccaccacagg

SEQ ID NO: 2885268 - DNA, 25 bp, Homo sapien
cacagggaaacgagaacgatactga

SEQ ID NO: 2885269 - DNA, 25 bp, Homo sapien
caagacagctaatcaggtgcccctg

SEQ ID NO: 2885270 - DNA, 25 bp, Homo sapien
gcctcagcgcccaaggtctttgcaa

SEQ ID NO: 2885271 - DNA, 25 bp, Homo sapien
cacctcggtttcagtcaggaagctg

SEQ ID NO: 2885272 - DNA, 25 bp, Homo sapien
tggcagcagggtactcgcagatttg

SEQ ID NO: 2885273 - DNA, 25 bp, Homo sapien
gatttgtgaggagagccgagccctt

SEQ ID NO: 2885274 - DNA, 25 bp, Homo sapien
gtctcggaagcaccgcaggagagct

SEQ ID NO: 2885275 - DNA, 25 bp, Homo sapien
cagggactcggactgaaaacctgcc

SEQ ID NO: 2885276 - DNA, 25 bp, Homo sapien
accggcccggcaagctgcagggact

SEQ ID NO: 2885277 - DNA, 25 bp, Homo sapien
aggactggctgcgaccgagctttaa

SEQ ID NO: 2885278 - DNA, 25 bp, Homo sapien
tcccatgtccccctctctgagcaca

SEQ ID NO: 2885279 - DNA, 25 bp, Homo sapien
ccctctctgagcacagcaaagaatg

SEQ ID NO: 2885280 - DNA, 25 bp, Homo sapien
tgagcacagcaaagaatgctcccat

SEQ ID NO: 2885281 - DNA, 25 bp, Homo sapien
cagttctcccatgtccccctctctg

SEQ ID NO: 2885282 - DNA, 25 bp, Homo sapien
ccaagactctggattccctgacctg

SEQ ID NO: 2885283 - DNA, 25 bp, Homo sapien
agactctggattccctgacctgatt

SEQ ID NO: 2885284 - DNA, 25 bp, Homo sapien
caagactctggattccctgacctga

SEQ ID NO: 2885285 - DNA, 25 bp, Homo sapien
ctctggattccctgacctgattcag

SEQ ID NO: 2885286 - DNA, 25 bp, Homo sapien
cttccagaggtgaagcagccgggca

SEQ ID NO: 2885287 - DNA, 25 bp, Homo sapien
gagccactgtgaaacctgataagag

SEQ ID NO: 2885288 - DNA, 25 bp, Homo sapien
tacatagattgctgcacgcctttgg

SEQ ID NO: 2885289 - DNA, 25 bp, Homo sapien
tcagcgtcagctaaataagtcagag

SEQ ID NO: 2885290 - DNA, 25 bp, Homo sapien
ttattttcaacaatagccccaggag

SEQ ID NO: 2885291 - DNA, 25 bp, Homo sapien
cactcagtcgggcagttaacaactc

SEQ ID NO: 2885292 - DNA, 25 bp, Homo sapien
gaacatgtgcataactgtctgcgct

SEQ ID NO: 2885293 - DNA, 25 bp, Homo sapien
cctgcttgcatagagcctgaaggtc

SEQ ID NO: 2885294 - DNA, 25 bp, Homo sapien
ttactggcacacactatgacacccg

SEQ ID NO: 2885295 - DNA, 25 bp, Homo sapien
cctcaagggtgatccatattatagc

SEQ ID NO: 2885296 - DNA, 25 bp, Homo sapien
cacagttgcaatgtgggatcataca

SEQ ID NO: 2885297 - DNA, 25 bp, Homo sapien
cattggtaggcacttgaactgattt

SEQ ID NO: 2885298 - DNA, 25 bp, Homo sapien
cattcatcatgtataaacgtcaccc

SEQ ID NO: 2885299 - DNA, 25 bp, Homo sapien
caactgcagagagtgatgattagac

SEQ ID NO: 2885300 - DNA, 25 bp, Homo sapien
tgattagacatctgtgctggtagtc

SEQ ID NO: 2885301 - DNA, 25 bp, Homo sapien
cattttcaaagggcagtgtaaaaat

SEQ ID NO: 2885302 - DNA, 25 bp, Homo sapien
gaacagagctatatatgcgcaaagt

SEQ ID NO: 2885303 - DNA, 25 bp, Homo sapien
ggtggagtattctacagacgtctgc

SEQ ID NO: 2885304 - DNA, 25 bp, Homo sapien
gacgtctgccaagtctaggtgggtt

SEQ ID NO: 2885305 - DNA, 25 bp, Homo sapien
taatgggcacaacaacctttgcagt

SEQ ID NO: 2885306 - DNA, 25 bp, Homo sapien
caacatcgggtttattctgtcagac

SEQ ID NO: 2885307 - DNA, 25 bp, Homo sapien
tatttaattggttggcacattgttc

SEQ ID NO: 2885308 - DNA, 25 bp, Homo sapien
gttcataagagtccctcataaatct

SEQ ID NO: 2885309 - DNA, 25 bp, Homo sapien
ttaattggttggcacattgttcata

SEQ ID NO: 2885310 - DNA, 25 bp, Homo sapien
tcatgagtcagtttcagtagtttgt

SEQ ID NO: 2885311 - DNA, 25 bp, Homo sapien
gaaattgggacgtgtaagtcttcca

SEQ ID NO: 2885312 - DNA, 25 bp, Homo sapien
ggtagttttggcaatctgaggcctc

SEQ ID NO: 2885313 - DNA, 25 bp, Homo sapien
tctaattgaggaacacaagatgtct

SEQ ID NO: 2885314 - DNA, 25 bp, Homo sapien
aggcctcttgcaattccgtatgaat

SEQ ID NO: 2885315 - DNA, 25 bp, Homo sapien
tggcaactgagtttagctacagcaa

SEQ ID NO: 2885316 - DNA, 25 bp, Homo sapien
caatccgaaaatggcaactgagttt

SEQ ID NO: 2885317 - DNA, 25 bp, Homo sapien
cctaatgccaatccgaaaatggcaa

SEQ ID NO: 2885318 - DNA, 25 bp, Homo sapien
gcaactgagtttagctacagcaaag

SEQ ID NO: 2885319 - DNA, 25 bp, Homo sapien
ggtggcagcagagaagggaccccag

SEQ ID NO: 2885320 - DNA, 25 bp, Homo sapien
gaggtggcagcagagaagggacccc

SEQ ID NO: 2885321 - DNA, 25 bp, Homo sapien
tggcagcagagaagggaccccagca

SEQ ID NO: 2885322 - DNA, 25 bp, Homo sapien
atgaggtggcagcagagaagggacc

SEQ ID NO: 2885323 - DNA, 25 bp, Homo sapien
tcttgtcccatggtcagcggcaggt

SEQ ID NO: 2885324 - DNA, 25 bp, Homo sapien
gttcttgtcccatggtcagcggcag

SEQ ID NO: 2885325 - DNA, 25 bp, Homo sapien
ttcttgtcccatggtcagcggcagg

SEQ ID NO: 2885326 - DNA, 25 bp, Homo sapien
ggaggccggccggagggtgtctctc

SEQ ID NO: 2885327 - DNA, 25 bp, Homo sapien
cggccggagggtgtctctctcccca

SEQ ID NO: 2885328 - DNA, 25 bp, Homo sapien
tgctgtgcccaaagtctggccgcag

SEQ ID NO: 2885329 - DNA, 25 bp, Homo sapien
tggaggagcccatttgccgtcgtgg

SEQ ID NO: 2885330 - DNA, 25 bp, Homo sapien
ggccttggcagaagaggcccgcaca

SEQ ID NO: 2885331 - DNA, 25 bp, Homo sapien
aatgacatggccttggcagaagagg

SEQ ID NO: 2885332 - DNA, 25 bp, Homo sapien
gccttggcagaagaggcccgcacac

SEQ ID NO: 2885333 - DNA, 25 bp, Homo sapien
ctcccaatgacatggccttggcaga

SEQ ID NO: 2885334 - DNA, 25 bp, Homo sapien
ggccagacttggaaacgctgaccca

SEQ ID NO: 2885335 - DNA, 25 bp, Homo sapien
agcctcgggccatctccagaggacg

SEQ ID NO: 2885336 - DNA, 25 bp, Homo sapien
ttgagtcatgggcaccagcctcggg

SEQ ID NO: 2885337 - DNA, 25 bp, Homo sapien
gtcgccggctgtggcgttggagccg

SEQ ID NO: 2885338 - DNA, 25 bp, Homo sapien
agcgggacccgccctgggaccgcag

SEQ ID NO: 2885339 - DNA, 25 bp, Homo sapien
cagcgggacccgccctgggaccgca

SEQ ID NO: 2885340 - DNA, 25 bp, Homo sapien
ccatccgcccaacctcgagctgtgc

SEQ ID NO: 2885341 - DNA, 25 bp, Homo sapien
gatgcagcccccatccgcccaacct

SEQ ID NO: 2885342 - DNA, 25 bp, Homo sapien
ccccatccgcccaacctcgagctgt

SEQ ID NO: 2885343 - DNA, 25 bp, Homo sapien
gtgcccgggatgcagcccccatccg

SEQ ID NO: 2885344 - DNA, 25 bp, Homo sapien
acacttctgggctggtttgtgatgc

SEQ ID NO: 2885345 - DNA, 25 bp, Homo sapien
cggtgacacttctgggctggtttgt

SEQ ID NO: 2885346 - DNA, 25 bp, Homo sapien
gacacttctgggctggtttgtgatg

SEQ ID NO: 2885347 - DNA, 25 bp, Homo sapien
gtgacacttctgggctggtttgtga

SEQ ID NO: 2885348 - DNA, 25 bp, Homo sapien
ccatgaggaacgtgagcatgaccat

SEQ ID NO: 2885349 - DNA, 25 bp, Homo sapien
gaagtcggaacgtttggaagctctg

SEQ ID NO: 2885350 - DNA, 25 bp, Homo sapien
tcggaagcgctgtttcccatgagga

SEQ ID NO: 2885351 - DNA, 25 bp, Homo sapien
tcccgtgaggaatcttcggaagcgc

SEQ ID NO: 2885352 - DNA, 25 bp, Homo sapien
tcttctgcggatgatgaacgtgttc

SEQ ID NO: 2885353 - DNA, 25 bp, Homo sapien
tgctaacaggcacaggacgtcttct

SEQ ID NO: 2885354 - DNA, 25 bp, Homo sapien
aatgaagctgttttgcgggagccag

SEQ ID NO: 2885355 - DNA, 25 bp, Homo sapien
tgtggcctcactcaaaccgtggcgg

SEQ ID NO: 2885356 - DNA, 25 bp, Homo sapien
ggcgtatccagcctcacatggcaga

SEQ ID NO: 2885357 - DNA, 25 bp, Homo sapien
aggacagaatcatggcaagggatga

SEQ ID NO: 2885358 - DNA, 25 bp, Homo sapien
gcagaattcggaggaaaaacagcca

SEQ ID NO: 2885359 - DNA, 25 bp, Homo sapien
cctttgggaccgcagagctcactgc

SEQ ID NO: 2885360 - DNA, 25 bp, Homo sapien
gcagccaaggtgacttcaagtgtct

SEQ ID NO: 2885361 - DNA, 25 bp, Homo sapien
ttctggacacggttaacaagccggc

SEQ ID NO: 2885362 - DNA, 25 bp, Homo sapien
aggagttccgcgctgacggctgact

SEQ ID NO: 2885363 - DNA, 25 bp, Homo sapien
tctcttgggtatgggcagtggctcc

SEQ ID NO: 2885364 - DNA, 25 bp, Homo sapien
taccggcgtcctcttcaaaatccca

SEQ ID NO: 2885365 - DNA, 25 bp, Homo sapien
tgagcctgtttaccggcgtcctctt

SEQ ID NO: 2885366 - DNA, 25 bp, Homo sapien
gcctgtttaccggcgtcctcttcaa

SEQ ID NO: 2885367 - DNA, 25 bp, Homo sapien
agctgagcctgtttaccggcgtcct

SEQ ID NO: 2885368 - DNA, 25 bp, Homo sapien
caccagtgccgtcctgctgatgtgg

SEQ ID NO: 2885369 - DNA, 25 bp, Homo sapien
cagaatgaggcagttggcaaacttc

SEQ ID NO: 2885370 - DNA, 25 bp, Homo sapien
tgttccaaatgaagacggcatcacg

SEQ ID NO: 2885371 - DNA, 25 bp, Homo sapien
ttttgtatgttggaacgtgccccag

SEQ ID NO: 2885372 - DNA, 25 bp, Homo sapien
gttgtagcccgggaggagctctcca

SEQ ID NO: 2885373 - DNA, 25 bp, Homo sapien
gaaaccctcggaccagagtgtgtgg

SEQ ID NO: 2885374 - DNA, 25 bp, Homo sapien
ctgtggaaggtatcgtccccagcgc

SEQ ID NO: 2885375 - DNA, 25 bp, Homo sapien
tagagaccacgccagtgaccagttg

SEQ ID NO: 2885376 - DNA, 25 bp, Homo sapien
gacacaggagtgccatgggcacggg

SEQ ID NO: 2885377 - DNA, 25 bp, Homo sapien
ctgaaaggcccatgagaaccagggc

SEQ ID NO: 2885378 - DNA, 25 bp, Homo sapien
cttcagggctcagtggacacaggag

SEQ ID NO: 2885379 - DNA, 25 bp, Homo sapien
agaaccagggcctcttggaaggagc

SEQ ID NO: 2885380 - DNA, 25 bp, Homo sapien
tgtgacttccgtgctgccaggttca

SEQ ID NO: 2885381 - DNA, 25 bp, Homo sapien
tgggtcggcccttgtgacttccgtg

SEQ ID NO: 2885382 - DNA, 25 bp, Homo sapien
gcccttgtgacttccgtgctgccag

SEQ ID NO: 2885383 - DNA, 25 bp, Homo sapien
ttccgtgctgccaggttcaggtttc

SEQ ID NO: 2885384 - DNA, 25 bp, Homo sapien
cattgatgggtggatcgaaaggcca

SEQ ID NO: 2885385 - DNA, 25 bp, Homo sapien
gcgtcacgttcctgtagcctaaaga

SEQ ID NO: 2885386 - DNA, 25 bp, Homo sapien
tagaaatgtggctcaccagtgaccg

SEQ ID NO: 2885387 - DNA, 25 bp, Homo sapien
cagaagtgaagaatggtctcgcccc

SEQ ID NO: 2885388 - DNA, 25 bp, Homo sapien
gaggaatctgtttaccccagggtca

SEQ ID NO: 2885389 - DNA, 25 bp, Homo sapien
catgtgacgctgtctgcacggctgt

SEQ ID NO: 2885390 - DNA, 25 bp, Homo sapien
ggtcatccgggtaacaggttctctg

SEQ ID NO: 2885391 - DNA, 25 bp, Homo sapien
tttatgaagcccagcgtatcacccg

SEQ ID NO: 2885392 - DNA, 25 bp, Homo sapien
accagcacgttgacagagcaggctc

SEQ ID NO: 2885393 - DNA, 25 bp, Homo sapien
tcacgggcacgcagccttctgtgtc

SEQ ID NO: 2885394 - DNA, 25 bp, Homo sapien
cccagctgtgccgaggtgggatcac

SEQ ID NO: 2885395 - DNA, 25 bp, Homo sapien
tgtgttttcatacgacccagcagtt

SEQ ID NO: 2885396 - DNA, 25 bp, Homo sapien
gcggtcgggcggtgcctggaagctg

SEQ ID NO: 2885397 - DNA, 25 bp, Homo sapien
gtcgggcggtgcctggaagctgcca

SEQ ID NO: 2885398 - DNA, 25 bp, Homo sapien
tcgggcggtgcctggaagctgccat

SEQ ID NO: 2885399 - DNA, 25 bp, Homo sapien
tgcctggcacggggcggtcgggcgg

SEQ ID NO: 2885400 - DNA, 25 bp, Homo sapien
cttggttctgtcgtgcgcctcccct

SEQ ID NO: 2885401 - DNA, 25 bp, Homo sapien
gccgaacggtcctgggtactgcttg

SEQ ID NO: 2885402 - DNA, 25 bp, Homo sapien
ctcctgctggccgaacggtcctggg

SEQ ID NO: 2885403 - DNA, 25 bp, Homo sapien
ggccgagcgtgcttgtggccgcggc

SEQ ID NO: 2885404 - DNA, 25 bp, Homo sapien
ttctctgccatgggttccaggaggc

SEQ ID NO: 2885405 - DNA, 25 bp, Homo sapien
tctctgccatgggttccaggaggca

SEQ ID NO: 2885406 - DNA, 25 bp, Homo sapien
ccgtcccctgcaggcgtgtgctgca

SEQ ID NO: 2885407 - DNA, 25 bp, Homo sapien
tggtcagtggagacccatgccccgt

SEQ ID NO: 2885408 - DNA, 25 bp, Homo sapien
gccgtactgggagccctcggctttg

SEQ ID NO: 2885409 - DNA, 25 bp, Homo sapien
gggcatgggcccagccgtactggga

SEQ ID NO: 2885410 - DNA, 25 bp, Homo sapien
cagcacccgggagtcccccacgcgg

SEQ ID NO: 2885411 - DNA, 25 bp, Homo sapien
ccagcacccgggagtcccccacgcg

SEQ ID NO: 2885412 - DNA, 25 bp, Homo sapien
agtgccccacacggttccgacgagg

SEQ ID NO: 2885413 - DNA, 25 bp, Homo sapien
tgccccacacggttccgacgaggga

SEQ ID NO: 2885414 - DNA, 25 bp, Homo sapien
gagtgccccacacggttccgacgag

SEQ ID NO: 2885415 - DNA, 25 bp, Homo sapien
ggagtgccccacacggttccgacga

SEQ ID NO: 2885416 - DNA, 25 bp, Homo sapien
ctgcaagggtgggctgtccggggaa

SEQ ID NO: 2885417 - DNA, 25 bp, Homo sapien
tgcaagggtgggctgtccggggaac

SEQ ID NO: 2885418 - DNA, 25 bp, Homo sapien
tgcagtcggaaacagccttgggctt

SEQ ID NO: 2885419 - DNA, 25 bp, Homo sapien
gaaatctcaggtgtccacccggctg

SEQ ID NO: 2885420 - DNA, 25 bp, Homo sapien
tggtcaggcctgtccgtggcatctg

SEQ ID NO: 2885421 - DNA, 25 bp, Homo sapien
tctgtcggaaagtgtctgagaggca

SEQ ID NO: 2885422 - DNA, 25 bp, Homo sapien
ctgtgggggtggccgcagccctggg

SEQ ID NO: 2885423 - DNA, 25 bp, Homo sapien
tgggggtggccgcagccctggggga

SEQ ID NO: 2885424 - DNA, 25 bp, Homo sapien
tgtgggggtggccgcagccctgggg

SEQ ID NO: 2885425 - DNA, 25 bp, Homo sapien
cctggttcttggacactggggacat

SEQ ID NO: 2885426 - DNA, 25 bp, Homo sapien
ggggacatctggatgcggctagagc

SEQ ID NO: 2885427 - DNA, 25 bp, Homo sapien
ctggttcttggacactggggacatc

SEQ ID NO: 2885428 - DNA, 25 bp, Homo sapien
cattgatgggtatcgatgatcctcc

SEQ ID NO: 2885429 - DNA, 25 bp, Homo sapien
gtcttgacgagcagcagccggtact

SEQ ID NO: 2885430 - DNA, 25 bp, Homo sapien
cagtattgagtattggccggtcttg

SEQ ID NO: 2885431 - DNA, 25 bp, Homo sapien
ccagtatagataagcattgagcagc

SEQ ID NO: 2885432 - DNA, 25 bp, Homo sapien
aacatgaggttaagcgtctgcaggg

SEQ ID NO: 2885433 - DNA, 25 bp, Homo sapien
gagaagctggagactgtcctcgtgt

SEQ ID NO: 2885434 - DNA, 25 bp, Homo sapien
ccgtgtgcggctgtgagtttttgat

SEQ ID NO: 2885435 - DNA, 25 bp, Homo sapien
cgctgggctgagagccgtgtgcggc

SEQ ID NO: 2885436 - DNA, 25 bp, Homo sapien
gggacgtggagggttggtagctgcc

SEQ ID NO: 2885437 - DNA, 25 bp, Homo sapien
ggtagctgccgagcctgggtctgag

SEQ ID NO: 2885438 - DNA, 25 bp, Homo sapien
gagggacgtggagggttggtagctg

SEQ ID NO: 2885439 - DNA, 25 bp, Homo sapien
agggttggtagctgccgagcctggg

SEQ ID NO: 2885440 - DNA, 25 bp, Homo sapien
gctttgtcacgagagggccactcga

SEQ ID NO: 2885441 - DNA, 25 bp, Homo sapien
ggcagctttgtcacgagagggccac

SEQ ID NO: 2885442 - DNA, 25 bp, Homo sapien
ggccactcgagcccggagtaatcag

SEQ ID NO: 2885443 - DNA, 25 bp, Homo sapien
tttgtcacgagagggccactcgagc

SEQ ID NO: 2885444 - DNA, 25 bp, Homo sapien
caaggtgccgtatcggctcgtggat

SEQ ID NO: 2885445 - DNA, 25 bp, Homo sapien
ggatgctgccgtccaaggtgccgta

SEQ ID NO: 2885446 - DNA, 25 bp, Homo sapien
ctcgtggatgacttgggcagtgtct

SEQ ID NO: 2885447 - DNA, 25 bp, Homo sapien
tatcggctcgtggatgacttgggca

SEQ ID NO: 2885448 - DNA, 25 bp, Homo sapien
ctgcaggccccgtggagtgcggtgg

SEQ ID NO: 2885449 - DNA, 25 bp, Homo sapien
ggagtgcggtggctccctggctcac

SEQ ID NO: 2885450 - DNA, 25 bp, Homo sapien
ccgtggagtgcggtggctccctggc

SEQ ID NO: 2885451 - DNA, 25 bp, Homo sapien
gtggagtgcggtggctccctggctc

SEQ ID NO: 2885452 - DNA, 25 bp, Homo sapien
tcctggagaggaatcttgctggcaa

SEQ ID NO: 2885453 - DNA, 25 bp, Homo sapien
tgtgctcgctgaacaaacagggaaa

SEQ ID NO: 2885454 - DNA, 25 bp, Homo sapien
gctggcaaatccatgcctttgatca

SEQ ID NO: 2885455 - DNA, 25 bp, Homo sapien
aacgtgcggctccacggatgtcctg

SEQ ID NO: 2885456 - DNA, 25 bp, Homo sapien
tggttggggaggcgttggggctatg

SEQ ID NO: 2885457 - DNA, 25 bp, Homo sapien
gttggggaggcgttggggctatggc

SEQ ID NO: 2885458 - DNA, 25 bp, Homo sapien
ctgagggaagcccagttggtttggt

SEQ ID NO: 2885459 - DNA, 25 bp, Homo sapien
ttggggaggcgttggggctatggcc

SEQ ID NO: 2885460 - DNA, 25 bp, Homo sapien
taaccttgagttgtctctctgggcg

SEQ ID NO: 2885461 - DNA, 25 bp, Homo sapien
tcttggtggctctttgccgagccaa

SEQ ID NO: 2885462 - DNA, 25 bp, Homo sapien
tgccgagccaaacgttaaccttgag

SEQ ID NO: 2885463 - DNA, 25 bp, Homo sapien
caggtggtaccagttctcacgggtg

SEQ ID NO: 2885464 - DNA, 25 bp, Homo sapien
cagtgcccaagtcaaaggtgtgtgc

SEQ ID NO: 2885465 - DNA, 25 bp, Homo sapien
tagttgtgggtaagagctctgtgcc

SEQ ID NO: 2885466 - DNA, 25 bp, Homo sapien
tggttgaactgcatcgcccaaggga

SEQ ID NO: 2885467 - DNA, 25 bp, Homo sapien
tggcaccactagtgttgctgagaac

SEQ ID NO: 2885468 - DNA, 25 bp, Homo sapien
cattaacctgagaacgtggcagtgg

SEQ ID NO: 2885469 - DNA, 25 bp, Homo sapien
ctgccatgtcctggtgggattggaa

SEQ ID NO: 2885470 - DNA, 25 bp, Homo sapien
gattggaagtgctggctcgtcctgt

SEQ ID NO: 2885471 - DNA, 25 bp, Homo sapien
gacgagccttggtccagtcctgtgg

SEQ ID NO: 2885472 - DNA, 25 bp, Homo sapien
agactggagcgttctctggcggcct

SEQ ID NO: 2885473 - DNA, 25 bp, Homo sapien
caccgtttctgtaggagcgcggcag

SEQ ID NO: 2885474 - DNA, 25 bp, Homo sapien
gctgtcgtctccgtgattgccggga

SEQ ID NO: 2885475 - DNA, 25 bp, Homo sapien
gagcacacgtccctcgggaagaaaa

SEQ ID NO: 2885476 - DNA, 25 bp, Homo sapien
tcgggcccgcgccaggcgctgacgt

SEQ ID NO: 2885477 - DNA, 25 bp, Homo sapien
gggcccgcgccaggcgctgacgtgg

SEQ ID NO: 2885478 - DNA, 25 bp, Homo sapien
ggcccgcgccaggcgctgacgtggg

SEQ ID NO: 2885479 - DNA, 25 bp, Homo sapien
gttcgggcccgcgccaggcgctgac

SEQ ID NO: 2885480 - DNA, 25 bp, Homo sapien
gctgtcaggacgttggttagctaca

SEQ ID NO: 2885481 - DNA, 25 bp, Homo sapien
actcgcggcgcgaggaatatccctg

SEQ ID NO: 2885482 - DNA, 25 bp, Homo sapien
tctcggacggtaaatcagggctcgg

SEQ ID NO: 2885483 - DNA, 25 bp, Homo sapien
tatctcggcattccagagggctcag

SEQ ID NO: 2885484 - DNA, 25 bp, Homo sapien
gaaattacagcaggtatctcgcgga

SEQ ID NO: 2885485 - DNA, 25 bp, Homo sapien
cgtcctcacgaaccacagcgaaatt

SEQ ID NO: 2885486 - DNA, 25 bp, Homo sapien
tcttagaacagaacgtggcacgcag

SEQ ID NO: 2885487 - DNA, 25 bp, Homo sapien
catcattccgtctccatgccgtggt

SEQ ID NO: 2885488 - DNA, 25 bp, Homo sapien
tctggtgacacctgccaggtttcct

SEQ ID NO: 2885489 - DNA, 25 bp, Homo sapien
ctccccaaagctctggtgacacctg

SEQ ID NO: 2885490 - DNA, 25 bp, Homo sapien
caaagctctggtgacacctgccagg

SEQ ID NO: 2885491 - DNA, 25 bp, Homo sapien
cctcaccctccccaaagctctggtg

SEQ ID NO: 2885492 - DNA, 25 bp, Homo sapien
gataacgcgctgacaagctgtgcag

SEQ ID NO: 2885493 - DNA, 25 bp, Homo sapien
aacactgtgtgtagacggaggccat

SEQ ID NO: 2885494 - DNA, 25 bp, Homo sapien
cataaaagtgcgcaggaagtggatc

SEQ ID NO: 2885495 - DNA, 25 bp, Homo sapien
cgggccggtgccaaatagaagtcat

SEQ ID NO: 2885496 - DNA, 25 bp, Homo sapien
gatggacaaaaatagcccatgtggc

SEQ ID NO: 2885497 - DNA, 25 bp, Homo sapien
aaggtgactgtccagtagctcccag

SEQ ID NO: 2885498 - DNA, 25 bp, Homo sapien
tccgtgtagggcaaacgccatgagc

SEQ ID NO: 2885499 - DNA, 25 bp, Homo sapien
aatactaggttgtcccacgcgatgg

SEQ ID NO: 2885500 - DNA, 25 bp, Homo sapien
gaagcagcattcgtccatccaaaac

SEQ ID NO: 2885501 - DNA, 25 bp, Homo sapien
ttctttcacacgtggctggcacaga

SEQ ID NO: 2885502 - DNA, 25 bp, Homo sapien
gaggagacactcataaatacccgag

SEQ ID NO: 2885503 - DNA, 25 bp, Homo sapien
gacatggagtcgcatgaagcagcat

SEQ ID NO: 2885504 - DNA, 25 bp, Homo sapien
taatacctcatcgacgttcccaggc

SEQ ID NO: 2885505 - DNA, 25 bp, Homo sapien
tgagcgtgatactgaacacaccgac

SEQ ID NO: 2885506 - DNA, 25 bp, Homo sapien
taggttggcccttgtcttgagcgtg

SEQ ID NO: 2885507 - DNA, 25 bp, Homo sapien
tccatgccaggaatcagaacggttg

SEQ ID NO: 2885508 - DNA, 25 bp, Homo sapien
gctaaactggactctggatggctaa

SEQ ID NO: 2885509 - DNA, 25 bp, Homo sapien
gaaaattcgatacctaggctgggca

SEQ ID NO: 2885510 - DNA, 25 bp, Homo sapien
gattcacgtggatccagggaggcct

SEQ ID NO: 2885511 - DNA, 25 bp, Homo sapien
gaacctttgagaggcgatgcagcca

SEQ ID NO: 2885512 - DNA, 25 bp, Homo sapien
ctcatagatgtttgggatctcctca

SEQ ID NO: 2885513 - DNA, 25 bp, Homo sapien
tcattcagaatggaactctcataga

SEQ ID NO: 2885514 - DNA, 25 bp, Homo sapien
gctctgcctcgcatcagaagtaatt

SEQ ID NO: 2885515 - DNA, 25 bp, Homo sapien
tctcagctgggtctaaattgctttt

SEQ ID NO: 2885516 - DNA, 25 bp, Homo sapien
taatttcataatctggtaaactcac

SEQ ID NO: 2885517 - DNA, 25 bp, Homo sapien
caagaatacagtaatctacagtctg

SEQ ID NO: 2885518 - DNA, 25 bp, Homo sapien
cagatttaattctaccccatcaaaa

SEQ ID NO: 2885519 - DNA, 25 bp, Homo sapien
agctatagtaatcaataatttcata

SEQ ID NO: 2885520 - DNA, 25 bp, Homo sapien
gtggttcactggatgtgcacccgtc

SEQ ID NO: 2885521 - DNA, 25 bp, Homo sapien
ggatgtgcacccgtccacatcggct

SEQ ID NO: 2885522 - DNA, 25 bp, Homo sapien
gggatcacgccctgacactgtggtt

SEQ ID NO: 2885523 - DNA, 25 bp, Homo sapien
aggcaggtccgcgttgcccgaactc

SEQ ID NO: 2885524 - DNA, 25 bp, Homo sapien
ctgtctggcagtgcccacgtcttgg

SEQ ID NO: 2885525 - DNA, 25 bp, Homo sapien
tataatttcttctggccccacatgg

SEQ ID NO: 2885526 - DNA, 25 bp, Homo sapien
ccacatggtcccctgtctggcagtg

SEQ ID NO: 2885527 - DNA, 25 bp, Homo sapien
gctcagggaagccttccaccactgg

SEQ ID NO: 2885528 - DNA, 25 bp, Homo sapien
cattatgcgcgttctccacacggaa

SEQ ID NO: 2885529 - DNA, 25 bp, Homo sapien
gatcttcggtgccacgtcacgggat

SEQ ID NO: 2885530 - DNA, 25 bp, Homo sapien
tcaagatctcgagggaaagggaccg

SEQ ID NO: 2885531 - DNA, 25 bp, Homo sapien
tatggcaggaccagcaatgacacca

SEQ ID NO: 2885532 - DNA, 25 bp, Homo sapien
gaacccacaagaaggtacaatagct

SEQ ID NO: 2885533 - DNA, 25 bp, Homo sapien
gttacaagatcaacacatcaagacc

SEQ ID NO: 2885534 - DNA, 25 bp, Homo sapien
tcaagaccaacacgcaaaattcatt

SEQ ID NO: 2885535 - DNA, 25 bp, Homo sapien
gaggtgaaagactcgtatgctgaaa

SEQ ID NO: 2885536 - DNA, 25 bp, Homo sapien
ctgggactacgagcaagattctgtc

SEQ ID NO: 2885537 - DNA, 25 bp, Homo sapien
tgaaggctcgtctctcaacaaaaaa

SEQ ID NO: 2885538 - DNA, 25 bp, Homo sapien
gaaaagctcagaaaactaagaatgg

SEQ ID NO: 2885539 - DNA, 25 bp, Homo sapien
tatgagaaacccatagctgggcagg

SEQ ID NO: 2885540 - DNA, 25 bp, Homo sapien
aagtccagggcgcaattggcaaagg

SEQ ID NO: 2885541 - DNA, 25 bp, Homo sapien
gaaagatcgtacttcatcaaaacta

SEQ ID NO: 2885542 - DNA, 25 bp, Homo sapien
gcaaaggatcctcagctatgacacc

SEQ ID NO: 2885543 - DNA, 25 bp, Homo sapien
gacaccaaaggtacaagcaacacaa

SEQ ID NO: 2885544 - DNA, 25 bp, Homo sapien
ctatccctgccccatccccctcacc

SEQ ID NO: 2885545 - DNA, 25 bp, Homo sapien
aatgctatccctgccccatccccct

SEQ ID NO: 2885546 - DNA, 25 bp, Homo sapien
tatccctgccccatccccctcaccc

SEQ ID NO: 2885547 - DNA, 25 bp, Homo sapien
tgctatccctgccccatccccctca

SEQ ID NO: 2885548 - DNA, 25 bp, Homo sapien
cctgctcactccgtcctggatgtga

SEQ ID NO: 2885549 - DNA, 25 bp, Homo sapien
ttatggcatgttctggttcaaacag

SEQ ID NO: 2885550 - DNA, 25 bp, Homo sapien
tcgtggacccctcagaattctgtgt

SEQ ID NO: 2885551 - DNA, 25 bp, Homo sapien
gaggaagtcccatgcgtaagaagta

SEQ ID NO: 2885552 - DNA, 25 bp, Homo sapien
tgtacacgaccaccgttctgttaac

SEQ ID NO: 2885553 - DNA, 25 bp, Homo sapien
cgtcactaatgtacacgaccaccgt

SEQ ID NO: 2885554 - DNA, 25 bp, Homo sapien
cactaatgtacacgaccaccgttct

SEQ ID NO: 2885555 - DNA, 25 bp, Homo sapien
taatgtacacgaccaccgttctgtt

SEQ ID NO: 2885556 - DNA, 25 bp, Homo sapien
tagttcctatggttagctgtagagg

SEQ ID NO: 2885557 - DNA, 25 bp, Homo sapien
tgggcttgagcactgactgttttgt

SEQ ID NO: 2885558 - DNA, 25 bp, Homo sapien
tagaggtggaatcgactcaagccac

SEQ ID NO: 2885559 - DNA, 25 bp, Homo sapien
tgttggtggagggacttcccactgt

SEQ ID NO: 2885560 - DNA, 25 bp, Homo sapien
catttggttgaaagagtgcttatct

SEQ ID NO: 2885561 - DNA, 25 bp, Homo sapien
gagatttacattggtccgaaaaggc

SEQ ID NO: 2885562 - DNA, 25 bp, Homo sapien
agcacagcggggcttccagctcaca

SEQ ID NO: 2885563 - DNA, 25 bp, Homo sapien
ggacaacacaaagcacagcggggct

SEQ ID NO: 2885564 - DNA, 25 bp, Homo sapien
ggacaactgagccgccgactcctgc

SEQ ID NO: 2885565 - DNA, 25 bp, Homo sapien
gggtactcctggaccttcagggtca

SEQ ID NO: 2885566 - DNA, 25 bp, Homo sapien
ggtactcctggaccttcagggtcat

SEQ ID NO: 2885567 - DNA, 25 bp, Homo sapien
tcagacggacgtgaacaccagggcg

SEQ ID NO: 2885568 - DNA, 25 bp, Homo sapien
agacggacgtgaacaccagggcgct

SEQ ID NO: 2885569 - DNA, 25 bp, Homo sapien
cagacggacgtgaacaccagggcgc

SEQ ID NO: 2885570 - DNA, 25 bp, Homo sapien
gccagtaccagaagtgacaaaccac

SEQ ID NO: 2885571 - DNA, 25 bp, Homo sapien
ttcccacattcaccagccagtacca

SEQ ID NO: 2885572 - DNA, 25 bp, Homo sapien
gacaaaccaccacggttctgatctt

SEQ ID NO: 2885573 - DNA, 25 bp, Homo sapien
ttcaaaccttcttgtgtgttagctg

SEQ ID NO: 2885574 - DNA, 25 bp, Homo sapien
gccgatggaggctctcagaccactg

SEQ ID NO: 2885575 - DNA, 25 bp, Homo sapien
tggccgatggaggctctcagaccac

SEQ ID NO: 2885576 - DNA, 25 bp, Homo sapien
ctggccgatggaggctctcagacca

SEQ ID NO: 2885577 - DNA, 25 bp, Homo sapien
ggccgatggaggctctcagaccact

SEQ ID NO: 2885578 - DNA, 25 bp, Homo sapien
cctcagcagataggtgcggcttctg

SEQ ID NO: 2885579 - DNA, 25 bp, Homo sapien
aagaagcatggctatgctgccaggc

SEQ ID NO: 2885580 - DNA, 25 bp, Homo sapien
gcacagcggggtttccatgctggaa

SEQ ID NO: 2885581 - DNA, 25 bp, Homo sapien
gggtacagggtgctaaaatgcctca

SEQ ID NO: 2885582 - DNA, 25 bp, Homo sapien
gggacctgtgggtcccgcacacagt

SEQ ID NO: 2885583 - DNA, 25 bp, Homo sapien
cttcgtggataaccagaagacggca

SEQ ID NO: 2885584 - DNA, 25 bp, Homo sapien
ttcgtggataaccagaagacggcac

SEQ ID NO: 2885585 - DNA, 25 bp, Homo sapien
tgggtcccgcacacagttaaccaga

SEQ ID NO: 2885586 - DNA, 25 bp, Homo sapien
gctgaatggcggcagaaaggccact

SEQ ID NO: 2885587 - DNA, 25 bp, Homo sapien
tcacgactcacgagggaaaagggca

SEQ ID NO: 2885588 - DNA, 25 bp, Homo sapien
caaaataccgttatgtgagacagcg

SEQ ID NO: 2885589 - DNA, 25 bp, Homo sapien
taatcccagtggtcagaaacaagca

SEQ ID NO: 2885590 - DNA, 25 bp, Homo sapien
gccacggtgtcttcacaactggaag

SEQ ID NO: 2885591 - DNA, 25 bp, Homo sapien
ccacggtgtcttcacaactggaaga

SEQ ID NO: 2885592 - DNA, 25 bp, Homo sapien
ctgacgctgctcaggcacagggcag

SEQ ID NO: 2885593 - DNA, 25 bp, Homo sapien
cggtgctgacgctgctcaggcacag

SEQ ID NO: 2885594 - DNA, 25 bp, Homo sapien
gcggtgctgacgctgctcaggcaca

SEQ ID NO: 2885595 - DNA, 25 bp, Homo sapien
tgctgacgctgctcaggcacagggc

SEQ ID NO: 2885596 - DNA, 25 bp, Homo sapien
gaggacgctgagcttctccaccacg

SEQ ID NO: 2885597 - DNA, 25 bp, Homo sapien
ctggtctcccggtcaatgttcttct

SEQ ID NO: 2885598 - DNA, 25 bp, Homo sapien
agcggcgcgaaagcgtttgttcagc

SEQ ID NO: 2885599 - DNA, 25 bp, Homo sapien
agcaggctgaccacggagtccacgg

SEQ ID NO: 2885600 - DNA, 25 bp, Homo sapien
agcacagtaaggtgtggcacctggc

SEQ ID NO: 2885601 - DNA, 25 bp, Homo sapien
cctcctgagtatctgctggggctac

SEQ ID NO: 2885602 - DNA, 25 bp, Homo sapien
ctttttatactgtctgttccctgca

SEQ ID NO: 2885603 - DNA, 25 bp, Homo sapien
tacaggagggcaccagtacgcttgg

SEQ ID NO: 2885604 - DNA, 25 bp, Homo sapien
ggctggtcgctgctatgctctttga

SEQ ID NO: 2885605 - DNA, 25 bp, Homo sapien
tctttgaggtgctcgatccggcgct

SEQ ID NO: 2885606 - DNA, 25 bp, Homo sapien
gacagccgtgttgtagtagccgcaa

SEQ ID NO: 2885607 - DNA, 25 bp, Homo sapien
ggtgctccaccatcatgcgatccat

SEQ ID NO: 2885608 - DNA, 25 bp, Homo sapien
tatcgggcgggaaaatcctaagcag

SEQ ID NO: 2885609 - DNA, 25 bp, Homo sapien
ccacgtgtttctacagggtgccaca

SEQ ID NO: 2885610 - DNA, 25 bp, Homo sapien
gaagacccctggttagacagaagca

SEQ ID NO: 2885611 - DNA, 25 bp, Homo sapien
taaaggcaaagctctcacgaggaag

SEQ ID NO: 2885612 - DNA, 25 bp, Homo sapien
gcatctgagagaaggtgaacgaggt

SEQ ID NO: 2885613 - DNA, 25 bp, Homo sapien
gaggtgcgggacaaatgccgaggac

SEQ ID NO: 2885614 - DNA, 25 bp, Homo sapien
tggagggcaggacggacaccacaca

SEQ ID NO: 2885615 - DNA, 25 bp, Homo sapien
ggtgagtctggagtgccgcaaggct

SEQ ID NO: 2885616 - DNA, 25 bp, Homo sapien
cccagcggtgccgagagcaacagtg

SEQ ID NO: 2885617 - DNA, 25 bp, Homo sapien
cggtgccgagagcaacagtgctgtg

SEQ ID NO: 2885618 - DNA, 25 bp, Homo sapien
agcggtgccgagagcaacagtgctg

SEQ ID NO: 2885619 - DNA, 25 bp, Homo sapien
gcggtgccgagagcaacagtgctgt

SEQ ID NO: 2885620 - DNA, 25 bp, Homo sapien
cacgcttgtgaaccgagacgccata

SEQ ID NO: 2885621 - DNA, 25 bp, Homo sapien
acgcttgtgaaccgagacgccatac

SEQ ID NO: 2885622 - DNA, 25 bp, Homo sapien
tcacgcttgtgaaccgagacgccat

SEQ ID NO: 2885623 - DNA, 25 bp, Homo sapien
tacgcacttctgtggaacgcgtggc

SEQ ID NO: 2885624 - DNA, 25 bp, Homo sapien
ggtcaccgcagaggatcagtgcact

SEQ ID NO: 2885625 - DNA, 25 bp, Homo sapien
cgaccccgtccagcgatgagaatgt

SEQ ID NO: 2885626 - DNA, 25 bp, Homo sapien
catgacctggagacttcggaaactc

SEQ ID NO: 2885627 - DNA, 25 bp, Homo sapien
acaggaattttggtgcacaggtagg

SEQ ID NO: 2885628 - DNA, 25 bp, Homo sapien
tcccacgtgggaattccatggcgcc

SEQ ID NO: 2885629 - DNA, 25 bp, Homo sapien
ccagggcttcctagtgccatggtca

SEQ ID NO: 2885630 - DNA, 25 bp, Homo sapien
tctccaattttggtgcacaggaatt

SEQ ID NO: 2885631 - DNA, 25 bp, Homo sapien
actagaaaccatctaagtgaactgg

SEQ ID NO: 2885632 - DNA, 25 bp, Homo sapien
tctgtctcacacgaaatgctcatgc

SEQ ID NO: 2885633 - DNA, 25 bp, Homo sapien
gcttcctgtcctgtattgtctggga

SEQ ID NO: 2885634 - DNA, 25 bp, Homo sapien
taggattacgggttgagagccctgc

SEQ ID NO: 2885635 - DNA, 25 bp, Homo sapien
gggtctgaacccagttggatctctc

SEQ ID NO: 2885636 - DNA, 25 bp, Homo sapien
ttggatctctcttactgagggtttc

SEQ ID NO: 2885637 - DNA, 25 bp, Homo sapien
tgtgagagtcacatgaaagatgtga

SEQ ID NO: 2885638 - DNA, 25 bp, Homo sapien
caatgtccgggtctccggttgtgag

SEQ ID NO: 2885639 - DNA, 25 bp, Homo sapien
tttgtagttttgctctaaatttcag

SEQ ID NO: 2885640 - DNA, 25 bp, Homo sapien
gtagttttgctctaaatttcaggag

SEQ ID NO: 2885641 - DNA, 25 bp, Homo sapien
ttgtccagactggatggaatacagt

SEQ ID NO: 2885642 - DNA, 25 bp, Homo sapien
ggtggctcctggtctatatcctgcc

SEQ ID NO: 2885643 - DNA, 25 bp, Homo sapien
gtttgctttgatgatttcttttctg

SEQ ID NO: 2885644 - DNA, 25 bp, Homo sapien
gctttgatgatttcttttctgaagc

SEQ ID NO: 2885645 - DNA, 25 bp, Homo sapien
ttgctttgatgatttcttttctgaa

SEQ ID NO: 2885646 - DNA, 25 bp, Homo sapien
tttgatgatttcttttctgaagccc

SEQ ID NO: 2885647 - DNA, 25 bp, Homo sapien
aagccccttcatagcgttttcttgc

SEQ ID NO: 2885648 - DNA, 25 bp, Homo sapien
tttctgaagccccttcatagcgttt

SEQ ID NO: 2885649 - DNA, 25 bp, Homo sapien
ccttcatagcgttttcttgcatgtt

SEQ ID NO: 2885650 - DNA, 25 bp, Homo sapien
agccccttcatagcgttttcttgca

SEQ ID NO: 2885651 - DNA, 25 bp, Homo sapien
ccccttcatagcgttttcttgcatg

SEQ ID NO: 2885652 - DNA, 25 bp, Homo sapien
aagccccttcatagcgttttcttgc

SEQ ID NO: 2885653 - DNA, 25 bp, Homo sapien
tttctgaagccccttcatagcgttt

SEQ ID NO: 2885654 - DNA, 25 bp, Homo sapien
agccccttcatagcgttttcttgca

SEQ ID NO: 2885655 - DNA, 25 bp, Homo sapien
ttctcgtttctgaaaccccttcata

SEQ ID NO: 2885656 - DNA, 25 bp, Homo sapien
gatttctcttttctgaaacccctca

SEQ ID NO: 2885657 - DNA, 25 bp, Homo sapien
ttgcatgtttgctttgatgatttct

SEQ ID NO: 2885658 - DNA, 25 bp, Homo sapien
catgtttgctttgatgatttctctt

SEQ ID NO: 2885659 - DNA, 25 bp, Homo sapien
attttcttgcatgtttgctttgatg

SEQ ID NO: 2885660 - DNA, 25 bp, Homo sapien
ggaacatctcaatattcactaggtc

SEQ ID NO: 2885661 - DNA, 25 bp, Homo sapien
tccacctctttggccgtcaggaaca

SEQ ID NO: 2885662 - DNA, 25 bp, Homo sapien
gccgggacttgttgtcatggcacca

SEQ ID NO: 2885663 - DNA, 25 bp, Homo sapien
aggcaggtggccgtctcacgcctct

SEQ ID NO: 2885664 - DNA, 25 bp, Homo sapien
taatgccaaatgaggtgcacttttc

SEQ ID NO: 2885665 - DNA, 25 bp, Homo sapien
tgccaaatgaggtgcacttttccag

SEQ ID NO: 2885666 - DNA, 25 bp, Homo sapien
ctgtaatgccaaatgaggtgcactt

SEQ ID NO: 2885667 - DNA, 25 bp, Homo sapien
caaatgaggtgcacttttccagatt

SEQ ID NO: 2885668 - DNA, 25 bp, Homo sapien
cagcctcctgtaacccactccttct

SEQ ID NO: 2885669 - DNA, 25 bp, Homo sapien
cgggcatgttttcgtgtcatttgga

SEQ ID NO: 2885670 - DNA, 25 bp, Homo sapien
gcatgttttcgtgtcatttggagtc

SEQ ID NO: 2885671 - DNA, 25 bp, Homo sapien
ttcagggcgcatttctggacagcat

SEQ ID NO: 2885672 - DNA, 25 bp, Homo sapien
gtcatttggagtcttcagggcgcat

SEQ ID NO: 2885673 - DNA, 25 bp, Homo sapien
ctgagggcaaagacaagacgagggc

SEQ ID NO: 2885674 - DNA, 25 bp, Homo sapien
agggcaaagacaagacgagggctta

SEQ ID NO: 2885675 - DNA, 25 bp, Homo sapien
caaagacaagacgagggcttagaca

SEQ ID NO: 2885676 - DNA, 25 bp, Homo sapien
aagacaagacgagggcttagacagc

SEQ ID NO: 2885677 - DNA, 25 bp, Homo sapien
ctcacagcgtccagtctcttattct

SEQ ID NO: 2885678 - DNA, 25 bp, Homo sapien
ccagtctcttattctgccggatgag

SEQ ID NO: 2885679 - DNA, 25 bp, Homo sapien
ttattctgccggatgagttcaatga

SEQ ID NO: 2885680 - DNA, 25 bp, Homo sapien
gcgtccagtctcttattctgccgga

SEQ ID NO: 2885681 - DNA, 25 bp, Homo sapien
tcagacattatgaggtggaggcccc

SEQ ID NO: 2885682 - DNA, 25 bp, Homo sapien
tcaggagacatgtggccaggcttct

SEQ ID NO: 2885683 - DNA, 25 bp, Homo sapien
aagacatctgtgacggagggactcc

SEQ ID NO: 2885684 - DNA, 25 bp, Homo sapien
taacaggtcaacagaccctatgcgg

SEQ ID NO: 2885685 - DNA, 25 bp, Homo sapien
ctcaagccctgtagatggtgcccga

SEQ ID NO: 2885686 - DNA, 25 bp, Homo sapien
agccctgtagatggtgcccgacgct

SEQ ID NO: 2885687 - DNA, 25 bp, Homo sapien
ccatgtggaccgtgagttcagaggt

SEQ ID NO: 2885688 - DNA, 25 bp, Homo sapien
ctccagcgccatgtggaccgtgagt

SEQ ID NO: 2885689 - DNA, 25 bp, Homo sapien
tcgggggtgagtccacacggctgac

SEQ ID NO: 2885690 - DNA, 25 bp, Homo sapien
ggggacggccatccgagattccagt

SEQ ID NO: 2885691 - DNA, 25 bp, Homo sapien
tgaccccgcagggtgcgtgtgcagg

SEQ ID NO: 2885692 - DNA, 25 bp, Homo sapien
tgggagtcgggggtgagtccacacg

SEQ ID NO: 2885693 - DNA, 25 bp, Homo sapien
acagacaacccacggaaaacaccag

SEQ ID NO: 2885694 - DNA, 25 bp, Homo sapien
tgcaaatggcacctgcccccgaggg

SEQ ID NO: 2885695 - DNA, 25 bp, Homo sapien
aggggaccagggcacccaagccaca

SEQ ID NO: 2885696 - DNA, 25 bp, Homo sapien
tggaggagcagctaccagacactcc

SEQ ID NO: 2885697 - DNA, 25 bp, Homo sapien
aagctgagaccgcagatgtgcagca

SEQ ID NO: 2885698 - DNA, 25 bp, Homo sapien
aagtaatcgcctcactccaagccga

SEQ ID NO: 2885699 - DNA, 25 bp, Homo sapien
catcttgttagagacagattctcgc

SEQ ID NO: 2885700 - DNA, 25 bp, Homo sapien
tttatgtcagagtctaggtacaaag

SEQ ID NO: 2885701 - DNA, 25 bp, Homo sapien
tgcccatggcctggcgcacctcgtc

SEQ ID NO: 2885702 - DNA, 25 bp, Homo sapien
gggagatgtgcgtgtcgggcgggaa

SEQ ID NO: 2885703 - DNA, 25 bp, Homo sapien
cttgtacggggagatgtgcgtgtcg

SEQ ID NO: 2885704 - DNA, 25 bp, Homo sapien
agatgtgcgtgtcgggcgggaaggc

SEQ ID NO: 2885705 - DNA, 25 bp, Homo sapien
ttctctgaacaaaatgcttccttct

SEQ ID NO: 2885706 - DNA, 25 bp, Homo sapien
aggactggttgcctctgggcttctg

SEQ ID NO: 2885707 - DNA, 25 bp, Homo sapien
gtggcttctgccattctctgaacaa

SEQ ID NO: 2885708 - DNA, 25 bp, Homo sapien
gtttcttgcctgacccatggcaacg

SEQ ID NO: 2885709 - DNA, 25 bp, Homo sapien
aaggccgctcagtctctagcttggg

SEQ ID NO: 2885710 - DNA, 25 bp, Homo sapien
atcaacccagaaaggccgctcagtc

SEQ ID NO: 2885711 - DNA, 25 bp, Homo sapien
ccagaaaggccgctcagtctctagc

SEQ ID NO: 2885712 - DNA, 25 bp, Homo sapien
tcaacccagaaaggccgctcagtct

SEQ ID NO: 2885713 - DNA, 25 bp, Homo sapien
ggccagtgctgatctaactccctga

SEQ ID NO: 2885714 - DNA, 25 bp, Homo sapien
tgatttcaacatgctgcaaggccag

SEQ ID NO: 2885715 - DNA, 25 bp, Homo sapien
tctgatttcaacacgctgtgaggcc

SEQ ID NO: 2885716 - DNA, 25 bp, Homo sapien
gatttcaacactctgcgggacgagt

SEQ ID NO: 2885717 - DNA, 25 bp, Homo sapien
gacagcttaaaaacgtggaccatgg

SEQ ID NO: 2885718 - DNA, 25 bp, Homo sapien
ggtcagcacaaagcataactccctc

SEQ ID NO: 2885719 - DNA, 25 bp, Homo sapien
cacactttgcactaagggtcagcac

SEQ ID NO: 2885720 - DNA, 25 bp, Homo sapien
gatttcaacatgctacagggtcagt

SEQ ID NO: 2885721 - DNA, 25 bp, Homo sapien
gttgtcgtaccggaactgctggatc

SEQ ID NO: 2885722 - DNA, 25 bp, Homo sapien
cacagaattgtttcccagctggtgt

SEQ ID NO: 2885723 - DNA, 25 bp, Homo sapien
tcccagctggtgtagtcggtagttg

SEQ ID NO: 2885724 - DNA, 25 bp, Homo sapien
ctggtgtagtcggtagttgtcgtac

SEQ ID NO: 2885725 - DNA, 25 bp, Homo sapien
caggaaggaatcagtcacaaacggg

SEQ ID NO: 2885726 - DNA, 25 bp, Homo sapien
tctgaatggtaatctgccggctgcc

SEQ ID NO: 2885727 - DNA, 25 bp, Homo sapien
caaggttcttggtaatcacacggga

SEQ ID NO: 2885728 - DNA, 25 bp, Homo sapien
atatgaccaaagatgccaaccccag

SEQ ID NO: 2885729 - DNA, 25 bp, Homo sapien
tatgtgggcgccatgctgactacac

SEQ ID NO: 2885730 - DNA, 25 bp, Homo sapien
agttgcaggaggacagtcagtcaca

SEQ ID NO: 2885731 - DNA, 25 bp, Homo sapien
ttctgctggcacctaggaacaggca

SEQ ID NO: 2885732 - DNA, 25 bp, Homo sapien
tcacaggcgggatggactcagttgc

SEQ ID NO: 2885733 - DNA, 25 bp, Homo sapien
tagacgtagccgttgggcagcatca

SEQ ID NO: 2885734 - DNA, 25 bp, Homo sapien
gggctcttggagctgccgtcctcct

SEQ ID NO: 2885735 - DNA, 25 bp, Homo sapien
tgttctcgttcatcacgtcgccaga

SEQ ID NO: 2885736 - DNA, 25 bp, Homo sapien
cagaaatcttgcagaccaggcggga

SEQ ID NO: 2885737 - DNA, 25 bp, Homo sapien
tttccatggaaaatccccacaatga

SEQ ID NO: 2885738 - DNA, 25 bp, Homo sapien
gactacaacgtacacacggatttcc

SEQ ID NO: 2885739 - DNA, 25 bp, Homo sapien
tgcattaaggcaagcgactacaacg

SEQ ID NO: 2885740 - DNA, 25 bp, Homo sapien
catttcgaacgaagctaaggcaggg

SEQ ID NO: 2885741 - DNA, 25 bp, Homo sapien
gacttctttggttctcgggcacacg

SEQ ID NO: 2885742 - DNA, 25 bp, Homo sapien
gatgtacaccttctcggcttgtgag

SEQ ID NO: 2885743 - DNA, 25 bp, Homo sapien
tcggcttgtgagaagtggaagactt

SEQ ID NO: 2885744 - DNA, 25 bp, Homo sapien
tcatcttgacggatagaaagcagag

SEQ ID NO: 2885745 - DNA, 25 bp, Homo sapien
cacagggaaatcacggactcctata

SEQ ID NO: 2885746 - DNA, 25 bp, Homo sapien
gttgacgtgttacaaaatcctacca

SEQ ID NO: 2885747 - DNA, 25 bp, Homo sapien
aagagtatttatcgttgctcacgga

SEQ ID NO: 2885748 - DNA, 25 bp, Homo sapien
tgctcacggatctttggtcgcaaga

SEQ ID NO: 2885749 - DNA, 25 bp, Homo sapien
aaggaccagcccgttctccaagtct

SEQ ID NO: 2885750 - DNA, 25 bp, Homo sapien
ggtgaaggaccagcccgttctccaa

SEQ ID NO: 2885751 - DNA, 25 bp, Homo sapien
gaagtggtgaaggaccagcccgttc

SEQ ID NO: 2885752 - DNA, 25 bp, Homo sapien
acaggaagtggtgaaggaccagccc

SEQ ID NO: 2885753 - DNA, 25 bp, Homo sapien
ggcgcggcatcgcgggtcactgcag

SEQ ID NO: 2885754 - DNA, 25 bp, Homo sapien
cgcggcatcgcgggtcactgcaggt

SEQ ID NO: 2885755 - DNA, 25 bp, Homo sapien
gtggcgcggcatcgcgggtcactgc

SEQ ID NO: 2885756 - DNA, 25 bp, Homo sapien
gcggcatcgcgggtcactgcaggtc

SEQ ID NO: 2885757 - DNA, 25 bp, Homo sapien
tcgaatgaagccataagtgtccctc

SEQ ID NO: 2885758 - DNA, 25 bp, Homo sapien
cacagccccgcgatgtgatatcgaa

SEQ ID NO: 2885759 - DNA, 25 bp, Homo sapien
acagagggtgtgatatcgaaacgac

SEQ ID NO: 2885760 - DNA, 25 bp, Homo sapien
gaaactatgcacgtacgaacacagt

SEQ ID NO: 2885761 - DNA, 25 bp, Homo sapien
gcctctgcagaaatttggtcccgtg

SEQ ID NO: 2885762 - DNA, 25 bp, Homo sapien
tctgcagaaatttggtcccgtggat

SEQ ID NO: 2885763 - DNA, 25 bp, Homo sapien
gcaaggcctctgcagaaatttggtc

SEQ ID NO: 2885764 - DNA, 25 bp, Homo sapien
gcagaaatttggtcccgtggatttc

SEQ ID NO: 2885765 - DNA, 25 bp, Homo sapien
taagcactaactacaaacctctacg

SEQ ID NO: 2885766 - DNA, 25 bp, Homo sapien
tcagtacttctttcaactgaacgat

SEQ ID NO: 2885767 - DNA, 25 bp, Homo sapien
tctctgtcagctacggtggttcatt

SEQ ID NO: 2885768 - DNA, 25 bp, Homo sapien
tattagctagtcaacatcaacatgc

SEQ ID NO: 2885769 - DNA, 25 bp, Homo sapien
gctgagccgccgagtaacgctgagc

SEQ ID NO: 2885770 - DNA, 25 bp, Homo sapien
actttgccgtgccagggctgagccg

SEQ ID NO: 2885771 - DNA, 25 bp, Homo sapien
caggcaagactttgccgtgccaggg

SEQ ID NO: 2885772 - DNA, 25 bp, Homo sapien
gagtaacgctgagccacggacccac

SEQ ID NO: 2885773 - DNA, 25 bp, Homo sapien
acgcacagcaggtacccctgggccc

SEQ ID NO: 2885774 - DNA, 25 bp, Homo sapien
caggcgcaaagacgcggccgaggtc

SEQ ID NO: 2885775 - DNA, 25 bp, Homo sapien
cgcggtgacgtaggcgcgctcccgg

SEQ ID NO: 2885776 - DNA, 25 bp, Homo sapien
gcgcaggcgcaaagacgcggccgag

SEQ ID NO: 2885777 - DNA, 25 bp, Homo sapien
ccgaggtctgcgcggtgacgtaggc

SEQ ID NO: 2885778 - DNA, 25 bp, Homo sapien
gctcgacgcggcctttctcgccgtt

SEQ ID NO: 2885779 - DNA, 25 bp, Homo sapien
acgtgccctgagctcgacagccaat

SEQ ID NO: 2885780 - DNA, 25 bp, Homo sapien
ctagcacgtgccctgagctcgacag

SEQ ID NO: 2885781 - DNA, 25 bp, Homo sapien
ctgagctcgacagccaatggctcac

SEQ ID NO: 2885782 - DNA, 25 bp, Homo sapien
tgggatgaggcgagggcctgccgca

SEQ ID NO: 2885783 - DNA, 25 bp, Homo sapien
atgaaaagtcgcgtccggagagcag

SEQ ID NO: 2885784 - DNA, 25 bp, Homo sapien
agcaccgcggcgtgcctggtgggat

SEQ ID NO: 2885785 - DNA, 25 bp, Homo sapien
gccaagaggagccaagaaattctga

SEQ ID NO: 2885786 - DNA, 25 bp, Homo sapien
gctgcattgagggtcgtgcgttaaa

SEQ ID NO: 2885787 - DNA, 25 bp, Homo sapien
tcagcttttccccaacgtgactgtt

SEQ ID NO: 2885788 - DNA, 25 bp, Homo sapien
aaccagtggcgctgtccgaatcagc

SEQ ID NO: 2885789 - DNA, 25 bp, Homo sapien
tacaatcccgtgtgtgggacgctgc

SEQ ID NO: 2885790 - DNA, 25 bp, Homo sapien
cttctaccaacttcgaaagtttctg

SEQ ID NO: 2885791 - DNA, 25 bp, Homo sapien
tagtcggggttctcctgaagttgtg

SEQ ID NO: 2885792 - DNA, 25 bp, Homo sapien
ttctcaggatttagtcggggttctc

SEQ ID NO: 2885793 - DNA, 25 bp, Homo sapien
gagctcttctaccaacttcgaaagt

SEQ ID NO: 2885794 - DNA, 25 bp, Homo sapien
gctcagtgggccagtcagttactgt

SEQ ID NO: 2885795 - DNA, 25 bp, Homo sapien
taccctaaaggcgatggaccaactc

SEQ ID NO: 2885796 - DNA, 25 bp, Homo sapien
tttcccttcgaaaagtccagcagca

SEQ ID NO: 2885797 - DNA, 25 bp, Homo sapien
gaagtgaacagaggtggacataccc

SEQ ID NO: 2885798 - DNA, 25 bp, Homo sapien
gcacgcacactgtttcagctgggtg

SEQ ID NO: 2885799 - DNA, 25 bp, Homo sapien
gcctggcacaacgcacaccgcccag

SEQ ID NO: 2885800 - DNA, 25 bp, Homo sapien
ccagcacgcacactgtttcagctgg

SEQ ID NO: 2885801 - DNA, 25 bp, Homo sapien
cgcctggcacaacgcacaccgccca

SEQ ID NO: 2885802 - DNA, 25 bp, Homo sapien
tggggatgcgagctggcctgaccca

SEQ ID NO: 2885803 - DNA, 25 bp, Homo sapien
ggggatgcgagctggcctgacccaa

SEQ ID NO: 2885804 - DNA, 25 bp, Homo sapien
ctggggatgcgagctggcctgaccc

SEQ ID NO: 2885805 - DNA, 25 bp, Homo sapien
taagaagtggtagcccaaggcaagc

SEQ ID NO: 2885806 - DNA, 25 bp, Homo sapien
tggaaacaaccagcatccggaactg

SEQ ID NO: 2885807 - DNA, 25 bp, Homo sapien
gacgaagagttcctccacaatctgg

SEQ ID NO: 2885808 - DNA, 25 bp, Homo sapien
gaactggtgagacctgacgaagagt

SEQ ID NO: 2885809 - DNA, 25 bp, Homo sapien
gcctcggcttccagagtcagtggga

SEQ ID NO: 2885810 - DNA, 25 bp, Homo sapien
taaagtgcaaggttgggacaggtcc

SEQ ID NO: 2885811 - DNA, 25 bp, Homo sapien
gatcctggtgggtttcatcatgcca

SEQ ID NO: 2885812 - DNA, 25 bp, Homo sapien
caggcccctgctgtgctaggttcaa

SEQ ID NO: 2885813 - DNA, 25 bp, Homo sapien
tccgagcattcgtgtcttgaaaatc

SEQ ID NO: 2885814 - DNA, 25 bp, Homo sapien
cagactccgagcattcgtgtcttga

SEQ ID NO: 2885815 - DNA, 25 bp, Homo sapien
ttcctttctgccagactccgagcat

SEQ ID NO: 2885816 - DNA, 25 bp, Homo sapien
ttctgccagactccgagcattcgtg

SEQ ID NO: 2885817 - DNA, 25 bp, Homo sapien
ccgcgcagcgaacgggcgtggatga

SEQ ID NO: 2885818 - DNA, 25 bp, Homo sapien
aacgggcgtggatgaatgtgaccac

SEQ ID NO: 2885819 - DNA, 25 bp, Homo sapien
cgtggatgaatgtgaccaccagagg

SEQ ID NO: 2885820 - DNA, 25 bp, Homo sapien
tctgcccagaggtccgcgcagcgaa

SEQ ID NO: 2885821 - DNA, 25 bp, Homo sapien
gcctgcgtttccagtggcctgtggc

SEQ ID NO: 2885822 - DNA, 25 bp, Homo sapien
cgggccggagcagctttcctcctgg

SEQ ID NO: 2885823 - DNA, 25 bp, Homo sapien
ctcccgggccggagcagctttcctc

SEQ ID NO: 2885824 - DNA, 25 bp, Homo sapien
ccgggccggagcagctttcctcctg

SEQ ID NO: 2885825 - DNA, 25 bp, Homo sapien
cctgcaaggcaatctctgtgtacct

SEQ ID NO: 2885826 - DNA, 25 bp, Homo sapien
tgggcctgcaaggcaatctctgtgt

SEQ ID NO: 2885827 - DNA, 25 bp, Homo sapien
tagagcacccagctcagcagctggg

SEQ ID NO: 2885828 - DNA, 25 bp, Homo sapien
gcctgcaaggcaatctctgtgtacc

SEQ ID NO: 2885829 - DNA, 25 bp, Homo sapien
ccggaagatcaagacacctgtttgc

SEQ ID NO: 2885830 - DNA, 25 bp, Homo sapien
gaagatcaagacacctgtttgctgc

SEQ ID NO: 2885831 - DNA, 25 bp, Homo sapien
ggaagatcaagacacctgtttgctg

SEQ ID NO: 2885832 - DNA, 25 bp, Homo sapien
aagatcaagacacctgtttgctgcg

SEQ ID NO: 2885833 - DNA, 25 bp, Homo sapien
tacctccgtcaagcaggattcaatt

SEQ ID NO: 2885834 - DNA, 25 bp, Homo sapien
gaagccatgccaagggattccgtct

SEQ ID NO: 2885835 - DNA, 25 bp, Homo sapien
agctctctacctccgtcaagcagga

SEQ ID NO: 2885836 - DNA, 25 bp, Homo sapien
ggcatcggacatgccagaagccatg

SEQ ID NO: 2885837 - DNA, 25 bp, Homo sapien
cccgccgcccgctctggggtggcct

SEQ ID NO: 2885838 - DNA, 25 bp, Homo sapien
ccgccgcccgctctggggtggcctg

SEQ ID NO: 2885839 - DNA, 25 bp, Homo sapien
gggtgccagaccggcaggggcccac

SEQ ID NO: 2885840 - DNA, 25 bp, Homo sapien
ctcatctgaggggtcacctgtggct

SEQ ID NO: 2885841 - DNA, 25 bp, Homo sapien
tccagcgtgtacttgtgcgagccca

SEQ ID NO: 2885842 - DNA, 25 bp, Homo sapien
gctccacatccagcgtgtacttgtg

SEQ ID NO: 2885843 - DNA, 25 bp, Homo sapien
tggctccgcacaaactcctcgaggt

SEQ ID NO: 2885844 - DNA, 25 bp, Homo sapien
tgtacttgtgcgagcccagcccgtg

SEQ ID NO: 2885845 - DNA, 25 bp, Homo sapien
cacgagcacacagccggcaggaact

SEQ ID NO: 2885846 - DNA, 25 bp, Homo sapien
aacttgttccggatgagcttgagtg

SEQ ID NO: 2885847 - DNA, 25 bp, Homo sapien
gatgagagcaaggttgtcctcgttc

SEQ ID NO: 2885848 - DNA, 25 bp, Homo sapien
agcttgagtgtgtcgcgggcggcgt

SEQ ID NO: 2885849 - DNA, 25 bp, Homo sapien
tcagtacgagctccaattcagcctt

SEQ ID NO: 2885850 - DNA, 25 bp, Homo sapien
tcaggtcaatggcacgctttaaaca

SEQ ID NO: 2885851 - DNA, 25 bp, Homo sapien
ggcacgctttaaacatccaccgtgg

SEQ ID NO: 2885852 - DNA, 25 bp, Homo sapien
gtattttctcagtacgagctccaat

SEQ ID NO: 2885853 - DNA, 25 bp, Homo sapien
tgagggtttgccgagggtctctcct

SEQ ID NO: 2885854 - DNA, 25 bp, Homo sapien
tctctcctctggtggatacagtgcc

SEQ ID NO: 2885855 - DNA, 25 bp, Homo sapien
ctgccaggacaggtgccgcactgct

SEQ ID NO: 2885856 - DNA, 25 bp, Homo sapien
tcctggccgtctgagggtttgccga

SEQ ID NO: 2885857 - DNA, 25 bp, Homo sapien
agggtggccgctgtgtacctccagt

SEQ ID NO: 2885858 - DNA, 25 bp, Homo sapien
tgctgctgtggaacccaacctcttc

SEQ ID NO: 2885859 - DNA, 25 bp, Homo sapien
agcatttaatcgagaggagcttccc

SEQ ID NO: 2885860 - DNA, 25 bp, Homo sapien
gaggcccagatttccattccatgct

SEQ ID NO: 2885861 - DNA, 25 bp, Homo sapien
aagcctagaccagcatcctttcgca

SEQ ID NO: 2885862 - DNA, 25 bp, Homo sapien
tctccgggagtcagtttcggactta

SEQ ID NO: 2885863 - DNA, 25 bp, Homo sapien
gtatattttcgtcacaactcacaga

SEQ ID NO: 2885864 - DNA, 25 bp, Homo sapien
gagaaaagcaagctcgccctctgct

SEQ ID NO: 2885865 - DNA, 25 bp, Homo sapien
ggcagtgaccttgaaagggcctcaa

SEQ ID NO: 2885866 - DNA, 25 bp, Homo sapien
cagcccactaggcaacagtgacagg

SEQ ID NO: 2885867 - DNA, 25 bp, Homo sapien
gggcctcaatgtgagccacagggaa

SEQ ID NO: 2885868 - DNA, 25 bp, Homo sapien
ttgcccatgccgtggagaccgggca

SEQ ID NO: 2885869 - DNA, 25 bp, Homo sapien
ggagggcatcccagatgctgtagag

SEQ ID NO: 2885870 - DNA, 25 bp, Homo sapien
tggagggcatcccagatgctgtaga

SEQ ID NO: 2885871 - DNA, 25 bp, Homo sapien
tgagctaggcgagcccgccaatcac

SEQ ID NO: 2885872 - DNA, 25 bp, Homo sapien
gagcccgccaatcacttcatctcca

SEQ ID NO: 2885873 - DNA, 25 bp, Homo sapien
ctgagctaggcgagcccgccaatca

SEQ ID NO: 2885874 - DNA, 25 bp, Homo sapien
taggcgagcccgccaatcacttcat

SEQ ID NO: 2885875 - DNA, 25 bp, Homo sapien
ttctgaagacggaacatctgtcccc

SEQ ID NO: 2885876 - DNA, 25 bp, Homo sapien
tttatcagctcagcgaatgacgcag

SEQ ID NO: 2885877 - DNA, 25 bp, Homo sapien
tgacgctgcacattgatccaggaga

SEQ ID NO: 2885878 - DNA, 25 bp, Homo sapien
aatgacgcagccacggatgatcaca

SEQ ID NO: 2885879 - DNA, 25 bp, Homo sapien
gaggcctcaggttcacaagatacct

SEQ ID NO: 2885880 - DNA, 25 bp, Homo sapien
gcctcaggttcacaagatacctgga

SEQ ID NO: 2885881 - DNA, 25 bp, Homo sapien
gttcacaagatacctggaggtcgat

SEQ ID NO: 2885882 - DNA, 25 bp, Homo sapien
tcaggttcacaagatacctggaggt

SEQ ID NO: 2885883 - DNA, 25 bp, Homo sapien
cctcgggccgcttcctggagtccca

SEQ ID NO: 2885884 - DNA, 25 bp, Homo sapien
gcatggtgggcctcgggccgcttcc

SEQ ID NO: 2885885 - DNA, 25 bp, Homo sapien
gctgccagccagcatggtgggcctc

SEQ ID NO: 2885886 - DNA, 25 bp, Homo sapien
agccagcatggtgggcctcgggccg

SEQ ID NO: 2885887 - DNA, 25 bp, Homo sapien
tctgaaacgagagcctggaggttct

SEQ ID NO: 2885888 - DNA, 25 bp, Homo sapien
gcaagtcgttgctttctagaatgac

SEQ ID NO: 2885889 - DNA, 25 bp, Homo sapien
ctggaggttctgctgaagcaagtcg

SEQ ID NO: 2885890 - DNA, 25 bp, Homo sapien
cgttgctttctagaatgactggttc

SEQ ID NO: 2885891 - DNA, 25 bp, Homo sapien
cttgagaggacggagggcggagcgg

SEQ ID NO: 2885892 - DNA, 25 bp, Homo sapien
cacctggcgggcagcactgtcgggg

SEQ ID NO: 2885893 - DNA, 25 bp, Homo sapien
cactgtcggggccgagcagaacctg

SEQ ID NO: 2885894 - DNA, 25 bp, Homo sapien
ctgactgcagcaagcgtgcgggaag

SEQ ID NO: 2885895 - DNA, 25 bp, Homo sapien
gggacagagctccccgaggcctcga

SEQ ID NO: 2885896 - DNA, 25 bp, Homo sapien
cgcacggagcccaaagggagggtga

SEQ ID NO: 2885897 - DNA, 25 bp, Homo sapien
aacggcgtggtcaccagggacagag

SEQ ID NO: 2885898 - DNA, 25 bp, Homo sapien
ggtcccacacgcctccagttcacct

SEQ ID NO: 2885899 - DNA, 25 bp, Homo sapien
tgtgaaacgtcccaattatactctt

SEQ ID NO: 2885900 - DNA, 25 bp, Homo sapien
ctgtgaaacgtcccaattatactct

SEQ ID NO: 2885901 - DNA, 25 bp, Homo sapien
atgacaggggcacttaactcccgcg

SEQ ID NO: 2885902 - DNA, 25 bp, Homo sapien
ttggaaatgacaggggcacttaact

SEQ ID NO: 2885903 - DNA, 25 bp, Homo sapien
ctcaaaggcgcctgcgatcgcagct

SEQ ID NO: 2885904 - DNA, 25 bp, Homo sapien
aggcgcctgcgatcgcagctgtttc

SEQ ID NO: 2885905 - DNA, 25 bp, Homo sapien
agcagcaacacctcaaaggcgcctg

SEQ ID NO: 2885906 - DNA, 25 bp, Homo sapien
gcaacacctcaaaggcgcctgcgat

SEQ ID NO: 2885907 - DNA, 25 bp, Homo sapien
gagatccctgttggaggaataccaa

SEQ ID NO: 2885908 - DNA, 25 bp, Homo sapien
tgagggaaacttcccgggagagaga

SEQ ID NO: 2885909 - DNA, 25 bp, Homo sapien
tcccgggagagagatccctgttgga

SEQ ID NO: 2885910 - DNA, 25 bp, Homo sapien
tccctgttggaggaataccaagcaa

SEQ ID NO: 2885911 - DNA, 25 bp, Homo sapien
ccagggtggagatgcccccagggtt

SEQ ID NO: 2885912 - DNA, 25 bp, Homo sapien
ccccgggatggaggcgcctgcattc

SEQ ID NO: 2885913 - DNA, 25 bp, Homo sapien
gcctgcattcctgttcccacagcac

SEQ ID NO: 2885914 - DNA, 25 bp, Homo sapien
gagatgcccccagggttgaggtacc

SEQ ID NO: 2885915 - DNA, 25 bp, Homo sapien
ccagggtggtggtgccctggggtgg

SEQ ID NO: 2885916 - DNA, 25 bp, Homo sapien
gccagggtggtggtgccctggggtg

SEQ ID NO: 2885917 - DNA, 25 bp, Homo sapien
agggtggccagggtggtggtgccct

SEQ ID NO: 2885918 - DNA, 25 bp, Homo sapien
ccccagggtggccagggtggtggtg

SEQ ID NO: 2885919 - DNA, 25 bp, Homo sapien
ggctgctagggcagctgaaggtcat

SEQ ID NO: 2885920 - DNA, 25 bp, Homo sapien
cttaggcaacgggccagggctagct

SEQ ID NO: 2885921 - DNA, 25 bp, Homo sapien
gctcttaggcaacgggccagggcta

SEQ ID NO: 2885922 - DNA, 25 bp, Homo sapien
ccccacacagggttctcccgtggtg

SEQ ID NO: 2885923 - DNA, 25 bp, Homo sapien
ctgctcttaggcaacgggccagggc

SEQ ID NO: 2885924 - DNA, 25 bp, Homo sapien
gaggcttagggcagttatcttctca

SEQ ID NO: 2885925 - DNA, 25 bp, Homo sapien
catactcaggccgcaagtggtcggg

SEQ ID NO: 2885926 - DNA, 25 bp, Homo sapien
ctccacaaagtcctcatcgtcctca

SEQ ID NO: 2885927 - DNA, 25 bp, Homo sapien
ggacctccacaaagtcctcatcgtc

SEQ ID NO: 2885928 - DNA, 25 bp, Homo sapien
catcttcctccgcatcccccagggc

SEQ ID NO: 2885929 - DNA, 25 bp, Homo sapien
taaaatgtaaattggagaaagagat

SEQ ID NO: 2885930 - DNA, 25 bp, Homo sapien
atgtaaattggagaaagagattatg

SEQ ID NO: 2885931 - DNA, 25 bp, Homo sapien
tcagctggccttgtaattaaaatgt

SEQ ID NO: 2885932 - DNA, 25 bp, Homo sapien
gtaaattggagaaagagattatgtc

SEQ ID NO: 2885933 - DNA, 25 bp, Homo sapien
ctttctgaggacacccacagtgcct

SEQ ID NO: 2885934 - DNA, 25 bp, Homo sapien
gtgctcaccacaggctttctgagga

SEQ ID NO: 2885935 - DNA, 25 bp, Homo sapien
cacaggctttctgaggacacccaca

SEQ ID NO: 2885936 - DNA, 25 bp, Homo sapien
ctgtcactgaacacacatgtgctca

SEQ ID NO: 2885937 - DNA, 25 bp, Homo sapien
ggtgcagaggtatccctgactgtgg

SEQ ID NO: 2885938 - DNA, 25 bp, Homo sapien
ccatgctgagggctacgggtgcaga

SEQ ID NO: 2885939 - DNA, 25 bp, Homo sapien
cttcggcgaaccctcttgggaagtg

SEQ ID NO: 2885940 - DNA, 25 bp, Homo sapien
cctgactgtggggacttcggcgaac

SEQ ID NO: 2885941 - DNA, 25 bp, Homo sapien
cgagcaaggcgtcctggctgcggca

SEQ ID NO: 2885942 - DNA, 25 bp, Homo sapien
tcctggctgcggcagaatccacagg

SEQ ID NO: 2885943 - DNA, 25 bp, Homo sapien
ggcgaagaggtgcacagcccatgcc

SEQ ID NO: 2885944 - DNA, 25 bp, Homo sapien
cagcccatgccacgctccccaggag

SEQ ID NO: 2885945 - DNA, 25 bp, Homo sapien
cgtcctggccccggcggaatccacg

SEQ ID NO: 2885946 - DNA, 25 bp, Homo sapien
gcgtcctggccccggcggaatccac

SEQ ID NO: 2885947 - DNA, 25 bp, Homo sapien
tcctggccccggcggaatccacgga

SEQ ID NO: 2885948 - DNA, 25 bp, Homo sapien
tgtggccacgctgttcacacactgt

SEQ ID NO: 2885949 - DNA, 25 bp, Homo sapien
ttccatcttccaacagtcccgaggt

SEQ ID NO: 2885950 - DNA, 25 bp, Homo sapien
tctgccagaacatggcgtgcgtcgg

SEQ ID NO: 2885951 - DNA, 25 bp, Homo sapien
tgccagcctgagcagatggattcgc

SEQ ID NO: 2885952 - DNA, 25 bp, Homo sapien
cgcaagcaccgcacaactgtgtctt

SEQ ID NO: 2885953 - DNA, 25 bp, Homo sapien
gtcctcgtccgcaagcaccgcacaa

SEQ ID NO: 2885954 - DNA, 25 bp, Homo sapien
tcgtccgcaagcaccgcacaactgt

SEQ ID NO: 2885955 - DNA, 25 bp, Homo sapien
gtccgcaagcaccgcacaactgtgt

SEQ ID NO: 2885956 - DNA, 25 bp, Homo sapien
cagaggtggggtccgacacctcctc

SEQ ID NO: 2885957 - DNA, 25 bp, Homo sapien
ccgcagaggtggggtccgacacctc

SEQ ID NO: 2885958 - DNA, 25 bp, Homo sapien
gcagaggtggggtccgacacctcct

SEQ ID NO: 2885959 - DNA, 25 bp, Homo sapien
cagccgcagaggtggggtccgacac

SEQ ID NO: 2885960 - DNA, 25 bp, Homo sapien
gggcctcctgtggctctggcaacgc

SEQ ID NO: 2885961 - DNA, 25 bp, Homo sapien
tgggcctcctgtggctctggcaacg

SEQ ID NO: 2885962 - DNA, 25 bp, Homo sapien
ctgggcctcctgtggctctggcaac

SEQ ID NO: 2885963 - DNA, 25 bp, Homo sapien
ggcctcctgtggctctggcaacgct

SEQ ID NO: 2885964 - DNA, 25 bp, Homo sapien
ccagtagtgcaggtccacgccgtag

SEQ ID NO: 2885965 - DNA, 25 bp, Homo sapien
gtgcaggtccacgccgtagggcacc

SEQ ID NO: 2885966 - DNA, 25 bp, Homo sapien
ggtccacgccgtagggcaccacagg

SEQ ID NO: 2885967 - DNA, 25 bp, Homo sapien
cagtagtgcaggtccacgccgtagg

SEQ ID NO: 2885968 - DNA, 25 bp, Homo sapien
ctcttgaggcccaacggtccggact

SEQ ID NO: 2885969 - DNA, 25 bp, Homo sapien
ggcaggcgctggagtacccaggtgg

SEQ ID NO: 2885970 - DNA, 25 bp, Homo sapien
ccgataggccgtgccagcgagctgt

SEQ ID NO: 2885971 - DNA, 25 bp, Homo sapien
cggtccggactttcgcacagatgac

SEQ ID NO: 2885972 - DNA, 25 bp, Homo sapien
ttcctgggcatccagacacagaggc

SEQ ID NO: 2885973 - DNA, 25 bp, Homo sapien
gcagaccccgcagcattggctttag

SEQ ID NO: 2885974 - DNA, 25 bp, Homo sapien
tggacaatgtgccaggacgtcccgg

SEQ ID NO: 2885975 - DNA, 25 bp, Homo sapien
tcgtgtgtcgtgtgtgagcccagca

SEQ ID NO: 2885976 - DNA, 25 bp, Homo sapien
acgggcatccgcttctcggtgggag

SEQ ID NO: 2885977 - DNA, 25 bp, Homo sapien
ggacagctgtttcttcccgacctct

SEQ ID NO: 2885978 - DNA, 25 bp, Homo sapien
tgggagctttgctgggcgtcacctc

SEQ ID NO: 2885979 - DNA, 25 bp, Homo sapien
cacccctggtggcaatgtgtgacag

SEQ ID NO: 2885980 - DNA, 25 bp, Homo sapien
tctcagcccaactgcctgggggctc

SEQ ID NO: 2885981 - DNA, 25 bp, Homo sapien
ctctctcagcccaactgcctggggg

SEQ ID NO: 2885982 - DNA, 25 bp, Homo sapien
tctctcagcccaactgcctgggggc

SEQ ID NO: 2885983 - DNA, 25 bp, Homo sapien
ctcagcccaactgcctgggggctca

SEQ ID NO: 2885984 - DNA, 25 bp, Homo sapien
gggaaacatgaagccgtgagctcga

SEQ ID NO: 2885985 - DNA, 25 bp, Homo sapien
gtggaacgtgaagccaggcctgccc

SEQ ID NO: 2885986 - DNA, 25 bp, Homo sapien
tccatcaagccgaccacagcagtgt

SEQ ID NO: 2885987 - DNA, 25 bp, Homo sapien
cgtgagctcgatgcaccaggtgcgt

SEQ ID NO: 2885988 - DNA, 25 bp, Homo sapien
aggtccacagacaggagcacagccc

SEQ ID NO: 2885989 - DNA, 25 bp, Homo sapien
agcacagccccaggcacggcccacg

SEQ ID NO: 2885990 - DNA, 25 bp, Homo sapien
gagcacagccccaggcacggcccac

SEQ ID NO: 2885991 - DNA, 25 bp, Homo sapien
cccaggtccacagacaggagcacag

SEQ ID NO: 2885992 - DNA, 25 bp, Homo sapien
tgaggcgtgaccttgaaggccaacg

SEQ ID NO: 2885993 - DNA, 25 bp, Homo sapien
catccacatgaaggtcgtccttcca

SEQ ID NO: 2885994 - DNA, 25 bp, Homo sapien
gggcatccacatgaaggtcgtcctt

SEQ ID NO: 2885995 - DNA, 25 bp, Homo sapien
ctataggacaagggcgacagctgct

SEQ ID NO: 2885996 - DNA, 25 bp, Homo sapien
ccacgtgaaccagccgcgcgaccac

SEQ ID NO: 2885997 - DNA, 25 bp, Homo sapien
gcacgaccgcctgcgtctgaattct

SEQ ID NO: 2885998 - DNA, 25 bp, Homo sapien
gccacgtgaaccagccgcgcgacca

SEQ ID NO: 2885999 - DNA, 25 bp, Homo sapien
agccgcgcgaccacgggcacgaccg

SEQ ID NO: 2886000 - DNA, 25 bp, Homo sapien
acggtcactcccggctgggtctgaa

SEQ ID NO: 2886001 - DNA, 25 bp, Homo sapien
tcactcccggctgggtctgaattct

SEQ ID NO: 2886002 - DNA, 25 bp, Homo sapien
aacacggtcactcccggctgggtct

SEQ ID NO: 2886003 - DNA, 25 bp, Homo sapien
ggtcactcccggctgggtctgaatt

SEQ ID NO: 2886004 - DNA, 25 bp, Homo sapien
agccaccccaacactgtggacagca

SEQ ID NO: 2886005 - DNA, 25 bp, Homo sapien
gccaccccaacactgtggacagcac

SEQ ID NO: 2886006 - DNA, 25 bp, Homo sapien
gaccccagaagagcgtggccacggt

SEQ ID NO: 2886007 - DNA, 25 bp, Homo sapien
agacacagccagaggccctcatagc

SEQ ID NO: 2886008 - DNA, 25 bp, Homo sapien
gcagacacagccagaggccctcata

SEQ ID NO: 2886009 - DNA, 25 bp, Homo sapien
ctgcagacacagccagaggccctca

SEQ ID NO: 2886010 - DNA, 25 bp, Homo sapien
acacagccagaggccctcatagcat

SEQ ID NO: 2886011 - DNA, 25 bp, Homo sapien
tgatgtggcggctccggagcatctc

SEQ ID NO: 2886012 - DNA, 25 bp, Homo sapien
tgctgcacaggctcaaacttcccgg

SEQ ID NO: 2886013 - DNA, 25 bp, Homo sapien
acttcccggcaaaagtgatgtggcg

SEQ ID NO: 2886014 - DNA, 25 bp, Homo sapien
catctcggagatgtcggcattgacc

SEQ ID NO: 2886015 - DNA, 25 bp, Homo sapien
acccgggctgcaaccatggaggata

SEQ ID NO: 2886016 - DNA, 25 bp, Homo sapien
gtgtcaggcttcagggccgtgggca

SEQ ID NO: 2886017 - DNA, 25 bp, Homo sapien
ccgggctgcaaccatggaggatact

SEQ ID NO: 2886018 - DNA, 25 bp, Homo sapien
agccatgtacccaggtgtcaggctt

SEQ ID NO: 2886019 - DNA, 25 bp, Homo sapien
cctcctctggagccggaaggtcttg

SEQ ID NO: 2886020 - DNA, 25 bp, Homo sapien
ctggaatcacgcgcccctcagagga

SEQ ID NO: 2886021 - DNA, 25 bp, Homo sapien
tcagaggagggcgtcctgagagcca

SEQ ID NO: 2886022 - DNA, 25 bp, Homo sapien
gacgtggggatggctccgtccctcc

SEQ ID NO: 2886023 - DNA, 25 bp, Homo sapien
cctgtcttccgggtcgagcggccgt

SEQ ID NO: 2886024 - DNA, 25 bp, Homo sapien
ggtcgagcggccgtccttcgtcgtc

SEQ ID NO: 2886025 - DNA, 25 bp, Homo sapien
cttcgtcgtcccgtggaacaatctt

SEQ ID NO: 2886026 - DNA, 25 bp, Homo sapien
cgtcccgtggaacaatcttcccatg

SEQ ID NO: 2886027 - DNA, 25 bp, Homo sapien
ctcgtcctgacaggggggctgggtc

SEQ ID NO: 2886028 - DNA, 25 bp, Homo sapien
gaggggctcttggtctcgtcctgac

SEQ ID NO: 2886029 - DNA, 25 bp, Homo sapien
ttgcccacggccgtaccctggcagc

SEQ ID NO: 2886030 - DNA, 25 bp, Homo sapien
gggctgggtcgccttgcccacggcc

SEQ ID NO: 2886031 - DNA, 25 bp, Homo sapien
cgggcggtatcagcctgagccttca

SEQ ID NO: 2886032 - DNA, 25 bp, Homo sapien
tccacgtctctcatcaactcagggt

SEQ ID NO: 2886033 - DNA, 25 bp, Homo sapien
gacttttctcccaatgcgagcgcgg

SEQ ID NO: 2886034 - DNA, 25 bp, Homo sapien
gctgtacctggatgagccgagatcc

SEQ ID NO: 2886035 - DNA, 25 bp, Homo sapien
ccaggaagcgaggatggcggtgcct

SEQ ID NO: 2886036 - DNA, 25 bp, Homo sapien
aatatcttggcgctcagatggcccc

SEQ ID NO: 2886037 - DNA, 25 bp, Homo sapien
tgcctggcggtcgagcccctcttat

SEQ ID NO: 2886038 - DNA, 25 bp, Homo sapien
agtccctggaatatcttggcgctca

SEQ ID NO: 2886039 - DNA, 25 bp, Homo sapien
ggctgacgcgtggacccccgttctg

SEQ ID NO: 2886040 - DNA, 25 bp, Homo sapien
ctccctgaagtcaccgctgcagaaa

SEQ ID NO: 2886041 - DNA, 25 bp, Homo sapien
cagtgctcagagaagacatgctggg

SEQ ID NO: 2886042 - DNA, 25 bp, Homo sapien
tgaagtcaccgctgcagaaatacgc

SEQ ID NO: 2886043 - DNA, 25 bp, Homo sapien
caagcaaggctgtggatgtaccacc

SEQ ID NO: 2886044 - DNA, 25 bp, Homo sapien
cagggacttgacacagatttgggag

SEQ ID NO: 2886045 - DNA, 25 bp, Homo sapien
tcttaggcgagaacaaggcaatatg

SEQ ID NO: 2886046 - DNA, 25 bp, Homo sapien
tgcccctggctgatccacgggaaaa

SEQ ID NO: 2886047 - DNA, 25 bp, Homo sapien
gccaggcaggcattccggggagcag

SEQ ID NO: 2886048 - DNA, 25 bp, Homo sapien
tcagctgctgcgacccacgagggtg

SEQ ID NO: 2886049 - DNA, 25 bp, Homo sapien
tgctgcgacccacgagggtgtggag

SEQ ID NO: 2886050 - DNA, 25 bp, Homo sapien
gctgctgcgacccacgagggtgtgg

SEQ ID NO: 2886051 - DNA, 25 bp, Homo sapien
gcaagatgtgacctgggaggcttcc

SEQ ID NO: 2886052 - DNA, 25 bp, Homo sapien
cagtggcggcatcaccaaagttagg

SEQ ID NO: 2886053 - DNA, 25 bp, Homo sapien
cactgacagactgcctgtgggtgcc

SEQ ID NO: 2886054 - DNA, 25 bp, Homo sapien
tggcccgagacagacaggcttagaa

SEQ ID NO: 2886055 - DNA, 25 bp, Homo sapien
tggctgccactaccctccgcacagc

SEQ ID NO: 2886056 - DNA, 25 bp, Homo sapien
tgccactaccctccgcacagctgcc

SEQ ID NO: 2886057 - DNA, 25 bp, Homo sapien
ggtccatccggttcatggctgccac

SEQ ID NO: 2886058 - DNA, 25 bp, Homo sapien
cgtgcttcttctggtccatccggtt

SEQ ID NO: 2886059 - DNA, 25 bp, Homo sapien
ctagttcagtgcgtagttaaactgg

SEQ ID NO: 2886060 - DNA, 25 bp, Homo sapien
tagttcagtgcgtagttaaactggt

SEQ ID NO: 2886061 - DNA, 25 bp, Homo sapien
agttcagtgcgtagttaaactggtt

SEQ ID NO: 2886062 - DNA, 25 bp, Homo sapien
gcatttgcacaaaagtgggtttccc

SEQ ID NO: 2886063 - DNA, 25 bp, Homo sapien
gacaagcactggtctcacgaggact

SEQ ID NO: 2886064 - DNA, 25 bp, Homo sapien
gaggactcgcagaagccctctggaa

SEQ ID NO: 2886065 - DNA, 25 bp, Homo sapien
cagagttcctctgagtggtcgcctc

SEQ ID NO: 2886066 - DNA, 25 bp, Homo sapien
aaatggccagtaagcccacgagaag

SEQ ID NO: 2886067 - DNA, 25 bp, Homo sapien
cacaagcttccgcatggacaggttt

SEQ ID NO: 2886068 - DNA, 25 bp, Homo sapien
tcggtatccttctccaatgctgctg

SEQ ID NO: 2886069 - DNA, 25 bp, Homo sapien
ctgtgaacatgggtgcacaagcttc

SEQ ID NO: 2886070 - DNA, 25 bp, Homo sapien
ggaatagagtcaagtgcccagaaat

SEQ ID NO: 2886071 - DNA, 25 bp, Homo sapien
catgcaaaagaatgtgggctcttac

SEQ ID NO: 2886072 - DNA, 25 bp, Homo sapien
ttttgcaaatcagctgagtgcggtg

SEQ ID NO: 2886073 - DNA, 25 bp, Homo sapien
gaagagtcaaaacagccttgaagca

SEQ ID NO: 2886074 - DNA, 25 bp, Homo sapien
tattaagacggtaatacattccaaa

SEQ ID NO: 2886075 - DNA, 25 bp, Homo sapien
gatttaatattaagacggtaataca

SEQ ID NO: 2886076 - DNA, 25 bp, Homo sapien
aatattaagacggtaatacattcca

SEQ ID NO: 2886077 - DNA, 25 bp, Homo sapien
taagacggtaatacattccaaagca

SEQ ID NO: 2886078 - DNA, 25 bp, Homo sapien
ttagcaatgatcagccccaaagtga

SEQ ID NO: 2886079 - DNA, 25 bp, Homo sapien
gagagaccgaaagcttcccgctaag

SEQ ID NO: 2886080 - DNA, 25 bp, Homo sapien
tcccgctaagatcaagagtaagacg

SEQ ID NO: 2886081 - DNA, 25 bp, Homo sapien
ccccatgaatgcaaggtcggttcaa

SEQ ID NO: 2886082 - DNA, 25 bp, Homo sapien
gacgagaaatcatacaatctatgtt

SEQ ID NO: 2886083 - DNA, 25 bp, Homo sapien
atacggtatgccaataaaataactc

SEQ ID NO: 2886084 - DNA, 25 bp, Homo sapien
taaaagacgagaaatcatacaatct

SEQ ID NO: 2886085 - DNA, 25 bp, Homo sapien
gggacagaaaatacggtatgccaat

SEQ ID NO: 2886086 - DNA, 25 bp, Homo sapien
agacccaacacacatctatacaact

SEQ ID NO: 2886087 - DNA, 25 bp, Homo sapien
aacaggcatctatacaacacacaca

SEQ ID NO: 2886088 - DNA, 25 bp, Homo sapien
tgagacccaacacacatctatacaa

SEQ ID NO: 2886089 - DNA, 25 bp, Homo sapien
caatgagacccaacacacatctata

SEQ ID NO: 2886090 - DNA, 25 bp, Homo sapien
catcaactgtgtgtcagcagaacca

SEQ ID NO: 2886091 - DNA, 25 bp, Homo sapien
tctgaggaacgagatgcccacagtg

SEQ ID NO: 2886092 - DNA, 25 bp, Homo sapien
tcaacacacgtagctggagtccaag

SEQ ID NO: 2886093 - DNA, 25 bp, Homo sapien
tttgcagaaccacaatggagcgctg

SEQ ID NO: 2886094 - DNA, 25 bp, Homo sapien
actccacattggcacaaagcgaggg

SEQ ID NO: 2886095 - DNA, 25 bp, Homo sapien
cacatcggcacatgtgagcaggtgg

SEQ ID NO: 2886096 - DNA, 25 bp, Homo sapien
tccacattggcacaaagcgagggct

SEQ ID NO: 2886097 - DNA, 25 bp, Homo sapien
gcgggcactccacattggcacaaag

SEQ ID NO: 2886098 - DNA, 25 bp, Homo sapien
gcaggcgggcactccacatgggcac

SEQ ID NO: 2886099 - DNA, 25 bp, Homo sapien
agcaggcgggcactccacatgggca

SEQ ID NO: 2886100 - DNA, 25 bp, Homo sapien
gtgagcaggcgggcactccacatgg

SEQ ID NO: 2886101 - DNA, 25 bp, Homo sapien
tgagcaggcgggcactccacatggg

SEQ ID NO: 2886102 - DNA, 25 bp, Homo sapien
ggcactccgcatgggcacgtgtgag

SEQ ID NO: 2886103 - DNA, 25 bp, Homo sapien
actccacgtcggcacgtgtgagcag

SEQ ID NO: 2886104 - DNA, 25 bp, Homo sapien
gggcactccgcatgggcacgtgtga

SEQ ID NO: 2886105 - DNA, 25 bp, Homo sapien
cgggcactccgcatcggcacgtgtg

SEQ ID NO: 2886106 - DNA, 25 bp, Homo sapien
cacgtgtgatcaggcgggcactcca

SEQ ID NO: 2886107 - DNA, 25 bp, Homo sapien
ggcactccacatcggcacgtgtgag

SEQ ID NO: 2886108 - DNA, 25 bp, Homo sapien
gaacactccacatgggcacgtgtga

SEQ ID NO: 2886109 - DNA, 25 bp, Homo sapien
gagcactccacatgggcacgtgtga

SEQ ID NO: 2886110 - DNA, 25 bp, Homo sapien
tacggtaacagcgtctgactcggcc

SEQ ID NO: 2886111 - DNA, 25 bp, Homo sapien
gccaccatgagtagaatgtacggta

SEQ ID NO: 2886112 - DNA, 25 bp, Homo sapien
aggaaacctacagaaccaccatgcc

SEQ ID NO: 2886113 - DNA, 25 bp, Homo sapien
ctacgttatctcgaggtgcagagaa

SEQ ID NO: 2886114 - DNA, 25 bp, Homo sapien
tgtcttttaatcagcatccatgaaa

SEQ ID NO: 2886115 - DNA, 25 bp, Homo sapien
ggtctgatacgaaaagcaccaggct

SEQ ID NO: 2886116 - DNA, 25 bp, Homo sapien
ggctaacaaatcagtcctgaattca

SEQ ID NO: 2886117 - DNA, 25 bp, Homo sapien
tcacaggtttgtcttttaatcagca

SEQ ID NO: 2886118 - DNA, 25 bp, Homo sapien
ctgctcctgtcccaggcgtgttcct

SEQ ID NO: 2886119 - DNA, 25 bp, Homo sapien
caccacccatacttctgctcctgtc

SEQ ID NO: 2886120 - DNA, 25 bp, Homo sapien
aggcgtgttcctgccaacgcccaca

SEQ ID NO: 2886121 - DNA, 25 bp, Homo sapien
tgtcccaggcgtgttcctgccaacg

SEQ ID NO: 2886122 - DNA, 25 bp, Homo sapien
ctgtgcggaggcacacgaggctggg

SEQ ID NO: 2886123 - DNA, 25 bp, Homo sapien
ggtctccagagctgacgtgctctcg

SEQ ID NO: 2886124 - DNA, 25 bp, Homo sapien
gacgtgctctcgaggtcagagcctg

SEQ ID NO: 2886125 - DNA, 25 bp, Homo sapien
tctggtgtcccgagtgtggtacact

SEQ ID NO: 2886126 - DNA, 25 bp, Homo sapien
gtaatgtacgccgtgccaagactcc

SEQ ID NO: 2886127 - DNA, 25 bp, Homo sapien
tctggtgggctcctcgccagaagcc

SEQ ID NO: 2886128 - DNA, 25 bp, Homo sapien
ccttaactcgcgcagcttgcaggta

SEQ ID NO: 2886129 - DNA, 25 bp, Homo sapien
ccaggagaccctcggagttgctggc

SEQ ID NO: 2886130 - DNA, 25 bp, Homo sapien
gggaggatagaggtgaacgcatgga

SEQ ID NO: 2886131 - DNA, 25 bp, Homo sapien
cacggcgtgctggaagaaatgctgg

SEQ ID NO: 2886132 - DNA, 25 bp, Homo sapien
agccacgaggagccccgtgagtgat

SEQ ID NO: 2886133 - DNA, 25 bp, Homo sapien
ctggaagaaatgctggcacccgcgt

SEQ ID NO: 2886134 - DNA, 25 bp, Homo sapien
cctgtcggaggagccacgaggagcc

SEQ ID NO: 2886135 - DNA, 25 bp, Homo sapien
atgccccgcaatgcacacgatcgta

SEQ ID NO: 2886136 - DNA, 25 bp, Homo sapien
tcacacaggccgtggttggcatgca

SEQ ID NO: 2886137 - DNA, 25 bp, Homo sapien
ggacacgctcaagccaggagcagaa

SEQ ID NO: 2886138 - DNA, 25 bp, Homo sapien
cacgatcgtagggacacgtggatgc

SEQ ID NO: 2886139 - DNA, 25 bp, Homo sapien
gggacgctggactctacatccctcg

SEQ ID NO: 2886140 - DNA, 25 bp, Homo sapien
tcttgccttggggacgctggactct

SEQ ID NO: 2886141 - DNA, 25 bp, Homo sapien
ctctacatccctcgtcttttctggg

SEQ ID NO: 2886142 - DNA, 25 bp, Homo sapien
gctggactctacatccctcgtcttt

SEQ ID NO: 2886143 - DNA, 25 bp, Homo sapien
cacgtgcagcgatgccccgtgggca

SEQ ID NO: 2886144 - DNA, 25 bp, Homo sapien
ggtgtccgggtgatcgagtcctggg

SEQ ID NO: 2886145 - DNA, 25 bp, Homo sapien
tggcactgaggccttcgagggcgat

SEQ ID NO: 2886146 - DNA, 25 bp, Homo sapien
cctcgggcccgtgcgagtgggctgt

SEQ ID NO: 2886147 - DNA, 25 bp, Homo sapien
caggcagcggtttgggtgagggtgt

SEQ ID NO: 2886148 - DNA, 25 bp, Homo sapien
tggcggcccgctgggtggtcctgtc

SEQ ID NO: 2886149 - DNA, 25 bp, Homo sapien
ggcggcccgctgggtggtcctgtct

SEQ ID NO: 2886150 - DNA, 25 bp, Homo sapien
gccccacccttcagtggcggcccgc

SEQ ID NO: 2886151 - DNA, 25 bp, Homo sapien
ccacccttcagtggcggcccgctgg

SEQ ID NO: 2886152 - DNA, 25 bp, Homo sapien
tgggcccagtttctacggcagcggc

SEQ ID NO: 2886153 - DNA, 25 bp, Homo sapien
accggcaccgcggatgggcccagtt

SEQ ID NO: 2886154 - DNA, 25 bp, Homo sapien
gcccagtttctacggcagcggcggt

SEQ ID NO: 2886155 - DNA, 25 bp, Homo sapien
cgcggatgggcccagtttctacggc

SEQ ID NO: 2886156 - DNA, 25 bp, Homo sapien
tctggctgacggagagacgtgaaca

SEQ ID NO: 2886157 - DNA, 25 bp, Homo sapien
gaatgcacagatcgcaaaaggccgg

SEQ ID NO: 2886158 - DNA, 25 bp, Homo sapien
gcctagcaatgcttctgggtgatgt

SEQ ID NO: 2886159 - DNA, 25 bp, Homo sapien
gaggatttattccagcagagctggg

SEQ ID NO: 2886160 - DNA, 25 bp, Homo sapien
tcggatagcgcctggaaagttatgg

SEQ ID NO: 2886161 - DNA, 25 bp, Homo sapien
tcccatcggatagcgcctggaaagt

SEQ ID NO: 2886162 - DNA, 25 bp, Homo sapien
tacaaactgtcccatcggatagcgc

SEQ ID NO: 2886163 - DNA, 25 bp, Homo sapien
ttttattacaaactgtcccatcgga

SEQ ID NO: 2886164 - DNA, 25 bp, Homo sapien
aatgagtaagaaggcggagcgtcca

SEQ ID NO: 2886165 - DNA, 25 bp, Homo sapien
gggaggatgcgcagtgtccacgcca

SEQ ID NO: 2886166 - DNA, 25 bp, Homo sapien
cccagaggaatgagtaagaaggcgg

SEQ ID NO: 2886167 - DNA, 25 bp, Homo sapien
aaggcggagcgtccacaccaggaaa

SEQ ID NO: 2886168 - DNA, 25 bp, Homo sapien
catagccggggtgtctgcacggttc

SEQ ID NO: 2886169 - DNA, 25 bp, Homo sapien
ccactcagccatagccggggtgtct

SEQ ID NO: 2886170 - DNA, 25 bp, Homo sapien
cggggtgtctgcacggttcccaaag

SEQ ID NO: 2886171 - DNA, 25 bp, Homo sapien
gtgtctgcacggttcccaaagggcc

SEQ ID NO: 2886172 - DNA, 25 bp, Homo sapien
tgcgtgctcagcgtcttttcctgaa

SEQ ID NO: 2886173 - DNA, 25 bp, Homo sapien
cctccgagatccttggagtcttggg

SEQ ID NO: 2886174 - DNA, 25 bp, Homo sapien
gagtcttggggctcacaccctggct

SEQ ID NO: 2886175 - DNA, 25 bp, Homo sapien
cggcagccgatgaaacctccgagat

SEQ ID NO: 2886176 - DNA, 25 bp, Homo sapien
ttcatgcttgtgatgagggcggtga

SEQ ID NO: 2886177 - DNA, 25 bp, Homo sapien
ttcttcatgcttgtgatgagggcgg

SEQ ID NO: 2886178 - DNA, 25 bp, Homo sapien
tcttcatgcttgtgatgagggcggt

SEQ ID NO: 2886179 - DNA, 25 bp, Homo sapien
cttcatgcttgtgatgagggcggtg

SEQ ID NO: 2886180 - DNA, 25 bp, Homo sapien
ctgcagaaagagccagaaggatgcc

SEQ ID NO: 2886181 - DNA, 25 bp, Homo sapien
tgcagaaagagccagaaggatgcca

SEQ ID NO: 2886182 - DNA, 25 bp, Homo sapien
gcagaaagagccagaaggatgccac

SEQ ID NO: 2886183 - DNA, 25 bp, Homo sapien
aacgtgccagtggtggctgctggac

SEQ ID NO: 2886184 - DNA, 25 bp, Homo sapien
acgtgccagtggtggctgctggaca

SEQ ID NO: 2886185 - DNA, 25 bp, Homo sapien
taacgtgccagtggtggctgctgga

SEQ ID NO: 2886186 - DNA, 25 bp, Homo sapien
ctaacgtgccagtggtggctgctgg

SEQ ID NO: 2886187 - DNA, 25 bp, Homo sapien
tactgacgccagtgtgctgtgctca

SEQ ID NO: 2886188 - DNA, 25 bp, Homo sapien
cttcattatcctggccagtctgcag

SEQ ID NO: 2886189 - DNA, 25 bp, Homo sapien
ggtggaatgctccttcctgattggg

SEQ ID NO: 2886190 - DNA, 25 bp, Homo sapien
tggatgggtcctcaggcttcccttg

SEQ ID NO: 2886191 - DNA, 25 bp, Homo sapien
cccatgagaaccatccgcaggggga

SEQ ID NO: 2886192 - DNA, 25 bp, Homo sapien
tgagaaccatccgcagggggagtca

SEQ ID NO: 2886193 - DNA, 25 bp, Homo sapien
catgagaaccatccgcagggggagt

SEQ ID NO: 2886194 - DNA, 25 bp, Homo sapien
gagaaccatccgcagggggagtcat

SEQ ID NO: 2886195 - DNA, 25 bp, Homo sapien
cggctgtcctgctgcactgaaccca

SEQ ID NO: 2886196 - DNA, 25 bp, Homo sapien
gtccggctgtcctgctgcactgaac

SEQ ID NO: 2886197 - DNA, 25 bp, Homo sapien
gggtccggctgtcctgctgcactga

SEQ ID NO: 2886198 - DNA, 25 bp, Homo sapien
caggggtccggctgtcctgctgcac

SEQ ID NO: 2886199 - DNA, 25 bp, Homo sapien
ggcaggggtccggctgtcctgctga

SEQ ID NO: 2886200 - DNA, 25 bp, Homo sapien
gcaggggtccggctgtcctgctgag

SEQ ID NO: 2886201 - DNA, 25 bp, Homo sapien
ctggggcaggggtccggctgtcctg

SEQ ID NO: 2886202 - DNA, 25 bp, Homo sapien
ggggcaggggtccggctgtcctgct

SEQ ID NO: 2886203 - DNA, 25 bp, Homo sapien
caggggtccggctgtccagctgaga

SEQ ID NO: 2886204 - DNA, 25 bp, Homo sapien
ggtccggctgtccagctgagagcct

SEQ ID NO: 2886205 - DNA, 25 bp, Homo sapien
ggggtccggctgtccagctgagagc

SEQ ID NO: 2886206 - DNA, 25 bp, Homo sapien
tccggctgtccagctgagagcctgg

SEQ ID NO: 2886207 - DNA, 25 bp, Homo sapien
ctggggtaggtgtccggctgtcctg

SEQ ID NO: 2886208 - DNA, 25 bp, Homo sapien
cctggggtaggtgtccggctgtcct

SEQ ID NO: 2886209 - DNA, 25 bp, Homo sapien
tacctggggtaggtgtccggctgtc

SEQ ID NO: 2886210 - DNA, 25 bp, Homo sapien
ctgtccagctgagagcctggggcag

SEQ ID NO: 2886211 - DNA, 25 bp, Homo sapien
ggtccggctgtccagctgagagcct

SEQ ID NO: 2886212 - DNA, 25 bp, Homo sapien
caggggtccggctgtccagctgaga

SEQ ID NO: 2886213 - DNA, 25 bp, Homo sapien
tccggctgtccagctgagagcctgg

SEQ ID NO: 2886214 - DNA, 25 bp, Homo sapien
cattcaccctttagagcccgaggct

SEQ ID NO: 2886215 - DNA, 25 bp, Homo sapien
gggcaggtcttcgtaacatcaggaa

SEQ ID NO: 2886216 - DNA, 25 bp, Homo sapien
ccggagagtcatgggctatcaggcc

SEQ ID NO: 2886217 - DNA, 25 bp, Homo sapien
caggcgctgtcgtttccaggaaaga

SEQ ID NO: 2886218 - DNA, 25 bp, Homo sapien
gggattttctcacccgcagagcggg

SEQ ID NO: 2886219 - DNA, 25 bp, Homo sapien
caaatgctctcgatctgctgggccg

SEQ ID NO: 2886220 - DNA, 25 bp, Homo sapien
gcagtcccagcgcattttaatagtg

SEQ ID NO: 2886221 - DNA, 25 bp, Homo sapien
ggaatgtaattcctgggcggcagaa

SEQ ID NO: 2886222 - DNA, 25 bp, Homo sapien
ccctctcagcttgtgcacactagag

SEQ ID NO: 2886223 - DNA, 25 bp, Homo sapien
gcacactagaggctggatctggatg

SEQ ID NO: 2886224 - DNA, 25 bp, Homo sapien
ggcaccggccttcggccttcagtgg

SEQ ID NO: 2886225 - DNA, 25 bp, Homo sapien
tcccactgaagcacggccttctctg

SEQ ID NO: 2886226 - DNA, 25 bp, Homo sapien
catacaaggggaggccggggctggg

SEQ ID NO: 2886227 - DNA, 25 bp, Homo sapien
ggcatacaaggggaggccggggctg

SEQ ID NO: 2886228 - DNA, 25 bp, Homo sapien
ctgggggcatacaaggggaggccgg

SEQ ID NO: 2886229 - DNA, 25 bp, Homo sapien
gcatacaaggggaggccggggctgg

SEQ ID NO: 2886230 - DNA, 25 bp, Homo sapien
tgagaacacgctcgccgcctgcggg

SEQ ID NO: 2886231 - DNA, 25 bp, Homo sapien
gcctgcgggcatcgcctctgctccc

SEQ ID NO: 2886232 - DNA, 25 bp, Homo sapien
tccctgtagcctccaggagatctct

SEQ ID NO: 2886233 - DNA, 25 bp, Homo sapien
tagcctccaggagatctctgaccca

SEQ ID NO: 2886234 - DNA, 25 bp, Homo sapien
tgcacagatgacagtttaatggcgc

SEQ ID NO: 2886235 - DNA, 25 bp, Homo sapien
ctgtatctctatcccatgaaaatgg

SEQ ID NO: 2886236 - DNA, 25 bp, Homo sapien
aaatggctaacggtgataagggaag

SEQ ID NO: 2886237 - DNA, 25 bp, Homo sapien
taatggcgctttgtaatgggagctc

SEQ ID NO: 2886238 - DNA, 25 bp, Homo sapien
ggttcggagccctcctggtgtgctg

SEQ ID NO: 2886239 - DNA, 25 bp, Homo sapien
gggttcggagccctcctggtgtgct

SEQ ID NO: 2886240 - DNA, 25 bp, Homo sapien
cgggttcggagccctcctggtgtgc

SEQ ID NO: 2886241 - DNA, 25 bp, Homo sapien
ccgggttcggagccctcctggtgtg

SEQ ID NO: 2886242 - DNA, 25 bp, Homo sapien
tctgttcttcacggttcctctgtct

SEQ ID NO: 2886243 - DNA, 25 bp, Homo sapien
atctgttcttcacggttcctctgtc

SEQ ID NO: 2886244 - DNA, 25 bp, Homo sapien
tcatctgttcttcacggttcctctg

SEQ ID NO: 2886245 - DNA, 25 bp, Homo sapien
catctgttcttcacggttcctctgt

SEQ ID NO: 2886246 - DNA, 25 bp, Homo sapien
tcaccccaagccgtgctggggagga

SEQ ID NO: 2886247 - DNA, 25 bp, Homo sapien
gggcaggcagctcacgccatcaccc

SEQ ID NO: 2886248 - DNA, 25 bp, Homo sapien
gctcacgccatcaccccaagccgtg

SEQ ID NO: 2886249 - DNA, 25 bp, Homo sapien
gcggggctgcccctctagcattctt

SEQ ID NO: 2886250 - DNA, 25 bp, Homo sapien
gggcctttacttggtatccgtgtgc

SEQ ID NO: 2886251 - DNA, 25 bp, Homo sapien
tccgattctgtcctggaacgccagc

SEQ ID NO: 2886252 - DNA, 25 bp, Homo sapien
cgtgtgctcgtttgatatccgattc

SEQ ID NO: 2886253 - DNA, 25 bp, Homo sapien
caggggcggcgtgtgcttctccctc

SEQ ID NO: 2886254 - DNA, 25 bp, Homo sapien
ctgcttagagaagtgggaaggacgg

SEQ ID NO: 2886255 - DNA, 25 bp, Homo sapien
tgcttagagaagtgggaaggacggt

SEQ ID NO: 2886256 - DNA, 25 bp, Homo sapien
tcgggtgccgtaggcagtggctgcc

SEQ ID NO: 2886257 - DNA, 25 bp, Homo sapien
ctccccggggtccactgtgtggact

SEQ ID NO: 2886258 - DNA, 25 bp, Homo sapien
actgctcgggtgccgtaggcagtgg

SEQ ID NO: 2886259 - DNA, 25 bp, Homo sapien
tgctcgggtgccgtaggcagtggct

SEQ ID NO: 2886260 - DNA, 25 bp, Homo sapien
ggatgcggaggcttccctcttcgtg

SEQ ID NO: 2886261 - DNA, 25 bp, Homo sapien
cactgttctgtggatgcggaggctt

SEQ ID NO: 2886262 - DNA, 25 bp, Homo sapien
tgttctgtggatgcggaggcttccc

SEQ ID NO: 2886263 - DNA, 25 bp, Homo sapien
tctgtggatgcggaggcttccctct

SEQ ID NO: 2886264 - DNA, 25 bp, Homo sapien
gttgccgcttcaagcccactgaggg

SEQ ID NO: 2886265 - DNA, 25 bp, Homo sapien
tctgaagacactactgcccgttgcc

SEQ ID NO: 2886266 - DNA, 25 bp, Homo sapien
cagcgtcagggtcgagccgtgacca

SEQ ID NO: 2886267 - DNA, 25 bp, Homo sapien
gctggttctttgcagtgtccgtggc

SEQ ID NO: 2886268 - DNA, 25 bp, Homo sapien
cgaagtgcgcacattgctgagacat

SEQ ID NO: 2886269 - DNA, 25 bp, Homo sapien
gtcaattcgattgaagaaaggccca

SEQ ID NO: 2886270 - DNA, 25 bp, Homo sapien
ctaatggtcaattcgattgaagaaa

SEQ ID NO: 2886271 - DNA, 25 bp, Homo sapien
tgaagaaaggcccacgaagtgcgca

SEQ ID NO: 2886272 - DNA, 25 bp, Homo sapien
ctggcatcgggtccgaccctttgct

SEQ ID NO: 2886273 - DNA, 25 bp, Homo sapien
tggcagtaacccaggatctcgcagg

SEQ ID NO: 2886274 - DNA, 25 bp, Homo sapien
caggtcgtttttcaccctccttgct

SEQ ID NO: 2886275 - DNA, 25 bp, Homo sapien
cccaggatctcgcaggagtccctgg

SEQ ID NO: 2886276 - DNA, 25 bp, Homo sapien
tccacggtggtcaccttcacctggg

SEQ ID NO: 2886277 - DNA, 25 bp, Homo sapien
tcagcagccattgcgcagaacagac

SEQ ID NO: 2886278 - DNA, 25 bp, Homo sapien
gctccccaggtgaccgtgctccctt

SEQ ID NO: 2886279 - DNA, 25 bp, Homo sapien
ccttgtcccaccttcctccacggtg

SEQ ID NO: 2886280 - DNA, 25 bp, Homo sapien
cagagacctcgaagccgggacagca

SEQ ID NO: 2886281 - DNA, 25 bp, Homo sapien
cgggacagcagcttgccgggcctgt

SEQ ID NO: 2886282 - DNA, 25 bp, Homo sapien
agagacctcgaagccgggacagcag

SEQ ID NO: 2886283 - DNA, 25 bp, Homo sapien
agacctcgaagccgggacagcagct

SEQ ID NO: 2886284 - DNA, 25 bp, Homo sapien
tgtagatggataagccacctcgtgg

SEQ ID NO: 2886285 - DNA, 25 bp, Homo sapien
tgtcagagccaacccgtgtagatgg

SEQ ID NO: 2886286 - DNA, 25 bp, Homo sapien
cacgtggatggtgtcagagccaacc

SEQ ID NO: 2886287 - DNA, 25 bp, Homo sapien
ggtgccagacgaggacccagctgct

SEQ ID NO: 2886288 - DNA, 25 bp, Homo sapien
tggcctggagtggacgggctgtcca

SEQ ID NO: 2886289 - DNA, 25 bp, Homo sapien
gagtggacgggctgtccaggaggag

SEQ ID NO: 2886290 - DNA, 25 bp, Homo sapien
tgttggcctggagtggacgggctgt

SEQ ID NO: 2886291 - DNA, 25 bp, Homo sapien
gctgtgttggcctggagtggacggg

SEQ ID NO: 2886292 - DNA, 25 bp, Homo sapien
gacctggagacgttcttccctggca

SEQ ID NO: 2886293 - DNA, 25 bp, Homo sapien
aggacctggagacgttcttccctgg

SEQ ID NO: 2886294 - DNA, 25 bp, Homo sapien
ttagggtggcgagcacaagccctca

SEQ ID NO: 2886295 - DNA, 25 bp, Homo sapien
ggtggcgagcacaagccctcaactc

SEQ ID NO: 2886296 - DNA, 25 bp, Homo sapien
gaggaatctgaagaaacgtgctgga

SEQ ID NO: 2886297 - DNA, 25 bp, Homo sapien
aagaaacgtgctggatgtccccaga

SEQ ID NO: 2886298 - DNA, 25 bp, Homo sapien
agtgggggcttcactgactctcccc

SEQ ID NO: 2886299 - DNA, 25 bp, Homo sapien
gagcagtcacatgaccggcaggcgg

SEQ ID NO: 2886300 - DNA, 25 bp, Homo sapien
tggacacagtctcctctaccgctga

SEQ ID NO: 2886301 - DNA, 25 bp, Homo sapien
gaaacgcaactctgcttgaggctgc

SEQ ID NO: 2886302 - DNA, 25 bp, Homo sapien
tgatgtccccgtcctggagcgggca

SEQ ID NO: 2886303 - DNA, 25 bp, Homo sapien
ggagcttgggcccatctcagggtcc

SEQ ID NO: 2886304 - DNA, 25 bp, Homo sapien
gctggtcctcccgggtgtccctgaa

SEQ ID NO: 2886305 - DNA, 25 bp, Homo sapien
gggcccctcctggtgttctgctggt

SEQ ID NO: 2886306 - DNA, 25 bp, Homo sapien
gttctgctggtcctcccgggtgtcc

SEQ ID NO: 2886307 - DNA, 25 bp, Homo sapien
accccgggcgctcccccagccacag

SEQ ID NO: 2886308 - DNA, 25 bp, Homo sapien
gaggtctcccttgaggaccctgggc

SEQ ID NO: 2886309 - DNA, 25 bp, Homo sapien
ccagcaagagcaggaatttcagctc

SEQ ID NO: 2886310 - DNA, 25 bp, Homo sapien
cttcgctgttccagccctgcagatg

SEQ ID NO: 2886311 - DNA, 25 bp, Homo sapien
agcaggaatttcagctctcctcctg

SEQ ID NO: 2886312 - DNA, 25 bp, Homo sapien
gaggaggggcagatgctggggccat

SEQ ID NO: 2886313 - DNA, 25 bp, Homo sapien
ggaggaggggcagatgctggggcca

SEQ ID NO: 2886314 - DNA, 25 bp, Homo sapien
ctggggggaggaggggcagatgctg

SEQ ID NO: 2886315 - DNA, 25 bp, Homo sapien
ggggggaggaggggcagatgctggg

SEQ ID NO: 2886316 - DNA, 25 bp, Homo sapien
agctccttgttctcgtgctcgccgc

SEQ ID NO: 2886317 - DNA, 25 bp, Homo sapien
cttgttctcgtgctcgccgccgcat

SEQ ID NO: 2886318 - DNA, 25 bp, Homo sapien
tgttctcgtgctcgccgccgcatgt

SEQ ID NO: 2886319 - DNA, 25 bp, Homo sapien
agcctgcccgtgctctggtgcagcg

SEQ ID NO: 2886320 - DNA, 25 bp, Homo sapien
gccacaggcagggggtcccagggcc

SEQ ID NO: 2886321 - DNA, 25 bp, Homo sapien
tagccacaggcagggggtcccaggg

SEQ ID NO: 2886322 - DNA, 25 bp, Homo sapien
ctagccacaggcagggggtcccagg

SEQ ID NO: 2886323 - DNA, 25 bp, Homo sapien
cacaggcagggggtcccagggccct

SEQ ID NO: 2886324 - DNA, 25 bp, Homo sapien
agctgtgtcacccacggtgggcctg

SEQ ID NO: 2886325 - DNA, 25 bp, Homo sapien
tttgagtcccttggttggccctgca

SEQ ID NO: 2886326 - DNA, 25 bp, Homo sapien
gggcatttgagtcccttggttggcc

SEQ ID NO: 2886327 - DNA, 25 bp, Homo sapien
cctcgtgtggatgcttggccccttg

SEQ ID NO: 2886328 - DNA, 25 bp, Homo sapien
gttcttctgcagtgccgacctgctg

SEQ ID NO: 2886329 - DNA, 25 bp, Homo sapien
tctgcagtgccgacctgctgtgtcc

SEQ ID NO: 2886330 - DNA, 25 bp, Homo sapien
ggccattcccctcggtgcccttgat

SEQ ID NO: 2886331 - DNA, 25 bp, Homo sapien
gcagtgcagccggttcttctgcagt

SEQ ID NO: 2886332 - DNA, 25 bp, Homo sapien
ggcagggtccctcaggtcagaggct

SEQ ID NO: 2886333 - DNA, 25 bp, Homo sapien
ttggtggtcagagtcccactggccc

SEQ ID NO: 2886334 - DNA, 25 bp, Homo sapien
gattaacatgcgtctgtgttcccca

SEQ ID NO: 2886335 - DNA, 25 bp, Homo sapien
tgttccccacgaaaggcctgctgtg

SEQ ID NO: 2886336 - DNA, 25 bp, Homo sapien
tgtgctttagttgctaggaaacccc

SEQ ID NO: 2886337 - DNA, 25 bp, Homo sapien
gcctgacacacgcacggagcttgct

SEQ ID NO: 2886338 - DNA, 25 bp, Homo sapien
ctcgcctgacacacgcacggagctt

SEQ ID NO: 2886339 - DNA, 25 bp, Homo sapien
cctcgcctgacacacgcacggagct

SEQ ID NO: 2886340 - DNA, 25 bp, Homo sapien
tcgcctgacacacgcacggagcttg

SEQ ID NO: 2886341 - DNA, 25 bp, Homo sapien
ttgggatgaggagccggtgccatca

SEQ ID NO: 2886342 - DNA, 25 bp, Homo sapien
cggtcagggcggagagtcccctcct

SEQ ID NO: 2886343 - DNA, 25 bp, Homo sapien
cacggtcagggcggagagtcccctc

SEQ ID NO: 2886344 - DNA, 25 bp, Homo sapien
tgaggagccggtgccatcagtggct

SEQ ID NO: 2886345 - DNA, 25 bp, Homo sapien
gctgcacctgctgagctgttttctc

SEQ ID NO: 2886346 - DNA, 25 bp, Homo sapien
ttccgcggcctcagtcacgagagcg

SEQ ID NO: 2886347 - DNA, 25 bp, Homo sapien
caggcccgctgcgtttttggaggtc

SEQ ID NO: 2886348 - DNA, 25 bp, Homo sapien
acgagagcgcaaggcttgtcctcca

SEQ ID NO: 2886349 - DNA, 25 bp, Homo sapien
tcttcagtgtgaccgtagtcatcgc

SEQ ID NO: 2886350 - DNA, 25 bp, Homo sapien
tgctcacgagtgtcttcagtgtgac

SEQ ID NO: 2886351 - DNA, 25 bp, Homo sapien
agccgctttggtctgcttgctcacg

SEQ ID NO: 2886352 - DNA, 25 bp, Homo sapien
tagtcatcgctttctggtaaaaagg

SEQ ID NO: 2886353 - DNA, 25 bp, Homo sapien
tccctgtggcgtgaaagccttcaag

SEQ ID NO: 2886354 - DNA, 25 bp, Homo sapien
gaggatcgacagcaacaagggtccc

SEQ ID NO: 2886355 - DNA, 25 bp, Homo sapien
aagccttcaagtcctttagcagagc

SEQ ID NO: 2886356 - DNA, 25 bp, Homo sapien
gggctgggaggatcgacagcaacaa

SEQ ID NO: 2886357 - DNA, 25 bp, Homo sapien
gctgcccccggcgtgtctttgcata

SEQ ID NO: 2886358 - DNA, 25 bp, Homo sapien
gtcacatttgggaccgtgcgggcct

SEQ ID NO: 2886359 - DNA, 25 bp, Homo sapien
agacgtttttccgtggcagcgtcga

SEQ ID NO: 2886360 - DNA, 25 bp, Homo sapien
ttcaagctgcccgtgagagccatct

SEQ ID NO: 2886361 - DNA, 25 bp, Homo sapien
gaaggtgggtgatgagccatatgga

SEQ ID NO: 2886362 - DNA, 25 bp, Homo sapien
ggtgatgagccatatggacatctgg

SEQ ID NO: 2886363 - DNA, 25 bp, Homo sapien
ggttcccatggccgtgggagcctgt

SEQ ID NO: 2886364 - DNA, 25 bp, Homo sapien
agagtagagggccgcggcagccagg

SEQ ID NO: 2886365 - DNA, 25 bp, Homo sapien
tcacgtgtgaaggtcattcagcgcg

SEQ ID NO: 2886366 - DNA, 25 bp, Homo sapien
gggttagcaatatggtgctcacttc

SEQ ID NO: 2886367 - DNA, 25 bp, Homo sapien
ggcgtctgtgctgcactggctgtgc

SEQ ID NO: 2886368 - DNA, 25 bp, Homo sapien
tcattcagcgcgttggggcgtctgt

SEQ ID NO: 2886369 - DNA, 25 bp, Homo sapien
cagggtgtgcaggtgcaggctttat

SEQ ID NO: 2886370 - DNA, 25 bp, Homo sapien
cagggtgtgcaggtgcaggttttat

SEQ ID NO: 2886371 - DNA, 25 bp, Homo sapien
tgcaggtgcaggctttattttagat

SEQ ID NO: 2886372 - DNA, 25 bp, Homo sapien
gtgcaggtgcagattttattttaga

SEQ ID NO: 2886373 - DNA, 25 bp, Homo sapien
aggagtggttggtgggattagggag

SEQ ID NO: 2886374 - DNA, 25 bp, Homo sapien
tgcaggagtggttggtgggattagg

SEQ ID NO: 2886375 - DNA, 25 bp, Homo sapien
ggagggaggctggcttgtcagccat

SEQ ID NO: 2886376 - DNA, 25 bp, Homo sapien
cttgcaggagtggttggtgggatta

SEQ ID NO: 2886377 - DNA, 25 bp, Homo sapien
gagctgcttttggcagtaggcgtgg

SEQ ID NO: 2886378 - DNA, 25 bp, Homo sapien
ggcagtaggcgtggtccctcccgcg

SEQ ID NO: 2886379 - DNA, 25 bp, Homo sapien
cagtaggcgtggtccctcccgcgct

SEQ ID NO: 2886380 - DNA, 25 bp, Homo sapien
ggagctgcttttggcagtaggcgtg

SEQ ID NO: 2886381 - DNA, 25 bp, Homo sapien
ggccggcgccgagaggtcctggagt

SEQ ID NO: 2886382 - DNA, 25 bp, Homo sapien
agggatgcctgatgccggctgtgct

SEQ ID NO: 2886383 - DNA, 25 bp, Homo sapien
ggcaagggatgcctgatgccggctg

SEQ ID NO: 2886384 - DNA, 25 bp, Homo sapien
gcctgatgccggctgtgcttcccgg

SEQ ID NO: 2886385 - DNA, 25 bp, Homo sapien
agccgccagccgagggcattttgcc

SEQ ID NO: 2886386 - DNA, 25 bp, Homo sapien
cattttgccgctgtcccgtgaggcg

SEQ ID NO: 2886387 - DNA, 25 bp, Homo sapien
ggtttgaccctcctaggggtctgca

SEQ ID NO: 2886388 - DNA, 25 bp, Homo sapien
gctgtcccgtgaggcggccatctga

SEQ ID NO: 2886389 - DNA, 25 bp, Homo sapien
tgctcagaggggcgcgctgcggcac

SEQ ID NO: 2886390 - DNA, 25 bp, Homo sapien
tcaagccagcagatgatgctcagag

SEQ ID NO: 2886391 - DNA, 25 bp, Homo sapien
agcagcagtgtctgcgggctgtgtg

SEQ ID NO: 2886392 - DNA, 25 bp, Homo sapien
ggcgcgctgcggcacagtccaggag

SEQ ID NO: 2886393 - DNA, 25 bp, Homo sapien
ttaatctgagcgcagtcgcggagcc

SEQ ID NO: 2886394 - DNA, 25 bp, Homo sapien
cacgcagcctgtgttaagtggcctc

SEQ ID NO: 2886395 - DNA, 25 bp, Homo sapien
gaagccgctttttctgcgtagcctg

SEQ ID NO: 2886396 - DNA, 25 bp, Homo sapien
tcgaggcgacttttccgcacgaggc

SEQ ID NO: 2886397 - DNA, 25 bp, Homo sapien
gcagtgcccagtaggcatatgagtc

SEQ ID NO: 2886398 - DNA, 25 bp, Homo sapien
ggcacgtttggtctccaggattgga

SEQ ID NO: 2886399 - DNA, 25 bp, Homo sapien
ggatctcactacttaaactgaacct

SEQ ID NO: 2886400 - DNA, 25 bp, Homo sapien
cccacggagcttctggattgcatag

SEQ ID NO: 2886401 - DNA, 25 bp, Homo sapien
cagttcgagtctgtgttgtgctccc

SEQ ID NO: 2886402 - DNA, 25 bp, Homo sapien
ccctgaaaggcgtggtgacttggcc

SEQ ID NO: 2886403 - DNA, 25 bp, Homo sapien
tcagcccgagttagccagttcgagt

SEQ ID NO: 2886404 - DNA, 25 bp, Homo sapien
gacgagcttctcgtgaacacgtgga

SEQ ID NO: 2886405 - DNA, 25 bp, Homo sapien
tcagttacgtgccagacctggaccg

SEQ ID NO: 2886406 - DNA, 25 bp, Homo sapien
ggagcatacccaccctcagttacgt

SEQ ID NO: 2886407 - DNA, 25 bp, Homo sapien
caggtggtcgtcatctgggccattt

SEQ ID NO: 2886408 - DNA, 25 bp, Homo sapien
gatgtagagcaactcgcctctgccc

SEQ ID NO: 2886409 - DNA, 25 bp, Homo sapien
tgtcaacactgagttccggcggatt

SEQ ID NO: 2886410 - DNA, 25 bp, Homo sapien
tgatctactactggtcccgtgaccg

SEQ ID NO: 2886411 - DNA, 25 bp, Homo sapien
tgacaagtttgccaccggtgcacca

SEQ ID NO: 2886412 - DNA, 25 bp, Homo sapien
gaaggtaaccacctaccgagtgcac

SEQ ID NO: 2886413 - DNA, 25 bp, Homo sapien
gaccttcactctcgcctatctggtg

SEQ ID NO: 2886414 - DNA, 25 bp, Homo sapien
gcactgacttgcaggtgacgggaac

SEQ ID NO: 2886415 - DNA, 25 bp, Homo sapien
gggctcacggtgcagaacctgctgt

SEQ ID NO: 2886416 - DNA, 25 bp, Homo sapien
gtgttcacgcccaacgagttccacg

SEQ ID NO: 2886417 - DNA, 25 bp, Homo sapien
cccagagcgccccgcgagcggccga

SEQ ID NO: 2886418 - DNA, 25 bp, Homo sapien
gagcgccccgcgagcggccgagcgg

SEQ ID NO: 2886419 - DNA, 25 bp, Homo sapien
gcgagcggccgagcggcgggactcc

SEQ ID NO: 2886420 - DNA, 25 bp, Homo sapien
ccgcgagcggccgagcggcgggact

SEQ ID NO: 2886421 - DNA, 25 bp, Homo sapien
ctcaatgcacaggtgcggtgccgcc

SEQ ID NO: 2886422 - DNA, 25 bp, Homo sapien
ctgtgctcaatgcacaggtgcggtg

SEQ ID NO: 2886423 - DNA, 25 bp, Homo sapien
tgctcaatgcacaggtgcggtgccg

SEQ ID NO: 2886424 - DNA, 25 bp, Homo sapien
aagagaggccgcacccgcacgggga

SEQ ID NO: 2886425 - DNA, 25 bp, Homo sapien
gtcgcgcttctagcccttgatggcc

SEQ ID NO: 2886426 - DNA, 25 bp, Homo sapien
acgccgggggccaagcctagctgct

SEQ ID NO: 2886427 - DNA, 25 bp, Homo sapien
gctgctaccgccgtcgcgcttctag

SEQ ID NO: 2886428 - DNA, 25 bp, Homo sapien
aaggaggggtccgcgtctgctccac

SEQ ID NO: 2886429 - DNA, 25 bp, Homo sapien
ccgctccgccgtcggtcttggccca

SEQ ID NO: 2886430 - DNA, 25 bp, Homo sapien
agggccgggtcccatgacagggcgc

SEQ ID NO: 2886431 - DNA, 25 bp, Homo sapien
cagcccggcggtcggtctagggccg

SEQ ID NO: 2886432 - DNA, 25 bp, Homo sapien
cgccgtcggtcttggcccagctcta

SEQ ID NO: 2886433 - DNA, 25 bp, Homo sapien
acctcccacacgtgtctcttggcag

SEQ ID NO: 2886434 - DNA, 25 bp, Homo sapien
cccacacgtgtctcttggcagagaa

SEQ ID NO: 2886435 - DNA, 25 bp, Homo sapien
ctcccacacgtgtctcttggcagag

SEQ ID NO: 2886436 - DNA, 25 bp, Homo sapien
tcccacacgtgtctcttggcagaga

SEQ ID NO: 2886437 - DNA, 25 bp, Homo sapien
ttgtcgtttaagacctgcagactca

SEQ ID NO: 2886438 - DNA, 25 bp, Homo sapien
tgtgacacacgaagaacagacgatc

SEQ ID NO: 2886439 - DNA, 25 bp, Homo sapien
tctggtggcgaaaacaggaagtcgc

SEQ ID NO: 2886440 - DNA, 25 bp, Homo sapien
cttcatagctttggccaggttcttg

SEQ ID NO: 2886441 - DNA, 25 bp, Homo sapien
gttttccagtccaagggtgtcatcc

SEQ ID NO: 2886442 - DNA, 25 bp, Homo sapien
gcgtctgtggatcccgcagaggtgt

SEQ ID NO: 2886443 - DNA, 25 bp, Homo sapien
gaaaggagcctcaagtttgctggcc

SEQ ID NO: 2886444 - DNA, 25 bp, Homo sapien
ggccatgctaggacttagaatcctg

SEQ ID NO: 2886445 - DNA, 25 bp, Homo sapien
acgtgggagcaccacagtgaccacc

SEQ ID NO: 2886446 - DNA, 25 bp, Homo sapien
gtgggagcaccacagtgaccaccac

SEQ ID NO: 2886447 - DNA, 25 bp, Homo sapien
tgacgtgggagcaccacagtgacca

SEQ ID NO: 2886448 - DNA, 25 bp, Homo sapien
ctgacgtgggagcaccacagtgacc

SEQ ID NO: 2886449 - DNA, 25 bp, Homo sapien
tctgaatgacacgtgggcagctgca

SEQ ID NO: 2886450 - DNA, 25 bp, Homo sapien
ccactcggctgtcctctgaatgaca

SEQ ID NO: 2886451 - DNA, 25 bp, Homo sapien
gctgtcctctgaatgacacgtgggc

SEQ ID NO: 2886452 - DNA, 25 bp, Homo sapien
agctgccaccttggggcggcactgc

SEQ ID NO: 2886453 - DNA, 25 bp, Homo sapien
ctaagtttgaagatgtcaaaactga

SEQ ID NO: 2886454 - DNA, 25 bp, Homo sapien
ctgagaagacgcagggtcatgtgcc

SEQ ID NO: 2886455 - DNA, 25 bp, Homo sapien
gaagacgcagggtcatgtgccagtg

SEQ ID NO: 2886456 - DNA, 25 bp, Homo sapien
agaagacgcagggtcatgtgccagt

SEQ ID NO: 2886457 - DNA, 25 bp, Homo sapien
tgagaagacgcagggtcatgtgcca

SEQ ID NO: 2886458 - DNA, 25 bp, Homo sapien
tgtctctggggcactcgctgctcac

SEQ ID NO: 2886459 - DNA, 25 bp, Homo sapien
ctgcatggcgcagggcccctgacag

SEQ ID NO: 2886460 - DNA, 25 bp, Homo sapien
ctgctcacaatgtgggactgcatgg

SEQ ID NO: 2886461 - DNA, 25 bp, Homo sapien
cagaagaggcggctgttgggatggt

SEQ ID NO: 2886462 - DNA, 25 bp, Homo sapien
acttaatcaacgtgaagcagcgagt

SEQ ID NO: 2886463 - DNA, 25 bp, Homo sapien
taaaagagacttaatcaacgtgaag

SEQ ID NO: 2886464 - DNA, 25 bp, Homo sapien
acgtgaagcagcgagtacctggtga

SEQ ID NO: 2886465 - DNA, 25 bp, Homo sapien
ggttaggggcctcagcattcattct

SEQ ID NO: 2886466 - DNA, 25 bp, Homo sapien
cttagggattgcaccaggaggcgaa

SEQ ID NO: 2886467 - DNA, 25 bp, Homo sapien
tcccagtcgaggtggtaagagcccc

SEQ ID NO: 2886468 - DNA, 25 bp, Homo sapien
agttttacaggtccgctcctcgagg

SEQ ID NO: 2886469 - DNA, 25 bp, Homo sapien
ttggtgtcacctccgaacgggatga

SEQ ID NO: 2886470 - DNA, 25 bp, Homo sapien
tattggatccctccttaggccagga

SEQ ID NO: 2886471 - DNA, 25 bp, Homo sapien
caagtcaagttcacctgaggaggaa

SEQ ID NO: 2886472 - DNA, 25 bp, Homo sapien
tacccggcctcaaaggagtatctga

SEQ ID NO: 2886473 - DNA, 25 bp, Homo sapien
taggccaggagcactaaagagatgc

SEQ ID NO: 2886474 - DNA, 25 bp, Homo sapien
aggcgtgtcctccgctgaggctgaa

SEQ ID NO: 2886475 - DNA, 25 bp, Homo sapien
tgtgggaagcgaggtgctggcagag

SEQ ID NO: 2886476 - DNA, 25 bp, Homo sapien
gacagcttgtgggaagcgaggtgct

SEQ ID NO: 2886477 - DNA, 25 bp, Homo sapien
tgcctggacagcttgtgggaagcga

SEQ ID NO: 2886478 - DNA, 25 bp, Homo sapien
agcttgtgggaagcgaggtgctggc

SEQ ID NO: 2886479 - DNA, 25 bp, Homo sapien
ctgcccctgctgatgggtgggcact

SEQ ID NO: 2886480 - DNA, 25 bp, Homo sapien
tcctctttcagctccaaggcaggct

SEQ ID NO: 2886481 - DNA, 25 bp, Homo sapien
tgcccctgctgatgggtgggcactg

SEQ ID NO: 2886482 - DNA, 25 bp, Homo sapien
tgaagctctcctctttcagctccaa

SEQ ID NO: 2886483 - DNA, 25 bp, Homo sapien
cgaggaagttccaaactgctccagg

SEQ ID NO: 2886484 - DNA, 25 bp, Homo sapien
ggaagttccaaactgctccaggtaa

SEQ ID NO: 2886485 - DNA, 25 bp, Homo sapien
aagttccaaactgctccaggtaatc

SEQ ID NO: 2886486 - DNA, 25 bp, Homo sapien
caggtaatccacctccgcgcccgtg

SEQ ID NO: 2886487 - DNA, 25 bp, Homo sapien
actggtctaccaggactgtccctca

SEQ ID NO: 2886488 - DNA, 25 bp, Homo sapien
ggtcgaacttgaggtataaggactg

SEQ ID NO: 2886489 - DNA, 25 bp, Homo sapien
aacttgaggtataaggactgcttcc

SEQ ID NO: 2886490 - DNA, 25 bp, Homo sapien
ggtggccacgggcactggtctacca

SEQ ID NO: 2886491 - DNA, 25 bp, Homo sapien
catgagggagggccggcgcacatac

SEQ ID NO: 2886492 - DNA, 25 bp, Homo sapien
ctcaaggcttcatgcatgagggagg

SEQ ID NO: 2886493 - DNA, 25 bp, Homo sapien
cagcctccagtcttcccacactcaa

SEQ ID NO: 2886494 - DNA, 25 bp, Homo sapien
tcccacactcaaggcttcatgcatg

SEQ ID NO: 2886495 - DNA, 25 bp, Homo sapien
ccaagaaatcgaactccacaagctt

SEQ ID NO: 2886496 - DNA, 25 bp, Homo sapien
ccgcggacgtcctgagggagtctca

SEQ ID NO: 2886497 - DNA, 25 bp, Homo sapien
aagcttggcttcccgcggacgtcct

SEQ ID NO: 2886498 - DNA, 25 bp, Homo sapien
cagtgctcccaagaaatcgaactcc

SEQ ID NO: 2886499 - DNA, 25 bp, Homo sapien
aggaacccatttcgcccttgcctct

SEQ ID NO: 2886500 - DNA, 25 bp, Homo sapien
caggaacccatttcgcccttgcctc

SEQ ID NO: 2886501 - DNA, 25 bp, Homo sapien
acaggaacccatttcgcccttgcct

SEQ ID NO: 2886502 - DNA, 25 bp, Homo sapien
gaacccatttcgcccttgcctctta

SEQ ID NO: 2886503 - DNA, 25 bp, Homo sapien
tggagcaggtccactataggtccgg

SEQ ID NO: 2886504 - DNA, 25 bp, Homo sapien
ggtccactataggtccggtggacag

SEQ ID NO: 2886505 - DNA, 25 bp, Homo sapien
tccactataggtccggtggacaggg

SEQ ID NO: 2886506 - DNA, 25 bp, Homo sapien
gcaggtccactataggtccggtgga

SEQ ID NO: 2886507 - DNA, 25 bp, Homo sapien
tttcccgccagtcctaatcagtagt

SEQ ID NO: 2886508 - DNA, 25 bp, Homo sapien
tctttgtggcaccagagaacaagca

SEQ ID NO: 2886509 - DNA, 25 bp, Homo sapien
taagtcaccttgagttacctgttcc

SEQ ID NO: 2886510 - DNA, 25 bp, Homo sapien
tggaattggcttagactgtgtggtc

SEQ ID NO: 2886511 - DNA, 25 bp, Homo sapien
gtgcagtcacgtgatctctgcttgc

SEQ ID NO: 2886512 - DNA, 25 bp, Homo sapien
gttcaagccattgtcttgcttcggc

SEQ ID NO: 2886513 - DNA, 25 bp, Homo sapien
agtcacgtgatctctgcttgctgca

SEQ ID NO: 2886514 - DNA, 25 bp, Homo sapien
tcaagccattgtcttgcttcggcct

SEQ ID NO: 2886515 - DNA, 25 bp, Homo sapien
ccagtggcagatactaggggtccta

SEQ ID NO: 2886516 - DNA, 25 bp, Homo sapien
ccatgtggggcttccagtgggaccc

SEQ ID NO: 2886517 - DNA, 25 bp, Homo sapien
agcaggcacccaacaggtgtgtgtc

SEQ ID NO: 2886518 - DNA, 25 bp, Homo sapien
acgtgcacccgactgccagggggca

SEQ ID NO: 2886519 - DNA, 25 bp, Homo sapien
ggttcttcccgtggagctcctcaca

SEQ ID NO: 2886520 - DNA, 25 bp, Homo sapien
ttcccgtggagctcctcacacctgc

SEQ ID NO: 2886521 - DNA, 25 bp, Homo sapien
aggttcttcccgtggagctcctcac

SEQ ID NO: 2886522 - DNA, 25 bp, Homo sapien
ccgtggagctcctcacacctgctcc

SEQ ID NO: 2886523 - DNA, 25 bp, Homo sapien
gccattgcctcgggtgcccagcggt

SEQ ID NO: 2886524 - DNA, 25 bp, Homo sapien
gacacacagccattgcctcgggtgc

SEQ ID NO: 2886525 - DNA, 25 bp, Homo sapien
acagacacacagccattgcctcggg

SEQ ID NO: 2886526 - DNA, 25 bp, Homo sapien
attgcctcgggtgcccagcggtccc

SEQ ID NO: 2886527 - DNA, 25 bp, Homo sapien
tggtacacaacctcttcgaacctgt

SEQ ID NO: 2886528 - DNA, 25 bp, Homo sapien
tggcctggtacacaacctcttcgaa

SEQ ID NO: 2886529 - DNA, 25 bp, Homo sapien
ggtacacaacctcttcgaacctgtc

SEQ ID NO: 2886530 - DNA, 25 bp, Homo sapien
cctggtacacaacctcttcgaacct

SEQ ID NO: 2886531 - DNA, 25 bp, Homo sapien
caggatcttctaggccggatgcaaa

SEQ ID NO: 2886532 - DNA, 25 bp, Homo sapien
caaccgaaacgatgggtgccagaga

SEQ ID NO: 2886533 - DNA, 25 bp, Homo sapien
tccacatcagatccgcagggaactg

SEQ ID NO: 2886534 - DNA, 25 bp, Homo sapien
tatggcgagctccaggatgtgcgtc

SEQ ID NO: 2886535 - DNA, 25 bp, Homo sapien
tccatggagttcagatctgtggtaa

SEQ ID NO: 2886536 - DNA, 25 bp, Homo sapien
tggagttcagatctgtggtaagttg

SEQ ID NO: 2886537 - DNA, 25 bp, Homo sapien
catggagttcagatctgtggtaagt

SEQ ID NO: 2886538 - DNA, 25 bp, Homo sapien
agttcagatctgtggtaagttggtc

SEQ ID NO: 2886539 - DNA, 25 bp, Homo sapien
tagccccgctggcttggaccatgag

SEQ ID NO: 2886540 - DNA, 25 bp, Homo sapien
tgcctgatcatagccgagtcgtctg

SEQ ID NO: 2886541 - DNA, 25 bp, Homo sapien
ggaccaaggtgcaaagacagcagct

SEQ ID NO: 2886542 - DNA, 25 bp, Homo sapien
tctgtcacacaacagcggacggctc

SEQ ID NO: 2886543 - DNA, 25 bp, Homo sapien
ctccacaggaggcgttgagcacctc

SEQ ID NO: 2886544 - DNA, 25 bp, Homo sapien
cctccacaggaggcgttgagcacct

SEQ ID NO: 2886545 - DNA, 25 bp, Homo sapien
tcctccacaggaggcgttgagcacc

SEQ ID NO: 2886546 - DNA, 25 bp, Homo sapien
tgcaagggccgcttttccagtttag

SEQ ID NO: 2886547 - DNA, 25 bp, Homo sapien
gactcagatgaggtgtggctcagca

SEQ ID NO: 2886548 - DNA, 25 bp, Homo sapien
ccatgcctcactctaataacgggtc

SEQ ID NO: 2886549 - DNA, 25 bp, Homo sapien
gcttgcttctgttaggcagctgggc

SEQ ID NO: 2886550 - DNA, 25 bp, Homo sapien
cactgggtcgtccaagatgggatta

SEQ ID NO: 2886551 - DNA, 25 bp, Homo sapien
cataagccggcctagtttttctgta

SEQ ID NO: 2886552 - DNA, 25 bp, Homo sapien
gctctatcgccaggccatagtgtga

SEQ ID NO: 2886553 - DNA, 25 bp, Homo sapien
caaggtctctattgaagcaatactc

SEQ ID NO: 2886554 - DNA, 25 bp, Homo sapien
ctccacgcacttcttcagtgactct

SEQ ID NO: 2886555 - DNA, 25 bp, Homo sapien
ttgccaggtaatcctccacgcactt

SEQ ID NO: 2886556 - DNA, 25 bp, Homo sapien
ctccgcgtgggccttcagggcttgg

SEQ ID NO: 2886557 - DNA, 25 bp, Homo sapien
ctcctgggtgatccttgccaggtaa

SEQ ID NO: 2886558 - DNA, 25 bp, Homo sapien
aggtgctcagattctccctccaggg

SEQ ID NO: 2886559 - DNA, 25 bp, Homo sapien
ctggagggccaacgcttccgcctgg

SEQ ID NO: 2886560 - DNA, 25 bp, Homo sapien
actgtcttctccagcgactggatgc

SEQ ID NO: 2886561 - DNA, 25 bp, Homo sapien
tctccagcgactggatgcgcatctg

SEQ ID NO: 2886562 - DNA, 25 bp, Homo sapien
cagcgactggatgcgcatctgctcc

SEQ ID NO: 2886563 - DNA, 25 bp, Homo sapien
gcccaagggccttctagaaggtgct

SEQ ID NO: 2886564 - DNA, 25 bp, Homo sapien
ggtgctgccagacggccccttgagc

SEQ ID NO: 2886565 - DNA, 25 bp, Homo sapien
tctagaaggtgctgccagacggccc

SEQ ID NO: 2886566 - DNA, 25 bp, Homo sapien
agaaggtgctgccagacggcccctt

SEQ ID NO: 2886567 - DNA, 25 bp, Homo sapien
ggaggaagatgagttgcggggcttc

SEQ ID NO: 2886568 - DNA, 25 bp, Homo sapien
ggaagatgagttgcggggcttctcc

SEQ ID NO: 2886569 - DNA, 25 bp, Homo sapien
gaggaggaagatgagttgcggggct

SEQ ID NO: 2886570 - DNA, 25 bp, Homo sapien
aggaagatgagttgcggggcttctc

SEQ ID NO: 2886571 - DNA, 25 bp, Homo sapien
cctggtcagctcctcgttctcttta

SEQ ID NO: 2886572 - DNA, 25 bp, Homo sapien
agatgaggtcgtcgcagatcctggt

SEQ ID NO: 2886573 - DNA, 25 bp, Homo sapien
tggtcagctcctcgttctctttagt

SEQ ID NO: 2886574 - DNA, 25 bp, Homo sapien
tcgtcgcagatcctggtcagctcct

SEQ ID NO: 2886575 - DNA, 25 bp, Homo sapien
aaagaacatgacacctaagagaatc

SEQ ID NO: 2886576 - DNA, 25 bp, Homo sapien
gaacatgacacctaagagaatcaga

SEQ ID NO: 2886577 - DNA, 25 bp, Homo sapien
gaaaaaagaacatgacacctaagag

SEQ ID NO: 2886578 - DNA, 25 bp, Homo sapien
catgacacctaagagaatcagacag

SEQ ID NO: 2886579 - DNA, 25 bp, Homo sapien
gaaaggaaacttttattgagtcatg

SEQ ID NO: 2886580 - DNA, 25 bp, Homo sapien
ttgaaaggaaacttttattgagtca

SEQ ID NO: 2886581 - DNA, 25 bp, Homo sapien
aaggaaacttttattgagtcatgtt

SEQ ID NO: 2886582 - DNA, 25 bp, Homo sapien
aaaggaaacttttattgagtcatgt

SEQ ID NO: 2886583 - DNA, 25 bp, Homo sapien
tcccactccaggagcctgccgctcc

SEQ ID NO: 2886584 - DNA, 25 bp, Homo sapien
tctccagttctatttcagctgaccg

SEQ ID NO: 2886585 - DNA, 25 bp, Homo sapien
tccagttctatttcagctgaccggg

SEQ ID NO: 2886586 - DNA, 25 bp, Homo sapien
cttcccactccaggagcctgccgct

SEQ ID NO: 2886587 - DNA, 25 bp, Homo sapien
tctccccagtgagctgccctgtggc

SEQ ID NO: 2886588 - DNA, 25 bp, Homo sapien
tcaggatcctgggtccctcttctcc

SEQ ID NO: 2886589 - DNA, 25 bp, Homo sapien
gatcctgggtccctcttctccccag

SEQ ID NO: 2886590 - DNA, 25 bp, Homo sapien
cctgggtccctcttctccccagtga

SEQ ID NO: 2886591 - DNA, 25 bp, Homo sapien
cactggctcgagccaggcagagagg

SEQ ID NO: 2886592 - DNA, 25 bp, Homo sapien
tgtggccttgtaggctcgatgttct

SEQ ID NO: 2886593 - DNA, 25 bp, Homo sapien
tgtaggctcgatgttcttgcagctt

SEQ ID NO: 2886594 - DNA, 25 bp, Homo sapien
ccttgtaggctcgatgttcttgcag

SEQ ID NO: 2886595 - DNA, 25 bp, Homo sapien
taggctcgatgttcttgcagcttca

SEQ ID NO: 2886596 - DNA, 25 bp, Homo sapien
cggctgccagctcagattctttctg

SEQ ID NO: 2886597 - DNA, 25 bp, Homo sapien
tgcattccttttccttagccccctc

SEQ ID NO: 2886598 - DNA, 25 bp, Homo sapien
tcccaagccattgagcgctgcattc

SEQ ID NO: 2886599 - DNA, 25 bp, Homo sapien
agccattgagcgctgcattcccggc

SEQ ID NO: 2886600 - DNA, 25 bp, Homo sapien
ggccgtcactgctcaatgggccctt

SEQ ID NO: 2886601 - DNA, 25 bp, Homo sapien
gtcactgctcaatgggcccttgtcc

SEQ ID NO: 2886602 - DNA, 25 bp, Homo sapien
agggtatcagcagggtccctggagc

SEQ ID NO: 2886603 - DNA, 25 bp, Homo sapien
ggagggtatcagcagggtccctgga

SEQ ID NO: 2886604 - DNA, 25 bp, Homo sapien
gagggtatcagcagggtccctggag

SEQ ID NO: 2886605 - DNA, 25 bp, Homo sapien
ccatgcccagctggagctttaagct

SEQ ID NO: 2886606 - DNA, 25 bp, Homo sapien
ccagctggagctttaagcttctgag

SEQ ID NO: 2886607 - DNA, 25 bp, Homo sapien
catgcccagctggagctttaagctt

SEQ ID NO: 2886608 - DNA, 25 bp, Homo sapien
tgcccagctggagctttaagcttct

SEQ ID NO: 2886609 - DNA, 25 bp, Homo sapien
tccggctcgctgtccgcgggcccag

SEQ ID NO: 2886610 - DNA, 25 bp, Homo sapien
gagcccggctcgctacgcgcggctc

SEQ ID NO: 2886611 - DNA, 25 bp, Homo sapien
gtgcgaccggcagagcaggaccgcg

SEQ ID NO: 2886612 - DNA, 25 bp, Homo sapien
gcggcccgccggtgcgtccgtgcga

SEQ ID NO: 2886613 - DNA, 25 bp, Homo sapien
gcggcgtcctcaggcagcgcgcgcg

SEQ ID NO: 2886614 - DNA, 25 bp, Homo sapien
gtccccaaggactccgaggaggcgc

SEQ ID NO: 2886615 - DNA, 25 bp, Homo sapien
cggccacgcagagcgcgagggcgca

SEQ ID NO: 2886616 - DNA, 25 bp, Homo sapien
gccacggccacgcagagcgcgaggg

SEQ ID NO: 2886617 - DNA, 25 bp, Homo sapien
ctccgtccccaaggactccgaggag

SEQ ID NO: 2886618 - DNA, 25 bp, Homo sapien
tcgccttggccgaagctggccacaa

SEQ ID NO: 2886619 - DNA, 25 bp, Homo sapien
tgggaactttccgtctgcgcagaac

SEQ ID NO: 2886620 - DNA, 25 bp, Homo sapien
ttagaagtccggtctctcgccttgg

SEQ ID NO: 2886621 - DNA, 25 bp, Homo sapien
cgaataacaacagcgggaatcgtgg

SEQ ID NO: 2886622 - DNA, 25 bp, Homo sapien
aggggccgggcttcgctgacgcgca

SEQ ID NO: 2886623 - DNA, 25 bp, Homo sapien
ggctgctgcctcttcgggcgggcag

SEQ ID NO: 2886624 - DNA, 25 bp, Homo sapien
ctgctgcctcttcgggcgggcaggg

SEQ ID NO: 2886625 - DNA, 25 bp, Homo sapien
gggcttcgctgacgcgcacacccac

SEQ ID NO: 2886626 - DNA, 25 bp, Homo sapien
cggccgccgggctgagctgtgcgcg

SEQ ID NO: 2886627 - DNA, 25 bp, Homo sapien
agccggctgcgggtgtacgcggcgg

SEQ ID NO: 2886628 - DNA, 25 bp, Homo sapien
ttcagaccctcgacgtcccgcggga

SEQ ID NO: 2886629 - DNA, 25 bp, Homo sapien
aaccgcggcgcgtgtgcaggtccgg

SEQ ID NO: 2886630 - DNA, 25 bp, Homo sapien
cgtcgaggtacaaagaagcggctgt

SEQ ID NO: 2886631 - DNA, 25 bp, Homo sapien
gtctgtggccgcgtcgaggtacaaa

SEQ ID NO: 2886632 - DNA, 25 bp, Homo sapien
aagaagcggctgttcgggcctcggc

SEQ ID NO: 2886633 - DNA, 25 bp, Homo sapien
gagccgccatcaatgcgcggtctgt

SEQ ID NO: 2886634 - DNA, 25 bp, Homo sapien
gtccggccaagtgggtctcacaggc

SEQ ID NO: 2886635 - DNA, 25 bp, Homo sapien
caaacacggcgctgggtccggccaa

SEQ ID NO: 2886636 - DNA, 25 bp, Homo sapien
agagcaaagtacaaacacggcgctg

SEQ ID NO: 2886637 - DNA, 25 bp, Homo sapien
ccctcacagaggacgaccaggctgg

SEQ ID NO: 2886638 - DNA, 25 bp, Homo sapien
ggtgggcaaggttctgtatcctgca

SEQ ID NO: 2886639 - DNA, 25 bp, Homo sapien
ggttctgtatcctgcagctcctatg

SEQ ID NO: 2886640 - DNA, 25 bp, Homo sapien
ttctgtatcctgcagctcctatgga

SEQ ID NO: 2886641 - DNA, 25 bp, Homo sapien
ggcaaggttctgtatcctgcagctc

SEQ ID NO: 2886642 - DNA, 25 bp, Homo sapien
gagtcctcgtgggaggcattcagca

SEQ ID NO: 2886643 - DNA, 25 bp, Homo sapien
tgccggcagctgtaggccccggagt

SEQ ID NO: 2886644 - DNA, 25 bp, Homo sapien
acagtacgcgctgcgtgagccgctg

SEQ ID NO: 2886645 - DNA, 25 bp, Homo sapien
gtcacccgcacactgaagtggcaca

SEQ ID NO: 2886646 - DNA, 25 bp, Homo sapien
ccccgtcttcgtcatctcccgagga

SEQ ID NO: 2886647 - DNA, 25 bp, Homo sapien
cgtcctccccgtcttcgtcatctcc

SEQ ID NO: 2886648 - DNA, 25 bp, Homo sapien
ccgtcttcgtcatctcccgaggatg

SEQ ID NO: 2886649 - DNA, 25 bp, Homo sapien
ctccccgtcttcgtcatctcccgag

SEQ ID NO: 2886650 - DNA, 25 bp, Homo sapien
ctccaatgcggtgctcgccgcggaa

SEQ ID NO: 2886651 - DNA, 25 bp, Homo sapien
ttcttgtccatccgctcgggccgtg

SEQ ID NO: 2886652 - DNA, 25 bp, Homo sapien
gcagcggaagcggacggtgttggcg

SEQ ID NO: 2886653 - DNA, 25 bp, Homo sapien
cgcggaactccctgccgttcttcag

SEQ ID NO: 2886654 - DNA, 25 bp, Homo sapien
gcgtgtacgtctgccggatgctgcc

SEQ ID NO: 2886655 - DNA, 25 bp, Homo sapien
ttgttctccacgacgcaggtgtagt

SEQ ID NO: 2886656 - DNA, 25 bp, Homo sapien
aaacttgttctccacgacgcaggtg

SEQ ID NO: 2886657 - DNA, 25 bp, Homo sapien
ccagcacgtccagcgtgtacgtctg

SEQ ID NO: 2886658 - DNA, 25 bp, Homo sapien
gcaccgccgtctggttggccggcag

SEQ ID NO: 2886659 - DNA, 25 bp, Homo sapien
agcaccgccgtctggttggccggca

SEQ ID NO: 2886660 - DNA, 25 bp, Homo sapien
accgccgtctggttggccggcagcc

SEQ ID NO: 2886661 - DNA, 25 bp, Homo sapien
cgccgtctggttggccggcagcccc

SEQ ID NO: 2886662 - DNA, 25 bp, Homo sapien
tgagccactggatgtggggctgtgc

SEQ ID NO: 2886663 - DNA, 25 bp, Homo sapien
agccactggatgtggggctgtgcgt

SEQ ID NO: 2886664 - DNA, 25 bp, Homo sapien
tgtggggctgtgcgtcactgtacac

SEQ ID NO: 2886665 - DNA, 25 bp, Homo sapien
cttgagccactggatgtggggctgt

SEQ ID NO: 2886666 - DNA, 25 bp, Homo sapien
tgagcacggtaacgtagggtgtgcc

SEQ ID NO: 2886667 - DNA, 25 bp, Homo sapien
cttgagcacggtaacgtagggtgtg

SEQ ID NO: 2886668 - DNA, 25 bp, Homo sapien
gagcacggtaacgtagggtgtgccg

SEQ ID NO: 2886669 - DNA, 25 bp, Homo sapien
gcacggtaacgtagggtgtgccgtc

SEQ ID NO: 2886670 - DNA, 25 bp, Homo sapien
tgctcggggcccgtgaacgctcagc

SEQ ID NO: 2886671 - DNA, 25 bp, Homo sapien
ctcggccacgcctatgaaattggtg

SEQ ID NO: 2886672 - DNA, 25 bp, Homo sapien
tggtggctcgacagaggtactcgcc

SEQ ID NO: 2886673 - DNA, 25 bp, Homo sapien
cgtcccgctccgacacattggccag

SEQ ID NO: 2886674 - DNA, 25 bp, Homo sapien
gagctggagctcttgtgccggccgg

SEQ ID NO: 2886675 - DNA, 25 bp, Homo sapien
gtgccggccggcatgggacagagtc

SEQ ID NO: 2886676 - DNA, 25 bp, Homo sapien
ctcttgtgccggccggcatgggaca

SEQ ID NO: 2886677 - DNA, 25 bp, Homo sapien
cagggcgcgcggccagggccttgga

SEQ ID NO: 2886678 - DNA, 25 bp, Homo sapien
ttgccgaggcggccccgagtggagc

SEQ ID NO: 2886679 - DNA, 25 bp, Homo sapien
cttgccgaggcggccccgagtggag

SEQ ID NO: 2886680 - DNA, 25 bp, Homo sapien
tgccagccttgccgaggcggccccg

SEQ ID NO: 2886681 - DNA, 25 bp, Homo sapien
cagccttgccgaggcggccccgagt

SEQ ID NO: 2886682 - DNA, 25 bp, Homo sapien
gtcggcgcaggccacagggctcgaa

SEQ ID NO: 2886683 - DNA, 25 bp, Homo sapien
aggcgtgcgggaagggtcggcgcag

SEQ ID NO: 2886684 - DNA, 25 bp, Homo sapien
gggtcgcaggcgtgcgggaagggtc

SEQ ID NO: 2886685 - DNA, 25 bp, Homo sapien
tcgaagcgggcggtcaccgtggagg

SEQ ID NO: 2886686 - DNA, 25 bp, Homo sapien
cggcacggagccggcccggtgggca

SEQ ID NO: 2886687 - DNA, 25 bp, Homo sapien
gagccggcccggtgggcaccgggca

SEQ ID NO: 2886688 - DNA, 25 bp, Homo sapien
cacggagccggcccggtgggcaccg

SEQ ID NO: 2886689 - DNA, 25 bp, Homo sapien
agacggcacggagccggcccggtgg

SEQ ID NO: 2886690 - DNA, 25 bp, Homo sapien
ggctgagggccctccgcctggtaca

SEQ ID NO: 2886691 - DNA, 25 bp, Homo sapien
cttggtcaccgccacgcggctgagg

SEQ ID NO: 2886692 - DNA, 25 bp, Homo sapien
tccaccggcgagtcctctgtcccag

SEQ ID NO: 2886693 - DNA, 25 bp, Homo sapien
tggtacaccggtactgagcccgaag

SEQ ID NO: 2886694 - DNA, 25 bp, Homo sapien
tccttgtcggtggtgttagcgcccg

SEQ ID NO: 2886695 - DNA, 25 bp, Homo sapien
caccagccacgcagagtgatgagaa

SEQ ID NO: 2886696 - DNA, 25 bp, Homo sapien
aaacccaatagaattgcccgccagg

SEQ ID NO: 2886697 - DNA, 25 bp, Homo sapien
gagagaacctctagctccttgtcgg

SEQ ID NO: 2886698 - DNA, 25 bp, Homo sapien
gaagcccaccccgtagctgaggatg

SEQ ID NO: 2886699 - DNA, 25 bp, Homo sapien
gaagcgggagatcttgtgcacggtg

SEQ ID NO: 2886700 - DNA, 25 bp, Homo sapien
aggatgcctgcatacacactgcccg

SEQ ID NO: 2886701 - DNA, 25 bp, Homo sapien
cttgagcgggaagcgggagatcttg

SEQ ID NO: 2886702 - DNA, 25 bp, Homo sapien
ctgaggacagccttgcgatgcgcac

SEQ ID NO: 2886703 - DNA, 25 bp, Homo sapien
ttggagctcatggacgcgttggact

SEQ ID NO: 2886704 - DNA, 25 bp, Homo sapien
gggcccgagacagctcccatttggg

SEQ ID NO: 2886705 - DNA, 25 bp, Homo sapien
tcgagctcggagacattggccagcg

SEQ ID NO: 2886706 - DNA, 25 bp, Homo sapien
tggcggcccggtccttgtcaatgcc

SEQ ID NO: 2886707 - DNA, 25 bp, Homo sapien
atcttcacggctacggtgacaggct

SEQ ID NO: 2886708 - DNA, 25 bp, Homo sapien
tcacggctacggtgacaggcttggc

SEQ ID NO: 2886709 - DNA, 25 bp, Homo sapien
gtcaatgccgatggcctccgccatg

SEQ ID NO: 2886710 - DNA, 25 bp, Homo sapien
gacaggtccttgtcagtggcatcgt

SEQ ID NO: 2886711 - DNA, 25 bp, Homo sapien
cagacaccaggtccgacaggtcctt

SEQ ID NO: 2886712 - DNA, 25 bp, Homo sapien
atctcagacaccaggtccgacaggt

SEQ ID NO: 2886713 - DNA, 25 bp, Homo sapien
ccgacaggtccttgtcagtggcatc

SEQ ID NO: 2886714 - DNA, 25 bp, Homo sapien
agggccgcccagccggcaccaccgc

SEQ ID NO: 2886715 - DNA, 25 bp, Homo sapien
ccaggagggccgcccagccggcacc

SEQ ID NO: 2886716 - DNA, 25 bp, Homo sapien
aggagggccgcccagccggcaccac

SEQ ID NO: 2886717 - DNA, 25 bp, Homo sapien
ggagggccgcccagccggcaccacc

SEQ ID NO: 2886718 - DNA, 25 bp, Homo sapien
tggccgcgtactccaccagcacgta

SEQ ID NO: 2886719 - DNA, 25 bp, Homo sapien
gcgtactccaccagcacgtacaggg

SEQ ID NO: 2886720 - DNA, 25 bp, Homo sapien
gtactccaccagcacgtacaggggc

SEQ ID NO: 2886721 - DNA, 25 bp, Homo sapien
ccttggccgcgtactccaccagcac

SEQ ID NO: 2886722 - DNA, 25 bp, Homo sapien
tgcaggtgtcgaaggagtagtccag

SEQ ID NO: 2886723 - DNA, 25 bp, Homo sapien
ttgcaggtgtcgaaggagtagtcca

SEQ ID NO: 2886724 - DNA, 25 bp, Homo sapien
cttgcaggtgtcgaaggagtagtcc

SEQ ID NO: 2886725 - DNA, 25 bp, Homo sapien
tctgggaggccaagtactccatgcc

SEQ ID NO: 2886726 - DNA, 25 bp, Homo sapien
gaggccaagtactccatgccccggg

SEQ ID NO: 2886727 - DNA, 25 bp, Homo sapien
tccttgaaggtgagctgctcctcgg

SEQ ID NO: 2886728 - DNA, 25 bp, Homo sapien
ggtaggcacaggacaccaggtcctt

SEQ ID NO: 2886729 - DNA, 25 bp, Homo sapien
tcttcttgtagtagtcgaggttgtg

SEQ ID NO: 2886730 - DNA, 25 bp, Homo sapien
cttgtagtagtcgaggttgtgcacg

SEQ ID NO: 2886731 - DNA, 25 bp, Homo sapien
tgtagtagtcgaggttgtgcacgtc

SEQ ID NO: 2886732 - DNA, 25 bp, Homo sapien
aggttgtgcacgtcccgggccagcc

SEQ ID NO: 2886733 - DNA, 25 bp, Homo sapien
cactctggtgagtgtagactcggtc

SEQ ID NO: 2886734 - DNA, 25 bp, Homo sapien
agtgtagactcggtcaaacaaggcc

SEQ ID NO: 2886735 - DNA, 25 bp, Homo sapien
acgtcactctggtgagtgtagactc

SEQ ID NO: 2886736 - DNA, 25 bp, Homo sapien
tggtgagtgtagactcggtcaaaca

SEQ ID NO: 2886737 - DNA, 25 bp, Homo sapien
tgcccagttcccgcctccacccctg

SEQ ID NO: 2886738 - DNA, 25 bp, Homo sapien
tctgcccagttcccgcctccacccc

SEQ ID NO: 2886739 - DNA, 25 bp, Homo sapien
ctgcccagttcccgcctccacccct

SEQ ID NO: 2886740 - DNA, 25 bp, Homo sapien
tgcagttggcgggcttgtccatgcg

SEQ ID NO: 2886741 - DNA, 25 bp, Homo sapien
gccccccagcgtgaagatctcccag

SEQ ID NO: 2886742 - DNA, 25 bp, Homo sapien
cctccacagggatgccggggtacgg

SEQ ID NO: 2886743 - DNA, 25 bp, Homo sapien
ctccacagggatgccggggtacggg

SEQ ID NO: 2886744 - DNA, 25 bp, Homo sapien
ggcagggcgctcaggagtgagcccc

SEQ ID NO: 2886745 - DNA, 25 bp, Homo sapien
gggcgctcaggagtgagccccgccg

SEQ ID NO: 2886746 - DNA, 25 bp, Homo sapien
gctcaggagtgagccccgccgcttc

SEQ ID NO: 2886747 - DNA, 25 bp, Homo sapien
cagggcgctcaggagtgagccccgc

SEQ ID NO: 2886748 - DNA, 25 bp, Homo sapien
ggcatgccagcactcccgcatgatc

SEQ ID NO: 2886749 - DNA, 25 bp, Homo sapien
cggcatgccagcactcccgcatgat

SEQ ID NO: 2886750 - DNA, 25 bp, Homo sapien
gcggcatgccagcactcccgcatga

SEQ ID NO: 2886751 - DNA, 25 bp, Homo sapien
cgcggcatgccagcactcccgcatg

SEQ ID NO: 2886752 - DNA, 25 bp, Homo sapien
tggacgtcacggtaaggacacggtc

SEQ ID NO: 2886753 - DNA, 25 bp, Homo sapien
tcggtggacgtcacggtaaggacac

SEQ ID NO: 2886754 - DNA, 25 bp, Homo sapien
tcacggtaaggacacggtccaggtc

SEQ ID NO: 2886755 - DNA, 25 bp, Homo sapien
gacgtcacggtaaggacacggtcca

SEQ ID NO: 2886756 - DNA, 25 bp, Homo sapien
aggggcataggcgggtggcaccagg

SEQ ID NO: 2886757 - DNA, 25 bp, Homo sapien
tggccacccggggagtactgctcga

SEQ ID NO: 2886758 - DNA, 25 bp, Homo sapien
tcgtgggcaaacacggagtcgtccc

SEQ ID NO: 2886759 - DNA, 25 bp, Homo sapien
gcaggtcgtgggcaaacacggagtc

SEQ ID NO: 2886760 - DNA, 25 bp, Homo sapien
gaaaggcgccgacaggtccaggtac

SEQ ID NO: 2886761 - DNA, 25 bp, Homo sapien
ccgcgagcccccactgctgggtggg

SEQ ID NO: 2886762 - DNA, 25 bp, Homo sapien
gtccgcgagcccccactgctgggtg

SEQ ID NO: 2886763 - DNA, 25 bp, Homo sapien
cgagcccccactgctgggtggggcc

SEQ ID NO: 2886764 - DNA, 25 bp, Homo sapien
agcccccactgctgggtggggccgg

SEQ ID NO: 2886765 - DNA, 25 bp, Homo sapien
aattaaaactctccgccatgtggcc

SEQ ID NO: 2886766 - DNA, 25 bp, Homo sapien
tgatgtcccgtggtgcaaaggcaga

SEQ ID NO: 2886767 - DNA, 25 bp, Homo sapien
taacatcggaacctgcacacagggc

SEQ ID NO: 2886768 - DNA, 25 bp, Homo sapien
tcgtcgctgggttaacaaaatcgca

SEQ ID NO: 2886769 - DNA, 25 bp, Homo sapien
tccttctgcagtgtcacagtccaga

SEQ ID NO: 2886770 - DNA, 25 bp, Homo sapien
cagttctaacgcagggattcaggaa

SEQ ID NO: 2886771 - DNA, 25 bp, Homo sapien
gattcaggaattgggctttcagact

SEQ ID NO: 2886772 - DNA, 25 bp, Homo sapien
ccggcctgaactctcagttctaacg

SEQ ID NO: 2886773 - DNA, 25 bp, Homo sapien
ccacggagattcagtctgtctggaa

SEQ ID NO: 2886774 - DNA, 25 bp, Homo sapien
gaaggcgcccccatgtgtgtggcct

SEQ ID NO: 2886775 - DNA, 25 bp, Homo sapien
ggaacccctccacagaatcgtgtct

SEQ ID NO: 2886776 - DNA, 25 bp, Homo sapien
atgaggaccacgtggactccgccca

SEQ ID NO: 2886777 - DNA, 25 bp, Homo sapien
ctcccggctggtgggtcgggagcgc

SEQ ID NO: 2886778 - DNA, 25 bp, Homo sapien
tggtgggtcgggagcgcggacgacc

SEQ ID NO: 2886779 - DNA, 25 bp, Homo sapien
cgggttcgggctggttgtcacggcg

SEQ ID NO: 2886780 - DNA, 25 bp, Homo sapien
cgcgggttcgggctggttgtcacgg

SEQ ID NO: 2886781 - DNA, 25 bp, Homo sapien
gaaaagctgcgaagatcatagggag

SEQ ID NO: 2886782 - DNA, 25 bp, Homo sapien
tcaccagggtcaattcagagttcac

SEQ ID NO: 2886783 - DNA, 25 bp, Homo sapien
tccagggtagcttggtggaaaccaa

SEQ ID NO: 2886784 - DNA, 25 bp, Homo sapien
gcttcttccctagactggcgaccgt

SEQ ID NO: 2886785 - DNA, 25 bp, Homo sapien
caagggcagcactgcaaggcctctt

SEQ ID NO: 2886786 - DNA, 25 bp, Homo sapien
gccacattggttccctgggatggcc

SEQ ID NO: 2886787 - DNA, 25 bp, Homo sapien
gcactgcaaggcctcttagggccat

SEQ ID NO: 2886788 - DNA, 25 bp, Homo sapien
gaagcccaagggcagcactgcaagg

SEQ ID NO: 2886789 - DNA, 25 bp, Homo sapien
tcgtctgaggtgctcgccatttgca

SEQ ID NO: 2886790 - DNA, 25 bp, Homo sapien
tcaggcaggttggtacaggccatcg

SEQ ID NO: 2886791 - DNA, 25 bp, Homo sapien
cgcagggtaatgctttgggcacaga

SEQ ID NO: 2886792 - DNA, 25 bp, Homo sapien
ccatttgcaggtgtgtcgtccgggc

SEQ ID NO: 2886793 - DNA, 25 bp, Homo sapien
agcccctagaaggtgtcttatttgg

SEQ ID NO: 2886794 - DNA, 25 bp, Homo sapien
aggccaccagaagcccctagaaggt

SEQ ID NO: 2886795 - DNA, 25 bp, Homo sapien
tgtcttatttgggtagtggccaaaa

SEQ ID NO: 2886796 - DNA, 25 bp, Homo sapien
agaagcccctagaaggtgtcttatt

SEQ ID NO: 2886797 - DNA, 25 bp, Homo sapien
agcgccgctgcggtagagccgggct

SEQ ID NO: 2886798 - DNA, 25 bp, Homo sapien
gggcgactgcgtgcggcacagggag

SEQ ID NO: 2886799 - DNA, 25 bp, Homo sapien
cgctgcggtagagccgggcttcagg

SEQ ID NO: 2886800 - DNA, 25 bp, Homo sapien
gcgcgggcgagcggggaagtcagac

SEQ ID NO: 2886801 - DNA, 25 bp, Homo sapien
gggaggacgcctggtccaggggcgc

SEQ ID NO: 2886802 - DNA, 25 bp, Homo sapien
cgggaggaccgctcgcgaggggagg

SEQ ID NO: 2886803 - DNA, 25 bp, Homo sapien
aggaccgctcgcgaggggaggacgc

SEQ ID NO: 2886804 - DNA, 25 bp, Homo sapien
gaccgctcgcgaggggaggacgcct

SEQ ID NO: 2886805 - DNA, 25 bp, Homo sapien
ctcggcgggcggctctccggagcgg

SEQ ID NO: 2886806 - DNA, 25 bp, Homo sapien
tgcggtgcgtcgcatcctcggcggg

SEQ ID NO: 2886807 - DNA, 25 bp, Homo sapien
aggccgaggctctcgcgcgcggcgc

SEQ ID NO: 2886808 - DNA, 25 bp, Homo sapien
ggccgtgcggcggtagggcccaggc

SEQ ID NO: 2886809 - DNA, 25 bp, Homo sapien
cccgggcgccgcgagtgtcaacgcc

SEQ ID NO: 2886810 - DNA, 25 bp, Homo sapien
tccacctgccaagggccggaccgcg

SEQ ID NO: 2886811 - DNA, 25 bp, Homo sapien
gcgccgcgagtgtcaacgccagaca

SEQ ID NO: 2886812 - DNA, 25 bp, Homo sapien
cgggcgccgcgagtgtcaacgccag

SEQ ID NO: 2886813 - DNA, 25 bp, Homo sapien
aggcttcaaggactatcaatctgca

SEQ ID NO: 2886814 - DNA, 25 bp, Homo sapien
caaaaccagccattaagtcgccagg

SEQ ID NO: 2886815 - DNA, 25 bp, Homo sapien
ttcctgtgagtggagcaaaaccagc

SEQ ID NO: 2886816 - DNA, 25 bp, Homo sapien
ttaagtcgccaggtcccatctcatg

SEQ ID NO: 2886817 - DNA, 25 bp, Homo sapien
cctggagtcaggacatggtaccacg

SEQ ID NO: 2886818 - DNA, 25 bp, Homo sapien
cacgtatttggagaacaaggtcaca

SEQ ID NO: 2886819 - DNA, 25 bp, Homo sapien
cattctatggccatgagcagcccac

SEQ ID NO: 2886820 - DNA, 25 bp, Homo sapien
ctgaggctcagaagactaaaatgct

SEQ ID NO: 2886821 - DNA, 25 bp, Homo sapien
ctcccaggctcagggaagtctcctg

SEQ ID NO: 2886822 - DNA, 25 bp, Homo sapien
tgcctcccaggctcagggaagtctc

SEQ ID NO: 2886823 - DNA, 25 bp, Homo sapien
caggctcagggaagtctcctgcctc

SEQ ID NO: 2886824 - DNA, 25 bp, Homo sapien
ccaggctcagggaagtctcctgcct

SEQ ID NO: 2886825 - DNA, 25 bp, Homo sapien
catttcatcccattacaggcctata

SEQ ID NO: 2886826 - DNA, 25 bp, Homo sapien
ggacataggtcttggctcatcattg

SEQ ID NO: 2886827 - DNA, 25 bp, Homo sapien
caggcctataaaacccatgggaacg

SEQ ID NO: 2886828 - DNA, 25 bp, Homo sapien
ctgactggcagaaatataatggctc

SEQ ID NO: 2886829 - DNA, 25 bp, Homo sapien
acaatggcatgatctcggctcactg

SEQ ID NO: 2886830 - DNA, 25 bp, Homo sapien
gtagctgagattacaggttgccgcc

SEQ ID NO: 2886831 - DNA, 25 bp, Homo sapien
gctgagattacaggttgccgccacc

SEQ ID NO: 2886832 - DNA, 25 bp, Homo sapien
cacctaggctggaatacaatggcat

SEQ ID NO: 2886833 - DNA, 25 bp, Homo sapien
tacagtattacctgacacgttaagg

SEQ ID NO: 2886834 - DNA, 25 bp, Homo sapien
gaacagcccctataggaccacatgg

SEQ ID NO: 2886835 - DNA, 25 bp, Homo sapien
agttaccagtggttctaggacaggc

SEQ ID NO: 2886836 - DNA, 25 bp, Homo sapien
cacatggaccttgggaggtctccaa

SEQ ID NO: 2886837 - DNA, 25 bp, Homo sapien
aaatcacaaggacaaagaacggaag

SEQ ID NO: 2886838 - DNA, 25 bp, Homo sapien
tgttgtaggaagaagactaataacc

SEQ ID NO: 2886839 - DNA, 25 bp, Homo sapien
aatcagattggtactggagaagtgc

SEQ ID NO: 2886840 - DNA, 25 bp, Homo sapien
gatgcggacttagaggaatcagatt

SEQ ID NO: 2886841 - DNA, 25 bp, Homo sapien
tcaggtgatctacccgtctcggact

SEQ ID NO: 2886842 - DNA, 25 bp, Homo sapien
caggtgatctacccgtctcggactc

SEQ ID NO: 2886843 - DNA, 25 bp, Homo sapien
aaaatcagctgggtgcatgcccata

SEQ ID NO: 2886844 - DNA, 25 bp, Homo sapien
gcctgggcagcagagattgcagaga

SEQ ID NO: 2886845 - DNA, 25 bp, Homo sapien
aatcagctgggtgcatgcccataat

SEQ ID NO: 2886846 - DNA, 25 bp, Homo sapien
cagctgggtgcatgcccataatccc

SEQ ID NO: 2886847 - DNA, 25 bp, Homo sapien
gggaggacgaggcaggtagatcgct

SEQ ID NO: 2886848 - DNA, 25 bp, Homo sapien
agctcagaagttcgagaccagcctg

SEQ ID NO: 2886849 - DNA, 25 bp, Homo sapien
ctgggcaacatggcgaaatcttgtc

SEQ ID NO: 2886850 - DNA, 25 bp, Homo sapien
gaggacgaggcaggtagatcgcttg

SEQ ID NO: 2886851 - DNA, 25 bp, Homo sapien
tatgcccaggtaaattatcattcaa

SEQ ID NO: 2886852 - DNA, 25 bp, Homo sapien
tcaaacatgaggcaagggccgggtg

SEQ ID NO: 2886853 - DNA, 25 bp, Homo sapien
gtccagaattttatgcccaggtaaa

SEQ ID NO: 2886854 - DNA, 25 bp, Homo sapien
aagtgtccagaattttatgcccagg

SEQ ID NO: 2886855 - DNA, 25 bp, Homo sapien
aattcgaggctacagcaacctataa

SEQ ID NO: 2886856 - DNA, 25 bp, Homo sapien
cagtgacacacacctacagtcctag

SEQ ID NO: 2886857 - DNA, 25 bp, Homo sapien
acctataagcatgccgctgtactgc

SEQ ID NO: 2886858 - DNA, 25 bp, Homo sapien
agctagtcctagaagctactcctag

SEQ ID NO: 2886859 - DNA, 25 bp, Homo sapien
ctcagccagccaacaaatttcaaag

SEQ ID NO: 2886860 - DNA, 25 bp, Homo sapien
acctcagccagccaacaaatttcaa

SEQ ID NO: 2886861 - DNA, 25 bp, Homo sapien
acaggttgagccacctcagccagcc

SEQ ID NO: 2886862 - DNA, 25 bp, Homo sapien
cagccagccaacaaatttcaaagag

SEQ ID NO: 2886863 - DNA, 25 bp, Homo sapien
gctgctggtgtctgcaacccgcagt

SEQ ID NO: 2886864 - DNA, 25 bp, Homo sapien
tggaggacacctgacgtgcagcaat

SEQ ID NO: 2886865 - DNA, 25 bp, Homo sapien
gcaacagggctatgcggcccgagat

SEQ ID NO: 2886866 - DNA, 25 bp, Homo sapien
ggcccgagatgtccacagtactgag

SEQ ID NO: 2886867 - DNA, 25 bp, Homo sapien
aaaggggactctgcttgatgctaaa

SEQ ID NO: 2886868 - DNA, 25 bp, Homo sapien
tttacaacactctgaacagaaaggg

SEQ ID NO: 2886869 - DNA, 25 bp, Homo sapien
acagaaaggggactctgcttgatgc

SEQ ID NO: 2886870 - DNA, 25 bp, Homo sapien
actttacaacactctgaacagaaag

SEQ ID NO: 2886871 - DNA, 25 bp, Homo sapien
gcgtcgtggccgttaaacttctgca

SEQ ID NO: 2886872 - DNA, 25 bp, Homo sapien
gacacaagagctgcttcgacaaggc

SEQ ID NO: 2886873 - DNA, 25 bp, Homo sapien
cacccgggaagtaagatctttcagc

SEQ ID NO: 2886874 - DNA, 25 bp, Homo sapien
tgtgcgccgggttctccattaaaca

SEQ ID NO: 2886875 - DNA, 25 bp, Homo sapien
tcaaggtcacatgaccccttacaca

SEQ ID NO: 2886876 - DNA, 25 bp, Homo sapien
tgaccccttacacaacgtctcctaa

SEQ ID NO: 2886877 - DNA, 25 bp, Homo sapien
gcaggtgccctcatagggtggccat

SEQ ID NO: 2886878 - DNA, 25 bp, Homo sapien
gcccgccccagtactcgtgcaggtg

SEQ ID NO: 2886879 - DNA, 25 bp, Homo sapien
gctcaggcaagtggctggaagtacc

SEQ ID NO: 2886880 - DNA, 25 bp, Homo sapien
ctccaacccaaagccagggctcagg

SEQ ID NO: 2886881 - DNA, 25 bp, Homo sapien
gcagtgccagggcatcctggagccc

SEQ ID NO: 2886882 - DNA, 25 bp, Homo sapien
ctggaagtaccaggcctgtcctcac

SEQ ID NO: 2886883 - DNA, 25 bp, Homo sapien
tcagggaggcaggccatctgctgga

SEQ ID NO: 2886884 - DNA, 25 bp, Homo sapien
ggaggcaggccatctgctggaccac

SEQ ID NO: 2886885 - DNA, 25 bp, Homo sapien
gcaggccatctgctggaccacctgg

SEQ ID NO: 2886886 - DNA, 25 bp, Homo sapien
agggaggcaggccatctgctggacc

SEQ ID NO: 2886887 - DNA, 25 bp, Homo sapien
atttcaacaggtggtctttgtctct

SEQ ID NO: 2886888 - DNA, 25 bp, Homo sapien
tggtatagctgtgaaggagtggatc

SEQ ID NO: 2886889 - DNA, 25 bp, Homo sapien
ctcttccagtgtttggacaagactc

SEQ ID NO: 2886890 - DNA, 25 bp, Homo sapien
ccaaatcaccaacgttgtatttcaa

SEQ ID NO: 2886891 - DNA, 25 bp, Homo sapien
gacctactgcacagagtttcccttg

SEQ ID NO: 2886892 - DNA, 25 bp, Homo sapien
tctgagaaacggctgatgctagggt

SEQ ID NO: 2886893 - DNA, 25 bp, Homo sapien
tctgtactcaaagaacctaggcctt

SEQ ID NO: 2886894 - DNA, 25 bp, Homo sapien
tctgtctcccagagcaatgaacaca

SEQ ID NO: 2886895 - DNA, 25 bp, Homo sapien
tactccagcctggacgagtgagcaa

SEQ ID NO: 2886896 - DNA, 25 bp, Homo sapien
cctggacgagtgagcaagactccat

SEQ ID NO: 2886897 - DNA, 25 bp, Homo sapien
ctccagcctggacgagtgagcaaga

SEQ ID NO: 2886898 - DNA, 25 bp, Homo sapien
ccagcctggacgagtgagcaagact

SEQ ID NO: 2886899 - DNA, 25 bp, Homo sapien
ctgcaatatttttagaaaatgccag

SEQ ID NO: 2886900 - DNA, 25 bp, Homo sapien
gcaatatttttagaaaatgccagaa

SEQ ID NO: 2886901 - DNA, 25 bp, Homo sapien
tatttttagaaaatgccagaagcat

SEQ ID NO: 2886902 - DNA, 25 bp, Homo sapien
aatatttttagaaaatgccagaagc

SEQ ID NO: 2886903 - DNA, 25 bp, Homo sapien
cacagcccattagactacaggtagt

SEQ ID NO: 2886904 - DNA, 25 bp, Homo sapien
aaggctgcctcagagataaagctcc

SEQ ID NO: 2886905 - DNA, 25 bp, Homo sapien
gactctctgggctcaactaagccag

SEQ ID NO: 2886906 - DNA, 25 bp, Homo sapien
gagtttctctccagattttgtggag

SEQ ID NO: 2886907 - DNA, 25 bp, Homo sapien
tggtacctaattttgtactgtgttc

SEQ ID NO: 2886908 - DNA, 25 bp, Homo sapien
tcctggtacctaattttgtactgtg

SEQ ID NO: 2886909 - DNA, 25 bp, Homo sapien
agtcctggtacctaattttgtactg

SEQ ID NO: 2886910 - DNA, 25 bp, Homo sapien
cctggtacctaattttgtactgtgt

SEQ ID NO: 2886911 - DNA, 25 bp, Homo sapien
acctggccctcttcctatgcaattt

SEQ ID NO: 2886912 - DNA, 25 bp, Homo sapien
tacatccccttcgaagagaacctgg

SEQ ID NO: 2886913 - DNA, 25 bp, Homo sapien
ccatctgtataaaaatgcaagtcac

SEQ ID NO: 2886914 - DNA, 25 bp, Homo sapien
tgttcattaatcaccatctgtataa

SEQ ID NO: 2886915 - DNA, 25 bp, Homo sapien
tattaatctttcagtacaatttgac

SEQ ID NO: 2886916 - DNA, 25 bp, Homo sapien
ctattaatctttcagtacaatttga

SEQ ID NO: 2886917 - DNA, 25 bp, Homo sapien
cactattaatctttcagtacaattt

SEQ ID NO: 2886918 - DNA, 25 bp, Homo sapien
ttaatctttcagtacaatttgactt

SEQ ID NO: 2886919 - DNA, 25 bp, Homo sapien
cccttggtgttgtctgagcctgtta

SEQ ID NO: 2886920 - DNA, 25 bp, Homo sapien
aaatgttagagaatgaaagttagaa

SEQ ID NO: 2886921 - DNA, 25 bp, Homo sapien
tagaatctgggatgaaactagtcaa

SEQ ID NO: 2886922 - DNA, 25 bp, Homo sapien
tatcccttccatgccacatgccaaa

SEQ ID NO: 2886923 - DNA, 25 bp, Homo sapien
aattttctcagctttcgtgggtgcc

SEQ ID NO: 2886924 - DNA, 25 bp, Homo sapien
gctcttctcaaatatccaagctctt

SEQ ID NO: 2886925 - DNA, 25 bp, Homo sapien
tctccttcaaaagctacgaggctct

SEQ ID NO: 2886926 - DNA, 25 bp, Homo sapien
caaagaactgtacgtgatactggcg

SEQ ID NO: 2886927 - DNA, 25 bp, Homo sapien
accaaaaactgggatgctgcatctc

SEQ ID NO: 2886928 - DNA, 25 bp, Homo sapien
cttcgtggcatggagactgtggtct

SEQ ID NO: 2886929 - DNA, 25 bp, Homo sapien
gaggagtactcttccctatgtcggg

SEQ ID NO: 2886930 - DNA, 25 bp, Homo sapien
tgcagagctacacagtttggccctc

SEQ ID NO: 2886931 - DNA, 25 bp, Homo sapien
cttgctagcatgaaacacaacttag

SEQ ID NO: 2886932 - DNA, 25 bp, Homo sapien
gcatgaaacacaacttagtactgac

SEQ ID NO: 2886933 - DNA, 25 bp, Homo sapien
gaaacttgctagcatgaaacacaac

SEQ ID NO: 2886934 - DNA, 25 bp, Homo sapien
aattctgaaacttgctagcatgaaa

SEQ ID NO: 2886935 - DNA, 25 bp, Homo sapien
aacagatgattctgcactgaaggga

SEQ ID NO: 2886936 - DNA, 25 bp, Homo sapien
caaggctcatgttagagtctcctga

SEQ ID NO: 2886937 - DNA, 25 bp, Homo sapien
taagaccccagagtgcaagtcgagt

SEQ ID NO: 2886938 - DNA, 25 bp, Homo sapien
cctcaagggtcagaatggctgttcc

SEQ ID NO: 2886939 - DNA, 25 bp, Homo sapien
cagatgagcatatcctgcactggaa

SEQ ID NO: 2886940 - DNA, 25 bp, Homo sapien
taatcacattgctacccttttaaat

SEQ ID NO: 2886941 - DNA, 25 bp, Homo sapien
gccagtggacacaatgagctttaca

SEQ ID NO: 2886942 - DNA, 25 bp, Homo sapien
tgcactggaagcttcagaacagact

SEQ ID NO: 2886943 - DNA, 25 bp, Homo sapien
atgcccagctaatttttttttgtat

SEQ ID NO: 2886944 - DNA, 25 bp, Homo sapien
ttacaagcacgcgtcaccatgccca

SEQ ID NO: 2886945 - DNA, 25 bp, Homo sapien
attacaagcacgcgtcaccatgccc

SEQ ID NO: 2886946 - DNA, 25 bp, Homo sapien
ttttctccctctatggagatgagca

SEQ ID NO: 2886947 - DNA, 25 bp, Homo sapien
aatagctttctaacatcaaatcacc

SEQ ID NO: 2886948 - DNA, 25 bp, Homo sapien
ctttaatgcacgtaccaaatatcac

SEQ ID NO: 2886949 - DNA, 25 bp, Homo sapien
aagccctaaggattacccaggctgg

SEQ ID NO: 2886950 - DNA, 25 bp, Homo sapien
tatcctggtgaactctattaattct

SEQ ID NO: 2886951 - DNA, 25 bp, Homo sapien
gattccgcagtacctgacattttgg

SEQ ID NO: 2886952 - DNA, 25 bp, Homo sapien
ctttattgaggtctgctaaaatatc

SEQ ID NO: 2886953 - DNA, 25 bp, Homo sapien
gcatatttcgtaatattgattccgc

SEQ ID NO: 2886954 - DNA, 25 bp, Homo sapien
ggtagagcaaatcctcaggccaagc

SEQ ID NO: 2886955 - DNA, 25 bp, Homo sapien
gataacttcctatctggtagagcaa

SEQ ID NO: 2886956 - DNA, 25 bp, Homo sapien
cactgccctgcgtgaatactgctat

SEQ ID NO: 2886957 - DNA, 25 bp, Homo sapien
catgctggccaagttcataaatcac

SEQ ID NO: 2886958 - DNA, 25 bp, Homo sapien
gaaacggtggctgtacacacattgc

SEQ ID NO: 2886959 - DNA, 25 bp, Homo sapien
gcaggcctagctgtcaaacactgga

SEQ ID NO: 2886960 - DNA, 25 bp, Homo sapien
tggacagtggcttcaattctcaggt

SEQ ID NO: 2886961 - DNA, 25 bp, Homo sapien
ttgtagagacacagccgagcaacat

SEQ ID NO: 2886962 - DNA, 25 bp, Homo sapien
tttaggtatccaccctccaagacga

SEQ ID NO: 2886963 - DNA, 25 bp, Homo sapien
agtcaataacatagtgcagaaatgg

SEQ ID NO: 2886964 - DNA, 25 bp, Homo sapien
ccactactgcttacggcgtagtcaa

SEQ ID NO: 2886965 - DNA, 25 bp, Homo sapien
caggattcagcgaagaatgtttagg

SEQ ID NO: 2886966 - DNA, 25 bp, Homo sapien
gacagtcaccacagacggcttctta

SEQ ID NO: 2886967 - DNA, 25 bp, Homo sapien
caccacagacggcttcttatagcct

SEQ ID NO: 2886968 - DNA, 25 bp, Homo sapien
caagacagtcaccacagacggcttc

SEQ ID NO: 2886969 - DNA, 25 bp, Homo sapien
acagacggcttcttatagcctccca

SEQ ID NO: 2886970 - DNA, 25 bp, Homo sapien
cactccacctggcagtggtaaggaa

SEQ ID NO: 2886971 - DNA, 25 bp, Homo sapien
tactgggtagttctgtggacttcgg

SEQ ID NO: 2886972 - DNA, 25 bp, Homo sapien
aaagtctgctgactggctcggcacc

SEQ ID NO: 2886973 - DNA, 25 bp, Homo sapien
ccacctgtttctgttcaatgtctga

SEQ ID NO: 2886974 - DNA, 25 bp, Homo sapien
aacttggtgttgtagcgtgctctct

SEQ ID NO: 2886975 - DNA, 25 bp, Homo sapien
cttggtgttgtagcgtgctctctgc

SEQ ID NO: 2886976 - DNA, 25 bp, Homo sapien
ttggtgttgtagcgtgctctctgct

SEQ ID NO: 2886977 - DNA, 25 bp, Homo sapien
caaacttggtgttgtagcgtgctct

SEQ ID NO: 2886978 - DNA, 25 bp, Homo sapien
tcagcttgctacactacacacatca

SEQ ID NO: 2886979 - DNA, 25 bp, Homo sapien
cagaggacatcagcataatgctatg

SEQ ID NO: 2886980 - DNA, 25 bp, Homo sapien
atcaacccaagcagaggacatcagc

SEQ ID NO: 2886981 - DNA, 25 bp, Homo sapien
cacacatcaacccaagcagaggaca

SEQ ID NO: 2886982 - DNA, 25 bp, Homo sapien
tatgagctctcaggcaaacaagcca

SEQ ID NO: 2886983 - DNA, 25 bp, Homo sapien
cagttttccacaatttacatccaag

SEQ ID NO: 2886984 - DNA, 25 bp, Homo sapien
cctaggaaggaccaaaggatacctg

SEQ ID NO: 2886985 - DNA, 25 bp, Homo sapien
agtcacccttcttgccctatgagct

SEQ ID NO: 2886986 - DNA, 25 bp, Homo sapien
gattgactcttgctctggcgccaag

SEQ ID NO: 2886987 - DNA, 25 bp, Homo sapien
gagattgactcttgctctggcgcca

SEQ ID NO: 2886988 - DNA, 25 bp, Homo sapien
ttgactcttgctctggcgccaaggc

SEQ ID NO: 2886989 - DNA, 25 bp, Homo sapien
tggagattgactcttgctctggcgc

SEQ ID NO: 2886990 - DNA, 25 bp, Homo sapien
cttccgaagactgtgcttgtccgtc

SEQ ID NO: 2886991 - DNA, 25 bp, Homo sapien
tgtccgtcctgagtcttttcctggg

SEQ ID NO: 2886992 - DNA, 25 bp, Homo sapien
gggtcctgtatcctctttgtgtggt

SEQ ID NO: 2886993 - DNA, 25 bp, Homo sapien
gtagggtcctgtatcctctttgtgt

SEQ ID NO: 2886994 - DNA, 25 bp, Homo sapien
ggccttgtaagagcttgttctggcc

SEQ ID NO: 2886995 - DNA, 25 bp, Homo sapien
aagagcttgttctggccgttttgtc

SEQ ID NO: 2886996 - DNA, 25 bp, Homo sapien
tgttctggccgttttgtcagtgatt

SEQ ID NO: 2886997 - DNA, 25 bp, Homo sapien
tgtaagagcttgttctggccgtttt

SEQ ID NO: 2886998 - DNA, 25 bp, Homo sapien
ctgcctggctcttgagcgaggaggc

SEQ ID NO: 2886999 - DNA, 25 bp, Homo sapien
cctggctcttgagcgaggaggctgc

SEQ ID NO: 2887000 - DNA, 25 bp, Homo sapien
ggctcttgagcgaggaggctgcctc

SEQ ID NO: 2887001 - DNA, 25 bp, Homo sapien
tggctcttgagcgaggaggctgcct

SEQ ID NO: 2887002 - DNA, 25 bp, Homo sapien
tgttagcttacatgcagagggtcag

SEQ ID NO: 2887003 - DNA, 25 bp, Homo sapien
gaatttacagtagcaactggcacca

SEQ ID NO: 2887004 - DNA, 25 bp, Homo sapien
taaaagccagtcaagcacctcatgc

SEQ ID NO: 2887005 - DNA, 25 bp, Homo sapien
tagttttcaaccacaggagaacctc

SEQ ID NO: 2887006 - DNA, 25 bp, Homo sapien
tacccctcaaataagtgaagttcta

SEQ ID NO: 2887007 - DNA, 25 bp, Homo sapien
gggccagcgtggctctatccatacc

SEQ ID NO: 2887008 - DNA, 25 bp, Homo sapien
tgaaccccatgtcctcgctacttgg

SEQ ID NO: 2887009 - DNA, 25 bp, Homo sapien
tctggcttaactttctatcatggaa

SEQ ID NO: 2887010 - DNA, 25 bp, Homo sapien
gcccgatttcgcttcttcagtggtt

SEQ ID NO: 2887011 - DNA, 25 bp, Homo sapien
tggtttacatgcatcagacagattt

SEQ ID NO: 2887012 - DNA, 25 bp, Homo sapien
gagatgaacttttgctaaacccaag

SEQ ID NO: 2887013 - DNA, 25 bp, Homo sapien
gaagatgctgccgtggaagcccgat

SEQ ID NO: 2887014 - DNA, 25 bp, Homo sapien
gagcattactcacactgcagcgtgg

SEQ ID NO: 2887015 - DNA, 25 bp, Homo sapien
gaatctgagttagccaagaggccct

SEQ ID NO: 2887016 - DNA, 25 bp, Homo sapien
catgagcctaggtctggaagcaaca

SEQ ID NO: 2887017 - DNA, 25 bp, Homo sapien
catgttacaatgatggcaggcagca

SEQ ID NO: 2887018 - DNA, 25 bp, Homo sapien
taactcatatcagaatcgggcccag

SEQ ID NO: 2887019 - DNA, 25 bp, Homo sapien
ggacctcaaacagcaattctcatgg

SEQ ID NO: 2887020 - DNA, 25 bp, Homo sapien
gaaagggaggaaatacaaacatgca

SEQ ID NO: 2887021 - DNA, 25 bp, Homo sapien
gggcccagcagtcaacaggctgttt

SEQ ID NO: 2887022 - DNA, 25 bp, Homo sapien
cctcagggtgatgtagtaccatgta

SEQ ID NO: 2887023 - DNA, 25 bp, Homo sapien
agggtgatgtagtaccatgtaataa

SEQ ID NO: 2887024 - DNA, 25 bp, Homo sapien
ctcagggtgatgtagtaccatgtaa

SEQ ID NO: 2887025 - DNA, 25 bp, Homo sapien
cagggtgatgtagtaccatgtaata

SEQ ID NO: 2887026 - DNA, 25 bp, Homo sapien
tacaaaacacttaaatcacattaat

SEQ ID NO: 2887027 - DNA, 25 bp, Homo sapien
cagtgaaggcgaaaaaaataagaat

SEQ ID NO: 2887028 - DNA, 25 bp, Homo sapien
ttcaaatccaacttgactggtgtgg

SEQ ID NO: 2887029 - DNA, 25 bp, Homo sapien
aaatccaacttgactggtgtgggct

SEQ ID NO: 2887030 - DNA, 25 bp, Homo sapien
ctaagtgcagtacagagcagctggg

SEQ ID NO: 2887031 - DNA, 25 bp, Homo sapien
taagtgcagtacagagcagctgggt

SEQ ID NO: 2887032 - DNA, 25 bp, Homo sapien
cagcagcatcctggaatattacatc

SEQ ID NO: 2887033 - DNA, 25 bp, Homo sapien
gcagcatcctggaatattacatcat

SEQ ID NO: 2887034 - DNA, 25 bp, Homo sapien
gcagcagcatcctggaatattacat

SEQ ID NO: 2887035 - DNA, 25 bp, Homo sapien
cagcatcctggaatattacatcatt

SEQ ID NO: 2887036 - DNA, 25 bp, Homo sapien
cactgagtgtgtacgatgatacgcc

SEQ ID NO: 2887037 - DNA, 25 bp, Homo sapien
aaaacagattatcacacatcttcca

SEQ ID NO: 2887038 - DNA, 25 bp, Homo sapien
ctgagtgtgtacgatgatacgccac

SEQ ID NO: 2887039 - DNA, 25 bp, Homo sapien
aatgtcactgagtgtgtacgatgat

SEQ ID NO: 2887040 - DNA, 25 bp, Homo sapien
gaggactcctcctaacgtgtgctgt

SEQ ID NO: 2887041 - DNA, 25 bp, Homo sapien
ggtagcgacgctgatattttccaca

SEQ ID NO: 2887042 - DNA, 25 bp, Homo sapien
tgattacagtatccccttggtccgg

SEQ ID NO: 2887043 - DNA, 25 bp, Homo sapien
taactgtgggctactcgcatggtac

SEQ ID NO: 2887044 - DNA, 25 bp, Homo sapien
gtcaagaggaccacttttcatgcca

SEQ ID NO: 2887045 - DNA, 25 bp, Homo sapien
agaggaccacttttcatgccaaagc

SEQ ID NO: 2887046 - DNA, 25 bp, Homo sapien
tcatcctcgcatgcataatgcagtc

SEQ ID NO: 2887047 - DNA, 25 bp, Homo sapien
ttatttcatcctcgcatgcataatg

SEQ ID NO: 2887048 - DNA, 25 bp, Homo sapien
gatgagcccactcctggcatctgaa

SEQ ID NO: 2887049 - DNA, 25 bp, Homo sapien
aatcagatctccctagagctgcggg

SEQ ID NO: 2887050 - DNA, 25 bp, Homo sapien
tatagagggagcacctatgcgctgg

SEQ ID NO: 2887051 - DNA, 25 bp, Homo sapien
ttgagcagagccaatagaggaaccc

SEQ ID NO: 2887052 - DNA, 25 bp, Homo sapien
agcagcaagcttgctcctgacagca

SEQ ID NO: 2887053 - DNA, 25 bp, Homo sapien
acaggagcagcaagcttgctcctga

SEQ ID NO: 2887054 - DNA, 25 bp, Homo sapien
acacacacaccatgggcaagcaagg

SEQ ID NO: 2887055 - DNA, 25 bp, Homo sapien
ctggacacacacaccatgggcaagc

SEQ ID NO: 2887056 - DNA, 25 bp, Homo sapien
tacaaaagtctacctggccagagga

SEQ ID NO: 2887057 - DNA, 25 bp, Homo sapien
ttcacactaaggcaaaagggctctc

SEQ ID NO: 2887058 - DNA, 25 bp, Homo sapien
ttcatctaccgctatcagacaggag

SEQ ID NO: 2887059 - DNA, 25 bp, Homo sapien
gcttatactggcttccatgccggga

SEQ ID NO: 2887060 - DNA, 25 bp, Homo sapien
tgctgtaagaatgtcccaaaggaag

SEQ ID NO: 2887061 - DNA, 25 bp, Homo sapien
tgtggacctaacacgtaaccatgga

SEQ ID NO: 2887062 - DNA, 25 bp, Homo sapien
aatactatatgcctggatggtcagc

SEQ ID NO: 2887063 - DNA, 25 bp, Homo sapien
cctgtcgggctgttggagagacacc

SEQ ID NO: 2887064 - DNA, 25 bp, Homo sapien
agcaaacccccatcagccggaccag

SEQ ID NO: 2887065 - DNA, 25 bp, Homo sapien
acagtgctgagcaaacccccatcag

SEQ ID NO: 2887066 - DNA, 25 bp, Homo sapien
gcaaacccccatcagccggaccagg

SEQ ID NO: 2887067 - DNA, 25 bp, Homo sapien
tggcacagtgctgagcaaaccccca

SEQ ID NO: 2887068 - DNA, 25 bp, Homo sapien
aagctgatggcgagaagtacctcca

SEQ ID NO: 2887069 - DNA, 25 bp, Homo sapien
tttacaaatgacaacagccctgtgc

SEQ ID NO: 2887070 - DNA, 25 bp, Homo sapien
agaaatacattccttcagggcaggg

SEQ ID NO: 2887071 - DNA, 25 bp, Homo sapien
tcagggtgacctgtatgagccgcag

SEQ ID NO: 2887072 - DNA, 25 bp, Homo sapien
cgttgtttcccgcgtccaccacagc

SEQ ID NO: 2887073 - DNA, 25 bp, Homo sapien
ccgttgtttcccgcgtccaccacag

SEQ ID NO: 2887074 - DNA, 25 bp, Homo sapien
gttgtttcccgcgtccaccacagcc

SEQ ID NO: 2887075 - DNA, 25 bp, Homo sapien
ggaggatccaatgctctcggctcgg

SEQ ID NO: 2887076 - DNA, 25 bp, Homo sapien
catgacacagattgcagagattccg

SEQ ID NO: 2887077 - DNA, 25 bp, Homo sapien
tgacgtgactcactcggagaagcca

SEQ ID NO: 2887078 - DNA, 25 bp, Homo sapien
tgtacggtcccaacatagtcccaaa

SEQ ID NO: 2887079 - DNA, 25 bp, Homo sapien
tcgcctctgactggtgactgtgggt

SEQ ID NO: 2887080 - DNA, 25 bp, Homo sapien
cctgccaacaagtccggctaaattt

SEQ ID NO: 2887081 - DNA, 25 bp, Homo sapien
cccagccagagtgggctttttccaa

SEQ ID NO: 2887082 - DNA, 25 bp, Homo sapien
ggaagatggactagcgtcatgaaca

SEQ ID NO: 2887083 - DNA, 25 bp, Homo sapien
gaaggaggcggatgacagttcacta

SEQ ID NO: 2887084 - DNA, 25 bp, Homo sapien
ctagtcgcagaacacagcgggtggc

SEQ ID NO: 2887085 - DNA, 25 bp, Homo sapien
tgacagttcactagtcgcagaacac

SEQ ID NO: 2887086 - DNA, 25 bp, Homo sapien
atgaaggaggcggatgacagttcac

SEQ ID NO: 2887087 - DNA, 25 bp, Homo sapien
tccgagggctcgtctcccgggctgt

SEQ ID NO: 2887088 - DNA, 25 bp, Homo sapien
ttcagtttgtgtttcgtctgcactt

SEQ ID NO: 2887089 - DNA, 25 bp, Homo sapien
tttcgtatggggactccgagggctc

SEQ ID NO: 2887090 - DNA, 25 bp, Homo sapien
tttttggcagtcactcctcgctcag

SEQ ID NO: 2887091 - DNA, 25 bp, Homo sapien
ggcaggcgaggtggaaagctccgca

SEQ ID NO: 2887092 - DNA, 25 bp, Homo sapien
gcgaggtggaaagctccgcagcagg

SEQ ID NO: 2887093 - DNA, 25 bp, Homo sapien
aggcgaggtggaaagctccgcagca

SEQ ID NO: 2887094 - DNA, 25 bp, Homo sapien
gcaggcgaggtggaaagctccgcag

SEQ ID NO: 2887095 - DNA, 25 bp, Homo sapien
ggagggggcttgtcctctgcaggca

SEQ ID NO: 2887096 - DNA, 25 bp, Homo sapien
ctgcagagctgcccgcccgtgggaa

SEQ ID NO: 2887097 - DNA, 25 bp, Homo sapien
agcaggtggccggccaggctgcaga

SEQ ID NO: 2887098 - DNA, 25 bp, Homo sapien
ggacttggtgcagggggttgcagga

SEQ ID NO: 2887099 - DNA, 25 bp, Homo sapien
gcagtaacatggaggcagaacaaca

SEQ ID NO: 2887100 - DNA, 25 bp, Homo sapien
ctgatgcagtaacatggaggcagaa

SEQ ID NO: 2887101 - DNA, 25 bp, Homo sapien
gtaacatggaggcagaacaacagca

SEQ ID NO: 2887102 - DNA, 25 bp, Homo sapien
tgatgcagtaacatggaggcagaac

SEQ ID NO: 2887103 - DNA, 25 bp, Homo sapien
ggccacggctgtgcaggtgtcctct

SEQ ID NO: 2887104 - DNA, 25 bp, Homo sapien
actccttgggcccggtgagtaggca

SEQ ID NO: 2887105 - DNA, 25 bp, Homo sapien
tgttctgacgtgagataggagactc

SEQ ID NO: 2887106 - DNA, 25 bp, Homo sapien
acagaccccagactgtgccgggcga

SEQ ID NO: 2887107 - DNA, 25 bp, Homo sapien
cacttatcattctgggcaggcagac

SEQ ID NO: 2887108 - DNA, 25 bp, Homo sapien
actcccataagtgaggtgctgctgt

SEQ ID NO: 2887109 - DNA, 25 bp, Homo sapien
gacagacactcccataagtgaggtg

SEQ ID NO: 2887110 - DNA, 25 bp, Homo sapien
gtggtggagcagtcacttatcattc

SEQ ID NO: 2887111 - DNA, 25 bp, Homo sapien
gaaatacaggagaatcttactaggc

SEQ ID NO: 2887112 - DNA, 25 bp, Homo sapien
gagaatcttactaggcagcctggct

SEQ ID NO: 2887113 - DNA, 25 bp, Homo sapien
gggaggcccagtctaactggcaaga

SEQ ID NO: 2887114 - DNA, 25 bp, Homo sapien
actggcaagaagcttgaaagaaggg

SEQ ID NO: 2887115 - DNA, 25 bp, Homo sapien
cttgctcactagtccaagcattctc

SEQ ID NO: 2887116 - DNA, 25 bp, Homo sapien
tgctcactagtccaagcattctcca

SEQ ID NO: 2887117 - DNA, 25 bp, Homo sapien
cactagtccaagcattctccagcaa

SEQ ID NO: 2887118 - DNA, 25 bp, Homo sapien
ctagtccaagcattctccagcaaaa

SEQ ID NO: 2887119 - DNA, 25 bp, Homo sapien
gcagttctgagccactaaaatcaag

SEQ ID NO: 2887120 - DNA, 25 bp, Homo sapien
ctaaaatcaagcaactcctcttcag

SEQ ID NO: 2887121 - DNA, 25 bp, Homo sapien
gagaggtgcaaagaacaagaattaa

SEQ ID NO: 2887122 - DNA, 25 bp, Homo sapien
aggcagccatgctgctaaagcacct

SEQ ID NO: 2887123 - DNA, 25 bp, Homo sapien
tattttttcacacaagcctcatggt

SEQ ID NO: 2887124 - DNA, 25 bp, Homo sapien
ttacacacgaaacatgagtgaatcc

SEQ ID NO: 2887125 - DNA, 25 bp, Homo sapien
tgtcttgctctctttacacacgaaa

SEQ ID NO: 2887126 - DNA, 25 bp, Homo sapien
cacactgagttaccacacagcgctt

SEQ ID NO: 2887127 - DNA, 25 bp, Homo sapien
ttgggtttgaagggttggaagcatg

SEQ ID NO: 2887128 - DNA, 25 bp, Homo sapien
cttgggtttgaagggttggaagcat

SEQ ID NO: 2887129 - DNA, 25 bp, Homo sapien
gggtttgaagggttggaagcatggc

SEQ ID NO: 2887130 - DNA, 25 bp, Homo sapien
tgggtttgaagggttggaagcatgg

SEQ ID NO: 2887131 - DNA, 25 bp, Homo sapien
ttcccaagcgcccatgggcctgcgt

SEQ ID NO: 2887132 - DNA, 25 bp, Homo sapien
tgggcctgcgtctggcctgcatctg

SEQ ID NO: 2887133 - DNA, 25 bp, Homo sapien
caaggctgcgcaggtgcacctgtac

SEQ ID NO: 2887134 - DNA, 25 bp, Homo sapien
gcgcccatgggcctgcgtctggcct

SEQ ID NO: 2887135 - DNA, 25 bp, Homo sapien
cccctctcctatagttaagcatctt

SEQ ID NO: 2887136 - DNA, 25 bp, Homo sapien
ctttagggtgatatttaggatggaa

SEQ ID NO: 2887137 - DNA, 25 bp, Homo sapien
aacccagccgatgtccagttagtca

SEQ ID NO: 2887138 - DNA, 25 bp, Homo sapien
tcaaatggtccaaaggttgcccctc

SEQ ID NO: 2887139 - DNA, 25 bp, Homo sapien
taatgggccattaaaaccagagcaa

SEQ ID NO: 2887140 - DNA, 25 bp, Homo sapien
ggccattaaaaccagagcaaacagg

SEQ ID NO: 2887141 - DNA, 25 bp, Homo sapien
atataatgggccattaaaaccagag

SEQ ID NO: 2887142 - DNA, 25 bp, Homo sapien
tgggccattaaaaccagagcaaaca

SEQ ID NO: 2887143 - DNA, 25 bp, Homo sapien
cggggcagcggacacaccgcatcat

SEQ ID NO: 2887144 - DNA, 25 bp, Homo sapien
taggcaacggggcagcggacacacc

SEQ ID NO: 2887145 - DNA, 25 bp, Homo sapien
tgccagacaagcatccccgctgtga

SEQ ID NO: 2887146 - DNA, 25 bp, Homo sapien
gcatccccgctgtgataggcaacgg

SEQ ID NO: 2887147 - DNA, 25 bp, Homo sapien
acgtgggcgtggtgtcgcttcccct

SEQ ID NO: 2887148 - DNA, 25 bp, Homo sapien
caccagctcacgttgacgtgggcgt

SEQ ID NO: 2887149 - DNA, 25 bp, Homo sapien
ccttccgagcagtgaagtgggcagt

SEQ ID NO: 2887150 - DNA, 25 bp, Homo sapien
agcacacgaagcaccagctcacgtt

SEQ ID NO: 2887151 - DNA, 25 bp, Homo sapien
aatgatatcctggaagtgcagcttc

SEQ ID NO: 2887152 - DNA, 25 bp, Homo sapien
aaccagctgccgtcaggcatctcga

SEQ ID NO: 2887153 - DNA, 25 bp, Homo sapien
tgatatcctggaagtgcagcttctt

SEQ ID NO: 2887154 - DNA, 25 bp, Homo sapien
tgttcaggcagtcagggtggaaggc

SEQ ID NO: 2887155 - DNA, 25 bp, Homo sapien
ttgggatggcaaacttctgccggcc

SEQ ID NO: 2887156 - DNA, 25 bp, Homo sapien
cgcgcctgatgcgtccagtaataat

SEQ ID NO: 2887157 - DNA, 25 bp, Homo sapien
atgtacgggaacactcgcgcctgat

SEQ ID NO: 2887158 - DNA, 25 bp, Homo sapien
aaacacagggaattctccaatctcg

SEQ ID NO: 2887159 - DNA, 25 bp, Homo sapien
ccctctgaagcttaatttcacgaaa

SEQ ID NO: 2887160 - DNA, 25 bp, Homo sapien
ggcttgcgctcgctctcctgtgttt

SEQ ID NO: 2887161 - DNA, 25 bp, Homo sapien
tcacgaaaacgagcttcagcttctt

SEQ ID NO: 2887162 - DNA, 25 bp, Homo sapien
gctcgctctcctgtgtttctcgggc

SEQ ID NO: 2887163 - DNA, 25 bp, Homo sapien
aaatatccgctgtgtagatctggac

SEQ ID NO: 2887164 - DNA, 25 bp, Homo sapien
gacactccgaatcaaagccacaagg

SEQ ID NO: 2887165 - DNA, 25 bp, Homo sapien
tctgatgtccctcttggcgaccagg

SEQ ID NO: 2887166 - DNA, 25 bp, Homo sapien
gatctggactttcccgtaaggctta

SEQ ID NO: 2887167 - DNA, 25 bp, Homo sapien
tatttcaggtcaggcacagaggctc

SEQ ID NO: 2887168 - DNA, 25 bp, Homo sapien
cagtgaaccgtaatttctcaaaagc

SEQ ID NO: 2887169 - DNA, 25 bp, Homo sapien
gagttatagcagatacctttcatgt

SEQ ID NO: 2887170 - DNA, 25 bp, Homo sapien
ctaggcctaattacccagtgaaccg

SEQ ID NO: 2887171 - DNA, 25 bp, Homo sapien
tctctcagtccctggatgtccttgg

SEQ ID NO: 2887172 - DNA, 25 bp, Homo sapien
agcagttctacatgtctctcagtcc

SEQ ID NO: 2887173 - DNA, 25 bp, Homo sapien
cagggtcagcagttctacatgtctc

SEQ ID NO: 2887174 - DNA, 25 bp, Homo sapien
atgtctctcagtccctggatgtcct

SEQ ID NO: 2887175 - DNA, 25 bp, Homo sapien
gatcagctccccaacgtactcgtta

SEQ ID NO: 2887176 - DNA, 25 bp, Homo sapien
ctatagtgagcatgtagaagtgggt

SEQ ID NO: 2887177 - DNA, 25 bp, Homo sapien
gtgatgtcgttctcgtgtgcgtgct

SEQ ID NO: 2887178 - DNA, 25 bp, Homo sapien
gcgtgcttgattctcgccatgcact

SEQ ID NO: 2887179 - DNA, 25 bp, Homo sapien
caggtccagcacactgcagaagctc

SEQ ID NO: 2887180 - DNA, 25 bp, Homo sapien
gctccaggtccagcacactgcagaa

SEQ ID NO: 2887181 - DNA, 25 bp, Homo sapien
ggtccagcacactgcagaagctcac

SEQ ID NO: 2887182 - DNA, 25 bp, Homo sapien
tcagggctccaggtccagcacactg

SEQ ID NO: 2887183 - DNA, 25 bp, Homo sapien
gctgagcactccagatgtactgtct

SEQ ID NO: 2887184 - DNA, 25 bp, Homo sapien
tgtcttttatccatgcccactttta

SEQ ID NO: 2887185 - DNA, 25 bp, Homo sapien
ggaagggcccggcaacacctgtcag

SEQ ID NO: 2887186 - DNA, 25 bp, Homo sapien
aacacctgtcaggattgggcatcag

SEQ ID NO: 2887187 - DNA, 25 bp, Homo sapien
ggctgtggccattgaaggagccgcc

SEQ ID NO: 2887188 - DNA, 25 bp, Homo sapien
gcctgccgtgtgagggaagggatga

SEQ ID NO: 2887189 - DNA, 25 bp, Homo sapien
agccaaaagcctgccgtgtgaggga

SEQ ID NO: 2887190 - DNA, 25 bp, Homo sapien
cagaagccaaaagcctgccgtgtga

SEQ ID NO: 2887191 - DNA, 25 bp, Homo sapien
tggttttcaagcactactattaatc

SEQ ID NO: 2887192 - DNA, 25 bp, Homo sapien
aagcactactattaatctactcttt

SEQ ID NO: 2887193 - DNA, 25 bp, Homo sapien
aaaggcagaaacatgtattctatct

SEQ ID NO: 2887194 - DNA, 25 bp, Homo sapien
ctagatgatgagcttaagggcaaca

SEQ ID NO: 2887195 - DNA, 25 bp, Homo sapien
ctgttccaatgtcatagggtatgcc

SEQ ID NO: 2887196 - DNA, 25 bp, Homo sapien
gtcatagggtatgccagagcccacc

SEQ ID NO: 2887197 - DNA, 25 bp, Homo sapien
tctctctcgttgtgtattcttggtt

SEQ ID NO: 2887198 - DNA, 25 bp, Homo sapien
tttctctctcgttgtgtattcttgg

SEQ ID NO: 2887199 - DNA, 25 bp, Homo sapien
aatgtagtcttgttacctcaggtcc

SEQ ID NO: 2887200 - DNA, 25 bp, Homo sapien
tcaggtcctcgctaaaagcaaagcc

SEQ ID NO: 2887201 - DNA, 25 bp, Homo sapien
ccttctattgcgctttgtaaacgtt

SEQ ID NO: 2887202 - DNA, 25 bp, Homo sapien
ttaggaaggtctgctcacgagggtc

SEQ ID NO: 2887203 - DNA, 25 bp, Homo sapien
gtgtgataacaacggcagcgcagcg

SEQ ID NO: 2887204 - DNA, 25 bp, Homo sapien
aaaggatccttcttgctcaccctga

SEQ ID NO: 2887205 - DNA, 25 bp, Homo sapien
tgaacccctcaagctgtgtgcgagg

SEQ ID NO: 2887206 - DNA, 25 bp, Homo sapien
tgctgtgccaagagctgaaaccaaa

SEQ ID NO: 2887207 - DNA, 25 bp, Homo sapien
tgggactcccacaatagatatattg

SEQ ID NO: 2887208 - DNA, 25 bp, Homo sapien
cataccccttatgatccgttcactt

SEQ ID NO: 2887209 - DNA, 25 bp, Homo sapien
ccacaatagatatattggtctgctt

SEQ ID NO: 2887210 - DNA, 25 bp, Homo sapien
catcaaacctgggaatttttcagcc

SEQ ID NO: 2887211 - DNA, 25 bp, Homo sapien
ttttatagctgaccatgtatttact

SEQ ID NO: 2887212 - DNA, 25 bp, Homo sapien
caaacaaatggagttataaaccacg

SEQ ID NO: 2887213 - DNA, 25 bp, Homo sapien
tataaaccacggttacaacaataca

SEQ ID NO: 2887214 - DNA, 25 bp, Homo sapien
tcaatcatgcagacaacaaacaaac

SEQ ID NO: 2887215 - DNA, 25 bp, Homo sapien
ttcacacacccagttctgattttag

SEQ ID NO: 2887216 - DNA, 25 bp, Homo sapien
gagtcaatctctctactagttataa

SEQ ID NO: 2887217 - DNA, 25 bp, Homo sapien
catctttatgtattgagtgccctaa

SEQ ID NO: 2887218 - DNA, 25 bp, Homo sapien
aatttactggagtacagttgttcac

SEQ ID NO: 2887219 - DNA, 25 bp, Homo sapien
ccttttgcttcatgcgttttcggtt

SEQ ID NO: 2887220 - DNA, 25 bp, Homo sapien
catgcgttttcggtttgctgagtag

SEQ ID NO: 2887221 - DNA, 25 bp, Homo sapien
cgttttcggtttgctgagtagttgc

SEQ ID NO: 2887222 - DNA, 25 bp, Homo sapien
gcttcatgcgttttcggtttgctga

SEQ ID NO: 2887223 - DNA, 25 bp, Homo sapien
aatgcactaatcaacccagagtgcc

SEQ ID NO: 2887224 - DNA, 25 bp, Homo sapien
cgttggcatgcacaccacttctgca

SEQ ID NO: 2887225 - DNA, 25 bp, Homo sapien
cagaatgtggttctctgcaagatgc

SEQ ID NO: 2887226 - DNA, 25 bp, Homo sapien
gatgctttgtcatgacgcgctgagc

SEQ ID NO: 2887227 - DNA, 25 bp, Homo sapien
aacaaaaccacgtgtgtgaacaggg

SEQ ID NO: 2887228 - DNA, 25 bp, Homo sapien
agtcacgtgttcaaacaaaaccacg

SEQ ID NO: 2887229 - DNA, 25 bp, Homo sapien
taaacactgggataaacatggtccc

SEQ ID NO: 2887230 - DNA, 25 bp, Homo sapien
tcaaaaggccacataaagcgtaaca

SEQ ID NO: 2887231 - DNA, 25 bp, Homo sapien
cgggaatcacaaatgcaagcacgat

SEQ ID NO: 2887232 - DNA, 25 bp, Homo sapien
gcaggaaggctttcgaggcagcaac

SEQ ID NO: 2887233 - DNA, 25 bp, Homo sapien
cagcaacctgataagggccacggga

SEQ ID NO: 2887234 - DNA, 25 bp, Homo sapien
caagcacgatgtggcctagaactga

SEQ ID NO: 2887235 - DNA, 25 bp, Homo sapien
aatgcagatccgagtgacagtgagc

SEQ ID NO: 2887236 - DNA, 25 bp, Homo sapien
agactcacccaaccgaaaaccagca

SEQ ID NO: 2887237 - DNA, 25 bp, Homo sapien
ggagaaatgcagatccgagtgacag

SEQ ID NO: 2887238 - DNA, 25 bp, Homo sapien
ctcacccaaccgaaaaccagcaaag

SEQ ID NO: 2887239 - DNA, 25 bp, Homo sapien
ctgaaaaccgtggtgtcctgtgtcc

SEQ ID NO: 2887240 - DNA, 25 bp, Homo sapien
tgaaaaccgtggtgtcctgtgtcca

SEQ ID NO: 2887241 - DNA, 25 bp, Homo sapien
gtactgaaaaccgtggtgtcctgtg

SEQ ID NO: 2887242 - DNA, 25 bp, Homo sapien
tgagacaggacacccccaaaccagt

SEQ ID NO: 2887243 - DNA, 25 bp, Homo sapien
tcaagtgatatattcggtcaagtgt

SEQ ID NO: 2887244 - DNA, 25 bp, Homo sapien
aagcacattgaacaagttgtgttcc

SEQ ID NO: 2887245 - DNA, 25 bp, Homo sapien
caagtgttagcaatcgcatgttatt

SEQ ID NO: 2887246 - DNA, 25 bp, Homo sapien
gggaattttcaccatcataaagcac

SEQ ID NO: 2887247 - DNA, 25 bp, Homo sapien
aggcccacacgagtgtccccattca

SEQ ID NO: 2887248 - DNA, 25 bp, Homo sapien
tccacttgagggtctcacagttggg

SEQ ID NO: 2887249 - DNA, 25 bp, Homo sapien
gaatgtcacagacggcaaacaggcc

SEQ ID NO: 2887250 - DNA, 25 bp, Homo sapien
gggctggcagctgtgattcataaat

SEQ ID NO: 2887251 - DNA, 25 bp, Homo sapien
cgaggaatccactgcaattggaggc

SEQ ID NO: 2887252 - DNA, 25 bp, Homo sapien
tgcaattggaggctccacaccggca

SEQ ID NO: 2887253 - DNA, 25 bp, Homo sapien
gcagaccgttttttcattgcccaga

SEQ ID NO: 2887254 - DNA, 25 bp, Homo sapien
cccagacaatcgaggttgtagttaa

SEQ ID NO: 2887255 - DNA, 25 bp, Homo sapien
ctgtcccggcaacaagccagcctgg

SEQ ID NO: 2887256 - DNA, 25 bp, Homo sapien
tcccggcaacaagccagcctggagg

SEQ ID NO: 2887257 - DNA, 25 bp, Homo sapien
aggaagccgctgttcacgggggaca

SEQ ID NO: 2887258 - DNA, 25 bp, Homo sapien
gaagccgctgttcacgggggacaca

SEQ ID NO: 2887259 - DNA, 25 bp, Homo sapien
ggaaagaattacacaggctgaagca

SEQ ID NO: 2887260 - DNA, 25 bp, Homo sapien
gggcagaagagcgagctacactcca

SEQ ID NO: 2887261 - DNA, 25 bp, Homo sapien
tagagtcaagaattaagcacagatc

SEQ ID NO: 2887262 - DNA, 25 bp, Homo sapien
gctacactccaggaacttcagagat

SEQ ID NO: 2887263 - DNA, 25 bp, Homo sapien
ggaagcactcgtcctctgactgcct

SEQ ID NO: 2887264 - DNA, 25 bp, Homo sapien
tttgctctgcgccgcctcgttttct

SEQ ID NO: 2887265 - DNA, 25 bp, Homo sapien
tggtaggccttggtgcagaacttgc

SEQ ID NO: 2887266 - DNA, 25 bp, Homo sapien
ggtgcagaacttgcggtcacacagc

SEQ ID NO: 2887267 - DNA, 25 bp, Homo sapien
tcttctctgctcgatgcagagatct

SEQ ID NO: 2887268 - DNA, 25 bp, Homo sapien
tagaatgtgcggctggtggaacaaa

SEQ ID NO: 2887269 - DNA, 25 bp, Homo sapien
tggatcagggccttcgctgcatgag

SEQ ID NO: 2887270 - DNA, 25 bp, Homo sapien
tgcatgagcgcctgatgtgcctgca

SEQ ID NO: 2887271 - DNA, 25 bp, Homo sapien
cacctggcctcttttgggtttcttg

SEQ ID NO: 2887272 - DNA, 25 bp, Homo sapien
ctatctcagctttctgcaatcttgg

SEQ ID NO: 2887273 - DNA, 25 bp, Homo sapien
tctcagctttctgcaatcttggctc

SEQ ID NO: 2887274 - DNA, 25 bp, Homo sapien
ttcttctgtgattccacacagtcaa

SEQ ID NO: 2887275 - DNA, 25 bp, Homo sapien
caactgtcaggtcaaatgaacacaa

SEQ ID NO: 2887276 - DNA, 25 bp, Homo sapien
ggcagggcctgttgactccacagta

SEQ ID NO: 2887277 - DNA, 25 bp, Homo sapien
gaagatgacttacaactgtcaggtc

SEQ ID NO: 2887278 - DNA, 25 bp, Homo sapien
gaagtgatggaatcacgacttcaac

SEQ ID NO: 2887279 - DNA, 25 bp, Homo sapien
gtggcaaaatgaagtcgaaggtttg

SEQ ID NO: 2887280 - DNA, 25 bp, Homo sapien
tgaagtcgaaggtttgccacacacg

SEQ ID NO: 2887281 - DNA, 25 bp, Homo sapien
tgccacacacgtcacaatgatgcca

SEQ ID NO: 2887282 - DNA, 25 bp, Homo sapien
caaaatgaagtcgaaggtttgccac

SEQ ID NO: 2887283 - DNA, 25 bp, Homo sapien
agtcatgctcacagcagtaggaccg

SEQ ID NO: 2887284 - DNA, 25 bp, Homo sapien
acagcagtaggaccgcccgtccggg

SEQ ID NO: 2887285 - DNA, 25 bp, Homo sapien
agctgaaggctgtcccgtcctggtg

SEQ ID NO: 2887286 - DNA, 25 bp, Homo sapien
ggtgcagctgaaggctgtcccgtcc

SEQ ID NO: 2887287 - DNA, 25 bp, Homo sapien
ttggtgcttctgaccgatgccgccc

SEQ ID NO: 2887288 - DNA, 25 bp, Homo sapien
ctctgtgactctccgccagcccctc

SEQ ID NO: 2887289 - DNA, 25 bp, Homo sapien
ctatttgccctctgtgactctccgc

SEQ ID NO: 2887290 - DNA, 25 bp, Homo sapien
agtcttggtgcttctgaccgatgcc

SEQ ID NO: 2887291 - DNA, 25 bp, Homo sapien
tgaaacttccagtcagtgctcaggg

SEQ ID NO: 2887292 - DNA, 25 bp, Homo sapien
gaaattcaagtgtggcggtaacgct

SEQ ID NO: 2887293 - DNA, 25 bp, Homo sapien
tcacaatggcagtttcgaggaatcc

SEQ ID NO: 2887294 - DNA, 25 bp, Homo sapien
gacgagtttctagcgacccttggga

SEQ ID NO: 2887295 - DNA, 25 bp, Homo sapien
caaacctggtgacagcacccagtat

SEQ ID NO: 2887296 - DNA, 25 bp, Homo sapien
ttaagtctaactatcaaacctggtg

SEQ ID NO: 2887297 - DNA, 25 bp, Homo sapien
cccaactggcaagtctcaactctct

SEQ ID NO: 2887298 - DNA, 25 bp, Homo sapien
tcctaaaaggaatctgaccttacat

SEQ ID NO: 2887299 - DNA, 25 bp, Homo sapien
cctaattttagtgacagctctgcct

SEQ ID NO: 2887300 - DNA, 25 bp, Homo sapien
gctctgcctgttagactcttacttt

SEQ ID NO: 2887301 - DNA, 25 bp, Homo sapien
ccacaccagagcgtgggagacggtg

SEQ ID NO: 2887302 - DNA, 25 bp, Homo sapien
ggactcaacgttacatttttgaatg

SEQ ID NO: 2887303 - DNA, 25 bp, Homo sapien
gctcttctccactcggagccaagag

SEQ ID NO: 2887304 - DNA, 25 bp, Homo sapien
ttccgcgctcttctccactcggagc

SEQ ID NO: 2887305 - DNA, 25 bp, Homo sapien
actcggagccaagagcccgggagca

SEQ ID NO: 2887306 - DNA, 25 bp, Homo sapien
cgtagaggggtagccccgcgctgtt

SEQ ID NO: 2887307 - DNA, 25 bp, Homo sapien
agcggccctcccgagtgtcgggcta

SEQ ID NO: 2887308 - DNA, 25 bp, Homo sapien
cctcccgagtgtcgggctagtgcgc

SEQ ID NO: 2887309 - DNA, 25 bp, Homo sapien
cggccctcccgagtgtcgggctagt

SEQ ID NO: 2887310 - DNA, 25 bp, Homo sapien
aggcagcggccctcccgagtgtcgg

SEQ ID NO: 2887311 - DNA, 25 bp, Homo sapien
cacctcgggggtgtgctgcatcctc

SEQ ID NO: 2887312 - DNA, 25 bp, Homo sapien
gaagcgtgcccgtgactgccgctgc

SEQ ID NO: 2887313 - DNA, 25 bp, Homo sapien
tgcctcctccgggttgggccgacgc

SEQ ID NO: 2887314 - DNA, 25 bp, Homo sapien
cgcacctcgggggtgtgctgcatcc

SEQ ID NO: 2887315 - DNA, 25 bp, Homo sapien
gtgtcctcggagaccggagaaccgc

SEQ ID NO: 2887316 - DNA, 25 bp, Homo sapien
tcccgtgaactcagggctgttggcc

SEQ ID NO: 2887317 - DNA, 25 bp, Homo sapien
tgttggccttaaagagcgccgtgca

SEQ ID NO: 2887318 - DNA, 25 bp, Homo sapien
tctgtgccgatttcagtcccgtgaa

SEQ ID NO: 2887319 - DNA, 25 bp, Homo sapien
cccatccgacgtcgtcgtcatggaa

SEQ ID NO: 2887320 - DNA, 25 bp, Homo sapien
gggacaccggcagacgttccgcgtc

SEQ ID NO: 2887321 - DNA, 25 bp, Homo sapien
tcatggaaacccgagactgcgctgg

SEQ ID NO: 2887322 - DNA, 25 bp, Homo sapien
gtttagaggaacctaggacgctcca

SEQ ID NO: 2887323 - DNA, 25 bp, Homo sapien
tccccgactccagtccgccggtctc

SEQ ID NO: 2887324 - DNA, 25 bp, Homo sapien
tagtccgcgccccgtatctagaaaa

SEQ ID NO: 2887325 - DNA, 25 bp, Homo sapien
gtatctagaaaacgcccattcggac

SEQ ID NO: 2887326 - DNA, 25 bp, Homo sapien
tctccgggcccagcgagcctctagt

SEQ ID NO: 2887327 - DNA, 25 bp, Homo sapien
tgacatcggggaccggcacgcgggc

SEQ ID NO: 2887328 - DNA, 25 bp, Homo sapien
cggcggtgacatcggggaccggcac

SEQ ID NO: 2887329 - DNA, 25 bp, Homo sapien
cggcggcggtgacatcggggaccgg

SEQ ID NO: 2887330 - DNA, 25 bp, Homo sapien
tgcgcggggacggcactcccggcgg

SEQ ID NO: 2887331 - DNA, 25 bp, Homo sapien
gcgcgctgcatgaactcgaaggcgt

SEQ ID NO: 2887332 - DNA, 25 bp, Homo sapien
tgcaggctgtcttccgcaggtcctg

SEQ ID NO: 2887333 - DNA, 25 bp, Homo sapien
tgcagggcgcgctgcatgaactcga

SEQ ID NO: 2887334 - DNA, 25 bp, Homo sapien
tcgaaggcgtggcagtccacgcatg

SEQ ID NO: 2887335 - DNA, 25 bp, Homo sapien
cataggacaaagtgcccagtgagag

SEQ ID NO: 2887336 - DNA, 25 bp, Homo sapien
taggacaaagtgcccagtgagagcc

SEQ ID NO: 2887337 - DNA, 25 bp, Homo sapien
ggacaaagtgcccagtgagagcctt

SEQ ID NO: 2887338 - DNA, 25 bp, Homo sapien
tcataggacaaagtgcccagtgaga

SEQ ID NO: 2887339 - DNA, 25 bp, Homo sapien
tggtgcccacgccatgccagcgtgc

SEQ ID NO: 2887340 - DNA, 25 bp, Homo sapien
atctccaccggctcctgagacagac

SEQ ID NO: 2887341 - DNA, 25 bp, Homo sapien
tggctcccactggtggggcctgcct

SEQ ID NO: 2887342 - DNA, 25 bp, Homo sapien
acaagaggggtgagggtgcagccca

SEQ ID NO: 2887343 - DNA, 25 bp, Homo sapien
ggcacacagggcacggcgctctgcc

SEQ ID NO: 2887344 - DNA, 25 bp, Homo sapien
ctgcctgcagcagtagggtctccgt

SEQ ID NO: 2887345 - DNA, 25 bp, Homo sapien
agggcacggcgctctgcctgcagca

SEQ ID NO: 2887346 - DNA, 25 bp, Homo sapien
cagcaggcacacagggcacggcgct

SEQ ID NO: 2887347 - DNA, 25 bp, Homo sapien
ttattcacacggagcagcgtggtcc

SEQ ID NO: 2887348 - DNA, 25 bp, Homo sapien
tgccactgggcatttattcacacgg

SEQ ID NO: 2887349 - DNA, 25 bp, Homo sapien
tgggcatttattcacacggagcagc

SEQ ID NO: 2887350 - DNA, 25 bp, Homo sapien
catttattcacacggagcagcgtgg

SEQ ID NO: 2887351 - DNA, 25 bp, Homo sapien
atcctcggcgcttctcgaacctagc

SEQ ID NO: 2887352 - DNA, 25 bp, Homo sapien
gggaggcggtcgcagaccccatcct

SEQ ID NO: 2887353 - DNA, 25 bp, Homo sapien
tgggcctgcccgtggacgtgggagt

SEQ ID NO: 2887354 - DNA, 25 bp, Homo sapien
cagtctgcgttgtgcggtggagttg

SEQ ID NO: 2887355 - DNA, 25 bp, Homo sapien
tggcgcggcgcccccctgtccgagc

SEQ ID NO: 2887356 - DNA, 25 bp, Homo sapien
ttgtttgaaagcagcgcccgcggtg

SEQ ID NO: 2887357 - DNA, 25 bp, Homo sapien
ccgggaagcctcgtccggagccgca

SEQ ID NO: 2887358 - DNA, 25 bp, Homo sapien
tcccgctccgtctcctgcctttgtt

SEQ ID NO: 2887359 - DNA, 25 bp, Homo sapien
gccccgccgtgaggctgagccaccg

SEQ ID NO: 2887360 - DNA, 25 bp, Homo sapien
cctcggcggccacgatcttcgtctc

SEQ ID NO: 2887361 - DNA, 25 bp, Homo sapien
ccgtgaggctgagccaccggggcag

SEQ ID NO: 2887362 - DNA, 25 bp, Homo sapien
gcggccacgatcttcgtctcgcaga

SEQ ID NO: 2887363 - DNA, 25 bp, Homo sapien
catgatgccgtcgtagaagatgcgg

SEQ ID NO: 2887364 - DNA, 25 bp, Homo sapien
gcgctccatgatgccgtcgtagaag

SEQ ID NO: 2887365 - DNA, 25 bp, Homo sapien
aaggccgtgttagggatgcgctcca

SEQ ID NO: 2887366 - DNA, 25 bp, Homo sapien
ctgcgcgcgcgggtgctgccgcagg

SEQ ID NO: 2887367 - DNA, 25 bp, Homo sapien
agcgagcggctcacggcgaagcaca

SEQ ID NO: 2887368 - DNA, 25 bp, Homo sapien
taggcgcggatcaccttgcggctgt

SEQ ID NO: 2887369 - DNA, 25 bp, Homo sapien
accaggcacgtcagcagcagcgagc

SEQ ID NO: 2887370 - DNA, 25 bp, Homo sapien
tgtgcagcgcgcactccaggtaggc

SEQ ID NO: 2887371 - DNA, 25 bp, Homo sapien
catgtagtactgctcgatgtccgcc

SEQ ID NO: 2887372 - DNA, 25 bp, Homo sapien
atgtagtactgctcgatgtccgcca

SEQ ID NO: 2887373 - DNA, 25 bp, Homo sapien
tgtagtactgctcgatgtccgccat

SEQ ID NO: 2887374 - DNA, 25 bp, Homo sapien
tcatgtagtactgctcgatgtccgc

SEQ ID NO: 2887375 - DNA, 25 bp, Homo sapien
cgagtcaggcacgaagccaggaggt

SEQ ID NO: 2887376 - DNA, 25 bp, Homo sapien
aggcagaggtggcacccagagacct

SEQ ID NO: 2887377 - DNA, 25 bp, Homo sapien
gcagaggtggcacccagagacctct

SEQ ID NO: 2887378 - DNA, 25 bp, Homo sapien
ctcgagtcaggcacgaagccaggag

SEQ ID NO: 2887379 - DNA, 25 bp, Homo sapien
gagtagttgtgcaccacggcgaact

SEQ ID NO: 2887380 - DNA, 25 bp, Homo sapien
gtcatgcccggcagcacgtagtggt

SEQ ID NO: 2887381 - DNA, 25 bp, Homo sapien
gatgcccttgcctcggaaacgtgag

SEQ ID NO: 2887382 - DNA, 25 bp, Homo sapien
tgtctgaagcccagcgactcgtaga

SEQ ID NO: 2887383 - DNA, 25 bp, Homo sapien
tctgaagcgcctcgtgagaagcatc

SEQ ID NO: 2887384 - DNA, 25 bp, Homo sapien
ggctcacagtacagtttcgggaaca

SEQ ID NO: 2887385 - DNA, 25 bp, Homo sapien
caacaatggtatgtccggctcgcca

SEQ ID NO: 2887386 - DNA, 25 bp, Homo sapien
aattgagcgtctgaaagcaggccgc

SEQ ID NO: 2887387 - DNA, 25 bp, Homo sapien
ccaggccttgatgtacccgccgcac

SEQ ID NO: 2887388 - DNA, 25 bp, Homo sapien
actctgagccccaacaggcccgcca

SEQ ID NO: 2887389 - DNA, 25 bp, Homo sapien
tctgagccccaacaggcccgccagg

SEQ ID NO: 2887390 - DNA, 25 bp, Homo sapien
ggccttgatgtacccgccgcaccca

SEQ ID NO: 2887391 - DNA, 25 bp, Homo sapien
ttcccttcaattacgcagcatttgc

SEQ ID NO: 2887392 - DNA, 25 bp, Homo sapien
tcttttctgggtgacctgggtcatc

SEQ ID NO: 2887393 - DNA, 25 bp, Homo sapien
gggtcatcacaatgaattggtcagg

SEQ ID NO: 2887394 - DNA, 25 bp, Homo sapien
tgtggtctgcgggtgctggaagtcc

SEQ ID NO: 2887395 - DNA, 25 bp, Homo sapien
cttaggccacaagggagtcactggc

SEQ ID NO: 2887396 - DNA, 25 bp, Homo sapien
gagcagccgtttccaacactagaca

SEQ ID NO: 2887397 - DNA, 25 bp, Homo sapien
tgagttgagtcctaagaacgccctg

SEQ ID NO: 2887398 - DNA, 25 bp, Homo sapien
tagacagtgggtagcgtattgctcg

SEQ ID NO: 2887399 - DNA, 25 bp, Homo sapien
gaatgttcgaggctgtgactgcgat

SEQ ID NO: 2887400 - DNA, 25 bp, Homo sapien
catggcccagcatcggaatgttcga

SEQ ID NO: 2887401 - DNA, 25 bp, Homo sapien
tatctaagcggagtgttttggaagg

SEQ ID NO: 2887402 - DNA, 25 bp, Homo sapien
gctgtgactgcgatgaagatcttga

SEQ ID NO: 2887403 - DNA, 25 bp, Homo sapien
gtcaaattgtgtgttcgtgtaggat

SEQ ID NO: 2887404 - DNA, 25 bp, Homo sapien
gtatggagtacttagtgtccccagc

SEQ ID NO: 2887405 - DNA, 25 bp, Homo sapien
ggttagccgtctgtgggaagagtca

SEQ ID NO: 2887406 - DNA, 25 bp, Homo sapien
taggatttcagaggtatggagtact

SEQ ID NO: 2887407 - DNA, 25 bp, Homo sapien
tagagtcaaatccttgggtcttctc

SEQ ID NO: 2887408 - DNA, 25 bp, Homo sapien
gagtgtttatggctcctagagtcaa

SEQ ID NO: 2887409 - DNA, 25 bp, Homo sapien
tctgaagcttgcctccacatccagt

SEQ ID NO: 2887410 - DNA, 25 bp, Homo sapien
gcagctcttgactcctcgggtcttg

SEQ ID NO: 2887411 - DNA, 25 bp, Homo sapien
gcagggtctgtgtgctcagtccccg

SEQ ID NO: 2887412 - DNA, 25 bp, Homo sapien
gctcagtccccgcagccaccgtggg

SEQ ID NO: 2887413 - DNA, 25 bp, Homo sapien
aagcagcaggactttgtgagaggca

SEQ ID NO: 2887414 - DNA, 25 bp, Homo sapien
cccagaaggtgcagggtctgtgtgc

SEQ ID NO: 2887415 - DNA, 25 bp, Homo sapien
cacattcttgagaaatcggtgacat

SEQ ID NO: 2887416 - DNA, 25 bp, Homo sapien
aaggcatgattcctacacattcttg

SEQ ID NO: 2887417 - DNA, 25 bp, Homo sapien
tctgaacggcccacaaatgctgagg

SEQ ID NO: 2887418 - DNA, 25 bp, Homo sapien
cagctttcagcggattgtagtgacg

SEQ ID NO: 2887419 - DNA, 25 bp, Homo sapien
gtcagtaaatgcctccaagtgactg

SEQ ID NO: 2887420 - DNA, 25 bp, Homo sapien
agcttctgtaggtctcctgtggcag

SEQ ID NO: 2887421 - DNA, 25 bp, Homo sapien
atgtcagtaaatgcctccaagtgac

SEQ ID NO: 2887422 - DNA, 25 bp, Homo sapien
ccatgtcagtaaatgcctccaagtg

SEQ ID NO: 2887423 - DNA, 25 bp, Homo sapien
cattggccatgaaaagcttggcacg

SEQ ID NO: 2887424 - DNA, 25 bp, Homo sapien
gcttggcacgggctgatatctcctc

SEQ ID NO: 2887425 - DNA, 25 bp, Homo sapien
tgaacccgtgcacatgaacagacat

SEQ ID NO: 2887426 - DNA, 25 bp, Homo sapien
cattcacagatctggttggcgcaca

SEQ ID NO: 2887427 - DNA, 25 bp, Homo sapien
tatgtgctaattgctcacgtagaca

SEQ ID NO: 2887428 - DNA, 25 bp, Homo sapien
cagcttcctcccagatgttcggact

SEQ ID NO: 2887429 - DNA, 25 bp, Homo sapien
caccctcggtctttggtagttcacg

SEQ ID NO: 2887430 - DNA, 25 bp, Homo sapien
gttagttgtcgcttcccaccacagt

SEQ ID NO: 2887431 - DNA, 25 bp, Homo sapien
tctgcccctagatccatgaacatat

SEQ ID NO: 2887432 - DNA, 25 bp, Homo sapien
tgaacatatctttaagcccagcttt

SEQ ID NO: 2887433 - DNA, 25 bp, Homo sapien
ggctgctgcccgttagttcttctga

SEQ ID NO: 2887434 - DNA, 25 bp, Homo sapien
tttttctgcccctagatccatgaac

SEQ ID NO: 2887435 - DNA, 25 bp, Homo sapien
ccaggagccacattcttaaatctaa

SEQ ID NO: 2887436 - DNA, 25 bp, Homo sapien
tccttatcacacgtggctttgaggt

SEQ ID NO: 2887437 - DNA, 25 bp, Homo sapien
atctaatacctccttatcacacgtg

SEQ ID NO: 2887438 - DNA, 25 bp, Homo sapien
tacctccttatcacacgtggctttg

SEQ ID NO: 2887439 - DNA, 25 bp, Homo sapien
tttacacataaaacttgaatccagc

SEQ ID NO: 2887440 - DNA, 25 bp, Homo sapien
tgatagaacatttgtgcttccattt

SEQ ID NO: 2887441 - DNA, 25 bp, Homo sapien
tgttttctgatagaacatttgtgct

SEQ ID NO: 2887442 - DNA, 25 bp, Homo sapien
cataaaacttgaatccagctgcaca

SEQ ID NO: 2887443 - DNA, 25 bp, Homo sapien
tcaggccttcacccaggcatttgca

SEQ ID NO: 2887444 - DNA, 25 bp, Homo sapien
ggtgtaccgagtgcatgcaggcaga

SEQ ID NO: 2887445 - DNA, 25 bp, Homo sapien
gcatttgcatagatggtgtaccgag

SEQ ID NO: 2887446 - DNA, 25 bp, Homo sapien
caggccttcacccaggcatttgcat

SEQ ID NO: 2887447 - DNA, 25 bp, Homo sapien
gcacttacatttgccagggatttca

SEQ ID NO: 2887448 - DNA, 25 bp, Homo sapien
ctgcccacagcataggtcctagtat

SEQ ID NO: 2887449 - DNA, 25 bp, Homo sapien
gagcctgtggcctgctgtatcctga

SEQ ID NO: 2887450 - DNA, 25 bp, Homo sapien
gaaccacgtttatagcttttgccac

SEQ ID NO: 2887451 - DNA, 25 bp, Homo sapien
tgaaccccaggagtcaaaatggaag

SEQ ID NO: 2887452 - DNA, 25 bp, Homo sapien
gaatcggaagtaggtggcatgccac

SEQ ID NO: 2887453 - DNA, 25 bp, Homo sapien
tctgccaagaccataccgtagtagt

SEQ ID NO: 2887454 - DNA, 25 bp, Homo sapien
aagtagccctcccagtgttctcagg

SEQ ID NO: 2887455 - DNA, 25 bp, Homo sapien
aatagatacagccactactcaggga

SEQ ID NO: 2887456 - DNA, 25 bp, Homo sapien
tactcattagtaggctgtcactgca

SEQ ID NO: 2887457 - DNA, 25 bp, Homo sapien
tggtgtgatagcaactcacggcaac

SEQ ID NO: 2887458 - DNA, 25 bp, Homo sapien
gtcactgcagtccaggtcatggcaa

SEQ ID NO: 2887459 - DNA, 25 bp, Homo sapien
gctcctcgtgggctgaagaacacat

SEQ ID NO: 2887460 - DNA, 25 bp, Homo sapien
tgctcctcgtgggctgaagaacaca

SEQ ID NO: 2887461 - DNA, 25 bp, Homo sapien
tactgtggtgagaaccagcttctga

SEQ ID NO: 2887462 - DNA, 25 bp, Homo sapien
tcttagagtacaggccctcaaggag

SEQ ID NO: 2887463 - DNA, 25 bp, Homo sapien
ccagcattcgactttgtaacagagg

SEQ ID NO: 2887464 - DNA, 25 bp, Homo sapien
gacagttactgggtgaataatggac

SEQ ID NO: 2887465 - DNA, 25 bp, Homo sapien
cagtggcaggtctagagtagattct

SEQ ID NO: 2887466 - DNA, 25 bp, Homo sapien
agttattattccagatggtttgtac

SEQ ID NO: 2887467 - DNA, 25 bp, Homo sapien
ggtctagagtagattctccttttct

SEQ ID NO: 2887468 - DNA, 25 bp, Homo sapien
gatggtttgtactggccatctcttt

SEQ ID NO: 2887469 - DNA, 25 bp, Homo sapien
tgtgtacgcagtccaaatttgaagc

SEQ ID NO: 2887470 - DNA, 25 bp, Homo sapien
gggtccagcttgttttgcgcagcac

SEQ ID NO: 2887471 - DNA, 25 bp, Homo sapien
tgcgcagcacttcctaggtggagct

SEQ ID NO: 2887472 - DNA, 25 bp, Homo sapien
gatcaggacatagcattgggtggcc

SEQ ID NO: 2887473 - DNA, 25 bp, Homo sapien
tagagggtgcatacttgacagaggt

SEQ ID NO: 2887474 - DNA, 25 bp, Homo sapien
gaggtggaaatatactccccttcaa

SEQ ID NO: 2887475 - DNA, 25 bp, Homo sapien
gagtgtgaattacatgcctagcaat

SEQ ID NO: 2887476 - DNA, 25 bp, Homo sapien
cattgttaatgcctgggacgatcac

SEQ ID NO: 2887477 - DNA, 25 bp, Homo sapien
tatctatttactatgatacctggat

SEQ ID NO: 2887478 - DNA, 25 bp, Homo sapien
ctcaggatgtatttgagtagattgc

SEQ ID NO: 2887479 - DNA, 25 bp, Homo sapien
ggattaagcctctagctattttgct

SEQ ID NO: 2887480 - DNA, 25 bp, Homo sapien
attgcttctaaattggtcacctaga

SEQ ID NO: 2887481 - DNA, 25 bp, Homo sapien
tgtcagcgtgcttaggtgtcacagc

SEQ ID NO: 2887482 - DNA, 25 bp, Homo sapien
gaagcacccttaattgtggccgcgc

SEQ ID NO: 2887483 - DNA, 25 bp, Homo sapien
tccgaaggaaggttttgccgctggc

SEQ ID NO: 2887484 - DNA, 25 bp, Homo sapien
cttgcccggcgagacgttgaggtaa

SEQ ID NO: 2887485 - DNA, 25 bp, Homo sapien
caatagagaggtctggtttcactgg

SEQ ID NO: 2887486 - DNA, 25 bp, Homo sapien
gccacctttagggtcatttgacgct

SEQ ID NO: 2887487 - DNA, 25 bp, Homo sapien
caccctggactaggacattgtctaa

SEQ ID NO: 2887488 - DNA, 25 bp, Homo sapien
aaagcccctgctaacctgtggaaga

SEQ ID NO: 2887489 - DNA, 25 bp, Homo sapien
cctgtccaccgtgtgggccgtgctg

SEQ ID NO: 2887490 - DNA, 25 bp, Homo sapien
tggtggaaccctgtaccggtctgtg

SEQ ID NO: 2887491 - DNA, 25 bp, Homo sapien
ggtctgtggccctagggtccctgct

SEQ ID NO: 2887492 - DNA, 25 bp, Homo sapien
caggtccatgttgggcactagggca

SEQ ID NO: 2887493 - DNA, 25 bp, Homo sapien
gaccaagaggccatcaccgtgtcta

SEQ ID NO: 2887494 - DNA, 25 bp, Homo sapien
cccgtgctaggagtcaccacatgct

SEQ ID NO: 2887495 - DNA, 25 bp, Homo sapien
tctatagagagcagacagaagcaga

SEQ ID NO: 2887496 - DNA, 25 bp, Homo sapien
agaatccacccggtgaccagtggtg

SEQ ID NO: 2887497 - DNA, 25 bp, Homo sapien
aaacaccgtggcacctccgagcaag

SEQ ID NO: 2887498 - DNA, 25 bp, Homo sapien
gcgggccgtgtgtaaaagcttgctt

SEQ ID NO: 2887499 - DNA, 25 bp, Homo sapien
gccctgaggtggtcgtgtccctgcc

SEQ ID NO: 2887500 - DNA, 25 bp, Homo sapien
cctgaggtggtcgtgtccctgccct

SEQ ID NO: 2887501 - DNA, 25 bp, Homo sapien
caatgaagactgtgctcgctgggtg

SEQ ID NO: 2887502 - DNA, 25 bp, Homo sapien
gaagaaagcctaaagactctcggcc

SEQ ID NO: 2887503 - DNA, 25 bp, Homo sapien
tctcggcctagggacgtccgtgtgt

SEQ ID NO: 2887504 - DNA, 25 bp, Homo sapien
tccgtcacgtcgtcaaagtgtgcct

SEQ ID NO: 2887505 - DNA, 25 bp, Homo sapien
tgggcgtcccgaggtcacatgttct

SEQ ID NO: 2887506 - DNA, 25 bp, Homo sapien
cacataggctcctggcgtggacaag

SEQ ID NO: 2887507 - DNA, 25 bp, Homo sapien
tcattgctgcaaacctcggcaggtg

SEQ ID NO: 2887508 - DNA, 25 bp, Homo sapien
taaggtccttcccacttcgcaggtg

SEQ ID NO: 2887509 - DNA, 25 bp, Homo sapien
gagacgcacgctccctgtgccttgt

SEQ ID NO: 2887510 - DNA, 25 bp, Homo sapien
aataaaattgccgggtgcttcgcct

SEQ ID NO: 2887511 - DNA, 25 bp, Homo sapien
ggtgcttcgcctggagacgcacgct

SEQ ID NO: 2887512 - DNA, 25 bp, Homo sapien
aaataccacaaatactaaccatttg

SEQ ID NO: 2887513 - DNA, 25 bp, Homo sapien
tgaagtcgttactacgggtgccagc

SEQ ID NO: 2887514 - DNA, 25 bp, Homo sapien
accttgacctcgtgttcaggcagca

SEQ ID NO: 2887515 - DNA, 25 bp, Homo sapien
tgctgtgaggaccatagcacacctg

SEQ ID NO: 2887516 - DNA, 25 bp, Homo sapien
tttccaggcggtagaaaagttgtca

SEQ ID NO: 2887517 - DNA, 25 bp, Homo sapien
aggcggccgagtacctggagcgcag

SEQ ID NO: 2887518 - DNA, 25 bp, Homo sapien
tggaggcggccgagtacctggagcg

SEQ ID NO: 2887519 - DNA, 25 bp, Homo sapien
cgagtacctggagcgcagggatcga

SEQ ID NO: 2887520 - DNA, 25 bp, Homo sapien
gccgagtacctggagcgcagggatc

SEQ ID NO: 2887521 - DNA, 25 bp, Homo sapien
cgtccactgggcgatctgaggagcc

SEQ ID NO: 2887522 - DNA, 25 bp, Homo sapien
ggagcgccctgcttcgctctcgtag

SEQ ID NO: 2887523 - DNA, 25 bp, Homo sapien
tcttaggatcagagcgtctgcgtcc

SEQ ID NO: 2887524 - DNA, 25 bp, Homo sapien
agccactgctttcgtcgcgctcaga

SEQ ID NO: 2887525 - DNA, 25 bp, Homo sapien
tcactagggagacccgccagctggg

SEQ ID NO: 2887526 - DNA, 25 bp, Homo sapien
ggatttgatgaagggttcactcccg

SEQ ID NO: 2887527 - DNA, 25 bp, Homo sapien
tggggggtgccgaggccagtctggg

SEQ ID NO: 2887528 - DNA, 25 bp, Homo sapien
ggtcactagggagacccgccagctg

SEQ ID NO: 2887529 - DNA, 25 bp, Homo sapien
gatgcacacgaagctttcacaggag

SEQ ID NO: 2887530 - DNA, 25 bp, Homo sapien
cagggagatgcacacgaagctttca

SEQ ID NO: 2887531 - DNA, 25 bp, Homo sapien
tcctgatctgcaagccgggcatgca

SEQ ID NO: 2887532 - DNA, 25 bp, Homo sapien
tgtcccactgagtacttctggaggg

SEQ ID NO: 2887533 - DNA, 25 bp, Homo sapien
tggcctctgcattcctatagccctg

SEQ ID NO: 2887534 - DNA, 25 bp, Homo sapien
ggttgtctcaatgtccatgcagggc

SEQ ID NO: 2887535 - DNA, 25 bp, Homo sapien
ctcatagcagtgtccgagttcccca

SEQ ID NO: 2887536 - DNA, 25 bp, Homo sapien
tagccctgagccgtgtgtggcagca

SEQ ID NO: 2887537 - DNA, 25 bp, Homo sapien
ggtgcacttgtactaggccaggtgt

SEQ ID NO: 2887538 - DNA, 25 bp, Homo sapien
gcactatgcccagcaggtgcacttg

SEQ ID NO: 2887539 - DNA, 25 bp, Homo sapien
tccgctttagctgtcggcagcaact

SEQ ID NO: 2887540 - DNA, 25 bp, Homo sapien
ggcagcaactcacccagtggccaaa

SEQ ID NO: 2887541 - DNA, 25 bp, Homo sapien
atggcctaaattgaggctaaaaatc

SEQ ID NO: 2887542 - DNA, 25 bp, Homo sapien
gtgagggtgagtccttaaatggcct

SEQ ID NO: 2887543 - DNA, 25 bp, Homo sapien
taaaaatctcttagactggggtagc

SEQ ID NO: 2887544 - DNA, 25 bp, Homo sapien
atgcaggtgcctccccatagacaca

SEQ ID NO: 2887545 - DNA, 25 bp, Homo sapien
gctcagccctcagtcatccatcgcc

SEQ ID NO: 2887546 - DNA, 25 bp, Homo sapien
gcagtggtgcccacactaccaggca

SEQ ID NO: 2887547 - DNA, 25 bp, Homo sapien
gccctcagtcatccatcgcctcctg

SEQ ID NO: 2887548 - DNA, 25 bp, Homo sapien
ggccgatgcctccagtacctccctc

SEQ ID NO: 2887549 - DNA, 25 bp, Homo sapien
ggcactggtgcctgccggcactgac

SEQ ID NO: 2887550 - DNA, 25 bp, Homo sapien
tgagacccgtgggtgtagagaccct

SEQ ID NO: 2887551 - DNA, 25 bp, Homo sapien
gtgcctgccggcactgacccaagat

SEQ ID NO: 2887552 - DNA, 25 bp, Homo sapien
cctgccaactgcaggtgggaccagt

SEQ ID NO: 2887553 - DNA, 25 bp, Homo sapien
gctttcattggtgcccattggacag

SEQ ID NO: 2887554 - DNA, 25 bp, Homo sapien
ctgcgggggacctgccctacagaag

SEQ ID NO: 2887555 - DNA, 25 bp, Homo sapien
gcaggagcttgtgcccatggaaagc

SEQ ID NO: 2887556 - DNA, 25 bp, Homo sapien
cctcctagctttcattggtgcccat

SEQ ID NO: 2887557 - DNA, 25 bp, Homo sapien
tgagatgcaccctgggggtcccaga

SEQ ID NO: 2887558 - DNA, 25 bp, Homo sapien
gaatgagatgcaccctgggggtccc

SEQ ID NO: 2887559 - DNA, 25 bp, Homo sapien
ggaatgagatgcaccctgggggtcc

SEQ ID NO: 2887560 - DNA, 25 bp, Homo sapien
caggaatgagatgcaccctgggggt

SEQ ID NO: 2887561 - DNA, 25 bp, Homo sapien
tccatatgtcccaagaggcagcact

SEQ ID NO: 2887562 - DNA, 25 bp, Homo sapien
gagactctgctactgaccggctgag

SEQ ID NO: 2887563 - DNA, 25 bp, Homo sapien
cacccaagaggcaagtactgtcacc

SEQ ID NO: 2887564 - DNA, 25 bp, Homo sapien
cagataccccgagaagtcatgtgtg

SEQ ID NO: 2887565 - DNA, 25 bp, Homo sapien
ctcgggtaccctgccctttggagat

SEQ ID NO: 2887566 - DNA, 25 bp, Homo sapien
tctggcaacggagaaagtgttttgg

SEQ ID NO: 2887567 - DNA, 25 bp, Homo sapien
caagaagggtcttcccctcagaggt

SEQ ID NO: 2887568 - DNA, 25 bp, Homo sapien
gggactctgagatggcctgcctgcc

SEQ ID NO: 2887569 - DNA, 25 bp, Homo sapien
gactgccgggccatccccatatggg

SEQ ID NO: 2887570 - DNA, 25 bp, Homo sapien
tggtcctggggactgccgggccatc

SEQ ID NO: 2887571 - DNA, 25 bp, Homo sapien
tggcatggtcctggggactgccggg

SEQ ID NO: 2887572 - DNA, 25 bp, Homo sapien
gggactgccgggccatccccatatg

SEQ ID NO: 2887573 - DNA, 25 bp, Homo sapien
caggtgtggtcgtgtcctgctctgc

SEQ ID NO: 2887574 - DNA, 25 bp, Homo sapien
gggccatcagtgagcagcgttgcat

SEQ ID NO: 2887575 - DNA, 25 bp, Homo sapien
tggtgagccgtggacgtcagcagct

SEQ ID NO: 2887576 - DNA, 25 bp, Homo sapien
ccccggcttttggagacatctcctg

SEQ ID NO: 2887577 - DNA, 25 bp, Homo sapien
aggtcctgcagggaacaccgagacc

SEQ ID NO: 2887578 - DNA, 25 bp, Homo sapien
taaagcaggtgtcccgaggtcctgc

SEQ ID NO: 2887579 - DNA, 25 bp, Homo sapien
ctgctgcagccattggtccctaaag

SEQ ID NO: 2887580 - DNA, 25 bp, Homo sapien
ctgcagggaacaccgagaccttcca

SEQ ID NO: 2887581 - DNA, 25 bp, Homo sapien
tcaaccaagggccatgcggtgctgt

SEQ ID NO: 2887582 - DNA, 25 bp, Homo sapien
ggcccggccctagtgtggagctctt

SEQ ID NO: 2887583 - DNA, 25 bp, Homo sapien
cagcgcagtcagggctgacagagcc

SEQ ID NO: 2887584 - DNA, 25 bp, Homo sapien
cacttctgatgtgcttcgttcccac

SEQ ID NO: 2887585 - DNA, 25 bp, Homo sapien
ctggcgactcctccgtgtggcctgg

SEQ ID NO: 2887586 - DNA, 25 bp, Homo sapien
tggcgactcctccgtgtggcctggg

SEQ ID NO: 2887587 - DNA, 25 bp, Homo sapien
ggcgactcctccgtgtggcctgggg

SEQ ID NO: 2887588 - DNA, 25 bp, Homo sapien
tgtcactgtccgtcccacgggggca

SEQ ID NO: 2887589 - DNA, 25 bp, Homo sapien
acttgtccaccgtgctcagcatcct

SEQ ID NO: 2887590 - DNA, 25 bp, Homo sapien
tcgggcgcctctgtgactgtacttg

SEQ ID NO: 2887591 - DNA, 25 bp, Homo sapien
tgctccgtcgtgcagtcgggcgcct

SEQ ID NO: 2887592 - DNA, 25 bp, Homo sapien
accgtttctggcaatagctcattcc

SEQ ID NO: 2887593 - DNA, 25 bp, Homo sapien
cccaccgtttctggcaatagctcat

SEQ ID NO: 2887594 - DNA, 25 bp, Homo sapien
gacccaccgtttctggcaatagctc

SEQ ID NO: 2887595 - DNA, 25 bp, Homo sapien
tggacccaccgtttctggcaatagc

SEQ ID NO: 2887596 - DNA, 25 bp, Homo sapien
ctgtagccatgggcagcggctgcat

SEQ ID NO: 2887597 - DNA, 25 bp, Homo sapien
tgggtggcctgtcgggctgtagcca

SEQ ID NO: 2887598 - DNA, 25 bp, Homo sapien
cgggctgtagccatgggcagcggct

SEQ ID NO: 2887599 - DNA, 25 bp, Homo sapien
ggctgtagccatgggcagcggctgc

SEQ ID NO: 2887600 - DNA, 25 bp, Homo sapien
cagtggctgacgaaagccaggtaat

SEQ ID NO: 2887601 - DNA, 25 bp, Homo sapien
gacagtggctgacgaaagccaggta

SEQ ID NO: 2887602 - DNA, 25 bp, Homo sapien
gtggctgacgaaagccaggtaattt

SEQ ID NO: 2887603 - DNA, 25 bp, Homo sapien
tgaggacagtggctgacgaaagcca

SEQ ID NO: 2887604 - DNA, 25 bp, Homo sapien
tgtcctatccctactgccacactgt

SEQ ID NO: 2887605 - DNA, 25 bp, Homo sapien
cttgactgtcctatccctactgcca

SEQ ID NO: 2887606 - DNA, 25 bp, Homo sapien
cttttccatgatgtttcctcctcca

SEQ ID NO: 2887607 - DNA, 25 bp, Homo sapien
tcagggtccccttgactgtcctatc

SEQ ID NO: 2887608 - DNA, 25 bp, Homo sapien
gtccagggctcgagcaaggaccagg

SEQ ID NO: 2887609 - DNA, 25 bp, Homo sapien
gacccctctagcctgcattcctggg

SEQ ID NO: 2887610 - DNA, 25 bp, Homo sapien
ccagggggccgcaggaacttctgca

SEQ ID NO: 2887611 - DNA, 25 bp, Homo sapien
ccctcgcaggatcctgcctctgtga

SEQ ID NO: 2887612 - DNA, 25 bp, Homo sapien
tccctgcgaaccttgtgcatgggcg

SEQ ID NO: 2887613 - DNA, 25 bp, Homo sapien
caagagctccgtccactctgggtta

SEQ ID NO: 2887614 - DNA, 25 bp, Homo sapien
tggtttttatgaggttcacaggccc

SEQ ID NO: 2887615 - DNA, 25 bp, Homo sapien
taaccagatcatggatgagtgcatc

SEQ ID NO: 2887616 - DNA, 25 bp, Homo sapien
tagagcctggaaacgcagtttgcac

SEQ ID NO: 2887617 - DNA, 25 bp, Homo sapien
tcggagcatcgtgcaccacagtagt

SEQ ID NO: 2887618 - DNA, 25 bp, Homo sapien
catttctagcaatcagtgggtccta

SEQ ID NO: 2887619 - DNA, 25 bp, Homo sapien
taaggaagtaatccacactcggagc

SEQ ID NO: 2887620 - DNA, 25 bp, Homo sapien
tgaacttaggtcatctccccacagg

SEQ ID NO: 2887621 - DNA, 25 bp, Homo sapien
tcttggctggcgttagaagtcctag

SEQ ID NO: 2887622 - DNA, 25 bp, Homo sapien
tgttgatcagttctcggctgaaccc

SEQ ID NO: 2887623 - DNA, 25 bp, Homo sapien
tcaaatcattcaggtgcgtctttcc

SEQ ID NO: 2887624 - DNA, 25 bp, Homo sapien
aatatcctatctctgggctgggcta

SEQ ID NO: 2887625 - DNA, 25 bp, Homo sapien
tttaaatatcctatctctgggctgg

SEQ ID NO: 2887626 - DNA, 25 bp, Homo sapien
aatgacctctttaaatatcctatct

SEQ ID NO: 2887627 - DNA, 25 bp, Homo sapien
taaatatcctatctctgggctgggc

SEQ ID NO: 2887628 - DNA, 25 bp, Homo sapien
ttcccacgcgcaggcaattataccg

SEQ ID NO: 2887629 - DNA, 25 bp, Homo sapien
gggcaatggctttggacacgctgtt

SEQ ID NO: 2887630 - DNA, 25 bp, Homo sapien
ttgttcctcgtggtcgtgaagacac

SEQ ID NO: 2887631 - DNA, 25 bp, Homo sapien
gacacgctgttcaggatgccccttt

SEQ ID NO: 2887632 - DNA, 25 bp, Homo sapien
gagatctggcgccttggcatccagc

SEQ ID NO: 2887633 - DNA, 25 bp, Homo sapien
gagtcctagtgacacctgggctgag

SEQ ID NO: 2887634 - DNA, 25 bp, Homo sapien
ctgggctgagatctggcgccttggc

SEQ ID NO: 2887635 - DNA, 25 bp, Homo sapien
gcatccagcgatgtggtcttggcca

SEQ ID NO: 2887636 - DNA, 25 bp, Homo sapien
tggactgggcttccgtcccttgttg

SEQ ID NO: 2887637 - DNA, 25 bp, Homo sapien
gagcttagagcccagcttatgtcct

SEQ ID NO: 2887638 - DNA, 25 bp, Homo sapien
gggtggtctgtcttgggaactggag

SEQ ID NO: 2887639 - DNA, 25 bp, Homo sapien
ttagagcccagcttatgtcctgggt

SEQ ID NO: 2887640 - DNA, 25 bp, Homo sapien
ctgggtctccacggctgagtgtggg

SEQ ID NO: 2887641 - DNA, 25 bp, Homo sapien
gaagtctgcatgtgaccactgtctc

SEQ ID NO: 2887642 - DNA, 25 bp, Homo sapien
gaccactgtctcctggagatctgct

SEQ ID NO: 2887643 - DNA, 25 bp, Homo sapien
tctgtccagctgaagtctgcatgtg

SEQ ID NO: 2887644 - DNA, 25 bp, Homo sapien
cctgcatgctccagcctctgtccag

SEQ ID NO: 2887645 - DNA, 25 bp, Homo sapien
agggcttggtgccacgtgtgggccc

SEQ ID NO: 2887646 - DNA, 25 bp, Homo sapien
acgtgtgggcccgaaggccacaggg

SEQ ID NO: 2887647 - DNA, 25 bp, Homo sapien
catgtaatggggttgaggggaccac

SEQ ID NO: 2887648 - DNA, 25 bp, Homo sapien
gaccacggggatggtgatgagccca

SEQ ID NO: 2887649 - DNA, 25 bp, Homo sapien
ctgggtaaagtacttattgatgtga

SEQ ID NO: 2887650 - DNA, 25 bp, Homo sapien
gaattgaacgtaaagctgccagcct

SEQ ID NO: 2887651 - DNA, 25 bp, Homo sapien
ttcctggcagtttgctttgaagggc

SEQ ID NO: 2887652 - DNA, 25 bp, Homo sapien
ctggcagtttgctttgaagggcttg

SEQ ID NO: 2887653 - DNA, 25 bp, Homo sapien
tgggagacgtcctccccgtgtagcc

SEQ ID NO: 2887654 - DNA, 25 bp, Homo sapien
tctcagagcttgaaaacccaaagtc

SEQ ID NO: 2887655 - DNA, 25 bp, Homo sapien
tgctggccgtcttccagcatgagtg

SEQ ID NO: 2887656 - DNA, 25 bp, Homo sapien
tggtatcaggggtgactctcagagc

SEQ ID NO: 2887657 - DNA, 25 bp, Homo sapien
ggcaggattgggtccagggctacct

SEQ ID NO: 2887658 - DNA, 25 bp, Homo sapien
agggctacctctgtcctgccggtgt

SEQ ID NO: 2887659 - DNA, 25 bp, Homo sapien
cctgggccggcaggattgggtccag

SEQ ID NO: 2887660 - DNA, 25 bp, Homo sapien
gggctacctctgtcctgccggtgtc

SEQ ID NO: 2887661 - DNA, 25 bp, Homo sapien
gctgacctgaggctcgtgcatggcc

SEQ ID NO: 2887662 - DNA, 25 bp, Homo sapien
cctgaggctcgtgcatggccttgca

SEQ ID NO: 2887663 - DNA, 25 bp, Homo sapien
gacctgaggctcgtgcatggccttg

SEQ ID NO: 2887664 - DNA, 25 bp, Homo sapien
ggggtctgtgcctctaggctgctcc

SEQ ID NO: 2887665 - DNA, 25 bp, Homo sapien
acccgaatcgggtgagtcaggtgtt

SEQ ID NO: 2887666 - DNA, 25 bp, Homo sapien
ggtgaaccttgaggccaaagaccca

SEQ ID NO: 2887667 - DNA, 25 bp, Homo sapien
tgatggtgacgtccaggcagagacc

SEQ ID NO: 2887668 - DNA, 25 bp, Homo sapien
accttgaggccaaagacccagcact

SEQ ID NO: 2887669 - DNA, 25 bp, Homo sapien
ttttgctgttcagagtgaggagctc

SEQ ID NO: 2887670 - DNA, 25 bp, Homo sapien
aggagctcttggagacccatgggtt

SEQ ID NO: 2887671 - DNA, 25 bp, Homo sapien
gagacccatgggttggatgaagccc

SEQ ID NO: 2887672 - DNA, 25 bp, Homo sapien
gagagagatctctgcatgggttctg

SEQ ID NO: 2887673 - DNA, 25 bp, Homo sapien
tttttctagattggaagggctgcac

SEQ ID NO: 2887674 - DNA, 25 bp, Homo sapien
tttccgtgtacttgcactctggctg

SEQ ID NO: 2887675 - DNA, 25 bp, Homo sapien
tcagcttctaacaacactagttgaa

SEQ ID NO: 2887676 - DNA, 25 bp, Homo sapien
ctcagagcctctggcaccagcttcc

SEQ ID NO: 2887677 - DNA, 25 bp, Homo sapien
agaggaagagccctctgctcagagc

SEQ ID NO: 2887678 - DNA, 25 bp, Homo sapien
ggcaccagcttccacccttgtggga

SEQ ID NO: 2887679 - DNA, 25 bp, Homo sapien
agccctctgctcagagcctctggca

SEQ ID NO: 2887680 - DNA, 25 bp, Homo sapien
gaaacatccaggtgcagatgtaccc

SEQ ID NO: 2887681 - DNA, 25 bp, Homo sapien
ccagaaacatccaggtgcagatgta

SEQ ID NO: 2887682 - DNA, 25 bp, Homo sapien
aacatccaggtgcagatgtacccca

SEQ ID NO: 2887683 - DNA, 25 bp, Homo sapien
acatccaggtgcagatgtaccccat

SEQ ID NO: 2887684 - DNA, 25 bp, Homo sapien
ctcagcgtttgtcgaagtacccggg

SEQ ID NO: 2887685 - DNA, 25 bp, Homo sapien
tgcagtctcggttcctcagcgtttg

SEQ ID NO: 2887686 - DNA, 25 bp, Homo sapien
tgtagggtacagaagctttcacact

SEQ ID NO: 2887687 - DNA, 25 bp, Homo sapien
tcctcttcgcagataaagggaattc

SEQ ID NO: 2887688 - DNA, 25 bp, Homo sapien
aaactgcatttgtcacggtcctggt

SEQ ID NO: 2887689 - DNA, 25 bp, Homo sapien
tggcgggtggtcacttccctctgac

SEQ ID NO: 2887690 - DNA, 25 bp, Homo sapien
gttcactcccttggcgggtggtcac

SEQ ID NO: 2887691 - DNA, 25 bp, Homo sapien
cccaaactgcatttgtcacggtcct

SEQ ID NO: 2887692 - DNA, 25 bp, Homo sapien
cttccagtctggtcccccttctcgc

SEQ ID NO: 2887693 - DNA, 25 bp, Homo sapien
gccttccagtctggtcccccttctc

SEQ ID NO: 2887694 - DNA, 25 bp, Homo sapien
agtgacttggccttccagtctggtc

SEQ ID NO: 2887695 - DNA, 25 bp, Homo sapien
tgacttggccttccagtctggtccc

SEQ ID NO: 2887696 - DNA, 25 bp, Homo sapien
ggtggcagcagtgcgggtgtattcc

SEQ ID NO: 2887697 - DNA, 25 bp, Homo sapien
agcagtgcgggtgtattcccagaga

SEQ ID NO: 2887698 - DNA, 25 bp, Homo sapien
cgtaagtagccaccatacaggccag

SEQ ID NO: 2887699 - DNA, 25 bp, Homo sapien
aagtagccaccatacaggccagggt

SEQ ID NO: 2887700 - DNA, 25 bp, Homo sapien
agacaagactggactaggaggctgc

SEQ ID NO: 2887701 - DNA, 25 bp, Homo sapien
gctccgggaggcgagctgagggcag

SEQ ID NO: 2887702 - DNA, 25 bp, Homo sapien
cttggctggcacctcaggcgggcgg

SEQ ID NO: 2887703 - DNA, 25 bp, Homo sapien
tgagggcagcgagcttggctggcac

SEQ ID NO: 2887704 - DNA, 25 bp, Homo sapien
ctcaggggtcctgctgtccgacagt

SEQ ID NO: 2887705 - DNA, 25 bp, Homo sapien
aggcatcgccttgctgtgaagccca

SEQ ID NO: 2887706 - DNA, 25 bp, Homo sapien
gctgtccgacagtctttggccaggc

SEQ ID NO: 2887707 - DNA, 25 bp, Homo sapien
catcgccttgctgtgaagcccacat

SEQ ID NO: 2887708 - DNA, 25 bp, Homo sapien
gctggtgtgagatccaggtaggctc

SEQ ID NO: 2887709 - DNA, 25 bp, Homo sapien
tctgggtgctccaaatccacggaag

SEQ ID NO: 2887710 - DNA, 25 bp, Homo sapien
gcctgactggccatgggtgtgagtg

SEQ ID NO: 2887711 - DNA, 25 bp, Homo sapien
taggctgtagccattaggattgtag

SEQ ID NO: 2887712 - DNA, 25 bp, Homo sapien
ccgcttgtgccctggatctcgaccc

SEQ ID NO: 2887713 - DNA, 25 bp, Homo sapien
actggatctcataccccccttgtgc

SEQ ID NO: 2887714 - DNA, 25 bp, Homo sapien
cgcttgtgccctggatctcgacccc

SEQ ID NO: 2887715 - DNA, 25 bp, Homo sapien
tgtgcactggatctcatacccccct

SEQ ID NO: 2887716 - DNA, 25 bp, Homo sapien
gcttgtgccctggatctcagctcca

SEQ ID NO: 2887717 - DNA, 25 bp, Homo sapien
ttgtgccctggatctcagctccaca

SEQ ID NO: 2887718 - DNA, 25 bp, Homo sapien
ccgcttgtgccctggatctcagctc

SEQ ID NO: 2887719 - DNA, 25 bp, Homo sapien
tccacacttgtgccctggatcttgc

SEQ ID NO: 2887720 - DNA, 25 bp, Homo sapien
atgcaaccccatgtggcccacgtga

SEQ ID NO: 2887721 - DNA, 25 bp, Homo sapien
acgtgggtgacagggcatgcaaccc

SEQ ID NO: 2887722 - DNA, 25 bp, Homo sapien
tgcacttgggatccgagtatcgcca

SEQ ID NO: 2887723 - DNA, 25 bp, Homo sapien
gctcacgtccggcagcgtttgggtc

SEQ ID NO: 2887724 - DNA, 25 bp, Homo sapien
tgtgcgtgctgcgtggtgccggcac

SEQ ID NO: 2887725 - DNA, 25 bp, Homo sapien
gtccccgccctgtgcgtgctgcgtg

SEQ ID NO: 2887726 - DNA, 25 bp, Homo sapien
gtgctgcgtggtgccggcacttcct

SEQ ID NO: 2887727 - DNA, 25 bp, Homo sapien
gccctgtgcgtgctgcgtggtgccg

SEQ ID NO: 2887728 - DNA, 25 bp, Homo sapien
tgtggctccccgaggcagattgcag

SEQ ID NO: 2887729 - DNA, 25 bp, Homo sapien
gtggctccccgaggcagattgcagg

SEQ ID NO: 2887730 - DNA, 25 bp, Homo sapien
ggctccccgaggcagattgcaggct

SEQ ID NO: 2887731 - DNA, 25 bp, Homo sapien
gctccccgaggcagattgcaggctc

SEQ ID NO: 2887732 - DNA, 25 bp, Homo sapien
tgagccccgggggtcatagaggttc

SEQ ID NO: 2887733 - DNA, 25 bp, Homo sapien
ctgagccccgggggtcatagaggtt

SEQ ID NO: 2887734 - DNA, 25 bp, Homo sapien
ccagggagaggattttaaaagctgc

SEQ ID NO: 2887735 - DNA, 25 bp, Homo sapien
acagccggcaggaccgggatttctt

SEQ ID NO: 2887736 - DNA, 25 bp, Homo sapien
cctccagcgccagggagaggatttt

SEQ ID NO: 2887737 - DNA, 25 bp, Homo sapien
cagccggcaggaccgggatttcttc

SEQ ID NO: 2887738 - DNA, 25 bp, Homo sapien
ccaggttgaaacgagctcccagctg

SEQ ID NO: 2887739 - DNA, 25 bp, Homo sapien
ctgcagcgctgtctgtgcggtgcct

SEQ ID NO: 2887740 - DNA, 25 bp, Homo sapien
tgtctccaggttgaaacgagctccc

SEQ ID NO: 2887741 - DNA, 25 bp, Homo sapien
ctgtctgtgcggtgcctggtgccat

SEQ ID NO: 2887742 - DNA, 25 bp, Homo sapien
tgatccaagccctggagcagctgac

SEQ ID NO: 2887743 - DNA, 25 bp, Homo sapien
gtggtaaggcctgcctcaaagctca

SEQ ID NO: 2887744 - DNA, 25 bp, Homo sapien
actgtgggtggtaaggcctgcctca

SEQ ID NO: 2887745 - DNA, 25 bp, Homo sapien
gggtggtaaggcctgcctcaaagct

SEQ ID NO: 2887746 - DNA, 25 bp, Homo sapien
aggactgtgggtggtaaggcctgcc

SEQ ID NO: 2887747 - DNA, 25 bp, Homo sapien
tcccacagcgtctgaaatccaagga

SEQ ID NO: 2887748 - DNA, 25 bp, Homo sapien
catcagtcgaccatcagcacagtcg

SEQ ID NO: 2887749 - DNA, 25 bp, Homo sapien
caaggaagtcccattggtcttctca

SEQ ID NO: 2887750 - DNA, 25 bp, Homo sapien
tttggtccaattggtgtgctccaga

SEQ ID NO: 2887751 - DNA, 25 bp, Homo sapien
tgaagcattgctgtccagtgagggc

SEQ ID NO: 2887752 - DNA, 25 bp, Homo sapien
gtccaggactgggtgaagcattgct

SEQ ID NO: 2887753 - DNA, 25 bp, Homo sapien
ggcaggttggagcaagggtcagaca

SEQ ID NO: 2887754 - DNA, 25 bp, Homo sapien
gagatgtgttggtccaggactgggt

SEQ ID NO: 2887755 - DNA, 25 bp, Homo sapien
aaaggctgggtgcacttggagcaca

SEQ ID NO: 2887756 - DNA, 25 bp, Homo sapien
tgtgggtcgcggagcctgaaaggct

SEQ ID NO: 2887757 - DNA, 25 bp, Homo sapien
tccaaggctgtcaggccatgtgggc

SEQ ID NO: 2887758 - DNA, 25 bp, Homo sapien
tgggctgctcagtgggaatctccaa

SEQ ID NO: 2887759 - DNA, 25 bp, Homo sapien
catttgcagggcaattaagagcctg

SEQ ID NO: 2887760 - DNA, 25 bp, Homo sapien
tgtgccagcggcatttgcagggcaa

SEQ ID NO: 2887761 - DNA, 25 bp, Homo sapien
cagggcaattaagagcctgggctgc

SEQ ID NO: 2887762 - DNA, 25 bp, Homo sapien
cttgccttgtgccagcggcatttgc

SEQ ID NO: 2887763 - DNA, 25 bp, Homo sapien
gggttccagcccacttggtcatggg

SEQ ID NO: 2887764 - DNA, 25 bp, Homo sapien
cccattggtggccagcactctgtac

SEQ ID NO: 2887765 - DNA, 25 bp, Homo sapien
tctgtaccttggccacctggttgag

SEQ ID NO: 2887766 - DNA, 25 bp, Homo sapien
ggcccttgaagagagctgcccattg

SEQ ID NO: 2887767 - DNA, 25 bp, Homo sapien
acctgccaccgcagcagtttcctgg

SEQ ID NO: 2887768 - DNA, 25 bp, Homo sapien
ttggcagtcgtcgtccgtcagctcc

SEQ ID NO: 2887769 - DNA, 25 bp, Homo sapien
gccaccgcagcagtttcctgggcca

SEQ ID NO: 2887770 - DNA, 25 bp, Homo sapien
aaggtgttggcagtcgtcgtccgtc

SEQ ID NO: 2887771 - DNA, 25 bp, Homo sapien
ctcatcacacatggttggggcaaga

SEQ ID NO: 2887772 - DNA, 25 bp, Homo sapien
acctcatcacacatggttggggcaa

SEQ ID NO: 2887773 - DNA, 25 bp, Homo sapien
cctcatcacacatggttggggcaag

SEQ ID NO: 2887774 - DNA, 25 bp, Homo sapien
gacctcatcacacatggttggggca

SEQ ID NO: 2887775 - DNA, 25 bp, Homo sapien
cctcagctttgcccgggaaggtgac

SEQ ID NO: 2887776 - DNA, 25 bp, Homo sapien
gaaacagcctctgagcgtccctcag

SEQ ID NO: 2887777 - DNA, 25 bp, Homo sapien
tctcgaaacagcctctgagcgtccc

SEQ ID NO: 2887778 - DNA, 25 bp, Homo sapien
ggaaggtgacggtttcttcatcagg

SEQ ID NO: 2887779 - DNA, 25 bp, Homo sapien
gtgttgggcctgtagcagcaggaag

SEQ ID NO: 2887780 - DNA, 25 bp, Homo sapien
ctgggatgtagccgcaggaccctcc

SEQ ID NO: 2887781 - DNA, 25 bp, Homo sapien
ctgccagggtgttgggcctgtagca

SEQ ID NO: 2887782 - DNA, 25 bp, Homo sapien
cagcaggaagaccggatgtgactgg

SEQ ID NO: 2887783 - DNA, 25 bp, Homo sapien
gggtgtaaatttgtcgagttgctcg

SEQ ID NO: 2887784 - DNA, 25 bp, Homo sapien
tgtccctcttgggtgtaaatttgtc

SEQ ID NO: 2887785 - DNA, 25 bp, Homo sapien
tcgagttgctcgatcacagtttcaa

SEQ ID NO: 2887786 - DNA, 25 bp, Homo sapien
gctcgatcacagtttcaatgcattt

SEQ ID NO: 2887787 - DNA, 25 bp, Homo sapien
tggaggacccatttcccgagataag

SEQ ID NO: 2887788 - DNA, 25 bp, Homo sapien
gatgtgagatcagcacctcgtggtg

SEQ ID NO: 2887789 - DNA, 25 bp, Homo sapien
caagtcccacattcctagaggcagg

SEQ ID NO: 2887790 - DNA, 25 bp, Homo sapien
tgtggatgtcatatcccgggtcccg

SEQ ID NO: 2887791 - DNA, 25 bp, Homo sapien
cataggccaagttcatccagagcac

SEQ ID NO: 2887792 - DNA, 25 bp, Homo sapien
gcagcgcacataggccaagttcatc

SEQ ID NO: 2887793 - DNA, 25 bp, Homo sapien
ctgagcaggtagtgagagcgggagc

SEQ ID NO: 2887794 - DNA, 25 bp, Homo sapien
aaaagcagcgcacataggccaagtt

SEQ ID NO: 2887795 - DNA, 25 bp, Homo sapien
tacccaggaagctgatcggaaggcc

SEQ ID NO: 2887796 - DNA, 25 bp, Homo sapien
tttttagggtgagagacgtagcagc

SEQ ID NO: 2887797 - DNA, 25 bp, Homo sapien
tggagcagagtgcacacatggcaga

SEQ ID NO: 2887798 - DNA, 25 bp, Homo sapien
acctgggcccgagctgtttgcatca

SEQ ID NO: 2887799 - DNA, 25 bp, Homo sapien
ggcaagtggcactcttgagccttgg

SEQ ID NO: 2887800 - DNA, 25 bp, Homo sapien
tggcaagtggcactcttgagccttg

SEQ ID NO: 2887801 - DNA, 25 bp, Homo sapien
gcaagtggcactcttgagccttggc

SEQ ID NO: 2887802 - DNA, 25 bp, Homo sapien
ctggcaagtggcactcttgagcctt

SEQ ID NO: 2887803 - DNA, 25 bp, Homo sapien
tttctggcatttcaccgcagtctgc

SEQ ID NO: 2887804 - DNA, 25 bp, Homo sapien
ttctggcatttcaccgcagtccgct

SEQ ID NO: 2887805 - DNA, 25 bp, Homo sapien
ttttctggcatttcaccgcagtccg

SEQ ID NO: 2887806 - DNA, 25 bp, Homo sapien
tttctggcatttcaccgcagtccgc

SEQ ID NO: 2887807 - DNA, 25 bp, Homo sapien
gctgtccggagtctgccatttggtt

SEQ ID NO: 2887808 - DNA, 25 bp, Homo sapien
tctgctgtccggagtctgccatttg

SEQ ID NO: 2887809 - DNA, 25 bp, Homo sapien
tgtccggagtctgccatttggttta

SEQ ID NO: 2887810 - DNA, 25 bp, Homo sapien
cgcagtctgctgtccggagtctgcc

SEQ ID NO: 2887811 - DNA, 25 bp, Homo sapien
cagtttcctaacagacaccggtccg

SEQ ID NO: 2887812 - DNA, 25 bp, Homo sapien
caccggtccgaacagatggttcaaa

SEQ ID NO: 2887813 - DNA, 25 bp, Homo sapien
gataataatttttgcccgcacatga

SEQ ID NO: 2887814 - DNA, 25 bp, Homo sapien
catgagctgtactgcaacctaggtg

SEQ ID NO: 2887815 - DNA, 25 bp, Homo sapien
aggacacgtggtgtccagcctattc

SEQ ID NO: 2887816 - DNA, 25 bp, Homo sapien
cggctgccaggacacgtggtgtcca

SEQ ID NO: 2887817 - DNA, 25 bp, Homo sapien
ctgccaggacacgtggtgtccagcc

SEQ ID NO: 2887818 - DNA, 25 bp, Homo sapien
gcggctgccaggacacgtggtgtcc

SEQ ID NO: 2887819 - DNA, 25 bp, Homo sapien
agagagacagccggtggggggccct

SEQ ID NO: 2887820 - DNA, 25 bp, Homo sapien
agagacagccggtggggggccctgg

SEQ ID NO: 2887821 - DNA, 25 bp, Homo sapien
gaagagagacagccggtggggggcc

SEQ ID NO: 2887822 - DNA, 25 bp, Homo sapien
tggaagagagacagccggtgggggg

SEQ ID NO: 2887823 - DNA, 25 bp, Homo sapien
ggtactcgaggcacccagacagaac

SEQ ID NO: 2887824 - DNA, 25 bp, Homo sapien
agagtcggccatcctccacgtagaa

SEQ ID NO: 2887825 - DNA, 25 bp, Homo sapien
tggtcaacccgcaggcagagtcggc

SEQ ID NO: 2887826 - DNA, 25 bp, Homo sapien
cctcgaagcggctgtggtcaacccg

SEQ ID NO: 2887827 - DNA, 25 bp, Homo sapien
cttatccacgggctgggacttgatg

SEQ ID NO: 2887828 - DNA, 25 bp, Homo sapien
ttgcacatcttatccacgggctggg

SEQ ID NO: 2887829 - DNA, 25 bp, Homo sapien
cacgggctgggacttgatgatgtta

SEQ ID NO: 2887830 - DNA, 25 bp, Homo sapien
cgggctgggacttgatgatgttaca

SEQ ID NO: 2887831 - DNA, 25 bp, Homo sapien
ggcctggtgggcaggtaggggtggc

SEQ ID NO: 2887832 - DNA, 25 bp, Homo sapien
cctggtgggcaggtaggggtggctc

SEQ ID NO: 2887833 - DNA, 25 bp, Homo sapien
tggtgggcaggtaggggtggctcac

SEQ ID NO: 2887834 - DNA, 25 bp, Homo sapien
ccgtgggcctcgtggcctggtgggc

SEQ ID NO: 2887835 - DNA, 25 bp, Homo sapien
tggctcgtagatgaggctccactca

SEQ ID NO: 2887836 - DNA, 25 bp, Homo sapien
tctccttcacgtgggctggctcgta

SEQ ID NO: 2887837 - DNA, 25 bp, Homo sapien
ccttgatccatgagcacaggtgcag

SEQ ID NO: 2887838 - DNA, 25 bp, Homo sapien
cttgatccatgagcacaggtgcagg

SEQ ID NO: 2887839 - DNA, 25 bp, Homo sapien
tctttaaaggagaggattgactggc

SEQ ID NO: 2887840 - DNA, 25 bp, Homo sapien
ggcagtcaggttgaattccttgggc

SEQ ID NO: 2887841 - DNA, 25 bp, Homo sapien
gagaggattgactggcagacacgcc

SEQ ID NO: 2887842 - DNA, 25 bp, Homo sapien
gcttggccacgaccgggactggttc

SEQ ID NO: 2887843 - DNA, 25 bp, Homo sapien
gccagcatgggatggccagggtggg

SEQ ID NO: 2887844 - DNA, 25 bp, Homo sapien
catcggccagcatgggatggccagg

SEQ ID NO: 2887845 - DNA, 25 bp, Homo sapien
gggatggccagggtgggtaggagca

SEQ ID NO: 2887846 - DNA, 25 bp, Homo sapien
catgggatggccagggtgggtagga

SEQ ID NO: 2887847 - DNA, 25 bp, Homo sapien
ggagggggcctagaaatgccagggc

SEQ ID NO: 2887848 - DNA, 25 bp, Homo sapien
gagtgggagggggcctagaaatgcc

SEQ ID NO: 2887849 - DNA, 25 bp, Homo sapien
aaatgccagggctgacagcttggtg

SEQ ID NO: 2887850 - DNA, 25 bp, Homo sapien
gaaatgccagggctgacagcttggt

SEQ ID NO: 2887851 - DNA, 25 bp, Homo sapien
gaagtggtgggaggaagagcctatg

SEQ ID NO: 2887852 - DNA, 25 bp, Homo sapien
ctgaagtggtgggaggaagagccta

SEQ ID NO: 2887853 - DNA, 25 bp, Homo sapien
gggaggaagagcctatggtcagcag

SEQ ID NO: 2887854 - DNA, 25 bp, Homo sapien
tggtgggaggaagagcctatggtca

SEQ ID NO: 2887855 - DNA, 25 bp, Homo sapien
cggcggttgtacctcttgactgtct

SEQ ID NO: 2887856 - DNA, 25 bp, Homo sapien
tccttgggtggctggtaggtgctct

SEQ ID NO: 2887857 - DNA, 25 bp, Homo sapien
tttcggcggttgtacctcttgactg

SEQ ID NO: 2887858 - DNA, 25 bp, Homo sapien
gcctttcggcggttgtacctcttga

SEQ ID NO: 2887859 - DNA, 25 bp, Homo sapien
cacagttcctcgatgtttgccctca

SEQ ID NO: 2887860 - DNA, 25 bp, Homo sapien
ggcatggcgcagcacagttcctcga

SEQ ID NO: 2887861 - DNA, 25 bp, Homo sapien
tgggcatggcgcagcacagttcctc

SEQ ID NO: 2887862 - DNA, 25 bp, Homo sapien
cagttcctcgatgtttgccctcagc

SEQ ID NO: 2887863 - DNA, 25 bp, Homo sapien
cacctcgatgatgggtcttgagaga

SEQ ID NO: 2887864 - DNA, 25 bp, Homo sapien
gaaatgcttgtcacggaacatctgg

SEQ ID NO: 2887865 - DNA, 25 bp, Homo sapien
tacataagtggtcactgcgatggcg

SEQ ID NO: 2887866 - DNA, 25 bp, Homo sapien
tctgatggcttgagaagatggcacc

SEQ ID NO: 2887867 - DNA, 25 bp, Homo sapien
tcggattcggggtgggaactgaagc

SEQ ID NO: 2887868 - DNA, 25 bp, Homo sapien
aggtcagcttcggagtctttcggat

SEQ ID NO: 2887869 - DNA, 25 bp, Homo sapien
ggtcagcttcggagtctttcggatt

SEQ ID NO: 2887870 - DNA, 25 bp, Homo sapien
ccacctgccgctggtacaaggcccc

SEQ ID NO: 2887871 - DNA, 25 bp, Homo sapien
ggctgtggtgttcagcttgaccagg

SEQ ID NO: 2887872 - DNA, 25 bp, Homo sapien
gccgctggtacaaggccccttctcg

SEQ ID NO: 2887873 - DNA, 25 bp, Homo sapien
gctgtggtgttcagcttgaccagga

SEQ ID NO: 2887874 - DNA, 25 bp, Homo sapien
catggctaagcttcccttgcaaccg

SEQ ID NO: 2887875 - DNA, 25 bp, Homo sapien
cttcttctgccactcgaagaactca

SEQ ID NO: 2887876 - DNA, 25 bp, Homo sapien
ggcactcgcttgcagccagctgctc

SEQ ID NO: 2887877 - DNA, 25 bp, Homo sapien
tgccgggctaggacggcctcctcat

SEQ ID NO: 2887878 - DNA, 25 bp, Homo sapien
gagccgtctctctgcacgctgcagc

SEQ ID NO: 2887879 - DNA, 25 bp, Homo sapien
cgagcttcgtctgggccgccttggc

SEQ ID NO: 2887880 - DNA, 25 bp, Homo sapien
tgctgtcggcccttcgcgagcttcg

SEQ ID NO: 2887881 - DNA, 25 bp, Homo sapien
ccttcctggacctgtcctcccggag

SEQ ID NO: 2887882 - DNA, 25 bp, Homo sapien
atgagttcacaacggcgccgctgct

SEQ ID NO: 2887883 - DNA, 25 bp, Homo sapien
tgggtcaggtccacgagcttgccct

SEQ ID NO: 2887884 - DNA, 25 bp, Homo sapien
ctgtgtctcgagtgcgcgcagctgg

SEQ ID NO: 2887885 - DNA, 25 bp, Homo sapien
tgcccttgcgcgtgggctgtgtctc

SEQ ID NO: 2887886 - DNA, 25 bp, Homo sapien
ccttgcgccgctgattctctttgag

SEQ ID NO: 2887887 - DNA, 25 bp, Homo sapien
cttggtgtgcttgccctgaatgatt

SEQ ID NO: 2887888 - DNA, 25 bp, Homo sapien
gaatgatttgatcccgcttttcttc

SEQ ID NO: 2887889 - DNA, 25 bp, Homo sapien
cagctccactatggacatctctcct

SEQ ID NO: 2887890 - DNA, 25 bp, Homo sapien
ctgcacggcacagcgagatctgctc

SEQ ID NO: 2887891 - DNA, 25 bp, Homo sapien
gctgcacggcacagcgagatctgct

SEQ ID NO: 2887892 - DNA, 25 bp, Homo sapien
ggctgccaggggccagccacaaggg

SEQ ID NO: 2887893 - DNA, 25 bp, Homo sapien
gctgccaggggccagccacaagggg

SEQ ID NO: 2887894 - DNA, 25 bp, Homo sapien
tggctgccaggggccagccacaagg

SEQ ID NO: 2887895 - DNA, 25 bp, Homo sapien
ctggctgccaggggccagccacaag

SEQ ID NO: 2887896 - DNA, 25 bp, Homo sapien
gacatggcccttgatccttctgatt

SEQ ID NO: 2887897 - DNA, 25 bp, Homo sapien
gctggctttggcgtcagtggacctc

SEQ ID NO: 2887898 - DNA, 25 bp, Homo sapien
tctccacaggtacctgcagacatgg

SEQ ID NO: 2887899 - DNA, 25 bp, Homo sapien
cccctgctaacgctgtggtgctgtg

SEQ ID NO: 2887900 - DNA, 25 bp, Homo sapien
tgcgagggcgccgccggggccgccg

SEQ ID NO: 2887901 - DNA, 25 bp, Homo sapien
gcgccgccggggccgccgcaagggc

SEQ ID NO: 2887902 - DNA, 25 bp, Homo sapien
cgagggcgccgccggggccgccgca

SEQ ID NO: 2887903 - DNA, 25 bp, Homo sapien
agggcgccgccggggccgccgcaag

SEQ ID NO: 2887904 - DNA, 25 bp, Homo sapien
tctccgagatcctgcgccgcagctg

SEQ ID NO: 2887905 - DNA, 25 bp, Homo sapien
tcggccgccctctccgagatcctgc

SEQ ID NO: 2887906 - DNA, 25 bp, Homo sapien
gtccgcggcgccgacacgtgcagca

SEQ ID NO: 2887907 - DNA, 25 bp, Homo sapien
cacgtgcagcaaggccgcctgcctg

SEQ ID NO: 2887908 - DNA, 25 bp, Homo sapien
cgcctgcagcctgcgctcgcggctc

SEQ ID NO: 2887909 - DNA, 25 bp, Homo sapien
tgcagcgcctgcagcctgcgctcgc

SEQ ID NO: 2887910 - DNA, 25 bp, Homo sapien
gcagcgcctgcagcctgcgctcgcg

SEQ ID NO: 2887911 - DNA, 25 bp, Homo sapien
agcgcctgcagcctgcgctcgcggc

SEQ ID NO: 2887912 - DNA, 25 bp, Homo sapien
gacactgcagaaccaatccatcttg

SEQ ID NO: 2887913 - DNA, 25 bp, Homo sapien
tggagccttctgtagcccacggagt

SEQ ID NO: 2887914 - DNA, 25 bp, Homo sapien
tccctgccttgggtgaagtcctgcc

SEQ ID NO: 2887915 - DNA, 25 bp, Homo sapien
ctgggctgcttctgatgctagagaa

SEQ ID NO: 2887916 - DNA, 25 bp, Homo sapien
cccacggacttgacgcttttctctc

SEQ ID NO: 2887917 - DNA, 25 bp, Homo sapien
ccccacggacttgacgcttttctct

SEQ ID NO: 2887918 - DNA, 25 bp, Homo sapien
caccccacggacttgacgcttttct

SEQ ID NO: 2887919 - DNA, 25 bp, Homo sapien
gtggtaaaatcctggggttctcaca

SEQ ID NO: 2887920 - DNA, 25 bp, Homo sapien
tcacaaactcagaatattggagtag

SEQ ID NO: 2887921 - DNA, 25 bp, Homo sapien
tcctggggttctcacaaactcagaa

SEQ ID NO: 2887922 - DNA, 25 bp, Homo sapien
cacaaactcagaatattggagtagg

SEQ ID NO: 2887923 - DNA, 25 bp, Homo sapien
tcgatgggaggtgtaaagtcacaag

SEQ ID NO: 2887924 - DNA, 25 bp, Homo sapien
tcactaggccagaccagatgcaagg

SEQ ID NO: 2887925 - DNA, 25 bp, Homo sapien
ctccacctctcgatgggaggtgtaa

SEQ ID NO: 2887926 - DNA, 25 bp, Homo sapien
cctctcgatgggaggtgtaaagtca

SEQ ID NO: 2887927 - DNA, 25 bp, Homo sapien
cattttgtgctctgctagtctagga

SEQ ID NO: 2887928 - DNA, 25 bp, Homo sapien
cagactcagaactggcacgtggtca

SEQ ID NO: 2887929 - DNA, 25 bp, Homo sapien
ttccaagagaacaagtgggagctcc

SEQ ID NO: 2887930 - DNA, 25 bp, Homo sapien
ggaggttcttgtccggctgcgctct

SEQ ID NO: 2887931 - DNA, 25 bp, Homo sapien
caccctgccctaagtatttgatttt

SEQ ID NO: 2887932 - DNA, 25 bp, Homo sapien
acctccccaggtttagatgatcaac

SEQ ID NO: 2887933 - DNA, 25 bp, Homo sapien
gcgactgtaagttgaaaggtataac

SEQ ID NO: 2887934 - DNA, 25 bp, Homo sapien
cgaagtttgtgattataattggagc

SEQ ID NO: 2887935 - DNA, 25 bp, Homo sapien
ctccaacgccgccagggacgacccg

SEQ ID NO: 2887936 - DNA, 25 bp, Homo sapien
gggacgacccgccagctgcctccgg

SEQ ID NO: 2887937 - DNA, 25 bp, Homo sapien
gctgcctccggagccgagcaggccc

SEQ ID NO: 2887938 - DNA, 25 bp, Homo sapien
cgccagggacgacccgccagctgcc

SEQ ID NO: 2887939 - DNA, 25 bp, Homo sapien
ctcgagaaagatgccgccgcctcaa

SEQ ID NO: 2887940 - DNA, 25 bp, Homo sapien
gccgcctcaacagcaacccacttcc

SEQ ID NO: 2887941 - DNA, 25 bp, Homo sapien
agcaacccacttccgcttcggaggc

SEQ ID NO: 2887942 - DNA, 25 bp, Homo sapien
acccacttccgcttcggaggcctcg

SEQ ID NO: 2887943 - DNA, 25 bp, Homo sapien
ctagttaggtccgcaggcgccaccg

SEQ ID NO: 2887944 - DNA, 25 bp, Homo sapien
tagttaggtccgcaggcgccaccgc

SEQ ID NO: 2887945 - DNA, 25 bp, Homo sapien
gttaggtccgcaggcgccaccgccg

SEQ ID NO: 2887946 - DNA, 25 bp, Homo sapien
taggtccgcaggcgccaccgccggc

SEQ ID NO: 2887947 - DNA, 25 bp, Homo sapien
gctttcccgcaaagctcggcctaac

SEQ ID NO: 2887948 - DNA, 25 bp, Homo sapien
gctgctttcccgcaaagctcggcct

SEQ ID NO: 2887949 - DNA, 25 bp, Homo sapien
tgctttcccgcaaagctcggcctaa

SEQ ID NO: 2887950 - DNA, 25 bp, Homo sapien
cgctgctttcccgcaaagctcggcc

SEQ ID NO: 2887951 - DNA, 25 bp, Homo sapien
cggcgcgaacacacaaaggaggcgt

SEQ ID NO: 2887952 - DNA, 25 bp, Homo sapien
taggctaggaactaagccccatggc

SEQ ID NO: 2887953 - DNA, 25 bp, Homo sapien
tcagatcctcccgacctacaaaagg

SEQ ID NO: 2887954 - DNA, 25 bp, Homo sapien
taagttttagactgcgacctcggcg

SEQ ID NO: 2887955 - DNA, 25 bp, Homo sapien
tcgatggatcaaaggcggaaaagcg

SEQ ID NO: 2887956 - DNA, 25 bp, Homo sapien
gggtcgtgagaatcttcatacacct

SEQ ID NO: 2887957 - DNA, 25 bp, Homo sapien
actctgtttcgggtcgtgagaatct

SEQ ID NO: 2887958 - DNA, 25 bp, Homo sapien
aaagcggtgtttactagcaactctg

SEQ ID NO: 2887959 - DNA, 25 bp, Homo sapien
gagaacacgccagtgcactgcatcc

SEQ ID NO: 2887960 - DNA, 25 bp, Homo sapien
agaccgagaacacgccagtgcactg

SEQ ID NO: 2887961 - DNA, 25 bp, Homo sapien
aacacgccagtgcactgcatcctgg

SEQ ID NO: 2887962 - DNA, 25 bp, Homo sapien
agtgagaccgagaacacgccagtgc

SEQ ID NO: 2887963 - DNA, 25 bp, Homo sapien
gaactgccagtcagtggagctgtta

SEQ ID NO: 2887964 - DNA, 25 bp, Homo sapien
catgagacctctttggtgactaagc

SEQ ID NO: 2887965 - DNA, 25 bp, Homo sapien
gagttagtaccttgctccggattag

SEQ ID NO: 2887966 - DNA, 25 bp, Homo sapien
tacacttttacattacagaggtggc

SEQ ID NO: 2887967 - DNA, 25 bp, Homo sapien
caccgcactgggccaactgtgacaa

SEQ ID NO: 2887968 - DNA, 25 bp, Homo sapien
ccgcactgggccaactgtgacaatt

SEQ ID NO: 2887969 - DNA, 25 bp, Homo sapien
cactgggccaactgtgacaatttct

SEQ ID NO: 2887970 - DNA, 25 bp, Homo sapien
cgcactgggccaactgtgacaattt

SEQ ID NO: 2887971 - DNA, 25 bp, Homo sapien
tgtgggcagcaaactctcaagtggt

SEQ ID NO: 2887972 - DNA, 25 bp, Homo sapien
tcttcagggcctacctcaaaggttg

SEQ ID NO: 2887973 - DNA, 25 bp, Homo sapien
gaagcgggcctcagtcagtttacag

SEQ ID NO: 2887974 - DNA, 25 bp, Homo sapien
tgcttgaaagagatggcggatacct

SEQ ID NO: 2887975 - DNA, 25 bp, Homo sapien
agaaaaggaagtgatctataccaag

SEQ ID NO: 2887976 - DNA, 25 bp, Homo sapien
aaggaagtgatctataccaaggttt

SEQ ID NO: 2887977 - DNA, 25 bp, Homo sapien
gaagtgatctataccaaggtttgca

SEQ ID NO: 2887978 - DNA, 25 bp, Homo sapien
gatctataccaaggtttgcagggaa

SEQ ID NO: 2887979 - DNA, 25 bp, Homo sapien
tgtgctctttggtgcctttcctttc

SEQ ID NO: 2887980 - DNA, 25 bp, Homo sapien
tatacatactccttcaagaagtggg

SEQ ID NO: 2887981 - DNA, 25 bp, Homo sapien
gtaagtaagctgatgtaaccaccag

SEQ ID NO: 2887982 - DNA, 25 bp, Homo sapien
gctctgccctttatgactcgaatgt

SEQ ID NO: 2887983 - DNA, 25 bp, Homo sapien
ggtctgagattaccaaaccctaagc

SEQ ID NO: 2887984 - DNA, 25 bp, Homo sapien
aggcgcccgccaactatgcctggct

SEQ ID NO: 2887985 - DNA, 25 bp, Homo sapien
ggcgcccgccaactatgcctggcta

SEQ ID NO: 2887986 - DNA, 25 bp, Homo sapien
gcctcttttcaaaagttctggccag

SEQ ID NO: 2887987 - DNA, 25 bp, Homo sapien
tgcctcttttcaaaagttctggcca

SEQ ID NO: 2887988 - DNA, 25 bp, Homo sapien
tccacgagttctatgggttctgctt

SEQ ID NO: 2887989 - DNA, 25 bp, Homo sapien
cttgtctagaatttattgctccacc

SEQ ID NO: 2887990 - DNA, 25 bp, Homo sapien
gcttgtctagaatttattgctccac

SEQ ID NO: 2887991 - DNA, 25 bp, Homo sapien
cagtttccacgagttctatgggttc

SEQ ID NO: 2887992 - DNA, 25 bp, Homo sapien
gatcaaccaccacaggctctaaaga

SEQ ID NO: 2887993 - DNA, 25 bp, Homo sapien
ggctctaaagattcacaagtgaggt

SEQ ID NO: 2887994 - DNA, 25 bp, Homo sapien
tgtgagtcagatcaaccaccacagg

SEQ ID NO: 2887995 - DNA, 25 bp, Homo sapien
agtcattgtgagtcagatcaaccac

SEQ ID NO: 2887996 - DNA, 25 bp, Homo sapien
ggacccatacccaagaaacagccga

SEQ ID NO: 2887997 - DNA, 25 bp, Homo sapien
ctggccagggacccatacccaagaa

SEQ ID NO: 2887998 - DNA, 25 bp, Homo sapien
gccagggacccatacccaagaaaca

SEQ ID NO: 2887999 - DNA, 25 bp, Homo sapien
cagggacccatacccaagaaacagc

SEQ ID NO: 2888000 - DNA, 25 bp, Homo sapien
tctttagcataagctgtaaccttga

SEQ ID NO: 2888001 - DNA, 25 bp, Homo sapien
gcatgaacttctttagcataagctg

SEQ ID NO: 2888002 - DNA, 25 bp, Homo sapien
cacaagatgcatgaacttctttagc

SEQ ID NO: 2888003 - DNA, 25 bp, Homo sapien
tctaaaagctcaattccacaagatg

SEQ ID NO: 2888004 - DNA, 25 bp, Homo sapien
taaactgtggaatcagggactgaag

SEQ ID NO: 2888005 - DNA, 25 bp, Homo sapien
caaaccacttttgtgcccaggtgtg

SEQ ID NO: 2888006 - DNA, 25 bp, Homo sapien
tgtggcaaggtcaggttacacagac

SEQ ID NO: 2888007 - DNA, 25 bp, Homo sapien
agatgtcttacaccatgccctgctg

SEQ ID NO: 2888008 - DNA, 25 bp, Homo sapien
tctgacggctacctctggatcctgg

SEQ ID NO: 2888009 - DNA, 25 bp, Homo sapien
ttacaggtacagagctactggagct

SEQ ID NO: 2888010 - DNA, 25 bp, Homo sapien
caaactattcgacaggtcctggcgg

SEQ ID NO: 2888011 - DNA, 25 bp, Homo sapien
gagggttccctgatgttctgacggc

SEQ ID NO: 2888012 - DNA, 25 bp, Homo sapien
caggaaagtcgggaagactggtgcg

SEQ ID NO: 2888013 - DNA, 25 bp, Homo sapien
cattgtagttgagtagccaacccat

SEQ ID NO: 2888014 - DNA, 25 bp, Homo sapien
gactggtgcggacaatcacattgta

SEQ ID NO: 2888015 - DNA, 25 bp, Homo sapien
tcacattgtagttgagtagccaacc

SEQ ID NO: 2888016 - DNA, 25 bp, Homo sapien
cagggccggcacaatgtactgtccg

SEQ ID NO: 2888017 - DNA, 25 bp, Homo sapien
gccggcacaatgtactgtccgcatg

SEQ ID NO: 2888018 - DNA, 25 bp, Homo sapien
gggccggcacaatgtactgtccgca

SEQ ID NO: 2888019 - DNA, 25 bp, Homo sapien
ggcacaatgtactgtccgcatgaaa

SEQ ID NO: 2888020 - DNA, 25 bp, Homo sapien
tgggagtatgggtagtcacatatac

SEQ ID NO: 2888021 - DNA, 25 bp, Homo sapien
ccctggcgtttctgggagtatgggt

SEQ ID NO: 2888022 - DNA, 25 bp, Homo sapien
cctggcgtttctgggagtatgggta

SEQ ID NO: 2888023 - DNA, 25 bp, Homo sapien
gagtatgggtagtcacatatacgtc

SEQ ID NO: 2888024 - DNA, 25 bp, Homo sapien
agatgggacaactgacagtacctga

SEQ ID NO: 2888025 - DNA, 25 bp, Homo sapien
tgagtatccgtccatgcagatggga

SEQ ID NO: 2888026 - DNA, 25 bp, Homo sapien
ctctgagtatccgtccatgcagatg

SEQ ID NO: 2888027 - DNA, 25 bp, Homo sapien
agtatccgtccatgcagatgggaca

SEQ ID NO: 2888028 - DNA, 25 bp, Homo sapien
cattctgtggaaacgatgagacgtc

SEQ ID NO: 2888029 - DNA, 25 bp, Homo sapien
ttcttcagggaatcacggaggcact

SEQ ID NO: 2888030 - DNA, 25 bp, Homo sapien
ttcctacaagttgggcaagtattag

SEQ ID NO: 2888031 - DNA, 25 bp, Homo sapien
tggttgatctttttcctacaagttg

SEQ ID NO: 2888032 - DNA, 25 bp, Homo sapien
gctacatcttgtgggctgctgaaaa

SEQ ID NO: 2888033 - DNA, 25 bp, Homo sapien
gcttctgaaataaacggcactgggt

SEQ ID NO: 2888034 - DNA, 25 bp, Homo sapien
ttcaacctgggatcctcgagctggg

SEQ ID NO: 2888035 - DNA, 25 bp, Homo sapien
aacctatggagcagtcagaagcccg

SEQ ID NO: 2888036 - DNA, 25 bp, Homo sapien
actttgctgcccctgagagaacctg

SEQ ID NO: 2888037 - DNA, 25 bp, Homo sapien
cctctgaggaaggacgacagtggaa

SEQ ID NO: 2888038 - DNA, 25 bp, Homo sapien
catgccggcactgtaaggcctctct

SEQ ID NO: 2888039 - DNA, 25 bp, Homo sapien
tttgtttggcgtgaggccctctgag

SEQ ID NO: 2888040 - DNA, 25 bp, Homo sapien
cagttattgctaacaaagccagaag

SEQ ID NO: 2888041 - DNA, 25 bp, Homo sapien
tcagccccgtctaaagtgaattctg

SEQ ID NO: 2888042 - DNA, 25 bp, Homo sapien
tcacatagaggagggacactccttc

SEQ ID NO: 2888043 - DNA, 25 bp, Homo sapien
aaggttgccttgctccaagtctggg

SEQ ID NO: 2888044 - DNA, 25 bp, Homo sapien
tggttttatttccatctgtaacact

SEQ ID NO: 2888045 - DNA, 25 bp, Homo sapien
gttttatttccatctgtaacactag

SEQ ID NO: 2888046 - DNA, 25 bp, Homo sapien
tatttccatctgtaacactagcaga

SEQ ID NO: 2888047 - DNA, 25 bp, Homo sapien
tttatttccatctgtaacactagca

SEQ ID NO: 2888048 - DNA, 25 bp, Homo sapien
ccaccaagcgaggagtgaagaagaa

SEQ ID NO: 2888049 - DNA, 25 bp, Homo sapien
cacgagcatgcggtgtctgaaggca

SEQ ID NO: 2888050 - DNA, 25 bp, Homo sapien
tcactgcaggcctcgcacgagcatg

SEQ ID NO: 2888051 - DNA, 25 bp, Homo sapien
tgggagccaccaagcgaggagtgaa

SEQ ID NO: 2888052 - DNA, 25 bp, Homo sapien
tcccaggagccggcaatcaggctgc

SEQ ID NO: 2888053 - DNA, 25 bp, Homo sapien
ccaggagccggcaatcaggctgctg

SEQ ID NO: 2888054 - DNA, 25 bp, Homo sapien
caggagccggcaatcaggctgctgt

SEQ ID NO: 2888055 - DNA, 25 bp, Homo sapien
ggagccggcaatcaggctgctgtca

SEQ ID NO: 2888056 - DNA, 25 bp, Homo sapien
tccttgtcaggcaccagagactggt

SEQ ID NO: 2888057 - DNA, 25 bp, Homo sapien
tcctgcctggcggtagatgcagcgc

SEQ ID NO: 2888058 - DNA, 25 bp, Homo sapien
cgtgtagcgcacttctgaccagtag

SEQ ID NO: 2888059 - DNA, 25 bp, Homo sapien
ccggtccgcctctgccgaaatttct

SEQ ID NO: 2888060 - DNA, 25 bp, Homo sapien
ccatggagttctgactgaagaggca

SEQ ID NO: 2888061 - DNA, 25 bp, Homo sapien
catggagttctgactgaagaggcat

SEQ ID NO: 2888062 - DNA, 25 bp, Homo sapien
tgtggttattccaataccaaaagtg

SEQ ID NO: 2888063 - DNA, 25 bp, Homo sapien
ccaccaagcgaggagtgaagaagaa

SEQ ID NO: 2888064 - DNA, 25 bp, Homo sapien
tcactgcaggcctcgcacgagcatg

SEQ ID NO: 2888065 - DNA, 25 bp, Homo sapien
tgggagccaccaagcgaggagtgaa

SEQ ID NO: 2888066 - DNA, 25 bp, Homo sapien
cacgagcatgcggtgtctgaaggca

SEQ ID NO: 2888067 - DNA, 25 bp, Homo sapien
tccaatatgcaggtctgcatgtcat

SEQ ID NO: 2888068 - DNA, 25 bp, Homo sapien
tccgtccagctccaatatgcaggtc

SEQ ID NO: 2888069 - DNA, 25 bp, Homo sapien
ccttactcttgttgctgtctgtcac

SEQ ID NO: 2888070 - DNA, 25 bp, Homo sapien
tctctcaatagcgaagcaactgcct

SEQ ID NO: 2888071 - DNA, 25 bp, Homo sapien
caggagccggcaatcaggctgctgt

SEQ ID NO: 2888072 - DNA, 25 bp, Homo sapien
ccaggagccggcaatcaggctgctg

SEQ ID NO: 2888073 - DNA, 25 bp, Homo sapien
tcccaggagccggcaatcaggctgc

SEQ ID NO: 2888074 - DNA, 25 bp, Homo sapien
ggagccggcaatcaggctgctgtca

SEQ ID NO: 2888075 - DNA, 25 bp, Homo sapien
ccggtccgcctctgccgaaatttct

SEQ ID NO: 2888076 - DNA, 25 bp, Homo sapien
cgtgtagcgcacttctgaccagtag

SEQ ID NO: 2888077 - DNA, 25 bp, Homo sapien
tccttgtcaggcaccagagactggt

SEQ ID NO: 2888078 - DNA, 25 bp, Homo sapien
tcctgcctggcggtagatgcagcgc

SEQ ID NO: 2888079 - DNA, 25 bp, Homo sapien
tatgctgaagaagctaggaagctca

SEQ ID NO: 2888080 - DNA, 25 bp, Homo sapien
gggcacatcaactacacactggctg

SEQ ID NO: 2888081 - DNA, 25 bp, Homo sapien
gctactctaaagtactgaagttgca

SEQ ID NO: 2888082 - DNA, 25 bp, Homo sapien
catgggtttgacgtgaaggttatac

SEQ ID NO: 2888083 - DNA, 25 bp, Homo sapien
agctggtaggggtccctctcgcaga

SEQ ID NO: 2888084 - DNA, 25 bp, Homo sapien
tccagacgctggtacagctggtagg

SEQ ID NO: 2888085 - DNA, 25 bp, Homo sapien
cgagcttgctgttccagacgctggt

SEQ ID NO: 2888086 - DNA, 25 bp, Homo sapien
tccagcacatactctcgagcttgct

SEQ ID NO: 2888087 - DNA, 25 bp, Homo sapien
ttggccgcagccgacagctgccgga

SEQ ID NO: 2888088 - DNA, 25 bp, Homo sapien
agagggcgccgtactcctcaagcag

SEQ ID NO: 2888089 - DNA, 25 bp, Homo sapien
gctgccggagcaggcggaccttcat

SEQ ID NO: 2888090 - DNA, 25 bp, Homo sapien
gatggtgccttcaccttggccgcag

SEQ ID NO: 2888091 - DNA, 25 bp, Homo sapien
tgggcggtaaacaagctgttctcta

SEQ ID NO: 2888092 - DNA, 25 bp, Homo sapien
catgctcttcatgggcatttcacct

SEQ ID NO: 2888093 - DNA, 25 bp, Homo sapien
tgctggcttgctgagtgcatgcatg

SEQ ID NO: 2888094 - DNA, 25 bp, Homo sapien
tgaatgaacgccactgggcggtaaa

SEQ ID NO: 2888095 - DNA, 25 bp, Homo sapien
cagccttgctggatacagctctgtt

SEQ ID NO: 2888096 - DNA, 25 bp, Homo sapien
cagtgatactgctagaccactgtgt

SEQ ID NO: 2888097 - DNA, 25 bp, Homo sapien
tactgctagaccactgtgtgccagc

SEQ ID NO: 2888098 - DNA, 25 bp, Homo sapien
tgccagccttgctggatacagctct

SEQ ID NO: 2888099 - DNA, 25 bp, Homo sapien
cacttggaactttttcaagtgttca

SEQ ID NO: 2888100 - DNA, 25 bp, Homo sapien
tatgcagttcccacgtcacttggaa

SEQ ID NO: 2888101 - DNA, 25 bp, Homo sapien
caccagtgcgggcaagttgctctga

SEQ ID NO: 2888102 - DNA, 25 bp, Homo sapien
gctctgaagaagtggctccgaaaag

SEQ ID NO: 2888103 - DNA, 25 bp, Homo sapien
tcctcggaacgctggtacctctgca

SEQ ID NO: 2888104 - DNA, 25 bp, Homo sapien
actcctcggcgactctgcgcagctc

SEQ ID NO: 2888105 - DNA, 25 bp, Homo sapien
tcctcactgcaggtgtcgtgtgtgg

SEQ ID NO: 2888106 - DNA, 25 bp, Homo sapien
ctgctcgtcgacataggcgtcgatc

SEQ ID NO: 2888107 - DNA, 25 bp, Homo sapien
tcatgaggagcgtacaatctagatc

SEQ ID NO: 2888108 - DNA, 25 bp, Homo sapien
cacaatgcacaattagtgggagccc

SEQ ID NO: 2888109 - DNA, 25 bp, Homo sapien
gcttctgtgaggatctaatgtctct

SEQ ID NO: 2888110 - DNA, 25 bp, Homo sapien
tctgctgatcggacatgagaagttc

SEQ ID NO: 2888111 - DNA, 25 bp, Homo sapien
ttattacactgtcatatagaatgaa

SEQ ID NO: 2888112 - DNA, 25 bp, Homo sapien
ttacactgtcatatagaatgaaata

SEQ ID NO: 2888113 - DNA, 25 bp, Homo sapien
tattacactgtcatatagaatgaaa

SEQ ID NO: 2888114 - DNA, 25 bp, Homo sapien
tattattacactgtcatatagaatg

SEQ ID NO: 2888115 - DNA, 25 bp, Homo sapien
gcagacaagtgcctcccatgaaggg

SEQ ID NO: 2888116 - DNA, 25 bp, Homo sapien
gctgatttgcacttagacttgcaga

SEQ ID NO: 2888117 - DNA, 25 bp, Homo sapien
tctgcaataggccagcgtctcctgt

SEQ ID NO: 2888118 - DNA, 25 bp, Homo sapien
accaggacaggaagcaccgacacac

SEQ ID NO: 2888119 - DNA, 25 bp, Homo sapien
gcatctggcgagatgactggtcaca

SEQ ID NO: 2888120 - DNA, 25 bp, Homo sapien
gaacaaatttgggtacctgcaggct

SEQ ID NO: 2888121 - DNA, 25 bp, Homo sapien
tacagactatggaggcacaaaatgg

SEQ ID NO: 2888122 - DNA, 25 bp, Homo sapien
aactacaagagttaatgccggcatc

SEQ ID NO: 2888123 - DNA, 25 bp, Homo sapien
aatgctcttattcacactggtctga

SEQ ID NO: 2888124 - DNA, 25 bp, Homo sapien
agtatcaatgctcttattcacactg

SEQ ID NO: 2888125 - DNA, 25 bp, Homo sapien
atcaatgctcttattcacactggtc

SEQ ID NO: 2888126 - DNA, 25 bp, Homo sapien
gtgccagtatcaatgctcttattca

SEQ ID NO: 2888127 - DNA, 25 bp, Homo sapien
cacacgtcctaaatcaaatatcagc

SEQ ID NO: 2888128 - DNA, 25 bp, Homo sapien
tcccaggaacgcaagaatgtctcaa

SEQ ID NO: 2888129 - DNA, 25 bp, Homo sapien
ttatatagctgtccgaatacacaca

SEQ ID NO: 2888130 - DNA, 25 bp, Homo sapien
gatctactagggtttcatcccagga

SEQ ID NO: 2888131 - DNA, 25 bp, Homo sapien
atgccccaggctccactagggccta

SEQ ID NO: 2888132 - DNA, 25 bp, Homo sapien
aggtgtggccttcgctacccatgcc

SEQ ID NO: 2888133 - DNA, 25 bp, Homo sapien
gcacacacaggtgtggccttcgcta

SEQ ID NO: 2888134 - DNA, 25 bp, Homo sapien
tagggcctatcccaactgagggcac

SEQ ID NO: 2888135 - DNA, 25 bp, Homo sapien
aactcatcacaagtacttttctcac

SEQ ID NO: 2888136 - DNA, 25 bp, Homo sapien
gcgacaattatacaagacattttca

SEQ ID NO: 2888137 - DNA, 25 bp, Homo sapien
atacaagacattttcaagaggagac

SEQ ID NO: 2888138 - DNA, 25 bp, Homo sapien
aatacctgcgacaattatacaagac

SEQ ID NO: 2888139 - DNA, 25 bp, Homo sapien
tcttctgttaacatgcgctgcttgg

SEQ ID NO: 2888140 - DNA, 25 bp, Homo sapien
ttctgttaacatgcgctgcttggtt

SEQ ID NO: 2888141 - DNA, 25 bp, Homo sapien
gtcttctgttaacatgcgctgcttg

SEQ ID NO: 2888142 - DNA, 25 bp, Homo sapien
cttctgttaacatgcgctgcttggt

SEQ ID NO: 2888143 - DNA, 25 bp, Homo sapien
cttggtacttgcaaggtactgagaa

SEQ ID NO: 2888144 - DNA, 25 bp, Homo sapien
ttggtacttgcaaggtactgagaac

SEQ ID NO: 2888145 - DNA, 25 bp, Homo sapien
ggtacttgcaaggtactgagaacag

SEQ ID NO: 2888146 - DNA, 25 bp, Homo sapien
tggtacttgcaaggtactgagaaca

SEQ ID NO: 2888147 - DNA, 25 bp, Homo sapien
gctcagccgggacgataacatgtgc

SEQ ID NO: 2888148 - DNA, 25 bp, Homo sapien
ctgtgaagttgttctcgccagtaac

SEQ ID NO: 2888149 - DNA, 25 bp, Homo sapien
tgcctcatggtgtctgtgaagttgt

SEQ ID NO: 2888150 - DNA, 25 bp, Homo sapien
gttctcgccagtaactgctttctta

SEQ ID NO: 2888151 - DNA, 25 bp, Homo sapien
tgatcaggaattaaggacagttacc

SEQ ID NO: 2888152 - DNA, 25 bp, Homo sapien
tccaatgggccagtcgtgctgacac

SEQ ID NO: 2888153 - DNA, 25 bp, Homo sapien
catgctctctaagggtcggttctag

SEQ ID NO: 2888154 - DNA, 25 bp, Homo sapien
caagccaaccaatgcacaagactag

SEQ ID NO: 2888155 - DNA, 25 bp, Homo sapien
cagcaagatagtcaggagcaggatc

SEQ ID NO: 2888156 - DNA, 25 bp, Homo sapien
aaagttggtgccgagccactgtctg

SEQ ID NO: 2888157 - DNA, 25 bp, Homo sapien
ccactgtctgtgaggatgagcctgg

SEQ ID NO: 2888158 - DNA, 25 bp, Homo sapien
gggtccatgataccacacgtgagga

SEQ ID NO: 2888159 - DNA, 25 bp, Homo sapien
gttcatacttctgtggacattactg

SEQ ID NO: 2888160 - DNA, 25 bp, Homo sapien
cattactggggcgacttaaatttcg

SEQ ID NO: 2888161 - DNA, 25 bp, Homo sapien
aaaaacctcagggtcccttgtcatg

SEQ ID NO: 2888162 - DNA, 25 bp, Homo sapien
catgaaaagcacaataatgatgttc

SEQ ID NO: 2888163 - DNA, 25 bp, Homo sapien
caagcagagatggtcactgtgaggt

SEQ ID NO: 2888164 - DNA, 25 bp, Homo sapien
tgaaagacaatgagtaaaccagcca

SEQ ID NO: 2888165 - DNA, 25 bp, Homo sapien
cactgtgaggtcattcaattgtgaa

SEQ ID NO: 2888166 - DNA, 25 bp, Homo sapien
gaggtcattcaattgtgaaagacaa

SEQ ID NO: 2888167 - DNA, 25 bp, Homo sapien
aatttggctgacaatggtgcaacat

SEQ ID NO: 2888168 - DNA, 25 bp, Homo sapien
caattcgctgtggattccattcatg

SEQ ID NO: 2888169 - DNA, 25 bp, Homo sapien
aattactcaatggataaatatcagc

SEQ ID NO: 2888170 - DNA, 25 bp, Homo sapien
tggccaccacctcggtatcatcata

SEQ ID NO: 2888171 - DNA, 25 bp, Homo sapien
gaggaactactgctggtactgctta

SEQ ID NO: 2888172 - DNA, 25 bp, Homo sapien
catcatcagcttctgaggaactact

SEQ ID NO: 2888173 - DNA, 25 bp, Homo sapien
tactctcgccgtccgcttcttcatc

SEQ ID NO: 2888174 - DNA, 25 bp, Homo sapien
gcttctgaggaactactgctggtac

SEQ ID NO: 2888175 - DNA, 25 bp, Homo sapien
tgcagatggtgtcagtccagaagct

SEQ ID NO: 2888176 - DNA, 25 bp, Homo sapien
gaagggctccggctgtcattgcaga

SEQ ID NO: 2888177 - DNA, 25 bp, Homo sapien
gatgtgagggtaaaggtgcagtgca

SEQ ID NO: 2888178 - DNA, 25 bp, Homo sapien
tgtgcaaaggcacatgtccatggat

SEQ ID NO: 2888179 - DNA, 25 bp, Homo sapien
catagacattttagaccctgtagag

SEQ ID NO: 2888180 - DNA, 25 bp, Homo sapien
tctgtggcatcacacttagggctct

SEQ ID NO: 2888181 - DNA, 25 bp, Homo sapien
cacctgcagggcgttatagttttct

SEQ ID NO: 2888182 - DNA, 25 bp, Homo sapien
gaggcaaagctatctaaggtccaaa

SEQ ID NO: 2888183 - DNA, 25 bp, Homo sapien
cacaactcactggtggaccaggaga

SEQ ID NO: 2888184 - DNA, 25 bp, Homo sapien
tgatggcagacacagtacacaaggc

SEQ ID NO: 2888185 - DNA, 25 bp, Homo sapien
cccttcagggctgctaacgcattat

SEQ ID NO: 2888186 - DNA, 25 bp, Homo sapien
aggccccaacaatgcaaaagtgatg

SEQ ID NO: 2888187 - DNA, 25 bp, Homo sapien
tgctgagaagtaattgacaaaaagt

SEQ ID NO: 2888188 - DNA, 25 bp, Homo sapien
acaaagcagcgataagctaagagct

SEQ ID NO: 2888189 - DNA, 25 bp, Homo sapien
taaaaggcagaagcccgtgacagat

SEQ ID NO: 2888190 - DNA, 25 bp, Homo sapien
gccaaactgctagctttgagcagca

SEQ ID NO: 2888191 - DNA, 25 bp, Homo sapien
cattgttttggtaagggagccccat

SEQ ID NO: 2888192 - DNA, 25 bp, Homo sapien
cccaggatacagtaaagggcctgaa

SEQ ID NO: 2888193 - DNA, 25 bp, Homo sapien
tttggtaagggagccccatgggaca

SEQ ID NO: 2888194 - DNA, 25 bp, Homo sapien
gtccagacgggccacccaggataca

SEQ ID NO: 2888195 - DNA, 25 bp, Homo sapien
ttccacagtgcttcggagcagagag

SEQ ID NO: 2888196 - DNA, 25 bp, Homo sapien
tccacagtgcttcggagcagagagg

SEQ ID NO: 2888197 - DNA, 25 bp, Homo sapien
acagtgcttcggagcagagaggaag

SEQ ID NO: 2888198 - DNA, 25 bp, Homo sapien
gcagagaggaagcactcccctctgg

SEQ ID NO: 2888199 - DNA, 25 bp, Homo sapien
tatagacatagagtccctggacaca

SEQ ID NO: 2888200 - DNA, 25 bp, Homo sapien
gaactctagtcccacgtcttggcct

SEQ ID NO: 2888201 - DNA, 25 bp, Homo sapien
tccactatgaggaggcacggtcagg

SEQ ID NO: 2888202 - DNA, 25 bp, Homo sapien
taagagttgagcacactgcctggcc

SEQ ID NO: 2888203 - DNA, 25 bp, Homo sapien
gcgatggttcggcagaatcctgctg

SEQ ID NO: 2888204 - DNA, 25 bp, Homo sapien
gatggttcggcagaatcctgctggc

SEQ ID NO: 2888205 - DNA, 25 bp, Homo sapien
ttaagaatgggcgatggttcggcag

SEQ ID NO: 2888206 - DNA, 25 bp, Homo sapien
aatgggcgatggttcggcagaatcc

SEQ ID NO: 2888207 - DNA, 25 bp, Homo sapien
caaaacagctcggataaatatggtc

SEQ ID NO: 2888208 - DNA, 25 bp, Homo sapien
ccactctggagtattcccaaaacag

SEQ ID NO: 2888209 - DNA, 25 bp, Homo sapien
gattctgaacaggtgctggcggtaa

SEQ ID NO: 2888210 - DNA, 25 bp, Homo sapien
tcttgaagagatgcattgaatacct

SEQ ID NO: 2888211 - DNA, 25 bp, Homo sapien
cagaaattgtatctggcaagaaagt

SEQ ID NO: 2888212 - DNA, 25 bp, Homo sapien
gtgccaggattccagttcttatcat

SEQ ID NO: 2888213 - DNA, 25 bp, Homo sapien
ccaggattccagttcttatcattca

SEQ ID NO: 2888214 - DNA, 25 bp, Homo sapien
aattgtatctggcaagaaagtgcca

SEQ ID NO: 2888215 - DNA, 25 bp, Homo sapien
tgatgacgtggccatgacaacttta

SEQ ID NO: 2888216 - DNA, 25 bp, Homo sapien
ctcttggatgacactctgaactggc

SEQ ID NO: 2888217 - DNA, 25 bp, Homo sapien
tccgagactgcaggtgtttcattgc

SEQ ID NO: 2888218 - DNA, 25 bp, Homo sapien
agggcttccggtcttgtttctgaga

SEQ ID NO: 2888219 - DNA, 25 bp, Homo sapien
gcagcaggcgagagcgctgggaggg

SEQ ID NO: 2888220 - DNA, 25 bp, Homo sapien
ggccaagcccgtggggctattcctc

SEQ ID NO: 2888221 - DNA, 25 bp, Homo sapien
caggtgacagcgcagcaggcgagag

SEQ ID NO: 2888222 - DNA, 25 bp, Homo sapien
agagcgcagcaggtgacagcgcagc

SEQ ID NO: 2888223 - DNA, 25 bp, Homo sapien
gcaggacagaaactcttgcgtgtgt

SEQ ID NO: 2888224 - DNA, 25 bp, Homo sapien
tcttgcgtgtgtccacaaacccagg

SEQ ID NO: 2888225 - DNA, 25 bp, Homo sapien
ccacaaacccaggagttgtggttgc

SEQ ID NO: 2888226 - DNA, 25 bp, Homo sapien
gggcgctaatggagccatctgtggc

SEQ ID NO: 2888227 - DNA, 25 bp, Homo sapien
tcatctgcactctcgtccccatcat

SEQ ID NO: 2888228 - DNA, 25 bp, Homo sapien
cctccttctggttggtggaggtcga

SEQ ID NO: 2888229 - DNA, 25 bp, Homo sapien
tagacaccattctcgcagcggtgcc

SEQ ID NO: 2888230 - DNA, 25 bp, Homo sapien
ctgtgggtcgtagacaccattctcg

SEQ ID NO: 2888231 - DNA, 25 bp, Homo sapien
gcccaaagaattcgcagtagcagca

SEQ ID NO: 2888232 - DNA, 25 bp, Homo sapien
gccgtgcccaaagaattcgcagtag

SEQ ID NO: 2888233 - DNA, 25 bp, Homo sapien
cgtgcccaaagaattcgcagtagca

SEQ ID NO: 2888234 - DNA, 25 bp, Homo sapien
ccgccgtgcccaaagaattcgcagt

SEQ ID NO: 2888235 - DNA, 25 bp, Homo sapien
agtatgtgtgtgtaccaacgccctc

SEQ ID NO: 2888236 - DNA, 25 bp, Homo sapien
aaaaagccctgaatcctactgccaa

SEQ ID NO: 2888237 - DNA, 25 bp, Homo sapien
caacgccctctgtattcaaacaaga

SEQ ID NO: 2888238 - DNA, 25 bp, Homo sapien
tgtcacccatccctcttaaacagtg

SEQ ID NO: 2888239 - DNA, 25 bp, Homo sapien
tccgatggtcaacgacgctttccct

SEQ ID NO: 2888240 - DNA, 25 bp, Homo sapien
tctttcctcttggtcagccgtaagc

SEQ ID NO: 2888241 - DNA, 25 bp, Homo sapien
gccgtaagcgaagcttttccctcat

SEQ ID NO: 2888242 - DNA, 25 bp, Homo sapien
cgatggtcaacgacgctttcccttt

SEQ ID NO: 2888243 - DNA, 25 bp, Homo sapien
cggagctatttataaactgcaacaa

SEQ ID NO: 2888244 - DNA, 25 bp, Homo sapien
tggtttcggagctatttataaactg

SEQ ID NO: 2888245 - DNA, 25 bp, Homo sapien
ttataaactgcaacaaatcctccac

SEQ ID NO: 2888246 - DNA, 25 bp, Homo sapien
tggtttggtttcggagctatttata

SEQ ID NO: 2888247 - DNA, 25 bp, Homo sapien
ttatgccttgctcgcttcgctgcac

SEQ ID NO: 2888248 - DNA, 25 bp, Homo sapien
tgcttatgccttgctcgcttcgctg

SEQ ID NO: 2888249 - DNA, 25 bp, Homo sapien
tcctttgcttatgccttgctcgctt

SEQ ID NO: 2888250 - DNA, 25 bp, Homo sapien
tttgcttatgccttgctcgcttcgc

SEQ ID NO: 2888251 - DNA, 25 bp, Homo sapien
gcctccaggtgctgagaactgtcac

SEQ ID NO: 2888252 - DNA, 25 bp, Homo sapien
ctggcgcctccaggtgctgagaact

SEQ ID NO: 2888253 - DNA, 25 bp, Homo sapien
cgcctccaggtgctgagaactgtca

SEQ ID NO: 2888254 - DNA, 25 bp, Homo sapien
ggcgcctccaggtgctgagaactgt

SEQ ID NO: 2888255 - DNA, 25 bp, Homo sapien
tcttctatcatctctacagttgacg

SEQ ID NO: 2888256 - DNA, 25 bp, Homo sapien
catgatggccagcacaagaacaaac

SEQ ID NO: 2888257 - DNA, 25 bp, Homo sapien
gatggccagcacaagaacaaaccca

SEQ ID NO: 2888258 - DNA, 25 bp, Homo sapien
tgacggctcctttcttcgaaaagaa

SEQ ID NO: 2888259 - DNA, 25 bp, Homo sapien
tgtgttctctgcactccagcagtct

SEQ ID NO: 2888260 - DNA, 25 bp, Homo sapien
tactgtaggactgcgaggtatgagc

SEQ ID NO: 2888261 - DNA, 25 bp, Homo sapien
caatcaggcccaatagtcagtctaa

SEQ ID NO: 2888262 - DNA, 25 bp, Homo sapien
gagcagagctcttgagggtagaaca

SEQ ID NO: 2888263 - DNA, 25 bp, Homo sapien
ctgatctaaatccagcacacgtgcc

SEQ ID NO: 2888264 - DNA, 25 bp, Homo sapien
caagcatgtaaaggcaggtgccctg

SEQ ID NO: 2888265 - DNA, 25 bp, Homo sapien
cacacgtgccttgtcaatatatgga

SEQ ID NO: 2888266 - DNA, 25 bp, Homo sapien
tatatggacaaataacaagcatgta

SEQ ID NO: 2888267 - DNA, 25 bp, Homo sapien
cacccaccaccaacctttagaaatg

SEQ ID NO: 2888268 - DNA, 25 bp, Homo sapien
cctttagaaatgctggggcttatga

SEQ ID NO: 2888269 - DNA, 25 bp, Homo sapien
agtgttaggagcacggctccaccca

SEQ ID NO: 2888270 - DNA, 25 bp, Homo sapien
agtcatcagtgttaggagcacggct

SEQ ID NO: 2888271 - DNA, 25 bp, Homo sapien
tgcttctaggcgagctttctcctcc

SEQ ID NO: 2888272 - DNA, 25 bp, Homo sapien
ctgcttctaggcgagctttctcctc

SEQ ID NO: 2888273 - DNA, 25 bp, Homo sapien
tcctcctggaggtgcaggtgctccc

SEQ ID NO: 2888274 - DNA, 25 bp, Homo sapien
gctcctcctggaggtgcaggtgctc

SEQ ID NO: 2888275 - DNA, 25 bp, Homo sapien
tctgctcctcctggaggtgcaggtg

SEQ ID NO: 2888276 - DNA, 25 bp, Homo sapien
cctcctggaggtgcaggtgctcccg

SEQ ID NO: 2888277 - DNA, 25 bp, Homo sapien
tgagcatgtccaacttggggcagtc

SEQ ID NO: 2888278 - DNA, 25 bp, Homo sapien
gctgcctggaaatttctagtgagca

SEQ ID NO: 2888279 - DNA, 25 bp, Homo sapien
ttgctctagtgagccattgtggatg

SEQ ID NO: 2888280 - DNA, 25 bp, Homo sapien
cagtctttacttggcctctccttct

SEQ ID NO: 2888281 - DNA, 25 bp, Homo sapien
tgctgcatgatgtcgaagaaaaaag

SEQ ID NO: 2888282 - DNA, 25 bp, Homo sapien
aatttggagtctctggtgtcgacgg

SEQ ID NO: 2888283 - DNA, 25 bp, Homo sapien
tgttctgctgatgctcaccgggaga

SEQ ID NO: 2888284 - DNA, 25 bp, Homo sapien
gatggacatgaggtcgaccacctta

SEQ ID NO: 2888285 - DNA, 25 bp, Homo sapien
tcagaaataccttcccgctattctg

SEQ ID NO: 2888286 - DNA, 25 bp, Homo sapien
gaaataccttcccgctattctgtat

SEQ ID NO: 2888287 - DNA, 25 bp, Homo sapien
aataccttcccgctattctgtattt

SEQ ID NO: 2888288 - DNA, 25 bp, Homo sapien
taccttcccgctattctgtatttac

SEQ ID NO: 2888289 - DNA, 25 bp, Homo sapien
tacaattagagaatagcattggatc

SEQ ID NO: 2888290 - DNA, 25 bp, Homo sapien
ggtatcatgtatgaagtgactctcc

SEQ ID NO: 2888291 - DNA, 25 bp, Homo sapien
cttgaggaaatatacatggaagtat

SEQ ID NO: 2888292 - DNA, 25 bp, Homo sapien
ttggagaaacatgagtaaggtctac

SEQ ID NO: 2888293 - DNA, 25 bp, Homo sapien
tacctgtgttgtaggactcagcaag

SEQ ID NO: 2888294 - DNA, 25 bp, Homo sapien
tgtaatcaccacaccctgaggctaa

SEQ ID NO: 2888295 - DNA, 25 bp, Homo sapien
tgattagttacctacagggagtggg

SEQ ID NO: 2888296 - DNA, 25 bp, Homo sapien
gaacaaataccgaaagcatgcccgg

SEQ ID NO: 2888297 - DNA, 25 bp, Homo sapien
atgcccggctgctttaaattttaag

SEQ ID NO: 2888298 - DNA, 25 bp, Homo sapien
aatcatgacacaccgcagcctcaaa

SEQ ID NO: 2888299 - DNA, 25 bp, Homo sapien
ggtgcaatcatgacacaccgcagcc

SEQ ID NO: 2888300 - DNA, 25 bp, Homo sapien
ccatgcccggctgctttaaatttta

SEQ ID NO: 2888301 - DNA, 25 bp, Homo sapien
agactgggcaacaagagcgaaactc

SEQ ID NO: 2888302 - DNA, 25 bp, Homo sapien
tgcaccattgtaccccagactgggc

SEQ ID NO: 2888303 - DNA, 25 bp, Homo sapien
aagattgcaccattgtaccccagac

SEQ ID NO: 2888304 - DNA, 25 bp, Homo sapien
ctgggcaacaagagcgaaactccat

SEQ ID NO: 2888305 - DNA, 25 bp, Homo sapien
catctaaggagaaacatcatggtta

SEQ ID NO: 2888306 - DNA, 25 bp, Homo sapien
taatcaagtgagctttattccagga

SEQ ID NO: 2888307 - DNA, 25 bp, Homo sapien
taaaagacaacaattagaggcgtaa

SEQ ID NO: 2888308 - DNA, 25 bp, Homo sapien
tatctccacagatgctagaaaacct

SEQ ID NO: 2888309 - DNA, 25 bp, Homo sapien
tatccacactgtctaggtcaatatc

SEQ ID NO: 2888310 - DNA, 25 bp, Homo sapien
tctgtctcatccatatccacactgt

SEQ ID NO: 2888311 - DNA, 25 bp, Homo sapien
cttttgaaatattccacttccctct

SEQ ID NO: 2888312 - DNA, 25 bp, Homo sapien
tctaggtcaatatctttaggtagaa

SEQ ID NO: 2888313 - DNA, 25 bp, Homo sapien
gaaaaccaaacatgtatggcaagca

SEQ ID NO: 2888314 - DNA, 25 bp, Homo sapien
agcacacagtcaccacggtttcaga

SEQ ID NO: 2888315 - DNA, 25 bp, Homo sapien
catgtatggcaagcacacagtcacc

SEQ ID NO: 2888316 - DNA, 25 bp, Homo sapien
gtcaccacggtttcagacacagcct

SEQ ID NO: 2888317 - DNA, 25 bp, Homo sapien
gcttgcttgatgtaacttcgtccaa

SEQ ID NO: 2888318 - DNA, 25 bp, Homo sapien
tggcttgcttgatgtaacttcgtcc

SEQ ID NO: 2888319 - DNA, 25 bp, Homo sapien
cttgatgtaacttcgtccaagacaa

SEQ ID NO: 2888320 - DNA, 25 bp, Homo sapien
tgcttgatgtaacttcgtccaagac

SEQ ID NO: 2888321 - DNA, 25 bp, Homo sapien
ccactgccatcaactatttttctag

SEQ ID NO: 2888322 - DNA, 25 bp, Homo sapien
agccactgccatcaactatttttct

SEQ ID NO: 2888323 - DNA, 25 bp, Homo sapien
cagaagcgcaacagccagttggcgg

SEQ ID NO: 2888324 - DNA, 25 bp, Homo sapien
gcctcagaagcgcaacagccagttg

SEQ ID NO: 2888325 - DNA, 25 bp, Homo sapien
ataaaacttgcccatcaggaaaaca

SEQ ID NO: 2888326 - DNA, 25 bp, Homo sapien
cagcaagtatgtaaaatgttacttt

SEQ ID NO: 2888327 - DNA, 25 bp, Homo sapien
aaacttgcccatcaggaaaacagca

SEQ ID NO: 2888328 - DNA, 25 bp, Homo sapien
agcaagtatgtaaaatgttactttt

SEQ ID NO: 2888329 - DNA, 25 bp, Homo sapien
cgcttgaacgtaggaggtggggatt

SEQ ID NO: 2888330 - DNA, 25 bp, Homo sapien
cccctgtaatcctagttagtcagga

SEQ ID NO: 2888331 - DNA, 25 bp, Homo sapien
aggcccctgtaatcctagttagtca

SEQ ID NO: 2888332 - DNA, 25 bp, Homo sapien
cccagatcacaacattgcactctag

SEQ ID NO: 2888333 - DNA, 25 bp, Homo sapien
ggctagagtgcaagtgccgtgatca

SEQ ID NO: 2888334 - DNA, 25 bp, Homo sapien
gctagagtgcaagtgccgtgatcat

SEQ ID NO: 2888335 - DNA, 25 bp, Homo sapien
tagagtgcaagtgccgtgatcatag

SEQ ID NO: 2888336 - DNA, 25 bp, Homo sapien
gagtgcaagtgccgtgatcatagtt

SEQ ID NO: 2888337 - DNA, 25 bp, Homo sapien
gttggagggtagatgcacaatcttg

SEQ ID NO: 2888338 - DNA, 25 bp, Homo sapien
ttggagggtagatgcacaatcttgg

SEQ ID NO: 2888339 - DNA, 25 bp, Homo sapien
tggagggtagatgcacaatcttggc

SEQ ID NO: 2888340 - DNA, 25 bp, Homo sapien
ggagggtagatgcacaatcttggct

SEQ ID NO: 2888341 - DNA, 25 bp, Homo sapien
acaagtcttatgcaacttttgccag

SEQ ID NO: 2888342 - DNA, 25 bp, Homo sapien
tgatactaacccttcctgtctttgg

SEQ ID NO: 2888343 - DNA, 25 bp, Homo sapien
tctttggataatgaatctctgtgat

SEQ ID NO: 2888344 - DNA, 25 bp, Homo sapien
ccagatttatctgtggatagtgaga

SEQ ID NO: 2888345 - DNA, 25 bp, Homo sapien
cactctggaaggtttgagaatcctc

SEQ ID NO: 2888346 - DNA, 25 bp, Homo sapien
taattatggttgcttaaactgtggc

SEQ ID NO: 2888347 - DNA, 25 bp, Homo sapien
gcccaacagcgttcttgccttgcag

SEQ ID NO: 2888348 - DNA, 25 bp, Homo sapien
tgaaaatggttattactgtcaccca

SEQ ID NO: 2888349 - DNA, 25 bp, Homo sapien
ttctgccaataatgtaaagcttcat

SEQ ID NO: 2888350 - DNA, 25 bp, Homo sapien
tctgtttgttgacatgatttctgcc

SEQ ID NO: 2888351 - DNA, 25 bp, Homo sapien
taacgatatgcactttctcagcccg

SEQ ID NO: 2888352 - DNA, 25 bp, Homo sapien
ttcctctcttccgtaacccttgata

SEQ ID NO: 2888353 - DNA, 25 bp, Homo sapien
gttgcccaggcaagcaccatatata

SEQ ID NO: 2888354 - DNA, 25 bp, Homo sapien
tgtgttgcccaggcaagcaccatat

SEQ ID NO: 2888355 - DNA, 25 bp, Homo sapien
tgttgcccaggcaagcaccatatat

SEQ ID NO: 2888356 - DNA, 25 bp, Homo sapien
tgcccaggcaagcaccatatatatg

SEQ ID NO: 2888357 - DNA, 25 bp, Homo sapien
cttccaaatctcttgagggccaggg

SEQ ID NO: 2888358 - DNA, 25 bp, Homo sapien
cagggagagaactcaccttcatgca

SEQ ID NO: 2888359 - DNA, 25 bp, Homo sapien
tgggtatcccaaatggtcaagagtc

SEQ ID NO: 2888360 - DNA, 25 bp, Homo sapien
gctgctaattccctggatgacagag

SEQ ID NO: 2888361 - DNA, 25 bp, Homo sapien
gaagcttttatagaaagcagaggcc

SEQ ID NO: 2888362 - DNA, 25 bp, Homo sapien
tagccaggcaaatagtcaacattct

SEQ ID NO: 2888363 - DNA, 25 bp, Homo sapien
gacaccaaagaggagatctgaagct

SEQ ID NO: 2888364 - DNA, 25 bp, Homo sapien
aactgacaccaaagaggagatctga

SEQ ID NO: 2888365 - DNA, 25 bp, Homo sapien
tcgggaggaggaatgggtgggcgga

SEQ ID NO: 2888366 - DNA, 25 bp, Homo sapien
gaggaggaatgggtgggcggaagga

SEQ ID NO: 2888367 - DNA, 25 bp, Homo sapien
aaggactcgggaggaggaatgggtg

SEQ ID NO: 2888368 - DNA, 25 bp, Homo sapien
gactcgggaggaggaatgggtgggc

SEQ ID NO: 2888369 - DNA, 25 bp, Homo sapien
tagacagtctttgtcgggtctgtct

SEQ ID NO: 2888370 - DNA, 25 bp, Homo sapien
gctaaaattggaccagttgatagac

SEQ ID NO: 2888371 - DNA, 25 bp, Homo sapien
ctgtctagcagaatccaagcagaac

SEQ ID NO: 2888372 - DNA, 25 bp, Homo sapien
aattggaccagttgatagacagtct

SEQ ID NO: 2888373 - DNA, 25 bp, Homo sapien
caaacagcgcaacgtgtacactcgg

SEQ ID NO: 2888374 - DNA, 25 bp, Homo sapien
caagggatcttacacaagctggcta

SEQ ID NO: 2888375 - DNA, 25 bp, Homo sapien
gctacaatcgaaggagtctcacgca

SEQ ID NO: 2888376 - DNA, 25 bp, Homo sapien
ccaggcaggcctccgtgttaataca

SEQ ID NO: 2888377 - DNA, 25 bp, Homo sapien
tcatcccacgaacaaaggaacgttc

SEQ ID NO: 2888378 - DNA, 25 bp, Homo sapien
catcccacgaacaaaggaacgttct

SEQ ID NO: 2888379 - DNA, 25 bp, Homo sapien
gaacaaaggaacgttctcttcctca

SEQ ID NO: 2888380 - DNA, 25 bp, Homo sapien
gcggtctttcacaacattaaggatg

SEQ ID NO: 2888381 - DNA, 25 bp, Homo sapien
gggattccacttgatcacggtgtat

SEQ ID NO: 2888382 - DNA, 25 bp, Homo sapien
agttctcttctattcacacttggtg

SEQ ID NO: 2888383 - DNA, 25 bp, Homo sapien
attgaaccacccttacattcctggg

SEQ ID NO: 2888384 - DNA, 25 bp, Homo sapien
tataataaacgttcttgctgctgtg

SEQ ID NO: 2888385 - DNA, 25 bp, Homo sapien
tagcatttgtcatccagccggaagt

SEQ ID NO: 2888386 - DNA, 25 bp, Homo sapien
ttgggagtcctatgttcaagggcag

SEQ ID NO: 2888387 - DNA, 25 bp, Homo sapien
atccagcacggagcaagatgtaggc

SEQ ID NO: 2888388 - DNA, 25 bp, Homo sapien
caggctgcagtgcttcaggacggat

SEQ ID NO: 2888389 - DNA, 25 bp, Homo sapien
tcatgagcacatgacggagcgtgtg

SEQ ID NO: 2888390 - DNA, 25 bp, Homo sapien
tccgctcagggataggtgaagtgcc

SEQ ID NO: 2888391 - DNA, 25 bp, Homo sapien
gggccgataggtccaactgaacagg

SEQ ID NO: 2888392 - DNA, 25 bp, Homo sapien
tatccacaagacaagacgtcactcc

SEQ ID NO: 2888393 - DNA, 25 bp, Homo sapien
accagtcccgtcctaatccattttg

SEQ ID NO: 2888394 - DNA, 25 bp, Homo sapien
tgttgtcacgtggtcgtcttctctc

SEQ ID NO: 2888395 - DNA, 25 bp, Homo sapien
gaccctatctctaagtaaggtttca

SEQ ID NO: 2888396 - DNA, 25 bp, Homo sapien
ccacaaggactatgagccaccacac

SEQ ID NO: 2888397 - DNA, 25 bp, Homo sapien
tatttattgctcatcccaacgttca

SEQ ID NO: 2888398 - DNA, 25 bp, Homo sapien
catcccaacgttcaatctgaggtcg

SEQ ID NO: 2888399 - DNA, 25 bp, Homo sapien
taggcgaagagcctaccacaaggac

SEQ ID NO: 2888400 - DNA, 25 bp, Homo sapien
cagtatacttgcagtcggtggccat

SEQ ID NO: 2888401 - DNA, 25 bp, Homo sapien
gaaggtacatcctgactcactagag

SEQ ID NO: 2888402 - DNA, 25 bp, Homo sapien
aaacattcgggtgagctctggcatc

SEQ ID NO: 2888403 - DNA, 25 bp, Homo sapien
gagccacagatgagtacagaccaag

SEQ ID NO: 2888404 - DNA, 25 bp, Homo sapien
tgagggacactaggtcctgggggta

SEQ ID NO: 2888405 - DNA, 25 bp, Homo sapien
gggtgatagggcaacagcttctggg

SEQ ID NO: 2888406 - DNA, 25 bp, Homo sapien
ctggggttgagggacactaggtcct

SEQ ID NO: 2888407 - DNA, 25 bp, Homo sapien
ttgagttggcctcgggtcctgaggg

SEQ ID NO: 2888408 - DNA, 25 bp, Homo sapien
catgccatggctacgtctacaaata

SEQ ID NO: 2888409 - DNA, 25 bp, Homo sapien
tatgaaacagctagaataaacggaa

SEQ ID NO: 2888410 - DNA, 25 bp, Homo sapien
tatatgaaagtcctgttgctatgca

SEQ ID NO: 2888411 - DNA, 25 bp, Homo sapien
gacatatctccctagcaagatagtg

SEQ ID NO: 2888412 - DNA, 25 bp, Homo sapien
ggtcgaggcggcggcttgactcggc

SEQ ID NO: 2888413 - DNA, 25 bp, Homo sapien
cgaggcggcggcttgactcggccgc

SEQ ID NO: 2888414 - DNA, 25 bp, Homo sapien
gcggcggcttgactcggccgccagg

SEQ ID NO: 2888415 - DNA, 25 bp, Homo sapien
ctgggtcgaggcggcggcttgactc

SEQ ID NO: 2888416 - DNA, 25 bp, Homo sapien
tgaacccagaggcttgcttcggcaa

SEQ ID NO: 2888417 - DNA, 25 bp, Homo sapien
ggcggttgtggaaacaattctacac

SEQ ID NO: 2888418 - DNA, 25 bp, Homo sapien
aattctacacattgcatcaccggcc

SEQ ID NO: 2888419 - DNA, 25 bp, Homo sapien
gccctgccttcaggcggttgtggaa

SEQ ID NO: 2888420 - DNA, 25 bp, Homo sapien
tccaggtggccgagcccacattctt

SEQ ID NO: 2888421 - DNA, 25 bp, Homo sapien
gatggaccagatgtgaccggaatcc

SEQ ID NO: 2888422 - DNA, 25 bp, Homo sapien
gcctgaccactctcatggccttgga

SEQ ID NO: 2888423 - DNA, 25 bp, Homo sapien
atggataccacgagggcgctctgcc

SEQ ID NO: 2888424 - DNA, 25 bp, Homo sapien
tgaagctgagcgaagtccagtcgcg

SEQ ID NO: 2888425 - DNA, 25 bp, Homo sapien
aaggcatttcagagattccaccccc

SEQ ID NO: 2888426 - DNA, 25 bp, Homo sapien
tccagtcgcggtgagggtcccgagg

SEQ ID NO: 2888427 - DNA, 25 bp, Homo sapien
ggtacagcaggaacgaagtcctgag

SEQ ID NO: 2888428 - DNA, 25 bp, Homo sapien
caggcatttcctgctgagcctggct

SEQ ID NO: 2888429 - DNA, 25 bp, Homo sapien
ggtaggaaatctgccgggcaccttc

SEQ ID NO: 2888430 - DNA, 25 bp, Homo sapien
taggtaggaaatctgccgggcacct

SEQ ID NO: 2888431 - DNA, 25 bp, Homo sapien
gcttaggtaggaaatctgccgggca

SEQ ID NO: 2888432 - DNA, 25 bp, Homo sapien
gcccagggggtgtgcttaggtagga

SEQ ID NO: 2888433 - DNA, 25 bp, Homo sapien
ggctccacttagtctgatcccgagt

SEQ ID NO: 2888434 - DNA, 25 bp, Homo sapien
acttagtctgatcccgagtgtgggc

SEQ ID NO: 2888435 - DNA, 25 bp, Homo sapien
tccacttagtctgatcccgagtgtg

SEQ ID NO: 2888436 - DNA, 25 bp, Homo sapien
ccttccccaggatgaactgcaggct

SEQ ID NO: 2888437 - DNA, 25 bp, Homo sapien
ggcaggcagagggccaagggtcagc

SEQ ID NO: 2888438 - DNA, 25 bp, Homo sapien
cagggcaggcagagggccaagggtc

SEQ ID NO: 2888439 - DNA, 25 bp, Homo sapien
caggatgagtgggagccagccagca

SEQ ID NO: 2888440 - DNA, 25 bp, Homo sapien
cagcagggcaggcagagggccaagg

SEQ ID NO: 2888441 - DNA, 25 bp, Homo sapien
tcccagacatgtgaggcctgacgcg

SEQ ID NO: 2888442 - DNA, 25 bp, Homo sapien
ccagacatgtgaggcctgacgcgcc

SEQ ID NO: 2888443 - DNA, 25 bp, Homo sapien
catgtgaggcctgacgcgcctggct

SEQ ID NO: 2888444 - DNA, 25 bp, Homo sapien
agcccaggcagcctacatctcccag

SEQ ID NO: 2888445 - DNA, 25 bp, Homo sapien
tggtgctgacccaacacatggccct

SEQ ID NO: 2888446 - DNA, 25 bp, Homo sapien
atggtgctgacccaacacatggccc

SEQ ID NO: 2888447 - DNA, 25 bp, Homo sapien
ccaacacatggccctccgtcctcgt

SEQ ID NO: 2888448 - DNA, 25 bp, Homo sapien
acacatggccctccgtcctcgtgac

SEQ ID NO: 2888449 - DNA, 25 bp, Homo sapien
tctgggtgcttcagtcccttcctct

SEQ ID NO: 2888450 - DNA, 25 bp, Homo sapien
gccaggagcccagtgccaggccagg

SEQ ID NO: 2888451 - DNA, 25 bp, Homo sapien
tggccaggagcccagtgccaggcca

SEQ ID NO: 2888452 - DNA, 25 bp, Homo sapien
ggccaggagcccagtgccaggccag

SEQ ID NO: 2888453 - DNA, 25 bp, Homo sapien
ctggccaggagcccagtgccaggcc

SEQ ID NO: 2888454 - DNA, 25 bp, Homo sapien
caaaggccggcagaggcccttgctg

SEQ ID NO: 2888455 - DNA, 25 bp, Homo sapien
gggtggccaaaggccggcagaggcc

SEQ ID NO: 2888456 - DNA, 25 bp, Homo sapien
tggggtggccaaaggccggcagagg

SEQ ID NO: 2888457 - DNA, 25 bp, Homo sapien
tggccaaaggccggcagaggccctt

SEQ ID NO: 2888458 - DNA, 25 bp, Homo sapien
agccaggggtctggtccttggcacc

SEQ ID NO: 2888459 - DNA, 25 bp, Homo sapien
tttcctgcgggactccatgggcctc

SEQ ID NO: 2888460 - DNA, 25 bp, Homo sapien
agccccggattctccaaggagccag

SEQ ID NO: 2888461 - DNA, 25 bp, Homo sapien
tgcttgcccaaacgcaggcacctca

SEQ ID NO: 2888462 - DNA, 25 bp, Homo sapien
ttggttggaaatccacggccggcgc

SEQ ID NO: 2888463 - DNA, 25 bp, Homo sapien
tttccccacgctgcaaggaggttgg

SEQ ID NO: 2888464 - DNA, 25 bp, Homo sapien
caagaagccttcgatgcaaacgagg

SEQ ID NO: 2888465 - DNA, 25 bp, Homo sapien
cctcgggaaagtggcctctgcaaaa

SEQ ID NO: 2888466 - DNA, 25 bp, Homo sapien
cccgccggccccagctccgcggccg

SEQ ID NO: 2888467 - DNA, 25 bp, Homo sapien
cctcccgccggccccagctccgcgg

SEQ ID NO: 2888468 - DNA, 25 bp, Homo sapien
tccgcggccgcggcccggagcccgc

SEQ ID NO: 2888469 - DNA, 25 bp, Homo sapien
tgcgagcaccggcacggccccgggc

SEQ ID NO: 2888470 - DNA, 25 bp, Homo sapien
cacgcggcgggcatggccggcttcc

SEQ ID NO: 2888471 - DNA, 25 bp, Homo sapien
ggcgtccacgcggcgggcatggccg

SEQ ID NO: 2888472 - DNA, 25 bp, Homo sapien
gtccacgcggcgggcatggccggct

SEQ ID NO: 2888473 - DNA, 25 bp, Homo sapien
catggccggcttccccggggcgatc

SEQ ID NO: 2888474 - DNA, 25 bp, Homo sapien
ggtccagagccggaagctcgcggcc

SEQ ID NO: 2888475 - DNA, 25 bp, Homo sapien
gcggggtccagagccggaagctcgc

SEQ ID NO: 2888476 - DNA, 25 bp, Homo sapien
tccagagccggaagctcgcggcccg

SEQ ID NO: 2888477 - DNA, 25 bp, Homo sapien
ggggtccagagccggaagctcgcgg

SEQ ID NO: 2888478 - DNA, 25 bp, Homo sapien
gcagatcgacaagccccgtgccggc

SEQ ID NO: 2888479 - DNA, 25 bp, Homo sapien
ttcccccaagaagcgcgtgggcgac

SEQ ID NO: 2888480 - DNA, 25 bp, Homo sapien
gctgcccgcagatcgacaagccccg

SEQ ID NO: 2888481 - DNA, 25 bp, Homo sapien
gttcccccaagaagcgcgtgggcga

SEQ ID NO: 2888482 - DNA, 25 bp, Homo sapien
gggcaactgagctggagctaaaatt

SEQ ID NO: 2888483 - DNA, 25 bp, Homo sapien
tatagtacccggaggaggcttatcc

SEQ ID NO: 2888484 - DNA, 25 bp, Homo sapien
tgcaagaggaagtcttcaaggcatc

SEQ ID NO: 2888485 - DNA, 25 bp, Homo sapien
agcaccctccaacaaaagtgcaaga

SEQ ID NO: 2888486 - DNA, 25 bp, Homo sapien
ccccaggcatggttagcaggttctg

SEQ ID NO: 2888487 - DNA, 25 bp, Homo sapien
acaggccaatgcatctcttcagccg

SEQ ID NO: 2888488 - DNA, 25 bp, Homo sapien
caccaatggccttcatagggacagg

SEQ ID NO: 2888489 - DNA, 25 bp, Homo sapien
tgaagctgggtaccgcccttcttgt

SEQ ID NO: 2888490 - DNA, 25 bp, Homo sapien
cttgaagtagtagacgcagcgtttg

SEQ ID NO: 2888491 - DNA, 25 bp, Homo sapien
gccactcagggagaaggcgccctgc

SEQ ID NO: 2888492 - DNA, 25 bp, Homo sapien
ggaggcagaggtgctactcttgaag

SEQ ID NO: 2888493 - DNA, 25 bp, Homo sapien
tttgtggatgatgacaaagcgcagg

SEQ ID NO: 2888494 - DNA, 25 bp, Homo sapien
agcctctgtttgggacagggcctgg

SEQ ID NO: 2888495 - DNA, 25 bp, Homo sapien
ctagggcccagcctctgtttgggac

SEQ ID NO: 2888496 - DNA, 25 bp, Homo sapien
cccagcctctgtttgggacagggcc

SEQ ID NO: 2888497 - DNA, 25 bp, Homo sapien
agggcccagcctctgtttgggacag

SEQ ID NO: 2888498 - DNA, 25 bp, Homo sapien
gcccaggacatgcgtgaagctggaa

SEQ ID NO: 2888499 - DNA, 25 bp, Homo sapien
gacatgcgtgaagctggaaactgat

SEQ ID NO: 2888500 - DNA, 25 bp, Homo sapien
cgtgaagctggaaactgatcccggc

SEQ ID NO: 2888501 - DNA, 25 bp, Homo sapien
aagctggaaactgatcccggcctgg

SEQ ID NO: 2888502 - DNA, 25 bp, Homo sapien
tgttggacgtggtctcctcagccgc

SEQ ID NO: 2888503 - DNA, 25 bp, Homo sapien
aacgttgttggacgtggtctcctca

SEQ ID NO: 2888504 - DNA, 25 bp, Homo sapien
ccgagaagaaccacgtgcggtgctt

SEQ ID NO: 2888505 - DNA, 25 bp, Homo sapien
gatgatcttgaaggggaaaacgttg

SEQ ID NO: 2888506 - DNA, 25 bp, Homo sapien
tgcactcgtcctcggacccccagtc

SEQ ID NO: 2888507 - DNA, 25 bp, Homo sapien
cttgcactcgtcctcggacccccag

SEQ ID NO: 2888508 - DNA, 25 bp, Homo sapien
ttgcactcgtcctcggacccccagt

SEQ ID NO: 2888509 - DNA, 25 bp, Homo sapien
cactcgtcctcggacccccagtcac

SEQ ID NO: 2888510 - DNA, 25 bp, Homo sapien
cgacccggctggatacaacatggct

SEQ ID NO: 2888511 - DNA, 25 bp, Homo sapien
acccggctggatacaacatggctgt

SEQ ID NO: 2888512 - DNA, 25 bp, Homo sapien
gaggcgacccggctggatacaacat

SEQ ID NO: 2888513 - DNA, 25 bp, Homo sapien
caaggtcagaggaggcgacccggct

SEQ ID NO: 2888514 - DNA, 25 bp, Homo sapien
tctttcttttcgtggaagtggccaa

SEQ ID NO: 2888515 - DNA, 25 bp, Homo sapien
gtctttcttttcgtggaagtggcca

SEQ ID NO: 2888516 - DNA, 25 bp, Homo sapien
ttcttttcgtggaagtggccaatct

SEQ ID NO: 2888517 - DNA, 25 bp, Homo sapien
caggtctttcttttcgtggaagtgg

SEQ ID NO: 2888518 - DNA, 25 bp, Homo sapien
ggaggtcccttgatgctcacacaaa

SEQ ID NO: 2888519 - DNA, 25 bp, Homo sapien
taaacacagatacaggacaagcaca

SEQ ID NO: 2888520 - DNA, 25 bp, Homo sapien
ggcacacgcggatacatggacagat

SEQ ID NO: 2888521 - DNA, 25 bp, Homo sapien
catgttcacacacagacgagcgaca

SEQ ID NO: 2888522 - DNA, 25 bp, Homo sapien
tcaactgcgccgtagaagctgtctg

SEQ ID NO: 2888523 - DNA, 25 bp, Homo sapien
aaggctgatatccacaggccgctca

SEQ ID NO: 2888524 - DNA, 25 bp, Homo sapien
tagaagctgtctgtgtccgagctgg

SEQ ID NO: 2888525 - DNA, 25 bp, Homo sapien
aggccgctcaactgcgccgtagaag

SEQ ID NO: 2888526 - DNA, 25 bp, Homo sapien
gtcatcctcatcgtcgtgctcatag

SEQ ID NO: 2888527 - DNA, 25 bp, Homo sapien
tcatcctcatcgtcgtgctcatagt

SEQ ID NO: 2888528 - DNA, 25 bp, Homo sapien
tgggtaagccggtgggtgcatcagg

SEQ ID NO: 2888529 - DNA, 25 bp, Homo sapien
tagcaggtaccctggggcaaggctc

SEQ ID NO: 2888530 - DNA, 25 bp, Homo sapien
ggctggcactctcccggaagcaagg

SEQ ID NO: 2888531 - DNA, 25 bp, Homo sapien
tgctcagagggggatcgctcatcct

SEQ ID NO: 2888532 - DNA, 25 bp, Homo sapien
ctttgaccacagccattggcgtaac

SEQ ID NO: 2888533 - DNA, 25 bp, Homo sapien
tttgaccacagccattggcgtaact

SEQ ID NO: 2888534 - DNA, 25 bp, Homo sapien
cctttgaccacagccattggcgtaa

SEQ ID NO: 2888535 - DNA, 25 bp, Homo sapien
gaaactctgcccatcggggggtgat

SEQ ID NO: 2888536 - DNA, 25 bp, Homo sapien
ccagtgtcagcctgtgagggttgcc

SEQ ID NO: 2888537 - DNA, 25 bp, Homo sapien
cctgaaactctgcccatcggggggt

SEQ ID NO: 2888538 - DNA, 25 bp, Homo sapien
tcgtccgagtcgtccccgccagtgt

SEQ ID NO: 2888539 - DNA, 25 bp, Homo sapien
tccgtggtgttgacgaagaccgagt

SEQ ID NO: 2888540 - DNA, 25 bp, Homo sapien
acttcgcaggactccgtggtgttga

SEQ ID NO: 2888541 - DNA, 25 bp, Homo sapien
cgcaggactccgtggtgttgacgaa

SEQ ID NO: 2888542 - DNA, 25 bp, Homo sapien
tttccacttcgcaggactccgtggt

SEQ ID NO: 2888543 - DNA, 25 bp, Homo sapien
catattagcgggtgagtcctcctcg

SEQ ID NO: 2888544 - DNA, 25 bp, Homo sapien
tctcaggagctgagcacgtcgggct

SEQ ID NO: 2888545 - DNA, 25 bp, Homo sapien
cacgcagggccatgaacttgtgcca

SEQ ID NO: 2888546 - DNA, 25 bp, Homo sapien
cacggaagctagtgagagggacaca

SEQ ID NO: 2888547 - DNA, 25 bp, Homo sapien
cggatgcagtagagtccatcctggg

SEQ ID NO: 2888548 - DNA, 25 bp, Homo sapien
acttggtagaggagttccggatgca

SEQ ID NO: 2888549 - DNA, 25 bp, Homo sapien
aggagttccggatgcagtagagtcc

SEQ ID NO: 2888550 - DNA, 25 bp, Homo sapien
tctccccgggggcttgtagccttga

SEQ ID NO: 2888551 - DNA, 25 bp, Homo sapien
cgatagttcctcactttgttagagg

SEQ ID NO: 2888552 - DNA, 25 bp, Homo sapien
aaaaatgcgatagttcctcactttg

SEQ ID NO: 2888553 - DNA, 25 bp, Homo sapien
gaggtttcgtcccacacaaccagga

SEQ ID NO: 2888554 - DNA, 25 bp, Homo sapien
cttctcaaaaatgcgatagttcctc

SEQ ID NO: 2888555 - DNA, 25 bp, Homo sapien
agtctcagtctacccgctgcctatg

SEQ ID NO: 2888556 - DNA, 25 bp, Homo sapien
ccatccccactagggtcagtggagg

SEQ ID NO: 2888557 - DNA, 25 bp, Homo sapien
caacccagggtctatggctgaccgc

SEQ ID NO: 2888558 - DNA, 25 bp, Homo sapien
gagcacttcagacaaggtcaggaaa

SEQ ID NO: 2888559 - DNA, 25 bp, Homo sapien
ccacactcacaaacaggacctcgcc

SEQ ID NO: 2888560 - DNA, 25 bp, Homo sapien
tcacaaacaggacctcgccctccag

SEQ ID NO: 2888561 - DNA, 25 bp, Homo sapien
cgccctccaggtagaacttagagtc

SEQ ID NO: 2888562 - DNA, 25 bp, Homo sapien
caaacaggacctcgccctccaggta

SEQ ID NO: 2888563 - DNA, 25 bp, Homo sapien
caacctgctggatgagactggctgg

SEQ ID NO: 2888564 - DNA, 25 bp, Homo sapien
tggctgggtcctacgagatgtccat

SEQ ID NO: 2888565 - DNA, 25 bp, Homo sapien
agatgtccatcacagaggccctagg

SEQ ID NO: 2888566 - DNA, 25 bp, Homo sapien
tactggagcctgtgtcttagcgttc

SEQ ID NO: 2888567 - DNA, 25 bp, Homo sapien
atctgttactcgctgtgcaccctgg

SEQ ID NO: 2888568 - DNA, 25 bp, Homo sapien
ggaggtacccagtaaccaggcacta

SEQ ID NO: 2888569 - DNA, 25 bp, Homo sapien
cacttagacatcagcatgggcaccc

SEQ ID NO: 2888570 - DNA, 25 bp, Homo sapien
tgtagcccgctcagtgtatgcaagt

SEQ ID NO: 2888571 - DNA, 25 bp, Homo sapien
tgccctggacactgtgccgtaagca

SEQ ID NO: 2888572 - DNA, 25 bp, Homo sapien
gcttagggtccactgttcccatccc

SEQ ID NO: 2888573 - DNA, 25 bp, Homo sapien
tgtgccgtaagcacctcatacccag

SEQ ID NO: 2888574 - DNA, 25 bp, Homo sapien
catcccatcgtagctgttacttcct

SEQ ID NO: 2888575 - DNA, 25 bp, Homo sapien
cacaaggattctagggtccctgcca

SEQ ID NO: 2888576 - DNA, 25 bp, Homo sapien
aaatgatgtcaagcacccagctcgg

SEQ ID NO: 2888577 - DNA, 25 bp, Homo sapien
gagggacctatcacctggctctggg

SEQ ID NO: 2888578 - DNA, 25 bp, Homo sapien
taaaatgggtctactagcagctgct

SEQ ID NO: 2888579 - DNA, 25 bp, Homo sapien
cccccttggttgagtgaaagcacct

SEQ ID NO: 2888580 - DNA, 25 bp, Homo sapien
tgctgtggcccccttggttgagtga

SEQ ID NO: 2888581 - DNA, 25 bp, Homo sapien
caacgaccatcagaggtcgtgaggg

SEQ ID NO: 2888582 - DNA, 25 bp, Homo sapien
tgaggcggggcagtttcactcccca

SEQ ID NO: 2888583 - DNA, 25 bp, Homo sapien
aactcatcttgaaggtaggtatgtc

SEQ ID NO: 2888584 - DNA, 25 bp, Homo sapien
cagaactgagcccacctgaactcat

SEQ ID NO: 2888585 - DNA, 25 bp, Homo sapien
gagcccacctgaactcatcttgaag

SEQ ID NO: 2888586 - DNA, 25 bp, Homo sapien
gtaggtatgtcagtgagtcctccca

SEQ ID NO: 2888587 - DNA, 25 bp, Homo sapien
attaactgaaggcacggggctcacc

SEQ ID NO: 2888588 - DNA, 25 bp, Homo sapien
ttaactgaaggcacggggctcacca

SEQ ID NO: 2888589 - DNA, 25 bp, Homo sapien
ttattaactgaaggcacggggctca

SEQ ID NO: 2888590 - DNA, 25 bp, Homo sapien
ctttattaactgaaggcacggggct

SEQ ID NO: 2888591 - DNA, 25 bp, Homo sapien
tgaaatggccccaataagccctgcc

SEQ ID NO: 2888592 - DNA, 25 bp, Homo sapien
tgcctcagggaactaagccgcaggt

SEQ ID NO: 2888593 - DNA, 25 bp, Homo sapien
ctcgtctagagacaagcacggccct

SEQ ID NO: 2888594 - DNA, 25 bp, Homo sapien
tgtgaccctggtgtcctaggccatc

SEQ ID NO: 2888595 - DNA, 25 bp, Homo sapien
acggcaacgccagggcagctgtctg

SEQ ID NO: 2888596 - DNA, 25 bp, Homo sapien
agcagacggcaacgccagggcagct

SEQ ID NO: 2888597 - DNA, 25 bp, Homo sapien
agaagcagacggcaacgccagggca

SEQ ID NO: 2888598 - DNA, 25 bp, Homo sapien
caacgccagggcagctgtctggcag

SEQ ID NO: 2888599 - DNA, 25 bp, Homo sapien
ccatggaccataccggaagaactgt

SEQ ID NO: 2888600 - DNA, 25 bp, Homo sapien
gaactgtctcgggtcacgcataaaa

SEQ ID NO: 2888601 - DNA, 25 bp, Homo sapien
caatgataggacaggtgtgtaaccc

SEQ ID NO: 2888602 - DNA, 25 bp, Homo sapien
tagcagcattgtgtgtagttacccc

SEQ ID NO: 2888603 - DNA, 25 bp, Homo sapien
ccggcagcttcgggcgccaggtcat

SEQ ID NO: 2888604 - DNA, 25 bp, Homo sapien
cgcgcggagtacaccccggccggca

SEQ ID NO: 2888605 - DNA, 25 bp, Homo sapien
cagggcgattggactcgccaggccc

SEQ ID NO: 2888606 - DNA, 25 bp, Homo sapien
cctgcgattggcgggacccatgagg

SEQ ID NO: 2888607 - DNA, 25 bp, Homo sapien
ctcagaagcgaatcgtgggcagcgc

SEQ ID NO: 2888608 - DNA, 25 bp, Homo sapien
cagcgcgcgggattccggggtccca

SEQ ID NO: 2888609 - DNA, 25 bp, Homo sapien
ggtcccagtgcggccaccgcccgtc

SEQ ID NO: 2888610 - DNA, 25 bp, Homo sapien
ggccaccgcccgtcggctccggctc

SEQ ID NO: 2888611 - DNA, 25 bp, Homo sapien
ttaaatacgagagccgacagatgcg

SEQ ID NO: 2888612 - DNA, 25 bp, Homo sapien
gattatctctcgagcgtccgtcggc

SEQ ID NO: 2888613 - DNA, 25 bp, Homo sapien
gatgcgtccgtacacaaaccttgca

SEQ ID NO: 2888614 - DNA, 25 bp, Homo sapien
tcctatcccgatgaaagatctgcgg

SEQ ID NO: 2888615 - DNA, 25 bp, Homo sapien
aaggaaaactatctcacaattcggg

SEQ ID NO: 2888616 - DNA, 25 bp, Homo sapien
actcagcgactctccgaaactttaa

SEQ ID NO: 2888617 - DNA, 25 bp, Homo sapien
gtttagactcacatcactcagcgac

SEQ ID NO: 2888618 - DNA, 25 bp, Homo sapien
tcataccagctgtccataccattgt

SEQ ID NO: 2888619 - DNA, 25 bp, Homo sapien
gctgaaatgactgtaggcactgaca

SEQ ID NO: 2888620 - DNA, 25 bp, Homo sapien
tacctcaagataaccaaatagtgga

SEQ ID NO: 2888621 - DNA, 25 bp, Homo sapien
ggttcgtaccatcttagcctcagga

SEQ ID NO: 2888622 - DNA, 25 bp, Homo sapien
cactgacaatcaagggctgcgaaca

SEQ ID NO: 2888623 - DNA, 25 bp, Homo sapien
gcaaggccttggctctactaaaaaa

SEQ ID NO: 2888624 - DNA, 25 bp, Homo sapien
aatgctgcagacaccctaggtcagt

SEQ ID NO: 2888625 - DNA, 25 bp, Homo sapien
ggttagattacagctatttccacag

SEQ ID NO: 2888626 - DNA, 25 bp, Homo sapien
tgaaatggagtatctgcgaaacccc

SEQ ID NO: 2888627 - DNA, 25 bp, Homo sapien
gcctgggtgacgagagcaaaactca

SEQ ID NO: 2888628 - DNA, 25 bp, Homo sapien
cctgggtgacgagagcaaaactcag

SEQ ID NO: 2888629 - DNA, 25 bp, Homo sapien
ctgggtgacgagagcaaaactcagt

SEQ ID NO: 2888630 - DNA, 25 bp, Homo sapien
ctaagtacagctcaacaggaagatg

SEQ ID NO: 2888631 - DNA, 25 bp, Homo sapien
tagagatatacagaaccttgcacct

SEQ ID NO: 2888632 - DNA, 25 bp, Homo sapien
catttattcggaatggaaaaggcca

SEQ ID NO: 2888633 - DNA, 25 bp, Homo sapien
cacattgctcaagtcagtaacagta

SEQ ID NO: 2888634 - DNA, 25 bp, Homo sapien
tggtccagtgatattgttttcaaac

SEQ ID NO: 2888635 - DNA, 25 bp, Homo sapien
cccatacgacctccagaggaagaat

SEQ ID NO: 2888636 - DNA, 25 bp, Homo sapien
agattctcccatacgacctccagag

SEQ ID NO: 2888637 - DNA, 25 bp, Homo sapien
cttgattttggtccagtgatattgt

SEQ ID NO: 2888638 - DNA, 25 bp, Homo sapien
cagtatccttataaaatcgaggtgg

SEQ ID NO: 2888639 - DNA, 25 bp, Homo sapien
tgggccctgaatgtaatcaccagta

SEQ ID NO: 2888640 - DNA, 25 bp, Homo sapien
gtccccaagttaacaggtctgaata

SEQ ID NO: 2888641 - DNA, 25 bp, Homo sapien
tagtaagctgagtaacggtccccaa

SEQ ID NO: 2888642 - DNA, 25 bp, Homo sapien
taggagggcgacagaatattagttt

SEQ ID NO: 2888643 - DNA, 25 bp, Homo sapien
actttcatgcctttgctgtatctag

SEQ ID NO: 2888644 - DNA, 25 bp, Homo sapien
tgtgtgaaataatttccgagtagct

SEQ ID NO: 2888645 - DNA, 25 bp, Homo sapien
tagacttcgttaaatatgcatagca

SEQ ID NO: 2888646 - DNA, 25 bp, Homo sapien
tgactttgtaccagcaacgccctac

SEQ ID NO: 2888647 - DNA, 25 bp, Homo sapien
aatctgtctggtatcactagtgcag

SEQ ID NO: 2888648 - DNA, 25 bp, Homo sapien
gatcccagttcactaaaccgcgtaa

SEQ ID NO: 2888649 - DNA, 25 bp, Homo sapien
aatacactcggtgatatgttcccag

SEQ ID NO: 2888650 - DNA, 25 bp, Homo sapien
cactgctcactatgtgtgttttaac

SEQ ID NO: 2888651 - DNA, 25 bp, Homo sapien
atcacagctacagttatcactgctc

SEQ ID NO: 2888652 - DNA, 25 bp, Homo sapien
gttatcactgctcactatgtgtgtt

SEQ ID NO: 2888653 - DNA, 25 bp, Homo sapien
tcacagctacagttatcactgctca

SEQ ID NO: 2888654 - DNA, 25 bp, Homo sapien
tctgatcggatcatttctattcctg

SEQ ID NO: 2888655 - DNA, 25 bp, Homo sapien
tattcctgtgtctccggatgtcctc

SEQ ID NO: 2888656 - DNA, 25 bp, Homo sapien
cagctttaggctgacggagtgtgcc

SEQ ID NO: 2888657 - DNA, 25 bp, Homo sapien
aaagcctttaattactctgatcgga

SEQ ID NO: 2888658 - DNA, 25 bp, Homo sapien
gggttgttctcatctactcggtcga

SEQ ID NO: 2888659 - DNA, 25 bp, Homo sapien
aagtcctggcgaaggtctggtgcca

SEQ ID NO: 2888660 - DNA, 25 bp, Homo sapien
ggtcaccaccgcagcacgagaatca

SEQ ID NO: 2888661 - DNA, 25 bp, Homo sapien
gtcgaagtacctctccttgtgaggg

SEQ ID NO: 2888662 - DNA, 25 bp, Homo sapien
gccctccaatgattctgccacacac

SEQ ID NO: 2888663 - DNA, 25 bp, Homo sapien
tgtgggctcatcaagcccatcccta

SEQ ID NO: 2888664 - DNA, 25 bp, Homo sapien
tggaaactctcaatctcagcataca

SEQ ID NO: 2888665 - DNA, 25 bp, Homo sapien
caggccgaaccacactggctgcctt

SEQ ID NO: 2888666 - DNA, 25 bp, Homo sapien
tataaactggtacattcttttctag

SEQ ID NO: 2888667 - DNA, 25 bp, Homo sapien
gatattctcacacattactgctgag

SEQ ID NO: 2888668 - DNA, 25 bp, Homo sapien
gctggaaaggcaaacggatattctc

SEQ ID NO: 2888669 - DNA, 25 bp, Homo sapien
gcaaacggatattctcacacattac

SEQ ID NO: 2888670 - DNA, 25 bp, Homo sapien
tacattcgtggtcataaaatctgca

SEQ ID NO: 2888671 - DNA, 25 bp, Homo sapien
tgctgtaatgccaataggcctgtgg

SEQ ID NO: 2888672 - DNA, 25 bp, Homo sapien
tgggtagacatttggtacattcgtg

SEQ ID NO: 2888673 - DNA, 25 bp, Homo sapien
aattgctcctgtatcattgattcca

SEQ ID NO: 2888674 - DNA, 25 bp, Homo sapien
tctgctagtctataaaacgctgcca

SEQ ID NO: 2888675 - DNA, 25 bp, Homo sapien
gttcacaggagtcaccataccaaga

SEQ ID NO: 2888676 - DNA, 25 bp, Homo sapien
gattgtagataagctgagaccaccc

SEQ ID NO: 2888677 - DNA, 25 bp, Homo sapien
tgtcatacgcaatagaatcagatcc

SEQ ID NO: 2888678 - DNA, 25 bp, Homo sapien
accaatatcaagtcccagaggcaca

SEQ ID NO: 2888679 - DNA, 25 bp, Homo sapien
catttcagcaacgtgaacagcgcac

SEQ ID NO: 2888680 - DNA, 25 bp, Homo sapien
gaagcaccgctggttatgagtccat

SEQ ID NO: 2888681 - DNA, 25 bp, Homo sapien
taatcacaaggtgagctccagaccg

SEQ ID NO: 2888682 - DNA, 25 bp, Homo sapien
ctgtcaagtataattagatgacaga

SEQ ID NO: 2888683 - DNA, 25 bp, Homo sapien
tgtcaagtataattagatgacagag

SEQ ID NO: 2888684 - DNA, 25 bp, Homo sapien
gtcaagtataattagatgacagagg

SEQ ID NO: 2888685 - DNA, 25 bp, Homo sapien
tcaagtataattagatgacagaggc

SEQ ID NO: 2888686 - DNA, 25 bp, Homo sapien
ctgtaacattttcaccgcactgatc

SEQ ID NO: 2888687 - DNA, 25 bp, Homo sapien
ttagcactaatctccaccacagcat

SEQ ID NO: 2888688 - DNA, 25 bp, Homo sapien
tccaatcacagctgtaacattttca

SEQ ID NO: 2888689 - DNA, 25 bp, Homo sapien
tttcaccgcactgatcttcaggcaa

SEQ ID NO: 2888690 - DNA, 25 bp, Homo sapien
gaaggtgaagctgttatcacagtta

SEQ ID NO: 2888691 - DNA, 25 bp, Homo sapien
cagcattcaaaataggactaggcaa

SEQ ID NO: 2888692 - DNA, 25 bp, Homo sapien
ataggactaggcaaacagcacttta

SEQ ID NO: 2888693 - DNA, 25 bp, Homo sapien
aggtgaagctgttatcacagttagg

SEQ ID NO: 2888694 - DNA, 25 bp, Homo sapien
gatgcacccactttttctggcctcc

SEQ ID NO: 2888695 - DNA, 25 bp, Homo sapien
gaaatgaccacctactcgctgagag

SEQ ID NO: 2888696 - DNA, 25 bp, Homo sapien
ccaaacagaagcatacccagggtct

SEQ ID NO: 2888697 - DNA, 25 bp, Homo sapien
aactggctatggtgttctgggcacc

SEQ ID NO: 2888698 - DNA, 25 bp, Homo sapien
tgtcatgggcgctgaagcactgtca

SEQ ID NO: 2888699 - DNA, 25 bp, Homo sapien
tacaggcacaagtcattaagcctgg

SEQ ID NO: 2888700 - DNA, 25 bp, Homo sapien
aacttgtacccttactacttgatct

SEQ ID NO: 2888701 - DNA, 25 bp, Homo sapien
ggcacaagtcattaagcctggctat

SEQ ID NO: 2888702 - DNA, 25 bp, Homo sapien
ccaacttgtacccttactacttgat

SEQ ID NO: 2888703 - DNA, 25 bp, Homo sapien
actggatgcagtcacttcactgtaa

SEQ ID NO: 2888704 - DNA, 25 bp, Homo sapien
gaagtgttcctgctcggagttcact

SEQ ID NO: 2888705 - DNA, 25 bp, Homo sapien
gaggaagtgttcctgctcggagttc

SEQ ID NO: 2888706 - DNA, 25 bp, Homo sapien
agtcacttcactgtaaagaagccca

SEQ ID NO: 2888707 - DNA, 25 bp, Homo sapien
cggcctgattcactcccagattagt

SEQ ID NO: 2888708 - DNA, 25 bp, Homo sapien
gtgcacgacgcacttcacgtccggg

SEQ ID NO: 2888709 - DNA, 25 bp, Homo sapien
agtgtaaggtgaagccggcctgatt

SEQ ID NO: 2888710 - DNA, 25 bp, Homo sapien
cgtccgggcgtgcagcataaattgc

SEQ ID NO: 2888711 - DNA, 25 bp, Homo sapien
caattcagaggaaacgtgcagtgcc

SEQ ID NO: 2888712 - DNA, 25 bp, Homo sapien
ttcactcagcagctttagaccttga

SEQ ID NO: 2888713 - DNA, 25 bp, Homo sapien
gaccttgagatgctaccagggcagc

SEQ ID NO: 2888714 - DNA, 25 bp, Homo sapien
tataaacaacaagggcaattcagag

SEQ ID NO: 2888715 - DNA, 25 bp, Homo sapien
tcttcatcaaccagaatgccatggt

SEQ ID NO: 2888716 - DNA, 25 bp, Homo sapien
ggtagtcatgataagccacttctcc

SEQ ID NO: 2888717 - DNA, 25 bp, Homo sapien
tgccatggtagtcatgataagccac

SEQ ID NO: 2888718 - DNA, 25 bp, Homo sapien
agaatgccatggtagtcatgataag

SEQ ID NO: 2888719 - DNA, 25 bp, Homo sapien
aaataccagattagatgcctactga

SEQ ID NO: 2888720 - DNA, 25 bp, Homo sapien
taaataccagattagatgcctactg

SEQ ID NO: 2888721 - DNA, 25 bp, Homo sapien
aggaagactggtcctttgctttatt

SEQ ID NO: 2888722 - DNA, 25 bp, Homo sapien
aggggaagcatgaatgctctgtgga

SEQ ID NO: 2888723 - DNA, 25 bp, Homo sapien
ggaagactggtcctttgctttattc

SEQ ID NO: 2888724 - DNA, 25 bp, Homo sapien
ctgaggggaagcatgaatgctctgt

SEQ ID NO: 2888725 - DNA, 25 bp, Homo sapien
gagcccatggttccggagaataaga

SEQ ID NO: 2888726 - DNA, 25 bp, Homo sapien
tgacacgagcccatggttccggaga

SEQ ID NO: 2888727 - DNA, 25 bp, Homo sapien
tctccaactgacacgagcccatggt

SEQ ID NO: 2888728 - DNA, 25 bp, Homo sapien
caacgctctctccaactgacacgag

SEQ ID NO: 2888729 - DNA, 25 bp, Homo sapien
aacgtgaactaacggctgacggagc

SEQ ID NO: 2888730 - DNA, 25 bp, Homo sapien
cagagtgactggaatggctgtcccc

SEQ ID NO: 2888731 - DNA, 25 bp, Homo sapien
gctgtaagctgcaggcaagtctctg

SEQ ID NO: 2888732 - DNA, 25 bp, Homo sapien
caaaggacttgggacttcactacgc

SEQ ID NO: 2888733 - DNA, 25 bp, Homo sapien
cgcatgagggcttcaaattcctgct

SEQ ID NO: 2888734 - DNA, 25 bp, Homo sapien
tgctcaccaatctgccacttgggag

SEQ ID NO: 2888735 - DNA, 25 bp, Homo sapien
cagattatcgagcatccgcatgagg

SEQ ID NO: 2888736 - DNA, 25 bp, Homo sapien
cacttgggaggcgatccagtgcctt

SEQ ID NO: 2888737 - DNA, 25 bp, Homo sapien
acttgctgtaagaacaccaacactg

SEQ ID NO: 2888738 - DNA, 25 bp, Homo sapien
caatcgcacttgctgtaagaacacc

SEQ ID NO: 2888739 - DNA, 25 bp, Homo sapien
tgcataaaagacagcaatcgcactt

SEQ ID NO: 2888740 - DNA, 25 bp, Homo sapien
tttatcatcaagtggtggcaccatt

SEQ ID NO: 2888741 - DNA, 25 bp, Homo sapien
catgactttgaaggtgaaggtattc

SEQ ID NO: 2888742 - DNA, 25 bp, Homo sapien
cagggagtggatacccatggaacac

SEQ ID NO: 2888743 - DNA, 25 bp, Homo sapien
aaagcctaaatacctgactgaccga

SEQ ID NO: 2888744 - DNA, 25 bp, Homo sapien
tccccactgagtccaaacacaaggt

SEQ ID NO: 2888745 - DNA, 25 bp, Homo sapien
gactgaccgatttcaaaagtgccac

SEQ ID NO: 2888746 - DNA, 25 bp, Homo sapien
caggccccataagcccgccttctgg

SEQ ID NO: 2888747 - DNA, 25 bp, Homo sapien
tgcaggccccataagcccgccttct

SEQ ID NO: 2888748 - DNA, 25 bp, Homo sapien
gcaggccccataagcccgccttctg

SEQ ID NO: 2888749 - DNA, 25 bp, Homo sapien
ctgcaggccccataagcccgccttc

SEQ ID NO: 2888750 - DNA, 25 bp, Homo sapien
tcaagatgaacctgaaaggtgcacc

SEQ ID NO: 2888751 - DNA, 25 bp, Homo sapien
caggctttcaaacgcaggctaagat

SEQ ID NO: 2888752 - DNA, 25 bp, Homo sapien
tgaaattcttcacggcaaccctgta

SEQ ID NO: 2888753 - DNA, 25 bp, Homo sapien
tttgaggtcatttccaagggctacc

SEQ ID NO: 2888754 - DNA, 25 bp, Homo sapien
gaacgtgcccacttgtccagtactg

SEQ ID NO: 2888755 - DNA, 25 bp, Homo sapien
tcatgtggcgttaggacggaccatc

SEQ ID NO: 2888756 - DNA, 25 bp, Homo sapien
tcatcccaagtgcaaagaatttcag

SEQ ID NO: 2888757 - DNA, 25 bp, Homo sapien
ctggctggcagcatacaaggatact

SEQ ID NO: 2888758 - DNA, 25 bp, Homo sapien
catgctggatgacctggctcctgac

SEQ ID NO: 2888759 - DNA, 25 bp, Homo sapien
tgctggatgacctggctcctgacgc

SEQ ID NO: 2888760 - DNA, 25 bp, Homo sapien
ccatgctggatgacctggctcctga

SEQ ID NO: 2888761 - DNA, 25 bp, Homo sapien
agccatgctggatgacctggctcct

SEQ ID NO: 2888762 - DNA, 25 bp, Homo sapien
tgctcggctgcaacatatattatag

SEQ ID NO: 2888763 - DNA, 25 bp, Homo sapien
cgccttctaggatgtgctttcagca

SEQ ID NO: 2888764 - DNA, 25 bp, Homo sapien
catatatgccaaccccgatgctaaa

SEQ ID NO: 2888765 - DNA, 25 bp, Homo sapien
caatctgtacacattaaggacactg

SEQ ID NO: 2888766 - DNA, 25 bp, Homo sapien
ctgaagtgctgtggctcgaccttgg

SEQ ID NO: 2888767 - DNA, 25 bp, Homo sapien
cagccatcgtgaccggcctacattt

SEQ ID NO: 2888768 - DNA, 25 bp, Homo sapien
taaagagccagaactcagtaatctc

SEQ ID NO: 2888769 - DNA, 25 bp, Homo sapien
tcctcagaaagataaggtaaatgtg

SEQ ID NO: 2888770 - DNA, 25 bp, Homo sapien
caaccacgtggatgactctcctgaa

SEQ ID NO: 2888771 - DNA, 25 bp, Homo sapien
taccgttgctcttattgactgctgg

SEQ ID NO: 2888772 - DNA, 25 bp, Homo sapien
tcctgaaggcaacgctgagtgaaag

SEQ ID NO: 2888773 - DNA, 25 bp, Homo sapien
cggtaggtgcactctcctgcttaca

SEQ ID NO: 2888774 - DNA, 25 bp, Homo sapien
ctagggtccaaggagagtgaaagac

SEQ ID NO: 2888775 - DNA, 25 bp, Homo sapien
gacagtcaatattccagatctcaaa

SEQ ID NO: 2888776 - DNA, 25 bp, Homo sapien
caccccacagaagcaaatgtgttca

SEQ ID NO: 2888777 - DNA, 25 bp, Homo sapien
tactcctcgtaaaccacaattggaa

SEQ ID NO: 2888778 - DNA, 25 bp, Homo sapien
tcagagcagggtatcgataagggta

SEQ ID NO: 2888779 - DNA, 25 bp, Homo sapien
gaatcaccgtcactagcaaaggagt

SEQ ID NO: 2888780 - DNA, 25 bp, Homo sapien
caaaggagtaacctgtgacactagc

SEQ ID NO: 2888781 - DNA, 25 bp, Homo sapien
ggaacctccacatcgctgtattttt

SEQ ID NO: 2888782 - DNA, 25 bp, Homo sapien
catcttgtcttctcccgctgctgct

SEQ ID NO: 2888783 - DNA, 25 bp, Homo sapien
tcagccatcttgtcttctcccgctg

SEQ ID NO: 2888784 - DNA, 25 bp, Homo sapien
agccatcttgtcttctcccgctgct

SEQ ID NO: 2888785 - DNA, 25 bp, Homo sapien
gccatcttgtcttctcccgctgctg

SEQ ID NO: 2888786 - DNA, 25 bp, Homo sapien
tcctcggaagcttcgtcgccccggc

SEQ ID NO: 2888787 - DNA, 25 bp, Homo sapien
cttagtcttcgacttgggactgctt

SEQ ID NO: 2888788 - DNA, 25 bp, Homo sapien
gaagcttcgtcgccccggccagagt

SEQ ID NO: 2888789 - DNA, 25 bp, Homo sapien
cttcctcggaagcttcgtcgccccg

SEQ ID NO: 2888790 - DNA, 25 bp, Homo sapien
agacaccggacgagagagactgcag

SEQ ID NO: 2888791 - DNA, 25 bp, Homo sapien
ggtaatacagcttggcacgcagaca

SEQ ID NO: 2888792 - DNA, 25 bp, Homo sapien
cgtgatcgtgtgtaatgttcgtcca

SEQ ID NO: 2888793 - DNA, 25 bp, Homo sapien
tgcagcaagggtttcacgtgatcgt

SEQ ID NO: 2888794 - DNA, 25 bp, Homo sapien
tatgaacagtaaggtaggcacagac

SEQ ID NO: 2888795 - DNA, 25 bp, Homo sapien
aatataaatgcggagcaaggcctcc

SEQ ID NO: 2888796 - DNA, 25 bp, Homo sapien
tcagaaggtgactcgccactatggc

SEQ ID NO: 2888797 - DNA, 25 bp, Homo sapien
taatggtaaataaagctcgcgctgc

SEQ ID NO: 2888798 - DNA, 25 bp, Homo sapien
taccaacctgggagcactgcatgga

SEQ ID NO: 2888799 - DNA, 25 bp, Homo sapien
gaggcccctcagagaccattggttc

SEQ ID NO: 2888800 - DNA, 25 bp, Homo sapien
cagagaggactgaaccaatgaccac

SEQ ID NO: 2888801 - DNA, 25 bp, Homo sapien
ggatgcagccacataaagaccagtt

SEQ ID NO: 2888802 - DNA, 25 bp, Homo sapien
taaggtaggctgacgacagagctga

SEQ ID NO: 2888803 - DNA, 25 bp, Homo sapien
agcagaggtggaagttctatgtcca

SEQ ID NO: 2888804 - DNA, 25 bp, Homo sapien
gggttagtgttcaatggaacaaaca

SEQ ID NO: 2888805 - DNA, 25 bp, Homo sapien
gaggtggaagttctatgtccatcct

SEQ ID NO: 2888806 - DNA, 25 bp, Homo sapien
tggacctcttttgggttagtgttca

SEQ ID NO: 2888807 - DNA, 25 bp, Homo sapien
gaggcacacatcaacagtcctgagc

SEQ ID NO: 2888808 - DNA, 25 bp, Homo sapien
gagaggcacacatcaacagtcctga

SEQ ID NO: 2888809 - DNA, 25 bp, Homo sapien
agaggcacacatcaacagtcctgag

SEQ ID NO: 2888810 - DNA, 25 bp, Homo sapien
ggacgaggctcctgtccatcactac

SEQ ID NO: 2888811 - DNA, 25 bp, Homo sapien
gggccagccgtcttaatgtcctgta

SEQ ID NO: 2888812 - DNA, 25 bp, Homo sapien
cacacaaaacctgggactgagggcc

SEQ ID NO: 2888813 - DNA, 25 bp, Homo sapien
aatgtcctgtaaattctgctctcgg

SEQ ID NO: 2888814 - DNA, 25 bp, Homo sapien
caagcagcactttgttgcagacagc

SEQ ID NO: 2888815 - DNA, 25 bp, Homo sapien
tgcagacactgaacacgaaaccagg

SEQ ID NO: 2888816 - DNA, 25 bp, Homo sapien
ttacacagaacgctgctgaacccgg

SEQ ID NO: 2888817 - DNA, 25 bp, Homo sapien
cagaataactttggagcaggcggtc

SEQ ID NO: 2888818 - DNA, 25 bp, Homo sapien
aagagagagatttagcgggactaaa

SEQ ID NO: 2888819 - DNA, 25 bp, Homo sapien
tctgtaagctcgagcccttcgatag

SEQ ID NO: 2888820 - DNA, 25 bp, Homo sapien
gatagtttccgtacagtcagagaga

SEQ ID NO: 2888821 - DNA, 25 bp, Homo sapien
taaaggtctgctctgtaagctcgag

SEQ ID NO: 2888822 - DNA, 25 bp, Homo sapien
ggagcaaggcgcatagacaggtagt

SEQ ID NO: 2888823 - DNA, 25 bp, Homo sapien
agcaaggcgcatagacaggtagtga

SEQ ID NO: 2888824 - DNA, 25 bp, Homo sapien
ggggagcaaggcgcatagacaggta

SEQ ID NO: 2888825 - DNA, 25 bp, Homo sapien
ggaggggagcaaggcgcatagacag

SEQ ID NO: 2888826 - DNA, 25 bp, Homo sapien
tcaagtaggtagaacagaaccttct

SEQ ID NO: 2888827 - DNA, 25 bp, Homo sapien
ttctgaaacccaaaacacgcactga

SEQ ID NO: 2888828 - DNA, 25 bp, Homo sapien
ctgcagtcagagtcatggaaaaggc

SEQ ID NO: 2888829 - DNA, 25 bp, Homo sapien
tcagtaacaacttcgaatgctggaa

SEQ ID NO: 2888830 - DNA, 25 bp, Homo sapien
cagtcaaagttgaaccagcgagggt

SEQ ID NO: 2888831 - DNA, 25 bp, Homo sapien
gacatttacagtcaaagttgaacca

SEQ ID NO: 2888832 - DNA, 25 bp, Homo sapien
gcactcgggagtggccgctgccaac

SEQ ID NO: 2888833 - DNA, 25 bp, Homo sapien
caaagttgaaccagcgagggtggaa

SEQ ID NO: 2888834 - DNA, 25 bp, Homo sapien
acattttatcaagggctgacaaaga

SEQ ID NO: 2888835 - DNA, 25 bp, Homo sapien
atgacatctttcaatgatatgacct

SEQ ID NO: 2888836 - DNA, 25 bp, Homo sapien
tcagattttcatctacgagcagggc

SEQ ID NO: 2888837 - DNA, 25 bp, Homo sapien
ctctctgaccatcagattttcatct

SEQ ID NO: 2888838 - DNA, 25 bp, Homo sapien
gattttcatctacgagcagggccaa

SEQ ID NO: 2888839 - DNA, 25 bp, Homo sapien
catctacgagcagggccaacttgga

SEQ ID NO: 2888840 - DNA, 25 bp, Homo sapien
tccacagaccacagctaagggttaa

SEQ ID NO: 2888841 - DNA, 25 bp, Homo sapien
gggttaagctgctgtcaagaccagt

SEQ ID NO: 2888842 - DNA, 25 bp, Homo sapien
agcccgaggcacagcgcagcaggtc

SEQ ID NO: 2888843 - DNA, 25 bp, Homo sapien
tactgagacagctgaagcccgaggc

SEQ ID NO: 2888844 - DNA, 25 bp, Homo sapien
ggctgctggaacaggcaacctttgc

SEQ ID NO: 2888845 - DNA, 25 bp, Homo sapien
tctgaaccaggtctgactcgaggcc

SEQ ID NO: 2888846 - DNA, 25 bp, Homo sapien
caaagggaaccctcttctgaaccag

SEQ ID NO: 2888847 - DNA, 25 bp, Homo sapien
acacagagctccgagagggacagat

SEQ ID NO: 2888848 - DNA, 25 bp, Homo sapien
ggagcccggcccgatggggactctc

SEQ ID NO: 2888849 - DNA, 25 bp, Homo sapien
ccatgggcccgaggcctaggctgag

SEQ ID NO: 2888850 - DNA, 25 bp, Homo sapien
gcagagacccctgagactgcactgc

SEQ ID NO: 2888851 - DNA, 25 bp, Homo sapien
acccctgagactgcactgccatggg

SEQ ID NO: 2888852 - DNA, 25 bp, Homo sapien
gacgtggggctggtactccttttca

SEQ ID NO: 2888853 - DNA, 25 bp, Homo sapien
ttggggcccgtggtgctcacaatga

SEQ ID NO: 2888854 - DNA, 25 bp, Homo sapien
cccgtggtgctcacaatgacgtggg

SEQ ID NO: 2888855 - DNA, 25 bp, Homo sapien
tcacggtctgtgagtgtggtgaagg

SEQ ID NO: 2888856 - DNA, 25 bp, Homo sapien
ccctgaggatgctggcgggagcctc

SEQ ID NO: 2888857 - DNA, 25 bp, Homo sapien
gagaaggcagggctctctcaaccct

SEQ ID NO: 2888858 - DNA, 25 bp, Homo sapien
tgacctgggtgttgactgatgcgaa

SEQ ID NO: 2888859 - DNA, 25 bp, Homo sapien
gagaaacttaaccaacttcagatac

SEQ ID NO: 2888860 - DNA, 25 bp, Homo sapien
tggacgccacgccatgagcctgtac

SEQ ID NO: 2888861 - DNA, 25 bp, Homo sapien
ctgttctctagcctcgtccagattc

SEQ ID NO: 2888862 - DNA, 25 bp, Homo sapien
tctgttctctagcctcgtccagatt

SEQ ID NO: 2888863 - DNA, 25 bp, Homo sapien
ttctgttctctagcctcgtccagat

SEQ ID NO: 2888864 - DNA, 25 bp, Homo sapien
tgttctctagcctcgtccagattct

SEQ ID NO: 2888865 - DNA, 25 bp, Homo sapien
gtcacagctcacatacaaatctgtt

SEQ ID NO: 2888866 - DNA, 25 bp, Homo sapien
cagctcacatacaaatctgttttgc

SEQ ID NO: 2888867 - DNA, 25 bp, Homo sapien
cacagctcacatacaaatctgtttt

SEQ ID NO: 2888868 - DNA, 25 bp, Homo sapien
ctggtcacagctcacatacaaatct

SEQ ID NO: 2888869 - DNA, 25 bp, Homo sapien
catggatgtacgagaccgagggaca

SEQ ID NO: 2888870 - DNA, 25 bp, Homo sapien
acaacacggcacgaggagtgtgcga

SEQ ID NO: 2888871 - DNA, 25 bp, Homo sapien
cacagccatcaggttacagaagaag

SEQ ID NO: 2888872 - DNA, 25 bp, Homo sapien
acctccgaaggtggcatctgcatga

SEQ ID NO: 2888873 - DNA, 25 bp, Homo sapien
aggtactctctagcgcatccgtctc

SEQ ID NO: 2888874 - DNA, 25 bp, Homo sapien
taacaggtactctctagcgcatccg

SEQ ID NO: 2888875 - DNA, 25 bp, Homo sapien
tagggtaacaggtactctctagcgc

SEQ ID NO: 2888876 - DNA, 25 bp, Homo sapien
ggtaacaggtactctctagcgcatc

SEQ ID NO: 2888877 - DNA, 25 bp, Homo sapien
agagcggaggcagcacggtacttac

SEQ ID NO: 2888878 - DNA, 25 bp, Homo sapien
gagaatgaggcaaagcgcagggcac

SEQ ID NO: 2888879 - DNA, 25 bp, Homo sapien
agaatgaggcaaagcgcagggcacc

SEQ ID NO: 2888880 - DNA, 25 bp, Homo sapien
gcagggcaccggtggagagcggagg

SEQ ID NO: 2888881 - DNA, 25 bp, Homo sapien
catggcacctaggtgcgtggaggta

SEQ ID NO: 2888882 - DNA, 25 bp, Homo sapien
ctccatggcacctaggtgcgtggag

SEQ ID NO: 2888883 - DNA, 25 bp, Homo sapien
acctaggtgcgtggaggtacccgct

SEQ ID NO: 2888884 - DNA, 25 bp, Homo sapien
gcacctaggtgcgtggaggtacccg

SEQ ID NO: 2888885 - DNA, 25 bp, Homo sapien
accctgtctgaaccgaggctgcact

SEQ ID NO: 2888886 - DNA, 25 bp, Homo sapien
ctgtctgaaccgaggctgcacttac

SEQ ID NO: 2888887 - DNA, 25 bp, Homo sapien
cctgtctgaaccgaggctgcactta

SEQ ID NO: 2888888 - DNA, 25 bp, Homo sapien
caccctgtctgaaccgaggctgcac

SEQ ID NO: 2888889 - DNA, 25 bp, Homo sapien
cacagcacgttgtgtgacgtcaaca

SEQ ID NO: 2888890 - DNA, 25 bp, Homo sapien
tactctactgtacggctggatggag

SEQ ID NO: 2888891 - DNA, 25 bp, Homo sapien
gcacaagctgaggacgactaaagga

SEQ ID NO: 2888892 - DNA, 25 bp, Homo sapien
gcgacgtcccgctttcattatgtga

SEQ ID NO: 2888893 - DNA, 25 bp, Homo sapien
cattgggaagccgagtgcttctgaa

SEQ ID NO: 2888894 - DNA, 25 bp, Homo sapien
tgaaggttcatcaggggacagatcg

SEQ ID NO: 2888895 - DNA, 25 bp, Homo sapien
gagttggcttaaaggtggcagcatc

SEQ ID NO: 2888896 - DNA, 25 bp, Homo sapien
tgtcatctccagtagtcggctccgg

SEQ ID NO: 2888897 - DNA, 25 bp, Homo sapien
tggacggggacttgcctggagaccc

SEQ ID NO: 2888898 - DNA, 25 bp, Homo sapien
cggccccctcctcgacagctgaggg

SEQ ID NO: 2888899 - DNA, 25 bp, Homo sapien
gcttgggggtctatgggcttcctcc

SEQ ID NO: 2888900 - DNA, 25 bp, Homo sapien
ggagacccatcgctgccagggtccg

SEQ ID NO: 2888901 - DNA, 25 bp, Homo sapien
agccagggtcgctccggacaggaca

SEQ ID NO: 2888902 - DNA, 25 bp, Homo sapien
ctctaggcggagggcttggcttttt

SEQ ID NO: 2888903 - DNA, 25 bp, Homo sapien
gtcgctccggacaggacagtgttag

SEQ ID NO: 2888904 - DNA, 25 bp, Homo sapien
gcattccattacacaaggacagagc

SEQ ID NO: 2888905 - DNA, 25 bp, Homo sapien
atttcacaacaggagggacggcagg

SEQ ID NO: 2888906 - DNA, 25 bp, Homo sapien
cacacgagtgttttcacgggaccaa

SEQ ID NO: 2888907 - DNA, 25 bp, Homo sapien
gcagcctattcacgttcacagtcga

SEQ ID NO: 2888908 - DNA, 25 bp, Homo sapien
tagcatcacgttgggtgcacacagg

SEQ ID NO: 2888909 - DNA, 25 bp, Homo sapien
tacctagtcaggctggtaccggcac

SEQ ID NO: 2888910 - DNA, 25 bp, Homo sapien
caatcagtgggatccgaggtggctc

SEQ ID NO: 2888911 - DNA, 25 bp, Homo sapien
atctggcaccagctctaccaagggc

SEQ ID NO: 2888912 - DNA, 25 bp, Homo sapien
gttctcgctcggctggccaatcagt

SEQ ID NO: 2888913 - DNA, 25 bp, Homo sapien
gacctgtcctcccaagtcggtgtcc

SEQ ID NO: 2888914 - DNA, 25 bp, Homo sapien
ggacctgtcctcccaagtcggtgtc

SEQ ID NO: 2888915 - DNA, 25 bp, Homo sapien
gagtaaaacatgttacactggagaa

SEQ ID NO: 2888916 - DNA, 25 bp, Homo sapien
gtgagtaaaacatgttacactggag

SEQ ID NO: 2888917 - DNA, 25 bp, Homo sapien
atttgtgagtaaaacatgttacact

SEQ ID NO: 2888918 - DNA, 25 bp, Homo sapien
ttgtgagtaaaacatgttacactgg

SEQ ID NO: 2888919 - DNA, 25 bp, Homo sapien
agacttacttactccttcagtgact

SEQ ID NO: 2888920 - DNA, 25 bp, Homo sapien
ttcagtgactccgagctgcagcact

SEQ ID NO: 2888921 - DNA, 25 bp, Homo sapien
cacagacgctcaaggctgagtagct

SEQ ID NO: 2888922 - DNA, 25 bp, Homo sapien
agaagctgagttacccggcacagac

SEQ ID NO: 2888923 - DNA, 25 bp, Homo sapien
catgtgtatctggttagggtcggcc

SEQ ID NO: 2888924 - DNA, 25 bp, Homo sapien
tggttccgtgagtgtgctccagcca

SEQ ID NO: 2888925 - DNA, 25 bp, Homo sapien
ggccacgtgagatccgcaagcattt

SEQ ID NO: 2888926 - DNA, 25 bp, Homo sapien
taaaggcggtatgtgtgccacctga

SEQ ID NO: 2888927 - DNA, 25 bp, Homo sapien
gccagtgagtcagaagtacccattg

SEQ ID NO: 2888928 - DNA, 25 bp, Homo sapien
tctgttggtcccacaaaagcaggct

SEQ ID NO: 2888929 - DNA, 25 bp, Homo sapien
tactcggtctccctgagcatctggg

SEQ ID NO: 2888930 - DNA, 25 bp, Homo sapien
gatggtgatgttatcgccaggagca

SEQ ID NO: 2888931 - DNA, 25 bp, Homo sapien
tgtcattgaagagggcgcgtgatcc

SEQ ID NO: 2888932 - DNA, 25 bp, Homo sapien
gttgtcacatccaccaactaggctg

SEQ ID NO: 2888933 - DNA, 25 bp, Homo sapien
ctggcaggtgcacggatccacaaat

SEQ ID NO: 2888934 - DNA, 25 bp, Homo sapien
tatgcgatccaggacggaaggtgcc

SEQ ID NO: 2888935 - DNA, 25 bp, Homo sapien
tctctctctggaaagcgcaagacag

SEQ ID NO: 2888936 - DNA, 25 bp, Homo sapien
tacgtgcctgaagcatcgcggaggt

SEQ ID NO: 2888937 - DNA, 25 bp, Homo sapien
taaggattaaccagactacgactgg

SEQ ID NO: 2888938 - DNA, 25 bp, Homo sapien
gcggaggtcacatctagccacggtg

SEQ ID NO: 2888939 - DNA, 25 bp, Homo sapien
ccagggagccatatcccgaatgcca

SEQ ID NO: 2888940 - DNA, 25 bp, Homo sapien
actgaacttgtgtccttagccggca

SEQ ID NO: 2888941 - DNA, 25 bp, Homo sapien
tccctgttccaatgcggtatgcggt

SEQ ID NO: 2888942 - DNA, 25 bp, Homo sapien
tatgcggtcttgcaggccgaggcat

SEQ ID NO: 2888943 - DNA, 25 bp, Homo sapien
gaagatgtgcaagttacgcatgaca

SEQ ID NO: 2888944 - DNA, 25 bp, Homo sapien
cactaatcaagagggaggtcagccc

SEQ ID NO: 2888945 - DNA, 25 bp, Homo sapien
gctgtaagaagtaacgagccccttg

SEQ ID NO: 2888946 - DNA, 25 bp, Homo sapien
gatgcagtttcaggtcagaatcaga

SEQ ID NO: 2888947 - DNA, 25 bp, Homo sapien
caggacactgcactctcggaggtgg

SEQ ID NO: 2888948 - DNA, 25 bp, Homo sapien
ggagactgggttgcgtctgtgccga

SEQ ID NO: 2888949 - DNA, 25 bp, Homo sapien
cttcagtggatgcttctgggtgctg

SEQ ID NO: 2888950 - DNA, 25 bp, Homo sapien
gggttctccattcaggacactgcac

SEQ ID NO: 2888951 - DNA, 25 bp, Homo sapien
agggaaacatcacccacagtccctc

SEQ ID NO: 2888952 - DNA, 25 bp, Homo sapien
aagggaaacatcacccacagtccct

SEQ ID NO: 2888953 - DNA, 25 bp, Homo sapien
gaagggaaacatcacccacagtccc

SEQ ID NO: 2888954 - DNA, 25 bp, Homo sapien
agaagggaaacatcacccacagtcc

SEQ ID NO: 2888955 - DNA, 25 bp, Homo sapien
cggacgtttgccttcatgtgtagaa

SEQ ID NO: 2888956 - DNA, 25 bp, Homo sapien
tctgtgtgttatcagctgcgactgg

SEQ ID NO: 2888957 - DNA, 25 bp, Homo sapien
gctgcgactggttcactgcgtctgg

SEQ ID NO: 2888958 - DNA, 25 bp, Homo sapien
tgtaatttctgtcaaccacggacgt

SEQ ID NO: 2888959 - DNA, 25 bp, Homo sapien
ctgatgaaatagaatgaatcctgaa

SEQ ID NO: 2888960 - DNA, 25 bp, Homo sapien
gaaatagaatgaatcctgaaatgca

SEQ ID NO: 2888961 - DNA, 25 bp, Homo sapien
aaatagaatgaatcctgaaatgcac

SEQ ID NO: 2888962 - DNA, 25 bp, Homo sapien
atgaaatagaatgaatcctgaaatg

SEQ ID NO: 2888963 - DNA, 25 bp, Homo sapien
tagagtaataatgctataatgttgg

SEQ ID NO: 2888964 - DNA, 25 bp, Homo sapien
tttagagtaataatgctataatgtt

SEQ ID NO: 2888965 - DNA, 25 bp, Homo sapien
ccttggccccccaattataggtgtg

SEQ ID NO: 2888966 - DNA, 25 bp, Homo sapien
cttggccccccaattataggtgtga

SEQ ID NO: 2888967 - DNA, 25 bp, Homo sapien
acatctgcaattccaaccctctggg

SEQ ID NO: 2888968 - DNA, 25 bp, Homo sapien
ctcacatctgcaattccaaccctct

SEQ ID NO: 2888969 - DNA, 25 bp, Homo sapien
caaggcaggaagattgcttcagccc

SEQ ID NO: 2888970 - DNA, 25 bp, Homo sapien
aggccaaggcaggaagattgcttca

SEQ ID NO: 2888971 - DNA, 25 bp, Homo sapien
aaagaaagcggaaagtaaagcagct

SEQ ID NO: 2888972 - DNA, 25 bp, Homo sapien
tggctacacaggaaggcgaatggaa

SEQ ID NO: 2888973 - DNA, 25 bp, Homo sapien
ttagggatgcggaaagaaagcggaa

SEQ ID NO: 2888974 - DNA, 25 bp, Homo sapien
cagctttttaacagcctggctacac

SEQ ID NO: 2888975 - DNA, 25 bp, Homo sapien
tggtctcggtagactgggccagtca

SEQ ID NO: 2888976 - DNA, 25 bp, Homo sapien
ggcattccggcactcgaaggttaca

SEQ ID NO: 2888977 - DNA, 25 bp, Homo sapien
ggcccttgagtttggtctccatgga

SEQ ID NO: 2888978 - DNA, 25 bp, Homo sapien
gaaggttacatccacatgggcccag

SEQ ID NO: 2888979 - DNA, 25 bp, Homo sapien
tccctggagcatagagcagataagc

SEQ ID NO: 2888980 - DNA, 25 bp, Homo sapien
tgaagcgctgcgtgctcatgtacgg

SEQ ID NO: 2888981 - DNA, 25 bp, Homo sapien
taagctagctatcacagactccgtc

SEQ ID NO: 2888982 - DNA, 25 bp, Homo sapien
caaggtggccacactggagttttca

SEQ ID NO: 2888983 - DNA, 25 bp, Homo sapien
gaaagttctcgtgcagctcacacag

SEQ ID NO: 2888984 - DNA, 25 bp, Homo sapien
agtgctaagcgcctgcatgtccagg

SEQ ID NO: 2888985 - DNA, 25 bp, Homo sapien
cagcctgaccagaggttggacctca

SEQ ID NO: 2888986 - DNA, 25 bp, Homo sapien
tttctcacgtgacgacaaggcagtg

SEQ ID NO: 2888987 - DNA, 25 bp, Homo sapien
tctgagcccgtgtctataaccattg

SEQ ID NO: 2888988 - DNA, 25 bp, Homo sapien
tgcacgtttagctggttgacccacg

SEQ ID NO: 2888989 - DNA, 25 bp, Homo sapien
cgagcactgcggttaggccaaagag

SEQ ID NO: 2888990 - DNA, 25 bp, Homo sapien
caaggtgcgttctctccacatgcgg

SEQ ID NO: 2888991 - DNA, 25 bp, Homo sapien
atgagttaatatggaaagtgccttg

SEQ ID NO: 2888992 - DNA, 25 bp, Homo sapien
gttaatatggaaagtgccttggagc

SEQ ID NO: 2888993 - DNA, 25 bp, Homo sapien
gagttaatatggaaagtgccttgga

SEQ ID NO: 2888994 - DNA, 25 bp, Homo sapien
aatatggaaagtgccttggagctgt

SEQ ID NO: 2888995 - DNA, 25 bp, Homo sapien
ttcggatccatgagagtgcacacca

SEQ ID NO: 2888996 - DNA, 25 bp, Homo sapien
gccctcgttgccctctaaggctgtg

SEQ ID NO: 2888997 - DNA, 25 bp, Homo sapien
agtcctcagttgagaggcgtgtgtt

SEQ ID NO: 2888998 - DNA, 25 bp, Homo sapien
catggaggcactatcaaagaagtac

SEQ ID NO: 2888999 - DNA, 25 bp, Homo sapien
gatttggctacagatgacccaccag

SEQ ID NO: 2889000 - DNA, 25 bp, Homo sapien
tatttggaaagcacggtagacaccc

SEQ ID NO: 2889001 - DNA, 25 bp, Homo sapien
cttgtgagcctcacagcgcaagccg

SEQ ID NO: 2889002 - DNA, 25 bp, Homo sapien
tgaacccctttagatttgtggctgg

SEQ ID NO: 2889003 - DNA, 25 bp, Homo sapien
tgccagtgggcaaatggagcacaca

SEQ ID NO: 2889004 - DNA, 25 bp, Homo sapien
tagaaagccctgatgtgggcagcct

SEQ ID NO: 2889005 - DNA, 25 bp, Homo sapien
ctcgaatagcctagaagcgggtggt

SEQ ID NO: 2889006 - DNA, 25 bp, Homo sapien
tgagatggtccagcgttgtctccgc

SEQ ID NO: 2889007 - DNA, 25 bp, Homo sapien
tcatcatactattgagggagctaac

SEQ ID NO: 2889008 - DNA, 25 bp, Homo sapien
tcgttttaagagtgtatcagtcagg

SEQ ID NO: 2889009 - DNA, 25 bp, Homo sapien
gtatgattctatctgcatgacctca

SEQ ID NO: 2889010 - DNA, 25 bp, Homo sapien
taacaatagtatgtgcactcacttg

SEQ ID NO: 2889011 - DNA, 25 bp, Homo sapien
taccttagcccgatgcatatgacat

SEQ ID NO: 2889012 - DNA, 25 bp, Homo sapien
catatgacatgatggttcgcgagct

SEQ ID NO: 2889013 - DNA, 25 bp, Homo sapien
gagaatactctgtttgatcagtgga

SEQ ID NO: 2889014 - DNA, 25 bp, Homo sapien
aaggcgcagccctctaacaggatga

SEQ ID NO: 2889015 - DNA, 25 bp, Homo sapien
ccttagcaaatagaagaagttccgc

SEQ ID NO: 2889016 - DNA, 25 bp, Homo sapien
taaacaccagtgtaatggcagttcc

SEQ ID NO: 2889017 - DNA, 25 bp, Homo sapien
cctaaactgtgacctcgctaacttg

SEQ ID NO: 2889018 - DNA, 25 bp, Homo sapien
agttccgcagcaagaaagagtttgc

SEQ ID NO: 2889019 - DNA, 25 bp, Homo sapien
ggtttcctactcttcaggtagcaga

SEQ ID NO: 2889020 - DNA, 25 bp, Homo sapien
gtgacctatgtctggagcaaaatct

SEQ ID NO: 2889021 - DNA, 25 bp, Homo sapien
tgtgctctaaatggaaaggagggcc

SEQ ID NO: 2889022 - DNA, 25 bp, Homo sapien
cctctccagatggaatgtgctctaa

SEQ ID NO: 2889023 - DNA, 25 bp, Homo sapien
caaaggcacattgtcccggtatggt

SEQ ID NO: 2889024 - DNA, 25 bp, Homo sapien
ggtcgtccagttgactccaagcttg

SEQ ID NO: 2889025 - DNA, 25 bp, Homo sapien
tatggtgaagtgtggcactcacagc

SEQ ID NO: 2889026 - DNA, 25 bp, Homo sapien
tccaagcttgataacgcgtgtaggg

SEQ ID NO: 2889027 - DNA, 25 bp, Homo sapien
taaggtcacgcacctggtaagggct

SEQ ID NO: 2889028 - DNA, 25 bp, Homo sapien
tagtatacatcctacccctcgtggt

SEQ ID NO: 2889029 - DNA, 25 bp, Homo sapien
tacagctgacttcgataggagtccc

SEQ ID NO: 2889030 - DNA, 25 bp, Homo sapien
tattatccttactgcgcgaagacga

SEQ ID NO: 2889031 - DNA, 25 bp, Homo sapien
gattctgcgagaccgaggagactga

SEQ ID NO: 2889032 - DNA, 25 bp, Homo sapien
aatgccgtggctcacttcggacagg

SEQ ID NO: 2889033 - DNA, 25 bp, Homo sapien
cgctaacggcttagctgaagaggga

SEQ ID NO: 2889034 - DNA, 25 bp, Homo sapien
gcagccccgagtcaatgccgtggct

SEQ ID NO: 2889035 - DNA, 25 bp, Homo sapien
cgcgctttcagcagcagcgagttgg

SEQ ID NO: 2889036 - DNA, 25 bp, Homo sapien
cgagttggccacgatgttctcgagc

SEQ ID NO: 2889037 - DNA, 25 bp, Homo sapien
cttgacgcgctttcagcagcagcga

SEQ ID NO: 2889038 - DNA, 25 bp, Homo sapien
cagcagcagcgagttggccacgatg

SEQ ID NO: 2889039 - DNA, 25 bp, Homo sapien
gcagatctgggttcccccagtggga

SEQ ID NO: 2889040 - DNA, 25 bp, Homo sapien
acactgcacagaccccggctccggc

SEQ ID NO: 2889041 - DNA, 25 bp, Homo sapien
tctccggggatgtcgggttccttca

SEQ ID NO: 2889042 - DNA, 25 bp, Homo sapien
cagtgggaggtgtcggggctctcca

SEQ ID NO: 2889043 - DNA, 25 bp, Homo sapien
agagcaaagcgcagacttctctcat

SEQ ID NO: 2889044 - DNA, 25 bp, Homo sapien
ggcaagactaagaagagcaaagcgc

SEQ ID NO: 2889045 - DNA, 25 bp, Homo sapien
gagcaaagcgcagacttctctcatc

SEQ ID NO: 2889046 - DNA, 25 bp, Homo sapien
cagggcaagactaagaagagcaaag

SEQ ID NO: 2889047 - DNA, 25 bp, Homo sapien
taaagcacacttgacacaccataga

SEQ ID NO: 2889048 - DNA, 25 bp, Homo sapien
aacattgccctacaatcattatcgg

SEQ ID NO: 2889049 - DNA, 25 bp, Homo sapien
tgtccatctgtgaccacgtcgtgct

SEQ ID NO: 2889050 - DNA, 25 bp, Homo sapien
tcattatcggaaggttctcgcccag

SEQ ID NO: 2889051 - DNA, 25 bp, Homo sapien
tctgcagcattataaggaaggcggc

SEQ ID NO: 2889052 - DNA, 25 bp, Homo sapien
cctttaaatatgcatcgccggctgc

SEQ ID NO: 2889053 - DNA, 25 bp, Homo sapien
ccgctgaagggctggaccaactgat

SEQ ID NO: 2889054 - DNA, 25 bp, Homo sapien
gaagaactaccgtggctagcacagg

SEQ ID NO: 2889055 - DNA, 25 bp, Homo sapien
tcaggaccagaatataactcttgtg

SEQ ID NO: 2889056 - DNA, 25 bp, Homo sapien
gaagctaaacaaggagctgtccatg

SEQ ID NO: 2889057 - DNA, 25 bp, Homo sapien
aagaagacacctcctggtacttcct

SEQ ID NO: 2889058 - DNA, 25 bp, Homo sapien
catgaagttatgtgtccaagaagac

SEQ ID NO: 2889059 - DNA, 25 bp, Homo sapien
tccccttcgtagtgaagatttcaac

SEQ ID NO: 2889060 - DNA, 25 bp, Homo sapien
taatattaaatcaacattgcgcttc

SEQ ID NO: 2889061 - DNA, 25 bp, Homo sapien
tcagaccatagcagggaccagagag

SEQ ID NO: 2889062 - DNA, 25 bp, Homo sapien
tccaggaaatgaccggactcactaa

SEQ ID NO: 2889063 - DNA, 25 bp, Homo sapien
cacgtattacgtattcctctctgca

SEQ ID NO: 2889064 - DNA, 25 bp, Homo sapien
tgctcaataacaccgcagcctgaaa

SEQ ID NO: 2889065 - DNA, 25 bp, Homo sapien
gaccaaaacccacattaaatgcacg

SEQ ID NO: 2889066 - DNA, 25 bp, Homo sapien
tttctccaagagataagacggtgtt

SEQ ID NO: 2889067 - DNA, 25 bp, Homo sapien
tcctcagctagggaatttcaaaggc

SEQ ID NO: 2889068 - DNA, 25 bp, Homo sapien
aaaggcaactttgaggattctctgc

SEQ ID NO: 2889069 - DNA, 25 bp, Homo sapien
ttcctcagctagggaatttcaaagg

SEQ ID NO: 2889070 - DNA, 25 bp, Homo sapien
ggattgtctcgatacctggacctcg

SEQ ID NO: 2889071 - DNA, 25 bp, Homo sapien
gaaataatttggctgactactacat

SEQ ID NO: 2889072 - DNA, 25 bp, Homo sapien
cagacggtagacattattgcttagg

SEQ ID NO: 2889073 - DNA, 25 bp, Homo sapien
ggtcctaaagtagcataaagccaat

SEQ ID NO: 2889074 - DNA, 25 bp, Homo sapien
tcccagctgctggggaggctgagac

SEQ ID NO: 2889075 - DNA, 25 bp, Homo sapien
ctgctggggaggctgagacaggaga

SEQ ID NO: 2889076 - DNA, 25 bp, Homo sapien
ctggggaggctgagacaggagaatg

SEQ ID NO: 2889077 - DNA, 25 bp, Homo sapien
caggcatggcggcgtgtgcctgtag

SEQ ID NO: 2889078 - DNA, 25 bp, Homo sapien
cttaagaaagccctaattctagagt

SEQ ID NO: 2889079 - DNA, 25 bp, Homo sapien
tataaagctcaagaacattcttttg

SEQ ID NO: 2889080 - DNA, 25 bp, Homo sapien
ggtaactattgcctaatttgggtca

SEQ ID NO: 2889081 - DNA, 25 bp, Homo sapien
tttttgaggagctttaataaagcca

SEQ ID NO: 2889082 - DNA, 25 bp, Homo sapien
cgaggtcaacggtggtcggcagggc

SEQ ID NO: 2889083 - DNA, 25 bp, Homo sapien
gcgaggtcaacggtggtcggcaggg

SEQ ID NO: 2889084 - DNA, 25 bp, Homo sapien
ggcgaggtcaacggtggtcggcagg

SEQ ID NO: 2889085 - DNA, 25 bp, Homo sapien
agacaaggaggccagaaggtgaaga

SEQ ID NO: 2889086 - DNA, 25 bp, Homo sapien
agaaccaggcagagcatgatgagtc

SEQ ID NO: 2889087 - DNA, 25 bp, Homo sapien
accaggcagagcatgatgagtcgtg

SEQ ID NO: 2889088 - DNA, 25 bp, Homo sapien
cagagcatgatgagtcgtggggcca

SEQ ID NO: 2889089 - DNA, 25 bp, Homo sapien
aggtgggccggctatgctgtcaata

SEQ ID NO: 2889090 - DNA, 25 bp, Homo sapien
tggttccacgtccccgctgtttggc

SEQ ID NO: 2889091 - DNA, 25 bp, Homo sapien
ccgggcccggtcatactcaaaggtg

SEQ ID NO: 2889092 - DNA, 25 bp, Homo sapien
gttccaaaagtctccactggcacag

SEQ ID NO: 2889093 - DNA, 25 bp, Homo sapien
aagagatatagtcagggcaccaaag

SEQ ID NO: 2889094 - DNA, 25 bp, Homo sapien
cctaatagtcacaacagagctgctg

SEQ ID NO: 2889095 - DNA, 25 bp, Homo sapien
ggccatctgactgtgatctggacaa

SEQ ID NO: 2889096 - DNA, 25 bp, Homo sapien
gcaccaaaggctcatgttacaaaag

SEQ ID NO: 2889097 - DNA, 25 bp, Homo sapien
caattagcttaatgtgtgaagccac

SEQ ID NO: 2889098 - DNA, 25 bp, Homo sapien
tccccttttcgggtgcacctgtggc

SEQ ID NO: 2889099 - DNA, 25 bp, Homo sapien
gccacagtctatgagataaccaaga

SEQ ID NO: 2889100 - DNA, 25 bp, Homo sapien
tcgccatggctgtgcatcccaaatt

SEQ ID NO: 2889101 - DNA, 25 bp, Homo sapien
catgtcctatgtcactgaagggtgg

SEQ ID NO: 2889102 - DNA, 25 bp, Homo sapien
tgatctacaagtgccctgagacatg

SEQ ID NO: 2889103 - DNA, 25 bp, Homo sapien
cctcttaaaggagtacagagctgag

SEQ ID NO: 2889104 - DNA, 25 bp, Homo sapien
tcattgagcagagaacaagtccctc

SEQ ID NO: 2889105 - DNA, 25 bp, Homo sapien
ctacgaccactttttttgccatatc

SEQ ID NO: 2889106 - DNA, 25 bp, Homo sapien
acgaccactttttttgccatatcct

SEQ ID NO: 2889107 - DNA, 25 bp, Homo sapien
tacgaccactttttttgccatatcc

SEQ ID NO: 2889108 - DNA, 25 bp, Homo sapien
cgaccactttttttgccatatcctc

SEQ ID NO: 2889109 - DNA, 25 bp, Homo sapien
gaggcagtgtcagtatctccttcca

SEQ ID NO: 2889110 - DNA, 25 bp, Homo sapien
aatggaatgtctaagctcactgcac

SEQ ID NO: 2889111 - DNA, 25 bp, Homo sapien
taagctcactgcactggctgacagg

SEQ ID NO: 2889112 - DNA, 25 bp, Homo sapien
gaatgtctaagctcactgcactggc

SEQ ID NO: 2889113 - DNA, 25 bp, Homo sapien
acatgcctccacacccaagtaattt

SEQ ID NO: 2889114 - DNA, 25 bp, Homo sapien
atgagtcatggcgcctggcccaatt

SEQ ID NO: 2889115 - DNA, 25 bp, Homo sapien
ttaccggcatgagtcatggcgcctg

SEQ ID NO: 2889116 - DNA, 25 bp, Homo sapien
agattaccggcatgagtcatggcgc

SEQ ID NO: 2889117 - DNA, 25 bp, Homo sapien
agtcaagaacagtatttgccgtatt

SEQ ID NO: 2889118 - DNA, 25 bp, Homo sapien
aagtcaagaacagtatttgccgtat

SEQ ID NO: 2889119 - DNA, 25 bp, Homo sapien
aagagacgtcttcctatcggttgct

SEQ ID NO: 2889120 - DNA, 25 bp, Homo sapien
gcttgtcacaaagactgctataatc

SEQ ID NO: 2889121 - DNA, 25 bp, Homo sapien
caagaattcaatgtgcctctttaga

SEQ ID NO: 2889122 - DNA, 25 bp, Homo sapien
cctctttagagtgggtttggtatca

SEQ ID NO: 2889123 - DNA, 25 bp, Homo sapien
aagaaaagaaagaacagttaagctg

SEQ ID NO: 2889124 - DNA, 25 bp, Homo sapien
aaagaaagaacagttaagctgggtg

SEQ ID NO: 2889125 - DNA, 25 bp, Homo sapien
ctgattggagagatggaagaaaaga

SEQ ID NO: 2889126 - DNA, 25 bp, Homo sapien
ccacttgggacgctgaggttgggag

SEQ ID NO: 2889127 - DNA, 25 bp, Homo sapien
taagattgacagtccacaatcactt

SEQ ID NO: 2889128 - DNA, 25 bp, Homo sapien
gacagtccacaatcacttcggtcct

SEQ ID NO: 2889129 - DNA, 25 bp, Homo sapien
caatcacttcggtcctcatcatcgg

SEQ ID NO: 2889130 - DNA, 25 bp, Homo sapien
cggtcctcatcatcggcaacttcat

SEQ ID NO: 2889131 - DNA, 25 bp, Homo sapien
tgtgttatcgtttggatgtgtgccc

SEQ ID NO: 2889132 - DNA, 25 bp, Homo sapien
tatttaggcctttgatggatttggc

SEQ ID NO: 2889133 - DNA, 25 bp, Homo sapien
tagggcttccgtgtgattctctgca

SEQ ID NO: 2889134 - DNA, 25 bp, Homo sapien
caaggtattgaagagttacacctac

SEQ ID NO: 2889135 - DNA, 25 bp, Homo sapien
cagtcccaatctacattctgtcaca

SEQ ID NO: 2889136 - DNA, 25 bp, Homo sapien
caatctacattctgtcacaacatct

SEQ ID NO: 2889137 - DNA, 25 bp, Homo sapien
tccttcagtcccaatctacattctg

SEQ ID NO: 2889138 - DNA, 25 bp, Homo sapien
ctagtacattcctcaaaggcttttt

SEQ ID NO: 2889139 - DNA, 25 bp, Homo sapien
tagtcatagataatatatgcagggc

SEQ ID NO: 2889140 - DNA, 25 bp, Homo sapien
aagctgtctgttttggggttagtca

SEQ ID NO: 2889141 - DNA, 25 bp, Homo sapien
ttagtcatagataatatatgcaggg

SEQ ID NO: 2889142 - DNA, 25 bp, Homo sapien
gggttagtcatagataatatatgca

SEQ ID NO: 2889143 - DNA, 25 bp, Homo sapien
aacctctatagcctcagtttctcct

SEQ ID NO: 2889144 - DNA, 25 bp, Homo sapien
caacctctatagcctcagtttctcc

SEQ ID NO: 2889145 - DNA, 25 bp, Homo sapien
acctctatagcctcagtttctcctt

SEQ ID NO: 2889146 - DNA, 25 bp, Homo sapien
ccaacctctatagcctcagtttctc

SEQ ID NO: 2889147 - DNA, 25 bp, Homo sapien
tttcttggtattcttcaaatggttc

SEQ ID NO: 2889148 - DNA, 25 bp, Homo sapien
ctgagaaaaatatgagctttcttgg

SEQ ID NO: 2889149 - DNA, 25 bp, Homo sapien
atggttcccctcttaggtagttatg

SEQ ID NO: 2889150 - DNA, 25 bp, Homo sapien
tcttggtattcttcaaatggttccc

SEQ ID NO: 2889151 - DNA, 25 bp, Homo sapien
ctctccaaatccgccttttcctaga

SEQ ID NO: 2889152 - DNA, 25 bp, Homo sapien
tctccaaatccgccttttcctagaa

SEQ ID NO: 2889153 - DNA, 25 bp, Homo sapien
caaatccgccttttcctagaactct

SEQ ID NO: 2889154 - DNA, 25 bp, Homo sapien
tgtttcttccaactcccatccactg

SEQ ID NO: 2889155 - DNA, 25 bp, Homo sapien
ctgctgtttcttccaactcccatcc

SEQ ID NO: 2889156 - DNA, 25 bp, Homo sapien
tttcttccaactcccatccactgca

SEQ ID NO: 2889157 - DNA, 25 bp, Homo sapien
gctgtttcttccaactcccatccac

SEQ ID NO: 2889158 - DNA, 25 bp, Homo sapien
tggctcgcacttgacaggcgcaaac

SEQ ID NO: 2889159 - DNA, 25 bp, Homo sapien
ttttcctgtggctcgcacttgacag

SEQ ID NO: 2889160 - DNA, 25 bp, Homo sapien
tgtggctcgcacttgacaggcgcaa

SEQ ID NO: 2889161 - DNA, 25 bp, Homo sapien
tcctgtggctcgcacttgacaggcg

SEQ ID NO: 2889162 - DNA, 25 bp, Homo sapien
acgaatctactttgcactttctcca

SEQ ID NO: 2889163 - DNA, 25 bp, Homo sapien
tacgaatctactttgcactttctcc

SEQ ID NO: 2889164 - DNA, 25 bp, Homo sapien
aatagggtgatgggggtctccctat

SEQ ID NO: 2889165 - DNA, 25 bp, Homo sapien
tgatgggggtctccctatgttgccc

SEQ ID NO: 2889166 - DNA, 25 bp, Homo sapien
cctcccaaagtgctgaaatgacagg

SEQ ID NO: 2889167 - DNA, 25 bp, Homo sapien
tggagtgcagtgggcaataatggct

SEQ ID NO: 2889168 - DNA, 25 bp, Homo sapien
gagtgcagtgggcaataatggctca

SEQ ID NO: 2889169 - DNA, 25 bp, Homo sapien
gtgcagtgggcaataatggctcact

SEQ ID NO: 2889170 - DNA, 25 bp, Homo sapien
caggctggagtacacaggctggagt

SEQ ID NO: 2889171 - DNA, 25 bp, Homo sapien
cgagtttttaagcatgactgggcat

SEQ ID NO: 2889172 - DNA, 25 bp, Homo sapien
cctttaccttactgcactggccaga

SEQ ID NO: 2889173 - DNA, 25 bp, Homo sapien
tgaaatggtcagcaggtatctagcc

SEQ ID NO: 2889174 - DNA, 25 bp, Homo sapien
ctagcctcattccagatctcacggg

SEQ ID NO: 2889175 - DNA, 25 bp, Homo sapien
gtaaatcttccaagccgcaacacag

SEQ ID NO: 2889176 - DNA, 25 bp, Homo sapien
ctgcagcatagaaaacggctctctg

SEQ ID NO: 2889177 - DNA, 25 bp, Homo sapien
ggtttcataagcgtaggctaaacta

SEQ ID NO: 2889178 - DNA, 25 bp, Homo sapien
catcaaagccgggattgcccaggtt

SEQ ID NO: 2889179 - DNA, 25 bp, Homo sapien
gagaatattctcaggcttcaagtct

SEQ ID NO: 2889180 - DNA, 25 bp, Homo sapien
gatcatcaaggagaatattctcagg

SEQ ID NO: 2889181 - DNA, 25 bp, Homo sapien
cacgatcatcaaggagaatattctc

SEQ ID NO: 2889182 - DNA, 25 bp, Homo sapien
aaggagaatattctcaggcttcaag

SEQ ID NO: 2889183 - DNA, 25 bp, Homo sapien
agcgagggctgcgcaaacaggtcag

SEQ ID NO: 2889184 - DNA, 25 bp, Homo sapien
cagcgagggctgcgcaaacaggtca

SEQ ID NO: 2889185 - DNA, 25 bp, Homo sapien
tctctgtggccaaaccgaggtctga

SEQ ID NO: 2889186 - DNA, 25 bp, Homo sapien
tccaactcttcctcgaaccctctgt

SEQ ID NO: 2889187 - DNA, 25 bp, Homo sapien
catgtagccgactgttccaactctt

SEQ ID NO: 2889188 - DNA, 25 bp, Homo sapien
ccgaggtctgaaatccggatgtgtc

SEQ ID NO: 2889189 - DNA, 25 bp, Homo sapien
ttcatagatcagacagccaagtccc

SEQ ID NO: 2889190 - DNA, 25 bp, Homo sapien
caccaatcgggactaaacgtatact

SEQ ID NO: 2889191 - DNA, 25 bp, Homo sapien
catagatcagacagccaagtcccca

SEQ ID NO: 2889192 - DNA, 25 bp, Homo sapien
tcatagatcagacagccaagtcccc

SEQ ID NO: 2889193 - DNA, 25 bp, Homo sapien
ctcagaatactcctcggtatcattc

SEQ ID NO: 2889194 - DNA, 25 bp, Homo sapien
tgattctttgatcgacctcctccca

SEQ ID NO: 2889195 - DNA, 25 bp, Homo sapien
cctgcagatagatttggcatcctct

SEQ ID NO: 2889196 - DNA, 25 bp, Homo sapien
cctcggtatcattcttgattctttg

SEQ ID NO: 2889197 - DNA, 25 bp, Homo sapien
cttctgctgttgataaattactcag

SEQ ID NO: 2889198 - DNA, 25 bp, Homo sapien
actaagacagatggcctgaccaggc

SEQ ID NO: 2889199 - DNA, 25 bp, Homo sapien
cagtctaagggattctgtcatagca

SEQ ID NO: 2889200 - DNA, 25 bp, Homo sapien
tggtccaaaagctggcctcaggtcc

SEQ ID NO: 2889201 - DNA, 25 bp, Homo sapien
ttgatgtccttgaacacggggtgct

SEQ ID NO: 2889202 - DNA, 25 bp, Homo sapien
agttgatgtccttgaacacggggtg

SEQ ID NO: 2889203 - DNA, 25 bp, Homo sapien
tgtccttgaacacggggtgctgctt

SEQ ID NO: 2889204 - DNA, 25 bp, Homo sapien
gatgtccttgaacacggggtgctgc

SEQ ID NO: 2889205 - DNA, 25 bp, Homo sapien
tagaagtcttcatctgcggtgtcca

SEQ ID NO: 2889206 - DNA, 25 bp, Homo sapien
caggacgtccttacagtaaacggca

SEQ ID NO: 2889207 - DNA, 25 bp, Homo sapien
cgagaactgctcgatatccaggacg

SEQ ID NO: 2889208 - DNA, 25 bp, Homo sapien
ggtagcaaaccgagcatagaagtct

SEQ ID NO: 2889209 - DNA, 25 bp, Homo sapien
cattctgccaggggatggagacaca

SEQ ID NO: 2889210 - DNA, 25 bp, Homo sapien
attctgccaggggatggagacacac

SEQ ID NO: 2889211 - DNA, 25 bp, Homo sapien
ctcattctgccaggggatggagaca

SEQ ID NO: 2889212 - DNA, 25 bp, Homo sapien
tcattctgccaggggatggagacac

SEQ ID NO: 2889213 - DNA, 25 bp, Homo sapien
ctttgaaacacccagattcgatcat

SEQ ID NO: 2889214 - DNA, 25 bp, Homo sapien
gtctatagaagaagcctctgtttgg

SEQ ID NO: 2889215 - DNA, 25 bp, Homo sapien
gggtatgtatgttcttgtctagatc

SEQ ID NO: 2889216 - DNA, 25 bp, Homo sapien
gttcttgtctagatctaatggcaaa

SEQ ID NO: 2889217 - DNA, 25 bp, Homo sapien
tctgaagagtctatagaagaagcct

SEQ ID NO: 2889218 - DNA, 25 bp, Homo sapien
aagtaccaggttttcaccttggcag

SEQ ID NO: 2889219 - DNA, 25 bp, Homo sapien
ctgtaggagccatcgcaaacagaaa

SEQ ID NO: 2889220 - DNA, 25 bp, Homo sapien
ggagccatcgcaaacagaaaaagta

SEQ ID NO: 2889221 - DNA, 25 bp, Homo sapien
gtaccaggttttcaccttggcagtc

SEQ ID NO: 2889222 - DNA, 25 bp, Homo sapien
tgacgaaggttccacaggatgccga

SEQ ID NO: 2889223 - DNA, 25 bp, Homo sapien
aaaggaatccactttccccgtgcag

SEQ ID NO: 2889224 - DNA, 25 bp, Homo sapien
cactgtgagtgccatctgacgaagg

SEQ ID NO: 2889225 - DNA, 25 bp, Homo sapien
taaactattttgtcagcgacacggg

SEQ ID NO: 2889226 - DNA, 25 bp, Homo sapien
tggattagaatgttagtggccaagc

SEQ ID NO: 2889227 - DNA, 25 bp, Homo sapien
aagatggattagaatgttagtggcc

SEQ ID NO: 2889228 - DNA, 25 bp, Homo sapien
aaagaaagatggattagaatgttag

SEQ ID NO: 2889229 - DNA, 25 bp, Homo sapien
ttagaatgttagtggccaagctctg

SEQ ID NO: 2889230 - DNA, 25 bp, Homo sapien
agcattgcttgggttccacttcctt

SEQ ID NO: 2889231 - DNA, 25 bp, Homo sapien
cattgcttgggttccacttccttct

SEQ ID NO: 2889232 - DNA, 25 bp, Homo sapien
gcattgcttgggttccacttccttc

SEQ ID NO: 2889233 - DNA, 25 bp, Homo sapien
tgggacgagacgctaacacatgctc

SEQ ID NO: 2889234 - DNA, 25 bp, Homo sapien
ttacaattccaggtgggacgagacg

SEQ ID NO: 2889235 - DNA, 25 bp, Homo sapien
agggtctgctctgtggtccgcaccg

SEQ ID NO: 2889236 - DNA, 25 bp, Homo sapien
acatgctccttcctggcgccagggt

SEQ ID NO: 2889237 - DNA, 25 bp, Homo sapien
atgtcaagtgctgccctgccctgcg

SEQ ID NO: 2889238 - DNA, 25 bp, Homo sapien
ccctgccctgcggaagccgcagcca

SEQ ID NO: 2889239 - DNA, 25 bp, Homo sapien
gctgccctgccctgcggaagccgca

SEQ ID NO: 2889240 - DNA, 25 bp, Homo sapien
tgccctgcggaagccgcagccagcg

SEQ ID NO: 2889241 - DNA, 25 bp, Homo sapien
ggcagcacagagatcccggctgcag

SEQ ID NO: 2889242 - DNA, 25 bp, Homo sapien
ctggttcaaagtcaccgaggcctgt

SEQ ID NO: 2889243 - DNA, 25 bp, Homo sapien
tctcccgcgcgcagctgtccgatgt

SEQ ID NO: 2889244 - DNA, 25 bp, Homo sapien
cctggcttctcacgcagcaggcagc

SEQ ID NO: 2889245 - DNA, 25 bp, Homo sapien
ctttgtctacactgatggaagaact

SEQ ID NO: 2889246 - DNA, 25 bp, Homo sapien
gattccgctgtggactttgtctaca

SEQ ID NO: 2889247 - DNA, 25 bp, Homo sapien
tgtggactttgtctacactgatgga

SEQ ID NO: 2889248 - DNA, 25 bp, Homo sapien
actgtgattccgctgtggactttgt

SEQ ID NO: 2889249 - DNA, 25 bp, Homo sapien
tggctggcaaggaagtcaggtcctc

SEQ ID NO: 2889250 - DNA, 25 bp, Homo sapien
gctggcaaggaagtcaggtcctcag

SEQ ID NO: 2889251 - DNA, 25 bp, Homo sapien
tggcaaggaagtcaggtcctcagcc

SEQ ID NO: 2889252 - DNA, 25 bp, Homo sapien
ttacagaggccctgtggctggcaag

SEQ ID NO: 2889253 - DNA, 25 bp, Homo sapien
atacagggtagctttcagacgttgc

SEQ ID NO: 2889254 - DNA, 25 bp, Homo sapien
acagggtagctttcagacgttgcca

SEQ ID NO: 2889255 - DNA, 25 bp, Homo sapien
tacagggtagctttcagacgttgcc

SEQ ID NO: 2889256 - DNA, 25 bp, Homo sapien
tgttaattgaacaagttaccaaatg

SEQ ID NO: 2889257 - DNA, 25 bp, Homo sapien
gttctcttcaatacatacatgcttg

SEQ ID NO: 2889258 - DNA, 25 bp, Homo sapien
tgcaaccctggtcggttcccaggtc

SEQ ID NO: 2889259 - DNA, 25 bp, Homo sapien
accagcccagggtatgaacgatgcc

SEQ ID NO: 2889260 - DNA, 25 bp, Homo sapien
tgtatatgctgccacagcgagcact

SEQ ID NO: 2889261 - DNA, 25 bp, Homo sapien
tagtgtatatgctgccacagcgagc

SEQ ID NO: 2889262 - DNA, 25 bp, Homo sapien
tttagtgtatatgctgccacagcga

SEQ ID NO: 2889263 - DNA, 25 bp, Homo sapien
ttttagtgtatatgctgccacagcg

SEQ ID NO: 2889264 - DNA, 25 bp, Homo sapien
ttctgtccccgtagaagggaggtgc

SEQ ID NO: 2889265 - DNA, 25 bp, Homo sapien
tcttgaagctgtctaggagccacca

SEQ ID NO: 2889266 - DNA, 25 bp, Homo sapien
cattggcgatcagctcaaccatcag

SEQ ID NO: 2889267 - DNA, 25 bp, Homo sapien
gggaggtgcgctgccctctagaaac

SEQ ID NO: 2889268 - DNA, 25 bp, Homo sapien
taaatgtatattagatcctctcacc

SEQ ID NO: 2889269 - DNA, 25 bp, Homo sapien
tctcagtgccttattctgggtagtg

SEQ ID NO: 2889270 - DNA, 25 bp, Homo sapien
gacttacttcctagttctctctggc

SEQ ID NO: 2889271 - DNA, 25 bp, Homo sapien
ctattctgctgttaaacccttgctt

SEQ ID NO: 2889272 - DNA, 25 bp, Homo sapien
cagaagttctggaacgcagatcccc

SEQ ID NO: 2889273 - DNA, 25 bp, Homo sapien
tatgcgattggctaggtgctctcgg

SEQ ID NO: 2889274 - DNA, 25 bp, Homo sapien
gcagatccccctcggtgaaagattt

SEQ ID NO: 2889275 - DNA, 25 bp, Homo sapien
aaagatttctaaggtcaggatgttc

SEQ ID NO: 2889276 - DNA, 25 bp, Homo sapien
tgaaagtgatcactgttggccgggc

SEQ ID NO: 2889277 - DNA, 25 bp, Homo sapien
tgaacctctgttagtttgaaagtga

SEQ ID NO: 2889278 - DNA, 25 bp, Homo sapien
taatcgttgatatacgtgaggtcag

SEQ ID NO: 2889279 - DNA, 25 bp, Homo sapien
tttctgtatatcctaccagctctgt

SEQ ID NO: 2889280 - DNA, 25 bp, Homo sapien
aaagttcacagaaaagtttggcatc

SEQ ID NO: 2889281 - DNA, 25 bp, Homo sapien
aagttcacagaaaagtttggcatca

SEQ ID NO: 2889282 - DNA, 25 bp, Homo sapien
agttcacagaaaagtttggcatcat

SEQ ID NO: 2889283 - DNA, 25 bp, Homo sapien
ttaaagttcacagaaaagtttggca

SEQ ID NO: 2889284 - DNA, 25 bp, Homo sapien
taaaagcagaacctgagcggccgtc

SEQ ID NO: 2889285 - DNA, 25 bp, Homo sapien
gactctgccaatggctggccaggga

SEQ ID NO: 2889286 - DNA, 25 bp, Homo sapien
cagcatgattgacagccctagcctg

SEQ ID NO: 2889287 - DNA, 25 bp, Homo sapien
tgagcggccgtccatcttggacccg

SEQ ID NO: 2889288 - DNA, 25 bp, Homo sapien
ccttcatcagcttttccagggtcgc

SEQ ID NO: 2889289 - DNA, 25 bp, Homo sapien
tgagggactcgaaggccttcatcag

SEQ ID NO: 2889290 - DNA, 25 bp, Homo sapien
tcatcagcttttccagggtcgccat

SEQ ID NO: 2889291 - DNA, 25 bp, Homo sapien
ttgagggactcgaaggccttcatca

SEQ ID NO: 2889292 - DNA, 25 bp, Homo sapien
tcctcagccacagccgggccgggtg

SEQ ID NO: 2889293 - DNA, 25 bp, Homo sapien
ggtcggtgcagcggctcctcagcca

SEQ ID NO: 2889294 - DNA, 25 bp, Homo sapien
agcagcggctgtgcctgcggcggcg

SEQ ID NO: 2889295 - DNA, 25 bp, Homo sapien
ggctgcggctgaggcagcagcggct

SEQ ID NO: 2889296 - DNA, 25 bp, Homo sapien
ctgacagactgtgccactatgtttt

SEQ ID NO: 2889297 - DNA, 25 bp, Homo sapien
cacatattgtcagacaatgattcac

SEQ ID NO: 2889298 - DNA, 25 bp, Homo sapien
caatgattcacacggtctttcttgg

SEQ ID NO: 2889299 - DNA, 25 bp, Homo sapien
cagactgtgccactatgttttcaca

SEQ ID NO: 2889300 - DNA, 25 bp, Homo sapien
taaggcaaggcaactatttcacgca

SEQ ID NO: 2889301 - DNA, 25 bp, Homo sapien
aagaaggtgctgctagttcatccca

SEQ ID NO: 2889302 - DNA, 25 bp, Homo sapien
taatcccgaagcacagaggagtggg

SEQ ID NO: 2889303 - DNA, 25 bp, Homo sapien
tacagctactaggaacaacggtcag

SEQ ID NO: 2889304 - DNA, 25 bp, Homo sapien
tttcaccgcactggtccagctggtc

SEQ ID NO: 2889305 - DNA, 25 bp, Homo sapien
gtgtttcaccgcactggtccagctg

SEQ ID NO: 2889306 - DNA, 25 bp, Homo sapien
ggcagtgtttcaccgcactggtcca

SEQ ID NO: 2889307 - DNA, 25 bp, Homo sapien
agtgtttcaccgcactggtccagct

SEQ ID NO: 2889308 - DNA, 25 bp, Homo sapien
gttccatagcgatgcccagaagttt

SEQ ID NO: 2889309 - DNA, 25 bp, Homo sapien
cagcagaaaaagttccatagcgatg

SEQ ID NO: 2889310 - DNA, 25 bp, Homo sapien
aaaagttccatagcgatgcccagaa

SEQ ID NO: 2889311 - DNA, 25 bp, Homo sapien
cagaaaaagttccatagcgatgccc

SEQ ID NO: 2889312 - DNA, 25 bp, Homo sapien
cctgacatctgactctgcgtcatca

SEQ ID NO: 2889313 - DNA, 25 bp, Homo sapien
taactttgttgaggcattcgtcagc

SEQ ID NO: 2889314 - DNA, 25 bp, Homo sapien
tgttgaggcattcgtcagccaccat

SEQ ID NO: 2889315 - DNA, 25 bp, Homo sapien
tttgttgaggcattcgtcagccacc

SEQ ID NO: 2889316 - DNA, 25 bp, Homo sapien
ctttgttgaggcattcgtcagccac

SEQ ID NO: 2889317 - DNA, 25 bp, Homo sapien
tatagagctcgagctgtaaccttgg

SEQ ID NO: 2889318 - DNA, 25 bp, Homo sapien
agagctcgagctgtaaccttggaag

SEQ ID NO: 2889319 - DNA, 25 bp, Homo sapien
gtaaccttggaagattagaatccat

SEQ ID NO: 2889320 - DNA, 25 bp, Homo sapien
ttccttatagagctcgagctgtaac

SEQ ID NO: 2889321 - DNA, 25 bp, Homo sapien
gcaatgagggttgcattaagagtca

SEQ ID NO: 2889322 - DNA, 25 bp, Homo sapien
tgagggttgcattaagagtcacata

SEQ ID NO: 2889323 - DNA, 25 bp, Homo sapien
gtgcaatgagggttgcattaagagt

SEQ ID NO: 2889324 - DNA, 25 bp, Homo sapien
aatgagggttgcattaagagtcaca

SEQ ID NO: 2889325 - DNA, 25 bp, Homo sapien
ctgcatttctgaggccgaaccaggt

SEQ ID NO: 2889326 - DNA, 25 bp, Homo sapien
cacagggcagcacgcaaactccgag

SEQ ID NO: 2889327 - DNA, 25 bp, Homo sapien
cagggcagcacgcaaactccgaggg

SEQ ID NO: 2889328 - DNA, 25 bp, Homo sapien
ggccgaaccaggtgagccagctcag

SEQ ID NO: 2889329 - DNA, 25 bp, Homo sapien
agctgcagccaaggtctcctggact

SEQ ID NO: 2889330 - DNA, 25 bp, Homo sapien
agtcaggcacggcagaaggttcacc

SEQ ID NO: 2889331 - DNA, 25 bp, Homo sapien
ggtctcctggactgattcttcgggt

SEQ ID NO: 2889332 - DNA, 25 bp, Homo sapien
tcttcgggtctcttgcttgttcgag

SEQ ID NO: 2889333 - DNA, 25 bp, Homo sapien
cacagcatcactcgcatgtttgtga

SEQ ID NO: 2889334 - DNA, 25 bp, Homo sapien
tcacagcatcactcgcatgtttgtg

SEQ ID NO: 2889335 - DNA, 25 bp, Homo sapien
acagcatcactcgcatgtttgtgac

SEQ ID NO: 2889336 - DNA, 25 bp, Homo sapien
ggactgccttcaacagaccccagtg

SEQ ID NO: 2889337 - DNA, 25 bp, Homo sapien
aaactggcgctgtggagctctcaca

SEQ ID NO: 2889338 - DNA, 25 bp, Homo sapien
ccttcccgtgggtgactatgctaca

SEQ ID NO: 2889339 - DNA, 25 bp, Homo sapien
gaccccagtgtacagatgggcaaac

SEQ ID NO: 2889340 - DNA, 25 bp, Homo sapien
ttgaagccacagacgccaagaagag

SEQ ID NO: 2889341 - DNA, 25 bp, Homo sapien
aagccacagacgccaagaagagctc

SEQ ID NO: 2889342 - DNA, 25 bp, Homo sapien
tgaagccacagacgccaagaagagc

SEQ ID NO: 2889343 - DNA, 25 bp, Homo sapien
tattgaagccacagacgccaagaag

SEQ ID NO: 2889344 - DNA, 25 bp, Homo sapien
tctcatgggcctctaggacaatcca

SEQ ID NO: 2889345 - DNA, 25 bp, Homo sapien
gcaatttaactggacatgaccgcat

SEQ ID NO: 2889346 - DNA, 25 bp, Homo sapien
cagtaaatgccccaccctaagagat

SEQ ID NO: 2889347 - DNA, 25 bp, Homo sapien
tcaggactggaacatcttcgatcgg

SEQ ID NO: 2889348 - DNA, 25 bp, Homo sapien
tccagccgctgtccgccgaatggtg

SEQ ID NO: 2889349 - DNA, 25 bp, Homo sapien
atccagccgctgtccgccgaatggt

SEQ ID NO: 2889350 - DNA, 25 bp, Homo sapien
tggtgggggagcttgacttcaggtt

SEQ ID NO: 2889351 - DNA, 25 bp, Homo sapien
cttcaggttcgctatgaaggccttt

SEQ ID NO: 2889352 - DNA, 25 bp, Homo sapien
agaaatattgtgtccttcttgagtg

SEQ ID NO: 2889353 - DNA, 25 bp, Homo sapien
tagaaatattgtgtccttcttgagt

SEQ ID NO: 2889354 - DNA, 25 bp, Homo sapien
cagagaacccgcaggaacccgaggc

SEQ ID NO: 2889355 - DNA, 25 bp, Homo sapien
aacccgcaggaacccgaggcacagt

SEQ ID NO: 2889356 - DNA, 25 bp, Homo sapien
ccgaggcacagtctcaagcctacaa

SEQ ID NO: 2889357 - DNA, 25 bp, Homo sapien
ggcacagtctcaagcctacaagact

SEQ ID NO: 2889358 - DNA, 25 bp, Homo sapien
cagagtggagtgttcatcctcgaca

SEQ ID NO: 2889359 - DNA, 25 bp, Homo sapien
tgtcactccgaagctgcctttcagg

SEQ ID NO: 2889360 - DNA, 25 bp, Homo sapien
caagggcaccaaatacctcagggtg

SEQ ID NO: 2889361 - DNA, 25 bp, Homo sapien
gggtgagcagcacgccaagaatcag

SEQ ID NO: 2889362 - DNA, 25 bp, Homo sapien
tagaaacagagaaacacaggtgttc

SEQ ID NO: 2889363 - DNA, 25 bp, Homo sapien
ctagaaacagagaaacacaggtgtt

SEQ ID NO: 2889364 - DNA, 25 bp, Homo sapien
agaaacagagaaacacaggtgttct

SEQ ID NO: 2889365 - DNA, 25 bp, Homo sapien
gactcctccttagcagcggtgagct

SEQ ID NO: 2889366 - DNA, 25 bp, Homo sapien
tcttggtgctgtgtatgatgtaacg

SEQ ID NO: 2889367 - DNA, 25 bp, Homo sapien
gcagaagctcgggtggaggcgttct

SEQ ID NO: 2889368 - DNA, 25 bp, Homo sapien
ccagggctccggtcacaacattgtg

SEQ ID NO: 2889369 - DNA, 25 bp, Homo sapien
gaatgcagactgcttagcacagggc

SEQ ID NO: 2889370 - DNA, 25 bp, Homo sapien
tgcaaagttaattgtaagagtagac

SEQ ID NO: 2889371 - DNA, 25 bp, Homo sapien
ggcccataatcaatagagtgtaact

SEQ ID NO: 2889372 - DNA, 25 bp, Homo sapien
gagtgtaactagtattactgcaaag

SEQ ID NO: 2889373 - DNA, 25 bp, Homo sapien
aggccggagtcagcagaagtttatc

SEQ ID NO: 2889374 - DNA, 25 bp, Homo sapien
gaagtttatccatagcctgctaggc

SEQ ID NO: 2889375 - DNA, 25 bp, Homo sapien
tgtgagtaaggccacgctgcacaca

SEQ ID NO: 2889376 - DNA, 25 bp, Homo sapien
catttatgttcacacgaggcagcag

SEQ ID NO: 2889377 - DNA, 25 bp, Homo sapien
ttgttttcttgaaaggacagggctg

SEQ ID NO: 2889378 - DNA, 25 bp, Homo sapien
aggacagggctgcatgaggaacccc

SEQ ID NO: 2889379 - DNA, 25 bp, Homo sapien
aaaggacagggctgcatgaggaacc

SEQ ID NO: 2889380 - DNA, 25 bp, Homo sapien
ttttcttgaaaggacagggctgcat

SEQ ID NO: 2889381 - DNA, 25 bp, Homo sapien
caaaactattcaggcctggttatca

SEQ ID NO: 2889382 - DNA, 25 bp, Homo sapien
ggccagtagctcatgtctttacaac

SEQ ID NO: 2889383 - DNA, 25 bp, Homo sapien
tactggaacatagctggccagtagc

SEQ ID NO: 2889384 - DNA, 25 bp, Homo sapien
tgctgaccccgaacattagaaattt

SEQ ID NO: 2889385 - DNA, 25 bp, Homo sapien
ataatgtaccaacattccttttagt

SEQ ID NO: 2889386 - DNA, 25 bp, Homo sapien
tccgatctcgattcagagtcatcct

SEQ ID NO: 2889387 - DNA, 25 bp, Homo sapien
gacatccgatctcgattcagagtca

SEQ ID NO: 2889388 - DNA, 25 bp, Homo sapien
gctgacatccgatctcgattcagag

SEQ ID NO: 2889389 - DNA, 25 bp, Homo sapien
agagctgctgacatccgatctcgat

SEQ ID NO: 2889390 - DNA, 25 bp, Homo sapien
catccccatcagtggcagagcttgt

SEQ ID NO: 2889391 - DNA, 25 bp, Homo sapien
cctggagtggaaacccctgaagaag

SEQ ID NO: 2889392 - DNA, 25 bp, Homo sapien
gaatcaggcccttcggtggtggtct

SEQ ID NO: 2889393 - DNA, 25 bp, Homo sapien
cagagcttgtcaagtcacagctggc

SEQ ID NO: 2889394 - DNA, 25 bp, Homo sapien
cattattagactatccatgagggtt

SEQ ID NO: 2889395 - DNA, 25 bp, Homo sapien
taaaactcaacatggacttgtagca

SEQ ID NO: 2889396 - DNA, 25 bp, Homo sapien
taataccagcgaactgtatacgcaa

SEQ ID NO: 2889397 - DNA, 25 bp, Homo sapien
tgagaagtgcttaaacctatgccgc

SEQ ID NO: 2889398 - DNA, 25 bp, Homo sapien
ttcatcaggaagaatacctgtggct

SEQ ID NO: 2889399 - DNA, 25 bp, Homo sapien
ggcctccgaggcttcatcaggaaga

SEQ ID NO: 2889400 - DNA, 25 bp, Homo sapien
ggctgtccaatctgcaggcccaaat

SEQ ID NO: 2889401 - DNA, 25 bp, Homo sapien
tactggttgtcggtaccgtctaaca

SEQ ID NO: 2889402 - DNA, 25 bp, Homo sapien
gtttttcaataaatgtgcctgttga

SEQ ID NO: 2889403 - DNA, 25 bp, Homo sapien
ttcaataaatgtgcctgttgaaggg

SEQ ID NO: 2889404 - DNA, 25 bp, Homo sapien
tttcaataaatgtgcctgttgaagg

SEQ ID NO: 2889405 - DNA, 25 bp, Homo sapien
ttttcaataaatgtgcctgttgaag

SEQ ID NO: 2889406 - DNA, 25 bp, Homo sapien
gcttcatctctcaacacaaatttat

SEQ ID NO: 2889407 - DNA, 25 bp, Homo sapien
tttatcaacactgctgtcagaaggc

SEQ ID NO: 2889408 - DNA, 25 bp, Homo sapien
gatcacccggttcagtagcttcatc

SEQ ID NO: 2889409 - DNA, 25 bp, Homo sapien
ttgttttcttgatcacccggttcag

SEQ ID NO: 2889410 - DNA, 25 bp, Homo sapien
aaacgaagcagataaaaggcggaca

SEQ ID NO: 2889411 - DNA, 25 bp, Homo sapien
ggacacaatggacaagaggtgcaga

SEQ ID NO: 2889412 - DNA, 25 bp, Homo sapien
caatgtcacctttgatgcggcaagg

SEQ ID NO: 2889413 - DNA, 25 bp, Homo sapien
gtcatcatcagtggactgtccaatg

SEQ ID NO: 2889414 - DNA, 25 bp, Homo sapien
agctgacctctgaaacctagttatt

SEQ ID NO: 2889415 - DNA, 25 bp, Homo sapien
tgctgcacgcaaggcaaaaacaggc

SEQ ID NO: 2889416 - DNA, 25 bp, Homo sapien
aagccaccttcagcctcaaacaaca

SEQ ID NO: 2889417 - DNA, 25 bp, Homo sapien
aataacctacctgctcccatcattt

SEQ ID NO: 2889418 - DNA, 25 bp, Homo sapien
ctcacatccctgtccggaaccagca

SEQ ID NO: 2889419 - DNA, 25 bp, Homo sapien
ggaactttatagagtttgctgaaga

SEQ ID NO: 2889420 - DNA, 25 bp, Homo sapien
agggccttcacgctgaccctcacat

SEQ ID NO: 2889421 - DNA, 25 bp, Homo sapien
ttgctgaagaaagattccgggtgga

SEQ ID NO: 2889422 - DNA, 25 bp, Homo sapien
tttctgaagagctacaacgcaggtc

SEQ ID NO: 2889423 - DNA, 25 bp, Homo sapien
gagaaggctccatagtaagcatggg

SEQ ID NO: 2889424 - DNA, 25 bp, Homo sapien
gccactgcgaccaggcacaatttgt

SEQ ID NO: 2889425 - DNA, 25 bp, Homo sapien
ggctcttacgtgctgaggtttctac

SEQ ID NO: 2889426 - DNA, 25 bp, Homo sapien
tgtgggtctccatgatcgatgtagt

SEQ ID NO: 2889427 - DNA, 25 bp, Homo sapien
catccaatctcccacgtggaagcgg

SEQ ID NO: 2889428 - DNA, 25 bp, Homo sapien
cagtggctcctcgaacctgtgggtc

SEQ ID NO: 2889429 - DNA, 25 bp, Homo sapien
cgatgtagttcaagatgtctgagac

SEQ ID NO: 2889430 - DNA, 25 bp, Homo sapien
tacaagctaacttgcaagtaacaga

SEQ ID NO: 2889431 - DNA, 25 bp, Homo sapien
cctcacagctgtacaagctaacttg

SEQ ID NO: 2889432 - DNA, 25 bp, Homo sapien
aatgcaatccgccaaagaaaatgta

SEQ ID NO: 2889433 - DNA, 25 bp, Homo sapien
tttccgcagcaaaggaatgcaatcc

SEQ ID NO: 2889434 - DNA, 25 bp, Homo sapien
gaagcattaactttactggcaacgt

SEQ ID NO: 2889435 - DNA, 25 bp, Homo sapien
cgtgcccagcatattcaacagactt

SEQ ID NO: 2889436 - DNA, 25 bp, Homo sapien
ccactaagtgaagaaatggttccac

SEQ ID NO: 2889437 - DNA, 25 bp, Homo sapien
gtggtgtaaccacgccttactgcag

SEQ ID NO: 2889438 - DNA, 25 bp, Homo sapien
gactggccagttgtgacttatgagc

SEQ ID NO: 2889439 - DNA, 25 bp, Homo sapien
ggttcaacatgctatcacttaaaga

SEQ ID NO: 2889440 - DNA, 25 bp, Homo sapien
ccagttggtatggaaaggttcaaca

SEQ ID NO: 2889441 - DNA, 25 bp, Homo sapien
ttaccatactatgggcctagcacag

SEQ ID NO: 2889442 - DNA, 25 bp, Homo sapien
gccaataggaactgttcctcagagt

SEQ ID NO: 2889443 - DNA, 25 bp, Homo sapien
ctcagagtcagcacatcgatgatca

SEQ ID NO: 2889444 - DNA, 25 bp, Homo sapien
tcagcacatcgatgatcagctgcag

SEQ ID NO: 2889445 - DNA, 25 bp, Homo sapien
cagctgcagtcctaactcactgtag

SEQ ID NO: 2889446 - DNA, 25 bp, Homo sapien
gggtttccagaagctctgtcctcac

SEQ ID NO: 2889447 - DNA, 25 bp, Homo sapien
tgcaagggtttccagaagctctgtc

SEQ ID NO: 2889448 - DNA, 25 bp, Homo sapien
ctgaagtcaatctctgcaagggttt

SEQ ID NO: 2889449 - DNA, 25 bp, Homo sapien
tcaatctctgcaagggtttccagaa

SEQ ID NO: 2889450 - DNA, 25 bp, Homo sapien
ccagctgtcttacctaggttcagta

SEQ ID NO: 2889451 - DNA, 25 bp, Homo sapien
caagcagaattaatataagctacat

SEQ ID NO: 2889452 - DNA, 25 bp, Homo sapien
ccagaatacttaaatgacgaggact

SEQ ID NO: 2889453 - DNA, 25 bp, Homo sapien
gcaaccacagctcacgttttttaat

SEQ ID NO: 2889454 - DNA, 25 bp, Homo sapien
tccagagcaggctcatccaggtgcc

SEQ ID NO: 2889455 - DNA, 25 bp, Homo sapien
tgctccagagcaggctcatccaggt

SEQ ID NO: 2889456 - DNA, 25 bp, Homo sapien
ctccagagcaggctcatccaggtgc

SEQ ID NO: 2889457 - DNA, 25 bp, Homo sapien
cttgctccagagcaggctcatccag

SEQ ID NO: 2889458 - DNA, 25 bp, Homo sapien
atgatgagcccctctgtgtaagttt

SEQ ID NO: 2889459 - DNA, 25 bp, Homo sapien
ccctgtataatgatgagcccctctg

SEQ ID NO: 2889460 - DNA, 25 bp, Homo sapien
ttttgcctccaaaaagctcaccagc

SEQ ID NO: 2889461 - DNA, 25 bp, Homo sapien
gatgagcccctctgtgtaagttttc

SEQ ID NO: 2889462 - DNA, 25 bp, Homo sapien
tattgagcactcgttcttgcagttt

SEQ ID NO: 2889463 - DNA, 25 bp, Homo sapien
gagcactcgttcttgcagttttaaa

SEQ ID NO: 2889464 - DNA, 25 bp, Homo sapien
cattattgagcactcgttcttgcag

SEQ ID NO: 2889465 - DNA, 25 bp, Homo sapien
tgacaacattattgagcactcgttc

SEQ ID NO: 2889466 - DNA, 25 bp, Homo sapien
gtgatgctgcggcaacatgtcgcac

SEQ ID NO: 2889467 - DNA, 25 bp, Homo sapien
attagtgatgctgcggcaacatgtc

SEQ ID NO: 2889468 - DNA, 25 bp, Homo sapien
ctaattagtgatgctgcggcaacat

SEQ ID NO: 2889469 - DNA, 25 bp, Homo sapien
tagtgatgctgcggcaacatgtcgc

SEQ ID NO: 2889470 - DNA, 25 bp, Homo sapien
cacttctaggtgatctactcaagag

SEQ ID NO: 2889471 - DNA, 25 bp, Homo sapien
gcaggcaaatgttcacagtaccata

SEQ ID NO: 2889472 - DNA, 25 bp, Homo sapien
attggagactcacaaggcggaaggc

SEQ ID NO: 2889473 - DNA, 25 bp, Homo sapien
tacaaggtacactactcgggtgaca

SEQ ID NO: 2889474 - DNA, 25 bp, Homo sapien
caatctcagggtcactctcatgcac

SEQ ID NO: 2889475 - DNA, 25 bp, Homo sapien
gacagcgttgtctccaatctcaggg

SEQ ID NO: 2889476 - DNA, 25 bp, Homo sapien
catgcacccactcggacataactgg

SEQ ID NO: 2889477 - DNA, 25 bp, Homo sapien
tcaggtggcgttcttcaagcacgtg

SEQ ID NO: 2889478 - DNA, 25 bp, Homo sapien
ctgacggagaaatgagatggaggct

SEQ ID NO: 2889479 - DNA, 25 bp, Homo sapien
tcttgccacggccactactggatca

SEQ ID NO: 2889480 - DNA, 25 bp, Homo sapien
gagatggaggctgcgtctcatgcat

SEQ ID NO: 2889481 - DNA, 25 bp, Homo sapien
gcatgagaagtttcaggtaaacact

SEQ ID NO: 2889482 - DNA, 25 bp, Homo sapien
tgagaaactgctgcaataactcttg

SEQ ID NO: 2889483 - DNA, 25 bp, Homo sapien
tattttccatagtgacgtctgttat

SEQ ID NO: 2889484 - DNA, 25 bp, Homo sapien
gcttggtagtaggttatagcctcta

SEQ ID NO: 2889485 - DNA, 25 bp, Homo sapien
gacgtctgttatgcttggtagtagg

SEQ ID NO: 2889486 - DNA, 25 bp, Homo sapien
ccaaatgcaaactgggaaggcagtg

SEQ ID NO: 2889487 - DNA, 25 bp, Homo sapien
cacagtgccaacctaaactccaaat

SEQ ID NO: 2889488 - DNA, 25 bp, Homo sapien
gacacaaagcttcacagcatccaaa

SEQ ID NO: 2889489 - DNA, 25 bp, Homo sapien
agacacaaagcttcacagcatccaa

SEQ ID NO: 2889490 - DNA, 25 bp, Homo sapien
cggtacagctcttcctagactcatc

SEQ ID NO: 2889491 - DNA, 25 bp, Homo sapien
aacggtacagctcttcctagactca

SEQ ID NO: 2889492 - DNA, 25 bp, Homo sapien
cccaacggtacagctcttcctagac

SEQ ID NO: 2889493 - DNA, 25 bp, Homo sapien
caacggtacagctcttcctagactc

SEQ ID NO: 2889494 - DNA, 25 bp, Homo sapien
catcttgatgggctgagagatccaa

SEQ ID NO: 2889495 - DNA, 25 bp, Homo sapien
tgcaagcaagtttccggccaaaatc

SEQ ID NO: 2889496 - DNA, 25 bp, Homo sapien
gtttccggccaaaatcaaagcatct

SEQ ID NO: 2889497 - DNA, 25 bp, Homo sapien
aaccaagctgacgagagcagggtca

SEQ ID NO: 2889498 - DNA, 25 bp, Homo sapien
aaatccaagtcctggagtccctgtt

SEQ ID NO: 2889499 - DNA, 25 bp, Homo sapien
tccaagtcctggagtccctgtttca

SEQ ID NO: 2889500 - DNA, 25 bp, Homo sapien
tcaaaatccaagtcctggagtccct

SEQ ID NO: 2889501 - DNA, 25 bp, Homo sapien
tcctggagtccctgtttcaactcag

SEQ ID NO: 2889502 - DNA, 25 bp, Homo sapien
tgtgatatgggcacagacattacct

SEQ ID NO: 2889503 - DNA, 25 bp, Homo sapien
tagcatgggaaggacaaattgcttg

SEQ ID NO: 2889504 - DNA, 25 bp, Homo sapien
ccccaatagcatgggaaggacaaat

SEQ ID NO: 2889505 - DNA, 25 bp, Homo sapien
tctccaccccaatagcatgggaagg

SEQ ID NO: 2889506 - DNA, 25 bp, Homo sapien
aggcccatgaacttctcagagattt

SEQ ID NO: 2889507 - DNA, 25 bp, Homo sapien
ggcccatgaacttctcagagatttg

SEQ ID NO: 2889508 - DNA, 25 bp, Homo sapien
gaggcccatgaacttctcagagatt

SEQ ID NO: 2889509 - DNA, 25 bp, Homo sapien
ccaggagccacgtcatccaggacgt

SEQ ID NO: 2889510 - DNA, 25 bp, Homo sapien
caggacgtgggcacaaatgttaatc

SEQ ID NO: 2889511 - DNA, 25 bp, Homo sapien
ctttattgcgggtccaggagccacg

SEQ ID NO: 2889512 - DNA, 25 bp, Homo sapien
aatcaccttcagcaggtgagagaag

SEQ ID NO: 2889513 - DNA, 25 bp, Homo sapien
tactcactccctgatcttagaaaag

SEQ ID NO: 2889514 - DNA, 25 bp, Homo sapien
tatggtttcaatgtctatagtcccc

SEQ ID NO: 2889515 - DNA, 25 bp, Homo sapien
tatacactgaaacttaattaccagg

SEQ ID NO: 2889516 - DNA, 25 bp, Homo sapien
caaggcgaaagtcctggatcttgga

SEQ ID NO: 2889517 - DNA, 25 bp, Homo sapien
agacaggatctcacactatgatgcc

SEQ ID NO: 2889518 - DNA, 25 bp, Homo sapien
caggatggggtgcaatcatatttca

SEQ ID NO: 2889519 - DNA, 25 bp, Homo sapien
gttaccagcaaagctagaagtcaac

SEQ ID NO: 2889520 - DNA, 25 bp, Homo sapien
attcaaggtcacagctggttaccag

SEQ ID NO: 2889521 - DNA, 25 bp, Homo sapien
tcgtcggatgggacttagagaaggg

SEQ ID NO: 2889522 - DNA, 25 bp, Homo sapien
gggtttgttagagaaggcaaggctg

SEQ ID NO: 2889523 - DNA, 25 bp, Homo sapien
ttcgtcggatgggacttagagaagg

SEQ ID NO: 2889524 - DNA, 25 bp, Homo sapien
tttcgtcggatgggacttagagaag

SEQ ID NO: 2889525 - DNA, 25 bp, Homo sapien
tcaacggtacagatgcttgttctcc

SEQ ID NO: 2889526 - DNA, 25 bp, Homo sapien
acggtacagatgcttgttctcctgg

SEQ ID NO: 2889527 - DNA, 25 bp, Homo sapien
tgggactcaacggtacagatgcttg

SEQ ID NO: 2889528 - DNA, 25 bp, Homo sapien
ctttcttgggactcaacggtacaga

SEQ ID NO: 2889529 - DNA, 25 bp, Homo sapien
gctttcaggacatcatgcagtttga

SEQ ID NO: 2889530 - DNA, 25 bp, Homo sapien
ggaagatgatagaaactccccagtg

SEQ ID NO: 2889531 - DNA, 25 bp, Homo sapien
cttgtagttagcgtgtgtagctttc

SEQ ID NO: 2889532 - DNA, 25 bp, Homo sapien
ggtatgaaggaagatgatagaaact

SEQ ID NO: 2889533 - DNA, 25 bp, Homo sapien
gctgagcggagaaaccctccaaact

SEQ ID NO: 2889534 - DNA, 25 bp, Homo sapien
ttttccgtgctgttctgaagatcca

SEQ ID NO: 2889535 - DNA, 25 bp, Homo sapien
tggccagctctagtatctgagaaag

SEQ ID NO: 2889536 - DNA, 25 bp, Homo sapien
aagaacatccaaggctgagcggaga

SEQ ID NO: 2889537 - DNA, 25 bp, Homo sapien
gcaggatttcaggtatcctaggatc

SEQ ID NO: 2889538 - DNA, 25 bp, Homo sapien
ccatcattggttctcgactaaagca

SEQ ID NO: 2889539 - DNA, 25 bp, Homo sapien
ggtatcctaggatctcttcaacaca

SEQ ID NO: 2889540 - DNA, 25 bp, Homo sapien
ggttctcgactaaagcaggatttca

SEQ ID NO: 2889541 - DNA, 25 bp, Homo sapien
acagaagaggaaaagaatgaagctc

SEQ ID NO: 2889542 - DNA, 25 bp, Homo sapien
aagaggaaaagaatgaagctcttac

SEQ ID NO: 2889543 - DNA, 25 bp, Homo sapien
cgtcttaacagaagaggaaaagaat

SEQ ID NO: 2889544 - DNA, 25 bp, Homo sapien
cagaagaggaaaagaatgaagctct

SEQ ID NO: 2889545 - DNA, 25 bp, Homo sapien
tgttcctcaggctggcgtcagcgag

SEQ ID NO: 2889546 - DNA, 25 bp, Homo sapien
gataagccatcaaactgggaggcca

SEQ ID NO: 2889547 - DNA, 25 bp, Homo sapien
tgtgctcggccttgtgacttgctgg

SEQ ID NO: 2889548 - DNA, 25 bp, Homo sapien
gtggtacaagcctggcctcacactg

SEQ ID NO: 2889549 - DNA, 25 bp, Homo sapien
gcttgctctttcgtgcttccaccaa

SEQ ID NO: 2889550 - DNA, 25 bp, Homo sapien
ctgcttgctctttcgtgcttccacc

SEQ ID NO: 2889551 - DNA, 25 bp, Homo sapien
tgctctttcgtgcttccaccaacga

SEQ ID NO: 2889552 - DNA, 25 bp, Homo sapien
ttgctctttcgtgcttccaccaacg

SEQ ID NO: 2889553 - DNA, 25 bp, Homo sapien
ttgtcttcaactgggtagacacttt

SEQ ID NO: 2889554 - DNA, 25 bp, Homo sapien
ttctttgtgacactcgtgaggtttg

SEQ ID NO: 2889555 - DNA, 25 bp, Homo sapien
cttatctgcacggttctttgtgaca

SEQ ID NO: 2889556 - DNA, 25 bp, Homo sapien
cactttctggaggacatcaaaccat

SEQ ID NO: 2889557 - DNA, 25 bp, Homo sapien
gcttttataacaagaggttcaaaca

SEQ ID NO: 2889558 - DNA, 25 bp, Homo sapien
caaacgaatgtgattatgaatagca

SEQ ID NO: 2889559 - DNA, 25 bp, Homo sapien
taacccgtaactgaaccagctgcgc

SEQ ID NO: 2889560 - DNA, 25 bp, Homo sapien
cacatgttgtagtcgtgtactgttt

SEQ ID NO: 2889561 - DNA, 25 bp, Homo sapien
ttcaaactgtttcaatacaaagcca

SEQ ID NO: 2889562 - DNA, 25 bp, Homo sapien
gaactggcccacttcaatgtattca

SEQ ID NO: 2889563 - DNA, 25 bp, Homo sapien
ctgtttcaatacaaagccaataaac

SEQ ID NO: 2889564 - DNA, 25 bp, Homo sapien
ctgaactggcccacttcaatgtatt

SEQ ID NO: 2889565 - DNA, 25 bp, Homo sapien
cacagagctgaatgattttaggaat

SEQ ID NO: 2889566 - DNA, 25 bp, Homo sapien
taggaattccaatgatctgttttga

SEQ ID NO: 2889567 - DNA, 25 bp, Homo sapien
tgtttggaatgattgcctctgattc

SEQ ID NO: 2889568 - DNA, 25 bp, Homo sapien
cgttcataagatagtaataccaaga

SEQ ID NO: 2889569 - DNA, 25 bp, Homo sapien
gacgacagtgaaaggtgtgtcccgt

SEQ ID NO: 2889570 - DNA, 25 bp, Homo sapien
aagacgacagtgaaaggtgtgtccc

SEQ ID NO: 2889571 - DNA, 25 bp, Homo sapien
gacagtgaaaggtgtgtcccgttac

SEQ ID NO: 2889572 - DNA, 25 bp, Homo sapien
cgaagacgacagtgaaaggtgtgtc

SEQ ID NO: 2889573 - DNA, 25 bp, Homo sapien
tcctcttaatacaaagaggtcgtgg

SEQ ID NO: 2889574 - DNA, 25 bp, Homo sapien
ctgatggtactggatgagtctcagt

SEQ ID NO: 2889575 - DNA, 25 bp, Homo sapien
gagtctcagtaacattgacaccacc

SEQ ID NO: 2889576 - DNA, 25 bp, Homo sapien
gcatcagctttatttgttcctctta

SEQ ID NO: 2889577 - DNA, 25 bp, Homo sapien
gagcgttaccacatggcacttcctt

SEQ ID NO: 2889578 - DNA, 25 bp, Homo sapien
caataaagtatccacgacagttcca

SEQ ID NO: 2889579 - DNA, 25 bp, Homo sapien
acacagttaacagtgagcgttacca

SEQ ID NO: 2889580 - DNA, 25 bp, Homo sapien
ccatctgcacgggtcaataaagtat

SEQ ID NO: 2889581 - DNA, 25 bp, Homo sapien
caaaaaaaaaaatttgctgggcatg

SEQ ID NO: 2889582 - DNA, 25 bp, Homo sapien
gtggtgcatgcctgtaatcccagct

SEQ ID NO: 2889583 - DNA, 25 bp, Homo sapien
actcgggaggtggaggcaggagaat

SEQ ID NO: 2889584 - DNA, 25 bp, Homo sapien
caggagaattgcttaaacccgggag

SEQ ID NO: 2889585 - DNA, 25 bp, Homo sapien
ttatgaagattcaaagacaaacagc

SEQ ID NO: 2889586 - DNA, 25 bp, Homo sapien
tgagggctagacaacagtgcaagtt

SEQ ID NO: 2889587 - DNA, 25 bp, Homo sapien
gaattgacaaaataagtgagggcta

SEQ ID NO: 2889588 - DNA, 25 bp, Homo sapien
gaaaaagaccttagccctatgtcaa

SEQ ID NO: 2889589 - DNA, 25 bp, Homo sapien
ggaggatgatgtcagctatctgtcg

SEQ ID NO: 2889590 - DNA, 25 bp, Homo sapien
tgtttggctaacattgggaggatga

SEQ ID NO: 2889591 - DNA, 25 bp, Homo sapien
tgtcgagacagtcgcttccacttgt

SEQ ID NO: 2889592 - DNA, 25 bp, Homo sapien
gcaggacaagaatgaacatctccaa

SEQ ID NO: 2889593 - DNA, 25 bp, Homo sapien
tgtgtttggagtgacgaacatactc

SEQ ID NO: 2889594 - DNA, 25 bp, Homo sapien
tatttaacactccaagggcttcatg

SEQ ID NO: 2889595 - DNA, 25 bp, Homo sapien
atactccgtaaaagcatgtctaccg

SEQ ID NO: 2889596 - DNA, 25 bp, Homo sapien
gggcttcatgagagtcaatgtgcat

SEQ ID NO: 2889597 - DNA, 25 bp, Homo sapien
gagaatggtgtgaagctggaaggca

SEQ ID NO: 2889598 - DNA, 25 bp, Homo sapien
ccgagatcatgacactgtactccag

SEQ ID NO: 2889599 - DNA, 25 bp, Homo sapien
aaggcagagcttgcagtgagccgag

SEQ ID NO: 2889600 - DNA, 25 bp, Homo sapien
gagccgagatcatgacactgtactc

SEQ ID NO: 2889601 - DNA, 25 bp, Homo sapien
cccgatatccacagttgaacagtgc

SEQ ID NO: 2889602 - DNA, 25 bp, Homo sapien
gaacaatatcttcagttgactggga

SEQ ID NO: 2889603 - DNA, 25 bp, Homo sapien
aaaatggccagaattcccgatatcc

SEQ ID NO: 2889604 - DNA, 25 bp, Homo sapien
ctgaatacgagaaagaacaatatct

SEQ ID NO: 2889605 - DNA, 25 bp, Homo sapien
caggagattaaatacggagagaagg

SEQ ID NO: 2889606 - DNA, 25 bp, Homo sapien
attaaatacggagagaaggagagct

SEQ ID NO: 2889607 - DNA, 25 bp, Homo sapien
agattaaatacggagagaaggagag

SEQ ID NO: 2889608 - DNA, 25 bp, Homo sapien
tgtacaggagattaaatacggagag

SEQ ID NO: 2889609 - DNA, 25 bp, Homo sapien
actgtgttcttctagcgttgaagta

SEQ ID NO: 2889610 - DNA, 25 bp, Homo sapien
gttcttctagcgttgaagtactgtc

SEQ ID NO: 2889611 - DNA, 25 bp, Homo sapien
tctagcgttgaagtactgtccccat

SEQ ID NO: 2889612 - DNA, 25 bp, Homo sapien
gcgttgaagtactgtccccatctct

SEQ ID NO: 2889613 - DNA, 25 bp, Homo sapien
gatgtggatcagacacattagcagt

SEQ ID NO: 2889614 - DNA, 25 bp, Homo sapien
tagttcctggcaatagaaagtatgt

SEQ ID NO: 2889615 - DNA, 25 bp, Homo sapien
gaaagtatgttgctgctcactcatt

SEQ ID NO: 2889616 - DNA, 25 bp, Homo sapien
cattagcagtgtgcctagttcctgg

SEQ ID NO: 2889617 - DNA, 25 bp, Homo sapien
acatggtctcgatctcgcccaggct

SEQ ID NO: 2889618 - DNA, 25 bp, Homo sapien
gcatcttatgactttcttgggttca

SEQ ID NO: 2889619 - DNA, 25 bp, Homo sapien
atcttatgactttcttgggttcact

SEQ ID NO: 2889620 - DNA, 25 bp, Homo sapien
agagacatggtctcgatctcgccca

SEQ ID NO: 2889621 - DNA, 25 bp, Homo sapien
gatcacagcccactgtagctttggc

SEQ ID NO: 2889622 - DNA, 25 bp, Homo sapien
gtagctttggcctccggggctcaat

SEQ ID NO: 2889623 - DNA, 25 bp, Homo sapien
tagctttggcctccggggctcaatt

SEQ ID NO: 2889624 - DNA, 25 bp, Homo sapien
agcccactgtagctttggcctccgg

SEQ ID NO: 2889625 - DNA, 25 bp, Homo sapien
agctgcgaaagtctgaacacagctc

SEQ ID NO: 2889626 - DNA, 25 bp, Homo sapien
attggtcggcaatgccaagccctcc

SEQ ID NO: 2889627 - DNA, 25 bp, Homo sapien
tccaagccaagagctgcgaaagtct

SEQ ID NO: 2889628 - DNA, 25 bp, Homo sapien
tgtcgacctccacattggtcggcaa

SEQ ID NO: 2889629 - DNA, 25 bp, Homo sapien
tgatcatggaacgagcccgcaagtt

SEQ ID NO: 2889630 - DNA, 25 bp, Homo sapien
cggaacagcctagtggcagctgctg

SEQ ID NO: 2889631 - DNA, 25 bp, Homo sapien
cagcggtagtcggtgtggttgacaa

SEQ ID NO: 2889632 - DNA, 25 bp, Homo sapien
gctgctgtgattctccggaacattc

SEQ ID NO: 2889633 - DNA, 25 bp, Homo sapien
tcggggtctgctgcacttctgccca

SEQ ID NO: 2889634 - DNA, 25 bp, Homo sapien
cggggtctgctgcacttctgcccac

SEQ ID NO: 2889635 - DNA, 25 bp, Homo sapien
ttcggggtctgctgcacttctgccc

SEQ ID NO: 2889636 - DNA, 25 bp, Homo sapien
cagtgctcagtcatcgtaacaggcc

SEQ ID NO: 2889637 - DNA, 25 bp, Homo sapien
gatataacatcagagtaagcaggcc

SEQ ID NO: 2889638 - DNA, 25 bp, Homo sapien
ccagcgtgggatcttgagccttcca

SEQ ID NO: 2889639 - DNA, 25 bp, Homo sapien
cttttgcaaaaagagggccacccat

SEQ ID NO: 2889640 - DNA, 25 bp, Homo sapien
ggaaaaacacagtgctaagagcagg

SEQ ID NO: 2889641 - DNA, 25 bp, Homo sapien
tatggctgctgagtctatggctaaa

SEQ ID NO: 2889642 - DNA, 25 bp, Homo sapien
gggtttaaaccagaacagctctgct

SEQ ID NO: 2889643 - DNA, 25 bp, Homo sapien
gggtcaagagtaagcagcaggaatt

SEQ ID NO: 2889644 - DNA, 25 bp, Homo sapien
tgagcagtagacataaagaaggtcc

SEQ ID NO: 2889645 - DNA, 25 bp, Homo sapien
gccagcgcagtgtgacttacactca

SEQ ID NO: 2889646 - DNA, 25 bp, Homo sapien
cgaacaggaaacgtgccctttctca

SEQ ID NO: 2889647 - DNA, 25 bp, Homo sapien
tatggccttctgcaatgggctgaac

SEQ ID NO: 2889648 - DNA, 25 bp, Homo sapien
gggacagaggtcacatcaagctaag

SEQ ID NO: 2889649 - DNA, 25 bp, Homo sapien
cccattgcggcaaagggccttaacg

SEQ ID NO: 2889650 - DNA, 25 bp, Homo sapien
tgggcaacacgcgacagaactttag

SEQ ID NO: 2889651 - DNA, 25 bp, Homo sapien
ttcagggtctgaccgagcgacgtcc

SEQ ID NO: 2889652 - DNA, 25 bp, Homo sapien
gccaactgccagaatgaaaacctcc

SEQ ID NO: 2889653 - DNA, 25 bp, Homo sapien
ggagcaacagatgcattgacaatgt

SEQ ID NO: 2889654 - DNA, 25 bp, Homo sapien
ttgacaatgtttctggatggcagtg

SEQ ID NO: 2889655 - DNA, 25 bp, Homo sapien
tctgccgtgaaagttgccaactgcc

SEQ ID NO: 2889656 - DNA, 25 bp, Homo sapien
ctttgtgctggacagactgtgtctt

SEQ ID NO: 2889657 - DNA, 25 bp, Homo sapien
gtaactttgtgctggacagactgtg

SEQ ID NO: 2889658 - DNA, 25 bp, Homo sapien
aactttgtgctggacagactgtgtc

SEQ ID NO: 2889659 - DNA, 25 bp, Homo sapien
aagtaactttgtgctggacagactg

SEQ ID NO: 2889660 - DNA, 25 bp, Homo sapien
tgagagcccctcttcgtactatttc

SEQ ID NO: 2889661 - DNA, 25 bp, Homo sapien
cctcttcgtactatttctctattgc

SEQ ID NO: 2889662 - DNA, 25 bp, Homo sapien
gagcccctcttcgtactatttctct

SEQ ID NO: 2889663 - DNA, 25 bp, Homo sapien
cttcgtactatttctctattgcaca

SEQ ID NO: 2889664 - DNA, 25 bp, Homo sapien
tacccagcatcatgtaggcgtgagc

SEQ ID NO: 2889665 - DNA, 25 bp, Homo sapien
ggcgtgagccaatagccgggcattt

SEQ ID NO: 2889666 - DNA, 25 bp, Homo sapien
gagtcagctgcaaaaactctcacag

SEQ ID NO: 2889667 - DNA, 25 bp, Homo sapien
ggtctccaattatatgtcacagcag

SEQ ID NO: 2889668 - DNA, 25 bp, Homo sapien
cgctggcagcagagttccgatgaac

SEQ ID NO: 2889669 - DNA, 25 bp, Homo sapien
tccgatgaacggcactgatgaagtc

SEQ ID NO: 2889670 - DNA, 25 bp, Homo sapien
tcacaacgagactgaattgcctgga

SEQ ID NO: 2889671 - DNA, 25 bp, Homo sapien
gccacgttaagtgctcggagtcatg

SEQ ID NO: 2889672 - DNA, 25 bp, Homo sapien
tgcacagaagcctgtccacatacag

SEQ ID NO: 2889673 - DNA, 25 bp, Homo sapien
catgcgagccagcacacggaaaggg

SEQ ID NO: 2889674 - DNA, 25 bp, Homo sapien
gagatggatcccctccaagcactga

SEQ ID NO: 2889675 - DNA, 25 bp, Homo sapien
caagcaaggatgtcgaccatgcgag

SEQ ID NO: 2889676 - DNA, 25 bp, Homo sapien
taaatttgcagccagaagcatttct

SEQ ID NO: 2889677 - DNA, 25 bp, Homo sapien
aatttgcagccagaagcatttctac

SEQ ID NO: 2889678 - DNA, 25 bp, Homo sapien
tgtaaatttgcagccagaagcattt

SEQ ID NO: 2889679 - DNA, 25 bp, Homo sapien
ctgtaaatttgcagccagaagcatt

SEQ ID NO: 2889680 - DNA, 25 bp, Homo sapien
atatcagggtttctcttcccaatac

SEQ ID NO: 2889681 - DNA, 25 bp, Homo sapien
aaatcaatatcagggtttctcttcc

SEQ ID NO: 2889682 - DNA, 25 bp, Homo sapien
atcaatatcagggtttctcttccca

SEQ ID NO: 2889683 - DNA, 25 bp, Homo sapien
caatatcagggtttctcttcccaat

SEQ ID NO: 2889684 - DNA, 25 bp, Homo sapien
cgctgctctgaaggtattcctggat

SEQ ID NO: 2889685 - DNA, 25 bp, Homo sapien
tgttgagttcttccattggcaactg

SEQ ID NO: 2889686 - DNA, 25 bp, Homo sapien
gctctgaaggtattcctggattctg

SEQ ID NO: 2889687 - DNA, 25 bp, Homo sapien
gctgctctgaaggtattcctggatt

SEQ ID NO: 2889688 - DNA, 25 bp, Homo sapien
aacacaaggacgacctgtgtttcca

SEQ ID NO: 2889689 - DNA, 25 bp, Homo sapien
taacacaaggacgacctgtgtttcc

SEQ ID NO: 2889690 - DNA, 25 bp, Homo sapien
ctaacacaaggacgacctgtgtttc

SEQ ID NO: 2889691 - DNA, 25 bp, Homo sapien
ttattcccgtacaaatctatatcct

SEQ ID NO: 2889692 - DNA, 25 bp, Homo sapien
gaatttattcccgtacaaatctata

SEQ ID NO: 2889693 - DNA, 25 bp, Homo sapien
tgtgaatttattcccgtacaaatct

SEQ ID NO: 2889694 - DNA, 25 bp, Homo sapien
ctgtgaatttattcccgtacaaatc

SEQ ID NO: 2889695 - DNA, 25 bp, Homo sapien
tttgcaaacacaactaaatgattaa

SEQ ID NO: 2889696 - DNA, 25 bp, Homo sapien
ctttgcaaacacaactaaatgatta

SEQ ID NO: 2889697 - DNA, 25 bp, Homo sapien
ttgcatggtggagagacgaaacctg

SEQ ID NO: 2889698 - DNA, 25 bp, Homo sapien
tgtccagcagggaatagagcctttg

SEQ ID NO: 2889699 - DNA, 25 bp, Homo sapien
agagacgaaacctgtccagcaggga

SEQ ID NO: 2889700 - DNA, 25 bp, Homo sapien
gagagggactaagtgagtcttgcat

SEQ ID NO: 2889701 - DNA, 25 bp, Homo sapien
tttgtccggactcactgtttccagt

SEQ ID NO: 2889702 - DNA, 25 bp, Homo sapien
gtgcccatccccgtccagcgggtgg

SEQ ID NO: 2889703 - DNA, 25 bp, Homo sapien
agtgacacgtgcccatccccgtcca

SEQ ID NO: 2889704 - DNA, 25 bp, Homo sapien
ttgtccggactcactgtttccagtg

SEQ ID NO: 2889705 - DNA, 25 bp, Homo sapien
gatttgacaagatgaacgtaccagt

SEQ ID NO: 2889706 - DNA, 25 bp, Homo sapien
ctggtccaacactgggatttgacaa

SEQ ID NO: 2889707 - DNA, 25 bp, Homo sapien
ccaacactgggatttgacaagatga

SEQ ID NO: 2889708 - DNA, 25 bp, Homo sapien
cactgggatttgacaagatgaacgt

SEQ ID NO: 2889709 - DNA, 25 bp, Homo sapien
catgaaggcattcatatcttcagca

SEQ ID NO: 2889710 - DNA, 25 bp, Homo sapien
cttcagcaggaatccgattcaccag

SEQ ID NO: 2889711 - DNA, 25 bp, Homo sapien
atgaaggcattcatatcttcagcag

SEQ ID NO: 2889712 - DNA, 25 bp, Homo sapien
gcaggaatccgattcaccagctctg

SEQ ID NO: 2889713 - DNA, 25 bp, Homo sapien
gattggtggccgatccttcaggtaa

SEQ ID NO: 2889714 - DNA, 25 bp, Homo sapien
agtaagttagctttcactgcatgaa

SEQ ID NO: 2889715 - DNA, 25 bp, Homo sapien
taaagtgtcatccaagacctcagtg

SEQ ID NO: 2889716 - DNA, 25 bp, Homo sapien
gctgaaatacgtaaaagtagccata

SEQ ID NO: 2889717 - DNA, 25 bp, Homo sapien
tcttctggccaccagaaatttcact

SEQ ID NO: 2889718 - DNA, 25 bp, Homo sapien
catggagctagcaggcttaggttga

SEQ ID NO: 2889719 - DNA, 25 bp, Homo sapien
ccctaggcttaagcatggagctagc

SEQ ID NO: 2889720 - DNA, 25 bp, Homo sapien
aatttcactcatccctaggcttaag

SEQ ID NO: 2889721 - DNA, 25 bp, Homo sapien
gatcattcaacttgctccagtaggc

SEQ ID NO: 2889722 - DNA, 25 bp, Homo sapien
attcaacttgctccagtaggccgcc

SEQ ID NO: 2889723 - DNA, 25 bp, Homo sapien
acagatcattcaacttgctccagta

SEQ ID NO: 2889724 - DNA, 25 bp, Homo sapien
aacttgctccagtaggccgccggct

SEQ ID NO: 2889725 - DNA, 25 bp, Homo sapien
gccaccacgaatttcacaatgtcct

SEQ ID NO: 2889726 - DNA, 25 bp, Homo sapien
agggttgccaccacgaatttcacaa

SEQ ID NO: 2889727 - DNA, 25 bp, Homo sapien
tgggcagggactgatacagtgcagc

SEQ ID NO: 2889728 - DNA, 25 bp, Homo sapien
ctcaagggttgccaccacgaatttc

SEQ ID NO: 2889729 - DNA, 25 bp, Homo sapien
gactttaatgcatccagaacgtgta

SEQ ID NO: 2889730 - DNA, 25 bp, Homo sapien
ccctttaaggatacaggccagactt

SEQ ID NO: 2889731 - DNA, 25 bp, Homo sapien
gatggctacaataacttgacggtga

SEQ ID NO: 2889732 - DNA, 25 bp, Homo sapien
gtgacaagacttactgccaggctga

SEQ ID NO: 2889733 - DNA, 25 bp, Homo sapien
tggagatccagactcagcgggatct

SEQ ID NO: 2889734 - DNA, 25 bp, Homo sapien
gagatccagactcagcgggatctgc

SEQ ID NO: 2889735 - DNA, 25 bp, Homo sapien
atccagactcagcgggatctgctca

SEQ ID NO: 2889736 - DNA, 25 bp, Homo sapien
gatccagactcagcgggatctgctc

SEQ ID NO: 2889737 - DNA, 25 bp, Homo sapien
aggatgaagtgcacacagtagatga

SEQ ID NO: 2889738 - DNA, 25 bp, Homo sapien
ctgtggaggagaccacgctccagag

SEQ ID NO: 2889739 - DNA, 25 bp, Homo sapien
gatgaagtgcacacagtagatgagg

SEQ ID NO: 2889740 - DNA, 25 bp, Homo sapien
gtggaggagaccacgctccagaggc

SEQ ID NO: 2889741 - DNA, 25 bp, Homo sapien
gtccttctttctggactaagaagct

SEQ ID NO: 2889742 - DNA, 25 bp, Homo sapien
tttctggactaagaagctgctctcc

SEQ ID NO: 2889743 - DNA, 25 bp, Homo sapien
tctgtgtgtttggatctacttcctc

SEQ ID NO: 2889744 - DNA, 25 bp, Homo sapien
cgctgatggcttttggggtatttgt

SEQ ID NO: 2889745 - DNA, 25 bp, Homo sapien
gttgcttgctgaccagaggccgagc

SEQ ID NO: 2889746 - DNA, 25 bp, Homo sapien
cagagacagccgcatgtgtacggat

SEQ ID NO: 2889747 - DNA, 25 bp, Homo sapien
tgttcactcggaaacaaaagagctg

SEQ ID NO: 2889748 - DNA, 25 bp, Homo sapien
gacacagcggagctacggtgcgctt

SEQ ID NO: 2889749 - DNA, 25 bp, Homo sapien
aatggcgtgagaaacgccggcacgc

SEQ ID NO: 2889750 - DNA, 25 bp, Homo sapien
ttttatgacccaaggccaacaccga

SEQ ID NO: 2889751 - DNA, 25 bp, Homo sapien
ggcacacgtgtgtagctgttgacaa

SEQ ID NO: 2889752 - DNA, 25 bp, Homo sapien
gccggcacgccgctattccttttat

SEQ ID NO: 2889753 - DNA, 25 bp, Homo sapien
tcttcggaataagcccgccatctgg

SEQ ID NO: 2889754 - DNA, 25 bp, Homo sapien
gcactggcctcttcttcggaataag

SEQ ID NO: 2889755 - DNA, 25 bp, Homo sapien
taagcccgccatctggaataccttc

SEQ ID NO: 2889756 - DNA, 25 bp, Homo sapien
caggaaagcctacaactccctgttc

SEQ ID NO: 2889757 - DNA, 25 bp, Homo sapien
tgaggtgctcagacaagtgccatgc

SEQ ID NO: 2889758 - DNA, 25 bp, Homo sapien
ttaaatcggttatgctcccctatgc

SEQ ID NO: 2889759 - DNA, 25 bp, Homo sapien
tccagatgaccgcactcagggaact

SEQ ID NO: 2889760 - DNA, 25 bp, Homo sapien
tcagtgaggtgacaaaggacccaac

SEQ ID NO: 2889761 - DNA, 25 bp, Homo sapien
gatgcggtagatgaactccttaaag

SEQ ID NO: 2889762 - DNA, 25 bp, Homo sapien
ctagtgtgttgatgcggtagatgaa

SEQ ID NO: 2889763 - DNA, 25 bp, Homo sapien
ggaatgctgtgccaaaatcccctcc

SEQ ID NO: 2889764 - DNA, 25 bp, Homo sapien
gggatctcagggaatgctgtgccaa

SEQ ID NO: 2889765 - DNA, 25 bp, Homo sapien
tcctgctccatcacgaggggctgcg

SEQ ID NO: 2889766 - DNA, 25 bp, Homo sapien
agtttcttcaaactgagtacgactg

SEQ ID NO: 2889767 - DNA, 25 bp, Homo sapien
atcacgaggggctgcgtcaccagga

SEQ ID NO: 2889768 - DNA, 25 bp, Homo sapien
tcaaactgagtacgactggtccagc

SEQ ID NO: 2889769 - DNA, 25 bp, Homo sapien
gagcccacatgtcaacaagagcagc

SEQ ID NO: 2889770 - DNA, 25 bp, Homo sapien
cacatgtcaacaagagcagcaagac

SEQ ID NO: 2889771 - DNA, 25 bp, Homo sapien
aggagagcccacatgtcaacaagag

SEQ ID NO: 2889772 - DNA, 25 bp, Homo sapien
gaaggagagcccacatgtcaacaag

SEQ ID NO: 2889773 - DNA, 25 bp, Homo sapien
aagcagcttacagctgggttgccgg

SEQ ID NO: 2889774 - DNA, 25 bp, Homo sapien
ccagtgaggtgatggcctgcacggc

SEQ ID NO: 2889775 - DNA, 25 bp, Homo sapien
gctttcagaggcttgttccggggct

SEQ ID NO: 2889776 - DNA, 25 bp, Homo sapien
cctgcacggccaggacgttgatctg

SEQ ID NO: 2889777 - DNA, 25 bp, Homo sapien
caggccacacggacggtgttttcaa

SEQ ID NO: 2889778 - DNA, 25 bp, Homo sapien
aggccacacggacggtgttttcaat

SEQ ID NO: 2889779 - DNA, 25 bp, Homo sapien
cacaggccacacggacggtgttttc

SEQ ID NO: 2889780 - DNA, 25 bp, Homo sapien
acaggccacacggacggtgttttca

SEQ ID NO: 2889781 - DNA, 25 bp, Homo sapien
tgaatctcttgctccacaatccctc

SEQ ID NO: 2889782 - DNA, 25 bp, Homo sapien
ctccacaatccctctgataatgctc

SEQ ID NO: 2889783 - DNA, 25 bp, Homo sapien
ttgaatctcttgctccacaatccct

SEQ ID NO: 2889784 - DNA, 25 bp, Homo sapien
cctgatataaatgatgggtggcaat

SEQ ID NO: 2889785 - DNA, 25 bp, Homo sapien
ctgtagtagccggagacagagaagg

SEQ ID NO: 2889786 - DNA, 25 bp, Homo sapien
tagtagccggagacagagaagggac

SEQ ID NO: 2889787 - DNA, 25 bp, Homo sapien
tgcctgatataaatgatgggtggca

SEQ ID NO: 2889788 - DNA, 25 bp, Homo sapien
tgcaaaagcttaggagtcagcagtt

SEQ ID NO: 2889789 - DNA, 25 bp, Homo sapien
aggcgagccgacagtccaggcaggc

SEQ ID NO: 2889790 - DNA, 25 bp, Homo sapien
gctgcaaaagcttaggagtcagcag

SEQ ID NO: 2889791 - DNA, 25 bp, Homo sapien
ctgagctgcaaaagcttaggagtca

SEQ ID NO: 2889792 - DNA, 25 bp, Homo sapien
cagggccgcaggcccaccccatacc

SEQ ID NO: 2889793 - DNA, 25 bp, Homo sapien
cgcaggcccaccccataccagccca

SEQ ID NO: 2889794 - DNA, 25 bp, Homo sapien
gccgcaggcccaccccataccagcc

SEQ ID NO: 2889795 - DNA, 25 bp, Homo sapien
gggccgcaggcccaccccataccag

SEQ ID NO: 2889796 - DNA, 25 bp, Homo sapien
tgtgaacaccagcaccctgagtctt

SEQ ID NO: 2889797 - DNA, 25 bp, Homo sapien
tgaacaccagcaccctgagtcttga

SEQ ID NO: 2889798 - DNA, 25 bp, Homo sapien
ctgtgaacaccagcaccctgagtct

SEQ ID NO: 2889799 - DNA, 25 bp, Homo sapien
gaacaccagcaccctgagtcttgat

SEQ ID NO: 2889800 - DNA, 25 bp, Homo sapien
ctggccgagtttgtagctcatgctc

SEQ ID NO: 2889801 - DNA, 25 bp, Homo sapien
ccgagtttgtagctcatgctcccca

SEQ ID NO: 2889802 - DNA, 25 bp, Homo sapien
tcccgctcggggttgatctgtagca

SEQ ID NO: 2889803 - DNA, 25 bp, Homo sapien
tcggggttgatctgtagcagcagct

SEQ ID NO: 2889804 - DNA, 25 bp, Homo sapien
gacgctggacacaacgcaaacattg

SEQ ID NO: 2889805 - DNA, 25 bp, Homo sapien
gatagggaatacctcgggcacagac

SEQ ID NO: 2889806 - DNA, 25 bp, Homo sapien
tcagccccagtatgatcccatgaca

SEQ ID NO: 2889807 - DNA, 25 bp, Homo sapien
cccatgacagttggtttgcggacgc

SEQ ID NO: 2889808 - DNA, 25 bp, Homo sapien
ttccccagccacacggagtgtatgg

SEQ ID NO: 2889809 - DNA, 25 bp, Homo sapien
acgtgggtggtgacgaaggtgcagg

SEQ ID NO: 2889810 - DNA, 25 bp, Homo sapien
ccagccacacggagtgtatggacac

SEQ ID NO: 2889811 - DNA, 25 bp, Homo sapien
ctggagttgactggagacgtgggtg

SEQ ID NO: 2889812 - DNA, 25 bp, Homo sapien
tgtggaatatgcgagatgggtattt

SEQ ID NO: 2889813 - DNA, 25 bp, Homo sapien
tcaagaagcacctcaaacaaatcaa

SEQ ID NO: 2889814 - DNA, 25 bp, Homo sapien
tatgcgagatgggtattttccaagt

SEQ ID NO: 2889815 - DNA, 25 bp, Homo sapien
ttcaagaagcacctcaaacaaatca

SEQ ID NO: 2889816 - DNA, 25 bp, Homo sapien
gatgtcaactccagcccggtgtttc

SEQ ID NO: 2889817 - DNA, 25 bp, Homo sapien
ggatgtcaactccagcccggtgttt

SEQ ID NO: 2889818 - DNA, 25 bp, Homo sapien
ctgcgaacaggagtggatgtcaact

SEQ ID NO: 2889819 - DNA, 25 bp, Homo sapien
cgaacaggagtggatgtcaactcca

SEQ ID NO: 2889820 - DNA, 25 bp, Homo sapien
ccacctcactgatcaggatggccgg

SEQ ID NO: 2889821 - DNA, 25 bp, Homo sapien
gcaggatccagcggctgtacaactc

SEQ ID NO: 2889822 - DNA, 25 bp, Homo sapien
actgatcaggatggccggggtcctc

SEQ ID NO: 2889823 - DNA, 25 bp, Homo sapien
aggatccagcggctgtacaactcaa

SEQ ID NO: 2889824 - DNA, 25 bp, Homo sapien
gatctcgtcttctgaagggtgcacc

SEQ ID NO: 2889825 - DNA, 25 bp, Homo sapien
gttctgtcagcgtcacatacatcag

SEQ ID NO: 2889826 - DNA, 25 bp, Homo sapien
gctcaaactggttgcgctcggtgaa

SEQ ID NO: 2889827 - DNA, 25 bp, Homo sapien
gggtgcacccttcgcagttctgtca

SEQ ID NO: 2889828 - DNA, 25 bp, Homo sapien
aaaccatggcttggccgccacaacc

SEQ ID NO: 2889829 - DNA, 25 bp, Homo sapien
ggctactacaatgatgtcataagcc

SEQ ID NO: 2889830 - DNA, 25 bp, Homo sapien
tgggctactacaatgatgtcataag

SEQ ID NO: 2889831 - DNA, 25 bp, Homo sapien
atacgggaccccaaaccatggcttg

SEQ ID NO: 2889832 - DNA, 25 bp, Homo sapien
aatatgcttcgccagatgtcgggac

SEQ ID NO: 2889833 - DNA, 25 bp, Homo sapien
gtaatgccacatgacaaggaaccag

SEQ ID NO: 2889834 - DNA, 25 bp, Homo sapien
gggacccacgggcaatgatttcacg

SEQ ID NO: 2889835 - DNA, 25 bp, Homo sapien
taccatgtggtgatgtgccacagaa

SEQ ID NO: 2889836 - DNA, 25 bp, Homo sapien
tttcacaacggtgggcaaatacctc

SEQ ID NO: 2889837 - DNA, 25 bp, Homo sapien
gacgcgctgaaaaccttcacagagg

SEQ ID NO: 2889838 - DNA, 25 bp, Homo sapien
tacgtgggtaccaagcatgacgcgc

SEQ ID NO: 2889839 - DNA, 25 bp, Homo sapien
gctctcgggtggcacggatttcaca

SEQ ID NO: 2889840 - DNA, 25 bp, Homo sapien
acgcacaacgccacacggcccctcc

SEQ ID NO: 2889841 - DNA, 25 bp, Homo sapien
cctaaggactgcgtacggccccagg

SEQ ID NO: 2889842 - DNA, 25 bp, Homo sapien
tccctaaggactgcgtacggcccca

SEQ ID NO: 2889843 - DNA, 25 bp, Homo sapien
taaggactgcgtacggccccaggtc

SEQ ID NO: 2889844 - DNA, 25 bp, Homo sapien
gagttaagtgcgtcctgcacgaccc

SEQ ID NO: 2889845 - DNA, 25 bp, Homo sapien
cacgaccccgctgggagaggattct

SEQ ID NO: 2889846 - DNA, 25 bp, Homo sapien
aagctcaagcctggtgtcctcggga

SEQ ID NO: 2889847 - DNA, 25 bp, Homo sapien
tctagtgtgctttcctggcgacgac

SEQ ID NO: 2889848 - DNA, 25 bp, Homo sapien
ggtcgcactccagcacatagaggac

SEQ ID NO: 2889849 - DNA, 25 bp, Homo sapien
tagtcgctgatgaccgggatgagct

SEQ ID NO: 2889850 - DNA, 25 bp, Homo sapien
tgcttggcagtgtcgtccagcaggt

SEQ ID NO: 2889851 - DNA, 25 bp, Homo sapien
ggctgctcctgagcgtgctctccag

SEQ ID NO: 2889852 - DNA, 25 bp, Homo sapien
atgctgaaaattccggccctacgtc

SEQ ID NO: 2889853 - DNA, 25 bp, Homo sapien
gaggtaaaacgcagtggcacacatg

SEQ ID NO: 2889854 - DNA, 25 bp, Homo sapien
tccagaggatagttctcaatgaggt

SEQ ID NO: 2889855 - DNA, 25 bp, Homo sapien
tggcacacatgaccagtacgtgctg

SEQ ID NO: 2889856 - DNA, 25 bp, Homo sapien
tgtgtcaaagaatcgctgcacagtc

SEQ ID NO: 2889857 - DNA, 25 bp, Homo sapien
cacagtctcaggtgttcatgcctcc

SEQ ID NO: 2889858 - DNA, 25 bp, Homo sapien
ccactggtatgatcctgcaaggaaa

SEQ ID NO: 2889859 - DNA, 25 bp, Homo sapien
gaccaagtcaaaactggcccactgg

SEQ ID NO: 2889860 - DNA, 25 bp, Homo sapien
ctgtgtacatgcaggtgagcatcag

SEQ ID NO: 2889861 - DNA, 25 bp, Homo sapien
cagagccgccatggcccggtgcggg

SEQ ID NO: 2889862 - DNA, 25 bp, Homo sapien
gggctgtgcacgttcactctgtcca

SEQ ID NO: 2889863 - DNA, 25 bp, Homo sapien
cacttccagacagcatcaccccaca

SEQ ID NO: 2889864 - DNA, 25 bp, Homo sapien
caacaatcactgactcgctgtcggg

SEQ ID NO: 2889865 - DNA, 25 bp, Homo sapien
ggtctgaagttctacccggactgac

SEQ ID NO: 2889866 - DNA, 25 bp, Homo sapien
aaagaacagatacccgctccatagc

SEQ ID NO: 2889867 - DNA, 25 bp, Homo sapien
caggattagggtctgaagttctacc

SEQ ID NO: 2889868 - DNA, 25 bp, Homo sapien
ttggctgttcagaatgcctcatctg

SEQ ID NO: 2889869 - DNA, 25 bp, Homo sapien
caggcttggctgttcagaatgcctc

SEQ ID NO: 2889870 - DNA, 25 bp, Homo sapien
aatgcctcatctggtcaaacagtgg

SEQ ID NO: 2889871 - DNA, 25 bp, Homo sapien
aaaagccaaatggctccccactggc

SEQ ID NO: 2889872 - DNA, 25 bp, Homo sapien
gctggttggacagaaactctccgat

SEQ ID NO: 2889873 - DNA, 25 bp, Homo sapien
tggctgctggttggacagaaactct

SEQ ID NO: 2889874 - DNA, 25 bp, Homo sapien
gaagaagtcgtctagaaactggggc

SEQ ID NO: 2889875 - DNA, 25 bp, Homo sapien
tggacagaaactctccgatgacttt

SEQ ID NO: 2889876 - DNA, 25 bp, Homo sapien
gaggctccacgtggccatggcgacc

SEQ ID NO: 2889877 - DNA, 25 bp, Homo sapien
ctggtggacgcgctgacaaagaagc

SEQ ID NO: 2889878 - DNA, 25 bp, Homo sapien
accatggacgactgcccggtgctgt

SEQ ID NO: 2889879 - DNA, 25 bp, Homo sapien
gggccctctgcgtgaagttggagag

SEQ ID NO: 2889880 - DNA, 25 bp, Homo sapien
gcaccaggacaactgtgctgcttgg

SEQ ID NO: 2889881 - DNA, 25 bp, Homo sapien
caccaggacaactgtgctgcttgga

SEQ ID NO: 2889882 - DNA, 25 bp, Homo sapien
accaggacaactgtgctgcttggag

SEQ ID NO: 2889883 - DNA, 25 bp, Homo sapien
ctggtggccggtgcttccgctggcc

SEQ ID NO: 2889884 - DNA, 25 bp, Homo sapien
tggctcctgtgcagcgctggtggcc

SEQ ID NO: 2889885 - DNA, 25 bp, Homo sapien
ggtgcttccgctggcctccactagc

SEQ ID NO: 2889886 - DNA, 25 bp, Homo sapien
agcgctggtggccggtgcttccgct

SEQ ID NO: 2889887 - DNA, 25 bp, Homo sapien
tgcaacccttggctggctggatgcc

SEQ ID NO: 2889888 - DNA, 25 bp, Homo sapien
ctggagagcgagcagagccccggaa

SEQ ID NO: 2889889 - DNA, 25 bp, Homo sapien
tccagctgcatcagcgcctccacct

SEQ ID NO: 2889890 - DNA, 25 bp, Homo sapien
acagtctacaaaggggtccagggag

SEQ ID NO: 2889891 - DNA, 25 bp, Homo sapien
tcagcagccggtgatatgggcttcc

SEQ ID NO: 2889892 - DNA, 25 bp, Homo sapien
catttcgtaaacaagtcagcagccg

SEQ ID NO: 2889893 - DNA, 25 bp, Homo sapien
caggcagaaaaggttcacgtccacc

SEQ ID NO: 2889894 - DNA, 25 bp, Homo sapien
tgtagaagtctgtggcgaccaggca

SEQ ID NO: 2889895 - DNA, 25 bp, Homo sapien
aacgacagtcgtctgtgcccgagga

SEQ ID NO: 2889896 - DNA, 25 bp, Homo sapien
caagctttgctgttgaccgagagag

SEQ ID NO: 2889897 - DNA, 25 bp, Homo sapien
tggcatctgtgcatccagacacggg

SEQ ID NO: 2889898 - DNA, 25 bp, Homo sapien
caacggaaatgtcagcgggtgctca

SEQ ID NO: 2889899 - DNA, 25 bp, Homo sapien
gtctcacagccagtcggcaagcaga

SEQ ID NO: 2889900 - DNA, 25 bp, Homo sapien
ggcatgaccaaaccaagccacatga

SEQ ID NO: 2889901 - DNA, 25 bp, Homo sapien
tacccaaaacatcgacgggcatgac

SEQ ID NO: 2889902 - DNA, 25 bp, Homo sapien
gatctgcactctcctgactaaaagg

SEQ ID NO: 2889903 - DNA, 25 bp, Homo sapien
gaaaagcctcatacaggcctggcag

SEQ ID NO: 2889904 - DNA, 25 bp, Homo sapien
ccaaaccttctagcgggctttccag

SEQ ID NO: 2889905 - DNA, 25 bp, Homo sapien
ccaggaaaaagctaggatgagaaac

SEQ ID NO: 2889906 - DNA, 25 bp, Homo sapien
ggagcagccaacagttctgagaact

SEQ ID NO: 2889907 - DNA, 25 bp, Homo sapien
gccaggaacaacatctggcctgtga

SEQ ID NO: 2889908 - DNA, 25 bp, Homo sapien
tagccaggaacaacatctggcctgt

SEQ ID NO: 2889909 - DNA, 25 bp, Homo sapien
caggaacaacatctggcctgtgata

SEQ ID NO: 2889910 - DNA, 25 bp, Homo sapien
ctagccaggaacaacatctggcctg

SEQ ID NO: 2889911 - DNA, 25 bp, Homo sapien
gacaaactctatgttgagcccagcg

SEQ ID NO: 2889912 - DNA, 25 bp, Homo sapien
tattgctgtctactatccgtcccga

SEQ ID NO: 2889913 - DNA, 25 bp, Homo sapien
tgcagagagctgatatggagaccat

SEQ ID NO: 2889914 - DNA, 25 bp, Homo sapien
aaccgacacgggcactcttagaggc

SEQ ID NO: 2889915 - DNA, 25 bp, Homo sapien
actcctacacgtgacccctctggag

SEQ ID NO: 2889916 - DNA, 25 bp, Homo sapien
ttctcactcctacacgtgacccctc

SEQ ID NO: 2889917 - DNA, 25 bp, Homo sapien
acacgtgacccctctggaggacagc

SEQ ID NO: 2889918 - DNA, 25 bp, Homo sapien
gggagggacaaagcccgatgaggat

SEQ ID NO: 2889919 - DNA, 25 bp, Homo sapien
tcatgcggcattctgagcagctccc

SEQ ID NO: 2889920 - DNA, 25 bp, Homo sapien
ccggcaagcgagtgtcctcgtctga

SEQ ID NO: 2889921 - DNA, 25 bp, Homo sapien
gaaggcgttcctttgactgcaccag

SEQ ID NO: 2889922 - DNA, 25 bp, Homo sapien
caccagagcgtgacaggcacatggg

SEQ ID NO: 2889923 - DNA, 25 bp, Homo sapien
cctccgtaggcaggtccacgttggc

SEQ ID NO: 2889924 - DNA, 25 bp, Homo sapien
aggctggcagttaccacccagattg

SEQ ID NO: 2889925 - DNA, 25 bp, Homo sapien
cagcgggagactctgctcttagaaa

SEQ ID NO: 2889926 - DNA, 25 bp, Homo sapien
aggcaggtccacgttggccacgatc

SEQ ID NO: 2889927 - DNA, 25 bp, Homo sapien
taaatatacatctctcgtcagtcct

SEQ ID NO: 2889928 - DNA, 25 bp, Homo sapien
tggatgtacaatgtttgcagcagtt

SEQ ID NO: 2889929 - DNA, 25 bp, Homo sapien
gtggggctccgggactcgcccatca

SEQ ID NO: 2889930 - DNA, 25 bp, Homo sapien
gaccacggtgcaaagcagtgagacc

SEQ ID NO: 2889931 - DNA, 25 bp, Homo sapien
gcttcagtgccatgggccaagtcct

SEQ ID NO: 2889932 - DNA, 25 bp, Homo sapien
tataagcttatgatgtcacttgacc

SEQ ID NO: 2889933 - DNA, 25 bp, Homo sapien
gaagaccacctgtactgtggtttgg

SEQ ID NO: 2889934 - DNA, 25 bp, Homo sapien
ggcttgtgtatgtcatataagctta

SEQ ID NO: 2889935 - DNA, 25 bp, Homo sapien
acggggcaggccctgcggacacaca

SEQ ID NO: 2889936 - DNA, 25 bp, Homo sapien
gcaggtgtcaatggccaaggaggtg

SEQ ID NO: 2889937 - DNA, 25 bp, Homo sapien
tggaagggtggtgggccctgtgaga

SEQ ID NO: 2889938 - DNA, 25 bp, Homo sapien
gctttgggggttacctgggagcagc

SEQ ID NO: 2889939 - DNA, 25 bp, Homo sapien
agcttagaagcatccccgctgggct

SEQ ID NO: 2889940 - DNA, 25 bp, Homo sapien
atcaccaaggcttccgagaggctcg

SEQ ID NO: 2889941 - DNA, 25 bp, Homo sapien
gcaggttggtaagacatctgcatcc

SEQ ID NO: 2889942 - DNA, 25 bp, Homo sapien
gatgactacaccaccaatcaccaag

SEQ ID NO: 2889943 - DNA, 25 bp, Homo sapien
gacagatttagggagctcaagtggc

SEQ ID NO: 2889944 - DNA, 25 bp, Homo sapien
aattagccagaaccagacgggacct

SEQ ID NO: 2889945 - DNA, 25 bp, Homo sapien
cagacgggacctcagcaaacattga

SEQ ID NO: 2889946 - DNA, 25 bp, Homo sapien
gaaagaatgggtggacgacccctgc

SEQ ID NO: 2889947 - DNA, 25 bp, Homo sapien
aatcaaataccaccgaaggcacagg

SEQ ID NO: 2889948 - DNA, 25 bp, Homo sapien
acagggtgtgctctccgatgaggaa

SEQ ID NO: 2889949 - DNA, 25 bp, Homo sapien
ttctgaaattaccagccatgccagg

SEQ ID NO: 2889950 - DNA, 25 bp, Homo sapien
gggtgctccatttctctgaagtgac

SEQ ID NO: 2889951 - DNA, 25 bp, Homo sapien
ctgggaccctcagtcgctacggggt

SEQ ID NO: 2889952 - DNA, 25 bp, Homo sapien
gtcgctacggggtctcctagggcca

SEQ ID NO: 2889953 - DNA, 25 bp, Homo sapien
tagggccagaggctggtcaaccagc

SEQ ID NO: 2889954 - DNA, 25 bp, Homo sapien
gtctcctagggccagaggctggtca

SEQ ID NO: 2889955 - DNA, 25 bp, Homo sapien
gcctgggagggtccccacatctgtc

SEQ ID NO: 2889956 - DNA, 25 bp, Homo sapien
aggacaagaaccaggcaggcagcag

SEQ ID NO: 2889957 - DNA, 25 bp, Homo sapien
atgtgaggacaagaaccaggcaggc

SEQ ID NO: 2889958 - DNA, 25 bp, Homo sapien
tgggagggtccccacatctgtcccc

SEQ ID NO: 2889959 - DNA, 25 bp, Homo sapien
gacaggcaggaatttagttaaaagc

SEQ ID NO: 2889960 - DNA, 25 bp, Homo sapien
cagagcaactgcataagctacaaca

SEQ ID NO: 2889961 - DNA, 25 bp, Homo sapien
cactgacgggccatcaatattgcgg

SEQ ID NO: 2889962 - DNA, 25 bp, Homo sapien
cctgggctgtgggacccttaagctc

SEQ ID NO: 2889963 - DNA, 25 bp, Homo sapien
gggtgagagagcgcgctcagcgagg

SEQ ID NO: 2889964 - DNA, 25 bp, Homo sapien
tggggtgagagagcgcgctcagcga

SEQ ID NO: 2889965 - DNA, 25 bp, Homo sapien
tgagagagcgcgctcagcgagggcc

SEQ ID NO: 2889966 - DNA, 25 bp, Homo sapien
ctgtggggtgagagagcgcgctcag

SEQ ID NO: 2889967 - DNA, 25 bp, Homo sapien
gcttgagctcgtcgaagaactcctc

SEQ ID NO: 2889968 - DNA, 25 bp, Homo sapien
atctcggcgtccgtccagttgcggg

SEQ ID NO: 2889969 - DNA, 25 bp, Homo sapien
catcttctcgtacaccttggcgttg

SEQ ID NO: 2889970 - DNA, 25 bp, Homo sapien
tcgccggtcatctcgaagagcttgc

SEQ ID NO: 2889971 - DNA, 25 bp, Homo sapien
aatgacgcagtaggcccctgaaacc

SEQ ID NO: 2889972 - DNA, 25 bp, Homo sapien
ccaatgacgcagtaggcccctgaaa

SEQ ID NO: 2889973 - DNA, 25 bp, Homo sapien
atttccccaatgacgcagtaggccc

SEQ ID NO: 2889974 - DNA, 25 bp, Homo sapien
tctcaatttccccaatgacgcagta

SEQ ID NO: 2889975 - DNA, 25 bp, Homo sapien
cagtggatgctccaagtcgcagagc

SEQ ID NO: 2889976 - DNA, 25 bp, Homo sapien
agtcgcagagcactgagcctccttc

SEQ ID NO: 2889977 - DNA, 25 bp, Homo sapien
gatgctccaagtcgcagagcactga

SEQ ID NO: 2889978 - DNA, 25 bp, Homo sapien
ctccaagtcgcagagcactgagcct

SEQ ID NO: 2889979 - DNA, 25 bp, Homo sapien
agcctgctggaacagtcgtggccac

SEQ ID NO: 2889980 - DNA, 25 bp, Homo sapien
aggtggtgcccgtgaattcctgagt

SEQ ID NO: 2889981 - DNA, 25 bp, Homo sapien
ggtggtgcccgtgaattcctgagtc

SEQ ID NO: 2889982 - DNA, 25 bp, Homo sapien
tgctggaacagtcgtggccacctcc

SEQ ID NO: 2889983 - DNA, 25 bp, Homo sapien
gccgttggaaacaataagctggatt

SEQ ID NO: 2889984 - DNA, 25 bp, Homo sapien
tggccattggccgttggaaacaata

SEQ ID NO: 2889985 - DNA, 25 bp, Homo sapien
ttggccgttggaaacaataagctgg

SEQ ID NO: 2889986 - DNA, 25 bp, Homo sapien
cattggccgttggaaacaataagct

SEQ ID NO: 2889987 - DNA, 25 bp, Homo sapien
gcagtttgccatcacaggactcggg

SEQ ID NO: 2889988 - DNA, 25 bp, Homo sapien
ccatcaatggctaggtaatagggcc

SEQ ID NO: 2889989 - DNA, 25 bp, Homo sapien
tcgaagcggccttcgtaggagcact

SEQ ID NO: 2889990 - DNA, 25 bp, Homo sapien
gagcactggttatacgggaagtaca

SEQ ID NO: 2889991 - DNA, 25 bp, Homo sapien
gtctcctccacggcgcggctcagcc

SEQ ID NO: 2889992 - DNA, 25 bp, Homo sapien
gcagactcatcatgcgctcctgcag

SEQ ID NO: 2889993 - DNA, 25 bp, Homo sapien
ctccagcagactcatcatgcgctcc

SEQ ID NO: 2889994 - DNA, 25 bp, Homo sapien
gtgctgctggtccagcacgcggcgc

SEQ ID NO: 2889995 - DNA, 25 bp, Homo sapien
tgctgctggtccagcacgcggcgca

SEQ ID NO: 2889996 - DNA, 25 bp, Homo sapien
tatcaaagccacgtcaagtatcatt

SEQ ID NO: 2889997 - DNA, 25 bp, Homo sapien
tggctctaggacgttcttactcgga

SEQ ID NO: 2889998 - DNA, 25 bp, Homo sapien
tcttactcggagtgaaccccagagg

SEQ ID NO: 2889999 - DNA, 25 bp, Homo sapien
tagtaacgacactggagagtggctc

SEQ ID NO: 2890000 - DNA, 25 bp, Homo sapien
gggttttcatcaggcgtcagaggcc

SEQ ID NO: 2890001 - DNA, 25 bp, Homo sapien
gcaaactgtgcgttccaggcaagaa

SEQ ID NO: 2890002 - DNA, 25 bp, Homo sapien
tttcgggatccatcaatcagggcat

SEQ ID NO: 2890003 - DNA, 25 bp, Homo sapien
tattagtgtcattgctaaggaggca

SEQ ID NO: 2890004 - DNA, 25 bp, Homo sapien
tcgcggtgtgctgtcccggatgcct

SEQ ID NO: 2890005 - DNA, 25 bp, Homo sapien
aagcacagcagcgactcgcggtgtg

SEQ ID NO: 2890006 - DNA, 25 bp, Homo sapien
gatgcctggcagttactgaagtacc

SEQ ID NO: 2890007 - DNA, 25 bp, Homo sapien
cagttactgaagtaccggtgcgtca

SEQ ID NO: 2890008 - DNA, 25 bp, Homo sapien
accttgcgtgcctctcgcatgttct

SEQ ID NO: 2890009 - DNA, 25 bp, Homo sapien
tggccacgagcgcaaagccagcaca

SEQ ID NO: 2890010 - DNA, 25 bp, Homo sapien
tgcctctcgcatgttctgagtcctg

SEQ ID NO: 2890011 - DNA, 25 bp, Homo sapien
agtcctggagatggccacgagcgca

SEQ ID NO: 2890012 - DNA, 25 bp, Homo sapien
taagccatttgtagcctgactttcc

SEQ ID NO: 2890013 - DNA, 25 bp, Homo sapien
aagtaaatctcaacccgacctcacg

SEQ ID NO: 2890014 - DNA, 25 bp, Homo sapien
aacccgacctcacgtgtaagccatt

SEQ ID NO: 2890015 - DNA, 25 bp, Homo sapien
cacgtgtaagccatttgtagcctga

SEQ ID NO: 2890016 - DNA, 25 bp, Homo sapien
tgtactgacgtgaggactgacatca

SEQ ID NO: 2890017 - DNA, 25 bp, Homo sapien
cacaggccatccatcttcaagaaag

SEQ ID NO: 2890018 - DNA, 25 bp, Homo sapien
caaagccactccatagcgacaggac

SEQ ID NO: 2890019 - DNA, 25 bp, Homo sapien
tgacatcattatcaatggacaggat

SEQ ID NO: 2890020 - DNA, 25 bp, Homo sapien
taaaaagaacaatacagttgaaaga

SEQ ID NO: 2890021 - DNA, 25 bp, Homo sapien
gaacaatacagttgaaagatttatt

SEQ ID NO: 2890022 - DNA, 25 bp, Homo sapien
cagttgaaagatttattagaccagg

SEQ ID NO: 2890023 - DNA, 25 bp, Homo sapien
caatacagttgaaagatttattaga

SEQ ID NO: 2890024 - DNA, 25 bp, Homo sapien
cagatggtgtcagtagaacactcca

SEQ ID NO: 2890025 - DNA, 25 bp, Homo sapien
gaaattggccttggacactcaggca

SEQ ID NO: 2890026 - DNA, 25 bp, Homo sapien
accccatctgtctgctctagaagca

SEQ ID NO: 2890027 - DNA, 25 bp, Homo sapien
cagaatgtagcgtcagaaattggcc

SEQ ID NO: 2890028 - DNA, 25 bp, Homo sapien
gataattgcacaagatgccagctgg

SEQ ID NO: 2890029 - DNA, 25 bp, Homo sapien
tgggctctccaaactagggcctctg

SEQ ID NO: 2890030 - DNA, 25 bp, Homo sapien
cattagtttcgaaggctgagcggca

SEQ ID NO: 2890031 - DNA, 25 bp, Homo sapien
tccaaattccgagcgtgaatgggct

SEQ ID NO: 2890032 - DNA, 25 bp, Homo sapien
acatggggaatgactgtttccgggc

SEQ ID NO: 2890033 - DNA, 25 bp, Homo sapien
ggaatgactgtttccgggccttgga

SEQ ID NO: 2890034 - DNA, 25 bp, Homo sapien
ctgtttccgggccttggactgtaat

SEQ ID NO: 2890035 - DNA, 25 bp, Homo sapien
gactgtttccgggccttggactgta

SEQ ID NO: 2890036 - DNA, 25 bp, Homo sapien
tttggaagacttacactaggtgacc

SEQ ID NO: 2890037 - DNA, 25 bp, Homo sapien
cagacactcgcgatagggaaagggc

SEQ ID NO: 2890038 - DNA, 25 bp, Homo sapien
gtgtctcaaaatagacccgctcggc

SEQ ID NO: 2890039 - DNA, 25 bp, Homo sapien
gcaattgagatggacagagacccag

SEQ ID NO: 2890040 - DNA, 25 bp, Homo sapien
ccagcccgcaggtccggattccctg

SEQ ID NO: 2890041 - DNA, 25 bp, Homo sapien
aggtccggattccctgcctctgctg

SEQ ID NO: 2890042 - DNA, 25 bp, Homo sapien
cccgcaggtccggattccctgcctc

SEQ ID NO: 2890043 - DNA, 25 bp, Homo sapien
cgcaggtccggattccctgcctctg

SEQ ID NO: 2890044 - DNA, 25 bp, Homo sapien
cgcgcggctcgggtcctggaggcca

SEQ ID NO: 2890045 - DNA, 25 bp, Homo sapien
caccacgtggcctgcgtccttgggc

SEQ ID NO: 2890046 - DNA, 25 bp, Homo sapien
cggacccagcccgagaggttaagcg

SEQ ID NO: 2890047 - DNA, 25 bp, Homo sapien
ttaagcgcgcggctcgggtcctgga

SEQ ID NO: 2890048 - DNA, 25 bp, Homo sapien
ctgaggggtgacaaaggagtctacg

SEQ ID NO: 2890049 - DNA, 25 bp, Homo sapien
ggggtgacaaaggagtctacggagc

SEQ ID NO: 2890050 - DNA, 25 bp, Homo sapien
gaggggtgacaaaggagtctacgga

SEQ ID NO: 2890051 - DNA, 25 bp, Homo sapien
gggtgacaaaggagtctacggagcc

SEQ ID NO: 2890052 - DNA, 25 bp, Homo sapien
gtgacggccccagcggtccctggag

SEQ ID NO: 2890053 - DNA, 25 bp, Homo sapien
caggaagtggtgaagccgtggctcc

SEQ ID NO: 2890054 - DNA, 25 bp, Homo sapien
gcaggacattttcctcacggcgaag

SEQ ID NO: 2890055 - DNA, 25 bp, Homo sapien
tgggctccgttcttttggtgacggc

SEQ ID NO: 2890056 - DNA, 25 bp, Homo sapien
gtctctcgacggctcggccatggga

SEQ ID NO: 2890057 - DNA, 25 bp, Homo sapien
gccatcgaatccttgtgtgcgctca

SEQ ID NO: 2890058 - DNA, 25 bp, Homo sapien
aggtacgggcccacggtgtctctcg

SEQ ID NO: 2890059 - DNA, 25 bp, Homo sapien
tcagagcaacgagcacgcaggctca

SEQ ID NO: 2890060 - DNA, 25 bp, Homo sapien
ctccgggcgcttcggcccgcgccac

SEQ ID NO: 2890061 - DNA, 25 bp, Homo sapien
gcccgcgcgcgcaacggtcgcctcg

SEQ ID NO: 2890062 - DNA, 25 bp, Homo sapien
ccgctccgggcgcttcggcccgcgc

SEQ ID NO: 2890063 - DNA, 25 bp, Homo sapien
gcaacggtcgcctcggcagccaccg

SEQ ID NO: 2890064 - DNA, 25 bp, Homo sapien
gggaagaaacttcgcactgtgacaa

SEQ ID NO: 2890065 - DNA, 25 bp, Homo sapien
cagtcacagaggcatccgcatcatt

SEQ ID NO: 2890066 - DNA, 25 bp, Homo sapien
tgatggcaggttccagcctcaggag

SEQ ID NO: 2890067 - DNA, 25 bp, Homo sapien
ttaccagggctagaactgtaagcct

SEQ ID NO: 2890068 - DNA, 25 bp, Homo sapien
ccagcagagtgcaagcctgcagcga

SEQ ID NO: 2890069 - DNA, 25 bp, Homo sapien
ggcgcctccgaggcgagcacctgtt

SEQ ID NO: 2890070 - DNA, 25 bp, Homo sapien
tcagcagagcccgcggcactgctgt

SEQ ID NO: 2890071 - DNA, 25 bp, Homo sapien
cagacccagatgcactcagtgaagg

SEQ ID NO: 2890072 - DNA, 25 bp, Homo sapien
ggctcattccaacgtccatgttctt

SEQ ID NO: 2890073 - DNA, 25 bp, Homo sapien
ctggctcattccaacgtccatgttc

SEQ ID NO: 2890074 - DNA, 25 bp, Homo sapien
tggctcattccaacgtccatgttct

SEQ ID NO: 2890075 - DNA, 25 bp, Homo sapien
caagcacacccccatactcggctaa

SEQ ID NO: 2890076 - DNA, 25 bp, Homo sapien
gatattttaagtcacgtatctaata

SEQ ID NO: 2890077 - DNA, 25 bp, Homo sapien
cacccccatactcggctaactattt

SEQ ID NO: 2890078 - DNA, 25 bp, Homo sapien
tattgagatattttaagtcacgtat

SEQ ID NO: 2890079 - DNA, 25 bp, Homo sapien
gaaaggctattactaggtgactcca

SEQ ID NO: 2890080 - DNA, 25 bp, Homo sapien
cctcttcattgagggtggtgggcac

SEQ ID NO: 2890081 - DNA, 25 bp, Homo sapien
gacacagaacatgcgtacttagtaa

SEQ ID NO: 2890082 - DNA, 25 bp, Homo sapien
tgatgacaaaacacggacacagaac

SEQ ID NO: 2890083 - DNA, 25 bp, Homo sapien
caagaccaagagcacgtctcattgt

SEQ ID NO: 2890084 - DNA, 25 bp, Homo sapien
tctgatgagcttccaagaccaagag

SEQ ID NO: 2890085 - DNA, 25 bp, Homo sapien
gagcacgtctcattgttcccttgga

SEQ ID NO: 2890086 - DNA, 25 bp, Homo sapien
tgagcttccaagaccaagagcacgt

SEQ ID NO: 2890087 - DNA, 25 bp, Homo sapien
caggcaatgggcgtttggaggcctc

SEQ ID NO: 2890088 - DNA, 25 bp, Homo sapien
cccaggcaatgggcgtttggaggcc

SEQ ID NO: 2890089 - DNA, 25 bp, Homo sapien
gcccaggcaatgggcgtttggaggc

SEQ ID NO: 2890090 - DNA, 25 bp, Homo sapien
ggcaatgggcgtttggaggcctccc

SEQ ID NO: 2890091 - DNA, 25 bp, Homo sapien
agcacacagggtgcctgtcccgaaa

SEQ ID NO: 2890092 - DNA, 25 bp, Homo sapien
acagggtgcctgtcccgaaagcgtg

SEQ ID NO: 2890093 - DNA, 25 bp, Homo sapien
cctgtcccgaaagcgtgaatccgta

SEQ ID NO: 2890094 - DNA, 25 bp, Homo sapien
aagcgtgaatccgtagccggccctc

SEQ ID NO: 2890095 - DNA, 25 bp, Homo sapien
tgattaaacaagtctgggtccacca

SEQ ID NO: 2890096 - DNA, 25 bp, Homo sapien
aacatcaaatcgagttgcggccgac

SEQ ID NO: 2890097 - DNA, 25 bp, Homo sapien
gaattgctcgcacaaaggctcgggt

SEQ ID NO: 2890098 - DNA, 25 bp, Homo sapien
cactggaacaggattcgaagcggcc

SEQ ID NO: 2890099 - DNA, 25 bp, Homo sapien
cctccccgtgactgctaagtgagga

SEQ ID NO: 2890100 - DNA, 25 bp, Homo sapien
gaagggccttatcctgagctccaag

SEQ ID NO: 2890101 - DNA, 25 bp, Homo sapien
caggaccagccatcagagccagaac

SEQ ID NO: 2890102 - DNA, 25 bp, Homo sapien
ccaggactgtgcaagctggtgactg

SEQ ID NO: 2890103 - DNA, 25 bp, Homo sapien
tattctcgcctcaagaggggtgtgg

SEQ ID NO: 2890104 - DNA, 25 bp, Homo sapien
gattctggggtcagacctaaaatgg

SEQ ID NO: 2890105 - DNA, 25 bp, Homo sapien
cactgggatgaagattctggggtca

SEQ ID NO: 2890106 - DNA, 25 bp, Homo sapien
gggtcagacctaaaatgggcttcaa

SEQ ID NO: 2890107 - DNA, 25 bp, Homo sapien
gcaccactgccaattatctaaaatg

SEQ ID NO: 2890108 - DNA, 25 bp, Homo sapien
aaatggcatcatactccccactgtc

SEQ ID NO: 2890109 - DNA, 25 bp, Homo sapien
tgtctctcaggtccgctgaggacca

SEQ ID NO: 2890110 - DNA, 25 bp, Homo sapien
gtccaggtcactttgaatttcaagg

SEQ ID NO: 2890111 - DNA, 25 bp, Homo sapien
tcacaggcctgaatgcttatctcca

SEQ ID NO: 2890112 - DNA, 25 bp, Homo sapien
gaatttgggtgctgctacttaacca

SEQ ID NO: 2890113 - DNA, 25 bp, Homo sapien
gaagcatttcgagatcctgggttct

SEQ ID NO: 2890114 - DNA, 25 bp, Homo sapien
gagacacagaattaaacacgcttgc

SEQ ID NO: 2890115 - DNA, 25 bp, Homo sapien
taactcacagcagtatgtcacatgt

SEQ ID NO: 2890116 - DNA, 25 bp, Homo sapien
cacaggcatatgacataataccacg

SEQ ID NO: 2890117 - DNA, 25 bp, Homo sapien
cacgtggccactacaatgaagaaga

SEQ ID NO: 2890118 - DNA, 25 bp, Homo sapien
gaaacagtctaaggttgccatcaac

SEQ ID NO: 2890119 - DNA, 25 bp, Homo sapien
gacccaaccaactccggcgcaggaa

SEQ ID NO: 2890120 - DNA, 25 bp, Homo sapien
ctgaagacccaaccaactccggcgc

SEQ ID NO: 2890121 - DNA, 25 bp, Homo sapien
agaatccctaagcattcagctggtg

SEQ ID NO: 2890122 - DNA, 25 bp, Homo sapien
aagaatccctaagcattcagctggt

SEQ ID NO: 2890123 - DNA, 25 bp, Homo sapien
gttttcagcaaagtcgtgctttttc

SEQ ID NO: 2890124 - DNA, 25 bp, Homo sapien
taaagatgactagtatgatgattag

SEQ ID NO: 2890125 - DNA, 25 bp, Homo sapien
tttcagcaaagtcgtgctttttcat

SEQ ID NO: 2890126 - DNA, 25 bp, Homo sapien
tatgatgattagtaaagatgaaggc

SEQ ID NO: 2890127 - DNA, 25 bp, Homo sapien
gatcatcaagggagcgagtgatact

SEQ ID NO: 2890128 - DNA, 25 bp, Homo sapien
gatactgaatctcttggatctccca

SEQ ID NO: 2890129 - DNA, 25 bp, Homo sapien
tgatctccgagcagacgtgcgttga

SEQ ID NO: 2890130 - DNA, 25 bp, Homo sapien
agtgagtccagttccccgcccaaat

SEQ ID NO: 2890131 - DNA, 25 bp, Homo sapien
cagggactcaaaaaacagccagacg

SEQ ID NO: 2890132 - DNA, 25 bp, Homo sapien
gacgtatctgcaaggtggacttgca

SEQ ID NO: 2890133 - DNA, 25 bp, Homo sapien
aaaacagccagacgtatctgcaagg

SEQ ID NO: 2890134 - DNA, 25 bp, Homo sapien
ggactcaaaaaacagccagacgtat

SEQ ID NO: 2890135 - DNA, 25 bp, Homo sapien
tcgagttccccggagagaccaaagc

SEQ ID NO: 2890136 - DNA, 25 bp, Homo sapien
gccatccaagggcagattcctattt

SEQ ID NO: 2890137 - DNA, 25 bp, Homo sapien
gattcctatttgcagccacaacgtg

SEQ ID NO: 2890138 - DNA, 25 bp, Homo sapien
gaccaaagctaaacaggccatccaa

SEQ ID NO: 2890139 - DNA, 25 bp, Homo sapien
aggtgtgtaccatcatacctgccta

SEQ ID NO: 2890140 - DNA, 25 bp, Homo sapien
acaggtgtgtaccatcatacctgcc

SEQ ID NO: 2890141 - DNA, 25 bp, Homo sapien
tgtgtaccatcatacctgcctaatt

SEQ ID NO: 2890142 - DNA, 25 bp, Homo sapien
ggtgtgtaccatcatacctgcctaa

SEQ ID NO: 2890143 - DNA, 25 bp, Homo sapien
gggacagacgcaaaagctcctgcca

SEQ ID NO: 2890144 - DNA, 25 bp, Homo sapien
tctgccgctgtagcatgaaaacagc

SEQ ID NO: 2890145 - DNA, 25 bp, Homo sapien
ctgtaaagggccaagagtaggcact

SEQ ID NO: 2890146 - DNA, 25 bp, Homo sapien
gcagcccagggagactctatttaca

SEQ ID NO: 2890147 - DNA, 25 bp, Homo sapien
acaccattcaacaccgcagcttgtg

SEQ ID NO: 2890148 - DNA, 25 bp, Homo sapien
tccaaagaaagaagcgccgtttaca

SEQ ID NO: 2890149 - DNA, 25 bp, Homo sapien
ggcacccgggtctaagacacaccat

SEQ ID NO: 2890150 - DNA, 25 bp, Homo sapien
gcgtgtgagaaaagtttaaaggcat

SEQ ID NO: 2890151 - DNA, 25 bp, Homo sapien
catgggtttcgtttgacaactcttt

SEQ ID NO: 2890152 - DNA, 25 bp, Homo sapien
acatgggtttcgtttgacaactctt

SEQ ID NO: 2890153 - DNA, 25 bp, Homo sapien
aacatgggtttcgtttgacaactct

SEQ ID NO: 2890154 - DNA, 25 bp, Homo sapien
ccacgtgcacagaaagccggttgat

SEQ ID NO: 2890155 - DNA, 25 bp, Homo sapien
ccaaaattcactttccgacgcagga

SEQ ID NO: 2890156 - DNA, 25 bp, Homo sapien
caaatggctaactgattaactggcc

SEQ ID NO: 2890157 - DNA, 25 bp, Homo sapien
cttaaaaggaaggacgcggctcatt

SEQ ID NO: 2890158 - DNA, 25 bp, Homo sapien
ccacatctcctggcacatgtggacc

SEQ ID NO: 2890159 - DNA, 25 bp, Homo sapien
cacatctcctggcacatgtggacca

SEQ ID NO: 2890160 - DNA, 25 bp, Homo sapien
cccacatctcctggcacatgtggac

SEQ ID NO: 2890161 - DNA, 25 bp, Homo sapien
caggggtagccattcccacatctcc

SEQ ID NO: 2890162 - DNA, 25 bp, Homo sapien
tacttcaatgtaatcccacctgttt

SEQ ID NO: 2890163 - DNA, 25 bp, Homo sapien
ggccatctgtagagcttctctggaa

SEQ ID NO: 2890164 - DNA, 25 bp, Homo sapien
tcgccgaaactgatgtcatggagct

SEQ ID NO: 2890165 - DNA, 25 bp, Homo sapien
tgtatggtgtgcgatgaggacccca

SEQ ID NO: 2890166 - DNA, 25 bp, Homo sapien
taccgccaggcactggtaagcacca

SEQ ID NO: 2890167 - DNA, 25 bp, Homo sapien
catgggagcacaactatgagagact

SEQ ID NO: 2890168 - DNA, 25 bp, Homo sapien
ccaatctactctctgcgtccatgaa

SEQ ID NO: 2890169 - DNA, 25 bp, Homo sapien
tattaactacaaccaccaagctgta

SEQ ID NO: 2890170 - DNA, 25 bp, Homo sapien
acggcctggcaaggacccacttctg

SEQ ID NO: 2890171 - DNA, 25 bp, Homo sapien
ctcccagacggcctggcaaggaccc

SEQ ID NO: 2890172 - DNA, 25 bp, Homo sapien
gagcgaacgagaaggtgctgccgtg

SEQ ID NO: 2890173 - DNA, 25 bp, Homo sapien
tgccgtgatgggcaacctggtacct

SEQ ID NO: 2890174 - DNA, 25 bp, Homo sapien
gccagcgtgaccaggaggaggccga

SEQ ID NO: 2890175 - DNA, 25 bp, Homo sapien
ctcgagacagtcagctgagccagga

SEQ ID NO: 2890176 - DNA, 25 bp, Homo sapien
gccgagaactcgagacagtcagctg

SEQ ID NO: 2890177 - DNA, 25 bp, Homo sapien
aggaggccgagaactcgagacagtc

SEQ ID NO: 2890178 - DNA, 25 bp, Homo sapien
gggcttggaacagtggaaggggctg

SEQ ID NO: 2890179 - DNA, 25 bp, Homo sapien
ccaagcagtgcaagagcggccacca

SEQ ID NO: 2890180 - DNA, 25 bp, Homo sapien
aagcagtgcaagagcggccaccagc

SEQ ID NO: 2890181 - DNA, 25 bp, Homo sapien
caagcagtgcaagagcggccaccag

SEQ ID NO: 2890182 - DNA, 25 bp, Homo sapien
gcatcatgccctgtaagtgacacac

SEQ ID NO: 2890183 - DNA, 25 bp, Homo sapien
cttagtaacagcgtcaatgaaacca

SEQ ID NO: 2890184 - DNA, 25 bp, Homo sapien
aaagtccatctgaggaacacaaggg

SEQ ID NO: 2890185 - DNA, 25 bp, Homo sapien
caatgagtcaagagtcacggctccc

SEQ ID NO: 2890186 - DNA, 25 bp, Homo sapien
caaacagggcggacactgcttctca

SEQ ID NO: 2890187 - DNA, 25 bp, Homo sapien
tcacgcctagggttgcatgagagga

SEQ ID NO: 2890188 - DNA, 25 bp, Homo sapien
catatggcttggtggagttttgcag

SEQ ID NO: 2890189 - DNA, 25 bp, Homo sapien
tggctagcacacgttaactctggaa

SEQ ID NO: 2890190 - DNA, 25 bp, Homo sapien
ttcattgaaacgctgatgactccca

SEQ ID NO: 2890191 - DNA, 25 bp, Homo sapien
taagaagtctgtaagtaatgggtcc

SEQ ID NO: 2890192 - DNA, 25 bp, Homo sapien
caagtttaccaagccaatgagtttc

SEQ ID NO: 2890193 - DNA, 25 bp, Homo sapien
caggtattgtccgatgtacttcaca

SEQ ID NO: 2890194 - DNA, 25 bp, Homo sapien
gttcatacttttagttgtatactgt

SEQ ID NO: 2890195 - DNA, 25 bp, Homo sapien
aactgtatgataactcccattttaa

SEQ ID NO: 2890196 - DNA, 25 bp, Homo sapien
tttttccgtacttgcttctgttgaa

SEQ ID NO: 2890197 - DNA, 25 bp, Homo sapien
ctggtgatgatgtgtagtatagaac

SEQ ID NO: 2890198 - DNA, 25 bp, Homo sapien
ctacagcggcaaaattcactttcac

SEQ ID NO: 2890199 - DNA, 25 bp, Homo sapien
catgcagtcactacagcggcaaaat

SEQ ID NO: 2890200 - DNA, 25 bp, Homo sapien
gcagtcactacagcggcaaaattca

SEQ ID NO: 2890201 - DNA, 25 bp, Homo sapien
tcactacagcggcaaaattcacttt

SEQ ID NO: 2890202 - DNA, 25 bp, Homo sapien
tgagcccgccctggccggagttctg

SEQ ID NO: 2890203 - DNA, 25 bp, Homo sapien
gtccccgtgtccatctgcggctggc

SEQ ID NO: 2890204 - DNA, 25 bp, Homo sapien
ggcccacccgtccatcatgtgcttc

SEQ ID NO: 2890205 - DNA, 25 bp, Homo sapien
ggagttctgcactcctttctggccg

SEQ ID NO: 2890206 - DNA, 25 bp, Homo sapien
agagccactgtgatgccacttaacc

SEQ ID NO: 2890207 - DNA, 25 bp, Homo sapien
aaatacttccaaccatgcactgcaa

SEQ ID NO: 2890208 - DNA, 25 bp, Homo sapien
acttaaccaaatacttccaaccatg

SEQ ID NO: 2890209 - DNA, 25 bp, Homo sapien
ctgataagagccactgtgatgccac

SEQ ID NO: 2890210 - DNA, 25 bp, Homo sapien
ggacagggcggccaagccaggaggg

SEQ ID NO: 2890211 - DNA, 25 bp, Homo sapien
aggacagggcggccaagccaggagg

SEQ ID NO: 2890212 - DNA, 25 bp, Homo sapien
gacagggcggccaagccaggagggc

SEQ ID NO: 2890213 - DNA, 25 bp, Homo sapien
tggccgccagcacgcactgaagttt

SEQ ID NO: 2890214 - DNA, 25 bp, Homo sapien
ctgaagtttcagaggcctgcggctg

SEQ ID NO: 2890215 - DNA, 25 bp, Homo sapien
tatagatcaaatgtgtgaccgcggt

SEQ ID NO: 2890216 - DNA, 25 bp, Homo sapien
cggctggggctcacacggaagccct

SEQ ID NO: 2890217 - DNA, 25 bp, Homo sapien
ccgaaaggaagttctgggataggat

SEQ ID NO: 2890218 - DNA, 25 bp, Homo sapien
tcagaaacacggtggtaatgtttcc

SEQ ID NO: 2890219 - DNA, 25 bp, Homo sapien
tctgggataggatcagaaacacggt

SEQ ID NO: 2890220 - DNA, 25 bp, Homo sapien
acacggtggtaatgtttccttgaat

SEQ ID NO: 2890221 - DNA, 25 bp, Homo sapien
gtgcgcaggataagccgcccaggct

SEQ ID NO: 2890222 - DNA, 25 bp, Homo sapien
ccagcggacgagctgatgggctcca

SEQ ID NO: 2890223 - DNA, 25 bp, Homo sapien
cacaggactgatcccagcggacgag

SEQ ID NO: 2890224 - DNA, 25 bp, Homo sapien
gcactgctgtaaagtcaaggccaca

SEQ ID NO: 2890225 - DNA, 25 bp, Homo sapien
tgcctgacgtgtctgcaaaacggcc

SEQ ID NO: 2890226 - DNA, 25 bp, Homo sapien
catttacaggagacccgatgtggga

SEQ ID NO: 2890227 - DNA, 25 bp, Homo sapien
tctcgaataaagagaagggaggtcc

SEQ ID NO: 2890228 - DNA, 25 bp, Homo sapien
tcaggcacagtgtccagagctaagc

SEQ ID NO: 2890229 - DNA, 25 bp, Homo sapien
gaagcccacacacccgtgactgcac

SEQ ID NO: 2890230 - DNA, 25 bp, Homo sapien
cgaggctcaccttccggatgcgaag

SEQ ID NO: 2890231 - DNA, 25 bp, Homo sapien
ccctcgggagcgtgctcagtcgaag

SEQ ID NO: 2890232 - DNA, 25 bp, Homo sapien
cccacacacccgtgactgcacactg

SEQ ID NO: 2890233 - DNA, 25 bp, Homo sapien
ggcaacaagatgtttcccaaacagg

SEQ ID NO: 2890234 - DNA, 25 bp, Homo sapien
cttacacaggagcatgtgcacacag

SEQ ID NO: 2890235 - DNA, 25 bp, Homo sapien
cagagcactaagaccatcatggcaa

SEQ ID NO: 2890236 - DNA, 25 bp, Homo sapien
cttgctagagcgaaagcagctgggc

SEQ ID NO: 2890237 - DNA, 25 bp, Homo sapien
aaccttgagcggctgcacatgtgtg

SEQ ID NO: 2890238 - DNA, 25 bp, Homo sapien
actacagccacagggttgaacagga

SEQ ID NO: 2890239 - DNA, 25 bp, Homo sapien
gcacactcatatgctcacacgtgca

SEQ ID NO: 2890240 - DNA, 25 bp, Homo sapien
gtcaacaactatgcacagcacacct

SEQ ID NO: 2890241 - DNA, 25 bp, Homo sapien
tgcagcaggcgctcaaaggacacgg

SEQ ID NO: 2890242 - DNA, 25 bp, Homo sapien
gctgttgttgctgacgcagtccttc

SEQ ID NO: 2890243 - DNA, 25 bp, Homo sapien
aggctggcattgctgctcaggctgt

SEQ ID NO: 2890244 - DNA, 25 bp, Homo sapien
tcctctcacgcaggcgccggcagct

SEQ ID NO: 2890245 - DNA, 25 bp, Homo sapien
ttattaacactgacacagggtcctc

SEQ ID NO: 2890246 - DNA, 25 bp, Homo sapien
gagagagaaacctcatcgctgccca

SEQ ID NO: 2890247 - DNA, 25 bp, Homo sapien
ctttgaagagctggcaacaggcacc

SEQ ID NO: 2890248 - DNA, 25 bp, Homo sapien
taacacagataggaagctccagtgc

SEQ ID NO: 2890249 - DNA, 25 bp, Homo sapien
catgtgcaggaacatgattaaaata

SEQ ID NO: 2890250 - DNA, 25 bp, Homo sapien
acaggcctgccagaataaaatgttt

SEQ ID NO: 2890251 - DNA, 25 bp, Homo sapien
gattaaaatattcacaggcctgcca

SEQ ID NO: 2890252 - DNA, 25 bp, Homo sapien
cctttttgtcatgtgcaggaacatg

SEQ ID NO: 2890253 - DNA, 25 bp, Homo sapien
aggacgtcgtctgctagctgggcct

SEQ ID NO: 2890254 - DNA, 25 bp, Homo sapien
gtgaggtgcgcggaggacgtcgtct

SEQ ID NO: 2890255 - DNA, 25 bp, Homo sapien
ttgctgcagagaaacttactgaaaa

SEQ ID NO: 2890256 - DNA, 25 bp, Homo sapien
tgtcgatgttgaccggggtggtggc

SEQ ID NO: 2890257 - DNA, 25 bp, Homo sapien
tctgtgaacgtgacccacgtgccgc

SEQ ID NO: 2890258 - DNA, 25 bp, Homo sapien
catgcacaggcacgtctcgaatagc

SEQ ID NO: 2890259 - DNA, 25 bp, Homo sapien
gggcctaatgcccatgaccacagca

SEQ ID NO: 2890260 - DNA, 25 bp, Homo sapien
gaaaatgccaccctatgcttctgtg

SEQ ID NO: 2890261 - DNA, 25 bp, Homo sapien
gagtccgggagtgcacggccctcca

SEQ ID NO: 2890262 - DNA, 25 bp, Homo sapien
tacagcggggacttcagaaagcgag

SEQ ID NO: 2890263 - DNA, 25 bp, Homo sapien
gtagctatcaaacttcatgagattg

SEQ ID NO: 2890264 - DNA, 25 bp, Homo sapien
acctgctgcgagtccgggagtgcac

SEQ ID NO: 2890265 - DNA, 25 bp, Homo sapien
tcttcattcagggatcggccggatt

SEQ ID NO: 2890266 - DNA, 25 bp, Homo sapien
cgtgctccctctttttctgggacct

SEQ ID NO: 2890267 - DNA, 25 bp, Homo sapien
ggtgctcctggtccgcgaccacgag

SEQ ID NO: 2890268 - DNA, 25 bp, Homo sapien
cgcgaccacgagaaaaacgcgcctt

SEQ ID NO: 2890269 - DNA, 25 bp, Homo sapien
accaccagagcgacgccaggacggg

SEQ ID NO: 2890270 - DNA, 25 bp, Homo sapien
attcagagaagcttcctcgacccgc

SEQ ID NO: 2890271 - DNA, 25 bp, Homo sapien
caaggtcaccgccaaccaccagagc

SEQ ID NO: 2890272 - DNA, 25 bp, Homo sapien
ctcgacccgccaacagggcctctca

SEQ ID NO: 2890273 - DNA, 25 bp, Homo sapien
gggagacacccaatagcacatttgt

SEQ ID NO: 2890274 - DNA, 25 bp, Homo sapien
tcagatgtgcgaagaaaaaagggac

SEQ ID NO: 2890275 - DNA, 25 bp, Homo sapien
tgacaggtcgtgtccccagacacag

SEQ ID NO: 2890276 - DNA, 25 bp, Homo sapien
tggaccctgacatctacctaggaaa

SEQ ID NO: 2890277 - DNA, 25 bp, Homo sapien
tcatcttcgccagcgttcagcatgg

SEQ ID NO: 2890278 - DNA, 25 bp, Homo sapien
ctggtacagaacagcctcatcttcg

SEQ ID NO: 2890279 - DNA, 25 bp, Homo sapien
agcacctggtacagaacagcctcat

SEQ ID NO: 2890280 - DNA, 25 bp, Homo sapien
cgccagcgttcagcatgggcatctc

SEQ ID NO: 2890281 - DNA, 25 bp, Homo sapien
agaccacaggctaagtgccagtccc

SEQ ID NO: 2890282 - DNA, 25 bp, Homo sapien
acaggctaagtgccagtcccctgcc

SEQ ID NO: 2890283 - DNA, 25 bp, Homo sapien
ctgatttaaacttggagaccacagg

SEQ ID NO: 2890284 - DNA, 25 bp, Homo sapien
tgatttaaacttggagaccacaggc

SEQ ID NO: 2890285 - DNA, 25 bp, Homo sapien
agctggtgctatcgcaatcacctca

SEQ ID NO: 2890286 - DNA, 25 bp, Homo sapien
tggtgctatcgcaatcacctcactg

SEQ ID NO: 2890287 - DNA, 25 bp, Homo sapien
gccagctggtgctatcgcaatcacc

SEQ ID NO: 2890288 - DNA, 25 bp, Homo sapien
cagctggtgctatcgcaatcacctc

SEQ ID NO: 2890289 - DNA, 25 bp, Homo sapien
gggcacacacaggagccgcagccac

SEQ ID NO: 2890290 - DNA, 25 bp, Homo sapien
tgcaggcggggagcagccacgcaca

SEQ ID NO: 2890291 - DNA, 25 bp, Homo sapien
gccacggagcgcagagcaccctgct

SEQ ID NO: 2890292 - DNA, 25 bp, Homo sapien
acacaggagccgcagccacggagcg

SEQ ID NO: 2890293 - DNA, 25 bp, Homo sapien
tcagcgccccgggaacaacgcttcc

SEQ ID NO: 2890294 - DNA, 25 bp, Homo sapien
gcgcgtccttcagcgccccgggaac

SEQ ID NO: 2890295 - DNA, 25 bp, Homo sapien
tccttcagcgccccgggaacaacgc

SEQ ID NO: 2890296 - DNA, 25 bp, Homo sapien
cttcagcgccccgggaacaacgctt

SEQ ID NO: 2890297 - DNA, 25 bp, Homo sapien
caggtggcctccgacaaaggtgaac

SEQ ID NO: 2890298 - DNA, 25 bp, Homo sapien
tcaaagccctttgcagatctgccag

SEQ ID NO: 2890299 - DNA, 25 bp, Homo sapien
tgtctgaagcgaacactcccatctc

SEQ ID NO: 2890300 - DNA, 25 bp, Homo sapien
cacgagtggatggactgtctgaagc

SEQ ID NO: 2890301 - DNA, 25 bp, Homo sapien
ttcggacacaggacttttcaaacag

SEQ ID NO: 2890302 - DNA, 25 bp, Homo sapien
aaccacaccgctgcacatgggctct

SEQ ID NO: 2890303 - DNA, 25 bp, Homo sapien
ggacttttcaaacagcacctgctcc

SEQ ID NO: 2890304 - DNA, 25 bp, Homo sapien
aaatcatgaaaattcggacacagga

SEQ ID NO: 2890305 - DNA, 25 bp, Homo sapien
tctctggtggagacgagtcacatgt

SEQ ID NO: 2890306 - DNA, 25 bp, Homo sapien
catcagtacgtgcagttacacagca

SEQ ID NO: 2890307 - DNA, 25 bp, Homo sapien
tttaggctgagcagacagacgccag

SEQ ID NO: 2890308 - DNA, 25 bp, Homo sapien
agacccaggtgcatgtcccggtaag

SEQ ID NO: 2890309 - DNA, 25 bp, Homo sapien
agagccctgcgactctcggcgacac

SEQ ID NO: 2890310 - DNA, 25 bp, Homo sapien
gcgactctcggcgacacaggcctcc

SEQ ID NO: 2890311 - DNA, 25 bp, Homo sapien
actctcggcgacacaggcctccatt

SEQ ID NO: 2890312 - DNA, 25 bp, Homo sapien
gccctgcgactctcggcgacacagg

SEQ ID NO: 2890313 - DNA, 25 bp, Homo sapien
tctgggcctcaagggccatcgtgct

SEQ ID NO: 2890314 - DNA, 25 bp, Homo sapien
agccgtgagggaaccagcgtcacag

SEQ ID NO: 2890315 - DNA, 25 bp, Homo sapien
gagagcggtcatcattctctcagct

SEQ ID NO: 2890316 - DNA, 25 bp, Homo sapien
tgtgaattaacacgagagagcggtc

SEQ ID NO: 2890317 - DNA, 25 bp, Homo sapien
cgctcacagagtccggacaggatgt

SEQ ID NO: 2890318 - DNA, 25 bp, Homo sapien
tccgggagatgaatgcagcagtgct

SEQ ID NO: 2890319 - DNA, 25 bp, Homo sapien
cttctcgggtgccaaagtcctgcag

SEQ ID NO: 2890320 - DNA, 25 bp, Homo sapien
gcttggtggccttgtccttctcggg

SEQ ID NO: 2890321 - DNA, 25 bp, Homo sapien
aaacaaggtgcgcttttctaggcgc

SEQ ID NO: 2890322 - DNA, 25 bp, Homo sapien
caagatgctactgtcttggtgcagc

SEQ ID NO: 2890323 - DNA, 25 bp, Homo sapien
ttctaggcgcaggtcccttgactcc

SEQ ID NO: 2890324 - DNA, 25 bp, Homo sapien
tactgtcttggtgcagcaccagagg

SEQ ID NO: 2890325 - DNA, 25 bp, Homo sapien
tcccactgaccggttaatcggaaca

SEQ ID NO: 2890326 - DNA, 25 bp, Homo sapien
cttgagtcccactgaccggttaatc

SEQ ID NO: 2890327 - DNA, 25 bp, Homo sapien
gtatctggccaccacgggccgcagc

SEQ ID NO: 2890328 - DNA, 25 bp, Homo sapien
tgaccggttaatcggaacaagatcc

SEQ ID NO: 2890329 - DNA, 25 bp, Homo sapien
agacaacccgctgtccgtccagact

SEQ ID NO: 2890330 - DNA, 25 bp, Homo sapien
ttctcctccaagacaacccgctgtc

SEQ ID NO: 2890331 - DNA, 25 bp, Homo sapien
cagactcgatataggggcgccaagg

SEQ ID NO: 2890332 - DNA, 25 bp, Homo sapien
ctgtccgtccagactcgatataggg

SEQ ID NO: 2890333 - DNA, 25 bp, Homo sapien
gagtaaccttcctcacgcacggttc

SEQ ID NO: 2890334 - DNA, 25 bp, Homo sapien
ggcgacgagcccatctccgaaggct

SEQ ID NO: 2890335 - DNA, 25 bp, Homo sapien
gagcccatctccgaaggctgctggc

SEQ ID NO: 2890336 - DNA, 25 bp, Homo sapien
tcaacaagggctctaaggagggccg

SEQ ID NO: 2890337 - DNA, 25 bp, Homo sapien
tgctggcactaacggcctcaagccc

SEQ ID NO: 2890338 - DNA, 25 bp, Homo sapien
tctgctggcactaacggcctcaagc

SEQ ID NO: 2890339 - DNA, 25 bp, Homo sapien
ctggcactaacggcctcaagcccat

SEQ ID NO: 2890340 - DNA, 25 bp, Homo sapien
ggcactaacggcctcaagcccattt

SEQ ID NO: 2890341 - DNA, 25 bp, Homo sapien
tggagctggaatttacagctgtgtt

SEQ ID NO: 2890342 - DNA, 25 bp, Homo sapien
ggtttctggagctggaatttacagc

SEQ ID NO: 2890343 - DNA, 25 bp, Homo sapien
gctggaatttacagctgtgttctgt

SEQ ID NO: 2890344 - DNA, 25 bp, Homo sapien
ttctggagctggaatttacagctgt

SEQ ID NO: 2890345 - DNA, 25 bp, Homo sapien
agcaggcggtaaggaagcaccaggg

SEQ ID NO: 2890346 - DNA, 25 bp, Homo sapien
aagcaggcggtaaggaagcaccagg

SEQ ID NO: 2890347 - DNA, 25 bp, Homo sapien
tccttcacaggtaagagggagctgg

SEQ ID NO: 2890348 - DNA, 25 bp, Homo sapien
tagcatttaaggcacaaccactccc

SEQ ID NO: 2890349 - DNA, 25 bp, Homo sapien
cattgcaatgataaggattacaaac

SEQ ID NO: 2890350 - DNA, 25 bp, Homo sapien
catgcattgcagaaaaaccattgca

SEQ ID NO: 2890351 - DNA, 25 bp, Homo sapien
taatagaattagacttgcctagtgt

SEQ ID NO: 2890352 - DNA, 25 bp, Homo sapien
ttaatagaattagacttgcctagtg

SEQ ID NO: 2890353 - DNA, 25 bp, Homo sapien
cggggatccctagcattttttccat

SEQ ID NO: 2890354 - DNA, 25 bp, Homo sapien
ttattttaatagaattagacttgcc

SEQ ID NO: 2890355 - DNA, 25 bp, Homo sapien
agctgtgacaaagccgtgacacgcc

SEQ ID NO: 2890356 - DNA, 25 bp, Homo sapien
tgatttacttgtgctcggtggccaa

SEQ ID NO: 2890357 - DNA, 25 bp, Homo sapien
ttcaaagagggcgtgtgatttactt

SEQ ID NO: 2890358 - DNA, 25 bp, Homo sapien
tagttttaccgtgaggtcagactcc

SEQ ID NO: 2890359 - DNA, 25 bp, Homo sapien
tgtactccctaaaaaccacgctgtg

SEQ ID NO: 2890360 - DNA, 25 bp, Homo sapien
cgcgctgatgccgtctgagtaggaa

SEQ ID NO: 2890361 - DNA, 25 bp, Homo sapien
gctgtgggtcaacaagagccctttt

SEQ ID NO: 2890362 - DNA, 25 bp, Homo sapien
gactcaacacggttacgcgctgatg

SEQ ID NO: 2890363 - DNA, 25 bp, Homo sapien
gcagcccacgttggtcatctgctct

SEQ ID NO: 2890364 - DNA, 25 bp, Homo sapien
cagcccacgttggtcatctgctctg

SEQ ID NO: 2890365 - DNA, 25 bp, Homo sapien
taaacggaggaactctggcaacacc

SEQ ID NO: 2890366 - DNA, 25 bp, Homo sapien
ggaactctggcaacaccaggtcttc

SEQ ID NO: 2890367 - DNA, 25 bp, Homo sapien
gaggtaaacggaggaactctggcaa

SEQ ID NO: 2890368 - DNA, 25 bp, Homo sapien
cggaggaactctggcaacaccaggt

SEQ ID NO: 2890369 - DNA, 25 bp, Homo sapien
ccgggctggtggacgggctgtcgct

SEQ ID NO: 2890370 - DNA, 25 bp, Homo sapien
cctgtggcgcttctcttgctaaagc

SEQ ID NO: 2890371 - DNA, 25 bp, Homo sapien
cgcttctcttgctaaagcccttggc

SEQ ID NO: 2890372 - DNA, 25 bp, Homo sapien
tgggaggcgctctcccggccgttgc

SEQ ID NO: 2890373 - DNA, 25 bp, Homo sapien
tccacttcctgagactgcctcttcc

SEQ ID NO: 2890374 - DNA, 25 bp, Homo sapien
tcttccagatctgggcggtgccctc

SEQ ID NO: 2890375 - DNA, 25 bp, Homo sapien
cggtgccctcctgcgcgagggagac

SEQ ID NO: 2890376 - DNA, 25 bp, Homo sapien
agctcggccacgtgctcatcctcca

SEQ ID NO: 2890377 - DNA, 25 bp, Homo sapien
aaaacgatcgctgtccagatttgga

SEQ ID NO: 2890378 - DNA, 25 bp, Homo sapien
gagacagaaacactaaaaacgatcg

SEQ ID NO: 2890379 - DNA, 25 bp, Homo sapien
gaagctgagcagaccacgcttacgg

SEQ ID NO: 2890380 - DNA, 25 bp, Homo sapien
gccacgtatcattcctgcaagagcc

SEQ ID NO: 2890381 - DNA, 25 bp, Homo sapien
ctcttccgaggacgggcctgtgtct

SEQ ID NO: 2890382 - DNA, 25 bp, Homo sapien
gctatgaacacagcgggcttcactt

SEQ ID NO: 2890383 - DNA, 25 bp, Homo sapien
gtgggtccgagctgcactctcaagg

SEQ ID NO: 2890384 - DNA, 25 bp, Homo sapien
tctcaaggctcttccgaggacgggc

SEQ ID NO: 2890385 - DNA, 25 bp, Homo sapien
acaggtgtccaccaagacggatgga

SEQ ID NO: 2890386 - DNA, 25 bp, Homo sapien
tgtggctcacggaaacatccctgct

SEQ ID NO: 2890387 - DNA, 25 bp, Homo sapien
tcaggctttctcatccaggcgtgtc

SEQ ID NO: 2890388 - DNA, 25 bp, Homo sapien
cctttgagaaatgcccgtgacaccc

SEQ ID NO: 2890389 - DNA, 25 bp, Homo sapien
gccagtagattacggtaaatccact

SEQ ID NO: 2890390 - DNA, 25 bp, Homo sapien
tgatatttcccctagattaaaatac

SEQ ID NO: 2890391 - DNA, 25 bp, Homo sapien
tagattacggtaaatccacttaatc

SEQ ID NO: 2890392 - DNA, 25 bp, Homo sapien
aatgtgtgatatttcccctagatta

SEQ ID NO: 2890393 - DNA, 25 bp, Homo sapien
cttctgctgtcccgccgcacagctg

SEQ ID NO: 2890394 - DNA, 25 bp, Homo sapien
gctcttctgctgtcccgccgcacag

SEQ ID NO: 2890395 - DNA, 25 bp, Homo sapien
tctgctgtcccgccgcacagctgtg

SEQ ID NO: 2890396 - DNA, 25 bp, Homo sapien
ctcttctgctgtcccgccgcacagc

SEQ ID NO: 2890397 - DNA, 25 bp, Homo sapien
gtgtgggtgcgggactgcagcccga

SEQ ID NO: 2890398 - DNA, 25 bp, Homo sapien
ccggggtgtgggtgcgggactgcag

SEQ ID NO: 2890399 - DNA, 25 bp, Homo sapien
tgggtgcgggactgcagcccgaagg

SEQ ID NO: 2890400 - DNA, 25 bp, Homo sapien
gtgcgggactgcagcccgaaggcca

SEQ ID NO: 2890401 - DNA, 25 bp, Homo sapien
tgctcctcccaaggccggtaccacc

SEQ ID NO: 2890402 - DNA, 25 bp, Homo sapien
caccagagcgcagggggacctgctc

SEQ ID NO: 2890403 - DNA, 25 bp, Homo sapien
agtggcagtcggggcagccaccaga

SEQ ID NO: 2890404 - DNA, 25 bp, Homo sapien
gggaaccagttctggccagtggcag

SEQ ID NO: 2890405 - DNA, 25 bp, Homo sapien
agcccaagagccaaggatccagggt

SEQ ID NO: 2890406 - DNA, 25 bp, Homo sapien
gtagccggcatgctgcccaccatgg

SEQ ID NO: 2890407 - DNA, 25 bp, Homo sapien
gttgtgtttctcaccccggacgctg

SEQ ID NO: 2890408 - DNA, 25 bp, Homo sapien
agcccgtgggcttggctacacctcc

SEQ ID NO: 2890409 - DNA, 25 bp, Homo sapien
acagcaactgtcaacgtcggagagc

SEQ ID NO: 2890410 - DNA, 25 bp, Homo sapien
gcggtctcaatccacatcagagtga

SEQ ID NO: 2890411 - DNA, 25 bp, Homo sapien
aaccagcggtctcaatccacatcag

SEQ ID NO: 2890412 - DNA, 25 bp, Homo sapien
agaaaaccagcggtctcaatccaca

SEQ ID NO: 2890413 - DNA, 25 bp, Homo sapien
acatcagagtgagggggtctaagct

SEQ ID NO: 2890414 - DNA, 25 bp, Homo sapien
gggagcaccttcttgcccagcattt

SEQ ID NO: 2890415 - DNA, 25 bp, Homo sapien
ggcctgcccggggagcaccttcttg

SEQ ID NO: 2890416 - DNA, 25 bp, Homo sapien
ccagggcctgcccggggagcacctt

SEQ ID NO: 2890417 - DNA, 25 bp, Homo sapien
ggagcaccttcttgcccagcatttc

SEQ ID NO: 2890418 - DNA, 25 bp, Homo sapien
cgggcgccgagccagttacaagatc

SEQ ID NO: 2890419 - DNA, 25 bp, Homo sapien
attctgttgactgggaggtctcggc

SEQ ID NO: 2890420 - DNA, 25 bp, Homo sapien
gaggtctcggctgccatgggtccca

SEQ ID NO: 2890421 - DNA, 25 bp, Homo sapien
gatccacatcgatgattctgttgac

SEQ ID NO: 2890422 - DNA, 25 bp, Homo sapien
cgtggtgagcgctggtcttgggctt

SEQ ID NO: 2890423 - DNA, 25 bp, Homo sapien
aaggtggcgtggtgagcgctggtct

SEQ ID NO: 2890424 - DNA, 25 bp, Homo sapien
gagcgctggtcttgggcttagcagg

SEQ ID NO: 2890425 - DNA, 25 bp, Homo sapien
tcagacgaaggtggcgtggtgagcg

SEQ ID NO: 2890426 - DNA, 25 bp, Homo sapien
ccagcatggcgaatgtccggggcca

SEQ ID NO: 2890427 - DNA, 25 bp, Homo sapien
ccaccccgacatgtccacaggagag

SEQ ID NO: 2890428 - DNA, 25 bp, Homo sapien
cggggccagtgcctccagcgaggtc

SEQ ID NO: 2890429 - DNA, 25 bp, Homo sapien
cctgggctgccccaccccgacatgt

SEQ ID NO: 2890430 - DNA, 25 bp, Homo sapien
gagtccccgagaacgaggagtctgt

SEQ ID NO: 2890431 - DNA, 25 bp, Homo sapien
tccccgagaacgaggagtctgtgtc

SEQ ID NO: 2890432 - DNA, 25 bp, Homo sapien
ctcggagtccccgagaacgaggagt

SEQ ID NO: 2890433 - DNA, 25 bp, Homo sapien
tgtgctcggagtccccgagaacgag

SEQ ID NO: 2890434 - DNA, 25 bp, Homo sapien
atggagctggagtcacggaattcgt

SEQ ID NO: 2890435 - DNA, 25 bp, Homo sapien
aatattggagcagccgctacggcac

SEQ ID NO: 2890436 - DNA, 25 bp, Homo sapien
tacggcacctcgggttcctcctgag

SEQ ID NO: 2890437 - DNA, 25 bp, Homo sapien
tgcctgaggaacctcttctgcaata

SEQ ID NO: 2890438 - DNA, 25 bp, Homo sapien
ggctggggctggaacccccgtggca

SEQ ID NO: 2890439 - DNA, 25 bp, Homo sapien
ctggggctggaacccccgtggcagc

SEQ ID NO: 2890440 - DNA, 25 bp, Homo sapien
gctggggacccaggcccagcgcccc

SEQ ID NO: 2890441 - DNA, 25 bp, Homo sapien
gggctggaacccccgtggcagcagc

SEQ ID NO: 2890442 - DNA, 25 bp, Homo sapien
gatagtggggatcgcaggggtcgct

SEQ ID NO: 2890443 - DNA, 25 bp, Homo sapien
ctgggggctactgctcgagggaact

SEQ ID NO: 2890444 - DNA, 25 bp, Homo sapien
tcacagaggtcaccaggatagtggg

SEQ ID NO: 2890445 - DNA, 25 bp, Homo sapien
aggtcacagaggtcaccaggatagt

SEQ ID NO: 2890446 - DNA, 25 bp, Homo sapien
agtgcaggcatgcagcatgcggccc

SEQ ID NO: 2890447 - DNA, 25 bp, Homo sapien
cccgtagcggaaggggaacctgcag

SEQ ID NO: 2890448 - DNA, 25 bp, Homo sapien
tgcagggcctcccgtcctcggtgag

SEQ ID NO: 2890449 - DNA, 25 bp, Homo sapien
cagggcctcccgtcctcggtgagtg

SEQ ID NO: 2890450 - DNA, 25 bp, Homo sapien
ccaggccctgtcccggtcgtagttg

SEQ ID NO: 2890451 - DNA, 25 bp, Homo sapien
tgtcccggtcgtagttgtgagttgt

SEQ ID NO: 2890452 - DNA, 25 bp, Homo sapien
aggcggggtggcctccacacagtag

SEQ ID NO: 2890453 - DNA, 25 bp, Homo sapien
cctccacacagtagccccaggccct

SEQ ID NO: 2890454 - DNA, 25 bp, Homo sapien
ctgtgccgcagtccttgccggtgaa

SEQ ID NO: 2890455 - DNA, 25 bp, Homo sapien
cagtccttgccggtgaaggcccggg

SEQ ID NO: 2890456 - DNA, 25 bp, Homo sapien
gccgcagtccttgccggtgaaggcc

SEQ ID NO: 2890457 - DNA, 25 bp, Homo sapien
actgggggtcctgggtattggagca

SEQ ID NO: 2890458 - DNA, 25 bp, Homo sapien
tgtatgtcgggtgccttcgcaccag

SEQ ID NO: 2890459 - DNA, 25 bp, Homo sapien
cgaagcactcgcactgttccacgtg

SEQ ID NO: 2890460 - DNA, 25 bp, Homo sapien
tccaggtactcgtagcgggtctcat

SEQ ID NO: 2890461 - DNA, 25 bp, Homo sapien
tagcgggtctcatcaaagcatttct

SEQ ID NO: 2890462 - DNA, 25 bp, Homo sapien
cagagccgtccagcgaagcctggtg

SEQ ID NO: 2890463 - DNA, 25 bp, Homo sapien
gcacacacggtggtcccggtggcca

SEQ ID NO: 2890464 - DNA, 25 bp, Homo sapien
cgatgttgcagagccgtccagcgaa

SEQ ID NO: 2890465 - DNA, 25 bp, Homo sapien
cggtggccacgatcaggtggcaggt

SEQ ID NO: 2890466 - DNA, 25 bp, Homo sapien
ggcagctgaggcccgaggctgaggt

SEQ ID NO: 2890467 - DNA, 25 bp, Homo sapien
cctggtagagcagatcggagttcca

SEQ ID NO: 2890468 - DNA, 25 bp, Homo sapien
tacccagtgccgttccccaagaagc

SEQ ID NO: 2890469 - DNA, 25 bp, Homo sapien
tgaggtgctggccacgccacggtac

SEQ ID NO: 2890470 - DNA, 25 bp, Homo sapien
ctgcggtgcataagtgggggctggc

SEQ ID NO: 2890471 - DNA, 25 bp, Homo sapien
gggctggcagggagtcacactgccc

SEQ ID NO: 2890472 - DNA, 25 bp, Homo sapien
gggggctggcagggagtcacactgc

SEQ ID NO: 2890473 - DNA, 25 bp, Homo sapien
gcggtgcataagtgggggctggcag

SEQ ID NO: 2890474 - DNA, 25 bp, Homo sapien
caggcggcagtactcccaggagagc

SEQ ID NO: 2890475 - DNA, 25 bp, Homo sapien
tgtccttcaccacgtagcaccaggg

SEQ ID NO: 2890476 - DNA, 25 bp, Homo sapien
cagggcctctcgtcattgtccggat

SEQ ID NO: 2890477 - DNA, 25 bp, Homo sapien
caggagagcgcgctgtccttcacca

SEQ ID NO: 2890478 - DNA, 25 bp, Homo sapien
gggtttgatgcccgatcccgaggct

SEQ ID NO: 2890479 - DNA, 25 bp, Homo sapien
aatggggtttgatgcccgatcccga

SEQ ID NO: 2890480 - DNA, 25 bp, Homo sapien
ggtttgatgcccgatcccgaggctc

SEQ ID NO: 2890481 - DNA, 25 bp, Homo sapien
ttgatgcccgatcccgaggctctgt

SEQ ID NO: 2890482 - DNA, 25 bp, Homo sapien
tgggagcaaaggtcaccgggtcaca

SEQ ID NO: 2890483 - DNA, 25 bp, Homo sapien
acaggccctacccggcaggaggcgc

SEQ ID NO: 2890484 - DNA, 25 bp, Homo sapien
agagggccatggccggaccccctgt

SEQ ID NO: 2890485 - DNA, 25 bp, Homo sapien
gagcaaaggtcaccgggtcacaccc

SEQ ID NO: 2890486 - DNA, 25 bp, Homo sapien
ctcaggcagggtcgccaggagatcc

SEQ ID NO: 2890487 - DNA, 25 bp, Homo sapien
caggagatccggtgacagttggact

SEQ ID NO: 2890488 - DNA, 25 bp, Homo sapien
tcgccaggagatccggtgacagttg

SEQ ID NO: 2890489 - DNA, 25 bp, Homo sapien
agggtcgccaggagatccggtgaca

SEQ ID NO: 2890490 - DNA, 25 bp, Homo sapien
gaagctgtccccgatgtagatggcg

SEQ ID NO: 2890491 - DNA, 25 bp, Homo sapien
agccgccgatgatacgtggccgcag

SEQ ID NO: 2890492 - DNA, 25 bp, Homo sapien
cggcgcagaagctgtccccgatgta

SEQ ID NO: 2890493 - DNA, 25 bp, Homo sapien
gtggccgcaggaacgtcctcttctt

SEQ ID NO: 2890494 - DNA, 25 bp, Homo sapien
tgaacaccgagtacagggtgtacgg

SEQ ID NO: 2890495 - DNA, 25 bp, Homo sapien
cagggtgtacgggatgtacttctcg

SEQ ID NO: 2890496 - DNA, 25 bp, Homo sapien
ttctcgatgccgaaggtctgcgtca

SEQ ID NO: 2890497 - DNA, 25 bp, Homo sapien
tccgtcgtgcggttgaagaagtgct

SEQ ID NO: 2890498 - DNA, 25 bp, Homo sapien
agagtgcagccacgacacgccggag

SEQ ID NO: 2890499 - DNA, 25 bp, Homo sapien
agtgcagccacgacacgccggagct

SEQ ID NO: 2890500 - DNA, 25 bp, Homo sapien
gcccagagtgcagccacgacacgcc

SEQ ID NO: 2890501 - DNA, 25 bp, Homo sapien
ccagagtgcagccacgacacgccgg

SEQ ID NO: 2890502 - DNA, 25 bp, Homo sapien
caagtggccccagcccgcaatctgg

SEQ ID NO: 2890503 - DNA, 25 bp, Homo sapien
tgcacgaactgcgagcgtgtggcac

SEQ ID NO: 2890504 - DNA, 25 bp, Homo sapien
gtggcacagcggtcccctttcttct

SEQ ID NO: 2890505 - DNA, 25 bp, Homo sapien
ccgcaatctggcacttgtgtcctgc

SEQ ID NO: 2890506 - DNA, 25 bp, Homo sapien
agggagctggagtagccgctcacgt

SEQ ID NO: 2890507 - DNA, 25 bp, Homo sapien
tgctgcacttgtggtcggcgaccag

SEQ ID NO: 2890508 - DNA, 25 bp, Homo sapien
caggcgtcggacttgcagtcgaagt

SEQ ID NO: 2890509 - DNA, 25 bp, Homo sapien
atgtcggcgccgtagacctcagggc

SEQ ID NO: 2890510 - DNA, 25 bp, Homo sapien
cagtcgggtcctggtggggcgggca

SEQ ID NO: 2890511 - DNA, 25 bp, Homo sapien
gggcagagacgttggtcagagccac

SEQ ID NO: 2890512 - DNA, 25 bp, Homo sapien
ggcagagacgttggtcagagccacc

SEQ ID NO: 2890513 - DNA, 25 bp, Homo sapien
tgggcagagacgttggtcagagcca

SEQ ID NO: 2890514 - DNA, 25 bp, Homo sapien
ctgggcagagacgttggtcagagcc

SEQ ID NO: 2890515 - DNA, 25 bp, Homo sapien
gcaggccaggggcccccctgagtcc

SEQ ID NO: 2890516 - DNA, 25 bp, Homo sapien
ctcgcaggccaggggcccccctgag

SEQ ID NO: 2890517 - DNA, 25 bp, Homo sapien
tcgcaggccaggggcccccctgagt

SEQ ID NO: 2890518 - DNA, 25 bp, Homo sapien
cgcaggccaggggcccccctgagtc

SEQ ID NO: 2890519 - DNA, 25 bp, Homo sapien
ccgtagaggtaagccacgccgttct

SEQ ID NO: 2890520 - DNA, 25 bp, Homo sapien
cacatagttggccacgcgggtgtag

SEQ ID NO: 2890521 - DNA, 25 bp, Homo sapien
tatccggtcgttgatccagtccaca

SEQ ID NO: 2890522 - DNA, 25 bp, Homo sapien
gtagacccccggcttgtggagccgc

SEQ ID NO: 2890523 - DNA, 25 bp, Homo sapien
tgggaaccagggtgtcccgctggag

SEQ ID NO: 2890524 - DNA, 25 bp, Homo sapien
tatctttattgtcagcaaggcaggg

SEQ ID NO: 2890525 - DNA, 25 bp, Homo sapien
ggaaatatctttattgtcagcaagg

SEQ ID NO: 2890526 - DNA, 25 bp, Homo sapien
atggtgggaaccagggtgtcccgct

SEQ ID NO: 2890527 - DNA, 25 bp, Homo sapien
catcttgagagcagcgctgaccttc

SEQ ID NO: 2890528 - DNA, 25 bp, Homo sapien
gtcagggtcccaataggcgggcaca

SEQ ID NO: 2890529 - DNA, 25 bp, Homo sapien
caccagttctagaatgctggcaatg

SEQ ID NO: 2890530 - DNA, 25 bp, Homo sapien
gctgggatagccttgataacagtca

SEQ ID NO: 2890531 - DNA, 25 bp, Homo sapien
ccatgctgctgctggacactgtggc

SEQ ID NO: 2890532 - DNA, 25 bp, Homo sapien
actgtggccagggacactgccatct

SEQ ID NO: 2890533 - DNA, 25 bp, Homo sapien
acagagccctgctgcggctgccatg

SEQ ID NO: 2890534 - DNA, 25 bp, Homo sapien
ctgctggacactgtggccagggaca

SEQ ID NO: 2890535 - DNA, 25 bp, Homo sapien
gccgccttccgcagaacagttgctg

SEQ ID NO: 2890536 - DNA, 25 bp, Homo sapien
agccgccttccgcagaacagttgct

SEQ ID NO: 2890537 - DNA, 25 bp, Homo sapien
gccttccgcagaacagttgctgggt

SEQ ID NO: 2890538 - DNA, 25 bp, Homo sapien
ttccgcagaacagttgctgggtcac

SEQ ID NO: 2890539 - DNA, 25 bp, Homo sapien
ctctggcctgggcattagatgtcac

SEQ ID NO: 2890540 - DNA, 25 bp, Homo sapien
agccccatccgagagacggcctcca

SEQ ID NO: 2890541 - DNA, 25 bp, Homo sapien
gacctggcaggtccgtgccttgggt

SEQ ID NO: 2890542 - DNA, 25 bp, Homo sapien
gcattagatgtcacatccaggttct

SEQ ID NO: 2890543 - DNA, 25 bp, Homo sapien
ctgtcatggttccgcgccgccgcgc

SEQ ID NO: 2890544 - DNA, 25 bp, Homo sapien
ttgccgtcccgcagcttgacctggc

SEQ ID NO: 2890545 - DNA, 25 bp, Homo sapien
ttgacctggccctccaccagcgccg

SEQ ID NO: 2890546 - DNA, 25 bp, Homo sapien
ccaccagcgccgcctcggtcatctt

SEQ ID NO: 2890547 - DNA, 25 bp, Homo sapien
cttcttgccgtcccgcagcttgacc

SEQ ID NO: 2890548 - DNA, 25 bp, Homo sapien
cacgggcgacggcttccgcagcacc

SEQ ID NO: 2890549 - DNA, 25 bp, Homo sapien
ctgccacgggcgacggcttccgcag

SEQ ID NO: 2890550 - DNA, 25 bp, Homo sapien
acgggcgacggcttccgcagcacca

SEQ ID NO: 2890551 - DNA, 25 bp, Homo sapien
gccacgggcgacggcttccgcagca

SEQ ID NO: 2890552 - DNA, 25 bp, Homo sapien
aggctctgtcggtgcccccacagct

SEQ ID NO: 2890553 - DNA, 25 bp, Homo sapien
ccctgcagccccggaggacaaagac

SEQ ID NO: 2890554 - DNA, 25 bp, Homo sapien
gacaaagacgccctcccaggctctg

SEQ ID NO: 2890555 - DNA, 25 bp, Homo sapien
tgcagccccggaggacaaagacgcc

SEQ ID NO: 2890556 - DNA, 25 bp, Homo sapien
cgggaaggcagctgggtgaaggcaa

SEQ ID NO: 2890557 - DNA, 25 bp, Homo sapien
ggcccatccacaagggaggtggtct

SEQ ID NO: 2890558 - DNA, 25 bp, Homo sapien
caggagcgcagggtctgtgctgtct

SEQ ID NO: 2890559 - DNA, 25 bp, Homo sapien
tccacaagggaggtggtctccagcg

SEQ ID NO: 2890560 - DNA, 25 bp, Homo sapien
cctccacgccgggcccatccacaag

SEQ ID NO: 2890561 - DNA, 25 bp, Homo sapien
ccagggcggagagccggggagggcg

SEQ ID NO: 2890562 - DNA, 25 bp, Homo sapien
ccgcagggaagatggagcaagcagg

SEQ ID NO: 2890563 - DNA, 25 bp, Homo sapien
gagaagccgcagggaagatggagca

SEQ ID NO: 2890564 - DNA, 25 bp, Homo sapien
aagccgcagggaagatggagcaagc

SEQ ID NO: 2890565 - DNA, 25 bp, Homo sapien
tgcgggcattggctgcaacctggcc

SEQ ID NO: 2890566 - DNA, 25 bp, Homo sapien
gcttttgcagaacttggagggttcc

SEQ ID NO: 2890567 - DNA, 25 bp, Homo sapien
ggcttttgcagaacttggagggttc

SEQ ID NO: 2890568 - DNA, 25 bp, Homo sapien
ctgggtggagggcaccgggtcgtga

SEQ ID NO: 2890569 - DNA, 25 bp, Homo sapien
ggggaggccgtgacagtgcagagac

SEQ ID NO: 2890570 - DNA, 25 bp, Homo sapien
gagcgtggccgtcagggacgccagc

SEQ ID NO: 2890571 - DNA, 25 bp, Homo sapien
gcgtggccgtcagggacgccagcca

SEQ ID NO: 2890572 - DNA, 25 bp, Homo sapien
aaggagcgtggccgtcagggacgcc

SEQ ID NO: 2890573 - DNA, 25 bp, Homo sapien
tggccgtcagggacgccagccaaca

SEQ ID NO: 2890574 - DNA, 25 bp, Homo sapien
gacaggcagacaatggccagcgtgt

SEQ ID NO: 2890575 - DNA, 25 bp, Homo sapien
cagatgtcctctagcgtcaggctgc

SEQ ID NO: 2890576 - DNA, 25 bp, Homo sapien
ctgtcaaagcccagcatgatggcct

SEQ ID NO: 2890577 - DNA, 25 bp, Homo sapien
aggcccttgatacgctccgacttgt

SEQ ID NO: 2890578 - DNA, 25 bp, Homo sapien
tccttgtcaggccacgttctatcaa

SEQ ID NO: 2890579 - DNA, 25 bp, Homo sapien
gctgtggcctcaggcgcatccttgt

SEQ ID NO: 2890580 - DNA, 25 bp, Homo sapien
tggcctcaggcgcatccttgtcagg

SEQ ID NO: 2890581 - DNA, 25 bp, Homo sapien
cacgttctatcaagatgaagctgcc

SEQ ID NO: 2890582 - DNA, 25 bp, Homo sapien
tagccgggccgctctccaacttggt

SEQ ID NO: 2890583 - DNA, 25 bp, Homo sapien
ccgggccgctctccaacttggtgcc

SEQ ID NO: 2890584 - DNA, 25 bp, Homo sapien
gtagccgggccgctctccaacttgg

SEQ ID NO: 2890585 - DNA, 25 bp, Homo sapien
agccgggccgctctccaacttggtg

SEQ ID NO: 2890586 - DNA, 25 bp, Homo sapien
tccctggccaagacgaggacatcat

SEQ ID NO: 2890587 - DNA, 25 bp, Homo sapien
ccgtagcgccggaggtcagacagct

SEQ ID NO: 2890588 - DNA, 25 bp, Homo sapien
aagatgaatccgcttggcacggccc

SEQ ID NO: 2890589 - DNA, 25 bp, Homo sapien
ggaggtcagacagcttccactgccc

SEQ ID NO: 2890590 - DNA, 25 bp, Homo sapien
ccaagaatatgtttctgcggtgctt

SEQ ID NO: 2890591 - DNA, 25 bp, Homo sapien
cactccccactgctaaatgcgtttg

SEQ ID NO: 2890592 - DNA, 25 bp, Homo sapien
aatctggatatgagcggctctgagg

SEQ ID NO: 2890593 - DNA, 25 bp, Homo sapien
tgcttatgcgggagctcacactccc

SEQ ID NO: 2890594 - DNA, 25 bp, Homo sapien
tcaccctgggtcatccaggtgggcc

SEQ ID NO: 2890595 - DNA, 25 bp, Homo sapien
caggagcctctgcggatggaattga

SEQ ID NO: 2890596 - DNA, 25 bp, Homo sapien
cagggcctgtgaacaggagcctctg

SEQ ID NO: 2890597 - DNA, 25 bp, Homo sapien
gatggaattgatggtctcgggatgg

SEQ ID NO: 2890598 - DNA, 25 bp, Homo sapien
aagccgtctgtggtctcagtgtcca

SEQ ID NO: 2890599 - DNA, 25 bp, Homo sapien
ccggcagggagcacaagccgtctgt

SEQ ID NO: 2890600 - DNA, 25 bp, Homo sapien
ggagcacaagccgtctgtggtctca

SEQ ID NO: 2890601 - DNA, 25 bp, Homo sapien
cccaagcgcccataaccaggagacc

SEQ ID NO: 2890602 - DNA, 25 bp, Homo sapien
acgtgcccacgcgacaccctcgcca

SEQ ID NO: 2890603 - DNA, 25 bp, Homo sapien
ccgaagacacggtcaaccgggcaag

SEQ ID NO: 2890604 - DNA, 25 bp, Homo sapien
tggagcacagcccaccgccagcctc

SEQ ID NO: 2890605 - DNA, 25 bp, Homo sapien
agacacggtcaaccgggcaaggcct

SEQ ID NO: 2890606 - DNA, 25 bp, Homo sapien
gtcacctcacaggaatcccgcccgc

SEQ ID NO: 2890607 - DNA, 25 bp, Homo sapien
cacccggctggacactccggctggc

SEQ ID NO: 2890608 - DNA, 25 bp, Homo sapien
cggctggacactccggctggcgtca

SEQ ID NO: 2890609 - DNA, 25 bp, Homo sapien
tggcggccgcgtgaatgggccactg

SEQ ID NO: 2890610 - DNA, 25 bp, Homo sapien
tgctgcagccgtcactgctggccag

SEQ ID NO: 2890611 - DNA, 25 bp, Homo sapien
cctgaggccgtgtgcagcatcctgg

SEQ ID NO: 2890612 - DNA, 25 bp, Homo sapien
cccagcgtcactggcagagcgatgc

SEQ ID NO: 2890613 - DNA, 25 bp, Homo sapien
atgcagccgccacccgtggagaagc

SEQ ID NO: 2890614 - DNA, 25 bp, Homo sapien
cttccgggcttgcttggggggatgg

SEQ ID NO: 2890615 - DNA, 25 bp, Homo sapien
acccagcaggcacttgatcagtccc

SEQ ID NO: 2890616 - DNA, 25 bp, Homo sapien
aggcacttgatcagtccctcctctg

SEQ ID NO: 2890617 - DNA, 25 bp, Homo sapien
gggatgtggctgctctgccacccag

SEQ ID NO: 2890618 - DNA, 25 bp, Homo sapien
gagatgcctcggacgatgcagtcga

SEQ ID NO: 2890619 - DNA, 25 bp, Homo sapien
aggaagctgatctgctccccctcgg

SEQ ID NO: 2890620 - DNA, 25 bp, Homo sapien
cggacgatgcagtcgaacaggaagc

SEQ ID NO: 2890621 - DNA, 25 bp, Homo sapien
tggtagaaccggccgcagcccaaag

SEQ ID NO: 2890622 - DNA, 25 bp, Homo sapien
cgctggccataggtgccacctcccc

SEQ ID NO: 2890623 - DNA, 25 bp, Homo sapien
agggcgctggccataggtgccacct

SEQ ID NO: 2890624 - DNA, 25 bp, Homo sapien
ggcgctggccataggtgccacctcc

SEQ ID NO: 2890625 - DNA, 25 bp, Homo sapien
gggcgctggccataggtgccacctc

SEQ ID NO: 2890626 - DNA, 25 bp, Homo sapien
ctgcctgcagccgctaggcaggaag

SEQ ID NO: 2890627 - DNA, 25 bp, Homo sapien
ggtgcatccactaggcaggaagaca

SEQ ID NO: 2890628 - DNA, 25 bp, Homo sapien
cctgcagccgctaggcaggaagaca

SEQ ID NO: 2890629 - DNA, 25 bp, Homo sapien
gggtgcatccactaggcaggaagac

SEQ ID NO: 2890630 - DNA, 25 bp, Homo sapien
ctccgggtggcctgaggcccccaca

SEQ ID NO: 2890631 - DNA, 25 bp, Homo sapien
tccgggtggcctgaggcccccacac

SEQ ID NO: 2890632 - DNA, 25 bp, Homo sapien
ccgggtggcctgaggcccccacaca

SEQ ID NO: 2890633 - DNA, 25 bp, Homo sapien
cgggtggcctgaggcccccacacac

SEQ ID NO: 2890634 - DNA, 25 bp, Homo sapien
cacagacacattcagccacgtgggc

SEQ ID NO: 2890635 - DNA, 25 bp, Homo sapien
acagacacattcagccacgtgggca

SEQ ID NO: 2890636 - DNA, 25 bp, Homo sapien
cagacacattcagccacgtgggcag

SEQ ID NO: 2890637 - DNA, 25 bp, Homo sapien
gactgagccgaaacaggtccaagga

SEQ ID NO: 2890638 - DNA, 25 bp, Homo sapien
caggactgagccgaaacaggtccaa

SEQ ID NO: 2890639 - DNA, 25 bp, Homo sapien
tccaaggacctgctctccccaaagt

SEQ ID NO: 2890640 - DNA, 25 bp, Homo sapien
tgcaggactgagccgaaacaggtcc

SEQ ID NO: 2890641 - DNA, 25 bp, Homo sapien
cacgccggccagacccctccttcct

SEQ ID NO: 2890642 - DNA, 25 bp, Homo sapien
tcatcttcctcaccaccgagttttt

SEQ ID NO: 2890643 - DNA, 25 bp, Homo sapien
tcctcatcttcctcaccaccgagtt

SEQ ID NO: 2890644 - DNA, 25 bp, Homo sapien
cttcctcaccaccgagtttttcaat

SEQ ID NO: 2890645 - DNA, 25 bp, Homo sapien
ctgcccgcatgtgagaggaggctca

SEQ ID NO: 2890646 - DNA, 25 bp, Homo sapien
ctcctccacagtcgagggtcccggg

SEQ ID NO: 2890647 - DNA, 25 bp, Homo sapien
cccggcctgcccgcatgtgagagga

SEQ ID NO: 2890648 - DNA, 25 bp, Homo sapien
acgctcctccacagtcgagggtccc

SEQ ID NO: 2890649 - DNA, 25 bp, Homo sapien
cctcctgtgacgtgctggctgacga

SEQ ID NO: 2890650 - DNA, 25 bp, Homo sapien
gattgctctggccatgcggtgagcc

SEQ ID NO: 2890651 - DNA, 25 bp, Homo sapien
caaaggctgcgtggtgtgtcatagt

SEQ ID NO: 2890652 - DNA, 25 bp, Homo sapien
tgctggcgctgacgtccaagtgact

SEQ ID NO: 2890653 - DNA, 25 bp, Homo sapien
tggacatgccgaaaagaaagccggg

SEQ ID NO: 2890654 - DNA, 25 bp, Homo sapien
catgccgaaaagaaagccgggggtg

SEQ ID NO: 2890655 - DNA, 25 bp, Homo sapien
ctggacatgccgaaaagaaagccgg

SEQ ID NO: 2890656 - DNA, 25 bp, Homo sapien
ggcaaattcagcccctttgcagccg

SEQ ID NO: 2890657 - DNA, 25 bp, Homo sapien
gggggcaaattcagcccctttgcag

SEQ ID NO: 2890658 - DNA, 25 bp, Homo sapien
aattcagcccctttgcagccgcggg

SEQ ID NO: 2890659 - DNA, 25 bp, Homo sapien
gccatctgggggcaaattcagcccc

SEQ ID NO: 2890660 - DNA, 25 bp, Homo sapien
tccagctcccctctccgggagaccc

SEQ ID NO: 2890661 - DNA, 25 bp, Homo sapien
tgcaaggcacgagccaacagaggtg

SEQ ID NO: 2890662 - DNA, 25 bp, Homo sapien
ttggccctgcgaggaggttcagaca

SEQ ID NO: 2890663 - DNA, 25 bp, Homo sapien
gacacggagtgaagcagctgagcat

SEQ ID NO: 2890664 - DNA, 25 bp, Homo sapien
aacagtgtctgggtttagaaacagc

SEQ ID NO: 2890665 - DNA, 25 bp, Homo sapien
agccccgccaggcaagaggccccat

SEQ ID NO: 2890666 - DNA, 25 bp, Homo sapien
ctcacgagcatcgtgaggagaggca

SEQ ID NO: 2890667 - DNA, 25 bp, Homo sapien
ggctgccgtagcaggcggtggccgg

SEQ ID NO: 2890668 - DNA, 25 bp, Homo sapien
agcgaggcccactcacgagcatcgt

SEQ ID NO: 2890669 - DNA, 25 bp, Homo sapien
ggaaccttcagacgcccggagcgag

SEQ ID NO: 2890670 - DNA, 25 bp, Homo sapien
aatgtcccacatgggttccggcagc

SEQ ID NO: 2890671 - DNA, 25 bp, Homo sapien
tgtcccacatgggttccggcagccg

SEQ ID NO: 2890672 - DNA, 25 bp, Homo sapien
agacaatgtcccacatgggttccgg

SEQ ID NO: 2890673 - DNA, 25 bp, Homo sapien
caatgtcccacatgggttccggcag

SEQ ID NO: 2890674 - DNA, 25 bp, Homo sapien
cctgtgatttcctttcccgtccttg

SEQ ID NO: 2890675 - DNA, 25 bp, Homo sapien
ccgagggtgcctgtgatttcctttc

SEQ ID NO: 2890676 - DNA, 25 bp, Homo sapien
tgtgatttcctttcccgtccttgag

SEQ ID NO: 2890677 - DNA, 25 bp, Homo sapien
ggtgcctgtgatttcctttcccgtc

SEQ ID NO: 2890678 - DNA, 25 bp, Homo sapien
gtggtagcccccataaccacccatg

SEQ ID NO: 2890679 - DNA, 25 bp, Homo sapien
cagcccccagatctccgggccaccc

SEQ ID NO: 2890680 - DNA, 25 bp, Homo sapien
tgccttgaccacccagcctggtggt

SEQ ID NO: 2890681 - DNA, 25 bp, Homo sapien
cttgaccacccagcctggtggtagc

SEQ ID NO: 2890682 - DNA, 25 bp, Homo sapien
ccctcatcctgtgcccggggggcca

SEQ ID NO: 2890683 - DNA, 25 bp, Homo sapien
ctagaccaaagagaacctgggtcag

SEQ ID NO: 2890684 - DNA, 25 bp, Homo sapien
caaagagaacctgggtcagtgcatc

SEQ ID NO: 2890685 - DNA, 25 bp, Homo sapien
ctgggtcagtgcatccttcagtctt

SEQ ID NO: 2890686 - DNA, 25 bp, Homo sapien
gaatgtgctgtcgcaggtcctgggg

SEQ ID NO: 2890687 - DNA, 25 bp, Homo sapien
tgaatgtgctgtcgcaggtcctggg

SEQ ID NO: 2890688 - DNA, 25 bp, Homo sapien
ctgaatgtgctgtcgcaggtcctgg

SEQ ID NO: 2890689 - DNA, 25 bp, Homo sapien
ggacagggccagcagggccagctgc

SEQ ID NO: 2890690 - DNA, 25 bp, Homo sapien
ctgggccagcagggacagggccagc

SEQ ID NO: 2890691 - DNA, 25 bp, Homo sapien
cagggacagggccagcagggccagc

SEQ ID NO: 2890692 - DNA, 25 bp, Homo sapien
tgggccagcagggacagggccagca

SEQ ID NO: 2890693 - DNA, 25 bp, Homo sapien
ctgcagggtcggcctccctgaaaca

SEQ ID NO: 2890694 - DNA, 25 bp, Homo sapien
cctgcagggtcggcctccctgaaac

SEQ ID NO: 2890695 - DNA, 25 bp, Homo sapien
ccctcagaattcaggtgggggctgg

SEQ ID NO: 2890696 - DNA, 25 bp, Homo sapien
ctgagggctccgcaccgtgggcacc

SEQ ID NO: 2890697 - DNA, 25 bp, Homo sapien
ccgtgggcacccaggttctacagga

SEQ ID NO: 2890698 - DNA, 25 bp, Homo sapien
acaggaaggaccccgttctccagtg

SEQ ID NO: 2890699 - DNA, 25 bp, Homo sapien
ggcacccaggttctacaggaaggac

SEQ ID NO: 2890700 - DNA, 25 bp, Homo sapien
aggatgggctgacggggatgttcac

SEQ ID NO: 2890701 - DNA, 25 bp, Homo sapien
cgcgcggcctctctggtcctgggct

SEQ ID NO: 2890702 - DNA, 25 bp, Homo sapien
gttcacgtaagtgggcgactcgccg

SEQ ID NO: 2890703 - DNA, 25 bp, Homo sapien
ggatgttcacgtaagtgggcgactc

SEQ ID NO: 2890704 - DNA, 25 bp, Homo sapien
aagaattctgtagtgagcggcagcc

SEQ ID NO: 2890705 - DNA, 25 bp, Homo sapien
tagtgagcggcagcctgcgccccga

SEQ ID NO: 2890706 - DNA, 25 bp, Homo sapien
gccaggccctcggaagcatctgagt

SEQ ID NO: 2890707 - DNA, 25 bp, Homo sapien
tggtcccagcccccaattgtcagtg

SEQ ID NO: 2890708 - DNA, 25 bp, Homo sapien
ctgggcgtagagggaggcgccagcc

SEQ ID NO: 2890709 - DNA, 25 bp, Homo sapien
tgggcgtagagggaggcgccagccc

SEQ ID NO: 2890710 - DNA, 25 bp, Homo sapien
actctgtgcgccgtctcggtggcca

SEQ ID NO: 2890711 - DNA, 25 bp, Homo sapien
ccccactctgtgcgccgtctcggtg

SEQ ID NO: 2890712 - DNA, 25 bp, Homo sapien
ccactctgtgcgccgtctcggtggc

SEQ ID NO: 2890713 - DNA, 25 bp, Homo sapien
ctgtgcgccgtctcggtggccatga

SEQ ID NO: 2890714 - DNA, 25 bp, Homo sapien
tctgctccagctccgacagctgctc

SEQ ID NO: 2890715 - DNA, 25 bp, Homo sapien
ctgctcctcccgggcccgtgcgtgc

SEQ ID NO: 2890716 - DNA, 25 bp, Homo sapien
gctcctcccgggcccgtgcgtgccg

SEQ ID NO: 2890717 - DNA, 25 bp, Homo sapien
cctcccgggcccgtgcgtgccgcac

SEQ ID NO: 2890718 - DNA, 25 bp, Homo sapien
gggtttgcggtcagctcctggcgct

SEQ ID NO: 2890719 - DNA, 25 bp, Homo sapien
cgggtttgcggtcagctcctggcgc

SEQ ID NO: 2890720 - DNA, 25 bp, Homo sapien
ctctgcctgagatgccacagcagct

SEQ ID NO: 2890721 - DNA, 25 bp, Homo sapien
attccgggagtgtctgagccgccag

SEQ ID NO: 2890722 - DNA, 25 bp, Homo sapien
gatgagcattttgccaggacacggc

SEQ ID NO: 2890723 - DNA, 25 bp, Homo sapien
cagagcaactctttcaggccgaagg

SEQ ID NO: 2890724 - DNA, 25 bp, Homo sapien
tgcttgggacatggggacggcgagg

SEQ ID NO: 2890725 - DNA, 25 bp, Homo sapien
cgggcctcgcctcgtcccggacgct

SEQ ID NO: 2890726 - DNA, 25 bp, Homo sapien
ccgtgccagcgttggctgcttggga

SEQ ID NO: 2890727 - DNA, 25 bp, Homo sapien
cgtgagtgtgcggtgccatcgggtc

SEQ ID NO: 2890728 - DNA, 25 bp, Homo sapien
tggttcgggataacgtggcctgcct

SEQ ID NO: 2890729 - DNA, 25 bp, Homo sapien
ggccgcggtgatgtacgagcttcct

SEQ ID NO: 2890730 - DNA, 25 bp, Homo sapien
ctgaggctgcacgtcacagggagag

SEQ ID NO: 2890731 - DNA, 25 bp, Homo sapien
tgcctggcacgggtattcccagagt

SEQ ID NO: 2890732 - DNA, 25 bp, Homo sapien
caggccagatcttgccaggtgagca

SEQ ID NO: 2890733 - DNA, 25 bp, Homo sapien
aagtcatgctgacccctgaagggcc

SEQ ID NO: 2890734 - DNA, 25 bp, Homo sapien
tatatggatcatcctcctggagagg

SEQ ID NO: 2890735 - DNA, 25 bp, Homo sapien
gttggtaccgattcaccctcagggc

SEQ ID NO: 2890736 - DNA, 25 bp, Homo sapien
aagtgatgtgcccacctcggctgcc

SEQ ID NO: 2890737 - DNA, 25 bp, Homo sapien
tcaagtgatgtgcccacctcggctg

SEQ ID NO: 2890738 - DNA, 25 bp, Homo sapien
caagtgatgtgcccacctcggctgc

SEQ ID NO: 2890739 - DNA, 25 bp, Homo sapien
attgggctccagtgctccgggtgcc

SEQ ID NO: 2890740 - DNA, 25 bp, Homo sapien
gcttgacaaggaagtacaccttact

SEQ ID NO: 2890741 - DNA, 25 bp, Homo sapien
ctgcagcttagccagcccactatgg

SEQ ID NO: 2890742 - DNA, 25 bp, Homo sapien
tcttcctcgtgtccgtgagctcagg

SEQ ID NO: 2890743 - DNA, 25 bp, Homo sapien
tggaagaagtgccgctcggagtcat

SEQ ID NO: 2890744 - DNA, 25 bp, Homo sapien
agctgcgcggtgtggaagaagtgcc

SEQ ID NO: 2890745 - DNA, 25 bp, Homo sapien
cggtgtggaagaagtgccgctcgga

SEQ ID NO: 2890746 - DNA, 25 bp, Homo sapien
aggcacaggcagctgcgcggtgtgg

SEQ ID NO: 2890747 - DNA, 25 bp, Homo sapien
tagctggtagtggtgctcaggaggc

SEQ ID NO: 2890748 - DNA, 25 bp, Homo sapien
tcagccatggtgttgtgccaggtgt

SEQ ID NO: 2890749 - DNA, 25 bp, Homo sapien
ctccccagcatcttgccgagttgta

SEQ ID NO: 2890750 - DNA, 25 bp, Homo sapien
catcttgccgagttgtaatccaggg

SEQ ID NO: 2890751 - DNA, 25 bp, Homo sapien
cactccggcctggggacaagagcaa

SEQ ID NO: 2890752 - DNA, 25 bp, Homo sapien
cctggggacaagagcaagacttcgc

SEQ ID NO: 2890753 - DNA, 25 bp, Homo sapien
ttgcactccggcctggggacaagag

SEQ ID NO: 2890754 - DNA, 25 bp, Homo sapien
tccggcctggggacaagagcaagac

SEQ ID NO: 2890755 - DNA, 25 bp, Homo sapien
tgtcttggctacagttgggtttata

SEQ ID NO: 2890756 - DNA, 25 bp, Homo sapien
tataataaaccctgaatcgaggtga

SEQ ID NO: 2890757 - DNA, 25 bp, Homo sapien
cttggctacagttgggtttataata

SEQ ID NO: 2890758 - DNA, 25 bp, Homo sapien
gaggtgatgtgcattttccaactct

SEQ ID NO: 2890759 - DNA, 25 bp, Homo sapien
ctgagaaaggtcaaggctagaggca

SEQ ID NO: 2890760 - DNA, 25 bp, Homo sapien
tgagaaaggtcaaggctagaggcag

SEQ ID NO: 2890761 - DNA, 25 bp, Homo sapien
gagaaaggtcaaggctagaggcagc

SEQ ID NO: 2890762 - DNA, 25 bp, Homo sapien
tgaccatagctgatggactggcggt

SEQ ID NO: 2890763 - DNA, 25 bp, Homo sapien
gcttgactgttgagatctgccaaac

SEQ ID NO: 2890764 - DNA, 25 bp, Homo sapien
gaagaggctccaccaggcgtattgt

SEQ ID NO: 2890765 - DNA, 25 bp, Homo sapien
tcaggtccggctccgagaatgttcc

SEQ ID NO: 2890766 - DNA, 25 bp, Homo sapien
tgctaaaacaacacgatttacataa

SEQ ID NO: 2890767 - DNA, 25 bp, Homo sapien
ggtctgatagtcctctgctaaaaca

SEQ ID NO: 2890768 - DNA, 25 bp, Homo sapien
ccagtgaggacctcgatgtccagct

SEQ ID NO: 2890769 - DNA, 25 bp, Homo sapien
tgagatcggcccagctctgactgaa

SEQ ID NO: 2890770 - DNA, 25 bp, Homo sapien
cccacccggccagccaccgcgtccg

SEQ ID NO: 2890771 - DNA, 25 bp, Homo sapien
agccaccctgtccaggaggtgaggg

SEQ ID NO: 2890772 - DNA, 25 bp, Homo sapien
agccaccgcgtccgggagggaggcg

SEQ ID NO: 2890773 - DNA, 25 bp, Homo sapien
cacccggccagccaccgcgtccggg

SEQ ID NO: 2890774 - DNA, 25 bp, Homo sapien
caaagtacccagtatggcaggaggt

SEQ ID NO: 2890775 - DNA, 25 bp, Homo sapien
aaggcgcccttgcacaggtctcttg

SEQ ID NO: 2890776 - DNA, 25 bp, Homo sapien
gacccttcttcgtagaccttagcag

SEQ ID NO: 2890777 - DNA, 25 bp, Homo sapien
cagcttctgatgtcctgatgtagaa

SEQ ID NO: 2890778 - DNA, 25 bp, Homo sapien
ttcttcttcttcttatattgagacg

SEQ ID NO: 2890779 - DNA, 25 bp, Homo sapien
ttcttcttcttatattgagacgggg

SEQ ID NO: 2890780 - DNA, 25 bp, Homo sapien
acaggcatgaagcacttcatccaga

SEQ ID NO: 2890781 - DNA, 25 bp, Homo sapien
tacaggcatgaagcacttcatccag

SEQ ID NO: 2890782 - DNA, 25 bp, Homo sapien
catcgtgtttttacgaagggcctgc

SEQ ID NO: 2890783 - DNA, 25 bp, Homo sapien
tttggctgcgtactttttatctatc

SEQ ID NO: 2890784 - DNA, 25 bp, Homo sapien
tcattgtttgagaattttacatcac

SEQ ID NO: 2890785 - DNA, 25 bp, Homo sapien
aatccagaaaaccaacatcgtgttt

SEQ ID NO: 2890786 - DNA, 25 bp, Homo sapien
acacagggcagtgggcgagtctgat

SEQ ID NO: 2890787 - DNA, 25 bp, Homo sapien
tttatgaggccaggacaaacagcac

SEQ ID NO: 2890788 - DNA, 25 bp, Homo sapien
ggttcagccacctgcgaaggttgca

SEQ ID NO: 2890789 - DNA, 25 bp, Homo sapien
tcttcccaaggagtgcccagttcag

SEQ ID NO: 2890790 - DNA, 25 bp, Homo sapien
gcaagtgacaccaatcccaactggg

SEQ ID NO: 2890791 - DNA, 25 bp, Homo sapien
cagccaagagcttgtggacattcag

SEQ ID NO: 2890792 - DNA, 25 bp, Homo sapien
caagagcttgtggacattcagaatc

SEQ ID NO: 2890793 - DNA, 25 bp, Homo sapien
caacaccaagtgagtcacagggaac

SEQ ID NO: 2890794 - DNA, 25 bp, Homo sapien
cttgtggacattcagaatcaggctt

SEQ ID NO: 2890795 - DNA, 25 bp, Homo sapien
ccccagtagctcttcaactctttta

SEQ ID NO: 2890796 - DNA, 25 bp, Homo sapien
tatctgcaaagggtcctgttcgctg

SEQ ID NO: 2890797 - DNA, 25 bp, Homo sapien
ttctcggtgggctcaggactcagaa

SEQ ID NO: 2890798 - DNA, 25 bp, Homo sapien
ttttactctcgctgttttctctcct

SEQ ID NO: 2890799 - DNA, 25 bp, Homo sapien
tcaccacagcagtgctgcaatgtcg

SEQ ID NO: 2890800 - DNA, 25 bp, Homo sapien
ctgtcaccacagcagtgctgcaatg

SEQ ID NO: 2890801 - DNA, 25 bp, Homo sapien
ccacagcagtgctgcaatgtcgtgt

SEQ ID NO: 2890802 - DNA, 25 bp, Homo sapien
acagcagtgctgcaatgtcgtgtga

SEQ ID NO: 2890803 - DNA, 25 bp, Homo sapien
gtctttccgtcgccacagcagtgct

SEQ ID NO: 2890804 - DNA, 25 bp, Homo sapien
tctttccgtcgccacagcagtgctg

SEQ ID NO: 2890805 - DNA, 25 bp, Homo sapien
cagtctttccgtcgccacagcagtg

SEQ ID NO: 2890806 - DNA, 25 bp, Homo sapien
cacagtctttccgtcgccacagcag

SEQ ID NO: 2890807 - DNA, 25 bp, Homo sapien
agcaccaaacaagggagggagacca

SEQ ID NO: 2890808 - DNA, 25 bp, Homo sapien
gcaccaaacaagggagggagaccat

SEQ ID NO: 2890809 - DNA, 25 bp, Homo sapien
ccagttggagcatccagtcggaggc

SEQ ID NO: 2890810 - DNA, 25 bp, Homo sapien
gatgattcctggagctccagttgga

SEQ ID NO: 2890811 - DNA, 25 bp, Homo sapien
tgctgttcccacgaccaggatgatt

SEQ ID NO: 2890812 - DNA, 25 bp, Homo sapien
gactcctctacgtgaaggtgctggg

SEQ ID NO: 2890813 - DNA, 25 bp, Homo sapien
aaagtccctgcgaggccgccctcat

SEQ ID NO: 2890814 - DNA, 25 bp, Homo sapien
accaaagtccctgcgaggccgccct

SEQ ID NO: 2890815 - DNA, 25 bp, Homo sapien
gaccaaagtccctgcgaggccgccc

SEQ ID NO: 2890816 - DNA, 25 bp, Homo sapien
gggcagagccgagaccaaagtccct

SEQ ID NO: 2890817 - DNA, 25 bp, Homo sapien
ctatggcatcgcagagggaggagac

SEQ ID NO: 2890818 - DNA, 25 bp, Homo sapien
atacaccaagatgcctccgtctgcc

SEQ ID NO: 2890819 - DNA, 25 bp, Homo sapien
gatgcctccgtctgcccttccagct

SEQ ID NO: 2890820 - DNA, 25 bp, Homo sapien
ggcccagcagggctgtgtatacacc

SEQ ID NO: 2890821 - DNA, 25 bp, Homo sapien
tccagagggctttcggaaggcgccc

SEQ ID NO: 2890822 - DNA, 25 bp, Homo sapien
tcctgctgcctcaatccagagggct

SEQ ID NO: 2890823 - DNA, 25 bp, Homo sapien
tccgggcagaaacgacacagggatg

SEQ ID NO: 2890824 - DNA, 25 bp, Homo sapien
cctctccgggcagaaacgacacagg

SEQ ID NO: 2890825 - DNA, 25 bp, Homo sapien
ttttctgccacaaatagactgaagc

SEQ ID NO: 2890826 - DNA, 25 bp, Homo sapien
gaagcgggtcccttgaggcagtcta

SEQ ID NO: 2890827 - DNA, 25 bp, Homo sapien
tctagcctgaacagagtccatctca

SEQ ID NO: 2890828 - DNA, 25 bp, Homo sapien
aggacccgggatacagcaacaggag

SEQ ID NO: 2890829 - DNA, 25 bp, Homo sapien
ggttgccatggaaaatccttcattg

SEQ ID NO: 2890830 - DNA, 25 bp, Homo sapien
acaagctcaggtagggagagaacac

SEQ ID NO: 2890831 - DNA, 25 bp, Homo sapien
catggaaaatccttcattgcttgtt

SEQ ID NO: 2890832 - DNA, 25 bp, Homo sapien
gctggtggttgccatggaaaatcct

SEQ ID NO: 2890833 - DNA, 25 bp, Homo sapien
gagcattcaacatgaccacaggggc

SEQ ID NO: 2890834 - DNA, 25 bp, Homo sapien
aggaccagggcagccccgcagaacg

SEQ ID NO: 2890835 - DNA, 25 bp, Homo sapien
ggtgaacctggagctgagagcattc

SEQ ID NO: 2890836 - DNA, 25 bp, Homo sapien
gaagatggctgattctcgagcccca

SEQ ID NO: 2890837 - DNA, 25 bp, Homo sapien
caggtggatgtgacatctttactgc

SEQ ID NO: 2890838 - DNA, 25 bp, Homo sapien
tgacatctttactgcccactgctga

SEQ ID NO: 2890839 - DNA, 25 bp, Homo sapien
tcccagctccatgagagcgagtcca

SEQ ID NO: 2890840 - DNA, 25 bp, Homo sapien
atgagagcgagtccacggccatctc

SEQ ID NO: 2890841 - DNA, 25 bp, Homo sapien
cctggaaatctacatgttccacatg

SEQ ID NO: 2890842 - DNA, 25 bp, Homo sapien
gagtgcaggcgcacctggaaatcta

SEQ ID NO: 2890843 - DNA, 25 bp, Homo sapien
ggcgcacctggaaatctacatgttc

SEQ ID NO: 2890844 - DNA, 25 bp, Homo sapien
ggaaatctacatgttccacatgagg

SEQ ID NO: 2890845 - DNA, 25 bp, Homo sapien
agtgcaggtgcaccagaaagtctca

SEQ ID NO: 2890846 - DNA, 25 bp, Homo sapien
gtgcaggtgcaccagaaagtctcat

SEQ ID NO: 2890847 - DNA, 25 bp, Homo sapien
gtggaagtgcaggtgcaccagaaag

SEQ ID NO: 2890848 - DNA, 25 bp, Homo sapien
gaagtgcaggtgcaccagaaagtct

SEQ ID NO: 2890849 - DNA, 25 bp, Homo sapien
ggagtgcaggtgcacccggaagtct

SEQ ID NO: 2890850 - DNA, 25 bp, Homo sapien
ctgggagtgcaggtgcacccggaag

SEQ ID NO: 2890851 - DNA, 25 bp, Homo sapien
tgggagtgcaggtgcacccggaagt

SEQ ID NO: 2890852 - DNA, 25 bp, Homo sapien
agtgcaggtgcacccggaagtctca

SEQ ID NO: 2890853 - DNA, 25 bp, Homo sapien
atgaaccaagaagtctgcaccagga

SEQ ID NO: 2890854 - DNA, 25 bp, Homo sapien
caagaagtctgcaccaggaagtgca

SEQ ID NO: 2890855 - DNA, 25 bp, Homo sapien
gaaccaagaagtctgcaccaggaag

SEQ ID NO: 2890856 - DNA, 25 bp, Homo sapien
accaagaagtctgcaccaggaagtg

SEQ ID NO: 2890857 - DNA, 25 bp, Homo sapien
caggaagtgcagatgcccaagggat

SEQ ID NO: 2890858 - DNA, 25 bp, Homo sapien
aggaagtgcagatgcccaagggatt

SEQ ID NO: 2890859 - DNA, 25 bp, Homo sapien
aggaagttccacctagaagtgcagg

SEQ ID NO: 2890860 - DNA, 25 bp, Homo sapien
gttcacccgtaaatgcagatgcagc

SEQ ID NO: 2890861 - DNA, 25 bp, Homo sapien
tcaagggattctcaccaggaagtat

SEQ ID NO: 2890862 - DNA, 25 bp, Homo sapien
gtgcatcaggaagttcacccgtaaa

SEQ ID NO: 2890863 - DNA, 25 bp, Homo sapien
gagctgtccagcaaaggtagcctga

SEQ ID NO: 2890864 - DNA, 25 bp, Homo sapien
tagacggcatatacagtggtggccc

SEQ ID NO: 2890865 - DNA, 25 bp, Homo sapien
ctgtagactaagagaggcaagggcc

SEQ ID NO: 2890866 - DNA, 25 bp, Homo sapien
ttgtagcccggtagcaggaggtcct

SEQ ID NO: 2890867 - DNA, 25 bp, Homo sapien
tgtatcttgtttccgggaactcagg

SEQ ID NO: 2890868 - DNA, 25 bp, Homo sapien
caggtgccattctgaaatctgtatc

SEQ ID NO: 2890869 - DNA, 25 bp, Homo sapien
atctgtatcttgtttccgggaactc

SEQ ID NO: 2890870 - DNA, 25 bp, Homo sapien
cttgtttccgggaactcaggagtgg

SEQ ID NO: 2890871 - DNA, 25 bp, Homo sapien
tccagccggaaatcagtaaacaatg

SEQ ID NO: 2890872 - DNA, 25 bp, Homo sapien
tagaagaatccctcggaccctcact

SEQ ID NO: 2890873 - DNA, 25 bp, Homo sapien
aaagatgctgagtcatacaattcca

SEQ ID NO: 2890874 - DNA, 25 bp, Homo sapien
caattccatagaagaatccctcgga

SEQ ID NO: 2890875 - DNA, 25 bp, Homo sapien
gatccacgtggtttaggagaagctg

SEQ ID NO: 2890876 - DNA, 25 bp, Homo sapien
tccacagacccgattttcaggaggt

SEQ ID NO: 2890877 - DNA, 25 bp, Homo sapien
tgacttccgtttggagatccacgtg

SEQ ID NO: 2890878 - DNA, 25 bp, Homo sapien
tgtgatctaaggcagtccagtcccc

SEQ ID NO: 2890879 - DNA, 25 bp, Homo sapien
ccactctctgcgcaatggaacaaag

SEQ ID NO: 2890880 - DNA, 25 bp, Homo sapien
atccccactctctgcgcaatggaac

SEQ ID NO: 2890881 - DNA, 25 bp, Homo sapien
cccactctctgcgcaatggaacaaa

SEQ ID NO: 2890882 - DNA, 25 bp, Homo sapien
tccccactctctgcgcaatggaaca

SEQ ID NO: 2890883 - DNA, 25 bp, Homo sapien
agcggctgtttgcagacactgggcc

SEQ ID NO: 2890884 - DNA, 25 bp, Homo sapien
caaaatcgacaaagcggctgtttgc

SEQ ID NO: 2890885 - DNA, 25 bp, Homo sapien
taccatacacgactatcaagctggg

SEQ ID NO: 2890886 - DNA, 25 bp, Homo sapien
tatcaagctgggcaaaatcgacaaa

SEQ ID NO: 2890887 - DNA, 25 bp, Homo sapien
tgtcattaaccttctccagggaggg

SEQ ID NO: 2890888 - DNA, 25 bp, Homo sapien
ccttctccagggagggtttgtacag

SEQ ID NO: 2890889 - DNA, 25 bp, Homo sapien
ctgtcattaaccttctccagggagg

SEQ ID NO: 2890890 - DNA, 25 bp, Homo sapien
tctccagggagggtttgtacagcat

SEQ ID NO: 2890891 - DNA, 25 bp, Homo sapien
cctgaaccgtccaggtgtgctgggt

SEQ ID NO: 2890892 - DNA, 25 bp, Homo sapien
cagaactctacccaggggttccagg

SEQ ID NO: 2890893 - DNA, 25 bp, Homo sapien
ataggctcaagcacctccacggtgg

SEQ ID NO: 2890894 - DNA, 25 bp, Homo sapien
tgtgctgggtcacagaactctaccc

SEQ ID NO: 2890895 - DNA, 25 bp, Homo sapien
gtctgccagccggtggttcaggata

SEQ ID NO: 2890896 - DNA, 25 bp, Homo sapien
cagccggtggttcaggataagttcc

SEQ ID NO: 2890897 - DNA, 25 bp, Homo sapien
tcaggataagttcctggtgactggc

SEQ ID NO: 2890898 - DNA, 25 bp, Homo sapien
tgccagccggtggttcaggataagt

SEQ ID NO: 2890899 - DNA, 25 bp, Homo sapien
gagtgaggaggtattcactgaacat

SEQ ID NO: 2890900 - DNA, 25 bp, Homo sapien
agtctgtgacgtgcaggctgcccag

SEQ ID NO: 2890901 - DNA, 25 bp, Homo sapien
gacagcagtctgtgacgtgcaggct

SEQ ID NO: 2890902 - DNA, 25 bp, Homo sapien
ggagtgaggaggtattcactgaaca

SEQ ID NO: 2890903 - DNA, 25 bp, Homo sapien
cacgaagcctgcatgaaatgacgcg

SEQ ID NO: 2890904 - DNA, 25 bp, Homo sapien
gaaatgacgcgttcaacagcaggaa

SEQ ID NO: 2890905 - DNA, 25 bp, Homo sapien
tgcatgaaatgacgcgttcaacagc

SEQ ID NO: 2890906 - DNA, 25 bp, Homo sapien
gaagcctgcatgaaatgacgcgttc

SEQ ID NO: 2890907 - DNA, 25 bp, Homo sapien
cttcccagaacccacgctcagcttc

SEQ ID NO: 2890908 - DNA, 25 bp, Homo sapien
ccttcccagaacccacgctcagctt

SEQ ID NO: 2890909 - DNA, 25 bp, Homo sapien
ccagctgtgaggctgcgacggttct

SEQ ID NO: 2890910 - DNA, 25 bp, Homo sapien
tgcgacggttctggccaggcaagca

SEQ ID NO: 2890911 - DNA, 25 bp, Homo sapien
ggagagaaaggagaccagacccagc

SEQ ID NO: 2890912 - DNA, 25 bp, Homo sapien
ggagaccagacccagctgtgaggct

SEQ ID NO: 2890913 - DNA, 25 bp, Homo sapien
cagctcccaggcagtcacaaggtga

SEQ ID NO: 2890914 - DNA, 25 bp, Homo sapien
ctgcccactccatacagctcccagg

SEQ ID NO: 2890915 - DNA, 25 bp, Homo sapien
cccttctgacaaggggctggtgctc

SEQ ID NO: 2890916 - DNA, 25 bp, Homo sapien
gctgcccttctgacaaggggctggt

SEQ ID NO: 2890917 - DNA, 25 bp, Homo sapien
agtgatgccccacggagtgtcctgg

SEQ ID NO: 2890918 - DNA, 25 bp, Homo sapien
agggcaaggccatgcaaggcaggct

SEQ ID NO: 2890919 - DNA, 25 bp, Homo sapien
aaggccatgcaaggcaggctcccca

SEQ ID NO: 2890920 - DNA, 25 bp, Homo sapien
cagcagtgatgccccacggagtgtc

SEQ ID NO: 2890921 - DNA, 25 bp, Homo sapien
ctcggccttgatgtccagctctgcg

SEQ ID NO: 2890922 - DNA, 25 bp, Homo sapien
cactgagaaggtcctcggccttgat

SEQ ID NO: 2890923 - DNA, 25 bp, Homo sapien
gcccactgagaaggtcctcggcctt

SEQ ID NO: 2890924 - DNA, 25 bp, Homo sapien
gatgtccagctctgcggtgacggaa

SEQ ID NO: 2890925 - DNA, 25 bp, Homo sapien
ctcttggcagtgctcaaggccccac

SEQ ID NO: 2890926 - DNA, 25 bp, Homo sapien
aggcagcccacgtcactctcctggg

SEQ ID NO: 2890927 - DNA, 25 bp, Homo sapien
cacactggaaagtggacacagcaca

SEQ ID NO: 2890928 - DNA, 25 bp, Homo sapien
ggcaaggcctcctggaagcccctgg

SEQ ID NO: 2890929 - DNA, 25 bp, Homo sapien
gcaaggcctcctggaagcccctggg

SEQ ID NO: 2890930 - DNA, 25 bp, Homo sapien
tggcaaggcctcctggaagcccctg

SEQ ID NO: 2890931 - DNA, 25 bp, Homo sapien
caaggcctcctggaagcccctgggg

SEQ ID NO: 2890932 - DNA, 25 bp, Homo sapien
ctaggggagaccccagagacggcct

SEQ ID NO: 2890933 - DNA, 25 bp, Homo sapien
taggggagaccccagagacggcctc

SEQ ID NO: 2890934 - DNA, 25 bp, Homo sapien
tgaaaatctgatggcacctccagcg

SEQ ID NO: 2890935 - DNA, 25 bp, Homo sapien
gagtcacccgactggcctgaaaatc

SEQ ID NO: 2890936 - DNA, 25 bp, Homo sapien
ggaccacgggttgagtggcaacatc

SEQ ID NO: 2890937 - DNA, 25 bp, Homo sapien
catctcagccactggaaaggtaggg

SEQ ID NO: 2890938 - DNA, 25 bp, Homo sapien
gatcccgggtccatgagattcctgg

SEQ ID NO: 2890939 - DNA, 25 bp, Homo sapien
aattcagtcatagggaccagccagg

SEQ ID NO: 2890940 - DNA, 25 bp, Homo sapien
caaagagccggcctttccgggctca

SEQ ID NO: 2890941 - DNA, 25 bp, Homo sapien
ggtcagtaacattgagtcccaaagc

SEQ ID NO: 2890942 - DNA, 25 bp, Homo sapien
cttccctggctcacctgtgccatcc

SEQ ID NO: 2890943 - DNA, 25 bp, Homo sapien
tccctggctcacctgtgccatccat

SEQ ID NO: 2890944 - DNA, 25 bp, Homo sapien
ttccctggctcacctgtgccatcca

SEQ ID NO: 2890945 - DNA, 25 bp, Homo sapien
gactccacagggcacaggatgccca

SEQ ID NO: 2890946 - DNA, 25 bp, Homo sapien
tcggactccacagggcacaggatgc

SEQ ID NO: 2890947 - DNA, 25 bp, Homo sapien
tccacagggcacaggatgcccacca

SEQ ID NO: 2890948 - DNA, 25 bp, Homo sapien
ctggtcggactccacagggcacagg

SEQ ID NO: 2890949 - DNA, 25 bp, Homo sapien
aacagaggcagcttcagcgaggacc

SEQ ID NO: 2890950 - DNA, 25 bp, Homo sapien
gcaacagaggcagcttcagcgagga

SEQ ID NO: 2890951 - DNA, 25 bp, Homo sapien
cagcacaagcgtggcagcaacagag

SEQ ID NO: 2890952 - DNA, 25 bp, Homo sapien
aggcccagcacaagcgtggcagcaa

SEQ ID NO: 2890953 - DNA, 25 bp, Homo sapien
acacaccagaaagtgagggccccgc

SEQ ID NO: 2890954 - DNA, 25 bp, Homo sapien
ttacacaccagaaagtgagggcccc

SEQ ID NO: 2890955 - DNA, 25 bp, Homo sapien
accagaaagtgagggccccgcacag

SEQ ID NO: 2890956 - DNA, 25 bp, Homo sapien
acaccagaaagtgagggccccgcac

SEQ ID NO: 2890957 - DNA, 25 bp, Homo sapien
tggctccccgacggcaaaccaagga

SEQ ID NO: 2890958 - DNA, 25 bp, Homo sapien
gacgcggggacgtgcttctctatgt

SEQ ID NO: 2890959 - DNA, 25 bp, Homo sapien
gaagggctgcgcctgatgctgtcct

SEQ ID NO: 2890960 - DNA, 25 bp, Homo sapien
acgtgcttctctatgtgcggggaga

SEQ ID NO: 2890961 - DNA, 25 bp, Homo sapien
catctgataggcagcgccttggcat

SEQ ID NO: 2890962 - DNA, 25 bp, Homo sapien
ccagaagggcggctgtgaacacggg

SEQ ID NO: 2890963 - DNA, 25 bp, Homo sapien
ccaggcatctgataggcagcgcctt

SEQ ID NO: 2890964 - DNA, 25 bp, Homo sapien
gataggcagcgccttggcattccag

SEQ ID NO: 2890965 - DNA, 25 bp, Homo sapien
ccatatgcacaacggcctccgtagt

SEQ ID NO: 2890966 - DNA, 25 bp, Homo sapien
agtcgccatatgcacaacggcctcc

SEQ ID NO: 2890967 - DNA, 25 bp, Homo sapien
atgcacaacggcctccgtagtacgc

SEQ ID NO: 2890968 - DNA, 25 bp, Homo sapien
gcacaacggcctccgtagtacgcag

SEQ ID NO: 2890969 - DNA, 25 bp, Homo sapien
tcatgatattcccaatgatgcctta

SEQ ID NO: 2890970 - DNA, 25 bp, Homo sapien
catgatattcccaatgatgccttac

SEQ ID NO: 2890971 - DNA, 25 bp, Homo sapien
acctgagtgggtggaccctttctca

SEQ ID NO: 2890972 - DNA, 25 bp, Homo sapien
cactcatcccgagtgtgggtgaaac

SEQ ID NO: 2890973 - DNA, 25 bp, Homo sapien
ccatccactcatcccgagtgtgggt

SEQ ID NO: 2890974 - DNA, 25 bp, Homo sapien
cctgagtgggtggaccctttctcac

SEQ ID NO: 2890975 - DNA, 25 bp, Homo sapien
ccctcagatcctcattgcggtctag

SEQ ID NO: 2890976 - DNA, 25 bp, Homo sapien
gccctcagatcctcattgcggtcta

SEQ ID NO: 2890977 - DNA, 25 bp, Homo sapien
tgccctcagatcctcattgcggtct

SEQ ID NO: 2890978 - DNA, 25 bp, Homo sapien
actagggcctcacagtcccgccagg

SEQ ID NO: 2890979 - DNA, 25 bp, Homo sapien
agccactagggcctcacagtcccgc

SEQ ID NO: 2890980 - DNA, 25 bp, Homo sapien
ccactagggcctcacagtcccgcca

SEQ ID NO: 2890981 - DNA, 25 bp, Homo sapien
cagccactagggcctcacagtcccg

SEQ ID NO: 2890982 - DNA, 25 bp, Homo sapien
cctcccggagcaacgatgaagttta

SEQ ID NO: 2890983 - DNA, 25 bp, Homo sapien
agaatgaaccgtgagcctcccggag

SEQ ID NO: 2890984 - DNA, 25 bp, Homo sapien
taaggattcgagttcttgactcagg

SEQ ID NO: 2890985 - DNA, 25 bp, Homo sapien
ggccagcagcacaaatagccaattt

SEQ ID NO: 2890986 - DNA, 25 bp, Homo sapien
ggttgccagcaactcggctttgaag

SEQ ID NO: 2890987 - DNA, 25 bp, Homo sapien
cggggctctgcagtttggcttctga

SEQ ID NO: 2890988 - DNA, 25 bp, Homo sapien
cacccaaccagagaggatcttccgg

SEQ ID NO: 2890989 - DNA, 25 bp, Homo sapien
agtccacggggacagacagcgttcg

SEQ ID NO: 2890990 - DNA, 25 bp, Homo sapien
ccaggtccatgtcatgttctccaga

SEQ ID NO: 2890991 - DNA, 25 bp, Homo sapien
gcagatctgggagacactccaggtc

SEQ ID NO: 2890992 - DNA, 25 bp, Homo sapien
atgttctccagactccacggacacc

SEQ ID NO: 2890993 - DNA, 25 bp, Homo sapien
gacactccaggtccatgtcatgttc

SEQ ID NO: 2890994 - DNA, 25 bp, Homo sapien
tcagccactgcggccgctggggctg

SEQ ID NO: 2890995 - DNA, 25 bp, Homo sapien
tcaggaggctccgaactgcagcagg

SEQ ID NO: 2890996 - DNA, 25 bp, Homo sapien
tctcaggaggctccgaactgcagca

SEQ ID NO: 2890997 - DNA, 25 bp, Homo sapien
caagggttgggccttctggaataat

SEQ ID NO: 2890998 - DNA, 25 bp, Homo sapien
aggaggctccgaactgcagcaggac

SEQ ID NO: 2890999 - DNA, 25 bp, Homo sapien
cccgcggccttcaccgtccagcaga

SEQ ID NO: 2891000 - DNA, 25 bp, Homo sapien
ggcccgcggccttcaccgtccagca

SEQ ID NO: 2891001 - DNA, 25 bp, Homo sapien
ccgcggccttcaccgtccagcagag

SEQ ID NO: 2891002 - DNA, 25 bp, Homo sapien
gcccgcggccttcaccgtccagcag

SEQ ID NO: 2891003 - DNA, 25 bp, Homo sapien
aggcgcggccaacacgaagatcagg

SEQ ID NO: 2891004 - DNA, 25 bp, Homo sapien
atctggagctcgaggcgccgctggg

SEQ ID NO: 2891005 - DNA, 25 bp, Homo sapien
gctgttggggtgaacggtgatcggg

SEQ ID NO: 2891006 - DNA, 25 bp, Homo sapien
cgtgtaggcggatggtgcatctgga

SEQ ID NO: 2891007 - DNA, 25 bp, Homo sapien
tctagcagtgaaagcttagcccggc

SEQ ID NO: 2891008 - DNA, 25 bp, Homo sapien
ccggtgggattactatggcttcaca

SEQ ID NO: 2891009 - DNA, 25 bp, Homo sapien
tcacagtgtacatgcagaggactct

SEQ ID NO: 2891010 - DNA, 25 bp, Homo sapien
tgagtacagacacacgtcagccggt

SEQ ID NO: 2891011 - DNA, 25 bp, Homo sapien
ggccgtgctgccctttggtgaggac

SEQ ID NO: 2891012 - DNA, 25 bp, Homo sapien
acctgtgcggtgtctgcagcgctgc

SEQ ID NO: 2891013 - DNA, 25 bp, Homo sapien
acgctgagtcgttgccacaggcctg

SEQ ID NO: 2891014 - DNA, 25 bp, Homo sapien
agggtgcggccacatcacctgtgcg

SEQ ID NO: 2891015 - DNA, 25 bp, Homo sapien
tcagcccggtgggatggcgccaagg

SEQ ID NO: 2891016 - DNA, 25 bp, Homo sapien
ccaaggccttgtggcgctggacgag

SEQ ID NO: 2891017 - DNA, 25 bp, Homo sapien
tgggatggcgccaaggccttgtggc

SEQ ID NO: 2891018 - DNA, 25 bp, Homo sapien
ggcgccaaggccttgtggcgctgga

SEQ ID NO: 2891019 - DNA, 25 bp, Homo sapien
gctggcaaaccgctgtcacattcgc

SEQ ID NO: 2891020 - DNA, 25 bp, Homo sapien
tgggcttgctggcaaaccgctgtca

SEQ ID NO: 2891021 - DNA, 25 bp, Homo sapien
ccttcttccagcaaagcggggcagg

SEQ ID NO: 2891022 - DNA, 25 bp, Homo sapien
ttcgcccagatagctgtgttctcct

SEQ ID NO: 2891023 - DNA, 25 bp, Homo sapien
cctcggccagcgtggttgatcaggg

SEQ ID NO: 2891024 - DNA, 25 bp, Homo sapien
cagctgaactggcctcggccagcat

SEQ ID NO: 2891025 - DNA, 25 bp, Homo sapien
tggtgtaggccagcgtggttgatcg

SEQ ID NO: 2891026 - DNA, 25 bp, Homo sapien
agcatggttgatcggcggcggaact

SEQ ID NO: 2891027 - DNA, 25 bp, Homo sapien
gaccacgggccactcagtgcagctt

SEQ ID NO: 2891028 - DNA, 25 bp, Homo sapien
atggaccacgggccactcagtgcag

SEQ ID NO: 2891029 - DNA, 25 bp, Homo sapien
ggccagatggaccacgggccactca

SEQ ID NO: 2891030 - DNA, 25 bp, Homo sapien
ccagatggaccacgggccactcagt

SEQ ID NO: 2891031 - DNA, 25 bp, Homo sapien
gctgcccgaggccttatgtctgcag

SEQ ID NO: 2891032 - DNA, 25 bp, Homo sapien
cgaggccttatgtctgcaggtgcag

SEQ ID NO: 2891033 - DNA, 25 bp, Homo sapien
tgcccgaggccttatgtctgcaggt

SEQ ID NO: 2891034 - DNA, 25 bp, Homo sapien
cccgaggccttatgtctgcaggtgc

SEQ ID NO: 2891035 - DNA, 25 bp, Homo sapien
cattatcagtcctgccagggagcat

SEQ ID NO: 2891036 - DNA, 25 bp, Homo sapien
gctgctgtggcggcattcagtcgtt

SEQ ID NO: 2891037 - DNA, 25 bp, Homo sapien
gggagcattctctggtggaggactc

SEQ ID NO: 2891038 - DNA, 25 bp, Homo sapien
tgctgtggcggcattcagtcgttgc

SEQ ID NO: 2891039 - DNA, 25 bp, Homo sapien
cagggtgtgccgagcctcagggttc

SEQ ID NO: 2891040 - DNA, 25 bp, Homo sapien
agatgcagccaaaggtgccaaggga

SEQ ID NO: 2891041 - DNA, 25 bp, Homo sapien
gcagggtgtgccgagcctcagggtt

SEQ ID NO: 2891042 - DNA, 25 bp, Homo sapien
ctcctcagccggcagatgcagccaa

SEQ ID NO: 2891043 - DNA, 25 bp, Homo sapien
tccagcttcctgcatcgatcctgat

SEQ ID NO: 2891044 - DNA, 25 bp, Homo sapien
gatgcgggctgagccgtcctcgcca

SEQ ID NO: 2891045 - DNA, 25 bp, Homo sapien
tttgtgttggaacctggacaccttg

SEQ ID NO: 2891046 - DNA, 25 bp, Homo sapien
gggcccacactcagcaagatctgct

SEQ ID NO: 2891047 - DNA, 25 bp, Homo sapien
aaagtgtgggcgtgcccgcgtggaa

SEQ ID NO: 2891048 - DNA, 25 bp, Homo sapien
tgataccttgtattgcagctgcttc

SEQ ID NO: 2891049 - DNA, 25 bp, Homo sapien
catgtgtgaggcgtgacgtgctccc

SEQ ID NO: 2891050 - DNA, 25 bp, Homo sapien
cacaggtggcgggtgcccatgtgtg

SEQ ID NO: 2891051 - DNA, 25 bp, Homo sapien
agacaccaggaagcatcctctgcgt

SEQ ID NO: 2891052 - DNA, 25 bp, Homo sapien
ccaggaagcatcctctgcgtgcagc

SEQ ID NO: 2891053 - DNA, 25 bp, Homo sapien
tcagttgtcatgcagtccgcagaca

SEQ ID NO: 2891054 - DNA, 25 bp, Homo sapien
catgcagtccgcagacaccaggaag

SEQ ID NO: 2891055 - DNA, 25 bp, Homo sapien
gctgctctttctaagactggagcct

SEQ ID NO: 2891056 - DNA, 25 bp, Homo sapien
cctgcgatcggcttccaacttgggt

SEQ ID NO: 2891057 - DNA, 25 bp, Homo sapien
cagggtccggaccagatcctggatc

SEQ ID NO: 2891058 - DNA, 25 bp, Homo sapien
cagctgccgagcgtgtaagtgcaga

SEQ ID NO: 2891059 - DNA, 25 bp, Homo sapien
cgctcgcattggggcccgccgctgc

SEQ ID NO: 2891060 - DNA, 25 bp, Homo sapien
accgcgcccgccgagtactggccgc

SEQ ID NO: 2891061 - DNA, 25 bp, Homo sapien
aggaagcccccgaggcattggcaac

SEQ ID NO: 2891062 - DNA, 25 bp, Homo sapien
aggcattggcaaccccgccgctgcc

SEQ ID NO: 2891063 - DNA, 25 bp, Homo sapien
aagaggttctgtggcgcgcgcagcg

SEQ ID NO: 2891064 - DNA, 25 bp, Homo sapien
tcgttggccaacgagaagggcatga

SEQ ID NO: 2891065 - DNA, 25 bp, Homo sapien
tgcccgaagtaccagtaggccatga

SEQ ID NO: 2891066 - DNA, 25 bp, Homo sapien
cccaccacggtgaagacgatgagga

SEQ ID NO: 2891067 - DNA, 25 bp, Homo sapien
acacagatgcacgatcgacgaggtg

SEQ ID NO: 2891068 - DNA, 25 bp, Homo sapien
aaacagcacatcgagcgccaggtac

SEQ ID NO: 2891069 - DNA, 25 bp, Homo sapien
gcaaaacagcacatcgagcgccagg

SEQ ID NO: 2891070 - DNA, 25 bp, Homo sapien
acgatcgacgaggtgcaaaacagca

SEQ ID NO: 2891071 - DNA, 25 bp, Homo sapien
gatggtggccttgacgcggcgtggt

SEQ ID NO: 2891072 - DNA, 25 bp, Homo sapien
gcctgcgtcaccgaccagtagcggt

SEQ ID NO: 2891073 - DNA, 25 bp, Homo sapien
cgccgtcgggctggcggtagagcga

SEQ ID NO: 2891074 - DNA, 25 bp, Homo sapien
caggttgtactcgacggcctgcgtc

SEQ ID NO: 2891075 - DNA, 25 bp, Homo sapien
cgtgcgcgtgcgcagcttggccact

SEQ ID NO: 2891076 - DNA, 25 bp, Homo sapien
cccatgatgaggcagggcgcgaaga

SEQ ID NO: 2891077 - DNA, 25 bp, Homo sapien
tggccactcggtagatgcgcgcgta

SEQ ID NO: 2891078 - DNA, 25 bp, Homo sapien
gcgcgtagaccaggcccatgatgag

SEQ ID NO: 2891079 - DNA, 25 bp, Homo sapien
ggcgggggcgcgcagtgcccgttct

SEQ ID NO: 2891080 - DNA, 25 bp, Homo sapien
gggcgcgcagtgcccgttctcgcct

SEQ ID NO: 2891081 - DNA, 25 bp, Homo sapien
cgcgcagtgcccgttctcgcctgcg

SEQ ID NO: 2891082 - DNA, 25 bp, Homo sapien
agtgcccgttctcgcctgcgcctgc

SEQ ID NO: 2891083 - DNA, 25 bp, Homo sapien
ggaggcggtcagcgcccccgactca

SEQ ID NO: 2891084 - DNA, 25 bp, Homo sapien
gaggcggtcagcgcccccgactcag

SEQ ID NO: 2891085 - DNA, 25 bp, Homo sapien
cgcgagctggcgcgcgacaggcggc

SEQ ID NO: 2891086 - DNA, 25 bp, Homo sapien
gagctggcgcgcgacaggcggccac

SEQ ID NO: 2891087 - DNA, 25 bp, Homo sapien
tggcgcgcgacaggcggccaccggg

SEQ ID NO: 2891088 - DNA, 25 bp, Homo sapien
ggagcgcgagctggcgcgcgacagg

SEQ ID NO: 2891089 - DNA, 25 bp, Homo sapien
cggcagatgccgtacaggctgtagc

SEQ ID NO: 2891090 - DNA, 25 bp, Homo sapien
gatgtgcttaaaggatcgccggaaa

SEQ ID NO: 2891091 - DNA, 25 bp, Homo sapien
gaaatcctggttgaagaccgtgtag

SEQ ID NO: 2891092 - DNA, 25 bp, Homo sapien
acctggcaggcctcgcggcagatgc

SEQ ID NO: 2891093 - DNA, 25 bp, Homo sapien
tccaggattcccagacgggtgcgag

SEQ ID NO: 2891094 - DNA, 25 bp, Homo sapien
ggagcccggctatctctctgccaag

SEQ ID NO: 2891095 - DNA, 25 bp, Homo sapien
cccgagcgcggagctgtccaggatt

SEQ ID NO: 2891096 - DNA, 25 bp, Homo sapien
tccatccccgggtctctgggaaagc

SEQ ID NO: 2891097 - DNA, 25 bp, Homo sapien
aaagattgtcggtgctttctccttg

SEQ ID NO: 2891098 - DNA, 25 bp, Homo sapien
agaagtcagcccttggtcagacggg

SEQ ID NO: 2891099 - DNA, 25 bp, Homo sapien
tttagggggctacctctgccactgc

SEQ ID NO: 2891100 - DNA, 25 bp, Homo sapien
gtaatcaaagattgtcggtgctttc

SEQ ID NO: 2891101 - DNA, 25 bp, Homo sapien
aagctcaaggactgactgcggcacc

SEQ ID NO: 2891102 - DNA, 25 bp, Homo sapien
tgccctccgtccagcattgtggggt

SEQ ID NO: 2891103 - DNA, 25 bp, Homo sapien
agcccccaagctcaaggactgactg

SEQ ID NO: 2891104 - DNA, 25 bp, Homo sapien
tgagggtctggaagatacccccagc

SEQ ID NO: 2891105 - DNA, 25 bp, Homo sapien
tcaacagccaacgtcacacagtgct

SEQ ID NO: 2891106 - DNA, 25 bp, Homo sapien
gtcacacagtgctgagcgccatcct

SEQ ID NO: 2891107 - DNA, 25 bp, Homo sapien
gtggtcaacagccaacgtcacacag

SEQ ID NO: 2891108 - DNA, 25 bp, Homo sapien
ggcagtggtcaacagccaacgtcac

SEQ ID NO: 2891109 - DNA, 25 bp, Homo sapien
gtctttgcccttgtcaacaggttgc

SEQ ID NO: 2891110 - DNA, 25 bp, Homo sapien
cccagggtctttgcccttgtcaaca

SEQ ID NO: 2891111 - DNA, 25 bp, Homo sapien
tctcctccatttgccccttagtatc

SEQ ID NO: 2891112 - DNA, 25 bp, Homo sapien
aacaggttgcttcccacctgcttcc

SEQ ID NO: 2891113 - DNA, 25 bp, Homo sapien
cagagtgggggtcacaagctactca

SEQ ID NO: 2891114 - DNA, 25 bp, Homo sapien
cacaagctactcagtgggggaggtt

SEQ ID NO: 2891115 - DNA, 25 bp, Homo sapien
tcacaagctactcagtgggggaggt

SEQ ID NO: 2891116 - DNA, 25 bp, Homo sapien
agtgggggtcacaagctactcagtg

SEQ ID NO: 2891117 - DNA, 25 bp, Homo sapien
tggatcgttttcacggagcaaacaa

SEQ ID NO: 2891118 - DNA, 25 bp, Homo sapien
atcgttttcacggagcaaacaacag

SEQ ID NO: 2891119 - DNA, 25 bp, Homo sapien
cgttttcacggagcaaacaacagga

SEQ ID NO: 2891120 - DNA, 25 bp, Homo sapien
ggatcgttttcacggagcaaacaac

SEQ ID NO: 2891121 - DNA, 25 bp, Homo sapien
gaacggcaaataggagtttgactag

SEQ ID NO: 2891122 - DNA, 25 bp, Homo sapien
gttgagaacggcaaataggagtttg

SEQ ID NO: 2891123 - DNA, 25 bp, Homo sapien
tgagaacggcaaataggagtttgac

SEQ ID NO: 2891124 - DNA, 25 bp, Homo sapien
cggcaaataggagtttgactagaca

SEQ ID NO: 2891125 - DNA, 25 bp, Homo sapien
gggcagagtagggatcacaatgtac

SEQ ID NO: 2891126 - DNA, 25 bp, Homo sapien
gcgggcagagtagggatcacaatgt

SEQ ID NO: 2891127 - DNA, 25 bp, Homo sapien
ggcagagtagggatcacaatgtact

SEQ ID NO: 2891128 - DNA, 25 bp, Homo sapien
cgggcagagtagggatcacaatgta

SEQ ID NO: 2891129 - DNA, 25 bp, Homo sapien
gagtgtgtgccgctgagcttcatga

SEQ ID NO: 2891130 - DNA, 25 bp, Homo sapien
agtgtgtgccgctgagcttcatgaa

SEQ ID NO: 2891131 - DNA, 25 bp, Homo sapien
ctccgtggctgggtcctcaggttct

SEQ ID NO: 2891132 - DNA, 25 bp, Homo sapien
tccgtggctgggtcctcaggttctg

SEQ ID NO: 2891133 - DNA, 25 bp, Homo sapien
ccgtggctgggtcctcaggttctga

SEQ ID NO: 2891134 - DNA, 25 bp, Homo sapien
cgtggctgggtcctcaggttctgag

SEQ ID NO: 2891135 - DNA, 25 bp, Homo sapien
gctggccgctcgtggagacgcatca

SEQ ID NO: 2891136 - DNA, 25 bp, Homo sapien
catccctcttcatgaaggccgaccg

SEQ ID NO: 2891137 - DNA, 25 bp, Homo sapien
ccagcatccctcttcatgaaggccg

SEQ ID NO: 2891138 - DNA, 25 bp, Homo sapien
gccgctcgtggagacgcatcaccag

SEQ ID NO: 2891139 - DNA, 25 bp, Homo sapien
caagtgttgcaggggtcgtgcagac

SEQ ID NO: 2891140 - DNA, 25 bp, Homo sapien
ccaagtgttgcaggggtcgtgcaga

SEQ ID NO: 2891141 - DNA, 25 bp, Homo sapien
cccaagtgttgcaggggtcgtgcag

SEQ ID NO: 2891142 - DNA, 25 bp, Homo sapien
ttctaaagctgccagcaggatggag

SEQ ID NO: 2891143 - DNA, 25 bp, Homo sapien
tttctaaagctgccagcaggatgga

SEQ ID NO: 2891144 - DNA, 25 bp, Homo sapien
agcaggatggagaagtcttcgtcct

SEQ ID NO: 2891145 - DNA, 25 bp, Homo sapien
gccagcaggatggagaagtcttcgt

SEQ ID NO: 2891146 - DNA, 25 bp, Homo sapien
gaggccctttgccttcacagagaag

SEQ ID NO: 2891147 - DNA, 25 bp, Homo sapien
ggccctttgccttcacagagaagag

SEQ ID NO: 2891148 - DNA, 25 bp, Homo sapien
tcctcggccctccagccagggggtg

SEQ ID NO: 2891149 - DNA, 25 bp, Homo sapien
ccctttgccttcacagagaagagga

SEQ ID NO: 2891150 - DNA, 25 bp, Homo sapien
cgtgtctagacagacgcccaggtcc

SEQ ID NO: 2891151 - DNA, 25 bp, Homo sapien
aggacgtgtctagacagacgcccag

SEQ ID NO: 2891152 - DNA, 25 bp, Homo sapien
gaggacgtgtctagacagacgccca

SEQ ID NO: 2891153 - DNA, 25 bp, Homo sapien
gacgtgtctagacagacgcccaggt

SEQ ID NO: 2891154 - DNA, 25 bp, Homo sapien
aaacagctcctgaacatgtccacca

SEQ ID NO: 2891155 - DNA, 25 bp, Homo sapien
caggcaaacagctcctgaacatgtc

SEQ ID NO: 2891156 - DNA, 25 bp, Homo sapien
acaggcaaacagctcctgaacatgt

SEQ ID NO: 2891157 - DNA, 25 bp, Homo sapien
ggcaaacagctcctgaacatgtcca

SEQ ID NO: 2891158 - DNA, 25 bp, Homo sapien
ccctcgcaccccacgctcaagccag

SEQ ID NO: 2891159 - DNA, 25 bp, Homo sapien
cctcgcaccccacgctcaagccagg

SEQ ID NO: 2891160 - DNA, 25 bp, Homo sapien
ctgcagagagaaccaagggagcctg

SEQ ID NO: 2891161 - DNA, 25 bp, Homo sapien
agagaaccaagggagcctgagagct

SEQ ID NO: 2891162 - DNA, 25 bp, Homo sapien
agaaccaagggagcctgagagctgc

SEQ ID NO: 2891163 - DNA, 25 bp, Homo sapien
cagagagaaccaagggagcctgaga

SEQ ID NO: 2891164 - DNA, 25 bp, Homo sapien
aaagaccaagccgttttcttgatgt

SEQ ID NO: 2891165 - DNA, 25 bp, Homo sapien
cctcaaagaccaagccgttttcttg

SEQ ID NO: 2891166 - DNA, 25 bp, Homo sapien
ctcaaagaccaagccgttttcttga

SEQ ID NO: 2891167 - DNA, 25 bp, Homo sapien
agaccaagccgttttcttgatgttt

SEQ ID NO: 2891168 - DNA, 25 bp, Homo sapien
cctggcttagtggcagatgtggcta

SEQ ID NO: 2891169 - DNA, 25 bp, Homo sapien
ctggcttagtggcagatgtggctac

SEQ ID NO: 2891170 - DNA, 25 bp, Homo sapien
ctgcaggatcaggaaagtttgagaa

SEQ ID NO: 2891171 - DNA, 25 bp, Homo sapien
gatcaggaaagtttgagaaaagcat

SEQ ID NO: 2891172 - DNA, 25 bp, Homo sapien
aggatcaggaaagtttgagaaaagc

SEQ ID NO: 2891173 - DNA, 25 bp, Homo sapien
gcaggatcaggaaagtttgagaaaa

SEQ ID NO: 2891174 - DNA, 25 bp, Homo sapien
atcggagctgctgcaactcccgcag

SEQ ID NO: 2891175 - DNA, 25 bp, Homo sapien
tcatcccatcggagctgctgcaact

SEQ ID NO: 2891176 - DNA, 25 bp, Homo sapien
ttcttccggaacaggtttagcttgc

SEQ ID NO: 2891177 - DNA, 25 bp, Homo sapien
agctctcatcccatcggagctgctg

SEQ ID NO: 2891178 - DNA, 25 bp, Homo sapien
ttatgtgtccataaccaaagggagc

SEQ ID NO: 2891179 - DNA, 25 bp, Homo sapien
atgtgtccataaccaaagggagcac

SEQ ID NO: 2891180 - DNA, 25 bp, Homo sapien
taaccaaagggagcacagtctgcac

SEQ ID NO: 2891181 - DNA, 25 bp, Homo sapien
cataaccaaagggagcacagtctgc

SEQ ID NO: 2891182 - DNA, 25 bp, Homo sapien
ggcggcaccactgccgtcatttcag

SEQ ID NO: 2891183 - DNA, 25 bp, Homo sapien
ttgaaagggtttgccctgagactcc

SEQ ID NO: 2891184 - DNA, 25 bp, Homo sapien
caggcggcaccactgccgtcatttc

SEQ ID NO: 2891185 - DNA, 25 bp, Homo sapien
aggcgctgcttgaaagggtttgccc

SEQ ID NO: 2891186 - DNA, 25 bp, Homo sapien
ataagacatcggctatctaagcgtg

SEQ ID NO: 2891187 - DNA, 25 bp, Homo sapien
gacatcggctatctaagcgtgtggg

SEQ ID NO: 2891188 - DNA, 25 bp, Homo sapien
cctctaataagacatcggctatcta

SEQ ID NO: 2891189 - DNA, 25 bp, Homo sapien
atcggctatctaagcgtgtgggtgc

SEQ ID NO: 2891190 - DNA, 25 bp, Homo sapien
aaacaagtagactgacttggacact

SEQ ID NO: 2891191 - DNA, 25 bp, Homo sapien
acaagtagactgacttggacactcc

SEQ ID NO: 2891192 - DNA, 25 bp, Homo sapien
ccaccacaccacgcctgtcctagca

SEQ ID NO: 2891193 - DNA, 25 bp, Homo sapien
caccacaccacgcctgtcctagcag

SEQ ID NO: 2891194 - DNA, 25 bp, Homo sapien
gctttctaagctttgtgaagagtgg

SEQ ID NO: 2891195 - DNA, 25 bp, Homo sapien
taagctttgtgaagagtgggttgac

SEQ ID NO: 2891196 - DNA, 25 bp, Homo sapien
cggccgctttctaagctttgtgaag

SEQ ID NO: 2891197 - DNA, 25 bp, Homo sapien
ccggccgctttctaagctttgtgaa

SEQ ID NO: 2891198 - DNA, 25 bp, Homo sapien
ttgcccagaagccatcgtgtcgcta

SEQ ID NO: 2891199 - DNA, 25 bp, Homo sapien
agaagccatcgtgtcgctagtcggg

SEQ ID NO: 2891200 - DNA, 25 bp, Homo sapien
gctgtattgcccagaagccatcgtg

SEQ ID NO: 2891201 - DNA, 25 bp, Homo sapien
gcccagaagccatcgtgtcgctagt

SEQ ID NO: 2891202 - DNA, 25 bp, Homo sapien
ggatacctgaaacacgaagttcatg

SEQ ID NO: 2891203 - DNA, 25 bp, Homo sapien
tcagcggatacctgaaacacgaagt

SEQ ID NO: 2891204 - DNA, 25 bp, Homo sapien
gcggatacctgaaacacgaagttca

SEQ ID NO: 2891205 - DNA, 25 bp, Homo sapien
cagcggatacctgaaacacgaagtt

SEQ ID NO: 2891206 - DNA, 25 bp, Homo sapien
tggcctctcattagaggcagacatc

SEQ ID NO: 2891207 - DNA, 25 bp, Homo sapien
caaacctggcgaaaatcatctggcc

SEQ ID NO: 2891208 - DNA, 25 bp, Homo sapien
tatttgctggtatgagaagggcacc

SEQ ID NO: 2891209 - DNA, 25 bp, Homo sapien
ggcagctggccggtattacaccatt

SEQ ID NO: 2891210 - DNA, 25 bp, Homo sapien
cctttggacgagctgtacgaggtgc

SEQ ID NO: 2891211 - DNA, 25 bp, Homo sapien
ggtgtgggcacctccgacggctcca

SEQ ID NO: 2891212 - DNA, 25 bp, Homo sapien
aatgttcttgtgaatgcacccttga

SEQ ID NO: 2891213 - DNA, 25 bp, Homo sapien
tgttcttgtgaatgcacccttgaga

SEQ ID NO: 2891214 - DNA, 25 bp, Homo sapien
gtgtgggcacctccgacggctccag

SEQ ID NO: 2891215 - DNA, 25 bp, Homo sapien
agccccgcttccaggatcgccctgt

SEQ ID NO: 2891216 - DNA, 25 bp, Homo sapien
cgcttccaggatcgccctgtcccgg

SEQ ID NO: 2891217 - DNA, 25 bp, Homo sapien
gaagccccgcttccaggatcgccct

SEQ ID NO: 2891218 - DNA, 25 bp, Homo sapien
tccgaagccccgcttccaggatcgc

SEQ ID NO: 2891219 - DNA, 25 bp, Homo sapien
tttctttgtcagatcttgcgttcat

SEQ ID NO: 2891220 - DNA, 25 bp, Homo sapien
ttggttctggtgtggaacaacagct

SEQ ID NO: 2891221 - DNA, 25 bp, Homo sapien
gtcagatcttgcgttcatttggttc

SEQ ID NO: 2891222 - DNA, 25 bp, Homo sapien
agatcttgcgttcatttggttctgg

SEQ ID NO: 2891223 - DNA, 25 bp, Homo sapien
catccctggttaggacttgctgtgg

SEQ ID NO: 2891224 - DNA, 25 bp, Homo sapien
gaagccaaccttccttaatcaccca

SEQ ID NO: 2891225 - DNA, 25 bp, Homo sapien
ggttaggacttgctgtggattctca

SEQ ID NO: 2891226 - DNA, 25 bp, Homo sapien
ccagacccatccctggttaggactt

SEQ ID NO: 2891227 - DNA, 25 bp, Homo sapien
cctgcgtcaactgcactgtggcctg

SEQ ID NO: 2891228 - DNA, 25 bp, Homo sapien
ctgccctgcgtcaactgcactgtgg

SEQ ID NO: 2891229 - DNA, 25 bp, Homo sapien
gttctggacacactatgctccactt

SEQ ID NO: 2891230 - DNA, 25 bp, Homo sapien
ccaccagttctggacacactatgct

SEQ ID NO: 2891231 - DNA, 25 bp, Homo sapien
aagttgaccatttcatgcaccttca

SEQ ID NO: 2891232 - DNA, 25 bp, Homo sapien
gttgaccatttcatgcaccttcaga

SEQ ID NO: 2891233 - DNA, 25 bp, Homo sapien
agttgaccatttcatgcaccttcag

SEQ ID NO: 2891234 - DNA, 25 bp, Homo sapien
aaagttgaccatttcatgcaccttc

SEQ ID NO: 2891235 - DNA, 25 bp, Homo sapien
taataacagtgcatgggtaccaggc

SEQ ID NO: 2891236 - DNA, 25 bp, Homo sapien
ggttaagtctccctatgtctgcagg

SEQ ID NO: 2891237 - DNA, 25 bp, Homo sapien
gttagaagaacctactgtcagtgcc

SEQ ID NO: 2891238 - DNA, 25 bp, Homo sapien
gcaggagccgctacagctaactata

SEQ ID NO: 2891239 - DNA, 25 bp, Homo sapien
acttgttctgattatacttagtcac

SEQ ID NO: 2891240 - DNA, 25 bp, Homo sapien
aggctgagtacagtggcataatcac

SEQ ID NO: 2891241 - DNA, 25 bp, Homo sapien
ggcacaagtgatcctcccacctcag

SEQ ID NO: 2891242 - DNA, 25 bp, Homo sapien
agcttactgcagcctcaacctcctg

SEQ ID NO: 2891243 - DNA, 25 bp, Homo sapien
tgttgttgttgttgtatttttggta

SEQ ID NO: 2891244 - DNA, 25 bp, Homo sapien
tcagcaggtagctgtgatccactgc

SEQ ID NO: 2891245 - DNA, 25 bp, Homo sapien
gtgatccactgcaaaggacatcaaa

SEQ ID NO: 2891246 - DNA, 25 bp, Homo sapien
cactgcaaaggacatcaaaaagaaa

SEQ ID NO: 2891247 - DNA, 25 bp, Homo sapien
ctgtgatccactgcaaaggacatca

SEQ ID NO: 2891248 - DNA, 25 bp, Homo sapien
cataaggcttaaggcagcatcaggc

SEQ ID NO: 2891249 - DNA, 25 bp, Homo sapien
cctcataaggcttaaggcagcatca

SEQ ID NO: 2891250 - DNA, 25 bp, Homo sapien
tcataaggcttaaggcagcatcagg

SEQ ID NO: 2891251 - DNA, 25 bp, Homo sapien
acctcataaggcttaaggcagcatc

SEQ ID NO: 2891252 - DNA, 25 bp, Homo sapien
tcatgattctggcttgtctctctct

SEQ ID NO: 2891253 - DNA, 25 bp, Homo sapien
cagatcatgattctggcttgtctct

SEQ ID NO: 2891254 - DNA, 25 bp, Homo sapien
caacagatcatgattctggcttgtc

SEQ ID NO: 2891255 - DNA, 25 bp, Homo sapien
aagctcaacagatcatgattctggc

SEQ ID NO: 2891256 - DNA, 25 bp, Homo sapien
agatagaaattgttctctgtggcca

SEQ ID NO: 2891257 - DNA, 25 bp, Homo sapien
ggagatagaaattgttctctgtggc

SEQ ID NO: 2891258 - DNA, 25 bp, Homo sapien
gatagaaattgttctctgtggccat

SEQ ID NO: 2891259 - DNA, 25 bp, Homo sapien
ctggagatagaaattgttctctgtg

SEQ ID NO: 2891260 - DNA, 25 bp, Homo sapien
actcttctaataccagcgatttccc

SEQ ID NO: 2891261 - DNA, 25 bp, Homo sapien
tgcagaattatctcctgaatcctca

SEQ ID NO: 2891262 - DNA, 25 bp, Homo sapien
ccatctcagttctcaggaagttctg

SEQ ID NO: 2891263 - DNA, 25 bp, Homo sapien
taataccagcgatttcccccatctc

SEQ ID NO: 2891264 - DNA, 25 bp, Homo sapien
gcattgatgaagatggcaggcatgc

SEQ ID NO: 2891265 - DNA, 25 bp, Homo sapien
cccgatagtgttgggtggtggtaat

SEQ ID NO: 2891266 - DNA, 25 bp, Homo sapien
caggtcccccgatagtgttgggtgg

SEQ ID NO: 2891267 - DNA, 25 bp, Homo sapien
gaagatggcaggcatgcctctgccc

SEQ ID NO: 2891268 - DNA, 25 bp, Homo sapien
ccggtgagccgggcagaacagaacc

SEQ ID NO: 2891269 - DNA, 25 bp, Homo sapien
cgccggtgagccgggcagaacagaa

SEQ ID NO: 2891270 - DNA, 25 bp, Homo sapien
ggtgagccgggcagaacagaaccat

SEQ ID NO: 2891271 - DNA, 25 bp, Homo sapien
tgagccgggcagaacagaaccatat

SEQ ID NO: 2891272 - DNA, 25 bp, Homo sapien
ttatctgtctggtcgagtcactctg

SEQ ID NO: 2891273 - DNA, 25 bp, Homo sapien
attgggcacccaggcatcatgggcc

SEQ ID NO: 2891274 - DNA, 25 bp, Homo sapien
tggtcgagtcactctgggctgactg

SEQ ID NO: 2891275 - DNA, 25 bp, Homo sapien
tgtctggtcgagtcactctgggctg

SEQ ID NO: 2891276 - DNA, 25 bp, Homo sapien
gaagctcgactttgctcttggtatg

SEQ ID NO: 2891277 - DNA, 25 bp, Homo sapien
tctatgggtcaactgaggattagtc

SEQ ID NO: 2891278 - DNA, 25 bp, Homo sapien
tccagtggccagagctagacacaat

SEQ ID NO: 2891279 - DNA, 25 bp, Homo sapien
acacaattcaaaacccaacattagg

SEQ ID NO: 2891280 - DNA, 25 bp, Homo sapien
tagacctggtgtgtcaatacaaggg

SEQ ID NO: 2891281 - DNA, 25 bp, Homo sapien
agacctggtgtgtcaatacaaggga

SEQ ID NO: 2891282 - DNA, 25 bp, Homo sapien
ggtagacctggtgtgtcaatacaag

SEQ ID NO: 2891283 - DNA, 25 bp, Homo sapien
gtggtagacctggtgtgtcaataca

SEQ ID NO: 2891284 - DNA, 25 bp, Homo sapien
tttgcttcccaatgtaggactccct

SEQ ID NO: 2891285 - DNA, 25 bp, Homo sapien
catttcttgtaggaccacaacaaac

SEQ ID NO: 2891286 - DNA, 25 bp, Homo sapien
tgttcttttgcttcccaatgtagga

SEQ ID NO: 2891287 - DNA, 25 bp, Homo sapien
gtcttttgcttatctgggaaatcct

SEQ ID NO: 2891288 - DNA, 25 bp, Homo sapien
acatagagtccctactgcagcacca

SEQ ID NO: 2891289 - DNA, 25 bp, Homo sapien
tagagtccctactgcagcaccacct

SEQ ID NO: 2891290 - DNA, 25 bp, Homo sapien
agtccctactgcagcaccacctagt

SEQ ID NO: 2891291 - DNA, 25 bp, Homo sapien
cacatagagtccctactgcagcacc

SEQ ID NO: 2891292 - DNA, 25 bp, Homo sapien
gagcagcctagggtgcctgagtcct

SEQ ID NO: 2891293 - DNA, 25 bp, Homo sapien
aaggagccaaggtacaacgtgggct

SEQ ID NO: 2891294 - DNA, 25 bp, Homo sapien
catcaaaggtccagaggcctaggaa

SEQ ID NO: 2891295 - DNA, 25 bp, Homo sapien
tggacccagggacccctgttgtgag

SEQ ID NO: 2891296 - DNA, 25 bp, Homo sapien
accaatgggacagagtagagaagct

SEQ ID NO: 2891297 - DNA, 25 bp, Homo sapien
atctaaggtctgaaaccataaacat

SEQ ID NO: 2891298 - DNA, 25 bp, Homo sapien
catgaccaatgggacagagtagaga

SEQ ID NO: 2891299 - DNA, 25 bp, Homo sapien
gcacatgaccaatgggacagagtag

SEQ ID NO: 2891300 - DNA, 25 bp, Homo sapien
tgcgagtcgatgatgctcgattgcg

SEQ ID NO: 2891301 - DNA, 25 bp, Homo sapien
ccattttgttcaccctgcgagtcga

SEQ ID NO: 2891302 - DNA, 25 bp, Homo sapien
ccttggtggattgtaacttcatctg

SEQ ID NO: 2891303 - DNA, 25 bp, Homo sapien
tctctgtagaggcactttcatttgc

SEQ ID NO: 2891304 - DNA, 25 bp, Homo sapien
taatgagctccagattgggtcaaag

SEQ ID NO: 2891305 - DNA, 25 bp, Homo sapien
catgttttaatgagctccagattgg

SEQ ID NO: 2891306 - DNA, 25 bp, Homo sapien
caaagcaatggttgaaagtacaggt

SEQ ID NO: 2891307 - DNA, 25 bp, Homo sapien
acacatgttttaatgagctccagat

SEQ ID NO: 2891308 - DNA, 25 bp, Homo sapien
aacaacacccagctttcaacggcag

SEQ ID NO: 2891309 - DNA, 25 bp, Homo sapien
ttgaacaacacccagctttcaacgg

SEQ ID NO: 2891310 - DNA, 25 bp, Homo sapien
gagaaactttgaacaacacccagct

SEQ ID NO: 2891311 - DNA, 25 bp, Homo sapien
agaaactttgaacaacacccagctt

SEQ ID NO: 2891312 - DNA, 25 bp, Homo sapien
tggagcggtcgattggtcatgaact

SEQ ID NO: 2891313 - DNA, 25 bp, Homo sapien
aacttcctggtccaggtagttactg

SEQ ID NO: 2891314 - DNA, 25 bp, Homo sapien
catttgtttcctctggagcggtcga

SEQ ID NO: 2891315 - DNA, 25 bp, Homo sapien
cttcctggtccaggtagttactgtg

SEQ ID NO: 2891316 - DNA, 25 bp, Homo sapien
tttccttcttaagttgtccaagaga

SEQ ID NO: 2891317 - DNA, 25 bp, Homo sapien
ctttccttcttaagttgtccaagag

SEQ ID NO: 2891318 - DNA, 25 bp, Homo sapien
agttcagtgagtgtaggcaaaagaa

SEQ ID NO: 2891319 - DNA, 25 bp, Homo sapien
ccgctgcagacaaaatggatgagat

SEQ ID NO: 2891320 - DNA, 25 bp, Homo sapien
gaaactgtggtatacacacccagtg

SEQ ID NO: 2891321 - DNA, 25 bp, Homo sapien
aggaagaaactcctctccgctgcag

SEQ ID NO: 2891322 - DNA, 25 bp, Homo sapien
gaagtttcacattccgagacatttt

SEQ ID NO: 2891323 - DNA, 25 bp, Homo sapien
ggctgctcagcagaacagtcgaatt

SEQ ID NO: 2891324 - DNA, 25 bp, Homo sapien
tcagcagaacagtcgaatttcatga

SEQ ID NO: 2891325 - DNA, 25 bp, Homo sapien
gctcagcagaacagtcgaatttcat

SEQ ID NO: 2891326 - DNA, 25 bp, Homo sapien
ctgctcagcagaacagtcgaatttc

SEQ ID NO: 2891327 - DNA, 25 bp, Homo sapien
tctcctcctgggactctcagaggat

SEQ ID NO: 2891328 - DNA, 25 bp, Homo sapien
cacacaggggtctgagaatttctcc

SEQ ID NO: 2891329 - DNA, 25 bp, Homo sapien
gaatttctcctcctgggactctcag

SEQ ID NO: 2891330 - DNA, 25 bp, Homo sapien
tcacacaggggtctgagaatttctc

SEQ ID NO: 2891331 - DNA, 25 bp, Homo sapien
tccccgtggtggataccaaatgcac

SEQ ID NO: 2891332 - DNA, 25 bp, Homo sapien
taggagagcccctaagggtcacagc

SEQ ID NO: 2891333 - DNA, 25 bp, Homo sapien
aggaaagatccctggacgctggcca

SEQ ID NO: 2891334 - DNA, 25 bp, Homo sapien
gccccagggctcatgtgtagagaga

SEQ ID NO: 2891335 - DNA, 25 bp, Homo sapien
cattgatggatgcataggttaattc

SEQ ID NO: 2891336 - DNA, 25 bp, Homo sapien
tgagccgccgcactcagcatttttt

SEQ ID NO: 2891337 - DNA, 25 bp, Homo sapien
ccatatcttgactatcatttgtgtg

SEQ ID NO: 2891338 - DNA, 25 bp, Homo sapien
taatttttgctcaccagaagatctg

SEQ ID NO: 2891339 - DNA, 25 bp, Homo sapien
gcctggctggacatgtaaatttgaa

SEQ ID NO: 2891340 - DNA, 25 bp, Homo sapien
gctagctgaaagcatggcagaccct

SEQ ID NO: 2891341 - DNA, 25 bp, Homo sapien
cagtgatacagaagtactattttgc

SEQ ID NO: 2891342 - DNA, 25 bp, Homo sapien
tgcagctatgaagtgaatggtttcc

SEQ ID NO: 2891343 - DNA, 25 bp, Homo sapien
tgagagcggaacctttgaggccgac

SEQ ID NO: 2891344 - DNA, 25 bp, Homo sapien
tcctcctgggcttccgtaggtcgga

SEQ ID NO: 2891345 - DNA, 25 bp, Homo sapien
tcacacttgccgacatgagagcgga

SEQ ID NO: 2891346 - DNA, 25 bp, Homo sapien
tcttccaccggcaaagctcagtgtt

SEQ ID NO: 2891347 - DNA, 25 bp, Homo sapien
atcagcaagaaccctacctttaagt

SEQ ID NO: 2891348 - DNA, 25 bp, Homo sapien
aatcagcaagaaccctacctttaag

SEQ ID NO: 2891349 - DNA, 25 bp, Homo sapien
ggacagccccatgatcttagtggat

SEQ ID NO: 2891350 - DNA, 25 bp, Homo sapien
tcccggtcctttgccaagagagcag

SEQ ID NO: 2891351 - DNA, 25 bp, Homo sapien
gatgagacccctgaattcctgcttg

SEQ ID NO: 2891352 - DNA, 25 bp, Homo sapien
tacagccttgcgagggtagagaact

SEQ ID NO: 2891353 - DNA, 25 bp, Homo sapien
ttggcttgccggaaccgccttcctg

SEQ ID NO: 2891354 - DNA, 25 bp, Homo sapien
attctgcaccgcgaagcctgagagg

SEQ ID NO: 2891355 - DNA, 25 bp, Homo sapien
gttgaaaccgttggcgggcgctggc

SEQ ID NO: 2891356 - DNA, 25 bp, Homo sapien
gctgggtggttcagaagcgaattct

SEQ ID NO: 2891357 - DNA, 25 bp, Homo sapien
cttcaaggccactcgcagcgatccg

SEQ ID NO: 2891358 - DNA, 25 bp, Homo sapien
tcaaggccactcgcagcgatccgct

SEQ ID NO: 2891359 - DNA, 25 bp, Homo sapien
ttcaaggccactcgcagcgatccgc

SEQ ID NO: 2891360 - DNA, 25 bp, Homo sapien
caaggccactcgcagcgatccgctg

SEQ ID NO: 2891361 - DNA, 25 bp, Homo sapien
caggacattcttatgcgctttaaag

SEQ ID NO: 2891362 - DNA, 25 bp, Homo sapien
aggccttggattcgctgctcatgca

SEQ ID NO: 2891363 - DNA, 25 bp, Homo sapien
gcagactccttttaccaccaacata

SEQ ID NO: 2891364 - DNA, 25 bp, Homo sapien
tggcagctgtgggtagcaacagggt

SEQ ID NO: 2891365 - DNA, 25 bp, Homo sapien
tgtatattgtcctggttaagatcta

SEQ ID NO: 2891366 - DNA, 25 bp, Homo sapien
agtccaggatctgccctatgccact

SEQ ID NO: 2891367 - DNA, 25 bp, Homo sapien
gatctgccctatgccactgacattt

SEQ ID NO: 2891368 - DNA, 25 bp, Homo sapien
gatctagatgagaagtgtacatgaa

SEQ ID NO: 2891369 - DNA, 25 bp, Homo sapien
catgccaggtggctgtactacagtg

SEQ ID NO: 2891370 - DNA, 25 bp, Homo sapien
ggcatgccaggtggctgtactacag

SEQ ID NO: 2891371 - DNA, 25 bp, Homo sapien
aaggcatgccaggtggctgtactac

SEQ ID NO: 2891372 - DNA, 25 bp, Homo sapien
aggcatgccaggtggctgtactaca

SEQ ID NO: 2891373 - DNA, 25 bp, Homo sapien
tgaggggggtagttttcactgataa

SEQ ID NO: 2891374 - DNA, 25 bp, Homo sapien
gggtagttttcactgataacacaag

SEQ ID NO: 2891375 - DNA, 25 bp, Homo sapien
gggggtagttttcactgataacaca

SEQ ID NO: 2891376 - DNA, 25 bp, Homo sapien
aatgaggggggtagttttcactgat

SEQ ID NO: 2891377 - DNA, 25 bp, Homo sapien
cacctgcggagtgatgacgattaac

SEQ ID NO: 2891378 - DNA, 25 bp, Homo sapien
tcagaatgactgacggcacaaggct

SEQ ID NO: 2891379 - DNA, 25 bp, Homo sapien
gaaggtaagtgctcgggagactcca

SEQ ID NO: 2891380 - DNA, 25 bp, Homo sapien
caaggctggctctctaccgtggtaa

SEQ ID NO: 2891381 - DNA, 25 bp, Homo sapien
aggcctctccgtctcactaatgcaa

SEQ ID NO: 2891382 - DNA, 25 bp, Homo sapien
tacttgctctgcgtatttctgtgac

SEQ ID NO: 2891383 - DNA, 25 bp, Homo sapien
cagatgaatggcctttttgagcctc

SEQ ID NO: 2891384 - DNA, 25 bp, Homo sapien
gcactttggctgctagctttctcta

SEQ ID NO: 2891385 - DNA, 25 bp, Homo sapien
gctccaagttgcttgggtgtttaaa

SEQ ID NO: 2891386 - DNA, 25 bp, Homo sapien
cgtattgtctctgggactgaagtgt

SEQ ID NO: 2891387 - DNA, 25 bp, Homo sapien
aaaggtttcccgcataattcacacg

SEQ ID NO: 2891388 - DNA, 25 bp, Homo sapien
tgtatgagaccgtttgtgaagctcc

SEQ ID NO: 2891389 - DNA, 25 bp, Homo sapien
caaacacagtgggtcgtcctgaagc

SEQ ID NO: 2891390 - DNA, 25 bp, Homo sapien
tggttcacaccacacaaggtatgag

SEQ ID NO: 2891391 - DNA, 25 bp, Homo sapien
tcctgccttggttctcacgagagaa

SEQ ID NO: 2891392 - DNA, 25 bp, Homo sapien
cagagcagacccacgttctggaagt

SEQ ID NO: 2891393 - DNA, 25 bp, Homo sapien
gagagaaatgtttcccacaaatgtt

SEQ ID NO: 2891394 - DNA, 25 bp, Homo sapien
agaaatgtttcccacaaatgttaca

SEQ ID NO: 2891395 - DNA, 25 bp, Homo sapien
ctgagagaaatgtttcccacaaatg

SEQ ID NO: 2891396 - DNA, 25 bp, Homo sapien
aatgtttcccacaaatgttacattc

SEQ ID NO: 2891397 - DNA, 25 bp, Homo sapien
agttacagacatcattagaggcttc

SEQ ID NO: 2891398 - DNA, 25 bp, Homo sapien
ttctgaagtctttaagttacagaca

SEQ ID NO: 2891399 - DNA, 25 bp, Homo sapien
cagacatcattagaggcttctctca

SEQ ID NO: 2891400 - DNA, 25 bp, Homo sapien
gcaggtttccaattattaacaataa

SEQ ID NO: 2891401 - DNA, 25 bp, Homo sapien
tcagctcagcttatcaaatccttcc

SEQ ID NO: 2891402 - DNA, 25 bp, Homo sapien
cctgagcatctgctggctgctgggt

SEQ ID NO: 2891403 - DNA, 25 bp, Homo sapien
cagcttatcaaatccttcctgagca

SEQ ID NO: 2891404 - DNA, 25 bp, Homo sapien
gctcagcttatcaaatccttcctga

SEQ ID NO: 2891405 - DNA, 25 bp, Homo sapien
taataatcggaatagcaccatctgc

SEQ ID NO: 2891406 - DNA, 25 bp, Homo sapien
tcagaaaagctgatcagttgcataa

SEQ ID NO: 2891407 - DNA, 25 bp, Homo sapien
gctgaactgttaaattagagccctc

SEQ ID NO: 2891408 - DNA, 25 bp, Homo sapien
ctgggttaattcttagcaatgttgc

SEQ ID NO: 2891409 - DNA, 25 bp, Homo sapien
agatcatcagatggatttctatgta

SEQ ID NO: 2891410 - DNA, 25 bp, Homo sapien
ttgcgaagaataacactgaaacgga

SEQ ID NO: 2891411 - DNA, 25 bp, Homo sapien
tgaaactagcaaggctttgcgaaga

SEQ ID NO: 2891412 - DNA, 25 bp, Homo sapien
ctgaaacggagatcatcagatggat

SEQ ID NO: 2891413 - DNA, 25 bp, Homo sapien
atcaggagaatcacagcagcctctc

SEQ ID NO: 2891414 - DNA, 25 bp, Homo sapien
gggcaaatcaggagaatcacagcag

SEQ ID NO: 2891415 - DNA, 25 bp, Homo sapien
ctttgtgcaaaagggcaaatcagga

SEQ ID NO: 2891416 - DNA, 25 bp, Homo sapien
agcagcctctcaggtgcagggccat

SEQ ID NO: 2891417 - DNA, 25 bp, Homo sapien
caccagaatgccgtcgtaagtgagt

SEQ ID NO: 2891418 - DNA, 25 bp, Homo sapien
gatctcgcagatgtatggtttttca

SEQ ID NO: 2891419 - DNA, 25 bp, Homo sapien
tgccgtcgtaagtgagtctgcaagt

SEQ ID NO: 2891420 - DNA, 25 bp, Homo sapien
agaatgccgtcgtaagtgagtctgc

SEQ ID NO: 2891421 - DNA, 25 bp, Homo sapien
cttcagaagacactgactaccaaag

SEQ ID NO: 2891422 - DNA, 25 bp, Homo sapien
gactaccaaagacactgagactaga

SEQ ID NO: 2891423 - DNA, 25 bp, Homo sapien
cttccacacggaagaacacgcccag

SEQ ID NO: 2891424 - DNA, 25 bp, Homo sapien
gagactagacatgctcccttccaca

SEQ ID NO: 2891425 - DNA, 25 bp, Homo sapien
cacaagatcagataccgtacggttc

SEQ ID NO: 2891426 - DNA, 25 bp, Homo sapien
tacagagcacaagatcagataccgt

SEQ ID NO: 2891427 - DNA, 25 bp, Homo sapien
gataccgtacggttcagcatcacta

SEQ ID NO: 2891428 - DNA, 25 bp, Homo sapien
ttttacagagcacaagatcagatac

SEQ ID NO: 2891429 - DNA, 25 bp, Homo sapien
ctggacgtcgccagaggctgcaaac

SEQ ID NO: 2891430 - DNA, 25 bp, Homo sapien
tgaataataatgtgacgctggacgt

SEQ ID NO: 2891431 - DNA, 25 bp, Homo sapien
ctcgaccacagatgtcacacaagtg

SEQ ID NO: 2891432 - DNA, 25 bp, Homo sapien
ccacagatgtcacacaagtgtggtt

SEQ ID NO: 2891433 - DNA, 25 bp, Homo sapien
ctagagagaccataacaggtgttaa

SEQ ID NO: 2891434 - DNA, 25 bp, Homo sapien
tagagagaccataacaggtgttaag

SEQ ID NO: 2891435 - DNA, 25 bp, Homo sapien
tcacaggtgaagactttatcagccg

SEQ ID NO: 2891436 - DNA, 25 bp, Homo sapien
gaagactttatcagccgtgtgtgtc

SEQ ID NO: 2891437 - DNA, 25 bp, Homo sapien
acactcatcacaggtgaagacttta

SEQ ID NO: 2891438 - DNA, 25 bp, Homo sapien
tatcagccgtgtgtgtctttttgtg

SEQ ID NO: 2891439 - DNA, 25 bp, Homo sapien
tctgtgctttactaacttcctttgc

SEQ ID NO: 2891440 - DNA, 25 bp, Homo sapien
gagcagctgtaaggccgctcccccg

SEQ ID NO: 2891441 - DNA, 25 bp, Homo sapien
aggcagagcagctgtaaggccgctc

SEQ ID NO: 2891442 - DNA, 25 bp, Homo sapien
gctcccccgtgtgccgaattctgtg

SEQ ID NO: 2891443 - DNA, 25 bp, Homo sapien
gacttgagaactacgaagcccagca

SEQ ID NO: 2891444 - DNA, 25 bp, Homo sapien
agcctgcgagcagtttgaaacaccg

SEQ ID NO: 2891445 - DNA, 25 bp, Homo sapien
taaatgtctagaacgggcaagtcca

SEQ ID NO: 2891446 - DNA, 25 bp, Homo sapien
gaaacaccgagaagctcagcatgtg

SEQ ID NO: 2891447 - DNA, 25 bp, Homo sapien
taacttacaataggagccgccagag

SEQ ID NO: 2891448 - DNA, 25 bp, Homo sapien
ccgcagagcgggtaaagcacttgtt

SEQ ID NO: 2891449 - DNA, 25 bp, Homo sapien
gagtttaaccgacactggcatcagc

SEQ ID NO: 2891450 - DNA, 25 bp, Homo sapien
cacatccgagtaagcataggcctga

SEQ ID NO: 2891451 - DNA, 25 bp, Homo sapien
tctggctagttagaaggcactgtca

SEQ ID NO: 2891452 - DNA, 25 bp, Homo sapien
tgagaacacgcctctaccgtggaga

SEQ ID NO: 2891453 - DNA, 25 bp, Homo sapien
gtagttgacacgatgcacacgcgct

SEQ ID NO: 2891454 - DNA, 25 bp, Homo sapien
tatgagccatcatcaggagggaagc

SEQ ID NO: 2891455 - DNA, 25 bp, Homo sapien
tagagctgctcacgagtattcgagg

SEQ ID NO: 2891456 - DNA, 25 bp, Homo sapien
tggatgggaaaacacgaaatgcacc

SEQ ID NO: 2891457 - DNA, 25 bp, Homo sapien
tcaccttgatattccagcgacagag

SEQ ID NO: 2891458 - DNA, 25 bp, Homo sapien
gggacaacagatgctcgctgagcca

SEQ ID NO: 2891459 - DNA, 25 bp, Homo sapien
agctgcaggcataccacccgagttt

SEQ ID NO: 2891460 - DNA, 25 bp, Homo sapien
tgtgctcaagctgtcttatctgtgt

SEQ ID NO: 2891461 - DNA, 25 bp, Homo sapien
gccgacttaggtcagaggccctctc

SEQ ID NO: 2891462 - DNA, 25 bp, Homo sapien
tctcagcatgcctaaagggaaagaa

SEQ ID NO: 2891463 - DNA, 25 bp, Homo sapien
aatgagaaggacgggaatcctgttc

SEQ ID NO: 2891464 - DNA, 25 bp, Homo sapien
agtgaatgagaaggacgggaatcct

SEQ ID NO: 2891465 - DNA, 25 bp, Homo sapien
cagtgaatgagaaggacgggaatcc

SEQ ID NO: 2891466 - DNA, 25 bp, Homo sapien
tgaatgagaaggacgggaatcctgt

SEQ ID NO: 2891467 - DNA, 25 bp, Homo sapien
gaatggcggaacacaaatcgcccga

SEQ ID NO: 2891468 - DNA, 25 bp, Homo sapien
gtagcacgcatctgggaaacaaggc

SEQ ID NO: 2891469 - DNA, 25 bp, Homo sapien
cagcacagtgttgaggaggacccta

SEQ ID NO: 2891470 - DNA, 25 bp, Homo sapien
tcttctgtcagccaaacgggcagat

SEQ ID NO: 2891471 - DNA, 25 bp, Homo sapien
gaacattcgcccagcactggcgtct

SEQ ID NO: 2891472 - DNA, 25 bp, Homo sapien
gcaggactgcagcaacgcagataag

SEQ ID NO: 2891473 - DNA, 25 bp, Homo sapien
cactcgacattctgcaggactgcag

SEQ ID NO: 2891474 - DNA, 25 bp, Homo sapien
gataaggcgctctcggaagaacatt

SEQ ID NO: 2891475 - DNA, 25 bp, Homo sapien
gcatccttcatggtgcctgctggaa

SEQ ID NO: 2891476 - DNA, 25 bp, Homo sapien
ggtcctgaagggtgttatccgcagc

SEQ ID NO: 2891477 - DNA, 25 bp, Homo sapien
tgcctgccgaaggagctgcaaaagg

SEQ ID NO: 2891478 - DNA, 25 bp, Homo sapien
gcaaaagggagcctccggtgactcg

SEQ ID NO: 2891479 - DNA, 25 bp, Homo sapien
aggctggatagcctggccaggagtt

SEQ ID NO: 2891480 - DNA, 25 bp, Homo sapien
gaggaggctggatagcctggccagg

SEQ ID NO: 2891481 - DNA, 25 bp, Homo sapien
aggaggaggctggatagcctggcca

SEQ ID NO: 2891482 - DNA, 25 bp, Homo sapien
gctggatagcctggccaggagtttt

SEQ ID NO: 2891483 - DNA, 25 bp, Homo sapien
gaagaacgcaccagaagtaaccaat

SEQ ID NO: 2891484 - DNA, 25 bp, Homo sapien
gcgagacgaagaacgcaccagaagt

SEQ ID NO: 2891485 - DNA, 25 bp, Homo sapien
gacgaagaacgcaccagaagtaacc

SEQ ID NO: 2891486 - DNA, 25 bp, Homo sapien
aacgcaccagaagtaaccaattcca

SEQ ID NO: 2891487 - DNA, 25 bp, Homo sapien
agaaggcaaaacccgctgggcacag

SEQ ID NO: 2891488 - DNA, 25 bp, Homo sapien
cagctgcttagccagtcgtttaggg

SEQ ID NO: 2891489 - DNA, 25 bp, Homo sapien
ccttgcaaatacattctgtagcagc

SEQ ID NO: 2891490 - DNA, 25 bp, Homo sapien
agaacgagtaatagcttttgccacc

SEQ ID NO: 2891491 - DNA, 25 bp, Homo sapien
ggtgcatacatcacagcaattggat

SEQ ID NO: 2891492 - DNA, 25 bp, Homo sapien
gctaccagtgaaagtaccaactcca

SEQ ID NO: 2891493 - DNA, 25 bp, Homo sapien
gaatgggctcagagtttccaacgtg

SEQ ID NO: 2891494 - DNA, 25 bp, Homo sapien
gattacatcagctaccctacaaggc

SEQ ID NO: 2891495 - DNA, 25 bp, Homo sapien
cttagagaataaggtgcttcgaaca

SEQ ID NO: 2891496 - DNA, 25 bp, Homo sapien
tccagagtctagagagttggagggc

SEQ ID NO: 2891497 - DNA, 25 bp, Homo sapien
aggtgcttcgaacatgttgacatcg

SEQ ID NO: 2891498 - DNA, 25 bp, Homo sapien
gggcggagttccactctcctgagat

SEQ ID NO: 2891499 - DNA, 25 bp, Homo sapien
ccatagaccgaactggattgggtgc

SEQ ID NO: 2891500 - DNA, 25 bp, Homo sapien
acagcggttgcagacgcgatcctca

SEQ ID NO: 2891501 - DNA, 25 bp, Homo sapien
tatgggctgggactcgtgccccaca

SEQ ID NO: 2891502 - DNA, 25 bp, Homo sapien
cgctctttccagtgcactgtttcta

SEQ ID NO: 2891503 - DNA, 25 bp, Homo sapien
gcaggcggcgtagcgatgacctaat

SEQ ID NO: 2891504 - DNA, 25 bp, Homo sapien
tgaaattagcacgtaacccctaggc

SEQ ID NO: 2891505 - DNA, 25 bp, Homo sapien
tggaatgcctccatccgtgcagctg

SEQ ID NO: 2891506 - DNA, 25 bp, Homo sapien
tgaaattcacagtctccccggagtg

SEQ ID NO: 2891507 - DNA, 25 bp, Homo sapien
ttcaaataatccaacctgtccaact

SEQ ID NO: 2891508 - DNA, 25 bp, Homo sapien
ttttcaaataatccaacctgtccaa

SEQ ID NO: 2891509 - DNA, 25 bp, Homo sapien
tttcctctcacaacccaggctgttt

SEQ ID NO: 2891510 - DNA, 25 bp, Homo sapien
tgttttcaaataatccaacctgtcc

SEQ ID NO: 2891511 - DNA, 25 bp, Homo sapien
aagatgctggcagctccaaattcct

SEQ ID NO: 2891512 - DNA, 25 bp, Homo sapien
tggcagctccaaattcctctggcct

SEQ ID NO: 2891513 - DNA, 25 bp, Homo sapien
caagatgctggcagctccaaattcc

SEQ ID NO: 2891514 - DNA, 25 bp, Homo sapien
ctccaaattcctctggcctgctcat

SEQ ID NO: 2891515 - DNA, 25 bp, Homo sapien
cctgtcctgtagccaaattctccat

SEQ ID NO: 2891516 - DNA, 25 bp, Homo sapien
tgggtgaagtcatccctgtttctcc

SEQ ID NO: 2891517 - DNA, 25 bp, Homo sapien
aaccctgtcctgtagccaaattctc

SEQ ID NO: 2891518 - DNA, 25 bp, Homo sapien
ctgggtgaagtcatccctgtttctc

SEQ ID NO: 2891519 - DNA, 25 bp, Homo sapien
tgggtccacttctcaatccacggga

SEQ ID NO: 2891520 - DNA, 25 bp, Homo sapien
acactgggatcagccggcacactga

SEQ ID NO: 2891521 - DNA, 25 bp, Homo sapien
acgctgggaccagccggcacactgg

SEQ ID NO: 2891522 - DNA, 25 bp, Homo sapien
ggcacactgacacagaatcgggaga

SEQ ID NO: 2891523 - DNA, 25 bp, Homo sapien
ttcctctgctgattgtatctgggcc

SEQ ID NO: 2891524 - DNA, 25 bp, Homo sapien
gctagctggccttttgtgctgtctt

SEQ ID NO: 2891525 - DNA, 25 bp, Homo sapien
cagagatggacggtgaacaatcatg

SEQ ID NO: 2891526 - DNA, 25 bp, Homo sapien
tgtcccagagatggacggtgaacaa

SEQ ID NO: 2891527 - DNA, 25 bp, Homo sapien
ccacttcagaaatctgcccaggcat

SEQ ID NO: 2891528 - DNA, 25 bp, Homo sapien
cttgctccacttcagaaatctgccc

SEQ ID NO: 2891529 - DNA, 25 bp, Homo sapien
tgctccacttcagaaatctgcccag

SEQ ID NO: 2891530 - DNA, 25 bp, Homo sapien
gctccacttcagaaatctgcccagg

SEQ ID NO: 2891531 - DNA, 25 bp, Homo sapien
ttctaggcaaagagcgctcagtgcg

SEQ ID NO: 2891532 - DNA, 25 bp, Homo sapien
gcctgcaggactcacggatgaaaga

SEQ ID NO: 2891533 - DNA, 25 bp, Homo sapien
ggaggcatcacccaaattcgatact

SEQ ID NO: 2891534 - DNA, 25 bp, Homo sapien
caaattcgatactttttcacaccct

SEQ ID NO: 2891535 - DNA, 25 bp, Homo sapien
gagcgaacgattgggctccacggcc

SEQ ID NO: 2891536 - DNA, 25 bp, Homo sapien
gtgtggccgcgcctccaccttgacg

SEQ ID NO: 2891537 - DNA, 25 bp, Homo sapien
gcggggaccgtagggacagagcgac

SEQ ID NO: 2891538 - DNA, 25 bp, Homo sapien
ggtgcgcgcgggtgggtgcgcgcgt

SEQ ID NO: 2891539 - DNA, 25 bp, Homo sapien
gtcagctgagcgctccgagctccgc

SEQ ID NO: 2891540 - DNA, 25 bp, Homo sapien
ggtcagctgagcgctccgagctccg

SEQ ID NO: 2891541 - DNA, 25 bp, Homo sapien
tcagctgagcgctccgagctccgcg

SEQ ID NO: 2891542 - DNA, 25 bp, Homo sapien
aggtcagctgagcgctccgagctcc

SEQ ID NO: 2891543 - DNA, 25 bp, Homo sapien
gttccgggagctccgaggctgcagc

SEQ ID NO: 2891544 - DNA, 25 bp, Homo sapien
cgttccgggagctccgaggctgcag

SEQ ID NO: 2891545 - DNA, 25 bp, Homo sapien
ctgcttggtgcccttctctgcgaaa

SEQ ID NO: 2891546 - DNA, 25 bp, Homo sapien
tgcgaaattgttccccaacttcacc

SEQ ID NO: 2891547 - DNA, 25 bp, Homo sapien
gctgattgacatcgaggggcgtcat

SEQ ID NO: 2891548 - DNA, 25 bp, Homo sapien
ggaatggtgtcgaagccatcctcca

SEQ ID NO: 2891549 - DNA, 25 bp, Homo sapien
cgaaggaatcttgccccaccgcgtt

SEQ ID NO: 2891550 - DNA, 25 bp, Homo sapien
gggccctctcggatgaggctcccag

SEQ ID NO: 2891551 - DNA, 25 bp, Homo sapien
gccagggccctctcggatgaggctc

SEQ ID NO: 2891552 - DNA, 25 bp, Homo sapien
caggaaaaacgcgaaggaatcttgc

SEQ ID NO: 2891553 - DNA, 25 bp, Homo sapien
cccgctaactggacgagtctgatgc

SEQ ID NO: 2891554 - DNA, 25 bp, Homo sapien
caggccccgctaactggacgagtct

SEQ ID NO: 2891555 - DNA, 25 bp, Homo sapien
gccccgctaactggacgagtctgat

SEQ ID NO: 2891556 - DNA, 25 bp, Homo sapien
ggccaggccccgctaactggacgag

SEQ ID NO: 2891557 - DNA, 25 bp, Homo sapien
catactcggtcttagttttcacgac

SEQ ID NO: 2891558 - DNA, 25 bp, Homo sapien
tcggtgacaccctccgtgatgctga

SEQ ID NO: 2891559 - DNA, 25 bp, Homo sapien
gaggacgtgctttccctttcttgcg

SEQ ID NO: 2891560 - DNA, 25 bp, Homo sapien
tcttgcggtcaggttcatactcggt

SEQ ID NO: 2891561 - DNA, 25 bp, Homo sapien
tgcatacatcgccttctcagacagc

SEQ ID NO: 2891562 - DNA, 25 bp, Homo sapien
ctattgggatgagcataatcaccca

SEQ ID NO: 2891563 - DNA, 25 bp, Homo sapien
ttgggatgagcataatcacccatgg

SEQ ID NO: 2891564 - DNA, 25 bp, Homo sapien
gatgagcataatcacccatggtctt

SEQ ID NO: 2891565 - DNA, 25 bp, Homo sapien
ttagtccagtatagtcatgtactga

SEQ ID NO: 2891566 - DNA, 25 bp, Homo sapien
tagtccagtatagtcatgtactgag

SEQ ID NO: 2891567 - DNA, 25 bp, Homo sapien
gtccagtatagtcatgtactgagca

SEQ ID NO: 2891568 - DNA, 25 bp, Homo sapien
ccagtatagtcatgtactgagcacc

SEQ ID NO: 2891569 - DNA, 25 bp, Homo sapien
aaagaaggcgcagccgtctgaggca

SEQ ID NO: 2891570 - DNA, 25 bp, Homo sapien
tgatagccgcaagccctgatggtgc

SEQ ID NO: 2891571 - DNA, 25 bp, Homo sapien
ggctgcctggcgatgatagccgcaa

SEQ ID NO: 2891572 - DNA, 25 bp, Homo sapien
ctggcgatgatagccgcaagccctg

SEQ ID NO: 2891573 - DNA, 25 bp, Homo sapien
gacagctgcaagacagctggcttgg

SEQ ID NO: 2891574 - DNA, 25 bp, Homo sapien
agggggacagcctgccccggctgga

SEQ ID NO: 2891575 - DNA, 25 bp, Homo sapien
gctgcaagacagctggcttggaggg

SEQ ID NO: 2891576 - DNA, 25 bp, Homo sapien
gcctgccccggctggagggcacggg

SEQ ID NO: 2891577 - DNA, 25 bp, Homo sapien
cttgaggacgaacccatcggggcag

SEQ ID NO: 2891578 - DNA, 25 bp, Homo sapien
tacaccttgtagacaaccaggaaga

SEQ ID NO: 2891579 - DNA, 25 bp, Homo sapien
ccaggaagacgacgcaggtgaggaa

SEQ ID NO: 2891580 - DNA, 25 bp, Homo sapien
gggcaggcgcggtcatacttgtaca

SEQ ID NO: 2891581 - DNA, 25 bp, Homo sapien
ctgctgctctaaggcctgtccgtgg

SEQ ID NO: 2891582 - DNA, 25 bp, Homo sapien
cacagggacactcctgacactggcc

SEQ ID NO: 2891583 - DNA, 25 bp, Homo sapien
ctgctctaaggcctgtccgtgggcc

SEQ ID NO: 2891584 - DNA, 25 bp, Homo sapien
tccacagggacactcctgacactgg

SEQ ID NO: 2891585 - DNA, 25 bp, Homo sapien
ctgcttgttgtaaagccctggtgtc

SEQ ID NO: 2891586 - DNA, 25 bp, Homo sapien
aacagactcaaactctcccagcccc

SEQ ID NO: 2891587 - DNA, 25 bp, Homo sapien
cctccgcttctgcttgttgtaaagc

SEQ ID NO: 2891588 - DNA, 25 bp, Homo sapien
tgttgtaaagccctggtgtcctctc

SEQ ID NO: 2891589 - DNA, 25 bp, Homo sapien
tgccctcgttccctgaagcccgcac

SEQ ID NO: 2891590 - DNA, 25 bp, Homo sapien
ttctgacagaactgacatccagggc

SEQ ID NO: 2891591 - DNA, 25 bp, Homo sapien
tcttgctccgcgtagtagctctcca

SEQ ID NO: 2891592 - DNA, 25 bp, Homo sapien
gatacggagcgcgtgatgctctgct

SEQ ID NO: 2891593 - DNA, 25 bp, Homo sapien
tgcttggccaggttgtagtggttta

SEQ ID NO: 2891594 - DNA, 25 bp, Homo sapien
ctgacttctcagccgcttcagtctc

SEQ ID NO: 2891595 - DNA, 25 bp, Homo sapien
aagctgacttctcagccgcttcagt

SEQ ID NO: 2891596 - DNA, 25 bp, Homo sapien
ctaagctgacttctcagccgcttca

SEQ ID NO: 2891597 - DNA, 25 bp, Homo sapien
gctgacttctcagccgcttcagtct

SEQ ID NO: 2891598 - DNA, 25 bp, Homo sapien
aacagaagcaattgcaccgtaaatg

SEQ ID NO: 2891599 - DNA, 25 bp, Homo sapien
gcaccgtaaatgagtaacctctaaa

SEQ ID NO: 2891600 - DNA, 25 bp, Homo sapien
tgcaagtgacacattgtaaggaact

SEQ ID NO: 2891601 - DNA, 25 bp, Homo sapien
tatttaatgaaatgtccctcaaagt

SEQ ID NO: 2891602 - DNA, 25 bp, Homo sapien
tttaggcaatgctgaaatgcacttg

SEQ ID NO: 2891603 - DNA, 25 bp, Homo sapien
ttaacatgaaaagtggtgtcagagc

SEQ ID NO: 2891604 - DNA, 25 bp, Homo sapien
ttaggcaatgctgaaatgcacttga

SEQ ID NO: 2891605 - DNA, 25 bp, Homo sapien
tgaagatcttaacatgaaaagtggt

SEQ ID NO: 2891606 - DNA, 25 bp, Homo sapien
tatggaggaaggtttgcagacagca

SEQ ID NO: 2891607 - DNA, 25 bp, Homo sapien
actgttacccgctgatggccgagga

SEQ ID NO: 2891608 - DNA, 25 bp, Homo sapien
ttactacagtgcaccttggcagcag

SEQ ID NO: 2891609 - DNA, 25 bp, Homo sapien
acagcagggtcggttcagaaaatca

SEQ ID NO: 2891610 - DNA, 25 bp, Homo sapien
tgtcattttgtttgcacggtgccac

SEQ ID NO: 2891611 - DNA, 25 bp, Homo sapien
gagggagtagtcaatccacaccgag

SEQ ID NO: 2891612 - DNA, 25 bp, Homo sapien
agggagagttctgcacctcacgggc

SEQ ID NO: 2891613 - DNA, 25 bp, Homo sapien
cagacagactacctgcagggagagt

SEQ ID NO: 2891614 - DNA, 25 bp, Homo sapien
tagaagaaatgtctgcgaatgtctt

SEQ ID NO: 2891615 - DNA, 25 bp, Homo sapien
tacacacttagttcatctaactggc

SEQ ID NO: 2891616 - DNA, 25 bp, Homo sapien
gtacaccagaaacaacacattcaat

SEQ ID NO: 2891617 - DNA, 25 bp, Homo sapien
actgaaacttttgacacgtacacca

SEQ ID NO: 2891618 - DNA, 25 bp, Homo sapien
ttctgtcttagaagcacatttcagg

SEQ ID NO: 2891619 - DNA, 25 bp, Homo sapien
tagaagcacatttcaggaaacaaga

SEQ ID NO: 2891620 - DNA, 25 bp, Homo sapien
tgaccacggtcaccatgcctgttca

SEQ ID NO: 2891621 - DNA, 25 bp, Homo sapien
acaagagtggcgctgaccacggtca

SEQ ID NO: 2891622 - DNA, 25 bp, Homo sapien
tacctggaaatacaggctcggcctc

SEQ ID NO: 2891623 - DNA, 25 bp, Homo sapien
aaggtcacggtctgtgtctccagac

SEQ ID NO: 2891624 - DNA, 25 bp, Homo sapien
actgtgcgcacacgggcttcacttg

SEQ ID NO: 2891625 - DNA, 25 bp, Homo sapien
ttcagatgcgcagggaagctttggc

SEQ ID NO: 2891626 - DNA, 25 bp, Homo sapien
ggaactgtaaacaggaacacctatg

SEQ ID NO: 2891627 - DNA, 25 bp, Homo sapien
ttgacaaattcagtggcagcccagc

SEQ ID NO: 2891628 - DNA, 25 bp, Homo sapien
aagaacgggcctgcttctctcgtgc

SEQ ID NO: 2891629 - DNA, 25 bp, Homo sapien
ggcattactcctccaaagactgctg

SEQ ID NO: 2891630 - DNA, 25 bp, Homo sapien
gagctgcgtgtgttcatgagaccca

SEQ ID NO: 2891631 - DNA, 25 bp, Homo sapien
tcccagcagcgggtgttagtctcgc

SEQ ID NO: 2891632 - DNA, 25 bp, Homo sapien
caaaattgtgtgaccgcggagctgc

SEQ ID NO: 2891633 - DNA, 25 bp, Homo sapien
caaggaaggcaacgaagacataaga

SEQ ID NO: 2891634 - DNA, 25 bp, Homo sapien
gcagttgacttcagcttgggccagc

SEQ ID NO: 2891635 - DNA, 25 bp, Homo sapien
ccctgccactgtgatactgttggga

SEQ ID NO: 2891636 - DNA, 25 bp, Homo sapien
cctgtcgctgctttgtgctggaaca

SEQ ID NO: 2891637 - DNA, 25 bp, Homo sapien
tcagatccgacagaacactccgttg

SEQ ID NO: 2891638 - DNA, 25 bp, Homo sapien
gatgttgatattgcccacgtggagg

SEQ ID NO: 2891639 - DNA, 25 bp, Homo sapien
ttatgcactacctggcacacacgtg

SEQ ID NO: 2891640 - DNA, 25 bp, Homo sapien
gaacaccgtgagtcatacagatctg

SEQ ID NO: 2891641 - DNA, 25 bp, Homo sapien
cacacgtggcgggtgctctgtaagt

SEQ ID NO: 2891642 - DNA, 25 bp, Homo sapien
attgcaagaatgtgttgaagtccag

SEQ ID NO: 2891643 - DNA, 25 bp, Homo sapien
acttcctctgattcacaactgaaga

SEQ ID NO: 2891644 - DNA, 25 bp, Homo sapien
cattgcaagaatgtgttgaagtcca

SEQ ID NO: 2891645 - DNA, 25 bp, Homo sapien
cccattgcaagaatgtgttgaagtc

SEQ ID NO: 2891646 - DNA, 25 bp, Homo sapien
gcctgcgagtctagcattttcactg

SEQ ID NO: 2891647 - DNA, 25 bp, Homo sapien
tgcctgcgagtctagcattttcact

SEQ ID NO: 2891648 - DNA, 25 bp, Homo sapien
cctgcgagtctagcattttcactgt

SEQ ID NO: 2891649 - DNA, 25 bp, Homo sapien
ggtgactccaaagtcagagaaccag

SEQ ID NO: 2891650 - DNA, 25 bp, Homo sapien
actccaaagtcagagaaccagctgg

SEQ ID NO: 2891651 - DNA, 25 bp, Homo sapien
gtgctgaccatccaccactcgtact

SEQ ID NO: 2891652 - DNA, 25 bp, Homo sapien
tcacccggtgactccaaagtcagag

SEQ ID NO: 2891653 - DNA, 25 bp, Homo sapien
accactggcgttgctatttaagaaa

SEQ ID NO: 2891654 - DNA, 25 bp, Homo sapien
taccactggcgttgctatttaagaa

SEQ ID NO: 2891655 - DNA, 25 bp, Homo sapien
ttaccactggcgttgctatttaaga

SEQ ID NO: 2891656 - DNA, 25 bp, Homo sapien
cttaccactggcgttgctatttaag

SEQ ID NO: 2891657 - DNA, 25 bp, Homo sapien
gaggttgttctcataaccaagacac

SEQ ID NO: 2891658 - DNA, 25 bp, Homo sapien
agctgtgaggttgttctcataacca

SEQ ID NO: 2891659 - DNA, 25 bp, Homo sapien
gagcccttaaagatgtagaagctgg

SEQ ID NO: 2891660 - DNA, 25 bp, Homo sapien
tggaggacttgatggcgggttggct

SEQ ID NO: 2891661 - DNA, 25 bp, Homo sapien
cgatcttggcgctccaactgaacat

SEQ ID NO: 2891662 - DNA, 25 bp, Homo sapien
ctggcttcttgccattgggcttcac

SEQ ID NO: 2891663 - DNA, 25 bp, Homo sapien
tggcttcttgccattgggcttcacg

SEQ ID NO: 2891664 - DNA, 25 bp, Homo sapien
ggcttcacgatcttggcgctccaac

SEQ ID NO: 2891665 - DNA, 25 bp, Homo sapien
tgagccttgaggtccgagttctttt

SEQ ID NO: 2891666 - DNA, 25 bp, Homo sapien
tgccataatattcagctctgtgagc

SEQ ID NO: 2891667 - DNA, 25 bp, Homo sapien
ggctgccataatattcagctctgtg

SEQ ID NO: 2891668 - DNA, 25 bp, Homo sapien
cttgaggtccgagttcttttccagc

SEQ ID NO: 2891669 - DNA, 25 bp, Homo sapien
agataatatgctttccactgaactt

SEQ ID NO: 2891670 - DNA, 25 bp, Homo sapien
cacagctgtcagagtgcactcctgg

SEQ ID NO: 2891671 - DNA, 25 bp, Homo sapien
cagcaaacaaagctcgggagctgtt

SEQ ID NO: 2891672 - DNA, 25 bp, Homo sapien
gattttgaagtatgtggttgatgtc

SEQ ID NO: 2891673 - DNA, 25 bp, Homo sapien
tactttcaaggtgccgcttgataca

SEQ ID NO: 2891674 - DNA, 25 bp, Homo sapien
gccgcttgatacagtgaagccatga

SEQ ID NO: 2891675 - DNA, 25 bp, Homo sapien
ccatgatatacaagtcctggccatg

SEQ ID NO: 2891676 - DNA, 25 bp, Homo sapien
aaccatttaacagatgaaagtacat

SEQ ID NO: 2891677 - DNA, 25 bp, Homo sapien
agatataccccagggaatttgagaa

SEQ ID NO: 2891678 - DNA, 25 bp, Homo sapien
agttattgaagatataccccaggga

SEQ ID NO: 2891679 - DNA, 25 bp, Homo sapien
ggaatttgagaaaccatttaacaga

SEQ ID NO: 2891680 - DNA, 25 bp, Homo sapien
tgtgtggtcaattgtaaaggcttca

SEQ ID NO: 2891681 - DNA, 25 bp, Homo sapien
tatagccagccatgcagatcggcct

SEQ ID NO: 2891682 - DNA, 25 bp, Homo sapien
gtctgtagtttacttccctataagc

SEQ ID NO: 2891683 - DNA, 25 bp, Homo sapien
gcatttgagtgcataagctgaccta

SEQ ID NO: 2891684 - DNA, 25 bp, Homo sapien
caattgtgagcctggaatgtcctgc

SEQ ID NO: 2891685 - DNA, 25 bp, Homo sapien
ccatgttgcggtcttttgtgtaccc

SEQ ID NO: 2891686 - DNA, 25 bp, Homo sapien
tttaaaattgcttgggaactggagc

SEQ ID NO: 2891687 - DNA, 25 bp, Homo sapien
aagggcctaatgctgacttttggaa

SEQ ID NO: 2891688 - DNA, 25 bp, Homo sapien
agagagctcctccaccctgactgcc

SEQ ID NO: 2891689 - DNA, 25 bp, Homo sapien
gagagctcctccaccctgactgcca

SEQ ID NO: 2891690 - DNA, 25 bp, Homo sapien
agagctcctccaccctgactgccat

SEQ ID NO: 2891691 - DNA, 25 bp, Homo sapien
cagagagctcctccaccctgactgc

SEQ ID NO: 2891692 - DNA, 25 bp, Homo sapien
gactcaactgcgataaaatcagcat

SEQ ID NO: 2891693 - DNA, 25 bp, Homo sapien
cacatgaagtcgtatattgggagga

SEQ ID NO: 2891694 - DNA, 25 bp, Homo sapien
taaaatcagcatcttccatggtgca

SEQ ID NO: 2891695 - DNA, 25 bp, Homo sapien
tatttgcttctatactttcccgttg

SEQ ID NO: 2891696 - DNA, 25 bp, Homo sapien
gagttcttgcagtcaaaggtcaagg

SEQ ID NO: 2891697 - DNA, 25 bp, Homo sapien
tatcctgctcaaggtgagttcttgc

SEQ ID NO: 2891698 - DNA, 25 bp, Homo sapien
aaaccgcccggtctcagtgagggag

SEQ ID NO: 2891699 - DNA, 25 bp, Homo sapien
tttgctgggagaaaccgatgcccga

SEQ ID NO: 2891700 - DNA, 25 bp, Homo sapien
ttattgcatcccgagggtcaccgtc

SEQ ID NO: 2891701 - DNA, 25 bp, Homo sapien
atttattgcatcccgagggtcaccg

SEQ ID NO: 2891702 - DNA, 25 bp, Homo sapien
tattgcatcccgagggtcaccgtcc

SEQ ID NO: 2891703 - DNA, 25 bp, Homo sapien
attgcatcccgagggtcaccgtcca

SEQ ID NO: 2891704 - DNA, 25 bp, Homo sapien
cacagcacgcgtcagctcacttaat

SEQ ID NO: 2891705 - DNA, 25 bp, Homo sapien
ttcacagtaaaccccgaggaggatg

SEQ ID NO: 2891706 - DNA, 25 bp, Homo sapien
atcaaaacacagcacgcgtcagctc

SEQ ID NO: 2891707 - DNA, 25 bp, Homo sapien
tcacagtaaaccccgaggaggatgc

SEQ ID NO: 2891708 - DNA, 25 bp, Homo sapien
gtcgactgcgtatttttcagaacag

SEQ ID NO: 2891709 - DNA, 25 bp, Homo sapien
tcaagcctgtgctgttcaaaagtcg

SEQ ID NO: 2891710 - DNA, 25 bp, Homo sapien
tggccgcatgcagttcaagcctgtg

SEQ ID NO: 2891711 - DNA, 25 bp, Homo sapien
cagaggcagaaggaagtccgagtat

SEQ ID NO: 2891712 - DNA, 25 bp, Homo sapien
ataaagtaaaggtcttcatactcac

SEQ ID NO: 2891713 - DNA, 25 bp, Homo sapien
cataaagtaaaggtcttcatactca

SEQ ID NO: 2891714 - DNA, 25 bp, Homo sapien
gctaggcagccgcaggacttatcaa

SEQ ID NO: 2891715 - DNA, 25 bp, Homo sapien
tggtggcagcccctcctttaggtac

SEQ ID NO: 2891716 - DNA, 25 bp, Homo sapien
gaaggcggcttacctgcagagctga

SEQ ID NO: 2891717 - DNA, 25 bp, Homo sapien
ccagtaggctagagcaacgggctca

SEQ ID NO: 2891718 - DNA, 25 bp, Homo sapien
ttcctaagtcaagctcctcatggtg

SEQ ID NO: 2891719 - DNA, 25 bp, Homo sapien
tatccagtggctcctaatcttgaag

SEQ ID NO: 2891720 - DNA, 25 bp, Homo sapien
gaagttcaaaccacaggtaatgccc

SEQ ID NO: 2891721 - DNA, 25 bp, Homo sapien
tgtgctgactctcattatccagtgg

SEQ ID NO: 2891722 - DNA, 25 bp, Homo sapien
acgtcctcttaggtccctcacacaa

SEQ ID NO: 2891723 - DNA, 25 bp, Homo sapien
tcttaggtccctcacacaacacgtg

SEQ ID NO: 2891724 - DNA, 25 bp, Homo sapien
gattcaatcacgtcctcttaggtcc

SEQ ID NO: 2891725 - DNA, 25 bp, Homo sapien
cctcttaggtccctcacacaacacg

SEQ ID NO: 2891726 - DNA, 25 bp, Homo sapien
tcaagacagagataatgaaatggcc

SEQ ID NO: 2891727 - DNA, 25 bp, Homo sapien
gaactgaggctcttgccacaatgcc

SEQ ID NO: 2891728 - DNA, 25 bp, Homo sapien
tgaacccaagcttgtctgacagaga

SEQ ID NO: 2891729 - DNA, 25 bp, Homo sapien
gaggtggttcctgctccatagagtc

SEQ ID NO: 2891730 - DNA, 25 bp, Homo sapien
gaggagatttcggtgctgactagaa

SEQ ID NO: 2891731 - DNA, 25 bp, Homo sapien
gaccctgtgtgggtagaaacttgaa

SEQ ID NO: 2891732 - DNA, 25 bp, Homo sapien
tgctgactagaagagcggccacggc

SEQ ID NO: 2891733 - DNA, 25 bp, Homo sapien
aaagagggctaagatttcacactgg

SEQ ID NO: 2891734 - DNA, 25 bp, Homo sapien
caccttcatcgttatctagctctat

SEQ ID NO: 2891735 - DNA, 25 bp, Homo sapien
gacaagaatacgagccacataggat

SEQ ID NO: 2891736 - DNA, 25 bp, Homo sapien
taatgagtgctacataggattggct

SEQ ID NO: 2891737 - DNA, 25 bp, Homo sapien
tgtgtcttaatcattctgtgccttg

SEQ ID NO: 2891738 - DNA, 25 bp, Homo sapien
cttcacacagcactcttaggtagag

SEQ ID NO: 2891739 - DNA, 25 bp, Homo sapien
gtaggctggcatgtacttcacacag

SEQ ID NO: 2891740 - DNA, 25 bp, Homo sapien
tgaatgaacgaatactgcactcttt

SEQ ID NO: 2891741 - DNA, 25 bp, Homo sapien
cactctttcgacttggttagagaca

SEQ ID NO: 2891742 - DNA, 25 bp, Homo sapien
tctgggcaccctattggctaaacca

SEQ ID NO: 2891743 - DNA, 25 bp, Homo sapien
gctgttacctgtccttaagcctgaa

SEQ ID NO: 2891744 - DNA, 25 bp, Homo sapien
ctctgccctggagctagtaatggca

SEQ ID NO: 2891745 - DNA, 25 bp, Homo sapien
gaggaatagtgacagcctaaggcaa

SEQ ID NO: 2891746 - DNA, 25 bp, Homo sapien
gagtaaagacttagtgcaaggcagg

SEQ ID NO: 2891747 - DNA, 25 bp, Homo sapien
tgtggtcaagtctcaagcatggtgc

SEQ ID NO: 2891748 - DNA, 25 bp, Homo sapien
gcgatctgtgcctcctgagagctca

SEQ ID NO: 2891749 - DNA, 25 bp, Homo sapien
gctgggttgggacaatgcacatttt

SEQ ID NO: 2891750 - DNA, 25 bp, Homo sapien
caggcgcgttgtggtcgccgtcggc

SEQ ID NO: 2891751 - DNA, 25 bp, Homo sapien
gggcggcgctgacacttgatcccga

SEQ ID NO: 2891752 - DNA, 25 bp, Homo sapien
gtctccgcctttgtcccgctcagcg

SEQ ID NO: 2891753 - DNA, 25 bp, Homo sapien
ctgtcacccacgaggttacgctggg

SEQ ID NO: 2891754 - DNA, 25 bp, Homo sapien
ccaagtcactgtgtaatcgcaggtg

SEQ ID NO: 2891755 - DNA, 25 bp, Homo sapien
taagaggaaatgagtcggtgctgac

SEQ ID NO: 2891756 - DNA, 25 bp, Homo sapien
tctgggccccagtcattacatttag

SEQ ID NO: 2891757 - DNA, 25 bp, Homo sapien
gagattgcagttagaacccctggga

SEQ ID NO: 2891758 - DNA, 25 bp, Homo sapien
ggtggctttggattcctgcttatag

SEQ ID NO: 2891759 - DNA, 25 bp, Homo sapien
ccagggaacgagtagttctcaaggt

SEQ ID NO: 2891760 - DNA, 25 bp, Homo sapien
tcacatatatatggcagacaaccag

SEQ ID NO: 2891761 - DNA, 25 bp, Homo sapien
ggattcctgcttatagcttatatag

SEQ ID NO: 2891762 - DNA, 25 bp, Homo sapien
gagtaatgccactatgaggccaggc

SEQ ID NO: 2891763 - DNA, 25 bp, Homo sapien
actgtggcttactccagtgatccca

SEQ ID NO: 2891764 - DNA, 25 bp, Homo sapien
gatgctttcatagtctgtccatgct

SEQ ID NO: 2891765 - DNA, 25 bp, Homo sapien
ttagctattacccatggtctcccat

SEQ ID NO: 2891766 - DNA, 25 bp, Homo sapien
taagctgcgatgagaaaagcacctg

SEQ ID NO: 2891767 - DNA, 25 bp, Homo sapien
aagtcaagcagtagatgcggctcca

SEQ ID NO: 2891768 - DNA, 25 bp, Homo sapien
cctataacatgtgactgcagcagcc

SEQ ID NO: 2891769 - DNA, 25 bp, Homo sapien
ccatgtatttgtccaagccgtgcac

SEQ ID NO: 2891770 - DNA, 25 bp, Homo sapien
gaataaaagtcagtcagcctccaga

SEQ ID NO: 2891771 - DNA, 25 bp, Homo sapien
aggacttgggctaaagcacctttga

SEQ ID NO: 2891772 - DNA, 25 bp, Homo sapien
ttttgagtgacaggacttgggctaa

SEQ ID NO: 2891773 - DNA, 25 bp, Homo sapien
cagtgtggttgtgtcacgcaggcta

SEQ ID NO: 2891774 - DNA, 25 bp, Homo sapien
aggtcagggtgtcggtggggccaca

SEQ ID NO: 2891775 - DNA, 25 bp, Homo sapien
ttgtcttctctgtatgtgtatctgt

SEQ ID NO: 2891776 - DNA, 25 bp, Homo sapien
ctgccttcatgccattgtcttctct

SEQ ID NO: 2891777 - DNA, 25 bp, Homo sapien
gcatcactccactcggcctctgcct

SEQ ID NO: 2891778 - DNA, 25 bp, Homo sapien
aaggcccagtggatgcttatgcaag

SEQ ID NO: 2891779 - DNA, 25 bp, Homo sapien
tagggctgccgcaaggaatgacaac

SEQ ID NO: 2891780 - DNA, 25 bp, Homo sapien
tactaaaatccagccaagccagaca

SEQ ID NO: 2891781 - DNA, 25 bp, Homo sapien
tagggatccagcatctataggtaag

SEQ ID NO: 2891782 - DNA, 25 bp, Homo sapien
agcctgccacacctaccacacgcga

SEQ ID NO: 2891783 - DNA, 25 bp, Homo sapien
gccacacctaccacacgcgagcaca

SEQ ID NO: 2891784 - DNA, 25 bp, Homo sapien
aggagcctgccacacctaccacacg

SEQ ID NO: 2891785 - DNA, 25 bp, Homo sapien
atgcaggagcctgccacacctacca

SEQ ID NO: 2891786 - DNA, 25 bp, Homo sapien
ccagacggtgtggaagcaagcagat

SEQ ID NO: 2891787 - DNA, 25 bp, Homo sapien
tctgcttaagtaaagaccccaccga

SEQ ID NO: 2891788 - DNA, 25 bp, Homo sapien
cgtcttggctaagtgcccgtgggca

SEQ ID NO: 2891789 - DNA, 25 bp, Homo sapien
cttggctggagcgagcagacacagt

SEQ ID NO: 2891790 - DNA, 25 bp, Homo sapien
caaactggatatgccagagaggagc

SEQ ID NO: 2891791 - DNA, 25 bp, Homo sapien
gacctgcatgcccagatactgctcc

SEQ ID NO: 2891792 - DNA, 25 bp, Homo sapien
gatccagggacagcccaatgacctg

SEQ ID NO: 2891793 - DNA, 25 bp, Homo sapien
gaggagctaagaagatccagggaca

SEQ ID NO: 2891794 - DNA, 25 bp, Homo sapien
tcattctccatgatcaatgaggatg

SEQ ID NO: 2891795 - DNA, 25 bp, Homo sapien
attctccatgatcaatgaggatgca

SEQ ID NO: 2891796 - DNA, 25 bp, Homo sapien
ttctccatgatcaatgaggatgcag

SEQ ID NO: 2891797 - DNA, 25 bp, Homo sapien
cattctccatgatcaatgaggatgc

SEQ ID NO: 2891798 - DNA, 25 bp, Homo sapien
tcacagagtgtccagccctcactga

SEQ ID NO: 2891799 - DNA, 25 bp, Homo sapien
catgggaaaagaggtaacagggtag

SEQ ID NO: 2891800 - DNA, 25 bp, Homo sapien
ggccctagcatggaccatgggaaaa

SEQ ID NO: 2891801 - DNA, 25 bp, Homo sapien
cagaacctggccatgctcacagagt

SEQ ID NO: 2891802 - DNA, 25 bp, Homo sapien
gattcgaacatttttggaacgtgtc

SEQ ID NO: 2891803 - DNA, 25 bp, Homo sapien
gaacgtgtctgttgatttatgatcc

SEQ ID NO: 2891804 - DNA, 25 bp, Homo sapien
ccttttatcccaaacaatttgtctg

SEQ ID NO: 2891805 - DNA, 25 bp, Homo sapien
cccctgaagttgcaatgattcgaac

SEQ ID NO: 2891806 - DNA, 25 bp, Homo sapien
caactctgtcgctccctctgaagtt

SEQ ID NO: 2891807 - DNA, 25 bp, Homo sapien
gcgcgcctgaaagaaactggttaaa

SEQ ID NO: 2891808 - DNA, 25 bp, Homo sapien
gaagttgaaataccatctgcgcgcc

SEQ ID NO: 2891809 - DNA, 25 bp, Homo sapien
actggttaaaggtgaactggctact

SEQ ID NO: 2891810 - DNA, 25 bp, Homo sapien
cagttactgaattccagctagatga

SEQ ID NO: 2891811 - DNA, 25 bp, Homo sapien
gaattccagctagatgatttagaaa

SEQ ID NO: 2891812 - DNA, 25 bp, Homo sapien
gatcctggctcagttactgaattcc

SEQ ID NO: 2891813 - DNA, 25 bp, Homo sapien
aagttgcttagactctctgaatctc

SEQ ID NO: 2891814 - DNA, 25 bp, Homo sapien
gggtgtacattcatccttgtggtct

SEQ ID NO: 2891815 - DNA, 25 bp, Homo sapien
gcaggtatggtagctcttcagccat

SEQ ID NO: 2891816 - DNA, 25 bp, Homo sapien
agatgatcagaaatagaagatctag

SEQ ID NO: 2891817 - DNA, 25 bp, Homo sapien
tctgatatggttgctagagctccag

SEQ ID NO: 2891818 - DNA, 25 bp, Homo sapien
ctccagggcaaacccaacttcttca

SEQ ID NO: 2891819 - DNA, 25 bp, Homo sapien
caggaatgtcatggtcagagcagca

SEQ ID NO: 2891820 - DNA, 25 bp, Homo sapien
tgaacaggaatgtcatggtcagagc

SEQ ID NO: 2891821 - DNA, 25 bp, Homo sapien
ttcagtgaaagggttcacatgttgc

SEQ ID NO: 2891822 - DNA, 25 bp, Homo sapien
ggttcacatgttgctggtactgccc

SEQ ID NO: 2891823 - DNA, 25 bp, Homo sapien
cagtggtcatacagcaaggcctggg

SEQ ID NO: 2891824 - DNA, 25 bp, Homo sapien
tcagctggacatatgagccctgctc

SEQ ID NO: 2891825 - DNA, 25 bp, Homo sapien
agagaatcctttcatgccagtggtc

SEQ ID NO: 2891826 - DNA, 25 bp, Homo sapien
caaggccctgtttgttcagatgcgt

SEQ ID NO: 2891827 - DNA, 25 bp, Homo sapien
tccagaactagggaggaatcatttc

SEQ ID NO: 2891828 - DNA, 25 bp, Homo sapien
taaagcctcaatgataatcacctgc

SEQ ID NO: 2891829 - DNA, 25 bp, Homo sapien
cctgcttatggtttcccaagtgcac

SEQ ID NO: 2891830 - DNA, 25 bp, Homo sapien
gagcttcagagggaacatggactca

SEQ ID NO: 2891831 - DNA, 25 bp, Homo sapien
ttcaaatgcgcaagtggtcgggacc

SEQ ID NO: 2891832 - DNA, 25 bp, Homo sapien
gatgcaaacccttggcaacttaagc

SEQ ID NO: 2891833 - DNA, 25 bp, Homo sapien
cttcaatagcgagagataactggcg

SEQ ID NO: 2891834 - DNA, 25 bp, Homo sapien
taatccaggatcaggcaaataagct

SEQ ID NO: 2891835 - DNA, 25 bp, Homo sapien
tccagagcatctaggatcaaagcta

SEQ ID NO: 2891836 - DNA, 25 bp, Homo sapien
cctccagagcatctaggatcaaagc

SEQ ID NO: 2891837 - DNA, 25 bp, Homo sapien
cagagcatctaggatcaaagctatc

SEQ ID NO: 2891838 - DNA, 25 bp, Homo sapien
ccagagcatctaggatcaaagctat

SEQ ID NO: 2891839 - DNA, 25 bp, Homo sapien
aaaaatcacctgtaggaatcctcac

SEQ ID NO: 2891840 - DNA, 25 bp, Homo sapien
cagtaaaattagtctgctagaagct

SEQ ID NO: 2891841 - DNA, 25 bp, Homo sapien
cattgctgtcacaatggaattcagg

SEQ ID NO: 2891842 - DNA, 25 bp, Homo sapien
tgctagaagctgatggaggtattca

SEQ ID NO: 2891843 - DNA, 25 bp, Homo sapien
agaacgggcgtggtccgaggaggag

SEQ ID NO: 2891844 - DNA, 25 bp, Homo sapien
ccactcgcagtagaagacctgaatg

SEQ ID NO: 2891845 - DNA, 25 bp, Homo sapien
ggaagatgagctgggcgtgggcgtg

SEQ ID NO: 2891846 - DNA, 25 bp, Homo sapien
aagaggcttccaaaagtccactcgc

SEQ ID NO: 2891847 - DNA, 25 bp, Homo sapien
ttctaaaataacaactgcgccctgt

SEQ ID NO: 2891848 - DNA, 25 bp, Homo sapien
tggattctcattagtgcacacttgg

SEQ ID NO: 2891849 - DNA, 25 bp, Homo sapien
agtgctcgacagtgatcaatgctgg

SEQ ID NO: 2891850 - DNA, 25 bp, Homo sapien
caggaaagcccaactacaagagagt

SEQ ID NO: 2891851 - DNA, 25 bp, Homo sapien
aggatggctgtgacactggtactca

SEQ ID NO: 2891852 - DNA, 25 bp, Homo sapien
gtgacactggtactcatgggaagct

SEQ ID NO: 2891853 - DNA, 25 bp, Homo sapien
gacactggtactcatgggaagctgt

SEQ ID NO: 2891854 - DNA, 25 bp, Homo sapien
gagaagaaatggttgcgaagattct

SEQ ID NO: 2891855 - DNA, 25 bp, Homo sapien
aaggcactgggaaagactcacaaca

SEQ ID NO: 2891856 - DNA, 25 bp, Homo sapien
ggccgccatgcagagtgccacttac

SEQ ID NO: 2891857 - DNA, 25 bp, Homo sapien
gaccctagtcgtaaagaaatccata

SEQ ID NO: 2891858 - DNA, 25 bp, Homo sapien
cataattgccagtaacacgacatat

SEQ ID NO: 2891859 - DNA, 25 bp, Homo sapien
tgataaaggcgcagtgacaaccaga

SEQ ID NO: 2891860 - DNA, 25 bp, Homo sapien
ccgtatattggcttgtgtgcacaga

SEQ ID NO: 2891861 - DNA, 25 bp, Homo sapien
acttggaacactggaagccttctgg

SEQ ID NO: 2891862 - DNA, 25 bp, Homo sapien
tgtctgtcaataaggcatcgatact

SEQ ID NO: 2891863 - DNA, 25 bp, Homo sapien
ggcctccaccttagaggcatccaga

SEQ ID NO: 2891864 - DNA, 25 bp, Homo sapien
aggcctccaccttagaggcatccag

SEQ ID NO: 2891865 - DNA, 25 bp, Homo sapien
caggcctccaccttagaggcatcca

SEQ ID NO: 2891866 - DNA, 25 bp, Homo sapien
ccaggcctccaccttagaggcatcc

SEQ ID NO: 2891867 - DNA, 25 bp, Homo sapien
ccttcccactttgtgtgatggttaa

SEQ ID NO: 2891868 - DNA, 25 bp, Homo sapien
tgacacatggacaggcgcgtgtcac

SEQ ID NO: 2891869 - DNA, 25 bp, Homo sapien
ctgcacctctttcaattatctgggt

SEQ ID NO: 2891870 - DNA, 25 bp, Homo sapien
tttcaattatctgggtactcacctg

SEQ ID NO: 2891871 - DNA, 25 bp, Homo sapien
gatccattgtgattctcacaacagg

SEQ ID NO: 2891872 - DNA, 25 bp, Homo sapien
gaaggagagttagagctgagcggca

SEQ ID NO: 2891873 - DNA, 25 bp, Homo sapien
tgttgctattcatcaacaaccacta

SEQ ID NO: 2891874 - DNA, 25 bp, Homo sapien
taaacagacgcgaaggaaggagagt

SEQ ID NO: 2891875 - DNA, 25 bp, Homo sapien
tgcccagtcacaggagaggtaatga

SEQ ID NO: 2891876 - DNA, 25 bp, Homo sapien
gaaactgtctaaacactggccagct

SEQ ID NO: 2891877 - DNA, 25 bp, Homo sapien
ctttgcacgcagctccagatgacgg

SEQ ID NO: 2891878 - DNA, 25 bp, Homo sapien
catgctgctgcaaaacggcagggaa

SEQ ID NO: 2891879 - DNA, 25 bp, Homo sapien
atcttgttccatgcccacatgatga

SEQ ID NO: 2891880 - DNA, 25 bp, Homo sapien
gaaagctgatcatccatggctatcc

SEQ ID NO: 2891881 - DNA, 25 bp, Homo sapien
atggctatccatgattacattccag

SEQ ID NO: 2891882 - DNA, 25 bp, Homo sapien
ttagtgtatgaaggctaggctgctc

SEQ ID NO: 2891883 - DNA, 25 bp, Homo sapien
tgctctacagaagggtgcagctcat

SEQ ID NO: 2891884 - DNA, 25 bp, Homo sapien
taagtcaagtgagaaggtctcccag

SEQ ID NO: 2891885 - DNA, 25 bp, Homo sapien
tcaaagcccaaatgtgtagcaggtg

SEQ ID NO: 2891886 - DNA, 25 bp, Homo sapien
agctcatgttaggtggccctgccca

SEQ ID NO: 2891887 - DNA, 25 bp, Homo sapien
cacaacatgttaagagcagcagaga

SEQ ID NO: 2891888 - DNA, 25 bp, Homo sapien
taataactgctcgtgatccctggtc

SEQ ID NO: 2891889 - DNA, 25 bp, Homo sapien
gagaatggtcgctatcccagaatcc

SEQ ID NO: 2891890 - DNA, 25 bp, Homo sapien
tccttctggaagcagtattggcctt

SEQ ID NO: 2891891 - DNA, 25 bp, Homo sapien
caggaagccttgttacccaggtgaa

SEQ ID NO: 2891892 - DNA, 25 bp, Homo sapien
caatgacatttaccagcaggtggcc

SEQ ID NO: 2891893 - DNA, 25 bp, Homo sapien
gctgagacccagatcaaagtccctg

SEQ ID NO: 2891894 - DNA, 25 bp, Homo sapien
tatgaacgaagcagtccagaggtct

SEQ ID NO: 2891895 - DNA, 25 bp, Homo sapien
ttccacctcgtgagcatcaggatgg

SEQ ID NO: 2891896 - DNA, 25 bp, Homo sapien
cctcgcaagggcattggcagttgtc

SEQ ID NO: 2891897 - DNA, 25 bp, Homo sapien
tctttctgtgttgttccacgagtgc

SEQ ID NO: 2891898 - DNA, 25 bp, Homo sapien
cattggcagttgtcaaacatcagct

SEQ ID NO: 2891899 - DNA, 25 bp, Homo sapien
gggccacagtggtgacccagcatta

SEQ ID NO: 2891900 - DNA, 25 bp, Homo sapien
ccacagtggtgacccagcattagcg

SEQ ID NO: 2891901 - DNA, 25 bp, Homo sapien
gtgacccagcattagcgtaccccat

SEQ ID NO: 2891902 - DNA, 25 bp, Homo sapien
cagtggtgacccagcattagcgtac

SEQ ID NO: 2891903 - DNA, 25 bp, Homo sapien
gattccggagtaatctgcctcgagg

SEQ ID NO: 2891904 - DNA, 25 bp, Homo sapien
gtaaaacaagaaagctatcgtcctc

SEQ ID NO: 2891905 - DNA, 25 bp, Homo sapien
tcttcgacgcagcataaattgtcat

SEQ ID NO: 2891906 - DNA, 25 bp, Homo sapien
cagatgcttactgccaaaagcaggc

SEQ ID NO: 2891907 - DNA, 25 bp, Homo sapien
gccaatttgcaaatgggccaatttc

SEQ ID NO: 2891908 - DNA, 25 bp, Homo sapien
aacaaaagttttccagccgacacag

SEQ ID NO: 2891909 - DNA, 25 bp, Homo sapien
ccagccgacacagcgttggttttcc

SEQ ID NO: 2891910 - DNA, 25 bp, Homo sapien
taccaattggccttaacatatacaa

SEQ ID NO: 2891911 - DNA, 25 bp, Homo sapien
cctgaggctgttaaccttggcaaaa

SEQ ID NO: 2891912 - DNA, 25 bp, Homo sapien
ttcagctgcatgataaagccttggc

SEQ ID NO: 2891913 - DNA, 25 bp, Homo sapien
tgtataaaagcaagccgtacccgga

SEQ ID NO: 2891914 - DNA, 25 bp, Homo sapien
tggccttcgcaaccccttagtataa

SEQ ID NO: 2891915 - DNA, 25 bp, Homo sapien
tttacaaccagatcccagtgagaac

SEQ ID NO: 2891916 - DNA, 25 bp, Homo sapien
gcactttacattaccagagcaggag

SEQ ID NO: 2891917 - DNA, 25 bp, Homo sapien
taagtccttcacatgagatataaag

SEQ ID NO: 2891918 - DNA, 25 bp, Homo sapien
aaaccataccacatgcctaagaatg

SEQ ID NO: 2891919 - DNA, 25 bp, Homo sapien
taaggctcctcgctggcaggatcag

SEQ ID NO: 2891920 - DNA, 25 bp, Homo sapien
tgaggcccagaaggttaagtcactt

SEQ ID NO: 2891921 - DNA, 25 bp, Homo sapien
ccaaacgtgtttaggagtatccagc

SEQ ID NO: 2891922 - DNA, 25 bp, Homo sapien
gggaggtgacttgatcacgcccatt

SEQ ID NO: 2891923 - DNA, 25 bp, Homo sapien
tttccctctaattaggaagatgggc

SEQ ID NO: 2891924 - DNA, 25 bp, Homo sapien
caataccggaggacgtggcagttca

SEQ ID NO: 2891925 - DNA, 25 bp, Homo sapien
ttgaatagaggaagtgagtgtagat

SEQ ID NO: 2891926 - DNA, 25 bp, Homo sapien
ttgggtccccatctaaccagcctct

SEQ ID NO: 2891927 - DNA, 25 bp, Homo sapien
cctgagtattggatgaccgctgctc

SEQ ID NO: 2891928 - DNA, 25 bp, Homo sapien
gaaatgcagcaggtctaatcctgag

SEQ ID NO: 2891929 - DNA, 25 bp, Homo sapien
cctgcctcgcaagggttaatcagcc

SEQ ID NO: 2891930 - DNA, 25 bp, Homo sapien
tcttgggaccctgattagcctgagt

SEQ ID NO: 2891931 - DNA, 25 bp, Homo sapien
gcactctcgtgtactgtaaacctga

SEQ ID NO: 2891932 - DNA, 25 bp, Homo sapien
cattgcttggaatgtcttggagagc

SEQ ID NO: 2891933 - DNA, 25 bp, Homo sapien
ggcaaatttccataagtcgatgaag

SEQ ID NO: 2891934 - DNA, 25 bp, Homo sapien
cagtccggacgtaagttaggcctgg

SEQ ID NO: 2891935 - DNA, 25 bp, Homo sapien
gaggacggagatatcttgccactga

SEQ ID NO: 2891936 - DNA, 25 bp, Homo sapien
gcagatcctttctggagtcccaggg

SEQ ID NO: 2891937 - DNA, 25 bp, Homo sapien
caaggagactcaaggaacagactgt

SEQ ID NO: 2891938 - DNA, 25 bp, Homo sapien
gttactcaggaggaaatgcattccc

SEQ ID NO: 2891939 - DNA, 25 bp, Homo sapien
tctatttagagactggggttgctgg

SEQ ID NO: 2891940 - DNA, 25 bp, Homo sapien
cagaggtgcgatcaagaatcactgc

SEQ ID NO: 2891941 - DNA, 25 bp, Homo sapien
aggtacgcctgccatgcctggcaaa

SEQ ID NO: 2891942 - DNA, 25 bp, Homo sapien
gttgctggggtttcgctgtgatgcc

SEQ ID NO: 2891943 - DNA, 25 bp, Homo sapien
tctaaaagcacaacgcaagcccagt

SEQ ID NO: 2891944 - DNA, 25 bp, Homo sapien
tagagatatactcacgccaaagtgg

SEQ ID NO: 2891945 - DNA, 25 bp, Homo sapien
gaaaggctcactacccacaagatgg

SEQ ID NO: 2891946 - DNA, 25 bp, Homo sapien
tcattagggaatccacgggctgccc

SEQ ID NO: 2891947 - DNA, 25 bp, Homo sapien
catagacctcagagaatgtccaggg

SEQ ID NO: 2891948 - DNA, 25 bp, Homo sapien
gaaagtgcctggttcaatgcctggc

SEQ ID NO: 2891949 - DNA, 25 bp, Homo sapien
tttgattcgagttaagccttagcgg

SEQ ID NO: 2891950 - DNA, 25 bp, Homo sapien
aaaaacccaggtcctactagctgtg

SEQ ID NO: 2891951 - DNA, 25 bp, Homo sapien
taacggtgagtgaatgggactccag

SEQ ID NO: 2891952 - DNA, 25 bp, Homo sapien
actccaggggtttgatgcagggaaa

SEQ ID NO: 2891953 - DNA, 25 bp, Homo sapien
acggtgagtgaatgggactccaggg

SEQ ID NO: 2891954 - DNA, 25 bp, Homo sapien
aggtaacggtgagtgaatgggactc

SEQ ID NO: 2891955 - DNA, 25 bp, Homo sapien
cgcaaggcttccccgtcatggccca

SEQ ID NO: 2891956 - DNA, 25 bp, Homo sapien
acgcaaggcttccccgtcatggccc

SEQ ID NO: 2891957 - DNA, 25 bp, Homo sapien
ctaacatcggacacgcaaggcttcc

SEQ ID NO: 2891958 - DNA, 25 bp, Homo sapien
taacatcggacacgcaaggcttccc

SEQ ID NO: 2891959 - DNA, 25 bp, Homo sapien
cagaacttctgctggcctacaaggg

SEQ ID NO: 2891960 - DNA, 25 bp, Homo sapien
gatagcttgagatccaccatggtgg

SEQ ID NO: 2891961 - DNA, 25 bp, Homo sapien
taagaatcagtgcactggagccaca

SEQ ID NO: 2891962 - DNA, 25 bp, Homo sapien
ctacaagggcacagtcaaagggcaa

SEQ ID NO: 2891963 - DNA, 25 bp, Homo sapien
caaaacagggcatgcgtattggagg

SEQ ID NO: 2891964 - DNA, 25 bp, Homo sapien
tctctacgaggcatggaatgggagc

SEQ ID NO: 2891965 - DNA, 25 bp, Homo sapien
cgtattggaggaaggtcataagcag

SEQ ID NO: 2891966 - DNA, 25 bp, Homo sapien
ttgaactgcggccaggttcagagtc

SEQ ID NO: 2891967 - DNA, 25 bp, Homo sapien
caccatgcccaatctgtttcacaat

SEQ ID NO: 2891968 - DNA, 25 bp, Homo sapien
aaattttatttgcaagctaagccct

SEQ ID NO: 2891969 - DNA, 25 bp, Homo sapien
tttatttgcaagctaagccctgatc

SEQ ID NO: 2891970 - DNA, 25 bp, Homo sapien
gcaagctaagccctgatcagcctcc

SEQ ID NO: 2891971 - DNA, 25 bp, Homo sapien
ctgcagtcctatggctctgggtaac

SEQ ID NO: 2891972 - DNA, 25 bp, Homo sapien
gcagtcctatggctctgggtaacag

SEQ ID NO: 2891973 - DNA, 25 bp, Homo sapien
ctgggtaacagaggctgccccctgc

SEQ ID NO: 2891974 - DNA, 25 bp, Homo sapien
agtcctatggctctgggtaacagag

SEQ ID NO: 2891975 - DNA, 25 bp, Homo sapien
agcctggagcatgtagaatacagcc

SEQ ID NO: 2891976 - DNA, 25 bp, Homo sapien
aagcctggagcatgtagaatacagc

SEQ ID NO: 2891977 - DNA, 25 bp, Homo sapien
aaagcctggagcatgtagaatacag

SEQ ID NO: 2891978 - DNA, 25 bp, Homo sapien
gcctggagcatgtagaatacagccc

SEQ ID NO: 2891979 - DNA, 25 bp, Homo sapien
ctggcaagcccttcatttgttcaac

SEQ ID NO: 2891980 - DNA, 25 bp, Homo sapien
catttgttcaacacccagctgccct

SEQ ID NO: 2891981 - DNA, 25 bp, Homo sapien
tccgctggattccacctggaggaga

SEQ ID NO: 2891982 - DNA, 25 bp, Homo sapien
atgagcctgtgaccttgggtccaat

SEQ ID NO: 2891983 - DNA, 25 bp, Homo sapien
tgagatccatcacgcggtggctgca

SEQ ID NO: 2891984 - DNA, 25 bp, Homo sapien
atcaggcacgctcagccggagggtc

SEQ ID NO: 2891985 - DNA, 25 bp, Homo sapien
gtggctgcactccatcaggcacgct

SEQ ID NO: 2891986 - DNA, 25 bp, Homo sapien
aagtggcccgcagacgccgggctct

SEQ ID NO: 2891987 - DNA, 25 bp, Homo sapien
gaaccctgatagtgtggtcccagag

SEQ ID NO: 2891988 - DNA, 25 bp, Homo sapien
taggcgtctccttcaataatctggg

SEQ ID NO: 2891989 - DNA, 25 bp, Homo sapien
tgcttaatgcgcagagaaccctcag

SEQ ID NO: 2891990 - DNA, 25 bp, Homo sapien
tggaattatccccactctggcctgg

SEQ ID NO: 2891991 - DNA, 25 bp, Homo sapien
taaagtagaatagtgtcaatcctcc

SEQ ID NO: 2891992 - DNA, 25 bp, Homo sapien
cagcttgtcagtagctacaagagaa

SEQ ID NO: 2891993 - DNA, 25 bp, Homo sapien
gccacaccttcttgattattacagc

SEQ ID NO: 2891994 - DNA, 25 bp, Homo sapien
tacaagagaacttgccgaggcttcg

SEQ ID NO: 2891995 - DNA, 25 bp, Homo sapien
cctttagtgaaatccagcttatcaa

SEQ ID NO: 2891996 - DNA, 25 bp, Homo sapien
cattctcttgactatcatctgcaga

SEQ ID NO: 2891997 - DNA, 25 bp, Homo sapien
cctaagttatcttctaggaggttca

SEQ ID NO: 2891998 - DNA, 25 bp, Homo sapien
cttctaggaggttcacacttttgta

SEQ ID NO: 2891999 - DNA, 25 bp, Homo sapien
gacccacggtggacatacagcataa

SEQ ID NO: 2892000 - DNA, 25 bp, Homo sapien
ggtgcagagctatcccatatgcccc

SEQ ID NO: 2892001 - DNA, 25 bp, Homo sapien
agcataacctatcctacctgactgg

SEQ ID NO: 2892002 - DNA, 25 bp, Homo sapien
catccctaccggagtgatacatttg

SEQ ID NO: 2892003 - DNA, 25 bp, Homo sapien
acttcttcacagcagttatcatgat

SEQ ID NO: 2892004 - DNA, 25 bp, Homo sapien
ttgttacccaaaaacgctgctttca

SEQ ID NO: 2892005 - DNA, 25 bp, Homo sapien
cccaaaaacgctgctttcacttctt

SEQ ID NO: 2892006 - DNA, 25 bp, Homo sapien
ttcttcacagcagttatcatgattg

SEQ ID NO: 2892007 - DNA, 25 bp, Homo sapien
ctgtcccatctaaaggagctccctg

SEQ ID NO: 2892008 - DNA, 25 bp, Homo sapien
gtcccatctaaaggagctccctgca

SEQ ID NO: 2892009 - DNA, 25 bp, Homo sapien
gactgtcccatctaaaggagctccc

SEQ ID NO: 2892010 - DNA, 25 bp, Homo sapien
ccagactgtcccatctaaaggagct

SEQ ID NO: 2892011 - DNA, 25 bp, Homo sapien
ctcaagctagactatccaggttagt

SEQ ID NO: 2892012 - DNA, 25 bp, Homo sapien
gggccttgagagaactggttaagac

SEQ ID NO: 2892013 - DNA, 25 bp, Homo sapien
agagaactggttaagactgggcact

SEQ ID NO: 2892014 - DNA, 25 bp, Homo sapien
taagactgggcactcaagctagact

SEQ ID NO: 2892015 - DNA, 25 bp, Homo sapien
tggccccccgctctgaaaaccactg

SEQ ID NO: 2892016 - DNA, 25 bp, Homo sapien
gaaatgaaaactcccaggtgcccca

SEQ ID NO: 2892017 - DNA, 25 bp, Homo sapien
aataatggaaatgaaaactcccagg

SEQ ID NO: 2892018 - DNA, 25 bp, Homo sapien
accactggctccaagtgaaataatg

SEQ ID NO: 2892019 - DNA, 25 bp, Homo sapien
taatgggggtgaatagtcgctcatc

SEQ ID NO: 2892020 - DNA, 25 bp, Homo sapien
ccacatggggtttacatcacagtct

SEQ ID NO: 2892021 - DNA, 25 bp, Homo sapien
tagtcgctcatccaaggtcattcaa

SEQ ID NO: 2892022 - DNA, 25 bp, Homo sapien
ggtgaatagtcgctcatccaaggtc

SEQ ID NO: 2892023 - DNA, 25 bp, Homo sapien
gagggcaggttccaataggctgaca

SEQ ID NO: 2892024 - DNA, 25 bp, Homo sapien
ggactggaagcttgcggctgacatc

SEQ ID NO: 2892025 - DNA, 25 bp, Homo sapien
aaagactctgagctaagagcggccc

SEQ ID NO: 2892026 - DNA, 25 bp, Homo sapien
gatcttacctatctgagagggcagg

SEQ ID NO: 2892027 - DNA, 25 bp, Homo sapien
taataatagcacgtattaaacaatt

SEQ ID NO: 2892028 - DNA, 25 bp, Homo sapien
acaattactgttgccaagcgttgtt

SEQ ID NO: 2892029 - DNA, 25 bp, Homo sapien
gcacgtattaaacaattactgttgc

SEQ ID NO: 2892030 - DNA, 25 bp, Homo sapien
tattaaacaattactgttgccaagc

SEQ ID NO: 2892031 - DNA, 25 bp, Homo sapien
tctggcccggtaggttcagagagca

SEQ ID NO: 2892032 - DNA, 25 bp, Homo sapien
gggccatgcccattcgtgaggactg

SEQ ID NO: 2892033 - DNA, 25 bp, Homo sapien
taaagtgtggggcaccctgcagcac

SEQ ID NO: 2892034 - DNA, 25 bp, Homo sapien
ttcgcgacctcgcagagggccatgc

SEQ ID NO: 2892035 - DNA, 25 bp, Homo sapien
aagcctcccacatgcagtaagtgct

SEQ ID NO: 2892036 - DNA, 25 bp, Homo sapien
ctcccacatgcagtaagtgctcaat

SEQ ID NO: 2892037 - DNA, 25 bp, Homo sapien
cagaggagacggtgactgggaagcc

SEQ ID NO: 2892038 - DNA, 25 bp, Homo sapien
gcctcccacatgcagtaagtgctca

SEQ ID NO: 2892039 - DNA, 25 bp, Homo sapien
tcactgctgtcaagtcgctgagaag

SEQ ID NO: 2892040 - DNA, 25 bp, Homo sapien
cgctgagaagctgctgtgactccag

SEQ ID NO: 2892041 - DNA, 25 bp, Homo sapien
ttcgtgagaagcagtaaagcgccgg

SEQ ID NO: 2892042 - DNA, 25 bp, Homo sapien
gaggcagtctgcgatttctggagca

SEQ ID NO: 2892043 - DNA, 25 bp, Homo sapien
gctggccccagcagataaagctcgg

SEQ ID NO: 2892044 - DNA, 25 bp, Homo sapien
agaaagccgggcagtaattcatgcc

SEQ ID NO: 2892045 - DNA, 25 bp, Homo sapien
ataaagctcggggactggcgctccg

SEQ ID NO: 2892046 - DNA, 25 bp, Homo sapien
tggcgctccgcttccatcctctaga

SEQ ID NO: 2892047 - DNA, 25 bp, Homo sapien
cgcgcggcaggttaaccgcgtgtaa

SEQ ID NO: 2892048 - DNA, 25 bp, Homo sapien
aacgccacggtgtcttctttatagg

SEQ ID NO: 2892049 - DNA, 25 bp, Homo sapien
tataggttcggcctgggttcgtgtc

SEQ ID NO: 2892050 - DNA, 25 bp, Homo sapien
cggccggatcaaaggctgcacccgg

SEQ ID NO: 2892051 - DNA, 25 bp, Homo sapien
tagagcgggaactttattatccgga

SEQ ID NO: 2892052 - DNA, 25 bp, Homo sapien
gaagttcgggaataccggcatctga

SEQ ID NO: 2892053 - DNA, 25 bp, Homo sapien
cacaggccgccgagatatgctgagg

SEQ ID NO: 2892054 - DNA, 25 bp, Homo sapien
gacgccggagcgattggtagcctcc

SEQ ID NO: 2892055 - DNA, 25 bp, Homo sapien
gctgccgccgcgcaggcagagttcc

SEQ ID NO: 2892056 - DNA, 25 bp, Homo sapien
cgccgcgcaggcagagttcccggga

SEQ ID NO: 2892057 - DNA, 25 bp, Homo sapien
ggcctggcctccggtcgctgccgcc

SEQ ID NO: 2892058 - DNA, 25 bp, Homo sapien
tgccgccgcgcaggcagagttcccg

SEQ ID NO: 2892059 - DNA, 25 bp, Homo sapien
atgcagagccgggcccccccttctg

SEQ ID NO: 2892060 - DNA, 25 bp, Homo sapien
cccccttctgccgcagcactggcca

SEQ ID NO: 2892061 - DNA, 25 bp, Homo sapien
tgcagagccgggcccccccttctgc

SEQ ID NO: 2892062 - DNA, 25 bp, Homo sapien
gtcagcagccggggccatgcagagc

SEQ ID NO: 2892063 - DNA, 25 bp, Homo sapien
ccggcttcctgtggtcggccatgag

SEQ ID NO: 2892064 - DNA, 25 bp, Homo sapien
ccggcttgccgaaggcggagtcctc

SEQ ID NO: 2892065 - DNA, 25 bp, Homo sapien
tctcggctttgacgagcgcatcttc

SEQ ID NO: 2892066 - DNA, 25 bp, Homo sapien
tttgacaccgagtggcaaagaagtc

SEQ ID NO: 2892067 - DNA, 25 bp, Homo sapien
aatctggctgctattatgccgagca

SEQ ID NO: 2892068 - DNA, 25 bp, Homo sapien
tatgccgagcaaaataatcggagga

SEQ ID NO: 2892069 - DNA, 25 bp, Homo sapien
tgggaatttcccgtgctcctgaaat

SEQ ID NO: 2892070 - DNA, 25 bp, Homo sapien
cctgaaatatctccgagcgtgttct

SEQ ID NO: 2892071 - DNA, 25 bp, Homo sapien
cagatattgagtgccgccaagtgcc

SEQ ID NO: 2892072 - DNA, 25 bp, Homo sapien
ccaagtgcctcggtgccgggcatcg

SEQ ID NO: 2892073 - DNA, 25 bp, Homo sapien
aattcccattgcaaccccgcagggg

SEQ ID NO: 2892074 - DNA, 25 bp, Homo sapien
cgggcatcgcgcaaggcacttgaaa

SEQ ID NO: 2892075 - DNA, 25 bp, Homo sapien
gaagcattggagcatgatcagccca

SEQ ID NO: 2892076 - DNA, 25 bp, Homo sapien
gcccaagaagtagtaataatagcca

SEQ ID NO: 2892077 - DNA, 25 bp, Homo sapien
tcagcccaagaagtagtaataatag

SEQ ID NO: 2892078 - DNA, 25 bp, Homo sapien
agaagcattggagcatgatcagccc

SEQ ID NO: 2892079 - DNA, 25 bp, Homo sapien
agcgagctggagaactccgcgcgct

SEQ ID NO: 2892080 - DNA, 25 bp, Homo sapien
cgtccgcggcttacggttcgtcttg

SEQ ID NO: 2892081 - DNA, 25 bp, Homo sapien
tagtctctttgccttggcgcggcgg

SEQ ID NO: 2892082 - DNA, 25 bp, Homo sapien
tgtcaggtggtacatgctgtagccc

SEQ ID NO: 2892083 - DNA, 25 bp, Homo sapien
ggaaaagctatgcaggagacatggc

SEQ ID NO: 2892084 - DNA, 25 bp, Homo sapien
tttggcagggatcagacttcggaga

SEQ ID NO: 2892085 - DNA, 25 bp, Homo sapien
aaagggatgtttgagagccacacaa

SEQ ID NO: 2892086 - DNA, 25 bp, Homo sapien
ccaatggaagaagctaggattcatc

SEQ ID NO: 2892087 - DNA, 25 bp, Homo sapien
ttgccaaactccaaggagccaggag

SEQ ID NO: 2892088 - DNA, 25 bp, Homo sapien
cctaaattgccaaactccaaggagc

SEQ ID NO: 2892089 - DNA, 25 bp, Homo sapien
ggccgggggagacacccgatcctgc

SEQ ID NO: 2892090 - DNA, 25 bp, Homo sapien
actccaaggagccaggaggtcctgg

SEQ ID NO: 2892091 - DNA, 25 bp, Homo sapien
actccgccctcggttgataaaccag

SEQ ID NO: 2892092 - DNA, 25 bp, Homo sapien
gccgctccgatctagcaaacaatta

SEQ ID NO: 2892093 - DNA, 25 bp, Homo sapien
aaacaattatcgagcaccttctgtg

SEQ ID NO: 2892094 - DNA, 25 bp, Homo sapien
tctccgcctggtagatcccatgttt

SEQ ID NO: 2892095 - DNA, 25 bp, Homo sapien
ccgggttcagcgatccgagaaacta

SEQ ID NO: 2892096 - DNA, 25 bp, Homo sapien
aaaacgctttcacagcgtgcagggc

SEQ ID NO: 2892097 - DNA, 25 bp, Homo sapien
taaagtaaggcgctcttagcgcgag

SEQ ID NO: 2892098 - DNA, 25 bp, Homo sapien
gacctatgctcaaagctcgaggcgc

SEQ ID NO: 2892099 - DNA, 25 bp, Homo sapien
gtccagcaccggaactacagtgagc

SEQ ID NO: 2892100 - DNA, 25 bp, Homo sapien
gcaccggaactacagtgagcaggcg

SEQ ID NO: 2892101 - DNA, 25 bp, Homo sapien
ccggaactacagtgagcaggcgctg

SEQ ID NO: 2892102 - DNA, 25 bp, Homo sapien
cagcaccggaactacagtgagcagg

SEQ ID NO: 2892103 - DNA, 25 bp, Homo sapien
cctggggctagcgacgggcagaatt

SEQ ID NO: 2892104 - DNA, 25 bp, Homo sapien
gggaagatgccttttcagagggcac

SEQ ID NO: 2892105 - DNA, 25 bp, Homo sapien
ttcagagggcacatcattcttcccc

SEQ ID NO: 2892106 - DNA, 25 bp, Homo sapien
tgccttttcagagggcacatcattc

SEQ ID NO: 2892107 - DNA, 25 bp, Homo sapien
ggtcttctcagcgaactcagtaggt

SEQ ID NO: 2892108 - DNA, 25 bp, Homo sapien
agggtcttctcagcgaactcagtag

SEQ ID NO: 2892109 - DNA, 25 bp, Homo sapien
aagggtcttctcagcgaactcagta

SEQ ID NO: 2892110 - DNA, 25 bp, Homo sapien
gggtcttctcagcgaactcagtagg

SEQ ID NO: 2892111 - DNA, 25 bp, Homo sapien
ctgagaccggtactgggtcagacca

SEQ ID NO: 2892112 - DNA, 25 bp, Homo sapien
cactgagaccggtactgggtcagac

SEQ ID NO: 2892113 - DNA, 25 bp, Homo sapien
gagaccggtactgggtcagaccaga

SEQ ID NO: 2892114 - DNA, 25 bp, Homo sapien
tcactgagaccggtactgggtcaga

SEQ ID NO: 2892115 - DNA, 25 bp, Homo sapien
cgcccttgaaggatgtgacattgtt

SEQ ID NO: 2892116 - DNA, 25 bp, Homo sapien
ggccacacccaatgtctggtgccat

SEQ ID NO: 2892117 - DNA, 25 bp, Homo sapien
aggccacacccaatgtctggtgcca

SEQ ID NO: 2892118 - DNA, 25 bp, Homo sapien
gtgacattgttgtcctccccaggcc

SEQ ID NO: 2892119 - DNA, 25 bp, Homo sapien
tcagcagcaaggcatgaaggtcttc

SEQ ID NO: 2892120 - DNA, 25 bp, Homo sapien
aggtcttctgcagcatgggccacca

SEQ ID NO: 2892121 - DNA, 25 bp, Homo sapien
taggcacagggcgataccgtgtaca

SEQ ID NO: 2892122 - DNA, 25 bp, Homo sapien
cagggcgataccgtgtacagtttca

SEQ ID NO: 2892123 - DNA, 25 bp, Homo sapien
atcaacatctgacaacaacaacagc

SEQ ID NO: 2892124 - DNA, 25 bp, Homo sapien
caacaacagcaagaggagggcccag

SEQ ID NO: 2892125 - DNA, 25 bp, Homo sapien
gaggagggcccagaggatctgctgc

SEQ ID NO: 2892126 - DNA, 25 bp, Homo sapien
ccaaactctcatcaacatctgacaa

SEQ ID NO: 2892127 - DNA, 25 bp, Homo sapien
tgcactcacgacaatccccgataga

SEQ ID NO: 2892128 - DNA, 25 bp, Homo sapien
gagtagctttgcacccctgctaggg

SEQ ID NO: 2892129 - DNA, 25 bp, Homo sapien
acaagctctcaaggtgttgaaggct

SEQ ID NO: 2892130 - DNA, 25 bp, Homo sapien
tagaggaggactggtcttcagccaa

SEQ ID NO: 2892131 - DNA, 25 bp, Homo sapien
aagaccacaatctcatcctgccatc

SEQ ID NO: 2892132 - DNA, 25 bp, Homo sapien
ggatggaagaccacaatctcatcct

SEQ ID NO: 2892133 - DNA, 25 bp, Homo sapien
tgtggatggaagaccacaatctcat

SEQ ID NO: 2892134 - DNA, 25 bp, Homo sapien
ctgtgtggatggaagaccacaatct

SEQ ID NO: 2892135 - DNA, 25 bp, Homo sapien
ctgaaaattccgaaaaccagacact

SEQ ID NO: 2892136 - DNA, 25 bp, Homo sapien
cttcagcagatttgcagcagagagg

SEQ ID NO: 2892137 - DNA, 25 bp, Homo sapien
gatgaaaaacctgcataaaaaggct

SEQ ID NO: 2892138 - DNA, 25 bp, Homo sapien
catgaaaaccccattcgaaggtcac

SEQ ID NO: 2892139 - DNA, 25 bp, Homo sapien
agggctgcaggcttcttccgttcat

SEQ ID NO: 2892140 - DNA, 25 bp, Homo sapien
caaaaggtagctggtatgcagagat

SEQ ID NO: 2892141 - DNA, 25 bp, Homo sapien
ggctgcaggcttcttccgttcatgt

SEQ ID NO: 2892142 - DNA, 25 bp, Homo sapien
tcagaaggcaaaaggtagctggtat

SEQ ID NO: 2892143 - DNA, 25 bp, Homo sapien
gaataaaagttcactcactagggag

SEQ ID NO: 2892144 - DNA, 25 bp, Homo sapien
gggaaccactctcttgggcagtcaa

SEQ ID NO: 2892145 - DNA, 25 bp, Homo sapien
ttccaaatgccatgggagcccaggg

SEQ ID NO: 2892146 - DNA, 25 bp, Homo sapien
gaggaacccccaaactgatctgaaa

SEQ ID NO: 2892147 - DNA, 25 bp, Homo sapien
gtgtcattaagcatgtgtgactgcc

SEQ ID NO: 2892148 - DNA, 25 bp, Homo sapien
tgaggttcctgaaaacttgtcattg

SEQ ID NO: 2892149 - DNA, 25 bp, Homo sapien
aggagggttggcagtccccccatca

SEQ ID NO: 2892150 - DNA, 25 bp, Homo sapien
tttgccccagcccactggataatgc

SEQ ID NO: 2892151 - DNA, 25 bp, Homo sapien
tgccagaatttgagggttgttattg

SEQ ID NO: 2892152 - DNA, 25 bp, Homo sapien
tgttattggcttaggtgtaatgaag

SEQ ID NO: 2892153 - DNA, 25 bp, Homo sapien
tgtacagcactgaaatgacaagcac

SEQ ID NO: 2892154 - DNA, 25 bp, Homo sapien
gaatgttgtctaacaatttcccaat

SEQ ID NO: 2892155 - DNA, 25 bp, Homo sapien
tatgtcagttatccacgatcaactg

SEQ ID NO: 2892156 - DNA, 25 bp, Homo sapien
caagcactgttcagccgttgtagaa

SEQ ID NO: 2892157 - DNA, 25 bp, Homo sapien
ttattggttcatcaagagcaaaggg

SEQ ID NO: 2892158 - DNA, 25 bp, Homo sapien
tcagatgttcaaggttattggttca

SEQ ID NO: 2892159 - DNA, 25 bp, Homo sapien
aaatgtgacccggttttcatgagtc

SEQ ID NO: 2892160 - DNA, 25 bp, Homo sapien
caaggttattggttcatcaagagca

SEQ ID NO: 2892161 - DNA, 25 bp, Homo sapien
catcgagcatgagcatcgacagcaa

SEQ ID NO: 2892162 - DNA, 25 bp, Homo sapien
gcttggcctggatacatcgagcatg

SEQ ID NO: 2892163 - DNA, 25 bp, Homo sapien
gaaagcttggcctggatacatcgag

SEQ ID NO: 2892164 - DNA, 25 bp, Homo sapien
cctggatacatcgagcatgagcatc

SEQ ID NO: 2892165 - DNA, 25 bp, Homo sapien
gggctttcgtgtctgagaggattcc

SEQ ID NO: 2892166 - DNA, 25 bp, Homo sapien
ctgtcccgaccctgcccggtgggcg

SEQ ID NO: 2892167 - DNA, 25 bp, Homo sapien
gagaggattcctgtcccgaccctgc

SEQ ID NO: 2892168 - DNA, 25 bp, Homo sapien
ctttcgtgtctgagaggattcctgt

SEQ ID NO: 2892169 - DNA, 25 bp, Homo sapien
tgatggacgaggacaccggtggcct

SEQ ID NO: 2892170 - DNA, 25 bp, Homo sapien
ctggttagcgattgatggacgagga

SEQ ID NO: 2892171 - DNA, 25 bp, Homo sapien
cgaggacaccggtggcctgaccgca

SEQ ID NO: 2892172 - DNA, 25 bp, Homo sapien
tggttagcgattgatggacgaggac

SEQ ID NO: 2892173 - DNA, 25 bp, Homo sapien
tagcgttcccaatggcagctggcct

SEQ ID NO: 2892174 - DNA, 25 bp, Homo sapien
tgggaattgggaataaccccattca

SEQ ID NO: 2892175 - DNA, 25 bp, Homo sapien
cttcttgcttgttgcctgatcttgg

SEQ ID NO: 2892176 - DNA, 25 bp, Homo sapien
gctggtatgtaagtcatgttcagtg

SEQ ID NO: 2892177 - DNA, 25 bp, Homo sapien
tgggataaggtctgcactgggaggg

SEQ ID NO: 2892178 - DNA, 25 bp, Homo sapien
gggataaggtctgcactgggaggga

SEQ ID NO: 2892179 - DNA, 25 bp, Homo sapien
ctgggataaggtctgcactgggagg

SEQ ID NO: 2892180 - DNA, 25 bp, Homo sapien
ggataaggtctgcactgggagggag

SEQ ID NO: 2892181 - DNA, 25 bp, Homo sapien
gggcccttataggctagtgtgtggg

SEQ ID NO: 2892182 - DNA, 25 bp, Homo sapien
ccttataggctagtgtgtggggtgt

SEQ ID NO: 2892183 - DNA, 25 bp, Homo sapien
gcccttataggctagtgtgtggggt

SEQ ID NO: 2892184 - DNA, 25 bp, Homo sapien
tggggcccttataggctagtgtgtg

SEQ ID NO: 2892185 - DNA, 25 bp, Homo sapien
cattccgccagcgttctcttccttc

SEQ ID NO: 2892186 - DNA, 25 bp, Homo sapien
ttccgccagcgttctcttccttcca

SEQ ID NO: 2892187 - DNA, 25 bp, Homo sapien
ccctcattccgccagcgttctcttc

SEQ ID NO: 2892188 - DNA, 25 bp, Homo sapien
tcattccctcattccgccagcgttc

SEQ ID NO: 2892189 - DNA, 25 bp, Homo sapien
gctgcagctgtggacgccgtatcac

SEQ ID NO: 2892190 - DNA, 25 bp, Homo sapien
aaatgcttgtttatggtgaccgtgc

SEQ ID NO: 2892191 - DNA, 25 bp, Homo sapien
ggaaatgcttgtttatggtgaccgt

SEQ ID NO: 2892192 - DNA, 25 bp, Homo sapien
atgcttgtttatggtgaccgtgctg

SEQ ID NO: 2892193 - DNA, 25 bp, Homo sapien
ttcccagaagctggagtccacagga

SEQ ID NO: 2892194 - DNA, 25 bp, Homo sapien
cccagaagctggagtccacaggaac

SEQ ID NO: 2892195 - DNA, 25 bp, Homo sapien
cttcccagaagctggagtccacagg

SEQ ID NO: 2892196 - DNA, 25 bp, Homo sapien
tcccagaagctggagtccacaggaa

SEQ ID NO: 2892197 - DNA, 25 bp, Homo sapien
ttccagctagggaaccagaagagct

SEQ ID NO: 2892198 - DNA, 25 bp, Homo sapien
gaaacaggctgaaacatggtgacat

SEQ ID NO: 2892199 - DNA, 25 bp, Homo sapien
ccaagggtctggcaaagcaaggatg

SEQ ID NO: 2892200 - DNA, 25 bp, Homo sapien
gatgattcatgaaccagcttgggta

SEQ ID NO: 2892201 - DNA, 25 bp, Homo sapien
cttgcctccagaacgatataggtac

SEQ ID NO: 2892202 - DNA, 25 bp, Homo sapien
ccttgcctccagaacgatataggta

SEQ ID NO: 2892203 - DNA, 25 bp, Homo sapien
ctaaacaaatgcagactcgttgagg

SEQ ID NO: 2892204 - DNA, 25 bp, Homo sapien
cgttgaggccaaggtcatcattgtc

SEQ ID NO: 2892205 - DNA, 25 bp, Homo sapien
tattggaaaggattgagacaaggga

SEQ ID NO: 2892206 - DNA, 25 bp, Homo sapien
agttcttaactcttgcaagtagagc

SEQ ID NO: 2892207 - DNA, 25 bp, Homo sapien
gagctctaatatccacagaaagaaa

SEQ ID NO: 2892208 - DNA, 25 bp, Homo sapien
gacaagggagactcaatgaacattt

SEQ ID NO: 2892209 - DNA, 25 bp, Homo sapien
gctgctacatgcccggccgctggga

SEQ ID NO: 2892210 - DNA, 25 bp, Homo sapien
gtccgggttgtagccgcgcgcggag

SEQ ID NO: 2892211 - DNA, 25 bp, Homo sapien
gcccttccgactgcgctcgcaggga

SEQ ID NO: 2892212 - DNA, 25 bp, Homo sapien
cgggatgtgggacgcgcgcagagat

SEQ ID NO: 2892213 - DNA, 25 bp, Homo sapien
attctcgtcaaacacggggggcttg

SEQ ID NO: 2892214 - DNA, 25 bp, Homo sapien
cttcctcattctcgtcaaacacggg

SEQ ID NO: 2892215 - DNA, 25 bp, Homo sapien
gcttgtgggagtggttcccgcccat

SEQ ID NO: 2892216 - DNA, 25 bp, Homo sapien
ggcttgtgggagtggttcccgccca

SEQ ID NO: 2892217 - DNA, 25 bp, Homo sapien
ctctaggcccctttacgatcccata

SEQ ID NO: 2892218 - DNA, 25 bp, Homo sapien
ccagagtcagacttctaagaacggg

SEQ ID NO: 2892219 - DNA, 25 bp, Homo sapien
cgaaagtcagcttgatccacatcag

SEQ ID NO: 2892220 - DNA, 25 bp, Homo sapien
tgacaggtagcacgagggttcagcc

SEQ ID NO: 2892221 - DNA, 25 bp, Homo sapien
gcagcaacaacatgacaagaggacg

SEQ ID NO: 2892222 - DNA, 25 bp, Homo sapien
ttagcaactgaagaaacatctgaat

SEQ ID NO: 2892223 - DNA, 25 bp, Homo sapien
gaagaaacatctgaatcacatatcg

SEQ ID NO: 2892224 - DNA, 25 bp, Homo sapien
aaacatctgaatcacatatcgacat

SEQ ID NO: 2892225 - DNA, 25 bp, Homo sapien
agcaactgaagaaacatctgaatca

SEQ ID NO: 2892226 - DNA, 25 bp, Homo sapien
tcatgagcagaatgggcgcaactct

SEQ ID NO: 2892227 - DNA, 25 bp, Homo sapien
tatctgtccttcgaggcccagttcg

SEQ ID NO: 2892228 - DNA, 25 bp, Homo sapien
cagccgagctgggtatcaccacata

SEQ ID NO: 2892229 - DNA, 25 bp, Homo sapien
ggctcagacaggtcccgcttggaaa

SEQ ID NO: 2892230 - DNA, 25 bp, Homo sapien
tggcgctgtcagctctgattctact

SEQ ID NO: 2892231 - DNA, 25 bp, Homo sapien
ctggcgctgtcagctctgattctac

SEQ ID NO: 2892232 - DNA, 25 bp, Homo sapien
cacaaattgtccatctgaagccttc

SEQ ID NO: 2892233 - DNA, 25 bp, Homo sapien
gatgaggctctgcagtcttgctgct

SEQ ID NO: 2892234 - DNA, 25 bp, Homo sapien
tccacaggggaatttgcagcacatt

SEQ ID NO: 2892235 - DNA, 25 bp, Homo sapien
cagccgtccacccttatccacaggg

SEQ ID NO: 2892236 - DNA, 25 bp, Homo sapien
tccctttaccaatggcccgcagaat

SEQ ID NO: 2892237 - DNA, 25 bp, Homo sapien
aactccctttaccaatggcccgcag

SEQ ID NO: 2892238 - DNA, 25 bp, Homo sapien
ctttaccaatggcccgcagaatctg

SEQ ID NO: 2892239 - DNA, 25 bp, Homo sapien
tttaccaatggcccgcagaatctga

SEQ ID NO: 2892240 - DNA, 25 bp, Homo sapien
gtctatgttgctggaaagagctgcc

SEQ ID NO: 2892241 - DNA, 25 bp, Homo sapien
actttcctcacttagattctcaagg

SEQ ID NO: 2892242 - DNA, 25 bp, Homo sapien
gagctgcctttgtgatgtttatggg

SEQ ID NO: 2892243 - DNA, 25 bp, Homo sapien
ttctcaaggaacaaacggcattggc

SEQ ID NO: 2892244 - DNA, 25 bp, Homo sapien
catacaagggaaacttcaactcttc

SEQ ID NO: 2892245 - DNA, 25 bp, Homo sapien
ctcttcacccatacaatccaagcct

SEQ ID NO: 2892246 - DNA, 25 bp, Homo sapien
ccttgagaactgaacatcctccctt

SEQ ID NO: 2892247 - DNA, 25 bp, Homo sapien
gccttgagaactgaacatcctccct

SEQ ID NO: 2892248 - DNA, 25 bp, Homo sapien
aagggatagtgtgagtgccaggcag

SEQ ID NO: 2892249 - DNA, 25 bp, Homo sapien
taagggatagtgtgagtgccaggca

SEQ ID NO: 2892250 - DNA, 25 bp, Homo sapien
ctaagggatagtgtgagtgccaggc

SEQ ID NO: 2892251 - DNA, 25 bp, Homo sapien
gggatagtgtgagtgccaggcagag

SEQ ID NO: 2892252 - DNA, 25 bp, Homo sapien
atgaagatgtctgcatgaacaatga

SEQ ID NO: 2892253 - DNA, 25 bp, Homo sapien
agatgtctgcatgaacaatgaaggc

SEQ ID NO: 2892254 - DNA, 25 bp, Homo sapien
aagatgtctgcatgaacaatgaagg

SEQ ID NO: 2892255 - DNA, 25 bp, Homo sapien
gaagatgtctgcatgaacaatgaag

SEQ ID NO: 2892256 - DNA, 25 bp, Homo sapien
atttcatacatgctcggtctatcat

SEQ ID NO: 2892257 - DNA, 25 bp, Homo sapien
tacatgctcggtctatcatgtccca

SEQ ID NO: 2892258 - DNA, 25 bp, Homo sapien
catacatgctcggtctatcatgtcc

SEQ ID NO: 2892259 - DNA, 25 bp, Homo sapien
catgctcggtctatcatgtcccaca

SEQ ID NO: 2892260 - DNA, 25 bp, Homo sapien
gggaagagccagccatagcatgtgg

SEQ ID NO: 2892261 - DNA, 25 bp, Homo sapien
cacagtcgggtctccatgggacaga

SEQ ID NO: 2892262 - DNA, 25 bp, Homo sapien
ggaagagccagccatagcatgtggc

SEQ ID NO: 2892263 - DNA, 25 bp, Homo sapien
ttcttagtgtctcgcttctgcacga

SEQ ID NO: 2892264 - DNA, 25 bp, Homo sapien
tgtctcgcttctgcacgatgcatac

SEQ ID NO: 2892265 - DNA, 25 bp, Homo sapien
tagtgtctcgcttctgcacgatgca

SEQ ID NO: 2892266 - DNA, 25 bp, Homo sapien
acattttcttagtgtctcgcttctg

SEQ ID NO: 2892267 - DNA, 25 bp, Homo sapien
tccagcccttgcatgatctgcagct

SEQ ID NO: 2892268 - DNA, 25 bp, Homo sapien
cagattgaccaggaaggggtgctcc

SEQ ID NO: 2892269 - DNA, 25 bp, Homo sapien
gaaaacattccgaacctcatccctc

SEQ ID NO: 2892270 - DNA, 25 bp, Homo sapien
tcatccctctcgatgcacttctgct

SEQ ID NO: 2892271 - DNA, 25 bp, Homo sapien
ccagctgtagctaagaaaggccaaa

SEQ ID NO: 2892272 - DNA, 25 bp, Homo sapien
ccaaagttcaggtcaggctgttgtt

SEQ ID NO: 2892273 - DNA, 25 bp, Homo sapien
gatgcatagaaatcaagaactgagg

SEQ ID NO: 2892274 - DNA, 25 bp, Homo sapien
gacaaattggaccatgcacctggaa

SEQ ID NO: 2892275 - DNA, 25 bp, Homo sapien
aacagtctaatgctaaaaacgcaag

SEQ ID NO: 2892276 - DNA, 25 bp, Homo sapien
tcaatcaggataacagtctaatgct

SEQ ID NO: 2892277 - DNA, 25 bp, Homo sapien
gctaaaaacgcaagacacattttcc

SEQ ID NO: 2892278 - DNA, 25 bp, Homo sapien
tctaatgctaaaaacgcaagacaca

SEQ ID NO: 2892279 - DNA, 25 bp, Homo sapien
ctgtaagacagggaggaactgtctt

SEQ ID NO: 2892280 - DNA, 25 bp, Homo sapien
caccagggtctagcacagcatttgg

SEQ ID NO: 2892281 - DNA, 25 bp, Homo sapien
cacagttctgccaccagggtctagc

SEQ ID NO: 2892282 - DNA, 25 bp, Homo sapien
tgccaccagggtctagcacagcatt

SEQ ID NO: 2892283 - DNA, 25 bp, Homo sapien
ttaaagcataagatgaagtttccat

SEQ ID NO: 2892284 - DNA, 25 bp, Homo sapien
ctttaaagcataagatgaagtttcc

SEQ ID NO: 2892285 - DNA, 25 bp, Homo sapien
ctggtatctttaaagcataagatga

SEQ ID NO: 2892286 - DNA, 25 bp, Homo sapien
ggtatctttaaagcataagatgaag

SEQ ID NO: 2892287 - DNA, 25 bp, Homo sapien
agcacaggccccctgagtgtcggag

SEQ ID NO: 2892288 - DNA, 25 bp, Homo sapien
gagtgcgggcaggtgcatcctgtga

SEQ ID NO: 2892289 - DNA, 25 bp, Homo sapien
ctcatgcagccctctgaacagctca

SEQ ID NO: 2892290 - DNA, 25 bp, Homo sapien
acactcacagctgccaatcctgccc

SEQ ID NO: 2892291 - DNA, 25 bp, Homo sapien
catttgcaggggaagaaggttcatg

SEQ ID NO: 2892292 - DNA, 25 bp, Homo sapien
cggttcacggcattccctttcattc

SEQ ID NO: 2892293 - DNA, 25 bp, Homo sapien
ttcattcacatttgcaggggaagaa

SEQ ID NO: 2892294 - DNA, 25 bp, Homo sapien
ttcacatttgcaggggaagaaggtt

SEQ ID NO: 2892295 - DNA, 25 bp, Homo sapien
cttttactggttgaaaagtgcccag

SEQ ID NO: 2892296 - DNA, 25 bp, Homo sapien
ccagccagctcgagagatctattaa

SEQ ID NO: 2892297 - DNA, 25 bp, Homo sapien
gattctgctctttcgaaagtgcagc

SEQ ID NO: 2892298 - DNA, 25 bp, Homo sapien
tacaattctacccacgattctgctc

SEQ ID NO: 2892299 - DNA, 25 bp, Homo sapien
cgaaagtgcagctttcttagttgag

SEQ ID NO: 2892300 - DNA, 25 bp, Homo sapien
catgcaaaacacaacaaggaaagct

SEQ ID NO: 2892301 - DNA, 25 bp, Homo sapien
tgggcttccaacttttaaactgata

SEQ ID NO: 2892302 - DNA, 25 bp, Homo sapien
aaaatgtagtgttgtcaggcccacg

SEQ ID NO: 2892303 - DNA, 25 bp, Homo sapien
ggagttggaaggtcccaattccaca

SEQ ID NO: 2892304 - DNA, 25 bp, Homo sapien
gactctaaattgtctgttggcaatt

SEQ ID NO: 2892305 - DNA, 25 bp, Homo sapien
cgtatccttttccatagactctaaa

SEQ ID NO: 2892306 - DNA, 25 bp, Homo sapien
gaagtgtccgtatccttttccatag

SEQ ID NO: 2892307 - DNA, 25 bp, Homo sapien
actgtctgcagaagtgtccgtatcc

SEQ ID NO: 2892308 - DNA, 25 bp, Homo sapien
gttctcacacatgacacctggcagt

SEQ ID NO: 2892309 - DNA, 25 bp, Homo sapien
cagcgttctcacacatgacacctgg

SEQ ID NO: 2892310 - DNA, 25 bp, Homo sapien
tgtcaatctccagcgttctcacaca

SEQ ID NO: 2892311 - DNA, 25 bp, Homo sapien
cagactctgcgccaggtagaggtgg

SEQ ID NO: 2892312 - DNA, 25 bp, Homo sapien
gaagtaagcctcactctccagaccc

SEQ ID NO: 2892313 - DNA, 25 bp, Homo sapien
ctggaagtaagcctcactctccaga

SEQ ID NO: 2892314 - DNA, 25 bp, Homo sapien
ggaagtaagcctcactctccagacc

SEQ ID NO: 2892315 - DNA, 25 bp, Homo sapien
agtgccagtatctggggtgccctgg

SEQ ID NO: 2892316 - DNA, 25 bp, Homo sapien
aatgtgtcagtgcttgtccataaac

SEQ ID NO: 2892317 - DNA, 25 bp, Homo sapien
aataaaagtgagactaccataactc

SEQ ID NO: 2892318 - DNA, 25 bp, Homo sapien
tctgaggtgcttccaactggaggtg

SEQ ID NO: 2892319 - DNA, 25 bp, Homo sapien
gtagttctctacagcaaatgtgtca

SEQ ID NO: 2892320 - DNA, 25 bp, Homo sapien
tatttaacctgtgctgcagtgggca

SEQ ID NO: 2892321 - DNA, 25 bp, Homo sapien
gagttcacgccacctctcaatggag

SEQ ID NO: 2892322 - DNA, 25 bp, Homo sapien
tatgttccttggtcacttcacagag

SEQ ID NO: 2892323 - DNA, 25 bp, Homo sapien
atgattcaggaattcacctcccagg

SEQ ID NO: 2892324 - DNA, 25 bp, Homo sapien
tcaccgagacaacatcaaagccaag

SEQ ID NO: 2892325 - DNA, 25 bp, Homo sapien
gggtgcaatgatggcaatcaccgag

SEQ ID NO: 2892326 - DNA, 25 bp, Homo sapien
ggcacgaacaggagttagcaagcaa

SEQ ID NO: 2892327 - DNA, 25 bp, Homo sapien
aaagccaagatctgaggcacgaaca

SEQ ID NO: 2892328 - DNA, 25 bp, Homo sapien
tgcatggctccaaaataggttctgt

SEQ ID NO: 2892329 - DNA, 25 bp, Homo sapien
gggtctctactagtaggtctcctag

SEQ ID NO: 2892330 - DNA, 25 bp, Homo sapien
taggtctcctagcaggtgactggat

SEQ ID NO: 2892331 - DNA, 25 bp, Homo sapien
cctagcaggtgactggatgcatggc

SEQ ID NO: 2892332 - DNA, 25 bp, Homo sapien
ccttgcagggtgcagaagtgataga

SEQ ID NO: 2892333 - DNA, 25 bp, Homo sapien
cttgcagggtgcagaagtgatagac

SEQ ID NO: 2892334 - DNA, 25 bp, Homo sapien
ggaaacttgcatactggaatgaatt

SEQ ID NO: 2892335 - DNA, 25 bp, Homo sapien
gagggaaacttgcatactggaatga

SEQ ID NO: 2892336 - DNA, 25 bp, Homo sapien
agggaaacttgcatactggaatgaa

SEQ ID NO: 2892337 - DNA, 25 bp, Homo sapien
gggaaacttgcatactggaatgaat

SEQ ID NO: 2892338 - DNA, 25 bp, Homo sapien
tgtggtacctctgaagatactccag

SEQ ID NO: 2892339 - DNA, 25 bp, Homo sapien
agcgcaggtcgcctcccaggagcag

SEQ ID NO: 2892340 - DNA, 25 bp, Homo sapien
ggccagtgccagctcacagatgtag

SEQ ID NO: 2892341 - DNA, 25 bp, Homo sapien
gatgtagagtttcacagtcccctct

SEQ ID NO: 2892342 - DNA, 25 bp, Homo sapien
tcactttccaaagcctctcattgag

SEQ ID NO: 2892343 - DNA, 25 bp, Homo sapien
tctgcaggcaaagtcactttgctca

SEQ ID NO: 2892344 - DNA, 25 bp, Homo sapien
tttccaaagcctctcattgagttcc

SEQ ID NO: 2892345 - DNA, 25 bp, Homo sapien
cttctgcaggcaaagtcactttgct

SEQ ID NO: 2892346 - DNA, 25 bp, Homo sapien
ttgagcagagtttagtagcccacct

SEQ ID NO: 2892347 - DNA, 25 bp, Homo sapien
taaatacggcattgaaagtgtctgg

SEQ ID NO: 2892348 - DNA, 25 bp, Homo sapien
gggataattcctccacttccgagtg

SEQ ID NO: 2892349 - DNA, 25 bp, Homo sapien
caagaagtaggtttaatcaggagca

SEQ ID NO: 2892350 - DNA, 25 bp, Homo sapien
aaagacagagtttgaagcatctgct

SEQ ID NO: 2892351 - DNA, 25 bp, Homo sapien
acaggaacgaggaatttaaagacag

SEQ ID NO: 2892352 - DNA, 25 bp, Homo sapien
taagtggtccatgggaacaggaacg

SEQ ID NO: 2892353 - DNA, 25 bp, Homo sapien
ttaaagacagagtttgaagcatctg

SEQ ID NO: 2892354 - DNA, 25 bp, Homo sapien
gcttttagtgtatcgtttatttgcc

SEQ ID NO: 2892355 - DNA, 25 bp, Homo sapien
tagtgtatcgtttatttgcctttta

SEQ ID NO: 2892356 - DNA, 25 bp, Homo sapien
cttttagtgtatcgtttatttgcct

SEQ ID NO: 2892357 - DNA, 25 bp, Homo sapien
tgcttttagtgtatcgtttatttgc

SEQ ID NO: 2892358 - DNA, 25 bp, Homo sapien
cattcatcgtcttgcttttgaacat

SEQ ID NO: 2892359 - DNA, 25 bp, Homo sapien
tgccacattcatcgtcttgcttttg

SEQ ID NO: 2892360 - DNA, 25 bp, Homo sapien
aaatgctgacccgatttactgatgc

SEQ ID NO: 2892361 - DNA, 25 bp, Homo sapien
aatgctgacccgatttactgatgcc

SEQ ID NO: 2892362 - DNA, 25 bp, Homo sapien
agccggttgggatgactgtcacagc

SEQ ID NO: 2892363 - DNA, 25 bp, Homo sapien
aacctctggcacataggcatagcct

SEQ ID NO: 2892364 - DNA, 25 bp, Homo sapien
ggaattcttagtcgccaacctctgg

SEQ ID NO: 2892365 - DNA, 25 bp, Homo sapien
aatgggatgctacgagtcctgggct

SEQ ID NO: 2892366 - DNA, 25 bp, Homo sapien
gatgctgcgactcttcgagagcttc

SEQ ID NO: 2892367 - DNA, 25 bp, Homo sapien
tctgtgaagacgctcaggccacggc

SEQ ID NO: 2892368 - DNA, 25 bp, Homo sapien
ctgtgagatgctgcgactcttcgag

SEQ ID NO: 2892369 - DNA, 25 bp, Homo sapien
tgtgaagacgctcaggccacggcct

SEQ ID NO: 2892370 - DNA, 25 bp, Homo sapien
agtgtgcatcttgccacgatcacgt

SEQ ID NO: 2892371 - DNA, 25 bp, Homo sapien
ttcagcagtgtgcatcttgccacga

SEQ ID NO: 2892372 - DNA, 25 bp, Homo sapien
tcagcagtgtgcatcttgccacgat

SEQ ID NO: 2892373 - DNA, 25 bp, Homo sapien
gcagtgtgcatcttgccacgatcac

SEQ ID NO: 2892374 - DNA, 25 bp, Homo sapien
gttaatcatagttaattgtgacccc

SEQ ID NO: 2892375 - DNA, 25 bp, Homo sapien
aatcagcgtcaggtcctggcttggg

SEQ ID NO: 2892376 - DNA, 25 bp, Homo sapien
tcctgctgacagttaatcatagtta

SEQ ID NO: 2892377 - DNA, 25 bp, Homo sapien
aggctgggatcctcgagcgcttcct

SEQ ID NO: 2892378 - DNA, 25 bp, Homo sapien
gcttgacattgtccatttactccct

SEQ ID NO: 2892379 - DNA, 25 bp, Homo sapien
tgctttcctatgtcctgatactgta

SEQ ID NO: 2892380 - DNA, 25 bp, Homo sapien
tgatactgtacagcttgacattgtc

SEQ ID NO: 2892381 - DNA, 25 bp, Homo sapien
gacattgtccatttactccctgctg

SEQ ID NO: 2892382 - DNA, 25 bp, Homo sapien
tccactcgagctcaatgagggtttg

SEQ ID NO: 2892383 - DNA, 25 bp, Homo sapien
gtcatggcatccactcgagctcaat

SEQ ID NO: 2892384 - DNA, 25 bp, Homo sapien
cagggttccctgcaggtgtcatggc

SEQ ID NO: 2892385 - DNA, 25 bp, Homo sapien
tggcatccactcgagctcaatgagg

SEQ ID NO: 2892386 - DNA, 25 bp, Homo sapien
cgtgttcatccagcaggatattgtc

SEQ ID NO: 2892387 - DNA, 25 bp, Homo sapien
caggatattgtctggcttgatgtct

SEQ ID NO: 2892388 - DNA, 25 bp, Homo sapien
gtgttcatccagcaggatattgtct

SEQ ID NO: 2892389 - DNA, 25 bp, Homo sapien
tccagcaggatattgtctggcttga

SEQ ID NO: 2892390 - DNA, 25 bp, Homo sapien
tgcttctgtgatttgaccttgcctg

SEQ ID NO: 2892391 - DNA, 25 bp, Homo sapien
ttctgtgatttgaccttgcctggcc

SEQ ID NO: 2892392 - DNA, 25 bp, Homo sapien
gcttctgtgatttgaccttgcctgg

SEQ ID NO: 2892393 - DNA, 25 bp, Homo sapien
cctgcttctgtgatttgaccttgcc

SEQ ID NO: 2892394 - DNA, 25 bp, Homo sapien
cagggctgggacactgtgaaggcca

SEQ ID NO: 2892395 - DNA, 25 bp, Homo sapien
gggcagaacgagatgcagaaagaat

SEQ ID NO: 2892396 - DNA, 25 bp, Homo sapien
gggtggaaaaagatgaggagctcaa

SEQ ID NO: 2892397 - DNA, 25 bp, Homo sapien
tgctgcatagccagaaggcagggct

SEQ ID NO: 2892398 - DNA, 25 bp, Homo sapien
cagagacttttcgatgaaatgggag

SEQ ID NO: 2892399 - DNA, 25 bp, Homo sapien
gctagcagagacttttcgatgaaat

SEQ ID NO: 2892400 - DNA, 25 bp, Homo sapien
ccaccagctagcagagacttttcga

SEQ ID NO: 2892401 - DNA, 25 bp, Homo sapien
gctctgtcccaccagctagcagaga

SEQ ID NO: 2892402 - DNA, 25 bp, Homo sapien
ggccatgggcatagaattctctctt

SEQ ID NO: 2892403 - DNA, 25 bp, Homo sapien
gagcggaattccctgctcctaaatt

SEQ ID NO: 2892404 - DNA, 25 bp, Homo sapien
caaagccactcattgagtgttggag

SEQ ID NO: 2892405 - DNA, 25 bp, Homo sapien
gggaagggttatcagccattcacct

SEQ ID NO: 2892406 - DNA, 25 bp, Homo sapien
tgctcctttcactaccgtcgctatg

SEQ ID NO: 2892407 - DNA, 25 bp, Homo sapien
cactaccgtcgctatgttgaagtct

SEQ ID NO: 2892408 - DNA, 25 bp, Homo sapien
ccgtcgctatgttgaagtctgtaat

SEQ ID NO: 2892409 - DNA, 25 bp, Homo sapien
ttgaagtctgtaatgtgaacatgtc

SEQ ID NO: 2892410 - DNA, 25 bp, Homo sapien
ctcccccactgggtagctctctgaa

SEQ ID NO: 2892411 - DNA, 25 bp, Homo sapien
atctcccccactgggtagctctctg

SEQ ID NO: 2892412 - DNA, 25 bp, Homo sapien
ccatctcccccactgggtagctctc

SEQ ID NO: 2892413 - DNA, 25 bp, Homo sapien
catctcccccactgggtagctctct

SEQ ID NO: 2892414 - DNA, 25 bp, Homo sapien
gctcttcacaggtacagtggactcc

SEQ ID NO: 2892415 - DNA, 25 bp, Homo sapien
ctcttcacaggtacagtggactcct

SEQ ID NO: 2892416 - DNA, 25 bp, Homo sapien
cagaataggcctctgctattatcac

SEQ ID NO: 2892417 - DNA, 25 bp, Homo sapien
agtggactcctcagaataggcctct

SEQ ID NO: 2892418 - DNA, 25 bp, Homo sapien
caaatgtctgcagtcctagagaagg

SEQ ID NO: 2892419 - DNA, 25 bp, Homo sapien
attcagaactcagggtagaagcagc

SEQ ID NO: 2892420 - DNA, 25 bp, Homo sapien
ggcagccccaagtccattcagaact

SEQ ID NO: 2892421 - DNA, 25 bp, Homo sapien
cttgtcatgcctggcagccccaagt

SEQ ID NO: 2892422 - DNA, 25 bp, Homo sapien
aagagaaagacaaattgtctctgtt

SEQ ID NO: 2892423 - DNA, 25 bp, Homo sapien
aggaaaagagaaagacaaattgtct

SEQ ID NO: 2892424 - DNA, 25 bp, Homo sapien
gaggttctggccagggtaattaggc

SEQ ID NO: 2892425 - DNA, 25 bp, Homo sapien
attaggcaggagaaggaaataaagg

SEQ ID NO: 2892426 - DNA, 25 bp, Homo sapien
gggcagctacacacttgaatctgac

SEQ ID NO: 2892427 - DNA, 25 bp, Homo sapien
cagctacacacttgaatctgaccag

SEQ ID NO: 2892428 - DNA, 25 bp, Homo sapien
gctggctgggcagctacacacttga

SEQ ID NO: 2892429 - DNA, 25 bp, Homo sapien
ggctgggcagctacacacttgaatc

SEQ ID NO: 2892430 - DNA, 25 bp, Homo sapien
gcagctcataggctgtgatgcccag

SEQ ID NO: 2892431 - DNA, 25 bp, Homo sapien
cagtcgacagggtacgagtatccgg

SEQ ID NO: 2892432 - DNA, 25 bp, Homo sapien
atgtacacctggaatacttctggag

SEQ ID NO: 2892433 - DNA, 25 bp, Homo sapien
gtatccggggcctctgtccatgtac

SEQ ID NO: 2892434 - DNA, 25 bp, Homo sapien
aagttcagggcgttcataggcggca

SEQ ID NO: 2892435 - DNA, 25 bp, Homo sapien
tgacttgtcactgatccgctgtggg

SEQ ID NO: 2892436 - DNA, 25 bp, Homo sapien
aaaccacgaggccaaggcgctttga

SEQ ID NO: 2892437 - DNA, 25 bp, Homo sapien
tctgtacaatgagtgggttggacca

SEQ ID NO: 2892438 - DNA, 25 bp, Homo sapien
taacaggaaacgaaccgagcaggaa

SEQ ID NO: 2892439 - DNA, 25 bp, Homo sapien
cataagattaacagcctctggcgga

SEQ ID NO: 2892440 - DNA, 25 bp, Homo sapien
tgacccatgaggaatgactgccaat

SEQ ID NO: 2892441 - DNA, 25 bp, Homo sapien
tagggcaaatgctcgccaaggtcat

SEQ ID NO: 2892442 - DNA, 25 bp, Homo sapien
tgaccgagtggatttcgtacggcct

SEQ ID NO: 2892443 - DNA, 25 bp, Homo sapien
ggaggagtagtggacacgctccacc

SEQ ID NO: 2892444 - DNA, 25 bp, Homo sapien
ggatttcatcgatgggcgtgaccga

SEQ ID NO: 2892445 - DNA, 25 bp, Homo sapien
caccacgtggaggagtagtggacac

SEQ ID NO: 2892446 - DNA, 25 bp, Homo sapien
tagggcacgctctgtatgtcatgaa

SEQ ID NO: 2892447 - DNA, 25 bp, Homo sapien
caaagccgggcatcagtgccttctt

SEQ ID NO: 2892448 - DNA, 25 bp, Homo sapien
tgtcatgaaggctggacacgcggct

SEQ ID NO: 2892449 - DNA, 25 bp, Homo sapien
ttcatgtcggccaagtagggcacgc

SEQ ID NO: 2892450 - DNA, 25 bp, Homo sapien
caaagtcttgctttgcaccaaggcg

SEQ ID NO: 2892451 - DNA, 25 bp, Homo sapien
agctgccaaagtcttgctttgcacc

SEQ ID NO: 2892452 - DNA, 25 bp, Homo sapien
tgccaaagtcttgctttgcaccaag

SEQ ID NO: 2892453 - DNA, 25 bp, Homo sapien
aagtcttgctttgcaccaaggcggg

SEQ ID NO: 2892454 - DNA, 25 bp, Homo sapien
tcctttgtgccatccctggatctgt

SEQ ID NO: 2892455 - DNA, 25 bp, Homo sapien
ttcaagctcaaatgtgggatcgcag

SEQ ID NO: 2892456 - DNA, 25 bp, Homo sapien
tgttctttgccaatcgcttcttctt

SEQ ID NO: 2892457 - DNA, 25 bp, Homo sapien
tgggatcgcagttcaacctcccttt

SEQ ID NO: 2892458 - DNA, 25 bp, Homo sapien
tgaattcctcccggacagtctccaa

SEQ ID NO: 2892459 - DNA, 25 bp, Homo sapien
gatgaattcctcccggacagtctcc

SEQ ID NO: 2892460 - DNA, 25 bp, Homo sapien
atgatgaattcctcccggacagtct

SEQ ID NO: 2892461 - DNA, 25 bp, Homo sapien
gaattcctcccggacagtctccaaa

SEQ ID NO: 2892462 - DNA, 25 bp, Homo sapien
caaatgcgctgggtttgctgccatt

SEQ ID NO: 2892463 - DNA, 25 bp, Homo sapien
ttagtcagggcaccctccatccaca

SEQ ID NO: 2892464 - DNA, 25 bp, Homo sapien
ccacagcaaatgcgctgggtttgct

SEQ ID NO: 2892465 - DNA, 25 bp, Homo sapien
agcaaatgcgctgggtttgctgcca

SEQ ID NO: 2892466 - DNA, 25 bp, Homo sapien
caccgtgtccggtctttaaatatct

SEQ ID NO: 2892467 - DNA, 25 bp, Homo sapien
gctgattctccccagtcattcgaaa

SEQ ID NO: 2892468 - DNA, 25 bp, Homo sapien
aattcctcccgctgcgtcaggtcac

SEQ ID NO: 2892469 - DNA, 25 bp, Homo sapien
tctccccagtcattcgaaaggcatt

SEQ ID NO: 2892470 - DNA, 25 bp, Homo sapien
tcccgctgcgtcaggtcactgagct

SEQ ID NO: 2892471 - DNA, 25 bp, Homo sapien
ccatcaggacctctagactgtgtct

SEQ ID NO: 2892472 - DNA, 25 bp, Homo sapien
cccatcaggacctctagactgtgtc

SEQ ID NO: 2892473 - DNA, 25 bp, Homo sapien
gctggtgggtggtgaataatggact

SEQ ID NO: 2892474 - DNA, 25 bp, Homo sapien
ctggggatccggatgctggtgggtg

SEQ ID NO: 2892475 - DNA, 25 bp, Homo sapien
tggagcttgctttgggcctggcctc

SEQ ID NO: 2892476 - DNA, 25 bp, Homo sapien
ctgcagccacgggtgcaggtgtggg

SEQ ID NO: 2892477 - DNA, 25 bp, Homo sapien
tgaggaggttgttgttgcacccgtc

SEQ ID NO: 2892478 - DNA, 25 bp, Homo sapien
cctcggctgtcggtgtccaagagct

SEQ ID NO: 2892479 - DNA, 25 bp, Homo sapien
tttggcagatgcagaaaacggaggc

SEQ ID NO: 2892480 - DNA, 25 bp, Homo sapien
gaaatctggtgttcctagggcgact

SEQ ID NO: 2892481 - DNA, 25 bp, Homo sapien
gacacttcaggttttgctccaggat

SEQ ID NO: 2892482 - DNA, 25 bp, Homo sapien
tcatctgaatggacacctgtgtgcc

SEQ ID NO: 2892483 - DNA, 25 bp, Homo sapien
gctgatgtttttatctgagaggtaa

SEQ ID NO: 2892484 - DNA, 25 bp, Homo sapien
caacaaggctgatgtttttatctga

SEQ ID NO: 2892485 - DNA, 25 bp, Homo sapien
ttcaacaaggctgatgtttttatct

SEQ ID NO: 2892486 - DNA, 25 bp, Homo sapien
caaggctgatgtttttatctgagag

SEQ ID NO: 2892487 - DNA, 25 bp, Homo sapien
tgtcttttgtgtgggttgtcataag

SEQ ID NO: 2892488 - DNA, 25 bp, Homo sapien
gatctggtttgaaaggatatggttg

SEQ ID NO: 2892489 - DNA, 25 bp, Homo sapien
tttctggtcatgacctcactgatct

SEQ ID NO: 2892490 - DNA, 25 bp, Homo sapien
cttttgtgtgggttgtcataaggaa

SEQ ID NO: 2892491 - DNA, 25 bp, Homo sapien
gtgtccaattgaaagaagaaggtaa

SEQ ID NO: 2892492 - DNA, 25 bp, Homo sapien
gatttccgtccatagtgtccaattg

SEQ ID NO: 2892493 - DNA, 25 bp, Homo sapien
gctctcctggatttccgtccatagt

SEQ ID NO: 2892494 - DNA, 25 bp, Homo sapien
ccttccttcccaaattcaactgaca

SEQ ID NO: 2892495 - DNA, 25 bp, Homo sapien
ctgcagttgagtgagcaccggagac

SEQ ID NO: 2892496 - DNA, 25 bp, Homo sapien
gagcaccggagacagtcacactggg

SEQ ID NO: 2892497 - DNA, 25 bp, Homo sapien
gttgagtgagcaccggagacagtca

SEQ ID NO: 2892498 - DNA, 25 bp, Homo sapien
gtttgggtcaaaggtccagctggca

SEQ ID NO: 2892499 - DNA, 25 bp, Homo sapien
acttggcacaaaggcgaaggttggc

SEQ ID NO: 2892500 - DNA, 25 bp, Homo sapien
tggcacaaaggcgaaggttggctct

SEQ ID NO: 2892501 - DNA, 25 bp, Homo sapien
taggagacttggcacaaaggcgaag

SEQ ID NO: 2892502 - DNA, 25 bp, Homo sapien
cacaaaggcgaaggttggctctccc

SEQ ID NO: 2892503 - DNA, 25 bp, Homo sapien
gagctgtcagaaacgctcagaaggg

SEQ ID NO: 2892504 - DNA, 25 bp, Homo sapien
aaaggcagcctttcatcccctaagc

SEQ ID NO: 2892505 - DNA, 25 bp, Homo sapien
tttgccaatgctcagttcttttttc

SEQ ID NO: 2892506 - DNA, 25 bp, Homo sapien
catcctcagctttttgccaatgctc

SEQ ID NO: 2892507 - DNA, 25 bp, Homo sapien
gctgggtaggtctgggttctaatcc

SEQ ID NO: 2892508 - DNA, 25 bp, Homo sapien
ggcatcttgtcaaatcaaactcaag

SEQ ID NO: 2892509 - DNA, 25 bp, Homo sapien
tattatctaagcaacctcaggcaaa

SEQ ID NO: 2892510 - DNA, 25 bp, Homo sapien
tgcggtgaggtactggcacgttccc

SEQ ID NO: 2892511 - DNA, 25 bp, Homo sapien
gtagccatatgggattcctcctact

SEQ ID NO: 2892512 - DNA, 25 bp, Homo sapien
taccccctgaatgaggtagcctcat

SEQ ID NO: 2892513 - DNA, 25 bp, Homo sapien
catatgggattcctcctactttacc

SEQ ID NO: 2892514 - DNA, 25 bp, Homo sapien
tactttaccccctgaatgaggtagc

SEQ ID NO: 2892515 - DNA, 25 bp, Homo sapien
gctctctctgctagacggtcagtgc

SEQ ID NO: 2892516 - DNA, 25 bp, Homo sapien
tctctctgctagacggtcagtgcag

SEQ ID NO: 2892517 - DNA, 25 bp, Homo sapien
ctctctctgctagacggtcagtgca

SEQ ID NO: 2892518 - DNA, 25 bp, Homo sapien
gtaagtgatgctcagttgggtcagt

SEQ ID NO: 2892519 - DNA, 25 bp, Homo sapien
aagttgctgtaagtgatgctcagtt

SEQ ID NO: 2892520 - DNA, 25 bp, Homo sapien
tgcagtgtccactcggtgcagggac

SEQ ID NO: 2892521 - DNA, 25 bp, Homo sapien
tgctgtaagtgatgctcagttgggt

SEQ ID NO: 2892522 - DNA, 25 bp, Homo sapien
ggtctcatgccacagcaaggatacg

SEQ ID NO: 2892523 - DNA, 25 bp, Homo sapien
atgccacagcaaggatacggttgac

SEQ ID NO: 2892524 - DNA, 25 bp, Homo sapien
tccccgtggcacaggaaggtctcat

SEQ ID NO: 2892525 - DNA, 25 bp, Homo sapien
aggtccccgtggcacaggaaggtct

SEQ ID NO: 2892526 - DNA, 25 bp, Homo sapien
catggtcctttagaagtttattact

SEQ ID NO: 2892527 - DNA, 25 bp, Homo sapien
cacccatggtcctttagaagtttat

SEQ ID NO: 2892528 - DNA, 25 bp, Homo sapien
taatggcaagccacctctcagggtg

SEQ ID NO: 2892529 - DNA, 25 bp, Homo sapien
cacgtctgtagagggcatggttcac

SEQ ID NO: 2892530 - DNA, 25 bp, Homo sapien
ccagggctggcctagattgctcaga

SEQ ID NO: 2892531 - DNA, 25 bp, Homo sapien
tctgaacatctactcccctagggag

SEQ ID NO: 2892532 - DNA, 25 bp, Homo sapien
ccatttgtaatttaccaatctggca

SEQ ID NO: 2892533 - DNA, 25 bp, Homo sapien
tggcattatttttaccataagccat

SEQ ID NO: 2892534 - DNA, 25 bp, Homo sapien
ttcccatccatttgtaatttaccaa

SEQ ID NO: 2892535 - DNA, 25 bp, Homo sapien
tgtaatttaccaatctggcattatt

SEQ ID NO: 2892536 - DNA, 25 bp, Homo sapien
gtgcagggtacagcgcaagatgaaa

SEQ ID NO: 2892537 - DNA, 25 bp, Homo sapien
cagcttccacccgacctgtgacact

SEQ ID NO: 2892538 - DNA, 25 bp, Homo sapien
ggtacagcgcaagatgaaaccagca

SEQ ID NO: 2892539 - DNA, 25 bp, Homo sapien
ccacccgacctgtgacactcaacat

SEQ ID NO: 2892540 - DNA, 25 bp, Homo sapien
agagaggactcgtgccgagaagcat

SEQ ID NO: 2892541 - DNA, 25 bp, Homo sapien
aggaagagaggactcgtgccgagaa

SEQ ID NO: 2892542 - DNA, 25 bp, Homo sapien
gaagagaggactcgtgccgagaagc

SEQ ID NO: 2892543 - DNA, 25 bp, Homo sapien
aagagaggactcgtgccgagaagca

SEQ ID NO: 2892544 - DNA, 25 bp, Homo sapien
tgaggagttctgtgtgacaaacacc

SEQ ID NO: 2892545 - DNA, 25 bp, Homo sapien
ttcctgcgcagcacctgacatgacg

SEQ ID NO: 2892546 - DNA, 25 bp, Homo sapien
tcgctgtcgtcttccagcaaggtga

SEQ ID NO: 2892547 - DNA, 25 bp, Homo sapien
ttcagcgctaggcacgatgtaggct

SEQ ID NO: 2892548 - DNA, 25 bp, Homo sapien
gatcgcaacatctcaagaggatgag

SEQ ID NO: 2892549 - DNA, 25 bp, Homo sapien
ttgggtggaagtgatcgcaacatct

SEQ ID NO: 2892550 - DNA, 25 bp, Homo sapien
gaagtgatcgcaacatctcaagagg

SEQ ID NO: 2892551 - DNA, 25 bp, Homo sapien
gcaacatctcaagaggatgaggaag

SEQ ID NO: 2892552 - DNA, 25 bp, Homo sapien
tgtgttttcccagatcttcccaaag

SEQ ID NO: 2892553 - DNA, 25 bp, Homo sapien
tggatgaccctccacctggacaagg

SEQ ID NO: 2892554 - DNA, 25 bp, Homo sapien
taacggtaagagacatgacatgccc

SEQ ID NO: 2892555 - DNA, 25 bp, Homo sapien
tgccctgaggctatctgactggttt

SEQ ID NO: 2892556 - DNA, 25 bp, Homo sapien
gcatcccgccgcctgctgcaccgtc

SEQ ID NO: 2892557 - DNA, 25 bp, Homo sapien
gcggcgacgcgggacttggagcccg

SEQ ID NO: 2892558 - DNA, 25 bp, Homo sapien
ttccctgcttcgccgagccggaggg

SEQ ID NO: 2892559 - DNA, 25 bp, Homo sapien
gcctgctgcaccgtccccgccaggg

SEQ ID NO: 2892560 - DNA, 25 bp, Homo sapien
gcgcggcagccaagccaaaggccga

SEQ ID NO: 2892561 - DNA, 25 bp, Homo sapien
agcagccgcgcgtcgctcttgcagg

SEQ ID NO: 2892562 - DNA, 25 bp, Homo sapien
agccaagccaaaggccgaggccgag

SEQ ID NO: 2892563 - DNA, 25 bp, Homo sapien
ctggtgtcgcgtgcgctggcggccc

SEQ ID NO: 2892564 - DNA, 25 bp, Homo sapien
agggggtctgcgcattagactccaa

SEQ ID NO: 2892565 - DNA, 25 bp, Homo sapien
ggggtctgcgcattagactccaaat

SEQ ID NO: 2892566 - DNA, 25 bp, Homo sapien
cagcttccttgtccttcgacatctg

SEQ ID NO: 2892567 - DNA, 25 bp, Homo sapien
tccttgtccttcgacatctgcactt

SEQ ID NO: 2892568 - DNA, 25 bp, Homo sapien
gaaagacacaaacggcatgggaaac

SEQ ID NO: 2892569 - DNA, 25 bp, Homo sapien
agggaaagacacaaacggcatggga

SEQ ID NO: 2892570 - DNA, 25 bp, Homo sapien
agacacaaacggcatgggaaacttt

SEQ ID NO: 2892571 - DNA, 25 bp, Homo sapien
gggaaagacacaaacggcatgggaa

SEQ ID NO: 2892572 - DNA, 25 bp, Homo sapien
tgctgttggaaggcggctcacattc

SEQ ID NO: 2892573 - DNA, 25 bp, Homo sapien
actttggccttcagggcgaatgctg

SEQ ID NO: 2892574 - DNA, 25 bp, Homo sapien
ccggaacttctgattgatggggtag

SEQ ID NO: 2892575 - DNA, 25 bp, Homo sapien
attgatggggtagatgactttggcc

SEQ ID NO: 2892576 - DNA, 25 bp, Homo sapien
tccatagccaccgcttgccctgacc

SEQ ID NO: 2892577 - DNA, 25 bp, Homo sapien
ctccctccacgaatcctgccaacca

SEQ ID NO: 2892578 - DNA, 25 bp, Homo sapien
catagccaccgcttgccctgaccca

SEQ ID NO: 2892579 - DNA, 25 bp, Homo sapien
tcctccatagccaccgcttgccctg

SEQ ID NO: 2892580 - DNA, 25 bp, Homo sapien
aacagcctgctttaagttttcatgc

SEQ ID NO: 2892581 - DNA, 25 bp, Homo sapien
caaaacagcctgctttaagttttca

SEQ ID NO: 2892582 - DNA, 25 bp, Homo sapien
gcctgctttaagttttcatgcagag

SEQ ID NO: 2892583 - DNA, 25 bp, Homo sapien
tggcaaaacagcctgctttaagttt

SEQ ID NO: 2892584 - DNA, 25 bp, Homo sapien
cacttcagggaaggcgttcacccgg

SEQ ID NO: 2892585 - DNA, 25 bp, Homo sapien
gaaggtgcggctgagaaacctgtca

SEQ ID NO: 2892586 - DNA, 25 bp, Homo sapien
ccgagtggacgctggatgaggagct

SEQ ID NO: 2892587 - DNA, 25 bp, Homo sapien
gaaacctgtcatcgctggtggccga

SEQ ID NO: 2892588 - DNA, 25 bp, Homo sapien
caaatgcagcaggtcttttaagtga

SEQ ID NO: 2892589 - DNA, 25 bp, Homo sapien
gctgtagatacacaggtcaacgtct

SEQ ID NO: 2892590 - DNA, 25 bp, Homo sapien
ttcctgcctcagtgccgtgtccaaa

SEQ ID NO: 2892591 - DNA, 25 bp, Homo sapien
ctcagtgccgtgtccaaatgcagca

SEQ ID NO: 2892592 - DNA, 25 bp, Homo sapien
ggaagaaggtcaaggaggcacattt

SEQ ID NO: 2892593 - DNA, 25 bp, Homo sapien
taggaagaaggtcaaggaggcacat

SEQ ID NO: 2892594 - DNA, 25 bp, Homo sapien
ggcacattttaaaaatctgaataaa

SEQ ID NO: 2892595 - DNA, 25 bp, Homo sapien
ttttaggaagaaggtcaaggaggca

SEQ ID NO: 2892596 - DNA, 25 bp, Homo sapien
tcttctggtatagttcatcatctga

SEQ ID NO: 2892597 - DNA, 25 bp, Homo sapien
atcttctggtatagttcatcatctg

SEQ ID NO: 2892598 - DNA, 25 bp, Homo sapien
gccagggtgatgtactcagagtcac

SEQ ID NO: 2892599 - DNA, 25 bp, Homo sapien
tcagccagggtgatgtactcagagt

SEQ ID NO: 2892600 - DNA, 25 bp, Homo sapien
gggtgatgtactcagagtcaccagc

SEQ ID NO: 2892601 - DNA, 25 bp, Homo sapien
ccacatcagccagggtgatgtactc

SEQ ID NO: 2892602 - DNA, 25 bp, Homo sapien
tgagaatcgcacaatagcccttcgg

SEQ ID NO: 2892603 - DNA, 25 bp, Homo sapien
gcccttcggctgcaatcattctttc

SEQ ID NO: 2892604 - DNA, 25 bp, Homo sapien
ggaacacttaaactggtccacaaga

SEQ ID NO: 2892605 - DNA, 25 bp, Homo sapien
ttctttccgtcagagtcatcatcag

SEQ ID NO: 2892606 - DNA, 25 bp, Homo sapien
tccctcccgccccctccagcattac

SEQ ID NO: 2892607 - DNA, 25 bp, Homo sapien
tggcctcccgtcagaatagttcagg

SEQ ID NO: 2892608 - DNA, 25 bp, Homo sapien
tattagaacctcagagtgaaggcca

SEQ ID NO: 2892609 - DNA, 25 bp, Homo sapien
caggttgcaccccaatctgattaag

SEQ ID NO: 2892610 - DNA, 25 bp, Homo sapien
gaccagtgttctatgctccagtaat

SEQ ID NO: 2892611 - DNA, 25 bp, Homo sapien
gtcattaactaatggcactgcctgg

SEQ ID NO: 2892612 - DNA, 25 bp, Homo sapien
gaaacacacaggaccatagctgggg

SEQ ID NO: 2892613 - DNA, 25 bp, Homo sapien
gaagaagccaccagggtcattaact

SEQ ID NO: 2892614 - DNA, 25 bp, Homo sapien
tgttaattaacagctgagaagaagc

SEQ ID NO: 2892615 - DNA, 25 bp, Homo sapien
tcacttttgccatgtgcgcccgccc

SEQ ID NO: 2892616 - DNA, 25 bp, Homo sapien
cctcctggacttgcagcttcagaaa

SEQ ID NO: 2892617 - DNA, 25 bp, Homo sapien
ttctgccgcccggacagcttcccct

SEQ ID NO: 2892618 - DNA, 25 bp, Homo sapien
gccagccggcacctggtctcctcct

SEQ ID NO: 2892619 - DNA, 25 bp, Homo sapien
ccaggtctttgcctcgctggacaaa

SEQ ID NO: 2892620 - DNA, 25 bp, Homo sapien
acctggtgagccagagacgccgtga

SEQ ID NO: 2892621 - DNA, 25 bp, Homo sapien
acttttccgggtcagcagtcggctg

SEQ ID NO: 2892622 - DNA, 25 bp, Homo sapien
cctcttgggccagcgtgagttttgc

SEQ ID NO: 2892623 - DNA, 25 bp, Homo sapien
tgcagaggctggggatgtgagtcac

SEQ ID NO: 2892624 - DNA, 25 bp, Homo sapien
tgtgcagaggctggggatgtgagtc

SEQ ID NO: 2892625 - DNA, 25 bp, Homo sapien
atgtgcagaggctggggatgtgagt

SEQ ID NO: 2892626 - DNA, 25 bp, Homo sapien
gtgcagaggctggggatgtgagtca

SEQ ID NO: 2892627 - DNA, 25 bp, Homo sapien
atgcagaagctccaagtatgggcct

SEQ ID NO: 2892628 - DNA, 25 bp, Homo sapien
cagaagctccaagtatgggcctgga

SEQ ID NO: 2892629 - DNA, 25 bp, Homo sapien
ggcagagtgcaaccacagcctcggt

SEQ ID NO: 2892630 - DNA, 25 bp, Homo sapien
ctggcagagtgcaaccacagcctcg

SEQ ID NO: 2892631 - DNA, 25 bp, Homo sapien
acagcctcggtggctctgacattct

SEQ ID NO: 2892632 - DNA, 25 bp, Homo sapien
cagagtgcaaccacagcctcggtgg

SEQ ID NO: 2892633 - DNA, 25 bp, Homo sapien
aaaatggacggtgcctcagagagga

SEQ ID NO: 2892634 - DNA, 25 bp, Homo sapien
gagaacggatttccaaagagctttg

SEQ ID NO: 2892635 - DNA, 25 bp, Homo sapien
ggagataagaatcctcagcacccca

SEQ ID NO: 2892636 - DNA, 25 bp, Homo sapien
ccaaagagctttgctgacagggatg

SEQ ID NO: 2892637 - DNA, 25 bp, Homo sapien
gctggtcttgctctaggagctcctg

SEQ ID NO: 2892638 - DNA, 25 bp, Homo sapien
tgctgcctccggaagcgatttgact

SEQ ID NO: 2892639 - DNA, 25 bp, Homo sapien
ccagtcatgccagggagcgtctgaa

SEQ ID NO: 2892640 - DNA, 25 bp, Homo sapien
ggacttcctgcctcaagtagtcaca

SEQ ID NO: 2892641 - DNA, 25 bp, Homo sapien
cagtgttcacgttgggtctgtgttc

SEQ ID NO: 2892642 - DNA, 25 bp, Homo sapien
tcatcatgtggatgctcggtggttg

SEQ ID NO: 2892643 - DNA, 25 bp, Homo sapien
tcacttgatgcagcaagggagaatg

SEQ ID NO: 2892644 - DNA, 25 bp, Homo sapien
gagctcccctaaggctgaacagatt

SEQ ID NO: 2892645 - DNA, 25 bp, Homo sapien
tcacttcaacaatcctgcttgctag

SEQ ID NO: 2892646 - DNA, 25 bp, Homo sapien
ggacagagcaggcatgtggttactc

SEQ ID NO: 2892647 - DNA, 25 bp, Homo sapien
ggcatgtggttactcacttcaacaa

SEQ ID NO: 2892648 - DNA, 25 bp, Homo sapien
tggttactcacttcaacaatcctgc

SEQ ID NO: 2892649 - DNA, 25 bp, Homo sapien
tggtcctcccgcaggtgtgtctgca

SEQ ID NO: 2892650 - DNA, 25 bp, Homo sapien
atggtgccctcgtggtcctcccgca

SEQ ID NO: 2892651 - DNA, 25 bp, Homo sapien
tcttcagtgaggccgcccagtcggc

SEQ ID NO: 2892652 - DNA, 25 bp, Homo sapien
agacgccgcggatggtgccctcgtg

SEQ ID NO: 2892653 - DNA, 25 bp, Homo sapien
catttacattcaaaggaagctgagg

SEQ ID NO: 2892654 - DNA, 25 bp, Homo sapien
gcatcatgcaggacacaaagccctg

SEQ ID NO: 2892655 - DNA, 25 bp, Homo sapien
agtcagcgtgcccactgtacagatg

SEQ ID NO: 2892656 - DNA, 25 bp, Homo sapien
cgaggctaagaaacgttaagtcatt

SEQ ID NO: 2892657 - DNA, 25 bp, Homo sapien
ttcacgaagccagtgacaagctccc

SEQ ID NO: 2892658 - DNA, 25 bp, Homo sapien
tgctcttggcttcacgaagccagtg

SEQ ID NO: 2892659 - DNA, 25 bp, Homo sapien
aggttggaatcaccgccctctgctg

SEQ ID NO: 2892660 - DNA, 25 bp, Homo sapien
aggaagcaggttggaatcaccgccc

SEQ ID NO: 2892661 - DNA, 25 bp, Homo sapien
cccgatagccgcatctgcgtcaggg

SEQ ID NO: 2892662 - DNA, 25 bp, Homo sapien
actgatgctcgtccaggcactggga

SEQ ID NO: 2892663 - DNA, 25 bp, Homo sapien
ctccggagggctgagcgcaacagca

SEQ ID NO: 2892664 - DNA, 25 bp, Homo sapien
agctcctgcaggaggtgcttcttcc

SEQ ID NO: 2892665 - DNA, 25 bp, Homo sapien
gcagcaccaagggtgataggattcg

SEQ ID NO: 2892666 - DNA, 25 bp, Homo sapien
ggcgaatgaataccgcaccctgcag

SEQ ID NO: 2892667 - DNA, 25 bp, Homo sapien
gataggattcgggttctggcaaacc

SEQ ID NO: 2892668 - DNA, 25 bp, Homo sapien
gcaccgcctgtctggaatgggtggg

SEQ ID NO: 2892669 - DNA, 25 bp, Homo sapien
tcttggtggctgcattccgtgcatg

SEQ ID NO: 2892670 - DNA, 25 bp, Homo sapien
tgcccaatggcgcactccatgtgct

SEQ ID NO: 2892671 - DNA, 25 bp, Homo sapien
gcattccgtgcatgcaccagcagcg

SEQ ID NO: 2892672 - DNA, 25 bp, Homo sapien
ggcccggctcttggtggctgcattc

SEQ ID NO: 2892673 - DNA, 25 bp, Homo sapien
tggtcacgtagacgctctccactgc

SEQ ID NO: 2892674 - DNA, 25 bp, Homo sapien
catgatccttccgatttgctggtaa

SEQ ID NO: 2892675 - DNA, 25 bp, Homo sapien
caggcggctgacaccagcgctggtc

SEQ ID NO: 2892676 - DNA, 25 bp, Homo sapien
taatacgcctgcaccaggcggctga

SEQ ID NO: 2892677 - DNA, 25 bp, Homo sapien
ccagtctcttctggggcttccctga

SEQ ID NO: 2892678 - DNA, 25 bp, Homo sapien
tctcttctggggcttccctgagggg

SEQ ID NO: 2892679 - DNA, 25 bp, Homo sapien
attgccagtctcttctggggcttcc

SEQ ID NO: 2892680 - DNA, 25 bp, Homo sapien
tgccagtctcttctggggcttccct

SEQ ID NO: 2892681 - DNA, 25 bp, Homo sapien
tcctgctgcccgacgaagggttgct

SEQ ID NO: 2892682 - DNA, 25 bp, Homo sapien
tgggaggtctcatgagcgccacctg

SEQ ID NO: 2892683 - DNA, 25 bp, Homo sapien
gacgaagggttgctgagttcttgct

SEQ ID NO: 2892684 - DNA, 25 bp, Homo sapien
tttccgcagtttgtaattttccatc

SEQ ID NO: 2892685 - DNA, 25 bp, Homo sapien
actattcaatatagctatgtcacaa

SEQ ID NO: 2892686 - DNA, 25 bp, Homo sapien
tgggtgatggttacaataaaggctc

SEQ ID NO: 2892687 - DNA, 25 bp, Homo sapien
tcaatatagctatgtcacaaaattg

SEQ ID NO: 2892688 - DNA, 25 bp, Homo sapien
gatggttacaataaaggctcagact

SEQ ID NO: 2892689 - DNA, 25 bp, Homo sapien
tcttcggaggagcttcatgacacca

SEQ ID NO: 2892690 - DNA, 25 bp, Homo sapien
tgtgatcttcggaggagcttcatga

SEQ ID NO: 2892691 - DNA, 25 bp, Homo sapien
tttgcatgtgatcttcggaggagct

SEQ ID NO: 2892692 - DNA, 25 bp, Homo sapien
tcggaggagcttcatgacaccagca

SEQ ID NO: 2892693 - DNA, 25 bp, Homo sapien
gacgcatctgctggtgcactgggaa

SEQ ID NO: 2892694 - DNA, 25 bp, Homo sapien
ctgggaactgggccaggaacctctt

SEQ ID NO: 2892695 - DNA, 25 bp, Homo sapien
tgctgggcgtgcagacgcatctgct

SEQ ID NO: 2892696 - DNA, 25 bp, Homo sapien
gaaggtccatgactcctgcctgctg

SEQ ID NO: 2892697 - DNA, 25 bp, Homo sapien
tcctggtggccatgcgcacacaggg

SEQ ID NO: 2892698 - DNA, 25 bp, Homo sapien
gggaatgctcaattctctgtcagct

SEQ ID NO: 2892699 - DNA, 25 bp, Homo sapien
cagctccatagatgaggcctgacca

SEQ ID NO: 2892700 - DNA, 25 bp, Homo sapien
tgcagctgctgtagggatccacaca

SEQ ID NO: 2892701 - DNA, 25 bp, Homo sapien
caggcaacagtttgctttcagcaag

SEQ ID NO: 2892702 - DNA, 25 bp, Homo sapien
gccaaggctgccagctcggagatga

SEQ ID NO: 2892703 - DNA, 25 bp, Homo sapien
ttcagcaaggggcactcgggccaag

SEQ ID NO: 2892704 - DNA, 25 bp, Homo sapien
tagcagcccacgcttagcaggcaac

SEQ ID NO: 2892705 - DNA, 25 bp, Homo sapien
gaggcaaggtcctcattgttgggca

SEQ ID NO: 2892706 - DNA, 25 bp, Homo sapien
gtccccggaggcaaggtcctcattg

SEQ ID NO: 2892707 - DNA, 25 bp, Homo sapien
caaggtcctcattgttgggcacccc

SEQ ID NO: 2892708 - DNA, 25 bp, Homo sapien
cccggaggcaaggtcctcattgttg

SEQ ID NO: 2892709 - DNA, 25 bp, Homo sapien
cacaggcaacaggtccggggcccag

SEQ ID NO: 2892710 - DNA, 25 bp, Homo sapien
cagccacaggcaacaggtccggggc

SEQ ID NO: 2892711 - DNA, 25 bp, Homo sapien
caacaggtccggggcccagtcatac

SEQ ID NO: 2892712 - DNA, 25 bp, Homo sapien
caggcaacaggtccggggcccagtc

SEQ ID NO: 2892713 - DNA, 25 bp, Homo sapien
ggcacacagcagctgagtgcattta

SEQ ID NO: 2892714 - DNA, 25 bp, Homo sapien
ttggcacacagcagctgagtgcatt

SEQ ID NO: 2892715 - DNA, 25 bp, Homo sapien
ttttggcacacagcagctgagtgca

SEQ ID NO: 2892716 - DNA, 25 bp, Homo sapien
gcacacagcagctgagtgcatttac

SEQ ID NO: 2892717 - DNA, 25 bp, Homo sapien
ctacaagttgcttcttctctttagc

SEQ ID NO: 2892718 - DNA, 25 bp, Homo sapien
agcttcactttcttgctgactcagc

SEQ ID NO: 2892719 - DNA, 25 bp, Homo sapien
tagcatcttctttgagttcccactg

SEQ ID NO: 2892720 - DNA, 25 bp, Homo sapien
actttcttgctgactcagccttttg

SEQ ID NO: 2892721 - DNA, 25 bp, Homo sapien
ggtcttgtcccaccgactggtctta

SEQ ID NO: 2892722 - DNA, 25 bp, Homo sapien
tcttgtcccaccgactggtcttaaa

SEQ ID NO: 2892723 - DNA, 25 bp, Homo sapien
ttcaggtcttgtcccaccgactggt

SEQ ID NO: 2892724 - DNA, 25 bp, Homo sapien
cagggcttcaggtcttgtcccaccg

SEQ ID NO: 2892725 - DNA, 25 bp, Homo sapien
cagagacgtgtttccaagacgggaa

SEQ ID NO: 2892726 - DNA, 25 bp, Homo sapien
ggtgtctactgtccggaagaagccc

SEQ ID NO: 2892727 - DNA, 25 bp, Homo sapien
tctctgcacgggcagggtgtctact

SEQ ID NO: 2892728 - DNA, 25 bp, Homo sapien
tgaaatgcaaactcacagagacgtg

SEQ ID NO: 2892729 - DNA, 25 bp, Homo sapien
gaagggtcccgtgatcattccacag

SEQ ID NO: 2892730 - DNA, 25 bp, Homo sapien
gatctcgcccggtatgttcacagtg

SEQ ID NO: 2892731 - DNA, 25 bp, Homo sapien
cctttggctaaggaagacaccccag

SEQ ID NO: 2892732 - DNA, 25 bp, Homo sapien
tggttaactttggagagcccactgg

SEQ ID NO: 2892733 - DNA, 25 bp, Homo sapien
aatcatgagttcatcataatacatc

SEQ ID NO: 2892734 - DNA, 25 bp, Homo sapien
ccacagcccataataagtggggatg

SEQ ID NO: 2892735 - DNA, 25 bp, Homo sapien
tcatctctcatggtccccttccaaa

SEQ ID NO: 2892736 - DNA, 25 bp, Homo sapien
gcccataataagtggggatggtaac

SEQ ID NO: 2892737 - DNA, 25 bp, Homo sapien
tgattcactgtaaagctcatggagc

SEQ ID NO: 2892738 - DNA, 25 bp, Homo sapien
tagggtggaggaaaagcttgccctc

SEQ ID NO: 2892739 - DNA, 25 bp, Homo sapien
catatcaggtgacactagggaggcc

SEQ ID NO: 2892740 - DNA, 25 bp, Homo sapien
gcttagccacgggttcactgacaca

SEQ ID NO: 2892741 - DNA, 25 bp, Homo sapien
gaagaatgtcgaccaggacctccat

SEQ ID NO: 2892742 - DNA, 25 bp, Homo sapien
tctgagcacggcaggaaatcccaag

SEQ ID NO: 2892743 - DNA, 25 bp, Homo sapien
tgagcccctgggtaatgctgacaca

SEQ ID NO: 2892744 - DNA, 25 bp, Homo sapien
cagagcccacagatttgcgatgcag

SEQ ID NO: 2892745 - DNA, 25 bp, Homo sapien
ttccacgtggctagaacttcacaat

SEQ ID NO: 2892746 - DNA, 25 bp, Homo sapien
agttccacgtggctagaacttcaca

SEQ ID NO: 2892747 - DNA, 25 bp, Homo sapien
ccacgtggctagaacttcacaatca

SEQ ID NO: 2892748 - DNA, 25 bp, Homo sapien
cacgtggctagaacttcacaatcat

SEQ ID NO: 2892749 - DNA, 25 bp, Homo sapien
tgactgagacacgatgccgagacct

SEQ ID NO: 2892750 - DNA, 25 bp, Homo sapien
gaactgcccactgacctgactaggg

SEQ ID NO: 2892751 - DNA, 25 bp, Homo sapien
ggcgggcttccacaaaataggctca

SEQ ID NO: 2892752 - DNA, 25 bp, Homo sapien
tgttcatgctgaatccacctcggag

SEQ ID NO: 2892753 - DNA, 25 bp, Homo sapien
tcaaattgctcacccgtaagttggg

SEQ ID NO: 2892754 - DNA, 25 bp, Homo sapien
gacacgtggcctgaacctcaaattg

SEQ ID NO: 2892755 - DNA, 25 bp, Homo sapien
taaaatacctttggagtgtgggaca

SEQ ID NO: 2892756 - DNA, 25 bp, Homo sapien
tcagatccacctatcgccaatgagg

SEQ ID NO: 2892757 - DNA, 25 bp, Homo sapien
gttagctgaggatctggtgataagt

SEQ ID NO: 2892758 - DNA, 25 bp, Homo sapien
tgattttcctcagttccgccggctc

SEQ ID NO: 2892759 - DNA, 25 bp, Homo sapien
gtgataagttgagtacaggaaggct

SEQ ID NO: 2892760 - DNA, 25 bp, Homo sapien
ttcccctccctgataaggactctat

SEQ ID NO: 2892761 - DNA, 25 bp, Homo sapien
gagtggtctgtccttcatgacccaa

SEQ ID NO: 2892762 - DNA, 25 bp, Homo sapien
taggtcagcaagaaaggagccgact

SEQ ID NO: 2892763 - DNA, 25 bp, Homo sapien
tactaagtgctaggcctgattccag

SEQ ID NO: 2892764 - DNA, 25 bp, Homo sapien
aagtacagacatgcaaccagcaagg

SEQ ID NO: 2892765 - DNA, 25 bp, Homo sapien
tacaagcagcacggtgccagcgtct

SEQ ID NO: 2892766 - DNA, 25 bp, Homo sapien
aaggcgaaggagagctagcgtgtgc

SEQ ID NO: 2892767 - DNA, 25 bp, Homo sapien
aggcagaggtgctctttaacaacca

SEQ ID NO: 2892768 - DNA, 25 bp, Homo sapien
gagggcctcaggctacttccagcat

SEQ ID NO: 2892769 - DNA, 25 bp, Homo sapien
tcctggtcaggaaaggcgatatgct

SEQ ID NO: 2892770 - DNA, 25 bp, Homo sapien
tgtgtggtggcagaacctcttatcc

SEQ ID NO: 2892771 - DNA, 25 bp, Homo sapien
gattcagtgattatgccgaggaggc

SEQ ID NO: 2892772 - DNA, 25 bp, Homo sapien
tattctcaggtcatggatcgtacag

SEQ ID NO: 2892773 - DNA, 25 bp, Homo sapien
tctttgtatgcttcctaagtgacca

SEQ ID NO: 2892774 - DNA, 25 bp, Homo sapien
ccagcttccataaggtgtagcacca

SEQ ID NO: 2892775 - DNA, 25 bp, Homo sapien
caggtcaaagacaccaagtcgcaca

SEQ ID NO: 2892776 - DNA, 25 bp, Homo sapien
cctaagtgaccaattgagatggaga

SEQ ID NO: 2892777 - DNA, 25 bp, Homo sapien
gagcaggctctattcctaactttag

SEQ ID NO: 2892778 - DNA, 25 bp, Homo sapien
gaacaaccttagcactgacctcagg

SEQ ID NO: 2892779 - DNA, 25 bp, Homo sapien
ggacatctgtcaaagggaaggagca

SEQ ID NO: 2892780 - DNA, 25 bp, Homo sapien
tggagcaaggtgttacccctggcat

SEQ ID NO: 2892781 - DNA, 25 bp, Homo sapien
aatgaggacatgcaagttccagggc

SEQ ID NO: 2892782 - DNA, 25 bp, Homo sapien
tcatgggagggacgcttaccaagct

SEQ ID NO: 2892783 - DNA, 25 bp, Homo sapien
gcgtcatcttaagtaatcctgccca

SEQ ID NO: 2892784 - DNA, 25 bp, Homo sapien
cacccacgggaggtgctgtgatcct

SEQ ID NO: 2892785 - DNA, 25 bp, Homo sapien
tcttggggaatcgagatctgacgtg

SEQ ID NO: 2892786 - DNA, 25 bp, Homo sapien
gaccagagccgacagcgtctcttgg

SEQ ID NO: 2892787 - DNA, 25 bp, Homo sapien
ccagcgcgtcaaaatcaggaataag

SEQ ID NO: 2892788 - DNA, 25 bp, Homo sapien
ctgtaccagcgcgtcaaaatcagga

SEQ ID NO: 2892789 - DNA, 25 bp, Homo sapien
catcttcgagggtatggagtgccac

SEQ ID NO: 2892790 - DNA, 25 bp, Homo sapien
gtgcaggcggtggagtacaacatct

SEQ ID NO: 2892791 - DNA, 25 bp, Homo sapien
tcctgggaagtaacactgaggctgt

SEQ ID NO: 2892792 - DNA, 25 bp, Homo sapien
atcaacgtcaacaagggcatgggcc

SEQ ID NO: 2892793 - DNA, 25 bp, Homo sapien
tctattctttcacccagtaatttga

SEQ ID NO: 2892794 - DNA, 25 bp, Homo sapien
catatggcacacgtgctttaaaaca

SEQ ID NO: 2892795 - DNA, 25 bp, Homo sapien
tatggcacacgtgctttaaaacagc

SEQ ID NO: 2892796 - DNA, 25 bp, Homo sapien
atggcacacgtgctttaaaacagct

SEQ ID NO: 2892797 - DNA, 25 bp, Homo sapien
caactgtttattcttgggaactggg

SEQ ID NO: 2892798 - DNA, 25 bp, Homo sapien
gagggaggacatatttgcaacacac

SEQ ID NO: 2892799 - DNA, 25 bp, Homo sapien
tttttcacctgtgccagcaactgag

SEQ ID NO: 2892800 - DNA, 25 bp, Homo sapien
caaaggcatggtaatgacccaactg

SEQ ID NO: 2892801 - DNA, 25 bp, Homo sapien
gaggatcatccgtgctatatcatgg

SEQ ID NO: 2892802 - DNA, 25 bp, Homo sapien
gccacatcatgggtatgcatacatg

SEQ ID NO: 2892803 - DNA, 25 bp, Homo sapien
tatgcacacatgagcttgagtggct

SEQ ID NO: 2892804 - DNA, 25 bp, Homo sapien
gatggaccacgtttagtttatgcac

SEQ ID NO: 2892805 - DNA, 25 bp, Homo sapien
aagccaactgccttatgtcaagaag

SEQ ID NO: 2892806 - DNA, 25 bp, Homo sapien
ctgacttgtgacacgtgcaggcaca

SEQ ID NO: 2892807 - DNA, 25 bp, Homo sapien
tgcaggcacacgctagagagtctct

SEQ ID NO: 2892808 - DNA, 25 bp, Homo sapien
tttgtaacgtgcaaagcatgaggcc

SEQ ID NO: 2892809 - DNA, 25 bp, Homo sapien
tattggatagagaagtattgaagct

SEQ ID NO: 2892810 - DNA, 25 bp, Homo sapien
gaaatgggttaacagtgagagagat

SEQ ID NO: 2892811 - DNA, 25 bp, Homo sapien
gcttgctgcccatactcatttctcg

SEQ ID NO: 2892812 - DNA, 25 bp, Homo sapien
tttataggtggaaagatacagtgct

SEQ ID NO: 2892813 - DNA, 25 bp, Homo sapien
taccaacactgaaatgtacttgcca

SEQ ID NO: 2892814 - DNA, 25 bp, Homo sapien
gccatgggagttgcttgccctcacc

SEQ ID NO: 2892815 - DNA, 25 bp, Homo sapien
tacttgccaactatgtccactcgga

SEQ ID NO: 2892816 - DNA, 25 bp, Homo sapien
tggaagtagtgtaaggtcttcatct

SEQ ID NO: 2892817 - DNA, 25 bp, Homo sapien
gcactcgagcttcgcgactgtggaa

SEQ ID NO: 2892818 - DNA, 25 bp, Homo sapien
gcccgtagctgtcccaaggagagtt

SEQ ID NO: 2892819 - DNA, 25 bp, Homo sapien
tttctgccggcagagcggccttgag

SEQ ID NO: 2892820 - DNA, 25 bp, Homo sapien
ggaactgcggtcaatgtcaccaacg

SEQ ID NO: 2892821 - DNA, 25 bp, Homo sapien
gagatggtgcgagagtccagcttcc

SEQ ID NO: 2892822 - DNA, 25 bp, Homo sapien
cagcaccagggaatccgggtttcca

SEQ ID NO: 2892823 - DNA, 25 bp, Homo sapien
ctggtaaacacggtggtgggcctct

SEQ ID NO: 2892824 - DNA, 25 bp, Homo sapien
agcctcgcgagggagaggtccaaca

SEQ ID NO: 2892825 - DNA, 25 bp, Homo sapien
tcatcatgcaagaggttcccagagc

SEQ ID NO: 2892826 - DNA, 25 bp, Homo sapien
tcgtcgggcagttggagccgtaaac

SEQ ID NO: 2892827 - DNA, 25 bp, Homo sapien
cgcttaaacgcgaaggaacctctgg

SEQ ID NO: 2892828 - DNA, 25 bp, Homo sapien
ttggctaaagctaccgcatggacgc

SEQ ID NO: 2892829 - DNA, 25 bp, Homo sapien
gtcatttgaaggatgtaaagaccgc

SEQ ID NO: 2892830 - DNA, 25 bp, Homo sapien
tcatttgaaggatgtaaagaccgca

SEQ ID NO: 2892831 - DNA, 25 bp, Homo sapien
catttgaaggatgtaaagaccgcat

SEQ ID NO: 2892832 - DNA, 25 bp, Homo sapien
cttcctctgacaccatttccctgta

SEQ ID NO: 2892833 - DNA, 25 bp, Homo sapien
tgtgaggcccgcttacactggcggc

SEQ ID NO: 2892834 - DNA, 25 bp, Homo sapien
gtgaaatctcagcatcgcccaggaa

SEQ ID NO: 2892835 - DNA, 25 bp, Homo sapien
cagttgctgtgcttggacccaggga

SEQ ID NO: 2892836 - DNA, 25 bp, Homo sapien
cagactgtgggccccccaaggccag

SEQ ID NO: 2892837 - DNA, 25 bp, Homo sapien
agactgtgggccccccaaggccagg

SEQ ID NO: 2892838 - DNA, 25 bp, Homo sapien
tgtgggccccccaaggccagggcca

SEQ ID NO: 2892839 - DNA, 25 bp, Homo sapien
ctgctttgtggtcaccaccatctga

SEQ ID NO: 2892840 - DNA, 25 bp, Homo sapien
catctgacaagcatgcatctgctcc

SEQ ID NO: 2892841 - DNA, 25 bp, Homo sapien
aggggagactgcaccgccagacatt

SEQ ID NO: 2892842 - DNA, 25 bp, Homo sapien
agactgcaccgccagacattctctg

SEQ ID NO: 2892843 - DNA, 25 bp, Homo sapien
gcattcttggcttggcatctctaac

SEQ ID NO: 2892844 - DNA, 25 bp, Homo sapien
tctaacttcctcacgcacagagaat

SEQ ID NO: 2892845 - DNA, 25 bp, Homo sapien
tcctaagaaggctttaattttcata

SEQ ID NO: 2892846 - DNA, 25 bp, Homo sapien
tcccaggaatatattttcactctat

SEQ ID NO: 2892847 - DNA, 25 bp, Homo sapien
tagtttagggagaccattttggatc

SEQ ID NO: 2892848 - DNA, 25 bp, Homo sapien
ctgttgatatttgaccccatggtgc

SEQ ID NO: 2892849 - DNA, 25 bp, Homo sapien
gacttcttgtagtttagggagacca

SEQ ID NO: 2892850 - DNA, 25 bp, Homo sapien
gttgatatttgaccccatggtgccc

SEQ ID NO: 2892851 - DNA, 25 bp, Homo sapien
caaaacgagtcgttcttggaggcgg

SEQ ID NO: 2892852 - DNA, 25 bp, Homo sapien
cgggaactgtgcgtgtccatggcct

SEQ ID NO: 2892853 - DNA, 25 bp, Homo sapien
gcacacagccggtgccaaaacgagt

SEQ ID NO: 2892854 - DNA, 25 bp, Homo sapien
ttggaggcgggagtgtcggtgtcgg

SEQ ID NO: 2892855 - DNA, 25 bp, Homo sapien
gattggaaaccactgcggtgatccc

SEQ ID NO: 2892856 - DNA, 25 bp, Homo sapien
tattcctggattgatttacccacag

SEQ ID NO: 2892857 - DNA, 25 bp, Homo sapien
catttagtgactgctgtgcgagtgt

SEQ ID NO: 2892858 - DNA, 25 bp, Homo sapien
gatgctgtccacctaggttttcagg

SEQ ID NO: 2892859 - DNA, 25 bp, Homo sapien
agcggtcactgtggaaccaggtctc

SEQ ID NO: 2892860 - DNA, 25 bp, Homo sapien
tgtccacgcttgatcctggaacgtg

SEQ ID NO: 2892861 - DNA, 25 bp, Homo sapien
ttggtgtccacgcttgatcctggaa

SEQ ID NO: 2892862 - DNA, 25 bp, Homo sapien
cggtcactgtggaaccaggtctccc

SEQ ID NO: 2892863 - DNA, 25 bp, Homo sapien
ctctggaaggtacacggcacctgct

SEQ ID NO: 2892864 - DNA, 25 bp, Homo sapien
gcactgcattttcgctgcagtcttg

SEQ ID NO: 2892865 - DNA, 25 bp, Homo sapien
cctgggcaaaaacagacagcaagcc

SEQ ID NO: 2892866 - DNA, 25 bp, Homo sapien
cagtcgtcatgagcatttgggaaca

SEQ ID NO: 2892867 - DNA, 25 bp, Homo sapien
ggccgtcggccaaccagttgagtga

SEQ ID NO: 2892868 - DNA, 25 bp, Homo sapien
caggtggtgcactcagattcaagcc

SEQ ID NO: 2892869 - DNA, 25 bp, Homo sapien
ccgtgcaatgcggaaccaggaggac

SEQ ID NO: 2892870 - DNA, 25 bp, Homo sapien
gctgccagtctggaaacaactctaa

SEQ ID NO: 2892871 - DNA, 25 bp, Homo sapien
tacggtcaacatgaggcggtgacac

SEQ ID NO: 2892872 - DNA, 25 bp, Homo sapien
ttctaaggcggtcatggtcaacgtg

SEQ ID NO: 2892873 - DNA, 25 bp, Homo sapien
ttaaggcagtcacggtcaacatggc

SEQ ID NO: 2892874 - DNA, 25 bp, Homo sapien
cactctaaggacgtcatggtcaacg

SEQ ID NO: 2892875 - DNA, 25 bp, Homo sapien
gcccaaagagttggcagacctgcag

SEQ ID NO: 2892876 - DNA, 25 bp, Homo sapien
caaagagttggcagacctgcagccg

SEQ ID NO: 2892877 - DNA, 25 bp, Homo sapien
cggcagcccaaagagttggcagacc

SEQ ID NO: 2892878 - DNA, 25 bp, Homo sapien
agcccaaagagttggcagacctgca

SEQ ID NO: 2892879 - DNA, 25 bp, Homo sapien
ggccctctctgggattagcaatggt

SEQ ID NO: 2892880 - DNA, 25 bp, Homo sapien
gttccacgtggtgccgtccgcacgg

SEQ ID NO: 2892881 - DNA, 25 bp, Homo sapien
attagcaatggtcgccagccctcgt

SEQ ID NO: 2892882 - DNA, 25 bp, Homo sapien
catcagtgatgggacacagggcttg

SEQ ID NO: 2892883 - DNA, 25 bp, Homo sapien
tgaaggttgcaagtggacccgacgc

SEQ ID NO: 2892884 - DNA, 25 bp, Homo sapien
gctgatgcttgctataggtggtgcc

SEQ ID NO: 2892885 - DNA, 25 bp, Homo sapien
taaacctgatggtgtggaaggagct

SEQ ID NO: 2892886 - DNA, 25 bp, Homo sapien
gagctctgaaggttgcaagtggacc

SEQ ID NO: 2892887 - DNA, 25 bp, Homo sapien
agctcttgtccagttgtacttgatt

SEQ ID NO: 2892888 - DNA, 25 bp, Homo sapien
taaatatcaatggttcctggctggc

SEQ ID NO: 2892889 - DNA, 25 bp, Homo sapien
tttagccaaaggccacatttaaata

SEQ ID NO: 2892890 - DNA, 25 bp, Homo sapien
gcccagcatctgaccacacatgtgc

SEQ ID NO: 2892891 - DNA, 25 bp, Homo sapien
cattatcaatggaggtaccttggca

SEQ ID NO: 2892892 - DNA, 25 bp, Homo sapien
tgtacgtcttctaaggctttcaaag

SEQ ID NO: 2892893 - DNA, 25 bp, Homo sapien
aaagagcttgtgctcgaagtcacca

SEQ ID NO: 2892894 - DNA, 25 bp, Homo sapien
aaatgtttatggttgtacgtcttct

SEQ ID NO: 2892895 - DNA, 25 bp, Homo sapien
gggctttctgtgtagtcaggacccc

SEQ ID NO: 2892896 - DNA, 25 bp, Homo sapien
tcaggacccccacgatgtgggttgt

SEQ ID NO: 2892897 - DNA, 25 bp, Homo sapien
gtgccgctgctggtaactagctttt

SEQ ID NO: 2892898 - DNA, 25 bp, Homo sapien
tgccagtggttctcgagggctttct

SEQ ID NO: 2892899 - DNA, 25 bp, Homo sapien
aattttaacttggattctaggccag

SEQ ID NO: 2892900 - DNA, 25 bp, Homo sapien
agttaacatcgtcaaaatatttggt

SEQ ID NO: 2892901 - DNA, 25 bp, Homo sapien
gtagttaacatcgtcaaaatatttg

SEQ ID NO: 2892902 - DNA, 25 bp, Homo sapien
tttaacttggattctaggccaggtg

SEQ ID NO: 2892903 - DNA, 25 bp, Homo sapien
tcttggtctgaaacagacgcaccac

SEQ ID NO: 2892904 - DNA, 25 bp, Homo sapien
gtctgaaacagacgcaccacagcca

SEQ ID NO: 2892905 - DNA, 25 bp, Homo sapien
aatgcagttgccctgctcttggtct

SEQ ID NO: 2892906 - DNA, 25 bp, Homo sapien
tgccctgctcttggtctgaaacaga

SEQ ID NO: 2892907 - DNA, 25 bp, Homo sapien
gaagccagacagacgctgatgcagg

SEQ ID NO: 2892908 - DNA, 25 bp, Homo sapien
cagggattaagaagcgggtgtctat

SEQ ID NO: 2892909 - DNA, 25 bp, Homo sapien
gctgccggccccgtggtctgttcat

SEQ ID NO: 2892910 - DNA, 25 bp, Homo sapien
gaaggtcaggagtccgttgagcgcc

SEQ ID NO: 2892911 - DNA, 25 bp, Homo sapien
ctgggtctggatgagtggccagaac

SEQ ID NO: 2892912 - DNA, 25 bp, Homo sapien
gtctggatgagtggccagaacatcg

SEQ ID NO: 2892913 - DNA, 25 bp, Homo sapien
gtgctctttgcggaggcagggccct

SEQ ID NO: 2892914 - DNA, 25 bp, Homo sapien
gatgagtggccagaacatcgtgctc

SEQ ID NO: 2892915 - DNA, 25 bp, Homo sapien
cacaacttgttcgttctccttcctg

SEQ ID NO: 2892916 - DNA, 25 bp, Homo sapien
acaacttgttcgttctccttcctgt

SEQ ID NO: 2892917 - DNA, 25 bp, Homo sapien
caacttgttcgttctccttcctgta

SEQ ID NO: 2892918 - DNA, 25 bp, Homo sapien
gacactgtgttgagtggctggctgt

SEQ ID NO: 2892919 - DNA, 25 bp, Homo sapien
catttcccccatgaaccatagccct

SEQ ID NO: 2892920 - DNA, 25 bp, Homo sapien
cccatgaaccatagccctctcctga

SEQ ID NO: 2892921 - DNA, 25 bp, Homo sapien
gagtggggagacacccgctgacttc

SEQ ID NO: 2892922 - DNA, 25 bp, Homo sapien
ctcctcgggtgccacttctccatcc

SEQ ID NO: 2892923 - DNA, 25 bp, Homo sapien
aagggcccgtggtgaaagcacctag

SEQ ID NO: 2892924 - DNA, 25 bp, Homo sapien
cctgcctttgatgttagtattggtt

SEQ ID NO: 2892925 - DNA, 25 bp, Homo sapien
gttttcagaactgcaacccgaagtg

SEQ ID NO: 2892926 - DNA, 25 bp, Homo sapien
cccgaagtgttatgcctttcataag

SEQ ID NO: 2892927 - DNA, 25 bp, Homo sapien
ccgcctgcccggatcgcggccacca

SEQ ID NO: 2892928 - DNA, 25 bp, Homo sapien
ggcctctcgactcccgccccgccga

SEQ ID NO: 2892929 - DNA, 25 bp, Homo sapien
ccggatcgcggccaccagtgccgcg

SEQ ID NO: 2892930 - DNA, 25 bp, Homo sapien
cagtgccgcggcctctcgactcccg

SEQ ID NO: 2892931 - DNA, 25 bp, Homo sapien
ccgcccgctggcccagtgcgcacgc

SEQ ID NO: 2892932 - DNA, 25 bp, Homo sapien
cgcccgctggcccagtgcgcacgct

SEQ ID NO: 2892933 - DNA, 25 bp, Homo sapien
ccccgagggcagggatagcttcccg

SEQ ID NO: 2892934 - DNA, 25 bp, Homo sapien
agcctgaaagctcctgccgggggtt

SEQ ID NO: 2892935 - DNA, 25 bp, Homo sapien
gttgctccgactcagcgaggcgcca

SEQ ID NO: 2892936 - DNA, 25 bp, Homo sapien
gggtcccgaggcttgaccagagcct

SEQ ID NO: 2892937 - DNA, 25 bp, Homo sapien
gatgcctcgacctgatctctacctt

SEQ ID NO: 2892938 - DNA, 25 bp, Homo sapien
tcagctggtccacgctccctatgaa

SEQ ID NO: 2892939 - DNA, 25 bp, Homo sapien
tttccttggctagctgatgcctcga

SEQ ID NO: 2892940 - DNA, 25 bp, Homo sapien
ttcatgttcacacggcatgctcccg

SEQ ID NO: 2892941 - DNA, 25 bp, Homo sapien
gatactgtattagggcagcccagga

SEQ ID NO: 2892942 - DNA, 25 bp, Homo sapien
tctttatagggagctgaaacctgcc

SEQ ID NO: 2892943 - DNA, 25 bp, Homo sapien
ccatcacaggtgttgggtgctcaca

SEQ ID NO: 2892944 - DNA, 25 bp, Homo sapien
taaaatgctgattcctagaccctgc

SEQ ID NO: 2892945 - DNA, 25 bp, Homo sapien
gcatgtgctcagtcaacgttattgc

SEQ ID NO: 2892946 - DNA, 25 bp, Homo sapien
catccctcaatttctaagggtaggg

SEQ ID NO: 2892947 - DNA, 25 bp, Homo sapien
catgcccgacctacatccctcaatt

SEQ ID NO: 2892948 - DNA, 25 bp, Homo sapien
cagtcaacgttattgctattaacaa

SEQ ID NO: 2892949 - DNA, 25 bp, Homo sapien
gcagttccgctgcatgtcgttcgcc

SEQ ID NO: 2892950 - DNA, 25 bp, Homo sapien
gctccgcgcgttgctgtgctccgga

SEQ ID NO: 2892951 - DNA, 25 bp, Homo sapien
tcggctgttgtcagccgcgctgcgc

SEQ ID NO: 2892952 - DNA, 25 bp, Homo sapien
agcgcaccggaaccgctcggctgtt

SEQ ID NO: 2892953 - DNA, 25 bp, Homo sapien
cgtaggaacacggaacagcaaggtc

SEQ ID NO: 2892954 - DNA, 25 bp, Homo sapien
taggaacacggaacagcaaggtccc

SEQ ID NO: 2892955 - DNA, 25 bp, Homo sapien
cctgtcgtaggaacacggaacagca

SEQ ID NO: 2892956 - DNA, 25 bp, Homo sapien
acacggaacagcaaggtccctcggg

SEQ ID NO: 2892957 - DNA, 25 bp, Homo sapien
agacagctgggcccactgaacagcc

SEQ ID NO: 2892958 - DNA, 25 bp, Homo sapien
tcctgagacagctgggcccactgaa

SEQ ID NO: 2892959 - DNA, 25 bp, Homo sapien
tgaaaggcagatcggggtgtgtggc

SEQ ID NO: 2892960 - DNA, 25 bp, Homo sapien
ctgtgaaaggcagatcggggtgtgt

SEQ ID NO: 2892961 - DNA, 25 bp, Homo sapien
tgtccaactgctttggctcttcaat

SEQ ID NO: 2892962 - DNA, 25 bp, Homo sapien
ctgaaggaggtggagtaacaccaag

SEQ ID NO: 2892963 - DNA, 25 bp, Homo sapien
caatcaaggcgactggtgtgagcgc

SEQ ID NO: 2892964 - DNA, 25 bp, Homo sapien
ggaacaagctgcctcttatctttaa

SEQ ID NO: 2892965 - DNA, 25 bp, Homo sapien
tctgagaaaagcccacggcagagat

SEQ ID NO: 2892966 - DNA, 25 bp, Homo sapien
ctgcgtgggtttacatagatgctca

SEQ ID NO: 2892967 - DNA, 25 bp, Homo sapien
gatgctcagtttgctagctctgccc

SEQ ID NO: 2892968 - DNA, 25 bp, Homo sapien
catgtggccccatggccatctgaga

SEQ ID NO: 2892969 - DNA, 25 bp, Homo sapien
gcaggttccttcttgttgcacaggg

SEQ ID NO: 2892970 - DNA, 25 bp, Homo sapien
cccgcagtagaggtcattgagttca

SEQ ID NO: 2892971 - DNA, 25 bp, Homo sapien
agctgcctggaggtcccgcagtaga

SEQ ID NO: 2892972 - DNA, 25 bp, Homo sapien
ggttccttcttgttgcacagggagc

SEQ ID NO: 2892973 - DNA, 25 bp, Homo sapien
aatgtgccacaggtcagagaatgcg

SEQ ID NO: 2892974 - DNA, 25 bp, Homo sapien
aataacaagaggtgtcacgtgggcc

SEQ ID NO: 2892975 - DNA, 25 bp, Homo sapien
tccaggagaagctgacgtccgtgtc

SEQ ID NO: 2892976 - DNA, 25 bp, Homo sapien
tggaaggaatacacgctctagggtc

SEQ ID NO: 2892977 - DNA, 25 bp, Homo sapien
ccctgcgtgactcagcaagcagggt

SEQ ID NO: 2892978 - DNA, 25 bp, Homo sapien
acagatgaggccgggtaagcacacg

SEQ ID NO: 2892979 - DNA, 25 bp, Homo sapien
gggcctacgtgagatctatttctgt

SEQ ID NO: 2892980 - DNA, 25 bp, Homo sapien
taagcacacggtagctgcgtaactg

SEQ ID NO: 2892981 - DNA, 25 bp, Homo sapien
aagagccatttgagacctgaacccc

SEQ ID NO: 2892982 - DNA, 25 bp, Homo sapien
tgctgatgaaaacgctggacccctg

SEQ ID NO: 2892983 - DNA, 25 bp, Homo sapien
aaacttgtcctaggctgctgggctg

SEQ ID NO: 2892984 - DNA, 25 bp, Homo sapien
ttcaggcccttgatggtgacacagc

SEQ ID NO: 2892985 - DNA, 25 bp, Homo sapien
tataaagaaactcgcagcctttggc

SEQ ID NO: 2892986 - DNA, 25 bp, Homo sapien
tgtacggcccaaggttacgctgttg

SEQ ID NO: 2892987 - DNA, 25 bp, Homo sapien
tttagtaggttcacagacatgcaac

SEQ ID NO: 2892988 - DNA, 25 bp, Homo sapien
aagtttcctccgcatcgtggtgcat

SEQ ID NO: 2892989 - DNA, 25 bp, Homo sapien
tcctctctggatgcggacatctgag

SEQ ID NO: 2892990 - DNA, 25 bp, Homo sapien
tgccggccagagattaccaccatta

SEQ ID NO: 2892991 - DNA, 25 bp, Homo sapien
gatgatattatcacctgccttgcag

SEQ ID NO: 2892992 - DNA, 25 bp, Homo sapien
tccaggtgctatgagtacgtggcag

SEQ ID NO: 2892993 - DNA, 25 bp, Homo sapien
cacacagagcagaacgttcagcagc

SEQ ID NO: 2892994 - DNA, 25 bp, Homo sapien
tctaacgtaagaaccaggtgtcacc

SEQ ID NO: 2892995 - DNA, 25 bp, Homo sapien
tgtgatcgccatgacaaccccatgg

SEQ ID NO: 2892996 - DNA, 25 bp, Homo sapien
caaaacgtacagtcataatggccag

SEQ ID NO: 2892997 - DNA, 25 bp, Homo sapien
tacccctggtgtacatgactcaagg

SEQ ID NO: 2892998 - DNA, 25 bp, Homo sapien
gagctacacttgagcacctgggagg

SEQ ID NO: 2892999 - DNA, 25 bp, Homo sapien
cacaggaggtagcaatgggctcaaa

SEQ ID NO: 2893000 - DNA, 25 bp, Homo sapien
caggacatggccttatgctgcagag

SEQ ID NO: 2893001 - DNA, 25 bp, Homo sapien
ggactacaggctggcaccttgagag

SEQ ID NO: 2893002 - DNA, 25 bp, Homo sapien
agggactacaggctggcaccttgag

SEQ ID NO: 2893003 - DNA, 25 bp, Homo sapien
gctggcaccttgagagctcatcttc

SEQ ID NO: 2893004 - DNA, 25 bp, Homo sapien
aggctggcaccttgagagctcatct

SEQ ID NO: 2893005 - DNA, 25 bp, Homo sapien
aaacccagcaagctcccttctgcgt

SEQ ID NO: 2893006 - DNA, 25 bp, Homo sapien
tgaaacccagcaagctcccttctgc

SEQ ID NO: 2893007 - DNA, 25 bp, Homo sapien
aacccagcaagctcccttctgcgtt

SEQ ID NO: 2893008 - DNA, 25 bp, Homo sapien
ctgaaacccagcaagctcccttctg

SEQ ID NO: 2893009 - DNA, 25 bp, Homo sapien
tattccggcgctgcaagagagtcta

SEQ ID NO: 2893010 - DNA, 25 bp, Homo sapien
tccagttgcttagcgaggccgctcg

SEQ ID NO: 2893011 - DNA, 25 bp, Homo sapien
aatattaacacacgtcttgagcgcc

SEQ ID NO: 2893012 - DNA, 25 bp, Homo sapien
cacagcgaaagtttccgagcggact

SEQ ID NO: 2893013 - DNA, 25 bp, Homo sapien
tgaacgcggcgcaaacgggagatct

SEQ ID NO: 2893014 - DNA, 25 bp, Homo sapien
aagttgttcgggagcagctgaacgc

SEQ ID NO: 2893015 - DNA, 25 bp, Homo sapien
tctgggccggcagaaaagttgttcg

SEQ ID NO: 2893016 - DNA, 25 bp, Homo sapien
aatctgcactcgctgctgaagagcc

SEQ ID NO: 2893017 - DNA, 25 bp, Homo sapien
ctgacccgatagcccagagggaagt

SEQ ID NO: 2893018 - DNA, 25 bp, Homo sapien
tgcagccaggcccggatcgggacca

SEQ ID NO: 2893019 - DNA, 25 bp, Homo sapien
cccgatagcccagagggaagtggca

SEQ ID NO: 2893020 - DNA, 25 bp, Homo sapien
gcccggatcgggaccagggaggagc

SEQ ID NO: 2893021 - DNA, 25 bp, Homo sapien
cacccacaaagacggcacagaaggg

SEQ ID NO: 2893022 - DNA, 25 bp, Homo sapien
atctagatgggaagggttaacacct

SEQ ID NO: 2893023 - DNA, 25 bp, Homo sapien
aacagacacccacaaagacggcaca

SEQ ID NO: 2893024 - DNA, 25 bp, Homo sapien
tggactgagggtaggtccatcttgt

SEQ ID NO: 2893025 - DNA, 25 bp, Homo sapien
gcccagcggagcagtgttggagtcc

SEQ ID NO: 2893026 - DNA, 25 bp, Homo sapien
gggcccagcggagcagtgttggagt

SEQ ID NO: 2893027 - DNA, 25 bp, Homo sapien
ccagcggagcagtgttggagtccat

SEQ ID NO: 2893028 - DNA, 25 bp, Homo sapien
aggggcccagcggagcagtgttgga

SEQ ID NO: 2893029 - DNA, 25 bp, Homo sapien
gctgcgtctctaacaccagggccag

SEQ ID NO: 2893030 - DNA, 25 bp, Homo sapien
ggtgctcggggcctttcgctcctct

SEQ ID NO: 2893031 - DNA, 25 bp, Homo sapien
ctgtggcattgagtcgggaacgcgc

SEQ ID NO: 2893032 - DNA, 25 bp, Homo sapien
gctctttcccggctcctggtatgct

SEQ ID NO: 2893033 - DNA, 25 bp, Homo sapien
cccagcatcccgcctcaggatggag

SEQ ID NO: 2893034 - DNA, 25 bp, Homo sapien
agtcagctcggcctgtgaagaccaa

SEQ ID NO: 2893035 - DNA, 25 bp, Homo sapien
caggaaccaacaagcctgtcagctc

SEQ ID NO: 2893036 - DNA, 25 bp, Homo sapien
ccaggaaccaacaagcctgtcagct

SEQ ID NO: 2893037 - DNA, 25 bp, Homo sapien
ttctgaaatcctagcatagtccagg

SEQ ID NO: 2893038 - DNA, 25 bp, Homo sapien
tgccaagctcaactccctgattgag

SEQ ID NO: 2893039 - DNA, 25 bp, Homo sapien
gacgctggacagtacacagggagca

SEQ ID NO: 2893040 - DNA, 25 bp, Homo sapien
cagcttccactacgacgctggacag

SEQ ID NO: 2893041 - DNA, 25 bp, Homo sapien
gactcactatccctagaggaactgc

SEQ ID NO: 2893042 - DNA, 25 bp, Homo sapien
tcttgcacagagtttcgggctcagc

SEQ ID NO: 2893043 - DNA, 25 bp, Homo sapien
taactctccctggacgcaactcttg

SEQ ID NO: 2893044 - DNA, 25 bp, Homo sapien
tcaaggacgctgctcagagatggca

SEQ ID NO: 2893045 - DNA, 25 bp, Homo sapien
gggatttccatgtctccctttgtag

SEQ ID NO: 2893046 - DNA, 25 bp, Homo sapien
ccctctccaggacttcttcaaaggg

SEQ ID NO: 2893047 - DNA, 25 bp, Homo sapien
atttccatgtctccctttgtaggcc

SEQ ID NO: 2893048 - DNA, 25 bp, Homo sapien
ctcagtctgtgccttggggtccccg

SEQ ID NO: 2893049 - DNA, 25 bp, Homo sapien
acgggctccgactggtactggtaca

SEQ ID NO: 2893050 - DNA, 25 bp, Homo sapien
ggcatgtccactaggctaggcccta

SEQ ID NO: 2893051 - DNA, 25 bp, Homo sapien
cactcgctcctcaaaacacggtgag

SEQ ID NO: 2893052 - DNA, 25 bp, Homo sapien
gagagacgccagctaaccaagggtt

SEQ ID NO: 2893053 - DNA, 25 bp, Homo sapien
tgcttcgcggcgaggaccagccagt

SEQ ID NO: 2893054 - DNA, 25 bp, Homo sapien
tgtcgccggccaactgcaggtagtg

SEQ ID NO: 2893055 - DNA, 25 bp, Homo sapien
aagcaccggcgaagcagcttcacag

SEQ ID NO: 2893056 - DNA, 25 bp, Homo sapien
tgttgagttcttcatccgtgtcgcc

SEQ ID NO: 2893057 - DNA, 25 bp, Homo sapien
gcttccagtacatgaccagggctgc

SEQ ID NO: 2893058 - DNA, 25 bp, Homo sapien
gggttgagcttccagtacatgacca

SEQ ID NO: 2893059 - DNA, 25 bp, Homo sapien
tcccgttcgttctcggacgtgatgc

SEQ ID NO: 2893060 - DNA, 25 bp, Homo sapien
agagctgcctcacctcccgttcgtt

SEQ ID NO: 2893061 - DNA, 25 bp, Homo sapien
cagcatgcgcctctgcttctgcagg

SEQ ID NO: 2893062 - DNA, 25 bp, Homo sapien
ctgcagggacttgggcacggggcct

SEQ ID NO: 2893063 - DNA, 25 bp, Homo sapien
caggcgctccagcatgcgcctctgc

SEQ ID NO: 2893064 - DNA, 25 bp, Homo sapien
cagggacttgggcacggggcctggc

SEQ ID NO: 2893065 - DNA, 25 bp, Homo sapien
agaggtcgccctgcaggcgcaggct

SEQ ID NO: 2893066 - DNA, 25 bp, Homo sapien
tgggaggcacgggtgagatagggca

SEQ ID NO: 2893067 - DNA, 25 bp, Homo sapien
tgggaggcatgggtgagacggggca

SEQ ID NO: 2893068 - DNA, 25 bp, Homo sapien
aaggagaggtcgccctgcaggcgca

SEQ ID NO: 2893069 - DNA, 25 bp, Homo sapien
ggccaagctaagaaaggagctgagt

SEQ ID NO: 2893070 - DNA, 25 bp, Homo sapien
gaagggggcaggtttgccaagtgcc

SEQ ID NO: 2893071 - DNA, 25 bp, Homo sapien
gagctgagtgggttcaggtggagga

SEQ ID NO: 2893072 - DNA, 25 bp, Homo sapien
ggacggtggcgtggggccaagctaa

SEQ ID NO: 2893073 - DNA, 25 bp, Homo sapien
agaaaacagcatgggcgccccacac

SEQ ID NO: 2893074 - DNA, 25 bp, Homo sapien
tgccaccctcacacagagcaatggg

SEQ ID NO: 2893075 - DNA, 25 bp, Homo sapien
agagaaaacagcatgggcgccccac

SEQ ID NO: 2893076 - DNA, 25 bp, Homo sapien
ccactgccaccctcacacagagcaa

SEQ ID NO: 2893077 - DNA, 25 bp, Homo sapien
tcatccagcgcgatgtagttcttgg

SEQ ID NO: 2893078 - DNA, 25 bp, Homo sapien
tggcgtacttcttagtgatctccac

SEQ ID NO: 2893079 - DNA, 25 bp, Homo sapien
tcttcgtcgtcctgcaggaacaggc

SEQ ID NO: 2893080 - DNA, 25 bp, Homo sapien
gggatgacgcccttggcgtacttct

SEQ ID NO: 2893081 - DNA, 25 bp, Homo sapien
gcaagcattagggaaagggagttca

SEQ ID NO: 2893082 - DNA, 25 bp, Homo sapien
cctccatgaagggaaatggcgatcc

SEQ ID NO: 2893083 - DNA, 25 bp, Homo sapien
ccagcaaaaataccgttcagctgca

SEQ ID NO: 2893084 - DNA, 25 bp, Homo sapien
aagagatgacggagccctgagatgc

SEQ ID NO: 2893085 - DNA, 25 bp, Homo sapien
caggtggttccagccgaagttgacc

SEQ ID NO: 2893086 - DNA, 25 bp, Homo sapien
tcagctgtgccatgcggaagaagag

SEQ ID NO: 2893087 - DNA, 25 bp, Homo sapien
taaagaagccggtgatgacagccag

SEQ ID NO: 2893088 - DNA, 25 bp, Homo sapien
tctgagcggtacacatagaaccagc

SEQ ID NO: 2893089 - DNA, 25 bp, Homo sapien
tgctggcccgcagcacgatgtcctt

SEQ ID NO: 2893090 - DNA, 25 bp, Homo sapien
ctcctcgcggctgcgcgagccgtca

SEQ ID NO: 2893091 - DNA, 25 bp, Homo sapien
gatgtccttggtgacgtcgtcctcc

SEQ ID NO: 2893092 - DNA, 25 bp, Homo sapien
agcgccgctgctgaatggcatgccc

SEQ ID NO: 2893093 - DNA, 25 bp, Homo sapien
tcgaaggcgaacttcacggcgccat

SEQ ID NO: 2893094 - DNA, 25 bp, Homo sapien
tgctgaactcgatgaggctgccctg

SEQ ID NO: 2893095 - DNA, 25 bp, Homo sapien
gccgccgacaggaatgggaagaaaa

SEQ ID NO: 2893096 - DNA, 25 bp, Homo sapien
ttgagctcgaagacaggccacttgc

SEQ ID NO: 2893097 - DNA, 25 bp, Homo sapien
ggcacacccatgtcactcagaaagg

SEQ ID NO: 2893098 - DNA, 25 bp, Homo sapien
gcaatctacacatggtcgcaaggtc

SEQ ID NO: 2893099 - DNA, 25 bp, Homo sapien
ttgaccacgtgacaggctcaagctg

SEQ ID NO: 2893100 - DNA, 25 bp, Homo sapien
tattcagagtggacagagctacaca

SEQ ID NO: 2893101 - DNA, 25 bp, Homo sapien
gcagctagaggttactgtcacatca

SEQ ID NO: 2893102 - DNA, 25 bp, Homo sapien
gagggccttacccattacttggata

SEQ ID NO: 2893103 - DNA, 25 bp, Homo sapien
tgtgtactcacttctggccatataa

SEQ ID NO: 2893104 - DNA, 25 bp, Homo sapien
gatagcgtgttaaagccaaaaccca

SEQ ID NO: 2893105 - DNA, 25 bp, Homo sapien
aagcgccggcgtgatgacatcagtg

SEQ ID NO: 2893106 - DNA, 25 bp, Homo sapien
gctgagaacatcattgccatcgccg

SEQ ID NO: 2893107 - DNA, 25 bp, Homo sapien
tcttccaggacaaggtaaactctga

SEQ ID NO: 2893108 - DNA, 25 bp, Homo sapien
tcagtgtggacagcttggacttcac

SEQ ID NO: 2893109 - DNA, 25 bp, Homo sapien
cctatgctgagatccccatggaggg

SEQ ID NO: 2893110 - DNA, 25 bp, Homo sapien
ggccccagtggagcatgtagacgat

SEQ ID NO: 2893111 - DNA, 25 bp, Homo sapien
tatgcccggtatgtaggtgaagaca

SEQ ID NO: 2893112 - DNA, 25 bp, Homo sapien
gcaagacccatagagacctaccagg

SEQ ID NO: 2893113 - DNA, 25 bp, Homo sapien
accctgttgtggagggcctgccgca

SEQ ID NO: 2893114 - DNA, 25 bp, Homo sapien
tggggaccctgttgtggagggcctg

SEQ ID NO: 2893115 - DNA, 25 bp, Homo sapien
ggaccctgttgtggagggcctgccg

SEQ ID NO: 2893116 - DNA, 25 bp, Homo sapien
ccctgttgtggagggcctgccgcat

SEQ ID NO: 2893117 - DNA, 25 bp, Homo sapien
atgaggaaatgggagttctagagaa

SEQ ID NO: 2893118 - DNA, 25 bp, Homo sapien
gggctgttggttggggggctgtcag

SEQ ID NO: 2893119 - DNA, 25 bp, Homo sapien
ctgtcgggtgttaggggctgttgcg

SEQ ID NO: 2893120 - DNA, 25 bp, Homo sapien
ctagagaaggagcggtgtgggggct

SEQ ID NO: 2893121 - DNA, 25 bp, Homo sapien
ttttcctccagccaagtgaccaaag

SEQ ID NO: 2893122 - DNA, 25 bp, Homo sapien
gactcatgatgagccaggactaggt

SEQ ID NO: 2893123 - DNA, 25 bp, Homo sapien
tcttcagcgagagtggaattcagta

SEQ ID NO: 2893124 - DNA, 25 bp, Homo sapien
ggctgcaggaggaaacgtctcacca

SEQ ID NO: 2893125 - DNA, 25 bp, Homo sapien
ttgaccggatcctgctgaccacaga

SEQ ID NO: 2893126 - DNA, 25 bp, Homo sapien
aggctgggtgtcatcctggctctga

SEQ ID NO: 2893127 - DNA, 25 bp, Homo sapien
agtggccttccacgctgggtctggc

SEQ ID NO: 2893128 - DNA, 25 bp, Homo sapien
ctgcctggttgcctttgaaggtcca

SEQ ID NO: 2893129 - DNA, 25 bp, Homo sapien
cagcagctggacaatgtgcccaggc

SEQ ID NO: 2893130 - DNA, 25 bp, Homo sapien
aggctgggagttggtgtctccagga

SEQ ID NO: 2893131 - DNA, 25 bp, Homo sapien
ccaggctgggagttggtgtctccag

SEQ ID NO: 2893132 - DNA, 25 bp, Homo sapien
agcagctggacaatgtgcccaggct

SEQ ID NO: 2893133 - DNA, 25 bp, Homo sapien
gtgactttagcatctcggatgttgc

SEQ ID NO: 2893134 - DNA, 25 bp, Homo sapien
catctcggatgttgccatcgtagcc

SEQ ID NO: 2893135 - DNA, 25 bp, Homo sapien
ttgccatcgtagcccatgtgcataa

SEQ ID NO: 2893136 - DNA, 25 bp, Homo sapien
ggctgaatagctgcatcttgttcat

SEQ ID NO: 2893137 - DNA, 25 bp, Homo sapien
acaaagtatcgagccaaatgccaaa

SEQ ID NO: 2893138 - DNA, 25 bp, Homo sapien
taacgtgctccgaatagggtgaggc

SEQ ID NO: 2893139 - DNA, 25 bp, Homo sapien
caaatccataagtcaccaagatggg

SEQ ID NO: 2893140 - DNA, 25 bp, Homo sapien
tatgtcctgatcctatacctctgtt

SEQ ID NO: 2893141 - DNA, 25 bp, Homo sapien
cgagtcaggggtcgagagtcccctt

SEQ ID NO: 2893142 - DNA, 25 bp, Homo sapien
ccgagtcaggggtcgagagtcccct

SEQ ID NO: 2893143 - DNA, 25 bp, Homo sapien
agtcaggggtcgagagtcccctttg

SEQ ID NO: 2893144 - DNA, 25 bp, Homo sapien
tggcgctggccagtttgatcccttt

SEQ ID NO: 2893145 - DNA, 25 bp, Homo sapien
ccccaggccggctgtaacagtggac

SEQ ID NO: 2893146 - DNA, 25 bp, Homo sapien
gatgttccattggtagtttcagagg

SEQ ID NO: 2893147 - DNA, 25 bp, Homo sapien
tattcacctccaagagagaaggccc

SEQ ID NO: 2893148 - DNA, 25 bp, Homo sapien
agaaagcctgcttgccctgactgga

SEQ ID NO: 2893149 - DNA, 25 bp, Homo sapien
agggccgtcctctgagtgaccgtgc

SEQ ID NO: 2893150 - DNA, 25 bp, Homo sapien
cctggatcagcgtgggttctgagaa

SEQ ID NO: 2893151 - DNA, 25 bp, Homo sapien
ctggtatctggaatgagctatgggt

SEQ ID NO: 2893152 - DNA, 25 bp, Homo sapien
tcctgcagggttcccgaagtggaag

SEQ ID NO: 2893153 - DNA, 25 bp, Homo sapien
ctgcagggttcccgaagtggaagga

SEQ ID NO: 2893154 - DNA, 25 bp, Homo sapien
ctcctgcagggttcccgaagtggaa

SEQ ID NO: 2893155 - DNA, 25 bp, Homo sapien
cagggttcccgaagtggaaggatct

SEQ ID NO: 2893156 - DNA, 25 bp, Homo sapien
cactggtggcacattctgatggaag

SEQ ID NO: 2893157 - DNA, 25 bp, Homo sapien
ctttatcactggtggcacattctga

SEQ ID NO: 2893158 - DNA, 25 bp, Homo sapien
ttctgatggaaggagacattggcag

SEQ ID NO: 2893159 - DNA, 25 bp, Homo sapien
atggaaggagacattggcagtggga

SEQ ID NO: 2893160 - DNA, 25 bp, Homo sapien
tcctggatgacagttcgtgtcccgc

SEQ ID NO: 2893161 - DNA, 25 bp, Homo sapien
tgtcccgcagatagagcttaaccaa

SEQ ID NO: 2893162 - DNA, 25 bp, Homo sapien
gaccaagcccataatttcctggatg

SEQ ID NO: 2893163 - DNA, 25 bp, Homo sapien
ttttgctctgtgagaggttgttgag

SEQ ID NO: 2893164 - DNA, 25 bp, Homo sapien
cacttctgtggacaccccaaatagg

SEQ ID NO: 2893165 - DNA, 25 bp, Homo sapien
aggcacatcgaggagaaccagctgc

SEQ ID NO: 2893166 - DNA, 25 bp, Homo sapien
gagagaaaggtgtggcctctccact

SEQ ID NO: 2893167 - DNA, 25 bp, Homo sapien
ataggaagaagggtgcacacaaagc

SEQ ID NO: 2893168 - DNA, 25 bp, Homo sapien
cgtcttgtggtccatctgcccgtga

SEQ ID NO: 2893169 - DNA, 25 bp, Homo sapien
tgtggtccatctgcccgtgagcatt

SEQ ID NO: 2893170 - DNA, 25 bp, Homo sapien
gtccatctgcccgtgagcattccag

SEQ ID NO: 2893171 - DNA, 25 bp, Homo sapien
ttatcgtcttgtggtccatctgccc

SEQ ID NO: 2893172 - DNA, 25 bp, Homo sapien
ctttaaggctcctttgcccctcact

SEQ ID NO: 2893173 - DNA, 25 bp, Homo sapien
aagctcctctgtgcggggttttctc

SEQ ID NO: 2893174 - DNA, 25 bp, Homo sapien
ccccggtcgtagtgcggctcccacg

SEQ ID NO: 2893175 - DNA, 25 bp, Homo sapien
tgtgcggggttttctcatttgccag

SEQ ID NO: 2893176 - DNA, 25 bp, Homo sapien
tttgccagctgtgcatcccccggtc

SEQ ID NO: 2893177 - DNA, 25 bp, Homo sapien
tactcgtgcaggggcagaaattcac

SEQ ID NO: 2893178 - DNA, 25 bp, Homo sapien
gacattttctctccgtccagaggca

SEQ ID NO: 2893179 - DNA, 25 bp, Homo sapien
gggcagaaattcactaaccttgagg

SEQ ID NO: 2893180 - DNA, 25 bp, Homo sapien
gttgggctggattatggctctgggc

SEQ ID NO: 2893181 - DNA, 25 bp, Homo sapien
cgtgtgctcattgagtcgtttttcc

SEQ ID NO: 2893182 - DNA, 25 bp, Homo sapien
tgtgcgtgtgctcattgagtcgttt

SEQ ID NO: 2893183 - DNA, 25 bp, Homo sapien
gctcattgagtcgtttttcccttac

SEQ ID NO: 2893184 - DNA, 25 bp, Homo sapien
ttgggaggggctgcgtcttaatgtg

SEQ ID NO: 2893185 - DNA, 25 bp, Homo sapien
gaactggtattggaacccctgtcta

SEQ ID NO: 2893186 - DNA, 25 bp, Homo sapien
gagattcagttgtgtgcccagcatg

SEQ ID NO: 2893187 - DNA, 25 bp, Homo sapien
ccagccaggttttggacccagatag

SEQ ID NO: 2893188 - DNA, 25 bp, Homo sapien
gacatcccaaagagccgcagggtaa

SEQ ID NO: 2893189 - DNA, 25 bp, Homo sapien
gtagacccagcccacgtccatgtgg

SEQ ID NO: 2893190 - DNA, 25 bp, Homo sapien
tgtggggcaccacgaaggcccggat

SEQ ID NO: 2893191 - DNA, 25 bp, Homo sapien
tcgcagcaacaggagcggtgccagc

SEQ ID NO: 2893192 - DNA, 25 bp, Homo sapien
cggcggactggacccctggcggtcg

SEQ ID NO: 2893193 - DNA, 25 bp, Homo sapien
tccccactggatgggatcgtgctct

SEQ ID NO: 2893194 - DNA, 25 bp, Homo sapien
ctccccactggatgggatcgtgctc

SEQ ID NO: 2893195 - DNA, 25 bp, Homo sapien
ccccactggatgggatcgtgctctc

SEQ ID NO: 2893196 - DNA, 25 bp, Homo sapien
ccccacacagctattaggcactcgc

SEQ ID NO: 2893197 - DNA, 25 bp, Homo sapien
cagctattaggcactcgctccatac

SEQ ID NO: 2893198 - DNA, 25 bp, Homo sapien
acagctattaggcactcgctccata

SEQ ID NO: 2893199 - DNA, 25 bp, Homo sapien
cacacagctattaggcactcgctcc

SEQ ID NO: 2893200 - DNA, 25 bp, Homo sapien
attggcggcgtacgcccgcatgctt

SEQ ID NO: 2893201 - DNA, 25 bp, Homo sapien
ccactgaggtgtagacattggcggc

SEQ ID NO: 2893202 - DNA, 25 bp, Homo sapien
tggtatttctgctggtccgaggcga

SEQ ID NO: 2893203 - DNA, 25 bp, Homo sapien
tccacagcgatgaaccggcgctgct

SEQ ID NO: 2893204 - DNA, 25 bp, Homo sapien
aggatctggtcatcaaggtgcgtca

SEQ ID NO: 2893205 - DNA, 25 bp, Homo sapien
gatgacaaattccaggcgtccttcc

SEQ ID NO: 2893206 - DNA, 25 bp, Homo sapien
catgacctggcctccgatgacaaat

SEQ ID NO: 2893207 - DNA, 25 bp, Homo sapien
cacagcctcgtcatgcatgacctgg

SEQ ID NO: 2893208 - DNA, 25 bp, Homo sapien
tacattcaacttccttggtgaggca

SEQ ID NO: 2893209 - DNA, 25 bp, Homo sapien
tatggcactagcaaatcactgcttt

SEQ ID NO: 2893210 - DNA, 25 bp, Homo sapien
ggatatattgagaccatctgactct

SEQ ID NO: 2893211 - DNA, 25 bp, Homo sapien
tgctttcactggttaaggtccccga

SEQ ID NO: 2893212 - DNA, 25 bp, Homo sapien
agccaggagtgggtcttggttgagg

SEQ ID NO: 2893213 - DNA, 25 bp, Homo sapien
caggagtgggtcttggttgaggaga

SEQ ID NO: 2893214 - DNA, 25 bp, Homo sapien
ttggttgaggagatgctttggcacc

SEQ ID NO: 2893215 - DNA, 25 bp, Homo sapien
gtgggtcttggttgaggagatgctt

SEQ ID NO: 2893216 - DNA, 25 bp, Homo sapien
attgaagcccgccagcgcaaatagg

SEQ ID NO: 2893217 - DNA, 25 bp, Homo sapien
acgggtcaacgtgccaggagaactg

SEQ ID NO: 2893218 - DNA, 25 bp, Homo sapien
gaactgtggccggatcccaaatgtt

SEQ ID NO: 2893219 - DNA, 25 bp, Homo sapien
tcaggtcgtagtcgatccgggagcc

SEQ ID NO: 2893220 - DNA, 25 bp, Homo sapien
tccatgatgtgcgtgaagatttcct

SEQ ID NO: 2893221 - DNA, 25 bp, Homo sapien
tgaagatttcctgccgctctgagag

SEQ ID NO: 2893222 - DNA, 25 bp, Homo sapien
gggaccctcgccacacgaactgcag

SEQ ID NO: 2893223 - DNA, 25 bp, Homo sapien
cagtagctgtactggtccatgatgt

SEQ ID NO: 2893224 - DNA, 25 bp, Homo sapien
ccagggcctcggcatagaggttgat

SEQ ID NO: 2893225 - DNA, 25 bp, Homo sapien
gccagaggacgtgcggtgtccggaa

SEQ ID NO: 2893226 - DNA, 25 bp, Homo sapien
gacagccacgccattccagtaaaat

SEQ ID NO: 2893227 - DNA, 25 bp, Homo sapien
gtgtccggaaccaggcggccctctg

SEQ ID NO: 2893228 - DNA, 25 bp, Homo sapien
tccatgttggcaaactgcaccgagg

SEQ ID NO: 2893229 - DNA, 25 bp, Homo sapien
tgcaccgaggcattgaagaactgct

SEQ ID NO: 2893230 - DNA, 25 bp, Homo sapien
gcggacacgccaggtgacattgaga

SEQ ID NO: 2893231 - DNA, 25 bp, Homo sapien
gaagtagtcgcccagcgtggcatac

SEQ ID NO: 2893232 - DNA, 25 bp, Homo sapien
tgcgggacgtgtagaagcccgtcca

SEQ ID NO: 2893233 - DNA, 25 bp, Homo sapien
gccggccacaggtagcgtgtgaaca

SEQ ID NO: 2893234 - DNA, 25 bp, Homo sapien
gtgtgaacatggactccccggcata

SEQ ID NO: 2893235 - DNA, 25 bp, Homo sapien
tacaacaaggcgctggctcgccggg

SEQ ID NO: 2893236 - DNA, 25 bp, Homo sapien
tcagtcccagtgatggcatcatggt

SEQ ID NO: 2893237 - DNA, 25 bp, Homo sapien
tgtctctcaccttgggggactcagt

SEQ ID NO: 2893238 - DNA, 25 bp, Homo sapien
ctcaccttgggggactcagtcccag

SEQ ID NO: 2893239 - DNA, 25 bp, Homo sapien
gggactcagtcccagtgatggcatc

SEQ ID NO: 2893240 - DNA, 25 bp, Homo sapien
tcatctaggacgatggaggccatca

SEQ ID NO: 2893241 - DNA, 25 bp, Homo sapien
gctggagctcatctaggacgatgga

SEQ ID NO: 2893242 - DNA, 25 bp, Homo sapien
aggccatcagcttgcgcatgcccag

SEQ ID NO: 2893243 - DNA, 25 bp, Homo sapien
ccccgaggccaggtgcgttgcgtac

SEQ ID NO: 2893244 - DNA, 25 bp, Homo sapien
acgatggtggtgaccgtccaggcca

SEQ ID NO: 2893245 - DNA, 25 bp, Homo sapien
tgggtggcccgcctcatctgtgacg

SEQ ID NO: 2893246 - DNA, 25 bp, Homo sapien
tagaccgaggcaaaatgtcctgcag

SEQ ID NO: 2893247 - DNA, 25 bp, Homo sapien
atctgtgacgcggactccagggaaa

SEQ ID NO: 2893248 - DNA, 25 bp, Homo sapien
caaaactgtcatggtaagtatggca

SEQ ID NO: 2893249 - DNA, 25 bp, Homo sapien
gctgtccctgagttgtaccctttct

SEQ ID NO: 2893250 - DNA, 25 bp, Homo sapien
caattattataccagtgcatgctac

SEQ ID NO: 2893251 - DNA, 25 bp, Homo sapien
tcagcaggacacaagtgtggtagcc

SEQ ID NO: 2893252 - DNA, 25 bp, Homo sapien
tcagcctgcggccaaattgaagggt

SEQ ID NO: 2893253 - DNA, 25 bp, Homo sapien
attgaagggtgctcgccacagtggc

SEQ ID NO: 2893254 - DNA, 25 bp, Homo sapien
ttgtagtgccggtaactgaggcctg

SEQ ID NO: 2893255 - DNA, 25 bp, Homo sapien
gaataagcaggtcatacgcagatgg

SEQ ID NO: 2893256 - DNA, 25 bp, Homo sapien
tcccagatgctgtgcatcaggttgg

SEQ ID NO: 2893257 - DNA, 25 bp, Homo sapien
cccagatgctgtgcatcaggttggt

SEQ ID NO: 2893258 - DNA, 25 bp, Homo sapien
ctgtagaagtactgccggatctcag

SEQ ID NO: 2893259 - DNA, 25 bp, Homo sapien
gccttgcccggtgtgaacaggtagt

SEQ ID NO: 2893260 - DNA, 25 bp, Homo sapien
cccgttgacgtggtactccaggaat

SEQ ID NO: 2893261 - DNA, 25 bp, Homo sapien
ggatctcagtcacaagctgtcccgc

SEQ ID NO: 2893262 - DNA, 25 bp, Homo sapien
tcatcagaccacgtgtcaaccacgg

SEQ ID NO: 2893263 - DNA, 25 bp, Homo sapien
tctgaacttagctcccaaccaacgt

SEQ ID NO: 2893264 - DNA, 25 bp, Homo sapien
cgtgacacagcacacgcaaacgcag

SEQ ID NO: 2893265 - DNA, 25 bp, Homo sapien
acacgcaaacgcagccagcatgcag

SEQ ID NO: 2893266 - DNA, 25 bp, Homo sapien
ccgggagcggattgcatacgtgtaa

SEQ ID NO: 2893267 - DNA, 25 bp, Homo sapien
tagggcctccgctgcatctggtagc

SEQ ID NO: 2893268 - DNA, 25 bp, Homo sapien
ggtactcctgctctatccggtggca

SEQ ID NO: 2893269 - DNA, 25 bp, Homo sapien
ttcacataggaaacgtagggcctcc

SEQ ID NO: 2893270 - DNA, 25 bp, Homo sapien
ccttggctggagatgccatgtgccc

SEQ ID NO: 2893271 - DNA, 25 bp, Homo sapien
tccatgaaggccgactgaaccatgg

SEQ ID NO: 2893272 - DNA, 25 bp, Homo sapien
gctccgacagcaacacaagcctgct

SEQ ID NO: 2893273 - DNA, 25 bp, Homo sapien
tggagatgccatgtgcccgctccga

SEQ ID NO: 2893274 - DNA, 25 bp, Homo sapien
acgactgaggtgtcgttcagcgtga

SEQ ID NO: 2893275 - DNA, 25 bp, Homo sapien
cacgggcctgtgctgcagcgccagt

SEQ ID NO: 2893276 - DNA, 25 bp, Homo sapien
tcgttcagcgtgaggttgtagccca

SEQ ID NO: 2893277 - DNA, 25 bp, Homo sapien
gttgttccacagccgccggtggagc

SEQ ID NO: 2893278 - DNA, 25 bp, Homo sapien
tcaggatctgcaggtgaagattcgg

SEQ ID NO: 2893279 - DNA, 25 bp, Homo sapien
tctgagagtgctccgtgtggttgga

SEQ ID NO: 2893280 - DNA, 25 bp, Homo sapien
ctttccggagattctgagagtgctc

SEQ ID NO: 2893281 - DNA, 25 bp, Homo sapien
aagattcgggggcagcgtcacggcc

SEQ ID NO: 2893282 - DNA, 25 bp, Homo sapien
ctcgcccacttcatataggtggtag

SEQ ID NO: 2893283 - DNA, 25 bp, Homo sapien
cgcagcaggacacggcggaggtcag

SEQ ID NO: 2893284 - DNA, 25 bp, Homo sapien
ggtagagccgcagcaggacacggcg

SEQ ID NO: 2893285 - DNA, 25 bp, Homo sapien
gctgagacaggactgggtcctcgcc

SEQ ID NO: 2893286 - DNA, 25 bp, Homo sapien
ctcgtggatctctttgccaaggcag

SEQ ID NO: 2893287 - DNA, 25 bp, Homo sapien
tgagagggcaacatcagccaagagg

SEQ ID NO: 2893288 - DNA, 25 bp, Homo sapien
gaagcctcgcctgatagtagagctg

SEQ ID NO: 2893289 - DNA, 25 bp, Homo sapien
aactgggaaagaaatgaggcggctc

SEQ ID NO: 2893290 - DNA, 25 bp, Homo sapien
ttgtgaccgcaaacaagcagacggc

SEQ ID NO: 2893291 - DNA, 25 bp, Homo sapien
ggtgcatgctttaccaggtggccga

SEQ ID NO: 2893292 - DNA, 25 bp, Homo sapien
gtgggtggcccagtaagacatcatg

SEQ ID NO: 2893293 - DNA, 25 bp, Homo sapien
gacatcatggcgaaaaggtactggg

SEQ ID NO: 2893294 - DNA, 25 bp, Homo sapien
aggtccctgtgagcgagcgctcctc

SEQ ID NO: 2893295 - DNA, 25 bp, Homo sapien
gcggtgcagcatgctcaaatcccag

SEQ ID NO: 2893296 - DNA, 25 bp, Homo sapien
ccagcggtgcagcatgctcaaatcc

SEQ ID NO: 2893297 - DNA, 25 bp, Homo sapien
caggtccctgtgagcgagcgctcct

SEQ ID NO: 2893298 - DNA, 25 bp, Homo sapien
gtggcggccaggccccgtcctccag

SEQ ID NO: 2893299 - DNA, 25 bp, Homo sapien
ctgtggcggccaggccccgtcctcc

SEQ ID NO: 2893300 - DNA, 25 bp, Homo sapien
ctctgtggcggccaggccccgtcct

SEQ ID NO: 2893301 - DNA, 25 bp, Homo sapien
ggcggccaggccccgtcctccagct

SEQ ID NO: 2893302 - DNA, 25 bp, Homo sapien
gttggatgtgcaccgggtctgacca

SEQ ID NO: 2893303 - DNA, 25 bp, Homo sapien
aaccgactgtagtagatttgggagg

SEQ ID NO: 2893304 - DNA, 25 bp, Homo sapien
aaagcagcctcgcaaggtcgcacag

SEQ ID NO: 2893305 - DNA, 25 bp, Homo sapien
gagggctgcgggttcagagtaggaa

SEQ ID NO: 2893306 - DNA, 25 bp, Homo sapien
tttcctttgggtggacggtgatgat

SEQ ID NO: 2893307 - DNA, 25 bp, Homo sapien
gatttcctttgggtggacggtgatg

SEQ ID NO: 2893308 - DNA, 25 bp, Homo sapien
atttcctttgggtggacggtgatga

SEQ ID NO: 2893309 - DNA, 25 bp, Homo sapien
ttcctttgggtggacggtgatgatg

SEQ ID NO: 2893310 - DNA, 25 bp, Homo sapien
tatgaacgcgggagcacaggtattg

SEQ ID NO: 2893311 - DNA, 25 bp, Homo sapien
gagtctatgaaaacacgtggcacgc

SEQ ID NO: 2893312 - DNA, 25 bp, Homo sapien
tcatggactctgacggctgctgtgc

SEQ ID NO: 2893313 - DNA, 25 bp, Homo sapien
taggtccacagttaccactggcagc

SEQ ID NO: 2893314 - DNA, 25 bp, Homo sapien
tgggtactttccttcagccctagag

SEQ ID NO: 2893315 - DNA, 25 bp, Homo sapien
caaactgcacgttgtccagaggtct

SEQ ID NO: 2893316 - DNA, 25 bp, Homo sapien
cagtggtgcatctctagtagcagct

SEQ ID NO: 2893317 - DNA, 25 bp, Homo sapien
gaccaccagtgatccggttgctttg

SEQ ID NO: 2893318 - DNA, 25 bp, Homo sapien
cagccgggcctctttacggtcaggg

SEQ ID NO: 2893319 - DNA, 25 bp, Homo sapien
cagagtaacggcgaacaaaatggag

SEQ ID NO: 2893320 - DNA, 25 bp, Homo sapien
cacgtctagaaagagaggcaccggc

SEQ ID NO: 2893321 - DNA, 25 bp, Homo sapien
ggcttcttgagcacgcgagtttaca

SEQ ID NO: 2893322 - DNA, 25 bp, Homo sapien
agagaagccacggacaagcgactta

SEQ ID NO: 2893323 - DNA, 25 bp, Homo sapien
tggagagagaaaaccgacactcgct

SEQ ID NO: 2893324 - DNA, 25 bp, Homo sapien
gctatgcttagcaatagagagcccg

SEQ ID NO: 2893325 - DNA, 25 bp, Homo sapien
tagagagcccgaatattcctgaaaa

SEQ ID NO: 2893326 - DNA, 25 bp, Homo sapien
cactgcctcggaaccgcaatagcga

SEQ ID NO: 2893327 - DNA, 25 bp, Homo sapien
actgcctcggaaccgcaatagcgat

SEQ ID NO: 2893328 - DNA, 25 bp, Homo sapien
cccactgcctcggaaccgcaatagc

SEQ ID NO: 2893329 - DNA, 25 bp, Homo sapien
ttcccactgcctcggaaccgcaata

SEQ ID NO: 2893330 - DNA, 25 bp, Homo sapien
cagctcgacgatgtccaggggccgc

SEQ ID NO: 2893331 - DNA, 25 bp, Homo sapien
tccgccagctcgacgatgtccaggg

SEQ ID NO: 2893332 - DNA, 25 bp, Homo sapien
ggttccgccagctcgacgatgtcca

SEQ ID NO: 2893333 - DNA, 25 bp, Homo sapien
tccggttccgccagctcgacgatgt

SEQ ID NO: 2893334 - DNA, 25 bp, Homo sapien
tcgcgcatctcgttgatgaccggga

SEQ ID NO: 2893335 - DNA, 25 bp, Homo sapien
cgcgcatctcgttgatgaccgggag

SEQ ID NO: 2893336 - DNA, 25 bp, Homo sapien
cgcatctcgttgatgaccgggagca

SEQ ID NO: 2893337 - DNA, 25 bp, Homo sapien
cctcgcgcatctcgttgatgaccgg

SEQ ID NO: 2893338 - DNA, 25 bp, Homo sapien
ctgcgttttgatctggatgagcata

SEQ ID NO: 2893339 - DNA, 25 bp, Homo sapien
tattgtccatctcccacagcttgct

SEQ ID NO: 2893340 - DNA, 25 bp, Homo sapien
tttgatctggatgagcatattgtcc

SEQ ID NO: 2893341 - DNA, 25 bp, Homo sapien
ggatgagcatattgtccatctccca

SEQ ID NO: 2893342 - DNA, 25 bp, Homo sapien
ccgcgtcgcccgggttctggaggtg

SEQ ID NO: 2893343 - DNA, 25 bp, Homo sapien
cctcggccgcgtcgcccgggttctg

SEQ ID NO: 2893344 - DNA, 25 bp, Homo sapien
cgcgtcgcccgggttctggaggtgg

SEQ ID NO: 2893345 - DNA, 25 bp, Homo sapien
cggccgcgtcgcccgggttctggag

SEQ ID NO: 2893346 - DNA, 25 bp, Homo sapien
tctctgccatcttcgcaatctcctt

SEQ ID NO: 2893347 - DNA, 25 bp, Homo sapien
atctctgccatcttcgcaatctcct

SEQ ID NO: 2893348 - DNA, 25 bp, Homo sapien
tctgccatcttcgcaatctccttgg

SEQ ID NO: 2893349 - DNA, 25 bp, Homo sapien
ctctgccatcttcgcaatctccttg

SEQ ID NO: 2893350 - DNA, 25 bp, Homo sapien
tcttctagtccagtttagggtccaa

SEQ ID NO: 2893351 - DNA, 25 bp, Homo sapien
ccaaagcccgggaacaaatgtgact

SEQ ID NO: 2893352 - DNA, 25 bp, Homo sapien
caagtcctctaaaacgcatcagggt

SEQ ID NO: 2893353 - DNA, 25 bp, Homo sapien
tagttgctgcatggagtcgtcttcc

SEQ ID NO: 2893354 - DNA, 25 bp, Homo sapien
ttatctctggaagatggtagaaact

SEQ ID NO: 2893355 - DNA, 25 bp, Homo sapien
tggaagatggtagaaactcaagcca

SEQ ID NO: 2893356 - DNA, 25 bp, Homo sapien
tctctggaagatggtagaaactcaa

SEQ ID NO: 2893357 - DNA, 25 bp, Homo sapien
gatggtagaaactcaagccactcca

SEQ ID NO: 2893358 - DNA, 25 bp, Homo sapien
acggcagctccaggttgccacgcgc

SEQ ID NO: 2893359 - DNA, 25 bp, Homo sapien
gggcctcctcgaagctcctttcacg

SEQ ID NO: 2893360 - DNA, 25 bp, Homo sapien
ctgaaacagcgaaggccacacccaa

SEQ ID NO: 2893361 - DNA, 25 bp, Homo sapien
ccacacccaaatggccttcccgctg

SEQ ID NO: 2893362 - DNA, 25 bp, Homo sapien
atccgcctgcccatccgcgccgcct

SEQ ID NO: 2893363 - DNA, 25 bp, Homo sapien
tcgcagccggcgatccgctggtgca

SEQ ID NO: 2893364 - DNA, 25 bp, Homo sapien
ctcttgatggcgtcgagcaggctct

SEQ ID NO: 2893365 - DNA, 25 bp, Homo sapien
gcagctccacgatccgcctgcccat

SEQ ID NO: 2893366 - DNA, 25 bp, Homo sapien
cacgcgcggctgctttccgggactt

SEQ ID NO: 2893367 - DNA, 25 bp, Homo sapien
cggccagggcgactgtcccacgcgc

SEQ ID NO: 2893368 - DNA, 25 bp, Homo sapien
gcgactgtcccacgcgcggctgctt

SEQ ID NO: 2893369 - DNA, 25 bp, Homo sapien
ggagggaaccccggccgcaggctca

SEQ ID NO: 2893370 - DNA, 25 bp, Homo sapien
tacacataataactggtcagaccac

SEQ ID NO: 2893371 - DNA, 25 bp, Homo sapien
cgacacaattctgagtcatgctaaa

SEQ ID NO: 2893372 - DNA, 25 bp, Homo sapien
tggtaagattctgggctcgacacaa

SEQ ID NO: 2893373 - DNA, 25 bp, Homo sapien
ttcagaaaatctgggtaagttccac

SEQ ID NO: 2893374 - DNA, 25 bp, Homo sapien
tgataaccatgtcccaagcactgct

SEQ ID NO: 2893375 - DNA, 25 bp, Homo sapien
aacgaccagactagcaacaggttgc

SEQ ID NO: 2893376 - DNA, 25 bp, Homo sapien
ccaactttccgcagcgaggacggta

SEQ ID NO: 2893377 - DNA, 25 bp, Homo sapien
aaatgggctactagccgtcggccag

SEQ ID NO: 2893378 - DNA, 25 bp, Homo sapien
ctcccgcgcctcgtccgcgtccacg

SEQ ID NO: 2893379 - DNA, 25 bp, Homo sapien
gctcccgcgcctcgtccgcgtccac

SEQ ID NO: 2893380 - DNA, 25 bp, Homo sapien
ctgcgggcccgccagtgcgcccggg

SEQ ID NO: 2893381 - DNA, 25 bp, Homo sapien
ttgatggcgtcgagcaggctctgga

SEQ ID NO: 2893382 - DNA, 25 bp, Homo sapien
tcttgatggcgtcgagcaggctctg

SEQ ID NO: 2893383 - DNA, 25 bp, Homo sapien
cttgatggcgtcgagcaggctctgg

SEQ ID NO: 2893384 - DNA, 25 bp, Homo sapien
gatggcgtcgagcaggctctggatc

SEQ ID NO: 2893385 - DNA, 25 bp, Homo sapien
atccgcctgcccatccgcgccgcct

SEQ ID NO: 2893386 - DNA, 25 bp, Homo sapien
tcgcagccggcgatccgctggtgca

SEQ ID NO: 2893387 - DNA, 25 bp, Homo sapien
ccggcgatccgctggtgcagctcca

SEQ ID NO: 2893388 - DNA, 25 bp, Homo sapien
gcagctccacgatccgcctgcccat

SEQ ID NO: 2893389 - DNA, 25 bp, Homo sapien
ccagcgccttccacgcgggacactc

SEQ ID NO: 2893390 - DNA, 25 bp, Homo sapien
cgcgctccgctccagacccgcgcgg

SEQ ID NO: 2893391 - DNA, 25 bp, Homo sapien
gccgcgctccgctccagacccgcgc

SEQ ID NO: 2893392 - DNA, 25 bp, Homo sapien
acgcgggacactccccgccgcgctc

SEQ ID NO: 2893393 - DNA, 25 bp, Homo sapien
ggagagcgtggcacggctctgcgct

SEQ ID NO: 2893394 - DNA, 25 bp, Homo sapien
agaatgaaaccaactccgcggagag

SEQ ID NO: 2893395 - DNA, 25 bp, Homo sapien
atgaaaccaactccgcggagagcgt

SEQ ID NO: 2893396 - DNA, 25 bp, Homo sapien
aaagaatgaaaccaactccgcggag

SEQ ID NO: 2893397 - DNA, 25 bp, Homo sapien
gacccaccaggtctacgtcctgaaa

SEQ ID NO: 2893398 - DNA, 25 bp, Homo sapien
tgcaggaaggtcatcgcaaacgctc

SEQ ID NO: 2893399 - DNA, 25 bp, Homo sapien
gaaaatacttccagtggtcatgact

SEQ ID NO: 2893400 - DNA, 25 bp, Homo sapien
tcatatccgggagtcaaacaaaccc

SEQ ID NO: 2893401 - DNA, 25 bp, Homo sapien
gaacaaatatgaccacgcagcagcg

SEQ ID NO: 2893402 - DNA, 25 bp, Homo sapien
tgaacacagttcgtcagttggccac

SEQ ID NO: 2893403 - DNA, 25 bp, Homo sapien
aattgtaggttgctcaccagacagg

SEQ ID NO: 2893404 - DNA, 25 bp, Homo sapien
cagacaggttacacgatgtgcacca

SEQ ID NO: 2893405 - DNA, 25 bp, Homo sapien
tcaggagctactgatgttgtgaaag

SEQ ID NO: 2893406 - DNA, 25 bp, Homo sapien
agatggcacatcaggagctactgat

SEQ ID NO: 2893407 - DNA, 25 bp, Homo sapien
cacgacagttagaggatgcagatgg

SEQ ID NO: 2893408 - DNA, 25 bp, Homo sapien
aaaaaccccatcacgacagttagag

SEQ ID NO: 2893409 - DNA, 25 bp, Homo sapien
gctcccaagacgcaaagttcacaaa

SEQ ID NO: 2893410 - DNA, 25 bp, Homo sapien
caagtgcgttctcttcctctaggct

SEQ ID NO: 2893411 - DNA, 25 bp, Homo sapien
tctaggctcatacacaggatattgc

SEQ ID NO: 2893412 - DNA, 25 bp, Homo sapien
tggccacagggtgagtaatcagcac

SEQ ID NO: 2893413 - DNA, 25 bp, Homo sapien
ggagtcagcgctggtgtgtgcagca

SEQ ID NO: 2893414 - DNA, 25 bp, Homo sapien
taggagtcagcgctggtgtgtgcag

SEQ ID NO: 2893415 - DNA, 25 bp, Homo sapien
cttgtaggagtcagcgctggtgtgt

SEQ ID NO: 2893416 - DNA, 25 bp, Homo sapien
cccagcttgtaggagtcagcgctgg

SEQ ID NO: 2893417 - DNA, 25 bp, Homo sapien
gataccggggagagtgtggtccctg

SEQ ID NO: 2893418 - DNA, 25 bp, Homo sapien
tggggataccggggagagtgtggtc

SEQ ID NO: 2893419 - DNA, 25 bp, Homo sapien
ttggttggaaacactctcgctaggt

SEQ ID NO: 2893420 - DNA, 25 bp, Homo sapien
ttagcaaacgcttggttggaaacac

SEQ ID NO: 2893421 - DNA, 25 bp, Homo sapien
ttctggctctgggttcagtttagca

SEQ ID NO: 2893422 - DNA, 25 bp, Homo sapien
ccaggcatgtgagtttttccaagct

SEQ ID NO: 2893423 - DNA, 25 bp, Homo sapien
agcaccggcccaagcaggtgggagc

SEQ ID NO: 2893424 - DNA, 25 bp, Homo sapien
tcagcagatgcgacagacggcccct

SEQ ID NO: 2893425 - DNA, 25 bp, Homo sapien
gctgtaagttgatccaagctctcca

SEQ ID NO: 2893426 - DNA, 25 bp, Homo sapien
ggcccctcgagtgtagcccaggatc

SEQ ID NO: 2893427 - DNA, 25 bp, Homo sapien
gatcatagcttatgtggcacggcag

SEQ ID NO: 2893428 - DNA, 25 bp, Homo sapien
tgtcaatatcagagcgtgctggcac

SEQ ID NO: 2893429 - DNA, 25 bp, Homo sapien
tgctgacacgaggagacatctgaga

SEQ ID NO: 2893430 - DNA, 25 bp, Homo sapien
gctggatgctcacagaccaagagga

SEQ ID NO: 2893431 - DNA, 25 bp, Homo sapien
ttgagctcccccttggtcagggtct

SEQ ID NO: 2893432 - DNA, 25 bp, Homo sapien
ccctcgctgcccgaatatcgggaaa

SEQ ID NO: 2893433 - DNA, 25 bp, Homo sapien
ctgcaggaagcctggtagctccttc

SEQ ID NO: 2893434 - DNA, 25 bp, Homo sapien
tcagggtctgcgtgctgccctcgct

SEQ ID NO: 2893435 - DNA, 25 bp, Homo sapien
tagcaaagcgttctcactgtgggac

SEQ ID NO: 2893436 - DNA, 25 bp, Homo sapien
ccaggatgcagatctgaacagcagc

SEQ ID NO: 2893437 - DNA, 25 bp, Homo sapien
gaggcatcgccctgttacagatgaa

SEQ ID NO: 2893438 - DNA, 25 bp, Homo sapien
gggacctgccctgaagtcacacagg

SEQ ID NO: 2893439 - DNA, 25 bp, Homo sapien
taagaacttgtgagctgccttcagc

SEQ ID NO: 2893440 - DNA, 25 bp, Homo sapien
cacatggcattcctggccttaagaa

SEQ ID NO: 2893441 - DNA, 25 bp, Homo sapien
gggccagctgtgcatagcagacaca

SEQ ID NO: 2893442 - DNA, 25 bp, Homo sapien
cgaattggaattgtgctctgcgaga

SEQ ID NO: 2893443 - DNA, 25 bp, Homo sapien
ctgccttctcaaagtacttgtgaca

SEQ ID NO: 2893444 - DNA, 25 bp, Homo sapien
gagcaatttatccacggcatccttg

SEQ ID NO: 2893445 - DNA, 25 bp, Homo sapien
acttgtgacaggcagacgtgattgc

SEQ ID NO: 2893446 - DNA, 25 bp, Homo sapien
tgattgcagccacgaacactatgaa

SEQ ID NO: 2893447 - DNA, 25 bp, Homo sapien
caacaaacacttttgggaagcctgg

SEQ ID NO: 2893448 - DNA, 25 bp, Homo sapien
gcaggctcagcctaggggaataatt

SEQ ID NO: 2893449 - DNA, 25 bp, Homo sapien
ttaatcagaggtacatgagcaggct

SEQ ID NO: 2893450 - DNA, 25 bp, Homo sapien
cacttttgggaagcctgggaccatg

SEQ ID NO: 2893451 - DNA, 25 bp, Homo sapien
cacggcgattcttcccgcagagttg

SEQ ID NO: 2893452 - DNA, 25 bp, Homo sapien
gaacgcccctactgcggtactgagg

SEQ ID NO: 2893453 - DNA, 25 bp, Homo sapien
gcccctggacatagacgaggtggaa

SEQ ID NO: 2893454 - DNA, 25 bp, Homo sapien
tacaattgacaaagcgtgtgggtcg

SEQ ID NO: 2893455 - DNA, 25 bp, Homo sapien
actgcgcagcgctcgcttccggcct

SEQ ID NO: 2893456 - DNA, 25 bp, Homo sapien
cgcacgcacgcgcgctcacgccttt

SEQ ID NO: 2893457 - DNA, 25 bp, Homo sapien
gcctccgcgcgctcacgctcacgca

SEQ ID NO: 2893458 - DNA, 25 bp, Homo sapien
cgaccacccgactgcgcagcgctcg

SEQ ID NO: 2893459 - DNA, 25 bp, Homo sapien
cgccatccgaaaagctaccctccat

SEQ ID NO: 2893460 - DNA, 25 bp, Homo sapien
ggcctcttccgcgagcccctccggc

SEQ ID NO: 2893461 - DNA, 25 bp, Homo sapien
cctcttccgcgagcccctccggcag

SEQ ID NO: 2893462 - DNA, 25 bp, Homo sapien
gcagcgctccgccatccgaaaagct

SEQ ID NO: 2893463 - DNA, 25 bp, Homo sapien
cgttcatcgtgtgcaggagcttctt

SEQ ID NO: 2893464 - DNA, 25 bp, Homo sapien
gctaaagagcgagggcacgttcatc

SEQ ID NO: 2893465 - DNA, 25 bp, Homo sapien
ggtaagcaggtcctctaggctcgcg

SEQ ID NO: 2893466 - DNA, 25 bp, Homo sapien
tcgatcctgctgtagatgcgccgca

SEQ ID NO: 2893467 - DNA, 25 bp, Homo sapien
cacttcatactggaggtaagcaccc

SEQ ID NO: 2893468 - DNA, 25 bp, Homo sapien
tccataagcaggatttgcaattcac

SEQ ID NO: 2893469 - DNA, 25 bp, Homo sapien
tataaatcttgaaaaggtaacgcca

SEQ ID NO: 2893470 - DNA, 25 bp, Homo sapien
gaatcatgaatatactacggagagt

SEQ ID NO: 2893471 - DNA, 25 bp, Homo sapien
tggtctacaatccacgctataggag

SEQ ID NO: 2893472 - DNA, 25 bp, Homo sapien
tacaactttggaattagtcacaaaa

SEQ ID NO: 2893473 - DNA, 25 bp, Homo sapien
cacacacatatgtttgctatggaca

SEQ ID NO: 2893474 - DNA, 25 bp, Homo sapien
gaagactgtgaggtcatactttcaa

SEQ ID NO: 2893475 - DNA, 25 bp, Homo sapien
ctcccagggcgcgttctagtgtgtg

SEQ ID NO: 2893476 - DNA, 25 bp, Homo sapien
tgtggcgttcgcttcatattcccag

SEQ ID NO: 2893477 - DNA, 25 bp, Homo sapien
cggtcatgcggttatgtcttcaaca

SEQ ID NO: 2893478 - DNA, 25 bp, Homo sapien
agcacgcctgtgtgctcagtaacaa

SEQ ID NO: 2893479 - DNA, 25 bp, Homo sapien
gaatgaggcagctccgagacattgg

SEQ ID NO: 2893480 - DNA, 25 bp, Homo sapien
gtgaaagccacgtagggtcactcca

SEQ ID NO: 2893481 - DNA, 25 bp, Homo sapien
tggtggtaagccatgatcccttgca

SEQ ID NO: 2893482 - DNA, 25 bp, Homo sapien
gtatttagccccagacatgattccc

SEQ ID NO: 2893483 - DNA, 25 bp, Homo sapien
cctcggccgggcagttgaaggcctt

SEQ ID NO: 2893484 - DNA, 25 bp, Homo sapien
ttgtagctgtggttgacatctacca

SEQ ID NO: 2893485 - DNA, 25 bp, Homo sapien
ttattcaatcaaacgctaacccagg

SEQ ID NO: 2893486 - DNA, 25 bp, Homo sapien
ttccccttggtgtgggtgagcctcg

SEQ ID NO: 2893487 - DNA, 25 bp, Homo sapien
agtgaggagggaataggggtgcgcc

SEQ ID NO: 2893488 - DNA, 25 bp, Homo sapien
ggtgcgcccgccgtgcattggccat

SEQ ID NO: 2893489 - DNA, 25 bp, Homo sapien
aataggggtgcgcccgccgtgcatt

SEQ ID NO: 2893490 - DNA, 25 bp, Homo sapien
agggaataggggtgcgcccgccgtg

SEQ ID NO: 2893491 - DNA, 25 bp, Homo sapien
catacaggtcatagggcgaatgaaa

SEQ ID NO: 2893492 - DNA, 25 bp, Homo sapien
tcatagggcgaatgaaatcagaggt

SEQ ID NO: 2893493 - DNA, 25 bp, Homo sapien
aggtcatagggcgaatgaaatcaga

SEQ ID NO: 2893494 - DNA, 25 bp, Homo sapien
tagggcgaatgaaatcagaggtaaa

SEQ ID NO: 2893495 - DNA, 25 bp, Homo sapien
tctcctctggctccgaggggctgcg

SEQ ID NO: 2893496 - DNA, 25 bp, Homo sapien
ggcgcctctcctctggctccgaggg

SEQ ID NO: 2893497 - DNA, 25 bp, Homo sapien
tgccgaggctgccgggcggcgcggc

SEQ ID NO: 2893498 - DNA, 25 bp, Homo sapien
ggctgcgggcggctgccgagcgccg

SEQ ID NO: 2893499 - DNA, 25 bp, Homo sapien
cagcaaaccctcttaggtgtacctt

SEQ ID NO: 2893500 - DNA, 25 bp, Homo sapien
aagggcaaccccacgctatgatggc

SEQ ID NO: 2893501 - DNA, 25 bp, Homo sapien
catcatggatgcagaaccaaggcct

SEQ ID NO: 2893502 - DNA, 25 bp, Homo sapien
ctagacaaggagatatctgactggc

SEQ ID NO: 2893503 - DNA, 25 bp, Homo sapien
attcagttctttaatggcacaagcc

SEQ ID NO: 2893504 - DNA, 25 bp, Homo sapien
gacacaacaggtctaacacatcaag

SEQ ID NO: 2893505 - DNA, 25 bp, Homo sapien
tgttaatagccccatgtagccagtg

SEQ ID NO: 2893506 - DNA, 25 bp, Homo sapien
tagctaagacgacaagtgtgtggcc

SEQ ID NO: 2893507 - DNA, 25 bp, Homo sapien
cccttcaagtactgctgtggctaca

SEQ ID NO: 2893508 - DNA, 25 bp, Homo sapien
caagtatgcccagtatgttgcctag

SEQ ID NO: 2893509 - DNA, 25 bp, Homo sapien
tattgtccaaccatggcacgctgtg

SEQ ID NO: 2893510 - DNA, 25 bp, Homo sapien
tgtggctacagagaactgcctcacc

SEQ ID NO: 2893511 - DNA, 25 bp, Homo sapien
tttagtatcaaagacgtacctacca

SEQ ID NO: 2893512 - DNA, 25 bp, Homo sapien
gacgtacctaccatcattaaaatga

SEQ ID NO: 2893513 - DNA, 25 bp, Homo sapien
ctacacaacagtgaagcaggcattt

SEQ ID NO: 2893514 - DNA, 25 bp, Homo sapien
cacaacagtgaagcaggcattttag

SEQ ID NO: 2893515 - DNA, 25 bp, Homo sapien
cgcattctccggaacggttacaggg

SEQ ID NO: 2893516 - DNA, 25 bp, Homo sapien
cattctcaacgcattctccggaacg

SEQ ID NO: 2893517 - DNA, 25 bp, Homo sapien
tggttgtcttcattctcaacgcatt

SEQ ID NO: 2893518 - DNA, 25 bp, Homo sapien
tcttcattctcaacgcattctccgg

SEQ ID NO: 2893519 - DNA, 25 bp, Homo sapien
ttagcagggctacaaaatggcagtt

SEQ ID NO: 2893520 - DNA, 25 bp, Homo sapien
gatgaaacccactttgtcaacgttg

SEQ ID NO: 2893521 - DNA, 25 bp, Homo sapien
ttctggtttgaaaagctggactgcc

SEQ ID NO: 2893522 - DNA, 25 bp, Homo sapien
caatgtgatactgttggtcctcaaa

SEQ ID NO: 2893523 - DNA, 25 bp, Homo sapien
caggtgcacatcaccacacctagct

SEQ ID NO: 2893524 - DNA, 25 bp, Homo sapien
aggtgcacatcaccacacctagcta

SEQ ID NO: 2893525 - DNA, 25 bp, Homo sapien
tttaatagggcaggtatcactagcc

SEQ ID NO: 2893526 - DNA, 25 bp, Homo sapien
ggctgaaacactaacacccaactgg

SEQ ID NO: 2893527 - DNA, 25 bp, Homo sapien
aaatggccattatcttgaaccctgc

SEQ ID NO: 2893528 - DNA, 25 bp, Homo sapien
ccttggcaggtgatcaaaactgtgc

SEQ ID NO: 2893529 - DNA, 25 bp, Homo sapien
agtgctggttttgacaagcacaggc

SEQ ID NO: 2893530 - DNA, 25 bp, Homo sapien
ggtcagtgctggttttgacaagcac

SEQ ID NO: 2893531 - DNA, 25 bp, Homo sapien
gagggtcagtgctggttttgacaag

SEQ ID NO: 2893532 - DNA, 25 bp, Homo sapien
gctggttttgacaagcacaggcaaa

SEQ ID NO: 2893533 - DNA, 25 bp, Homo sapien
ttatttttgctggtagtcagccacc

SEQ ID NO: 2893534 - DNA, 25 bp, Homo sapien
caggcatgactaatgaatcaacatc

SEQ ID NO: 2893535 - DNA, 25 bp, Homo sapien
gtcagccacctaaaacagactttcc

SEQ ID NO: 2893536 - DNA, 25 bp, Homo sapien
caacatcctgatagcaacatgcatg

SEQ ID NO: 2893537 - DNA, 25 bp, Homo sapien
ggtacatgaatttaggttgccgaca

SEQ ID NO: 2893538 - DNA, 25 bp, Homo sapien
acatgaatttaggttgccgacatcc

SEQ ID NO: 2893539 - DNA, 25 bp, Homo sapien
tagggtacatgaatttaggttgccg

SEQ ID NO: 2893540 - DNA, 25 bp, Homo sapien
atagggtacatgaatttaggttgcc

SEQ ID NO: 2893541 - DNA, 25 bp, Homo sapien
tgttcctgcaggtcgtagtcatagc

SEQ ID NO: 2893542 - DNA, 25 bp, Homo sapien
aacttgaggagctttcagatggcaa

SEQ ID NO: 2893543 - DNA, 25 bp, Homo sapien
acatttctcgagctcttgtcccagc

SEQ ID NO: 2893544 - DNA, 25 bp, Homo sapien
gagtgtaaatcatggcatcaatgcc

SEQ ID NO: 2893545 - DNA, 25 bp, Homo sapien
caatttctcactataaactcagcgg

SEQ ID NO: 2893546 - DNA, 25 bp, Homo sapien
tgcaaggtgacacatcctgacttat

SEQ ID NO: 2893547 - DNA, 25 bp, Homo sapien
ggcaagaagtataatagacgcaatg

SEQ ID NO: 2893548 - DNA, 25 bp, Homo sapien
tgtgtaatgaccaacttgcaaggtg

SEQ ID NO: 2893549 - DNA, 25 bp, Homo sapien
ctgaggaacgaaccggaactctgga

SEQ ID NO: 2893550 - DNA, 25 bp, Homo sapien
tgtcctgaggaacgaaccggaactc

SEQ ID NO: 2893551 - DNA, 25 bp, Homo sapien
tctggagggaggatcaaacacagct

SEQ ID NO: 2893552 - DNA, 25 bp, Homo sapien
ctgtgtcctgaggaacgaaccggaa

SEQ ID NO: 2893553 - DNA, 25 bp, Homo sapien
ggtggttcagcaccctacttactca

SEQ ID NO: 2893554 - DNA, 25 bp, Homo sapien
aaagttctgggagtcctaagatcta

SEQ ID NO: 2893555 - DNA, 25 bp, Homo sapien
gggccatcacgaaaggatacttttg

SEQ ID NO: 2893556 - DNA, 25 bp, Homo sapien
tcttgtacagaatccatggttgttc

SEQ ID NO: 2893557 - DNA, 25 bp, Homo sapien
tcagggatagggaaggttctagaaa

SEQ ID NO: 2893558 - DNA, 25 bp, Homo sapien
tgggctcaagtaatagcatggaata

SEQ ID NO: 2893559 - DNA, 25 bp, Homo sapien
taaatgcaaataacaatgcttgtga

SEQ ID NO: 2893560 - DNA, 25 bp, Homo sapien
ttctagaaagatactcctggctttc

SEQ ID NO: 2893561 - DNA, 25 bp, Homo sapien
aatgaccagggctaacttggacact

SEQ ID NO: 2893562 - DNA, 25 bp, Homo sapien
ggacactactatgttccacctacca

SEQ ID NO: 2893563 - DNA, 25 bp, Homo sapien
tgaaattgcaccaggttaaatgacc

SEQ ID NO: 2893564 - DNA, 25 bp, Homo sapien
cagtcacaaaaaggccccttgcatt

SEQ ID NO: 2893565 - DNA, 25 bp, Homo sapien
gaagcagatcgaagacactggacag

SEQ ID NO: 2893566 - DNA, 25 bp, Homo sapien
agaagcagatcgaagacactggaca

SEQ ID NO: 2893567 - DNA, 25 bp, Homo sapien
ttcatcagaagcagatcgaagacac

SEQ ID NO: 2893568 - DNA, 25 bp, Homo sapien
taggcagtaggagataaaaacgatg

SEQ ID NO: 2893569 - DNA, 25 bp, Homo sapien
acgatgggtaacttggtcgggtgcg

SEQ ID NO: 2893570 - DNA, 25 bp, Homo sapien
catgtgataagcactcactgtgcta

SEQ ID NO: 2893571 - DNA, 25 bp, Homo sapien
aataattggatgaaagggtaggctt

SEQ ID NO: 2893572 - DNA, 25 bp, Homo sapien
cttcaggaggtggaagcaggtggat

SEQ ID NO: 2893573 - DNA, 25 bp, Homo sapien
cacttcaggaggtggaagcaggtgg

SEQ ID NO: 2893574 - DNA, 25 bp, Homo sapien
ttcaggaggtggaagcaggtggatc

SEQ ID NO: 2893575 - DNA, 25 bp, Homo sapien
agcacttcaggaggtggaagcaggt

SEQ ID NO: 2893576 - DNA, 25 bp, Homo sapien
atcttggctccaccgcctggttcaa

SEQ ID NO: 2893577 - DNA, 25 bp, Homo sapien
gatcttggctccaccgcctggttca

SEQ ID NO: 2893578 - DNA, 25 bp, Homo sapien
tgatcttggctccaccgcctggttc

SEQ ID NO: 2893579 - DNA, 25 bp, Homo sapien
tcttggctccaccgcctggttcaag

SEQ ID NO: 2893580 - DNA, 25 bp, Homo sapien
gaatgttcctttcggccgagcatgg

SEQ ID NO: 2893581 - DNA, 25 bp, Homo sapien
ggaaagcgtacatgggtctccagct

SEQ ID NO: 2893582 - DNA, 25 bp, Homo sapien
tgagctgactgagataacgccactg

SEQ ID NO: 2893583 - DNA, 25 bp, Homo sapien
gatgaactcttaaggaggccactaa

SEQ ID NO: 2893584 - DNA, 25 bp, Homo sapien
tccacacttctatctttggaagata

SEQ ID NO: 2893585 - DNA, 25 bp, Homo sapien
tcttcctcgttaagaaatcttccac

SEQ ID NO: 2893586 - DNA, 25 bp, Homo sapien
tggaagataaacctatttgtcagtc

SEQ ID NO: 2893587 - DNA, 25 bp, Homo sapien
tcagtcaggcaccagaaagggatgg

SEQ ID NO: 2893588 - DNA, 25 bp, Homo sapien
taaggagagtacatagaagagtctg

SEQ ID NO: 2893589 - DNA, 25 bp, Homo sapien
gcatctggaccagattatcgacttc

SEQ ID NO: 2893590 - DNA, 25 bp, Homo sapien
tacatagaagagtctggatttggga

SEQ ID NO: 2893591 - DNA, 25 bp, Homo sapien
tctatacaaagcttgggagtttaaa

SEQ ID NO: 2893592 - DNA, 25 bp, Homo sapien
tccactaaagtctcgataccagagc

SEQ ID NO: 2893593 - DNA, 25 bp, Homo sapien
tcctccactaaagtctcgataccag

SEQ ID NO: 2893594 - DNA, 25 bp, Homo sapien
gaaggtctttcagtctggagcagag

SEQ ID NO: 2893595 - DNA, 25 bp, Homo sapien
ccactaaagtctcgataccagagct

SEQ ID NO: 2893596 - DNA, 25 bp, Homo sapien
tttgctggaggggataattctgcct

SEQ ID NO: 2893597 - DNA, 25 bp, Homo sapien
ctctaactttttgtgaatcttctct

SEQ ID NO: 2893598 - DNA, 25 bp, Homo sapien
cctttgctggaggggataattctgc

SEQ ID NO: 2893599 - DNA, 25 bp, Homo sapien
ctggaggggataattctgcctctgg

SEQ ID NO: 2893600 - DNA, 25 bp, Homo sapien
tcacagctgtctcaaagggctgttg

SEQ ID NO: 2893601 - DNA, 25 bp, Homo sapien
aaggacagaaccatcttgtttcacc

SEQ ID NO: 2893602 - DNA, 25 bp, Homo sapien
taaaggtaatagtacatacatagac

SEQ ID NO: 2893603 - DNA, 25 bp, Homo sapien
tgcccggctgataatcctaatttct

SEQ ID NO: 2893604 - DNA, 25 bp, Homo sapien
actggagccagaagaccacgagcga

SEQ ID NO: 2893605 - DNA, 25 bp, Homo sapien
tgcagtccttaggagaggaagtatc

SEQ ID NO: 2893606 - DNA, 25 bp, Homo sapien
ccttcaggtttatgtcggatttgct

SEQ ID NO: 2893607 - DNA, 25 bp, Homo sapien
cgagcgagggcgaatctttccttca

SEQ ID NO: 2893608 - DNA, 25 bp, Homo sapien
tttcagccttttcaccgtgcttcaa

SEQ ID NO: 2893609 - DNA, 25 bp, Homo sapien
ttttgtttcgaatctctcgtgcctt

SEQ ID NO: 2893610 - DNA, 25 bp, Homo sapien
cttttcaccgtgcttcaaagaaagc

SEQ ID NO: 2893611 - DNA, 25 bp, Homo sapien
cgaatctctcgtgccttgtgtctta

SEQ ID NO: 2893612 - DNA, 25 bp, Homo sapien
tgtgtgactaggtggtacgactgcc

SEQ ID NO: 2893613 - DNA, 25 bp, Homo sapien
tttaataacccctgagctgtagcca

SEQ ID NO: 2893614 - DNA, 25 bp, Homo sapien
aaactgagccagattgccaaggtcc

SEQ ID NO: 2893615 - DNA, 25 bp, Homo sapien
aattggctcggtgtaccacaagggc

SEQ ID NO: 2893616 - DNA, 25 bp, Homo sapien
ttaatttcttcctcgcattgtgcca

SEQ ID NO: 2893617 - DNA, 25 bp, Homo sapien
gaaactggattatcttcataagcag

SEQ ID NO: 2893618 - DNA, 25 bp, Homo sapien
tcttccagctgtcccgaagaaactg

SEQ ID NO: 2893619 - DNA, 25 bp, Homo sapien
gcaggaaactgacaacctgctttgc

SEQ ID NO: 2893620 - DNA, 25 bp, Homo sapien
tcaaataccaacacgcagacacata

SEQ ID NO: 2893621 - DNA, 25 bp, Homo sapien
tgggttaaactctgatcaaatcctt

SEQ ID NO: 2893622 - DNA, 25 bp, Homo sapien
gacaacacataggaatcttacatcc

SEQ ID NO: 2893623 - DNA, 25 bp, Homo sapien
taaccctatctttcattgactggca

SEQ ID NO: 2893624 - DNA, 25 bp, Homo sapien
tgggcttcccgcaaacaaggtggca

SEQ ID NO: 2893625 - DNA, 25 bp, Homo sapien
gagtttagatcccagcagaacccga

SEQ ID NO: 2893626 - DNA, 25 bp, Homo sapien
tagataaacagatgctagggccagg

SEQ ID NO: 2893627 - DNA, 25 bp, Homo sapien
tagacatctgcttagtggagaggcc

SEQ ID NO: 2893628 - DNA, 25 bp, Homo sapien
aaattatcttgcttaggtgcgaacc

SEQ ID NO: 2893629 - DNA, 25 bp, Homo sapien
gtgcgaaccagaaggaaactaaggc

SEQ ID NO: 2893630 - DNA, 25 bp, Homo sapien
taggagatagccatccaaatgagat

SEQ ID NO: 2893631 - DNA, 25 bp, Homo sapien
gatgagagaatgattcctgagagcg

SEQ ID NO: 2893632 - DNA, 25 bp, Homo sapien
tctattcattccttgtatatcagtg

SEQ ID NO: 2893633 - DNA, 25 bp, Homo sapien
tattcattccttgtatatcagtgtt

SEQ ID NO: 2893634 - DNA, 25 bp, Homo sapien
ctattcattccttgtatatcagtgt

SEQ ID NO: 2893635 - DNA, 25 bp, Homo sapien
gaggagagtacaaggctttttccca

SEQ ID NO: 2893636 - DNA, 25 bp, Homo sapien
tctcccttggcatttgtgtaacatt

SEQ ID NO: 2893637 - DNA, 25 bp, Homo sapien
taacaggcgctcttcattactgggt

SEQ ID NO: 2893638 - DNA, 25 bp, Homo sapien
ttactgggtgtctctttagcatctg

SEQ ID NO: 2893639 - DNA, 25 bp, Homo sapien
attaaaatctaacaggcgctcttca

SEQ ID NO: 2893640 - DNA, 25 bp, Homo sapien
ccagctacgaccatgtgaccaggtg

SEQ ID NO: 2893641 - DNA, 25 bp, Homo sapien
cgtggacgatgatgctacaggtgct

SEQ ID NO: 2893642 - DNA, 25 bp, Homo sapien
tctgccttcatgtgtggagccggac

SEQ ID NO: 2893643 - DNA, 25 bp, Homo sapien
aatgaaggtttaggtcactccaccg

SEQ ID NO: 2893644 - DNA, 25 bp, Homo sapien
tggtgaggcgacactacagacctgt

SEQ ID NO: 2893645 - DNA, 25 bp, Homo sapien
aggaactttactgggcacagggact

SEQ ID NO: 2893646 - DNA, 25 bp, Homo sapien
tgccagttgcagtgacacagtaccg

SEQ ID NO: 2893647 - DNA, 25 bp, Homo sapien
cagtcacttggacaaaatgttagcc

SEQ ID NO: 2893648 - DNA, 25 bp, Homo sapien
gaagccatctgactttgctccagaa

SEQ ID NO: 2893649 - DNA, 25 bp, Homo sapien
gctggagcacatctttccgcggaag

SEQ ID NO: 2893650 - DNA, 25 bp, Homo sapien
tctgagcctgtctcttccgaggtgg

SEQ ID NO: 2893651 - DNA, 25 bp, Homo sapien
tctctctcctgtacatcttgcttca

SEQ ID NO: 2893652 - DNA, 25 bp, Homo sapien
ttagagatgagttcgagaaaagagc

SEQ ID NO: 2893653 - DNA, 25 bp, Homo sapien
gatgagttcgagaaaagagctcctc

SEQ ID NO: 2893654 - DNA, 25 bp, Homo sapien
gagttcgagaaaagagctcctcttc

SEQ ID NO: 2893655 - DNA, 25 bp, Homo sapien
aagagctcctcttcactagggccca

SEQ ID NO: 2893656 - DNA, 25 bp, Homo sapien
gattttgctgaatggagaccaccgc

SEQ ID NO: 2893657 - DNA, 25 bp, Homo sapien
tactgcctgcccaaatgagtggtga

SEQ ID NO: 2893658 - DNA, 25 bp, Homo sapien
gtcttgaaaagcacacctctgcggt

SEQ ID NO: 2893659 - DNA, 25 bp, Homo sapien
catagtgatataaccgcagtcggaa

SEQ ID NO: 2893660 - DNA, 25 bp, Homo sapien
cttccacggatgctcatgagtaaaa

SEQ ID NO: 2893661 - DNA, 25 bp, Homo sapien
gcaatgagagctaaatgacctccat

SEQ ID NO: 2893662 - DNA, 25 bp, Homo sapien
catctagaacaaatgtaacctgggc

SEQ ID NO: 2893663 - DNA, 25 bp, Homo sapien
ctttcttccctagcaaagctgcaca

SEQ ID NO: 2893664 - DNA, 25 bp, Homo sapien
gatgttaccagtgtatgtctcagag

SEQ ID NO: 2893665 - DNA, 25 bp, Homo sapien
gagctttgtgtaccatccacggaca

SEQ ID NO: 2893666 - DNA, 25 bp, Homo sapien
tcaggtagtagtccctgcgtgtgct

SEQ ID NO: 2893667 - DNA, 25 bp, Homo sapien
tataattaccgacatgaagacatct

SEQ ID NO: 2893668 - DNA, 25 bp, Homo sapien
catagaaacgttattcagatactga

SEQ ID NO: 2893669 - DNA, 25 bp, Homo sapien
tgtttacagatgtccatagaaacgt

SEQ ID NO: 2893670 - DNA, 25 bp, Homo sapien
cccctcatacatgtttacagatgtc

SEQ ID NO: 2893671 - DNA, 25 bp, Homo sapien
taaatctacataatacagctataaa

SEQ ID NO: 2893672 - DNA, 25 bp, Homo sapien
agggtatgactgtttgaaaagagca

SEQ ID NO: 2893673 - DNA, 25 bp, Homo sapien
ttataacatgtcttaagatctactt

SEQ ID NO: 2893674 - DNA, 25 bp, Homo sapien
aggcactaagaagggtatgactgtt

SEQ ID NO: 2893675 - DNA, 25 bp, Homo sapien
ttaagatctactttgaggcactaag

SEQ ID NO: 2893676 - DNA, 25 bp, Homo sapien
tggaaggggagggtcactgtcccca

SEQ ID NO: 2893677 - DNA, 25 bp, Homo sapien
cagctggcagtttgtgggaggtcga

SEQ ID NO: 2893678 - DNA, 25 bp, Homo sapien
tcagtctagggtggtggtaaggcct

SEQ ID NO: 2893679 - DNA, 25 bp, Homo sapien
gaggtcgaagtggttacgtttgaca

SEQ ID NO: 2893680 - DNA, 25 bp, Homo sapien
cgagtgcggccacttctgttatcag

SEQ ID NO: 2893681 - DNA, 25 bp, Homo sapien
gagcggcggagcgcatcgatggggc

SEQ ID NO: 2893682 - DNA, 25 bp, Homo sapien
gcggcggagcgcatcgatggggctc

SEQ ID NO: 2893683 - DNA, 25 bp, Homo sapien
agcggcggagcgcatcgatggggct

SEQ ID NO: 2893684 - DNA, 25 bp, Homo sapien
ggcggagcgcatcgatggggctccc

SEQ ID NO: 2893685 - DNA, 25 bp, Homo sapien
ccgacccgcaggtgcgcgcgagcag

SEQ ID NO: 2893686 - DNA, 25 bp, Homo sapien
acccgcaggtgcgcgcgagcagccc

SEQ ID NO: 2893687 - DNA, 25 bp, Homo sapien
cgcaggtgcgcgcgagcagcccgcg

SEQ ID NO: 2893688 - DNA, 25 bp, Homo sapien
caggtgcgcgcgagcagcccgcggc

SEQ ID NO: 2893689 - DNA, 25 bp, Homo sapien
gagttagcgcggctccgacgccatc

SEQ ID NO: 2893690 - DNA, 25 bp, Homo sapien
aactcgcgcgacgaggacgccgggc

SEQ ID NO: 2893691 - DNA, 25 bp, Homo sapien
aggacgccgggcacgcggtaggcag

SEQ ID NO: 2893692 - DNA, 25 bp, Homo sapien
caggccccgcgggaccggcaactcg

SEQ ID NO: 2893693 - DNA, 25 bp, Homo sapien
aaggctacgccatttgtagaggtgg

SEQ ID NO: 2893694 - DNA, 25 bp, Homo sapien
gctacgccatttgtagaggtggaga

SEQ ID NO: 2893695 - DNA, 25 bp, Homo sapien
aggctacgccatttgtagaggtgga

SEQ ID NO: 2893696 - DNA, 25 bp, Homo sapien
gaaggctacgccatttgtagaggtg

SEQ ID NO: 2893697 - DNA, 25 bp, Homo sapien
ttaccgagtcatagcctgtcctggg

SEQ ID NO: 2893698 - DNA, 25 bp, Homo sapien
actggagctgctcgtgaccacaagg

SEQ ID NO: 2893699 - DNA, 25 bp, Homo sapien
taagccacgggtttccttgatagag

SEQ ID NO: 2893700 - DNA, 25 bp, Homo sapien
gacatcatcgctgcgggtcagggct

SEQ ID NO: 2893701 - DNA, 25 bp, Homo sapien
tgcaaagaagttactaaatggcccc

SEQ ID NO: 2893702 - DNA, 25 bp, Homo sapien
agaagttactaaatggccccaatat

SEQ ID NO: 2893703 - DNA, 25 bp, Homo sapien
gcaaagaagttactaaatggcccca

SEQ ID NO: 2893704 - DNA, 25 bp, Homo sapien
gtttgcacagaaaaggcatagttac

SEQ ID NO: 2893705 - DNA, 25 bp, Homo sapien
ctgtttgcacagaaaaggcatagtt

SEQ ID NO: 2893706 - DNA, 25 bp, Homo sapien
tgtttgcacagaaaaggcatagtta

SEQ ID NO: 2893707 - DNA, 25 bp, Homo sapien
ctgtatatccataatgccagggcaa

SEQ ID NO: 2893708 - DNA, 25 bp, Homo sapien
tgtatatccataatgccagggcaaa

SEQ ID NO: 2893709 - DNA, 25 bp, Homo sapien
tctgtatatccataatgccagggca

SEQ ID NO: 2893710 - DNA, 25 bp, Homo sapien
aagaagctgtgtctcggcaaggcca

SEQ ID NO: 2893711 - DNA, 25 bp, Homo sapien
cgtggtggaaactgaccctgcaggt

SEQ ID NO: 2893712 - DNA, 25 bp, Homo sapien
tgcggctcaatcagcaatgcaacgg

SEQ ID NO: 2893713 - DNA, 25 bp, Homo sapien
ggaggctcttacaccatgggaagaa

SEQ ID NO: 2893714 - DNA, 25 bp, Homo sapien
ttcctgctggaagatgccgagaccg

SEQ ID NO: 2893715 - DNA, 25 bp, Homo sapien
gaccgcctgacgcaactctgcattt

SEQ ID NO: 2893716 - DNA, 25 bp, Homo sapien
ctgggagtcgacacacagcaaaggg

SEQ ID NO: 2893717 - DNA, 25 bp, Homo sapien
gactactgctgattccagaaggttc

SEQ ID NO: 2893718 - DNA, 25 bp, Homo sapien
tgggtggccaagacggcaaatcacc

SEQ ID NO: 2893719 - DNA, 25 bp, Homo sapien
cataaagtggtaagaacttaaagag

SEQ ID NO: 2893720 - DNA, 25 bp, Homo sapien
gagcaacataaagtggtaagaactt

SEQ ID NO: 2893721 - DNA, 25 bp, Homo sapien
acgatgtcaggagcaacataaagtg

SEQ ID NO: 2893722 - DNA, 25 bp, Homo sapien
taggccacaccaactggtctggact

SEQ ID NO: 2893723 - DNA, 25 bp, Homo sapien
cacaccaactggtctggacttcatc

SEQ ID NO: 2893724 - DNA, 25 bp, Homo sapien
accaactggtctggacttcatcctc

SEQ ID NO: 2893725 - DNA, 25 bp, Homo sapien
agccagatcctgcacgccccgtagg

SEQ ID NO: 2893726 - DNA, 25 bp, Homo sapien
ccagtgacatccgtgagaacaccat

SEQ ID NO: 2893727 - DNA, 25 bp, Homo sapien
cgccagtgacatccgtgagaacacc

SEQ ID NO: 2893728 - DNA, 25 bp, Homo sapien
cgcacacgccagtgacatccgtgag

SEQ ID NO: 2893729 - DNA, 25 bp, Homo sapien
cacgccagtgacatccgtgagaaca

SEQ ID NO: 2893730 - DNA, 25 bp, Homo sapien
cattctgtacctatgtgatggatcc

SEQ ID NO: 2893731 - DNA, 25 bp, Homo sapien
tacacacgtctgctggcaaatggag

SEQ ID NO: 2893732 - DNA, 25 bp, Homo sapien
caggatctacccagcatgcagtagg

SEQ ID NO: 2893733 - DNA, 25 bp, Homo sapien
tccacatgccttcaccttcggtggg

SEQ ID NO: 2893734 - DNA, 25 bp, Homo sapien
tgtgtttgtcaagccttgcactttg

SEQ ID NO: 2893735 - DNA, 25 bp, Homo sapien
caagtcattgtgtttgtcaagcctt

SEQ ID NO: 2893736 - DNA, 25 bp, Homo sapien
ggcattctctcggagtggcgctttc

SEQ ID NO: 2893737 - DNA, 25 bp, Homo sapien
ttctctcggagtggcgctttcccaa

SEQ ID NO: 2893738 - DNA, 25 bp, Homo sapien
tgggtacccacaacatgacgagaag

SEQ ID NO: 2893739 - DNA, 25 bp, Homo sapien
caagtctacgtaagctactcagcgt

SEQ ID NO: 2893740 - DNA, 25 bp, Homo sapien
catggtggtctatcccagagatgag

SEQ ID NO: 2893741 - DNA, 25 bp, Homo sapien
tactcagcgtcagatctgggtaccc

SEQ ID NO: 2893742 - DNA, 25 bp, Homo sapien
cttgtccccttttgtatttcacttg

SEQ ID NO: 2893743 - DNA, 25 bp, Homo sapien
cagtattttactacttcaagtggaa

SEQ ID NO: 2893744 - DNA, 25 bp, Homo sapien
catctacatacactgcaaacgccag

SEQ ID NO: 2893745 - DNA, 25 bp, Homo sapien
tagtggttggtctaaggattacaat

SEQ ID NO: 2893746 - DNA, 25 bp, Homo sapien
ggccggaggctccatgcccagcgag

SEQ ID NO: 2893747 - DNA, 25 bp, Homo sapien
aacgccggggccttagaggcgcgcg

SEQ ID NO: 2893748 - DNA, 25 bp, Homo sapien
tccatgcccagcgagcggagggccg

SEQ ID NO: 2893749 - DNA, 25 bp, Homo sapien
ggcaggccgctcaatcgcgcgcaga

SEQ ID NO: 2893750 - DNA, 25 bp, Homo sapien
cacaaaggggccagctgagtggaca

SEQ ID NO: 2893751 - DNA, 25 bp, Homo sapien
ctgagtggacagacaggtaagacgt

SEQ ID NO: 2893752 - DNA, 25 bp, Homo sapien
ccaggaggggcgagccacacactgt

SEQ ID NO: 2893753 - DNA, 25 bp, Homo sapien
ggaagctttcacaaaggggccagct

SEQ ID NO: 2893754 - DNA, 25 bp, Homo sapien
gccacgcgctggggttccgcagcca

SEQ ID NO: 2893755 - DNA, 25 bp, Homo sapien
cgcgctggggttccgcagccacact

SEQ ID NO: 2893756 - DNA, 25 bp, Homo sapien
aggccacgcgctggggttccgcagc

SEQ ID NO: 2893757 - DNA, 25 bp, Homo sapien
cacgcgctggggttccgcagccaca

SEQ ID NO: 2893758 - DNA, 25 bp, Homo sapien
ctcgaggatgagtgcggtggtggaa

SEQ ID NO: 2893759 - DNA, 25 bp, Homo sapien
ctgtcctcgaggatgagtgcggtgg

SEQ ID NO: 2893760 - DNA, 25 bp, Homo sapien
gatgagtgcggtggtggaaagtggt

SEQ ID NO: 2893761 - DNA, 25 bp, Homo sapien
tgcggtggtggaaagtggttcaaag

SEQ ID NO: 2893762 - DNA, 25 bp, Homo sapien
aacaagttcactataaaacaaatga

SEQ ID NO: 2893763 - DNA, 25 bp, Homo sapien
aataccgcatagaagtctttcagaa

SEQ ID NO: 2893764 - DNA, 25 bp, Homo sapien
tcaccattataaataccgcatagaa

SEQ ID NO: 2893765 - DNA, 25 bp, Homo sapien
taagattacacagttctttcacaaa

SEQ ID NO: 2893766 - DNA, 25 bp, Homo sapien
ctttttggcctgaaccaccatttct

SEQ ID NO: 2893767 - DNA, 25 bp, Homo sapien
ctcgctttttggcctgaaccaccat

SEQ ID NO: 2893768 - DNA, 25 bp, Homo sapien
cgctttttggcctgaaccaccattt

SEQ ID NO: 2893769 - DNA, 25 bp, Homo sapien
tcgctttttggcctgaaccaccatt

SEQ ID NO: 2893770 - DNA, 25 bp, Homo sapien
caggttctatgactccaaatggtaa

SEQ ID NO: 2893771 - DNA, 25 bp, Homo sapien
ccagaaagacacaaaccctgtgctg

SEQ ID NO: 2893772 - DNA, 25 bp, Homo sapien
taacccatcaagtgtgaaccccatt

SEQ ID NO: 2893773 - DNA, 25 bp, Homo sapien
accctgtgctgcctgatttaaccca

SEQ ID NO: 2893774 - DNA, 25 bp, Homo sapien
tcacataccctgactgaagaccggt

SEQ ID NO: 2893775 - DNA, 25 bp, Homo sapien
tcttggaaggttgacgactctacat

SEQ ID NO: 2893776 - DNA, 25 bp, Homo sapien
ggacaccgggctagccagcagatga

SEQ ID NO: 2893777 - DNA, 25 bp, Homo sapien
tcctacgaatggagcctgtctggag

SEQ ID NO: 2893778 - DNA, 25 bp, Homo sapien
gctgcttcttccttcgctgggcttc

SEQ ID NO: 2893779 - DNA, 25 bp, Homo sapien
gcgtttccaatgctttcctcgactc

SEQ ID NO: 2893780 - DNA, 25 bp, Homo sapien
tgtttcccagttaggtaagatctca

SEQ ID NO: 2893781 - DNA, 25 bp, Homo sapien
tcattattccaggtgagcacagcgt

SEQ ID NO: 2893782 - DNA, 25 bp, Homo sapien
taccatcctctcgaaagtcaagacg

SEQ ID NO: 2893783 - DNA, 25 bp, Homo sapien
tactagatcccatgcgagaacaggt

SEQ ID NO: 2893784 - DNA, 25 bp, Homo sapien
tacaaaagcacggagaacagtgcca

SEQ ID NO: 2893785 - DNA, 25 bp, Homo sapien
tataaagtgtttcctgacagcatcc

SEQ ID NO: 2893786 - DNA, 25 bp, Homo sapien
gacatttgtctacctgcgtgcctag

SEQ ID NO: 2893787 - DNA, 25 bp, Homo sapien
atttgtctacctgcgtgcctagccc

SEQ ID NO: 2893788 - DNA, 25 bp, Homo sapien
aaagacatttgtctacctgcgtgcc

SEQ ID NO: 2893789 - DNA, 25 bp, Homo sapien
cacaaagacatttgtctacctgcgt

SEQ ID NO: 2893790 - DNA, 25 bp, Homo sapien
tgccaatggctaagctccagacttt

SEQ ID NO: 2893791 - DNA, 25 bp, Homo sapien
tctcacacttggagggattccctgc

SEQ ID NO: 2893792 - DNA, 25 bp, Homo sapien
aatctcgaacttttctagagcacca

SEQ ID NO: 2893793 - DNA, 25 bp, Homo sapien
cgtgggtgatatttaactcgttgcc

SEQ ID NO: 2893794 - DNA, 25 bp, Homo sapien
tggatttagccaagagggagttccg

SEQ ID NO: 2893795 - DNA, 25 bp, Homo sapien
tctgtaggaccacaccgcacagaag

SEQ ID NO: 2893796 - DNA, 25 bp, Homo sapien
agccagctggctgacgctccgtgag

SEQ ID NO: 2893797 - DNA, 25 bp, Homo sapien
tgggatgaggctaagataacctgtc

SEQ ID NO: 2893798 - DNA, 25 bp, Homo sapien
gatgttcctgatcagctcccagatg

SEQ ID NO: 2893799 - DNA, 25 bp, Homo sapien
cagtgtccaaagcagtaactcagca

SEQ ID NO: 2893800 - DNA, 25 bp, Homo sapien
gactttaattgcagctacccatgga

SEQ ID NO: 2893801 - DNA, 25 bp, Homo sapien
caggaggccggccaagctttggtca

SEQ ID NO: 2893802 - DNA, 25 bp, Homo sapien
acctctccttggctcgggcaagaca

SEQ ID NO: 2893803 - DNA, 25 bp, Homo sapien
agcctcctgtgctaagggaccgcca

SEQ ID NO: 2893804 - DNA, 25 bp, Homo sapien
tggctcgggcaagacagatgtcaaa

SEQ ID NO: 2893805 - DNA, 25 bp, Homo sapien
tcgttctccacttcagagcctcctg

SEQ ID NO: 2893806 - DNA, 25 bp, Homo sapien
tggcactggttatgacgggccctcc

SEQ ID NO: 2893807 - DNA, 25 bp, Homo sapien
taagccagtattcaactaatcccag

SEQ ID NO: 2893808 - DNA, 25 bp, Homo sapien
gggtactggaagtcacatgaacaac

SEQ ID NO: 2893809 - DNA, 25 bp, Homo sapien
ggcataatctagcaaacatgcagtg

SEQ ID NO: 2893810 - DNA, 25 bp, Homo sapien
agaaatgtccagtttaataagctcc

SEQ ID NO: 2893811 - DNA, 25 bp, Homo sapien
gggctcatctgagccgaagcccatc

SEQ ID NO: 2893812 - DNA, 25 bp, Homo sapien
ttccctttctcacacgggctcactg

SEQ ID NO: 2893813 - DNA, 25 bp, Homo sapien
gcactgggctcatctgagccgaagc

SEQ ID NO: 2893814 - DNA, 25 bp, Homo sapien
tgctgagcgcagactgctacacaca

SEQ ID NO: 2893815 - DNA, 25 bp, Homo sapien
gacccacacggaaatccacaaagat

SEQ ID NO: 2893816 - DNA, 25 bp, Homo sapien
taagcgcccaaaatactgtgcaaca

SEQ ID NO: 2893817 - DNA, 25 bp, Homo sapien
taacccacatctggccggtaacaag

SEQ ID NO: 2893818 - DNA, 25 bp, Homo sapien
gtataagcgcccaaaatactgtgca

SEQ ID NO: 2893819 - DNA, 25 bp, Homo sapien
gccggtaacaagtataagcgcccaa

SEQ ID NO: 2893820 - DNA, 25 bp, Homo sapien
gctgctatgaaggacatgccctgga

SEQ ID NO: 2893821 - DNA, 25 bp, Homo sapien
taagttcaagatcaacactgctgct

SEQ ID NO: 2893822 - DNA, 25 bp, Homo sapien
cgccatttgacagggtttattcaga

SEQ ID NO: 2893823 - DNA, 25 bp, Homo sapien
ggccatggtccactctaaaaaacgc

SEQ ID NO: 2893824 - DNA, 25 bp, Homo sapien
gaaatgcgcaaataatttcggcaaa

SEQ ID NO: 2893825 - DNA, 25 bp, Homo sapien
caatcaattaggtagatatctggag

SEQ ID NO: 2893826 - DNA, 25 bp, Homo sapien
tgttcttcttgaaatgcgcaaataa

SEQ ID NO: 2893827 - DNA, 25 bp, Homo sapien
gatatctggagttaggttgttcttc

SEQ ID NO: 2893828 - DNA, 25 bp, Homo sapien
cagcacccaacaaggagcctgaatc

SEQ ID NO: 2893829 - DNA, 25 bp, Homo sapien
tctaggacaggtcttatgtaaagtc

SEQ ID NO: 2893830 - DNA, 25 bp, Homo sapien
tgagctttcaccgaactgtcagcac

SEQ ID NO: 2893831 - DNA, 25 bp, Homo sapien
gaccacagtgacgagtgcttctgaa

SEQ ID NO: 2893832 - DNA, 25 bp, Homo sapien
gatggaggcaaacagctcctcggcg

SEQ ID NO: 2893833 - DNA, 25 bp, Homo sapien
tcaggatgtcctcgaacagcttcag

SEQ ID NO: 2893834 - DNA, 25 bp, Homo sapien
tcccagatacgacaggccaggtcga

SEQ ID NO: 2893835 - DNA, 25 bp, Homo sapien
agggccgtgcggaacaggaactctt

SEQ ID NO: 2893836 - DNA, 25 bp, Homo sapien
tgagtcgcgccacttgccggctacg

SEQ ID NO: 2893837 - DNA, 25 bp, Homo sapien
cctgagtcgcgccacttgccggcta

SEQ ID NO: 2893838 - DNA, 25 bp, Homo sapien
gggccttcctgagtcgcgccacttg

SEQ ID NO: 2893839 - DNA, 25 bp, Homo sapien
ttcctgagtcgcgccacttgccggc

SEQ ID NO: 2893840 - DNA, 25 bp, Homo sapien
gatacggactatccgcgccactgtt

SEQ ID NO: 2893841 - DNA, 25 bp, Homo sapien
aaaagcctgccacagggcatggcca

SEQ ID NO: 2893842 - DNA, 25 bp, Homo sapien
caaagactcggaacaggaaatgcag

SEQ ID NO: 2893843 - DNA, 25 bp, Homo sapien
cacagcagcgcatgggaagacccag

SEQ ID NO: 2893844 - DNA, 25 bp, Homo sapien
ccacgccattgtggctgcttagcaa

SEQ ID NO: 2893845 - DNA, 25 bp, Homo sapien
gcagcaacactaacaggctccacgc

SEQ ID NO: 2893846 - DNA, 25 bp, Homo sapien
taaaagatattccacgccattgtgg

SEQ ID NO: 2893847 - DNA, 25 bp, Homo sapien
ggctgcttagcaattgcagcaacac

SEQ ID NO: 2893848 - DNA, 25 bp, Homo sapien
acacagatcctgacagcagcgaagc

SEQ ID NO: 2893849 - DNA, 25 bp, Homo sapien
acagatcctgacagcagcgaagcag

SEQ ID NO: 2893850 - DNA, 25 bp, Homo sapien
gttaagtgaccacgcacacagatcc

SEQ ID NO: 2893851 - DNA, 25 bp, Homo sapien
ggaagacagctgaggttaagtgacc

SEQ ID NO: 2893852 - DNA, 25 bp, Homo sapien
ccatttcccggctgtctttctgcaa

SEQ ID NO: 2893853 - DNA, 25 bp, Homo sapien
catttcccggctgtctttctgcaat

SEQ ID NO: 2893854 - DNA, 25 bp, Homo sapien
tgtctttctgcaatgcagtcagtac

SEQ ID NO: 2893855 - DNA, 25 bp, Homo sapien
aaagagcgtctgttcttctcggctg

SEQ ID NO: 2893856 - DNA, 25 bp, Homo sapien
tgattggtgccgagtgcgaattccc

SEQ ID NO: 2893857 - DNA, 25 bp, Homo sapien
tgcccgggtgtcagtctgaaacaac

SEQ ID NO: 2893858 - DNA, 25 bp, Homo sapien
taaggccaactccagtgttaggaat

SEQ ID NO: 2893859 - DNA, 25 bp, Homo sapien
tgtacaacgggtcatgaagcacacg

SEQ ID NO: 2893860 - DNA, 25 bp, Homo sapien
tttagactgcgcagctgcaaaacgg

SEQ ID NO: 2893861 - DNA, 25 bp, Homo sapien
tgccacagggcttcctcgcaaatag

SEQ ID NO: 2893862 - DNA, 25 bp, Homo sapien
ttagaaacgtgacctccagctctgg

SEQ ID NO: 2893863 - DNA, 25 bp, Homo sapien
caggaaatggctacgtctggaggcc

SEQ ID NO: 2893864 - DNA, 25 bp, Homo sapien
tgcacctcgaggagcattagcgggt

SEQ ID NO: 2893865 - DNA, 25 bp, Homo sapien
gagtccgggaaacgtgacacatgat

SEQ ID NO: 2893866 - DNA, 25 bp, Homo sapien
tccagagaacgaatgccagctcggc

SEQ ID NO: 2893867 - DNA, 25 bp, Homo sapien
agtacatctgcgaggacaacagcgc

SEQ ID NO: 2893868 - DNA, 25 bp, Homo sapien
tactgtgcaggctggacaaaggtcc

SEQ ID NO: 2893869 - DNA, 25 bp, Homo sapien
catgggatcctgttcagaagcggaa

SEQ ID NO: 2893870 - DNA, 25 bp, Homo sapien
tctgtgccgaggtgttaagggaccc

SEQ ID NO: 2893871 - DNA, 25 bp, Homo sapien
gccactctagttcgtggccaggttc

SEQ ID NO: 2893872 - DNA, 25 bp, Homo sapien
tggcagcaagtctcgggaaacagtg

SEQ ID NO: 2893873 - DNA, 25 bp, Homo sapien
tgcaggcgatgctcgcgggagccca

SEQ ID NO: 2893874 - DNA, 25 bp, Homo sapien
tgaaagacctatctggccactctag

SEQ ID NO: 2893875 - DNA, 25 bp, Homo sapien
aaggagtggcgacgcttccaggcac

SEQ ID NO: 2893876 - DNA, 25 bp, Homo sapien
cttccaggcactcaagaagcaggtg

SEQ ID NO: 2893877 - DNA, 25 bp, Homo sapien
cagttgaagcggcagtgccaggaga

SEQ ID NO: 2893878 - DNA, 25 bp, Homo sapien
cctgcagtggtaccaccaggagctg

SEQ ID NO: 2893879 - DNA, 25 bp, Homo sapien
tcccccctcagtacgcaggcgccgt

SEQ ID NO: 2893880 - DNA, 25 bp, Homo sapien
cgccgcagctgtcgccccgccgcat

SEQ ID NO: 2893881 - DNA, 25 bp, Homo sapien
cgccgccgcgcacgagcaaccgccg

SEQ ID NO: 2893882 - DNA, 25 bp, Homo sapien
gccgcgtcccccctcagtacgcagg

SEQ ID NO: 2893883 - DNA, 25 bp, Homo sapien
tccaccagctggtagccgtggtagc

SEQ ID NO: 2893884 - DNA, 25 bp, Homo sapien
tttccgaagccgaactgctcgatgg

SEQ ID NO: 2893885 - DNA, 25 bp, Homo sapien
cggccaggcagtacacgcagtactt

SEQ ID NO: 2893886 - DNA, 25 bp, Homo sapien
agtacacgcagtacttcttccccag

SEQ ID NO: 2893887 - DNA, 25 bp, Homo sapien
cacttgcccacacggcacctgccag

SEQ ID NO: 2893888 - DNA, 25 bp, Homo sapien
atcctgaggcccacttgcccacacg

SEQ ID NO: 2893889 - DNA, 25 bp, Homo sapien
tgtgtccttccctccgcaggacatc

SEQ ID NO: 2893890 - DNA, 25 bp, Homo sapien
gcccacacggcacctgccaggtgag

SEQ ID NO: 2893891 - DNA, 25 bp, Homo sapien
agaagccttgggttgaaattccacg

SEQ ID NO: 2893892 - DNA, 25 bp, Homo sapien
tcggcctcagaggtgacaatccagc

SEQ ID NO: 2893893 - DNA, 25 bp, Homo sapien
tccttaatggtcatccctggaagcc

SEQ ID NO: 2893894 - DNA, 25 bp, Homo sapien
caatgaaacggatggttctaggcat

SEQ ID NO: 2893895 - DNA, 25 bp, Homo sapien
tgttacacgtattgtaccacaataa

SEQ ID NO: 2893896 - DNA, 25 bp, Homo sapien
ttatgttacacgtattgtaccacaa

SEQ ID NO: 2893897 - DNA, 25 bp, Homo sapien
tatgttacacgtattgtaccacaat

SEQ ID NO: 2893898 - DNA, 25 bp, Homo sapien
atgttacacgtattgtaccacaata

SEQ ID NO: 2893899 - DNA, 25 bp, Homo sapien
caatggaatccatgggacaggggac

SEQ ID NO: 2893900 - DNA, 25 bp, Homo sapien
gggcacactggtggcccctgcaggg

SEQ ID NO: 2893901 - DNA, 25 bp, Homo sapien
agggccaggaggcaatggaatccat

SEQ ID NO: 2893902 - DNA, 25 bp, Homo sapien
cagcgggcagagctctcaaggagca

SEQ ID NO: 2893903 - DNA, 25 bp, Homo sapien
aggcagagcgaagccggacgctggg

SEQ ID NO: 2893904 - DNA, 25 bp, Homo sapien
cacgatgcagcgcacagcagaaggg

SEQ ID NO: 2893905 - DNA, 25 bp, Homo sapien
gggtcctagccgcttcccgatgttg

SEQ ID NO: 2893906 - DNA, 25 bp, Homo sapien
tcccgatgttgtgatgagaggcaga

SEQ ID NO: 2893907 - DNA, 25 bp, Homo sapien
cttctccagccctcgacaccagctt

SEQ ID NO: 2893908 - DNA, 25 bp, Homo sapien
cagtttccaggaggctccgatggct

SEQ ID NO: 2893909 - DNA, 25 bp, Homo sapien
cagcttctgtccaaggctgcggagg

SEQ ID NO: 2893910 - DNA, 25 bp, Homo sapien
gccgactcaagaggccagtttccag

SEQ ID NO: 2893911 - DNA, 25 bp, Homo sapien
gcagaagttagttccaccatcaggg

SEQ ID NO: 2893912 - DNA, 25 bp, Homo sapien
ggctgacctagagtacttcctacag

SEQ ID NO: 2893913 - DNA, 25 bp, Homo sapien
ccagatttgggttccgcacagattc

SEQ ID NO: 2893914 - DNA, 25 bp, Homo sapien
gagtacttcctacagcaccgttacc

SEQ ID NO: 2893915 - DNA, 25 bp, Homo sapien
tgagcgtctcggcatcctggtcata

SEQ ID NO: 2893916 - DNA, 25 bp, Homo sapien
tggcaccagattgtagtcacgggcg

SEQ ID NO: 2893917 - DNA, 25 bp, Homo sapien
tcatcatagttgacagagagcccgc

SEQ ID NO: 2893918 - DNA, 25 bp, Homo sapien
gacatgaactggtacagcggcctca

SEQ ID NO: 2893919 - DNA, 25 bp, Homo sapien
catcttggtgatcccgtttcgccgg

SEQ ID NO: 2893920 - DNA, 25 bp, Homo sapien
cgctgcagttctcggatcttggccc

SEQ ID NO: 2893921 - DNA, 25 bp, Homo sapien
gctgcctcgtactctgccgactctt

SEQ ID NO: 2893922 - DNA, 25 bp, Homo sapien
cagttctcggatcttggcccggagc

SEQ ID NO: 2893923 - DNA, 25 bp, Homo sapien
aaggttctcaatggcggcgaactcg

SEQ ID NO: 2893924 - DNA, 25 bp, Homo sapien
tctgacaggagctcgaagcctggaa

SEQ ID NO: 2893925 - DNA, 25 bp, Homo sapien
gctcgaagcctggaaggttctcaat

SEQ ID NO: 2893926 - DNA, 25 bp, Homo sapien
tggagccggctaggtttttgttctc

SEQ ID NO: 2893927 - DNA, 25 bp, Homo sapien
tctggaggtggtctttaattataat

SEQ ID NO: 2893928 - DNA, 25 bp, Homo sapien
agtcttcacagtcacgtagcgggct

SEQ ID NO: 2893929 - DNA, 25 bp, Homo sapien
gatccagccgctttctgtgaggaaa

SEQ ID NO: 2893930 - DNA, 25 bp, Homo sapien
ctggactcaagtttaaagagctgca

SEQ ID NO: 2893931 - DNA, 25 bp, Homo sapien
tacagatgcctactagccaggcggg

SEQ ID NO: 2893932 - DNA, 25 bp, Homo sapien
tcatctgctacacagcggaggagtc

SEQ ID NO: 2893933 - DNA, 25 bp, Homo sapien
catcgcagtgtatgactcgcaggaa

SEQ ID NO: 2893934 - DNA, 25 bp, Homo sapien
ccttgaagaacggagcgctggagtc

SEQ ID NO: 2893935 - DNA, 25 bp, Homo sapien
ggcacagtaattaagtcatccttag

SEQ ID NO: 2893936 - DNA, 25 bp, Homo sapien
ttaccctaagggacagtaggatgtg

SEQ ID NO: 2893937 - DNA, 25 bp, Homo sapien
aaaggcacagtaattaagtcatcct

SEQ ID NO: 2893938 - DNA, 25 bp, Homo sapien
gggacagtaggatgtgtaaaaagaa

SEQ ID NO: 2893939 - DNA, 25 bp, Homo sapien
tctgggcttagctaaaagagcgctt

SEQ ID NO: 2893940 - DNA, 25 bp, Homo sapien
tgcgcccggactagattttaacaag

SEQ ID NO: 2893941 - DNA, 25 bp, Homo sapien
tagtcgatgggctaacaggcagcca

SEQ ID NO: 2893942 - DNA, 25 bp, Homo sapien
tcatcaaaacggtaggcagggttgc

SEQ ID NO: 2893943 - DNA, 25 bp, Homo sapien
catggagatccttgccgctgaggca

SEQ ID NO: 2893944 - DNA, 25 bp, Homo sapien
ggaattctgtttggctacctgggca

SEQ ID NO: 2893945 - DNA, 25 bp, Homo sapien
tagtgccacgcgttgaatagttcca

SEQ ID NO: 2893946 - DNA, 25 bp, Homo sapien
gcggctgaaactgaccactgagaaa

SEQ ID NO: 2893947 - DNA, 25 bp, Homo sapien
ctatgaggggctggtcatgactgaa

SEQ ID NO: 2893948 - DNA, 25 bp, Homo sapien
tgactgaagtccagatccagaaggt

SEQ ID NO: 2893949 - DNA, 25 bp, Homo sapien
gggctggtcatgactgaagtccaga

SEQ ID NO: 2893950 - DNA, 25 bp, Homo sapien
ggtcatgactgaagtccagatccag

SEQ ID NO: 2893951 - DNA, 25 bp, Homo sapien
gcacagccacgaaacaaaagaacag

SEQ ID NO: 2893952 - DNA, 25 bp, Homo sapien
tgcacagccacgaaacaaaagaaca

SEQ ID NO: 2893953 - DNA, 25 bp, Homo sapien
cacagccacgaaacaaaagaacagt

SEQ ID NO: 2893954 - DNA, 25 bp, Homo sapien
gtgcacagccacgaaacaaaagaac

SEQ ID NO: 2893955 - DNA, 25 bp, Homo sapien
caacttgtcgctcgcagtgctgcaa

SEQ ID NO: 2893956 - DNA, 25 bp, Homo sapien
tataaaatggtcatcgctctccacc

SEQ ID NO: 2893957 - DNA, 25 bp, Homo sapien
cttattctcagataggactgtggcc

SEQ ID NO: 2893958 - DNA, 25 bp, Homo sapien
gcaagactgtaatggaggcttccac

SEQ ID NO: 2893959 - DNA, 25 bp, Homo sapien
cgtgctgctgatcctccactgagga

SEQ ID NO: 2893960 - DNA, 25 bp, Homo sapien
ctctccaccgtggagaggagtggca

SEQ ID NO: 2893961 - DNA, 25 bp, Homo sapien
agacagagcggacctctgccccgtg

SEQ ID NO: 2893962 - DNA, 25 bp, Homo sapien
ctgcccattcggcagccggagctgc

SEQ ID NO: 2893963 - DNA, 25 bp, Homo sapien
tccttctgtgggagtgtcctctcct

SEQ ID NO: 2893964 - DNA, 25 bp, Homo sapien
ccgtgagtgccggcgacatgtgctc

SEQ ID NO: 2893965 - DNA, 25 bp, Homo sapien
aaaccccagtgggaattagctgtga

SEQ ID NO: 2893966 - DNA, 25 bp, Homo sapien
cacagacacaaacaggggcaacaaa

SEQ ID NO: 2893967 - DNA, 25 bp, Homo sapien
accaaatgttcaccaagcactcctc

SEQ ID NO: 2893968 - DNA, 25 bp, Homo sapien
aatgttcaccaagcactcctctgtg

SEQ ID NO: 2893969 - DNA, 25 bp, Homo sapien
caccaaatgttcaccaagcactcct

SEQ ID NO: 2893970 - DNA, 25 bp, Homo sapien
caaatgttcaccaagcactcctctg

SEQ ID NO: 2893971 - DNA, 25 bp, Homo sapien
cgctttatagttctgtctagggaca

SEQ ID NO: 2893972 - DNA, 25 bp, Homo sapien
gctagactctgtagtggcacaaaag

SEQ ID NO: 2893973 - DNA, 25 bp, Homo sapien
aaatcaatcccgtgccttgtccagg

SEQ ID NO: 2893974 - DNA, 25 bp, Homo sapien
tggtacccactgtaatagacgaagc

SEQ ID NO: 2893975 - DNA, 25 bp, Homo sapien
tggctgcgtgttggcatccacagca

SEQ ID NO: 2893976 - DNA, 25 bp, Homo sapien
tgggctgcccgatcccctggttgct

SEQ ID NO: 2893977 - DNA, 25 bp, Homo sapien
gtgttggcatccacagcacgtgata

SEQ ID NO: 2893978 - DNA, 25 bp, Homo sapien
tccacagcacgtgataagggctatg

SEQ ID NO: 2893979 - DNA, 25 bp, Homo sapien
agcgttttccacttgcactttgctc

SEQ ID NO: 2893980 - DNA, 25 bp, Homo sapien
gctgagtttggtgcacacggccagt

SEQ ID NO: 2893981 - DNA, 25 bp, Homo sapien
gtttggtgcacacggccagtgctcc

SEQ ID NO: 2893982 - DNA, 25 bp, Homo sapien
tgagtttggtgcacacggccagtgc

SEQ ID NO: 2893983 - DNA, 25 bp, Homo sapien
gctttatgcaaaaatggcctgatgg

SEQ ID NO: 2893984 - DNA, 25 bp, Homo sapien
cagagcacggcctggtaccaggaac

SEQ ID NO: 2893985 - DNA, 25 bp, Homo sapien
tcttgctttatgcaaaaatggcctg

SEQ ID NO: 2893986 - DNA, 25 bp, Homo sapien
ctggtaccaggaactttgctgcagg

SEQ ID NO: 2893987 - DNA, 25 bp, Homo sapien
gaggaggcctgaaccatgccacggt

SEQ ID NO: 2893988 - DNA, 25 bp, Homo sapien
tgccaatactgcttatcattccatc

SEQ ID NO: 2893989 - DNA, 25 bp, Homo sapien
atgccacggtagacagacccatggg

SEQ ID NO: 2893990 - DNA, 25 bp, Homo sapien
tggtttgccaatactgcttatcatt

SEQ ID NO: 2893991 - DNA, 25 bp, Homo sapien
actgtgaggtcctccaaggcgggca

SEQ ID NO: 2893992 - DNA, 25 bp, Homo sapien
ggagtgcactcaagactctccagtc

SEQ ID NO: 2893993 - DNA, 25 bp, Homo sapien
ttccagtggcctcagggactgtgag

SEQ ID NO: 2893994 - DNA, 25 bp, Homo sapien
tccacaactggacagcatgagggca

SEQ ID NO: 2893995 - DNA, 25 bp, Homo sapien
agccccagcaagtcccagcttggcc

SEQ ID NO: 2893996 - DNA, 25 bp, Homo sapien
cagagaagactctctgggcagaggg

SEQ ID NO: 2893997 - DNA, 25 bp, Homo sapien
ggcagaggggccactcagccccagc

SEQ ID NO: 2893998 - DNA, 25 bp, Homo sapien
gaggggccactcagccccagcaagt

SEQ ID NO: 2893999 - DNA, 25 bp, Homo sapien
aaacaaagttcatcacagctcaagg

SEQ ID NO: 2894000 - DNA, 25 bp, Homo sapien
caacgggacctgtgagttacctgca

SEQ ID NO: 2894001 - DNA, 25 bp, Homo sapien
ggctacaagagacctgctccgtgct

SEQ ID NO: 2894002 - DNA, 25 bp, Homo sapien
tacagggaagttggtacacagccat

SEQ ID NO: 2894003 - DNA, 25 bp, Homo sapien
caggcttgcctgtgatgtactcact

SEQ ID NO: 2894004 - DNA, 25 bp, Homo sapien
ggcttgcctgtgatgtactcactcc

SEQ ID NO: 2894005 - DNA, 25 bp, Homo sapien
cttgcctgtgatgtactcactccca

SEQ ID NO: 2894006 - DNA, 25 bp, Homo sapien
tcaggcttgcctgtgatgtactcac

SEQ ID NO: 2894007 - DNA, 25 bp, Homo sapien
cgcgaaccaaggtggacgacagact

SEQ ID NO: 2894008 - DNA, 25 bp, Homo sapien
ggacgacagactcaacagttggcca

SEQ ID NO: 2894009 - DNA, 25 bp, Homo sapien
cgaaccaaggtggacgacagactca

SEQ ID NO: 2894010 - DNA, 25 bp, Homo sapien
caaggtggacgacagactcaacagt

SEQ ID NO: 2894011 - DNA, 25 bp, Homo sapien
tcaagccagaatcagcgctgtgcag

SEQ ID NO: 2894012 - DNA, 25 bp, Homo sapien
agcgctgtgcaggtcacaaagccca

SEQ ID NO: 2894013 - DNA, 25 bp, Homo sapien
gctgtggtggccgtcaagccagaat

SEQ ID NO: 2894014 - DNA, 25 bp, Homo sapien
cccatccacaatcacgcgaacaggg

SEQ ID NO: 2894015 - DNA, 25 bp, Homo sapien
agagtcccccgggaagagctttcag

SEQ ID NO: 2894016 - DNA, 25 bp, Homo sapien
gaagagctttcagcgccagccgtta

SEQ ID NO: 2894017 - DNA, 25 bp, Homo sapien
gtgcttatgtttaatccgaaacaga

SEQ ID NO: 2894018 - DNA, 25 bp, Homo sapien
aaacagtgcttatgtttaatccgaa

SEQ ID NO: 2894019 - DNA, 25 bp, Homo sapien
ctgtgaggtagggtcccaccacact

SEQ ID NO: 2894020 - DNA, 25 bp, Homo sapien
catccatttgccctgtatgagcgca

SEQ ID NO: 2894021 - DNA, 25 bp, Homo sapien
tgccctgtatgagcgcagactgagc

SEQ ID NO: 2894022 - DNA, 25 bp, Homo sapien
catttgccctgtatgagcgcagact

SEQ ID NO: 2894023 - DNA, 25 bp, Homo sapien
ctgctccctttccaaatcgatgaaa

SEQ ID NO: 2894024 - DNA, 25 bp, Homo sapien
tcaggtctgcaatggaatcctctat

SEQ ID NO: 2894025 - DNA, 25 bp, Homo sapien
gattttccatgcagagtcataggtg

SEQ ID NO: 2894026 - DNA, 25 bp, Homo sapien
ccatgcagagtcataggtgattttc

SEQ ID NO: 2894027 - DNA, 25 bp, Homo sapien
aagtactatcctcaagaaacttggc

SEQ ID NO: 2894028 - DNA, 25 bp, Homo sapien
gtactatcctcaagaaacttggcca

SEQ ID NO: 2894029 - DNA, 25 bp, Homo sapien
gcctccaagtactatcctcaagaaa

SEQ ID NO: 2894030 - DNA, 25 bp, Homo sapien
agaaggcctccaagtactatcctca

SEQ ID NO: 2894031 - DNA, 25 bp, Homo sapien
cagctcggtggttcctccggtcctc

SEQ ID NO: 2894032 - DNA, 25 bp, Homo sapien
gaacagccaggtccctgtccgggag

SEQ ID NO: 2894033 - DNA, 25 bp, Homo sapien
caggtccagccacggttctgcggct

SEQ ID NO: 2894034 - DNA, 25 bp, Homo sapien
cttcccagctcggtggttcctccgg

SEQ ID NO: 2894035 - DNA, 25 bp, Homo sapien
tcagttgggcgtgaggacccaggcg

SEQ ID NO: 2894036 - DNA, 25 bp, Homo sapien
ggccggggcccttcgaggcgcgcga

SEQ ID NO: 2894037 - DNA, 25 bp, Homo sapien
cccgccgccccgcaggcgcccagca

SEQ ID NO: 2894038 - DNA, 25 bp, Homo sapien
gggcccttcgaggcgcgcgagggcc

SEQ ID NO: 2894039 - DNA, 25 bp, Homo sapien
gctccgtgccgcgcgcctgccggtc

SEQ ID NO: 2894040 - DNA, 25 bp, Homo sapien
gtgccgcgcgcctgccggtcctcgc

SEQ ID NO: 2894041 - DNA, 25 bp, Homo sapien
gcctgccggtcctcgccgccaccgg

SEQ ID NO: 2894042 - DNA, 25 bp, Homo sapien
gcgcctgccggtcctcgccgccacc

SEQ ID NO: 2894043 - DNA, 25 bp, Homo sapien
atgagcgagacctgcgcccgcgaag

SEQ ID NO: 2894044 - DNA, 25 bp, Homo sapien
cgcgaagccactccggccagcggcg

SEQ ID NO: 2894045 - DNA, 25 bp, Homo sapien
ctggttgtgcgtcgcgtcccccttg

SEQ ID NO: 2894046 - DNA, 25 bp, Homo sapien
gcacgaacgacgtgctgatgagcga

SEQ ID NO: 2894047 - DNA, 25 bp, Homo sapien
tgttctcgcccgtccagtgcaccat

SEQ ID NO: 2894048 - DNA, 25 bp, Homo sapien
ctgttctcgcccgtccagtgcacca

SEQ ID NO: 2894049 - DNA, 25 bp, Homo sapien
gcccaggatcccgaaatctgcggga

SEQ ID NO: 2894050 - DNA, 25 bp, Homo sapien
tgtcccctgcggtgagacaagcgta

SEQ ID NO: 2894051 - DNA, 25 bp, Homo sapien
tccccaagtaaccagtgaccagagg

SEQ ID NO: 2894052 - DNA, 25 bp, Homo sapien
gacaagcgtacgaatctgaggacct

SEQ ID NO: 2894053 - DNA, 25 bp, Homo sapien
ctactccccgagtgtttgctaagtg

SEQ ID NO: 2894054 - DNA, 25 bp, Homo sapien
tcaggcaaggtcaaactcctgcagc

SEQ ID NO: 2894055 - DNA, 25 bp, Homo sapien
ttgctaagtgtcaggctatgcccgg

SEQ ID NO: 2894056 - DNA, 25 bp, Homo sapien
tggaaggtgttgaagcccaatgcct

SEQ ID NO: 2894057 - DNA, 25 bp, Homo sapien
ggtgtgagaagaaactaattaaatg

SEQ ID NO: 2894058 - DNA, 25 bp, Homo sapien
gtgtgagaagaaactaattaaatga

SEQ ID NO: 2894059 - DNA, 25 bp, Homo sapien
tggtgtgagaagaaactaattaaat

SEQ ID NO: 2894060 - DNA, 25 bp, Homo sapien
ctggtgtgagaagaaactaattaaa

SEQ ID NO: 2894061 - DNA, 25 bp, Homo sapien
ctcggtgtgagtcaaggcgagctca

SEQ ID NO: 2894062 - DNA, 25 bp, Homo sapien
tgcttttgcaagaaaattactaagg

SEQ ID NO: 2894063 - DNA, 25 bp, Homo sapien
gagctcaacattgcaggaaattatc

SEQ ID NO: 2894064 - DNA, 25 bp, Homo sapien
tatctgcttttgcaagaaaattact

SEQ ID NO: 2894065 - DNA, 25 bp, Homo sapien
ccggcaagtgggtacaacacaaggc

SEQ ID NO: 2894066 - DNA, 25 bp, Homo sapien
gttgcaattgtgctactgaccggca

SEQ ID NO: 2894067 - DNA, 25 bp, Homo sapien
cttgggtcacaagtggcagaattca

SEQ ID NO: 2894068 - DNA, 25 bp, Homo sapien
cacgggattgtcctaatgccacaca

SEQ ID NO: 2894069 - DNA, 25 bp, Homo sapien
cagattccccagcaggaaagctagg

SEQ ID NO: 2894070 - DNA, 25 bp, Homo sapien
ggacagagggactcgactctcccca

SEQ ID NO: 2894071 - DNA, 25 bp, Homo sapien
gaaagctaggcctctgagcttcagg

SEQ ID NO: 2894072 - DNA, 25 bp, Homo sapien
cagctttgcgaggacagagggactc

SEQ ID NO: 2894073 - DNA, 25 bp, Homo sapien
gggccgcctcggtggtcttctttgc

SEQ ID NO: 2894074 - DNA, 25 bp, Homo sapien
tacgtgagtcgctccaagaacacct

SEQ ID NO: 2894075 - DNA, 25 bp, Homo sapien
cccggcagaggatctggcccagagc

SEQ ID NO: 2894076 - DNA, 25 bp, Homo sapien
catgctcggtcccaaccatggactt

SEQ ID NO: 2894077 - DNA, 25 bp, Homo sapien
tagctcactgctaaatacgtgagtc

SEQ ID NO: 2894078 - DNA, 25 bp, Homo sapien
ccgtgtgggctacaattccggcagg

SEQ ID NO: 2894079 - DNA, 25 bp, Homo sapien
gtgccgtgtgggctacaattccggc

SEQ ID NO: 2894080 - DNA, 25 bp, Homo sapien
ctgtgccgtgtgggctacaattccg

SEQ ID NO: 2894081 - DNA, 25 bp, Homo sapien
gccgtgtgggctacaattccggcag

SEQ ID NO: 2894082 - DNA, 25 bp, Homo sapien
gtcacagacgtctggacttaaccct

SEQ ID NO: 2894083 - DNA, 25 bp, Homo sapien
tggacttaaccctcgagcaaacgga

SEQ ID NO: 2894084 - DNA, 25 bp, Homo sapien
gagcaaacggaacggcactgaccgt

SEQ ID NO: 2894085 - DNA, 25 bp, Homo sapien
ctcgagcaaacggaacggcactgac

SEQ ID NO: 2894086 - DNA, 25 bp, Homo sapien
cacaggatcacaacctgcaggctgc

SEQ ID NO: 2894087 - DNA, 25 bp, Homo sapien
caggatcacaacctgcaggctgctg

SEQ ID NO: 2894088 - DNA, 25 bp, Homo sapien
atgagggctacgtctgctctggagc

SEQ ID NO: 2894089 - DNA, 25 bp, Homo sapien
tggaggacgtgatgagggctacgtc

SEQ ID NO: 2894090 - DNA, 25 bp, Homo sapien
cccctgttttagatggtggccctgg

SEQ ID NO: 2894091 - DNA, 25 bp, Homo sapien
gccctggtcgcatggactgaaggtc

SEQ ID NO: 2894092 - DNA, 25 bp, Homo sapien
agcagctggacagagtcgtaggccc

SEQ ID NO: 2894093 - DNA, 25 bp, Homo sapien
gacagagtcgtaggccccaagccct

SEQ ID NO: 2894094 - DNA, 25 bp, Homo sapien
actcgaagacttgaccacggaacac

SEQ ID NO: 2894095 - DNA, 25 bp, Homo sapien
tcatacacgagcatgacactgctcc

SEQ ID NO: 2894096 - DNA, 25 bp, Homo sapien
tcatacatgagcacatgacactgct

SEQ ID NO: 2894097 - DNA, 25 bp, Homo sapien
tcttcatctccttcatacatgagca

SEQ ID NO: 2894098 - DNA, 25 bp, Homo sapien
caccctcattgacaaattcttgggc

SEQ ID NO: 2894099 - DNA, 25 bp, Homo sapien
ggctgttcaccctcattgacaaatt

SEQ ID NO: 2894100 - DNA, 25 bp, Homo sapien
ctgggctgttcaccctcattgacaa

SEQ ID NO: 2894101 - DNA, 25 bp, Homo sapien
gttcaccctcattgacaaattcttg

SEQ ID NO: 2894102 - DNA, 25 bp, Homo sapien
cttggcttgttatgcagacacttcc

SEQ ID NO: 2894103 - DNA, 25 bp, Homo sapien
cttgttatgcagacacttcctgagc

SEQ ID NO: 2894104 - DNA, 25 bp, Homo sapien
tggcttgttatgcagacacttcctg

SEQ ID NO: 2894105 - DNA, 25 bp, Homo sapien
tgttatgcagacacttcctgagccc

SEQ ID NO: 2894106 - DNA, 25 bp, Homo sapien
ttgttggtgacccctgggctcagaa

SEQ ID NO: 2894107 - DNA, 25 bp, Homo sapien
gccacacctggggtcttgttggtga

SEQ ID NO: 2894108 - DNA, 25 bp, Homo sapien
gttggtgacccctgggctcagaaag

SEQ ID NO: 2894109 - DNA, 25 bp, Homo sapien
gtcttgttggtgacccctgggctca

SEQ ID NO: 2894110 - DNA, 25 bp, Homo sapien
gggccacatagagcaaatctgagtg

SEQ ID NO: 2894111 - DNA, 25 bp, Homo sapien
agagcaaatctgagtggataaatcc

SEQ ID NO: 2894112 - DNA, 25 bp, Homo sapien
caggggccacatagagcaaatctga

SEQ ID NO: 2894113 - DNA, 25 bp, Homo sapien
cacatagagcaaatctgagtggata

SEQ ID NO: 2894114 - DNA, 25 bp, Homo sapien
ttttttaaatgacgcatagagcagc

SEQ ID NO: 2894115 - DNA, 25 bp, Homo sapien
taagctggctgacttgaaaccacac

SEQ ID NO: 2894116 - DNA, 25 bp, Homo sapien
gggttttttaaatgacgcatagagc

SEQ ID NO: 2894117 - DNA, 25 bp, Homo sapien
gacttgaaaccacaccagaagagcc

SEQ ID NO: 2894118 - DNA, 25 bp, Homo sapien
aggtggattcagtgcgtgtaccctc

SEQ ID NO: 2894119 - DNA, 25 bp, Homo sapien
tgcaggaagaggcaaattccatcca

SEQ ID NO: 2894120 - DNA, 25 bp, Homo sapien
ggacccgggtcacaaggaaccagca

SEQ ID NO: 2894121 - DNA, 25 bp, Homo sapien
ggaatcccgtgacttcttcaggagg

SEQ ID NO: 2894122 - DNA, 25 bp, Homo sapien
ttaaggttcttggtgggcactcctg

SEQ ID NO: 2894123 - DNA, 25 bp, Homo sapien
gccaggcacacgagcctcacctcac

SEQ ID NO: 2894124 - DNA, 25 bp, Homo sapien
gtgggcactcctggcgccaggcaca

SEQ ID NO: 2894125 - DNA, 25 bp, Homo sapien
cgccgatccgtcctgctggtttgca

SEQ ID NO: 2894126 - DNA, 25 bp, Homo sapien
agcatgaccataagttagaacttca

SEQ ID NO: 2894127 - DNA, 25 bp, Homo sapien
cataagttagaacttcaattctctg

SEQ ID NO: 2894128 - DNA, 25 bp, Homo sapien
ttcccaagcatcatccgacagatgt

SEQ ID NO: 2894129 - DNA, 25 bp, Homo sapien
catccgacagatgttgacgagtgct

SEQ ID NO: 2894130 - DNA, 25 bp, Homo sapien
acaaggcttcttggccaaatgcagg

SEQ ID NO: 2894131 - DNA, 25 bp, Homo sapien
gagaccacgggcttagctgaagcca

SEQ ID NO: 2894132 - DNA, 25 bp, Homo sapien
cagccctggctgttttgagacacca

SEQ ID NO: 2894133 - DNA, 25 bp, Homo sapien
caagctccgtggatgaaccagtgtc

SEQ ID NO: 2894134 - DNA, 25 bp, Homo sapien
ccctggagatgatcagagacatccc

SEQ ID NO: 2894135 - DNA, 25 bp, Homo sapien
tgatcagagacatcccgggaaagct

SEQ ID NO: 2894136 - DNA, 25 bp, Homo sapien
tcccgggaaagctcagagcacagaa

SEQ ID NO: 2894137 - DNA, 25 bp, Homo sapien
agacatcccgggaaagctcagagca

SEQ ID NO: 2894138 - DNA, 25 bp, Homo sapien
tgttccttcgcaaattgtccatccc

SEQ ID NO: 2894139 - DNA, 25 bp, Homo sapien
attgatggctgcaatgccgcggatg

SEQ ID NO: 2894140 - DNA, 25 bp, Homo sapien
cgcgagatctgattgcgattattga

SEQ ID NO: 2894141 - DNA, 25 bp, Homo sapien
gccctgaagcgcgagatctgattgc

SEQ ID NO: 2894142 - DNA, 25 bp, Homo sapien
ctgagtttccagtgcgtttcccggg

SEQ ID NO: 2894143 - DNA, 25 bp, Homo sapien
cacgtttctcatcttcgtcacggaa

SEQ ID NO: 2894144 - DNA, 25 bp, Homo sapien
gccacgtttctcatcttcgtcacgg

SEQ ID NO: 2894145 - DNA, 25 bp, Homo sapien
tttctcatcttcgtcacggaaagcc

SEQ ID NO: 2894146 - DNA, 25 bp, Homo sapien
ctcatcttcgtcacggaaagcccgt

SEQ ID NO: 2894147 - DNA, 25 bp, Homo sapien
gtcacgctcagtgaactcgtcccaa

SEQ ID NO: 2894148 - DNA, 25 bp, Homo sapien
cagtgaactcgtcccaaccaggcag

SEQ ID NO: 2894149 - DNA, 25 bp, Homo sapien
gctggcaatgcgcttagactccagg

SEQ ID NO: 2894150 - DNA, 25 bp, Homo sapien
gatgaagaagaacgaagaccccgtc

SEQ ID NO: 2894151 - DNA, 25 bp, Homo sapien
ccaggtcataacctcgagctctcct

SEQ ID NO: 2894152 - DNA, 25 bp, Homo sapien
ctgccaggtcataacctcgagctct

SEQ ID NO: 2894153 - DNA, 25 bp, Homo sapien
gagggatggactgagggtcatggag

SEQ ID NO: 2894154 - DNA, 25 bp, Homo sapien
tgagggatggactgagggtcatgga

SEQ ID NO: 2894155 - DNA, 25 bp, Homo sapien
actcagggtccgagtcgtgcagtga

SEQ ID NO: 2894156 - DNA, 25 bp, Homo sapien
taggagactgtttaccagctcatca

SEQ ID NO: 2894157 - DNA, 25 bp, Homo sapien
tggagacccagctggagactctagg

SEQ ID NO: 2894158 - DNA, 25 bp, Homo sapien
ttcccacgcgaggagactcagggtc

SEQ ID NO: 2894159 - DNA, 25 bp, Homo sapien
attttcaatgtcacagactcctcaa

SEQ ID NO: 2894160 - DNA, 25 bp, Homo sapien
caatgtcacagactcctcaatagag

SEQ ID NO: 2894161 - DNA, 25 bp, Homo sapien
tgtcacagactcctcaatagagaaa

SEQ ID NO: 2894162 - DNA, 25 bp, Homo sapien
cacagactcctcaatagagaaagag

SEQ ID NO: 2894163 - DNA, 25 bp, Homo sapien
tccggtgacggggagctcgctacct

SEQ ID NO: 2894164 - DNA, 25 bp, Homo sapien
ggagctcgctacctgtccagtgcaa

SEQ ID NO: 2894165 - DNA, 25 bp, Homo sapien
tacctgtccagtgcaattccaacat

SEQ ID NO: 2894166 - DNA, 25 bp, Homo sapien
ccagtaatagcccaggagtccggtg

SEQ ID NO: 2894167 - DNA, 25 bp, Homo sapien
cttaaagagttacactggtctggag

SEQ ID NO: 2894168 - DNA, 25 bp, Homo sapien
tggacgaagacctccagccagacaa

SEQ ID NO: 2894169 - DNA, 25 bp, Homo sapien
acccgccagccaacatggacgaaga

SEQ ID NO: 2894170 - DNA, 25 bp, Homo sapien
gctgttcttaaagagttacactggt

SEQ ID NO: 2894171 - DNA, 25 bp, Homo sapien
gctgatgggccagcagcaaagtcgt

SEQ ID NO: 2894172 - DNA, 25 bp, Homo sapien
agcctcggacccacaacggcattaa

SEQ ID NO: 2894173 - DNA, 25 bp, Homo sapien
gcagcaaagtcgtcagcgtcttcac

SEQ ID NO: 2894174 - DNA, 25 bp, Homo sapien
gacccacaacggcattaacaggact

SEQ ID NO: 2894175 - DNA, 25 bp, Homo sapien
cgtggtagtacttcgtcaggatcaa

SEQ ID NO: 2894176 - DNA, 25 bp, Homo sapien
catgtctgcgtggtagtacttcgtc

SEQ ID NO: 2894177 - DNA, 25 bp, Homo sapien
cttccccatgtctgcgtggtagtac

SEQ ID NO: 2894178 - DNA, 25 bp, Homo sapien
gtagtacttcgtcaggatcaagatc

SEQ ID NO: 2894179 - DNA, 25 bp, Homo sapien
ttgatagaccttggcagcatacatg

SEQ ID NO: 2894180 - DNA, 25 bp, Homo sapien
cctaggattacagaaggatggctgg

SEQ ID NO: 2894181 - DNA, 25 bp, Homo sapien
cacagacttgatagaccttggcagc

SEQ ID NO: 2894182 - DNA, 25 bp, Homo sapien
tgccacacagcctaggattacagaa

SEQ ID NO: 2894183 - DNA, 25 bp, Homo sapien
tgagctcagaatgcacggggtcgtc

SEQ ID NO: 2894184 - DNA, 25 bp, Homo sapien
aaagcatctgagacgatcttatggg

SEQ ID NO: 2894185 - DNA, 25 bp, Homo sapien
tcttatgggctaggaagctggctgt

SEQ ID NO: 2894186 - DNA, 25 bp, Homo sapien
gagacgatcttatgggctaggaagc

SEQ ID NO: 2894187 - DNA, 25 bp, Homo sapien
tgcggacgccactgcgaggtgccat

SEQ ID NO: 2894188 - DNA, 25 bp, Homo sapien
ctgtagcccctgatgctgcggacgc

SEQ ID NO: 2894189 - DNA, 25 bp, Homo sapien
gctgcggacgccactgcgaggtgcc

SEQ ID NO: 2894190 - DNA, 25 bp, Homo sapien
gtagcccctgatgctgcggacgcca

SEQ ID NO: 2894191 - DNA, 25 bp, Homo sapien
tgcacaggctccgttccatcctggg

SEQ ID NO: 2894192 - DNA, 25 bp, Homo sapien
ccatcctgggtcgtagtttgtttca

SEQ ID NO: 2894193 - DNA, 25 bp, Homo sapien
cagtttcgaaatgcccggctccgtc

SEQ ID NO: 2894194 - DNA, 25 bp, Homo sapien
cggctccgtcttccaagagcagcag

SEQ ID NO: 2894195 - DNA, 25 bp, Homo sapien
ggatgggaagggagcgcatcagcct

SEQ ID NO: 2894196 - DNA, 25 bp, Homo sapien
catatgtggcaaaaccgagcaggcg

SEQ ID NO: 2894197 - DNA, 25 bp, Homo sapien
atacacattcaaggccggcagcaca

SEQ ID NO: 2894198 - DNA, 25 bp, Homo sapien
catcagcctgcgtgtgaaggccaca

SEQ ID NO: 2894199 - DNA, 25 bp, Homo sapien
gcatgtgggtcacagttacccagaa

SEQ ID NO: 2894200 - DNA, 25 bp, Homo sapien
gtcacagttacccagaagctgctga

SEQ ID NO: 2894201 - DNA, 25 bp, Homo sapien
tgatggttgacaacttctggaggac

SEQ ID NO: 2894202 - DNA, 25 bp, Homo sapien
tgacactcaaccgtgatggttgaca

SEQ ID NO: 2894203 - DNA, 25 bp, Homo sapien
cctgatgcggtgcctttcagatgcc

SEQ ID NO: 2894204 - DNA, 25 bp, Homo sapien
tggcttctcttgacagttccaataa

SEQ ID NO: 2894205 - DNA, 25 bp, Homo sapien
cacagagacaggtgagcctgatgcg

SEQ ID NO: 2894206 - DNA, 25 bp, Homo sapien
cagttccaataattccttagaactt

SEQ ID NO: 2894207 - DNA, 25 bp, Homo sapien
gcccatgtctggcagcttccaacag

SEQ ID NO: 2894208 - DNA, 25 bp, Homo sapien
gaccacttgtggcatgctctggcca

SEQ ID NO: 2894209 - DNA, 25 bp, Homo sapien
ggatgacacgtcattcgcccatgtc

SEQ ID NO: 2894210 - DNA, 25 bp, Homo sapien
acagtggatacggacaaaggcagca

SEQ ID NO: 2894211 - DNA, 25 bp, Homo sapien
gctgtccagcctgcactgtatcatt

SEQ ID NO: 2894212 - DNA, 25 bp, Homo sapien
gggacgtggcccagctgtccagcct

SEQ ID NO: 2894213 - DNA, 25 bp, Homo sapien
tggaacgaaggggacgtggcccagc

SEQ ID NO: 2894214 - DNA, 25 bp, Homo sapien
gcctgcactgtatcatttaaaattg

SEQ ID NO: 2894215 - DNA, 25 bp, Homo sapien
cctgtgtcccggacagtttgctctg

SEQ ID NO: 2894216 - DNA, 25 bp, Homo sapien
tgatgagtccaggaaccgagaacgg

SEQ ID NO: 2894217 - DNA, 25 bp, Homo sapien
gggccactgctgatcttcgttctgc

SEQ ID NO: 2894218 - DNA, 25 bp, Homo sapien
tgctgatcttcgttctgctccctct

SEQ ID NO: 2894219 - DNA, 25 bp, Homo sapien
cttcagatgtattcttcatgtctgc

SEQ ID NO: 2894220 - DNA, 25 bp, Homo sapien
tctgtatcctagaaccatgcagagt

SEQ ID NO: 2894221 - DNA, 25 bp, Homo sapien
tgcagagcatctgtatcctagaacc

SEQ ID NO: 2894222 - DNA, 25 bp, Homo sapien
agaagagggacacggccccccgatg

SEQ ID NO: 2894223 - DNA, 25 bp, Homo sapien
tatcctagaaccatgcagagttggg

SEQ ID NO: 2894224 - DNA, 25 bp, Homo sapien
cctgacccatctgcagcacgcagaa

SEQ ID NO: 2894225 - DNA, 25 bp, Homo sapien
tgacccatctgcagcacgcagaagg

SEQ ID NO: 2894226 - DNA, 25 bp, Homo sapien
tctgcagcacgcagaagggggcttc

SEQ ID NO: 2894227 - DNA, 25 bp, Homo sapien
catctgcagcacgcagaagggggct

SEQ ID NO: 2894228 - DNA, 25 bp, Homo sapien
tgaacagtagccaggggtgtccacg

SEQ ID NO: 2894229 - DNA, 25 bp, Homo sapien
cagtagccaggggtgtccacggtgg

SEQ ID NO: 2894230 - DNA, 25 bp, Homo sapien
gaacagtagccaggggtgtccacgg

SEQ ID NO: 2894231 - DNA, 25 bp, Homo sapien
aacagtagccaggggtgtccacggt

SEQ ID NO: 2894232 - DNA, 25 bp, Homo sapien
ggggatacaggtctgaacagcagcc

SEQ ID NO: 2894233 - DNA, 25 bp, Homo sapien
gggatacaggtctgaacagcagcca

SEQ ID NO: 2894234 - DNA, 25 bp, Homo sapien
gatacaggtctgaacagcagccagg

SEQ ID NO: 2894235 - DNA, 25 bp, Homo sapien
ggatacaggtctgaacagcagccag

SEQ ID NO: 2894236 - DNA, 25 bp, Homo sapien
cttgccaagcagtgatttaatgact

SEQ ID NO: 2894237 - DNA, 25 bp, Homo sapien
ctctccagatgccagcgtttgagga

SEQ ID NO: 2894238 - DNA, 25 bp, Homo sapien
ccagatgccagcgtttgaggagcga

SEQ ID NO: 2894239 - DNA, 25 bp, Homo sapien
aaggcagacgagaggatctttccag

SEQ ID NO: 2894240 - DNA, 25 bp, Homo sapien
acagaggagggaagcccccattcca

SEQ ID NO: 2894241 - DNA, 25 bp, Homo sapien
agggacctccaagagccggcacaga

SEQ ID NO: 2894242 - DNA, 25 bp, Homo sapien
ggacctccaagagccggcacagagc

SEQ ID NO: 2894243 - DNA, 25 bp, Homo sapien
aggaggtcctcaatgcaggcagagg

SEQ ID NO: 2894244 - DNA, 25 bp, Homo sapien
gagcacacggcccatcaatctgcat

SEQ ID NO: 2894245 - DNA, 25 bp, Homo sapien
gaagtttgcaacgagaaagattgaa

SEQ ID NO: 2894246 - DNA, 25 bp, Homo sapien
catacacgttgcaggaacatcattc

SEQ ID NO: 2894247 - DNA, 25 bp, Homo sapien
gggccagcggtctcctttgttccat

SEQ ID NO: 2894248 - DNA, 25 bp, Homo sapien
gcccatggccgctgtcctctgggga

SEQ ID NO: 2894249 - DNA, 25 bp, Homo sapien
cactgcccatggccgctgtcctctg

SEQ ID NO: 2894250 - DNA, 25 bp, Homo sapien
tgcccatggccgctgtcctctgggg

SEQ ID NO: 2894251 - DNA, 25 bp, Homo sapien
ctgcccatggccgctgtcctctggg

SEQ ID NO: 2894252 - DNA, 25 bp, Homo sapien
tgccgcgcacagaacaagccgctgg

SEQ ID NO: 2894253 - DNA, 25 bp, Homo sapien
gacatgccgcgcacagaacaagccg

SEQ ID NO: 2894254 - DNA, 25 bp, Homo sapien
cctggacatgccgcgcacagaacaa

SEQ ID NO: 2894255 - DNA, 25 bp, Homo sapien
ctggacatgccgcgcacagaacaag

SEQ ID NO: 2894256 - DNA, 25 bp, Homo sapien
acttggagggctctgcgtggatgta

SEQ ID NO: 2894257 - DNA, 25 bp, Homo sapien
gggctctgcgtggatgtagtctgtc

SEQ ID NO: 2894258 - DNA, 25 bp, Homo sapien
gagggctctgcgtggatgtagtctg

SEQ ID NO: 2894259 - DNA, 25 bp, Homo sapien
ttggagggctctgcgtggatgtagt

SEQ ID NO: 2894260 - DNA, 25 bp, Homo sapien
cctggggagggcaccgtgtctccca

SEQ ID NO: 2894261 - DNA, 25 bp, Homo sapien
cgtgtctcccacagcagcgcgtgcc

SEQ ID NO: 2894262 - DNA, 25 bp, Homo sapien
acagcagcgcgtgcccctccaggac

SEQ ID NO: 2894263 - DNA, 25 bp, Homo sapien
caccgtgtctcccacagcagcgcgt

SEQ ID NO: 2894264 - DNA, 25 bp, Homo sapien
tgtgctgtctgtgtattgcgcagga

SEQ ID NO: 2894265 - DNA, 25 bp, Homo sapien
tgtctgtgtattgcgcaggaacaga

SEQ ID NO: 2894266 - DNA, 25 bp, Homo sapien
cagtgtgctgtctgtgtattgcgca

SEQ ID NO: 2894267 - DNA, 25 bp, Homo sapien
gctgtctgtgtattgcgcaggaaca

SEQ ID NO: 2894268 - DNA, 25 bp, Homo sapien
cccacctctgcagggttggggggca

SEQ ID NO: 2894269 - DNA, 25 bp, Homo sapien
tcctgaatccaaggtgaagccccgt

SEQ ID NO: 2894270 - DNA, 25 bp, Homo sapien
cagccccacctctgcagggttgggg

SEQ ID NO: 2894271 - DNA, 25 bp, Homo sapien
gggagcttcttccagcagccccacc

SEQ ID NO: 2894272 - DNA, 25 bp, Homo sapien
tgcagggcacgggtgggttccgagc

SEQ ID NO: 2894273 - DNA, 25 bp, Homo sapien
tcagcaggatggacggtgtccaggc

SEQ ID NO: 2894274 - DNA, 25 bp, Homo sapien
cctcctcaatgtgctgaggaagctg

SEQ ID NO: 2894275 - DNA, 25 bp, Homo sapien
gctgcccgctgagccctcgtgccag

SEQ ID NO: 2894276 - DNA, 25 bp, Homo sapien
ggctgaagctgtacttggcactgtg

SEQ ID NO: 2894277 - DNA, 25 bp, Homo sapien
tgaagcagccgtccgatgatccgga

SEQ ID NO: 2894278 - DNA, 25 bp, Homo sapien
gctgtacttggcactgtgttgttcc

SEQ ID NO: 2894279 - DNA, 25 bp, Homo sapien
atgatccggacacagcccgcgactt

SEQ ID NO: 2894280 - DNA, 25 bp, Homo sapien
ttccaagagccacggcgggtgacag

SEQ ID NO: 2894281 - DNA, 25 bp, Homo sapien
atgccagccagctgggatgccagag

SEQ ID NO: 2894282 - DNA, 25 bp, Homo sapien
tccaagagccacggcgggtgacaga

SEQ ID NO: 2894283 - DNA, 25 bp, Homo sapien
caagagccacggcgggtgacagagc

SEQ ID NO: 2894284 - DNA, 25 bp, Homo sapien
atccacggtgaacgaggccgagctc

SEQ ID NO: 2894285 - DNA, 25 bp, Homo sapien
ccctcggcatgcagagccttgtcaa

SEQ ID NO: 2894286 - DNA, 25 bp, Homo sapien
tcaacctccagcagatatgcctgct

SEQ ID NO: 2894287 - DNA, 25 bp, Homo sapien
tttgtgtataaccatccacggtgaa

SEQ ID NO: 2894288 - DNA, 25 bp, Homo sapien
tgggcatctccttaactccacctca

SEQ ID NO: 2894289 - DNA, 25 bp, Homo sapien
ggcatctccttaactccacctcacc

SEQ ID NO: 2894290 - DNA, 25 bp, Homo sapien
tgtgcgttacccatgggcttgggca

SEQ ID NO: 2894291 - DNA, 25 bp, Homo sapien
tgcgttacccatgggcttgggcatc

SEQ ID NO: 2894292 - DNA, 25 bp, Homo sapien
gggagctcctggttttcagtgaaga

SEQ ID NO: 2894293 - DNA, 25 bp, Homo sapien
cattaaatctccctgaatcccctgg

SEQ ID NO: 2894294 - DNA, 25 bp, Homo sapien
tggttttcagtgaagaaatggagac

SEQ ID NO: 2894295 - DNA, 25 bp, Homo sapien
ctgcctacttcattaaatctccctg

SEQ ID NO: 2894296 - DNA, 25 bp, Homo sapien
gaaaaatggactgtttatcatctct

SEQ ID NO: 2894297 - DNA, 25 bp, Homo sapien
tccagaaaaatggactgtttatcat

SEQ ID NO: 2894298 - DNA, 25 bp, Homo sapien
aaaatggactgtttatcatctctgg

SEQ ID NO: 2894299 - DNA, 25 bp, Homo sapien
aatggactgtttatcatctctgggc

SEQ ID NO: 2894300 - DNA, 25 bp, Homo sapien
cagcatgccttgtggggcttcccca

SEQ ID NO: 2894301 - DNA, 25 bp, Homo sapien
cctgtcgtgggcagcatgccttgtg

SEQ ID NO: 2894302 - DNA, 25 bp, Homo sapien
cgtggggctcctgtcgtgggcagca

SEQ ID NO: 2894303 - DNA, 25 bp, Homo sapien
acaggggtggaacacacggccgtgg

SEQ ID NO: 2894304 - DNA, 25 bp, Homo sapien
tgagcttggtgtaggacgtcccgaa

SEQ ID NO: 2894305 - DNA, 25 bp, Homo sapien
gtaggacgtcccgaaatctgatgac

SEQ ID NO: 2894306 - DNA, 25 bp, Homo sapien
tcctcttgttggtcgggcagatgta

SEQ ID NO: 2894307 - DNA, 25 bp, Homo sapien
aattgtcgatgacggtggtgacacc

SEQ ID NO: 2894308 - DNA, 25 bp, Homo sapien
accagaaagacaggagcggagtgtc

SEQ ID NO: 2894309 - DNA, 25 bp, Homo sapien
tggtgaccagaaagacaggagcgga

SEQ ID NO: 2894310 - DNA, 25 bp, Homo sapien
tgaccagaaagacaggagcggagtg

SEQ ID NO: 2894311 - DNA, 25 bp, Homo sapien
cagaaagacaggagcggagtgtccc

SEQ ID NO: 2894312 - DNA, 25 bp, Homo sapien
agggctgaccctggaggtaccatca

SEQ ID NO: 2894313 - DNA, 25 bp, Homo sapien
tggttccgttactgcccctgttgcc

SEQ ID NO: 2894314 - DNA, 25 bp, Homo sapien
tctcttggttccgttactgcccctg

SEQ ID NO: 2894315 - DNA, 25 bp, Homo sapien
gaggtaccatcacatcccaggtgcc

SEQ ID NO: 2894316 - DNA, 25 bp, Homo sapien
ccacgggaggccagttccatctggg

SEQ ID NO: 2894317 - DNA, 25 bp, Homo sapien
aatcaggatcggtgtgtcagcagga

SEQ ID NO: 2894318 - DNA, 25 bp, Homo sapien
ccacctggggtccaacaggaatcag

SEQ ID NO: 2894319 - DNA, 25 bp, Homo sapien
gtgactttgctcctgccacctgggg

SEQ ID NO: 2894320 - DNA, 25 bp, Homo sapien
ggccagggcaatgccccccatgcct

SEQ ID NO: 2894321 - DNA, 25 bp, Homo sapien
gaaccaggtgggtgcagatcagcag

SEQ ID NO: 2894322 - DNA, 25 bp, Homo sapien
gcctgagggaaccaggtgggtgcag

SEQ ID NO: 2894323 - DNA, 25 bp, Homo sapien
cacagccaccaggtgaggcctctgt

SEQ ID NO: 2894324 - DNA, 25 bp, Homo sapien
gggtagatggagccaagtcaggatc

SEQ ID NO: 2894325 - DNA, 25 bp, Homo sapien
tgggcacagggtagatggagccaag

SEQ ID NO: 2894326 - DNA, 25 bp, Homo sapien
cacagggtagatggagccaagtcag

SEQ ID NO: 2894327 - DNA, 25 bp, Homo sapien
ggcacagggtagatggagccaagtc

SEQ ID NO: 2894328 - DNA, 25 bp, Homo sapien
gacaatagtaggctgcctggccagg

SEQ ID NO: 2894329 - DNA, 25 bp, Homo sapien
tgtcggcccgaagctgatctgagca

SEQ ID NO: 2894330 - DNA, 25 bp, Homo sapien
cgaagctgatctgagcattgcaggg

SEQ ID NO: 2894331 - DNA, 25 bp, Homo sapien
ccaagtgggaaggaaacctgctgtc

SEQ ID NO: 2894332 - DNA, 25 bp, Homo sapien
gatgttgccttggatgctcaggctg

SEQ ID NO: 2894333 - DNA, 25 bp, Homo sapien
ggatgttgccttggatgctcaggct

SEQ ID NO: 2894334 - DNA, 25 bp, Homo sapien
gccgccctgagcctgttggatgttg

SEQ ID NO: 2894335 - DNA, 25 bp, Homo sapien
caatggcagggggcacatatagctc

SEQ ID NO: 2894336 - DNA, 25 bp, Homo sapien
aaggctccaagtatgcgaccgggga

SEQ ID NO: 2894337 - DNA, 25 bp, Homo sapien
gatgaatttgcagaggtgagcaggc

SEQ ID NO: 2894338 - DNA, 25 bp, Homo sapien
taaccgacatcagaaggctggcaaa

SEQ ID NO: 2894339 - DNA, 25 bp, Homo sapien
cctggattttgcagtaaccgacatc

SEQ ID NO: 2894340 - DNA, 25 bp, Homo sapien
caaaggtgacttcccaatgtattcc

SEQ ID NO: 2894341 - DNA, 25 bp, Homo sapien
tggtcgcgggagcattcctctttgc

SEQ ID NO: 2894342 - DNA, 25 bp, Homo sapien
tgtgttggagccctcaaaggccttc

SEQ ID NO: 2894343 - DNA, 25 bp, Homo sapien
tgtattccagacaaatggtcgcggg

SEQ ID NO: 2894344 - DNA, 25 bp, Homo sapien
caagcttcaaatcgatagacttgct

SEQ ID NO: 2894345 - DNA, 25 bp, Homo sapien
aagcttcaaatcgatagacttgctg

SEQ ID NO: 2894346 - DNA, 25 bp, Homo sapien
tcaagcttcaaatcgatagacttgc

SEQ ID NO: 2894347 - DNA, 25 bp, Homo sapien
caaaaagacacccgcaggaaagcca

SEQ ID NO: 2894348 - DNA, 25 bp, Homo sapien
aaaagacacccgcaggaaagccaag

SEQ ID NO: 2894349 - DNA, 25 bp, Homo sapien
ctgccccacctcgcatgggccctgg

SEQ ID NO: 2894350 - DNA, 25 bp, Homo sapien
tgccccacctcgcatgggccctgga

SEQ ID NO: 2894351 - DNA, 25 bp, Homo sapien
tcgcatgggccctggatcttgggaa

SEQ ID NO: 2894352 - DNA, 25 bp, Homo sapien
atgggccctggatcttgggaaacag

SEQ ID NO: 2894353 - DNA, 25 bp, Homo sapien
gttgtcccaggaccagcgtgcatga

SEQ ID NO: 2894354 - DNA, 25 bp, Homo sapien
gaggttgaagcactgttcctgatcc

SEQ ID NO: 2894355 - DNA, 25 bp, Homo sapien
cccaggaccagcgtgcatgagtgag

SEQ ID NO: 2894356 - DNA, 25 bp, Homo sapien
aggaggttgaagcactgttcctgat

SEQ ID NO: 2894357 - DNA, 25 bp, Homo sapien
tgtgccggtcataggcttggcacat

SEQ ID NO: 2894358 - DNA, 25 bp, Homo sapien
catgcaggcacaggatagcggtgca

SEQ ID NO: 2894359 - DNA, 25 bp, Homo sapien
caggatagcggtgcagggcgtgggt

SEQ ID NO: 2894360 - DNA, 25 bp, Homo sapien
gtccctgtgccggtcataggcttgg

SEQ ID NO: 2894361 - DNA, 25 bp, Homo sapien
aaacacagagaagaccaggaatgct

SEQ ID NO: 2894362 - DNA, 25 bp, Homo sapien
gaagcgagtagtggctcaaaacaca

SEQ ID NO: 2894363 - DNA, 25 bp, Homo sapien
tgatgggagaagaccattccaggca

SEQ ID NO: 2894364 - DNA, 25 bp, Homo sapien
cagggcaaaaaccaagggcagacag

SEQ ID NO: 2894365 - DNA, 25 bp, Homo sapien
agccatttccgtgggcttggcagcc

SEQ ID NO: 2894366 - DNA, 25 bp, Homo sapien
aagccatttccgtgggcttggcagc

SEQ ID NO: 2894367 - DNA, 25 bp, Homo sapien
actgcattcatcagacgtgtgttgt

SEQ ID NO: 2894368 - DNA, 25 bp, Homo sapien
ttgcagaagcatctatttcacactg

SEQ ID NO: 2894369 - DNA, 25 bp, Homo sapien
tcatcagacgtgtgttgtgtataca

SEQ ID NO: 2894370 - DNA, 25 bp, Homo sapien
agttttgcagaagcatctatttcac

SEQ ID NO: 2894371 - DNA, 25 bp, Homo sapien
attttactaaatccaggacgctcca

SEQ ID NO: 2894372 - DNA, 25 bp, Homo sapien
agtggctgcgcctctgaagtctccc

SEQ ID NO: 2894373 - DNA, 25 bp, Homo sapien
tccttggagagtggctgcgcctctg

SEQ ID NO: 2894374 - DNA, 25 bp, Homo sapien
ttttactaaatccaggacgctccag

SEQ ID NO: 2894375 - DNA, 25 bp, Homo sapien
tcctgataatgtgggtagatactta

SEQ ID NO: 2894376 - DNA, 25 bp, Homo sapien
aattgtctcgactatgaaataaaga

SEQ ID NO: 2894377 - DNA, 25 bp, Homo sapien
gatgcttacaaagcattcctgataa

SEQ ID NO: 2894378 - DNA, 25 bp, Homo sapien
tggtaggtgaccacaaaaatggcca

SEQ ID NO: 2894379 - DNA, 25 bp, Homo sapien
cgaatgtgcattgcatgatgggcga

SEQ ID NO: 2894380 - DNA, 25 bp, Homo sapien
cccacgaatgtgcattgcatgatgg

SEQ ID NO: 2894381 - DNA, 25 bp, Homo sapien
ttccccacgaatgtgcattgcatga

SEQ ID NO: 2894382 - DNA, 25 bp, Homo sapien
cacgaatgtgcattgcatgatgggc

SEQ ID NO: 2894383 - DNA, 25 bp, Homo sapien
ctacatatgaaaccccgagccagaa

SEQ ID NO: 2894384 - DNA, 25 bp, Homo sapien
atatgaaaccccgagccagaagcag

SEQ ID NO: 2894385 - DNA, 25 bp, Homo sapien
tctgctacatatgaaaccccgagcc

SEQ ID NO: 2894386 - DNA, 25 bp, Homo sapien
tgctacatatgaaaccccgagccag

SEQ ID NO: 2894387 - DNA, 25 bp, Homo sapien
tctgtgaagcggttccgataggagc

SEQ ID NO: 2894388 - DNA, 25 bp, Homo sapien
aaaccaacttgatgtccacgtcctc

SEQ ID NO: 2894389 - DNA, 25 bp, Homo sapien
acttgatgtccacgtcctctgtgaa

SEQ ID NO: 2894390 - DNA, 25 bp, Homo sapien
ggttccgataggagccacctgctct

SEQ ID NO: 2894391 - DNA, 25 bp, Homo sapien
tcgactcgggttttaagagacagac

SEQ ID NO: 2894392 - DNA, 25 bp, Homo sapien
tgcggccagaatgcactagcttcct

SEQ ID NO: 2894393 - DNA, 25 bp, Homo sapien
cataaacaaggcagtaccctggcag

SEQ ID NO: 2894394 - DNA, 25 bp, Homo sapien
gcttccttctcttattcgactcggg

SEQ ID NO: 2894395 - DNA, 25 bp, Homo sapien
acaccagttggctcccagtcctggc

SEQ ID NO: 2894396 - DNA, 25 bp, Homo sapien
gctctaggggagaccacaccagttg

SEQ ID NO: 2894397 - DNA, 25 bp, Homo sapien
tgagctggggccgccgtcttgcagg

SEQ ID NO: 2894398 - DNA, 25 bp, Homo sapien
agagctgtggagatctcgggtgagc

SEQ ID NO: 2894399 - DNA, 25 bp, Homo sapien
taagcttgtggtaagctgtgacagc

SEQ ID NO: 2894400 - DNA, 25 bp, Homo sapien
ggttcctcgtactgtagcagcgaca

SEQ ID NO: 2894401 - DNA, 25 bp, Homo sapien
tgacagcagctggttccacctttga

SEQ ID NO: 2894402 - DNA, 25 bp, Homo sapien
ggacaactgactccagcatggtaag

SEQ ID NO: 2894403 - DNA, 25 bp, Homo sapien
ttcaaagagttgtcaggtaagatct

SEQ ID NO: 2894404 - DNA, 25 bp, Homo sapien
cttcaaagagttgtcaggtaagatc

SEQ ID NO: 2894405 - DNA, 25 bp, Homo sapien
caaagagttgtcaggtaagatcttt

SEQ ID NO: 2894406 - DNA, 25 bp, Homo sapien
gatctttccatctaaggcactgaaa

SEQ ID NO: 2894407 - DNA, 25 bp, Homo sapien
gtcggaacgagaagccaggatactg

SEQ ID NO: 2894408 - DNA, 25 bp, Homo sapien
ggaggtgaccgtttgcagcagaaac

SEQ ID NO: 2894409 - DNA, 25 bp, Homo sapien
tagcagcccgacatctgacagagga

SEQ ID NO: 2894410 - DNA, 25 bp, Homo sapien
cagaaacgaaggacaaggagtcgga

SEQ ID NO: 2894411 - DNA, 25 bp, Homo sapien
tcaaccatcatagctgggcagcagc

SEQ ID NO: 2894412 - DNA, 25 bp, Homo sapien
gccaggctggacaccgccccagagg

SEQ ID NO: 2894413 - DNA, 25 bp, Homo sapien
tgccagccccgcttttcagagaggt

SEQ ID NO: 2894414 - DNA, 25 bp, Homo sapien
ggcagtgatcatctcaaccatcata

SEQ ID NO: 2894415 - DNA, 25 bp, Homo sapien
agcgctgttgtcacaagcagataga

SEQ ID NO: 2894416 - DNA, 25 bp, Homo sapien
tgattatcagcgatggggtatcggt

SEQ ID NO: 2894417 - DNA, 25 bp, Homo sapien
ctactgattatcagcgatggggtat

SEQ ID NO: 2894418 - DNA, 25 bp, Homo sapien
ggggtatcggtgtccctgggcacca

SEQ ID NO: 2894419 - DNA, 25 bp, Homo sapien
tcagcgatggggtatcggtgtccct

SEQ ID NO: 2894420 - DNA, 25 bp, Homo sapien
attgtaaaaggcagggcattggtgt

SEQ ID NO: 2894421 - DNA, 25 bp, Homo sapien
actgattgtaaaaggcagggcattg

SEQ ID NO: 2894422 - DNA, 25 bp, Homo sapien
taaaaggcagggcattggtgtgtct

SEQ ID NO: 2894423 - DNA, 25 bp, Homo sapien
tcactgattgtaaaaggcagggcat

SEQ ID NO: 2894424 - DNA, 25 bp, Homo sapien
ccaaagacacctggtactttcctca

SEQ ID NO: 2894425 - DNA, 25 bp, Homo sapien
caaagacacctggtactttcctcat

SEQ ID NO: 2894426 - DNA, 25 bp, Homo sapien
ggctgtgccagggtctctggcgtcc

SEQ ID NO: 2894427 - DNA, 25 bp, Homo sapien
gtctctggcgtcctcgccaggcccc

SEQ ID NO: 2894428 - DNA, 25 bp, Homo sapien
gcaggcccggggctgtgccagggtc

SEQ ID NO: 2894429 - DNA, 25 bp, Homo sapien
ggtctctggcgtcctcgccaggccc

SEQ ID NO: 2894430 - DNA, 25 bp, Homo sapien
atgaccgctgacaggcacaagagtg

SEQ ID NO: 2894431 - DNA, 25 bp, Homo sapien
ccgctgacaggcacaagagtggaga

SEQ ID NO: 2894432 - DNA, 25 bp, Homo sapien
ctgacaggcacaagagtggagacac

SEQ ID NO: 2894433 - DNA, 25 bp, Homo sapien
tcacatgaccgctgacaggcacaag

SEQ ID NO: 2894434 - DNA, 25 bp, Homo sapien
agcctctctgacttgtttcacaccc

SEQ ID NO: 2894435 - DNA, 25 bp, Homo sapien
acagcctctctgacttgtttcacac

SEQ ID NO: 2894436 - DNA, 25 bp, Homo sapien
cacagcctctctgacttgtttcaca

SEQ ID NO: 2894437 - DNA, 25 bp, Homo sapien
cagcctctctgacttgtttcacacc

SEQ ID NO: 2894438 - DNA, 25 bp, Homo sapien
atggctcccacgcatcctgagctca

SEQ ID NO: 2894439 - DNA, 25 bp, Homo sapien
tggctcccacgcatcctgagctcaa

SEQ ID NO: 2894440 - DNA, 25 bp, Homo sapien
ggctcccacgcatcctgagctcaag

SEQ ID NO: 2894441 - DNA, 25 bp, Homo sapien
tgctgaggttcccaatgaggcaaaa

SEQ ID NO: 2894442 - DNA, 25 bp, Homo sapien
tgaggttcccaatgaggcaaaacat

SEQ ID NO: 2894443 - DNA, 25 bp, Homo sapien
tcaaattggagataataatttcttc

SEQ ID NO: 2894444 - DNA, 25 bp, Homo sapien
aataatttcttctgtgctgaggttc

SEQ ID NO: 2894445 - DNA, 25 bp, Homo sapien
cagggctttcacgatggatttccga

SEQ ID NO: 2894446 - DNA, 25 bp, Homo sapien
gggctttcacgatggatttccgacc

SEQ ID NO: 2894447 - DNA, 25 bp, Homo sapien
agggctttcacgatggatttccgac

SEQ ID NO: 2894448 - DNA, 25 bp, Homo sapien
ccagggctttcacgatggatttccg

SEQ ID NO: 2894449 - DNA, 25 bp, Homo sapien
ggattcaggtaaacacagggctccg

SEQ ID NO: 2894450 - DNA, 25 bp, Homo sapien
caagcaaggattcaggtaaacacag

SEQ ID NO: 2894451 - DNA, 25 bp, Homo sapien
accacatggtccaagcaaggattca

SEQ ID NO: 2894452 - DNA, 25 bp, Homo sapien
gcaaaaccacatggtccaagcaagg

SEQ ID NO: 2894453 - DNA, 25 bp, Homo sapien
tcccagctacggtcattaatctccg

SEQ ID NO: 2894454 - DNA, 25 bp, Homo sapien
gcctccgtggagagcgattccttgg

SEQ ID NO: 2894455 - DNA, 25 bp, Homo sapien
cctgacggagaaagatgtggcctcc

SEQ ID NO: 2894456 - DNA, 25 bp, Homo sapien
taatctccgctagcacaaaaccctg

SEQ ID NO: 2894457 - DNA, 25 bp, Homo sapien
gaaaggtggcgccttcgtctgcgct

SEQ ID NO: 2894458 - DNA, 25 bp, Homo sapien
aaatcagagtttccacgaagaaggg

SEQ ID NO: 2894459 - DNA, 25 bp, Homo sapien
ctttgtgtaggcgaggaccttgtcc

SEQ ID NO: 2894460 - DNA, 25 bp, Homo sapien
ctcctccttagggtggaaaatcaga

SEQ ID NO: 2894461 - DNA, 25 bp, Homo sapien
ccaggcgactggcacccatatatct

SEQ ID NO: 2894462 - DNA, 25 bp, Homo sapien
ggcgactggcacccatatatcttac

SEQ ID NO: 2894463 - DNA, 25 bp, Homo sapien
gaccaggcgactggcacccatatat

SEQ ID NO: 2894464 - DNA, 25 bp, Homo sapien
caggcgactggcacccatatatctt

SEQ ID NO: 2894465 - DNA, 25 bp, Homo sapien
ctctgagcctggtgcactgcccacc

SEQ ID NO: 2894466 - DNA, 25 bp, Homo sapien
caccaaggagagggcgatgacgggg

SEQ ID NO: 2894467 - DNA, 25 bp, Homo sapien
atgacggggtccagcatcccggccc

SEQ ID NO: 2894468 - DNA, 25 bp, Homo sapien
gccaagtgggcacggtcccttgagg

SEQ ID NO: 2894469 - DNA, 25 bp, Homo sapien
cggtagcccggaatccgtggctgcc

SEQ ID NO: 2894470 - DNA, 25 bp, Homo sapien
tttgctgaccgaatgaacacgtttg

SEQ ID NO: 2894471 - DNA, 25 bp, Homo sapien
ctgccgggtgcgcaaggcccatttg

SEQ ID NO: 2894472 - DNA, 25 bp, Homo sapien
gcggcaccagcggtagcccggaatc

SEQ ID NO: 2894473 - DNA, 25 bp, Homo sapien
tggctacctcctgtttttcgggaca

SEQ ID NO: 2894474 - DNA, 25 bp, Homo sapien
ctccaggcctttgcgcaagctgtgt

SEQ ID NO: 2894475 - DNA, 25 bp, Homo sapien
tccacaggtaagagtccgggtctcc

SEQ ID NO: 2894476 - DNA, 25 bp, Homo sapien
gtttttcgggacagcgtcattccca

SEQ ID NO: 2894477 - DNA, 25 bp, Homo sapien
gacagggccctgcatcatggaactg

SEQ ID NO: 2894478 - DNA, 25 bp, Homo sapien
tgaactcgccttgaaaactacagac

SEQ ID NO: 2894479 - DNA, 25 bp, Homo sapien
tcacaagggcaattgcagcaaacgt

SEQ ID NO: 2894480 - DNA, 25 bp, Homo sapien
actgtcctggcaaaggtgtcccgcc

SEQ ID NO: 2894481 - DNA, 25 bp, Homo sapien
cctgcaccagctgcacactgcaccc

SEQ ID NO: 2894482 - DNA, 25 bp, Homo sapien
accagctgcacactgcacccctctc

SEQ ID NO: 2894483 - DNA, 25 bp, Homo sapien
tgcaccagctgcacactgcacccct

SEQ ID NO: 2894484 - DNA, 25 bp, Homo sapien
caccagctgcacactgcacccctct

SEQ ID NO: 2894485 - DNA, 25 bp, Homo sapien
tcattcacactaatagccgccagga

SEQ ID NO: 2894486 - DNA, 25 bp, Homo sapien
ctgcataacgggcacatcattcaca

SEQ ID NO: 2894487 - DNA, 25 bp, Homo sapien
tgttcccacgtgtccttgtcacggg

SEQ ID NO: 2894488 - DNA, 25 bp, Homo sapien
ttgtcacgggcaccaccttatgacg

SEQ ID NO: 2894489 - DNA, 25 bp, Homo sapien
cttgatcaagctatgagttttggaa

SEQ ID NO: 2894490 - DNA, 25 bp, Homo sapien
accttgatcaagctatgagttttgg

SEQ ID NO: 2894491 - DNA, 25 bp, Homo sapien
aaatgccaggtgaagttgccagggc

SEQ ID NO: 2894492 - DNA, 25 bp, Homo sapien
gaaatgccaggtgaagttgccaggg

SEQ ID NO: 2894493 - DNA, 25 bp, Homo sapien
aggaatgaatggagccaggggctcc

SEQ ID NO: 2894494 - DNA, 25 bp, Homo sapien
gaggaatgaatggagccaggggctc

SEQ ID NO: 2894495 - DNA, 25 bp, Homo sapien
atgaatggagccaggggctccttgg

SEQ ID NO: 2894496 - DNA, 25 bp, Homo sapien
gaatgaatggagccaggggctcctt

SEQ ID NO: 2894497 - DNA, 25 bp, Homo sapien
cagacagcgtttcaagtagcccaca

SEQ ID NO: 2894498 - DNA, 25 bp, Homo sapien
gggtccgtggtcagacagcgtttca

SEQ ID NO: 2894499 - DNA, 25 bp, Homo sapien
caaggccggataagatgaggcgctc

SEQ ID NO: 2894500 - DNA, 25 bp, Homo sapien
tttcaagtagcccacaccagaggct

SEQ ID NO: 2894501 - DNA, 25 bp, Homo sapien
aatccagaggggtctcacagaggag

SEQ ID NO: 2894502 - DNA, 25 bp, Homo sapien
agggtgaaatccagaggggtctcac

SEQ ID NO: 2894503 - DNA, 25 bp, Homo sapien
tctgagcctcaaaggtgggagggac

SEQ ID NO: 2894504 - DNA, 25 bp, Homo sapien
tcctgtccccgggccagctggcagg

SEQ ID NO: 2894505 - DNA, 25 bp, Homo sapien
tcatccttgtccagcggacacgcgg

SEQ ID NO: 2894506 - DNA, 25 bp, Homo sapien
aagaaacaaaagcttggtcaggacg

SEQ ID NO: 2894507 - DNA, 25 bp, Homo sapien
ggacgtcaggaataagctgcttctg

SEQ ID NO: 2894508 - DNA, 25 bp, Homo sapien
gatcccccaggagaagtcatccttg

SEQ ID NO: 2894509 - DNA, 25 bp, Homo sapien
tccccaagtcagatgacacgtagag

SEQ ID NO: 2894510 - DNA, 25 bp, Homo sapien
agaacacgtggtctttggtcactcg

SEQ ID NO: 2894511 - DNA, 25 bp, Homo sapien
cgctcttgcagaagtgtccactttt

SEQ ID NO: 2894512 - DNA, 25 bp, Homo sapien
ggtctttggtcactcgctcttgcag

SEQ ID NO: 2894513 - DNA, 25 bp, Homo sapien
taattggagctttggaacggaaggc

SEQ ID NO: 2894514 - DNA, 25 bp, Homo sapien
tgaccagaaggacgggatatggccc

SEQ ID NO: 2894515 - DNA, 25 bp, Homo sapien
tggaatcagcacatcaaggagcggt

SEQ ID NO: 2894516 - DNA, 25 bp, Homo sapien
gaggcccgtgcaatggtctgttcca

SEQ ID NO: 2894517 - DNA, 25 bp, Homo sapien
ggctgctgacagttgacagcaatga

SEQ ID NO: 2894518 - DNA, 25 bp, Homo sapien
gggcaatccgcagacagacggccgt

SEQ ID NO: 2894519 - DNA, 25 bp, Homo sapien
ggcgtgtacaccagccatcggcatt

SEQ ID NO: 2894520 - DNA, 25 bp, Homo sapien
tccccatgagccaacggcgtgtaca

SEQ ID NO: 2894521 - DNA, 25 bp, Homo sapien
gagggcagctccagtgcaaatggtt

SEQ ID NO: 2894522 - DNA, 25 bp, Homo sapien
caccccatttgtgctgagggcagct

SEQ ID NO: 2894523 - DNA, 25 bp, Homo sapien
gctgagggcagctccagtgcaaatg

SEQ ID NO: 2894524 - DNA, 25 bp, Homo sapien
tcaccccatttgtgctgagggcagc

SEQ ID NO: 2894525 - DNA, 25 bp, Homo sapien
agtcacttcctggtatcagtggcca

SEQ ID NO: 2894526 - DNA, 25 bp, Homo sapien
gcaaactgagcctcaagatgaggaa

SEQ ID NO: 2894527 - DNA, 25 bp, Homo sapien
gtatcagtggccactcagcgttggg

SEQ ID NO: 2894528 - DNA, 25 bp, Homo sapien
caagtggttgagatgtctcaggcac

SEQ ID NO: 2894529 - DNA, 25 bp, Homo sapien
cactttcttcacactgaaaacttcc

SEQ ID NO: 2894530 - DNA, 25 bp, Homo sapien
aactcctggatttggtggctggtca

SEQ ID NO: 2894531 - DNA, 25 bp, Homo sapien
ctgctttagccttctgcaaagcaag

SEQ ID NO: 2894532 - DNA, 25 bp, Homo sapien
actgaaaacttccacctgctttagc

SEQ ID NO: 2894533 - DNA, 25 bp, Homo sapien
cttgccctcttggacactctctcct

SEQ ID NO: 2894534 - DNA, 25 bp, Homo sapien
tactctggcaccaattctgccttga

SEQ ID NO: 2894535 - DNA, 25 bp, Homo sapien
ccaattctgccttgaatttatgcag

SEQ ID NO: 2894536 - DNA, 25 bp, Homo sapien
ttccagtaagtactctggcaccaat

SEQ ID NO: 2894537 - DNA, 25 bp, Homo sapien
ccaaggcccagacaggtgaaaacag

SEQ ID NO: 2894538 - DNA, 25 bp, Homo sapien
gtgctcaggtacagggaacgtccta

SEQ ID NO: 2894539 - DNA, 25 bp, Homo sapien
taatacctccatttggtggcaggtg

SEQ ID NO: 2894540 - DNA, 25 bp, Homo sapien
gccctgctgggcgaagtctttaact

SEQ ID NO: 2894541 - DNA, 25 bp, Homo sapien
tcagggtcagcgtccaccccagaca

SEQ ID NO: 2894542 - DNA, 25 bp, Homo sapien
gtcagggtcagcgtccaccccagac

SEQ ID NO: 2894543 - DNA, 25 bp, Homo sapien
gggcttccacgtggaccaagtcagg

SEQ ID NO: 2894544 - DNA, 25 bp, Homo sapien
acctgcactctgacacgagctcctt

SEQ ID NO: 2894545 - DNA, 25 bp, Homo sapien
tctgacacgagctccttcaaccctc

SEQ ID NO: 2894546 - DNA, 25 bp, Homo sapien
aaggtgttcgtgctactctggagcc

SEQ ID NO: 2894547 - DNA, 25 bp, Homo sapien
caggaaggtgttcgtgctactctgg

SEQ ID NO: 2894548 - DNA, 25 bp, Homo sapien
agcatcttctcggagcaattgtgga

SEQ ID NO: 2894549 - DNA, 25 bp, Homo sapien
tgcacggtcagagacccgtggtcaa

SEQ ID NO: 2894550 - DNA, 25 bp, Homo sapien
gaagatgtaatcgtcctgcacggtc

SEQ ID NO: 2894551 - DNA, 25 bp, Homo sapien
caattgtggattgcgcaggtgacgt

SEQ ID NO: 2894552 - DNA, 25 bp, Homo sapien
caatttccaaaagccccagaagcaa

SEQ ID NO: 2894553 - DNA, 25 bp, Homo sapien
ctgttgccaatttccaaaagcccca

SEQ ID NO: 2894554 - DNA, 25 bp, Homo sapien
tccaaaagccccagaagcaacctta

SEQ ID NO: 2894555 - DNA, 25 bp, Homo sapien
gccaatttccaaaagccccagaagc

SEQ ID NO: 2894556 - DNA, 25 bp, Homo sapien
cacagttctgggcttgcgagggctt

SEQ ID NO: 2894557 - DNA, 25 bp, Homo sapien
agccacagttctgggcttgcgaggg

SEQ ID NO: 2894558 - DNA, 25 bp, Homo sapien
cagttctgggcttgcgagggcttct

SEQ ID NO: 2894559 - DNA, 25 bp, Homo sapien
gagggcttctgtggatggctgcagc

SEQ ID NO: 2894560 - DNA, 25 bp, Homo sapien
tcgaggcatgacaaacaaagccggc

SEQ ID NO: 2894561 - DNA, 25 bp, Homo sapien
gagacaggccaaagatgcgctcgtt

SEQ ID NO: 2894562 - DNA, 25 bp, Homo sapien
ggtgatcactgaacctcgaggcatg

SEQ ID NO: 2894563 - DNA, 25 bp, Homo sapien
tgcgctcgttaccaaaggtgatcac

SEQ ID NO: 2894564 - DNA, 25 bp, Homo sapien
caggacaaattcatttcgacgataa

SEQ ID NO: 2894565 - DNA, 25 bp, Homo sapien
ctttggcaatgcatacttcggcagc

SEQ ID NO: 2894566 - DNA, 25 bp, Homo sapien
taagagacgtagtattttgtctggt

SEQ ID NO: 2894567 - DNA, 25 bp, Homo sapien
catacttcggcagcttcatcaggac

SEQ ID NO: 2894568 - DNA, 25 bp, Homo sapien
cagctggacgaagcgtggccacact

SEQ ID NO: 2894569 - DNA, 25 bp, Homo sapien
agcagctggacgaagcgtggccaca

SEQ ID NO: 2894570 - DNA, 25 bp, Homo sapien
gggtgagcagctggacgaagcgtgg

SEQ ID NO: 2894571 - DNA, 25 bp, Homo sapien
tgagcagctggacgaagcgtggcca

SEQ ID NO: 2894572 - DNA, 25 bp, Homo sapien
tcctggaagctgtttcaactcatgg

SEQ ID NO: 2894573 - DNA, 25 bp, Homo sapien
ccaagaatcagccttacatgtaagc

SEQ ID NO: 2894574 - DNA, 25 bp, Homo sapien
caactcatggtggttgcaataatga

SEQ ID NO: 2894575 - DNA, 25 bp, Homo sapien
tctgggtatctgcatgtctatcatc

SEQ ID NO: 2894576 - DNA, 25 bp, Homo sapien
gctcccccttcctccctgctcagcg

SEQ ID NO: 2894577 - DNA, 25 bp, Homo sapien
ccccttcctccctgctcagcgccat

SEQ ID NO: 2894578 - DNA, 25 bp, Homo sapien
ctcccccttcctccctgctcagcgc

SEQ ID NO: 2894579 - DNA, 25 bp, Homo sapien
ctcagctcccccttcctccctgctc

SEQ ID NO: 2894580 - DNA, 25 bp, Homo sapien
tccaggatgtcgatgagcacgctct

SEQ ID NO: 2894581 - DNA, 25 bp, Homo sapien
tgggtccgactggtacaggttgtag

SEQ ID NO: 2894582 - DNA, 25 bp, Homo sapien
gaacacctgactctcgtccgtgctg

SEQ ID NO: 2894583 - DNA, 25 bp, Homo sapien
ctgccgtgagctgcgcacgtcctgc

SEQ ID NO: 2894584 - DNA, 25 bp, Homo sapien
cccttgttgtaggttataagcgtca

SEQ ID NO: 2894585 - DNA, 25 bp, Homo sapien
aggaagactcctttcacccctctga

SEQ ID NO: 2894586 - DNA, 25 bp, Homo sapien
tcaggtaatcccagtcgcggccctt

SEQ ID NO: 2894587 - DNA, 25 bp, Homo sapien
taagcgtcatcactttcccatcaat

SEQ ID NO: 2894588 - DNA, 25 bp, Homo sapien
aaaagaagggcaatgccggcaggct

SEQ ID NO: 2894589 - DNA, 25 bp, Homo sapien
ctgctgacggccaaacagacggctc

SEQ ID NO: 2894590 - DNA, 25 bp, Homo sapien
gaacacaggcggctctatgaaccct

SEQ ID NO: 2894591 - DNA, 25 bp, Homo sapien
ttttgcattcgccttgcggcctgct

SEQ ID NO: 2894592 - DNA, 25 bp, Homo sapien
cttcagcaggtgctgtgctgacagc

SEQ ID NO: 2894593 - DNA, 25 bp, Homo sapien
tgggaagtacaagggaagcttcagc

SEQ ID NO: 2894594 - DNA, 25 bp, Homo sapien
ggtgggaagtacaagggaagcttca

SEQ ID NO: 2894595 - DNA, 25 bp, Homo sapien
aagtacaagggaagcttcagcaggt

SEQ ID NO: 2894596 - DNA, 25 bp, Homo sapien
tgcacggtgcctgatacgtaggggt

SEQ ID NO: 2894597 - DNA, 25 bp, Homo sapien
gggttgtctgcccagcgcaggtgca

SEQ ID NO: 2894598 - DNA, 25 bp, Homo sapien
tacgtaggggttgtctgcccagcgc

SEQ ID NO: 2894599 - DNA, 25 bp, Homo sapien
tgcctgatacgtaggggttgtctgc

SEQ ID NO: 2894600 - DNA, 25 bp, Homo sapien
gatgtgaagccagcccacgcgcctt

SEQ ID NO: 2894601 - DNA, 25 bp, Homo sapien
gcagtgcggtcacgtggcactggga

SEQ ID NO: 2894602 - DNA, 25 bp, Homo sapien
tgtggaaacaggtagccatcatccc

SEQ ID NO: 2894603 - DNA, 25 bp, Homo sapien
catgtcgggccagcagatgtgaagc

SEQ ID NO: 2894604 - DNA, 25 bp, Homo sapien
ggatggagaagtgttcactggcctc

SEQ ID NO: 2894605 - DNA, 25 bp, Homo sapien
cctgaggacgtctggatgatcagct

SEQ ID NO: 2894606 - DNA, 25 bp, Homo sapien
tgttggatcctgaggacgtctggat

SEQ ID NO: 2894607 - DNA, 25 bp, Homo sapien
gatcctgaggacgtctggatgatca

SEQ ID NO: 2894608 - DNA, 25 bp, Homo sapien
acacttcaccaaggaggactgcggg

SEQ ID NO: 2894609 - DNA, 25 bp, Homo sapien
cggcgatcaccaagacacagccggg

SEQ ID NO: 2894610 - DNA, 25 bp, Homo sapien
tcccgagacagggagcaccggcgat

SEQ ID NO: 2894611 - DNA, 25 bp, Homo sapien
tagtcttccaggttccgccggtgct

SEQ ID NO: 2894612 - DNA, 25 bp, Homo sapien
cacagtctgacgtgatgtacatttc

SEQ ID NO: 2894613 - DNA, 25 bp, Homo sapien
gtgtgaccacagtctgacgtgatgt

SEQ ID NO: 2894614 - DNA, 25 bp, Homo sapien
gaccacagtctgacgtgatgtacat

SEQ ID NO: 2894615 - DNA, 25 bp, Homo sapien
agtctgacgtgatgtacatttcttc

SEQ ID NO: 2894616 - DNA, 25 bp, Homo sapien
gccctgccacaggacgaggggctca

SEQ ID NO: 2894617 - DNA, 25 bp, Homo sapien
aggccctgccacaggacgaggggct

SEQ ID NO: 2894618 - DNA, 25 bp, Homo sapien
ccacaggacgaggggctcagccaat

SEQ ID NO: 2894619 - DNA, 25 bp, Homo sapien
caggacgaggggctcagccaatgtt

SEQ ID NO: 2894620 - DNA, 25 bp, Homo sapien
tgggggccggcaggccacacccttg

SEQ ID NO: 2894621 - DNA, 25 bp, Homo sapien
gccggcaggccacacccttggccct

SEQ ID NO: 2894622 - DNA, 25 bp, Homo sapien
ccctggtgtccagcaggtaccctga

SEQ ID NO: 2894623 - DNA, 25 bp, Homo sapien
tggtgtccagcaggtaccctgaccc

SEQ ID NO: 2894624 - DNA, 25 bp, Homo sapien
gcgcatgtctcaacatgcccagtaa

SEQ ID NO: 2894625 - DNA, 25 bp, Homo sapien
gggcggccagcgcatgtctcaacat

SEQ ID NO: 2894626 - DNA, 25 bp, Homo sapien
cataccgcccctcctcgaaagtggc

SEQ ID NO: 2894627 - DNA, 25 bp, Homo sapien
catgcccagtaagggcacagccatc

SEQ ID NO: 2894628 - DNA, 25 bp, Homo sapien
gaggtgtctttgatggccacgatca

SEQ ID NO: 2894629 - DNA, 25 bp, Homo sapien
gatcttcaaagggatggaggtgtct

SEQ ID NO: 2894630 - DNA, 25 bp, Homo sapien
ccgccgtggtccaggtacaggatgt

SEQ ID NO: 2894631 - DNA, 25 bp, Homo sapien
tacaggatgtgatgctcttcctcaa

SEQ ID NO: 2894632 - DNA, 25 bp, Homo sapien
tcagcagcccgtccacaaacaccga

SEQ ID NO: 2894633 - DNA, 25 bp, Homo sapien
tcatgaccagcgtctcgtcccctgg

SEQ ID NO: 2894634 - DNA, 25 bp, Homo sapien
agttgtgcgtgctccaggtgaggcc

SEQ ID NO: 2894635 - DNA, 25 bp, Homo sapien
gtgaagttgtgcgtgctccaggtga

SEQ ID NO: 2894636 - DNA, 25 bp, Homo sapien
gcagatgtccctgattcccaggtgg

SEQ ID NO: 2894637 - DNA, 25 bp, Homo sapien
gggcaggtggcagatgtccctgatt

SEQ ID NO: 2894638 - DNA, 25 bp, Homo sapien
ggcaggtggcagatgtccctgattc

SEQ ID NO: 2894639 - DNA, 25 bp, Homo sapien
ggtggcagatgtccctgattcccag

SEQ ID NO: 2894640 - DNA, 25 bp, Homo sapien
gctcaagaggtgccgtggccatggt

SEQ ID NO: 2894641 - DNA, 25 bp, Homo sapien
cggctcaagaggtgccgtggccatg

SEQ ID NO: 2894642 - DNA, 25 bp, Homo sapien
ggctcaagaggtgccgtggccatgg

SEQ ID NO: 2894643 - DNA, 25 bp, Homo sapien
ctcaagaggtgccgtggccatggtg

SEQ ID NO: 2894644 - DNA, 25 bp, Homo sapien
ccgagtgggcgagggtgaggggcac

SEQ ID NO: 2894645 - DNA, 25 bp, Homo sapien
gggaaatgggtagggcaggtcctgc

SEQ ID NO: 2894646 - DNA, 25 bp, Homo sapien
atggccactccagccgagtgggcga

SEQ ID NO: 2894647 - DNA, 25 bp, Homo sapien
tctgtgggaaatgggtagggcaggt

SEQ ID NO: 2894648 - DNA, 25 bp, Homo sapien
ctcagctggaactgatggcttcttg

SEQ ID NO: 2894649 - DNA, 25 bp, Homo sapien
gcaatctcagtttcccgaaacctgg

SEQ ID NO: 2894650 - DNA, 25 bp, Homo sapien
gctaaatccgacgtccagcttccat

SEQ ID NO: 2894651 - DNA, 25 bp, Homo sapien
tggcttcttgttgctaaatccgacg

SEQ ID NO: 2894652 - DNA, 25 bp, Homo sapien
ttgaccagctcccaatcggagcgga

SEQ ID NO: 2894653 - DNA, 25 bp, Homo sapien
aggagctgtagtcctcctcgccgca

SEQ ID NO: 2894654 - DNA, 25 bp, Homo sapien
agggccggaagtccaccttgaccag

SEQ ID NO: 2894655 - DNA, 25 bp, Homo sapien
caatcggagcggaagctgatgtggc

SEQ ID NO: 2894656 - DNA, 25 bp, Homo sapien
ctgcccgatcccagcctcatgccgg

SEQ ID NO: 2894657 - DNA, 25 bp, Homo sapien
cgatcccagcctcatgccggcccac

SEQ ID NO: 2894658 - DNA, 25 bp, Homo sapien
tgcccgatcccagcctcatgccggc

SEQ ID NO: 2894659 - DNA, 25 bp, Homo sapien
cccgatcccagcctcatgccggccc

SEQ ID NO: 2894660 - DNA, 25 bp, Homo sapien
acaggaagtccgagtcccggcactc

SEQ ID NO: 2894661 - DNA, 25 bp, Homo sapien
tgctggcccatgatacagcggtcgc

SEQ ID NO: 2894662 - DNA, 25 bp, Homo sapien
acgtgagcgccgacgtgaagctcct

SEQ ID NO: 2894663 - DNA, 25 bp, Homo sapien
tccccttgatgcaccaggacgtgga

SEQ ID NO: 2894664 - DNA, 25 bp, Homo sapien
ggaggagcgctcaaatccgtagtcg

SEQ ID NO: 2894665 - DNA, 25 bp, Homo sapien
ggctgctggtgtaggtctggcccag

SEQ ID NO: 2894666 - DNA, 25 bp, Homo sapien
ggcacagtcgtcaggcggggacaat

SEQ ID NO: 2894667 - DNA, 25 bp, Homo sapien
aagttggcagagcacttgttggtgc

SEQ ID NO: 2894668 - DNA, 25 bp, Homo sapien
gcctcgccttgaatgctgacctgca

SEQ ID NO: 2894669 - DNA, 25 bp, Homo sapien
accacaaacaggacgtcctctccag

SEQ ID NO: 2894670 - DNA, 25 bp, Homo sapien
ttgaatgctgacctgcaggccccgg

SEQ ID NO: 2894671 - DNA, 25 bp, Homo sapien
cacacgttggacaccactttccggt

SEQ ID NO: 2894672 - DNA, 25 bp, Homo sapien
gactgcactgccgagacgccaggct

SEQ ID NO: 2894673 - DNA, 25 bp, Homo sapien
gcggtggtagactggctcccataga

SEQ ID NO: 2894674 - DNA, 25 bp, Homo sapien
cagatgcgactgcactgccgagacg

SEQ ID NO: 2894675 - DNA, 25 bp, Homo sapien
catagagacactccgcagatgcgac

SEQ ID NO: 2894676 - DNA, 25 bp, Homo sapien
ctggtacttggtagtcaggacatca

SEQ ID NO: 2894677 - DNA, 25 bp, Homo sapien
ggtacttggtagtcaggacatcacc

SEQ ID NO: 2894678 - DNA, 25 bp, Homo sapien
tggtacttggtagtcaggacatcac

SEQ ID NO: 2894679 - DNA, 25 bp, Homo sapien
tctcgtagcggtgccggatgggctc

SEQ ID NO: 2894680 - DNA, 25 bp, Homo sapien
tggacaaagagcaccgcctcatcgt

SEQ ID NO: 2894681 - DNA, 25 bp, Homo sapien
atgggctccccggtcagtgtaaggt

SEQ ID NO: 2894682 - DNA, 25 bp, Homo sapien
ctgccgtgttctctgccctgacgga

SEQ ID NO: 2894683 - DNA, 25 bp, Homo sapien
aggctgtggccgatccaccagtaga

SEQ ID NO: 2894684 - DNA, 25 bp, Homo sapien
ccaccagtagaagacggtgaggtta

SEQ ID NO: 2894685 - DNA, 25 bp, Homo sapien
ggttagggttcaagggaagcagcac

SEQ ID NO: 2894686 - DNA, 25 bp, Homo sapien
gaggccaatgacaggaaccacctcc

SEQ ID NO: 2894687 - DNA, 25 bp, Homo sapien
tgcagcaccgagttcccacaggcgg

SEQ ID NO: 2894688 - DNA, 25 bp, Homo sapien
agcacacggaggaccctggagtcct

SEQ ID NO: 2894689 - DNA, 25 bp, Homo sapien
accgtcacacgcacgtcgcccgtgt

SEQ ID NO: 2894690 - DNA, 25 bp, Homo sapien
tccgaaaaccgcgttgtcacagaat

SEQ ID NO: 2894691 - DNA, 25 bp, Homo sapien
agagcagccgggtgaccaccaggcc

SEQ ID NO: 2894692 - DNA, 25 bp, Homo sapien
gggttgtaggcatccagctccttgg

SEQ ID NO: 2894693 - DNA, 25 bp, Homo sapien
agctccttggaaaactgcagaggca

SEQ ID NO: 2894694 - DNA, 25 bp, Homo sapien
cttccctccactcaggggtgttggg

SEQ ID NO: 2894695 - DNA, 25 bp, Homo sapien
aggagcacgtacagatcggccaaag

SEQ ID NO: 2894696 - DNA, 25 bp, Homo sapien
ggcaggagcacgtacagatcggcca

SEQ ID NO: 2894697 - DNA, 25 bp, Homo sapien
gaagctcctgagggacgctggtctc

SEQ ID NO: 2894698 - DNA, 25 bp, Homo sapien
gcacgtacagatcggccaaagtggg

SEQ ID NO: 2894699 - DNA, 25 bp, Homo sapien
cgttcagcacctgctggatggcggc

SEQ ID NO: 2894700 - DNA, 25 bp, Homo sapien
gactccgcctcgcaggaggaagctg

SEQ ID NO: 2894701 - DNA, 25 bp, Homo sapien
ccggactccgcctcgcaggaggaag

SEQ ID NO: 2894702 - DNA, 25 bp, Homo sapien
gaggaagctgatcttctgtgcgttc

SEQ ID NO: 2894703 - DNA, 25 bp, Homo sapien
attccgcaggggagctcccagtggc

SEQ ID NO: 2894704 - DNA, 25 bp, Homo sapien
ttccgcaggggagctcccagtggct

SEQ ID NO: 2894705 - DNA, 25 bp, Homo sapien
tccgcaggggagctcccagtggctc

SEQ ID NO: 2894706 - DNA, 25 bp, Homo sapien
gctcccgctgcgaagagcccgatga

SEQ ID NO: 2894707 - DNA, 25 bp, Homo sapien
tgcgaagagcccgatgacaaacagc

SEQ ID NO: 2894708 - DNA, 25 bp, Homo sapien
aagagcccgatgacaaacagcacca

SEQ ID NO: 2894709 - DNA, 25 bp, Homo sapien
aggatgaaggctcccgctgcgaaga

SEQ ID NO: 2894710 - DNA, 25 bp, Homo sapien
gcagaggagggcagccaagggcctt

SEQ ID NO: 2894711 - DNA, 25 bp, Homo sapien
agaggagggcagccaagggccttgc

SEQ ID NO: 2894712 - DNA, 25 bp, Homo sapien
tcagagccccgcagaggagggcagc

SEQ ID NO: 2894713 - DNA, 25 bp, Homo sapien
agagccccgcagaggagggcagcca

SEQ ID NO: 2894714 - DNA, 25 bp, Homo sapien
ctgagaggcacttgctgagccccat

SEQ ID NO: 2894715 - DNA, 25 bp, Homo sapien
attcccgcaggaggcacgagccggc

SEQ ID NO: 2894716 - DNA, 25 bp, Homo sapien
gcccagctctgagaggcacttgctg

SEQ ID NO: 2894717 - DNA, 25 bp, Homo sapien
acgagccggcccagctctgagaggc

SEQ ID NO: 2894718 - DNA, 25 bp, Homo sapien
cacaccgagtgtggtgcacggtgcc

SEQ ID NO: 2894719 - DNA, 25 bp, Homo sapien
ccgagtgtggtgcacggtgcccaca

SEQ ID NO: 2894720 - DNA, 25 bp, Homo sapien
caccgagtgtggtgcacggtgccca

SEQ ID NO: 2894721 - DNA, 25 bp, Homo sapien
gaccacaccgagtgtggtgcacggt

SEQ ID NO: 2894722 - DNA, 25 bp, Homo sapien
ggcgtacacggtcctgcctggccgt

SEQ ID NO: 2894723 - DNA, 25 bp, Homo sapien
ttgggcgtacacggtcctgcctggc

SEQ ID NO: 2894724 - DNA, 25 bp, Homo sapien
gtacacggtcctgcctggccgtttc

SEQ ID NO: 2894725 - DNA, 25 bp, Homo sapien
cgtacacggtcctgcctggccgttt

SEQ ID NO: 2894726 - DNA, 25 bp, Homo sapien
gacagcgccctggacgtcctcactg

SEQ ID NO: 2894727 - DNA, 25 bp, Homo sapien
ctggacgtcctcactgtgactcaca

SEQ ID NO: 2894728 - DNA, 25 bp, Homo sapien
ggacgtcctcactgtgactcacagg

SEQ ID NO: 2894729 - DNA, 25 bp, Homo sapien
agcgccctggacgtcctcactgtga

SEQ ID NO: 2894730 - DNA, 25 bp, Homo sapien
cgagtcgagatcatcatctataaac

SEQ ID NO: 2894731 - DNA, 25 bp, Homo sapien
tagagtctgcgagtcgagatcatca

SEQ ID NO: 2894732 - DNA, 25 bp, Homo sapien
ctgcgagtcgagatcatcatctata

SEQ ID NO: 2894733 - DNA, 25 bp, Homo sapien
tgcgagtcgagatcatcatctataa

SEQ ID NO: 2894734 - DNA, 25 bp, Homo sapien
ctgggccagcgttttgctggcccca

SEQ ID NO: 2894735 - DNA, 25 bp, Homo sapien
tgggccagcgttttgctggccccag

SEQ ID NO: 2894736 - DNA, 25 bp, Homo sapien
gccagcgttttgctggccccagcgg

SEQ ID NO: 2894737 - DNA, 25 bp, Homo sapien
ggccagcgttttgctggccccagcg

SEQ ID NO: 2894738 - DNA, 25 bp, Homo sapien
gggtggggcagacaggcctggtgag

SEQ ID NO: 2894739 - DNA, 25 bp, Homo sapien
ccgggggtggggcagacaggcctgg

SEQ ID NO: 2894740 - DNA, 25 bp, Homo sapien
caccgggggtggggcagacaggcct

SEQ ID NO: 2894741 - DNA, 25 bp, Homo sapien
gtggggcagacaggcctggtgaggg

SEQ ID NO: 2894742 - DNA, 25 bp, Homo sapien
tttccaagtctacagacgcatcacg

SEQ ID NO: 2894743 - DNA, 25 bp, Homo sapien
acgcatcacgccatgaggaacacac

SEQ ID NO: 2894744 - DNA, 25 bp, Homo sapien
gacgcatcacgccatgaggaacaca

SEQ ID NO: 2894745 - DNA, 25 bp, Homo sapien
tgtgatgtttccaagtctacagacg

SEQ ID NO: 2894746 - DNA, 25 bp, Homo sapien
gggatcgcccccggcatcggcagca

SEQ ID NO: 2894747 - DNA, 25 bp, Homo sapien
tggggatcgcccccggcatcggcag

SEQ ID NO: 2894748 - DNA, 25 bp, Homo sapien
ctgcgtggggatcgcccccggcatc

SEQ ID NO: 2894749 - DNA, 25 bp, Homo sapien
atcgcccccggcatcggcagcaagg

SEQ ID NO: 2894750 - DNA, 25 bp, Homo sapien
gtgggagtgaaggaacaaatgaatc

SEQ ID NO: 2894751 - DNA, 25 bp, Homo sapien
ggagtgaaggaacaaatgaatctgt

SEQ ID NO: 2894752 - DNA, 25 bp, Homo sapien
ccaagtgaggcagtgggagtgaagg

SEQ ID NO: 2894753 - DNA, 25 bp, Homo sapien
tagccaagtgaggcagtgggagtga

SEQ ID NO: 2894754 - DNA, 25 bp, Homo sapien
tcagaccccgaactagatgctatgg

SEQ ID NO: 2894755 - DNA, 25 bp, Homo sapien
taatagaggttagcaaacgcgtgca

SEQ ID NO: 2894756 - DNA, 25 bp, Homo sapien
cagcagccatttcctaagcgtttgt

SEQ ID NO: 2894757 - DNA, 25 bp, Homo sapien
tatgtcgcacgctaacaaggtggaa

SEQ ID NO: 2894758 - DNA, 25 bp, Homo sapien
tctgtaactggttttgatgagtttt

SEQ ID NO: 2894759 - DNA, 25 bp, Homo sapien
tgtaactggttttgatgagttttaa

SEQ ID NO: 2894760 - DNA, 25 bp, Homo sapien
tggttttgatgagttttaaacacca

SEQ ID NO: 2894761 - DNA, 25 bp, Homo sapien
aatctgtaactggttttgatgagtt

SEQ ID NO: 2894762 - DNA, 25 bp, Homo sapien
caagtatgtggattacagcgtgggt

SEQ ID NO: 2894763 - DNA, 25 bp, Homo sapien
tgcccctgcgttggaaatgccataa

SEQ ID NO: 2894764 - DNA, 25 bp, Homo sapien
gcaatgttagtagtacacccagcag

SEQ ID NO: 2894765 - DNA, 25 bp, Homo sapien
tagagtgttgcatattacggtagac

SEQ ID NO: 2894766 - DNA, 25 bp, Homo sapien
ccaaaatcaggatgtcggcaggctg

SEQ ID NO: 2894767 - DNA, 25 bp, Homo sapien
aagtctaggacaggaatcactggcc

SEQ ID NO: 2894768 - DNA, 25 bp, Homo sapien
ctggcacagtctttaacgtacggat

SEQ ID NO: 2894769 - DNA, 25 bp, Homo sapien
tcttgcacttacaggatcgaggtcc

SEQ ID NO: 2894770 - DNA, 25 bp, Homo sapien
tagagagaactcgtgctttatgcag

SEQ ID NO: 2894771 - DNA, 25 bp, Homo sapien
gagatgattacctccctcacgcagg

SEQ ID NO: 2894772 - DNA, 25 bp, Homo sapien
tggcctgcagtgaaacgaagtcaga

SEQ ID NO: 2894773 - DNA, 25 bp, Homo sapien
tgtatttacatgcatcctggcctgc

SEQ ID NO: 2894774 - DNA, 25 bp, Homo sapien
gccaggcacagtggtatgtgtctat

SEQ ID NO: 2894775 - DNA, 25 bp, Homo sapien
agtcccgtttactcggcaggctcag

SEQ ID NO: 2894776 - DNA, 25 bp, Homo sapien
aagtcagtttactcagtatgtttca

SEQ ID NO: 2894777 - DNA, 25 bp, Homo sapien
gcaacagtggctctgtccctaaata

SEQ ID NO: 2894778 - DNA, 25 bp, Homo sapien
ctccagagcgcgccgccacctcctt

SEQ ID NO: 2894779 - DNA, 25 bp, Homo sapien
gcgcgccgccacctccttggcggca

SEQ ID NO: 2894780 - DNA, 25 bp, Homo sapien
ccagagcgcgccgccacctccttgg

SEQ ID NO: 2894781 - DNA, 25 bp, Homo sapien
gagcgcgccgccacctccttggcgg

SEQ ID NO: 2894782 - DNA, 25 bp, Homo sapien
tgggccccgcggccgccgactgcag

SEQ ID NO: 2894783 - DNA, 25 bp, Homo sapien
ctgggccccgcggccgccgactgca

SEQ ID NO: 2894784 - DNA, 25 bp, Homo sapien
gattaaaggacagagcgtagtgaat

SEQ ID NO: 2894785 - DNA, 25 bp, Homo sapien
tcccagcttacattcaaccttggac

SEQ ID NO: 2894786 - DNA, 25 bp, Homo sapien
atcctcactcaggtagaggctcacg

SEQ ID NO: 2894787 - DNA, 25 bp, Homo sapien
agaccgatcagccggtgcacctcat

SEQ ID NO: 2894788 - DNA, 25 bp, Homo sapien
tactgataaagtgcgtagaacttct

SEQ ID NO: 2894789 - DNA, 25 bp, Homo sapien
tcagggccatttttggtgcacattt

SEQ ID NO: 2894790 - DNA, 25 bp, Homo sapien
gtcagggccatttttggtgcacatt

SEQ ID NO: 2894791 - DNA, 25 bp, Homo sapien
taatattattgctacgagaaatatt

SEQ ID NO: 2894792 - DNA, 25 bp, Homo sapien
tattgctacgagaaatattactgca

SEQ ID NO: 2894793 - DNA, 25 bp, Homo sapien
tattattgctacgagaaatattact

SEQ ID NO: 2894794 - DNA, 25 bp, Homo sapien
ttgctacgagaaatattactgcaca

SEQ ID NO: 2894795 - DNA, 25 bp, Homo sapien
tgtcatccagttcaacccttttcat

SEQ ID NO: 2894796 - DNA, 25 bp, Homo sapien
ggaactcctgctggcactaatgctg

SEQ ID NO: 2894797 - DNA, 25 bp, Homo sapien
ctgggtggatggctgagacaaccct

SEQ ID NO: 2894798 - DNA, 25 bp, Homo sapien
tgagacaacccttgggaactcctgc

SEQ ID NO: 2894799 - DNA, 25 bp, Homo sapien
aagagtgacacttctcaagtcgttc

SEQ ID NO: 2894800 - DNA, 25 bp, Homo sapien
tctctatccgcaaggtaggataacc

SEQ ID NO: 2894801 - DNA, 25 bp, Homo sapien
tcaagtcgttcttctctatccgcaa

SEQ ID NO: 2894802 - DNA, 25 bp, Homo sapien
tggcctccaaaagagtgacacttct

SEQ ID NO: 2894803 - DNA, 25 bp, Homo sapien
ttttattagagttatcctgtccctg

SEQ ID NO: 2894804 - DNA, 25 bp, Homo sapien
tttattagagttatcctgtccctgg

SEQ ID NO: 2894805 - DNA, 25 bp, Homo sapien
ttattagagttatcctgtccctgga

SEQ ID NO: 2894806 - DNA, 25 bp, Homo sapien
caagtgaagattccctcagttcatg

SEQ ID NO: 2894807 - DNA, 25 bp, Homo sapien
cagttcatgtaaggcagtgtcacca

SEQ ID NO: 2894808 - DNA, 25 bp, Homo sapien
ctttgcagcttacgactttcagtga

SEQ ID NO: 2894809 - DNA, 25 bp, Homo sapien
ggcttttctcgtatacacccatgag

SEQ ID NO: 2894810 - DNA, 25 bp, Homo sapien
gattattggcctctactaacttgca

SEQ ID NO: 2894811 - DNA, 25 bp, Homo sapien
tggattattggcctctactaacttg

SEQ ID NO: 2894812 - DNA, 25 bp, Homo sapien
ctgtggattattggcctctactaac

SEQ ID NO: 2894813 - DNA, 25 bp, Homo sapien
tgtggattattggcctctactaact

SEQ ID NO: 2894814 - DNA, 25 bp, Homo sapien
tccacaggcaatctgaatagccatg

SEQ ID NO: 2894815 - DNA, 25 bp, Homo sapien
tctgaatagccatgtgtaccaggtc

SEQ ID NO: 2894816 - DNA, 25 bp, Homo sapien
gcaatctgaatagccatgtgtacca

SEQ ID NO: 2894817 - DNA, 25 bp, Homo sapien
gaatagccatgtgtaccaggtcttg

SEQ ID NO: 2894818 - DNA, 25 bp, Homo sapien
tcagtgatacagttcctagcagcca

SEQ ID NO: 2894819 - DNA, 25 bp, Homo sapien
tgtgtcatcagtgatacagttccta

SEQ ID NO: 2894820 - DNA, 25 bp, Homo sapien
tgaagtgtgtcatcagtgatacagt

SEQ ID NO: 2894821 - DNA, 25 bp, Homo sapien
catcagtgatacagttcctagcagc

SEQ ID NO: 2894822 - DNA, 25 bp, Homo sapien
ttaaccagactttcaagagccatcc

SEQ ID NO: 2894823 - DNA, 25 bp, Homo sapien
ttcattgtcccccagacagtgatag

SEQ ID NO: 2894824 - DNA, 25 bp, Homo sapien
tattaaccagactttcaagagccat

SEQ ID NO: 2894825 - DNA, 25 bp, Homo sapien
accagactttcaagagccatccaac

SEQ ID NO: 2894826 - DNA, 25 bp, Homo sapien
ggtcagtgtccatgtagggcgtctg

SEQ ID NO: 2894827 - DNA, 25 bp, Homo sapien
tcagtgtccatgtagggcgtctggc

SEQ ID NO: 2894828 - DNA, 25 bp, Homo sapien
gtgtccatgtagggcgtctggccca

SEQ ID NO: 2894829 - DNA, 25 bp, Homo sapien
cagtgtccatgtagggcgtctggcc

SEQ ID NO: 2894830 - DNA, 25 bp, Homo sapien
ctaaagcattgctgaggcacagtgt

SEQ ID NO: 2894831 - DNA, 25 bp, Homo sapien
ccatgacaggcacctttctcctgat

SEQ ID NO: 2894832 - DNA, 25 bp, Homo sapien
ctgtgggattgcgagagaagagtca

SEQ ID NO: 2894833 - DNA, 25 bp, Homo sapien
acaaagcatccatgacaggcacctt

SEQ ID NO: 2894834 - DNA, 25 bp, Homo sapien
caagacaaaccaggtatctttttat

SEQ ID NO: 2894835 - DNA, 25 bp, Homo sapien
cttgtacaagacaaaccaggtatct

SEQ ID NO: 2894836 - DNA, 25 bp, Homo sapien
ccttttcttgtacaagacaaaccag

SEQ ID NO: 2894837 - DNA, 25 bp, Homo sapien
aagacaaaccaggtatctttttatg

SEQ ID NO: 2894838 - DNA, 25 bp, Homo sapien
tggttgggaaagctatcccctgaag

SEQ ID NO: 2894839 - DNA, 25 bp, Homo sapien
gaaagctatcccctgaagcaccatc

SEQ ID NO: 2894840 - DNA, 25 bp, Homo sapien
cactctggttgggaaagctatcccc

SEQ ID NO: 2894841 - DNA, 25 bp, Homo sapien
cttttcactctggttgggaaagcta

SEQ ID NO: 2894842 - DNA, 25 bp, Homo sapien
tccggagcgcggttcctatgacaac

SEQ ID NO: 2894843 - DNA, 25 bp, Homo sapien
tctccttaggaaatcgaaactgctg

SEQ ID NO: 2894844 - DNA, 25 bp, Homo sapien
gagacttggtgattccgttccgcac

SEQ ID NO: 2894845 - DNA, 25 bp, Homo sapien
gcacttctcgcgaggttgcaggcag

SEQ ID NO: 2894846 - DNA, 25 bp, Homo sapien
tctcatgggacagggctaataaccg

SEQ ID NO: 2894847 - DNA, 25 bp, Homo sapien
gatgtgttgagaccggtgcttgacc

SEQ ID NO: 2894848 - DNA, 25 bp, Homo sapien
tcttctaagacataggagctgcaca

SEQ ID NO: 2894849 - DNA, 25 bp, Homo sapien
gatgtgtgtaatctggctgccaacg

SEQ ID NO: 2894850 - DNA, 25 bp, Homo sapien
gccaggcatgagtgcgtctccacat

SEQ ID NO: 2894851 - DNA, 25 bp, Homo sapien
tccaagttctcgtagaggcatatag

SEQ ID NO: 2894852 - DNA, 25 bp, Homo sapien
tcatcagtgtgaggcgattcctctc

SEQ ID NO: 2894853 - DNA, 25 bp, Homo sapien
tagtactgtgatcacgtgggtgtca

SEQ ID NO: 2894854 - DNA, 25 bp, Homo sapien
acaacttcagcaaatggtaaaatga

SEQ ID NO: 2894855 - DNA, 25 bp, Homo sapien
tgtgattaatgtttgagcttcaata

SEQ ID NO: 2894856 - DNA, 25 bp, Homo sapien
cgtcactaacaatagtacacttgga

SEQ ID NO: 2894857 - DNA, 25 bp, Homo sapien
tgctatttgacgtatagatcccgtc

SEQ ID NO: 2894858 - DNA, 25 bp, Homo sapien
aaaggattcctttaagcatgtcaga

SEQ ID NO: 2894859 - DNA, 25 bp, Homo sapien
ttgatcccagtcattacccctgaga

SEQ ID NO: 2894860 - DNA, 25 bp, Homo sapien
cttcgaaggagtcatcactaggtgc

SEQ ID NO: 2894861 - DNA, 25 bp, Homo sapien
ggccgttgtgagctcttgatcccag

SEQ ID NO: 2894862 - DNA, 25 bp, Homo sapien
ctcatggtagaagacgacgagcagc

SEQ ID NO: 2894863 - DNA, 25 bp, Homo sapien
aaaaagtcagcggattggtgacgga

SEQ ID NO: 2894864 - DNA, 25 bp, Homo sapien
cgacgagcagcacggtcccagtgtg

SEQ ID NO: 2894865 - DNA, 25 bp, Homo sapien
caggagtacactgggtggctgtgta

SEQ ID NO: 2894866 - DNA, 25 bp, Homo sapien
tcacattttgttagtgtttatacct

SEQ ID NO: 2894867 - DNA, 25 bp, Homo sapien
ttagtacccttatgttctaattcag

SEQ ID NO: 2894868 - DNA, 25 bp, Homo sapien
ccttgtcctatatagagattattag

SEQ ID NO: 2894869 - DNA, 25 bp, Homo sapien
gttagtgtttataccttgtcctata

SEQ ID NO: 2894870 - DNA, 25 bp, Homo sapien
catggtgttcacctgcctgttccgt

SEQ ID NO: 2894871 - DNA, 25 bp, Homo sapien
tgcctgttccgtttatcctgagtct

SEQ ID NO: 2894872 - DNA, 25 bp, Homo sapien
ttccgtttatcctgagtctgaaggg

SEQ ID NO: 2894873 - DNA, 25 bp, Homo sapien
tggtgttcacctgcctgttccgttt

SEQ ID NO: 2894874 - DNA, 25 bp, Homo sapien
tagccatgctaaattgttggagtcc

SEQ ID NO: 2894875 - DNA, 25 bp, Homo sapien
catgtttaccgtacttccaattcta

SEQ ID NO: 2894876 - DNA, 25 bp, Homo sapien
ttcatgtttaccgtacttccaattc

SEQ ID NO: 2894877 - DNA, 25 bp, Homo sapien
ttctagccatgctaaattgttggag

SEQ ID NO: 2894878 - DNA, 25 bp, Homo sapien
gcaagcgatgaataggagattccca

SEQ ID NO: 2894879 - DNA, 25 bp, Homo sapien
acaagagtggctgcaaccacacgca

SEQ ID NO: 2894880 - DNA, 25 bp, Homo sapien
ggtgtgggagctgataacgacatat

SEQ ID NO: 2894881 - DNA, 25 bp, Homo sapien
cgtgtcatccactgggagcccaaat

SEQ ID NO: 2894882 - DNA, 25 bp, Homo sapien
tgttaaagtgtaccactcagtggtg

SEQ ID NO: 2894883 - DNA, 25 bp, Homo sapien
gaacagatttctacccttgcacaga

SEQ ID NO: 2894884 - DNA, 25 bp, Homo sapien
tcgatctagctttcagacgttctca

SEQ ID NO: 2894885 - DNA, 25 bp, Homo sapien
taacttagcctgatgttactgagct

SEQ ID NO: 2894886 - DNA, 25 bp, Homo sapien
cacttcggagatatgaaatgcacat

SEQ ID NO: 2894887 - DNA, 25 bp, Homo sapien
gaaatgcacattgctgttgccacag

SEQ ID NO: 2894888 - DNA, 25 bp, Homo sapien
tcctgtttctctcctttcacctcca

SEQ ID NO: 2894889 - DNA, 25 bp, Homo sapien
caaattctcctgtttctctcctttc

SEQ ID NO: 2894890 - DNA, 25 bp, Homo sapien
cctgtttctctcctttcacctccat

SEQ ID NO: 2894891 - DNA, 25 bp, Homo sapien
ttctcctgtttctctcctttcacct

SEQ ID NO: 2894892 - DNA, 25 bp, Homo sapien
tttgatgaattcgtatgccttctta

SEQ ID NO: 2894893 - DNA, 25 bp, Homo sapien
cattttgatgaattcgtatgccttc

SEQ ID NO: 2894894 - DNA, 25 bp, Homo sapien
tcattttgatgaattcgtatgcctt

SEQ ID NO: 2894895 - DNA, 25 bp, Homo sapien
gatgaattcgtatgccttcttaggt

SEQ ID NO: 2894896 - DNA, 25 bp, Homo sapien
cagagtaatgacacagtccgtctgt

SEQ ID NO: 2894897 - DNA, 25 bp, Homo sapien
gacacagtccgtctgtattttagga

SEQ ID NO: 2894898 - DNA, 25 bp, Homo sapien
taatggtgctgtctttgggtgtggg

SEQ ID NO: 2894899 - DNA, 25 bp, Homo sapien
tgctgtctttgggtgtgggccacgt

SEQ ID NO: 2894900 - DNA, 25 bp, Homo sapien
agtttgatgcccattttgtgtacta

SEQ ID NO: 2894901 - DNA, 25 bp, Homo sapien
ctcttaaatcagcaagtttgatgcc

SEQ ID NO: 2894902 - DNA, 25 bp, Homo sapien
ttgtgtactattgggatgctgtttt

SEQ ID NO: 2894903 - DNA, 25 bp, Homo sapien
ttatgcagatctaatgctgtctctt

SEQ ID NO: 2894904 - DNA, 25 bp, Homo sapien
actatagatagaaaacagcttgctt

SEQ ID NO: 2894905 - DNA, 25 bp, Homo sapien
tgccagggacttggagaaacttgaa

SEQ ID NO: 2894906 - DNA, 25 bp, Homo sapien
tcactacttacctgttagaatagtt

SEQ ID NO: 2894907 - DNA, 25 bp, Homo sapien
caaattgaaatcaccgtaagatatc

SEQ ID NO: 2894908 - DNA, 25 bp, Homo sapien
tacctgattaaagactgttaagagg

SEQ ID NO: 2894909 - DNA, 25 bp, Homo sapien
tttcaacttgatgccaaaagcatga

SEQ ID NO: 2894910 - DNA, 25 bp, Homo sapien
tttacctgattaaagactgttaaga

SEQ ID NO: 2894911 - DNA, 25 bp, Homo sapien
caacttgatgccaaaagcatgagcc

SEQ ID NO: 2894912 - DNA, 25 bp, Homo sapien
tatatccactgcttcaatccagagg

SEQ ID NO: 2894913 - DNA, 25 bp, Homo sapien
caatccagaggctgtatttgaccct

SEQ ID NO: 2894914 - DNA, 25 bp, Homo sapien
tcttctggcctcttcgctcctatat

SEQ ID NO: 2894915 - DNA, 25 bp, Homo sapien
tgaccctctgcgacctctttgtcat

SEQ ID NO: 2894916 - DNA, 25 bp, Homo sapien
tggaatgctcgtccccagaatcatc

SEQ ID NO: 2894917 - DNA, 25 bp, Homo sapien
caaaggccttccctattttatctag

SEQ ID NO: 2894918 - DNA, 25 bp, Homo sapien
tagcagctgataattctcaattgag

SEQ ID NO: 2894919 - DNA, 25 bp, Homo sapien
taccactgggctttagcagtaacca

SEQ ID NO: 2894920 - DNA, 25 bp, Homo sapien
gggccacctctgaggatctctgggt

SEQ ID NO: 2894921 - DNA, 25 bp, Homo sapien
ctctgggtccatccggctgctcggc

SEQ ID NO: 2894922 - DNA, 25 bp, Homo sapien
gggggagctgcagagccctccttgc

SEQ ID NO: 2894923 - DNA, 25 bp, Homo sapien
agagccctccttgccctcaccaaga

SEQ ID NO: 2894924 - DNA, 25 bp, Homo sapien
cttgtcctgacagccccttgggact

SEQ ID NO: 2894925 - DNA, 25 bp, Homo sapien
tcaccaagaaaccaggaggcccaga

SEQ ID NO: 2894926 - DNA, 25 bp, Homo sapien
tctaagctgagaaccttcactaagg

SEQ ID NO: 2894927 - DNA, 25 bp, Homo sapien
cgtccaccaagagacgctccaagaa

SEQ ID NO: 2894928 - DNA, 25 bp, Homo sapien
aagtcccaggtctgatgcccggtgg

SEQ ID NO: 2894929 - DNA, 25 bp, Homo sapien
caggtggcgctgaagtctaagctga

SEQ ID NO: 2894930 - DNA, 25 bp, Homo sapien
tgaccacccacatggggtctacagt

SEQ ID NO: 2894931 - DNA, 25 bp, Homo sapien
gttcaagatcatccatgcgcacgtg

SEQ ID NO: 2894932 - DNA, 25 bp, Homo sapien
gggtctacagttggtgaatgaaggg

SEQ ID NO: 2894933 - DNA, 25 bp, Homo sapien
tcatccatgcgcacgtgcaggcggt

SEQ ID NO: 2894934 - DNA, 25 bp, Homo sapien
tggtgacgatgatgacgaggtcctt

SEQ ID NO: 2894935 - DNA, 25 bp, Homo sapien
gagtgtagagtattgttattgtggt

SEQ ID NO: 2894936 - DNA, 25 bp, Homo sapien
tcatgtgacaaacagagtgtagagt

SEQ ID NO: 2894937 - DNA, 25 bp, Homo sapien
ttattgtggtggtgacgatgatgac

SEQ ID NO: 2894938 - DNA, 25 bp, Homo sapien
gactggcgccaggatgaagcaacat

SEQ ID NO: 2894939 - DNA, 25 bp, Homo sapien
gctcttggcctgagactggcgccag

SEQ ID NO: 2894940 - DNA, 25 bp, Homo sapien
cattagctcagcacgaagtcacttc

SEQ ID NO: 2894941 - DNA, 25 bp, Homo sapien
gatgaagcaacattagctcagcacg

SEQ ID NO: 2894942 - DNA, 25 bp, Homo sapien
agggcactccgctgacatcccccca

SEQ ID NO: 2894943 - DNA, 25 bp, Homo sapien
ggcactccgctgacatccccccagc

SEQ ID NO: 2894944 - DNA, 25 bp, Homo sapien
aggctcagggcactccgctgacatc

SEQ ID NO: 2894945 - DNA, 25 bp, Homo sapien
cactccgctgacatccccccagcca

SEQ ID NO: 2894946 - DNA, 25 bp, Homo sapien
atgtagcagaggacggcggcagcca

SEQ ID NO: 2894947 - DNA, 25 bp, Homo sapien
gatgaaccagttcatgtaattcagg

SEQ ID NO: 2894948 - DNA, 25 bp, Homo sapien
tcatgtaattcaggaggttgatgta

SEQ ID NO: 2894949 - DNA, 25 bp, Homo sapien
ggttgatgtagcagaggacggcggc

SEQ ID NO: 2894950 - DNA, 25 bp, Homo sapien
ctcctcaaagacgatgaccaggtct

SEQ ID NO: 2894951 - DNA, 25 bp, Homo sapien
gctcctcaaagacgatgaccaggtc

SEQ ID NO: 2894952 - DNA, 25 bp, Homo sapien
agctcctcaaagacgatgaccaggt

SEQ ID NO: 2894953 - DNA, 25 bp, Homo sapien
tcctcaaagacgatgaccaggtctg

SEQ ID NO: 2894954 - DNA, 25 bp, Homo sapien
cccagatgctcagcacggtttcact

SEQ ID NO: 2894955 - DNA, 25 bp, Homo sapien
gcacggtttcacttctccaggtctc

SEQ ID NO: 2894956 - DNA, 25 bp, Homo sapien
tctctatccccacagtaaccacagc

SEQ ID NO: 2894957 - DNA, 25 bp, Homo sapien
cctttcttgcacatacagaggaagt

SEQ ID NO: 2894958 - DNA, 25 bp, Homo sapien
ggacagtgctcaggaaacgggaagt

SEQ ID NO: 2894959 - DNA, 25 bp, Homo sapien
gggacagtgctcaggaaacgggaag

SEQ ID NO: 2894960 - DNA, 25 bp, Homo sapien
caggaaacgggaagtagccctcctg

SEQ ID NO: 2894961 - DNA, 25 bp, Homo sapien
ctggaaaacctcctgtatatccagc

SEQ ID NO: 2894962 - DNA, 25 bp, Homo sapien
aaacctcctgtatatccagcagcac

SEQ ID NO: 2894963 - DNA, 25 bp, Homo sapien
ggaaaacctcctgtatatccagcag

SEQ ID NO: 2894964 - DNA, 25 bp, Homo sapien
gaaaacctcctgtatatccagcagc

SEQ ID NO: 2894965 - DNA, 25 bp, Homo sapien
acacaggggcagcctggatcccccc

SEQ ID NO: 2894966 - DNA, 25 bp, Homo sapien
aggagacacacaggggcagcctgga

SEQ ID NO: 2894967 - DNA, 25 bp, Homo sapien
ctgaaggagacacacaggggcagcc

SEQ ID NO: 2894968 - DNA, 25 bp, Homo sapien
gacacacaggggcagcctggatccc

SEQ ID NO: 2894969 - DNA, 25 bp, Homo sapien
ttgcggctatgtcggtcgcccaggt

SEQ ID NO: 2894970 - DNA, 25 bp, Homo sapien
caagataccgaagctcatggtagcc

SEQ ID NO: 2894971 - DNA, 25 bp, Homo sapien
ctgaccacagcaagataccgaagct

SEQ ID NO: 2894972 - DNA, 25 bp, Homo sapien
tcatggtagccttgcggctatgtcg

SEQ ID NO: 2894973 - DNA, 25 bp, Homo sapien
tcacgaagaggtcgcccaggacggt

SEQ ID NO: 2894974 - DNA, 25 bp, Homo sapien
gatggtggagtagctggccgagcca

SEQ ID NO: 2894975 - DNA, 25 bp, Homo sapien
acgcgggtgcgctggtccctcacga

SEQ ID NO: 2894976 - DNA, 25 bp, Homo sapien
tagaagacagccagcacgcgggtgc

SEQ ID NO: 2894977 - DNA, 25 bp, Homo sapien
tcactgaggaaagtaagccacgtga

SEQ ID NO: 2894978 - DNA, 25 bp, Homo sapien
atggaaacacataccctacaccctc

SEQ ID NO: 2894979 - DNA, 25 bp, Homo sapien
tctctgcaggctcagacctgtttca

SEQ ID NO: 2894980 - DNA, 25 bp, Homo sapien
aggcggaaggcagaccccaccacca

SEQ ID NO: 2894981 - DNA, 25 bp, Homo sapien
tgcaacaaaggggcaggggcgatgg

SEQ ID NO: 2894982 - DNA, 25 bp, Homo sapien
ctgcaacaaaggggcaggggcgatg

SEQ ID NO: 2894983 - DNA, 25 bp, Homo sapien
gcaacaaaggggcaggggcgatggg

SEQ ID NO: 2894984 - DNA, 25 bp, Homo sapien
agcatcgtcacagccgaccccagca

SEQ ID NO: 2894985 - DNA, 25 bp, Homo sapien
agtcagcatcgtcacagccgacccc

SEQ ID NO: 2894986 - DNA, 25 bp, Homo sapien
ttcccagtcagcatcgtcacagccg

SEQ ID NO: 2894987 - DNA, 25 bp, Homo sapien
cgtcacagccgaccccagcacgtag

SEQ ID NO: 2894988 - DNA, 25 bp, Homo sapien
ctccccctgtgtctcggcagctccc

SEQ ID NO: 2894989 - DNA, 25 bp, Homo sapien
gggtgggtctggaaccagcaggata

SEQ ID NO: 2894990 - DNA, 25 bp, Homo sapien
gggtctggaaccagcaggataagca

SEQ ID NO: 2894991 - DNA, 25 bp, Homo sapien
tttccccaggtatctgacgtcctca

SEQ ID NO: 2894992 - DNA, 25 bp, Homo sapien
gagggctgtgaacactgggacaacc

SEQ ID NO: 2894993 - DNA, 25 bp, Homo sapien
gggctgtgaacactgggacaaccag

SEQ ID NO: 2894994 - DNA, 25 bp, Homo sapien
aacactgggacaaccagggagggct

SEQ ID NO: 2894995 - DNA, 25 bp, Homo sapien
gctgtgaacactgggacaaccaggg

SEQ ID NO: 2894996 - DNA, 25 bp, Homo sapien
catggcggtcactccgagggtcgac

SEQ ID NO: 2894997 - DNA, 25 bp, Homo sapien
gagggtcgaccacacgaaactccag

SEQ ID NO: 2894998 - DNA, 25 bp, Homo sapien
tccagtcacaaaggccatggcggtc

SEQ ID NO: 2894999 - DNA, 25 bp, Homo sapien
cgcgtgcctcgagcagaaacttggg

SEQ ID NO: 2895000 - DNA, 25 bp, Homo sapien
caatgacgccggtcatgatggtcag

SEQ ID NO: 2895001 - DNA, 25 bp, Homo sapien
catgatggtcagtgccccaaaaatc

SEQ ID NO: 2895002 - DNA, 25 bp, Homo sapien
caggacgagagccaggtagaggcag

SEQ ID NO: 2895003 - DNA, 25 bp, Homo sapien
agatgaccccaatgacgccggtcat

SEQ ID NO: 2895004 - DNA, 25 bp, Homo sapien
catcctgggctgacccttgatgaca

SEQ ID NO: 2895005 - DNA, 25 bp, Homo sapien
tgatgacagctatggtggaccacgt

SEQ ID NO: 2895006 - DNA, 25 bp, Homo sapien
ctatggtggaccacgtcctggctga

SEQ ID NO: 2895007 - DNA, 25 bp, Homo sapien
gcatcctgggctgacccttgatgac

SEQ ID NO: 2895008 - DNA, 25 bp, Homo sapien
gctgcaccgtctggcacgctttgtc

SEQ ID NO: 2895009 - DNA, 25 bp, Homo sapien
cgtctggcacgctttgtccctggac

SEQ ID NO: 2895010 - DNA, 25 bp, Homo sapien
tgctgcaccgtctggcacgctttgt

SEQ ID NO: 2895011 - DNA, 25 bp, Homo sapien
caccgtctggcacgctttgtccctg

SEQ ID NO: 2895012 - DNA, 25 bp, Homo sapien
gacgatctctttgcctgagccagtc

SEQ ID NO: 2895013 - DNA, 25 bp, Homo sapien
ggacgatctctttgcctgagccagt

SEQ ID NO: 2895014 - DNA, 25 bp, Homo sapien
ctctttgcctgagccagtcaggaca

SEQ ID NO: 2895015 - DNA, 25 bp, Homo sapien
tttgcctgagccagtcaggacacag

SEQ ID NO: 2895016 - DNA, 25 bp, Homo sapien
agatcccagtcaccaaccccacctg

SEQ ID NO: 2895017 - DNA, 25 bp, Homo sapien
atcccagtcaccaaccccacctgtt

SEQ ID NO: 2895018 - DNA, 25 bp, Homo sapien
gatcccagtcaccaaccccacctgt

SEQ ID NO: 2895019 - DNA, 25 bp, Homo sapien
agcaggatgtcggcaaccactgccc

SEQ ID NO: 2895020 - DNA, 25 bp, Homo sapien
gcccagttgcaggacagaagcagct

SEQ ID NO: 2895021 - DNA, 25 bp, Homo sapien
gcaggatgtcggcaaccactgccca

SEQ ID NO: 2895022 - DNA, 25 bp, Homo sapien
actgcccagttgcaggacagaagca

SEQ ID NO: 2895023 - DNA, 25 bp, Homo sapien
tatcgttattcgtctgctacctgga

SEQ ID NO: 2895024 - DNA, 25 bp, Homo sapien
cagatccccactcgctagctgtgtg

SEQ ID NO: 2895025 - DNA, 25 bp, Homo sapien
ggtgtcacacactcaggttccgatc

SEQ ID NO: 2895026 - DNA, 25 bp, Homo sapien
taacgctctgagacaggatgctcca

SEQ ID NO: 2895027 - DNA, 25 bp, Homo sapien
ccaagtgagggcacccttgcctgct

SEQ ID NO: 2895028 - DNA, 25 bp, Homo sapien
ctgcaaaacataggcacagcagggg

SEQ ID NO: 2895029 - DNA, 25 bp, Homo sapien
caagtgagggcacccttgcctgctg

SEQ ID NO: 2895030 - DNA, 25 bp, Homo sapien
aaaacataggcacagcaggggggca

SEQ ID NO: 2895031 - DNA, 25 bp, Homo sapien
atgtggcccaccgtgatctgaagtg

SEQ ID NO: 2895032 - DNA, 25 bp, Homo sapien
aggatgtggcccaccgtgatctgaa

SEQ ID NO: 2895033 - DNA, 25 bp, Homo sapien
aagtcctgtgagataggggctgcca

SEQ ID NO: 2895034 - DNA, 25 bp, Homo sapien
gcccaccgtgatctgaagtgcctct

SEQ ID NO: 2895035 - DNA, 25 bp, Homo sapien
gtacagcgcagtcagcaggaagcag

SEQ ID NO: 2895036 - DNA, 25 bp, Homo sapien
gcggaagcgctgcagataggagtca

SEQ ID NO: 2895037 - DNA, 25 bp, Homo sapien
gcctggcccgcaggacactagagat

SEQ ID NO: 2895038 - DNA, 25 bp, Homo sapien
atgacaaaggcgcagcacaggaagc

SEQ ID NO: 2895039 - DNA, 25 bp, Homo sapien
tcagggctcctctgtagaggcgcca

SEQ ID NO: 2895040 - DNA, 25 bp, Homo sapien
gccagcgcccgaaagtaggccttgt

SEQ ID NO: 2895041 - DNA, 25 bp, Homo sapien
aagtaggccttgtctctccaggtcg

SEQ ID NO: 2895042 - DNA, 25 bp, Homo sapien
gtcgttgctgtccacatcattgctg

SEQ ID NO: 2895043 - DNA, 25 bp, Homo sapien
tcaaaagtggcagatgtgcctcagc

SEQ ID NO: 2895044 - DNA, 25 bp, Homo sapien
aatccatgggctttgtactggcctc

SEQ ID NO: 2895045 - DNA, 25 bp, Homo sapien
aggcctcccacgcagagtgctgaca

SEQ ID NO: 2895046 - DNA, 25 bp, Homo sapien
tctccagccgggaattcaaaagtgg

SEQ ID NO: 2895047 - DNA, 25 bp, Homo sapien
cttgtaacttgaagggctgcctgtt

SEQ ID NO: 2895048 - DNA, 25 bp, Homo sapien
ttgagtcacggtcaagggcctggct

SEQ ID NO: 2895049 - DNA, 25 bp, Homo sapien
gggcttgttgcagccaacagggagg

SEQ ID NO: 2895050 - DNA, 25 bp, Homo sapien
taagctccaagcattgagtcacggt

SEQ ID NO: 2895051 - DNA, 25 bp, Homo sapien
ccacgcccaggtatgttttggtatt

SEQ ID NO: 2895052 - DNA, 25 bp, Homo sapien
gtggtgccatctcccttcacgacga

SEQ ID NO: 2895053 - DNA, 25 bp, Homo sapien
accacgcccaggtatgttttggtat

SEQ ID NO: 2895054 - DNA, 25 bp, Homo sapien
atctcccttcacgacgaactccacc

SEQ ID NO: 2895055 - DNA, 25 bp, Homo sapien
ccctgatgggcacccgccgatacca

SEQ ID NO: 2895056 - DNA, 25 bp, Homo sapien
agggctggagtctgattcactgctg

SEQ ID NO: 2895057 - DNA, 25 bp, Homo sapien
tgggcacccgccgataccaatgcat

SEQ ID NO: 2895058 - DNA, 25 bp, Homo sapien
tgatgggcacccgccgataccaatg

SEQ ID NO: 2895059 - DNA, 25 bp, Homo sapien
ataggtgtgccacacttgcctgtcc

SEQ ID NO: 2895060 - DNA, 25 bp, Homo sapien
gcttctggggcacggaagcccttac

SEQ ID NO: 2895061 - DNA, 25 bp, Homo sapien
cacggaagcccttactctgcccata

SEQ ID NO: 2895062 - DNA, 25 bp, Homo sapien
aggtgtgccacacttgcctgtcctg

SEQ ID NO: 2895063 - DNA, 25 bp, Homo sapien
aatagctagcatacccccatgtggc

SEQ ID NO: 2895064 - DNA, 25 bp, Homo sapien
tgttggtattggttccaatagctag

SEQ ID NO: 2895065 - DNA, 25 bp, Homo sapien
gtggccacacgccaacatggtgatg

SEQ ID NO: 2895066 - DNA, 25 bp, Homo sapien
acacgcacacagagatacctccatg

SEQ ID NO: 2895067 - DNA, 25 bp, Homo sapien
tctccaaacacgagatccatatgca

SEQ ID NO: 2895068 - DNA, 25 bp, Homo sapien
catccatgtgactatgacaccccaa

SEQ ID NO: 2895069 - DNA, 25 bp, Homo sapien
tcatccacactgtcgccaagcagaa

SEQ ID NO: 2895070 - DNA, 25 bp, Homo sapien
tgtaccttaggctcagcacatttga

SEQ ID NO: 2895071 - DNA, 25 bp, Homo sapien
cagaacctagacctccaccagtcat

SEQ ID NO: 2895072 - DNA, 25 bp, Homo sapien
ccagaacctagacctccaccagtca

SEQ ID NO: 2895073 - DNA, 25 bp, Homo sapien
ggcccagaacctagacctccaccag

SEQ ID NO: 2895074 - DNA, 25 bp, Homo sapien
ggagggcccagaacctagacctcca

SEQ ID NO: 2895075 - DNA, 25 bp, Homo sapien
gcgctgccaccgctcagctcgctgc

SEQ ID NO: 2895076 - DNA, 25 bp, Homo sapien
gtcgggccccgtcggctcctgcgct

SEQ ID NO: 2895077 - DNA, 25 bp, Homo sapien
ctgcgcctcgttcgccgccgcggct

SEQ ID NO: 2895078 - DNA, 25 bp, Homo sapien
tgggcccgctcagcgcgtgcgtgcg

SEQ ID NO: 2895079 - DNA, 25 bp, Homo sapien
gcagcaaccgctaccgccagcccct

SEQ ID NO: 2895080 - DNA, 25 bp, Homo sapien
tcatcgcccgcggccgagactccag

SEQ ID NO: 2895081 - DNA, 25 bp, Homo sapien
gcccgcggccgagactccagcgccg

SEQ ID NO: 2895082 - DNA, 25 bp, Homo sapien
ccgaggcgcattccaggcacatcat

SEQ ID NO: 2895083 - DNA, 25 bp, Homo sapien
agcgccggggccctttgcagtagct

SEQ ID NO: 2895084 - DNA, 25 bp, Homo sapien
ccaagctggccggtttgggctgctg

SEQ ID NO: 2895085 - DNA, 25 bp, Homo sapien
cttacgctgcccgacagcgtctgca

SEQ ID NO: 2895086 - DNA, 25 bp, Homo sapien
cctttgcagtagctgcgcagccggg

SEQ ID NO: 2895087 - DNA, 25 bp, Homo sapien
ccaggtagttgagcacgttgcccaa

SEQ ID NO: 2895088 - DNA, 25 bp, Homo sapien
cggtgtacctgtccaggtagttgag

SEQ ID NO: 2895089 - DNA, 25 bp, Homo sapien
caggtagttgagcacgttgcccaag

SEQ ID NO: 2895090 - DNA, 25 bp, Homo sapien
ctgccacggtgtacctgtccaggta

SEQ ID NO: 2895091 - DNA, 25 bp, Homo sapien
gcacacccgcaaggggcgcgcgcac

SEQ ID NO: 2895092 - DNA, 25 bp, Homo sapien
tggaggcggcggagaaaggaaggaa

SEQ ID NO: 2895093 - DNA, 25 bp, Homo sapien
agaaaggaaggaactgacgggccat

SEQ ID NO: 2895094 - DNA, 25 bp, Homo sapien
acgggccatggacggacagacgacc

SEQ ID NO: 2895095 - DNA, 25 bp, Homo sapien
cgcagcccggagcctttgtcagcca

SEQ ID NO: 2895096 - DNA, 25 bp, Homo sapien
ccgcagcccggagcctttgtcagcc

SEQ ID NO: 2895097 - DNA, 25 bp, Homo sapien
ggagccccttcctatgccagtctgg

SEQ ID NO: 2895098 - DNA, 25 bp, Homo sapien
gtagcagctcagtctagggcaaatt

SEQ ID NO: 2895099 - DNA, 25 bp, Homo sapien
ttcccaaccagtagcagctcagtct

SEQ ID NO: 2895100 - DNA, 25 bp, Homo sapien
agggagccccttcctatgccagtct

SEQ ID NO: 2895101 - DNA, 25 bp, Homo sapien
gctggggtttctccacggtgcagat

SEQ ID NO: 2895102 - DNA, 25 bp, Homo sapien
ggtttctccacggtgcagatgtggc

SEQ ID NO: 2895103 - DNA, 25 bp, Homo sapien
tctccacggtgcagatgtggcagtg

SEQ ID NO: 2895104 - DNA, 25 bp, Homo sapien
tttctccacggtgcagatgtggcag

SEQ ID NO: 2895105 - DNA, 25 bp, Homo sapien
ctcacacggcctcactgtgtgacct

SEQ ID NO: 2895106 - DNA, 25 bp, Homo sapien
aggcccagagcagaccggtgctctt

SEQ ID NO: 2895107 - DNA, 25 bp, Homo sapien
caccaggcgaggaccaggcccagag

SEQ ID NO: 2895108 - DNA, 25 bp, Homo sapien
gagcagaccggtgctcttcctcaca

SEQ ID NO: 2895109 - DNA, 25 bp, Homo sapien
gctacttcagtagccaaggcggcca

SEQ ID NO: 2895110 - DNA, 25 bp, Homo sapien
cctcggatggaagctgacgtgcaga

SEQ ID NO: 2895111 - DNA, 25 bp, Homo sapien
tgctccccgcctcggatggaagctg

SEQ ID NO: 2895112 - DNA, 25 bp, Homo sapien
acgtgcagaaggtgagcgggacaga

SEQ ID NO: 2895113 - DNA, 25 bp, Homo sapien
aacagtctctctcgcctggcaggga

SEQ ID NO: 2895114 - DNA, 25 bp, Homo sapien
gctgcgctgggtcagtccttggctt

SEQ ID NO: 2895115 - DNA, 25 bp, Homo sapien
ttgtctgaggccaacgtcccctact

SEQ ID NO: 2895116 - DNA, 25 bp, Homo sapien
tcagtccttggcttgggcccgtgca

SEQ ID NO: 2895117 - DNA, 25 bp, Homo sapien
cctgagtgggttgaccataattacc

SEQ ID NO: 2895118 - DNA, 25 bp, Homo sapien
ggaggctggaacgtcactgtccctt

SEQ ID NO: 2895119 - DNA, 25 bp, Homo sapien
gaatcctgagcaatttcccggaatg

SEQ ID NO: 2895120 - DNA, 25 bp, Homo sapien
aattacccgtaatgaagaggctgtg

SEQ ID NO: 2895121 - DNA, 25 bp, Homo sapien
cagcctctttcccgccttgcagggc

SEQ ID NO: 2895122 - DNA, 25 bp, Homo sapien
cctctttcccgccttgcagggccca

SEQ ID NO: 2895123 - DNA, 25 bp, Homo sapien
agcctctttcccgccttgcagggcc

SEQ ID NO: 2895124 - DNA, 25 bp, Homo sapien
cccagcctctttcccgccttgcagg

SEQ ID NO: 2895125 - DNA, 25 bp, Homo sapien
ctgactgcagcaggccggcgcctcg

SEQ ID NO: 2895126 - DNA, 25 bp, Homo sapien
cgcctcggtccttgaccccaaagtg

SEQ ID NO: 2895127 - DNA, 25 bp, Homo sapien
gccggcgcctcggtccttgacccca

SEQ ID NO: 2895128 - DNA, 25 bp, Homo sapien
gcctcggtccttgaccccaaagtgc

SEQ ID NO: 2895129 - DNA, 25 bp, Homo sapien
ggcagatgacgaccaacaggacagg

SEQ ID NO: 2895130 - DNA, 25 bp, Homo sapien
aacaggacaggacccacgacgccaa

SEQ ID NO: 2895131 - DNA, 25 bp, Homo sapien
ggtggcagatgacgaccaacaggac

SEQ ID NO: 2895132 - DNA, 25 bp, Homo sapien
cgggtggcagatgacgaccaacagg

SEQ ID NO: 2895133 - DNA, 25 bp, Homo sapien
gcagttcccgcagggacatcctgtg

SEQ ID NO: 2895134 - DNA, 25 bp, Homo sapien
atcctgtggagggtgtgctgagccc

SEQ ID NO: 2895135 - DNA, 25 bp, Homo sapien
caccccgcaatcccgtggtctttgt

SEQ ID NO: 2895136 - DNA, 25 bp, Homo sapien
cgcaatcccgtggtctttgtttgtt

SEQ ID NO: 2895137 - DNA, 25 bp, Homo sapien
caaagctgggcactgaagcatgcat

SEQ ID NO: 2895138 - DNA, 25 bp, Homo sapien
tttatggatatataggcaaggccca

SEQ ID NO: 2895139 - DNA, 25 bp, Homo sapien
catgcataggagtttaccgctaaga

SEQ ID NO: 2895140 - DNA, 25 bp, Homo sapien
catggcctgaggatgctcaagagga

SEQ ID NO: 2895141 - DNA, 25 bp, Homo sapien
gtggtgtaaacactccgccctggct

SEQ ID NO: 2895142 - DNA, 25 bp, Homo sapien
tcgtgtcactgatgggcgttggaaa

SEQ ID NO: 2895143 - DNA, 25 bp, Homo sapien
taccacacaaatagaacagacgcca

SEQ ID NO: 2895144 - DNA, 25 bp, Homo sapien
tgagttcaagctacccacgtcgtgt

SEQ ID NO: 2895145 - DNA, 25 bp, Homo sapien
ggtgacggccgaccagaagaaaatg

SEQ ID NO: 2895146 - DNA, 25 bp, Homo sapien
ggcagccaccatgaagctacagatg

SEQ ID NO: 2895147 - DNA, 25 bp, Homo sapien
aaatgccgcagctgagaatcacctt

SEQ ID NO: 2895148 - DNA, 25 bp, Homo sapien
ccttcctgttgaagcggtcgcccag

SEQ ID NO: 2895149 - DNA, 25 bp, Homo sapien
tcggggagaagccgagccgggcctc

SEQ ID NO: 2895150 - DNA, 25 bp, Homo sapien
tagcagccggcatgtgattgccact

SEQ ID NO: 2895151 - DNA, 25 bp, Homo sapien
tctgcttgaatacgcctcgagatgg

SEQ ID NO: 2895152 - DNA, 25 bp, Homo sapien
tgaccccacggatttcaagagactg

SEQ ID NO: 2895153 - DNA, 25 bp, Homo sapien
tttctgcatcagtgggttggctccc

SEQ ID NO: 2895154 - DNA, 25 bp, Homo sapien
tggttactagagaagctgagccctg

SEQ ID NO: 2895155 - DNA, 25 bp, Homo sapien
tgggccacgggagataaacagagtt

SEQ ID NO: 2895156 - DNA, 25 bp, Homo sapien
gaaactgtctgtagctatcccgtgc

SEQ ID NO: 2895157 - DNA, 25 bp, Homo sapien
ggtgtataccccaagtagaaggctg

SEQ ID NO: 2895158 - DNA, 25 bp, Homo sapien
tggtgaagaggtcgccaatgatagt

SEQ ID NO: 2895159 - DNA, 25 bp, Homo sapien
tgagcgtacgcgtgttcttggtgaa

SEQ ID NO: 2895160 - DNA, 25 bp, Homo sapien
tggtggagtagctggcctccccgat

SEQ ID NO: 2895161 - DNA, 25 bp, Homo sapien
tagaagacggacagcatgagcgtac

SEQ ID NO: 2895162 - DNA, 25 bp, Homo sapien
ctgcttcacgctggagccagtaatg

SEQ ID NO: 2895163 - DNA, 25 bp, Homo sapien
tcggcatgaccccttttagtggctg

SEQ ID NO: 2895164 - DNA, 25 bp, Homo sapien
tctcggagccatgaggtccgggcct

SEQ ID NO: 2895165 - DNA, 25 bp, Homo sapien
agctggtcggcatgaccccttttag

SEQ ID NO: 2895166 - DNA, 25 bp, Homo sapien
tcgaatcagggccttcatatctcgg

SEQ ID NO: 2895167 - DNA, 25 bp, Homo sapien
cacagggcgggctgttgcacgtctc

SEQ ID NO: 2895168 - DNA, 25 bp, Homo sapien
tcttctgcacaacttgggcgcggtg

SEQ ID NO: 2895169 - DNA, 25 bp, Homo sapien
ccccgtggcgaaggagacagccgac

SEQ ID NO: 2895170 - DNA, 25 bp, Homo sapien
aggtagagcgggatccacatgccca

SEQ ID NO: 2895171 - DNA, 25 bp, Homo sapien
cccgctgggtcttcaggcggcacca

SEQ ID NO: 2895172 - DNA, 25 bp, Homo sapien
ggcagccacgaagatcaggcagatg

SEQ ID NO: 2895173 - DNA, 25 bp, Homo sapien
aaatcccgtaaagcaggtgatggcc

SEQ ID NO: 2895174 - DNA, 25 bp, Homo sapien
acaccagtgggtcggcccgctgggt

SEQ ID NO: 2895175 - DNA, 25 bp, Homo sapien
aaagccaccatcagcggtccctcca

SEQ ID NO: 2895176 - DNA, 25 bp, Homo sapien
aagccaccatcagcggtccctccat

SEQ ID NO: 2895177 - DNA, 25 bp, Homo sapien
cagttagaaaacagcagcgtctccc

SEQ ID NO: 2895178 - DNA, 25 bp, Homo sapien
gcgtctccccgacgaagatacagat

SEQ ID NO: 2895179 - DNA, 25 bp, Homo sapien
agcgtctccccgacgaagatacaga

SEQ ID NO: 2895180 - DNA, 25 bp, Homo sapien
catgaggatgtctgcagtgatggcc

SEQ ID NO: 2895181 - DNA, 25 bp, Homo sapien
ggagaaaggctcacgcgcttggccc

SEQ ID NO: 2895182 - DNA, 25 bp, Homo sapien
aggctcacgcgcttggccctggccc

SEQ ID NO: 2895183 - DNA, 25 bp, Homo sapien
gaaaggctcacgcgcttggccctgg

SEQ ID NO: 2895184 - DNA, 25 bp, Homo sapien
gagaaaggctcacgcgcttggccct

SEQ ID NO: 2895185 - DNA, 25 bp, Homo sapien
ggaggtgaagctctgcaaggccacg

SEQ ID NO: 2895186 - DNA, 25 bp, Homo sapien
aggtgaagctctgcaaggccacggc

SEQ ID NO: 2895187 - DNA, 25 bp, Homo sapien
cgcgccgcgtggggatgaccacgta

SEQ ID NO: 2895188 - DNA, 25 bp, Homo sapien
gcgcgccgcgtggggatgaccacgt

SEQ ID NO: 2895189 - DNA, 25 bp, Homo sapien
gggtggatgtcagggcagagccctc

SEQ ID NO: 2895190 - DNA, 25 bp, Homo sapien
ctgcgaggatttgggggtggatgtc

SEQ ID NO: 2895191 - DNA, 25 bp, Homo sapien
tggatgtcagggcagagccctcctg

SEQ ID NO: 2895192 - DNA, 25 bp, Homo sapien
gatgtcagggcagagccctcctgca

SEQ ID NO: 2895193 - DNA, 25 bp, Homo sapien
gcccaggaccacgacgaaagggcag

SEQ ID NO: 2895194 - DNA, 25 bp, Homo sapien
cagtggcgaggaagaacatgccgcc

SEQ ID NO: 2895195 - DNA, 25 bp, Homo sapien
ccttagtgctctggcggatcaggtc

SEQ ID NO: 2895196 - DNA, 25 bp, Homo sapien
ccctggcgcggtcgctgacgaagaa

SEQ ID NO: 2895197 - DNA, 25 bp, Homo sapien
cactgagtgcatgggaggtctgtac

SEQ ID NO: 2895198 - DNA, 25 bp, Homo sapien
actgctctggcacatcgtgtcgtgg

SEQ ID NO: 2895199 - DNA, 25 bp, Homo sapien
tggaccccagcaaccagtgggtgca

SEQ ID NO: 2895200 - DNA, 25 bp, Homo sapien
cagggctcacggtggctatcacggt

SEQ ID NO: 2895201 - DNA, 25 bp, Homo sapien
tgcgggcggcatcgccagctggttc

SEQ ID NO: 2895202 - DNA, 25 bp, Homo sapien
gggcggcatcgccagctggttcacc

SEQ ID NO: 2895203 - DNA, 25 bp, Homo sapien
gagaacagaagtccggacagagtga

SEQ ID NO: 2895204 - DNA, 25 bp, Homo sapien
tttactggaaggagcagcctgctgt

SEQ ID NO: 2895205 - DNA, 25 bp, Homo sapien
ggaagctataactcccagagggaag

SEQ ID NO: 2895206 - DNA, 25 bp, Homo sapien
agtcctggccctgatctatgcgagg

SEQ ID NO: 2895207 - DNA, 25 bp, Homo sapien
tgggaacctgtccaaccgtgtggct

SEQ ID NO: 2895208 - DNA, 25 bp, Homo sapien
tcggacctggttcttgtacaacaag

SEQ ID NO: 2895209 - DNA, 25 bp, Homo sapien
cagaaccaccttgattgcagcagaa

SEQ ID NO: 2895210 - DNA, 25 bp, Homo sapien
tgcctagccgtggatcacacagaaa

SEQ ID NO: 2895211 - DNA, 25 bp, Homo sapien
agctgtttctaaggcgctgccactg

SEQ ID NO: 2895212 - DNA, 25 bp, Homo sapien
aggcaggtgtgaccatctctcgtgc

SEQ ID NO: 2895213 - DNA, 25 bp, Homo sapien
tacgcaagctgtttctaaggcgctg

SEQ ID NO: 2895214 - DNA, 25 bp, Homo sapien
tctggtgtttgcctgggttggtgca

SEQ ID NO: 2895215 - DNA, 25 bp, Homo sapien
gggcatggtggtacacgcctgcaat

SEQ ID NO: 2895216 - DNA, 25 bp, Homo sapien
cccagctacttgggaggctgaggca

SEQ ID NO: 2895217 - DNA, 25 bp, Homo sapien
atcccagctacttgggaggctgagg

SEQ ID NO: 2895218 - DNA, 25 bp, Homo sapien
gcatggtggtacacgcctgcaatcc

SEQ ID NO: 2895219 - DNA, 25 bp, Homo sapien
aacaaagcaagatctcatctgtact

SEQ ID NO: 2895220 - DNA, 25 bp, Homo sapien
aaggcaggaagatacctcgaggcca

SEQ ID NO: 2895221 - DNA, 25 bp, Homo sapien
caaagcaagatctcatctgtactaa

SEQ ID NO: 2895222 - DNA, 25 bp, Homo sapien
tcaaggcaggaagatacctcgaggc

SEQ ID NO: 2895223 - DNA, 25 bp, Homo sapien
cgggtcacaacagtgctgaggtaca

SEQ ID NO: 2895224 - DNA, 25 bp, Homo sapien
tctcgaaggatgtgaattccaggtc

SEQ ID NO: 2895225 - DNA, 25 bp, Homo sapien
gaggtacagatgatatctcgaagga

SEQ ID NO: 2895226 - DNA, 25 bp, Homo sapien
cgttgaggatttcgccatacagtgt

SEQ ID NO: 2895227 - DNA, 25 bp, Homo sapien
ccagccctgcgttgtcattgagtga

SEQ ID NO: 2895228 - DNA, 25 bp, Homo sapien
gccactagtctaacctggtcgagta

SEQ ID NO: 2895229 - DNA, 25 bp, Homo sapien
tgcaatagatcggtcagtacactga

SEQ ID NO: 2895230 - DNA, 25 bp, Homo sapien
tatcaaagcacagacaagtggtccg

SEQ ID NO: 2895231 - DNA, 25 bp, Homo sapien
gaggcagccatctgagtaagtggaa

SEQ ID NO: 2895232 - DNA, 25 bp, Homo sapien
tgccagatttgggagcatccgagga

SEQ ID NO: 2895233 - DNA, 25 bp, Homo sapien
gaagtgtgatattcgctccgggcat

SEQ ID NO: 2895234 - DNA, 25 bp, Homo sapien
caaagctggagtgaccatatgcccg

SEQ ID NO: 2895235 - DNA, 25 bp, Homo sapien
tattacaagtttatcgcctgtggca

SEQ ID NO: 2895236 - DNA, 25 bp, Homo sapien
caagtttatcgcctgtggcatccaa

SEQ ID NO: 2895237 - DNA, 25 bp, Homo sapien
tatcgcctgtggcatccaaggcttc

SEQ ID NO: 2895238 - DNA, 25 bp, Homo sapien
caactattacaagtttatcgcctgt

SEQ ID NO: 2895239 - DNA, 25 bp, Homo sapien
ccagatggtatttgagtttatagtc

SEQ ID NO: 2895240 - DNA, 25 bp, Homo sapien
tgttttattgtcacccagatggtat

SEQ ID NO: 2895241 - DNA, 25 bp, Homo sapien
atgttggcatgcattcggcttcaca

SEQ ID NO: 2895242 - DNA, 25 bp, Homo sapien
taattcatgaatggtggcttcaagc

SEQ ID NO: 2895243 - DNA, 25 bp, Homo sapien
tggtgaggtcccctccctgactctg

SEQ ID NO: 2895244 - DNA, 25 bp, Homo sapien
cctgactctgcgactacgcgctgtc

SEQ ID NO: 2895245 - DNA, 25 bp, Homo sapien
tgggaccttcgcctggaatttcttg

SEQ ID NO: 2895246 - DNA, 25 bp, Homo sapien
tatctgttctaagacctcagggagg

SEQ ID NO: 2895247 - DNA, 25 bp, Homo sapien
cgcgggtcgagagcgggccagacgg

SEQ ID NO: 2895248 - DNA, 25 bp, Homo sapien
cgcgcgggtcgagagcgggccagac

SEQ ID NO: 2895249 - DNA, 25 bp, Homo sapien
gagaagatccgagctccgcagctcc

SEQ ID NO: 2895250 - DNA, 25 bp, Homo sapien
cagacgggggagaagatccgagctc

SEQ ID NO: 2895251 - DNA, 25 bp, Homo sapien
ggccaggcgcatcgcctctgccact

SEQ ID NO: 2895252 - DNA, 25 bp, Homo sapien
gtcaggcgctcgagctgcgcctgca

SEQ ID NO: 2895253 - DNA, 25 bp, Homo sapien
ccgctggttgtcccgctgcaggtcg

SEQ ID NO: 2895254 - DNA, 25 bp, Homo sapien
acagtgcgcgcctcctgggcgtcgg

SEQ ID NO: 2895255 - DNA, 25 bp, Homo sapien
ggggacatcccgctggccaagccca

SEQ ID NO: 2895256 - DNA, 25 bp, Homo sapien
cggggacatcccgctggccaagccc

SEQ ID NO: 2895257 - DNA, 25 bp, Homo sapien
tgggcgtgccgggagtgccgggcac

SEQ ID NO: 2895258 - DNA, 25 bp, Homo sapien
cggggggctgggcgtgccgggagtg

SEQ ID NO: 2895259 - DNA, 25 bp, Homo sapien
gctgggcgtgccgggagtgccgggc

SEQ ID NO: 2895260 - DNA, 25 bp, Homo sapien
ggggctgggcgtgccgggagtgccg

SEQ ID NO: 2895261 - DNA, 25 bp, Homo sapien
ccgcggccggacagcgagaaggtgg

SEQ ID NO: 2895262 - DNA, 25 bp, Homo sapien
gccgcggccggacagcgagaaggtg

SEQ ID NO: 2895263 - DNA, 25 bp, Homo sapien
cgcggccggacagcgagaaggtggc

SEQ ID NO: 2895264 - DNA, 25 bp, Homo sapien
agcgagaaggtggcgtggctggcga

SEQ ID NO: 2895265 - DNA, 25 bp, Homo sapien
ccgcagacgcgagcagaggcaggca

SEQ ID NO: 2895266 - DNA, 25 bp, Homo sapien
ctagtccgagcggccggtgaaggcc

SEQ ID NO: 2895267 - DNA, 25 bp, Homo sapien
aaggccccaaccccgcagacgcgag

SEQ ID NO: 2895268 - DNA, 25 bp, Homo sapien
tggcgccagcgcacgcgctcccccg

SEQ ID NO: 2895269 - DNA, 25 bp, Homo sapien
ccccggctccttgagtgtgaccaag

SEQ ID NO: 2895270 - DNA, 25 bp, Homo sapien
gctccttgagtgtgaccaagctctt

SEQ ID NO: 2895271 - DNA, 25 bp, Homo sapien
ccggctccttgagtgtgaccaagct

SEQ ID NO: 2895272 - DNA, 25 bp, Homo sapien
ccttgagtgtgaccaagctcttgat

SEQ ID NO: 2895273 - DNA, 25 bp, Homo sapien
agcatttaactctcttatcgcacag

SEQ ID NO: 2895274 - DNA, 25 bp, Homo sapien
catttaactctcttatcgcacagtg

SEQ ID NO: 2895275 - DNA, 25 bp, Homo sapien
ctaaagcatttaactctcttatcgc

SEQ ID NO: 2895276 - DNA, 25 bp, Homo sapien
ttaactctcttatcgcacagtgtgt

SEQ ID NO: 2895277 - DNA, 25 bp, Homo sapien
ctgctctcgtctgacaggttccaca

SEQ ID NO: 2895278 - DNA, 25 bp, Homo sapien
tgctctcgtctgacaggttccacag

SEQ ID NO: 2895279 - DNA, 25 bp, Homo sapien
actcactggcctcatcgtgatccaa

SEQ ID NO: 2895280 - DNA, 25 bp, Homo sapien
cactggcctcatcgtgatccaaact

SEQ ID NO: 2895281 - DNA, 25 bp, Homo sapien
ctccgactcactggcctcatcgtga

SEQ ID NO: 2895282 - DNA, 25 bp, Homo sapien
tccgactcactggcctcatcgtgat

SEQ ID NO: 2895283 - DNA, 25 bp, Homo sapien
ccccggctggtgcccattttccatg

SEQ ID NO: 2895284 - DNA, 25 bp, Homo sapien
ccattttccatgatgcaggagtttg

SEQ ID NO: 2895285 - DNA, 25 bp, Homo sapien
gcaatctcagggggtccatcgcctg

SEQ ID NO: 2895286 - DNA, 25 bp, Homo sapien
tttgggcaatctcagggggtccatc

SEQ ID NO: 2895287 - DNA, 25 bp, Homo sapien
tgggcaatctcagggggtccatcgc

SEQ ID NO: 2895288 - DNA, 25 bp, Homo sapien
aatctcagggggtccatcgcctgga

SEQ ID NO: 2895289 - DNA, 25 bp, Homo sapien
cctgtcagagactcgggtgatggcc

SEQ ID NO: 2895290 - DNA, 25 bp, Homo sapien
tgatagagccgcagctgaggtctcc

SEQ ID NO: 2895291 - DNA, 25 bp, Homo sapien
agcagacatgggtgatagagccgca

SEQ ID NO: 2895292 - DNA, 25 bp, Homo sapien
agtccagggcgtgatgacctcgctg

SEQ ID NO: 2895293 - DNA, 25 bp, Homo sapien
tttgcttgctgtcactgccccatag

SEQ ID NO: 2895294 - DNA, 25 bp, Homo sapien
ttgctgtgtttgcttgctgtcactg

SEQ ID NO: 2895295 - DNA, 25 bp, Homo sapien
ggcacagaccacgtgaaagaggaat

SEQ ID NO: 2895296 - DNA, 25 bp, Homo sapien
gaccacgtgaaagaggaattcttct

SEQ ID NO: 2895297 - DNA, 25 bp, Homo sapien
ccgtgggcaggaagttccgggctct

SEQ ID NO: 2895298 - DNA, 25 bp, Homo sapien
cgggcgactggggtggtgtcaccag

SEQ ID NO: 2895299 - DNA, 25 bp, Homo sapien
cacgggcgactggggtggtgtcacc

SEQ ID NO: 2895300 - DNA, 25 bp, Homo sapien
acgggcgactggggtggtgtcacca

SEQ ID NO: 2895301 - DNA, 25 bp, Homo sapien
ccgatggacctgagttatggctggc

SEQ ID NO: 2895302 - DNA, 25 bp, Homo sapien
cccctgccgatggacctgagttatg

SEQ ID NO: 2895303 - DNA, 25 bp, Homo sapien
ctcaaacaatgctttccgggcctgc

SEQ ID NO: 2895304 - DNA, 25 bp, Homo sapien
ggcagcgtctgcgacctcaccagct

SEQ ID NO: 2895305 - DNA, 25 bp, Homo sapien
cctgtctgtgagtgggcatccgtac

SEQ ID NO: 2895306 - DNA, 25 bp, Homo sapien
gggcctgtctgtgagtgggcatccg

SEQ ID NO: 2895307 - DNA, 25 bp, Homo sapien
tggggccgggcctgtctgtgagtgg

SEQ ID NO: 2895308 - DNA, 25 bp, Homo sapien
ggccgggcctgtctgtgagtgggca

SEQ ID NO: 2895309 - DNA, 25 bp, Homo sapien
caagccccgtctgggtctgggcaca

SEQ ID NO: 2895310 - DNA, 25 bp, Homo sapien
aagccccgtctgggtctgggcacac

SEQ ID NO: 2895311 - DNA, 25 bp, Homo sapien
ccaagccccgtctgggtctgggcac

SEQ ID NO: 2895312 - DNA, 25 bp, Homo sapien
aggactggctgaatatgcaaaggtg

SEQ ID NO: 2895313 - DNA, 25 bp, Homo sapien
ctggctgaatatgcaaaggtgggct

SEQ ID NO: 2895314 - DNA, 25 bp, Homo sapien
gctgaatatgcaaaggtgggctgga

SEQ ID NO: 2895315 - DNA, 25 bp, Homo sapien
tgaatatgcaaaggtgggctggagc

SEQ ID NO: 2895316 - DNA, 25 bp, Homo sapien
acgcttgggccacactctgcacaca

SEQ ID NO: 2895317 - DNA, 25 bp, Homo sapien
cacgcttgggccacactctgcacac

SEQ ID NO: 2895318 - DNA, 25 bp, Homo sapien
acactctgcacacagcaggcatcaa

SEQ ID NO: 2895319 - DNA, 25 bp, Homo sapien
ctctgcacacagcaggcatcaatac

SEQ ID NO: 2895320 - DNA, 25 bp, Homo sapien
gcctcctttgatggtatgtggcagg

SEQ ID NO: 2895321 - DNA, 25 bp, Homo sapien
atgtaccagcgacacagcctccttt

SEQ ID NO: 2895322 - DNA, 25 bp, Homo sapien
acgtccacggcacagcccatgtacc

SEQ ID NO: 2895323 - DNA, 25 bp, Homo sapien
gcacacgtgggctcagctgtgccca

SEQ ID NO: 2895324 - DNA, 25 bp, Homo sapien
caccactcgagcaggatctgcttga

SEQ ID NO: 2895325 - DNA, 25 bp, Homo sapien
gaagctctgcgaccgcttcagcctg

SEQ ID NO: 2895326 - DNA, 25 bp, Homo sapien
tggccacgccgaagctctgcgaccg

SEQ ID NO: 2895327 - DNA, 25 bp, Homo sapien
tcttgctgcggcaccactcgagcag

SEQ ID NO: 2895328 - DNA, 25 bp, Homo sapien
gtgagtggggtcagtgcgggagggc

SEQ ID NO: 2895329 - DNA, 25 bp, Homo sapien
gtggggtcagtgcgggagggcagct

SEQ ID NO: 2895330 - DNA, 25 bp, Homo sapien
agtggggtcagtgcgggagggcagc

SEQ ID NO: 2895331 - DNA, 25 bp, Homo sapien
tgagtggggtcagtgcgggagggca

SEQ ID NO: 2895332 - DNA, 25 bp, Homo sapien
ggaagaaggagtgtaccagggcgca

SEQ ID NO: 2895333 - DNA, 25 bp, Homo sapien
ccatgccgtcgctccagctggagga

SEQ ID NO: 2895334 - DNA, 25 bp, Homo sapien
tgtaccagggcgcagaaggccatgc

SEQ ID NO: 2895335 - DNA, 25 bp, Homo sapien
gccatggtgaaagccagctcgaagt

SEQ ID NO: 2895336 - DNA, 25 bp, Homo sapien
catcatgtcctccacttcgatgagg

SEQ ID NO: 2895337 - DNA, 25 bp, Homo sapien
gactggacgtaggtgaagacacaca

SEQ ID NO: 2895338 - DNA, 25 bp, Homo sapien
tcgaagcgacgcaggtggttgtaca

SEQ ID NO: 2895339 - DNA, 25 bp, Homo sapien
ttcgatgaggcgctcacagttggcc

SEQ ID NO: 2895340 - DNA, 25 bp, Homo sapien
tgttaaattcccgagagcctgtgct

SEQ ID NO: 2895341 - DNA, 25 bp, Homo sapien
tgaaagtcctaccaccaaacagctg

SEQ ID NO: 2895342 - DNA, 25 bp, Homo sapien
ctttgggaccgagaggagagccttc

SEQ ID NO: 2895343 - DNA, 25 bp, Homo sapien
tgtttcatgcgcagagcgtacggcc

SEQ ID NO: 2895344 - DNA, 25 bp, Homo sapien
tctagtcttctgtgcaattgcctgc

SEQ ID NO: 2895345 - DNA, 25 bp, Homo sapien
aattgcctgcagtcgtatagacccg

SEQ ID NO: 2895346 - DNA, 25 bp, Homo sapien
tcttctgtgcaattgcctgcagtcg

SEQ ID NO: 2895347 - DNA, 25 bp, Homo sapien
cctgcagtcgtatagacccggtcat

SEQ ID NO: 2895348 - DNA, 25 bp, Homo sapien
cattcttccggagtgcttttcctta

SEQ ID NO: 2895349 - DNA, 25 bp, Homo sapien
gaccttgtccctccagtgaaggctg

SEQ ID NO: 2895350 - DNA, 25 bp, Homo sapien
tatttggtgctttctagggagtagg

SEQ ID NO: 2895351 - DNA, 25 bp, Homo sapien
tgctttctagggagtaggcaggtca

SEQ ID NO: 2895352 - DNA, 25 bp, Homo sapien
tgtattttcctcagcagcaggagcc

SEQ ID NO: 2895353 - DNA, 25 bp, Homo sapien
tgccatggtcaggtgaacagaaccc

SEQ ID NO: 2895354 - DNA, 25 bp, Homo sapien
tattcgagtgctgtaagtggcctgg

SEQ ID NO: 2895355 - DNA, 25 bp, Homo sapien
aacaaatcccggtaggagcagagcc

SEQ ID NO: 2895356 - DNA, 25 bp, Homo sapien
gatacgtggccttaggacttcagcc

SEQ ID NO: 2895357 - DNA, 25 bp, Homo sapien
tgaggcatccgtgtcttaacccatc

SEQ ID NO: 2895358 - DNA, 25 bp, Homo sapien
catctgccgttcaccagttggcaag

SEQ ID NO: 2895359 - DNA, 25 bp, Homo sapien
gatttaatttgtgtcctgaaaccag

SEQ ID NO: 2895360 - DNA, 25 bp, Homo sapien
tttcggacatctaactccctgaagt

SEQ ID NO: 2895361 - DNA, 25 bp, Homo sapien
ctttcggacatctaactccctgaag

SEQ ID NO: 2895362 - DNA, 25 bp, Homo sapien
ggacatctaactccctgaagtctcc

SEQ ID NO: 2895363 - DNA, 25 bp, Homo sapien
tcggacatctaactccctgaagtct

SEQ ID NO: 2895364 - DNA, 25 bp, Homo sapien
cactcagtatccttgttgcttctgc

SEQ ID NO: 2895365 - DNA, 25 bp, Homo sapien
tttagccttctctcgtcacactcag

SEQ ID NO: 2895366 - DNA, 25 bp, Homo sapien
ttcccctgaaagaaccggctgccta

SEQ ID NO: 2895367 - DNA, 25 bp, Homo sapien
tgaaagaaccggctgcctagccccg

SEQ ID NO: 2895368 - DNA, 25 bp, Homo sapien
tcatccttgagggaagtgactcctc

SEQ ID NO: 2895369 - DNA, 25 bp, Homo sapien
gttcatccttgagggaagtgactcc

SEQ ID NO: 2895370 - DNA, 25 bp, Homo sapien
ttcatccttgagggaagtgactcct

SEQ ID NO: 2895371 - DNA, 25 bp, Homo sapien
tgatgacagcgtggtgatcgtgccc

SEQ ID NO: 2895372 - DNA, 25 bp, Homo sapien
cagccctggaagaggatttgacagt

SEQ ID NO: 2895373 - DNA, 25 bp, Homo sapien
cagaccagcctttgtccactatgac

SEQ ID NO: 2895374 - DNA, 25 bp, Homo sapien
gaggcatctgatgtggagatctcct

SEQ ID NO: 2895375 - DNA, 25 bp, Homo sapien
tgtaaatggtcattccctgtttctg

SEQ ID NO: 2895376 - DNA, 25 bp, Homo sapien
gtaaatggtcattccctgtttctgt

SEQ ID NO: 2895377 - DNA, 25 bp, Homo sapien
taaatggtcattccctgtttctgtc

SEQ ID NO: 2895378 - DNA, 25 bp, Homo sapien
gactggattttaaagcacaccacac

SEQ ID NO: 2895379 - DNA, 25 bp, Homo sapien
cagtgtttagatggcagttgaagct

SEQ ID NO: 2895380 - DNA, 25 bp, Homo sapien
caccacacttaatggtcaggtagag

SEQ ID NO: 2895381 - DNA, 25 bp, Homo sapien
caaaatgagcccttttacggactgg

SEQ ID NO: 2895382 - DNA, 25 bp, Homo sapien
ggagttggaaaccacagtggatctg

SEQ ID NO: 2895383 - DNA, 25 bp, Homo sapien
accacagtggatctggggatgaagt

SEQ ID NO: 2895384 - DNA, 25 bp, Homo sapien
agttggaaaccacagtggatctggg

SEQ ID NO: 2895385 - DNA, 25 bp, Homo sapien
cacagtggatctggggatgaagtct

SEQ ID NO: 2895386 - DNA, 25 bp, Homo sapien
gaatattacagtaaccttctacctc

SEQ ID NO: 2895387 - DNA, 25 bp, Homo sapien
catatccagtttgacggcacatccc

SEQ ID NO: 2895388 - DNA, 25 bp, Homo sapien
tcatcatttgtctggaatattacag

SEQ ID NO: 2895389 - DNA, 25 bp, Homo sapien
gattttgactgctttgtatcgccac

SEQ ID NO: 2895390 - DNA, 25 bp, Homo sapien
ttaacatcacaggaccgcctcggac

SEQ ID NO: 2895391 - DNA, 25 bp, Homo sapien
gggaaccgagcaccccgctgcctcg

SEQ ID NO: 2895392 - DNA, 25 bp, Homo sapien
accgcctcggacacgctcacaggca

SEQ ID NO: 2895393 - DNA, 25 bp, Homo sapien
atccgccatcactccgggaaccgag

SEQ ID NO: 2895394 - DNA, 25 bp, Homo sapien
tggaaatcgttccgactttggcgcc

SEQ ID NO: 2895395 - DNA, 25 bp, Homo sapien
tggcgccttttgtccggaccacgtg

SEQ ID NO: 2895396 - DNA, 25 bp, Homo sapien
atcgttccgactttggcgccttttg

SEQ ID NO: 2895397 - DNA, 25 bp, Homo sapien
ctaaatggaaatcgttccgactttg

SEQ ID NO: 2895398 - DNA, 25 bp, Homo sapien
gcatccaactatgatgagcctacta

SEQ ID NO: 2895399 - DNA, 25 bp, Homo sapien
ccaactatgatgagcctactatgta

SEQ ID NO: 2895400 - DNA, 25 bp, Homo sapien
atccaactatgatgagcctactatg

SEQ ID NO: 2895401 - DNA, 25 bp, Homo sapien
tgcatccaactatgatgagcctact

SEQ ID NO: 2895402 - DNA, 25 bp, Homo sapien
aattggcttttgcaaggcgcacgtc

SEQ ID NO: 2895403 - DNA, 25 bp, Homo sapien
ggcgcacgtcttgtatcatttctga

SEQ ID NO: 2895404 - DNA, 25 bp, Homo sapien
ttaggaaagtatacacgctactggg

SEQ ID NO: 2895405 - DNA, 25 bp, Homo sapien
agttacctagagagttattgattcc

SEQ ID NO: 2895406 - DNA, 25 bp, Homo sapien
cgccctctcctagcagacacgcggg

SEQ ID NO: 2895407 - DNA, 25 bp, Homo sapien
ccagatgcgtcagccggatcgcgcg

SEQ ID NO: 2895408 - DNA, 25 bp, Homo sapien
cgcgccaatgcgcacgcgcgccctc

SEQ ID NO: 2895409 - DNA, 25 bp, Homo sapien
tcctccccgcgccaatgcgcacgcg

SEQ ID NO: 2895410 - DNA, 25 bp, Homo sapien
ctcggttcgcggctcgctcgcagcc

SEQ ID NO: 2895411 - DNA, 25 bp, Homo sapien
gccgcccgctcggttcgcggctcgc

SEQ ID NO: 2895412 - DNA, 25 bp, Homo sapien
gttcgcggctcgctcgcagcctcct

SEQ ID NO: 2895413 - DNA, 25 bp, Homo sapien
gcccgctcggttcgcggctcgctcg

SEQ ID NO: 2895414 - DNA, 25 bp, Homo sapien
ctcattatcctcgaggacctgcgcg

SEQ ID NO: 2895415 - DNA, 25 bp, Homo sapien
ccgctgcgccctcgtctgggaccgt

SEQ ID NO: 2895416 - DNA, 25 bp, Homo sapien
gccccggatggctgtccctagggac

SEQ ID NO: 2895417 - DNA, 25 bp, Homo sapien
tatcctcgaggacctgcgcgtgcgg

SEQ ID NO: 2895418 - DNA, 25 bp, Homo sapien
gggatattggataggaggctttcca

SEQ ID NO: 2895419 - DNA, 25 bp, Homo sapien
ctgcacgggagagcccagtagtctg

SEQ ID NO: 2895420 - DNA, 25 bp, Homo sapien
ctgcatcgcagcctgcacgggagag

SEQ ID NO: 2895421 - DNA, 25 bp, Homo sapien
ttccattggcttggcgcgagtctgg

SEQ ID NO: 2895422 - DNA, 25 bp, Homo sapien
tgctcctggcaacccaagggaaggt

SEQ ID NO: 2895423 - DNA, 25 bp, Homo sapien
cacatcgatatggtagccgctagaa

SEQ ID NO: 2895424 - DNA, 25 bp, Homo sapien
tcccaacttgggagctgagtgccgt

SEQ ID NO: 2895425 - DNA, 25 bp, Homo sapien
gaaagagcctcgattgcacagaaaa

SEQ ID NO: 2895426 - DNA, 25 bp, Homo sapien
cataggcccagtttctgctacaact

SEQ ID NO: 2895427 - DNA, 25 bp, Homo sapien
tggtttctaccataggcccagtttc

SEQ ID NO: 2895428 - DNA, 25 bp, Homo sapien
ctaccataggcccagtttctgctac

SEQ ID NO: 2895429 - DNA, 25 bp, Homo sapien
gtttctaccataggcccagtttctg

SEQ ID NO: 2895430 - DNA, 25 bp, Homo sapien
gagcatataggagagcaatgaccct

SEQ ID NO: 2895431 - DNA, 25 bp, Homo sapien
taatagaaaccaaggcagtctggct

SEQ ID NO: 2895432 - DNA, 25 bp, Homo sapien
gaaacgtgaaatcctgccaactagc

SEQ ID NO: 2895433 - DNA, 25 bp, Homo sapien
agtgtttggcaaccccagtgatctg

SEQ ID NO: 2895434 - DNA, 25 bp, Homo sapien
cctatttctaacgtggtggcaaggg

SEQ ID NO: 2895435 - DNA, 25 bp, Homo sapien
tccttcctatttctaacgtggtggc

SEQ ID NO: 2895436 - DNA, 25 bp, Homo sapien
cttcctatttctaacgtggtggcaa

SEQ ID NO: 2895437 - DNA, 25 bp, Homo sapien
tcctatttctaacgtggtggcaagg

SEQ ID NO: 2895438 - DNA, 25 bp, Homo sapien
cttgcagttagggctcgacttcttg

SEQ ID NO: 2895439 - DNA, 25 bp, Homo sapien
ttgcagttagggctcgacttcttga

SEQ ID NO: 2895440 - DNA, 25 bp, Homo sapien
gcagttagggctcgacttcttgaag

SEQ ID NO: 2895441 - DNA, 25 bp, Homo sapien
tgcagttagggctcgacttcttgaa

SEQ ID NO: 2895442 - DNA, 25 bp, Homo sapien
tctcagactagtggacctttaggct

SEQ ID NO: 2895443 - DNA, 25 bp, Homo sapien
cctcagccaaccagtcaggtgtgtg

SEQ ID NO: 2895444 - DNA, 25 bp, Homo sapien
tggtgacagggcatcggagccctca

SEQ ID NO: 2895445 - DNA, 25 bp, Homo sapien
ctgggctatcaggaaggagttgttc

SEQ ID NO: 2895446 - DNA, 25 bp, Homo sapien
cccgcttgcccaagtacacggtgag

SEQ ID NO: 2895447 - DNA, 25 bp, Homo sapien
gtcccgcttgcccaagtacacggtg

SEQ ID NO: 2895448 - DNA, 25 bp, Homo sapien
tttgtccaggtgatctacgaagtcc

SEQ ID NO: 2895449 - DNA, 25 bp, Homo sapien
ggtgatctacgaagtcccgcttgcc

SEQ ID NO: 2895450 - DNA, 25 bp, Homo sapien
cggtccttcaggtagtcagggtcca

SEQ ID NO: 2895451 - DNA, 25 bp, Homo sapien
tagtcagggtccacaagcaccacgc

SEQ ID NO: 2895452 - DNA, 25 bp, Homo sapien
ttcaggtagtcagggtccacaagca

SEQ ID NO: 2895453 - DNA, 25 bp, Homo sapien
ctttgcggtccttcaggtagtcagg

SEQ ID NO: 2895454 - DNA, 25 bp, Homo sapien
atctctctggggcgcccttccaagg

SEQ ID NO: 2895455 - DNA, 25 bp, Homo sapien
agacttgcctgaaccctactcctgg

SEQ ID NO: 2895456 - DNA, 25 bp, Homo sapien
gggagggtgagatgagtggtcagga

SEQ ID NO: 2895457 - DNA, 25 bp, Homo sapien
gagggtgagatgagtggtcaggagc

SEQ ID NO: 2895458 - DNA, 25 bp, Homo sapien
tcagcagccggtcctgcaggcgggt

SEQ ID NO: 2895459 - DNA, 25 bp, Homo sapien
ggtaggtggcgatgaacaggtcttt

SEQ ID NO: 2895460 - DNA, 25 bp, Homo sapien
caggtctttgcggaaggacaagccc

SEQ ID NO: 2895461 - DNA, 25 bp, Homo sapien
ttgcggaaggacaagcccagcacat

SEQ ID NO: 2895462 - DNA, 25 bp, Homo sapien
ttcctgaatgcactgggaccctgaa

SEQ ID NO: 2895463 - DNA, 25 bp, Homo sapien
aatgcactgggaccctgaagggaag

SEQ ID NO: 2895464 - DNA, 25 bp, Homo sapien
tgaagggaagtggatctagggtccc

SEQ ID NO: 2895465 - DNA, 25 bp, Homo sapien
tgaatgcactgggaccctgaaggga

SEQ ID NO: 2895466 - DNA, 25 bp, Homo sapien
cctggctgcagtgtgacggagcatg

SEQ ID NO: 2895467 - DNA, 25 bp, Homo sapien
ggctgcagtgtgacggagcatggaa

SEQ ID NO: 2895468 - DNA, 25 bp, Homo sapien
ggcctggctgcagtgtgacggagca

SEQ ID NO: 2895469 - DNA, 25 bp, Homo sapien
cagtgtgacggagcatggaagattc

SEQ ID NO: 2895470 - DNA, 25 bp, Homo sapien
cacagaaggctcgaatctcaaagtc

SEQ ID NO: 2895471 - DNA, 25 bp, Homo sapien
cagaaggctcgaatctcaaagtcta

SEQ ID NO: 2895472 - DNA, 25 bp, Homo sapien
cttctagtgatttagcacagaaggc

SEQ ID NO: 2895473 - DNA, 25 bp, Homo sapien
tagcacagaaggctcgaatctcaaa

SEQ ID NO: 2895474 - DNA, 25 bp, Homo sapien
acatgaggaagtggcgtgtggtttc

SEQ ID NO: 2895475 - DNA, 25 bp, Homo sapien
ttcggatcaccagccgcacagagtt

SEQ ID NO: 2895476 - DNA, 25 bp, Homo sapien
gggcgaactgcacctttcggatcac

SEQ ID NO: 2895477 - DNA, 25 bp, Homo sapien
tgcagggaccggtcagacatgagga

SEQ ID NO: 2895478 - DNA, 25 bp, Homo sapien
cagccaaggcaacctcctttacaaa

SEQ ID NO: 2895479 - DNA, 25 bp, Homo sapien
tcctcttgatgtgtggcttcgcccc

SEQ ID NO: 2895480 - DNA, 25 bp, Homo sapien
cagggtctaaactgcaccgtggcat

SEQ ID NO: 2895481 - DNA, 25 bp, Homo sapien
cctttacaaatgtcctcttgatgtg

SEQ ID NO: 2895482 - DNA, 25 bp, Homo sapien
gtgacgtggacatttacattgaggg

SEQ ID NO: 2895483 - DNA, 25 bp, Homo sapien
ggtcttggtggagttgttggtgacg

SEQ ID NO: 2895484 - DNA, 25 bp, Homo sapien
cagagactttgatcttcttgacggt

SEQ ID NO: 2895485 - DNA, 25 bp, Homo sapien
gttggtgacgtggacatttacattg

SEQ ID NO: 2895486 - DNA, 25 bp, Homo sapien
tgaagcagtaaacaccgaggctccc

SEQ ID NO: 2895487 - DNA, 25 bp, Homo sapien
gtctcccgcactgggaaatggcctg

SEQ ID NO: 2895488 - DNA, 25 bp, Homo sapien
cgaggctccccgtatcattatggaa

SEQ ID NO: 2895489 - DNA, 25 bp, Homo sapien
gctctggatggagcacaagccacca

SEQ ID NO: 2895490 - DNA, 25 bp, Homo sapien
gaagaggcagatgtcggcgtactgt

SEQ ID NO: 2895491 - DNA, 25 bp, Homo sapien
agaggcagatgtcggcgtactgtct

SEQ ID NO: 2895492 - DNA, 25 bp, Homo sapien
tactgggcggtgctgaagaggcaga

SEQ ID NO: 2895493 - DNA, 25 bp, Homo sapien
gacacttgtactgggcggtgctgaa

SEQ ID NO: 2895494 - DNA, 25 bp, Homo sapien
aggggttcgcaactagcttggccaa

SEQ ID NO: 2895495 - DNA, 25 bp, Homo sapien
gaggtcaggggttcgcaactagctt

SEQ ID NO: 2895496 - DNA, 25 bp, Homo sapien
tcaggggttcgcaactagcttggcc

SEQ ID NO: 2895497 - DNA, 25 bp, Homo sapien
gagaggccgcgacgggtgggtcact

SEQ ID NO: 2895498 - DNA, 25 bp, Homo sapien
cgcttctcccggttgtcgctgagca

SEQ ID NO: 2895499 - DNA, 25 bp, Homo sapien
gggttatggtgtacaccttacagaa

SEQ ID NO: 2895500 - DNA, 25 bp, Homo sapien
tacaccttacagaatgtggagctgg

SEQ ID NO: 2895501 - DNA, 25 bp, Homo sapien
tctcccggttgtcgctgagcagtgg

SEQ ID NO: 2895502 - DNA, 25 bp, Homo sapien
gcttcaccttgaccctgtaggacac

SEQ ID NO: 2895503 - DNA, 25 bp, Homo sapien
ttcaccttgaccctgtaggacacca

SEQ ID NO: 2895504 - DNA, 25 bp, Homo sapien
tcaccttgaccctgtaggacaccag

SEQ ID NO: 2895505 - DNA, 25 bp, Homo sapien
accttgaccctgtaggacaccagga

SEQ ID NO: 2895506 - DNA, 25 bp, Homo sapien
gggcttggggtgcataagaacaaaa

SEQ ID NO: 2895507 - DNA, 25 bp, Homo sapien
tggggtgcataagaacaaaaggcag

SEQ ID NO: 2895508 - DNA, 25 bp, Homo sapien
cttggggtgcataagaacaaaaggc

SEQ ID NO: 2895509 - DNA, 25 bp, Homo sapien
gcttggggtgcataagaacaaaagg

SEQ ID NO: 2895510 - DNA, 25 bp, Homo sapien
ttggtgtccacagggacatctgtct

SEQ ID NO: 2895511 - DNA, 25 bp, Homo sapien
acagggacatctgtctccggagcgg

SEQ ID NO: 2895512 - DNA, 25 bp, Homo sapien
caaattcaatgaggttggtgtccac

SEQ ID NO: 2895513 - DNA, 25 bp, Homo sapien
ttggtatcaaattcaatgaggttgg

SEQ ID NO: 2895514 - DNA, 25 bp, Homo sapien
gcctcacaaggctaaggcatcttga

SEQ ID NO: 2895515 - DNA, 25 bp, Homo sapien
gaatgttataggaatctttgtccca

SEQ ID NO: 2895516 - DNA, 25 bp, Homo sapien
ccagaggtatttacaggaagggaca

SEQ ID NO: 2895517 - DNA, 25 bp, Homo sapien
gatttgatgctacaatccgcttctc

SEQ ID NO: 2895518 - DNA, 25 bp, Homo sapien
cttggtggtgggaaagagggttgtg

SEQ ID NO: 2895519 - DNA, 25 bp, Homo sapien
tggtggtgggaaagagggttgtgag

SEQ ID NO: 2895520 - DNA, 25 bp, Homo sapien
ttggtggtgggaaagagggttgtga

SEQ ID NO: 2895521 - DNA, 25 bp, Homo sapien
ccttcagccgaagccgggcaaagtc

SEQ ID NO: 2895522 - DNA, 25 bp, Homo sapien
gttgatcatcatagtcgtcatcctt

SEQ ID NO: 2895523 - DNA, 25 bp, Homo sapien
cccttcagccgaagccgggcaaagt

SEQ ID NO: 2895524 - DNA, 25 bp, Homo sapien
tcatcatagtcgtcatccttcatcc

SEQ ID NO: 2895525 - DNA, 25 bp, Homo sapien
aaagggtctcctcttgaaggaatgg

SEQ ID NO: 2895526 - DNA, 25 bp, Homo sapien
ttggttgaagaagcttccaggtgag

SEQ ID NO: 2895527 - DNA, 25 bp, Homo sapien
gggacaatcccccattgacagtggg

SEQ ID NO: 2895528 - DNA, 25 bp, Homo sapien
cagcaagagagggtccagtgtgtat

SEQ ID NO: 2895529 - DNA, 25 bp, Homo sapien
gcgcagagggcaccgtgtagcgagc

SEQ ID NO: 2895530 - DNA, 25 bp, Homo sapien
cctgcgcagagggcaccgtgtagcg

SEQ ID NO: 2895531 - DNA, 25 bp, Homo sapien
cgcctgcgcagagggcaccgtgtag

SEQ ID NO: 2895532 - DNA, 25 bp, Homo sapien
tgcgcagagggcaccgtgtagcgag

SEQ ID NO: 2895533 - DNA, 25 bp, Homo sapien
agtttctcctcagaaacgcgacgct

SEQ ID NO: 2895534 - DNA, 25 bp, Homo sapien
tctcctcagaaacgcgacgcttgtt

SEQ ID NO: 2895535 - DNA, 25 bp, Homo sapien
ctctgggaattctcaccaagagttt

SEQ ID NO: 2895536 - DNA, 25 bp, Homo sapien
tttctcctcagaaacgcgacgcttg

SEQ ID NO: 2895537 - DNA, 25 bp, Homo sapien
atgtcttccagagcgcgtagtctct

SEQ ID NO: 2895538 - DNA, 25 bp, Homo sapien
attctgaaggatggcgccgatttcc

SEQ ID NO: 2895539 - DNA, 25 bp, Homo sapien
cgttcgccaggctgtaggtagccat

SEQ ID NO: 2895540 - DNA, 25 bp, Homo sapien
gccgatttcccgttcaatgtcttcc

SEQ ID NO: 2895541 - DNA, 25 bp, Homo sapien
ctgtccaggttgtcgcatcccgaac

SEQ ID NO: 2895542 - DNA, 25 bp, Homo sapien
actgccagtgtagcctctccctagg

SEQ ID NO: 2895543 - DNA, 25 bp, Homo sapien
gctgcgcacgcacgtaggattccct

SEQ ID NO: 2895544 - DNA, 25 bp, Homo sapien
cctttcgctgcgcacgcacgtagga

SEQ ID NO: 2895545 - DNA, 25 bp, Homo sapien
gggacacacggagactgccagtgta

SEQ ID NO: 2895546 - DNA, 25 bp, Homo sapien
tgaagcggtgaaggccgccgcctgc

SEQ ID NO: 2895547 - DNA, 25 bp, Homo sapien
cctccacgtgttgcactgaagcggt

SEQ ID NO: 2895548 - DNA, 25 bp, Homo sapien
cgccgcctgccggtctaggagccgc

SEQ ID NO: 2895549 - DNA, 25 bp, Homo sapien
gtgaggtagcggatctgagctgaca

SEQ ID NO: 2895550 - DNA, 25 bp, Homo sapien
tctcgaactctgtcaagccactgcg

SEQ ID NO: 2895551 - DNA, 25 bp, Homo sapien
agaaacccgctctggatggccggct

SEQ ID NO: 2895552 - DNA, 25 bp, Homo sapien
tgatctcggctaagtacaacaacct

SEQ ID NO: 2895553 - DNA, 25 bp, Homo sapien
gcccagttaatgctccaccctggat

SEQ ID NO: 2895554 - DNA, 25 bp, Homo sapien
gtatctggcacaccgtaaaaattag

SEQ ID NO: 2895555 - DNA, 25 bp, Homo sapien
tggtccctgcgacgatttcagaacc

SEQ ID NO: 2895556 - DNA, 25 bp, Homo sapien
taaggatttgggacctcgtggcctg

SEQ ID NO: 2895557 - DNA, 25 bp, Homo sapien
aattagtaatggtagtggtccctgc

SEQ ID NO: 2895558 - DNA, 25 bp, Homo sapien
gactatcaatggagcaccatctcct

SEQ ID NO: 2895559 - DNA, 25 bp, Homo sapien
tttaccctaactccaaccaggcatc

SEQ ID NO: 2895560 - DNA, 25 bp, Homo sapien
ctacaagacagactatcaatggagc

SEQ ID NO: 2895561 - DNA, 25 bp, Homo sapien
catcaggtctcgtctcatttcttcc

SEQ ID NO: 2895562 - DNA, 25 bp, Homo sapien
catctgctcacaggttcgagccaca

SEQ ID NO: 2895563 - DNA, 25 bp, Homo sapien
gcatagtccactcgcttcagagcca

SEQ ID NO: 2895564 - DNA, 25 bp, Homo sapien
cacatcactgagcttgaggcgggca

SEQ ID NO: 2895565 - DNA, 25 bp, Homo sapien
gagccatctgacagtccttcctcga

SEQ ID NO: 2895566 - DNA, 25 bp, Homo sapien
gctggagaggccaaagcatagctgt

SEQ ID NO: 2895567 - DNA, 25 bp, Homo sapien
tgtctctccgaatgaagaagtatgt

SEQ ID NO: 2895568 - DNA, 25 bp, Homo sapien
tgtcctagggtactttgaccagcag

SEQ ID NO: 2895569 - DNA, 25 bp, Homo sapien
tcagtttttccatgcccaccatttg

SEQ ID NO: 2895570 - DNA, 25 bp, Homo sapien
tgctgggacaccatacgggttggtt

SEQ ID NO: 2895571 - DNA, 25 bp, Homo sapien
tgcctaccccagtgagagtctgatc

SEQ ID NO: 2895572 - DNA, 25 bp, Homo sapien
tctctctcccagtacaccagttgtt

SEQ ID NO: 2895573 - DNA, 25 bp, Homo sapien
agcccttgcgcccttactgtgattc

SEQ ID NO: 2895574 - DNA, 25 bp, Homo sapien
ttccgtttgctctcattccccgaaa

SEQ ID NO: 2895575 - DNA, 25 bp, Homo sapien
catctccgggttccgtttgctctca

SEQ ID NO: 2895576 - DNA, 25 bp, Homo sapien
tttgctctcattccccgaaacttca

SEQ ID NO: 2895577 - DNA, 25 bp, Homo sapien
tccgggttccgtttgctctcattcc

SEQ ID NO: 2895578 - DNA, 25 bp, Homo sapien
tgaaccgaaccgaatcggctcctcg

SEQ ID NO: 2895579 - DNA, 25 bp, Homo sapien
ggtccccggcgaaagccattgagac

SEQ ID NO: 2895580 - DNA, 25 bp, Homo sapien
tttccctgcgtccagaggctggcat

SEQ ID NO: 2895581 - DNA, 25 bp, Homo sapien
acctgactcagccaggttagccggg

SEQ ID NO: 2895582 - DNA, 25 bp, Homo sapien
tcgaaggtaaatacctcgcggtgga

SEQ ID NO: 2895583 - DNA, 25 bp, Homo sapien
gcagccgccaccacttttcgaaggt

SEQ ID NO: 2895584 - DNA, 25 bp, Homo sapien
gtgacgtcagggctgcccgagccct

SEQ ID NO: 2895585 - DNA, 25 bp, Homo sapien
tgcgcgggtgcggttgtgacgtcag

SEQ ID NO: 2895586 - DNA, 25 bp, Homo sapien
gagttcacaccctcaaaagcagagt

SEQ ID NO: 2895587 - DNA, 25 bp, Homo sapien
tggagaagactactcagggatgaga

SEQ ID NO: 2895588 - DNA, 25 bp, Homo sapien
tgagagtcacttagggttggatccg

SEQ ID NO: 2895589 - DNA, 25 bp, Homo sapien
gagagggctaatcctatcgggaacg

SEQ ID NO: 2895590 - DNA, 25 bp, Homo sapien
caggagagcaatgatggagtttggg

SEQ ID NO: 2895591 - DNA, 25 bp, Homo sapien
aaaagaagggatatatggtgaggga

SEQ ID NO: 2895592 - DNA, 25 bp, Homo sapien
agcaaaagaagggatatatggtgag

SEQ ID NO: 2895593 - DNA, 25 bp, Homo sapien
acaggagagcaatgatggagtttgg

SEQ ID NO: 2895594 - DNA, 25 bp, Homo sapien
gtcttcagcggcacagggccccggc

SEQ ID NO: 2895595 - DNA, 25 bp, Homo sapien
ttcagcggcacagggccccggccca

SEQ ID NO: 2895596 - DNA, 25 bp, Homo sapien
cagcggcacagggccccggcccaga

SEQ ID NO: 2895597 - DNA, 25 bp, Homo sapien
tcttcagcggcacagggccccggcc

SEQ ID NO: 2895598 - DNA, 25 bp, Homo sapien
cacaaactttcggaaccagccgaag

SEQ ID NO: 2895599 - DNA, 25 bp, Homo sapien
actttcggaaccagccgaagagaag

SEQ ID NO: 2895600 - DNA, 25 bp, Homo sapien
tcaaggaactcatcccggtatccag

SEQ ID NO: 2895601 - DNA, 25 bp, Homo sapien
actcatcccggtatccagacacaaa

SEQ ID NO: 2895602 - DNA, 25 bp, Homo sapien
agcggccctcaaggctagtccctac

SEQ ID NO: 2895603 - DNA, 25 bp, Homo sapien
ctggggtagccttctgatctgggcc

SEQ ID NO: 2895604 - DNA, 25 bp, Homo sapien
gcaggacatggagcacccaaagggc

SEQ ID NO: 2895605 - DNA, 25 bp, Homo sapien
caggctgatgcccacactatggttg

SEQ ID NO: 2895606 - DNA, 25 bp, Homo sapien
gatgtaggggctcaggtctcgcagg

SEQ ID NO: 2895607 - DNA, 25 bp, Homo sapien
gtggagtggagggttgtctcccagg

SEQ ID NO: 2895608 - DNA, 25 bp, Homo sapien
tcaggtctcgcaggtggagtggagg

SEQ ID NO: 2895609 - DNA, 25 bp, Homo sapien
ggagtggagggttgtctcccaggag

SEQ ID NO: 2895610 - DNA, 25 bp, Homo sapien
tccccttcctccccatcctctaggc

SEQ ID NO: 2895611 - DNA, 25 bp, Homo sapien
ctgcacccccgtcctctctcttctc

SEQ ID NO: 2895612 - DNA, 25 bp, Homo sapien
cttcctccccatcctctaggctgac

SEQ ID NO: 2895613 - DNA, 25 bp, Homo sapien
cccttcctccccatcctctaggctg

SEQ ID NO: 2895614 - DNA, 25 bp, Homo sapien
tcctctgactctcctggagggtttg

SEQ ID NO: 2895615 - DNA, 25 bp, Homo sapien
tcggcagccatccttgccacctcct

SEQ ID NO: 2895616 - DNA, 25 bp, Homo sapien
ctggggggactccctgctggtaggg

SEQ ID NO: 2895617 - DNA, 25 bp, Homo sapien
ctggtaggggctagctcccggtcct

SEQ ID NO: 2895618 - DNA, 25 bp, Homo sapien
ctagcagatcaatgcccaagatggt

SEQ ID NO: 2895619 - DNA, 25 bp, Homo sapien
gatggtgccatgctcatccgtcaca

SEQ ID NO: 2895620 - DNA, 25 bp, Homo sapien
aggagagcataggcccaaggagcca

SEQ ID NO: 2895621 - DNA, 25 bp, Homo sapien
cacaagtaagagacaggaaacgtgc

SEQ ID NO: 2895622 - DNA, 25 bp, Homo sapien
gcagttgggggggagatggcatcag

SEQ ID NO: 2895623 - DNA, 25 bp, Homo sapien
tgcagttgggggggagatggcatca

SEQ ID NO: 2895624 - DNA, 25 bp, Homo sapien
aatgcagttgggggggagatggcat

SEQ ID NO: 2895625 - DNA, 25 bp, Homo sapien
cagttgggggggagatggcatcagg

SEQ ID NO: 2895626 - DNA, 25 bp, Homo sapien
ttcgagcacgaagggaagcaaaggt

SEQ ID NO: 2895627 - DNA, 25 bp, Homo sapien
tgtgacacacatggcaggttcgagc

SEQ ID NO: 2895628 - DNA, 25 bp, Homo sapien
gttttggctaacttcacacctagcc

SEQ ID NO: 2895629 - DNA, 25 bp, Homo sapien
ttcacacctagccttgggaccaagc

SEQ ID NO: 2895630 - DNA, 25 bp, Homo sapien
tgtcagcttcgcttcaaagctgtgc

SEQ ID NO: 2895631 - DNA, 25 bp, Homo sapien
aggtgtcagcttcgcttcaaagctg

SEQ ID NO: 2895632 - DNA, 25 bp, Homo sapien
gtgtcagcttcgcttcaaagctgtg

SEQ ID NO: 2895633 - DNA, 25 bp, Homo sapien
caaggtgtcagcttcgcttcaaagc

SEQ ID NO: 2895634 - DNA, 25 bp, Homo sapien
aatcggtgactcacatcatctgggc

SEQ ID NO: 2895635 - DNA, 25 bp, Homo sapien
gcaagccttgggcaccaaaatcggt

SEQ ID NO: 2895636 - DNA, 25 bp, Homo sapien
cgctgccagtcagcccggagacaag

SEQ ID NO: 2895637 - DNA, 25 bp, Homo sapien
agacaagcctctccacaatacaaga

SEQ ID NO: 2895638 - DNA, 25 bp, Homo sapien
ctgggtccaatagccacgagtgagg

SEQ ID NO: 2895639 - DNA, 25 bp, Homo sapien
gaaggctgagggatggcgtgttgcc

SEQ ID NO: 2895640 - DNA, 25 bp, Homo sapien
gggtgtctggagaagcccgggcctg

SEQ ID NO: 2895641 - DNA, 25 bp, Homo sapien
tggaatcagcatgctgagctgggtc

SEQ ID NO: 2895642 - DNA, 25 bp, Homo sapien
gaggcatcagggcagtcccgtctcc

SEQ ID NO: 2895643 - DNA, 25 bp, Homo sapien
ggaggcatcagggcagtcccgtctc

SEQ ID NO: 2895644 - DNA, 25 bp, Homo sapien
gggcagtcccgtctccctggagaag

SEQ ID NO: 2895645 - DNA, 25 bp, Homo sapien
tcagggcagtcccgtctccctggag

SEQ ID NO: 2895646 - DNA, 25 bp, Homo sapien
tgaggccccgccatgtgtagtaatc

SEQ ID NO: 2895647 - DNA, 25 bp, Homo sapien
gccatgtgtagtaatcctgccatga

SEQ ID NO: 2895648 - DNA, 25 bp, Homo sapien
ggccccgccatgtgtagtaatcctg

SEQ ID NO: 2895649 - DNA, 25 bp, Homo sapien
tatgggggagtccaagctgaggccc

SEQ ID NO: 2895650 - DNA, 25 bp, Homo sapien
cacggtcagcgggtaggtgagaagc

SEQ ID NO: 2895651 - DNA, 25 bp, Homo sapien
tgacgtagtacacggtcagcgggta

SEQ ID NO: 2895652 - DNA, 25 bp, Homo sapien
accaggtgggtgatgacgtagtaca

SEQ ID NO: 2895653 - DNA, 25 bp, Homo sapien
gtcagcgggtaggtgagaagcacgg

SEQ ID NO: 2895654 - DNA, 25 bp, Homo sapien
ttgttttggatgttgagctcaggga

SEQ ID NO: 2895655 - DNA, 25 bp, Homo sapien
ttcccggcctccaccacgtggatct

SEQ ID NO: 2895656 - DNA, 25 bp, Homo sapien
aaacaccatgacaaggtcaaactcc

SEQ ID NO: 2895657 - DNA, 25 bp, Homo sapien
tgacaaggtcaaactccttcccggc

SEQ ID NO: 2895658 - DNA, 25 bp, Homo sapien
taaaatgctgctcgtcgctttcggg

SEQ ID NO: 2895659 - DNA, 25 bp, Homo sapien
aggccatcacctacaaactgcagct

SEQ ID NO: 2895660 - DNA, 25 bp, Homo sapien
tctgcagggtaaaatgctgctcgtc

SEQ ID NO: 2895661 - DNA, 25 bp, Homo sapien
gctttcggggggcaggccatcacct

SEQ ID NO: 2895662 - DNA, 25 bp, Homo sapien
ggatgcaccaggcaagatggggagt

SEQ ID NO: 2895663 - DNA, 25 bp, Homo sapien
gcagaagggcaggacccaaccagga

SEQ ID NO: 2895664 - DNA, 25 bp, Homo sapien
cagaagggcaggacccaaccaggag

SEQ ID NO: 2895665 - DNA, 25 bp, Homo sapien
aggatgcaccaggcaagatggggag

SEQ ID NO: 2895666 - DNA, 25 bp, Homo sapien
gtggaaaagccactggaagtcaggg

SEQ ID NO: 2895667 - DNA, 25 bp, Homo sapien
gggtggaaaagccactggaagtcag

SEQ ID NO: 2895668 - DNA, 25 bp, Homo sapien
ggaaaagccactggaagtcagggaa

SEQ ID NO: 2895669 - DNA, 25 bp, Homo sapien
agtggggtggaaaagccactggaag

SEQ ID NO: 2895670 - DNA, 25 bp, Homo sapien
atgccggaaccaggccggacagaca

SEQ ID NO: 2895671 - DNA, 25 bp, Homo sapien
gctgatatgccggaaccaggccgga

SEQ ID NO: 2895672 - DNA, 25 bp, Homo sapien
ggccgtgctgatatgccggaaccag

SEQ ID NO: 2895673 - DNA, 25 bp, Homo sapien
agagctgggccgtgctgatatgccg

SEQ ID NO: 2895674 - DNA, 25 bp, Homo sapien
tggctcccacggtgggcttctctcc

SEQ ID NO: 2895675 - DNA, 25 bp, Homo sapien
ggctcccacggtgggcttctctccc

SEQ ID NO: 2895676 - DNA, 25 bp, Homo sapien
gagaagctggctcccacggtgggct

SEQ ID NO: 2895677 - DNA, 25 bp, Homo sapien
aagctggctcccacggtgggcttct

SEQ ID NO: 2895678 - DNA, 25 bp, Homo sapien
acctcagccacgtatccttgagagc

SEQ ID NO: 2895679 - DNA, 25 bp, Homo sapien
cctcagccacgtatccttgagagca

SEQ ID NO: 2895680 - DNA, 25 bp, Homo sapien
gacctcagccacgtatccttgagag

SEQ ID NO: 2895681 - DNA, 25 bp, Homo sapien
agacctcagccacgtatccttgaga

SEQ ID NO: 2895682 - DNA, 25 bp, Homo sapien
ggtgaagaaggctggcactcggagg

SEQ ID NO: 2895683 - DNA, 25 bp, Homo sapien
cacagctgtactcgctgctctcggt

SEQ ID NO: 2895684 - DNA, 25 bp, Homo sapien
atggtctggccgtccatcacacagc

SEQ ID NO: 2895685 - DNA, 25 bp, Homo sapien
gacatgcagttgtcggccgctctga

SEQ ID NO: 2895686 - DNA, 25 bp, Homo sapien
ccagggcgtggggctagactcaggg

SEQ ID NO: 2895687 - DNA, 25 bp, Homo sapien
gtgggttggggagattccgtgagct

SEQ ID NO: 2895688 - DNA, 25 bp, Homo sapien
ggttggggagattccgtgagctaga

SEQ ID NO: 2895689 - DNA, 25 bp, Homo sapien
gttggggagattccgtgagctagat

SEQ ID NO: 2895690 - DNA, 25 bp, Homo sapien
ggtggaagatgaaggcattgcagta

SEQ ID NO: 2895691 - DNA, 25 bp, Homo sapien
aggtggaagatgaaggcattgcagt

SEQ ID NO: 2895692 - DNA, 25 bp, Homo sapien
caggtggaagatgaaggcattgcag

SEQ ID NO: 2895693 - DNA, 25 bp, Homo sapien
gtggaagatgaaggcattgcagtac

SEQ ID NO: 2895694 - DNA, 25 bp, Homo sapien
gccccgctcccttgagcaggcttgt

SEQ ID NO: 2895695 - DNA, 25 bp, Homo sapien
cccgctcccttgagcaggcttgtaa

SEQ ID NO: 2895696 - DNA, 25 bp, Homo sapien
cgctcccttgagcaggcttgtaaac

SEQ ID NO: 2895697 - DNA, 25 bp, Homo sapien
gggccccgctcccttgagcaggctt

SEQ ID NO: 2895698 - DNA, 25 bp, Homo sapien
ctggggactactagggtatcagcat

SEQ ID NO: 2895699 - DNA, 25 bp, Homo sapien
cctaggccttgagtgttttcacgtt

SEQ ID NO: 2895700 - DNA, 25 bp, Homo sapien
tcatgttttaccaacctgtcctccc

SEQ ID NO: 2895701 - DNA, 25 bp, Homo sapien
tgtttgggagctggggactactagg

SEQ ID NO: 2895702 - DNA, 25 bp, Homo sapien
tgtcatatcccgaatagtggccctt

SEQ ID NO: 2895703 - DNA, 25 bp, Homo sapien
agagcaactgtcatatcccgaatag

SEQ ID NO: 2895704 - DNA, 25 bp, Homo sapien
tatcccgaatagtggcccttccaac

SEQ ID NO: 2895705 - DNA, 25 bp, Homo sapien
gaatagtggcccttccaaccgtgga

SEQ ID NO: 2895706 - DNA, 25 bp, Homo sapien
aggtgtcaggaaggacaggcggtga

SEQ ID NO: 2895707 - DNA, 25 bp, Homo sapien
gtgtcaggaaggacaggcggtgagt

SEQ ID NO: 2895708 - DNA, 25 bp, Homo sapien
ggtgaggtgtcaggaaggacaggcg

SEQ ID NO: 2895709 - DNA, 25 bp, Homo sapien
tgaggtgtcaggaaggacaggcggt

SEQ ID NO: 2895710 - DNA, 25 bp, Homo sapien
gagccccacacagcgggcacatttt

SEQ ID NO: 2895711 - DNA, 25 bp, Homo sapien
cttgcaagctgagatggttggtgtt

SEQ ID NO: 2895712 - DNA, 25 bp, Homo sapien
agggcgttggccacaatgcagacga

SEQ ID NO: 2895713 - DNA, 25 bp, Homo sapien
gcccatgagccagacttgcaagctg

SEQ ID NO: 2895714 - DNA, 25 bp, Homo sapien
cacgaagccattgccatcctctccc

SEQ ID NO: 2895715 - DNA, 25 bp, Homo sapien
ccggtaggggagctctttagagcag

SEQ ID NO: 2895716 - DNA, 25 bp, Homo sapien
cagagggctgctagcccccacgaag

SEQ ID NO: 2895717 - DNA, 25 bp, Homo sapien
atcctctcccaagcaaccattctta

SEQ ID NO: 2895718 - DNA, 25 bp, Homo sapien
aacggctgcaatccccggacacagt

SEQ ID NO: 2895719 - DNA, 25 bp, Homo sapien
cccctgcccgaacggctgcaatccc

SEQ ID NO: 2895720 - DNA, 25 bp, Homo sapien
tgcccgaacggctgcaatccccgga

SEQ ID NO: 2895721 - DNA, 25 bp, Homo sapien
tgccccctgcccgaacggctgcaat

SEQ ID NO: 2895722 - DNA, 25 bp, Homo sapien
tgtggtgtggaaggggaggtaaggc

SEQ ID NO: 2895723 - DNA, 25 bp, Homo sapien
ctggatgtggtgtggaaggggaggt

SEQ ID NO: 2895724 - DNA, 25 bp, Homo sapien
ggatgtggtgtggaaggggaggtaa

SEQ ID NO: 2895725 - DNA, 25 bp, Homo sapien
gatgtggtgtggaaggggaggtaag

SEQ ID NO: 2895726 - DNA, 25 bp, Homo sapien
cggtgtcttcgaagtggtagcccca

SEQ ID NO: 2895727 - DNA, 25 bp, Homo sapien
ccgaggagaagaccgagcgcagcat

SEQ ID NO: 2895728 - DNA, 25 bp, Homo sapien
catctgggtccatttcggagcccag

SEQ ID NO: 2895729 - DNA, 25 bp, Homo sapien
actcgccgttcattaagcatctggg

SEQ ID NO: 2895730 - DNA, 25 bp, Homo sapien
gtagcccacgtggagcgagtgccct

SEQ ID NO: 2895731 - DNA, 25 bp, Homo sapien
ggagaaggcagcgtgcgcgtgcgcc

SEQ ID NO: 2895732 - DNA, 25 bp, Homo sapien
gggtgaggccacgtgggagaaggca

SEQ ID NO: 2895733 - DNA, 25 bp, Homo sapien
gggatttgctaaggcccaggtagcc

SEQ ID NO: 2895734 - DNA, 25 bp, Homo sapien
aatcgccgcagaagacaccaatggt

SEQ ID NO: 2895735 - DNA, 25 bp, Homo sapien
caatggtcgcgttcaccagctggat

SEQ ID NO: 2895736 - DNA, 25 bp, Homo sapien
gcaccgatcccatagagtgcggttg

SEQ ID NO: 2895737 - DNA, 25 bp, Homo sapien
gcagcgagaagagcgtcacattcca

SEQ ID NO: 2895738 - DNA, 25 bp, Homo sapien
gcaagggagtgagcgtccaggaagg

SEQ ID NO: 2895739 - DNA, 25 bp, Homo sapien
gagcaggtgtaacccggcggtcagt

SEQ ID NO: 2895740 - DNA, 25 bp, Homo sapien
gagagcgcaaagcagtttattctag

SEQ ID NO: 2895741 - DNA, 25 bp, Homo sapien
gcagtttattctagcgagcaaggga

SEQ ID NO: 2895742 - DNA, 25 bp, Homo sapien
agttattcctgttggaccgggcgcg

SEQ ID NO: 2895743 - DNA, 25 bp, Homo sapien
tgcgatgccgccactgggcgacaga

SEQ ID NO: 2895744 - DNA, 25 bp, Homo sapien
cccaaacttcttagagttattcctg

SEQ ID NO: 2895745 - DNA, 25 bp, Homo sapien
gatcgcgccactgcgatgccgccac

SEQ ID NO: 2895746 - DNA, 25 bp, Homo sapien
cgagaggaattgagtggctgaacca

SEQ ID NO: 2895747 - DNA, 25 bp, Homo sapien
agcagcagcgcgaagatagcgagag

SEQ ID NO: 2895748 - DNA, 25 bp, Homo sapien
ggctgaaccagtgccgcagggctgg

SEQ ID NO: 2895749 - DNA, 25 bp, Homo sapien
ggctccgaacactgagataaagcag

SEQ ID NO: 2895750 - DNA, 25 bp, Homo sapien
agaagcggagcggtgagggctcgag

SEQ ID NO: 2895751 - DNA, 25 bp, Homo sapien
tgagggcctggattccgggcttcct

SEQ ID NO: 2895752 - DNA, 25 bp, Homo sapien
gcttcctcccggagcaagtgaggga

SEQ ID NO: 2895753 - DNA, 25 bp, Homo sapien
gctcgagaaagaggcttgagtcgtg

SEQ ID NO: 2895754 - DNA, 25 bp, Homo sapien
gtttcccctggaacgcagggctgcg

SEQ ID NO: 2895755 - DNA, 25 bp, Homo sapien
ccgtttcccctggaacgcagggctg

SEQ ID NO: 2895756 - DNA, 25 bp, Homo sapien
cctgggtccgcagcccgagcgggcg

SEQ ID NO: 2895757 - DNA, 25 bp, Homo sapien
tgcgccctgggtccgcagcccgagc

SEQ ID NO: 2895758 - DNA, 25 bp, Homo sapien
tctgctgtgcgctcagcttccgacg

SEQ ID NO: 2895759 - DNA, 25 bp, Homo sapien
tggcggctcttctgctgtgcgctca

SEQ ID NO: 2895760 - DNA, 25 bp, Homo sapien
agaaattgttccgaaggtttagctg

SEQ ID NO: 2895761 - DNA, 25 bp, Homo sapien
gcgcccaatcctgcgcctagcgtac

SEQ ID NO: 2895762 - DNA, 25 bp, Homo sapien
cagacacggaggctgtttcctctcc

SEQ ID NO: 2895763 - DNA, 25 bp, Homo sapien
acacggaggctgtttcctctccggg

SEQ ID NO: 2895764 - DNA, 25 bp, Homo sapien
ggcccagacacggaggctgtttcct

SEQ ID NO: 2895765 - DNA, 25 bp, Homo sapien
ccgagggcccagacacggaggctgt

SEQ ID NO: 2895766 - DNA, 25 bp, Homo sapien
gactggcgtggaaccgcctcatcat

SEQ ID NO: 2895767 - DNA, 25 bp, Homo sapien
ttcagactggcgtggaaccgcctca

SEQ ID NO: 2895768 - DNA, 25 bp, Homo sapien
acgagtgccctccatcccgccaggt

SEQ ID NO: 2895769 - DNA, 25 bp, Homo sapien
ccttcgggtttcagactggcgtgga

SEQ ID NO: 2895770 - DNA, 25 bp, Homo sapien
ctagtggcgaaggcgaagacggagc

SEQ ID NO: 2895771 - DNA, 25 bp, Homo sapien
agtggcgaaggcgaagacggagccg

SEQ ID NO: 2895772 - DNA, 25 bp, Homo sapien
gtggcgaaggcgaagacggagccga

SEQ ID NO: 2895773 - DNA, 25 bp, Homo sapien
gacggagccgaggggagtcaggaat

SEQ ID NO: 2895774 - DNA, 25 bp, Homo sapien
ggtaggcgtcgctgcactgcacgcc

SEQ ID NO: 2895775 - DNA, 25 bp, Homo sapien
gaggcgggcggtctgtcggaccagc

SEQ ID NO: 2895776 - DNA, 25 bp, Homo sapien
agcagcgtgcgagagcccgagctcc

SEQ ID NO: 2895777 - DNA, 25 bp, Homo sapien
gccagcgaccagtagtgctccgcgt

SEQ ID NO: 2895778 - DNA, 25 bp, Homo sapien
tggctccgggacacgccagctccag

SEQ ID NO: 2895779 - DNA, 25 bp, Homo sapien
tcggtggctccgggacacgccagct

SEQ ID NO: 2895780 - DNA, 25 bp, Homo sapien
ggctctgggtgcggttgtagacatc

SEQ ID NO: 2895781 - DNA, 25 bp, Homo sapien
aggctctgggtgcggttgtagacat

SEQ ID NO: 2895782 - DNA, 25 bp, Homo sapien
cggttgtagacatcctccaaggtgc

SEQ ID NO: 2895783 - DNA, 25 bp, Homo sapien
gttgtagacatcctccaaggtgccg

SEQ ID NO: 2895784 - DNA, 25 bp, Homo sapien
tgccgagaacagagatgacacatct

SEQ ID NO: 2895785 - DNA, 25 bp, Homo sapien
tacgtcgacgctgccaaatattgct

SEQ ID NO: 2895786 - DNA, 25 bp, Homo sapien
tatttcccttaagcgcctgtcgtca

SEQ ID NO: 2895787 - DNA, 25 bp, Homo sapien
agactcagcgtgtgtttggcaaccg

SEQ ID NO: 2895788 - DNA, 25 bp, Homo sapien
tctttggtcgcgctttgaggccttc

SEQ ID NO: 2895789 - DNA, 25 bp, Homo sapien
gaagctactccgaggttgacggcag

SEQ ID NO: 2895790 - DNA, 25 bp, Homo sapien
taaagcgctctgtcacgctctttgg

SEQ ID NO: 2895791 - DNA, 25 bp, Homo sapien
tcaaagcaactgtcgtaaagcgctc

SEQ ID NO: 2895792 - DNA, 25 bp, Homo sapien
ggctccccgagcagctagtaaggta

SEQ ID NO: 2895793 - DNA, 25 bp, Homo sapien
agtggaaacttctcggctttcccag

SEQ ID NO: 2895794 - DNA, 25 bp, Homo sapien
acttctcggctttcccagtctggag

SEQ ID NO: 2895795 - DNA, 25 bp, Homo sapien
gagcagctagtaaggtagccgccat

SEQ ID NO: 2895796 - DNA, 25 bp, Homo sapien
cgtcaaactgcacggccatgatagt

SEQ ID NO: 2895797 - DNA, 25 bp, Homo sapien
accacgcccccgtcaaactgcacgg

SEQ ID NO: 2895798 - DNA, 25 bp, Homo sapien
cagtggttgttctggagtccgcccc

SEQ ID NO: 2895799 - DNA, 25 bp, Homo sapien
ccagtggttgttctggagtccgccc

SEQ ID NO: 2895800 - DNA, 25 bp, Homo sapien
aaaccgagctggtaggtgacagcat

SEQ ID NO: 2895801 - DNA, 25 bp, Homo sapien
gagcctgagcgacagcagaaaatgc

SEQ ID NO: 2895802 - DNA, 25 bp, Homo sapien
gcttgtcagtcactcgattggcgat

SEQ ID NO: 2895803 - DNA, 25 bp, Homo sapien
cggtcgtgaataggtgtcagcttgt

SEQ ID NO: 2895804 - DNA, 25 bp, Homo sapien
tgtgtggaccagtggaggctcattc

SEQ ID NO: 2895805 - DNA, 25 bp, Homo sapien
tgtggaccagtggaggctcattcag

SEQ ID NO: 2895806 - DNA, 25 bp, Homo sapien
cagtggaggctcattcagttcaatg

SEQ ID NO: 2895807 - DNA, 25 bp, Homo sapien
gaccagtggaggctcattcagttca

SEQ ID NO: 2895808 - DNA, 25 bp, Homo sapien
taacacatctccttaaagaggctgg

SEQ ID NO: 2895809 - DNA, 25 bp, Homo sapien
tcccagcctgcgatgatgattcccg

SEQ ID NO: 2895810 - DNA, 25 bp, Homo sapien
tcccggtatcggtaacacatctcct

SEQ ID NO: 2895811 - DNA, 25 bp, Homo sapien
gatgattcccgccatcaggtcttcc

SEQ ID NO: 2895812 - DNA, 25 bp, Homo sapien
aggagtcaccagtcgtatcctccct

SEQ ID NO: 2895813 - DNA, 25 bp, Homo sapien
gagaggagtcaccagtcgtatcctc

SEQ ID NO: 2895814 - DNA, 25 bp, Homo sapien
ggagaggagtcaccagtcgtatcct

SEQ ID NO: 2895815 - DNA, 25 bp, Homo sapien
ctccaacacacgtacattcacctgt

SEQ ID NO: 2895816 - DNA, 25 bp, Homo sapien
tagccatagatgtaggagctcccgg

SEQ ID NO: 2895817 - DNA, 25 bp, Homo sapien
tcccggagcctccaatggcaaagga

SEQ ID NO: 2895818 - DNA, 25 bp, Homo sapien
cattggcagtgaattgcagacactc

SEQ ID NO: 2895819 - DNA, 25 bp, Homo sapien
tcccggtaggtagcatcaacatagc

SEQ ID NO: 2895820 - DNA, 25 bp, Homo sapien
caggcggatcactcctccactggag

SEQ ID NO: 2895821 - DNA, 25 bp, Homo sapien
actggagccatcccgctccatggcc

SEQ ID NO: 2895822 - DNA, 25 bp, Homo sapien
atcccgctccatggccaaagcgaga

SEQ ID NO: 2895823 - DNA, 25 bp, Homo sapien
ggagccatcccgctccatggccaaa

SEQ ID NO: 2895824 - DNA, 25 bp, Homo sapien
tcaggcgggtggtaaagtggcaacg

SEQ ID NO: 2895825 - DNA, 25 bp, Homo sapien
tctcccaaaagtacttgccgctcta

SEQ ID NO: 2895826 - DNA, 25 bp, Homo sapien
gtggcaacggcgaatttgggtatct

SEQ ID NO: 2895827 - DNA, 25 bp, Homo sapien
tatctggtctcccaaaagtacttgc

SEQ ID NO: 2895828 - DNA, 25 bp, Homo sapien
cttattgcatactagaatcccagga

SEQ ID NO: 2895829 - DNA, 25 bp, Homo sapien
ctcttattgcatactagaatcccag

SEQ ID NO: 2895830 - DNA, 25 bp, Homo sapien
ttattgcatactagaatcccaggat

SEQ ID NO: 2895831 - DNA, 25 bp, Homo sapien
tcttattgcatactagaatcccagg

SEQ ID NO: 2895832 - DNA, 25 bp, Homo sapien
catggtgtttcccatggtgcgggtg

SEQ ID NO: 2895833 - DNA, 25 bp, Homo sapien
tgtttcccatggtgcgggtgccgga

SEQ ID NO: 2895834 - DNA, 25 bp, Homo sapien
ccattcccagctctgatcgcctcca

SEQ ID NO: 2895835 - DNA, 25 bp, Homo sapien
ctgatcgcctccactgttgagatgg

SEQ ID NO: 2895836 - DNA, 25 bp, Homo sapien
ttcccgagccaagagagcagaccgg

SEQ ID NO: 2895837 - DNA, 25 bp, Homo sapien
ccgagccaagagagcagaccggagc

SEQ ID NO: 2895838 - DNA, 25 bp, Homo sapien
gggttcccgagccaagagagcagac

SEQ ID NO: 2895839 - DNA, 25 bp, Homo sapien
ggttcccgagccaagagagcagacc

SEQ ID NO: 2895840 - DNA, 25 bp, Homo sapien
ctcttccagatcctcctcttccccc

SEQ ID NO: 2895841 - DNA, 25 bp, Homo sapien
gatcctcctcttcccccacggactc

SEQ ID NO: 2895842 - DNA, 25 bp, Homo sapien
tccagatcctcctcttcccccacgg

SEQ ID NO: 2895843 - DNA, 25 bp, Homo sapien
cagatcctcctcttcccccacggac

SEQ ID NO: 2895844 - DNA, 25 bp, Homo sapien
ctaggaacattgggaagcctcaggg

SEQ ID NO: 2895845 - DNA, 25 bp, Homo sapien
cctcagggaggcgagctgtcctgca

SEQ ID NO: 2895846 - DNA, 25 bp, Homo sapien
cccatcctaactcccgcaggtcctc

SEQ ID NO: 2895847 - DNA, 25 bp, Homo sapien
ctgtcctgcagaacccgccccccat

SEQ ID NO: 2895848 - DNA, 25 bp, Homo sapien
tggagtccagttcgtccccagtggg

SEQ ID NO: 2895849 - DNA, 25 bp, Homo sapien
agggtgtccacctcatcggactcca

SEQ ID NO: 2895850 - DNA, 25 bp, Homo sapien
acctcatcggactccatctggagct

SEQ ID NO: 2895851 - DNA, 25 bp, Homo sapien
ctggagtccagttcgtccccagtgg

SEQ ID NO: 2895852 - DNA, 25 bp, Homo sapien
agggaccccaggtgcgaacaccaag

SEQ ID NO: 2895853 - DNA, 25 bp, Homo sapien
caccaaggggtgcactttcagagac

SEQ ID NO: 2895854 - DNA, 25 bp, Homo sapien
agagactgaagctcatagatggcca

SEQ ID NO: 2895855 - DNA, 25 bp, Homo sapien
tagatggccagaaacgggtgcatcc

SEQ ID NO: 2895856 - DNA, 25 bp, Homo sapien
tccgctggtatatctttcggtgccc

SEQ ID NO: 2895857 - DNA, 25 bp, Homo sapien
ttggatccgctggtatatctttcgg

SEQ ID NO: 2895858 - DNA, 25 bp, Homo sapien
gatccgctggtatatctttcggtgc

SEQ ID NO: 2895859 - DNA, 25 bp, Homo sapien
cttggatccgctggtatatctttcg

SEQ ID NO: 2895860 - DNA, 25 bp, Homo sapien
ggagcagactcatcaagactttgtg

SEQ ID NO: 2895861 - DNA, 25 bp, Homo sapien
tcaagcggacagaatacagagtgca

SEQ ID NO: 2895862 - DNA, 25 bp, Homo sapien
ttgtccaggaaaagtcgccgtgagt

SEQ ID NO: 2895863 - DNA, 25 bp, Homo sapien
ggaggtcccgatgcagctcctgaaa

SEQ ID NO: 2895864 - DNA, 25 bp, Homo sapien
ccctcaggacctgcccggggtagag

SEQ ID NO: 2895865 - DNA, 25 bp, Homo sapien
tagagagggcatctctctgttgcct

SEQ ID NO: 2895866 - DNA, 25 bp, Homo sapien
gctggctgcatgtctggtggagccc

SEQ ID NO: 2895867 - DNA, 25 bp, Homo sapien
ctggctgcatgtctggtggagccct

SEQ ID NO: 2895868 - DNA, 25 bp, Homo sapien
ccggaggacctggcatctggtccca

SEQ ID NO: 2895869 - DNA, 25 bp, Homo sapien
tagttgcgatagaaagacatggtca

SEQ ID NO: 2895870 - DNA, 25 bp, Homo sapien
gtcaagagacggttgaggtaattct

SEQ ID NO: 2895871 - DNA, 25 bp, Homo sapien
catggcatggtagttgcgatagaaa

SEQ ID NO: 2895872 - DNA, 25 bp, Homo sapien
tagaaagacatggtcaagagacggt

SEQ ID NO: 2895873 - DNA, 25 bp, Homo sapien
tcctttgcggcccaagtccgggata

SEQ ID NO: 2895874 - DNA, 25 bp, Homo sapien
tgcggcccaagtccgggataaagga

SEQ ID NO: 2895875 - DNA, 25 bp, Homo sapien
gtggccacctgagcgcttccggatc

SEQ ID NO: 2895876 - DNA, 25 bp, Homo sapien
caggtgaggccaggaacacggtggc

SEQ ID NO: 2895877 - DNA, 25 bp, Homo sapien
acaaacttggtctcggccacagcag

SEQ ID NO: 2895878 - DNA, 25 bp, Homo sapien
tcttggaccagcgataacaaacttg

SEQ ID NO: 2895879 - DNA, 25 bp, Homo sapien
ccagctgcttggccatagcccgtac

SEQ ID NO: 2895880 - DNA, 25 bp, Homo sapien
tcctctctgccctcaaaattttctt

SEQ ID NO: 2895881 - DNA, 25 bp, Homo sapien
aagggctccgtgtgttcctctctgc

SEQ ID NO: 2895882 - DNA, 25 bp, Homo sapien
gagcagaagggctccgtgtgttcct

SEQ ID NO: 2895883 - DNA, 25 bp, Homo sapien
ctgtgggaggtatcgatccgcacgc

SEQ ID NO: 2895884 - DNA, 25 bp, Homo sapien
gagatggcacctgtctcgaggcaca

SEQ ID NO: 2895885 - DNA, 25 bp, Homo sapien
cgtgccgtgcctccgtgctcctttt

SEQ ID NO: 2895886 - DNA, 25 bp, Homo sapien
cgaggcacatgtacagcaggaagga

SEQ ID NO: 2895887 - DNA, 25 bp, Homo sapien
tgtcatgccggtgcagctgtaggaa

SEQ ID NO: 2895888 - DNA, 25 bp, Homo sapien
ctgtcatgccggtgcagctgtagga

SEQ ID NO: 2895889 - DNA, 25 bp, Homo sapien
gcctgccggtagctgctgcacttga

SEQ ID NO: 2895890 - DNA, 25 bp, Homo sapien
ccaccaccgtgcctgccggtagctg

SEQ ID NO: 2895891 - DNA, 25 bp, Homo sapien
aggtcaggggagtcagaagccagaa

SEQ ID NO: 2895892 - DNA, 25 bp, Homo sapien
aggaggtcaggggagtcagaagcca

SEQ ID NO: 2895893 - DNA, 25 bp, Homo sapien
ggaggtcaggggagtcagaagccag

SEQ ID NO: 2895894 - DNA, 25 bp, Homo sapien
gctcgaaggatggcatctgccacag

SEQ ID NO: 2895895 - DNA, 25 bp, Homo sapien
tcgaaggatggcatctgccacagca

SEQ ID NO: 2895896 - DNA, 25 bp, Homo sapien
ctcgaaggatggcatctgccacagc

SEQ ID NO: 2895897 - DNA, 25 bp, Homo sapien
tcctcttgagcataatgtccagtct

SEQ ID NO: 2895898 - DNA, 25 bp, Homo sapien
cagtctccagtcatctgaatgggcc

SEQ ID NO: 2895899 - DNA, 25 bp, Homo sapien
ccttcctcttgagcataatgtccag

SEQ ID NO: 2895900 - DNA, 25 bp, Homo sapien
tgaatgggccggacgcttcaggtaa

SEQ ID NO: 2895901 - DNA, 25 bp, Homo sapien
tcagcgccctcttgctatagccact

SEQ ID NO: 2895902 - DNA, 25 bp, Homo sapien
cagcgccctcttgctatagccactg

SEQ ID NO: 2895903 - DNA, 25 bp, Homo sapien
agcagaatagacacacggacacctt

SEQ ID NO: 2895904 - DNA, 25 bp, Homo sapien
agaatagacacacggacaccttcct

SEQ ID NO: 2895905 - DNA, 25 bp, Homo sapien
tgatgggcccacaacgtcacttggt

SEQ ID NO: 2895906 - DNA, 25 bp, Homo sapien
tcatgatgggcccacaacgtcactt

SEQ ID NO: 2895907 - DNA, 25 bp, Homo sapien
gcttctcatgatgggcccacaacgt

SEQ ID NO: 2895908 - DNA, 25 bp, Homo sapien
ggcccacaacgtcacttggtctggg

SEQ ID NO: 2895909 - DNA, 25 bp, Homo sapien
agcggccataggcaaggtccagtcc

SEQ ID NO: 2895910 - DNA, 25 bp, Homo sapien
tgggaggcagctgattcagaggagt

SEQ ID NO: 2895911 - DNA, 25 bp, Homo sapien
tgcaggtcatcccagcggccatagg

SEQ ID NO: 2895912 - DNA, 25 bp, Homo sapien
caaggtcagtcagtcggtagtgcag

SEQ ID NO: 2895913 - DNA, 25 bp, Homo sapien
cttggtgataagattgctgtagtcc

SEQ ID NO: 2895914 - DNA, 25 bp, Homo sapien
tggctggtgagtctgggcgcggggt

SEQ ID NO: 2895915 - DNA, 25 bp, Homo sapien
cagaagaattggttgtgagagaggt

SEQ ID NO: 2895916 - DNA, 25 bp, Homo sapien
ggtgataagattgctgtagtccttg

SEQ ID NO: 2895917 - DNA, 25 bp, Homo sapien
tcgaaaggccggtccagctgcaccc

SEQ ID NO: 2895918 - DNA, 25 bp, Homo sapien
gaaaggccggtccagctgcacccag

SEQ ID NO: 2895919 - DNA, 25 bp, Homo sapien
cttcgaaaggccggtccagctgcac

SEQ ID NO: 2895920 - DNA, 25 bp, Homo sapien
aaaggccggtccagctgcacccagt

SEQ ID NO: 2895921 - DNA, 25 bp, Homo sapien
actctcagtaccagccccagcttct

SEQ ID NO: 2895922 - DNA, 25 bp, Homo sapien
ggctttggcgggtgggaggcttcac

SEQ ID NO: 2895923 - DNA, 25 bp, Homo sapien
cttgacccctctcatcccactctca

SEQ ID NO: 2895924 - DNA, 25 bp, Homo sapien
gggctttggcgggtgggaggcttca

SEQ ID NO: 2895925 - DNA, 25 bp, Homo sapien
gaggggtcgtctccctgtcaatgaa

SEQ ID NO: 2895926 - DNA, 25 bp, Homo sapien
ggtaggccatggacgaccaccccaa

SEQ ID NO: 2895927 - DNA, 25 bp, Homo sapien
tgaagtgccgggcaaggtcccgggc

SEQ ID NO: 2895928 - DNA, 25 bp, Homo sapien
ccaacgtcccgccatggcatccgag

SEQ ID NO: 2895929 - DNA, 25 bp, Homo sapien
tccagcccctatcggagggaatgaa

SEQ ID NO: 2895930 - DNA, 25 bp, Homo sapien
ctccagcccctatcggagggaatga

SEQ ID NO: 2895931 - DNA, 25 bp, Homo sapien
cagcccctatcggagggaatgaaca

SEQ ID NO: 2895932 - DNA, 25 bp, Homo sapien
agcccctatcggagggaatgaacac

SEQ ID NO: 2895933 - DNA, 25 bp, Homo sapien
ctgattggccgtgctggtagacttg

SEQ ID NO: 2895934 - DNA, 25 bp, Homo sapien
cctggaagtgtgaaggggagctgat

SEQ ID NO: 2895935 - DNA, 25 bp, Homo sapien
tgtacggtggtgcactgccctcctg

SEQ ID NO: 2895936 - DNA, 25 bp, Homo sapien
gtatgtgggagtcttgtacttggcc

SEQ ID NO: 2895937 - DNA, 25 bp, Homo sapien
ggaatggtgaatgcgatgtgcttca

SEQ ID NO: 2895938 - DNA, 25 bp, Homo sapien
atggtgaatgcgatgtgcttcattt

SEQ ID NO: 2895939 - DNA, 25 bp, Homo sapien
gggaatggtgaatgcgatgtgcttc

SEQ ID NO: 2895940 - DNA, 25 bp, Homo sapien
ctagggaatggtgaatgcgatgtgc

SEQ ID NO: 2895941 - DNA, 25 bp, Homo sapien
gaccagcggtccactgatcgcaaga

SEQ ID NO: 2895942 - DNA, 25 bp, Homo sapien
accagcggtccactgatcgcaagac

SEQ ID NO: 2895943 - DNA, 25 bp, Homo sapien
tgaccagcggtccactgatcgcaag

SEQ ID NO: 2895944 - DNA, 25 bp, Homo sapien
cagagacagacatcagcagcctggc

SEQ ID NO: 2895945 - DNA, 25 bp, Homo sapien
gggcaagaatcagagacagacatca

SEQ ID NO: 2895946 - DNA, 25 bp, Homo sapien
caggctccaggcgtctgcttctgct

SEQ ID NO: 2895947 - DNA, 25 bp, Homo sapien
agccctcaatgactgactccactca

SEQ ID NO: 2895948 - DNA, 25 bp, Homo sapien
ccgcccatctgagcagctaatgaag

SEQ ID NO: 2895949 - DNA, 25 bp, Homo sapien
ttgttcagaaccgtccgcccatctg

SEQ ID NO: 2895950 - DNA, 25 bp, Homo sapien
tctgagcagctaatgaagaactgat

SEQ ID NO: 2895951 - DNA, 25 bp, Homo sapien
tcatcgcccaccttgttcagaaccg

SEQ ID NO: 2895952 - DNA, 25 bp, Homo sapien
tgtaagtaaagtgcagaatggcctg

SEQ ID NO: 2895953 - DNA, 25 bp, Homo sapien
gtcaccctcgaagccagggagtaag

SEQ ID NO: 2895954 - DNA, 25 bp, Homo sapien
taagggcaaaagcacgtagactcgg

SEQ ID NO: 2895955 - DNA, 25 bp, Homo sapien
atggagttgccaccgcccgtggaga

SEQ ID NO: 2895956 - DNA, 25 bp, Homo sapien
ggattgaatactccccacgacacag

SEQ ID NO: 2895957 - DNA, 25 bp, Homo sapien
gatgcaggattgaatactccccacg

SEQ ID NO: 2895958 - DNA, 25 bp, Homo sapien
aggcgatgcaggattgaatactccc

SEQ ID NO: 2895959 - DNA, 25 bp, Homo sapien
tgaatactccccacgacacagggtc

SEQ ID NO: 2895960 - DNA, 25 bp, Homo sapien
gatggaaatatagtcccgccatgct

SEQ ID NO: 2895961 - DNA, 25 bp, Homo sapien
tgactgtccggtcatctgcgatgag

SEQ ID NO: 2895962 - DNA, 25 bp, Homo sapien
tgtggatgtagatgagctccgagac

SEQ ID NO: 2895963 - DNA, 25 bp, Homo sapien
ctccgtgtgtacgaagcccgcagat

SEQ ID NO: 2895964 - DNA, 25 bp, Homo sapien
cattcatgagggatggttccgtctc

SEQ ID NO: 2895965 - DNA, 25 bp, Homo sapien
gcctgatactctgccccattcatga

SEQ ID NO: 2895966 - DNA, 25 bp, Homo sapien
gtctctgtgtcctcgatcagcacgg

SEQ ID NO: 2895967 - DNA, 25 bp, Homo sapien
gctccggtcattgatgtttgcagaa

SEQ ID NO: 2895968 - DNA, 25 bp, Homo sapien
agtgcttccgcagactcaaggcaaa

SEQ ID NO: 2895969 - DNA, 25 bp, Homo sapien
gtgcttccgcagactcaaggcaaac

SEQ ID NO: 2895970 - DNA, 25 bp, Homo sapien
cagcgtgggtgacagagcgactccg

SEQ ID NO: 2895971 - DNA, 25 bp, Homo sapien
gaggtcaagagatctagaccatcct

SEQ ID NO: 2895972 - DNA, 25 bp, Homo sapien
tccagcgtgggtgacagagcgactc

SEQ ID NO: 2895973 - DNA, 25 bp, Homo sapien
gcgactccgtctcaaaaagaaaaca

SEQ ID NO: 2895974 - DNA, 25 bp, Homo sapien
ttcagctggcgaagtcgaggttgca

SEQ ID NO: 2895975 - DNA, 25 bp, Homo sapien
tgactttgatgactaccttgatgct

SEQ ID NO: 2895976 - DNA, 25 bp, Homo sapien
tagagaacctgagtaccagaaaagt

SEQ ID NO: 2895977 - DNA, 25 bp, Homo sapien
aagttacattgtccctactcaggta

SEQ ID NO: 2895978 - DNA, 25 bp, Homo sapien
tcacagatggggtctcggagatcca

SEQ ID NO: 2895979 - DNA, 25 bp, Homo sapien
tagatattggcgttgctctcagcca

SEQ ID NO: 2895980 - DNA, 25 bp, Homo sapien
aagtctggccgggtatttgctccaa

SEQ ID NO: 2895981 - DNA, 25 bp, Homo sapien
cacaactggaagaagtcatcacaga

SEQ ID NO: 2895982 - DNA, 25 bp, Homo sapien
cggccacgtactcccggagagtccg

SEQ ID NO: 2895983 - DNA, 25 bp, Homo sapien
tggccaagggctccacggccacgta

SEQ ID NO: 2895984 - DNA, 25 bp, Homo sapien
aacgcgtggcattggatggcaggca

SEQ ID NO: 2895985 - DNA, 25 bp, Homo sapien
ccggagagtccgcagggaacgcgtg

SEQ ID NO: 2895986 - DNA, 25 bp, Homo sapien
tgggtgagctcagaccgagccaagg

SEQ ID NO: 2895987 - DNA, 25 bp, Homo sapien
catgccctccttgctacccagcggg

SEQ ID NO: 2895988 - DNA, 25 bp, Homo sapien
gcgggggcagcaaagactcatcctc

SEQ ID NO: 2895989 - DNA, 25 bp, Homo sapien
atgtccacacttctagggggatcat

SEQ ID NO: 2895990 - DNA, 25 bp, Homo sapien
cagggttgggagtgcccttttcagc

SEQ ID NO: 2895991 - DNA, 25 bp, Homo sapien
aataagaggcttgaccctgctcacc

SEQ ID NO: 2895992 - DNA, 25 bp, Homo sapien
taagggtcctctgtaacacctctag

SEQ ID NO: 2895993 - DNA, 25 bp, Homo sapien
tcagctatttctcacgtaagggtcc

SEQ ID NO: 2895994 - DNA, 25 bp, Homo sapien
gaaatgcttattgaacggatacaaa

SEQ ID NO: 2895995 - DNA, 25 bp, Homo sapien
gaacggatacaaagttagtgtctgt

SEQ ID NO: 2895996 - DNA, 25 bp, Homo sapien
gctgaagccagaagtggctttatcc

SEQ ID NO: 2895997 - DNA, 25 bp, Homo sapien
ggagggagttaatgtgccctccttc

SEQ ID NO: 2895998 - DNA, 25 bp, Homo sapien
aggcgctatctccccggagccagcc

SEQ ID NO: 2895999 - DNA, 25 bp, Homo sapien
ctgacaggcgctatctccccggagc

SEQ ID NO: 2896000 - DNA, 25 bp, Homo sapien
tgacaggcgctatctccccggagcc

SEQ ID NO: 2896001 - DNA, 25 bp, Homo sapien
acaggcgctatctccccggagccag

SEQ ID NO: 2896002 - DNA, 25 bp, Homo sapien
cgctccggctcggttactccactgc

SEQ ID NO: 2896003 - DNA, 25 bp, Homo sapien
gggccgctcacgctccggctcggtt

SEQ ID NO: 2896004 - DNA, 25 bp, Homo sapien
ctcacgctccggctcggttactcca

SEQ ID NO: 2896005 - DNA, 25 bp, Homo sapien
ggctcggttactccactgccgccgt

SEQ ID NO: 2896006 - DNA, 25 bp, Homo sapien
gggcggacaggtcgatgtcgtccag

SEQ ID NO: 2896007 - DNA, 25 bp, Homo sapien
cggacaggtcgatgtcgtccaggct

SEQ ID NO: 2896008 - DNA, 25 bp, Homo sapien
ccgcagggcggacaggtcgatgtcg

SEQ ID NO: 2896009 - DNA, 25 bp, Homo sapien
cagggcggacaggtcgatgtcgtcc

SEQ ID NO: 2896010 - DNA, 25 bp, Homo sapien
cagacgattaccctcatcaccagct

SEQ ID NO: 2896011 - DNA, 25 bp, Homo sapien
tcagacgattaccctcatcaccagc

SEQ ID NO: 2896012 - DNA, 25 bp, Homo sapien
agacgattaccctcatcaccagctg

SEQ ID NO: 2896013 - DNA, 25 bp, Homo sapien
agcagggccagggttacattgtaag

SEQ ID NO: 2896014 - DNA, 25 bp, Homo sapien
ttaccatgcccacgatacaggactg

SEQ ID NO: 2896015 - DNA, 25 bp, Homo sapien
cacccggccactgaactgacatttt

SEQ ID NO: 2896016 - DNA, 25 bp, Homo sapien
cacacatggctaagagattaacgca

SEQ ID NO: 2896017 - DNA, 25 bp, Homo sapien
caagaaaacttgtgacctgtaccca

SEQ ID NO: 2896018 - DNA, 25 bp, Homo sapien
actagagaagcttcatgaccaagaa

SEQ ID NO: 2896019 - DNA, 25 bp, Homo sapien
gatgccaggcccgttcaggctggca

SEQ ID NO: 2896020 - DNA, 25 bp, Homo sapien
gcagataccaagctaacggaggagg

SEQ ID NO: 2896021 - DNA, 25 bp, Homo sapien
agagagagcaaggaagggcacagca

SEQ ID NO: 2896022 - DNA, 25 bp, Homo sapien
cctgggaagcagacaccagagagag

SEQ ID NO: 2896023 - DNA, 25 bp, Homo sapien
gagagagcaaggaagggcacagcat

SEQ ID NO: 2896024 - DNA, 25 bp, Homo sapien
gaagcagacaccagagagagcaagg

SEQ ID NO: 2896025 - DNA, 25 bp, Homo sapien
tctgtggcctcggaggcaggctgac

SEQ ID NO: 2896026 - DNA, 25 bp, Homo sapien
cagggaattcctacgtggttggcaa

SEQ ID NO: 2896027 - DNA, 25 bp, Homo sapien
cagacagcgagcaggaaggctctaa

SEQ ID NO: 2896028 - DNA, 25 bp, Homo sapien
tctcggaggagaaaagagctcagcg

SEQ ID NO: 2896029 - DNA, 25 bp, Homo sapien
cacggcccgagagtggactttctta

SEQ ID NO: 2896030 - DNA, 25 bp, Homo sapien
tactgactctttcgtgacaccaatt

SEQ ID NO: 2896031 - DNA, 25 bp, Homo sapien
gactctttcgtgacaccaattacat

SEQ ID NO: 2896032 - DNA, 25 bp, Homo sapien
ctttcgtgacaccaattacattttt

SEQ ID NO: 2896033 - DNA, 25 bp, Homo sapien
ccctgtactgactctttcgtgacac

SEQ ID NO: 2896034 - DNA, 25 bp, Homo sapien
ccacatgctgttcatcactctcctc

SEQ ID NO: 2896035 - DNA, 25 bp, Homo sapien
acatgctgttcatcactctcctcct

SEQ ID NO: 2896036 - DNA, 25 bp, Homo sapien
cgtgcctgtgcctcccgacctccac

SEQ ID NO: 2896037 - DNA, 25 bp, Homo sapien
atgcctcgtgcctgtgcctcccgac

SEQ ID NO: 2896038 - DNA, 25 bp, Homo sapien
tttgtcaaggtgaagcaagcgctca

SEQ ID NO: 2896039 - DNA, 25 bp, Homo sapien
gaaagccagggctctaacaagtgaa

SEQ ID NO: 2896040 - DNA, 25 bp, Homo sapien
cagtttccgtccgagatcagcagaa

SEQ ID NO: 2896041 - DNA, 25 bp, Homo sapien
tcactgtaggtaagcgaggccatgg

SEQ ID NO: 2896042 - DNA, 25 bp, Homo sapien
caaggatacagtactggcagagatt

SEQ ID NO: 2896043 - DNA, 25 bp, Homo sapien
aagggataagggcctgagagacaaa

SEQ ID NO: 2896044 - DNA, 25 bp, Homo sapien
gcaagtattctgacagaagggtggt

SEQ ID NO: 2896045 - DNA, 25 bp, Homo sapien
cttaggcacccttcaattaggagta

SEQ ID NO: 2896046 - DNA, 25 bp, Homo sapien
cagactgttctcaaacttctgagtt

SEQ ID NO: 2896047 - DNA, 25 bp, Homo sapien
tccagactgttctcaaacttctgag

SEQ ID NO: 2896048 - DNA, 25 bp, Homo sapien
catgcaccaccgctcctggctagtt

SEQ ID NO: 2896049 - DNA, 25 bp, Homo sapien
actgttctcaaacttctgagttcaa

SEQ ID NO: 2896050 - DNA, 25 bp, Homo sapien
agatataggcgatacagtcctcctt

SEQ ID NO: 2896051 - DNA, 25 bp, Homo sapien
gccttttgtgttctttaccaggtca

SEQ ID NO: 2896052 - DNA, 25 bp, Homo sapien
ccttcagggcattgccttttgtgtt

SEQ ID NO: 2896053 - DNA, 25 bp, Homo sapien
tgaggatctccctgcagatataggc

SEQ ID NO: 2896054 - DNA, 25 bp, Homo sapien
tgatgtctcgatggatcaccttgtg

SEQ ID NO: 2896055 - DNA, 25 bp, Homo sapien
ttgatgtctcgatggatcaccttgt

SEQ ID NO: 2896056 - DNA, 25 bp, Homo sapien
tggatcaccttgtgggcatggagat

SEQ ID NO: 2896057 - DNA, 25 bp, Homo sapien
aagtgttccgtctgcccacggtgcg

SEQ ID NO: 2896058 - DNA, 25 bp, Homo sapien
aatgaaagtgttccgtctgcccacg

SEQ ID NO: 2896059 - DNA, 25 bp, Homo sapien
gagtcccaatgaaagtgttccgtct

SEQ ID NO: 2896060 - DNA, 25 bp, Homo sapien
tcccaatgaaagtgttccgtctgcc

SEQ ID NO: 2896061 - DNA, 25 bp, Homo sapien
tccctctgccatctcgatggctgtg

SEQ ID NO: 2896062 - DNA, 25 bp, Homo sapien
tctgccatctcgatggctgtgattc

SEQ ID NO: 2896063 - DNA, 25 bp, Homo sapien
ctgggcggagggttccgaggaatga

SEQ ID NO: 2896064 - DNA, 25 bp, Homo sapien
ggacttgagcctgggcggagggttc

SEQ ID NO: 2896065 - DNA, 25 bp, Homo sapien
gcggagggttccgaggaatgaggaa

SEQ ID NO: 2896066 - DNA, 25 bp, Homo sapien
tgagcctgggcggagggttccgagg

SEQ ID NO: 2896067 - DNA, 25 bp, Homo sapien
tgagacatgtgtcaatgaagtcaat

SEQ ID NO: 2896068 - DNA, 25 bp, Homo sapien
cttgatgagacatgtgtcaatgaag

SEQ ID NO: 2896069 - DNA, 25 bp, Homo sapien
gatgagacatgtgtcaatgaagtca

SEQ ID NO: 2896070 - DNA, 25 bp, Homo sapien
agacatgtgtcaatgaagtcaatga

SEQ ID NO: 2896071 - DNA, 25 bp, Homo sapien
tagctgctccgtgggtgggcggctc

SEQ ID NO: 2896072 - DNA, 25 bp, Homo sapien
cgcttcttccgggatcggtcaatgt

SEQ ID NO: 2896073 - DNA, 25 bp, Homo sapien
ggtccttaagctggatgcggacctg

SEQ ID NO: 2896074 - DNA, 25 bp, Homo sapien
tcccggatgaagggaaacttcagta

SEQ ID NO: 2896075 - DNA, 25 bp, Homo sapien
tgccccctccagcctgcccactgac

SEQ ID NO: 2896076 - DNA, 25 bp, Homo sapien
ctgccccctccagcctgcccactga

SEQ ID NO: 2896077 - DNA, 25 bp, Homo sapien
ctcgctgccgctgtactcatattct

SEQ ID NO: 2896078 - DNA, 25 bp, Homo sapien
aagcctctgagttgctcttattttc

SEQ ID NO: 2896079 - DNA, 25 bp, Homo sapien
ggcgtagagtcgactctccaggcac

SEQ ID NO: 2896080 - DNA, 25 bp, Homo sapien
gttttaaagcctctgagttgctctt

SEQ ID NO: 2896081 - DNA, 25 bp, Homo sapien
ctgctggagccggagaaactcccgg

SEQ ID NO: 2896082 - DNA, 25 bp, Homo sapien
tgctcctctatgcgccgctgccgct

SEQ ID NO: 2896083 - DNA, 25 bp, Homo sapien
ctgctcctctatgcgccgctgccgc

SEQ ID NO: 2896084 - DNA, 25 bp, Homo sapien
tctgctcctctatgcgccgctgccg

SEQ ID NO: 2896085 - DNA, 25 bp, Homo sapien
ctcctctatgcgccgctgccgctgg

SEQ ID NO: 2896086 - DNA, 25 bp, Homo sapien
ctcctcccgccgcagagcctgcatg

SEQ ID NO: 2896087 - DNA, 25 bp, Homo sapien
tcccgccgcagagcctgcatgtcct

SEQ ID NO: 2896088 - DNA, 25 bp, Homo sapien
ctgcagcttccgctgctcccgctcc

SEQ ID NO: 2896089 - DNA, 25 bp, Homo sapien
ccgccgcagagcctgcatgtcctcc

SEQ ID NO: 2896090 - DNA, 25 bp, Homo sapien
ggatctcgagctgtcgctgctcctc

SEQ ID NO: 2896091 - DNA, 25 bp, Homo sapien
tgaaggatctcgagctgtcgctgct

SEQ ID NO: 2896092 - DNA, 25 bp, Homo sapien
gttgctgaaggatctcgagctgtcg

SEQ ID NO: 2896093 - DNA, 25 bp, Homo sapien
tgctgaaggatctcgagctgtcgct

SEQ ID NO: 2896094 - DNA, 25 bp, Homo sapien
tgcctagagaggagatgtattccct

SEQ ID NO: 2896095 - DNA, 25 bp, Homo sapien
ccctgggagttagagcaggcatgcc

SEQ ID NO: 2896096 - DNA, 25 bp, Homo sapien
ttgaagtgttcccatcccgttccag

SEQ ID NO: 2896097 - DNA, 25 bp, Homo sapien
cagaggacgctgagggacccgttac

SEQ ID NO: 2896098 - DNA, 25 bp, Homo sapien
tggagacgttctgactgccgctgct

SEQ ID NO: 2896099 - DNA, 25 bp, Homo sapien
caggctggtttgtcagcgggattca

SEQ ID NO: 2896100 - DNA, 25 bp, Homo sapien
catgccccgaccataatggtacagg

SEQ ID NO: 2896101 - DNA, 25 bp, Homo sapien
gctgcctctggagacgttctgactg

SEQ ID NO: 2896102 - DNA, 25 bp, Homo sapien
tcttggccaagggagagttctgctg

SEQ ID NO: 2896103 - DNA, 25 bp, Homo sapien
tggccaagggagagttctgctgctt

SEQ ID NO: 2896104 - DNA, 25 bp, Homo sapien
ccggcctctgcataggaggagtctg

SEQ ID NO: 2896105 - DNA, 25 bp, Homo sapien
gctccaccggcctctgcataggagg

SEQ ID NO: 2896106 - DNA, 25 bp, Homo sapien
gcttcagtgggacccggtgtgccac

SEQ ID NO: 2896107 - DNA, 25 bp, Homo sapien
caggtgctgcatatggcttcagtgg

SEQ ID NO: 2896108 - DNA, 25 bp, Homo sapien
gggtacaggtgctgcatatggcttc

SEQ ID NO: 2896109 - DNA, 25 bp, Homo sapien
tacaggtgctgcatatggcttcagt

SEQ ID NO: 2896110 - DNA, 25 bp, Homo sapien
gcctcgttatctgggcggacccagg

SEQ ID NO: 2896111 - DNA, 25 bp, Homo sapien
ttgggtggggcctcgttatctgggc

SEQ ID NO: 2896112 - DNA, 25 bp, Homo sapien
gaaggcagccaggtttcgggtgggc

SEQ ID NO: 2896113 - DNA, 25 bp, Homo sapien
ccaggtttcgggtgggctggtcctg

SEQ ID NO: 2896114 - DNA, 25 bp, Homo sapien
agggcagtggcgatagatgaggtcc

SEQ ID NO: 2896115 - DNA, 25 bp, Homo sapien
gcgatagatgaggtcctctgaggca

SEQ ID NO: 2896116 - DNA, 25 bp, Homo sapien
ccccactggtgttaagggcagtggc

SEQ ID NO: 2896117 - DNA, 25 bp, Homo sapien
cggccccactggtgttaagggcagt

SEQ ID NO: 2896118 - DNA, 25 bp, Homo sapien
tgcagatagatttgccaggcggagt

SEQ ID NO: 2896119 - DNA, 25 bp, Homo sapien
atagatttgccaggcggagttgctg

SEQ ID NO: 2896120 - DNA, 25 bp, Homo sapien
gcagatagatttgccaggcggagtt

SEQ ID NO: 2896121 - DNA, 25 bp, Homo sapien
agatagatttgccaggcggagttgc

SEQ ID NO: 2896122 - DNA, 25 bp, Homo sapien
ctggaaggacgctgtccgagcgttc

SEQ ID NO: 2896123 - DNA, 25 bp, Homo sapien
ctgtccgagcgttcccagccagggt

SEQ ID NO: 2896124 - DNA, 25 bp, Homo sapien
agccagggtcgctcctcctgaggtc

SEQ ID NO: 2896125 - DNA, 25 bp, Homo sapien
cagccagggtcgctcctcctgaggt

SEQ ID NO: 2896126 - DNA, 25 bp, Homo sapien
cggcagggtggaagaaggtcactga

SEQ ID NO: 2896127 - DNA, 25 bp, Homo sapien
ggacggcagggtggaagaaggtcac

SEQ ID NO: 2896128 - DNA, 25 bp, Homo sapien
gcagggtggaagaaggtcactgatg

SEQ ID NO: 2896129 - DNA, 25 bp, Homo sapien
gacggcagggtggaagaaggtcact

SEQ ID NO: 2896130 - DNA, 25 bp, Homo sapien
cgtgagcggtggtcgtcgggcttgg

SEQ ID NO: 2896131 - DNA, 25 bp, Homo sapien
tgagcggtggtcgtcgggcttggct

SEQ ID NO: 2896132 - DNA, 25 bp, Homo sapien
gcctggccgtgagcggtggtcgtcg

SEQ ID NO: 2896133 - DNA, 25 bp, Homo sapien
tggccgtgagcggtggtcgtcgggc

SEQ ID NO: 2896134 - DNA, 25 bp, Homo sapien
ttctcggtagatcagcggagacccc

SEQ ID NO: 2896135 - DNA, 25 bp, Homo sapien
aggaaaggttagcaccatgagaagc

SEQ ID NO: 2896136 - DNA, 25 bp, Homo sapien
acacccagcaccctgaggctaagcc

SEQ ID NO: 2896137 - DNA, 25 bp, Homo sapien
cacagcccttctcggtagatcagcg

SEQ ID NO: 2896138 - DNA, 25 bp, Homo sapien
caaagggtgccgggacaccccagca

SEQ ID NO: 2896139 - DNA, 25 bp, Homo sapien
aaagggtgccgggacaccccagcag

SEQ ID NO: 2896140 - DNA, 25 bp, Homo sapien
ggggctcccacaagcaggcccatct

SEQ ID NO: 2896141 - DNA, 25 bp, Homo sapien
tggacgacgagtagtccatggcctt

SEQ ID NO: 2896142 - DNA, 25 bp, Homo sapien
cacctcctcgctggacgacgagtag

SEQ ID NO: 2896143 - DNA, 25 bp, Homo sapien
tccagagtccgctctttcagcaaca

SEQ ID NO: 2896144 - DNA, 25 bp, Homo sapien
cctcgtcgtcctcactgctttccac

SEQ ID NO: 2896145 - DNA, 25 bp, Homo sapien
gagggccccactcccgatgccgtac

SEQ ID NO: 2896146 - DNA, 25 bp, Homo sapien
cactctctagagaagggagccgctc

SEQ ID NO: 2896147 - DNA, 25 bp, Homo sapien
acaacacacagggcagcgggagaga

SEQ ID NO: 2896148 - DNA, 25 bp, Homo sapien
tgctccaccgtgaggtgcttccctg

SEQ ID NO: 2896149 - DNA, 25 bp, Homo sapien
acttgaagaggccaccccacaacac

SEQ ID NO: 2896150 - DNA, 25 bp, Homo sapien
ctgtgagagaggaaggtggggcccc

SEQ ID NO: 2896151 - DNA, 25 bp, Homo sapien
tgagagaggaaggtggggcccctcc

SEQ ID NO: 2896152 - DNA, 25 bp, Homo sapien
agagaggaaggtggggcccctccag

SEQ ID NO: 2896153 - DNA, 25 bp, Homo sapien
tgtgagagaggaaggtggggcccct

SEQ ID NO: 2896154 - DNA, 25 bp, Homo sapien
gggtcccggtgatctcctcgacgtc

SEQ ID NO: 2896155 - DNA, 25 bp, Homo sapien
tgatctcctcgacgtcgtggaccac

SEQ ID NO: 2896156 - DNA, 25 bp, Homo sapien
gtgctgacgctgtctgtatccccat

SEQ ID NO: 2896157 - DNA, 25 bp, Homo sapien
gcgctggaccaccatggtgccgccc

SEQ ID NO: 2896158 - DNA, 25 bp, Homo sapien
tgttctcggtgggtgagtggctggg

SEQ ID NO: 2896159 - DNA, 25 bp, Homo sapien
gttctcggtgggtgagtggctgggc

SEQ ID NO: 2896160 - DNA, 25 bp, Homo sapien
gtgtacccattgctgtcagcatgca

SEQ ID NO: 2896161 - DNA, 25 bp, Homo sapien
tgggctggaccacgtcaggcaggtt

SEQ ID NO: 2896162 - DNA, 25 bp, Homo sapien
tggtagatccctagatccacaaaca

SEQ ID NO: 2896163 - DNA, 25 bp, Homo sapien
gatccacaaacatcgtgaacgagct

SEQ ID NO: 2896164 - DNA, 25 bp, Homo sapien
catcgtgaacgagctcttgccaggg

SEQ ID NO: 2896165 - DNA, 25 bp, Homo sapien
tgtgatggggatgctgtccccactg

SEQ ID NO: 2896166 - DNA, 25 bp, Homo sapien
ggtcttggcacctcataatacgcag

SEQ ID NO: 2896167 - DNA, 25 bp, Homo sapien
agtcaaaaggtctggctcaagtccc

SEQ ID NO: 2896168 - DNA, 25 bp, Homo sapien
ggtcccctggcaactctgagcattt

SEQ ID NO: 2896169 - DNA, 25 bp, Homo sapien
gaggctgcgtctcaagaccactgtg

SEQ ID NO: 2896170 - DNA, 25 bp, Homo sapien
gcttcttgtacttccggatctcagg

SEQ ID NO: 2896171 - DNA, 25 bp, Homo sapien
gattcacgttgaccacagaaccctt

SEQ ID NO: 2896172 - DNA, 25 bp, Homo sapien
ttcctcacgtcgtactgcagctggt

SEQ ID NO: 2896173 - DNA, 25 bp, Homo sapien
ctgcacagaggatctcggagttgaa

SEQ ID NO: 2896174 - DNA, 25 bp, Homo sapien
gcccacttcggtccagcaacatcag

SEQ ID NO: 2896175 - DNA, 25 bp, Homo sapien
tgctggaagcgtcgccgcccaatga

SEQ ID NO: 2896176 - DNA, 25 bp, Homo sapien
gcccaatgagtccatacaccttgcc

SEQ ID NO: 2896177 - DNA, 25 bp, Homo sapien
ccatctgctggaagcgtcgccgccc

SEQ ID NO: 2896178 - DNA, 25 bp, Homo sapien
cacaaggggtgagaaagtgtggccc

SEQ ID NO: 2896179 - DNA, 25 bp, Homo sapien
gtgtggccccaccttccagtgcctg

SEQ ID NO: 2896180 - DNA, 25 bp, Homo sapien
ctcctctgtcagcataccacaaggg

SEQ ID NO: 2896181 - DNA, 25 bp, Homo sapien
tgaggcccgaatgccaccgccctgg

SEQ ID NO: 2896182 - DNA, 25 bp, Homo sapien
ttctgggtcattgtgcagaatcttg

SEQ ID NO: 2896183 - DNA, 25 bp, Homo sapien
gccaggacaggtaatacacccgcag

SEQ ID NO: 2896184 - DNA, 25 bp, Homo sapien
gacaggtaatacacccgcagtttgt

SEQ ID NO: 2896185 - DNA, 25 bp, Homo sapien
cttgttccggagccaggacaggtaa

SEQ ID NO: 2896186 - DNA, 25 bp, Homo sapien
aagtccctggctcccagatccattt

SEQ ID NO: 2896187 - DNA, 25 bp, Homo sapien
caagtatgcgctggccactctgttg

SEQ ID NO: 2896188 - DNA, 25 bp, Homo sapien
tccccgtggtctgtcactacactgc

SEQ ID NO: 2896189 - DNA, 25 bp, Homo sapien
gaagagggatgctgagacttccctt

SEQ ID NO: 2896190 - DNA, 25 bp, Homo sapien
aggccatgaatttgtggtagggttt

SEQ ID NO: 2896191 - DNA, 25 bp, Homo sapien
tacacctccacggagctcttgaggg

SEQ ID NO: 2896192 - DNA, 25 bp, Homo sapien
gggcgatgaccaggaacttaatccg

SEQ ID NO: 2896193 - DNA, 25 bp, Homo sapien
caggaacttaatccgctcgtatttc

SEQ ID NO: 2896194 - DNA, 25 bp, Homo sapien
ctcaggggcacggggagaggcgctg

SEQ ID NO: 2896195 - DNA, 25 bp, Homo sapien
tggtgttagggaccgaggctgggat

SEQ ID NO: 2896196 - DNA, 25 bp, Homo sapien
ccagatggtgttagggaccgaggct

SEQ ID NO: 2896197 - DNA, 25 bp, Homo sapien
ctccagatggtgttagggaccgagg

SEQ ID NO: 2896198 - DNA, 25 bp, Homo sapien
tgcacagggatgtagatgtcatagc

SEQ ID NO: 2896199 - DNA, 25 bp, Homo sapien
tcctctactgtcaggtcgaccagca

SEQ ID NO: 2896200 - DNA, 25 bp, Homo sapien
ctctactgtcaggtcgaccagcaga

SEQ ID NO: 2896201 - DNA, 25 bp, Homo sapien
tagctgttccccgagtcgacatcca

SEQ ID NO: 2896202 - DNA, 25 bp, Homo sapien
gagggggactagagtctccgtgtct

SEQ ID NO: 2896203 - DNA, 25 bp, Homo sapien
ggactagagtctccgtgtctggtgc

SEQ ID NO: 2896204 - DNA, 25 bp, Homo sapien
gagtctccgtgtctggtgcccagac

SEQ ID NO: 2896205 - DNA, 25 bp, Homo sapien
cccagactgggccatcccactcccc

SEQ ID NO: 2896206 - DNA, 25 bp, Homo sapien
gcagcaccacatccttaatgatgcg

SEQ ID NO: 2896207 - DNA, 25 bp, Homo sapien
aatgatgcgcccgtacgtgttgacg

SEQ ID NO: 2896208 - DNA, 25 bp, Homo sapien
gcagcatctccatgccgtcggtgtt

SEQ ID NO: 2896209 - DNA, 25 bp, Homo sapien
gtgttgacgtagacaccctcgtcct

SEQ ID NO: 2896210 - DNA, 25 bp, Homo sapien
ttgtcattccgctcacacaggaact

SEQ ID NO: 2896211 - DNA, 25 bp, Homo sapien
tccacagagcggatctcaatggctt

SEQ ID NO: 2896212 - DNA, 25 bp, Homo sapien
gcctctgagctcgtttgtgcatgaa

SEQ ID NO: 2896213 - DNA, 25 bp, Homo sapien
gcccattatctggttggagcagatg

SEQ ID NO: 2896214 - DNA, 25 bp, Homo sapien
cagaagagttgagggagacacagag

SEQ ID NO: 2896215 - DNA, 25 bp, Homo sapien
cagtggtagtggctgactgccctcc

SEQ ID NO: 2896216 - DNA, 25 bp, Homo sapien
tcctcggaatctgaagggagcgcag

SEQ ID NO: 2896217 - DNA, 25 bp, Homo sapien
ccctcacccggaggaaaggcaggct

SEQ ID NO: 2896218 - DNA, 25 bp, Homo sapien
aagaagtcaccaagggctgaggttg

SEQ ID NO: 2896219 - DNA, 25 bp, Homo sapien
gggcaggagaagaagtcaccaaggg

SEQ ID NO: 2896220 - DNA, 25 bp, Homo sapien
ggtggggcaggagaagaagtcacca

SEQ ID NO: 2896221 - DNA, 25 bp, Homo sapien
aggagaagaagtcaccaagggctga

SEQ ID NO: 2896222 - DNA, 25 bp, Homo sapien
gttcatgatgcagttacggttcaga

SEQ ID NO: 2896223 - DNA, 25 bp, Homo sapien
agagtcatgaagtaaacttggctgc

SEQ ID NO: 2896224 - DNA, 25 bp, Homo sapien
tgcagttacggttcagagtcatgaa

SEQ ID NO: 2896225 - DNA, 25 bp, Homo sapien
cccccagagcggactgaggcaaaaa

SEQ ID NO: 2896226 - DNA, 25 bp, Homo sapien
cagcaggctccagtgaaatcaaacc

SEQ ID NO: 2896227 - DNA, 25 bp, Homo sapien
ccaagcactctcctctcaaatggag

SEQ ID NO: 2896228 - DNA, 25 bp, Homo sapien
ggctaggcccactcaattcctggga

SEQ ID NO: 2896229 - DNA, 25 bp, Homo sapien
tcacgtgatcacgaaagcatcaggg

SEQ ID NO: 2896230 - DNA, 25 bp, Homo sapien
tacattcaaggggggagccggctcc

SEQ ID NO: 2896231 - DNA, 25 bp, Homo sapien
gctcccctgacgtgcaaataaaggg

SEQ ID NO: 2896232 - DNA, 25 bp, Homo sapien
tgacgtgcaaataaaggggtccagg

SEQ ID NO: 2896233 - DNA, 25 bp, Homo sapien
gtacattcaaggggggagccggctc

SEQ ID NO: 2896234 - DNA, 25 bp, Homo sapien
tatccaaggccactacattgaggag

SEQ ID NO: 2896235 - DNA, 25 bp, Homo sapien
tacttgctgctcacactatatacag

SEQ ID NO: 2896236 - DNA, 25 bp, Homo sapien
gaggagaagggttacttgctgctca

SEQ ID NO: 2896237 - DNA, 25 bp, Homo sapien
tctttattaacaaacaggatatcca

SEQ ID NO: 2896238 - DNA, 25 bp, Homo sapien
agctggagggcgtaaccagcccgta

SEQ ID NO: 2896239 - DNA, 25 bp, Homo sapien
gcggcgccttcggtagctgggagga

SEQ ID NO: 2896240 - DNA, 25 bp, Homo sapien
aagccgtgtttgtgaggtcagcgcg

SEQ ID NO: 2896241 - DNA, 25 bp, Homo sapien
atgtcatgccttccgggctcctcag

SEQ ID NO: 2896242 - DNA, 25 bp, Homo sapien
ggagctgtggaagtggtagatccac

SEQ ID NO: 2896243 - DNA, 25 bp, Homo sapien
tggtagatccacatcagggtgtcca

SEQ ID NO: 2896244 - DNA, 25 bp, Homo sapien
gagctgtggaagtggtagatccaca

SEQ ID NO: 2896245 - DNA, 25 bp, Homo sapien
ggtagatccacatcagggtgtccag

SEQ ID NO: 2896246 - DNA, 25 bp, Homo sapien
tgcatcttcggttcgggtggctcca

SEQ ID NO: 2896247 - DNA, 25 bp, Homo sapien
atattcatgggctgcggccacggag

SEQ ID NO: 2896248 - DNA, 25 bp, Homo sapien
gcggccacggagagttccagggaag

SEQ ID NO: 2896249 - DNA, 25 bp, Homo sapien
tgccgaagctcacgaggctggctgt

SEQ ID NO: 2896250 - DNA, 25 bp, Homo sapien
ccgatcgccgcgtatcctaagcccc

SEQ ID NO: 2896251 - DNA, 25 bp, Homo sapien
tccttgttcccgctacccgatcgcc

SEQ ID NO: 2896252 - DNA, 25 bp, Homo sapien
ttgttcccgctacccgatcgccgcg

SEQ ID NO: 2896253 - DNA, 25 bp, Homo sapien
ccgctacccgatcgccgcgtatcct

SEQ ID NO: 2896254 - DNA, 25 bp, Homo sapien
gctgctgttgcgactgtcgcaggaa

SEQ ID NO: 2896255 - DNA, 25 bp, Homo sapien
ggattccgaggcctagctgctgttg

SEQ ID NO: 2896256 - DNA, 25 bp, Homo sapien
ctccctggactaggagccgggcgct

SEQ ID NO: 2896257 - DNA, 25 bp, Homo sapien
ggaatgaggcagacccctgcagacc

SEQ ID NO: 2896258 - DNA, 25 bp, Homo sapien
tcgacatcgacacagaggcctatac

SEQ ID NO: 2896259 - DNA, 25 bp, Homo sapien
gattaccgactcaactacagcaagg

SEQ ID NO: 2896260 - DNA, 25 bp, Homo sapien
tttccccgagcccacagtattgatg

SEQ ID NO: 2896261 - DNA, 25 bp, Homo sapien
tgtgcaaaaagctcggtttccccga

SEQ ID NO: 2896262 - DNA, 25 bp, Homo sapien
gcaatggtaggatcaccactcactg

SEQ ID NO: 2896263 - DNA, 25 bp, Homo sapien
tgcaatggtaggatcaccactcact

SEQ ID NO: 2896264 - DNA, 25 bp, Homo sapien
tgatatggggattctccttctcgat

SEQ ID NO: 2896265 - DNA, 25 bp, Homo sapien
tatggggattctccttctcgattca

SEQ ID NO: 2896266 - DNA, 25 bp, Homo sapien
tgctgatatggggattctccttctc

SEQ ID NO: 2896267 - DNA, 25 bp, Homo sapien
gatatggggattctccttctcgatt

SEQ ID NO: 2896268 - DNA, 25 bp, Homo sapien
ttctgaaggcaagcccacaatgtgg

SEQ ID NO: 2896269 - DNA, 25 bp, Homo sapien
tgaactttgaacatcagctggaccc

SEQ ID NO: 2896270 - DNA, 25 bp, Homo sapien
cacaatgtggtggaaactgcccgtg

SEQ ID NO: 2896271 - DNA, 25 bp, Homo sapien
ttctggcttctgcagcggcatcatc

SEQ ID NO: 2896272 - DNA, 25 bp, Homo sapien
tctctgacacagtttaaggacccaa

SEQ ID NO: 2896273 - DNA, 25 bp, Homo sapien
aatttttggtgacattgactctcag

SEQ ID NO: 2896274 - DNA, 25 bp, Homo sapien
tcagctgcgagagtggatctaagcc

SEQ ID NO: 2896275 - DNA, 25 bp, Homo sapien
caacaagtaccctgacataagctga

SEQ ID NO: 2896276 - DNA, 25 bp, Homo sapien
aaggcacagagcgtcttctagggtg

SEQ ID NO: 2896277 - DNA, 25 bp, Homo sapien
gtcttctagggtgccactcgactcc

SEQ ID NO: 2896278 - DNA, 25 bp, Homo sapien
ggcaggcagaaagacctccgaaggc

SEQ ID NO: 2896279 - DNA, 25 bp, Homo sapien
gacctccgaaggcacagagcgtctt

SEQ ID NO: 2896280 - DNA, 25 bp, Homo sapien
gcacactggccacattagaggtcat

SEQ ID NO: 2896281 - DNA, 25 bp, Homo sapien
ggatctcacagttgcataaccaggg

SEQ ID NO: 2896282 - DNA, 25 bp, Homo sapien
tacaggaggttctcactcaggtgga

SEQ ID NO: 2896283 - DNA, 25 bp, Homo sapien
ccagcgacgaaaatagaggatctca

SEQ ID NO: 2896284 - DNA, 25 bp, Homo sapien
gggtagtaatcatataggtctgtgt

SEQ ID NO: 2896285 - DNA, 25 bp, Homo sapien
tagtaatcatataggtctgtgtcac

SEQ ID NO: 2896286 - DNA, 25 bp, Homo sapien
ggtagtaatcatataggtctgtgtc

SEQ ID NO: 2896287 - DNA, 25 bp, Homo sapien
gtagtaatcatataggtctgtgtca

SEQ ID NO: 2896288 - DNA, 25 bp, Homo sapien
tgaccacagtccttgtggcacgcac

SEQ ID NO: 2896289 - DNA, 25 bp, Homo sapien
tggggaacttgaccacagtccttgt

SEQ ID NO: 2896290 - DNA, 25 bp, Homo sapien
ggctttggtggggaacttgaccaca

SEQ ID NO: 2896291 - DNA, 25 bp, Homo sapien
aacttgaccacagtccttgtggcac

SEQ ID NO: 2896292 - DNA, 25 bp, Homo sapien
cttagtggattcttgtgttggatgc

SEQ ID NO: 2896293 - DNA, 25 bp, Homo sapien
tttggctgtctagagaagcagtgga

SEQ ID NO: 2896294 - DNA, 25 bp, Homo sapien
gtggtcgggcttggagtgggctcca

SEQ ID NO: 2896295 - DNA, 25 bp, Homo sapien
gcagtggaccatgagtagaatagac

SEQ ID NO: 2896296 - DNA, 25 bp, Homo sapien
gctgggggcgggctctgaggtgggc

SEQ ID NO: 2896297 - DNA, 25 bp, Homo sapien
gtggtcgggctgggggcgggctctg

SEQ ID NO: 2896298 - DNA, 25 bp, Homo sapien
tgggggcgggctctgaggtgggctc

SEQ ID NO: 2896299 - DNA, 25 bp, Homo sapien
gggctgggggcgggctctgaggtgg

SEQ ID NO: 2896300 - DNA, 25 bp, Homo sapien
acaccaggatggtcgggcttgtggc

SEQ ID NO: 2896301 - DNA, 25 bp, Homo sapien
aatgtgctttttggagtgatcaggc

SEQ ID NO: 2896302 - DNA, 25 bp, Homo sapien
gcttgtggcgatggtcgggattggg

SEQ ID NO: 2896303 - DNA, 25 bp, Homo sapien
tctaagagtgatacgggttttgtgg

SEQ ID NO: 2896304 - DNA, 25 bp, Homo sapien
cttggagcaccccacggagctttgg

SEQ ID NO: 2896305 - DNA, 25 bp, Homo sapien
tggagcaccccacggagctttggtg

SEQ ID NO: 2896306 - DNA, 25 bp, Homo sapien
ggagcaccccacggagctttggtgg

SEQ ID NO: 2896307 - DNA, 25 bp, Homo sapien
ttggagcaccccacggagctttggt

SEQ ID NO: 2896308 - DNA, 25 bp, Homo sapien
gcagccagaagagacccaagacata

SEQ ID NO: 2896309 - DNA, 25 bp, Homo sapien
cagaagagacccaagacatagaagc

SEQ ID NO: 2896310 - DNA, 25 bp, Homo sapien
agagacccaagacatagaagcccag

SEQ ID NO: 2896311 - DNA, 25 bp, Homo sapien
tgtggtttcacatgcccaacccagc

SEQ ID NO: 2896312 - DNA, 25 bp, Homo sapien
cattaggccgtacccacaggaagag

SEQ ID NO: 2896313 - DNA, 25 bp, Homo sapien
ggctgtggccagagtacctaatgct

SEQ ID NO: 2896314 - DNA, 25 bp, Homo sapien
tcctgaccacgaccctgactcagag

SEQ ID NO: 2896315 - DNA, 25 bp, Homo sapien
ctggagcggaaagtgggaagcgaac

SEQ ID NO: 2896316 - DNA, 25 bp, Homo sapien
gttcaccgtgagatctggcagcgcc

SEQ ID NO: 2896317 - DNA, 25 bp, Homo sapien
caactagattccaataggagagccc

SEQ ID NO: 2896318 - DNA, 25 bp, Homo sapien
tgtaacatccagacacaacgagtgc

SEQ ID NO: 2896319 - DNA, 25 bp, Homo sapien
tattctgccaaaatggttcaccgtg

SEQ ID NO: 2896320 - DNA, 25 bp, Homo sapien
gctgccaggtaagtcccagcagttg

SEQ ID NO: 2896321 - DNA, 25 bp, Homo sapien
tgtcattaaactccaggaaggcaat

SEQ ID NO: 2896322 - DNA, 25 bp, Homo sapien
ggctgctgccaggtaagtcccagca

SEQ ID NO: 2896323 - DNA, 25 bp, Homo sapien
gttgtcattaaactccaggaaggca

SEQ ID NO: 2896324 - DNA, 25 bp, Homo sapien
actgtgaggtatctcccttgagatg

SEQ ID NO: 2896325 - DNA, 25 bp, Homo sapien
ggcactccctgactgccaagctcag

SEQ ID NO: 2896326 - DNA, 25 bp, Homo sapien
tataggcttgtgatagttggagcac

SEQ ID NO: 2896327 - DNA, 25 bp, Homo sapien
cccttgagatgaagctggactgtca

SEQ ID NO: 2896328 - DNA, 25 bp, Homo sapien
ccgcgcgcgcacgggacccggagcc

SEQ ID NO: 2896329 - DNA, 25 bp, Homo sapien
cgcgcgcacgggacccggagccgag

SEQ ID NO: 2896330 - DNA, 25 bp, Homo sapien
cgcgcgcgcacgggacccggagccg

SEQ ID NO: 2896331 - DNA, 25 bp, Homo sapien
gcgcgcgcacgggacccggagccga

SEQ ID NO: 2896332 - DNA, 25 bp, Homo sapien
cgatctcgcgagaccttcaaacaaa

SEQ ID NO: 2896333 - DNA, 25 bp, Homo sapien
ctattttcccgcgattctaattcgg

SEQ ID NO: 2896334 - DNA, 25 bp, Homo sapien
taattcggtgaaaacagcgcctttc

SEQ ID NO: 2896335 - DNA, 25 bp, Homo sapien
tccaaatcagttacgccccttctcg

SEQ ID NO: 2896336 - DNA, 25 bp, Homo sapien
caaatctcgcgagagtgctcaccac

SEQ ID NO: 2896337 - DNA, 25 bp, Homo sapien
ccgtcccctcgcagctgaatagttg

SEQ ID NO: 2896338 - DNA, 25 bp, Homo sapien
gagcgctccaacttggcgagccgta

SEQ ID NO: 2896339 - DNA, 25 bp, Homo sapien
gaatagttgctgtgtctatcgcgag

SEQ ID NO: 2896340 - DNA, 25 bp, Homo sapien
aaaggttagcgatggagggactgcc

SEQ ID NO: 2896341 - DNA, 25 bp, Homo sapien
gtggcccagaagacgacctaataaa

SEQ ID NO: 2896342 - DNA, 25 bp, Homo sapien
cgatggagggactgcctgtggagat

SEQ ID NO: 2896343 - DNA, 25 bp, Homo sapien
cagaagacgacctaataaaagtgcc

SEQ ID NO: 2896344 - DNA, 25 bp, Homo sapien
aaatcaggccgctttcagcattgga

SEQ ID NO: 2896345 - DNA, 25 bp, Homo sapien
tgcttgagatgaaggacttccggtc

SEQ ID NO: 2896346 - DNA, 25 bp, Homo sapien
gacttcctgctaggtgggccgtgtt

SEQ ID NO: 2896347 - DNA, 25 bp, Homo sapien
caggtgacagaaaaacttcgggaag

SEQ ID NO: 2896348 - DNA, 25 bp, Homo sapien
ggcactaaatgtatccttttctggt

SEQ ID NO: 2896349 - DNA, 25 bp, Homo sapien
tgtatccttttctggtacggggata

SEQ ID NO: 2896350 - DNA, 25 bp, Homo sapien
gtgggaggcactaaatgtatccttt

SEQ ID NO: 2896351 - DNA, 25 bp, Homo sapien
ccgtttagtggagctgggtgggagg

SEQ ID NO: 2896352 - DNA, 25 bp, Homo sapien
gcgccggggaaggaacaccaactca

SEQ ID NO: 2896353 - DNA, 25 bp, Homo sapien
ggaaggaacaccaactcaaagaatg

SEQ ID NO: 2896354 - DNA, 25 bp, Homo sapien
caaggagcagaagcggagttctgcg

SEQ ID NO: 2896355 - DNA, 25 bp, Homo sapien
gcagaagcggagttctgcgccctcc

SEQ ID NO: 2896356 - DNA, 25 bp, Homo sapien
gccacaaccacaggaagcgggaagg

SEQ ID NO: 2896357 - DNA, 25 bp, Homo sapien
cgctcgaatgagcccccgggtcggg

SEQ ID NO: 2896358 - DNA, 25 bp, Homo sapien
agcacagcggccacaaccacaggaa

SEQ ID NO: 2896359 - DNA, 25 bp, Homo sapien
acagcggccacaaccacaggaagcg

SEQ ID NO: 2896360 - DNA, 25 bp, Homo sapien
caaggtagccccaaacagagctgga

SEQ ID NO: 2896361 - DNA, 25 bp, Homo sapien
tgcaaagtccatgctggcattgtgg

SEQ ID NO: 2896362 - DNA, 25 bp, Homo sapien
tcctggctcaaggtagccccaaaca

SEQ ID NO: 2896363 - DNA, 25 bp, Homo sapien
caaagtccatgctggcattgtggtc

SEQ ID NO: 2896364 - DNA, 25 bp, Homo sapien
caaacaactcgactgctactaaggc

SEQ ID NO: 2896365 - DNA, 25 bp, Homo sapien
tgataaggaccgttgatcctgcctt

SEQ ID NO: 2896366 - DNA, 25 bp, Homo sapien
taactagcacctgagaccttcctga

SEQ ID NO: 2896367 - DNA, 25 bp, Homo sapien
gattctgggttctacactagacgtg

SEQ ID NO: 2896368 - DNA, 25 bp, Homo sapien
ggcattgtctgggtgagcctccaca

SEQ ID NO: 2896369 - DNA, 25 bp, Homo sapien
ggtcaaagttgcagtcgaatcttcg

SEQ ID NO: 2896370 - DNA, 25 bp, Homo sapien
aataaagactgacccattgaccggg

SEQ ID NO: 2896371 - DNA, 25 bp, Homo sapien
tcgaatcttcgaagcagcgcaataa

SEQ ID NO: 2896372 - DNA, 25 bp, Homo sapien
agcggcaccatatccagccttctgg

SEQ ID NO: 2896373 - DNA, 25 bp, Homo sapien
aattcacattgtgtactacagcggc

SEQ ID NO: 2896374 - DNA, 25 bp, Homo sapien
ttgtgtactacagcggcaccatatc

SEQ ID NO: 2896375 - DNA, 25 bp, Homo sapien
gcggcaccatatccagccttctggg

SEQ ID NO: 2896376 - DNA, 25 bp, Homo sapien
atacagacgggatccagatctgctg

SEQ ID NO: 2896377 - DNA, 25 bp, Homo sapien
tctcgtagacaaagagggcacgcag

SEQ ID NO: 2896378 - DNA, 25 bp, Homo sapien
cccaataaatacagacgggatccag

SEQ ID NO: 2896379 - DNA, 25 bp, Homo sapien
gggcacgcaggtactcggagcttct

SEQ ID NO: 2896380 - DNA, 25 bp, Homo sapien
aaaaggatgaccagtctcagcaggg

SEQ ID NO: 2896381 - DNA, 25 bp, Homo sapien
tctcagcagggcgagaaaggcaaag

SEQ ID NO: 2896382 - DNA, 25 bp, Homo sapien
cagtctcagcagggcgagaaaggca

SEQ ID NO: 2896383 - DNA, 25 bp, Homo sapien
gaaaaggatgaccagtctcagcagg

SEQ ID NO: 2896384 - DNA, 25 bp, Homo sapien
aggtattgtctggaaccagaagcac

SEQ ID NO: 2896385 - DNA, 25 bp, Homo sapien
atccctgtgaaagggatgaggtaat

SEQ ID NO: 2896386 - DNA, 25 bp, Homo sapien
aaagggatgaggtaatagcccaagg

SEQ ID NO: 2896387 - DNA, 25 bp, Homo sapien
gggaaggtattgtctggaaccagaa

SEQ ID NO: 2896388 - DNA, 25 bp, Homo sapien
ttcccatcatgttccctcagctact

SEQ ID NO: 2896389 - DNA, 25 bp, Homo sapien
acaatctaggacaagccactcccat

SEQ ID NO: 2896390 - DNA, 25 bp, Homo sapien
agacaatctaggacaagccactccc

SEQ ID NO: 2896391 - DNA, 25 bp, Homo sapien
ctccagatccagtctggcctcacag

SEQ ID NO: 2896392 - DNA, 25 bp, Homo sapien
ttctgatagtcatgtgtaggaatct

SEQ ID NO: 2896393 - DNA, 25 bp, Homo sapien
ccttctgatagtcatgtgtaggaat

SEQ ID NO: 2896394 - DNA, 25 bp, Homo sapien
attccgctggagccgtttccggtgc

SEQ ID NO: 2896395 - DNA, 25 bp, Homo sapien
cgtttccggtgctggatacaacgag

SEQ ID NO: 2896396 - DNA, 25 bp, Homo sapien
atctcctctcccgtcttcgttgtat

SEQ ID NO: 2896397 - DNA, 25 bp, Homo sapien
gacagcatctcaagctgaaaccttc

SEQ ID NO: 2896398 - DNA, 25 bp, Homo sapien
tgtatttatgcataaaagcagaaga

SEQ ID NO: 2896399 - DNA, 25 bp, Homo sapien
aagacagcatctcaagctgaaacct

SEQ ID NO: 2896400 - DNA, 25 bp, Homo sapien
ataagacaggtaggcaggataaggt

SEQ ID NO: 2896401 - DNA, 25 bp, Homo sapien
aagagataagacaggtaggcaggat

SEQ ID NO: 2896402 - DNA, 25 bp, Homo sapien
agataagacaggtaggcaggataag

SEQ ID NO: 2896403 - DNA, 25 bp, Homo sapien
gagataagacaggtaggcaggataa

SEQ ID NO: 2896404 - DNA, 25 bp, Homo sapien
aataatctagtccttcactgagcca

SEQ ID NO: 2896405 - DNA, 25 bp, Homo sapien
gaaaataatctagtccttcactgag

SEQ ID NO: 2896406 - DNA, 25 bp, Homo sapien
cagggctaaggcttttaaagccttg

SEQ ID NO: 2896407 - DNA, 25 bp, Homo sapien
actgagccacaatgacccagggcta

SEQ ID NO: 2896408 - DNA, 25 bp, Homo sapien
tattcatccaggcaaatggcacaga

SEQ ID NO: 2896409 - DNA, 25 bp, Homo sapien
agcttgtccccatcctcatattcat

SEQ ID NO: 2896410 - DNA, 25 bp, Homo sapien
attcatccaggcaaatggcacagac

SEQ ID NO: 2896411 - DNA, 25 bp, Homo sapien
tgagcacaggggagtacccgcagct

SEQ ID NO: 2896412 - DNA, 25 bp, Homo sapien
agaggggcatgggcaggcagtgagg

SEQ ID NO: 2896413 - DNA, 25 bp, Homo sapien
gcagaggggcatgggcaggcagtga

SEQ ID NO: 2896414 - DNA, 25 bp, Homo sapien
tggcagaggggcatgggcaggcagt

SEQ ID NO: 2896415 - DNA, 25 bp, Homo sapien
gtggcagaggggcatgggcaggcag

SEQ ID NO: 2896416 - DNA, 25 bp, Homo sapien
tgcagagaggaacaaggtgaagcac

SEQ ID NO: 2896417 - DNA, 25 bp, Homo sapien
agagaggaacaaggtgaagcacctg

SEQ ID NO: 2896418 - DNA, 25 bp, Homo sapien
ggaacaaggtgaagcacctggtggc

SEQ ID NO: 2896419 - DNA, 25 bp, Homo sapien
aacaaggtgaagcacctggtggctg

SEQ ID NO: 2896420 - DNA, 25 bp, Homo sapien
accccgatgaacaggctgcttgcaa

SEQ ID NO: 2896421 - DNA, 25 bp, Homo sapien
cttccgggtctgagtgagccagggg

SEQ ID NO: 2896422 - DNA, 25 bp, Homo sapien
caggaccccgatgaacaggctgctt

SEQ ID NO: 2896423 - DNA, 25 bp, Homo sapien
ccgatgaacaggctgcttgcaaatg

SEQ ID NO: 2896424 - DNA, 25 bp, Homo sapien
gtgggaagagtggggctagaaccca

SEQ ID NO: 2896425 - DNA, 25 bp, Homo sapien
agagtggggctagaacccaaaagtg

SEQ ID NO: 2896426 - DNA, 25 bp, Homo sapien
tgggaagagtggggctagaacccaa

SEQ ID NO: 2896427 - DNA, 25 bp, Homo sapien
gaggggacagtgggggatctgttga

SEQ ID NO: 2896428 - DNA, 25 bp, Homo sapien
gtgcaaataggtcaccagaggtgta

SEQ ID NO: 2896429 - DNA, 25 bp, Homo sapien
aataggtcaccagaggtgtatgtgt

SEQ ID NO: 2896430 - DNA, 25 bp, Homo sapien
gaagacgacggtctgtgcaaatagg

SEQ ID NO: 2896431 - DNA, 25 bp, Homo sapien
agacgacggtctgtgcaaataggtc

SEQ ID NO: 2896432 - DNA, 25 bp, Homo sapien
ggaatgtcccctatccctcagaaga

SEQ ID NO: 2896433 - DNA, 25 bp, Homo sapien
atggaatgtcccctatccctcagaa

SEQ ID NO: 2896434 - DNA, 25 bp, Homo sapien
gggatggaatgtcccctatccctca

SEQ ID NO: 2896435 - DNA, 25 bp, Homo sapien
ttgggatggaatgtcccctatccct

SEQ ID NO: 2896436 - DNA, 25 bp, Homo sapien
agcccaagaagtgaagacccagtcc

SEQ ID NO: 2896437 - DNA, 25 bp, Homo sapien
tattagcccaagaagtgaagaccca

SEQ ID NO: 2896438 - DNA, 25 bp, Homo sapien
attttattagcccaagaagtgaaga

SEQ ID NO: 2896439 - DNA, 25 bp, Homo sapien
ttagcccaagaagtgaagacccagt

SEQ ID NO: 2896440 - DNA, 25 bp, Homo sapien
catctggaccagagaatgggtgcag

SEQ ID NO: 2896441 - DNA, 25 bp, Homo sapien
gctggtcaaattggtggatgatgga

SEQ ID NO: 2896442 - DNA, 25 bp, Homo sapien
tcagtgtgctggtcaaattggtgga

SEQ ID NO: 2896443 - DNA, 25 bp, Homo sapien
ccatctggaccagagaatgggtgca

SEQ ID NO: 2896444 - DNA, 25 bp, Homo sapien
tatccctcccgtgtgtggttggaaa

SEQ ID NO: 2896445 - DNA, 25 bp, Homo sapien
gccattaccccataccccttattgc

SEQ ID NO: 2896446 - DNA, 25 bp, Homo sapien
agtactgacctcgtctgtcccttcc

SEQ ID NO: 2896447 - DNA, 25 bp, Homo sapien
tacccatatccctcccgtgtgtggt

SEQ ID NO: 2896448 - DNA, 25 bp, Homo sapien
aatctctagaggagtatgtcatccc

SEQ ID NO: 2896449 - DNA, 25 bp, Homo sapien
tcttcgtaccaagagcaccggtggg

SEQ ID NO: 2896450 - DNA, 25 bp, Homo sapien
ctgactaacttgatgggcgcttggt

SEQ ID NO: 2896451 - DNA, 25 bp, Homo sapien
gaacacggtgggaatcttggtgcac

SEQ ID NO: 2896452 - DNA, 25 bp, Homo sapien
tcaacatcacggtactgcgaggcct

SEQ ID NO: 2896453 - DNA, 25 bp, Homo sapien
gcactgctccggtttggaccctgag

SEQ ID NO: 2896454 - DNA, 25 bp, Homo sapien
catcgtgggctacaaggactcgccc

SEQ ID NO: 2896455 - DNA, 25 bp, Homo sapien
cttgccctggaagcggcgcgaatgg

SEQ ID NO: 2896456 - DNA, 25 bp, Homo sapien
atggccgggtggaacgcctacatcg

SEQ ID NO: 2896457 - DNA, 25 bp, Homo sapien
gggtggaacgcctacatcgacaacc

SEQ ID NO: 2896458 - DNA, 25 bp, Homo sapien
atcgacaacctcatggcggacggga

SEQ ID NO: 2896459 - DNA, 25 bp, Homo sapien
gcctacatcgacaacctcatggcgg

SEQ ID NO: 2896460 - DNA, 25 bp, Homo sapien
ctgcacgacccgagaagacgctggg

SEQ ID NO: 2896461 - DNA, 25 bp, Homo sapien
tgggtgccttcagctatgagagcga

SEQ ID NO: 2896462 - DNA, 25 bp, Homo sapien
gcgactagaggatttggccaaactc

SEQ ID NO: 2896463 - DNA, 25 bp, Homo sapien
cttcagctatgagagcgactagagg

SEQ ID NO: 2896464 - DNA, 25 bp, Homo sapien
gacaggaaacgaatttagacaggcc

SEQ ID NO: 2896465 - DNA, 25 bp, Homo sapien
aaggcgcccgactgataacgctggg

SEQ ID NO: 2896466 - DNA, 25 bp, Homo sapien
gggtcctcataacggccattctcgg

SEQ ID NO: 2896467 - DNA, 25 bp, Homo sapien
tagacaggccctttcggctggcaag

SEQ ID NO: 2896468 - DNA, 25 bp, Homo sapien
cccaccccagaaggcgagagggtct

SEQ ID NO: 2896469 - DNA, 25 bp, Homo sapien
caagaggaatgagtgacctttagga

SEQ ID NO: 2896470 - DNA, 25 bp, Homo sapien
gggctgcaagattgacgtccacaca

SEQ ID NO: 2896471 - DNA, 25 bp, Homo sapien
ccttttgcaaacgtcaagaggaatg

SEQ ID NO: 2896472 - DNA, 25 bp, Homo sapien
tcttcgctggaggtttggatggagc

SEQ ID NO: 2896473 - DNA, 25 bp, Homo sapien
ctgggatgtcttcgctggaggtttg

SEQ ID NO: 2896474 - DNA, 25 bp, Homo sapien
tttggatggagctccgagtctaggt

SEQ ID NO: 2896475 - DNA, 25 bp, Homo sapien
gtttggatggagctccgagtctagg

SEQ ID NO: 2896476 - DNA, 25 bp, Homo sapien
tccacccccagggctggaagattca

SEQ ID NO: 2896477 - DNA, 25 bp, Homo sapien
cccccagggctggaagattcaccca

SEQ ID NO: 2896478 - DNA, 25 bp, Homo sapien
cacccccagggctggaagattcacc

SEQ ID NO: 2896479 - DNA, 25 bp, Homo sapien
cccagggctggaagattcacccaac

SEQ ID NO: 2896480 - DNA, 25 bp, Homo sapien
tttcccgggcaaagattttctgcat

SEQ ID NO: 2896481 - DNA, 25 bp, Homo sapien
gagtccaagatttcccgggcaaaga

SEQ ID NO: 2896482 - DNA, 25 bp, Homo sapien
agatttcccgggcaaagattttctg

SEQ ID NO: 2896483 - DNA, 25 bp, Homo sapien
ctggagtccaagatttcccgggcaa

SEQ ID NO: 2896484 - DNA, 25 bp, Homo sapien
tcaaagggctgaggtgtcctctctg

SEQ ID NO: 2896485 - DNA, 25 bp, Homo sapien
ctctcaaagggctgaggtgtcctct

SEQ ID NO: 2896486 - DNA, 25 bp, Homo sapien
tctcaaagggctgaggtgtcctctc

SEQ ID NO: 2896487 - DNA, 25 bp, Homo sapien
aaagggctgaggtgtcctctctgag

SEQ ID NO: 2896488 - DNA, 25 bp, Homo sapien
ccaggtagcggcctttgtctccgtc

SEQ ID NO: 2896489 - DNA, 25 bp, Homo sapien
tgtctccgtctcttagttccagagc

SEQ ID NO: 2896490 - DNA, 25 bp, Homo sapien
cagagcctcatagatacccgtggaa

SEQ ID NO: 2896491 - DNA, 25 bp, Homo sapien
gagcctcatagatacccgtggaagc

SEQ ID NO: 2896492 - DNA, 25 bp, Homo sapien
gcccagagtactgttgatgttctcc

SEQ ID NO: 2896493 - DNA, 25 bp, Homo sapien
ggcccagagtactgttgatgttctc

SEQ ID NO: 2896494 - DNA, 25 bp, Homo sapien
gggcccagagtactgttgatgttct

SEQ ID NO: 2896495 - DNA, 25 bp, Homo sapien
agggcccagagtactgttgatgttc

SEQ ID NO: 2896496 - DNA, 25 bp, Homo sapien
ggctgcagcgagcgggcttccccac

SEQ ID NO: 2896497 - DNA, 25 bp, Homo sapien
ggcacatgcaggggaaggataaggg

SEQ ID NO: 2896498 - DNA, 25 bp, Homo sapien
aaatgtttcgggagaggcctgtctg

SEQ ID NO: 2896499 - DNA, 25 bp, Homo sapien
gaaaatgtttcgggagaggcctgtc

SEQ ID NO: 2896500 - DNA, 25 bp, Homo sapien
tctcagaagtcagggcacatgcagg

SEQ ID NO: 2896501 - DNA, 25 bp, Homo sapien
ctagctcaatcataaatttgtcaac

SEQ ID NO: 2896502 - DNA, 25 bp, Homo sapien
tattctcggtcccatctagctcaat

SEQ ID NO: 2896503 - DNA, 25 bp, Homo sapien
tgtcaactttttcttgatccgcaac

SEQ ID NO: 2896504 - DNA, 25 bp, Homo sapien
tttcttgatccgcaacgcttagttt

SEQ ID NO: 2896505 - DNA, 25 bp, Homo sapien
ccaaggacacgcccaggatggcatt

SEQ ID NO: 2896506 - DNA, 25 bp, Homo sapien
gccaaggacacgcccaggatggcat

SEQ ID NO: 2896507 - DNA, 25 bp, Homo sapien
ctgggagtatgaggtcagggttccc

SEQ ID NO: 2896508 - DNA, 25 bp, Homo sapien
ggttcccagcgagatctgcgatgtg

SEQ ID NO: 2896509 - DNA, 25 bp, Homo sapien
agggttcccagcgagatctgcgatg

SEQ ID NO: 2896510 - DNA, 25 bp, Homo sapien
tcccagcgagatctgcgatgtggcg

SEQ ID NO: 2896511 - DNA, 25 bp, Homo sapien
gaagcacatagagccttcagggaag

SEQ ID NO: 2896512 - DNA, 25 bp, Homo sapien
tatcgagcctaggattggaatggga

SEQ ID NO: 2896513 - DNA, 25 bp, Homo sapien
gaaatgccaagatctttgcctcaaa

SEQ ID NO: 2896514 - DNA, 25 bp, Homo sapien
ggttggctctgtccaggcgagatct

SEQ ID NO: 2896515 - DNA, 25 bp, Homo sapien
tgagatggggagagggtgtctggac

SEQ ID NO: 2896516 - DNA, 25 bp, Homo sapien
ctgagatggggagagggtgtctgga

SEQ ID NO: 2896517 - DNA, 25 bp, Homo sapien
gatgttgggtgcgaagccaccttca

SEQ ID NO: 2896518 - DNA, 25 bp, Homo sapien
ccccttgaggtggtggtagacctcg

SEQ ID NO: 2896519 - DNA, 25 bp, Homo sapien
tgggagcccccgttgatcacattga

SEQ ID NO: 2896520 - DNA, 25 bp, Homo sapien
cttgatgacccccttgaggtggtgg

SEQ ID NO: 2896521 - DNA, 25 bp, Homo sapien
aaaggacctgagactccagtgcccc

SEQ ID NO: 2896522 - DNA, 25 bp, Homo sapien
aggacctgagactccagtgcccctt

SEQ ID NO: 2896523 - DNA, 25 bp, Homo sapien
agaaaggacctgagactccagtgcc

SEQ ID NO: 2896524 - DNA, 25 bp, Homo sapien
ctcccctgcccatgtggagatccag

SEQ ID NO: 2896525 - DNA, 25 bp, Homo sapien
gtcaagatcgtacttcccattgcga

SEQ ID NO: 2896526 - DNA, 25 bp, Homo sapien
ttgcgatagaactcagatgctgcca

SEQ ID NO: 2896527 - DNA, 25 bp, Homo sapien
tgcgggatcatcaggcgacttgaag

SEQ ID NO: 2896528 - DNA, 25 bp, Homo sapien
ttgtctgggtaaccagccgcctgga

SEQ ID NO: 2896529 - DNA, 25 bp, Homo sapien
gatccaagtcgatggcaaagcaggt

SEQ ID NO: 2896530 - DNA, 25 bp, Homo sapien
ctgcacgggattcgggcaggaacac

SEQ ID NO: 2896531 - DNA, 25 bp, Homo sapien
gcagagacacggctagaggtcagaa

SEQ ID NO: 2896532 - DNA, 25 bp, Homo sapien
gctaagaattggaaggatccaagtc

SEQ ID NO: 2896533 - DNA, 25 bp, Homo sapien
aggccttcttctcaacggcctgggc

SEQ ID NO: 2896534 - DNA, 25 bp, Homo sapien
ttgcaggccttcttctcaacggcct

SEQ ID NO: 2896535 - DNA, 25 bp, Homo sapien
caggccttcttctcaacggcctggg

SEQ ID NO: 2896536 - DNA, 25 bp, Homo sapien
gcaggccttcttctcaacggcctgg

SEQ ID NO: 2896537 - DNA, 25 bp, Homo sapien
gagtcaggccaaggattagtcaaac

SEQ ID NO: 2896538 - DNA, 25 bp, Homo sapien
aaagacttatcttgatttcgggctc

SEQ ID NO: 2896539 - DNA, 25 bp, Homo sapien
gccttctagaacctcctcagtggga

SEQ ID NO: 2896540 - DNA, 25 bp, Homo sapien
caggctatggtgagcctcagggtca

SEQ ID NO: 2896541 - DNA, 25 bp, Homo sapien
catcaccccccagccattagactga

SEQ ID NO: 2896542 - DNA, 25 bp, Homo sapien
gccattagactgagccagtttgcac

SEQ ID NO: 2896543 - DNA, 25 bp, Homo sapien
agagcggtggctcaccatcaccccc

SEQ ID NO: 2896544 - DNA, 25 bp, Homo sapien
ccccagccattagactgagccagtt

SEQ ID NO: 2896545 - DNA, 25 bp, Homo sapien
ggccccaagggagcattaacctcaa

SEQ ID NO: 2896546 - DNA, 25 bp, Homo sapien
ggtgagacactcagtagagagaagc

SEQ ID NO: 2896547 - DNA, 25 bp, Homo sapien
gaacttggtgagacactcagtagag

SEQ ID NO: 2896548 - DNA, 25 bp, Homo sapien
gaatttggagggttaggtgaggctg

SEQ ID NO: 2896549 - DNA, 25 bp, Homo sapien
ctccgagcggcagggggcgccagtc

SEQ ID NO: 2896550 - DNA, 25 bp, Homo sapien
tggccagacgctccgagcggcaggg

SEQ ID NO: 2896551 - DNA, 25 bp, Homo sapien
tgtatttggccagacgctccgagcg

SEQ ID NO: 2896552 - DNA, 25 bp, Homo sapien
gagttggttgtatttggccagacgc

SEQ ID NO: 2896553 - DNA, 25 bp, Homo sapien
cttgcgtccagcaaagattgccttg

SEQ ID NO: 2896554 - DNA, 25 bp, Homo sapien
gaacttgcgtccagcaaagattgcc

SEQ ID NO: 2896555 - DNA, 25 bp, Homo sapien
gcgtccagcaaagattgccttgtcc

SEQ ID NO: 2896556 - DNA, 25 bp, Homo sapien
tgcgtccagcaaagattgccttgtc

SEQ ID NO: 2896557 - DNA, 25 bp, Homo sapien
tgggtctgtccagtggagtcctgga

SEQ ID NO: 2896558 - DNA, 25 bp, Homo sapien
gagcgtgtgtccctcttattggcca

SEQ ID NO: 2896559 - DNA, 25 bp, Homo sapien
tacttgtccttgtagtcgctggcag

SEQ ID NO: 2896560 - DNA, 25 bp, Homo sapien
catatccaagctccaacggtgacaa

SEQ ID NO: 2896561 - DNA, 25 bp, Homo sapien
caggatgggctctaatagcagcagc

SEQ ID NO: 2896562 - DNA, 25 bp, Homo sapien
tagcctcttcaatggagcgtgtgtc

SEQ ID NO: 2896563 - DNA, 25 bp, Homo sapien
ggcgggcctagaaatccgtacctca

SEQ ID NO: 2896564 - DNA, 25 bp, Homo sapien
tgccagcgactacaaggacaagtac

SEQ ID NO: 2896565 - DNA, 25 bp, Homo sapien
aatgagatcagagccaagaagcgtc

SEQ ID NO: 2896566 - DNA, 25 bp, Homo sapien
aagtacagccacctcatcggcaagg

SEQ ID NO: 2896567 - DNA, 25 bp, Homo sapien
gagggacacacgctccattgaagag

SEQ ID NO: 2896568 - DNA, 25 bp, Homo sapien
tgaggtacggatttctaggcccgcc

SEQ ID NO: 2896569 - DNA, 25 bp, Homo sapien
taagacctacggctgtggtgaggcc

SEQ ID NO: 2896570 - DNA, 25 bp, Homo sapien
gcttcaagtgaagtgtggtgtccac

SEQ ID NO: 2896571 - DNA, 25 bp, Homo sapien
taacttattggaagtccttcctgag

SEQ ID NO: 2896572 - DNA, 25 bp, Homo sapien
taggattagcgtttattcatcaagc

SEQ ID NO: 2896573 - DNA, 25 bp, Homo sapien
tgagtctgcctttgatcactccagt

SEQ ID NO: 2896574 - DNA, 25 bp, Homo sapien
gatgtttattctatctaatagtccc

SEQ ID NO: 2896575 - DNA, 25 bp, Homo sapien
cttgtagtttcttcaggcgggcggc

SEQ ID NO: 2896576 - DNA, 25 bp, Homo sapien
gtggacaccacacttcacttgaagc

SEQ ID NO: 2896577 - DNA, 25 bp, Homo sapien
gtgatcaaaggcagactcaggaagg

SEQ ID NO: 2896578 - DNA, 25 bp, Homo sapien
gcttgatgaataaacgctaatccta

SEQ ID NO: 2896579 - DNA, 25 bp, Homo sapien
cgcccgcctgaagaaactacaagag

SEQ ID NO: 2896580 - DNA, 25 bp, Homo sapien
acaactggagtgatcaaaggcagac

SEQ ID NO: 2896581 - DNA, 25 bp, Homo sapien
aactacaagagcaagagaaacaaca

SEQ ID NO: 2896582 - DNA, 25 bp, Homo sapien
gcacggccgggcttgtggttctcta

SEQ ID NO: 2896583 - DNA, 25 bp, Homo sapien
gctccacgggcactttctacttgtg

SEQ ID NO: 2896584 - DNA, 25 bp, Homo sapien
tgccattaaacatcgctgcaccagc

SEQ ID NO: 2896585 - DNA, 25 bp, Homo sapien
catgggcttggtttatacgaattgc

SEQ ID NO: 2896586 - DNA, 25 bp, Homo sapien
tctgggccgtctgccattgtctgtg

SEQ ID NO: 2896587 - DNA, 25 bp, Homo sapien
gagcattcccgactctctgggccgt

SEQ ID NO: 2896588 - DNA, 25 bp, Homo sapien
ttggaaccgacaggcactgagcatt

SEQ ID NO: 2896589 - DNA, 25 bp, Homo sapien
tgtgctccttttccgttggaaccga

SEQ ID NO: 2896590 - DNA, 25 bp, Homo sapien
gtccatactagagcgactggagcag

SEQ ID NO: 2896591 - DNA, 25 bp, Homo sapien
caaccagttccggatgtccatacta

SEQ ID NO: 2896592 - DNA, 25 bp, Homo sapien
gggaagataaaagaatatggttctg

SEQ ID NO: 2896593 - DNA, 25 bp, Homo sapien
ccagatcttgggacaggtctacttt

SEQ ID NO: 2896594 - DNA, 25 bp, Homo sapien
gggaggtacttttcaaatcacagtc

SEQ ID NO: 2896595 - DNA, 25 bp, Homo sapien
gctatatggctatccatctctgtca

SEQ ID NO: 2896596 - DNA, 25 bp, Homo sapien
catcgtctttgtggacagctgcggg

SEQ ID NO: 2896597 - DNA, 25 bp, Homo sapien
gggaccctggaatccttcaccttca

SEQ ID NO: 2896598 - DNA, 25 bp, Homo sapien
aactcagggcgtgtcttctaaaggc

SEQ ID NO: 2896599 - DNA, 25 bp, Homo sapien
caaggagtcttgtccgaggcgagaa

SEQ ID NO: 2896600 - DNA, 25 bp, Homo sapien
cattgctgacatgaaggcgtttccc

SEQ ID NO: 2896601 - DNA, 25 bp, Homo sapien
ctacaatgaagtcgggctgggtccc

SEQ ID NO: 2896602 - DNA, 25 bp, Homo sapien
gagagagcaacctatccacaggaag

SEQ ID NO: 2896603 - DNA, 25 bp, Homo sapien
ccacaggaagaggaccgttttctca

SEQ ID NO: 2896604 - DNA, 25 bp, Homo sapien
gcaccaatgaataccctgatctgga

SEQ ID NO: 2896605 - DNA, 25 bp, Homo sapien
cccaggtattgttggagtggaactg

SEQ ID NO: 2896606 - DNA, 25 bp, Homo sapien
tctgtaatatggaaagaaggaggga

SEQ ID NO: 2896607 - DNA, 25 bp, Homo sapien
taaggaagggagacatctgggttct

SEQ ID NO: 2896608 - DNA, 25 bp, Homo sapien
gggctttggtgtgattgaaacagat

SEQ ID NO: 2896609 - DNA, 25 bp, Homo sapien
cagaacagtttgagctaaggaaggg

SEQ ID NO: 2896610 - DNA, 25 bp, Homo sapien
tatagtcccatggaaagatggcccc

SEQ ID NO: 2896611 - DNA, 25 bp, Homo sapien
tggacatccccgatatagagcttaa

SEQ ID NO: 2896612 - DNA, 25 bp, Homo sapien
tctgagggtcaaactatagccaatc

SEQ ID NO: 2896613 - DNA, 25 bp, Homo sapien
cagctaaagtggttaagagaggaca

SEQ ID NO: 2896614 - DNA, 25 bp, Homo sapien
agacagagaagataaagggccccag

SEQ ID NO: 2896615 - DNA, 25 bp, Homo sapien
gggcaatcatcattcagcctgtggg

SEQ ID NO: 2896616 - DNA, 25 bp, Homo sapien
ccctggatccttgcattgacctaaa

SEQ ID NO: 2896617 - DNA, 25 bp, Homo sapien
ttcttagagatcaggagggcaatca

SEQ ID NO: 2896618 - DNA, 25 bp, Homo sapien
gatctggggccggttcggagctgcc

SEQ ID NO: 2896619 - DNA, 25 bp, Homo sapien
tttccgggaagcgtgaggcggaagc

SEQ ID NO: 2896620 - DNA, 25 bp, Homo sapien
agcagctcggcggagagggacaagc

SEQ ID NO: 2896621 - DNA, 25 bp, Homo sapien
gctcggcggagagggacaagctttc

SEQ ID NO: 2896622 - DNA, 25 bp, Homo sapien
ctctctgcgcctccgcggaacaaac

SEQ ID NO: 2896623 - DNA, 25 bp, Homo sapien
acctctctgcgcctccgcggaacaa

SEQ ID NO: 2896624 - DNA, 25 bp, Homo sapien
tgcgcctccgcggaacaaacagcac

SEQ ID NO: 2896625 - DNA, 25 bp, Homo sapien
cgcctccgcggaacaaacagcacat

SEQ ID NO: 2896626 - DNA, 25 bp, Homo sapien
tccccgcccggcctctcagggcggc

SEQ ID NO: 2896627 - DNA, 25 bp, Homo sapien
cccgcccggcctctcagggcggcca

SEQ ID NO: 2896628 - DNA, 25 bp, Homo sapien
ccggcggttctcacacaggtccccg

SEQ ID NO: 2896629 - DNA, 25 bp, Homo sapien
tctcacacaggtccccgcccggcct

SEQ ID NO: 2896630 - DNA, 25 bp, Homo sapien
gaaagggggtcttgggccacctgca

SEQ ID NO: 2896631 - DNA, 25 bp, Homo sapien
tgtgtttgagggtagagggtccctg

SEQ ID NO: 2896632 - DNA, 25 bp, Homo sapien
ctgtgtttgagggtagagggtccct

SEQ ID NO: 2896633 - DNA, 25 bp, Homo sapien
agttctggctgccaccggccctcgt

SEQ ID NO: 2896634 - DNA, 25 bp, Homo sapien
ttctggctgccaccggccctcgtag

SEQ ID NO: 2896635 - DNA, 25 bp, Homo sapien
ctcgtagggggagccccatcctact

SEQ ID NO: 2896636 - DNA, 25 bp, Homo sapien
accaggggggctgtatcagttctgg

SEQ ID NO: 2896637 - DNA, 25 bp, Homo sapien
agctccagacactcctgccctcctc

SEQ ID NO: 2896638 - DNA, 25 bp, Homo sapien
gctccagacactcctgccctcctca

SEQ ID NO: 2896639 - DNA, 25 bp, Homo sapien
ctccagacactcctgccctcctcag

SEQ ID NO: 2896640 - DNA, 25 bp, Homo sapien
actgccactttcaccgaggcaccag

SEQ ID NO: 2896641 - DNA, 25 bp, Homo sapien
ttaaagggccgaaccctcactgcca

SEQ ID NO: 2896642 - DNA, 25 bp, Homo sapien
tcctggctggtctcacgggcgttaa

SEQ ID NO: 2896643 - DNA, 25 bp, Homo sapien
ctggctggtctcacgggcgttaaag

SEQ ID NO: 2896644 - DNA, 25 bp, Homo sapien
caaaggtgaagcttttgggggcatc

SEQ ID NO: 2896645 - DNA, 25 bp, Homo sapien
ccttgctctgtttaggattgatgat

SEQ ID NO: 2896646 - DNA, 25 bp, Homo sapien
ttgctctgtttaggattgatgatgg

SEQ ID NO: 2896647 - DNA, 25 bp, Homo sapien
cttgctctgtttaggattgatgatg

SEQ ID NO: 2896648 - DNA, 25 bp, Homo sapien
tgtagccttcaaaggcgtggagcag

SEQ ID NO: 2896649 - DNA, 25 bp, Homo sapien
tgctgagatgcaaactgggggtcct

SEQ ID NO: 2896650 - DNA, 25 bp, Homo sapien
tcccgatacacttgctgctgagatg

SEQ ID NO: 2896651 - DNA, 25 bp, Homo sapien
tcctgtcgccccatcatggtatagg

SEQ ID NO: 2896652 - DNA, 25 bp, Homo sapien
gatagctgagcactctggttctcac

SEQ ID NO: 2896653 - DNA, 25 bp, Homo sapien
tctggttctcactaacgcgagagaa

SEQ ID NO: 2896654 - DNA, 25 bp, Homo sapien
ctcactaacgcgagagaagaggtcc

SEQ ID NO: 2896655 - DNA, 25 bp, Homo sapien
ctccacagagtaggatagctgagca

SEQ ID NO: 2896656 - DNA, 25 bp, Homo sapien
ggttcaagaggtctcgtacccgctc

SEQ ID NO: 2896657 - DNA, 25 bp, Homo sapien
tcacagccaatttggacaggtcctg

SEQ ID NO: 2896658 - DNA, 25 bp, Homo sapien
gtcagcaatgtctgcgtaggaggtc

SEQ ID NO: 2896659 - DNA, 25 bp, Homo sapien
ggtcctgcacgtacgggcccaggat

SEQ ID NO: 2896660 - DNA, 25 bp, Homo sapien
tcatggcagcgctgtgtgaagacga

SEQ ID NO: 2896661 - DNA, 25 bp, Homo sapien
tctccgagtccagccccgtgagctg

SEQ ID NO: 2896662 - DNA, 25 bp, Homo sapien
catgggaacggctgctggtctcatt

SEQ ID NO: 2896663 - DNA, 25 bp, Homo sapien
tgtgaagacgatggtaaagacggca

SEQ ID NO: 2896664 - DNA, 25 bp, Homo sapien
tacgtgacaacagtgagacggtggt

SEQ ID NO: 2896665 - DNA, 25 bp, Homo sapien
ggttactcactcaattacaaatagc

SEQ ID NO: 2896666 - DNA, 25 bp, Homo sapien
gagacggtggttactcactcaatta

SEQ ID NO: 2896667 - DNA, 25 bp, Homo sapien
gggaaacagaatacgtgacaacagt

SEQ ID NO: 2896668 - DNA, 25 bp, Homo sapien
tcccagcaaggtccaccaaactgat

SEQ ID NO: 2896669 - DNA, 25 bp, Homo sapien
ggcccctgaggagtcggctcgctca

SEQ ID NO: 2896670 - DNA, 25 bp, Homo sapien
tgaggagtcggctcgctcactccca

SEQ ID NO: 2896671 - DNA, 25 bp, Homo sapien
aggtccaccaaactgatcttactga

SEQ ID NO: 2896672 - DNA, 25 bp, Homo sapien
tccccagtgagagtctcaggttccg

SEQ ID NO: 2896673 - DNA, 25 bp, Homo sapien
agcccacaacactgccccacaacaa

SEQ ID NO: 2896674 - DNA, 25 bp, Homo sapien
cagtgagagtctcaggttccgactg

SEQ ID NO: 2896675 - DNA, 25 bp, Homo sapien
gtgagagtctcaggttccgactgga

SEQ ID NO: 2896676 - DNA, 25 bp, Homo sapien
tctgcaagggccgagatcactttcc

SEQ ID NO: 2896677 - DNA, 25 bp, Homo sapien
caagggccgagatcactttccctag

SEQ ID NO: 2896678 - DNA, 25 bp, Homo sapien
ttccctagtgtagtcagggacttat

SEQ ID NO: 2896679 - DNA, 25 bp, Homo sapien
tcagggacttattgatgttggctcc

SEQ ID NO: 2896680 - DNA, 25 bp, Homo sapien
aaaatccgactttcgcttctttgat

SEQ ID NO: 2896681 - DNA, 25 bp, Homo sapien
tttccttgagcagccaggtgagcac

SEQ ID NO: 2896682 - DNA, 25 bp, Homo sapien
ataaaatccgactttcgcttctttg

SEQ ID NO: 2896683 - DNA, 25 bp, Homo sapien
caaattttccttgagcagccaggtg

SEQ ID NO: 2896684 - DNA, 25 bp, Homo sapien
gtgaatggagtgcatggaaaagctt

SEQ ID NO: 2896685 - DNA, 25 bp, Homo sapien
tcctcgtaattgatgtcagcagggc

SEQ ID NO: 2896686 - DNA, 25 bp, Homo sapien
gctgcaatcatggctgtgcgtgagt

SEQ ID NO: 2896687 - DNA, 25 bp, Homo sapien
gagtctcctcgtaattgatgtcagc

SEQ ID NO: 2896688 - DNA, 25 bp, Homo sapien
ggtgctgagagtctcctcgtaattg

SEQ ID NO: 2896689 - DNA, 25 bp, Homo sapien
gatttgcttggtgcggtcagcatac

SEQ ID NO: 2896690 - DNA, 25 bp, Homo sapien
tgatggcattgcagcggatttgctt

SEQ ID NO: 2896691 - DNA, 25 bp, Homo sapien
ctgcagctctctaatcagccgggca

SEQ ID NO: 2896692 - DNA, 25 bp, Homo sapien
cagctctctaatcagccgggcatta

SEQ ID NO: 2896693 - DNA, 25 bp, Homo sapien
aggctaaggaaagaaggagctgatg

SEQ ID NO: 2896694 - DNA, 25 bp, Homo sapien
acacagctggcagggcgcctctgac

SEQ ID NO: 2896695 - DNA, 25 bp, Homo sapien
ctggcagggcgcctctgacactccc

SEQ ID NO: 2896696 - DNA, 25 bp, Homo sapien
cgtgttgggggagaatgacggctcc

SEQ ID NO: 2896697 - DNA, 25 bp, Homo sapien
gcccaatctgggactccgtgttggg

SEQ ID NO: 2896698 - DNA, 25 bp, Homo sapien
gtagcttctcctcccatgtctcgtt

SEQ ID NO: 2896699 - DNA, 25 bp, Homo sapien
catgtctcgttcagctcagctataa

SEQ ID NO: 2896700 - DNA, 25 bp, Homo sapien
ctcagggcttctgtcttgcgtagct

SEQ ID NO: 2896701 - DNA, 25 bp, Homo sapien
gggcttctgtcttgcgtagcttctc

SEQ ID NO: 2896702 - DNA, 25 bp, Homo sapien
cttctttggagagaagacgcccaca

SEQ ID NO: 2896703 - DNA, 25 bp, Homo sapien
ttggagagaagacgcccacagttcc

SEQ ID NO: 2896704 - DNA, 25 bp, Homo sapien
tcccggacggccacccccatctcag

SEQ ID NO: 2896705 - DNA, 25 bp, Homo sapien
tctttggagagaagacgcccacagt

SEQ ID NO: 2896706 - DNA, 25 bp, Homo sapien
ctctctaggcctcctcgctcgattc

SEQ ID NO: 2896707 - DNA, 25 bp, Homo sapien
tgatggagggacaagccggggacct

SEQ ID NO: 2896708 - DNA, 25 bp, Homo sapien
aggcctcctcgctcgattcctcact

SEQ ID NO: 2896709 - DNA, 25 bp, Homo sapien
cttttctaggcatccagagagctct

SEQ ID NO: 2896710 - DNA, 25 bp, Homo sapien
ccctctcctgaggctgactgttgaa

SEQ ID NO: 2896711 - DNA, 25 bp, Homo sapien
tctcctgaggctgactgttgaatgg

SEQ ID NO: 2896712 - DNA, 25 bp, Homo sapien
tctccctctcctgaggctgactgtt

SEQ ID NO: 2896713 - DNA, 25 bp, Homo sapien
ctccgatttcccaggtcctctccct

SEQ ID NO: 2896714 - DNA, 25 bp, Homo sapien
gaagccatgctgagcgcatccgtag

SEQ ID NO: 2896715 - DNA, 25 bp, Homo sapien
tcctttggtccccaggctttggcag

SEQ ID NO: 2896716 - DNA, 25 bp, Homo sapien
cagctccaggtatacaaaggtggct

SEQ ID NO: 2896717 - DNA, 25 bp, Homo sapien
tccttgcaaccgtggtggaagcggc

SEQ ID NO: 2896718 - DNA, 25 bp, Homo sapien
acaaggagggcgtggacatgcacaa

SEQ ID NO: 2896719 - DNA, 25 bp, Homo sapien
tgggagccacttaacactcagagcc

SEQ ID NO: 2896720 - DNA, 25 bp, Homo sapien
gaaacagcacggagtcgaacctcta

SEQ ID NO: 2896721 - DNA, 25 bp, Homo sapien
tgctctgggactggcaaacgctgat

SEQ ID NO: 2896722 - DNA, 25 bp, Homo sapien
ctggtgacgccatctttgatgtggt

SEQ ID NO: 2896723 - DNA, 25 bp, Homo sapien
gacactcagacatcagagggtcttc

SEQ ID NO: 2896724 - DNA, 25 bp, Homo sapien
ccatctttgatgtggtagagcagac

SEQ ID NO: 2896725 - DNA, 25 bp, Homo sapien
gagggtcttcgttcaggttcaccag

SEQ ID NO: 2896726 - DNA, 25 bp, Homo sapien
ctgggagaaacgggcaccctcagcc

SEQ ID NO: 2896727 - DNA, 25 bp, Homo sapien
agagctcactccctacccaagatga

SEQ ID NO: 2896728 - DNA, 25 bp, Homo sapien
taggttgatgatcctgagagctcac

SEQ ID NO: 2896729 - DNA, 25 bp, Homo sapien
ccacccatccttaggttgatgatcc

SEQ ID NO: 2896730 - DNA, 25 bp, Homo sapien
gatgtccatatctacttggccgacc

SEQ ID NO: 2896731 - DNA, 25 bp, Homo sapien
gctgggggatgctccggaacagaca

SEQ ID NO: 2896732 - DNA, 25 bp, Homo sapien
gctcccgaatgaactgtccggtcag

SEQ ID NO: 2896733 - DNA, 25 bp, Homo sapien
agtgttgctcccgaatgaactgtcc

SEQ ID NO: 2896734 - DNA, 25 bp, Homo sapien
gggctgaactgattcaacagctttc

SEQ ID NO: 2896735 - DNA, 25 bp, Homo sapien
cccaaaatgccggaagcatttgctg

SEQ ID NO: 2896736 - DNA, 25 bp, Homo sapien
atttgctgtcactgaggacttgaac

SEQ ID NO: 2896737 - DNA, 25 bp, Homo sapien
agctttcaacccaaaatgccggaag

SEQ ID NO: 2896738 - DNA, 25 bp, Homo sapien
agcggctccgtcacaagcttcccat

SEQ ID NO: 2896739 - DNA, 25 bp, Homo sapien
cattcacatatgtctcagctccttc

SEQ ID NO: 2896740 - DNA, 25 bp, Homo sapien
tcccattcacatatgtctcagctcc

SEQ ID NO: 2896741 - DNA, 25 bp, Homo sapien
agcaccagcggctccgtcacaagct

SEQ ID NO: 2896742 - DNA, 25 bp, Homo sapien
ttccagtcgactggctcagagggcg

SEQ ID NO: 2896743 - DNA, 25 bp, Homo sapien
cggaaaacgtggttcttgcccatca

SEQ ID NO: 2896744 - DNA, 25 bp, Homo sapien
gctttatgtcgatgccttgctgctc

SEQ ID NO: 2896745 - DNA, 25 bp, Homo sapien
gccttgcctgctccgggtggttgaa

SEQ ID NO: 2896746 - DNA, 25 bp, Homo sapien
cagcagaagatcggcttcttccttt

SEQ ID NO: 2896747 - DNA, 25 bp, Homo sapien
ccagcagaagatcggcttcttcctt

SEQ ID NO: 2896748 - DNA, 25 bp, Homo sapien
ctttccggtactgattctccagatc

SEQ ID NO: 2896749 - DNA, 25 bp, Homo sapien
tttccggtactgattctccagatcc

SEQ ID NO: 2896750 - DNA, 25 bp, Homo sapien
tgggcagaccacagcgtttgacaat

SEQ ID NO: 2896751 - DNA, 25 bp, Homo sapien
tgcagaatccccgtcagcttgtcga

SEQ ID NO: 2896752 - DNA, 25 bp, Homo sapien
cacaagagcgcttgtcagagtcatc

SEQ ID NO: 2896753 - DNA, 25 bp, Homo sapien
tgctcccgcaaggaggagatgagcc

SEQ ID NO: 2896754 - DNA, 25 bp, Homo sapien
tcctgcttgagccagcgaagacgac

SEQ ID NO: 2896755 - DNA, 25 bp, Homo sapien
gaagcgtagcttgcagtcgtgaggg

SEQ ID NO: 2896756 - DNA, 25 bp, Homo sapien
gggctgacggcatgcggtcactggg

SEQ ID NO: 2896757 - DNA, 25 bp, Homo sapien
cgaccacgacggaaggcagggtcct

SEQ ID NO: 2896758 - DNA, 25 bp, Homo sapien
cagaacgctgccgtctcattcgtgg

SEQ ID NO: 2896759 - DNA, 25 bp, Homo sapien
gggtggctggggataagagttgtgc

SEQ ID NO: 2896760 - DNA, 25 bp, Homo sapien
agaacgctgccgtctcattcgtggg

SEQ ID NO: 2896761 - DNA, 25 bp, Homo sapien
gctggggataagagttgtgcttttt

SEQ ID NO: 2896762 - DNA, 25 bp, Homo sapien
aagcagcgtctcgggcgtcttccct

SEQ ID NO: 2896763 - DNA, 25 bp, Homo sapien
ttctcctagcaaggggccccaccag

SEQ ID NO: 2896764 - DNA, 25 bp, Homo sapien
gcagcgtctcgggcgtcttcccttc

SEQ ID NO: 2896765 - DNA, 25 bp, Homo sapien
cttctcctagcaaggggccccacca

SEQ ID NO: 2896766 - DNA, 25 bp, Homo sapien
tttgctcctggcaactccgtgccct

SEQ ID NO: 2896767 - DNA, 25 bp, Homo sapien
tagcagcgtttgtgggacacacccc

SEQ ID NO: 2896768 - DNA, 25 bp, Homo sapien
gaaagtcaaacactggctacgcagc

SEQ ID NO: 2896769 - DNA, 25 bp, Homo sapien
gaggcagcttcctatctctctcttc

SEQ ID NO: 2896770 - DNA, 25 bp, Homo sapien
gggaatgacttatgatcctaccatg

SEQ ID NO: 2896771 - DNA, 25 bp, Homo sapien
gggaggggaatgacttatgatccta

SEQ ID NO: 2896772 - DNA, 25 bp, Homo sapien
gaatgacttatgatcctaccatgcc

SEQ ID NO: 2896773 - DNA, 25 bp, Homo sapien
tgacttatgatcctaccatgcctcc

SEQ ID NO: 2896774 - DNA, 25 bp, Homo sapien
ctttattaaagggcccacatcctca

SEQ ID NO: 2896775 - DNA, 25 bp, Homo sapien
gctatcctttattaaagggcccaca

SEQ ID NO: 2896776 - DNA, 25 bp, Homo sapien
ttattaaagggcccacatcctcatg

SEQ ID NO: 2896777 - DNA, 25 bp, Homo sapien
attaaagggcccacatcctcatggg

SEQ ID NO: 2896778 - DNA, 25 bp, Homo sapien
gaggaggcccacgaaatagctgctg

SEQ ID NO: 2896779 - DNA, 25 bp, Homo sapien
gcctggcccgtgcacattattaaag

SEQ ID NO: 2896780 - DNA, 25 bp, Homo sapien
gattgaatttgaggagaaggcccca

SEQ ID NO: 2896781 - DNA, 25 bp, Homo sapien
caatgtggcatagtcaagggctcgc

SEQ ID NO: 2896782 - DNA, 25 bp, Homo sapien
agaacaggcagggcgctatagctca

SEQ ID NO: 2896783 - DNA, 25 bp, Homo sapien
gggcgctatagctcacgcaggtaat

SEQ ID NO: 2896784 - DNA, 25 bp, Homo sapien
aggcagggcgctatagctcacgcag

SEQ ID NO: 2896785 - DNA, 25 bp, Homo sapien
cagggcgctatagctcacgcaggta

SEQ ID NO: 2896786 - DNA, 25 bp, Homo sapien
tccgtgaacgcgcaagcaaagacgt

SEQ ID NO: 2896787 - DNA, 25 bp, Homo sapien
tcctggcggacaagagtggaacgac

SEQ ID NO: 2896788 - DNA, 25 bp, Homo sapien
tcaaggcctcatatccggttcagag

SEQ ID NO: 2896789 - DNA, 25 bp, Homo sapien
gagacctcacctcgttttgcaagcg

SEQ ID NO: 2896790 - DNA, 25 bp, Homo sapien
gattgtttcccctaaggtcgatcta

SEQ ID NO: 2896791 - DNA, 25 bp, Homo sapien
ctgtcatttgctatgggattggcct

SEQ ID NO: 2896792 - DNA, 25 bp, Homo sapien
gaagaagctgctcaatgaaggcttc

SEQ ID NO: 2896793 - DNA, 25 bp, Homo sapien
tctttggaactcaagagcacccacg

SEQ ID NO: 2896794 - DNA, 25 bp, Homo sapien
agctttcactccactatttgtgtta

SEQ ID NO: 2896795 - DNA, 25 bp, Homo sapien
tccactgggttgtagcccagctttc

SEQ ID NO: 2896796 - DNA, 25 bp, Homo sapien
aacatgtttgttttccctccactgg

SEQ ID NO: 2896797 - DNA, 25 bp, Homo sapien
tgcctggtggaaatccatgtggaac

SEQ ID NO: 2896798 - DNA, 25 bp, Homo sapien
tgaacgagtctggtcatctgtggac

SEQ ID NO: 2896799 - DNA, 25 bp, Homo sapien
atgtcccagtgaacgagtctggtca

SEQ ID NO: 2896800 - DNA, 25 bp, Homo sapien
cagtgaacgagtctggtcatctgtg

SEQ ID NO: 2896801 - DNA, 25 bp, Homo sapien
cccagtgaacgagtctggtcatctg

SEQ ID NO: 2896802 - DNA, 25 bp, Homo sapien
taatagttcagtgtcctacctccct

SEQ ID NO: 2896803 - DNA, 25 bp, Homo sapien
gatggtatgagacgtattccttcct

SEQ ID NO: 2896804 - DNA, 25 bp, Homo sapien
tatactctacccaaaagtctgccat

SEQ ID NO: 2896805 - DNA, 25 bp, Homo sapien
tctgtcacccgcacgggagtggctg

SEQ ID NO: 2896806 - DNA, 25 bp, Homo sapien
cagcctgtatgaggatgtgtatgac

SEQ ID NO: 2896807 - DNA, 25 bp, Homo sapien
ttcacggtctactaacaggttcagg

SEQ ID NO: 2896808 - DNA, 25 bp, Homo sapien
taggtgagtatgagcagttctgttc

SEQ ID NO: 2896809 - DNA, 25 bp, Homo sapien
caggacttccacagaattggcttta

SEQ ID NO: 2896810 - DNA, 25 bp, Homo sapien
tgccttcccgcaaggatgacggcgg

SEQ ID NO: 2896811 - DNA, 25 bp, Homo sapien
ccttcccgcaaggatgacggcgggc

SEQ ID NO: 2896812 - DNA, 25 bp, Homo sapien
ttcccgcaaggatgacggcgggctt

SEQ ID NO: 2896813 - DNA, 25 bp, Homo sapien
cccgcaaggatgacggcgggcttct

SEQ ID NO: 2896814 - DNA, 25 bp, Homo sapien
tgcgccctcgtgtcgctccccaagc

SEQ ID NO: 2896815 - DNA, 25 bp, Homo sapien
cgcgatctgccgctctgcgccctcg

SEQ ID NO: 2896816 - DNA, 25 bp, Homo sapien
tcctagaacggctccggggatgaac

SEQ ID NO: 2896817 - DNA, 25 bp, Homo sapien
gatgaacttccgctccgcgatctgc

SEQ ID NO: 2896818 - DNA, 25 bp, Homo sapien
gcttttcgccggttctagccctagc

SEQ ID NO: 2896819 - DNA, 25 bp, Homo sapien
tccggcttgcttttcgccggttcta

SEQ ID NO: 2896820 - DNA, 25 bp, Homo sapien
tagcccaagttccacgtcgccgccg

SEQ ID NO: 2896821 - DNA, 25 bp, Homo sapien
gaacaggtggtcagcgcaccgacgc

SEQ ID NO: 2896822 - DNA, 25 bp, Homo sapien
tgtcactggcgacgggcatcggcca

SEQ ID NO: 2896823 - DNA, 25 bp, Homo sapien
ctcgcacagagcccgcagctgttgt

SEQ ID NO: 2896824 - DNA, 25 bp, Homo sapien
cgcagctgttgtcccggtgtcactg

SEQ ID NO: 2896825 - DNA, 25 bp, Homo sapien
ggcactccagccaatcggcgcgcgt

SEQ ID NO: 2896826 - DNA, 25 bp, Homo sapien
caggccgctactgccccgcgctcgc

SEQ ID NO: 2896827 - DNA, 25 bp, Homo sapien
gcaggccgctactgccccgcgctcg

SEQ ID NO: 2896828 - DNA, 25 bp, Homo sapien
cgcaggccgctactgccccgcgctc

SEQ ID NO: 2896829 - DNA, 25 bp, Homo sapien
gcagttttggcagcctgagaatcca

SEQ ID NO: 2896830 - DNA, 25 bp, Homo sapien
gaggggccaatcaccatgctctcct

SEQ ID NO: 2896831 - DNA, 25 bp, Homo sapien
tcagagtgaagaggggccaatcacc

SEQ ID NO: 2896832 - DNA, 25 bp, Homo sapien
gtgaagaggggccaatcaccatgct

SEQ ID NO: 2896833 - DNA, 25 bp, Homo sapien
taacctcttccatggactctctcga

SEQ ID NO: 2896834 - DNA, 25 bp, Homo sapien
taatgacccatgtggctcagattct

SEQ ID NO: 2896835 - DNA, 25 bp, Homo sapien
caaccctgatggaaagtctctctcc

SEQ ID NO: 2896836 - DNA, 25 bp, Homo sapien
gatttcttaaagatcatcaaccctg

SEQ ID NO: 2896837 - DNA, 25 bp, Homo sapien
ctctgttgtatctccctgatgtgta

SEQ ID NO: 2896838 - DNA, 25 bp, Homo sapien
tctctaggaagttttggccagaggt

SEQ ID NO: 2896839 - DNA, 25 bp, Homo sapien
ctctcattattctcccggtctttct

SEQ ID NO: 2896840 - DNA, 25 bp, Homo sapien
atgtgtaaccagatttgggctggga

SEQ ID NO: 2896841 - DNA, 25 bp, Homo sapien
gcatgaattctcaggtgccgtcgaa

SEQ ID NO: 2896842 - DNA, 25 bp, Homo sapien
gcagctcagaattatcccaaaaggt

SEQ ID NO: 2896843 - DNA, 25 bp, Homo sapien
gatgccggataagctcagaactctg

SEQ ID NO: 2896844 - DNA, 25 bp, Homo sapien
caataaggtgagaggtccgcctgaa

SEQ ID NO: 2896845 - DNA, 25 bp, Homo sapien
tgaataagttggactttagcttttc

SEQ ID NO: 2896846 - DNA, 25 bp, Homo sapien
caaatgaataagttggactttagct

SEQ ID NO: 2896847 - DNA, 25 bp, Homo sapien
ctgtccattcattggatttgaatac

SEQ ID NO: 2896848 - DNA, 25 bp, Homo sapien
aacaaatgaataagttggactttag

SEQ ID NO: 2896849 - DNA, 25 bp, Homo sapien
tctgggaatgagacgtgagacctcc

SEQ ID NO: 2896850 - DNA, 25 bp, Homo sapien
tgaaaaaggaataagacggcgcact

SEQ ID NO: 2896851 - DNA, 25 bp, Homo sapien
catggtcaggtacaacaggtcacta

SEQ ID NO: 2896852 - DNA, 25 bp, Homo sapien
tatcccctggtgttgcctaatcggc

SEQ ID NO: 2896853 - DNA, 25 bp, Homo sapien
gacttttaagattgaggcctgtgcg

SEQ ID NO: 2896854 - DNA, 25 bp, Homo sapien
ggtcagatgctgactcccaagtaag

SEQ ID NO: 2896855 - DNA, 25 bp, Homo sapien
taccagtcacgactgtggtcagatg

SEQ ID NO: 2896856 - DNA, 25 bp, Homo sapien
ccaagtaagtcgaagagggaggcaa

SEQ ID NO: 2896857 - DNA, 25 bp, Homo sapien
gtataccaacacacgcacaatagat

SEQ ID NO: 2896858 - DNA, 25 bp, Homo sapien
tgttaaaggccatacaaatggtccg

SEQ ID NO: 2896859 - DNA, 25 bp, Homo sapien
cgccaggagtcagaacacttgtaaa

SEQ ID NO: 2896860 - DNA, 25 bp, Homo sapien
agcattaagaacctggcatccgcca

SEQ ID NO: 2896861 - DNA, 25 bp, Homo sapien
gtggttgacgactgtgtccacctgc

SEQ ID NO: 2896862 - DNA, 25 bp, Homo sapien
gcggccagcgagtggttgacgactg

SEQ ID NO: 2896863 - DNA, 25 bp, Homo sapien
gactgtgtccacctgcgctgctgag

SEQ ID NO: 2896864 - DNA, 25 bp, Homo sapien
tcgcaggcggccagcgagtggttga

SEQ ID NO: 2896865 - DNA, 25 bp, Homo sapien
ctcgggtaccggggctcctgaaatg

SEQ ID NO: 2896866 - DNA, 25 bp, Homo sapien
ctgaaatgggcttccgctgtccgct

SEQ ID NO: 2896867 - DNA, 25 bp, Homo sapien
gctgtccgctcggtcactgccctca

SEQ ID NO: 2896868 - DNA, 25 bp, Homo sapien
ccgagctcgggtaccggggctcctg

SEQ ID NO: 2896869 - DNA, 25 bp, Homo sapien
ggagacaaggacatgggaaggacgc

SEQ ID NO: 2896870 - DNA, 25 bp, Homo sapien
aggagacaaggacatgggaaggacg

SEQ ID NO: 2896871 - DNA, 25 bp, Homo sapien
taggagacaaggacatgggaaggac

SEQ ID NO: 2896872 - DNA, 25 bp, Homo sapien
ctaggagacaaggacatgggaagga

SEQ ID NO: 2896873 - DNA, 25 bp, Homo sapien
ctggctggcctctagcgcatttggg

SEQ ID NO: 2896874 - DNA, 25 bp, Homo sapien
gacgacaagtaccaacagagttggg

SEQ ID NO: 2896875 - DNA, 25 bp, Homo sapien
tcttgtccgcggtactgcaggagag

SEQ ID NO: 2896876 - DNA, 25 bp, Homo sapien
gagttgggtccaccagaagacacct

SEQ ID NO: 2896877 - DNA, 25 bp, Homo sapien
agagtggggaaaagcgtcctgagaa

SEQ ID NO: 2896878 - DNA, 25 bp, Homo sapien
tcctgagaagtaaggggtatgatga

SEQ ID NO: 2896879 - DNA, 25 bp, Homo sapien
aagcgtcctgagaagtaaggggtat

SEQ ID NO: 2896880 - DNA, 25 bp, Homo sapien
tggggaaaagcgtcctgagaagtaa

SEQ ID NO: 2896881 - DNA, 25 bp, Homo sapien
cggagagttcatgccagaaaagagc

SEQ ID NO: 2896882 - DNA, 25 bp, Homo sapien
tcatatctaagtcagcatcggagaa

SEQ ID NO: 2896883 - DNA, 25 bp, Homo sapien
gagctcattagacatcggagagttc

SEQ ID NO: 2896884 - DNA, 25 bp, Homo sapien
ggaaagcttatggatggtgctcaga

SEQ ID NO: 2896885 - DNA, 25 bp, Homo sapien
tcagttgttacagaagatggcccag

SEQ ID NO: 2896886 - DNA, 25 bp, Homo sapien
gagaaatcccaaagcggagagactg

SEQ ID NO: 2896887 - DNA, 25 bp, Homo sapien
tctgagggtaccttagaactgcagc

SEQ ID NO: 2896888 - DNA, 25 bp, Homo sapien
ggacaaaggatcattgccacaacca

SEQ ID NO: 2896889 - DNA, 25 bp, Homo sapien
ggggggtcttgatgttcctcttctc

SEQ ID NO: 2896890 - DNA, 25 bp, Homo sapien
ctcttttctcgagacccttgggtag

SEQ ID NO: 2896891 - DNA, 25 bp, Homo sapien
gcgtcgcgtcacgtgccgtggaggg

SEQ ID NO: 2896892 - DNA, 25 bp, Homo sapien
ctgcgttgcgtcgcgtcacgtgccg

SEQ ID NO: 2896893 - DNA, 25 bp, Homo sapien
cgaggtccacctggcggcttggctt

SEQ ID NO: 2896894 - DNA, 25 bp, Homo sapien
tccgctcaagtccaggaaccggttc

SEQ ID NO: 2896895 - DNA, 25 bp, Homo sapien
cgctccagtccagtcgtgcaggcgg

SEQ ID NO: 2896896 - DNA, 25 bp, Homo sapien
ctgggccaaagtccgcgaacggaag

SEQ ID NO: 2896897 - DNA, 25 bp, Homo sapien
attgtttctgagtcttgagttttct

SEQ ID NO: 2896898 - DNA, 25 bp, Homo sapien
tcaggctctgtcaatttcatctctg

SEQ ID NO: 2896899 - DNA, 25 bp, Homo sapien
tctctgtaacctttattgtttctga

SEQ ID NO: 2896900 - DNA, 25 bp, Homo sapien
gaaattcaggctctgtcaatttcat

SEQ ID NO: 2896901 - DNA, 25 bp, Homo sapien
tagttcctttgctttatcatgagag

SEQ ID NO: 2896902 - DNA, 25 bp, Homo sapien
taaatggtggaagctgcataaagca

SEQ ID NO: 2896903 - DNA, 25 bp, Homo sapien
gtgtcctgtttagcagcaccgagaa

SEQ ID NO: 2896904 - DNA, 25 bp, Homo sapien
tcatgagaggttccacaccacagga

SEQ ID NO: 2896905 - DNA, 25 bp, Homo sapien
catctgattcagtgtatagtactta

SEQ ID NO: 2896906 - DNA, 25 bp, Homo sapien
ggtcatgtgcagatatgtccttccc

SEQ ID NO: 2896907 - DNA, 25 bp, Homo sapien
gataaagatgtcagtatgtacatat

SEQ ID NO: 2896908 - DNA, 25 bp, Homo sapien
cagtatgtacatataggaagagaga

SEQ ID NO: 2896909 - DNA, 25 bp, Homo sapien
tgtagcgagcgtggaagaattttca

SEQ ID NO: 2896910 - DNA, 25 bp, Homo sapien
gctcaggtctaatgcagcaccaaag

SEQ ID NO: 2896911 - DNA, 25 bp, Homo sapien
caaagaaaccatacagaatcataac

SEQ ID NO: 2896912 - DNA, 25 bp, Homo sapien
agaattttcaatcagagctcaggtc

SEQ ID NO: 2896913 - DNA, 25 bp, Homo sapien
tcatagaattcatagtggagaaaag

SEQ ID NO: 2896914 - DNA, 25 bp, Homo sapien
ttcgacatcatagaattcatagtgg

SEQ ID NO: 2896915 - DNA, 25 bp, Homo sapien
gctcacactttattcgacatcatag

SEQ ID NO: 2896916 - DNA, 25 bp, Homo sapien
cagagctcacactttattcgacatc

SEQ ID NO: 2896917 - DNA, 25 bp, Homo sapien
cacggccatcgtaaggcagcaactg

SEQ ID NO: 2896918 - DNA, 25 bp, Homo sapien
tcttggcggtacagtcttgggtctc

SEQ ID NO: 2896919 - DNA, 25 bp, Homo sapien
tcggcccgactcgaaagcggtcttg

SEQ ID NO: 2896920 - DNA, 25 bp, Homo sapien
tgttcaggcctcacgtatctgcccg

SEQ ID NO: 2896921 - DNA, 25 bp, Homo sapien
gagtcccacgaaggaatcaaggaaa

SEQ ID NO: 2896922 - DNA, 25 bp, Homo sapien
ttgagtcccacgaaggaatcaagga

SEQ ID NO: 2896923 - DNA, 25 bp, Homo sapien
acccctgtcttgagtcccacgaagg

SEQ ID NO: 2896924 - DNA, 25 bp, Homo sapien
tgtcttgagtcccacgaaggaatca

SEQ ID NO: 2896925 - DNA, 25 bp, Homo sapien
gaaacagcccttggcatccttgtag

SEQ ID NO: 2896926 - DNA, 25 bp, Homo sapien
aagaaacagcccttggcatccttgt

SEQ ID NO: 2896927 - DNA, 25 bp, Homo sapien
acagcccttggcatccttgtagctc

SEQ ID NO: 2896928 - DNA, 25 bp, Homo sapien
catgctgaagaaacagcccttggca

SEQ ID NO: 2896929 - DNA, 25 bp, Homo sapien
gggacagaggccctaccttgctgag

SEQ ID NO: 2896930 - DNA, 25 bp, Homo sapien
tcccgtaacacacctccaagcaggg

SEQ ID NO: 2896931 - DNA, 25 bp, Homo sapien
acctccaagcaggggtctataaggc

SEQ ID NO: 2896932 - DNA, 25 bp, Homo sapien
tgggtcccgtaacacacctccaagc

SEQ ID NO: 2896933 - DNA, 25 bp, Homo sapien
ggtcccgtaacacacctccaagcag

SEQ ID NO: 2896934 - DNA, 25 bp, Homo sapien
ggtgctccgcgtcgcagcagagctc

SEQ ID NO: 2896935 - DNA, 25 bp, Homo sapien
tgctcatggtcctggtgctccgcgt

SEQ ID NO: 2896936 - DNA, 25 bp, Homo sapien
ggtcctggtgctccgcgtcgcagca

SEQ ID NO: 2896937 - DNA, 25 bp, Homo sapien
atggtcctggtgctccgcgtcgcag

SEQ ID NO: 2896938 - DNA, 25 bp, Homo sapien
cgacgacaaggatggggcccatctc

SEQ ID NO: 2896939 - DNA, 25 bp, Homo sapien
ccgcgacgacgacaaggatggggcc

SEQ ID NO: 2896940 - DNA, 25 bp, Homo sapien
gcgacgacgacaaggatggggccca

SEQ ID NO: 2896941 - DNA, 25 bp, Homo sapien
gacgacgacaaggatggggcccatc

SEQ ID NO: 2896942 - DNA, 25 bp, Homo sapien
catccagtagatctctggctacttc

SEQ ID NO: 2896943 - DNA, 25 bp, Homo sapien
gccccatccagtagatctctggcta

SEQ ID NO: 2896944 - DNA, 25 bp, Homo sapien
tccagtagatctctggctacttccc

SEQ ID NO: 2896945 - DNA, 25 bp, Homo sapien
ccgccccatccagtagatctctggc

SEQ ID NO: 2896946 - DNA, 25 bp, Homo sapien
catgagtgtcagtccaagatcaagg

SEQ ID NO: 2896947 - DNA, 25 bp, Homo sapien
taacaggctgcgttagtttcccagg

SEQ ID NO: 2896948 - DNA, 25 bp, Homo sapien
tctgtgagaatctaacggcaccgct

SEQ ID NO: 2896949 - DNA, 25 bp, Homo sapien
tgtagatagtaagcctggagctccg

SEQ ID NO: 2896950 - DNA, 25 bp, Homo sapien
cagtggcatgaagcgagatgaggag

SEQ ID NO: 2896951 - DNA, 25 bp, Homo sapien
agtcctgtgtccagccgtccacgtg

SEQ ID NO: 2896952 - DNA, 25 bp, Homo sapien
ccgtgaaaattagcctaggagtcct

SEQ ID NO: 2896953 - DNA, 25 bp, Homo sapien
agccgtccacgtggagccccaggag

SEQ ID NO: 2896954 - DNA, 25 bp, Homo sapien
gaaacaagacaagttcacgttgtcc

SEQ ID NO: 2896955 - DNA, 25 bp, Homo sapien
gagcccagtggttgcccttagttct

SEQ ID NO: 2896956 - DNA, 25 bp, Homo sapien
cggaagataagtgacagccaaggtt

SEQ ID NO: 2896957 - DNA, 25 bp, Homo sapien
ccaaggtttgtcagcctgcagaggg

SEQ ID NO: 2896958 - DNA, 25 bp, Homo sapien
cattcatccattgtctcccccgact

SEQ ID NO: 2896959 - DNA, 25 bp, Homo sapien
cccatctcagactgtcccaatgaca

SEQ ID NO: 2896960 - DNA, 25 bp, Homo sapien
tccccatctcagactgtcccaatga

SEQ ID NO: 2896961 - DNA, 25 bp, Homo sapien
atctcagactgtcccaatgacagcc

SEQ ID NO: 2896962 - DNA, 25 bp, Homo sapien
ccaagggatgactatataaactcac

SEQ ID NO: 2896963 - DNA, 25 bp, Homo sapien
tccaaacggagtctcaagtcctgag

SEQ ID NO: 2896964 - DNA, 25 bp, Homo sapien
aagcacttggccctcgtatctggga

SEQ ID NO: 2896965 - DNA, 25 bp, Homo sapien
ctgagacagggcgtccagatgccca

SEQ ID NO: 2896966 - DNA, 25 bp, Homo sapien
gatcatgtgcggaaagtgccaggca

SEQ ID NO: 2896967 - DNA, 25 bp, Homo sapien
tggataaacatgtctgtgcacgtgt

SEQ ID NO: 2896968 - DNA, 25 bp, Homo sapien
cagcttcagacctccctgacctcag

SEQ ID NO: 2896969 - DNA, 25 bp, Homo sapien
ctggagagcggataggtgctaagca

SEQ ID NO: 2896970 - DNA, 25 bp, Homo sapien
taagcaccagtgacattctgaggtc

SEQ ID NO: 2896971 - DNA, 25 bp, Homo sapien
gtgctaagcaccagtgacattctga

SEQ ID NO: 2896972 - DNA, 25 bp, Homo sapien
gctaagcaccagtgacattctgagg

SEQ ID NO: 2896973 - DNA, 25 bp, Homo sapien
ccacaaaaccgcttgtgaataccac

SEQ ID NO: 2896974 - DNA, 25 bp, Homo sapien
acaaaaccgcttgtgaataccactg

SEQ ID NO: 2896975 - DNA, 25 bp, Homo sapien
cctttgagtccacaaaaccgcttgt

SEQ ID NO: 2896976 - DNA, 25 bp, Homo sapien
acctttgagtccacaaaaccgcttg

SEQ ID NO: 2896977 - DNA, 25 bp, Homo sapien
ctggagggaagagagcaggtcacac

SEQ ID NO: 2896978 - DNA, 25 bp, Homo sapien
tggagggaagagagcaggtcacact

SEQ ID NO: 2896979 - DNA, 25 bp, Homo sapien
agggaagagagcaggtcacactcac

SEQ ID NO: 2896980 - DNA, 25 bp, Homo sapien
gagggaagagagcaggtcacactca

SEQ ID NO: 2896981 - DNA, 25 bp, Homo sapien
catgggcagtgtagaacgggcgccc

SEQ ID NO: 2896982 - DNA, 25 bp, Homo sapien
gaatgggtacattcgggaacagcac

SEQ ID NO: 2896983 - DNA, 25 bp, Homo sapien
gagaaaatcgtctacatgggcagtg

SEQ ID NO: 2896984 - DNA, 25 bp, Homo sapien
actctacgaagccaccatgaagacg

SEQ ID NO: 2896985 - DNA, 25 bp, Homo sapien
cagatttgggatctagagcagggag

SEQ ID NO: 2896986 - DNA, 25 bp, Homo sapien
ccaggccagttactgcctctctgac

SEQ ID NO: 2896987 - DNA, 25 bp, Homo sapien
ttgaggcctgaagtctagcatggca

SEQ ID NO: 2896988 - DNA, 25 bp, Homo sapien
cccagggtcttgtctggattcccag

SEQ ID NO: 2896989 - DNA, 25 bp, Homo sapien
ccacagtggatccatcccagtgtct

SEQ ID NO: 2896990 - DNA, 25 bp, Homo sapien
cagtgtctctgccagggccaggctc

SEQ ID NO: 2896991 - DNA, 25 bp, Homo sapien
ctgccagggccaggctctgccccat

SEQ ID NO: 2896992 - DNA, 25 bp, Homo sapien
cccagtgtctctgccagggccaggc

SEQ ID NO: 2896993 - DNA, 25 bp, Homo sapien
ggaaagcgaggccagacagaataag

SEQ ID NO: 2896994 - DNA, 25 bp, Homo sapien
cagtgaccatcaagacccagcttag

SEQ ID NO: 2896995 - DNA, 25 bp, Homo sapien
cctttgaacacaagggaagatagtc

SEQ ID NO: 2896996 - DNA, 25 bp, Homo sapien
gaggacatctagatggaccgtccct

SEQ ID NO: 2896997 - DNA, 25 bp, Homo sapien
catttgagcaggagtgtgtttggtt

SEQ ID NO: 2896998 - DNA, 25 bp, Homo sapien
agtgaagctgctttagcaataacac

SEQ ID NO: 2896999 - DNA, 25 bp, Homo sapien
tgctttagcaataacaccatttgag

SEQ ID NO: 2897000 - DNA, 25 bp, Homo sapien
caataacaccatttgagcaggagtg

SEQ ID NO: 2897001 - DNA, 25 bp, Homo sapien
attctaccccgctcatcacttgggc

SEQ ID NO: 2897002 - DNA, 25 bp, Homo sapien
gatctctcctgactgctccattcta

SEQ ID NO: 2897003 - DNA, 25 bp, Homo sapien
aagatctctcctgactgctccattc

SEQ ID NO: 2897004 - DNA, 25 bp, Homo sapien
tgctccattctaccccgctcatcac

SEQ ID NO: 2897005 - DNA, 25 bp, Homo sapien
tgtgaactgcggtcaggcaccagag

SEQ ID NO: 2897006 - DNA, 25 bp, Homo sapien
tggatgtgaactgcggtcaggcacc

SEQ ID NO: 2897007 - DNA, 25 bp, Homo sapien
tgtggatgtgaactgcggtcaggca

SEQ ID NO: 2897008 - DNA, 25 bp, Homo sapien
ggatgtggatgtgaactgcggtcag

SEQ ID NO: 2897009 - DNA, 25 bp, Homo sapien
tgccccggcaggttgaatggtgtcc

SEQ ID NO: 2897010 - DNA, 25 bp, Homo sapien
ccccggcaggttgaatggtgtccac

SEQ ID NO: 2897011 - DNA, 25 bp, Homo sapien
ctgccccggcaggttgaatggtgtc

SEQ ID NO: 2897012 - DNA, 25 bp, Homo sapien
gccccggcaggttgaatggtgtcca

SEQ ID NO: 2897013 - DNA, 25 bp, Homo sapien
gctcctgtgcctgcaaactatctgc

SEQ ID NO: 2897014 - DNA, 25 bp, Homo sapien
tgtgcctgcaaactatctgcattct

SEQ ID NO: 2897015 - DNA, 25 bp, Homo sapien
gcaaactatctgcattctctaccat

SEQ ID NO: 2897016 - DNA, 25 bp, Homo sapien
ttccgctcctgtgcctgcaaactat

SEQ ID NO: 2897017 - DNA, 25 bp, Homo sapien
tgcaaaatgccaaaacgatcaatgc

SEQ ID NO: 2897018 - DNA, 25 bp, Homo sapien
tgttgattccaacgggctcaggccc

SEQ ID NO: 2897019 - DNA, 25 bp, Homo sapien
aaacgatcaatgctgctgttgattc

SEQ ID NO: 2897020 - DNA, 25 bp, Homo sapien
tgctgttgattccaacgggctcagg

SEQ ID NO: 2897021 - DNA, 25 bp, Homo sapien
cccccttccccatggggacagtgag

SEQ ID NO: 2897022 - DNA, 25 bp, Homo sapien
catggggacagtgagggctgtagct

SEQ ID NO: 2897023 - DNA, 25 bp, Homo sapien
tcccccttccccatggggacagtga

SEQ ID NO: 2897024 - DNA, 25 bp, Homo sapien
ccccatggggacagtgagggctgta

SEQ ID NO: 2897025 - DNA, 25 bp, Homo sapien
ccagggtctttagtcacaagccctg

SEQ ID NO: 2897026 - DNA, 25 bp, Homo sapien
gacccagggtctttagtcacaagcc

SEQ ID NO: 2897027 - DNA, 25 bp, Homo sapien
gctgcctccctagtctcactgtgag

SEQ ID NO: 2897028 - DNA, 25 bp, Homo sapien
gcctccctagtctcactgtgagatg

SEQ ID NO: 2897029 - DNA, 25 bp, Homo sapien
agggcctggagccgcccaagcctgg

SEQ ID NO: 2897030 - DNA, 25 bp, Homo sapien
cctggagccgcccaagcctgggagc

SEQ ID NO: 2897031 - DNA, 25 bp, Homo sapien
gagctgaggacgtgcacagggcctg

SEQ ID NO: 2897032 - DNA, 25 bp, Homo sapien
gcagagctgaggacgtgcacagggc

SEQ ID NO: 2897033 - DNA, 25 bp, Homo sapien
ttcgcctcccgtgcagtcacaggag

SEQ ID NO: 2897034 - DNA, 25 bp, Homo sapien
agtcacaggaggcagctccgtctca

SEQ ID NO: 2897035 - DNA, 25 bp, Homo sapien
tgcagtcacaggaggcagctccgtc

SEQ ID NO: 2897036 - DNA, 25 bp, Homo sapien
cttcgcctcccgtgcagtcacagga

SEQ ID NO: 2897037 - DNA, 25 bp, Homo sapien
gctactgtgcttatatgtctcccat

SEQ ID NO: 2897038 - DNA, 25 bp, Homo sapien
tactgtgcttatatgtctcccattc

SEQ ID NO: 2897039 - DNA, 25 bp, Homo sapien
tcgttcgtgtcatctcccgccgaat

SEQ ID NO: 2897040 - DNA, 25 bp, Homo sapien
tccatccacttgctcgttcgtgtca

SEQ ID NO: 2897041 - DNA, 25 bp, Homo sapien
tgttcatgggaattcccttgtacac

SEQ ID NO: 2897042 - DNA, 25 bp, Homo sapien
atgggaattcccttgtacactcgat

SEQ ID NO: 2897043 - DNA, 25 bp, Homo sapien
ccgggccccggatgttcatgggaat

SEQ ID NO: 2897044 - DNA, 25 bp, Homo sapien
atgttcaggaggactgaccacaccg

SEQ ID NO: 2897045 - DNA, 25 bp, Homo sapien
cctcacgtccaggtcgatgtggtgg

SEQ ID NO: 2897046 - DNA, 25 bp, Homo sapien
gacatggttccggagagtcgtcctc

SEQ ID NO: 2897047 - DNA, 25 bp, Homo sapien
tggttccggagagtcgtcctcacgt

SEQ ID NO: 2897048 - DNA, 25 bp, Homo sapien
gagtcgtcctcacgtccaggtcgat

SEQ ID NO: 2897049 - DNA, 25 bp, Homo sapien
ccagttcagtctttgggtgcacagt

SEQ ID NO: 2897050 - DNA, 25 bp, Homo sapien
caccattgcgtgtgattttctttgc

SEQ ID NO: 2897051 - DNA, 25 bp, Homo sapien
cacctttcaccattgcgtgtgattt

SEQ ID NO: 2897052 - DNA, 25 bp, Homo sapien
atctctgctgggactgtgtggctcc

SEQ ID NO: 2897053 - DNA, 25 bp, Homo sapien
cgggttatactccgaataggccagg

SEQ ID NO: 2897054 - DNA, 25 bp, Homo sapien
gaatgcgtcctcctcaggcagataa

SEQ ID NO: 2897055 - DNA, 25 bp, Homo sapien
tgcgtcctcctcaggcagataaagg

SEQ ID NO: 2897056 - DNA, 25 bp, Homo sapien
gcgtcctcctcaggcagataaagga

SEQ ID NO: 2897057 - DNA, 25 bp, Homo sapien
acaaggcggtgatgtggctcaggtc

SEQ ID NO: 2897058 - DNA, 25 bp, Homo sapien
ccagggtgcaaaagggcaagcctga

SEQ ID NO: 2897059 - DNA, 25 bp, Homo sapien
ggccacaacagagcggccagaacag

SEQ ID NO: 2897060 - DNA, 25 bp, Homo sapien
gactttgaggccacaacagagcggc

SEQ ID NO: 2897061 - DNA, 25 bp, Homo sapien
catgcggcctttgccctggggaggt

SEQ ID NO: 2897062 - DNA, 25 bp, Homo sapien
gtcttgggttgtgacttgggtacca

SEQ ID NO: 2897063 - DNA, 25 bp, Homo sapien
gttgtgacttgggtaccacatgctc

SEQ ID NO: 2897064 - DNA, 25 bp, Homo sapien
actgtcccaccatttgggctgtgga

SEQ ID NO: 2897065 - DNA, 25 bp, Homo sapien
gactgtcccaccatttgggctgtgg

SEQ ID NO: 2897066 - DNA, 25 bp, Homo sapien
cccgtcaatcaggttccggagaagg

SEQ ID NO: 2897067 - DNA, 25 bp, Homo sapien
aacgaggcacactgcccgcatagac

SEQ ID NO: 2897068 - DNA, 25 bp, Homo sapien
cgtcaatcaggttccggagaaggca

SEQ ID NO: 2897069 - DNA, 25 bp, Homo sapien
aaggcagcctaacgaggcacactgc

SEQ ID NO: 2897070 - DNA, 25 bp, Homo sapien
cttaagagcaatgctggttattggc

SEQ ID NO: 2897071 - DNA, 25 bp, Homo sapien
gagcaatgctggttattggcatcaa

SEQ ID NO: 2897072 - DNA, 25 bp, Homo sapien
aatgctggttattggcatcaacacc

SEQ ID NO: 2897073 - DNA, 25 bp, Homo sapien
ctgaaccttaagagcaatgctggtt

SEQ ID NO: 2897074 - DNA, 25 bp, Homo sapien
ttggttccgcagacgtgcccacagg

SEQ ID NO: 2897075 - DNA, 25 bp, Homo sapien
gcacggtgtcatcgttcatggccca

SEQ ID NO: 2897076 - DNA, 25 bp, Homo sapien
tcatggcccaggtatcgaagaattg

SEQ ID NO: 2897077 - DNA, 25 bp, Homo sapien
tgcttgagcacggtgtcatcgttca

SEQ ID NO: 2897078 - DNA, 25 bp, Homo sapien
gacacgcctgtagtctgctgatccc

SEQ ID NO: 2897079 - DNA, 25 bp, Homo sapien
cacgcctgtagtctgctgatcccag

SEQ ID NO: 2897080 - DNA, 25 bp, Homo sapien
cgcctgtagtctgctgatcccagag

SEQ ID NO: 2897081 - DNA, 25 bp, Homo sapien
ttcctgccacacaccttcgtcccag

SEQ ID NO: 2897082 - DNA, 25 bp, Homo sapien
caggacagggcgtggaaaaacgaga

SEQ ID NO: 2897083 - DNA, 25 bp, Homo sapien
ggagccggggcattgacttccactc

SEQ ID NO: 2897084 - DNA, 25 bp, Homo sapien
ttgacttccactccaggaatctcca

SEQ ID NO: 2897085 - DNA, 25 bp, Homo sapien
tggaaaaacgagatgcccatggcgg

SEQ ID NO: 2897086 - DNA, 25 bp, Homo sapien
tcctcaggccaactcatatctttgt

SEQ ID NO: 2897087 - DNA, 25 bp, Homo sapien
catctcctcaggccaactcatatct

SEQ ID NO: 2897088 - DNA, 25 bp, Homo sapien
tctcctcaggccaactcatatcttt

SEQ ID NO: 2897089 - DNA, 25 bp, Homo sapien
cctcaggccaactcatatctttgtt

SEQ ID NO: 2897090 - DNA, 25 bp, Homo sapien
gtgtcagtggctgtgtgttactaac

SEQ ID NO: 2897091 - DNA, 25 bp, Homo sapien
tgtgtcagtggctgtgtgttactaa

SEQ ID NO: 2897092 - DNA, 25 bp, Homo sapien
cactggatgcttgagttcatgaagc

SEQ ID NO: 2897093 - DNA, 25 bp, Homo sapien
ctgtgtcagtggctgtgtgttacta

SEQ ID NO: 2897094 - DNA, 25 bp, Homo sapien
gttcctgcactaaatcaccatagca

SEQ ID NO: 2897095 - DNA, 25 bp, Homo sapien
tagccatatgccccttcataccaat

SEQ ID NO: 2897096 - DNA, 25 bp, Homo sapien
gcatttagccatatgccccttcata

SEQ ID NO: 2897097 - DNA, 25 bp, Homo sapien
atttagccatatgccccttcatacc

SEQ ID NO: 2897098 - DNA, 25 bp, Homo sapien
ctctgcagctacttcccagtctggt

SEQ ID NO: 2897099 - DNA, 25 bp, Homo sapien
ccacaataattgatctatttcttct

SEQ ID NO: 2897100 - DNA, 25 bp, Homo sapien
cccatggaacaaatccacaataatt

SEQ ID NO: 2897101 - DNA, 25 bp, Homo sapien
ctgcccatggaacaaatccacaata

SEQ ID NO: 2897102 - DNA, 25 bp, Homo sapien
ttcttcttagatggttgtcccaggc

SEQ ID NO: 2897103 - DNA, 25 bp, Homo sapien
ggacacttatatgcccacatgtctt

SEQ ID NO: 2897104 - DNA, 25 bp, Homo sapien
aattgaaagggtcaaatcggacact

SEQ ID NO: 2897105 - DNA, 25 bp, Homo sapien
taactgtccattggtagtggcaaag

SEQ ID NO: 2897106 - DNA, 25 bp, Homo sapien
tccattggtagtggcaaagacaaaa

SEQ ID NO: 2897107 - DNA, 25 bp, Homo sapien
aatgctgtgtacagatatatctgac

SEQ ID NO: 2897108 - DNA, 25 bp, Homo sapien
taaatgctgtgtacagatatatctg

SEQ ID NO: 2897109 - DNA, 25 bp, Homo sapien
cttaaatgctgtgtacagatatatc

SEQ ID NO: 2897110 - DNA, 25 bp, Homo sapien
aaatgctgtgtacagatatatctga

SEQ ID NO: 2897111 - DNA, 25 bp, Homo sapien
cagtcttagtccataccgtacaggg

SEQ ID NO: 2897112 - DNA, 25 bp, Homo sapien
gatttgttctgaattaagtccacag

SEQ ID NO: 2897113 - DNA, 25 bp, Homo sapien
ggggtagtaccatctaacttaatca

SEQ ID NO: 2897114 - DNA, 25 bp, Homo sapien
cctgtgtacttttcatccatattca

SEQ ID NO: 2897115 - DNA, 25 bp, Homo sapien
ttggagatgaagggacaggaatttc

SEQ ID NO: 2897116 - DNA, 25 bp, Homo sapien
tgagagttgtactttttggttatcc

SEQ ID NO: 2897117 - DNA, 25 bp, Homo sapien
tgcacacaaaaatccgctcactgag

SEQ ID NO: 2897118 - DNA, 25 bp, Homo sapien
tatttgtgttggactagaagctgaa

SEQ ID NO: 2897119 - DNA, 25 bp, Homo sapien
tgaagtagcagaacccttgagccca

SEQ ID NO: 2897120 - DNA, 25 bp, Homo sapien
attaggctggatgaggcagctcaca

SEQ ID NO: 2897121 - DNA, 25 bp, Homo sapien
ttagggggctgaagtagcagaaccc

SEQ ID NO: 2897122 - DNA, 25 bp, Homo sapien
caaaagatacaccatagctgggcat

SEQ ID NO: 2897123 - DNA, 25 bp, Homo sapien
atcataagcttgtggtattttcatc

SEQ ID NO: 2897124 - DNA, 25 bp, Homo sapien
catttgtagatggtgaagaggagaa

SEQ ID NO: 2897125 - DNA, 25 bp, Homo sapien
tagggtgaacattccatttgtagat

SEQ ID NO: 2897126 - DNA, 25 bp, Homo sapien
ttccatttgtagatggtgaagagga

SEQ ID NO: 2897127 - DNA, 25 bp, Homo sapien
acattccatttgtagatggtgaaga

SEQ ID NO: 2897128 - DNA, 25 bp, Homo sapien
gtaacctgtaaaggggctgtcagga

SEQ ID NO: 2897129 - DNA, 25 bp, Homo sapien
gagatggcatgtgaccattaaccat

SEQ ID NO: 2897130 - DNA, 25 bp, Homo sapien
gtggactgcaatgatgtaacctgta

SEQ ID NO: 2897131 - DNA, 25 bp, Homo sapien
aaccattccatttgtgaagttcttc

SEQ ID NO: 2897132 - DNA, 25 bp, Homo sapien
acaggaaatacagttctgtcctcat

SEQ ID NO: 2897133 - DNA, 25 bp, Homo sapien
gaggtgacaggaaatacagttctgt

SEQ ID NO: 2897134 - DNA, 25 bp, Homo sapien
ggtgacaggaaatacagttctgtcc

SEQ ID NO: 2897135 - DNA, 25 bp, Homo sapien
ctgaggtgacaggaaatacagttct

SEQ ID NO: 2897136 - DNA, 25 bp, Homo sapien
gtggtcttgctaaccaggatacttg

SEQ ID NO: 2897137 - DNA, 25 bp, Homo sapien
ggtgggagtggtcttgctaaccagg

SEQ ID NO: 2897138 - DNA, 25 bp, Homo sapien
tcttgctaaccaggatacttgaatc

SEQ ID NO: 2897139 - DNA, 25 bp, Homo sapien
ggagtggtcttgctaaccaggatac

SEQ ID NO: 2897140 - DNA, 25 bp, Homo sapien
tagagtgaatggatattgatagccc

SEQ ID NO: 2897141 - DNA, 25 bp, Homo sapien
caccaagcacaggagttcccatctt

SEQ ID NO: 2897142 - DNA, 25 bp, Homo sapien
gcacaactcgtagagtgaatggata

SEQ ID NO: 2897143 - DNA, 25 bp, Homo sapien
tcccatctttctgcacaactcgtag

SEQ ID NO: 2897144 - DNA, 25 bp, Homo sapien
tgtggggtgccaatccacagcaata

SEQ ID NO: 2897145 - DNA, 25 bp, Homo sapien
tggggtgccaatccacagcaatata

SEQ ID NO: 2897146 - DNA, 25 bp, Homo sapien
gggtgccaatccacagcaatatagg

SEQ ID NO: 2897147 - DNA, 25 bp, Homo sapien
ggggtgccaatccacagcaatatag

SEQ ID NO: 2897148 - DNA, 25 bp, Homo sapien
tttggggtcctgttaatcagcatgt

SEQ ID NO: 2897149 - DNA, 25 bp, Homo sapien
gggtcctgttaatcagcatgttagg

SEQ ID NO: 2897150 - DNA, 25 bp, Homo sapien
tggggtcctgttaatcagcatgtta

SEQ ID NO: 2897151 - DNA, 25 bp, Homo sapien
acctttggggtcctgttaatcagca

SEQ ID NO: 2897152 - DNA, 25 bp, Homo sapien
gaaagcacggagacagctgtccagg

SEQ ID NO: 2897153 - DNA, 25 bp, Homo sapien
agtgggtcttacacttggaacagta

SEQ ID NO: 2897154 - DNA, 25 bp, Homo sapien
agcacggagacagctgtccaggttg

SEQ ID NO: 2897155 - DNA, 25 bp, Homo sapien
cacggagacagctgtccaggttgat

SEQ ID NO: 2897156 - DNA, 25 bp, Homo sapien
ctggagaagtaaaggtagaaaacat

SEQ ID NO: 2897157 - DNA, 25 bp, Homo sapien
aggtagaaaacatcgcattaaaggg

SEQ ID NO: 2897158 - DNA, 25 bp, Homo sapien
gaagtaaaggtagaaaacatcgcat

SEQ ID NO: 2897159 - DNA, 25 bp, Homo sapien
aaaggtagaaaacatcgcattaaag

SEQ ID NO: 2897160 - DNA, 25 bp, Homo sapien
gcactcggatcaaaactttcccgaa

SEQ ID NO: 2897161 - DNA, 25 bp, Homo sapien
acaaattgaaatcgcttaaggtgaa

SEQ ID NO: 2897162 - DNA, 25 bp, Homo sapien
agtggtttatgctggcagagggccg

SEQ ID NO: 2897163 - DNA, 25 bp, Homo sapien
cagagggccgggtctcgtggtacca

SEQ ID NO: 2897164 - DNA, 25 bp, Homo sapien
tcttttccagccgaactctgcgcat

SEQ ID NO: 2897165 - DNA, 25 bp, Homo sapien
tgtcctcttttccagccgaactctg

SEQ ID NO: 2897166 - DNA, 25 bp, Homo sapien
ggagcatgtcctcttttccagccga

SEQ ID NO: 2897167 - DNA, 25 bp, Homo sapien
ttttgcttaggagcatgtcctcttt

SEQ ID NO: 2897168 - DNA, 25 bp, Homo sapien
ttcatgctcataaaggaatccattg

SEQ ID NO: 2897169 - DNA, 25 bp, Homo sapien
gcttcatgctcataaaggaatccat

SEQ ID NO: 2897170 - DNA, 25 bp, Homo sapien
tgcttcatgctcataaaggaatcca

SEQ ID NO: 2897171 - DNA, 25 bp, Homo sapien
atgcttcatgctcataaaggaatcc

SEQ ID NO: 2897172 - DNA, 25 bp, Homo sapien
gctgtcattataacagtaccacttg

SEQ ID NO: 2897173 - DNA, 25 bp, Homo sapien
ctcacagctgctgtcattataacag

SEQ ID NO: 2897174 - DNA, 25 bp, Homo sapien
gtcattataacagtaccacttgcag

SEQ ID NO: 2897175 - DNA, 25 bp, Homo sapien
gctgctgtcattataacagtaccac

SEQ ID NO: 2897176 - DNA, 25 bp, Homo sapien
accccatcaaattctaacagtctag

SEQ ID NO: 2897177 - DNA, 25 bp, Homo sapien
gtctagaagataggagctttttgca

SEQ ID NO: 2897178 - DNA, 25 bp, Homo sapien
ggagctttttgcattaactaactac

SEQ ID NO: 2897179 - DNA, 25 bp, Homo sapien
tcggcccaaccccatcaaattctaa

SEQ ID NO: 2897180 - DNA, 25 bp, Homo sapien
ttttcgtaatcagactcagagtctt

SEQ ID NO: 2897181 - DNA, 25 bp, Homo sapien
tcatccgtactgcttgtgtctgcca

SEQ ID NO: 2897182 - DNA, 25 bp, Homo sapien
gaaattgtgcgtagtctatcccctg

SEQ ID NO: 2897183 - DNA, 25 bp, Homo sapien
tatcccctgctgctcatagaaaaga

SEQ ID NO: 2897184 - DNA, 25 bp, Homo sapien
tatcagctacaaggagtcatctccc

SEQ ID NO: 2897185 - DNA, 25 bp, Homo sapien
catttagcttgtctttcagtgacac

SEQ ID NO: 2897186 - DNA, 25 bp, Homo sapien
tctccctcgccaccaagctgtctag

SEQ ID NO: 2897187 - DNA, 25 bp, Homo sapien
gacacttttgccaagtatcagctac

SEQ ID NO: 2897188 - DNA, 25 bp, Homo sapien
catgtgaagatggtgcaaatattgg

SEQ ID NO: 2897189 - DNA, 25 bp, Homo sapien
ttaagagagcctccctttcagactg

SEQ ID NO: 2897190 - DNA, 25 bp, Homo sapien
aattcttatttggtcccaggtggct

SEQ ID NO: 2897191 - DNA, 25 bp, Homo sapien
tgcaaatattggcaactgctcccct

SEQ ID NO: 2897192 - DNA, 25 bp, Homo sapien
aaagggtaatggaatctggcaatga

SEQ ID NO: 2897193 - DNA, 25 bp, Homo sapien
aagggtaatggaatctggcaatgag

SEQ ID NO: 2897194 - DNA, 25 bp, Homo sapien
agggtaatggaatctggcaatgaga

SEQ ID NO: 2897195 - DNA, 25 bp, Homo sapien
gaaagggtaatggaatctggcaatg

SEQ ID NO: 2897196 - DNA, 25 bp, Homo sapien
gataatagttaacagataaacaggt

SEQ ID NO: 2897197 - DNA, 25 bp, Homo sapien
aaccagtataacacaaatcacacaa

SEQ ID NO: 2897198 - DNA, 25 bp, Homo sapien
ataatagttaacagataaacaggta

SEQ ID NO: 2897199 - DNA, 25 bp, Homo sapien
acaaccagtataacacaaatcacac

SEQ ID NO: 2897200 - DNA, 25 bp, Homo sapien
tctgtgtttacttgtatgaggaaaa

SEQ ID NO: 2897201 - DNA, 25 bp, Homo sapien
ttctgtgtttacttgtatgaggaaa

SEQ ID NO: 2897202 - DNA, 25 bp, Homo sapien
ctttctgtgtttacttgtatgagga

SEQ ID NO: 2897203 - DNA, 25 bp, Homo sapien
gactttctgtgtttacttgtatgag

SEQ ID NO: 2897204 - DNA, 25 bp, Homo sapien
tccattctgccaacgtctccggcct

SEQ ID NO: 2897205 - DNA, 25 bp, Homo sapien
ctgccaacgtctccggcctggtgag

SEQ ID NO: 2897206 - DNA, 25 bp, Homo sapien
attctgccaacgtctccggcctggt

SEQ ID NO: 2897207 - DNA, 25 bp, Homo sapien
ctccattctgccaacgtctccggcc

SEQ ID NO: 2897208 - DNA, 25 bp, Homo sapien
ttggctccggccagggtcagcttgt

SEQ ID NO: 2897209 - DNA, 25 bp, Homo sapien
tgcagaagtcattggcagccaggtg

SEQ ID NO: 2897210 - DNA, 25 bp, Homo sapien
agcctcgcttggtgcagaagtcatt

SEQ ID NO: 2897211 - DNA, 25 bp, Homo sapien
cattgttgaatcttcttcaggtaga

SEQ ID NO: 2897212 - DNA, 25 bp, Homo sapien
tctcagaactgacactagaatatgg

SEQ ID NO: 2897213 - DNA, 25 bp, Homo sapien
tgatcatgaggagttactatgccca

SEQ ID NO: 2897214 - DNA, 25 bp, Homo sapien
tcttgacttcctagtcgagtgacaa

SEQ ID NO: 2897215 - DNA, 25 bp, Homo sapien
gaatatggtcccaacgatacaattt

SEQ ID NO: 2897216 - DNA, 25 bp, Homo sapien
cgggtgcgcatgactgggccttctt

SEQ ID NO: 2897217 - DNA, 25 bp, Homo sapien
tgtgggtaccgctaacggcatcttc

SEQ ID NO: 2897218 - DNA, 25 bp, Homo sapien
gaatccaccgtcaggcataaattga

SEQ ID NO: 2897219 - DNA, 25 bp, Homo sapien
tttttgcatcccacgagtgaccccg

SEQ ID NO: 2897220 - DNA, 25 bp, Homo sapien
accagctgaggacgcggcctctcgg

SEQ ID NO: 2897221 - DNA, 25 bp, Homo sapien
tacgccagcgccgactggcgtcgtg

SEQ ID NO: 2897222 - DNA, 25 bp, Homo sapien
gactccgccgggctgagccgagcta

SEQ ID NO: 2897223 - DNA, 25 bp, Homo sapien
gccacgcatgtctaggaccagctga

SEQ ID NO: 2897224 - DNA, 25 bp, Homo sapien
tgggcagatgtcttgttaaacaagt

SEQ ID NO: 2897225 - DNA, 25 bp, Homo sapien
gggcagatgtcttgttaaacaagtg

SEQ ID NO: 2897226 - DNA, 25 bp, Homo sapien
catgggcagatgtcttgttaaacaa

SEQ ID NO: 2897227 - DNA, 25 bp, Homo sapien
gcagatgtcttgttaaacaagtgtc

SEQ ID NO: 2897228 - DNA, 25 bp, Homo sapien
atgaagacacccctgcgatcggatg

SEQ ID NO: 2897229 - DNA, 25 bp, Homo sapien
acacatgggtgctcggctctgagga

SEQ ID NO: 2897230 - DNA, 25 bp, Homo sapien
cgatcggatgactgcagccagagga

SEQ ID NO: 2897231 - DNA, 25 bp, Homo sapien
gcatttggttgtgcagaccctccca

SEQ ID NO: 2897232 - DNA, 25 bp, Homo sapien
tctgaagctggaagcccgagatgag

SEQ ID NO: 2897233 - DNA, 25 bp, Homo sapien
cgttgttctgaagctggaagcccga

SEQ ID NO: 2897234 - DNA, 25 bp, Homo sapien
gttttctcgttgttctgaagctgga

SEQ ID NO: 2897235 - DNA, 25 bp, Homo sapien
agggtgttggccgatttctgtgagg

SEQ ID NO: 2897236 - DNA, 25 bp, Homo sapien
gccaattacaaatgggaaccaggac

SEQ ID NO: 2897237 - DNA, 25 bp, Homo sapien
tctgaattatagcactttatttccc

SEQ ID NO: 2897238 - DNA, 25 bp, Homo sapien
ggtttcattagggtgccaattacaa

SEQ ID NO: 2897239 - DNA, 25 bp, Homo sapien
tccagggctacagaaaacggtttca

SEQ ID NO: 2897240 - DNA, 25 bp, Homo sapien
tcaggtgaaccaggaaggtgtgctc

SEQ ID NO: 2897241 - DNA, 25 bp, Homo sapien
tgaaccaggaaggtgtgctccatgc

SEQ ID NO: 2897242 - DNA, 25 bp, Homo sapien
tctccgaatccagctcaggtgaacc

SEQ ID NO: 2897243 - DNA, 25 bp, Homo sapien
ctctccgaatccagctcaggtgaac

SEQ ID NO: 2897244 - DNA, 25 bp, Homo sapien
tagactgtctgggttctaagtccgg

SEQ ID NO: 2897245 - DNA, 25 bp, Homo sapien
catttcctgtagagctggcgagact

SEQ ID NO: 2897246 - DNA, 25 bp, Homo sapien
gaaatgggaaattgccaagcccctg

SEQ ID NO: 2897247 - DNA, 25 bp, Homo sapien
tctaagtgccacctaagtgccaggc

SEQ ID NO: 2897248 - DNA, 25 bp, Homo sapien
cagcttagacgaggtaatggccatt

SEQ ID NO: 2897249 - DNA, 25 bp, Homo sapien
aagtggcagcttagacgaggtaatg

SEQ ID NO: 2897250 - DNA, 25 bp, Homo sapien
tggcagcttagacgaggtaatggcc

SEQ ID NO: 2897251 - DNA, 25 bp, Homo sapien
ctgtaagtggcagcttagacgaggt

SEQ ID NO: 2897252 - DNA, 25 bp, Homo sapien
gctgtggccatcatcgttgtctctg

SEQ ID NO: 2897253 - DNA, 25 bp, Homo sapien
tggccatcatcgttgtctctgtggg

SEQ ID NO: 2897254 - DNA, 25 bp, Homo sapien
tgtggccatcatcgttgtctctgtg

SEQ ID NO: 2897255 - DNA, 25 bp, Homo sapien
ccatcatcgttgtctctgtgggtct

SEQ ID NO: 2897256 - DNA, 25 bp, Homo sapien
tctagagggcccagtaggtacatgt

SEQ ID NO: 2897257 - DNA, 25 bp, Homo sapien
ccagtgcctgattcctaagcagatg

SEQ ID NO: 2897258 - DNA, 25 bp, Homo sapien
tagggtatggctgtgatccagtgcc

SEQ ID NO: 2897259 - DNA, 25 bp, Homo sapien
tcacagaaggtcgagtgacatgcct

SEQ ID NO: 2897260 - DNA, 25 bp, Homo sapien
aactccccagacgtcagtcgcaagt

SEQ ID NO: 2897261 - DNA, 25 bp, Homo sapien
gatagtatcagatctcacagctcag

SEQ ID NO: 2897262 - DNA, 25 bp, Homo sapien
caatgccagcactatagacccagag

SEQ ID NO: 2897263 - DNA, 25 bp, Homo sapien
gtgagggtttttccgccacacacca

SEQ ID NO: 2897264 - DNA, 25 bp, Homo sapien
cgtttatgggacaaagaagcaggtg

SEQ ID NO: 2897265 - DNA, 25 bp, Homo sapien
tggataagagctgaccccaagttcc

SEQ ID NO: 2897266 - DNA, 25 bp, Homo sapien
gacatcggcaatctgtgcaagccta

SEQ ID NO: 2897267 - DNA, 25 bp, Homo sapien
tccagcaggaagctagtggaagtcc

SEQ ID NO: 2897268 - DNA, 25 bp, Homo sapien
ctggcgtgagttctcggtgtagcca

SEQ ID NO: 2897269 - DNA, 25 bp, Homo sapien
ccttccagaggcctcgagatcaaag

SEQ ID NO: 2897270 - DNA, 25 bp, Homo sapien
gaggcctcgagatcaaagtgtgttg

SEQ ID NO: 2897271 - DNA, 25 bp, Homo sapien
cggtgtagccatctgcttttgccct

SEQ ID NO: 2897272 - DNA, 25 bp, Homo sapien
ggagcgaggcactgactgtgtcaat

SEQ ID NO: 2897273 - DNA, 25 bp, Homo sapien
gaagactgtcatggtgctatgctgg

SEQ ID NO: 2897274 - DNA, 25 bp, Homo sapien
taatgaccgggagtgagaggtctca

SEQ ID NO: 2897275 - DNA, 25 bp, Homo sapien
tcactttctggatgccgatggtgtg

SEQ ID NO: 2897276 - DNA, 25 bp, Homo sapien
agcgctggcatcagggcgtgtccct

SEQ ID NO: 2897277 - DNA, 25 bp, Homo sapien
tcacagttcaggtaagcatctcagc

SEQ ID NO: 2897278 - DNA, 25 bp, Homo sapien
gctcacatatggatactttcacagt

SEQ ID NO: 2897279 - DNA, 25 bp, Homo sapien
ctgggagccaccgatcagcactggg

SEQ ID NO: 2897280 - DNA, 25 bp, Homo sapien
tctctgcatgggagctggcgtcctg

SEQ ID NO: 2897281 - DNA, 25 bp, Homo sapien
gaatgctcacggcaaactcgtctgt

SEQ ID NO: 2897282 - DNA, 25 bp, Homo sapien
caaggtgcacaggagctttcaagag

SEQ ID NO: 2897283 - DNA, 25 bp, Homo sapien
taacaactcattcgctctgggcaaa

SEQ ID NO: 2897284 - DNA, 25 bp, Homo sapien
aaagatgagttattgtgcccggagt

SEQ ID NO: 2897285 - DNA, 25 bp, Homo sapien
cttcatacacaagacacggctgcct

SEQ ID NO: 2897286 - DNA, 25 bp, Homo sapien
gatgacttctggttccacctgagtg

SEQ ID NO: 2897287 - DNA, 25 bp, Homo sapien
tgcatttcttggctcgagacccctt

SEQ ID NO: 2897288 - DNA, 25 bp, Homo sapien
tatcacaaggtggatggattagttg

SEQ ID NO: 2897289 - DNA, 25 bp, Homo sapien
atatcacaaggtggatggattagtt

SEQ ID NO: 2897290 - DNA, 25 bp, Homo sapien
aggaacatatcacaaggtggatgga

SEQ ID NO: 2897291 - DNA, 25 bp, Homo sapien
gaacatatcacaaggtggatggatt

SEQ ID NO: 2897292 - DNA, 25 bp, Homo sapien
acatatcacaaggtggatggattag

SEQ ID NO: 2897293 - DNA, 25 bp, Homo sapien
tagggaaggaacatatcacaaggtg

SEQ ID NO: 2897294 - DNA, 25 bp, Homo sapien
tatcacaaggtggatggattagttg

SEQ ID NO: 2897295 - DNA, 25 bp, Homo sapien
tatcacaaggtggatggattagtta

SEQ ID NO: 2897296 - DNA, 25 bp, Homo sapien
tagggcaggaacatgtcacaaggtg

SEQ ID NO: 2897297 - DNA, 25 bp, Homo sapien
caggaacatgtcacaaggtggatgg

SEQ ID NO: 2897298 - DNA, 25 bp, Homo sapien
aggaacatatcacaaggtggatgga

SEQ ID NO: 2897299 - DNA, 25 bp, Homo sapien
atcacaaggtggatggattagttgg

SEQ ID NO: 2897300 - DNA, 25 bp, Homo sapien
tacaaggtgcatagtcacaaggtgg

SEQ ID NO: 2897301 - DNA, 25 bp, Homo sapien
cataaggcacgatatcacaaggtgg

SEQ ID NO: 2897302 - DNA, 25 bp, Homo sapien
gggaagtcataaggcacgatatcac

SEQ ID NO: 2897303 - DNA, 25 bp, Homo sapien
acaaggtggatggattaattagggt

SEQ ID NO: 2897304 - DNA, 25 bp, Homo sapien
caagatttcacaggttctcagagcc

SEQ ID NO: 2897305 - DNA, 25 bp, Homo sapien
tacgtcaagggtgttctatacaagt

SEQ ID NO: 2897306 - DNA, 25 bp, Homo sapien
caaacaatgactgtgacctcaccat

SEQ ID NO: 2897307 - DNA, 25 bp, Homo sapien
cattgataaggtttcaaggaccaga

SEQ ID NO: 2897308 - DNA, 25 bp, Homo sapien
cacaggctacgtggagttcccaagg

SEQ ID NO: 2897309 - DNA, 25 bp, Homo sapien
cagtgtcacgcttttattcatgcta

SEQ ID NO: 2897310 - DNA, 25 bp, Homo sapien
tccagccagtccacaataattaagt

SEQ ID NO: 2897311 - DNA, 25 bp, Homo sapien
catcactcagtagtcagctgcgggc

SEQ ID NO: 2897312 - DNA, 25 bp, Homo sapien
cctggcatgcgcagtccacaatggt

SEQ ID NO: 2897313 - DNA, 25 bp, Homo sapien
catgcgcagtccacaatggtgttct

SEQ ID NO: 2897314 - DNA, 25 bp, Homo sapien
aggcggatttcaggcagtcatgcaa

SEQ ID NO: 2897315 - DNA, 25 bp, Homo sapien
atcataatccaatgcccctgctgat

SEQ ID NO: 2897316 - DNA, 25 bp, Homo sapien
tgctggcccatcaccgggggatcgt

SEQ ID NO: 2897317 - DNA, 25 bp, Homo sapien
tgctgacagtgttggcttcccacaa

SEQ ID NO: 2897318 - DNA, 25 bp, Homo sapien
cctttctgaaatgctcgggtgctgg

SEQ ID NO: 2897319 - DNA, 25 bp, Homo sapien
caatccattccagatcctgctgaca

SEQ ID NO: 2897320 - DNA, 25 bp, Homo sapien
actgcgcccggctgagcttttctga

SEQ ID NO: 2897321 - DNA, 25 bp, Homo sapien
tcgtgatctgcctgcctcagcctcc

SEQ ID NO: 2897322 - DNA, 25 bp, Homo sapien
tgcgcccggctgagcttttctgatt

SEQ ID NO: 2897323 - DNA, 25 bp, Homo sapien
ccactgcgcccggctgagcttttct

SEQ ID NO: 2897324 - DNA, 25 bp, Homo sapien
attcattctccagcatatagttgtg

SEQ ID NO: 2897325 - DNA, 25 bp, Homo sapien
agcctactgaataacaggtgcatgc

SEQ ID NO: 2897326 - DNA, 25 bp, Homo sapien
tttacatagaggcagcatttcacca

SEQ ID NO: 2897327 - DNA, 25 bp, Homo sapien
tacatagaggcagcatttcaccatg

SEQ ID NO: 2897328 - DNA, 25 bp, Homo sapien
aattttacatagaggcagcatttca

SEQ ID NO: 2897329 - DNA, 25 bp, Homo sapien
gattacaggccgtaatatcattcgg

SEQ ID NO: 2897330 - DNA, 25 bp, Homo sapien
tggaatgacatacacgtgccaccac

SEQ ID NO: 2897331 - DNA, 25 bp, Homo sapien
tcattcgggtagttttctcaaccaa

SEQ ID NO: 2897332 - DNA, 25 bp, Homo sapien
tcaacctcctaactggaatgacata

SEQ ID NO: 2897333 - DNA, 25 bp, Homo sapien
ccctaggagtagagattttcaggga

SEQ ID NO: 2897334 - DNA, 25 bp, Homo sapien
taaagacaagccctaggagtagaga

SEQ ID NO: 2897335 - DNA, 25 bp, Homo sapien
taggatcgtttgcatggagcctgtt

SEQ ID NO: 2897336 - DNA, 25 bp, Homo sapien
ggaaagacccgagaaggcaccaatc

SEQ ID NO: 2897337 - DNA, 25 bp, Homo sapien
tcgtgaaggagtgcaacttcactcc

SEQ ID NO: 2897338 - DNA, 25 bp, Homo sapien
tgcatataggtatctatttggccca

SEQ ID NO: 2897339 - DNA, 25 bp, Homo sapien
tgtctgtcttgtgtgagtaccacgc

SEQ ID NO: 2897340 - DNA, 25 bp, Homo sapien
aattgtattgaccacccttgttgaa

SEQ ID NO: 2897341 - DNA, 25 bp, Homo sapien
gataccgcgaatgtaaccgcccaag

SEQ ID NO: 2897342 - DNA, 25 bp, Homo sapien
aagctgttttcatgcactgactcag

SEQ ID NO: 2897343 - DNA, 25 bp, Homo sapien
gagccgattcattaagatagggaaa

SEQ ID NO: 2897344 - DNA, 25 bp, Homo sapien
ccatgctgtaatattatcaaatgaa

SEQ ID NO: 2897345 - DNA, 25 bp, Homo sapien
cccggctaattaaggctgacttctc

SEQ ID NO: 2897346 - DNA, 25 bp, Homo sapien
tctatcacagtctcacaagatgtag

SEQ ID NO: 2897347 - DNA, 25 bp, Homo sapien
gattgatatctagggaagagctcca

SEQ ID NO: 2897348 - DNA, 25 bp, Homo sapien
gagctccaggctttgaatcagaaga

SEQ ID NO: 2897349 - DNA, 25 bp, Homo sapien
tgttgggcacttacaatcgggaggc

SEQ ID NO: 2897350 - DNA, 25 bp, Homo sapien
tgaagccaggccctcaagtcaaggt

SEQ ID NO: 2897351 - DNA, 25 bp, Homo sapien
cctagggctctccatgtgagggaag

SEQ ID NO: 2897352 - DNA, 25 bp, Homo sapien
catatgatttggacacctagggctc

SEQ ID NO: 2897353 - DNA, 25 bp, Homo sapien
gggcagagacggacccgaccgccga

SEQ ID NO: 2897354 - DNA, 25 bp, Homo sapien
agagaaaccgctaaggctggatccg

SEQ ID NO: 2897355 - DNA, 25 bp, Homo sapien
agaaaccgctaaggctggatccgcc

SEQ ID NO: 2897356 - DNA, 25 bp, Homo sapien
accgctaaggctggatccgccggcg

SEQ ID NO: 2897357 - DNA, 25 bp, Homo sapien
cggcctcggggagcggggatgggcg

SEQ ID NO: 2897358 - DNA, 25 bp, Homo sapien
gggaagccgggcccggctgcgccat

SEQ ID NO: 2897359 - DNA, 25 bp, Homo sapien
tcttctcaataaagctgcctgacca

SEQ ID NO: 2897360 - DNA, 25 bp, Homo sapien
aaaactgatccctgcctagaacacc

SEQ ID NO: 2897361 - DNA, 25 bp, Homo sapien
ggctaactcctctatctacttcaag

SEQ ID NO: 2897362 - DNA, 25 bp, Homo sapien
aatctttgcaatacttctagggccc

SEQ ID NO: 2897363 - DNA, 25 bp, Homo sapien
ggagcacggtggcatgatcttcgcc

SEQ ID NO: 2897364 - DNA, 25 bp, Homo sapien
gctggagcacggtggcatgatcttc

SEQ ID NO: 2897365 - DNA, 25 bp, Homo sapien
gcacggtggcatgatcttcgcccac

SEQ ID NO: 2897366 - DNA, 25 bp, Homo sapien
gagcacggtggcatgatcttcgccc

SEQ ID NO: 2897367 - DNA, 25 bp, Homo sapien
tcatccatcagatctcggctccagg

SEQ ID NO: 2897368 - DNA, 25 bp, Homo sapien
tatgttactcgttctgcatcctcca

SEQ ID NO: 2897369 - DNA, 25 bp, Homo sapien
cagtgggttcccgtacacctctaag

SEQ ID NO: 2897370 - DNA, 25 bp, Homo sapien
tttactgacctctgtatattggtca

SEQ ID NO: 2897371 - DNA, 25 bp, Homo sapien
aatctgcttacgatcaacctggctg

SEQ ID NO: 2897372 - DNA, 25 bp, Homo sapien
gaaaacgatactttacccatgtgct

SEQ ID NO: 2897373 - DNA, 25 bp, Homo sapien
tcttaaagactgctcatagggtgct

SEQ ID NO: 2897374 - DNA, 25 bp, Homo sapien
aagcttgggcaaaacatactgtcac

SEQ ID NO: 2897375 - DNA, 25 bp, Homo sapien
ccttaaaaccagaatgcaggcatgt

SEQ ID NO: 2897376 - DNA, 25 bp, Homo sapien
cgtgtcccagtggtataggtctagc

SEQ ID NO: 2897377 - DNA, 25 bp, Homo sapien
tagttgacaactgccatatccatgg

SEQ ID NO: 2897378 - DNA, 25 bp, Homo sapien
agcagtgtaaagaaacgaggttcca

SEQ ID NO: 2897379 - DNA, 25 bp, Homo sapien
taaactaagacactaagcacattgc

SEQ ID NO: 2897380 - DNA, 25 bp, Homo sapien
gagacccttggtatatcacctgaaa

SEQ ID NO: 2897381 - DNA, 25 bp, Homo sapien
agataaggagtttgtgccacaacgt

SEQ ID NO: 2897382 - DNA, 25 bp, Homo sapien
attggttaggcctaagagacccttg

SEQ ID NO: 2897383 - DNA, 25 bp, Homo sapien
tctgctacccgttgctgaagagaaa

SEQ ID NO: 2897384 - DNA, 25 bp, Homo sapien
caagctgctgttgtgcacgtaaaaa

SEQ ID NO: 2897385 - DNA, 25 bp, Homo sapien
cctctttagccaaatataactcctt

SEQ ID NO: 2897386 - DNA, 25 bp, Homo sapien
cttgttcaagctgctgttgtgcacg

SEQ ID NO: 2897387 - DNA, 25 bp, Homo sapien
tagctgataggataaaaacattttg

SEQ ID NO: 2897388 - DNA, 25 bp, Homo sapien
tcagttgttagctgataggataaaa

SEQ ID NO: 2897389 - DNA, 25 bp, Homo sapien
caacaaaattgaagacagacctaat

SEQ ID NO: 2897390 - DNA, 25 bp, Homo sapien
ggcaagtcaggtggacgcaagtcct

SEQ ID NO: 2897391 - DNA, 25 bp, Homo sapien
gaacatcagctttcccacctactta

SEQ ID NO: 2897392 - DNA, 25 bp, Homo sapien
gggctaaattctacaaggcctaaga

SEQ ID NO: 2897393 - DNA, 25 bp, Homo sapien
cacagtgtcttgcagagtgccacca

SEQ ID NO: 2897394 - DNA, 25 bp, Homo sapien
accacagtcagtaatcctttccaag

SEQ ID NO: 2897395 - DNA, 25 bp, Homo sapien
gactgacttcaattagctgtagaca

SEQ ID NO: 2897396 - DNA, 25 bp, Homo sapien
gacaggatgaacaagctacagaggt

SEQ ID NO: 2897397 - DNA, 25 bp, Homo sapien
tactgctgggtttcaacttatcacc

SEQ ID NO: 2897398 - DNA, 25 bp, Homo sapien
gatatcattagccagcatcatactg

SEQ ID NO: 2897399 - DNA, 25 bp, Homo sapien
accaacccatgttacaagctcttta

SEQ ID NO: 2897400 - DNA, 25 bp, Homo sapien
caacccatgttacaagctctttaat

SEQ ID NO: 2897401 - DNA, 25 bp, Homo sapien
tctgaaccaacccatgttacaagct

SEQ ID NO: 2897402 - DNA, 25 bp, Homo sapien
tgaaccaacccatgttacaagctct

SEQ ID NO: 2897403 - DNA, 25 bp, Homo sapien
tttgatagcatactcccattgggtg

SEQ ID NO: 2897404 - DNA, 25 bp, Homo sapien
aaggagcatggagcttctacgccct

SEQ ID NO: 2897405 - DNA, 25 bp, Homo sapien
tagagaaaaaggtgcacaggacaag

SEQ ID NO: 2897406 - DNA, 25 bp, Homo sapien
ttttcgcccaccagtaaccaatcag

SEQ ID NO: 2897407 - DNA, 25 bp, Homo sapien
tgtccttgaccactgagagttggtt

SEQ ID NO: 2897408 - DNA, 25 bp, Homo sapien
actgactgaagctccattagggtta

SEQ ID NO: 2897409 - DNA, 25 bp, Homo sapien
gatgggtctggtagtggtcaattct

SEQ ID NO: 2897410 - DNA, 25 bp, Homo sapien
cacattgaaggtgtcattccactcc

SEQ ID NO: 2897411 - DNA, 25 bp, Homo sapien
cataacagcctgaagtgaagcaact

SEQ ID NO: 2897412 - DNA, 25 bp, Homo sapien
cagagactgtggcaatcgccttaat

SEQ ID NO: 2897413 - DNA, 25 bp, Homo sapien
tcccaaatcatcttgtgcagcttgt

SEQ ID NO: 2897414 - DNA, 25 bp, Homo sapien
cacagctgggttcgaaggtgtccca

SEQ ID NO: 2897415 - DNA, 25 bp, Homo sapien
tttagaatattaactaatctgggcc

SEQ ID NO: 2897416 - DNA, 25 bp, Homo sapien
cactatttcacatttagaatattaa

SEQ ID NO: 2897417 - DNA, 25 bp, Homo sapien
agaatattaactaatctgggccaag

SEQ ID NO: 2897418 - DNA, 25 bp, Homo sapien
catttagaatattaactaatctggg

SEQ ID NO: 2897419 - DNA, 25 bp, Homo sapien
tccagcctaaggtggaactggtgct

SEQ ID NO: 2897420 - DNA, 25 bp, Homo sapien
tcttgaccttcagacagccttcttc

SEQ ID NO: 2897421 - DNA, 25 bp, Homo sapien
gattctctatactgtgcccactgtg

SEQ ID NO: 2897422 - DNA, 25 bp, Homo sapien
tcagctatttccctctctgcggatt

SEQ ID NO: 2897423 - DNA, 25 bp, Homo sapien
tatcttcccaatttttcagataatc

SEQ ID NO: 2897424 - DNA, 25 bp, Homo sapien
gacttcagttaataagaataaattg

SEQ ID NO: 2897425 - DNA, 25 bp, Homo sapien
taaattgatagaggcttattagctg

SEQ ID NO: 2897426 - DNA, 25 bp, Homo sapien
aactaggcatggagtatataggaac

SEQ ID NO: 2897427 - DNA, 25 bp, Homo sapien
atataaatatgacttcacaattcca

SEQ ID NO: 2897428 - DNA, 25 bp, Homo sapien
aatatgacttcacaattccaagtgc

SEQ ID NO: 2897429 - DNA, 25 bp, Homo sapien
ccaagtgctgaatgtcatcataaac

SEQ ID NO: 2897430 - DNA, 25 bp, Homo sapien
agtgctgaatgtcatcataaacaaa

SEQ ID NO: 2897431 - DNA, 25 bp, Homo sapien
aattatgttgctataaaaaggcttc

SEQ ID NO: 2897432 - DNA, 25 bp, Homo sapien
cctgggttagtaagttcatgagaca

SEQ ID NO: 2897433 - DNA, 25 bp, Homo sapien
ttcttatgaataatgaaagggctga

SEQ ID NO: 2897434 - DNA, 25 bp, Homo sapien
aatgaaagggctgattacattttaa

SEQ ID NO: 2897435 - DNA, 25 bp, Homo sapien
gcctctgtcagtttatccttcaaag

SEQ ID NO: 2897436 - DNA, 25 bp, Homo sapien
aacggaccgaagtttctcagcatcc

SEQ ID NO: 2897437 - DNA, 25 bp, Homo sapien
ttttccattggcatcacaacggacc

SEQ ID NO: 2897438 - DNA, 25 bp, Homo sapien
cttcagcctctgtcagtttatcctt

SEQ ID NO: 2897439 - DNA, 25 bp, Homo sapien
taaagaaagattcttaagatgcata

SEQ ID NO: 2897440 - DNA, 25 bp, Homo sapien
aaagaaagattcttaagatgcatag

SEQ ID NO: 2897441 - DNA, 25 bp, Homo sapien
tttaaagaaagattcttaagatgca

SEQ ID NO: 2897442 - DNA, 25 bp, Homo sapien
aagaaagattcttaagatgcatagt

SEQ ID NO: 2897443 - DNA, 25 bp, Homo sapien
tgtctttatggccaacaaattcagc

SEQ ID NO: 2897444 - DNA, 25 bp, Homo sapien
tctctaaaagatcaatgctggagct

SEQ ID NO: 2897445 - DNA, 25 bp, Homo sapien
tcagcaatactatagctacattatc

SEQ ID NO: 2897446 - DNA, 25 bp, Homo sapien
tcagaaaacaaggtcaacttcgaac

SEQ ID NO: 2897447 - DNA, 25 bp, Homo sapien
gtagaagggactacaaggcgcgtgg

SEQ ID NO: 2897448 - DNA, 25 bp, Homo sapien
aagggactacaaggcgcgtggccac

SEQ ID NO: 2897449 - DNA, 25 bp, Homo sapien
ttgtggtttgattttaggcatagct

SEQ ID NO: 2897450 - DNA, 25 bp, Homo sapien
cttgtggtttgattttaggcatagc

SEQ ID NO: 2897451 - DNA, 25 bp, Homo sapien
tatatttgtgaaagtcagtttctcc

SEQ ID NO: 2897452 - DNA, 25 bp, Homo sapien
catgactatgtaaggtgcattcaag

SEQ ID NO: 2897453 - DNA, 25 bp, Homo sapien
tactacacttggtatatcagctttc

SEQ ID NO: 2897454 - DNA, 25 bp, Homo sapien
tatcctatctttgtgatactacact

SEQ ID NO: 2897455 - DNA, 25 bp, Homo sapien
gcgtaaatacctgaataacccatag

SEQ ID NO: 2897456 - DNA, 25 bp, Homo sapien
catacagtggctactatagggatta

SEQ ID NO: 2897457 - DNA, 25 bp, Homo sapien
catatggtgactattaaggtgggct

SEQ ID NO: 2897458 - DNA, 25 bp, Homo sapien
cagaattgggtctgtgtaacctcaa

SEQ ID NO: 2897459 - DNA, 25 bp, Homo sapien
taagattttttactctagatccact

SEQ ID NO: 2897460 - DNA, 25 bp, Homo sapien
tctactgatttgtagttatgttctt

SEQ ID NO: 2897461 - DNA, 25 bp, Homo sapien
cctgatcagtcttaccagagatttg

SEQ ID NO: 2897462 - DNA, 25 bp, Homo sapien
tctacactcggactcacttctgatt

SEQ ID NO: 2897463 - DNA, 25 bp, Homo sapien
atttctgggaatacaccctacttgg

SEQ ID NO: 2897464 - DNA, 25 bp, Homo sapien
tacactgcaatgatagattttccga

SEQ ID NO: 2897465 - DNA, 25 bp, Homo sapien
tgaattactgagcatgggtctgccc

SEQ ID NO: 2897466 - DNA, 25 bp, Homo sapien
caccattaatggtaaggctgctaaa

SEQ ID NO: 2897467 - DNA, 25 bp, Homo sapien
tgcctcctgagagattggcactaca

SEQ ID NO: 2897468 - DNA, 25 bp, Homo sapien
tctgcctcctgagagattggcacta

SEQ ID NO: 2897469 - DNA, 25 bp, Homo sapien
acctctgcctcctgagagattggca

SEQ ID NO: 2897470 - DNA, 25 bp, Homo sapien
ctctgcctcctgagagattggcact

SEQ ID NO: 2897471 - DNA, 25 bp, Homo sapien
caattctttccgcagtttctcagca

SEQ ID NO: 2897472 - DNA, 25 bp, Homo sapien
cagcttccagataatgattcagttc

SEQ ID NO: 2897473 - DNA, 25 bp, Homo sapien
gatcagtcctacaagatttctcagc

SEQ ID NO: 2897474 - DNA, 25 bp, Homo sapien
gatttctgagtattcaaaacagcta

SEQ ID NO: 2897475 - DNA, 25 bp, Homo sapien
tcaacttgtcggagctgttctgaag

SEQ ID NO: 2897476 - DNA, 25 bp, Homo sapien
aatctccattcgctgcatgtctctc

SEQ ID NO: 2897477 - DNA, 25 bp, Homo sapien
catcagtaaacgctgagattccaga

SEQ ID NO: 2897478 - DNA, 25 bp, Homo sapien
tctgccacgtatgttttaactggtt

SEQ ID NO: 2897479 - DNA, 25 bp, Homo sapien
gttggacaagcttgacctcaagact

SEQ ID NO: 2897480 - DNA, 25 bp, Homo sapien
tatcaccttgttgcagcttaagtca

SEQ ID NO: 2897481 - DNA, 25 bp, Homo sapien
ttttctccgaaatacgcactgctgc

SEQ ID NO: 2897482 - DNA, 25 bp, Homo sapien
taaggtaatgcaatcacatgtggtg

SEQ ID NO: 2897483 - DNA, 25 bp, Homo sapien
ttaaagcacacactactggtatttt

SEQ ID NO: 2897484 - DNA, 25 bp, Homo sapien
catttgataactgggctgaagattc

SEQ ID NO: 2897485 - DNA, 25 bp, Homo sapien
ctcttattgagtctttgttgttcat

SEQ ID NO: 2897486 - DNA, 25 bp, Homo sapien
ctgaagattcttcttgagttaaagc

SEQ ID NO: 2897487 - DNA, 25 bp, Homo sapien
tgagccacgggtgctgtctaaatgc

SEQ ID NO: 2897488 - DNA, 25 bp, Homo sapien
ttggattgcaatgagcccgaggttc

SEQ ID NO: 2897489 - DNA, 25 bp, Homo sapien
ggtccaaaatctgactcgtccaggt

SEQ ID NO: 2897490 - DNA, 25 bp, Homo sapien
cgaggttcccaagctgtctgtagac

SEQ ID NO: 2897491 - DNA, 25 bp, Homo sapien
gacccaagggatgcagtatcaaagt

SEQ ID NO: 2897492 - DNA, 25 bp, Homo sapien
ggatgcagtatcaaagttctcagac

SEQ ID NO: 2897493 - DNA, 25 bp, Homo sapien
caagggatgcagtatcaaagttctc

SEQ ID NO: 2897494 - DNA, 25 bp, Homo sapien
tggagtgacccaagggatgcagtat

SEQ ID NO: 2897495 - DNA, 25 bp, Homo sapien
tggttaacataaacccacttggcat

SEQ ID NO: 2897496 - DNA, 25 bp, Homo sapien
tgttctggtgtcatcgccttgattg

SEQ ID NO: 2897497 - DNA, 25 bp, Homo sapien
gggacacataggcactctccatgcc

SEQ ID NO: 2897498 - DNA, 25 bp, Homo sapien
tctccatgccctgggtaacgctgga

SEQ ID NO: 2897499 - DNA, 25 bp, Homo sapien
actgtttttcgtaattggaacacat

SEQ ID NO: 2897500 - DNA, 25 bp, Homo sapien
tcacaacgtctaccaagtttatttc

SEQ ID NO: 2897501 - DNA, 25 bp, Homo sapien
gcctcctgaatctgaattccttgta

SEQ ID NO: 2897502 - DNA, 25 bp, Homo sapien
tggaacacatatcacaacgtctacc

SEQ ID NO: 2897503 - DNA, 25 bp, Homo sapien
tctcagcataccaaatctaccaaag

SEQ ID NO: 2897504 - DNA, 25 bp, Homo sapien
cttacgtagactttgacaagcccac

SEQ ID NO: 2897505 - DNA, 25 bp, Homo sapien
ggctaagggaacaatcttcataaca

SEQ ID NO: 2897506 - DNA, 25 bp, Homo sapien
cattaagcctttattctactggagg

SEQ ID NO: 2897507 - DNA, 25 bp, Homo sapien
taactggtcattagcttgccttagc

SEQ ID NO: 2897508 - DNA, 25 bp, Homo sapien
ctggtgactcgaatcttcgctgctt

SEQ ID NO: 2897509 - DNA, 25 bp, Homo sapien
ttagcatcagctgtagttttttcac

SEQ ID NO: 2897510 - DNA, 25 bp, Homo sapien
gaatcttcgctgctttgctttatga

SEQ ID NO: 2897511 - DNA, 25 bp, Homo sapien
cttcaagtaagatctcggaggcctg

SEQ ID NO: 2897512 - DNA, 25 bp, Homo sapien
caagtaagatctcggaggcctgggc

SEQ ID NO: 2897513 - DNA, 25 bp, Homo sapien
tcaagtaagatctcggaggcctggg

SEQ ID NO: 2897514 - DNA, 25 bp, Homo sapien
ctcttcaagtaagatctcggaggcc

SEQ ID NO: 2897515 - DNA, 25 bp, Homo sapien
tgttcccgtgactgcatcagcaccg

SEQ ID NO: 2897516 - DNA, 25 bp, Homo sapien
ccctggagactgtcattatctttct

SEQ ID NO: 2897517 - DNA, 25 bp, Homo sapien
tgaagtcttctgcttgctgtaatga

SEQ ID NO: 2897518 - DNA, 25 bp, Homo sapien
acctgttcccgtgactgcatcagca

SEQ ID NO: 2897519 - DNA, 25 bp, Homo sapien
catttttgatcatgtggaaagtaag

SEQ ID NO: 2897520 - DNA, 25 bp, Homo sapien
tttgatcatgtggaaagtaagttac

SEQ ID NO: 2897521 - DNA, 25 bp, Homo sapien
gacatttttgatcatgtggaaagta

SEQ ID NO: 2897522 - DNA, 25 bp, Homo sapien
tgttgacatttttgatcatgtggaa

SEQ ID NO: 2897523 - DNA, 25 bp, Homo sapien
ataatcatatctcaccacagactca

SEQ ID NO: 2897524 - DNA, 25 bp, Homo sapien
ggcataatcatatctcaccacagac

SEQ ID NO: 2897525 - DNA, 25 bp, Homo sapien
gcataatcatatctcaccacagact

SEQ ID NO: 2897526 - DNA, 25 bp, Homo sapien
cataatcatatctcaccacagactc

SEQ ID NO: 2897527 - DNA, 25 bp, Homo sapien
ggtctgctgctgtccgcacattaat

SEQ ID NO: 2897528 - DNA, 25 bp, Homo sapien
gcacattaatgatgtcctcacggta

SEQ ID NO: 2897529 - DNA, 25 bp, Homo sapien
gcttttcttctacgtggtctgctgc

SEQ ID NO: 2897530 - DNA, 25 bp, Homo sapien
taaacactgttctgcttggatctgc

SEQ ID NO: 2897531 - DNA, 25 bp, Homo sapien
ttctaattcagcttttaggctagaa

SEQ ID NO: 2897532 - DNA, 25 bp, Homo sapien
tcagcttttaggctagaaatagaag

SEQ ID NO: 2897533 - DNA, 25 bp, Homo sapien
tctaattcagcttttaggctagaaa

SEQ ID NO: 2897534 - DNA, 25 bp, Homo sapien
aattcagcttttaggctagaaatag

SEQ ID NO: 2897535 - DNA, 25 bp, Homo sapien
gctcttccaaactgatctttatttc

SEQ ID NO: 2897536 - DNA, 25 bp, Homo sapien
gagacttctctcttaatgtggactc

SEQ ID NO: 2897537 - DNA, 25 bp, Homo sapien
tgctcttccaaactgatctttattt

SEQ ID NO: 2897538 - DNA, 25 bp, Homo sapien
acttctctcttaatgtggactccaa

SEQ ID NO: 2897539 - DNA, 25 bp, Homo sapien
ctgaagggtctgtgaaagctttaca

SEQ ID NO: 2897540 - DNA, 25 bp, Homo sapien
caaacattagttgttcaacggtagc

SEQ ID NO: 2897541 - DNA, 25 bp, Homo sapien
tccctctggacttgctcactgacat

SEQ ID NO: 2897542 - DNA, 25 bp, Homo sapien
cactgacatctaattctgtctgtaa

SEQ ID NO: 2897543 - DNA, 25 bp, Homo sapien
gataactacaggtggctcctgccta

SEQ ID NO: 2897544 - DNA, 25 bp, Homo sapien
actcaccagagtactagtcacttca

SEQ ID NO: 2897545 - DNA, 25 bp, Homo sapien
tagctgagatgtagcagattaactc

SEQ ID NO: 2897546 - DNA, 25 bp, Homo sapien
caaagctaccgtgtaacggactggg

SEQ ID NO: 2897547 - DNA, 25 bp, Homo sapien
agaattgcccggattctctccaagg

SEQ ID NO: 2897548 - DNA, 25 bp, Homo sapien
cagtttagtatcattcagaattgcc

SEQ ID NO: 2897549 - DNA, 25 bp, Homo sapien
ctcaggaagctggttaatgtctgtc

SEQ ID NO: 2897550 - DNA, 25 bp, Homo sapien
agcttgccggatccgctctaactgc

SEQ ID NO: 2897551 - DNA, 25 bp, Homo sapien
tgttcgcatttgaaggtctctgggc

SEQ ID NO: 2897552 - DNA, 25 bp, Homo sapien
cacgcctgttggaatcaagcctgga

SEQ ID NO: 2897553 - DNA, 25 bp, Homo sapien
aggctagaatcctgccatgagggtg

SEQ ID NO: 2897554 - DNA, 25 bp, Homo sapien
caagcctggagtttatagtgttcgc

SEQ ID NO: 2897555 - DNA, 25 bp, Homo sapien
tacgtaagcctaatgatccaagttg

SEQ ID NO: 2897556 - DNA, 25 bp, Homo sapien
gccacagtcctatggttctcaggta

SEQ ID NO: 2897557 - DNA, 25 bp, Homo sapien
gctttatcctggtaccctgtgggcc

SEQ ID NO: 2897558 - DNA, 25 bp, Homo sapien
tccagtatatatagccccagccaag

SEQ ID NO: 2897559 - DNA, 25 bp, Homo sapien
ggtaccctgctgttatgcaaccagt

SEQ ID NO: 2897560 - DNA, 25 bp, Homo sapien
tagttcactaactcccagaaggctc

SEQ ID NO: 2897561 - DNA, 25 bp, Homo sapien
tacagaagatctttagggtaagtcc

SEQ ID NO: 2897562 - DNA, 25 bp, Homo sapien
ctgggacagtactctcagcaggtat

SEQ ID NO: 2897563 - DNA, 25 bp, Homo sapien
agtactatttccataattggtattt

SEQ ID NO: 2897564 - DNA, 25 bp, Homo sapien
ttaaattcataaccatgaatgcaag

SEQ ID NO: 2897565 - DNA, 25 bp, Homo sapien
ttcataaccatgaatgcaagactac

SEQ ID NO: 2897566 - DNA, 25 bp, Homo sapien
cataaccatgaatgcaagactacaa

SEQ ID NO: 2897567 - DNA, 25 bp, Homo sapien
gaaaggctgtgaattgcccaccctg

SEQ ID NO: 2897568 - DNA, 25 bp, Homo sapien
tctgtaaggtgctcagtctcagcag

SEQ ID NO: 2897569 - DNA, 25 bp, Homo sapien
gcaagctctagttcagtcagttcag

SEQ ID NO: 2897570 - DNA, 25 bp, Homo sapien
ggaacactcgtgaaacccaactgag

SEQ ID NO: 2897571 - DNA, 25 bp, Homo sapien
gagcagagctcaagatccacaattg

SEQ ID NO: 2897572 - DNA, 25 bp, Homo sapien
cacaattgcaaaggccactgctggc

SEQ ID NO: 2897573 - DNA, 25 bp, Homo sapien
gctgtgctctacgtcccaatacttg

SEQ ID NO: 2897574 - DNA, 25 bp, Homo sapien
gaggacacaccttcagtacagttaa

SEQ ID NO: 2897575 - DNA, 25 bp, Homo sapien
tgaaggcttaaacccatattgtaaa

SEQ ID NO: 2897576 - DNA, 25 bp, Homo sapien
gatagaaccctaggattcaaaggag

SEQ ID NO: 2897577 - DNA, 25 bp, Homo sapien
caagcctacagttgtgttcagcaag

SEQ ID NO: 2897578 - DNA, 25 bp, Homo sapien
tatccgcaatcatgtaaacttctga

SEQ ID NO: 2897579 - DNA, 25 bp, Homo sapien
tgagagccacatgatacatagggac

SEQ ID NO: 2897580 - DNA, 25 bp, Homo sapien
tcagtgcctaccagcgaaagtgcat

SEQ ID NO: 2897581 - DNA, 25 bp, Homo sapien
gaaagtgcattcagtccatcctgaa

SEQ ID NO: 2897582 - DNA, 25 bp, Homo sapien
cctttacagtatgccagaatcaacc

SEQ ID NO: 2897583 - DNA, 25 bp, Homo sapien
catttcatcagtcccaaatttctat

SEQ ID NO: 2897584 - DNA, 25 bp, Homo sapien
tttcgaaagtatacaccaagcttgt

SEQ ID NO: 2897585 - DNA, 25 bp, Homo sapien
ttgtccaacccacgggctgcgcgca

SEQ ID NO: 2897586 - DNA, 25 bp, Homo sapien
tcatcagtcccaaatttctattgat

SEQ ID NO: 2897587 - DNA, 25 bp, Homo sapien
caaagatgaagtagtggcataccca

SEQ ID NO: 2897588 - DNA, 25 bp, Homo sapien
cattggcagcagtcccaaagactct

SEQ ID NO: 2897589 - DNA, 25 bp, Homo sapien
tctctttccagaagggcgtataccg

SEQ ID NO: 2897590 - DNA, 25 bp, Homo sapien
ctctaggagagacagcagttgcatt

SEQ ID NO: 2897591 - DNA, 25 bp, Homo sapien
aagtcttgttaagcccaacacaaca

SEQ ID NO: 2897592 - DNA, 25 bp, Homo sapien
gaaatctatcaagtcttgttaagcc

SEQ ID NO: 2897593 - DNA, 25 bp, Homo sapien
ggacttatggtattagaattaccta

SEQ ID NO: 2897594 - DNA, 25 bp, Homo sapien
catcatgtagcacttataggaataa

SEQ ID NO: 2897595 - DNA, 25 bp, Homo sapien
gatcttggaagtgaccctcaccggg

SEQ ID NO: 2897596 - DNA, 25 bp, Homo sapien
agaaacgtggtctttggcctcggcg

SEQ ID NO: 2897597 - DNA, 25 bp, Homo sapien
cagtaccaggtaatgccaggccgat

SEQ ID NO: 2897598 - DNA, 25 bp, Homo sapien
tcatcttgtggcaggcgttccagcg

SEQ ID NO: 2897599 - DNA, 25 bp, Homo sapien
catccaagcgaaatgcgtgaggcca

SEQ ID NO: 2897600 - DNA, 25 bp, Homo sapien
tagatacacaagtctcaggctctcc

SEQ ID NO: 2897601 - DNA, 25 bp, Homo sapien
cccaggtgctagatttccagcagca

SEQ ID NO: 2897602 - DNA, 25 bp, Homo sapien
tctgggaagtgttgttttatcgacc

SEQ ID NO: 2897603 - DNA, 25 bp, Homo sapien
aaggcggcgagcccaccagtttgta

SEQ ID NO: 2897604 - DNA, 25 bp, Homo sapien
gcctctttccaaggcggcgagccca

SEQ ID NO: 2897605 - DNA, 25 bp, Homo sapien
caccagtttgtacagggagcggcgc

SEQ ID NO: 2897606 - DNA, 25 bp, Homo sapien
agcggcgcggagacctcaacgactc

SEQ ID NO: 2897607 - DNA, 25 bp, Homo sapien
ccagcctggcggtacctgtttagga

SEQ ID NO: 2897608 - DNA, 25 bp, Homo sapien
catcacctcttgaactagaaagctg

SEQ ID NO: 2897609 - DNA, 25 bp, Homo sapien
tgttctgagaattccctggcccact

SEQ ID NO: 2897610 - DNA, 25 bp, Homo sapien
ctgtttaggagcctgtcccggctgt

SEQ ID NO: 2897611 - DNA, 25 bp, Homo sapien
cagttgcccacattttcttacacag

SEQ ID NO: 2897612 - DNA, 25 bp, Homo sapien
taaacctcaaagaggcaaactgaag

SEQ ID NO: 2897613 - DNA, 25 bp, Homo sapien
ccaacgttggctgagattagaatcg

SEQ ID NO: 2897614 - DNA, 25 bp, Homo sapien
gaactcctgacttcgaatccagtgt

SEQ ID NO: 2897615 - DNA, 25 bp, Homo sapien
agcacagccatgtctatcagctcct

SEQ ID NO: 2897616 - DNA, 25 bp, Homo sapien
cagccatgtctatcagctcctccag

SEQ ID NO: 2897617 - DNA, 25 bp, Homo sapien
gcacagccatgtctatcagctcctc

SEQ ID NO: 2897618 - DNA, 25 bp, Homo sapien
acagccatgtctatcagctcctcca

SEQ ID NO: 2897619 - DNA, 25 bp, Homo sapien
tccctcaaggagtggatgctcacag

SEQ ID NO: 2897620 - DNA, 25 bp, Homo sapien
tgtatgacctgcacgagaacaccaa

SEQ ID NO: 2897621 - DNA, 25 bp, Homo sapien
tatcttacagggcagtcacatggag

SEQ ID NO: 2897622 - DNA, 25 bp, Homo sapien
tagcacaaggtctagcaccctggag

SEQ ID NO: 2897623 - DNA, 25 bp, Homo sapien
gctgagaaattgtgccagagaccac

SEQ ID NO: 2897624 - DNA, 25 bp, Homo sapien
tcacagtctagacattagggaaggg

SEQ ID NO: 2897625 - DNA, 25 bp, Homo sapien
ttctgatgccaggacgaccctgctg

SEQ ID NO: 2897626 - DNA, 25 bp, Homo sapien
tctaaccagagtcgacagcaacagt

SEQ ID NO: 2897627 - DNA, 25 bp, Homo sapien
acagatgagtgggtttgcctcccac

SEQ ID NO: 2897628 - DNA, 25 bp, Homo sapien
gagtgggtttgcctcccactcagcc

SEQ ID NO: 2897629 - DNA, 25 bp, Homo sapien
tctcatactcgctgatgatggactg

SEQ ID NO: 2897630 - DNA, 25 bp, Homo sapien
ctcttctcatactcgctgatgatgg

SEQ ID NO: 2897631 - DNA, 25 bp, Homo sapien
gggaatgggaacgaataatgctgaa

SEQ ID NO: 2897632 - DNA, 25 bp, Homo sapien
gaatttcaggcaacaaatctggggg

SEQ ID NO: 2897633 - DNA, 25 bp, Homo sapien
tggccaccagacctggatctccaaa

SEQ ID NO: 2897634 - DNA, 25 bp, Homo sapien
gggagattccactcaccttggagtg

SEQ ID NO: 2897635 - DNA, 25 bp, Homo sapien
accaccacaccgcttgtgattctca

SEQ ID NO: 2897636 - DNA, 25 bp, Homo sapien
caccacaccgcttgtgattctcagg

SEQ ID NO: 2897637 - DNA, 25 bp, Homo sapien
cacaccgcttgtgattctcaggttg

SEQ ID NO: 2897638 - DNA, 25 bp, Homo sapien
accgcttgtgattctcaggttgtac

SEQ ID NO: 2897639 - DNA, 25 bp, Homo sapien
ttaagattactgaaggccgggcgtg

SEQ ID NO: 2897640 - DNA, 25 bp, Homo sapien
aacgttaagcggtgatggctctcca

SEQ ID NO: 2897641 - DNA, 25 bp, Homo sapien
aggcgttaccaatcccaagctgagg

SEQ ID NO: 2897642 - DNA, 25 bp, Homo sapien
cactcatggcaggaagaacgctcag

SEQ ID NO: 2897643 - DNA, 25 bp, Homo sapien
gggacaatgtgcactgtgctcattt

SEQ ID NO: 2897644 - DNA, 25 bp, Homo sapien
tgtgctcatttatactaccctctaa

SEQ ID NO: 2897645 - DNA, 25 bp, Homo sapien
tctaaacaggcacgaagcttctgct

SEQ ID NO: 2897646 - DNA, 25 bp, Homo sapien
agctcatgagaagactggacttttc

SEQ ID NO: 2897647 - DNA, 25 bp, Homo sapien
cagcatggcctatctgggtcttatg

SEQ ID NO: 2897648 - DNA, 25 bp, Homo sapien
tttccttccgcaaaagtggtgccag

SEQ ID NO: 2897649 - DNA, 25 bp, Homo sapien
taatgctgccctgctatgcttctgc

SEQ ID NO: 2897650 - DNA, 25 bp, Homo sapien
gactatgaaatgaccagctgaatcc

SEQ ID NO: 2897651 - DNA, 25 bp, Homo sapien
gatcgattccatgcttcaaggccaa

SEQ ID NO: 2897652 - DNA, 25 bp, Homo sapien
taaattcccagtagaaagccatggc

SEQ ID NO: 2897653 - DNA, 25 bp, Homo sapien
tgtcactcaggttagcgaatagccc

SEQ ID NO: 2897654 - DNA, 25 bp, Homo sapien
tacagtgtgctcctaatcccaaggc

SEQ ID NO: 2897655 - DNA, 25 bp, Homo sapien
tgggaggagtcaaagtcattcagac

SEQ ID NO: 2897656 - DNA, 25 bp, Homo sapien
gcatattgtagtgcttggtaaatat

SEQ ID NO: 2897657 - DNA, 25 bp, Homo sapien
gccaattccttgtgaggaatcaggc

SEQ ID NO: 2897658 - DNA, 25 bp, Homo sapien
attccttgtgaggaatcaggctgaa

SEQ ID NO: 2897659 - DNA, 25 bp, Homo sapien
gagccggcactgtcaactatgatct

SEQ ID NO: 2897660 - DNA, 25 bp, Homo sapien
gaagccaaagccagctgacctgtgc

SEQ ID NO: 2897661 - DNA, 25 bp, Homo sapien
catgaggtacggtgaaagcccaagg

SEQ ID NO: 2897662 - DNA, 25 bp, Homo sapien
gggactttcatactcaaggagctgt

SEQ ID NO: 2897663 - DNA, 25 bp, Homo sapien
ccatgcatgatcagtacgggcagaa

SEQ ID NO: 2897664 - DNA, 25 bp, Homo sapien
cactgtaactctgctaataggcggt

SEQ ID NO: 2897665 - DNA, 25 bp, Homo sapien
tgggaaccatcagcatcaatagtct

SEQ ID NO: 2897666 - DNA, 25 bp, Homo sapien
taagcacctgagtgtaaaactgcct

SEQ ID NO: 2897667 - DNA, 25 bp, Homo sapien
tatgtacaaggctcctcagagggaa

SEQ ID NO: 2897668 - DNA, 25 bp, Homo sapien
tagaatgatgtgagtccaagctggc

SEQ ID NO: 2897669 - DNA, 25 bp, Homo sapien
tcaacctgcgtcacaaaagaccaag

SEQ ID NO: 2897670 - DNA, 25 bp, Homo sapien
gagttgtcttcaaccccatagaatg

SEQ ID NO: 2897671 - DNA, 25 bp, Homo sapien
tcctactctgaagctagacatgtgc

SEQ ID NO: 2897672 - DNA, 25 bp, Homo sapien
gttttgtcaagagccagtagagcag

SEQ ID NO: 2897673 - DNA, 25 bp, Homo sapien
ctggagcaccaggagtacattactt

SEQ ID NO: 2897674 - DNA, 25 bp, Homo sapien
taatggatttccttgccgaccgagg

SEQ ID NO: 2897675 - DNA, 25 bp, Homo sapien
tcctggcagagcagctagttagcac

SEQ ID NO: 2897676 - DNA, 25 bp, Homo sapien
tcacctaaacaccatttgcgcaagg

SEQ ID NO: 2897677 - DNA, 25 bp, Homo sapien
gagctcagcttagtcagcacagttg

SEQ ID NO: 2897678 - DNA, 25 bp, Homo sapien
tggagggcggcacttcatgtactct

SEQ ID NO: 2897679 - DNA, 25 bp, Homo sapien
tatgtcctgtatatcctgggaaggt

SEQ ID NO: 2897680 - DNA, 25 bp, Homo sapien
aataaatctgaaccctgtctttggg

SEQ ID NO: 2897681 - DNA, 25 bp, Homo sapien
taatgctcaaatttgcacccgacga

SEQ ID NO: 2897682 - DNA, 25 bp, Homo sapien
taccatgagttagtaagacatacct

SEQ ID NO: 2897683 - DNA, 25 bp, Homo sapien
ctgtcatatataaatccactaaatc

SEQ ID NO: 2897684 - DNA, 25 bp, Homo sapien
gcatctgagatacgatattccttgg

SEQ ID NO: 2897685 - DNA, 25 bp, Homo sapien
aaaatcaagtaggttcaggcttatg

SEQ ID NO: 2897686 - DNA, 25 bp, Homo sapien
ccagtgtgatagtaggccatgcatc

SEQ ID NO: 2897687 - DNA, 25 bp, Homo sapien
caagcagattgcatgcctcaggtgt

SEQ ID NO: 2897688 - DNA, 25 bp, Homo sapien
tattgagctgcaggagatagtacac

SEQ ID NO: 2897689 - DNA, 25 bp, Homo sapien
caacctacgaaacccatatctggaa

SEQ ID NO: 2897690 - DNA, 25 bp, Homo sapien
tctggaagaatcaccagctcccgtg

SEQ ID NO: 2897691 - DNA, 25 bp, Homo sapien
gatcatggatgctctctttctggaa

SEQ ID NO: 2897692 - DNA, 25 bp, Homo sapien
tattttgccctagaagaagccgtga

SEQ ID NO: 2897693 - DNA, 25 bp, Homo sapien
tcagaagcaagtaatctttccccag

SEQ ID NO: 2897694 - DNA, 25 bp, Homo sapien
catctgtccggagttgtgtatgtca

SEQ ID NO: 2897695 - DNA, 25 bp, Homo sapien
tgtgagaaaccgtgcccagtcaatt

SEQ ID NO: 2897696 - DNA, 25 bp, Homo sapien
gggcacctactttcaatctctacat

SEQ ID NO: 2897697 - DNA, 25 bp, Homo sapien
gatttctgctgtttagggcacctac

SEQ ID NO: 2897698 - DNA, 25 bp, Homo sapien
taagtgatgcatatgggatttaaag

SEQ ID NO: 2897699 - DNA, 25 bp, Homo sapien
ctgtgtttcccggttgtagctccgg

SEQ ID NO: 2897700 - DNA, 25 bp, Homo sapien
cctgtgtttcccggttgtagctccg

SEQ ID NO: 2897701 - DNA, 25 bp, Homo sapien
tcctgtgtttcccggttgtagctcc

SEQ ID NO: 2897702 - DNA, 25 bp, Homo sapien
atcctgtgtttcccggttgtagctc

SEQ ID NO: 2897703 - DNA, 25 bp, Homo sapien
actggaggcgaccacatccgttgga

SEQ ID NO: 2897704 - DNA, 25 bp, Homo sapien
cacatccgttggaggagtcattttc

SEQ ID NO: 2897705 - DNA, 25 bp, Homo sapien
ttctctgcttgtattactggaggcg

SEQ ID NO: 2897706 - DNA, 25 bp, Homo sapien
gcttgtattactggaggcgaccaca

SEQ ID NO: 2897707 - DNA, 25 bp, Homo sapien
ggggttgcacagccatgtagagaac

SEQ ID NO: 2897708 - DNA, 25 bp, Homo sapien
gatggggttgcacagccatgtagag

SEQ ID NO: 2897709 - DNA, 25 bp, Homo sapien
gggttgcacagccatgtagagaact

SEQ ID NO: 2897710 - DNA, 25 bp, Homo sapien
gcaaacagctacttggcattctccg

SEQ ID NO: 2897711 - DNA, 25 bp, Homo sapien
tctccgtggtaaattagcaaatcat

SEQ ID NO: 2897712 - DNA, 25 bp, Homo sapien
aatcatctaagaacttttaggaggg

SEQ ID NO: 2897713 - DNA, 25 bp, Homo sapien
taaggaagaactagttataatccta

SEQ ID NO: 2897714 - DNA, 25 bp, Homo sapien
gactagctctctcacgaatcacggg

SEQ ID NO: 2897715 - DNA, 25 bp, Homo sapien
gaggaaaattatctccgacctggag

SEQ ID NO: 2897716 - DNA, 25 bp, Homo sapien
gaagcttacggtgtattctctggaa

SEQ ID NO: 2897717 - DNA, 25 bp, Homo sapien
taacagggcgagtttcatggaaacg

SEQ ID NO: 2897718 - DNA, 25 bp, Homo sapien
cctgggtctggataatgaaaccctc

SEQ ID NO: 2897719 - DNA, 25 bp, Homo sapien
taacagggacctcaacttaagtctc

SEQ ID NO: 2897720 - DNA, 25 bp, Homo sapien
gaactattgtcatctatcctgccag

SEQ ID NO: 2897721 - DNA, 25 bp, Homo sapien
gaagcagaacacctaagtcctgggt

SEQ ID NO: 2897722 - DNA, 25 bp, Homo sapien
tatagggtgcaagttcccagtggca

SEQ ID NO: 2897723 - DNA, 25 bp, Homo sapien
caggatacctgtgcttgaatggaca

SEQ ID NO: 2897724 - DNA, 25 bp, Homo sapien
gaatatacagcctaaaggcaggcag

SEQ ID NO: 2897725 - DNA, 25 bp, Homo sapien
gatgccctgctgtgtgactgactac

SEQ ID NO: 2897726 - DNA, 25 bp, Homo sapien
cattaacggcatgtaggcacaggtc

SEQ ID NO: 2897727 - DNA, 25 bp, Homo sapien
tagctaggcatatgttcttccaggg

SEQ ID NO: 2897728 - DNA, 25 bp, Homo sapien
aacctggaagagtcgaaagagcacc

SEQ ID NO: 2897729 - DNA, 25 bp, Homo sapien
ctttggagccagacgaacagatacc

SEQ ID NO: 2897730 - DNA, 25 bp, Homo sapien
gatttttatggtataaggcagagcc

SEQ ID NO: 2897731 - DNA, 25 bp, Homo sapien
gacatttccaacagtttgccagtgg

SEQ ID NO: 2897732 - DNA, 25 bp, Homo sapien
tggttcctcactacactggtactga

SEQ ID NO: 2897733 - DNA, 25 bp, Homo sapien
tcttcttgatagatgaggccatggt

SEQ ID NO: 2897734 - DNA, 25 bp, Homo sapien
ccatgagggtgacgatttgaagcac

SEQ ID NO: 2897735 - DNA, 25 bp, Homo sapien
gatactctcgcgttcctgattggct

SEQ ID NO: 2897736 - DNA, 25 bp, Homo sapien
gattggctggttgtggacacctcaa

SEQ ID NO: 2897737 - DNA, 25 bp, Homo sapien
aaattccgactgatacgcgcctcgg

SEQ ID NO: 2897738 - DNA, 25 bp, Homo sapien
gagttgagctgtctaagaccccgcg

SEQ ID NO: 2897739 - DNA, 25 bp, Homo sapien
cgattcaacgcagaggtgcccaggt

SEQ ID NO: 2897740 - DNA, 25 bp, Homo sapien
tgcccaggtcatctcggcgagttga

SEQ ID NO: 2897741 - DNA, 25 bp, Homo sapien
tcctgagagcagaataaatgcggct

SEQ ID NO: 2897742 - DNA, 25 bp, Homo sapien
ttaggacctctcttcgggcactgac

SEQ ID NO: 2897743 - DNA, 25 bp, Homo sapien
tcttcgaattcccattaggacctct

SEQ ID NO: 2897744 - DNA, 25 bp, Homo sapien
gaattcccattaggacctctcttcg

SEQ ID NO: 2897745 - DNA, 25 bp, Homo sapien
tcccattaggacctctcttcgggca

SEQ ID NO: 2897746 - DNA, 25 bp, Homo sapien
ggcgtgatggtggatacttgcaatc

SEQ ID NO: 2897747 - DNA, 25 bp, Homo sapien
gatggtggatacttgcaatcccagc

SEQ ID NO: 2897748 - DNA, 25 bp, Homo sapien
caggcgtgatggtggatacttgcaa

SEQ ID NO: 2897749 - DNA, 25 bp, Homo sapien
cgtgatggtggatacttgcaatccc

SEQ ID NO: 2897750 - DNA, 25 bp, Homo sapien
actttggcacagatcagtcttctga

SEQ ID NO: 2897751 - DNA, 25 bp, Homo sapien
tatcattttgatcactccgttgcca

SEQ ID NO: 2897752 - DNA, 25 bp, Homo sapien
tagacagatgacttaaccaatgccc

SEQ ID NO: 2897753 - DNA, 25 bp, Homo sapien
tccgttgccaatgtcctcaatttgc

SEQ ID NO: 2897754 - DNA, 25 bp, Homo sapien
tgctatgttgttttcagtcgtgaaa

SEQ ID NO: 2897755 - DNA, 25 bp, Homo sapien
tatgttgttttcagtcgtgaaaaac

SEQ ID NO: 2897756 - DNA, 25 bp, Homo sapien
tttgctatgttgttttcagtcgtga

SEQ ID NO: 2897757 - DNA, 25 bp, Homo sapien
gctatgttgttttcagtcgtgaaaa

SEQ ID NO: 2897758 - DNA, 25 bp, Homo sapien
gaactgggcctcgtaggtcattgga

SEQ ID NO: 2897759 - DNA, 25 bp, Homo sapien
agaataacctgttcaacggcctgca

SEQ ID NO: 2897760 - DNA, 25 bp, Homo sapien
tgtagatccgaagcatgcacgtttg

SEQ ID NO: 2897761 - DNA, 25 bp, Homo sapien
caagaagggcctgcttagtacataa

SEQ ID NO: 2897762 - DNA, 25 bp, Homo sapien
ttaagatattttcagtcgtttcgat

SEQ ID NO: 2897763 - DNA, 25 bp, Homo sapien
ttcagtcgtttcgattccttttcca

SEQ ID NO: 2897764 - DNA, 25 bp, Homo sapien
tcagtcgtttcgattccttttccac

SEQ ID NO: 2897765 - DNA, 25 bp, Homo sapien
gatattttcagtcgtttcgattcct

SEQ ID NO: 2897766 - DNA, 25 bp, Homo sapien
cactgaaatctactctaacctgggt

SEQ ID NO: 2897767 - DNA, 25 bp, Homo sapien
catggagggcaagcaataccttagg

SEQ ID NO: 2897768 - DNA, 25 bp, Homo sapien
agtactctatgttggctgttccgca

SEQ ID NO: 2897769 - DNA, 25 bp, Homo sapien
gaaaattcacaggacgagagcaagt

SEQ ID NO: 2897770 - DNA, 25 bp, Homo sapien
cctggattcttacctctatttatct

SEQ ID NO: 2897771 - DNA, 25 bp, Homo sapien
tttgtcgaaattgcttttgctagtc

SEQ ID NO: 2897772 - DNA, 25 bp, Homo sapien
gcttttgctagtctaggtgttttga

SEQ ID NO: 2897773 - DNA, 25 bp, Homo sapien
tatctatatgtctatctttattcca

SEQ ID NO: 2897774 - DNA, 25 bp, Homo sapien
tgacaagagttcgtgcgggaaaacc

SEQ ID NO: 2897775 - DNA, 25 bp, Homo sapien
agagctggcgcactcctgaggatga

SEQ ID NO: 2897776 - DNA, 25 bp, Homo sapien
taggatggcttcgttctggcccggc

SEQ ID NO: 2897777 - DNA, 25 bp, Homo sapien
ttggcaagatatttacccaccggcc

SEQ ID NO: 2897778 - DNA, 25 bp, Homo sapien
tacctatatccatttacagcttgcc

SEQ ID NO: 2897779 - DNA, 25 bp, Homo sapien
tacgaaagtacaaagtagctgccgg

SEQ ID NO: 2897780 - DNA, 25 bp, Homo sapien
gtgttttagaacagcgctgcacccc

SEQ ID NO: 2897781 - DNA, 25 bp, Homo sapien
gacgagggctgctatctcgaccatt

SEQ ID NO: 2897782 - DNA, 25 bp, Homo sapien
gctgacgggctctttcggcgcagac

SEQ ID NO: 2897783 - DNA, 25 bp, Homo sapien
gagtccgaaggcctgtttgacaagc

SEQ ID NO: 2897784 - DNA, 25 bp, Homo sapien
gggtctcgagcagattcgcccggac

SEQ ID NO: 2897785 - DNA, 25 bp, Homo sapien
tcggccgcgggcaagaaggctggtc

SEQ ID NO: 2897786 - DNA, 25 bp, Homo sapien
agcctctcgggtagccgtgattaca

SEQ ID NO: 2897787 - DNA, 25 bp, Homo sapien
tctcgggtagccgtgattacaggcg

SEQ ID NO: 2897788 - DNA, 25 bp, Homo sapien
cctccacctcttaagttccagcgat

SEQ ID NO: 2897789 - DNA, 25 bp, Homo sapien
cctcagcctctcgggtagccgtgat

SEQ ID NO: 2897790 - DNA, 25 bp, Homo sapien
ttggctgggtgcttacctataatcc

SEQ ID NO: 2897791 - DNA, 25 bp, Homo sapien
tggctgggtgcttacctataatcct

SEQ ID NO: 2897792 - DNA, 25 bp, Homo sapien
aattggctgggtgcttacctataat

SEQ ID NO: 2897793 - DNA, 25 bp, Homo sapien
taattggctgggtgcttacctataa

SEQ ID NO: 2897794 - DNA, 25 bp, Homo sapien
catggacccttctgggattgacatc

SEQ ID NO: 2897795 - DNA, 25 bp, Homo sapien
gggacctctgatccctaggccagtg

SEQ ID NO: 2897796 - DNA, 25 bp, Homo sapien
gattgacatctgactaagggctttg

SEQ ID NO: 2897797 - DNA, 25 bp, Homo sapien
acttcaatgtccttgcctggcgctg

SEQ ID NO: 2897798 - DNA, 25 bp, Homo sapien
tctgctactgcctcccgtcttcttt

SEQ ID NO: 2897799 - DNA, 25 bp, Homo sapien
agtgcatatgatcatatacagtctt

SEQ ID NO: 2897800 - DNA, 25 bp, Homo sapien
tgcatatgatcatatacagtcttcc

SEQ ID NO: 2897801 - DNA, 25 bp, Homo sapien
catatgatcatatacagtcttccat

SEQ ID NO: 2897802 - DNA, 25 bp, Homo sapien
atccttcctgatcacggctcggacc

SEQ ID NO: 2897803 - DNA, 25 bp, Homo sapien
gaaaactatacttcccgaggcatcc

SEQ ID NO: 2897804 - DNA, 25 bp, Homo sapien
gagcaggcacgttgggtagaggtcc

SEQ ID NO: 2897805 - DNA, 25 bp, Homo sapien
cctggggttctctgagtccagcagg

SEQ ID NO: 2897806 - DNA, 25 bp, Homo sapien
taagagtcaggagaggcatcccgtt

SEQ ID NO: 2897807 - DNA, 25 bp, Homo sapien
cacggtgggagcctaggagatcctt

SEQ ID NO: 2897808 - DNA, 25 bp, Homo sapien
taattgcacctcaatcagcactgga

SEQ ID NO: 2897809 - DNA, 25 bp, Homo sapien
cccgttagtggatctgctaattgca

SEQ ID NO: 2897810 - DNA, 25 bp, Homo sapien
gtgcccctcccgtagggagactgta

SEQ ID NO: 2897811 - DNA, 25 bp, Homo sapien
tgggcttctcgctctactttaggtc

SEQ ID NO: 2897812 - DNA, 25 bp, Homo sapien
ctcgctctactttaggtcctgagtc

SEQ ID NO: 2897813 - DNA, 25 bp, Homo sapien
tagggagactgtatctgggcttctc

SEQ ID NO: 2897814 - DNA, 25 bp, Homo sapien
gggaatcggagctccattgttcgca

SEQ ID NO: 2897815 - DNA, 25 bp, Homo sapien
gcaatggattgctggaggaaatgct

SEQ ID NO: 2897816 - DNA, 25 bp, Homo sapien
tcggagctccattgttcgcaatgga

SEQ ID NO: 2897817 - DNA, 25 bp, Homo sapien
cattgttcgcaatggattgctggag

SEQ ID NO: 2897818 - DNA, 25 bp, Homo sapien
catcagtccgtcaggaccactgggc

SEQ ID NO: 2897819 - DNA, 25 bp, Homo sapien
tgtgtctccatcagtccgtcaggac

SEQ ID NO: 2897820 - DNA, 25 bp, Homo sapien
tgcctgtgtctccatcagtccgtca

SEQ ID NO: 2897821 - DNA, 25 bp, Homo sapien
tccatcagtccgtcaggaccactgg

SEQ ID NO: 2897822 - DNA, 25 bp, Homo sapien
tagaatttccgatggttagtcatac

SEQ ID NO: 2897823 - DNA, 25 bp, Homo sapien
cgatggttagtcatacttttttgag

SEQ ID NO: 2897824 - DNA, 25 bp, Homo sapien
ctgggtcgagccactcgtagaattt

SEQ ID NO: 2897825 - DNA, 25 bp, Homo sapien
gtaaatatcatggtaaaaagacatg

SEQ ID NO: 2897826 - DNA, 25 bp, Homo sapien
aggatgaccctgactccccatttct

SEQ ID NO: 2897827 - DNA, 25 bp, Homo sapien
atcaaggggccagtacttaactgaa

SEQ ID NO: 2897828 - DNA, 25 bp, Homo sapien
tctgagtcacccaggatgaccctga

SEQ ID NO: 2897829 - DNA, 25 bp, Homo sapien
caaggggccagtacttaactgaaag

SEQ ID NO: 2897830 - DNA, 25 bp, Homo sapien
tccagtggagcattagacagcagtt

SEQ ID NO: 2897831 - DNA, 25 bp, Homo sapien
tgctgcactgcgactctctggagaa

SEQ ID NO: 2897832 - DNA, 25 bp, Homo sapien
gacagcagtttaatcattattaccg

SEQ ID NO: 2897833 - DNA, 25 bp, Homo sapien
tagtctgacacagttcaatagggaa

SEQ ID NO: 2897834 - DNA, 25 bp, Homo sapien
ttgggcgattgctctgaggctttgt

SEQ ID NO: 2897835 - DNA, 25 bp, Homo sapien
tgggttgggcgattgctctgaggct

SEQ ID NO: 2897836 - DNA, 25 bp, Homo sapien
catatgggttgggcgattgctctga

SEQ ID NO: 2897837 - DNA, 25 bp, Homo sapien
tatgggttgggcgattgctctgagg

SEQ ID NO: 2897838 - DNA, 25 bp, Homo sapien
ttcctagcaatacaaggggcccatt

SEQ ID NO: 2897839 - DNA, 25 bp, Homo sapien
acttcctagcaatacaaggggccca

SEQ ID NO: 2897840 - DNA, 25 bp, Homo sapien
gaggtggataaatggctctgttggc

SEQ ID NO: 2897841 - DNA, 25 bp, Homo sapien
cacttcctagcaatacaaggggccc

SEQ ID NO: 2897842 - DNA, 25 bp, Homo sapien
ggagatgtgtgccctccagccagat

SEQ ID NO: 2897843 - DNA, 25 bp, Homo sapien
cttcagcttcacagtaacccacata

SEQ ID NO: 2897844 - DNA, 25 bp, Homo sapien
tcacagtaacccacatagaactcag

SEQ ID NO: 2897845 - DNA, 25 bp, Homo sapien
atgctgtcagctccggtagctgtca

SEQ ID NO: 2897846 - DNA, 25 bp, Homo sapien
aatgtgcaccgtgtaacggtccacc

SEQ ID NO: 2897847 - DNA, 25 bp, Homo sapien
atgtgcaccgtgtaacggtccacca

SEQ ID NO: 2897848 - DNA, 25 bp, Homo sapien
tgtgcaccgtgtaacggtccaccat

SEQ ID NO: 2897849 - DNA, 25 bp, Homo sapien
gggccttccagtagccactgtgaca

SEQ ID NO: 2897850 - DNA, 25 bp, Homo sapien
agcacagccgcagctgcaacatccc

SEQ ID NO: 2897851 - DNA, 25 bp, Homo sapien
gcctgggccttccagtagccactgt

SEQ ID NO: 2897852 - DNA, 25 bp, Homo sapien
ggatagaaatgcagcacagccgcag

SEQ ID NO: 2897853 - DNA, 25 bp, Homo sapien
ggagcagaaccagtagccttcgttg

SEQ ID NO: 2897854 - DNA, 25 bp, Homo sapien
gagggagcagaaccagtagccttcg

SEQ ID NO: 2897855 - DNA, 25 bp, Homo sapien
aaagagggagcagaaccagtagcct

SEQ ID NO: 2897856 - DNA, 25 bp, Homo sapien
agcagaaccagtagccttcgttgtc

SEQ ID NO: 2897857 - DNA, 25 bp, Homo sapien
tataggcatccgggcactcaggctt

SEQ ID NO: 2897858 - DNA, 25 bp, Homo sapien
tccgggcactcaggcttctcactgt

SEQ ID NO: 2897859 - DNA, 25 bp, Homo sapien
aggcatccgggcactcaggcttctc

SEQ ID NO: 2897860 - DNA, 25 bp, Homo sapien
atccgggcactcaggcttctcactg

SEQ ID NO: 2897861 - DNA, 25 bp, Homo sapien
catgacagtaggactggggtgctcc

SEQ ID NO: 2897862 - DNA, 25 bp, Homo sapien
tcagttccccgttgtctgagctaag

SEQ ID NO: 2897863 - DNA, 25 bp, Homo sapien
ccccgttgtctgagctaagcatgga

SEQ ID NO: 2897864 - DNA, 25 bp, Homo sapien
gagctaagcatggaccctcagagtc

SEQ ID NO: 2897865 - DNA, 25 bp, Homo sapien
gtgcacttgcagttcactaggagga

SEQ ID NO: 2897866 - DNA, 25 bp, Homo sapien
gatatcaccacaatgaggagagagt

SEQ ID NO: 2897867 - DNA, 25 bp, Homo sapien
ctgagaggactcactgcagagcacc

SEQ ID NO: 2897868 - DNA, 25 bp, Homo sapien
tgggaactgatgcttaataagaacc

SEQ ID NO: 2897869 - DNA, 25 bp, Homo sapien
aagcccagcaatgaaattacctggt

SEQ ID NO: 2897870 - DNA, 25 bp, Homo sapien
cgaagcccagcaatgaaattacctg

SEQ ID NO: 2897871 - DNA, 25 bp, Homo sapien
gaagcccagcaatgaaattacctgg

SEQ ID NO: 2897872 - DNA, 25 bp, Homo sapien
agcccagcaatgaaattacctggtt

SEQ ID NO: 2897873 - DNA, 25 bp, Homo sapien
tcttgcgaagataacggcggagcgt

SEQ ID NO: 2897874 - DNA, 25 bp, Homo sapien
taggaggcgtggaaattcccagcag

SEQ ID NO: 2897875 - DNA, 25 bp, Homo sapien
tctgcaacttgaggcaacaacggaa

SEQ ID NO: 2897876 - DNA, 25 bp, Homo sapien
ttcagaaagagagagtgcgcccatg

SEQ ID NO: 2897877 - DNA, 25 bp, Homo sapien
tacattagatagtgatataacaaac

SEQ ID NO: 2897878 - DNA, 25 bp, Homo sapien
acattatgtgctggatgagccggat

SEQ ID NO: 2897879 - DNA, 25 bp, Homo sapien
caaggccttccacatggggtttttg

SEQ ID NO: 2897880 - DNA, 25 bp, Homo sapien
atgatggaagcaaatccccccacgc

SEQ ID NO: 2897881 - DNA, 25 bp, Homo sapien
aattcctttccaacgtgactgaaat

SEQ ID NO: 2897882 - DNA, 25 bp, Homo sapien
ttcctttccaacgtgactgaaatca

SEQ ID NO: 2897883 - DNA, 25 bp, Homo sapien
cctttccaacgtgactgaaatcaaa

SEQ ID NO: 2897884 - DNA, 25 bp, Homo sapien
tcctttccaacgtgactgaaatcaa

SEQ ID NO: 2897885 - DNA, 25 bp, Homo sapien
tacctgcagatgtaaccggtgttca

SEQ ID NO: 2897886 - DNA, 25 bp, Homo sapien
tatgctgggaagtagcgatctggcc

SEQ ID NO: 2897887 - DNA, 25 bp, Homo sapien
taaatttgacatcagaggttattct

SEQ ID NO: 2897888 - DNA, 25 bp, Homo sapien
cccagtagaaatagcaatcctttaa

SEQ ID NO: 2897889 - DNA, 25 bp, Homo sapien
tgtgccaagaacttcttcaaagtta

SEQ ID NO: 2897890 - DNA, 25 bp, Homo sapien
ccttcattgtgccaagaacttcttc

SEQ ID NO: 2897891 - DNA, 25 bp, Homo sapien
aaagttagagcaagccatactcagc

SEQ ID NO: 2897892 - DNA, 25 bp, Homo sapien
gagcaagccatactcagctcactat

SEQ ID NO: 2897893 - DNA, 25 bp, Homo sapien
agagggcacccctaatcctttggag

SEQ ID NO: 2897894 - DNA, 25 bp, Homo sapien
ggaccaaacggtgaccacatcatag

SEQ ID NO: 2897895 - DNA, 25 bp, Homo sapien
ggagctcttcatagacaagtccagg

SEQ ID NO: 2897896 - DNA, 25 bp, Homo sapien
tagaaactgtaaggtcccaagagac

SEQ ID NO: 2897897 - DNA, 25 bp, Homo sapien
gatcaaagtcccataaacagcataa

SEQ ID NO: 2897898 - DNA, 25 bp, Homo sapien
cctctctcttaattatcctggatgg

SEQ ID NO: 2897899 - DNA, 25 bp, Homo sapien
ttaaaatctttgatcaaagtcccat

SEQ ID NO: 2897900 - DNA, 25 bp, Homo sapien
cctggatggtcttacaagcattaaa

SEQ ID NO: 2897901 - DNA, 25 bp, Homo sapien
cggaaggcactggcatctgagaaca

SEQ ID NO: 2897902 - DNA, 25 bp, Homo sapien
gggcctgtgctccaggaagtctctt

SEQ ID NO: 2897903 - DNA, 25 bp, Homo sapien
tctgagaacaggcagggcctgtgct

SEQ ID NO: 2897904 - DNA, 25 bp, Homo sapien
gcatctgagaacaggcagggcctgt

SEQ ID NO: 2897905 - DNA, 25 bp, Homo sapien
gaaggacataactggcaaaatacaa

SEQ ID NO: 2897906 - DNA, 25 bp, Homo sapien
ctgggcattgggcattaaaacggat

SEQ ID NO: 2897907 - DNA, 25 bp, Homo sapien
aaatcatctttgtctagcggccgga

SEQ ID NO: 2897908 - DNA, 25 bp, Homo sapien
gcattaaaacggatatttataacgc

SEQ ID NO: 2897909 - DNA, 25 bp, Homo sapien
aagtcttcgatgctcttcttctgag

SEQ ID NO: 2897910 - DNA, 25 bp, Homo sapien
actgtcttcatgtcccgaactccag

SEQ ID NO: 2897911 - DNA, 25 bp, Homo sapien
gaactccaggtttattctgcttgta

SEQ ID NO: 2897912 - DNA, 25 bp, Homo sapien
gaacggtgttcctgaactgtcttca

SEQ ID NO: 2897913 - DNA, 25 bp, Homo sapien
tatacttcattgtccttgcccataa

SEQ ID NO: 2897914 - DNA, 25 bp, Homo sapien
ttcattgtccttgcccataaatgct

SEQ ID NO: 2897915 - DNA, 25 bp, Homo sapien
gtcagagtatacttcattgtccttg

SEQ ID NO: 2897916 - DNA, 25 bp, Homo sapien
ttttgtctagactgaagtcactgca

SEQ ID NO: 2897917 - DNA, 25 bp, Homo sapien
tcccttgccgtagtactcaacaaaa

SEQ ID NO: 2897918 - DNA, 25 bp, Homo sapien
aacctttacctcgaatttgtagcag

SEQ ID NO: 2897919 - DNA, 25 bp, Homo sapien
ctcccttgccgtagtactcaacaaa

SEQ ID NO: 2897920 - DNA, 25 bp, Homo sapien
cctttacctcgaatttgtagcagta

SEQ ID NO: 2897921 - DNA, 25 bp, Homo sapien
cttggtcattactgtgtcatcagtg

SEQ ID NO: 2897922 - DNA, 25 bp, Homo sapien
ttactgtgtcatcagtgccagcaca

SEQ ID NO: 2897923 - DNA, 25 bp, Homo sapien
gtcattactgtgtcatcagtgccag

SEQ ID NO: 2897924 - DNA, 25 bp, Homo sapien
ctgtgtcatcagtgccagcacattc

SEQ ID NO: 2897925 - DNA, 25 bp, Homo sapien
caggctagagcaggtccttgtttac

SEQ ID NO: 2897926 - DNA, 25 bp, Homo sapien
tgtcaggctagagcaggtccttgtt

SEQ ID NO: 2897927 - DNA, 25 bp, Homo sapien
cagcctgtcaggctagagcaggtcc

SEQ ID NO: 2897928 - DNA, 25 bp, Homo sapien
cctgtcaggctagagcaggtccttg

SEQ ID NO: 2897929 - DNA, 25 bp, Homo sapien
cgtattaatctcttgggttcacttt

SEQ ID NO: 2897930 - DNA, 25 bp, Homo sapien
cacagaattcactcagagactaagc

SEQ ID NO: 2897931 - DNA, 25 bp, Homo sapien
tctggaccgccctcccgtattaatc

SEQ ID NO: 2897932 - DNA, 25 bp, Homo sapien
ttcactcagagactaagccctctgg

SEQ ID NO: 2897933 - DNA, 25 bp, Homo sapien
taagttaggagccaactcacaggtc

SEQ ID NO: 2897934 - DNA, 25 bp, Homo sapien
ggaacatgccgtgacctcaacagta

SEQ ID NO: 2897935 - DNA, 25 bp, Homo sapien
ctcaacagtactggtcttgtcttgg

SEQ ID NO: 2897936 - DNA, 25 bp, Homo sapien
gaaagagtttctgatgcaagatggt

SEQ ID NO: 2897937 - DNA, 25 bp, Homo sapien
cctctggccatcgagtagaaagtga

SEQ ID NO: 2897938 - DNA, 25 bp, Homo sapien
tgaatgacgaggagccaagactgga

SEQ ID NO: 2897939 - DNA, 25 bp, Homo sapien
catgttagaatgctccctctggcca

SEQ ID NO: 2897940 - DNA, 25 bp, Homo sapien
catggagaggacttcggatgtcatc

SEQ ID NO: 2897941 - DNA, 25 bp, Homo sapien
ggtgttgcttcagggtgatcaggta

SEQ ID NO: 2897942 - DNA, 25 bp, Homo sapien
caggtagggagatggccaaaacact

SEQ ID NO: 2897943 - DNA, 25 bp, Homo sapien
tgatcaggtagggagatggccaaaa

SEQ ID NO: 2897944 - DNA, 25 bp, Homo sapien
cagagcttgtctgcttgtgggtgtt

SEQ ID NO: 2897945 - DNA, 25 bp, Homo sapien
ccagtatcaggagtcagcgtgccca

SEQ ID NO: 2897946 - DNA, 25 bp, Homo sapien
gaccctctcctccacaactctatga

SEQ ID NO: 2897947 - DNA, 25 bp, Homo sapien
tcccagtatcaggagtcagcgtgcc

SEQ ID NO: 2897948 - DNA, 25 bp, Homo sapien
atctcccagtatcaggagtcagcgt

SEQ ID NO: 2897949 - DNA, 25 bp, Homo sapien
taaaagaagtatccgtgagaggcac

SEQ ID NO: 2897950 - DNA, 25 bp, Homo sapien
tcacgggtcagacaactaggcgctg

SEQ ID NO: 2897951 - DNA, 25 bp, Homo sapien
tgctgtctgagccaaagcctgaatg

SEQ ID NO: 2897952 - DNA, 25 bp, Homo sapien
tggacacagcaaccaccaaggcatt

SEQ ID NO: 2897953 - DNA, 25 bp, Homo sapien
tctttgatgaggattccatgcatat

SEQ ID NO: 2897954 - DNA, 25 bp, Homo sapien
cacactctgtggatttgacacaatc

SEQ ID NO: 2897955 - DNA, 25 bp, Homo sapien
tcacacactctgtggatttgacaca

SEQ ID NO: 2897956 - DNA, 25 bp, Homo sapien
tctgtggatttgacacaatctgctc

SEQ ID NO: 2897957 - DNA, 25 bp, Homo sapien
ttctaaagctgatattcagcttccc

SEQ ID NO: 2897958 - DNA, 25 bp, Homo sapien
gaaaagacctgcattctaaagctga

SEQ ID NO: 2897959 - DNA, 25 bp, Homo sapien
gacctgcattctaaagctgatattc

SEQ ID NO: 2897960 - DNA, 25 bp, Homo sapien
aacagaaaagacctgcattctaaag

SEQ ID NO: 2897961 - DNA, 25 bp, Homo sapien
tttgcagaatccgtggtgctctccc

SEQ ID NO: 2897962 - DNA, 25 bp, Homo sapien
tgcagaatccgtggtgctctcccat

SEQ ID NO: 2897963 - DNA, 25 bp, Homo sapien
cactttgcagaatccgtggtgctct

SEQ ID NO: 2897964 - DNA, 25 bp, Homo sapien
actttgcagaatccgtggtgctctc

SEQ ID NO: 2897965 - DNA, 25 bp, Homo sapien
aagatgttgagcaacagcttctaca

SEQ ID NO: 2897966 - DNA, 25 bp, Homo sapien
caaattaataagatgttgagcaaca

SEQ ID NO: 2897967 - DNA, 25 bp, Homo sapien
aattaataagatgttgagcaacagc

SEQ ID NO: 2897968 - DNA, 25 bp, Homo sapien
taataagatgttgagcaacagcttc

SEQ ID NO: 2897969 - DNA, 25 bp, Homo sapien
tcttctctgtaactaccttcaggtc

SEQ ID NO: 2897970 - DNA, 25 bp, Homo sapien
tgtaactaccttcaggtccagagag

SEQ ID NO: 2897971 - DNA, 25 bp, Homo sapien
cagagagagaaaaccactccttttc

SEQ ID NO: 2897972 - DNA, 25 bp, Homo sapien
aaatccatatccaactcaactcctt

SEQ ID NO: 2897973 - DNA, 25 bp, Homo sapien
cgttgatagacgctttctttggccc

SEQ ID NO: 2897974 - DNA, 25 bp, Homo sapien
ttgatagacgctttctttggcccca

SEQ ID NO: 2897975 - DNA, 25 bp, Homo sapien
gaaacgttgatagacgctttctttg

SEQ ID NO: 2897976 - DNA, 25 bp, Homo sapien
cactggaaacgttgatagacgcttt

SEQ ID NO: 2897977 - DNA, 25 bp, Homo sapien
gcgtgaaggagatcatagcatttaa

SEQ ID NO: 2897978 - DNA, 25 bp, Homo sapien
tggcgtgaaggagatcatagcattt

SEQ ID NO: 2897979 - DNA, 25 bp, Homo sapien
ctggcgtgaaggagatcatagcatt

SEQ ID NO: 2897980 - DNA, 25 bp, Homo sapien
ggcgtgaaggagatcatagcattta

SEQ ID NO: 2897981 - DNA, 25 bp, Homo sapien
atccaagcctcctgatgtggcagcc

SEQ ID NO: 2897982 - DNA, 25 bp, Homo sapien
cacttaatccaagcctcctgatgtg

SEQ ID NO: 2897983 - DNA, 25 bp, Homo sapien
tgttggagggagacaaatcacttaa

SEQ ID NO: 2897984 - DNA, 25 bp, Homo sapien
ctgtgttggagggagacaaatcact

SEQ ID NO: 2897985 - DNA, 25 bp, Homo sapien
tgagaacagcacttagcagactccc

SEQ ID NO: 2897986 - DNA, 25 bp, Homo sapien
tccctgagaacagcacttagcagac

SEQ ID NO: 2897987 - DNA, 25 bp, Homo sapien
tcatctttgtcagccctaatgaacc

SEQ ID NO: 2897988 - DNA, 25 bp, Homo sapien
ctttgtcagccctaatgaaccacat

SEQ ID NO: 2897989 - DNA, 25 bp, Homo sapien
gctgggtcgccaatgtgatgtatac

SEQ ID NO: 2897990 - DNA, 25 bp, Homo sapien
ctgctgggtcgccaatgtgatgtat

SEQ ID NO: 2897991 - DNA, 25 bp, Homo sapien
ggctctgctgggtcgccaatgtgat

SEQ ID NO: 2897992 - DNA, 25 bp, Homo sapien
agaggctctgctgggtcgccaatgt

SEQ ID NO: 2897993 - DNA, 25 bp, Homo sapien
tactcatggcaggtagctcgtactt

SEQ ID NO: 2897994 - DNA, 25 bp, Homo sapien
caaccaggaagctctcgtgggacct

SEQ ID NO: 2897995 - DNA, 25 bp, Homo sapien
gcaggtagctcgtacttggccttca

SEQ ID NO: 2897996 - DNA, 25 bp, Homo sapien
tctcgtgggacctactcatggcagg

SEQ ID NO: 2897997 - DNA, 25 bp, Homo sapien
ggtccagcgccctctgaagtcattg

SEQ ID NO: 2897998 - DNA, 25 bp, Homo sapien
gaagcacggagaagaccgtggtcca

SEQ ID NO: 2897999 - DNA, 25 bp, Homo sapien
tggtctgagcacgtttctccccaca

SEQ ID NO: 2898000 - DNA, 25 bp, Homo sapien
attggcgaccgcgatggaagtagtt

SEQ ID NO: 2898001 - DNA, 25 bp, Homo sapien
tctttccagtggaaccaagtaggag

SEQ ID NO: 2898002 - DNA, 25 bp, Homo sapien
cttgtttgtgaataatgacctctta

SEQ ID NO: 2898003 - DNA, 25 bp, Homo sapien
gctgccagacatcccggggaggctt

SEQ ID NO: 2898004 - DNA, 25 bp, Homo sapien
atgacctcttattttctttccagtg

SEQ ID NO: 2898005 - DNA, 25 bp, Homo sapien
tggccaagacgatccaacaggtgct

SEQ ID NO: 2898006 - DNA, 25 bp, Homo sapien
ttgagctaagcacactgaccagggc

SEQ ID NO: 2898007 - DNA, 25 bp, Homo sapien
aacaggtgctctctacgacctggca

SEQ ID NO: 2898008 - DNA, 25 bp, Homo sapien
catgaccggtacaggttgaatcagg

SEQ ID NO: 2898009 - DNA, 25 bp, Homo sapien
tgatgtccttagccagggaccgcat

SEQ ID NO: 2898010 - DNA, 25 bp, Homo sapien
tgctgatgtccttagccagggaccg

SEQ ID NO: 2898011 - DNA, 25 bp, Homo sapien
ttgctgatgtccttagccagggacc

SEQ ID NO: 2898012 - DNA, 25 bp, Homo sapien
ctgatgtccttagccagggaccgca

SEQ ID NO: 2898013 - DNA, 25 bp, Homo sapien
tgaagcaaattgcagagcgcagaaa

SEQ ID NO: 2898014 - DNA, 25 bp, Homo sapien
gacccacgctgactgtgatttgaaa

SEQ ID NO: 2898015 - DNA, 25 bp, Homo sapien
tccttggctgggtgaaaaattcctg

SEQ ID NO: 2898016 - DNA, 25 bp, Homo sapien
gctggatctttctcaacagaacgcc

SEQ ID NO: 2898017 - DNA, 25 bp, Homo sapien
cgtttcaccacgctgtagtcaaaat

SEQ ID NO: 2898018 - DNA, 25 bp, Homo sapien
cgctgtagtcaaaatacagcgactg

SEQ ID NO: 2898019 - DNA, 25 bp, Homo sapien
tcaccacgctgtagtcaaaatacag

SEQ ID NO: 2898020 - DNA, 25 bp, Homo sapien
taaacgtttcaccacgctgtagtca

SEQ ID NO: 2898021 - DNA, 25 bp, Homo sapien
atgctgtgctttgatgggccgctct

SEQ ID NO: 2898022 - DNA, 25 bp, Homo sapien
ggccacagtggccaattggaagatg

SEQ ID NO: 2898023 - DNA, 25 bp, Homo sapien
cacagtggccaattggaagatggct

SEQ ID NO: 2898024 - DNA, 25 bp, Homo sapien
tgctgtgctttgatgggccgctctg

SEQ ID NO: 2898025 - DNA, 25 bp, Homo sapien
cctcatcctgcgcttcaggtatatt

SEQ ID NO: 2898026 - DNA, 25 bp, Homo sapien
agcactgccttcgtcttcaatctca

SEQ ID NO: 2898027 - DNA, 25 bp, Homo sapien
gcactgccttcgtcttcaatctcat

SEQ ID NO: 2898028 - DNA, 25 bp, Homo sapien
cctgcgcttcaggtatattcaccat

SEQ ID NO: 2898029 - DNA, 25 bp, Homo sapien
agcccagcacggttattcttcccaa

SEQ ID NO: 2898030 - DNA, 25 bp, Homo sapien
gacaaagcccagcacggttattctt

SEQ ID NO: 2898031 - DNA, 25 bp, Homo sapien
ttgaccaaaagaagaaggacaaagc

SEQ ID NO: 2898032 - DNA, 25 bp, Homo sapien
tctgaagtcagacttgaccaaaaga

SEQ ID NO: 2898033 - DNA, 25 bp, Homo sapien
aggtagcagagcacagtcaggtccc

SEQ ID NO: 2898034 - DNA, 25 bp, Homo sapien
caaggttaaagcgtgatgcccagag

SEQ ID NO: 2898035 - DNA, 25 bp, Homo sapien
cgtagcgaaagatttgtgcacccct

SEQ ID NO: 2898036 - DNA, 25 bp, Homo sapien
caatgtatcacttggcataaggcac

SEQ ID NO: 2898037 - DNA, 25 bp, Homo sapien
gctcaggtgtacatcaggctctctg

SEQ ID NO: 2898038 - DNA, 25 bp, Homo sapien
cagggctcaggtgtacatcaggctc

SEQ ID NO: 2898039 - DNA, 25 bp, Homo sapien
gacagggctcaggtgtacatcaggc

SEQ ID NO: 2898040 - DNA, 25 bp, Homo sapien
caggtgtacatcaggctctctgaca

SEQ ID NO: 2898041 - DNA, 25 bp, Homo sapien
atgacgctcacacccagacacagac

SEQ ID NO: 2898042 - DNA, 25 bp, Homo sapien
ggagagcacgccgccactctcccat

SEQ ID NO: 2898043 - DNA, 25 bp, Homo sapien
acaaacacacggggcactgccgcgc

SEQ ID NO: 2898044 - DNA, 25 bp, Homo sapien
aacacacggggcactgccgcgcaga

SEQ ID NO: 2898045 - DNA, 25 bp, Homo sapien
ccggctggggcgcccgcacccgcgc

SEQ ID NO: 2898046 - DNA, 25 bp, Homo sapien
gctggggcgcccgcacccgcgccca

SEQ ID NO: 2898047 - DNA, 25 bp, Homo sapien
cgcgatcgcggccggctggggcgcc

SEQ ID NO: 2898048 - DNA, 25 bp, Homo sapien
cccgcgatcgcggccggctggggcg

SEQ ID NO: 2898049 - DNA, 25 bp, Homo sapien
gttcaccaagagacggagcaaaccc

SEQ ID NO: 2898050 - DNA, 25 bp, Homo sapien
ttcaccaagagacggagcaaaccct

SEQ ID NO: 2898051 - DNA, 25 bp, Homo sapien
caccaagagacggagcaaaccctcc

SEQ ID NO: 2898052 - DNA, 25 bp, Homo sapien
agttcaccaagagacggagcaaacc

SEQ ID NO: 2898053 - DNA, 25 bp, Homo sapien
actggacatccttcgatgctcaggg

SEQ ID NO: 2898054 - DNA, 25 bp, Homo sapien
cagggaatgcccctgaaaataagtg

SEQ ID NO: 2898055 - DNA, 25 bp, Homo sapien
tggactggacatccttcgatgctca

SEQ ID NO: 2898056 - DNA, 25 bp, Homo sapien
cctgaaaataagtgcctgctggact

SEQ ID NO: 2898057 - DNA, 25 bp, Homo sapien
gagccatggatgaagcctgaaacat

SEQ ID NO: 2898058 - DNA, 25 bp, Homo sapien
gagatggagcagtgcataggcacag

SEQ ID NO: 2898059 - DNA, 25 bp, Homo sapien
ccagagccatggatgaagcctgaaa

SEQ ID NO: 2898060 - DNA, 25 bp, Homo sapien
tggagcagtgcataggcacaggccc

SEQ ID NO: 2898061 - DNA, 25 bp, Homo sapien
gaggcgtcatccttgcatcctggct

SEQ ID NO: 2898062 - DNA, 25 bp, Homo sapien
cccaggcgtcaaggacatctccatt

SEQ ID NO: 2898063 - DNA, 25 bp, Homo sapien
aaatggcaccattacttatctccag

SEQ ID NO: 2898064 - DNA, 25 bp, Homo sapien
ccagtaggtgttcaaatggcaccat

SEQ ID NO: 2898065 - DNA, 25 bp, Homo sapien
agggctcctggctggagccccggga

SEQ ID NO: 2898066 - DNA, 25 bp, Homo sapien
agcagggctcctggctggagccccg

SEQ ID NO: 2898067 - DNA, 25 bp, Homo sapien
gctcctggctggagccccgggatgg

SEQ ID NO: 2898068 - DNA, 25 bp, Homo sapien
ggctcctggctggagccccgggatg

SEQ ID NO: 2898069 - DNA, 25 bp, Homo sapien
caggctgccggtcatcaggtaggca

SEQ ID NO: 2898070 - DNA, 25 bp, Homo sapien
cttctggagtcggaagaaaggtttg

SEQ ID NO: 2898071 - DNA, 25 bp, Homo sapien
tgtgttcggcggagaaacttctgga

SEQ ID NO: 2898072 - DNA, 25 bp, Homo sapien
tgactcgagggtcgtgcagggctct

SEQ ID NO: 2898073 - DNA, 25 bp, Homo sapien
tcactcatgaagtggtggaaccagc

SEQ ID NO: 2898074 - DNA, 25 bp, Homo sapien
cagggcgggcggtccctgggagtca

SEQ ID NO: 2898075 - DNA, 25 bp, Homo sapien
caactgacgcagctccgagttgcgg

SEQ ID NO: 2898076 - DNA, 25 bp, Homo sapien
ggaaccagcggcgacgcaactgacg

SEQ ID NO: 2898077 - DNA, 25 bp, Homo sapien
tgaaggacttcgcatcgcaggcccc

SEQ ID NO: 2898078 - DNA, 25 bp, Homo sapien
gctggtgagtgagcaaaaccctgaa

SEQ ID NO: 2898079 - DNA, 25 bp, Homo sapien
aggacttcgcatcgcaggccccttc

SEQ ID NO: 2898080 - DNA, 25 bp, Homo sapien
ggtgagtgagcaaaaccctgaagga

SEQ ID NO: 2898081 - DNA, 25 bp, Homo sapien
gtgataaacacgctgcacgtctccc

SEQ ID NO: 2898082 - DNA, 25 bp, Homo sapien
ctgtgataaacacgctgcacgtctc

SEQ ID NO: 2898083 - DNA, 25 bp, Homo sapien
aggaagggccgcgttccgctcattc

SEQ ID NO: 2898084 - DNA, 25 bp, Homo sapien
gaagggccgcgttccgctcattcat

SEQ ID NO: 2898085 - DNA, 25 bp, Homo sapien
aatagctgcgccgagatctggatcg

SEQ ID NO: 2898086 - DNA, 25 bp, Homo sapien
tgttttgaaggagcggcatgggaat

SEQ ID NO: 2898087 - DNA, 25 bp, Homo sapien
ggaatttgcaaacacgccgtcacac

SEQ ID NO: 2898088 - DNA, 25 bp, Homo sapien
aagccgtgaacgcacacccacaata

SEQ ID NO: 2898089 - DNA, 25 bp, Homo sapien
tcagcacacgcatcctggcagtggg

SEQ ID NO: 2898090 - DNA, 25 bp, Homo sapien
tcactgaagcatccaatgtaggtgc

SEQ ID NO: 2898091 - DNA, 25 bp, Homo sapien
tcctctcgtggccatcgtcactgaa

SEQ ID NO: 2898092 - DNA, 25 bp, Homo sapien
cagtgggagacagtcatctttctca

SEQ ID NO: 2898093 - DNA, 25 bp, Homo sapien
ggataactccttgctacctggcaga

SEQ ID NO: 2898094 - DNA, 25 bp, Homo sapien
tctggagtcaggaaacggactggac

SEQ ID NO: 2898095 - DNA, 25 bp, Homo sapien
tatgtgggtcatgcaatggcaactg

SEQ ID NO: 2898096 - DNA, 25 bp, Homo sapien
tcaagggccaccaggctaagttcag

SEQ ID NO: 2898097 - DNA, 25 bp, Homo sapien
ctccaagccggcgtagacataggac

SEQ ID NO: 2898098 - DNA, 25 bp, Homo sapien
cctccaagccggcgtagacatagga

SEQ ID NO: 2898099 - DNA, 25 bp, Homo sapien
gcactcatggttacactcttccagc

SEQ ID NO: 2898100 - DNA, 25 bp, Homo sapien
ccttctcgcctttgcactcatggtt

SEQ ID NO: 2898101 - DNA, 25 bp, Homo sapien
ggctgcagctcgtccacacggtaca

SEQ ID NO: 2898102 - DNA, 25 bp, Homo sapien
acggtacacggagagccggtccaca

SEQ ID NO: 2898103 - DNA, 25 bp, Homo sapien
tgtgaatgctccttgctggcagaag

SEQ ID NO: 2898104 - DNA, 25 bp, Homo sapien
cctccaaggcgaagacgttgatgac

SEQ ID NO: 2898105 - DNA, 25 bp, Homo sapien
gagcctgagggtcacttggcagaat

SEQ ID NO: 2898106 - DNA, 25 bp, Homo sapien
cagaagctgcagctcacaatggtgg

SEQ ID NO: 2898107 - DNA, 25 bp, Homo sapien
gaggcgagttcaaatcagggaggga

SEQ ID NO: 2898108 - DNA, 25 bp, Homo sapien
atcagggagggaaaacggccctgca

SEQ ID NO: 2898109 - DNA, 25 bp, Homo sapien
gcgagttcaaatcagggagggaaaa

SEQ ID NO: 2898110 - DNA, 25 bp, Homo sapien
tcagggagggaaaacggccctgcat

SEQ ID NO: 2898111 - DNA, 25 bp, Homo sapien
aagtccccacggtcacattggcctg

SEQ ID NO: 2898112 - DNA, 25 bp, Homo sapien
cacattggcctgtatcagggagctg

SEQ ID NO: 2898113 - DNA, 25 bp, Homo sapien
tttctgggaacaaaagcccgagcaa

SEQ ID NO: 2898114 - DNA, 25 bp, Homo sapien
cagtcggaagcatccgcggtaggtg

SEQ ID NO: 2898115 - DNA, 25 bp, Homo sapien
ccaggccagatgtccgcaaatcaac

SEQ ID NO: 2898116 - DNA, 25 bp, Homo sapien
cttcggaaatgctggtgacgcagga

SEQ ID NO: 2898117 - DNA, 25 bp, Homo sapien
tgggtgccctgatgcccaagacatc

SEQ ID NO: 2898118 - DNA, 25 bp, Homo sapien
agctgagcgcgcatccttgctgcct

SEQ ID NO: 2898119 - DNA, 25 bp, Homo sapien
agaagcacactgagtgaatttgagg

SEQ ID NO: 2898120 - DNA, 25 bp, Homo sapien
agggaacgataagaagagaagcaca

SEQ ID NO: 2898121 - DNA, 25 bp, Homo sapien
ctgccagggaacgataagaagagaa

SEQ ID NO: 2898122 - DNA, 25 bp, Homo sapien
cacactgagtgaatttgagggtcat

SEQ ID NO: 2898123 - DNA, 25 bp, Homo sapien
cttgcacaggtgtctggtagacctc

SEQ ID NO: 2898124 - DNA, 25 bp, Homo sapien
ggtagggtaagcacagtagcattcc

SEQ ID NO: 2898125 - DNA, 25 bp, Homo sapien
catggcatcccgcaggttgaaccgg

SEQ ID NO: 2898126 - DNA, 25 bp, Homo sapien
gtgtctggtagacctcacagtattc

SEQ ID NO: 2898127 - DNA, 25 bp, Homo sapien
gaagccagtggcatgctcaatgagg

SEQ ID NO: 2898128 - DNA, 25 bp, Homo sapien
gctcctgggaagcttgacaaagcca

SEQ ID NO: 2898129 - DNA, 25 bp, Homo sapien
tagtagctccctgtatagaagccag

SEQ ID NO: 2898130 - DNA, 25 bp, Homo sapien
aatgaggtgccgtgcccatgtgttc

SEQ ID NO: 2898131 - DNA, 25 bp, Homo sapien
aacaccatttgtacagcctcagtct

SEQ ID NO: 2898132 - DNA, 25 bp, Homo sapien
accatttgtacagcctcagtcttct

SEQ ID NO: 2898133 - DNA, 25 bp, Homo sapien
tcttctagcagtttaatagatttgg

SEQ ID NO: 2898134 - DNA, 25 bp, Homo sapien
ttcttctagcagtttaatagatttg

SEQ ID NO: 2898135 - DNA, 25 bp, Homo sapien
gacctgtatgggttccggattagca

SEQ ID NO: 2898136 - DNA, 25 bp, Homo sapien
gctcttccagttgcggtcagctgca

SEQ ID NO: 2898137 - DNA, 25 bp, Homo sapien
ttgacacagatggtgcgtcggctcc

SEQ ID NO: 2898138 - DNA, 25 bp, Homo sapien
gccagtggtccttttcgcccttgaa

SEQ ID NO: 2898139 - DNA, 25 bp, Homo sapien
tcatctgggcacatactccctgggc

SEQ ID NO: 2898140 - DNA, 25 bp, Homo sapien
tcacagacacgttgaggaaggccac

SEQ ID NO: 2898141 - DNA, 25 bp, Homo sapien
ttgttgttctccacgcagagcagcc

SEQ ID NO: 2898142 - DNA, 25 bp, Homo sapien
tagctgttgacaaagtccggccact

SEQ ID NO: 2898143 - DNA, 25 bp, Homo sapien
attgcgtcactcagcgggggcggcg

SEQ ID NO: 2898144 - DNA, 25 bp, Homo sapien
gtggtgcgattgcgtcactcagcgg

SEQ ID NO: 2898145 - DNA, 25 bp, Homo sapien
gcgattgcgtcactcagcgggggcg

SEQ ID NO: 2898146 - DNA, 25 bp, Homo sapien
tggtgcgattgcgtcactcagcggg

SEQ ID NO: 2898147 - DNA, 25 bp, Homo sapien
cccaccgttcgtcccagtgaggcca

SEQ ID NO: 2898148 - DNA, 25 bp, Homo sapien
ccacccaccgttcgtcccagtgagg

SEQ ID NO: 2898149 - DNA, 25 bp, Homo sapien
cagtgaggccacgggcctgagcatc

SEQ ID NO: 2898150 - DNA, 25 bp, Homo sapien
accgttcgtcccagtgaggccacgg

SEQ ID NO: 2898151 - DNA, 25 bp, Homo sapien
gagtcatctacaaggccacaggagc

SEQ ID NO: 2898152 - DNA, 25 bp, Homo sapien
caatgggtttccgagcaagtcagca

SEQ ID NO: 2898153 - DNA, 25 bp, Homo sapien
gatgagatctcccacgtaggcagac

SEQ ID NO: 2898154 - DNA, 25 bp, Homo sapien
tatgccagggctacacacaggaagc

SEQ ID NO: 2898155 - DNA, 25 bp, Homo sapien
gaggttgtctaacagtctctctgga

SEQ ID NO: 2898156 - DNA, 25 bp, Homo sapien
ttccagaaggatgcgcaaagcacgc

SEQ ID NO: 2898157 - DNA, 25 bp, Homo sapien
gaaaagcaatcatgatcccgtgaat

SEQ ID NO: 2898158 - DNA, 25 bp, Homo sapien
ggtaagactgtcttgcatcccgctt

SEQ ID NO: 2898159 - DNA, 25 bp, Homo sapien
aatggattttgtgtccctgagaaac

SEQ ID NO: 2898160 - DNA, 25 bp, Homo sapien
tgtgacccccgctactgggaagaag

SEQ ID NO: 2898161 - DNA, 25 bp, Homo sapien
gaagacaacgtctactggagaaaat

SEQ ID NO: 2898162 - DNA, 25 bp, Homo sapien
gaattcaggcaggacgatgccattt

SEQ ID NO: 2898163 - DNA, 25 bp, Homo sapien
cacgggtcctcggaagactaagagg

SEQ ID NO: 2898164 - DNA, 25 bp, Homo sapien
aaatggacatagcaacactcacatc

SEQ ID NO: 2898165 - DNA, 25 bp, Homo sapien
attataaaacggcagctcagcttca

SEQ ID NO: 2898166 - DNA, 25 bp, Homo sapien
tcacatctcaagactgttgggagaa

SEQ ID NO: 2898167 - DNA, 25 bp, Homo sapien
gtggtgccctcagatctccatcact

SEQ ID NO: 2898168 - DNA, 25 bp, Homo sapien
gaaatggccctttgaggtggtgccc

SEQ ID NO: 2898169 - DNA, 25 bp, Homo sapien
tgaggtggtgccctcagatctccat

SEQ ID NO: 2898170 - DNA, 25 bp, Homo sapien
ggccctttgaggtggtgccctcaga

SEQ ID NO: 2898171 - DNA, 25 bp, Homo sapien
tgctagaggccacccaaagctcttt

SEQ ID NO: 2898172 - DNA, 25 bp, Homo sapien
tagatagagactgcccctggtgcta

SEQ ID NO: 2898173 - DNA, 25 bp, Homo sapien
tgatcaggatcacacaaggttgcca

SEQ ID NO: 2898174 - DNA, 25 bp, Homo sapien
tctaggcagttagcacatgacggtt

SEQ ID NO: 2898175 - DNA, 25 bp, Homo sapien
atatcctgtgctccaggtaggtcat

SEQ ID NO: 2898176 - DNA, 25 bp, Homo sapien
gtgtgttcttcatcagtgcatatcc

SEQ ID NO: 2898177 - DNA, 25 bp, Homo sapien
cttgtacagtgtgttcttcatcagt

SEQ ID NO: 2898178 - DNA, 25 bp, Homo sapien
gttcttcatcagtgcatatcctgtg

SEQ ID NO: 2898179 - DNA, 25 bp, Homo sapien
tgaaggcaaagaagtcagatagaca

SEQ ID NO: 2898180 - DNA, 25 bp, Homo sapien
tgtccatgccaggtcctgtcctgag

SEQ ID NO: 2898181 - DNA, 25 bp, Homo sapien
actgtgccacagttaagatgagtcc

SEQ ID NO: 2898182 - DNA, 25 bp, Homo sapien
accagccctgtttaggtgagttctg

SEQ ID NO: 2898183 - DNA, 25 bp, Homo sapien
caaacttttgtgtcattcttgagca

SEQ ID NO: 2898184 - DNA, 25 bp, Homo sapien
tcacaaacttttgtgtcattcttga

SEQ ID NO: 2898185 - DNA, 25 bp, Homo sapien
acaaacttttgtgtcattcttgagc

SEQ ID NO: 2898186 - DNA, 25 bp, Homo sapien
aacttttgtgtcattcttgagcagg

SEQ ID NO: 2898187 - DNA, 25 bp, Homo sapien
aactaagcgtttgccagtgccgtct

SEQ ID NO: 2898188 - DNA, 25 bp, Homo sapien
ggatggtggtaactaagcgtttgcc

SEQ ID NO: 2898189 - DNA, 25 bp, Homo sapien
tggtaactaagcgtttgccagtgcc

SEQ ID NO: 2898190 - DNA, 25 bp, Homo sapien
tataggatggtggtaactaagcgtt

SEQ ID NO: 2898191 - DNA, 25 bp, Homo sapien
tgaggatgttaggaagaacccctcc

SEQ ID NO: 2898192 - DNA, 25 bp, Homo sapien
gaacccctccctacctgcctcatag

SEQ ID NO: 2898193 - DNA, 25 bp, Homo sapien
acctgcctcataggtctgacgccga

SEQ ID NO: 2898194 - DNA, 25 bp, Homo sapien
tgtgcctccgtttccatttgtaaga

SEQ ID NO: 2898195 - DNA, 25 bp, Homo sapien
gagacgcagtttacccagggtcagg

SEQ ID NO: 2898196 - DNA, 25 bp, Homo sapien
aggagcactcctaggcttctggttt

SEQ ID NO: 2898197 - DNA, 25 bp, Homo sapien
ctgacagaaggcaagggaccaagtg

SEQ ID NO: 2898198 - DNA, 25 bp, Homo sapien
taacagtccaggtgggagactctgg

SEQ ID NO: 2898199 - DNA, 25 bp, Homo sapien
gctccagccccatcagagcctccat

SEQ ID NO: 2898200 - DNA, 25 bp, Homo sapien
tgctccagccccatcagagcctcca

SEQ ID NO: 2898201 - DNA, 25 bp, Homo sapien
ctgctccagccccatcagagcctcc

SEQ ID NO: 2898202 - DNA, 25 bp, Homo sapien
tcgtattgctctgctgtgaaggcat

SEQ ID NO: 2898203 - DNA, 25 bp, Homo sapien
gatctggcaaagttggagcacacca

SEQ ID NO: 2898204 - DNA, 25 bp, Homo sapien
cctgagctgatgcagagatctggca

SEQ ID NO: 2898205 - DNA, 25 bp, Homo sapien
agcagctcatatcccgtgccctgag

SEQ ID NO: 2898206 - DNA, 25 bp, Homo sapien
aaaggtggaattcaggatgcgatgg

SEQ ID NO: 2898207 - DNA, 25 bp, Homo sapien
ccgaaaggtggaattcaggatgcga

SEQ ID NO: 2898208 - DNA, 25 bp, Homo sapien
aggtggaattcaggatgcgatggct

SEQ ID NO: 2898209 - DNA, 25 bp, Homo sapien
cgaaaggtggaattcaggatgcgat

SEQ ID NO: 2898210 - DNA, 25 bp, Homo sapien
gagtctggctgtcatgtcataatac

SEQ ID NO: 2898211 - DNA, 25 bp, Homo sapien
aaggaatgtgctagattcacgcagc

SEQ ID NO: 2898212 - DNA, 25 bp, Homo sapien
gaagcaatactacgaattatcaggg

SEQ ID NO: 2898213 - DNA, 25 bp, Homo sapien
tgccttggcaggatgaaagaaaata

SEQ ID NO: 2898214 - DNA, 25 bp, Homo sapien
gtttggcctgacaggtgaacttcct

SEQ ID NO: 2898215 - DNA, 25 bp, Homo sapien
ctgagtttggcctgacaggtgaact

SEQ ID NO: 2898216 - DNA, 25 bp, Homo sapien
tggcctgacaggtgaacttccttcc

SEQ ID NO: 2898217 - DNA, 25 bp, Homo sapien
ctggcggctgtgatctgagtttggc

SEQ ID NO: 2898218 - DNA, 25 bp, Homo sapien
cttttgattcctgattcccaggcca

SEQ ID NO: 2898219 - DNA, 25 bp, Homo sapien
cctgattcccaggccagggttcgga

SEQ ID NO: 2898220 - DNA, 25 bp, Homo sapien
caggccagggttcggaggtagaagt

SEQ ID NO: 2898221 - DNA, 25 bp, Homo sapien
tcccaggccagggttcggaggtaga

SEQ ID NO: 2898222 - DNA, 25 bp, Homo sapien
gacagttccaggtatctgtttctcc

SEQ ID NO: 2898223 - DNA, 25 bp, Homo sapien
ccacggtgactgttatgataaagaa

SEQ ID NO: 2898224 - DNA, 25 bp, Homo sapien
tagacagccgtgtgctgctcatctc

SEQ ID NO: 2898225 - DNA, 25 bp, Homo sapien
gcccaaagttattcccatcctgagg

SEQ ID NO: 2898226 - DNA, 25 bp, Homo sapien
tggggtcaaatgttcctgtctggac

SEQ ID NO: 2898227 - DNA, 25 bp, Homo sapien
ctggggtcaaatgttcctgtctgga

SEQ ID NO: 2898228 - DNA, 25 bp, Homo sapien
aatgttcctgtctggaccaatgggc

SEQ ID NO: 2898229 - DNA, 25 bp, Homo sapien
tcaaatgttcctgtctggaccaatg

SEQ ID NO: 2898230 - DNA, 25 bp, Homo sapien
cctgatgcttgctaccattgagttt

SEQ ID NO: 2898231 - DNA, 25 bp, Homo sapien
tcctgatgcttgctaccattgagtt

SEQ ID NO: 2898232 - DNA, 25 bp, Homo sapien
ctgatgcttgctaccattgagtttc

SEQ ID NO: 2898233 - DNA, 25 bp, Homo sapien
tggaataatggtcaggactgggctg

SEQ ID NO: 2898234 - DNA, 25 bp, Homo sapien
gaataatggtcaggactgggctggc

SEQ ID NO: 2898235 - DNA, 25 bp, Homo sapien
acccagggatgagtggaataatggt

SEQ ID NO: 2898236 - DNA, 25 bp, Homo sapien
gatgagtggaataatggtcaggact

SEQ ID NO: 2898237 - DNA, 25 bp, Homo sapien
cccatcgggtgcagttagggcagcc

SEQ ID NO: 2898238 - DNA, 25 bp, Homo sapien
ggacaagtttgatggcccatcgggt

SEQ ID NO: 2898239 - DNA, 25 bp, Homo sapien
tttgatggcccatcgggtgcagtta

SEQ ID NO: 2898240 - DNA, 25 bp, Homo sapien
agttagggcagccaagcgttgctct

SEQ ID NO: 2898241 - DNA, 25 bp, Homo sapien
atttcttttcgctccctcttcctgt

SEQ ID NO: 2898242 - DNA, 25 bp, Homo sapien
tatttcttttcgctccctcttcctg

SEQ ID NO: 2898243 - DNA, 25 bp, Homo sapien
tttcttttcgctccctcttcctgtc

SEQ ID NO: 2898244 - DNA, 25 bp, Homo sapien
ctatttcttttcgctccctcttcct

SEQ ID NO: 2898245 - DNA, 25 bp, Homo sapien
caataccctgaaccgttggctgcct

SEQ ID NO: 2898246 - DNA, 25 bp, Homo sapien
tctcagtgccccagtgttggcaata

SEQ ID NO: 2898247 - DNA, 25 bp, Homo sapien
tgatagtcacatctttacaccccat

SEQ ID NO: 2898248 - DNA, 25 bp, Homo sapien
tgctatctttggcactttgcatttc

SEQ ID NO: 2898249 - DNA, 25 bp, Homo sapien
catcttcacttaggggaggggtgta

SEQ ID NO: 2898250 - DNA, 25 bp, Homo sapien
tggcatcttcacttaggggaggggt

SEQ ID NO: 2898251 - DNA, 25 bp, Homo sapien
ttcacttaggggaggggtgtactca

SEQ ID NO: 2898252 - DNA, 25 bp, Homo sapien
ggatggcatcttcacttaggggagg

SEQ ID NO: 2898253 - DNA, 25 bp, Homo sapien
tcaaatgtaaaatggccaccagagg

SEQ ID NO: 2898254 - DNA, 25 bp, Homo sapien
taaaatggccaccagaggaagggag

SEQ ID NO: 2898255 - DNA, 25 bp, Homo sapien
tcacaatctggggatctcaaatgta

SEQ ID NO: 2898256 - DNA, 25 bp, Homo sapien
cacaatctggggatctcaaatgtaa

SEQ ID NO: 2898257 - DNA, 25 bp, Homo sapien
taagccggtgagatgcagacagtct

SEQ ID NO: 2898258 - DNA, 25 bp, Homo sapien
cagacagtctggctagtttgggaag

SEQ ID NO: 2898259 - DNA, 25 bp, Homo sapien
gaatgaggcaaaccgaattaagcca

SEQ ID NO: 2898260 - DNA, 25 bp, Homo sapien
ccagcatcttaagccggtgagatgc

SEQ ID NO: 2898261 - DNA, 25 bp, Homo sapien
tcagcaagctcttggcggtcccaaa

SEQ ID NO: 2898262 - DNA, 25 bp, Homo sapien
gctcttggcggtcccaaataaatat

SEQ ID NO: 2898263 - DNA, 25 bp, Homo sapien
ctcatttcagcaagctcttggcggt

SEQ ID NO: 2898264 - DNA, 25 bp, Homo sapien
atttttatcaggcaagtgctctaga

SEQ ID NO: 2898265 - DNA, 25 bp, Homo sapien
aagtctgtgactgggggcattgctt

SEQ ID NO: 2898266 - DNA, 25 bp, Homo sapien
tgactgggggcattgcttgtcagcc

SEQ ID NO: 2898267 - DNA, 25 bp, Homo sapien
cacttgaagtgttaagtctgtgact

SEQ ID NO: 2898268 - DNA, 25 bp, Homo sapien
ggcattgcttgtcagccaggtttcc

SEQ ID NO: 2898269 - DNA, 25 bp, Homo sapien
aggatgctccatccccatggggcca

SEQ ID NO: 2898270 - DNA, 25 bp, Homo sapien
atggggccattgggctcctcctgct

SEQ ID NO: 2898271 - DNA, 25 bp, Homo sapien
ctggctgagctgctcaggttgtcat

SEQ ID NO: 2898272 - DNA, 25 bp, Homo sapien
gcctggctgagctgctcaggttgtc

SEQ ID NO: 2898273 - DNA, 25 bp, Homo sapien
tgatttcaagatgcatgaactgggg

SEQ ID NO: 2898274 - DNA, 25 bp, Homo sapien
aggaatctggagacagcaaaacttg

SEQ ID NO: 2898275 - DNA, 25 bp, Homo sapien
gaggaatctggagacagcaaaactt

SEQ ID NO: 2898276 - DNA, 25 bp, Homo sapien
ttcaagatgcatgaactggggcagg

SEQ ID NO: 2898277 - DNA, 25 bp, Homo sapien
tacttgtagacaagggcgtagactg

SEQ ID NO: 2898278 - DNA, 25 bp, Homo sapien
cagatcctgcacagcatttagtaaa

SEQ ID NO: 2898279 - DNA, 25 bp, Homo sapien
ctaaatgccagttttgcggtacttg

SEQ ID NO: 2898280 - DNA, 25 bp, Homo sapien
aagggcgtagactgtcagatcctgc

SEQ ID NO: 2898281 - DNA, 25 bp, Homo sapien
ctatggcaactttgcatgggtgatc

SEQ ID NO: 2898282 - DNA, 25 bp, Homo sapien
catgggtgatcacataaagaggatc

SEQ ID NO: 2898283 - DNA, 25 bp, Homo sapien
gcaactttgcatgggtgatcacata

SEQ ID NO: 2898284 - DNA, 25 bp, Homo sapien
gaggatcaagatgcaaagatttttc

SEQ ID NO: 2898285 - DNA, 25 bp, Homo sapien
gagctgccacgcacacgctcagcat

SEQ ID NO: 2898286 - DNA, 25 bp, Homo sapien
gcatggggagctgccacgcacacgc

SEQ ID NO: 2898287 - DNA, 25 bp, Homo sapien
ttatcactaataggatcgggcattt

SEQ ID NO: 2898288 - DNA, 25 bp, Homo sapien
cactaataggatcgggcatttcagc

SEQ ID NO: 2898289 - DNA, 25 bp, Homo sapien
acatcgagctgtgaccttccctcct

SEQ ID NO: 2898290 - DNA, 25 bp, Homo sapien
cgagctgtgaccttccctccttcct

SEQ ID NO: 2898291 - DNA, 25 bp, Homo sapien
atcgagctgtgaccttccctccttc

SEQ ID NO: 2898292 - DNA, 25 bp, Homo sapien
cacatcgagctgtgaccttccctcc

SEQ ID NO: 2898293 - DNA, 25 bp, Homo sapien
ggagacccgatcacgtcatgcacag

SEQ ID NO: 2898294 - DNA, 25 bp, Homo sapien
ttgcctctggagacccgatcacgtc

SEQ ID NO: 2898295 - DNA, 25 bp, Homo sapien
tgcacacacagacaggccctcggct

SEQ ID NO: 2898296 - DNA, 25 bp, Homo sapien
acaggccctcggctgaatccctttg

SEQ ID NO: 2898297 - DNA, 25 bp, Homo sapien
tagatcacactctaactgcacatac

SEQ ID NO: 2898298 - DNA, 25 bp, Homo sapien
gaaatggctcggcaacccatagatc

SEQ ID NO: 2898299 - DNA, 25 bp, Homo sapien
tcggcaacccatagatcacactcta

SEQ ID NO: 2898300 - DNA, 25 bp, Homo sapien
taattaacagaaatggctcggcaac

SEQ ID NO: 2898301 - DNA, 25 bp, Homo sapien
gggcacaagagggaaggctgccatt

SEQ ID NO: 2898302 - DNA, 25 bp, Homo sapien
cacaagagggaaggctgccattgtc

SEQ ID NO: 2898303 - DNA, 25 bp, Homo sapien
gggatcccaatgtggccggaggctg

SEQ ID NO: 2898304 - DNA, 25 bp, Homo sapien
caatgtggccggaggctggatgggc

SEQ ID NO: 2898305 - DNA, 25 bp, Homo sapien
tgccatcatcacagggaagccccag

SEQ ID NO: 2898306 - DNA, 25 bp, Homo sapien
tttgcacggcctgagttgtgggcca

SEQ ID NO: 2898307 - DNA, 25 bp, Homo sapien
tcaggtttttgcacggcctgagttg

SEQ ID NO: 2898308 - DNA, 25 bp, Homo sapien
gccatcatcacagggaagccccaga

SEQ ID NO: 2898309 - DNA, 25 bp, Homo sapien
gtgattgcaatcaccactgtttgta

SEQ ID NO: 2898310 - DNA, 25 bp, Homo sapien
ttgccatgggaacggcaagtgattg

SEQ ID NO: 2898311 - DNA, 25 bp, Homo sapien
gaacggcaagtgattgcaatcacca

SEQ ID NO: 2898312 - DNA, 25 bp, Homo sapien
cactgtttgtattgtgagcttgttc

SEQ ID NO: 2898313 - DNA, 25 bp, Homo sapien
gagaaccggctcgtggatgctccac

SEQ ID NO: 2898314 - DNA, 25 bp, Homo sapien
gaaccggctcgtggatgctccacca

SEQ ID NO: 2898315 - DNA, 25 bp, Homo sapien
tgctccaccacggaaggggaagtcc

SEQ ID NO: 2898316 - DNA, 25 bp, Homo sapien
gatgctccaccacggaaggggaagt

SEQ ID NO: 2898317 - DNA, 25 bp, Homo sapien
tcaggtgccctctgtacactggcag

SEQ ID NO: 2898318 - DNA, 25 bp, Homo sapien
tgtacactggcagaatccccacttc

SEQ ID NO: 2898319 - DNA, 25 bp, Homo sapien
tctgagagccccgtgttcaggtgcc

SEQ ID NO: 2898320 - DNA, 25 bp, Homo sapien
tcctggctgtagatgagagtgaatt

SEQ ID NO: 2898321 - DNA, 25 bp, Homo sapien
ctggggactggcccttcttactatt

SEQ ID NO: 2898322 - DNA, 25 bp, Homo sapien
tactattgggaaactccttcttcca

SEQ ID NO: 2898323 - DNA, 25 bp, Homo sapien
ggagaactgattctgtgtcactggc

SEQ ID NO: 2898324 - DNA, 25 bp, Homo sapien
agctggcactgttttccctgtgaat

SEQ ID NO: 2898325 - DNA, 25 bp, Homo sapien
tggcactgttttccctgtgaatccc

SEQ ID NO: 2898326 - DNA, 25 bp, Homo sapien
gggatggagaactgattctgtgtca

SEQ ID NO: 2898327 - DNA, 25 bp, Homo sapien
gggataggcggctgctccttgctca

SEQ ID NO: 2898328 - DNA, 25 bp, Homo sapien
cacctctgagcgctcgggataggcg

SEQ ID NO: 2898329 - DNA, 25 bp, Homo sapien
catgagtgaggcgtcatcttgacca

SEQ ID NO: 2898330 - DNA, 25 bp, Homo sapien
cttgatggaacggtccatgagtgag

SEQ ID NO: 2898331 - DNA, 25 bp, Homo sapien
caatagtttgcagggcctctcttcc

SEQ ID NO: 2898332 - DNA, 25 bp, Homo sapien
tgttttcaagttgccagcaggtggc

SEQ ID NO: 2898333 - DNA, 25 bp, Homo sapien
tccaagggcttctttcccggagatc

SEQ ID NO: 2898334 - DNA, 25 bp, Homo sapien
tctgggcgggcagttgcaatagttt

SEQ ID NO: 2898335 - DNA, 25 bp, Homo sapien
cccctcatttgtggtgagaacgtgg

SEQ ID NO: 2898336 - DNA, 25 bp, Homo sapien
tcttttggggacaacgagcagcgag

SEQ ID NO: 2898337 - DNA, 25 bp, Homo sapien
gaatgcagcctatgctcgggcttgg

SEQ ID NO: 2898338 - DNA, 25 bp, Homo sapien
tcgggcttggtcctgtccggctcat

SEQ ID NO: 2898339 - DNA, 25 bp, Homo sapien
accactaaggccgagcacagccgca

SEQ ID NO: 2898340 - DNA, 25 bp, Homo sapien
cactaaggccgagcacagccgcagc

SEQ ID NO: 2898341 - DNA, 25 bp, Homo sapien
acaccactaaggccgagcacagccg

SEQ ID NO: 2898342 - DNA, 25 bp, Homo sapien
ccgacaccactaaggccgagcacag

SEQ ID NO: 2898343 - DNA, 25 bp, Homo sapien
ctgcctggccaagagtcttctctgt

SEQ ID NO: 2898344 - DNA, 25 bp, Homo sapien
aagagtcttctctgtccactagacc

SEQ ID NO: 2898345 - DNA, 25 bp, Homo sapien
caagagtcttctctgtccactagac

SEQ ID NO: 2898346 - DNA, 25 bp, Homo sapien
ctggccaagagtcttctctgtccac

SEQ ID NO: 2898347 - DNA, 25 bp, Homo sapien
ccatgttctgccaccgagaagccat

SEQ ID NO: 2898348 - DNA, 25 bp, Homo sapien
agggccctgcgcggaggttgaggtt

SEQ ID NO: 2898349 - DNA, 25 bp, Homo sapien
actcttagctgagcgagctgcagcc

SEQ ID NO: 2898350 - DNA, 25 bp, Homo sapien
ctgggacacggcacccaaagcactc

SEQ ID NO: 2898351 - DNA, 25 bp, Homo sapien
gacacggcacccaaagcactcttag

SEQ ID NO: 2898352 - DNA, 25 bp, Homo sapien
cactcttagctgagcgagctgcagc

SEQ ID NO: 2898353 - DNA, 25 bp, Homo sapien
tccaatataaggacgtcttcctgac

SEQ ID NO: 2898354 - DNA, 25 bp, Homo sapien
agcaaatcccctctaactggacctt

SEQ ID NO: 2898355 - DNA, 25 bp, Homo sapien
tctaactggaccttctcggcagctc

SEQ ID NO: 2898356 - DNA, 25 bp, Homo sapien
gacagcagctctcatttgacagcaa

SEQ ID NO: 2898357 - DNA, 25 bp, Homo sapien
gtgccactttggcaggactcctgga

SEQ ID NO: 2898358 - DNA, 25 bp, Homo sapien
gccactttggcaggactcctggatt

SEQ ID NO: 2898359 - DNA, 25 bp, Homo sapien
tggtgccactttggcaggactcctg

SEQ ID NO: 2898360 - DNA, 25 bp, Homo sapien
ttggtgccactttggcaggactcct

SEQ ID NO: 2898361 - DNA, 25 bp, Homo sapien
agttggggatccactgcccttctgt

SEQ ID NO: 2898362 - DNA, 25 bp, Homo sapien
acagagaggcggtgatgctccttct

SEQ ID NO: 2898363 - DNA, 25 bp, Homo sapien
gacagccgggtgctcttctggctca

SEQ ID NO: 2898364 - DNA, 25 bp, Homo sapien
ccttctgtgctcctctcttccgcct

SEQ ID NO: 2898365 - DNA, 25 bp, Homo sapien
gtaatgggtgggcatgtgagcccat

SEQ ID NO: 2898366 - DNA, 25 bp, Homo sapien
tcccgccttgatcgccgtaatgggt

SEQ ID NO: 2898367 - DNA, 25 bp, Homo sapien
agcctcccgccttgatcgccgtaat

SEQ ID NO: 2898368 - DNA, 25 bp, Homo sapien
cttgatcgccgtaatgggtgggcat

SEQ ID NO: 2898369 - DNA, 25 bp, Homo sapien
acccctagggcccagttggtgtctg

SEQ ID NO: 2898370 - DNA, 25 bp, Homo sapien
tctgctaaagcaggacacacattta

SEQ ID NO: 2898371 - DNA, 25 bp, Homo sapien
tacaatatgacgctgctcagggtgc

SEQ ID NO: 2898372 - DNA, 25 bp, Homo sapien
tacatgcactggatatctgctaaag

SEQ ID NO: 2898373 - DNA, 25 bp, Homo sapien
tcttccgccataatggcttcatcta

SEQ ID NO: 2898374 - DNA, 25 bp, Homo sapien
catctagctcttgggacagcttctg

SEQ ID NO: 2898375 - DNA, 25 bp, Homo sapien
tctggagatgctgaattcccgcccc

SEQ ID NO: 2898376 - DNA, 25 bp, Homo sapien
ttcatctagctcttgggacagcttc

SEQ ID NO: 2898377 - DNA, 25 bp, Homo sapien
ccatagcagtcaggttgcttttccc

SEQ ID NO: 2898378 - DNA, 25 bp, Homo sapien
gggcacagacgagccacggagagtt

SEQ ID NO: 2898379 - DNA, 25 bp, Homo sapien
caggaactccatagcagtcaggttg

SEQ ID NO: 2898380 - DNA, 25 bp, Homo sapien
aggcagggcacagacgagccacgga

SEQ ID NO: 2898381 - DNA, 25 bp, Homo sapien
catcatggccattatacaagtggaa

SEQ ID NO: 2898382 - DNA, 25 bp, Homo sapien
tgagctacacaagatcagacccgga

SEQ ID NO: 2898383 - DNA, 25 bp, Homo sapien
gaatatggcccctcaacacatagag

SEQ ID NO: 2898384 - DNA, 25 bp, Homo sapien
gccttagagcccatcatggccatta

SEQ ID NO: 2898385 - DNA, 25 bp, Homo sapien
tcagtcatgaatgagagagacgatg

SEQ ID NO: 2898386 - DNA, 25 bp, Homo sapien
tcatgaatgagagagacgatgtcac

SEQ ID NO: 2898387 - DNA, 25 bp, Homo sapien
gtcatgaatgagagagacgatgtca

SEQ ID NO: 2898388 - DNA, 25 bp, Homo sapien
atgaatgagagagacgatgtcacca

SEQ ID NO: 2898389 - DNA, 25 bp, Homo sapien
cttcaagcggcaagtaggtactacc

SEQ ID NO: 2898390 - DNA, 25 bp, Homo sapien
cactgtgctcaaggtaggagaagta

SEQ ID NO: 2898391 - DNA, 25 bp, Homo sapien
ttaacttgctcatgcatgagatgga

SEQ ID NO: 2898392 - DNA, 25 bp, Homo sapien
tcagtgaggttagcagctctggctt

SEQ ID NO: 2898393 - DNA, 25 bp, Homo sapien
tcacggggaagcatagacatccttg

SEQ ID NO: 2898394 - DNA, 25 bp, Homo sapien
ccttgagtatgaagccttggcggtc

SEQ ID NO: 2898395 - DNA, 25 bp, Homo sapien
tagacatccttgagtatgaagcctt

SEQ ID NO: 2898396 - DNA, 25 bp, Homo sapien
agtatgaagccttggcggtcagaca

SEQ ID NO: 2898397 - DNA, 25 bp, Homo sapien
gacactctcaggctatggcaggcag

SEQ ID NO: 2898398 - DNA, 25 bp, Homo sapien
tcaagagtcccctaggaaagcagaa

SEQ ID NO: 2898399 - DNA, 25 bp, Homo sapien
gttatctaggaaagtcacacgctgg

SEQ ID NO: 2898400 - DNA, 25 bp, Homo sapien
tataaataggtacccgtgagcccag

SEQ ID NO: 2898401 - DNA, 25 bp, Homo sapien
caagacaaaaacagcattatggagt

SEQ ID NO: 2898402 - DNA, 25 bp, Homo sapien
tctgaactaagttgagaaacctttc

SEQ ID NO: 2898403 - DNA, 25 bp, Homo sapien
tagctctcaaatgttgtcacttaaa

SEQ ID NO: 2898404 - DNA, 25 bp, Homo sapien
tacaactgggtcttgattttgatgt

SEQ ID NO: 2898405 - DNA, 25 bp, Homo sapien
ctgccttgtacaaaatccgttagaa

SEQ ID NO: 2898406 - DNA, 25 bp, Homo sapien
tgtacaaaatccgttagaaacgcta

SEQ ID NO: 2898407 - DNA, 25 bp, Homo sapien
ccgttagaaacgctaatgtaagata

SEQ ID NO: 2898408 - DNA, 25 bp, Homo sapien
gaaacgctaatgtaagatatcagat

SEQ ID NO: 2898409 - DNA, 25 bp, Homo sapien
gatgaacggccctcttgtctgggtg

SEQ ID NO: 2898410 - DNA, 25 bp, Homo sapien
cgaggctggatctcacggtttttaa

SEQ ID NO: 2898411 - DNA, 25 bp, Homo sapien
tctagaagaggcgaggctggatctc

SEQ ID NO: 2898412 - DNA, 25 bp, Homo sapien
tgtttgaatcccagtattccagaga

SEQ ID NO: 2898413 - DNA, 25 bp, Homo sapien
ctgatttaaacttgggcagacttag

SEQ ID NO: 2898414 - DNA, 25 bp, Homo sapien
gcctcagcctcctctatggtcctgt

SEQ ID NO: 2898415 - DNA, 25 bp, Homo sapien
ttgggcagacttagtctgattcttg

SEQ ID NO: 2898416 - DNA, 25 bp, Homo sapien
gggtactttgctcccagttacattc

SEQ ID NO: 2898417 - DNA, 25 bp, Homo sapien
tgtctgtccagcagtgtccgaccag

SEQ ID NO: 2898418 - DNA, 25 bp, Homo sapien
gaagcgtttgggcaaagtcgaccac

SEQ ID NO: 2898419 - DNA, 25 bp, Homo sapien
ccaagttcgagtcggtgccctgagg

SEQ ID NO: 2898420 - DNA, 25 bp, Homo sapien
gaccgcaagcccaagtcagggttca

SEQ ID NO: 2898421 - DNA, 25 bp, Homo sapien
catacttcactaccatgtgacccaa

SEQ ID NO: 2898422 - DNA, 25 bp, Homo sapien
gaatgtatgatgatacaatcatttt

SEQ ID NO: 2898423 - DNA, 25 bp, Homo sapien
actgggactttcaaactcggctggc

SEQ ID NO: 2898424 - DNA, 25 bp, Homo sapien
tgcagctgcttaagaagcaaatcat

SEQ ID NO: 2898425 - DNA, 25 bp, Homo sapien
aacctgctgttctcgtgtatgtgta

SEQ ID NO: 2898426 - DNA, 25 bp, Homo sapien
tcagccgccaggagttagaccctga

SEQ ID NO: 2898427 - DNA, 25 bp, Homo sapien
gatgcttgtgcttgtagaacctgct

SEQ ID NO: 2898428 - DNA, 25 bp, Homo sapien
cacattctgcgtttggaccccaggg

SEQ ID NO: 2898429 - DNA, 25 bp, Homo sapien
tactgtaccgtgatcctgggaggga

SEQ ID NO: 2898430 - DNA, 25 bp, Homo sapien
cacagccaggtctattggactcgaa

SEQ ID NO: 2898431 - DNA, 25 bp, Homo sapien
actccttaaaatggcctgtggcagg

SEQ ID NO: 2898432 - DNA, 25 bp, Homo sapien
actgggacgccttgagcacaggtca

SEQ ID NO: 2898433 - DNA, 25 bp, Homo sapien
gagacccagattccttctcgggaag

SEQ ID NO: 2898434 - DNA, 25 bp, Homo sapien
ctgggacgcaaagcctcagctgcgg

SEQ ID NO: 2898435 - DNA, 25 bp, Homo sapien
ggagcgggcattagtcattcgttca

SEQ ID NO: 2898436 - DNA, 25 bp, Homo sapien
cgacgttcattcactagcatctgct

SEQ ID NO: 2898437 - DNA, 25 bp, Homo sapien
tctcaattcgtagcctgaggctcag

SEQ ID NO: 2898438 - DNA, 25 bp, Homo sapien
taacctgtccagtgccgtcatctgg

SEQ ID NO: 2898439 - DNA, 25 bp, Homo sapien
gaggctcagtgaaggaaacatgcag

SEQ ID NO: 2898440 - DNA, 25 bp, Homo sapien
cggaatgtgcgtaagaatcaggcca

SEQ ID NO: 2898441 - DNA, 25 bp, Homo sapien
gaggccatttgtgtcacactggaga

SEQ ID NO: 2898442 - DNA, 25 bp, Homo sapien
tcagaattcttagaggctgctacat

SEQ ID NO: 2898443 - DNA, 25 bp, Homo sapien
cgcctggccttgtacatacctttag

SEQ ID NO: 2898444 - DNA, 25 bp, Homo sapien
tatgtgcgaagattatgcagaagct

SEQ ID NO: 2898445 - DNA, 25 bp, Homo sapien
cattgaggatgaagtccatcctgtg

SEQ ID NO: 2898446 - DNA, 25 bp, Homo sapien
gaggatgaagtccatcctgtgtatg

SEQ ID NO: 2898447 - DNA, 25 bp, Homo sapien
aaacacattgaggatgaagtccatc

SEQ ID NO: 2898448 - DNA, 25 bp, Homo sapien
tgaagtccatcctgtgtatgtttta

SEQ ID NO: 2898449 - DNA, 25 bp, Homo sapien
ccgtcggccggtcaggcagctgtta

SEQ ID NO: 2898450 - DNA, 25 bp, Homo sapien
tacttgggagatacgaagcttgcgc

SEQ ID NO: 2898451 - DNA, 25 bp, Homo sapien
gaataaggcctgtagatagataggc

SEQ ID NO: 2898452 - DNA, 25 bp, Homo sapien
gataggcctgtagaatagatactag

SEQ ID NO: 2898453 - DNA, 25 bp, Homo sapien
aataaggactcttagacagctgtct

SEQ ID NO: 2898454 - DNA, 25 bp, Homo sapien
aagccagttgggattgccttgctca

SEQ ID NO: 2898455 - DNA, 25 bp, Homo sapien
tttatgttcccaagaagtatctgtc

SEQ ID NO: 2898456 - DNA, 25 bp, Homo sapien
cacctgtgccaacgtcaagccagtt

SEQ ID NO: 2898457 - DNA, 25 bp, Homo sapien
tgcagatgccaagggtcccacaagg

SEQ ID NO: 2898458 - DNA, 25 bp, Homo sapien
ctctggggatgacggctcaggcata

SEQ ID NO: 2898459 - DNA, 25 bp, Homo sapien
gaggcagacagactacaggagtgtc

SEQ ID NO: 2898460 - DNA, 25 bp, Homo sapien
ggctgctagaggttccatggccgtg

SEQ ID NO: 2898461 - DNA, 25 bp, Homo sapien
tttggcgtcaagttctgaaatggcc

SEQ ID NO: 2898462 - DNA, 25 bp, Homo sapien
caggctgggagggtgcctcctgcga

SEQ ID NO: 2898463 - DNA, 25 bp, Homo sapien
ggtgcctcctgcgagtgtgcctggg

SEQ ID NO: 2898464 - DNA, 25 bp, Homo sapien
gagagccttaggcttctgtggacag

SEQ ID NO: 2898465 - DNA, 25 bp, Homo sapien
agctccatcccgtgcctgcaggaga

SEQ ID NO: 2898466 - DNA, 25 bp, Homo sapien
ggaaggaagtagagtcgagctccat

SEQ ID NO: 2898467 - DNA, 25 bp, Homo sapien
gctgaaggtgcaggctatgagggcc

SEQ ID NO: 2898468 - DNA, 25 bp, Homo sapien
tatgagggccgcctcgggatgtggg

SEQ ID NO: 2898469 - DNA, 25 bp, Homo sapien
taaagactacgggagcctctgacga

SEQ ID NO: 2898470 - DNA, 25 bp, Homo sapien
ctactggaggagtgcacgtccggtc

SEQ ID NO: 2898471 - DNA, 25 bp, Homo sapien
tgacgaccacaatccatccgcatgg

SEQ ID NO: 2898472 - DNA, 25 bp, Homo sapien
gacctcatggacactggctgcaaaa

SEQ ID NO: 2898473 - DNA, 25 bp, Homo sapien
cacggcccggtggaactcctcgaag

SEQ ID NO: 2898474 - DNA, 25 bp, Homo sapien
tccacggcccggtggaactcctcga

SEQ ID NO: 2898475 - DNA, 25 bp, Homo sapien
cattgtgctgttccacggcccggtg

SEQ ID NO: 2898476 - DNA, 25 bp, Homo sapien
tgtgctgttccacggcccggtggaa

SEQ ID NO: 2898477 - DNA, 25 bp, Homo sapien
gtaaagtaggcgaaaatggtcttgc

SEQ ID NO: 2898478 - DNA, 25 bp, Homo sapien
cgtaaagtaggcgaaaatggtcttg

SEQ ID NO: 2898479 - DNA, 25 bp, Homo sapien
taaggtggtaaaaggaagagcgctc

SEQ ID NO: 2898480 - DNA, 25 bp, Homo sapien
agattccaagatcatccgggtaagg

SEQ ID NO: 2898481 - DNA, 25 bp, Homo sapien
gctccgcggatgtctggaaccaaga

SEQ ID NO: 2898482 - DNA, 25 bp, Homo sapien
cctgtaagacactaatggtactggg

SEQ ID NO: 2898483 - DNA, 25 bp, Homo sapien
accgcgcccgtaacaatggaaagca

SEQ ID NO: 2898484 - DNA, 25 bp, Homo sapien
acaagtcaggtgttcccttctggtc

SEQ ID NO: 2898485 - DNA, 25 bp, Homo sapien
aactgaagaggtcaacacaagtcag

SEQ ID NO: 2898486 - DNA, 25 bp, Homo sapien
tggtcttagagccacgttaagggta

SEQ ID NO: 2898487 - DNA, 25 bp, Homo sapien
tcttggtaagcactcagactttaac

SEQ ID NO: 2898488 - DNA, 25 bp, Homo sapien
atcgcacgtcaactctacaatcagg

SEQ ID NO: 2898489 - DNA, 25 bp, Homo sapien
gttgagataaaataatcgcacgtca

SEQ ID NO: 2898490 - DNA, 25 bp, Homo sapien
caggcacgtataaactgtgttcttt

SEQ ID NO: 2898491 - DNA, 25 bp, Homo sapien
tgcttcagcccctctcgtacgactg

SEQ ID NO: 2898492 - DNA, 25 bp, Homo sapien
tctcctacttggcagtagatgaaca

SEQ ID NO: 2898493 - DNA, 25 bp, Homo sapien
tcctacttggcagtagatgaacaca

SEQ ID NO: 2898494 - DNA, 25 bp, Homo sapien
agcccctctcgtacgactggttcag

SEQ ID NO: 2898495 - DNA, 25 bp, Homo sapien
caaactgggtaagtaagtccctgag

SEQ ID NO: 2898496 - DNA, 25 bp, Homo sapien
tgggcttacaccagaccaaattcgt

SEQ ID NO: 2898497 - DNA, 25 bp, Homo sapien
tacccttacttaattcaggtgggca

SEQ ID NO: 2898498 - DNA, 25 bp, Homo sapien
gcaatttgtgcacgtctgcgaggta

SEQ ID NO: 2898499 - DNA, 25 bp, Homo sapien
gtagtgtaggcactgctgttacttt

SEQ ID NO: 2898500 - DNA, 25 bp, Homo sapien
taggaatggactttcagcagcactc

SEQ ID NO: 2898501 - DNA, 25 bp, Homo sapien
ggaagctccacagactaaaacagga

SEQ ID NO: 2898502 - DNA, 25 bp, Homo sapien
caactctttaatttaggatcccagg

SEQ ID NO: 2898503 - DNA, 25 bp, Homo sapien
tacaggcccagcatatttaaagata

SEQ ID NO: 2898504 - DNA, 25 bp, Homo sapien
tcagagaacaacatttccaccaggt

SEQ ID NO: 2898505 - DNA, 25 bp, Homo sapien
ttcagagaacaacatttccaccagg

SEQ ID NO: 2898506 - DNA, 25 bp, Homo sapien
gacatcaagacatgattgccatcct

SEQ ID NO: 2898507 - DNA, 25 bp, Homo sapien
gcaagtatacagtttattgatacta

SEQ ID NO: 2898508 - DNA, 25 bp, Homo sapien
tgatactagaacaaatcaggacatc

SEQ ID NO: 2898509 - DNA, 25 bp, Homo sapien
tcaggacatcaagacatgattgcca

SEQ ID NO: 2898510 - DNA, 25 bp, Homo sapien
taacatcatttattgctaacatgaa

SEQ ID NO: 2898511 - DNA, 25 bp, Homo sapien
ttaacatcatttattgctaacatga

SEQ ID NO: 2898512 - DNA, 25 bp, Homo sapien
ggttatagagtctttccggccgctc

SEQ ID NO: 2898513 - DNA, 25 bp, Homo sapien
aaacaaactgcttctagtgctcagg

SEQ ID NO: 2898514 - DNA, 25 bp, Homo sapien
taagcagaggctagattagaggtca

SEQ ID NO: 2898515 - DNA, 25 bp, Homo sapien
caggcaaactaaaggttcatgggca

SEQ ID NO: 2898516 - DNA, 25 bp, Homo sapien
gaaaaactggatacaaacgaggcac

SEQ ID NO: 2898517 - DNA, 25 bp, Homo sapien
ttggcagcactattcccggaagcgg

SEQ ID NO: 2898518 - DNA, 25 bp, Homo sapien
catatagtagggcaagaccatctcc

SEQ ID NO: 2898519 - DNA, 25 bp, Homo sapien
ggtgggccaccaagtatactgaatt

SEQ ID NO: 2898520 - DNA, 25 bp, Homo sapien
gaaaaaaccctatgctaccagagtg

SEQ ID NO: 2898521 - DNA, 25 bp, Homo sapien
cactgacctttgatgactaatcggg

SEQ ID NO: 2898522 - DNA, 25 bp, Homo sapien
gtttacacatgttagagctgctcca

SEQ ID NO: 2898523 - DNA, 25 bp, Homo sapien
caatatgaacacttccgaaaggagc

SEQ ID NO: 2898524 - DNA, 25 bp, Homo sapien
tgtagtgcaggatccagtctaggcc

SEQ ID NO: 2898525 - DNA, 25 bp, Homo sapien
tatttgtcccactactggtgacgta

SEQ ID NO: 2898526 - DNA, 25 bp, Homo sapien
tctgctggtgtgctgtatgtagtgc

SEQ ID NO: 2898527 - DNA, 25 bp, Homo sapien
tgttcacccacgtattccaaatgtg

SEQ ID NO: 2898528 - DNA, 25 bp, Homo sapien
gtgcttcttatatgcatgcgctgca

SEQ ID NO: 2898529 - DNA, 25 bp, Homo sapien
ctggtgcttcttatatgcatgcgct

SEQ ID NO: 2898530 - DNA, 25 bp, Homo sapien
gcttcttatatgcatgcgctgcatg

SEQ ID NO: 2898531 - DNA, 25 bp, Homo sapien
ggtgcttcttatatgcatgcgctgc

SEQ ID NO: 2898532 - DNA, 25 bp, Homo sapien
aactacggtactgccatagccggga

SEQ ID NO: 2898533 - DNA, 25 bp, Homo sapien
ttcgaaggctaaaacactggactcc

SEQ ID NO: 2898534 - DNA, 25 bp, Homo sapien
ggagcgccacaacacgatgacgtgg

SEQ ID NO: 2898535 - DNA, 25 bp, Homo sapien
gatgacgtggaagcaccatggtcct

SEQ ID NO: 2898536 - DNA, 25 bp, Homo sapien
tccgtgcgctgcgaggaggattcca

SEQ ID NO: 2898537 - DNA, 25 bp, Homo sapien
actgcttggcccctcgggctgaggc

SEQ ID NO: 2898538 - DNA, 25 bp, Homo sapien
tccacgcggtgggacgaggtctcca

SEQ ID NO: 2898539 - DNA, 25 bp, Homo sapien
acgtctctgtgtagcgggtggtccc

SEQ ID NO: 2898540 - DNA, 25 bp, Homo sapien
ggctctccgcgcagtgcagagacgt

SEQ ID NO: 2898541 - DNA, 25 bp, Homo sapien
tccgcgcagtgcagagacgtctcca

SEQ ID NO: 2898542 - DNA, 25 bp, Homo sapien
ctcatcgggccgttttttcgttctg

SEQ ID NO: 2898543 - DNA, 25 bp, Homo sapien
ggaagcagcatctcatcgggccgtt

SEQ ID NO: 2898544 - DNA, 25 bp, Homo sapien
tttgtttccatgaaaccgaaaatga

SEQ ID NO: 2898545 - DNA, 25 bp, Homo sapien
gtttccatgaaaccgaaaatgattg

SEQ ID NO: 2898546 - DNA, 25 bp, Homo sapien
ttccatgaaaccgaaaatgattggt

SEQ ID NO: 2898547 - DNA, 25 bp, Homo sapien
catgaaaccgaaaatgattggtcca

SEQ ID NO: 2898548 - DNA, 25 bp, Homo sapien
caaaagtaggctggtccaagacgca

SEQ ID NO: 2898549 - DNA, 25 bp, Homo sapien
aacccgatttagacagcatcctggg

SEQ ID NO: 2898550 - DNA, 25 bp, Homo sapien
ccaagacgcaggacggtcagtaaac

SEQ ID NO: 2898551 - DNA, 25 bp, Homo sapien
gtgaaaatagttcactgggtcaaaa

SEQ ID NO: 2898552 - DNA, 25 bp, Homo sapien
agtggaggaacatctagtgcctggc

SEQ ID NO: 2898553 - DNA, 25 bp, Homo sapien
gcacagagccggttctcaataaata

SEQ ID NO: 2898554 - DNA, 25 bp, Homo sapien
aatttatgagtctgttccttgtccc

SEQ ID NO: 2898555 - DNA, 25 bp, Homo sapien
ccttgtccctcgagtttttagcagg

SEQ ID NO: 2898556 - DNA, 25 bp, Homo sapien
tttactgctatagcccaagttccca

SEQ ID NO: 2898557 - DNA, 25 bp, Homo sapien
cactagagctgggactttgcctttt

SEQ ID NO: 2898558 - DNA, 25 bp, Homo sapien
ccttcatagtgctaatcacaataga

SEQ ID NO: 2898559 - DNA, 25 bp, Homo sapien
caccagagtgtaagctccactagag

SEQ ID NO: 2898560 - DNA, 25 bp, Homo sapien
ctgacacacagaatccttgggagaa

SEQ ID NO: 2898561 - DNA, 25 bp, Homo sapien
gggcccagagagcctcatccaatgt

SEQ ID NO: 2898562 - DNA, 25 bp, Homo sapien
gggtagccccaagcctgtccttgta

SEQ ID NO: 2898563 - DNA, 25 bp, Homo sapien
atgcctccctgggcaagaccaacgt

SEQ ID NO: 2898564 - DNA, 25 bp, Homo sapien
tgagcagactcagatccaggagttc

SEQ ID NO: 2898565 - DNA, 25 bp, Homo sapien
gccaggctgccaaagctcactctgc

SEQ ID NO: 2898566 - DNA, 25 bp, Homo sapien
gaaggacacctatgcctccctgggc

SEQ ID NO: 2898567 - DNA, 25 bp, Homo sapien
gtagtcctggccagaggtatctggg

SEQ ID NO: 2898568 - DNA, 25 bp, Homo sapien
atggcttcattgacaaggaggacct

SEQ ID NO: 2898569 - DNA, 25 bp, Homo sapien
ggagttcaaggaggcattcacactc

SEQ ID NO: 2898570 - DNA, 25 bp, Homo sapien
actcatggatcagaaccgagatggc

SEQ ID NO: 2898571 - DNA, 25 bp, Homo sapien
catctaaaggcaagcgcggacatgc

SEQ ID NO: 2898572 - DNA, 25 bp, Homo sapien
gagacccagtcagccgtggcatttg

SEQ ID NO: 2898573 - DNA, 25 bp, Homo sapien
gaggaaggtacatttaggccaccga

SEQ ID NO: 2898574 - DNA, 25 bp, Homo sapien
tctgttaggcaggtggcgattcgct

SEQ ID NO: 2898575 - DNA, 25 bp, Homo sapien
cgatctgggagagagctagagcagt

SEQ ID NO: 2898576 - DNA, 25 bp, Homo sapien
gacatccggatttggcgatctggga

SEQ ID NO: 2898577 - DNA, 25 bp, Homo sapien
cgttccctgagacagacatccggat

SEQ ID NO: 2898578 - DNA, 25 bp, Homo sapien
tcatccgggcatgttgctttgacgt

SEQ ID NO: 2898579 - DNA, 25 bp, Homo sapien
gtacttccaccttgagttctgtctc

SEQ ID NO: 2898580 - DNA, 25 bp, Homo sapien
atcagcggccccaggtactccggta

SEQ ID NO: 2898581 - DNA, 25 bp, Homo sapien
ccggtacttccaccttgagttctgt

SEQ ID NO: 2898582 - DNA, 25 bp, Homo sapien
caggtactccggtacttccaccttg

SEQ ID NO: 2898583 - DNA, 25 bp, Homo sapien
agctgcagaacctgaaggaagtgac

SEQ ID NO: 2898584 - DNA, 25 bp, Homo sapien
ctacacggagatccagctgcagaac

SEQ ID NO: 2898585 - DNA, 25 bp, Homo sapien
acacggagatccagctgcagaacct

SEQ ID NO: 2898586 - DNA, 25 bp, Homo sapien
ccagctgcagaacctgaaggaagtg

SEQ ID NO: 2898587 - DNA, 25 bp, Homo sapien
cacccagcggtaacaagggaacctg

SEQ ID NO: 2898588 - DNA, 25 bp, Homo sapien
cagtgacttttggtgagcgcctctt

SEQ ID NO: 2898589 - DNA, 25 bp, Homo sapien
gagggcttggccagtgacttttggt

SEQ ID NO: 2898590 - DNA, 25 bp, Homo sapien
gcttggccagtgacttttggtgagc

SEQ ID NO: 2898591 - DNA, 25 bp, Homo sapien
tggccagtgacttttggtgagcgcc

SEQ ID NO: 2898592 - DNA, 25 bp, Homo sapien
aacaggcctcgagggtcgtcgccca

SEQ ID NO: 2898593 - DNA, 25 bp, Homo sapien
tctggaacaggcctcgagggtcgtc

SEQ ID NO: 2898594 - DNA, 25 bp, Homo sapien
tttctggaacaggcctcgagggtcg

SEQ ID NO: 2898595 - DNA, 25 bp, Homo sapien
ctcgagggtcgtcgcccacagtacg

SEQ ID NO: 2898596 - DNA, 25 bp, Homo sapien
ggtcacatagttttgccccagccac

SEQ ID NO: 2898597 - DNA, 25 bp, Homo sapien
tttggccagcgaaaccttaaagtca

SEQ ID NO: 2898598 - DNA, 25 bp, Homo sapien
ttccagaaattgctcatccacaggg

SEQ ID NO: 2898599 - DNA, 25 bp, Homo sapien
acattcagaattaacccatccttca

SEQ ID NO: 2898600 - DNA, 25 bp, Homo sapien
catgcccagcgtcagaacatttagt

SEQ ID NO: 2898601 - DNA, 25 bp, Homo sapien
cagcgtcagaacatttagtttttga

SEQ ID NO: 2898602 - DNA, 25 bp, Homo sapien
tagtttttgatagtgaggtcggcca

SEQ ID NO: 2898603 - DNA, 25 bp, Homo sapien
tttagtttttgatagtgaggtcggc

SEQ ID NO: 2898604 - DNA, 25 bp, Homo sapien
agcagaaaatctggttgaagtcatt

SEQ ID NO: 2898605 - DNA, 25 bp, Homo sapien
gccacagcagaaaatctggttgaag

SEQ ID NO: 2898606 - DNA, 25 bp, Homo sapien
cagaaaatctggttgaagtcattca

SEQ ID NO: 2898607 - DNA, 25 bp, Homo sapien
ctggccacagcagaaaatctggttg

SEQ ID NO: 2898608 - DNA, 25 bp, Homo sapien
gggtaagcgtcctgggagacatatt

SEQ ID NO: 2898609 - DNA, 25 bp, Homo sapien
tgggatctgggggtaagcgtcctgg

SEQ ID NO: 2898610 - DNA, 25 bp, Homo sapien
taagcgtcctgggagacatattggg

SEQ ID NO: 2898611 - DNA, 25 bp, Homo sapien
ccaccagagggacccaagtctctgg

SEQ ID NO: 2898612 - DNA, 25 bp, Homo sapien
tccatgcctggagggaacactaggc

SEQ ID NO: 2898613 - DNA, 25 bp, Homo sapien
agcaccacggggttggcgccattaa

SEQ ID NO: 2898614 - DNA, 25 bp, Homo sapien
caccacggggttggcgccattaaga

SEQ ID NO: 2898615 - DNA, 25 bp, Homo sapien
cctggagggaacactaggcgagcag

SEQ ID NO: 2898616 - DNA, 25 bp, Homo sapien
agtcagcttcgaacaatgtgcctcc

SEQ ID NO: 2898617 - DNA, 25 bp, Homo sapien
gaagtcagcttcgaacaatgtgcct

SEQ ID NO: 2898618 - DNA, 25 bp, Homo sapien
ggagaagtcagcttcgaacaatgtg

SEQ ID NO: 2898619 - DNA, 25 bp, Homo sapien
gttggccttgatcccatccagcagg

SEQ ID NO: 2898620 - DNA, 25 bp, Homo sapien
ggtgctgctggctacagagactgac

SEQ ID NO: 2898621 - DNA, 25 bp, Homo sapien
ccaggtgctgctggctacagagact

SEQ ID NO: 2898622 - DNA, 25 bp, Homo sapien
cagccaggtgctgctggctacagag

SEQ ID NO: 2898623 - DNA, 25 bp, Homo sapien
aggtgctgctggctacagagactga

SEQ ID NO: 2898624 - DNA, 25 bp, Homo sapien
gatgaccatgggcaagagtttccca

SEQ ID NO: 2898625 - DNA, 25 bp, Homo sapien
atcgacggcaggcacctcatggtgg

SEQ ID NO: 2898626 - DNA, 25 bp, Homo sapien
atgtatcgacggcaggcacctcatg

SEQ ID NO: 2898627 - DNA, 25 bp, Homo sapien
cttgaagataggatgtatcgacggc

SEQ ID NO: 2898628 - DNA, 25 bp, Homo sapien
taggatgtatcgacggcaggcacct

SEQ ID NO: 2898629 - DNA, 25 bp, Homo sapien
aaagtcactgcatccgtctctggga

SEQ ID NO: 2898630 - DNA, 25 bp, Homo sapien
gctacgataattactccatgaatgg

SEQ ID NO: 2898631 - DNA, 25 bp, Homo sapien
agatgctattagtctctccttgaga

SEQ ID NO: 2898632 - DNA, 25 bp, Homo sapien
gaatggagtcgcagtcctgtctgaa

SEQ ID NO: 2898633 - DNA, 25 bp, Homo sapien
tatcacacagagagtgctgcgatgc

SEQ ID NO: 2898634 - DNA, 25 bp, Homo sapien
gtaactagacacctggaagtactcc

SEQ ID NO: 2898635 - DNA, 25 bp, Homo sapien
tgcgatgcctaggaggaccaggtac

SEQ ID NO: 2898636 - DNA, 25 bp, Homo sapien
caaagacaaggatccagcctgtgga

SEQ ID NO: 2898637 - DNA, 25 bp, Homo sapien
ctttggcagttggcgcaggttttgc

SEQ ID NO: 2898638 - DNA, 25 bp, Homo sapien
ggctttggcagttggcgcaggtttt

SEQ ID NO: 2898639 - DNA, 25 bp, Homo sapien
gctttggcagttggcgcaggttttg

SEQ ID NO: 2898640 - DNA, 25 bp, Homo sapien
gaggctttggcagttggcgcaggtt

SEQ ID NO: 2898641 - DNA, 25 bp, Homo sapien
tgctcctcaggccatagtgggactc

SEQ ID NO: 2898642 - DNA, 25 bp, Homo sapien
ccagcatattgaggggcccctggca

SEQ ID NO: 2898643 - DNA, 25 bp, Homo sapien
agagcgggatgctcctcaggccata

SEQ ID NO: 2898644 - DNA, 25 bp, Homo sapien
gcagaaccttgccagagagcgggat

SEQ ID NO: 2898645 - DNA, 25 bp, Homo sapien
gaggagagactgttccttggcaggc

SEQ ID NO: 2898646 - DNA, 25 bp, Homo sapien
aggagagactgttccttggcaggct

SEQ ID NO: 2898647 - DNA, 25 bp, Homo sapien
cacagtttgtgtcgtctcccattgg

SEQ ID NO: 2898648 - DNA, 25 bp, Homo sapien
aagtaacacttcctgcggcaaccac

SEQ ID NO: 2898649 - DNA, 25 bp, Homo sapien
gttcctttgtacgaatataccacag

SEQ ID NO: 2898650 - DNA, 25 bp, Homo sapien
catggatgagttgtgtccgttgaac

SEQ ID NO: 2898651 - DNA, 25 bp, Homo sapien
tccacaccgaaagggaaccgctgtc

SEQ ID NO: 2898652 - DNA, 25 bp, Homo sapien
catccacaccgaaagggaaccgctg

SEQ ID NO: 2898653 - DNA, 25 bp, Homo sapien
cacaccgaaagggaaccgctgtcaa

SEQ ID NO: 2898654 - DNA, 25 bp, Homo sapien
accgaaagggaaccgctgtcaacag

SEQ ID NO: 2898655 - DNA, 25 bp, Homo sapien
tcacacagcctctgaaaagggtttg

SEQ ID NO: 2898656 - DNA, 25 bp, Homo sapien
taaatcctccataccacgggatggg

SEQ ID NO: 2898657 - DNA, 25 bp, Homo sapien
tacatttctcaaccggaagtttgcc

SEQ ID NO: 2898658 - DNA, 25 bp, Homo sapien
ggtgtccctgcttcctgctatcaag

SEQ ID NO: 2898659 - DNA, 25 bp, Homo sapien
gctcttgctctcattaaatgctctg

SEQ ID NO: 2898660 - DNA, 25 bp, Homo sapien
aatgctctgtctcccgcggaaagct

SEQ ID NO: 2898661 - DNA, 25 bp, Homo sapien
tccttgggtgggacgattcctgacc

SEQ ID NO: 2898662 - DNA, 25 bp, Homo sapien
catcaaggaccgagtatgtgtctgg

SEQ ID NO: 2898663 - DNA, 25 bp, Homo sapien
cagcgcttggtgatctctcagcaaa

SEQ ID NO: 2898664 - DNA, 25 bp, Homo sapien
aggctgtgggaatcttcagaacccc

SEQ ID NO: 2898665 - DNA, 25 bp, Homo sapien
ctgcccgtgggccaatctacttgaa

SEQ ID NO: 2898666 - DNA, 25 bp, Homo sapien
tgaagttactcggacaaagacccca

SEQ ID NO: 2898667 - DNA, 25 bp, Homo sapien
aagtatgggcagtgatggcgctctg

SEQ ID NO: 2898668 - DNA, 25 bp, Homo sapien
gccacagtgggctatctaggccctc

SEQ ID NO: 2898669 - DNA, 25 bp, Homo sapien
tcagagtctttcatgccagcgtttg

SEQ ID NO: 2898670 - DNA, 25 bp, Homo sapien
gctatgccacttcagagtctttcat

SEQ ID NO: 2898671 - DNA, 25 bp, Homo sapien
gaagacccgagttcaagatgtggga

SEQ ID NO: 2898672 - DNA, 25 bp, Homo sapien
tcatccattgcaaagacgtaccagc

SEQ ID NO: 2898673 - DNA, 25 bp, Homo sapien
ttctttcttccgagagctgtgctga

SEQ ID NO: 2898674 - DNA, 25 bp, Homo sapien
aaagatccctggtctcgcagtcaga

SEQ ID NO: 2898675 - DNA, 25 bp, Homo sapien
cttctaaatagtggcgcggaggtga

SEQ ID NO: 2898676 - DNA, 25 bp, Homo sapien
cactgtggaggcattctagactagg

SEQ ID NO: 2898677 - DNA, 25 bp, Homo sapien
taagtggtgtgtcaggacaccctgc

SEQ ID NO: 2898678 - DNA, 25 bp, Homo sapien
gacaccctgccttgttaatgttgaa

SEQ ID NO: 2898679 - DNA, 25 bp, Homo sapien
gccaacgcactgagttaagctctga

SEQ ID NO: 2898680 - DNA, 25 bp, Homo sapien
tagagagcaacttgtctgaggcaca

SEQ ID NO: 2898681 - DNA, 25 bp, Homo sapien
gatgagctagggcaagatataagcc

SEQ ID NO: 2898682 - DNA, 25 bp, Homo sapien
ccatgctctggtgaatccctttgga

SEQ ID NO: 2898683 - DNA, 25 bp, Homo sapien
cttgcaaacagcgtccagggaggct

SEQ ID NO: 2898684 - DNA, 25 bp, Homo sapien
gaattctcggctcaggagttcccct

SEQ ID NO: 2898685 - DNA, 25 bp, Homo sapien
actgaaagttttccgatggcccagc

SEQ ID NO: 2898686 - DNA, 25 bp, Homo sapien
gaagcccctttacagcatggccagc

SEQ ID NO: 2898687 - DNA, 25 bp, Homo sapien
cagttcctgcacaccgagaagtctc

SEQ ID NO: 2898688 - DNA, 25 bp, Homo sapien
ttcctgcacaccgagaagtctcctt

SEQ ID NO: 2898689 - DNA, 25 bp, Homo sapien
ctgcacaccgagaagtctccttcca

SEQ ID NO: 2898690 - DNA, 25 bp, Homo sapien
tgcacaccgagaagtctccttccat

SEQ ID NO: 2898691 - DNA, 25 bp, Homo sapien
ctaagtgttcttatgcaggaaccac

SEQ ID NO: 2898692 - DNA, 25 bp, Homo sapien
gaaacagccctatgtcgtctacgtc

SEQ ID NO: 2898693 - DNA, 25 bp, Homo sapien
tcagaaacagccctatgtcgtctac

SEQ ID NO: 2898694 - DNA, 25 bp, Homo sapien
tccagctgcttgtcctcctaagtgt

SEQ ID NO: 2898695 - DNA, 25 bp, Homo sapien
ctcatggagggtgaagttggcagag

SEQ ID NO: 2898696 - DNA, 25 bp, Homo sapien
agttggcagagactacatgtctttt

SEQ ID NO: 2898697 - DNA, 25 bp, Homo sapien
tcatggagggtgaagttggcagaga

SEQ ID NO: 2898698 - DNA, 25 bp, Homo sapien
ggtgaagttggcagagactacatgt

SEQ ID NO: 2898699 - DNA, 25 bp, Homo sapien
ggctcctcacactccggacacagga

SEQ ID NO: 2898700 - DNA, 25 bp, Homo sapien
tcacactccggacacaggaccagga

SEQ ID NO: 2898701 - DNA, 25 bp, Homo sapien
gggacaggctcctcacactccggac

SEQ ID NO: 2898702 - DNA, 25 bp, Homo sapien
tccggacacaggaccaggaaccgca

SEQ ID NO: 2898703 - DNA, 25 bp, Homo sapien
gcagagaggactgaacacttgcctt

SEQ ID NO: 2898704 - DNA, 25 bp, Homo sapien
actcgccttgactctcagaccccat

SEQ ID NO: 2898705 - DNA, 25 bp, Homo sapien
gcagagaggactgaacactcgcctt

SEQ ID NO: 2898706 - DNA, 25 bp, Homo sapien
tgcagggaggactagaccctcgtcc

SEQ ID NO: 2898707 - DNA, 25 bp, Homo sapien
tgtgtggaggggctaaatgacttcc

SEQ ID NO: 2898708 - DNA, 25 bp, Homo sapien
actcagattagcatgaaaaaggcag

SEQ ID NO: 2898709 - DNA, 25 bp, Homo sapien
gaaaactggaggtagactcagatta

SEQ ID NO: 2898710 - DNA, 25 bp, Homo sapien
gaggactggagccattccctgactc

SEQ ID NO: 2898711 - DNA, 25 bp, Homo sapien
gggatccgatgtggctacctcagtg

SEQ ID NO: 2898712 - DNA, 25 bp, Homo sapien
agcaccccgcccagtgttcaagaag

SEQ ID NO: 2898713 - DNA, 25 bp, Homo sapien
tgagcttgagtatctccagagagac

SEQ ID NO: 2898714 - DNA, 25 bp, Homo sapien
ccagtctgagttggcaacggctgcc

SEQ ID NO: 2898715 - DNA, 25 bp, Homo sapien
actccagcgaggacttctgcatgct

SEQ ID NO: 2898716 - DNA, 25 bp, Homo sapien
tctgctgacacatcgtacacccaac

SEQ ID NO: 2898717 - DNA, 25 bp, Homo sapien
ctctgctgacacatcgtacacccaa

SEQ ID NO: 2898718 - DNA, 25 bp, Homo sapien
ctccagcgaggacttctgcatgctc

SEQ ID NO: 2898719 - DNA, 25 bp, Homo sapien
tagggccaatacgagaaagcagatg

SEQ ID NO: 2898720 - DNA, 25 bp, Homo sapien
gatcactggcctctttgactgtagg

SEQ ID NO: 2898721 - DNA, 25 bp, Homo sapien
tcatggaccatggaaaacccttctg

SEQ ID NO: 2898722 - DNA, 25 bp, Homo sapien
gacttgtgcccatctccctagggaa

SEQ ID NO: 2898723 - DNA, 25 bp, Homo sapien
tgttcactgcgacagacatctctgt

SEQ ID NO: 2898724 - DNA, 25 bp, Homo sapien
ttacactcaacagggcgctcctggc

SEQ ID NO: 2898725 - DNA, 25 bp, Homo sapien
tccggctgccacagtaggactcgtg

SEQ ID NO: 2898726 - DNA, 25 bp, Homo sapien
tgcatgatgaactggccacagcctt

SEQ ID NO: 2898727 - DNA, 25 bp, Homo sapien
tggtaccagggagccaatacatagg

SEQ ID NO: 2898728 - DNA, 25 bp, Homo sapien
ttcagactctgtgatcagaccaggt

SEQ ID NO: 2898729 - DNA, 25 bp, Homo sapien
caactagcaaagacaccaaaggatc

SEQ ID NO: 2898730 - DNA, 25 bp, Homo sapien
gtttgattctgttgacgtccagcca

SEQ ID NO: 2898731 - DNA, 25 bp, Homo sapien
cagcagcaaccgtaatggagagaca

SEQ ID NO: 2898732 - DNA, 25 bp, Homo sapien
ggcatccttgaccacacaggcaact

SEQ ID NO: 2898733 - DNA, 25 bp, Homo sapien
ccacagatgtgcactcagggcagca

SEQ ID NO: 2898734 - DNA, 25 bp, Homo sapien
ttggccgaatcacccacatcatttc

SEQ ID NO: 2898735 - DNA, 25 bp, Homo sapien
tgtgctcatgagcacgaactgcccc

SEQ ID NO: 2898736 - DNA, 25 bp, Homo sapien
tgattgtccttgtcaacggctagcc

SEQ ID NO: 2898737 - DNA, 25 bp, Homo sapien
tgtccttgtcaacggctagcccagc

SEQ ID NO: 2898738 - DNA, 25 bp, Homo sapien
cacaactgcatacatggcctgtgct

SEQ ID NO: 2898739 - DNA, 25 bp, Homo sapien
gacagtagatttccctttcaggagc

SEQ ID NO: 2898740 - DNA, 25 bp, Homo sapien
tgcaataatgacagtagatttccct

SEQ ID NO: 2898741 - DNA, 25 bp, Homo sapien
atgacagtagatttccctttcagga

SEQ ID NO: 2898742 - DNA, 25 bp, Homo sapien
tgacagtagatttccctttcaggag

SEQ ID NO: 2898743 - DNA, 25 bp, Homo sapien
tgtgtagtggccaaatcagaattgt

SEQ ID NO: 2898744 - DNA, 25 bp, Homo sapien
ttgggaatcagaactccaaccgtgg

SEQ ID NO: 2898745 - DNA, 25 bp, Homo sapien
caatagattctatagccacccaagc

SEQ ID NO: 2898746 - DNA, 25 bp, Homo sapien
gataggtacctagaaagtgaagcaa

SEQ ID NO: 2898747 - DNA, 25 bp, Homo sapien
ccatcgtggaagtttgattttcagc

SEQ ID NO: 2898748 - DNA, 25 bp, Homo sapien
tgtctttggacgaacatctttctcc

SEQ ID NO: 2898749 - DNA, 25 bp, Homo sapien
actctgagtctggacaacatttacc

SEQ ID NO: 2898750 - DNA, 25 bp, Homo sapien
catctcctcagaatgtcataggctg

SEQ ID NO: 2898751 - DNA, 25 bp, Homo sapien
gatgttgatttaggatcggcagggg

SEQ ID NO: 2898752 - DNA, 25 bp, Homo sapien
atgttgatttaggatcggcagggga

SEQ ID NO: 2898753 - DNA, 25 bp, Homo sapien
tgatgttgatttaggatcggcaggg

SEQ ID NO: 2898754 - DNA, 25 bp, Homo sapien
gacactgtgcggatggttcccagaa

SEQ ID NO: 2898755 - DNA, 25 bp, Homo sapien
gaagcaaaccttgatctgctggagg

SEQ ID NO: 2898756 - DNA, 25 bp, Homo sapien
gctatatacatgtggactcaggctg

SEQ ID NO: 2898757 - DNA, 25 bp, Homo sapien
taaagagctctgtattgtaactggc

SEQ ID NO: 2898758 - DNA, 25 bp, Homo sapien
gatgaagctaaccaccggcatttct

SEQ ID NO: 2898759 - DNA, 25 bp, Homo sapien
cttttgatgaagctaaccaccggca

SEQ ID NO: 2898760 - DNA, 25 bp, Homo sapien
tttgatgaagctaaccaccggcatt

SEQ ID NO: 2898761 - DNA, 25 bp, Homo sapien
ttccttttgatgaagctaaccaccg

SEQ ID NO: 2898762 - DNA, 25 bp, Homo sapien
gaataaaacccatcacctttcacaa

SEQ ID NO: 2898763 - DNA, 25 bp, Homo sapien
tacttctcaagagtaatgctccagc

SEQ ID NO: 2898764 - DNA, 25 bp, Homo sapien
gtatgttccttcgacgcctggtttg

SEQ ID NO: 2898765 - DNA, 25 bp, Homo sapien
gaccaccacagcaagtaggcaggaa

SEQ ID NO: 2898766 - DNA, 25 bp, Homo sapien
ttccatgctccgacctcaggtaggc

SEQ ID NO: 2898767 - DNA, 25 bp, Homo sapien
cgttgctgcacaggacatgatccca

SEQ ID NO: 2898768 - DNA, 25 bp, Homo sapien
gtagtccttgggcaaaccaatgtct

SEQ ID NO: 2898769 - DNA, 25 bp, Homo sapien
ccctgactttgcgattgtgtatagt

SEQ ID NO: 2898770 - DNA, 25 bp, Homo sapien
gcagctgttgctccgacgccaactc

SEQ ID NO: 2898771 - DNA, 25 bp, Homo sapien
gctgttgctccgacgccaactccat

SEQ ID NO: 2898772 - DNA, 25 bp, Homo sapien
ctgctccgcccgcgcagctgttgct

SEQ ID NO: 2898773 - DNA, 25 bp, Homo sapien
gctccgcccgcgcagctgttgctcc

SEQ ID NO: 2898774 - DNA, 25 bp, Homo sapien
ggaaaggaaagcaatcacttgcttt

SEQ ID NO: 2898775 - DNA, 25 bp, Homo sapien
aaaatgaggaaaggaaagcaatcac

SEQ ID NO: 2898776 - DNA, 25 bp, Homo sapien
ccaaaaatgaggaaaggaaagcaat

SEQ ID NO: 2898777 - DNA, 25 bp, Homo sapien
tgaggaaaggaaagcaatcacttgc

SEQ ID NO: 2898778 - DNA, 25 bp, Homo sapien
ccaggaactgggatgtacagtgcag

SEQ ID NO: 2898779 - DNA, 25 bp, Homo sapien
gatgtacagtgcagctgtgtgttag

SEQ ID NO: 2898780 - DNA, 25 bp, Homo sapien
tgggatgtacagtgcagctgtgtgt

SEQ ID NO: 2898781 - DNA, 25 bp, Homo sapien
ggaactgggatgtacagtgcagctg

SEQ ID NO: 2898782 - DNA, 25 bp, Homo sapien
acagacacaaatcgggcagaaaggc

SEQ ID NO: 2898783 - DNA, 25 bp, Homo sapien
agacaagagcagccctggacctgtc

SEQ ID NO: 2898784 - DNA, 25 bp, Homo sapien
gccaccagaaaacacggcacagaca

SEQ ID NO: 2898785 - DNA, 25 bp, Homo sapien
cacggcacagacacaaatcgggcag

SEQ ID NO: 2898786 - DNA, 25 bp, Homo sapien
tcaagcagctcgtcggagatacagt

SEQ ID NO: 2898787 - DNA, 25 bp, Homo sapien
tgcaagaggattcgggccaagcgtt

SEQ ID NO: 2898788 - DNA, 25 bp, Homo sapien
gagtcgagaatttggcagccttgct

SEQ ID NO: 2898789 - DNA, 25 bp, Homo sapien
gacggttgttgctcttactcagaca

SEQ ID NO: 2898790 - DNA, 25 bp, Homo sapien
ttgaatacacgcagggcacactgcc

SEQ ID NO: 2898791 - DNA, 25 bp, Homo sapien
aaactaacatcaaggaaagcccaga

SEQ ID NO: 2898792 - DNA, 25 bp, Homo sapien
gcacactgccgttctttctgactct

SEQ ID NO: 2898793 - DNA, 25 bp, Homo sapien
gaggtgcagctcctcgtcgagtgac

SEQ ID NO: 2898794 - DNA, 25 bp, Homo sapien
aatagctaagctctgattcgatcag

SEQ ID NO: 2898795 - DNA, 25 bp, Homo sapien
cagagtaaacgatgacaaaatagct

SEQ ID NO: 2898796 - DNA, 25 bp, Homo sapien
gatcagctttctgtacttcctgtaa

SEQ ID NO: 2898797 - DNA, 25 bp, Homo sapien
gcagggtcttgtcctcttcattcgt

SEQ ID NO: 2898798 - DNA, 25 bp, Homo sapien
agaggagcaaaagggccggcagtgc

SEQ ID NO: 2898799 - DNA, 25 bp, Homo sapien
ttcaagttcaaagtgctcccagctt

SEQ ID NO: 2898800 - DNA, 25 bp, Homo sapien
gcagtgcccaagtgtagttctaaga

SEQ ID NO: 2898801 - DNA, 25 bp, Homo sapien
caagttcaaagtgctcccagctttc

SEQ ID NO: 2898802 - DNA, 25 bp, Homo sapien
ccgggatagttggtaaacatagcgc

SEQ ID NO: 2898803 - DNA, 25 bp, Homo sapien
taaagccacctggagccttcaggtc

SEQ ID NO: 2898804 - DNA, 25 bp, Homo sapien
aagagaaatgacaccgggatagttg

SEQ ID NO: 2898805 - DNA, 25 bp, Homo sapien
tcaggtcatgggcagtctcagcctt

SEQ ID NO: 2898806 - DNA, 25 bp, Homo sapien
tccaggtgaagtcgggagcatctcc

SEQ ID NO: 2898807 - DNA, 25 bp, Homo sapien
tgggtaatgaggacaaatccctcct

SEQ ID NO: 2898808 - DNA, 25 bp, Homo sapien
cagctgctgatagggtttgtcccca

SEQ ID NO: 2898809 - DNA, 25 bp, Homo sapien
tgatctccagcgttcaaggtgaggc

SEQ ID NO: 2898810 - DNA, 25 bp, Homo sapien
cgtgtcccctgcaacacctctgagt

SEQ ID NO: 2898811 - DNA, 25 bp, Homo sapien
tgaaaacttgcccgaggctttccgc

SEQ ID NO: 2898812 - DNA, 25 bp, Homo sapien
gacagaggacgggcttgaaaacttg

SEQ ID NO: 2898813 - DNA, 25 bp, Homo sapien
cacgcacaccgaagggctggtctca

SEQ ID NO: 2898814 - DNA, 25 bp, Homo sapien
ctctagagctttaagatctttacta

SEQ ID NO: 2898815 - DNA, 25 bp, Homo sapien
attttttacacaagttagtcaatct

SEQ ID NO: 2898816 - DNA, 25 bp, Homo sapien
tctagagctttaagatctttactaa

SEQ ID NO: 2898817 - DNA, 25 bp, Homo sapien
gtttatccactcagcccatgagcca

SEQ ID NO: 2898818 - DNA, 25 bp, Homo sapien
gtggtttatccactcagcccatgag

SEQ ID NO: 2898819 - DNA, 25 bp, Homo sapien
tattacccattttgtggtttatcca

SEQ ID NO: 2898820 - DNA, 25 bp, Homo sapien
attttgtggtttatccactcagccc

SEQ ID NO: 2898821 - DNA, 25 bp, Homo sapien
gcccggagatccggggagaaatcag

SEQ ID NO: 2898822 - DNA, 25 bp, Homo sapien
ctacgcggaccgtgtacttgcccat

SEQ ID NO: 2898823 - DNA, 25 bp, Homo sapien
tagctgcaccaggttgggagagccc

SEQ ID NO: 2898824 - DNA, 25 bp, Homo sapien
gccatagctgcaccaggttgggaga

SEQ ID NO: 2898825 - DNA, 25 bp, Homo sapien
ccaggagcaaatccccggtggctac

SEQ ID NO: 2898826 - DNA, 25 bp, Homo sapien
ctgcgcgacagtacacagctcaggt

SEQ ID NO: 2898827 - DNA, 25 bp, Homo sapien
cgacagtacacagctcaggttttgg

SEQ ID NO: 2898828 - DNA, 25 bp, Homo sapien
gcgacagtacacagctcaggttttg

SEQ ID NO: 2898829 - DNA, 25 bp, Homo sapien
gcgcgacagtacacagctcaggttt

SEQ ID NO: 2898830 - DNA, 25 bp, Homo sapien
tcaggcaggcagataattccgtggc

SEQ ID NO: 2898831 - DNA, 25 bp, Homo sapien
caacagcacgttgtgtttgcgcagc

SEQ ID NO: 2898832 - DNA, 25 bp, Homo sapien
tttgcgcagcttcaccatcaggagg

SEQ ID NO: 2898833 - DNA, 25 bp, Homo sapien
agatccacttgcagaaccagtcgag

SEQ ID NO: 2898834 - DNA, 25 bp, Homo sapien
gttctgggggtcatcactcacggtc

SEQ ID NO: 2898835 - DNA, 25 bp, Homo sapien
ctgggggtcatcactcacggtccgg

SEQ ID NO: 2898836 - DNA, 25 bp, Homo sapien
aggttctgggggtcatcactcacgg

SEQ ID NO: 2898837 - DNA, 25 bp, Homo sapien
cgagctcctgttcccgatatttctt

SEQ ID NO: 2898838 - DNA, 25 bp, Homo sapien
aatcgctcgtccctaggaaggtccg

SEQ ID NO: 2898839 - DNA, 25 bp, Homo sapien
aaagtctaaatccttatcctcgagg

SEQ ID NO: 2898840 - DNA, 25 bp, Homo sapien
tttgctagggagacattaaagtcta

SEQ ID NO: 2898841 - DNA, 25 bp, Homo sapien
gaaggtccggttgcctattccctgc

SEQ ID NO: 2898842 - DNA, 25 bp, Homo sapien
acagtctttccatgtgggaatattt

SEQ ID NO: 2898843 - DNA, 25 bp, Homo sapien
ggacagtctttccatgtgggaatat

SEQ ID NO: 2898844 - DNA, 25 bp, Homo sapien
cacaatttatgaaatccagtgtccc

SEQ ID NO: 2898845 - DNA, 25 bp, Homo sapien
caatttatgaaatccagtgtcccct

SEQ ID NO: 2898846 - DNA, 25 bp, Homo sapien
ttcttccaagaatcataaacccgct

SEQ ID NO: 2898847 - DNA, 25 bp, Homo sapien
aaggcatcattcttccaagaatcat

SEQ ID NO: 2898848 - DNA, 25 bp, Homo sapien
gagcatggggtttgcaccattgaga

SEQ ID NO: 2898849 - DNA, 25 bp, Homo sapien
aacacctcaggagcatggggtttgc

SEQ ID NO: 2898850 - DNA, 25 bp, Homo sapien
gggctgccacgcattgctgcttaaa

SEQ ID NO: 2898851 - DNA, 25 bp, Homo sapien
caggctgaagcttcagcatgaccaa

SEQ ID NO: 2898852 - DNA, 25 bp, Homo sapien
cattaggcttgactccatccagcaa

SEQ ID NO: 2898853 - DNA, 25 bp, Homo sapien
gatgaccatgggtaagagtcctcca

SEQ ID NO: 2898854 - DNA, 25 bp, Homo sapien
ggatgcgagggcagaaagagcagag

SEQ ID NO: 2898855 - DNA, 25 bp, Homo sapien
gggatgcgagggcagaaagagcaga

SEQ ID NO: 2898856 - DNA, 25 bp, Homo sapien
ttgtagccacagcaataacctcagc

SEQ ID NO: 2898857 - DNA, 25 bp, Homo sapien
taggatggaggctaggcaagcttct

SEQ ID NO: 2898858 - DNA, 25 bp, Homo sapien
cagctggaaatcagagctccggacc

SEQ ID NO: 2898859 - DNA, 25 bp, Homo sapien
taggcaagcttctcattgtagccac

SEQ ID NO: 2898860 - DNA, 25 bp, Homo sapien
tctcagcagcacttgagacagataa

SEQ ID NO: 2898861 - DNA, 25 bp, Homo sapien
gatggcgcatgtccatttattaacc

SEQ ID NO: 2898862 - DNA, 25 bp, Homo sapien
cctggctgccatggattgcactttt

SEQ ID NO: 2898863 - DNA, 25 bp, Homo sapien
gacagataatcacgcgtccctcttg

SEQ ID NO: 2898864 - DNA, 25 bp, Homo sapien
gccagcgtgttgatcgccatggtgt

SEQ ID NO: 2898865 - DNA, 25 bp, Homo sapien
ttgatcgccatggtgtagcggaagt

SEQ ID NO: 2898866 - DNA, 25 bp, Homo sapien
cattcggagacaagactactctggg

SEQ ID NO: 2898867 - DNA, 25 bp, Homo sapien
caaaaattccccattcggagacaag

SEQ ID NO: 2898868 - DNA, 25 bp, Homo sapien
ggacagagggaatgataggtcaaac

SEQ ID NO: 2898869 - DNA, 25 bp, Homo sapien
gacagagggaatgataggtcaaaca

SEQ ID NO: 2898870 - DNA, 25 bp, Homo sapien
acagagggaatgataggtcaaacaa

SEQ ID NO: 2898871 - DNA, 25 bp, Homo sapien
gaagatttcacatccaggagcccac

SEQ ID NO: 2898872 - DNA, 25 bp, Homo sapien
aaagaagatttcacatccaggagcc

SEQ ID NO: 2898873 - DNA, 25 bp, Homo sapien
agaagatttcacatccaggagccca

SEQ ID NO: 2898874 - DNA, 25 bp, Homo sapien
aaaaagaagatttcacatccaggag

SEQ ID NO: 2898875 - DNA, 25 bp, Homo sapien
gacactcagtctcaggggccaatgc

SEQ ID NO: 2898876 - DNA, 25 bp, Homo sapien
aagacactcagtctcaggggccaat

SEQ ID NO: 2898877 - DNA, 25 bp, Homo sapien
cagtcccccgcccctccgttcattg

SEQ ID NO: 2898878 - DNA, 25 bp, Homo sapien
cactcagtctcaggggccaatgcag

SEQ ID NO: 2898879 - DNA, 25 bp, Homo sapien
tgcagtccagtctcagtcatctctc

SEQ ID NO: 2898880 - DNA, 25 bp, Homo sapien
tattgtagaaaagcccaaccatccc

SEQ ID NO: 2898881 - DNA, 25 bp, Homo sapien
gcctgcagctctagatcatccttca

SEQ ID NO: 2898882 - DNA, 25 bp, Homo sapien
ccttcatggcttggtcactattgta

SEQ ID NO: 2898883 - DNA, 25 bp, Homo sapien
tctcatgatgatgtgagaagaagca

SEQ ID NO: 2898884 - DNA, 25 bp, Homo sapien
ggtgtctcatgatgatgtgagaaga

SEQ ID NO: 2898885 - DNA, 25 bp, Homo sapien
acagggttcagtggggaaggatcca

SEQ ID NO: 2898886 - DNA, 25 bp, Homo sapien
aggagtgggtgttgacagggttcag

SEQ ID NO: 2898887 - DNA, 25 bp, Homo sapien
gaagcatgctgacctgtgcatgtga

SEQ ID NO: 2898888 - DNA, 25 bp, Homo sapien
gcatgctgacctgtgcatgtgaaga

SEQ ID NO: 2898889 - DNA, 25 bp, Homo sapien
ttagaagcatgctgacctgtgcatg

SEQ ID NO: 2898890 - DNA, 25 bp, Homo sapien
tagaagcatgctgacctgtgcatgt

SEQ ID NO: 2898891 - DNA, 25 bp, Homo sapien
tccatcccaggagccgttgtgggat

SEQ ID NO: 2898892 - DNA, 25 bp, Homo sapien
ccagagaaatgcaggctgatgacct

SEQ ID NO: 2898893 - DNA, 25 bp, Homo sapien
gttgtgggatgatcacataggttac

SEQ ID NO: 2898894 - DNA, 25 bp, Homo sapien
gacctgggcatttgatcccccactt

SEQ ID NO: 2898895 - DNA, 25 bp, Homo sapien
tctgcatggtgcatgggccattagg

SEQ ID NO: 2898896 - DNA, 25 bp, Homo sapien
tgtcacatccttagagatgggcggg

SEQ ID NO: 2898897 - DNA, 25 bp, Homo sapien
gggcagtaagtccactatatccttc

SEQ ID NO: 2898898 - DNA, 25 bp, Homo sapien
tctctgtcacatccttagagatggg

SEQ ID NO: 2898899 - DNA, 25 bp, Homo sapien
cgtctgccaaggaactttgtgaagg

SEQ ID NO: 2898900 - DNA, 25 bp, Homo sapien
tctgccaaggaactttgtgaaggtc

SEQ ID NO: 2898901 - DNA, 25 bp, Homo sapien
tggcgtctgccaaggaactttgtga

SEQ ID NO: 2898902 - DNA, 25 bp, Homo sapien
ttgtgaaggtcttttgcatacgtgc

SEQ ID NO: 2898903 - DNA, 25 bp, Homo sapien
gggctcaggaccagagaaatatttc

SEQ ID NO: 2898904 - DNA, 25 bp, Homo sapien
gcattccggacctcaatctccttgt

SEQ ID NO: 2898905 - DNA, 25 bp, Homo sapien
agggcaggtccaggactgcattccg

SEQ ID NO: 2898906 - DNA, 25 bp, Homo sapien
ggctcaggaccagagaaatatttct

SEQ ID NO: 2898907 - DNA, 25 bp, Homo sapien
tcacgctgttctctaccatgctggg

SEQ ID NO: 2898908 - DNA, 25 bp, Homo sapien
tccccatagttgtgtggtgagcagc

SEQ ID NO: 2898909 - DNA, 25 bp, Homo sapien
gatggacatttaaggtagggcagct

SEQ ID NO: 2898910 - DNA, 25 bp, Homo sapien
ggtgagcagctctggataccctgac

SEQ ID NO: 2898911 - DNA, 25 bp, Homo sapien
tattgctatgaccacaatcctgggc

SEQ ID NO: 2898912 - DNA, 25 bp, Homo sapien
ctgtgcccggtgtgataaattgaga

SEQ ID NO: 2898913 - DNA, 25 bp, Homo sapien
gaagcaatacacagaacaggacggg

SEQ ID NO: 2898914 - DNA, 25 bp, Homo sapien
gttgtgccgcaactgaaaacctcag

SEQ ID NO: 2898915 - DNA, 25 bp, Homo sapien
ccctggaatgggtacctgcatggca

SEQ ID NO: 2898916 - DNA, 25 bp, Homo sapien
caaggatagcctctttggccacata

SEQ ID NO: 2898917 - DNA, 25 bp, Homo sapien
gcatcccagtgacccagagttagtc

SEQ ID NO: 2898918 - DNA, 25 bp, Homo sapien
taaggaaagtggacaaccaggagac

SEQ ID NO: 2898919 - DNA, 25 bp, Homo sapien
ggattccaggacttacatcagcagc

SEQ ID NO: 2898920 - DNA, 25 bp, Homo sapien
cagttcaccaatggcctgttgtggg

SEQ ID NO: 2898921 - DNA, 25 bp, Homo sapien
aaagggcaaacatgtcttctagagc

SEQ ID NO: 2898922 - DNA, 25 bp, Homo sapien
tagacctgaggcctttagacttgga

SEQ ID NO: 2898923 - DNA, 25 bp, Homo sapien
tgagggaccaagacatcaggaagac

SEQ ID NO: 2898924 - DNA, 25 bp, Homo sapien
gcagccagtagaaacatctcccagt

SEQ ID NO: 2898925 - DNA, 25 bp, Homo sapien
agactggtgcactcctagcagatct

SEQ ID NO: 2898926 - DNA, 25 bp, Homo sapien
gatggcctactagatgcagccagta

SEQ ID NO: 2898927 - DNA, 25 bp, Homo sapien
tatttcttggaataactttctacac

SEQ ID NO: 2898928 - DNA, 25 bp, Homo sapien
ggtggtcttatttggatctgaatct

SEQ ID NO: 2898929 - DNA, 25 bp, Homo sapien
tatttggatctgaatctatttggtg

SEQ ID NO: 2898930 - DNA, 25 bp, Homo sapien
tgttcttgacccttgagagtgcgat

SEQ ID NO: 2898931 - DNA, 25 bp, Homo sapien
tttttggctgagagcagatgaactc

SEQ ID NO: 2898932 - DNA, 25 bp, Homo sapien
atatagaattctgagttgatagctc

SEQ ID NO: 2898933 - DNA, 25 bp, Homo sapien
agatggtcagcccattaatcacatc

SEQ ID NO: 2898934 - DNA, 25 bp, Homo sapien
ctcattaggagagggatagtctgtt

SEQ ID NO: 2898935 - DNA, 25 bp, Homo sapien
aagtcatgggctcaaaacattggcc

SEQ ID NO: 2898936 - DNA, 25 bp, Homo sapien
tgggtctttccttgagccactaact

SEQ ID NO: 2898937 - DNA, 25 bp, Homo sapien
tttcccagctcaaatcccagtcaag

SEQ ID NO: 2898938 - DNA, 25 bp, Homo sapien
tttgtcgacgaccaaagtcagtcat

SEQ ID NO: 2898939 - DNA, 25 bp, Homo sapien
tgagtaggtgggattacaggcaccc

SEQ ID NO: 2898940 - DNA, 25 bp, Homo sapien
ttcttgtgcttcagcctccgagtag

SEQ ID NO: 2898941 - DNA, 25 bp, Homo sapien
ctgagtaggtgggattacaggcacc

SEQ ID NO: 2898942 - DNA, 25 bp, Homo sapien
gattcttgtgcttcagcctccgagt

SEQ ID NO: 2898943 - DNA, 25 bp, Homo sapien
tatacatcacatcagtgtacttggg

SEQ ID NO: 2898944 - DNA, 25 bp, Homo sapien
aataagttacatagtttcagggcac

SEQ ID NO: 2898945 - DNA, 25 bp, Homo sapien
tagtcaccctactcatctgttgaac

SEQ ID NO: 2898946 - DNA, 25 bp, Homo sapien
gttgaacactggagcttatttcttc

SEQ ID NO: 2898947 - DNA, 25 bp, Homo sapien
catggtagccgatgttatgggtagc

SEQ ID NO: 2898948 - DNA, 25 bp, Homo sapien
tgtacccactgatgtcgtcatggtg

SEQ ID NO: 2898949 - DNA, 25 bp, Homo sapien
tgctgagtctaggtcatgtacccac

SEQ ID NO: 2898950 - DNA, 25 bp, Homo sapien
catggccacccctaagagaggtgca

SEQ ID NO: 2898951 - DNA, 25 bp, Homo sapien
tgtgattccaataggcagggactgt

SEQ ID NO: 2898952 - DNA, 25 bp, Homo sapien
gattgtgcagtaaggtttccagcca

SEQ ID NO: 2898953 - DNA, 25 bp, Homo sapien
ggactgtcagtcaagtcagtgtgac

SEQ ID NO: 2898954 - DNA, 25 bp, Homo sapien
gccggttcatgctcactggatatca

SEQ ID NO: 2898955 - DNA, 25 bp, Homo sapien
gctgtagttctcagggtgcaatccc

SEQ ID NO: 2898956 - DNA, 25 bp, Homo sapien
tgctaactagcaaacactcccctgt

SEQ ID NO: 2898957 - DNA, 25 bp, Homo sapien
gctggtggtacatggcatcaaaacc

SEQ ID NO: 2898958 - DNA, 25 bp, Homo sapien
tctgtgattccccaatggagcctga

SEQ ID NO: 2898959 - DNA, 25 bp, Homo sapien
ttccgtgtggaagcgcctgatcacc

SEQ ID NO: 2898960 - DNA, 25 bp, Homo sapien
tcatctccgcaaagaaagtccaaag

SEQ ID NO: 2898961 - DNA, 25 bp, Homo sapien
caactcgggactctcggtggacagt

SEQ ID NO: 2898962 - DNA, 25 bp, Homo sapien
taggcatggaggcaaccgcaggttt

SEQ ID NO: 2898963 - DNA, 25 bp, Homo sapien
gctacaacccagtccaagagttaga

SEQ ID NO: 2898964 - DNA, 25 bp, Homo sapien
cggaagtaaccactctccaaacgtg

SEQ ID NO: 2898965 - DNA, 25 bp, Homo sapien
tactcagtgatttgacttacggtgg

SEQ ID NO: 2898966 - DNA, 25 bp, Homo sapien
tcgcctgatctacactaccactgag

SEQ ID NO: 2898967 - DNA, 25 bp, Homo sapien
ccaatacttaatctgtgatcacaca

SEQ ID NO: 2898968 - DNA, 25 bp, Homo sapien
tgatcacacatcaaaattagttgcc

SEQ ID NO: 2898969 - DNA, 25 bp, Homo sapien
cacaattgccccgtcgtgtccttta

SEQ ID NO: 2898970 - DNA, 25 bp, Homo sapien
ctttagcatatatctgctgagaaca

SEQ ID NO: 2898971 - DNA, 25 bp, Homo sapien
aaccctgcgggtagaagttgcaatg

SEQ ID NO: 2898972 - DNA, 25 bp, Homo sapien
gaatgcctatagacgcttcacttag

SEQ ID NO: 2898973 - DNA, 25 bp, Homo sapien
tagttgtaagaacagtaccatgaat

SEQ ID NO: 2898974 - DNA, 25 bp, Homo sapien
gattcaccagttttaacgttggcca

SEQ ID NO: 2898975 - DNA, 25 bp, Homo sapien
ggcccattctccagcgttaccgtat

SEQ ID NO: 2898976 - DNA, 25 bp, Homo sapien
gttaccgtatgtctcacctgtgctg

SEQ ID NO: 2898977 - DNA, 25 bp, Homo sapien
tgctgagcccagtgattcccagtgt

SEQ ID NO: 2898978 - DNA, 25 bp, Homo sapien
tgaagccagacaatgaccgagaggc

SEQ ID NO: 2898979 - DNA, 25 bp, Homo sapien
gggattgtgctttaccaacttgata

SEQ ID NO: 2898980 - DNA, 25 bp, Homo sapien
taatgaaaactcaactaaaaatggc

SEQ ID NO: 2898981 - DNA, 25 bp, Homo sapien
gatagaccctctaaaagcattgtta

SEQ ID NO: 2898982 - DNA, 25 bp, Homo sapien
gcattgttaaagagagctaccagca

SEQ ID NO: 2898983 - DNA, 25 bp, Homo sapien
gaggaactggccttacatctgcatt

SEQ ID NO: 2898984 - DNA, 25 bp, Homo sapien
agatccgatgagattggatgtgttc

SEQ ID NO: 2898985 - DNA, 25 bp, Homo sapien
tgagatccgatgagattggatgtgt

SEQ ID NO: 2898986 - DNA, 25 bp, Homo sapien
gagatccgatgagattggatgtgtt

SEQ ID NO: 2898987 - DNA, 25 bp, Homo sapien
ggtcctgtgcgattcccgggaccgc

SEQ ID NO: 2898988 - DNA, 25 bp, Homo sapien
aaacctgcgagcagagcggtagagc

SEQ ID NO: 2898989 - DNA, 25 bp, Homo sapien
tcgcaagttttaggcgctcccaagt

SEQ ID NO: 2898990 - DNA, 25 bp, Homo sapien
ggctgtgcctcctggtcggagcgta

SEQ ID NO: 2898991 - DNA, 25 bp, Homo sapien
cgcgtcccgaccagccaaagctgca

SEQ ID NO: 2898992 - DNA, 25 bp, Homo sapien
cgaccagccaaagctgcacgcggtt

SEQ ID NO: 2898993 - DNA, 25 bp, Homo sapien
gctgcacgcggttgtacgacccgga

SEQ ID NO: 2898994 - DNA, 25 bp, Homo sapien
ttgtacgacccggagaagagccagg

SEQ ID NO: 2898995 - DNA, 25 bp, Homo sapien
ctgtgcaggccggacccaggccaga

SEQ ID NO: 2898996 - DNA, 25 bp, Homo sapien
tgcacccagcggtagcacgggaagg

SEQ ID NO: 2898997 - DNA, 25 bp, Homo sapien
gtgatgcggtcgcagaaccacgcgt

SEQ ID NO: 2898998 - DNA, 25 bp, Homo sapien
agtcctctgcaacgtcatgatcaaa

SEQ ID NO: 2898999 - DNA, 25 bp, Homo sapien
tgcgcagcctcacgaactgcaggag

SEQ ID NO: 2899000 - DNA, 25 bp, Homo sapien
atgtccaaagcattgtctcctggca

SEQ ID NO: 2899001 - DNA, 25 bp, Homo sapien
cttctctcgatgcttctggaacatg

SEQ ID NO: 2899002 - DNA, 25 bp, Homo sapien
agtagatctgctgtctgtctttcag

SEQ ID NO: 2899003 - DNA, 25 bp, Homo sapien
tttcagttccttctctcgatgcttc

SEQ ID NO: 2899004 - DNA, 25 bp, Homo sapien
tccttacggtctgcagcgatggtca

SEQ ID NO: 2899005 - DNA, 25 bp, Homo sapien
tcttctcctcatggaatctcatatt

SEQ ID NO: 2899006 - DNA, 25 bp, Homo sapien
tttggaggtagatcatccttacggt

SEQ ID NO: 2899007 - DNA, 25 bp, Homo sapien
cagcgatggtcaggggtaacccttc

SEQ ID NO: 2899008 - DNA, 25 bp, Homo sapien
caaagtcttctaggcagttccagga

SEQ ID NO: 2899009 - DNA, 25 bp, Homo sapien
gatcaaagtcttctaggcagttcca

SEQ ID NO: 2899010 - DNA, 25 bp, Homo sapien
gctcaggagggtgtaaacacgtttg

SEQ ID NO: 2899011 - DNA, 25 bp, Homo sapien
ggccccagaagatctgatcaaagtc

SEQ ID NO: 2899012 - DNA, 25 bp, Homo sapien
tcatcatcctgccagcactggcgaa

SEQ ID NO: 2899013 - DNA, 25 bp, Homo sapien
ccattgaggaactggtagctgaaca

SEQ ID NO: 2899014 - DNA, 25 bp, Homo sapien
ctggtagctgaacaactcatcatcc

SEQ ID NO: 2899015 - DNA, 25 bp, Homo sapien
aggtcgagcgtctcaacagcatggg

SEQ ID NO: 2899016 - DNA, 25 bp, Homo sapien
tctccagttgagcctgaagctcttc

SEQ ID NO: 2899017 - DNA, 25 bp, Homo sapien
tgaagctcttccatccccgagggca

SEQ ID NO: 2899018 - DNA, 25 bp, Homo sapien
ctgaagttctttctccagttgagcc

SEQ ID NO: 2899019 - DNA, 25 bp, Homo sapien
ttccatccccgagggcagcactagc

SEQ ID NO: 2899020 - DNA, 25 bp, Homo sapien
cctcggatcacgttggctggaattc

SEQ ID NO: 2899021 - DNA, 25 bp, Homo sapien
catcttcagcataacgaggggggca

SEQ ID NO: 2899022 - DNA, 25 bp, Homo sapien
gggcagccaggtattgcttctctcc

SEQ ID NO: 2899023 - DNA, 25 bp, Homo sapien
tgcttctctcctcggatcacgttgg

SEQ ID NO: 2899024 - DNA, 25 bp, Homo sapien
caggtgagtgttcagcaagtgatac

SEQ ID NO: 2899025 - DNA, 25 bp, Homo sapien
gatctcgtgcagttggaaatctgaa

SEQ ID NO: 2899026 - DNA, 25 bp, Homo sapien
gaaatctgaatttcggacccaggac

SEQ ID NO: 2899027 - DNA, 25 bp, Homo sapien
cagcaagtgatactggatctcgtgc

SEQ ID NO: 2899028 - DNA, 25 bp, Homo sapien
gtggcgacagcgatgacctcagcca

SEQ ID NO: 2899029 - DNA, 25 bp, Homo sapien
tgggaggcaccgcatggtggcgaca

SEQ ID NO: 2899030 - DNA, 25 bp, Homo sapien
atggtggcgacagcgatgacctcag

SEQ ID NO: 2899031 - DNA, 25 bp, Homo sapien
ggaggcaccgcatggtggcgacagc

SEQ ID NO: 2899032 - DNA, 25 bp, Homo sapien
tgttttactagcagtgttcaagccc

SEQ ID NO: 2899033 - DNA, 25 bp, Homo sapien
tctggttggttcttatgggcatcac

SEQ ID NO: 2899034 - DNA, 25 bp, Homo sapien
tctggctaaatactagatctaaggt

SEQ ID NO: 2899035 - DNA, 25 bp, Homo sapien
tactgttataggctgtcccttgtga

SEQ ID NO: 2899036 - DNA, 25 bp, Homo sapien
tccatggtgtagcggatatggggga

SEQ ID NO: 2899037 - DNA, 25 bp, Homo sapien
gatttccatggtgtagcggatatgg

SEQ ID NO: 2899038 - DNA, 25 bp, Homo sapien
atttccatggtgtagcggatatggg

SEQ ID NO: 2899039 - DNA, 25 bp, Homo sapien
ccgggcccgggtgttgatttccatg

SEQ ID NO: 2899040 - DNA, 25 bp, Homo sapien
cagtaggtcagctgagctgccgccc

SEQ ID NO: 2899041 - DNA, 25 bp, Homo sapien
gccccggtcagccaggtcgtcagga

SEQ ID NO: 2899042 - DNA, 25 bp, Homo sapien
ccagagccgtaaagcatcatgggca

SEQ ID NO: 2899043 - DNA, 25 bp, Homo sapien
ccgcccgacggagcaactgtacatg

SEQ ID NO: 2899044 - DNA, 25 bp, Homo sapien
gccccacctccgtgatctcccgaca

SEQ ID NO: 2899045 - DNA, 25 bp, Homo sapien
gaggtggacgatcccctccacatac

SEQ ID NO: 2899046 - DNA, 25 bp, Homo sapien
acctccgtgatctcccgacaccagg

SEQ ID NO: 2899047 - DNA, 25 bp, Homo sapien
aagaggtggacgatcccctccacat

SEQ ID NO: 2899048 - DNA, 25 bp, Homo sapien
taggccagcttaacctatttgaacc

SEQ ID NO: 2899049 - DNA, 25 bp, Homo sapien
aaggctgttgttttgggatgcccat

SEQ ID NO: 2899050 - DNA, 25 bp, Homo sapien
tagacgtatttgcatcagacatgcg

SEQ ID NO: 2899051 - DNA, 25 bp, Homo sapien
cctgtaaaatatggacgatacctac

SEQ ID NO: 2899052 - DNA, 25 bp, Homo sapien
acgtgaagacgcacatggtgaggaa

SEQ ID NO: 2899053 - DNA, 25 bp, Homo sapien
catgctgggcagtgcacgtgaagac

SEQ ID NO: 2899054 - DNA, 25 bp, Homo sapien
cctggttgatggcggcatgctgggc

SEQ ID NO: 2899055 - DNA, 25 bp, Homo sapien
ggcatgctgggcagtgcacgtgaag

SEQ ID NO: 2899056 - DNA, 25 bp, Homo sapien
ggcatccgcattgtgcatggagcat

SEQ ID NO: 2899057 - DNA, 25 bp, Homo sapien
catttgaagacaggcctgccggaca

SEQ ID NO: 2899058 - DNA, 25 bp, Homo sapien
ctgccggacatcaggtagtgacccc

SEQ ID NO: 2899059 - DNA, 25 bp, Homo sapien
catggagcattagggacccaggcat

SEQ ID NO: 2899060 - DNA, 25 bp, Homo sapien
gatggtgacactgttctctatgcag

SEQ ID NO: 2899061 - DNA, 25 bp, Homo sapien
gctcattccgggctgtaatctcctt

SEQ ID NO: 2899062 - DNA, 25 bp, Homo sapien
tattcatagggccagtcaagttgct

SEQ ID NO: 2899063 - DNA, 25 bp, Homo sapien
gaattggtttagcacagctttgggc

SEQ ID NO: 2899064 - DNA, 25 bp, Homo sapien
ttagcagcagagactttaggaaagc

SEQ ID NO: 2899065 - DNA, 25 bp, Homo sapien
ggaggaaatagagccttagcagcag

SEQ ID NO: 2899066 - DNA, 25 bp, Homo sapien
gactatgcggtctgcaaagcgtaaa

SEQ ID NO: 2899067 - DNA, 25 bp, Homo sapien
aaagtttactgctcccctgggctag

SEQ ID NO: 2899068 - DNA, 25 bp, Homo sapien
aaccaaaagaagactactttgtgat

SEQ ID NO: 2899069 - DNA, 25 bp, Homo sapien
gactactttgtgatgtaacattcat

SEQ ID NO: 2899070 - DNA, 25 bp, Homo sapien
agaagactactttgtgatgtaacat

SEQ ID NO: 2899071 - DNA, 25 bp, Homo sapien
aaagaagactactttgtgatgtaac

SEQ ID NO: 2899072 - DNA, 25 bp, Homo sapien
tggccaccaggcatgaaggttagtt

SEQ ID NO: 2899073 - DNA, 25 bp, Homo sapien
ctgggactgtttggagaaagaagcc

SEQ ID NO: 2899074 - DNA, 25 bp, Homo sapien
ggcagtggtttgtattctgccccaa

SEQ ID NO: 2899075 - DNA, 25 bp, Homo sapien
gaattatgtgcctttcatctgggac

SEQ ID NO: 2899076 - DNA, 25 bp, Homo sapien
tctcaggactttcgcgggagacggc

SEQ ID NO: 2899077 - DNA, 25 bp, Homo sapien
gagacggcgccgtctgaaaccaaaa

SEQ ID NO: 2899078 - DNA, 25 bp, Homo sapien
gtctgaaaccaaaactgctcctggg

SEQ ID NO: 2899079 - DNA, 25 bp, Homo sapien
ccttgacctctgtagctagggcgtg

SEQ ID NO: 2899080 - DNA, 25 bp, Homo sapien
atgatcactccccaggcgctgagga

SEQ ID NO: 2899081 - DNA, 25 bp, Homo sapien
actccccaggcgctgaggacgatgc

SEQ ID NO: 2899082 - DNA, 25 bp, Homo sapien
gcaggcggccagcttcggcccacag

SEQ ID NO: 2899083 - DNA, 25 bp, Homo sapien
cccaggcgctgaggacgatgccgca

SEQ ID NO: 2899084 - DNA, 25 bp, Homo sapien
cttgaggggtctccacctttaccag

SEQ ID NO: 2899085 - DNA, 25 bp, Homo sapien
tgcctgcggcccagagtttcctcgc

SEQ ID NO: 2899086 - DNA, 25 bp, Homo sapien
gctggtctcgaacagttcccatttt

SEQ ID NO: 2899087 - DNA, 25 bp, Homo sapien
gaaaacaaggcccagctacacattt

SEQ ID NO: 2899088 - DNA, 25 bp, Homo sapien
ggagaaccggcacttcttcatatca

SEQ ID NO: 2899089 - DNA, 25 bp, Homo sapien
gacattgagacaagtggtcgaggca

SEQ ID NO: 2899090 - DNA, 25 bp, Homo sapien
tctctggaggcgtcatcatcacggg

SEQ ID NO: 2899091 - DNA, 25 bp, Homo sapien
tgggaatagtgaccaagccatctct

SEQ ID NO: 2899092 - DNA, 25 bp, Homo sapien
ggttactggattcggactcagccac

SEQ ID NO: 2899093 - DNA, 25 bp, Homo sapien
tgaattcaggcacctgacctcatgt

SEQ ID NO: 2899094 - DNA, 25 bp, Homo sapien
aatgttgctacaacacccgagcctg

SEQ ID NO: 2899095 - DNA, 25 bp, Homo sapien
cgagcctgagattaaccaaaacgag

SEQ ID NO: 2899096 - DNA, 25 bp, Homo sapien
cacagcggaatggacattgaaaaat

SEQ ID NO: 2899097 - DNA, 25 bp, Homo sapien
tggacattgaaaaatattccgagca

SEQ ID NO: 2899098 - DNA, 25 bp, Homo sapien
aagggaacgtcctcaatcaacacag

SEQ ID NO: 2899099 - DNA, 25 bp, Homo sapien
tcaatcaacacagcggaatggacat

SEQ ID NO: 2899100 - DNA, 25 bp, Homo sapien
aggcctcgccacctcccacctgctc

SEQ ID NO: 2899101 - DNA, 25 bp, Homo sapien
cccacctgctcccagcccgcctccc

SEQ ID NO: 2899102 - DNA, 25 bp, Homo sapien
ctcccacctgctcccagcccgcctc

SEQ ID NO: 2899103 - DNA, 25 bp, Homo sapien
acctcccacctgctcccagcccgcc

SEQ ID NO: 2899104 - DNA, 25 bp, Homo sapien
tgggaatgaagcaaaggggtcaaac

SEQ ID NO: 2899105 - DNA, 25 bp, Homo sapien
tttaataggagccaacattttctga

SEQ ID NO: 2899106 - DNA, 25 bp, Homo sapien
caaactttaataggagccaacattt

SEQ ID NO: 2899107 - DNA, 25 bp, Homo sapien
ggtcaaactttaataggagccaaca

SEQ ID NO: 2899108 - DNA, 25 bp, Homo sapien
catgtattccttgcgcttattgagc

SEQ ID NO: 2899109 - DNA, 25 bp, Homo sapien
gaaacagttgtagctgacttgctcg

SEQ ID NO: 2899110 - DNA, 25 bp, Homo sapien
gacttgctcgtaaaggttgtatatg

SEQ ID NO: 2899111 - DNA, 25 bp, Homo sapien
gaggtaaaggcctgcagcgatgaaa

SEQ ID NO: 2899112 - DNA, 25 bp, Homo sapien
cagcgaagggtggagaaacggaaca

SEQ ID NO: 2899113 - DNA, 25 bp, Homo sapien
gggattcagtctctcgcccgggaaa

SEQ ID NO: 2899114 - DNA, 25 bp, Homo sapien
tctttattgagatacgggacacagc

SEQ ID NO: 2899115 - DNA, 25 bp, Homo sapien
ggtgacacggtgcagggagtcttta

SEQ ID NO: 2899116 - DNA, 25 bp, Homo sapien
agcggataggctcaacccggcggct

SEQ ID NO: 2899117 - DNA, 25 bp, Homo sapien
tttccaggcagaggccgacctctag

SEQ ID NO: 2899118 - DNA, 25 bp, Homo sapien
cacttccgctcagacatcgggactt

SEQ ID NO: 2899119 - DNA, 25 bp, Homo sapien
ccatcagacgcagtcgcttagaccg

SEQ ID NO: 2899120 - DNA, 25 bp, Homo sapien
gaagagccgcgagccaagtgggggg

SEQ ID NO: 2899121 - DNA, 25 bp, Homo sapien
gggcggaagagccgcgagccaagtg

SEQ ID NO: 2899122 - DNA, 25 bp, Homo sapien
cggaagagccgcgagccaagtgggg

SEQ ID NO: 2899123 - DNA, 25 bp, Homo sapien
ggcggaagagccgcgagccaagtgg

SEQ ID NO: 2899124 - DNA, 25 bp, Homo sapien
cccgcaggagaagagtcggccacgg

SEQ ID NO: 2899125 - DNA, 25 bp, Homo sapien
ggatgcagctgcatcgtcagctccc

SEQ ID NO: 2899126 - DNA, 25 bp, Homo sapien
cggccgccgagaagatctctccgac

SEQ ID NO: 2899127 - DNA, 25 bp, Homo sapien
agctccccgagcttcgtgaaggcgg

SEQ ID NO: 2899128 - DNA, 25 bp, Homo sapien
tccgtgtctgtgaccgagtccaagc

SEQ ID NO: 2899129 - DNA, 25 bp, Homo sapien
ccttccacggatgcataaagaggtc

SEQ ID NO: 2899130 - DNA, 25 bp, Homo sapien
gggaggaccccaatcacaagaaatc

SEQ ID NO: 2899131 - DNA, 25 bp, Homo sapien
aaacaggagtctgggctatgggcct

SEQ ID NO: 2899132 - DNA, 25 bp, Homo sapien
agcatctctatttccgtctccgtcc

SEQ ID NO: 2899133 - DNA, 25 bp, Homo sapien
tctatttccgtctccgtccacttcg

SEQ ID NO: 2899134 - DNA, 25 bp, Homo sapien
tgatgacacagctgatgtgattaag

SEQ ID NO: 2899135 - DNA, 25 bp, Homo sapien
gattaagatcgtccccaaatcgctt

SEQ ID NO: 2899136 - DNA, 25 bp, Homo sapien
gaaggattaccacagcattttagga

SEQ ID NO: 2899137 - DNA, 25 bp, Homo sapien
gatcaactagttcagggtcaccata

SEQ ID NO: 2899138 - DNA, 25 bp, Homo sapien
caataacagcatctcaggcaaccta

SEQ ID NO: 2899139 - DNA, 25 bp, Homo sapien
gacaaagtagggaagcagctgagct

SEQ ID NO: 2899140 - DNA, 25 bp, Homo sapien
gaaaggagtcatcagagagactaac

SEQ ID NO: 2899141 - DNA, 25 bp, Homo sapien
tcccttcataagaatccaggtcggg

SEQ ID NO: 2899142 - DNA, 25 bp, Homo sapien
cattggtagggttctcactttctcg

SEQ ID NO: 2899143 - DNA, 25 bp, Homo sapien
cactttctcgaagttttacactcac

SEQ ID NO: 2899144 - DNA, 25 bp, Homo sapien
tgcgtttcacagtggcctttatctg

SEQ ID NO: 2899145 - DNA, 25 bp, Homo sapien
tttcacagtggcctttatctgggcc

SEQ ID NO: 2899146 - DNA, 25 bp, Homo sapien
cttgcgtttcacagtggcctttatc

SEQ ID NO: 2899147 - DNA, 25 bp, Homo sapien
gcgtttcacagtggcctttatctgg

SEQ ID NO: 2899148 - DNA, 25 bp, Homo sapien
agatgccaccttcttgggccctttc

SEQ ID NO: 2899149 - DNA, 25 bp, Homo sapien
ttgggtgactcagctggaaggggga

SEQ ID NO: 2899150 - DNA, 25 bp, Homo sapien
cttgggccctttcttgggtgactca

SEQ ID NO: 2899151 - DNA, 25 bp, Homo sapien
gaagggggatgccagaatcttcata

SEQ ID NO: 2899152 - DNA, 25 bp, Homo sapien
acccccggcctcagggacactggag

SEQ ID NO: 2899153 - DNA, 25 bp, Homo sapien
gcagctggaggaggtgacaagacac

SEQ ID NO: 2899154 - DNA, 25 bp, Homo sapien
cagggacactggagctgctgggagg

SEQ ID NO: 2899155 - DNA, 25 bp, Homo sapien
ccggcctcagggacactggagctgc

SEQ ID NO: 2899156 - DNA, 25 bp, Homo sapien
gggcataagctaggttctaggttcc

SEQ ID NO: 2899157 - DNA, 25 bp, Homo sapien
gctaggttctaggttcccctgacag

SEQ ID NO: 2899158 - DNA, 25 bp, Homo sapien
taagctaggttctaggttcccctga

SEQ ID NO: 2899159 - DNA, 25 bp, Homo sapien
gcataagctaggttctaggttcccc

SEQ ID NO: 2899160 - DNA, 25 bp, Homo sapien
ttggcatcggagtcgttcagagcac

SEQ ID NO: 2899161 - DNA, 25 bp, Homo sapien
catcggagtcgttcagagcactgag

SEQ ID NO: 2899162 - DNA, 25 bp, Homo sapien
ctgttggcatcggagtcgttcagag

SEQ ID NO: 2899163 - DNA, 25 bp, Homo sapien
gcatcggagtcgttcagagcactga

SEQ ID NO: 2899164 - DNA, 25 bp, Homo sapien
tgagtttcttagctggaggagtttc

SEQ ID NO: 2899165 - DNA, 25 bp, Homo sapien
ggagtttctcctagcccttcaatat

SEQ ID NO: 2899166 - DNA, 25 bp, Homo sapien
cctggtcgaagttgagtttcttagc

SEQ ID NO: 2899167 - DNA, 25 bp, Homo sapien
ggaggagtttctcctagcccttcaa

SEQ ID NO: 2899168 - DNA, 25 bp, Homo sapien
tgtgtgggaggaggaggactcctac

SEQ ID NO: 2899169 - DNA, 25 bp, Homo sapien
cccgtcagctgtgtgggaggaggag

SEQ ID NO: 2899170 - DNA, 25 bp, Homo sapien
cagctgtgtgggaggaggaggactc

SEQ ID NO: 2899171 - DNA, 25 bp, Homo sapien
gctgtgtgggaggaggaggactcct

SEQ ID NO: 2899172 - DNA, 25 bp, Homo sapien
caggaagtaaaatgggccgagatgg

SEQ ID NO: 2899173 - DNA, 25 bp, Homo sapien
cttctgaaacccctatacaagggag

SEQ ID NO: 2899174 - DNA, 25 bp, Homo sapien
tgctacgtactgatccaatgccctg

SEQ ID NO: 2899175 - DNA, 25 bp, Homo sapien
caatgccctgcgctgtgtatgagag

SEQ ID NO: 2899176 - DNA, 25 bp, Homo sapien
acaggtccggcatgaacagtgagag

SEQ ID NO: 2899177 - DNA, 25 bp, Homo sapien
ctctctcgtgcaggccttgctcgga

SEQ ID NO: 2899178 - DNA, 25 bp, Homo sapien
tgtccatcagatgaaggtcaaaggg

SEQ ID NO: 2899179 - DNA, 25 bp, Homo sapien
gcagatgcttatgcgggaatagcga

SEQ ID NO: 2899180 - DNA, 25 bp, Homo sapien
gcaccgccgaggcttggccctggga

SEQ ID NO: 2899181 - DNA, 25 bp, Homo sapien
tggtttgtacggcactgtggccacg

SEQ ID NO: 2899182 - DNA, 25 bp, Homo sapien
tggccacgtccaaaccacactgtgg

SEQ ID NO: 2899183 - DNA, 25 bp, Homo sapien
accacactgtggtgttagagcgagg

SEQ ID NO: 2899184 - DNA, 25 bp, Homo sapien
gacacaggaagccttgggtccctgc

SEQ ID NO: 2899185 - DNA, 25 bp, Homo sapien
accacctctggactgccaactccca

SEQ ID NO: 2899186 - DNA, 25 bp, Homo sapien
gcctccatcttgtggcaggcccagg

SEQ ID NO: 2899187 - DNA, 25 bp, Homo sapien
tctcttgggttctgacccagggaga

SEQ ID NO: 2899188 - DNA, 25 bp, Homo sapien
gtccccaattctgactgggagtgga

SEQ ID NO: 2899189 - DNA, 25 bp, Homo sapien
gaacccctcctgagatctcttgtgg

SEQ ID NO: 2899190 - DNA, 25 bp, Homo sapien
gaatgtagtgttgggtgaatctgac

SEQ ID NO: 2899191 - DNA, 25 bp, Homo sapien
tctcccgccgagttggagacggatg

SEQ ID NO: 2899192 - DNA, 25 bp, Homo sapien
ctagccctttgaggagtgattcccc

SEQ ID NO: 2899193 - DNA, 25 bp, Homo sapien
ttgaggagtgattccccccggtctg

SEQ ID NO: 2899194 - DNA, 25 bp, Homo sapien
tggcccctagccctttgaggagtga

SEQ ID NO: 2899195 - DNA, 25 bp, Homo sapien
tgattccccccggtctggaagccag

SEQ ID NO: 2899196 - DNA, 25 bp, Homo sapien
caatacgggagtctgagtcgtcgga

SEQ ID NO: 2899197 - DNA, 25 bp, Homo sapien
gttagggatatcgaggttggcaata

SEQ ID NO: 2899198 - DNA, 25 bp, Homo sapien
tcactgcaagtggacacgaggacgg

SEQ ID NO: 2899199 - DNA, 25 bp, Homo sapien
tatcgaggttggcaatacgggagtc

SEQ ID NO: 2899200 - DNA, 25 bp, Homo sapien
caggggccgcggcttctcttcttaa

SEQ ID NO: 2899201 - DNA, 25 bp, Homo sapien
gcaggggccgcggcttctcttctta

SEQ ID NO: 2899202 - DNA, 25 bp, Homo sapien
gacccaggagtctggctccctcagt

SEQ ID NO: 2899203 - DNA, 25 bp, Homo sapien
ctcttgggggacccaggagtctggc

SEQ ID NO: 2899204 - DNA, 25 bp, Homo sapien
cctcttgggggacccaggagtctgg

SEQ ID NO: 2899205 - DNA, 25 bp, Homo sapien
ggggacccaggagtctggctccctc

SEQ ID NO: 2899206 - DNA, 25 bp, Homo sapien
ccttttccttccgaggtgcaactag

SEQ ID NO: 2899207 - DNA, 25 bp, Homo sapien
agcctccctcctaattcttcttgtt

SEQ ID NO: 2899208 - DNA, 25 bp, Homo sapien
cgaggtgcaactagagccaggactt

SEQ ID NO: 2899209 - DNA, 25 bp, Homo sapien
gatccaggcagtcctaagacgcctt

SEQ ID NO: 2899210 - DNA, 25 bp, Homo sapien
aggttgcccagcacgtcggaggagt

SEQ ID NO: 2899211 - DNA, 25 bp, Homo sapien
ccaaccagcagcgtgacgtcagtga

SEQ ID NO: 2899212 - DNA, 25 bp, Homo sapien
acgtcagtgaggatcccgcgcaggc

SEQ ID NO: 2899213 - DNA, 25 bp, Homo sapien
aggcgcagctcgttgaggttgccca

SEQ ID NO: 2899214 - DNA, 25 bp, Homo sapien
ctagagagagagcagataagtcctt

SEQ ID NO: 2899215 - DNA, 25 bp, Homo sapien
ctgcttctgaaagacttggcttcgg

SEQ ID NO: 2899216 - DNA, 25 bp, Homo sapien
gattccctctcaacggccctgtggt

SEQ ID NO: 2899217 - DNA, 25 bp, Homo sapien
gaaccaagggagacatgcgcagctt

SEQ ID NO: 2899218 - DNA, 25 bp, Homo sapien
tctgcaaataggtggcggccgctag

SEQ ID NO: 2899219 - DNA, 25 bp, Homo sapien
cgcacggccccggaaaattgaatag

SEQ ID NO: 2899220 - DNA, 25 bp, Homo sapien
gggcgaagcctctcgcttcgggacc

SEQ ID NO: 2899221 - DNA, 25 bp, Homo sapien
atgaagcggtggcatgcctggacca

SEQ ID NO: 2899222 - DNA, 25 bp, Homo sapien
ttcggagcgcctgggactacctggt

SEQ ID NO: 2899223 - DNA, 25 bp, Homo sapien
gcttcgagattcagtaggtgggtct

SEQ ID NO: 2899224 - DNA, 25 bp, Homo sapien
gtgtccttcggagcgcctgggacta

SEQ ID NO: 2899225 - DNA, 25 bp, Homo sapien
cttgactgcagcttcgagattcagt

SEQ ID NO: 2899226 - DNA, 25 bp, Homo sapien
aggcctgagagtttagcacgatgta

SEQ ID NO: 2899227 - DNA, 25 bp, Homo sapien
ggcctgagagtttagcacgatgtac

SEQ ID NO: 2899228 - DNA, 25 bp, Homo sapien
gaggcctgagagtttagcacgatgt

SEQ ID NO: 2899229 - DNA, 25 bp, Homo sapien
gagcctggcttgggggcaaggttga

SEQ ID NO: 2899230 - DNA, 25 bp, Homo sapien
agcctggcttgggggcaaggttgac

SEQ ID NO: 2899231 - DNA, 25 bp, Homo sapien
tggggagcctggcttgggggcaagg

SEQ ID NO: 2899232 - DNA, 25 bp, Homo sapien
ggagcctggcttgggggcaaggttg

SEQ ID NO: 2899233 - DNA, 25 bp, Homo sapien
gctgctgctggaggcctcgtctcca

SEQ ID NO: 2899234 - DNA, 25 bp, Homo sapien
tgctgctgctggaggcctcgtctcc

SEQ ID NO: 2899235 - DNA, 25 bp, Homo sapien
ctgctctggggaccaggaatgggtc

SEQ ID NO: 2899236 - DNA, 25 bp, Homo sapien
ggaatgggtccttcttcactgctgc

SEQ ID NO: 2899237 - DNA, 25 bp, Homo sapien
tcagagggtgatccagaggtgtctt

SEQ ID NO: 2899238 - DNA, 25 bp, Homo sapien
agcccgttcagagggtgatccagag

SEQ ID NO: 2899239 - DNA, 25 bp, Homo sapien
gacgagcccgttcagagggtgatcc

SEQ ID NO: 2899240 - DNA, 25 bp, Homo sapien
cccgttcagagggtgatccagaggt

SEQ ID NO: 2899241 - DNA, 25 bp, Homo sapien
ctgtacgatgactggcaaggttgcc

SEQ ID NO: 2899242 - DNA, 25 bp, Homo sapien
gacacttatagggtttgtcttcgtc

SEQ ID NO: 2899243 - DNA, 25 bp, Homo sapien
ccttgtagcggaacgaagaccggca

SEQ ID NO: 2899244 - DNA, 25 bp, Homo sapien
tcgtccccaggaaccaaggagtcca

SEQ ID NO: 2899245 - DNA, 25 bp, Homo sapien
gagccgcacgtctcacacttatacg

SEQ ID NO: 2899246 - DNA, 25 bp, Homo sapien
cggctgtgcgttttcaggtttgctg

SEQ ID NO: 2899247 - DNA, 25 bp, Homo sapien
tccgcagattgagcagtggtaaggc

SEQ ID NO: 2899248 - DNA, 25 bp, Homo sapien
ggcttctctcccgaatggatgcggc

SEQ ID NO: 2899249 - DNA, 25 bp, Homo sapien
aagccacttggaggctggctccgta

SEQ ID NO: 2899250 - DNA, 25 bp, Homo sapien
tcttgcaggtttgccttggaagcca

SEQ ID NO: 2899251 - DNA, 25 bp, Homo sapien
cccacctcttgcaggtttgccttgg

SEQ ID NO: 2899252 - DNA, 25 bp, Homo sapien
ccttggaagccacttggaggctggc

SEQ ID NO: 2899253 - DNA, 25 bp, Homo sapien
gaacagaaccctccctattggccca

SEQ ID NO: 2899254 - DNA, 25 bp, Homo sapien
agggaggagacttcaagtcctgcct

SEQ ID NO: 2899255 - DNA, 25 bp, Homo sapien
gagggaggagacttcaagtcctgcc

SEQ ID NO: 2899256 - DNA, 25 bp, Homo sapien
ggagggaggagacttcaagtcctgc

SEQ ID NO: 2899257 - DNA, 25 bp, Homo sapien
tgggagggaggagacttcaagtcct

SEQ ID NO: 2899258 - DNA, 25 bp, Homo sapien
tccggtgtggatgcgaacgtggctc

SEQ ID NO: 2899259 - DNA, 25 bp, Homo sapien
ccgcaggtagggcaagggtagggct

SEQ ID NO: 2899260 - DNA, 25 bp, Homo sapien
caggtagggcaagggtagggcttct

SEQ ID NO: 2899261 - DNA, 25 bp, Homo sapien
gtctgcaggtggcggaagcgggttc

SEQ ID NO: 2899262 - DNA, 25 bp, Homo sapien
tcttgtgccggaaatgcaggccaca

SEQ ID NO: 2899263 - DNA, 25 bp, Homo sapien
ttggtagcagctccgtgtttctggc

SEQ ID NO: 2899264 - DNA, 25 bp, Homo sapien
ggcgcagatgcagccgcagttgact

SEQ ID NO: 2899265 - DNA, 25 bp, Homo sapien
ccccgagaatgtggtagtgcacttt

SEQ ID NO: 2899266 - DNA, 25 bp, Homo sapien
aaatgcaatcgaatgaaggccccgg

SEQ ID NO: 2899267 - DNA, 25 bp, Homo sapien
gatggactccacttgagccctggtg

SEQ ID NO: 2899268 - DNA, 25 bp, Homo sapien
cataatcagataagccccagggcaa

SEQ ID NO: 2899269 - DNA, 25 bp, Homo sapien
tttctgataccaaagtggcctggca

SEQ ID NO: 2899270 - DNA, 25 bp, Homo sapien
gacagtggaatggtacagaatccaa

SEQ ID NO: 2899271 - DNA, 25 bp, Homo sapien
gaatggtacagaatccaagatgtta

SEQ ID NO: 2899272 - DNA, 25 bp, Homo sapien
agagctctcttcctcgctccccgag

SEQ ID NO: 2899273 - DNA, 25 bp, Homo sapien
tacagaatccaagatgttatccagg

SEQ ID NO: 2899274 - DNA, 25 bp, Homo sapien
gatgcatgcactggaccctggatag

SEQ ID NO: 2899275 - DNA, 25 bp, Homo sapien
tatcagaattagtgacctccgcacc

SEQ ID NO: 2899276 - DNA, 25 bp, Homo sapien
gcacgccccggcctcttgatattat

SEQ ID NO: 2899277 - DNA, 25 bp, Homo sapien
gatggaggcatgtcgccagcattaa

SEQ ID NO: 2899278 - DNA, 25 bp, Homo sapien
tcggagctgagctagttcaagccgg

SEQ ID NO: 2899279 - DNA, 25 bp, Homo sapien
cggttcggtgttcggctgggagcca

SEQ ID NO: 2899280 - DNA, 25 bp, Homo sapien
gcgatataggactgaagacctggcc

SEQ ID NO: 2899281 - DNA, 25 bp, Homo sapien
gagccgggttctggacgccgcacct

SEQ ID NO: 2899282 - DNA, 25 bp, Homo sapien
cgactggaagaacgctgagagcacc

SEQ ID NO: 2899283 - DNA, 25 bp, Homo sapien
aaggagcggagcaccccaaacacaa

SEQ ID NO: 2899284 - DNA, 25 bp, Homo sapien
gctgcaccgcgattcctatggaggc

SEQ ID NO: 2899285 - DNA, 25 bp, Homo sapien
cgatccaggagacgcgcgctgcctg

SEQ ID NO: 2899286 - DNA, 25 bp, Homo sapien
gcccgaacttcgtgctcagggcact

SEQ ID NO: 2899287 - DNA, 25 bp, Homo sapien
gaagtagcaaaagaggcgagcagca

SEQ ID NO: 2899288 - DNA, 25 bp, Homo sapien
tgacagcaacccaatactcaggtat

SEQ ID NO: 2899289 - DNA, 25 bp, Homo sapien
tataggtgggtcaaggaagtagcaa

SEQ ID NO: 2899290 - DNA, 25 bp, Homo sapien
gtagtgggtcccaatccaggtcctg

SEQ ID NO: 2899291 - DNA, 25 bp, Homo sapien
cccacgaggtcagaaatagcaacaa

SEQ ID NO: 2899292 - DNA, 25 bp, Homo sapien
ccagagcatcaggagtcgtgtcaca

SEQ ID NO: 2899293 - DNA, 25 bp, Homo sapien
gatcgtcggcgagagaaataacagg

SEQ ID NO: 2899294 - DNA, 25 bp, Homo sapien
gatgctctctatcatctgcaacagt

SEQ ID NO: 2899295 - DNA, 25 bp, Homo sapien
agttcaggcagcacggagaaggcca

SEQ ID NO: 2899296 - DNA, 25 bp, Homo sapien
cttctagtccctattagttcaggca

SEQ ID NO: 2899297 - DNA, 25 bp, Homo sapien
cagagcccctgatgtgaagccgtag

SEQ ID NO: 2899298 - DNA, 25 bp, Homo sapien
gagaatgccactccctgaaagaagg

SEQ ID NO: 2899299 - DNA, 25 bp, Homo sapien
tagtgcttctgttacaaggtcctgg

SEQ ID NO: 2899300 - DNA, 25 bp, Homo sapien
ggaactttagtatctagtgcttctg

SEQ ID NO: 2899301 - DNA, 25 bp, Homo sapien
tagttgcctgtcacatcccggaggt

SEQ ID NO: 2899302 - DNA, 25 bp, Homo sapien
atacaaagggttggcacacacattg

SEQ ID NO: 2899303 - DNA, 25 bp, Homo sapien
aaaatacaaagggttggcacacaca

SEQ ID NO: 2899304 - DNA, 25 bp, Homo sapien
agaccaagacgtggcaagagaagac

SEQ ID NO: 2899305 - DNA, 25 bp, Homo sapien
tctgtggagaccaagacgtggcaag

SEQ ID NO: 2899306 - DNA, 25 bp, Homo sapien
ataaagcatgataagtctcttggcc

SEQ ID NO: 2899307 - DNA, 25 bp, Homo sapien
tcaggaggcaacactagagatgtta

SEQ ID NO: 2899308 - DNA, 25 bp, Homo sapien
cactagagatgttatataaagcatg

SEQ ID NO: 2899309 - DNA, 25 bp, Homo sapien
gcatgataagtctcttggcctttga

SEQ ID NO: 2899310 - DNA, 25 bp, Homo sapien
actccattcggccaacccaagcata

SEQ ID NO: 2899311 - DNA, 25 bp, Homo sapien
tcttttctaagccacagggataatg

SEQ ID NO: 2899312 - DNA, 25 bp, Homo sapien
aagagggaggtatgtggtggtagcc

SEQ ID NO: 2899313 - DNA, 25 bp, Homo sapien
ttcggccaacccaagcatatgggcc

SEQ ID NO: 2899314 - DNA, 25 bp, Homo sapien
ccttctatgggcctgagggaaatac

SEQ ID NO: 2899315 - DNA, 25 bp, Homo sapien
cttctatgggcctgagggaaataca

SEQ ID NO: 2899316 - DNA, 25 bp, Homo sapien
ttctatgggcctgagggaaatacaa

SEQ ID NO: 2899317 - DNA, 25 bp, Homo sapien
cctggccgtaacagggaatctttgc

SEQ ID NO: 2899318 - DNA, 25 bp, Homo sapien
aagggtgactgtccagccaatccat

SEQ ID NO: 2899319 - DNA, 25 bp, Homo sapien
ggctggttcaaaggaacaggatccc

SEQ ID NO: 2899320 - DNA, 25 bp, Homo sapien
gaatctttgcgaagttgtctggcag

SEQ ID NO: 2899321 - DNA, 25 bp, Homo sapien
tcttctcggctttcgccagcgatct

SEQ ID NO: 2899322 - DNA, 25 bp, Homo sapien
gggcgtgtcttccgttgactccgcc

SEQ ID NO: 2899323 - DNA, 25 bp, Homo sapien
gaggcaaacagccaatgagaagtgt

SEQ ID NO: 2899324 - DNA, 25 bp, Homo sapien
tcctcgcctcgctgggcttcgtctt

SEQ ID NO: 2899325 - DNA, 25 bp, Homo sapien
gtacagagcggtagatgaaatagtg

SEQ ID NO: 2899326 - DNA, 25 bp, Homo sapien
gcagatcgcgaaaaggagtgtcctt

SEQ ID NO: 2899327 - DNA, 25 bp, Homo sapien
agttcgtagtacagagcggtagatg

SEQ ID NO: 2899328 - DNA, 25 bp, Homo sapien
cccatcacttagcagatcgcgaaaa

SEQ ID NO: 2899329 - DNA, 25 bp, Homo sapien
gtcacaagtgtctaccagcatgccc

SEQ ID NO: 2899330 - DNA, 25 bp, Homo sapien
taggaaacttctcatgctggctctt

SEQ ID NO: 2899331 - DNA, 25 bp, Homo sapien
gctggctcttgaattgtgcaaacac

SEQ ID NO: 2899332 - DNA, 25 bp, Homo sapien
tcccaagtagcaagggtcacaagtg

SEQ ID NO: 2899333 - DNA, 25 bp, Homo sapien
atcgcagtaaatagaacatacgatc

SEQ ID NO: 2899334 - DNA, 25 bp, Homo sapien
cgagacattccatttccagggatga

SEQ ID NO: 2899335 - DNA, 25 bp, Homo sapien
ctatcgcagtaaatagaacatacga

SEQ ID NO: 2899336 - DNA, 25 bp, Homo sapien
tcctatcgcagtaaatagaacatac

SEQ ID NO: 2899337 - DNA, 25 bp, Homo sapien
gatgtggcaggactatagggtaatg

SEQ ID NO: 2899338 - DNA, 25 bp, Homo sapien
tgtggcaggactatagggtaatggt

SEQ ID NO: 2899339 - DNA, 25 bp, Homo sapien
ggcaggactatagggtaatggtggg

SEQ ID NO: 2899340 - DNA, 25 bp, Homo sapien
tggcaggactatagggtaatggtgg

SEQ ID NO: 2899341 - DNA, 25 bp, Homo sapien
cagcacacctctggctaacccatac

SEQ ID NO: 2899342 - DNA, 25 bp, Homo sapien
taattattataatcgtcagcctctt

SEQ ID NO: 2899343 - DNA, 25 bp, Homo sapien
tagtttaagagtccctgaccctgga

SEQ ID NO: 2899344 - DNA, 25 bp, Homo sapien
tggctaacccataccccacacctgc

SEQ ID NO: 2899345 - DNA, 25 bp, Homo sapien
tacaattgctatgtgagaggtgttc

SEQ ID NO: 2899346 - DNA, 25 bp, Homo sapien
gaaaggtgaggagaccaggatacct

SEQ ID NO: 2899347 - DNA, 25 bp, Homo sapien
agtttgtataacttccataggaaag

SEQ ID NO: 2899348 - DNA, 25 bp, Homo sapien
ttagagttattccagtgattacttg

SEQ ID NO: 2899349 - DNA, 25 bp, Homo sapien
tttaataggtgagtgtctcatttac

SEQ ID NO: 2899350 - DNA, 25 bp, Homo sapien
taataggtgagtgtctcatttacat

SEQ ID NO: 2899351 - DNA, 25 bp, Homo sapien
aataggtgagtgtctcatttacatt

SEQ ID NO: 2899352 - DNA, 25 bp, Homo sapien
cttttaataggtgagtgtctcattt

SEQ ID NO: 2899353 - DNA, 25 bp, Homo sapien
tgtgtgtatgtcgtgtatgtgagag

SEQ ID NO: 2899354 - DNA, 25 bp, Homo sapien
ccaagaacacatgtgcctcgtatgt

SEQ ID NO: 2899355 - DNA, 25 bp, Homo sapien
gcacgtatgtgcatatgaggaatgc

SEQ ID NO: 2899356 - DNA, 25 bp, Homo sapien
gatctggaagataactgcctgccct

SEQ ID NO: 2899357 - DNA, 25 bp, Homo sapien
cctcgtatgtgcgtgtgcacgtatg

SEQ ID NO: 2899358 - DNA, 25 bp, Homo sapien
gacttgcatttccaaggccaggttc

SEQ ID NO: 2899359 - DNA, 25 bp, Homo sapien
gtgacttgcatttccaaggccaggt

SEQ ID NO: 2899360 - DNA, 25 bp, Homo sapien
aactcatgttctttatggtgacttg

SEQ ID NO: 2899361 - DNA, 25 bp, Homo sapien
tgttctttatggtgacttgcatttc

SEQ ID NO: 2899362 - DNA, 25 bp, Homo sapien
tggtcagctttcctcgaactagatc

SEQ ID NO: 2899363 - DNA, 25 bp, Homo sapien
caggaaagtacaattactggtcagc

SEQ ID NO: 2899364 - DNA, 25 bp, Homo sapien
gatgaggattagctcttagccactg

SEQ ID NO: 2899365 - DNA, 25 bp, Homo sapien
ctagatccctcccaatgccaggtga

SEQ ID NO: 2899366 - DNA, 25 bp, Homo sapien
gggcttccgagggttcttgctaaca

SEQ ID NO: 2899367 - DNA, 25 bp, Homo sapien
tggttgctgctaagtccacgcctct

SEQ ID NO: 2899368 - DNA, 25 bp, Homo sapien
ttcccacagccgatgtttacaatgg

SEQ ID NO: 2899369 - DNA, 25 bp, Homo sapien
gctccttggccgatgagtggcttca

SEQ ID NO: 2899370 - DNA, 25 bp, Homo sapien
attcccaaccaggaactgatgcttc

SEQ ID NO: 2899371 - DNA, 25 bp, Homo sapien
aattcccaaccaggaactgatgctt

SEQ ID NO: 2899372 - DNA, 25 bp, Homo sapien
ccttttgggctggatagcctgttca

SEQ ID NO: 2899373 - DNA, 25 bp, Homo sapien
gatagcctgttcaatgccagattct

SEQ ID NO: 2899374 - DNA, 25 bp, Homo sapien
tgggccattcaacaatcaacaaagc

SEQ ID NO: 2899375 - DNA, 25 bp, Homo sapien
ctgcaaccagatgtagttgggccat

SEQ ID NO: 2899376 - DNA, 25 bp, Homo sapien
caagctcgacgagagtcacgtgcag

SEQ ID NO: 2899377 - DNA, 25 bp, Homo sapien
cactttcagctgctcgtggaggtca

SEQ ID NO: 2899378 - DNA, 25 bp, Homo sapien
taccatggtccagctgatgcagttg

SEQ ID NO: 2899379 - DNA, 25 bp, Homo sapien
tgagtcggtcacttgcaggaggcac

SEQ ID NO: 2899380 - DNA, 25 bp, Homo sapien
cattgctgtagccacccaacgggtt

SEQ ID NO: 2899381 - DNA, 25 bp, Homo sapien
attgctgtagccacccaacgggttc

SEQ ID NO: 2899382 - DNA, 25 bp, Homo sapien
ctttgccttttgcagtttagcaatg

SEQ ID NO: 2899383 - DNA, 25 bp, Homo sapien
ccttttgcagtttagcaatgtctga

SEQ ID NO: 2899384 - DNA, 25 bp, Homo sapien
tgcggtacataagtggatcgaagcc

SEQ ID NO: 2899385 - DNA, 25 bp, Homo sapien
gctgctgaaacaagatgcggtacat

SEQ ID NO: 2899386 - DNA, 25 bp, Homo sapien
aatagccaactagtggcccttggag

SEQ ID NO: 2899387 - DNA, 25 bp, Homo sapien
caaacgccatggcaacacttggaag

SEQ ID NO: 2899388 - DNA, 25 bp, Homo sapien
gaggtacaacctatgcagacaaaca

SEQ ID NO: 2899389 - DNA, 25 bp, Homo sapien
gacaaacattaacaacaaatctacg

SEQ ID NO: 2899390 - DNA, 25 bp, Homo sapien
caaatctacggagagaggttgtgta

SEQ ID NO: 2899391 - DNA, 25 bp, Homo sapien
gagggtaatactcccactggtgaga

SEQ ID NO: 2899392 - DNA, 25 bp, Homo sapien
gggacactgcagtactttgaaggag

SEQ ID NO: 2899393 - DNA, 25 bp, Homo sapien
tctgctcaacagctatgtagagtga

SEQ ID NO: 2899394 - DNA, 25 bp, Homo sapien
tagaggtattagagagaggttccac

SEQ ID NO: 2899395 - DNA, 25 bp, Homo sapien
gaatgcagggttacagcaggacccg

SEQ ID NO: 2899396 - DNA, 25 bp, Homo sapien
tgatcagaattagtcccagggccac

SEQ ID NO: 2899397 - DNA, 25 bp, Homo sapien
aatgaactttattccatgaggccac

SEQ ID NO: 2899398 - DNA, 25 bp, Homo sapien
tgttatgacacattccggacaagag

SEQ ID NO: 2899399 - DNA, 25 bp, Homo sapien
ggagtcagtaaactttggccctcac

SEQ ID NO: 2899400 - DNA, 25 bp, Homo sapien
catatgaacaggtgcccttcatgcg

SEQ ID NO: 2899401 - DNA, 25 bp, Homo sapien
atccatatgaacaggtgcccttcat

SEQ ID NO: 2899402 - DNA, 25 bp, Homo sapien
aacaggtgcccttcatgcgtccgtt

SEQ ID NO: 2899403 - DNA, 25 bp, Homo sapien
tgaacaggtgcccttcatgcgtccg

SEQ ID NO: 2899404 - DNA, 25 bp, Homo sapien
gtccgggattgggaatccgcccatc

SEQ ID NO: 2899405 - DNA, 25 bp, Homo sapien
cgggattgggaatccgcccatctgg

SEQ ID NO: 2899406 - DNA, 25 bp, Homo sapien
ttcaatgcctcgacctgccgcaggg

SEQ ID NO: 2899407 - DNA, 25 bp, Homo sapien
atttcttcaatgcctcgacctgccg

SEQ ID NO: 2899408 - DNA, 25 bp, Homo sapien
ggacgactggtacggccacgggctc

SEQ ID NO: 2899409 - DNA, 25 bp, Homo sapien
gactggtacggccacgggctcggag

SEQ ID NO: 2899410 - DNA, 25 bp, Homo sapien
ctggtacggccacgggctcggagga

SEQ ID NO: 2899411 - DNA, 25 bp, Homo sapien
agccggacgactggtacggccacgg

SEQ ID NO: 2899412 - DNA, 25 bp, Homo sapien
cagcaccacataggccctgtgaaca

SEQ ID NO: 2899413 - DNA, 25 bp, Homo sapien
tgggctgacgccgacaactactgcc

SEQ ID NO: 2899414 - DNA, 25 bp, Homo sapien
cgcacctggtggtggtcacgtcctg

SEQ ID NO: 2899415 - DNA, 25 bp, Homo sapien
ctactggttctctcgctccgggaag

SEQ ID NO: 2899416 - DNA, 25 bp, Homo sapien
tcaattgcgtttcaaggcgcgggag

SEQ ID NO: 2899417 - DNA, 25 bp, Homo sapien
cctgcacgcagccaaagacaagtgg

SEQ ID NO: 2899418 - DNA, 25 bp, Homo sapien
tgagggcctgaatggtagctattgc

SEQ ID NO: 2899419 - DNA, 25 bp, Homo sapien
cagggcacagggctaacgtgtctct

SEQ ID NO: 2899420 - DNA, 25 bp, Homo sapien
aatgctgccgccttctgcaatttat

SEQ ID NO: 2899421 - DNA, 25 bp, Homo sapien
caccatttttctttgccggtttgca

SEQ ID NO: 2899422 - DNA, 25 bp, Homo sapien
agactggaaatgctgccgccttctg

SEQ ID NO: 2899423 - DNA, 25 bp, Homo sapien
catgagtggaaggtctaaatgtggc

SEQ ID NO: 2899424 - DNA, 25 bp, Homo sapien
gtgtccctccggcactgctctctgt

SEQ ID NO: 2899425 - DNA, 25 bp, Homo sapien
tgtcttttactctgtccatacccgc

SEQ ID NO: 2899426 - DNA, 25 bp, Homo sapien
gatgtctcggccaatgccgtgcggc

SEQ ID NO: 2899427 - DNA, 25 bp, Homo sapien
atgtcactccccttcggccaacttc

SEQ ID NO: 2899428 - DNA, 25 bp, Homo sapien
agatccctcaatgttagagggttgc

SEQ ID NO: 2899429 - DNA, 25 bp, Homo sapien
cagatccctcaatgttagagggttg

SEQ ID NO: 2899430 - DNA, 25 bp, Homo sapien
atccctcaatgttagagggttgctg

SEQ ID NO: 2899431 - DNA, 25 bp, Homo sapien
gatccctcaatgttagagggttgct

SEQ ID NO: 2899432 - DNA, 25 bp, Homo sapien
ctggctcgagctctgacccagctct

SEQ ID NO: 2899433 - DNA, 25 bp, Homo sapien
ctccgaatctctccgggcgccgctg

SEQ ID NO: 2899434 - DNA, 25 bp, Homo sapien
tggcgcccctaaccctgactcatcg

SEQ ID NO: 2899435 - DNA, 25 bp, Homo sapien
gactcatcgtccacagtgcaccggg

SEQ ID NO: 2899436 - DNA, 25 bp, Homo sapien
cgccccaagctcgcggccatccgag

SEQ ID NO: 2899437 - DNA, 25 bp, Homo sapien
cttccgcccccgagcctcagcagct

SEQ ID NO: 2899438 - DNA, 25 bp, Homo sapien
ccgccccaagctcgcggccatccga

SEQ ID NO: 2899439 - DNA, 25 bp, Homo sapien
gccccaagctcgcggccatccgagc

SEQ ID NO: 2899440 - DNA, 25 bp, Homo sapien
tgcccaccgtccctcttgtcacaca

SEQ ID NO: 2899441 - DNA, 25 bp, Homo sapien
ttcagtgccggcccggtgcccaggg

SEQ ID NO: 2899442 - DNA, 25 bp, Homo sapien
ggttcagtgccggcccggtgcccag

SEQ ID NO: 2899443 - DNA, 25 bp, Homo sapien
agggccgctgcccaccgtccctctt

SEQ ID NO: 2899444 - DNA, 25 bp, Homo sapien
cggggctgccccaggagcgccgtga

SEQ ID NO: 2899445 - DNA, 25 bp, Homo sapien
gccggggctgccccaggagcgccgt

SEQ ID NO: 2899446 - DNA, 25 bp, Homo sapien
gggctgccccaggagcgccgtgagc

SEQ ID NO: 2899447 - DNA, 25 bp, Homo sapien
ccgggccggggctgccccaggagcg

SEQ ID NO: 2899448 - DNA, 25 bp, Homo sapien
ctttcccctactttcggcgactgag

SEQ ID NO: 2899449 - DNA, 25 bp, Homo sapien
atccctgccgatggcgggcgccgaa

SEQ ID NO: 2899450 - DNA, 25 bp, Homo sapien
tactttcggcgactgagcagtaggc

SEQ ID NO: 2899451 - DNA, 25 bp, Homo sapien
gcaggtacctggcaccaagagggag

SEQ ID NO: 2899452 - DNA, 25 bp, Homo sapien
aagagacggttagcaagttcaggga

SEQ ID NO: 2899453 - DNA, 25 bp, Homo sapien
gagacggttagcaagttcagggaag

SEQ ID NO: 2899454 - DNA, 25 bp, Homo sapien
agagacggttagcaagttcagggaa

SEQ ID NO: 2899455 - DNA, 25 bp, Homo sapien
agacggttagcaagttcagggaagg

SEQ ID NO: 2899456 - DNA, 25 bp, Homo sapien
gaggggtgggaatctgacttgtcca

SEQ ID NO: 2899457 - DNA, 25 bp, Homo sapien
tggtcagagcgtcagaggggtggga

SEQ ID NO: 2899458 - DNA, 25 bp, Homo sapien
gggaatctgacttgtccagagccag

SEQ ID NO: 2899459 - DNA, 25 bp, Homo sapien
ggtgggaatctgacttgtccagagc

SEQ ID NO: 2899460 - DNA, 25 bp, Homo sapien
tccacctggcctcggggctacctac

SEQ ID NO: 2899461 - DNA, 25 bp, Homo sapien
tctggttgggtctggctaaggtcca

SEQ ID NO: 2899462 - DNA, 25 bp, Homo sapien
ttgggtctggctaaggtccacctgg

SEQ ID NO: 2899463 - DNA, 25 bp, Homo sapien
gtccacctggcctcggggctaccta

SEQ ID NO: 2899464 - DNA, 25 bp, Homo sapien
ggacgggtatgggaacacctgatct

SEQ ID NO: 2899465 - DNA, 25 bp, Homo sapien
tatgggaacacctgatctgtggtga

SEQ ID NO: 2899466 - DNA, 25 bp, Homo sapien
cgggtatgggaacacctgatctgtg

SEQ ID NO: 2899467 - DNA, 25 bp, Homo sapien
ctggcctttgaacattcccacagca

SEQ ID NO: 2899468 - DNA, 25 bp, Homo sapien
agaaactgtgtctgctcttcgttga

SEQ ID NO: 2899469 - DNA, 25 bp, Homo sapien
gaaactgtgtctgctcttcgttgag

SEQ ID NO: 2899470 - DNA, 25 bp, Homo sapien
aaactgtgtctgctcttcgttgagc

SEQ ID NO: 2899471 - DNA, 25 bp, Homo sapien
aactgtgtctgctcttcgttgagca

SEQ ID NO: 2899472 - DNA, 25 bp, Homo sapien
catctccagagcgtcattcttggcg

SEQ ID NO: 2899473 - DNA, 25 bp, Homo sapien
ccagagcgtcattcttggcgggatc

SEQ ID NO: 2899474 - DNA, 25 bp, Homo sapien
ttgaggccctgccaagtggtctcct

SEQ ID NO: 2899475 - DNA, 25 bp, Homo sapien
cattcttggcgggatcgttcacttc

SEQ ID NO: 2899476 - DNA, 25 bp, Homo sapien
cagggtaatgcccacgccaaggtca

SEQ ID NO: 2899477 - DNA, 25 bp, Homo sapien
ccacgatctccaccaaacgggcgta

SEQ ID NO: 2899478 - DNA, 25 bp, Homo sapien
ccaaggtcatgcatgcccacgatct

SEQ ID NO: 2899479 - DNA, 25 bp, Homo sapien
ttgaaaccgatgctctgatgggccc

SEQ ID NO: 2899480 - DNA, 25 bp, Homo sapien
taacacctgggagtatccagttctt

SEQ ID NO: 2899481 - DNA, 25 bp, Homo sapien
gcatgtcccaaccagcacactgtga

SEQ ID NO: 2899482 - DNA, 25 bp, Homo sapien
gtgccaactggcctaatctgtgcca

SEQ ID NO: 2899483 - DNA, 25 bp, Homo sapien
tgatgagcttcaaagtcccctcggc

SEQ ID NO: 2899484 - DNA, 25 bp, Homo sapien
gttagacagaaagcggccacagtct

SEQ ID NO: 2899485 - DNA, 25 bp, Homo sapien
ggctcggttagacagaaagcggcca

SEQ ID NO: 2899486 - DNA, 25 bp, Homo sapien
ttgagggctcggttagacagaaagc

SEQ ID NO: 2899487 - DNA, 25 bp, Homo sapien
ccgcttgagggctcggttagacaga

SEQ ID NO: 2899488 - DNA, 25 bp, Homo sapien
gcacagcagaggttcggatggaggc

SEQ ID NO: 2899489 - DNA, 25 bp, Homo sapien
ctgggcacagcagaggttcggatgg

SEQ ID NO: 2899490 - DNA, 25 bp, Homo sapien
tgggcacagcagaggttcggatgga

SEQ ID NO: 2899491 - DNA, 25 bp, Homo sapien
ccaaagcttgcttccattgagggta

SEQ ID NO: 2899492 - DNA, 25 bp, Homo sapien
caaagcttgcttccattgagggtat

SEQ ID NO: 2899493 - DNA, 25 bp, Homo sapien
cattgagggtatagtattttccaca

SEQ ID NO: 2899494 - DNA, 25 bp, Homo sapien
attgagggtatagtattttccacag

SEQ ID NO: 2899495 - DNA, 25 bp, Homo sapien
aagaatgggatattcagggcgtgga

SEQ ID NO: 2899496 - DNA, 25 bp, Homo sapien
ctgtggaagaatgggatattcaggg

SEQ ID NO: 2899497 - DNA, 25 bp, Homo sapien
tggaagaatgggatattcagggcgt

SEQ ID NO: 2899498 - DNA, 25 bp, Homo sapien
atgggatattcagggcgtggaggac

SEQ ID NO: 2899499 - DNA, 25 bp, Homo sapien
gcccctctccaccacaaaagctgtg

SEQ ID NO: 2899500 - DNA, 25 bp, Homo sapien
caaagaccgtgaagatgtctgctag

SEQ ID NO: 2899501 - DNA, 25 bp, Homo sapien
gatctgtaactggtgtcttggcaaa

SEQ ID NO: 2899502 - DNA, 25 bp, Homo sapien
tctccaccacaaaagctgtgatctt

SEQ ID NO: 2899503 - DNA, 25 bp, Homo sapien
tagactattagaggctacagccacc

SEQ ID NO: 2899504 - DNA, 25 bp, Homo sapien
tgcatacatattagtcccaaaggcc

SEQ ID NO: 2899505 - DNA, 25 bp, Homo sapien
ggaggaatgacgaccactagactat

SEQ ID NO: 2899506 - DNA, 25 bp, Homo sapien
ttttgcacacgtccccagggtgact

SEQ ID NO: 2899507 - DNA, 25 bp, Homo sapien
tgtgcatggcaaccttgaagccact

SEQ ID NO: 2899508 - DNA, 25 bp, Homo sapien
agcacgttctccgatggcacccgta

SEQ ID NO: 2899509 - DNA, 25 bp, Homo sapien
tgctgtgtttgaagccttgatgccc

SEQ ID NO: 2899510 - DNA, 25 bp, Homo sapien
gccttagcaatgatgcctctcatgg

SEQ ID NO: 2899511 - DNA, 25 bp, Homo sapien
gacctaagctagcaagtcgggctgc

SEQ ID NO: 2899512 - DNA, 25 bp, Homo sapien
tctacgctggatggagacctaagct

SEQ ID NO: 2899513 - DNA, 25 bp, Homo sapien
caagtgatcagggacacatggcaag

SEQ ID NO: 2899514 - DNA, 25 bp, Homo sapien
ccagagggatgggttttgcatacaa

SEQ ID NO: 2899515 - DNA, 25 bp, Homo sapien
gcagcataaccatccgtgccagctt

SEQ ID NO: 2899516 - DNA, 25 bp, Homo sapien
tgcagcataaccatccgtgccagct

SEQ ID NO: 2899517 - DNA, 25 bp, Homo sapien
cccaaactgggtacgattagtggca

SEQ ID NO: 2899518 - DNA, 25 bp, Homo sapien
gggtacgattagtggcatgatctac

SEQ ID NO: 2899519 - DNA, 25 bp, Homo sapien
taagggctgacctagcttgtcaggt

SEQ ID NO: 2899520 - DNA, 25 bp, Homo sapien
cccagatctccaagataagggctga

SEQ ID NO: 2899521 - DNA, 25 bp, Homo sapien
agttcatcaggtgcttccaggtatt

SEQ ID NO: 2899522 - DNA, 25 bp, Homo sapien
gtcaggtcaggcagatacttgttct

SEQ ID NO: 2899523 - DNA, 25 bp, Homo sapien
gattttgctgatggcggcctctatc

SEQ ID NO: 2899524 - DNA, 25 bp, Homo sapien
ggaagtccgtggctccctggtccat

SEQ ID NO: 2899525 - DNA, 25 bp, Homo sapien
tggtccatgttagcactcaccatgt

SEQ ID NO: 2899526 - DNA, 25 bp, Homo sapien
aagattttgctgatggcggcctcta

SEQ ID NO: 2899527 - DNA, 25 bp, Homo sapien
gactggttttgggagctgagcaccc

SEQ ID NO: 2899528 - DNA, 25 bp, Homo sapien
ccccatgatttggatgcattcatct

SEQ ID NO: 2899529 - DNA, 25 bp, Homo sapien
tgatttggatgcattcatctgtcac

SEQ ID NO: 2899530 - DNA, 25 bp, Homo sapien
cccatgatttggatgcattcatctg

SEQ ID NO: 2899531 - DNA, 25 bp, Homo sapien
catgatttggatgcattcatctgtc

SEQ ID NO: 2899532 - DNA, 25 bp, Homo sapien
gccacacaaattatatgcccgtgct

SEQ ID NO: 2899533 - DNA, 25 bp, Homo sapien
aattatatgcccgtgctgagatgtg

SEQ ID NO: 2899534 - DNA, 25 bp, Homo sapien
cacaaattatatgcccgtgctgaga

SEQ ID NO: 2899535 - DNA, 25 bp, Homo sapien
ttatatgcccgtgctgagatgtgcc

SEQ ID NO: 2899536 - DNA, 25 bp, Homo sapien
ccacaaacagccgaagaatgtcatt

SEQ ID NO: 2899537 - DNA, 25 bp, Homo sapien
gatgcgaagatctcggagcacacgc

SEQ ID NO: 2899538 - DNA, 25 bp, Homo sapien
ggagcacacgctctactccaggttc

SEQ ID NO: 2899539 - DNA, 25 bp, Homo sapien
tgtcccctcaaagatccggaagatg

SEQ ID NO: 2899540 - DNA, 25 bp, Homo sapien
agcagtcaggactcactgtcctccc

SEQ ID NO: 2899541 - DNA, 25 bp, Homo sapien
tccagcagtcaggactcactgtcct

SEQ ID NO: 2899542 - DNA, 25 bp, Homo sapien
tcaggactcactgtcctccccacct

SEQ ID NO: 2899543 - DNA, 25 bp, Homo sapien
gagggtccagcagtcaggactcact

SEQ ID NO: 2899544 - DNA, 25 bp, Homo sapien
aggaggccagcattcccaaagggat

SEQ ID NO: 2899545 - DNA, 25 bp, Homo sapien
gaggccagcattcccaaagggattc

SEQ ID NO: 2899546 - DNA, 25 bp, Homo sapien
gcaggaggccagcattcccaaaggg

SEQ ID NO: 2899547 - DNA, 25 bp, Homo sapien
ggaggccagcattcccaaagggatt

SEQ ID NO: 2899548 - DNA, 25 bp, Homo sapien
tggttagttgccatacaccaccctg

SEQ ID NO: 2899549 - DNA, 25 bp, Homo sapien
gactggttagttgccatacaccacc

SEQ ID NO: 2899550 - DNA, 25 bp, Homo sapien
agaatgactggttagttgccataca

SEQ ID NO: 2899551 - DNA, 25 bp, Homo sapien
aatgactggttagttgccatacacc

SEQ ID NO: 2899552 - DNA, 25 bp, Homo sapien
actcaactccgggtggacaagtccg

SEQ ID NO: 2899553 - DNA, 25 bp, Homo sapien
actccgactcaactccgggtggaca

SEQ ID NO: 2899554 - DNA, 25 bp, Homo sapien
ctccgggtggacaagtccgctgaga

SEQ ID NO: 2899555 - DNA, 25 bp, Homo sapien
tcgccactccgactcaactccgggt

SEQ ID NO: 2899556 - DNA, 25 bp, Homo sapien
gggccatcggctgcagtccctgatg

SEQ ID NO: 2899557 - DNA, 25 bp, Homo sapien
catcggctgcagtccctgatgcagg

SEQ ID NO: 2899558 - DNA, 25 bp, Homo sapien
gccatcggctgcagtccctgatgca

SEQ ID NO: 2899559 - DNA, 25 bp, Homo sapien
ctcagaggggccatcggctgcagtc

SEQ ID NO: 2899560 - DNA, 25 bp, Homo sapien
acaatccccttcttgtgttttatca

SEQ ID NO: 2899561 - DNA, 25 bp, Homo sapien
caccacagtggcaaactgctccaga

SEQ ID NO: 2899562 - DNA, 25 bp, Homo sapien
tcttgtgttttatcagcttggcctc

SEQ ID NO: 2899563 - DNA, 25 bp, Homo sapien
gcttggcctccaccacagtggcaaa

SEQ ID NO: 2899564 - DNA, 25 bp, Homo sapien
gcggaatggtgtagagctcacttac

SEQ ID NO: 2899565 - DNA, 25 bp, Homo sapien
gggaggggcggaatggtgtagagct

SEQ ID NO: 2899566 - DNA, 25 bp, Homo sapien
cattagtctcaaggagaggaaaggg

SEQ ID NO: 2899567 - DNA, 25 bp, Homo sapien
aggggcggaatggtgtagagctcac

SEQ ID NO: 2899568 - DNA, 25 bp, Homo sapien
catggcatagaggtcgatggccccg

SEQ ID NO: 2899569 - DNA, 25 bp, Homo sapien
ccatggcatagaggtcgatggcccc

SEQ ID NO: 2899570 - DNA, 25 bp, Homo sapien
tggcatagaggtcgatggccccgtc

SEQ ID NO: 2899571 - DNA, 25 bp, Homo sapien
atggcatagaggtcgatggccccgt

SEQ ID NO: 2899572 - DNA, 25 bp, Homo sapien
cccctgcggctcaggcattccctgc

SEQ ID NO: 2899573 - DNA, 25 bp, Homo sapien
ccctgcggctcaggcattccctgcc

SEQ ID NO: 2899574 - DNA, 25 bp, Homo sapien
ataaatctgggccggctgggatcca

SEQ ID NO: 2899575 - DNA, 25 bp, Homo sapien
tctgggccggctgggatccaggccc

SEQ ID NO: 2899576 - DNA, 25 bp, Homo sapien
gtggccctcactcagggatcttgag

SEQ ID NO: 2899577 - DNA, 25 bp, Homo sapien
gggtggccctcactcagggatcttg

SEQ ID NO: 2899578 - DNA, 25 bp, Homo sapien
ggtggccctcactcagggatcttga

SEQ ID NO: 2899579 - DNA, 25 bp, Homo sapien
ctgagcttggcagccccgagtctca

SEQ ID NO: 2899580 - DNA, 25 bp, Homo sapien
tgagcttggcagccccgagtctcac

SEQ ID NO: 2899581 - DNA, 25 bp, Homo sapien
gaaggaggggttgggcctgcacctc

SEQ ID NO: 2899582 - DNA, 25 bp, Homo sapien
atgccctctcggatccgagctgcag

SEQ ID NO: 2899583 - DNA, 25 bp, Homo sapien
catgccctctcggatccgagctgca

SEQ ID NO: 2899584 - DNA, 25 bp, Homo sapien
tgccctctcggatccgagctgcagc

SEQ ID NO: 2899585 - DNA, 25 bp, Homo sapien
gttgcggtagagctcttgctgccag

SEQ ID NO: 2899586 - DNA, 25 bp, Homo sapien
agatgcttttgaagttgcggtagag

SEQ ID NO: 2899587 - DNA, 25 bp, Homo sapien
ttgcggtagagctcttgctgccagg

SEQ ID NO: 2899588 - DNA, 25 bp, Homo sapien
gagatgcttttgaagttgcggtaga

SEQ ID NO: 2899589 - DNA, 25 bp, Homo sapien
taagtgctcttgagagcaggcacag

SEQ ID NO: 2899590 - DNA, 25 bp, Homo sapien
ttcggctttggcttgagggaaggca

SEQ ID NO: 2899591 - DNA, 25 bp, Homo sapien
atttgcgaggcagtaagtgctcttg

SEQ ID NO: 2899592 - DNA, 25 bp, Homo sapien
agtgctgggaacactaggccccttc

SEQ ID NO: 2899593 - DNA, 25 bp, Homo sapien
agaattcccatccattgggcccctt

SEQ ID NO: 2899594 - DNA, 25 bp, Homo sapien
ggcatttcctcttttatatgaagaa

SEQ ID NO: 2899595 - DNA, 25 bp, Homo sapien
ggccccttctaaccccagaatgtga

SEQ ID NO: 2899596 - DNA, 25 bp, Homo sapien
aagaattcccatccattgggcccct

SEQ ID NO: 2899597 - DNA, 25 bp, Homo sapien
ttgctgaaggcagcgatcatgtggc

SEQ ID NO: 2899598 - DNA, 25 bp, Homo sapien
gggagccgatggtccgtttcctgaa

SEQ ID NO: 2899599 - DNA, 25 bp, Homo sapien
actaggcggagtcagacggtcacgt

SEQ ID NO: 2899600 - DNA, 25 bp, Homo sapien
taagtcacgtgacatgaggagaggt

SEQ ID NO: 2899601 - DNA, 25 bp, Homo sapien
tggagagccctgatggcaccaactt

SEQ ID NO: 2899602 - DNA, 25 bp, Homo sapien
cccctggagcttggatactgtctgc

SEQ ID NO: 2899603 - DNA, 25 bp, Homo sapien
tgaaattgaatccattacggttggg

SEQ ID NO: 2899604 - DNA, 25 bp, Homo sapien
agggtcctcagcctatcccctggag

SEQ ID NO: 2899605 - DNA, 25 bp, Homo sapien
gggaaaagagatctcgaatcaagaa

SEQ ID NO: 2899606 - DNA, 25 bp, Homo sapien
gctttggggtgcttcggaggcctcg

SEQ ID NO: 2899607 - DNA, 25 bp, Homo sapien
tctcgaatcaagaagagcaagaagc

SEQ ID NO: 2899608 - DNA, 25 bp, Homo sapien
gcagaacggggggatagactcccac

SEQ ID NO: 2899609 - DNA, 25 bp, Homo sapien
ccccgacagtgctaccttgcttgag

SEQ ID NO: 2899610 - DNA, 25 bp, Homo sapien
caagagaagggcagctcaagcaggt

SEQ ID NO: 2899611 - DNA, 25 bp, Homo sapien
tgagaagatgaagctcaaggactct

SEQ ID NO: 2899612 - DNA, 25 bp, Homo sapien
caaggtccactttctctcgtctgca

SEQ ID NO: 2899613 - DNA, 25 bp, Homo sapien
gtgtcacatccagtgattgttttgg

SEQ ID NO: 2899614 - DNA, 25 bp, Homo sapien
tcccatcctgctgtagacttcttga

SEQ ID NO: 2899615 - DNA, 25 bp, Homo sapien
gacttcttgattgtcagtctgtgtc

SEQ ID NO: 2899616 - DNA, 25 bp, Homo sapien
caggaccggcacttcttaatgtttg

SEQ ID NO: 2899617 - DNA, 25 bp, Homo sapien
ctcattctacaaagagagaggtggc

SEQ ID NO: 2899618 - DNA, 25 bp, Homo sapien
cgaaagtgtctacggtctgtgaagc

SEQ ID NO: 2899619 - DNA, 25 bp, Homo sapien
gacgaaagtgtctacggtctgtgaa

SEQ ID NO: 2899620 - DNA, 25 bp, Homo sapien
gaggggggtctcattctacaaagag

SEQ ID NO: 2899621 - DNA, 25 bp, Homo sapien
aacacgaagttaagagtgaggctgc

SEQ ID NO: 2899622 - DNA, 25 bp, Homo sapien
agctgacttggcttctctttgagcc

SEQ ID NO: 2899623 - DNA, 25 bp, Homo sapien
cctggatcaccgtatgtctgtcact

SEQ ID NO: 2899624 - DNA, 25 bp, Homo sapien
taggcttccgcctgtgtcccagtct

SEQ ID NO: 2899625 - DNA, 25 bp, Homo sapien
caaacactgattcggctctcctagg

SEQ ID NO: 2899626 - DNA, 25 bp, Homo sapien
tctttgagcctcctggatcaccgta

SEQ ID NO: 2899627 - DNA, 25 bp, Homo sapien
agactgggacacaggcggaagccta

SEQ ID NO: 2899628 - DNA, 25 bp, Homo sapien
ggctcaaagagaagccaagtcagct

SEQ ID NO: 2899629 - DNA, 25 bp, Homo sapien
catacggtgatccaggaggctcaaa

SEQ ID NO: 2899630 - DNA, 25 bp, Homo sapien
cctaggagagccgaatcagtgtttg

SEQ ID NO: 2899631 - DNA, 25 bp, Homo sapien
gagtgacagacatacggtgatccag

SEQ ID NO: 2899632 - DNA, 25 bp, Homo sapien
actccatggaaaccccagactggga

SEQ ID NO: 2899633 - DNA, 25 bp, Homo sapien
gctaggatggggtcctccgagacct

SEQ ID NO: 2899634 - DNA, 25 bp, Homo sapien
cccctggcgagggtaaagcccagcg

SEQ ID NO: 2899635 - DNA, 25 bp, Homo sapien
cgggccgagacaggtagggctagga

SEQ ID NO: 2899636 - DNA, 25 bp, Homo sapien
ctgggagtggcaccgacggcttcgg

SEQ ID NO: 2899637 - DNA, 25 bp, Homo sapien
ctcagaaagccacccctggcgaggg

SEQ ID NO: 2899638 - DNA, 25 bp, Homo sapien
gagcgggcggctcagaaagccaccc

SEQ ID NO: 2899639 - DNA, 25 bp, Homo sapien
gggtggctttctgagccgcccgctc

SEQ ID NO: 2899640 - DNA, 25 bp, Homo sapien
ctgggctttaccctcgccaggggtg

SEQ ID NO: 2899641 - DNA, 25 bp, Homo sapien
aggtctcggaggaccccatcctagc

SEQ ID NO: 2899642 - DNA, 25 bp, Homo sapien
cgcaacctccccgaagccgtcggtg

SEQ ID NO: 2899643 - DNA, 25 bp, Homo sapien
atcctagccctacctgtctcggccc

SEQ ID NO: 2899644 - DNA, 25 bp, Homo sapien
cagctccccgttccgctgggcttta

SEQ ID NO: 2899645 - DNA, 25 bp, Homo sapien
tagaccgcgcaggaggaacttagtc

SEQ ID NO: 2899646 - DNA, 25 bp, Homo sapien
cgccatagaccgcgcaggaggaact

SEQ ID NO: 2899647 - DNA, 25 bp, Homo sapien
ccgccatagaccgcgcaggaggaac

SEQ ID NO: 2899648 - DNA, 25 bp, Homo sapien
ccgcgcaggaggaacttagtcccgg

SEQ ID NO: 2899649 - DNA, 25 bp, Homo sapien
gacaacgaccccgtctacattttca

SEQ ID NO: 2899650 - DNA, 25 bp, Homo sapien
acattttcactgtgaccggggcggg

SEQ ID NO: 2899651 - DNA, 25 bp, Homo sapien
ttcactgtgaccggggcgggaagag

SEQ ID NO: 2899652 - DNA, 25 bp, Homo sapien
aacgaccccgtctacattttcactg

SEQ ID NO: 2899653 - DNA, 25 bp, Homo sapien
gcgctcacgcggagggcgcccctcc

SEQ ID NO: 2899654 - DNA, 25 bp, Homo sapien
caggggggcgctcacgcggagggcg

SEQ ID NO: 2899655 - DNA, 25 bp, Homo sapien
tatgttcaatattcccaggggggcg

SEQ ID NO: 2899656 - DNA, 25 bp, Homo sapien
ctggaatgagaggtgattatgttca

SEQ ID NO: 2899657 - DNA, 25 bp, Homo sapien
ggcgtcctcccaccattaagaccta

SEQ ID NO: 2899658 - DNA, 25 bp, Homo sapien
ggtgaaacgggccgagcactcgggc

SEQ ID NO: 2899659 - DNA, 25 bp, Homo sapien
tcctcggggtgaaacgggccgagca

SEQ ID NO: 2899660 - DNA, 25 bp, Homo sapien
tcccaccattaagacctaacatagt

SEQ ID NO: 2899661 - DNA, 25 bp, Homo sapien
ctccaactcgcgtccggtccctgct

SEQ ID NO: 2899662 - DNA, 25 bp, Homo sapien
tccaactcgcgtccggtccctgctc

SEQ ID NO: 2899663 - DNA, 25 bp, Homo sapien
ccaactcgcgtccggtccctgctct

SEQ ID NO: 2899664 - DNA, 25 bp, Homo sapien
caggccgcccaaggccaacagcgag

SEQ ID NO: 2899665 - DNA, 25 bp, Homo sapien
aggccgcccaaggccaacagcgagt

SEQ ID NO: 2899666 - DNA, 25 bp, Homo sapien
cgcccaaggccaacagcgagtccaa

SEQ ID NO: 2899667 - DNA, 25 bp, Homo sapien
ccaaggccaacagcgagtccaacat

SEQ ID NO: 2899668 - DNA, 25 bp, Homo sapien
cgccttcgcgaacccgtcgcgattt

SEQ ID NO: 2899669 - DNA, 25 bp, Homo sapien
cgtcgcgatttccacacctagcctg

SEQ ID NO: 2899670 - DNA, 25 bp, Homo sapien
gagcgctgggattaccgccttcgcg

SEQ ID NO: 2899671 - DNA, 25 bp, Homo sapien
cagagcgagggacggataaagggta

SEQ ID NO: 2899672 - DNA, 25 bp, Homo sapien
agtgcagatttcttgacaagcgcct

SEQ ID NO: 2899673 - DNA, 25 bp, Homo sapien
cttgacaagcgccttcaagagactg

SEQ ID NO: 2899674 - DNA, 25 bp, Homo sapien
cagatttcttgacaagcgccttcaa

SEQ ID NO: 2899675 - DNA, 25 bp, Homo sapien
acaagcgccttcaagagactgcgcc

SEQ ID NO: 2899676 - DNA, 25 bp, Homo sapien
gaaactcttcctcgctcacttcaca

SEQ ID NO: 2899677 - DNA, 25 bp, Homo sapien
cgattgttgatatcagagtcaaaac

SEQ ID NO: 2899678 - DNA, 25 bp, Homo sapien
gcccaggatatgcacttgctcccca

SEQ ID NO: 2899679 - DNA, 25 bp, Homo sapien
tcagagtcaaaaccttcacgaaact

SEQ ID NO: 2899680 - DNA, 25 bp, Homo sapien
tgaccagttgagagggtctctgaag

SEQ ID NO: 2899681 - DNA, 25 bp, Homo sapien
caggaacaggatctgtcctcttgca

SEQ ID NO: 2899682 - DNA, 25 bp, Homo sapien
aaggcctcctcagtttttgaccagt

SEQ ID NO: 2899683 - DNA, 25 bp, Homo sapien
gaatcgagagcaatggtgacaggaa

SEQ ID NO: 2899684 - DNA, 25 bp, Homo sapien
ctggcagagtgtggtgcagggaagg

SEQ ID NO: 2899685 - DNA, 25 bp, Homo sapien
tgtggtgcagggaaggcgaagtagc

SEQ ID NO: 2899686 - DNA, 25 bp, Homo sapien
gagtgtggtgcagggaaggcgaagt

SEQ ID NO: 2899687 - DNA, 25 bp, Homo sapien
tggtgcagggaaggcgaagtagcag

SEQ ID NO: 2899688 - DNA, 25 bp, Homo sapien
ggacaagagtcctgatggctcacag

SEQ ID NO: 2899689 - DNA, 25 bp, Homo sapien
gagtcctgatggctcacagcatgca

SEQ ID NO: 2899690 - DNA, 25 bp, Homo sapien
caagagtcctgatggctcacagcat

SEQ ID NO: 2899691 - DNA, 25 bp, Homo sapien
caggacaagagtcctgatggctcac

SEQ ID NO: 2899692 - DNA, 25 bp, Homo sapien
cccagatgtttattctagggtagaa

SEQ ID NO: 2899693 - DNA, 25 bp, Homo sapien
cttggcagagggagatgtatgaggg

SEQ ID NO: 2899694 - DNA, 25 bp, Homo sapien
ggaaaaggggcacactccttggcag

SEQ ID NO: 2899695 - DNA, 25 bp, Homo sapien
tggagaacccagatgtttattctag

SEQ ID NO: 2899696 - DNA, 25 bp, Homo sapien
gcaaatggtagatggcattaaggag

SEQ ID NO: 2899697 - DNA, 25 bp, Homo sapien
aaaaaaagcaaatggtagatggcat

SEQ ID NO: 2899698 - DNA, 25 bp, Homo sapien
aaaaaagcaaatggtagatggcatt

SEQ ID NO: 2899699 - DNA, 25 bp, Homo sapien
tggtagatggcattaaggagaagta

SEQ ID NO: 2899700 - DNA, 25 bp, Homo sapien
gctacgggctcaacaatactgcctc

SEQ ID NO: 2899701 - DNA, 25 bp, Homo sapien
tgctacgggctcaacaatactgcct

SEQ ID NO: 2899702 - DNA, 25 bp, Homo sapien
ccctgctacgggctcaacaatactg

SEQ ID NO: 2899703 - DNA, 25 bp, Homo sapien
gcaacccctgctacgggctcaacaa

SEQ ID NO: 2899704 - DNA, 25 bp, Homo sapien
agcacactcactttccccactgagg

SEQ ID NO: 2899705 - DNA, 25 bp, Homo sapien
cacactcactttccccactgaggag

SEQ ID NO: 2899706 - DNA, 25 bp, Homo sapien
cagcacactcactttccccactgag

SEQ ID NO: 2899707 - DNA, 25 bp, Homo sapien
gcacactcactttccccactgagga

SEQ ID NO: 2899708 - DNA, 25 bp, Homo sapien
cctggcccatggtaccgcccagggt

SEQ ID NO: 2899709 - DNA, 25 bp, Homo sapien
tggcccatggtaccgcccagggtca

SEQ ID NO: 2899710 - DNA, 25 bp, Homo sapien
ccatggtaccgcccagggtcacctc

SEQ ID NO: 2899711 - DNA, 25 bp, Homo sapien
aggcctggcccatggtaccgcccag

SEQ ID NO: 2899712 - DNA, 25 bp, Homo sapien
gggcgctgtcggggcctccgacaca

SEQ ID NO: 2899713 - DNA, 25 bp, Homo sapien
gctgtcggggcctccgacacaggat

SEQ ID NO: 2899714 - DNA, 25 bp, Homo sapien
gcgctgtcggggcctccgacacagg

SEQ ID NO: 2899715 - DNA, 25 bp, Homo sapien
gttgggcgctgtcggggcctccgac

SEQ ID NO: 2899716 - DNA, 25 bp, Homo sapien
atatgaggatcggagtagggctggg

SEQ ID NO: 2899717 - DNA, 25 bp, Homo sapien
gggtatatgaggatcggagtagggc

SEQ ID NO: 2899718 - DNA, 25 bp, Homo sapien
ctgaagtccggaaggatggagaacc

SEQ ID NO: 2899719 - DNA, 25 bp, Homo sapien
ggctgaagtccggaaggatggagaa

SEQ ID NO: 2899720 - DNA, 25 bp, Homo sapien
cccgtgaccagatactaaactacat

SEQ ID NO: 2899721 - DNA, 25 bp, Homo sapien
tcccgtgaccagatactaaactaca

SEQ ID NO: 2899722 - DNA, 25 bp, Homo sapien
tctcccgtgaccagatactaaacta

SEQ ID NO: 2899723 - DNA, 25 bp, Homo sapien
cgtgaccagatactaaactacattt

SEQ ID NO: 2899724 - DNA, 25 bp, Homo sapien
tgtaggtacaaaggatgctgccact

SEQ ID NO: 2899725 - DNA, 25 bp, Homo sapien
ctgtaggtacaaaggatgctgccac

SEQ ID NO: 2899726 - DNA, 25 bp, Homo sapien
gtaggtacaaaggatgctgccactc

SEQ ID NO: 2899727 - DNA, 25 bp, Homo sapien
aggtcaaatgagttgtgggatccac

SEQ ID NO: 2899728 - DNA, 25 bp, Homo sapien
aaggtcaaatgagttgtgggatcca

SEQ ID NO: 2899729 - DNA, 25 bp, Homo sapien
aagggcaggatcaggctatctctgg

SEQ ID NO: 2899730 - DNA, 25 bp, Homo sapien
tactcagggatccacgtacccaggt

SEQ ID NO: 2899731 - DNA, 25 bp, Homo sapien
gacctccatgttagagctgaagcac

SEQ ID NO: 2899732 - DNA, 25 bp, Homo sapien
taagttcctagcagcttgagggcaa

SEQ ID NO: 2899733 - DNA, 25 bp, Homo sapien
tactgggcacagaacagcaagcgtg

SEQ ID NO: 2899734 - DNA, 25 bp, Homo sapien
ggtgactgtgactctcattcaggca

SEQ ID NO: 2899735 - DNA, 25 bp, Homo sapien
tgctggtgagggtagctaacaggtt

SEQ ID NO: 2899736 - DNA, 25 bp, Homo sapien
gaagggaagatttggtgctggtgag

SEQ ID NO: 2899737 - DNA, 25 bp, Homo sapien
caggttgggtctggatactttcttc

SEQ ID NO: 2899738 - DNA, 25 bp, Homo sapien
aagatgtggctggtagcctgccctg

SEQ ID NO: 2899739 - DNA, 25 bp, Homo sapien
gtcttcttggtccaggtcatcataa

SEQ ID NO: 2899740 - DNA, 25 bp, Homo sapien
gaagatgtggctggtagcctgccct

SEQ ID NO: 2899741 - DNA, 25 bp, Homo sapien
tctgggtcttcttggtccaggtcat

SEQ ID NO: 2899742 - DNA, 25 bp, Homo sapien
gcagggacagggtaaggctaacaca

SEQ ID NO: 2899743 - DNA, 25 bp, Homo sapien
caaacaatagaaagatggttctggg

SEQ ID NO: 2899744 - DNA, 25 bp, Homo sapien
gggtgttctactctctcacattacc

SEQ ID NO: 2899745 - DNA, 25 bp, Homo sapien
tctgtcctgatgagacgctgcttcc

SEQ ID NO: 2899746 - DNA, 25 bp, Homo sapien
tagtgcacctacttcagttcagaac

SEQ ID NO: 2899747 - DNA, 25 bp, Homo sapien
gttcagaacacttagcaccccactg

SEQ ID NO: 2899748 - DNA, 25 bp, Homo sapien
gctcgtatctcgacattcattccca

SEQ ID NO: 2899749 - DNA, 25 bp, Homo sapien
gacaattgactaaaagatgcaggtg

SEQ ID NO: 2899750 - DNA, 25 bp, Homo sapien
tgtccagactcatgtatcctcactt

SEQ ID NO: 2899751 - DNA, 25 bp, Homo sapien
tataatctaacacaatcactctcgt

SEQ ID NO: 2899752 - DNA, 25 bp, Homo sapien
gacctctaaacttttgatcctacca

SEQ ID NO: 2899753 - DNA, 25 bp, Homo sapien
gatcctaccagtttttcactatcca

SEQ ID NO: 2899754 - DNA, 25 bp, Homo sapien
aaatccactcgtggccaggcgtggt

SEQ ID NO: 2899755 - DNA, 25 bp, Homo sapien
tatatttcactctgatcttattttc

SEQ ID NO: 2899756 - DNA, 25 bp, Homo sapien
tgttatatatttcactctgatctta

SEQ ID NO: 2899757 - DNA, 25 bp, Homo sapien
cagtaatcacgatgtttttaaaatc

SEQ ID NO: 2899758 - DNA, 25 bp, Homo sapien
gcgggccacgcccttcacagcaccc

SEQ ID NO: 2899759 - DNA, 25 bp, Homo sapien
gcccccgcgggccacgcccttcaca

SEQ ID NO: 2899760 - DNA, 25 bp, Homo sapien
ccccgcgggccacgcccttcacagc

SEQ ID NO: 2899761 - DNA, 25 bp, Homo sapien
ctcgctcctgcccccgcgggccacg

SEQ ID NO: 2899762 - DNA, 25 bp, Homo sapien
tggagcgcagaacctgcggaggccg

SEQ ID NO: 2899763 - DNA, 25 bp, Homo sapien
gtcccggagtgacgtgcgagggcgg

SEQ ID NO: 2899764 - DNA, 25 bp, Homo sapien
cacaagccaaggacccggagagcag

SEQ ID NO: 2899765 - DNA, 25 bp, Homo sapien
tgaaagaaccgatcctggagtctct

SEQ ID NO: 2899766 - DNA, 25 bp, Homo sapien
ttcggagcctatctgttggaagccc

SEQ ID NO: 2899767 - DNA, 25 bp, Homo sapien
gcctatctgttggaagcccgacggc

SEQ ID NO: 2899768 - DNA, 25 bp, Homo sapien
gagcctatctgttggaagcccgacg

SEQ ID NO: 2899769 - DNA, 25 bp, Homo sapien
ctatctgttggaagcccgacggcat

SEQ ID NO: 2899770 - DNA, 25 bp, Homo sapien
ccagctgaccccaaccgcgacccca

SEQ ID NO: 2899771 - DNA, 25 bp, Homo sapien
cctgcgcctgcgcaggaaccacccc

SEQ ID NO: 2899772 - DNA, 25 bp, Homo sapien
cagcccaagaaaagcgggacccgtg

SEQ ID NO: 2899773 - DNA, 25 bp, Homo sapien
agctgaccccaaccgcgaccccagc

SEQ ID NO: 2899774 - DNA, 25 bp, Homo sapien
gaccccaatgttgtacccaaactgc

SEQ ID NO: 2899775 - DNA, 25 bp, Homo sapien
agggtcccagtcactcgctgctgag

SEQ ID NO: 2899776 - DNA, 25 bp, Homo sapien
ccccaatgttgtacccaaactgcag

SEQ ID NO: 2899777 - DNA, 25 bp, Homo sapien
cccaatgttgtacccaaactgcagg

SEQ ID NO: 2899778 - DNA, 25 bp, Homo sapien
ggaaggaggaaatcatgccgcccac

SEQ ID NO: 2899779 - DNA, 25 bp, Homo sapien
tcatgccgcccacggaaaagatggc

SEQ ID NO: 2899780 - DNA, 25 bp, Homo sapien
ggaaaagatggccacggagagggcc

SEQ ID NO: 2899781 - DNA, 25 bp, Homo sapien
tgagagatgataccaatgaggaagg

SEQ ID NO: 2899782 - DNA, 25 bp, Homo sapien
tgaggaatcgtccaaggatgagcat

SEQ ID NO: 2899783 - DNA, 25 bp, Homo sapien
ctgagtaggcgccaatgaggaatcg

SEQ ID NO: 2899784 - DNA, 25 bp, Homo sapien
taggcgccaatgaggaatcgtccaa

SEQ ID NO: 2899785 - DNA, 25 bp, Homo sapien
ccaggacattgttgaccagcatggc

SEQ ID NO: 2899786 - DNA, 25 bp, Homo sapien
ccgcaggtgagtgggagcaatctcc

SEQ ID NO: 2899787 - DNA, 25 bp, Homo sapien
ctgggcgatcagaatgccgataaca

SEQ ID NO: 2899788 - DNA, 25 bp, Homo sapien
ccccgcaggtgagtgggagcaatct

SEQ ID NO: 2899789 - DNA, 25 bp, Homo sapien
aatggccagttggttgagcgtcccc

SEQ ID NO: 2899790 - DNA, 25 bp, Homo sapien
caggcccctcgagattctggatgat

SEQ ID NO: 2899791 - DNA, 25 bp, Homo sapien
agattctggatgatgtagaggtagc

SEQ ID NO: 2899792 - DNA, 25 bp, Homo sapien
tctggcaggcccctcgagattctgg

SEQ ID NO: 2899793 - DNA, 25 bp, Homo sapien
ccctcgagattctggatgatgtaga

SEQ ID NO: 2899794 - DNA, 25 bp, Homo sapien
accgcaatgatcaggggctgccggt

SEQ ID NO: 2899795 - DNA, 25 bp, Homo sapien
cagctgcagcacgaccgcaatgatc

SEQ ID NO: 2899796 - DNA, 25 bp, Homo sapien
actccagaaacatcggcccagcctg

SEQ ID NO: 2899797 - DNA, 25 bp, Homo sapien
ggctgccggtgggtacggctgccca

SEQ ID NO: 2899798 - DNA, 25 bp, Homo sapien
tctcgaagatgctggtcgaataata

SEQ ID NO: 2899799 - DNA, 25 bp, Homo sapien
tggcctacccctgctgtctcgaaga

SEQ ID NO: 2899800 - DNA, 25 bp, Homo sapien
gaagatgctggtcgaataatagaaa

SEQ ID NO: 2899801 - DNA, 25 bp, Homo sapien
ccctgctgtctcgaagatgctggtc

SEQ ID NO: 2899802 - DNA, 25 bp, Homo sapien
aagccagtggctcgggccattccag

SEQ ID NO: 2899803 - DNA, 25 bp, Homo sapien
tgaagccagtggctcgggccattcc

SEQ ID NO: 2899804 - DNA, 25 bp, Homo sapien
ggaggtgaagccagtggctcgggcc

SEQ ID NO: 2899805 - DNA, 25 bp, Homo sapien
ggtgaagccagtggctcgggccatt

SEQ ID NO: 2899806 - DNA, 25 bp, Homo sapien
ggcacagccacacatgcccgccagg

SEQ ID NO: 2899807 - DNA, 25 bp, Homo sapien
aggagatggagcgtccggcgccccg

SEQ ID NO: 2899808 - DNA, 25 bp, Homo sapien
cccaggagatggagcgtccggcgcc

SEQ ID NO: 2899809 - DNA, 25 bp, Homo sapien
atggcacagccacacatgcccgcca

SEQ ID NO: 2899810 - DNA, 25 bp, Homo sapien
agctcggccacgatgaaccaaggaa

SEQ ID NO: 2899811 - DNA, 25 bp, Homo sapien
gggccagggccaatctcaaaaaatg

SEQ ID NO: 2899812 - DNA, 25 bp, Homo sapien
tggccacaatggagacgtagctcat

SEQ ID NO: 2899813 - DNA, 25 bp, Homo sapien
tgatgaagttgctcgtccagttgga

SEQ ID NO: 2899814 - DNA, 25 bp, Homo sapien
tcagttactatccaatctaggtcag

SEQ ID NO: 2899815 - DNA, 25 bp, Homo sapien
taaggtaagttatgccactggtgcg

SEQ ID NO: 2899816 - DNA, 25 bp, Homo sapien
ggctagctgtgtgatgcccacctct

SEQ ID NO: 2899817 - DNA, 25 bp, Homo sapien
cactggtgcgtttcagacacctcag

SEQ ID NO: 2899818 - DNA, 25 bp, Homo sapien
gcaaatagaaggaagacgtagggcc

SEQ ID NO: 2899819 - DNA, 25 bp, Homo sapien
gagatctggtcaaacgtccggcctc

SEQ ID NO: 2899820 - DNA, 25 bp, Homo sapien
gtttcaggtactcttaagaaggtga

SEQ ID NO: 2899821 - DNA, 25 bp, Homo sapien
tcagtcgttctcatctggccctaaa

SEQ ID NO: 2899822 - DNA, 25 bp, Homo sapien
ggtttgtcccactgagaaagtctag

SEQ ID NO: 2899823 - DNA, 25 bp, Homo sapien
tctctagcagcgaagaaggtattct

SEQ ID NO: 2899824 - DNA, 25 bp, Homo sapien
cagagtctgcgtggcaagaattcag

SEQ ID NO: 2899825 - DNA, 25 bp, Homo sapien
taccaggctgcagggattcttttcc

SEQ ID NO: 2899826 - DNA, 25 bp, Homo sapien
gctgacacctccctcacagagtgag

SEQ ID NO: 2899827 - DNA, 25 bp, Homo sapien
ctgttttggagaatcgctagtaact

SEQ ID NO: 2899828 - DNA, 25 bp, Homo sapien
tggagaatcgctagtaactcactgt

SEQ ID NO: 2899829 - DNA, 25 bp, Homo sapien
gagtattctgcaaatgccaagagca

SEQ ID NO: 2899830 - DNA, 25 bp, Homo sapien
gaaggaaccagccagctcttacctc

SEQ ID NO: 2899831 - DNA, 25 bp, Homo sapien
tccctcccgtaactcaggctgagaa

SEQ ID NO: 2899832 - DNA, 25 bp, Homo sapien
aactccctcccgtaactcaggctga

SEQ ID NO: 2899833 - DNA, 25 bp, Homo sapien
gagccatccttactgttcagagaca

SEQ ID NO: 2899834 - DNA, 25 bp, Homo sapien
tgttccttgccttaggcctttccgc

SEQ ID NO: 2899835 - DNA, 25 bp, Homo sapien
tgaggacctcagatgtgggatgaaa

SEQ ID NO: 2899836 - DNA, 25 bp, Homo sapien
acgccagcagcctaccacagaaggt

SEQ ID NO: 2899837 - DNA, 25 bp, Homo sapien
gccaaggtcccgctgatggttcccg

SEQ ID NO: 2899838 - DNA, 25 bp, Homo sapien
cccactcttctagcgcgctagtgtg

SEQ ID NO: 2899839 - DNA, 25 bp, Homo sapien
gcgcgggagatgtctttccgcccca

SEQ ID NO: 2899840 - DNA, 25 bp, Homo sapien
ttccgccccactcttctagcgcgct

SEQ ID NO: 2899841 - DNA, 25 bp, Homo sapien
tcttctagcgcgctagtgtggtcgg

SEQ ID NO: 2899842 - DNA, 25 bp, Homo sapien
gtgggcgccttgtcttggaatcagt

SEQ ID NO: 2899843 - DNA, 25 bp, Homo sapien
tggggtgggcgccttgtcttggaat

SEQ ID NO: 2899844 - DNA, 25 bp, Homo sapien
gtcttggaatcagtccccccagttc

SEQ ID NO: 2899845 - DNA, 25 bp, Homo sapien
ctctgtggggtgggcgccttgtctt

SEQ ID NO: 2899846 - DNA, 25 bp, Homo sapien
acgggtcttagtacgcaggcgccga

SEQ ID NO: 2899847 - DNA, 25 bp, Homo sapien
cctgagcgttttcaactaatctgca

SEQ ID NO: 2899848 - DNA, 25 bp, Homo sapien
gacccgtccaatgacgcgcatacgt

SEQ ID NO: 2899849 - DNA, 25 bp, Homo sapien
tgacagccgcgcaagcgtgctatct

SEQ ID NO: 2899850 - DNA, 25 bp, Homo sapien
ctgcgtcgctccaacgtcaccgggc

SEQ ID NO: 2899851 - DNA, 25 bp, Homo sapien
tcccgcgtggctgcctcgcggctcg

SEQ ID NO: 2899852 - DNA, 25 bp, Homo sapien
gcctctcctcacctcgcgccgctct

SEQ ID NO: 2899853 - DNA, 25 bp, Homo sapien
ctctctggccgaacccgtgcggcgg

SEQ ID NO: 2899854 - DNA, 25 bp, Homo sapien
ggccgcgctgagccgggtcctcaac

SEQ ID NO: 2899855 - DNA, 25 bp, Homo sapien
tggccgcgctgagccgggtcctcaa

SEQ ID NO: 2899856 - DNA, 25 bp, Homo sapien
tcctcagagactgcgccaggccgga

SEQ ID NO: 2899857 - DNA, 25 bp, Homo sapien
acgcttggccatgcggcctgcgacc

SEQ ID NO: 2899858 - DNA, 25 bp, Homo sapien
catgcggccccggtccacgcttggc

SEQ ID NO: 2899859 - DNA, 25 bp, Homo sapien
cgaccccgagggcagcctcccgtgg

SEQ ID NO: 2899860 - DNA, 25 bp, Homo sapien
cgaggactagctccccgcgctaggg

SEQ ID NO: 2899861 - DNA, 25 bp, Homo sapien
tccggcttccactcctcaaaatctc

SEQ ID NO: 2899862 - DNA, 25 bp, Homo sapien
tgattaggacccgagcctccggctt

SEQ ID NO: 2899863 - DNA, 25 bp, Homo sapien
catgtggccgttccgggcttccggt

SEQ ID NO: 2899864 - DNA, 25 bp, Homo sapien
ccgccacacttcacaggagggtttt

SEQ ID NO: 2899865 - DNA, 25 bp, Homo sapien
ccacacttcacaggagggtttttca

SEQ ID NO: 2899866 - DNA, 25 bp, Homo sapien
gccacacttcacaggagggtttttc

SEQ ID NO: 2899867 - DNA, 25 bp, Homo sapien
gaccgccacacttcacaggagggtt

SEQ ID NO: 2899868 - DNA, 25 bp, Homo sapien
taagcatggaggtcaacaggacctc

SEQ ID NO: 2899869 - DNA, 25 bp, Homo sapien
aacaggacctccaatctatcccatt

SEQ ID NO: 2899870 - DNA, 25 bp, Homo sapien
aggacctccaatctatcccatttct

SEQ ID NO: 2899871 - DNA, 25 bp, Homo sapien
tgaataagcatggaggtcaacagga

SEQ ID NO: 2899872 - DNA, 25 bp, Homo sapien
acaaagccattcttacgtaatgctg

SEQ ID NO: 2899873 - DNA, 25 bp, Homo sapien
agccattcttacgtaatgctgagca

SEQ ID NO: 2899874 - DNA, 25 bp, Homo sapien
gcctttgagcaccacaaagccattc

SEQ ID NO: 2899875 - DNA, 25 bp, Homo sapien
aaagccattcttacgtaatgctgag

SEQ ID NO: 2899876 - DNA, 25 bp, Homo sapien
tgatcctgcgtcagagttccaaagg

SEQ ID NO: 2899877 - DNA, 25 bp, Homo sapien
tcagaattgacgcaggagtccctcc

SEQ ID NO: 2899878 - DNA, 25 bp, Homo sapien
tcgaagagttttccggacaccagga

SEQ ID NO: 2899879 - DNA, 25 bp, Homo sapien
aaagcatggaggctcaaggaaccca

SEQ ID NO: 2899880 - DNA, 25 bp, Homo sapien
tgtatgcatcacaaagagaaaccca

SEQ ID NO: 2899881 - DNA, 25 bp, Homo sapien
ctgtatgtatgcatcacaaagagaa

SEQ ID NO: 2899882 - DNA, 25 bp, Homo sapien
tgcatcacaaagagaaacccaacca

SEQ ID NO: 2899883 - DNA, 25 bp, Homo sapien
catcacaaagagaaacccaaccaaa

SEQ ID NO: 2899884 - DNA, 25 bp, Homo sapien
gggacatccatattatgagttgacg

SEQ ID NO: 2899885 - DNA, 25 bp, Homo sapien
gagttgacgggcagatatcttcata

SEQ ID NO: 2899886 - DNA, 25 bp, Homo sapien
tccatattatgagttgacgggcaga

SEQ ID NO: 2899887 - DNA, 25 bp, Homo sapien
taaagatgtcaataccaaccagatg

SEQ ID NO: 2899888 - DNA, 25 bp, Homo sapien
gaaggaggctgaaggtagtaggccc

SEQ ID NO: 2899889 - DNA, 25 bp, Homo sapien
ggactgatagcaaactaataccaaa

SEQ ID NO: 2899890 - DNA, 25 bp, Homo sapien
ggctctgatagacaaactggactga

SEQ ID NO: 2899891 - DNA, 25 bp, Homo sapien
ctgaaggtagtaggcccagggaggc

SEQ ID NO: 2899892 - DNA, 25 bp, Homo sapien
ggtctccctcagggagacgaaggtc

SEQ ID NO: 2899893 - DNA, 25 bp, Homo sapien
caaggtctccctcagggagacgaag

SEQ ID NO: 2899894 - DNA, 25 bp, Homo sapien
tccctcagggagacgaaggtcctct

SEQ ID NO: 2899895 - DNA, 25 bp, Homo sapien
tctccctcagggagacgaaggtcct

SEQ ID NO: 2899896 - DNA, 25 bp, Homo sapien
gcaagagggatagccaagagatgtc

SEQ ID NO: 2899897 - DNA, 25 bp, Homo sapien
agagggatagccaagagatgtctga

SEQ ID NO: 2899898 - DNA, 25 bp, Homo sapien
agaagcaagagggatagccaagaga

SEQ ID NO: 2899899 - DNA, 25 bp, Homo sapien
ggatagccaagagatgtctgagctc

SEQ ID NO: 2899900 - DNA, 25 bp, Homo sapien
tggccttgattgcaacagctgcctc

SEQ ID NO: 2899901 - DNA, 25 bp, Homo sapien
cagctgcctcctctgtcatggcaga

SEQ ID NO: 2899902 - DNA, 25 bp, Homo sapien
ctgtcatggcagacagcaccgtgat

SEQ ID NO: 2899903 - DNA, 25 bp, Homo sapien
ttattttgccatggccttgattgca

SEQ ID NO: 2899904 - DNA, 25 bp, Homo sapien
agacaggataataccttcaacagga

SEQ ID NO: 2899905 - DNA, 25 bp, Homo sapien
cagaaagtaagcctgaaacaattaa

SEQ ID NO: 2899906 - DNA, 25 bp, Homo sapien
caggataataccttcaacaggaagg

SEQ ID NO: 2899907 - DNA, 25 bp, Homo sapien
aacaattaagactacagcagctctg

SEQ ID NO: 2899908 - DNA, 25 bp, Homo sapien
aaacgtcaaataaattgtgtaggag

SEQ ID NO: 2899909 - DNA, 25 bp, Homo sapien
gtcaaataaattgtgtaggaggagt

SEQ ID NO: 2899910 - DNA, 25 bp, Homo sapien
cgtcaaataaattgtgtaggaggag

SEQ ID NO: 2899911 - DNA, 25 bp, Homo sapien
aacgtcaaataaattgtgtaggagg

SEQ ID NO: 2899912 - DNA, 25 bp, Homo sapien
gggagggcacaaggaccatttgcca

SEQ ID NO: 2899913 - DNA, 25 bp, Homo sapien
cacaaggaccatttgccagaatcca

SEQ ID NO: 2899914 - DNA, 25 bp, Homo sapien
ggtggtgctcagggtaaagggctat

SEQ ID NO: 2899915 - DNA, 25 bp, Homo sapien
gggcacaaggaccatttgccagaat

SEQ ID NO: 2899916 - DNA, 25 bp, Homo sapien
gtgtcggggagagagcccgcaggga

SEQ ID NO: 2899917 - DNA, 25 bp, Homo sapien
tcaggtttgattttaacaaatgtgt

SEQ ID NO: 2899918 - DNA, 25 bp, Homo sapien
agggccctcccagatgcctgaggag

SEQ ID NO: 2899919 - DNA, 25 bp, Homo sapien
taaagcccatgggggcagggccctc

SEQ ID NO: 2899920 - DNA, 25 bp, Homo sapien
catgaagctgctttttccggggcca

SEQ ID NO: 2899921 - DNA, 25 bp, Homo sapien
gatttctaaggagccaataaacacc

SEQ ID NO: 2899922 - DNA, 25 bp, Homo sapien
gaagggtgggcgcacggaagatggg

SEQ ID NO: 2899923 - DNA, 25 bp, Homo sapien
gggcctctgtacagttgttactgac

SEQ ID NO: 2899924 - DNA, 25 bp, Homo sapien
gaagccctggatacactggttcgag

SEQ ID NO: 2899925 - DNA, 25 bp, Homo sapien
ccggagggacagcttgaaccagtac

SEQ ID NO: 2899926 - DNA, 25 bp, Homo sapien
gcggcgggcggaatcaagactatat

SEQ ID NO: 2899927 - DNA, 25 bp, Homo sapien
gaaccgtgaaacaagactactctgg

SEQ ID NO: 2899928 - DNA, 25 bp, Homo sapien
tgacccccccataggcctccctcat

SEQ ID NO: 2899929 - DNA, 25 bp, Homo sapien
tctaatgacccccccataggcctcc

SEQ ID NO: 2899930 - DNA, 25 bp, Homo sapien
cttctaatgacccccccataggcct

SEQ ID NO: 2899931 - DNA, 25 bp, Homo sapien
tgggggaggagaccttctaatgacc

SEQ ID NO: 2899932 - DNA, 25 bp, Homo sapien
ggtaggtggccaggatattcatctc

SEQ ID NO: 2899933 - DNA, 25 bp, Homo sapien
catccaccatcataaatccatagtc

SEQ ID NO: 2899934 - DNA, 25 bp, Homo sapien
tggccaggatattcatctcgtccca

SEQ ID NO: 2899935 - DNA, 25 bp, Homo sapien
gtagggagtgttgggctcatccacc

SEQ ID NO: 2899936 - DNA, 25 bp, Homo sapien
gaggtcctcaaaactgtcctgcagc

SEQ ID NO: 2899937 - DNA, 25 bp, Homo sapien
cagagaggtcctcaaaactgtcctg

SEQ ID NO: 2899938 - DNA, 25 bp, Homo sapien
ggagccggcagagaggtcctcaaaa

SEQ ID NO: 2899939 - DNA, 25 bp, Homo sapien
ccggcagagaggtcctcaaaactgt

SEQ ID NO: 2899940 - DNA, 25 bp, Homo sapien
tcagcacagtcctggcggaacctgg

SEQ ID NO: 2899941 - DNA, 25 bp, Homo sapien
gtcagcacagtcctggcggaacctg

SEQ ID NO: 2899942 - DNA, 25 bp, Homo sapien
tatcttggaaaagttgtctgcaggc

SEQ ID NO: 2899943 - DNA, 25 bp, Homo sapien
tcttggaaaagttgtctgcaggccc

SEQ ID NO: 2899944 - DNA, 25 bp, Homo sapien
gcactcttgccaaaggctcgctcca

SEQ ID NO: 2899945 - DNA, 25 bp, Homo sapien
tcccaccgcactcttgccaaaggct

SEQ ID NO: 2899946 - DNA, 25 bp, Homo sapien
tgaccatggtgagagcttggctttc

SEQ ID NO: 2899947 - DNA, 25 bp, Homo sapien
gtgagagcttggctttcccaccgca

SEQ ID NO: 2899948 - DNA, 25 bp, Homo sapien
ttccctttgtcatagtgtgccttgc

SEQ ID NO: 2899949 - DNA, 25 bp, Homo sapien
tttgtcatagtgtgccttgcggcgc

SEQ ID NO: 2899950 - DNA, 25 bp, Homo sapien
atagtgtgccttgcggcgcttgtca

SEQ ID NO: 2899951 - DNA, 25 bp, Homo sapien
tcatagtgtgccttgcggcgcttgt

SEQ ID NO: 2899952 - DNA, 25 bp, Homo sapien
gctggtttttctgagccttgagaaa

SEQ ID NO: 2899953 - DNA, 25 bp, Homo sapien
tcctcttcattctccaagggctggt

SEQ ID NO: 2899954 - DNA, 25 bp, Homo sapien
tcttcattctccaagggctggtttt

SEQ ID NO: 2899955 - DNA, 25 bp, Homo sapien
ggctggtttttctgagccttgagaa

SEQ ID NO: 2899956 - DNA, 25 bp, Homo sapien
gccttgactgccaccgctgatactg

SEQ ID NO: 2899957 - DNA, 25 bp, Homo sapien
gggtccagcatcacgccttgactgc

SEQ ID NO: 2899958 - DNA, 25 bp, Homo sapien
ccttgactgccaccgctgatactga

SEQ ID NO: 2899959 - DNA, 25 bp, Homo sapien
tctgggtccagcatcacgccttgac

SEQ ID NO: 2899960 - DNA, 25 bp, Homo sapien
cttcaaggatgtgcctccaggtgac

SEQ ID NO: 2899961 - DNA, 25 bp, Homo sapien
gcttcaaggatgtgcctccaggtga

SEQ ID NO: 2899962 - DNA, 25 bp, Homo sapien
tcggcttcaaggatgtgcctccagg

SEQ ID NO: 2899963 - DNA, 25 bp, Homo sapien
cctcggcttcaaggatgtgcctcca

SEQ ID NO: 2899964 - DNA, 25 bp, Homo sapien
tccctgtcaggcagcagagtcttgg

SEQ ID NO: 2899965 - DNA, 25 bp, Homo sapien
aggcagcagagtcttgggctgatag

SEQ ID NO: 2899966 - DNA, 25 bp, Homo sapien
cagcagagtcttgggctgatagcca

SEQ ID NO: 2899967 - DNA, 25 bp, Homo sapien
ctccctgtcaggcagcagagtcttg

SEQ ID NO: 2899968 - DNA, 25 bp, Homo sapien
tgccatcatattccttgtgctgcag

SEQ ID NO: 2899969 - DNA, 25 bp, Homo sapien
gacctcaggtatagtcctttgccat

SEQ ID NO: 2899970 - DNA, 25 bp, Homo sapien
acgtcctctacaagctctgggtggg

SEQ ID NO: 2899971 - DNA, 25 bp, Homo sapien
ccaatatgatagtggccacagctgg

SEQ ID NO: 2899972 - DNA, 25 bp, Homo sapien
ccagtaggtggacttcagtgcttac

SEQ ID NO: 2899973 - DNA, 25 bp, Homo sapien
tctccgtggccttgtgatccctaaa

SEQ ID NO: 2899974 - DNA, 25 bp, Homo sapien
tcattgttgccatcagggagctctc

SEQ ID NO: 2899975 - DNA, 25 bp, Homo sapien
caatcacctaggtcaagcttgtgga

SEQ ID NO: 2899976 - DNA, 25 bp, Homo sapien
cagctggacaccacttgagactcac

SEQ ID NO: 2899977 - DNA, 25 bp, Homo sapien
tggagggggtcccaaccgcctctga

SEQ ID NO: 2899978 - DNA, 25 bp, Homo sapien
gacaccacttgagactcactgtctt

SEQ ID NO: 2899979 - DNA, 25 bp, Homo sapien
tcgcctgtccaatgtggaccttgga

SEQ ID NO: 2899980 - DNA, 25 bp, Homo sapien
ttgagtccattgaagtcccagggtt

SEQ ID NO: 2899981 - DNA, 25 bp, Homo sapien
tgagtccattgaagtcccagggttt

SEQ ID NO: 2899982 - DNA, 25 bp, Homo sapien
tcttgagtccattgaagtcccaggg

SEQ ID NO: 2899983 - DNA, 25 bp, Homo sapien
agtccattgaagtcccagggtttca

SEQ ID NO: 2899984 - DNA, 25 bp, Homo sapien
gcctgggggcacaattctttcccca

SEQ ID NO: 2899985 - DNA, 25 bp, Homo sapien
ctgggggcacaattctttccccaag

SEQ ID NO: 2899986 - DNA, 25 bp, Homo sapien
gtgtcctaggaggagctctcacccc

SEQ ID NO: 2899987 - DNA, 25 bp, Homo sapien
aaaggggtgtcctaggaggagctct

SEQ ID NO: 2899988 - DNA, 25 bp, Homo sapien
gtggggccagcgggccctggaggcc

SEQ ID NO: 2899989 - DNA, 25 bp, Homo sapien
ggccagcgggccctggaggccgggc

SEQ ID NO: 2899990 - DNA, 25 bp, Homo sapien
ctcagcttgcctgctgtggggccag

SEQ ID NO: 2899991 - DNA, 25 bp, Homo sapien
gaggccgggcccctggggatgcagg

SEQ ID NO: 2899992 - DNA, 25 bp, Homo sapien
actcctcgaaatccagcttgaccgt

SEQ ID NO: 2899993 - DNA, 25 bp, Homo sapien
gaaacggggtgagtccttgagacac

SEQ ID NO: 2899994 - DNA, 25 bp, Homo sapien
acggggtgagtccttgagacactcc

SEQ ID NO: 2899995 - DNA, 25 bp, Homo sapien
cctcgaaatccagcttgaccgtcat

SEQ ID NO: 2899996 - DNA, 25 bp, Homo sapien
gagagcttgggtccatctggtctgt

SEQ ID NO: 2899997 - DNA, 25 bp, Homo sapien
tcatgggaagagagcttgggtccat

SEQ ID NO: 2899998 - DNA, 25 bp, Homo sapien
aagagagcttgggtccatctggtct

SEQ ID NO: 2899999 - DNA, 25 bp, Homo sapien
agagggggtcatgggaagagagctt

SEQ ID NO: 2900000 - DNA, 25 bp, Homo sapien
cttcggcttccaccagctcaataga

SEQ ID NO: 2900001 - DNA, 25 bp, Homo sapien
cggcttccaccagctcaatagaggc

SEQ ID NO: 2900002 - DNA, 25 bp, Homo sapien
ggcttccaccagctcaatagaggct

SEQ ID NO: 2900003 - DNA, 25 bp, Homo sapien
tcggcttccaccagctcaatagagg

SEQ ID NO: 2900004 - DNA, 25 bp, Homo sapien
aatgccgacaacgaaggcgcggctg

SEQ ID NO: 2900005 - DNA, 25 bp, Homo sapien
atgggctctggtggacccaggcggg

SEQ ID NO: 2900006 - DNA, 25 bp, Homo sapien
aggcgggccaggtcacaaatgccga

SEQ ID NO: 2900007 - DNA, 25 bp, Homo sapien
gtaatggcgcccactttccaggaga

SEQ ID NO: 2900008 - DNA, 25 bp, Homo sapien
tcacggtgaatttttccagacactc

SEQ ID NO: 2900009 - DNA, 25 bp, Homo sapien
tccagcttgtggttcaggctcacgg

SEQ ID NO: 2900010 - DNA, 25 bp, Homo sapien
ggctgtccagcttgtggttcaggct

SEQ ID NO: 2900011 - DNA, 25 bp, Homo sapien
tgtggttcaggctcacggtgaattt

SEQ ID NO: 2900012 - DNA, 25 bp, Homo sapien
tgtgttgggtggcatctagaagctc

SEQ ID NO: 2900013 - DNA, 25 bp, Homo sapien
ctgctgctgcagtgtgtgttgggtg

SEQ ID NO: 2900014 - DNA, 25 bp, Homo sapien
gtgtgtgttgggtggcatctagaag

SEQ ID NO: 2900015 - DNA, 25 bp, Homo sapien
tgtgtgttgggtggcatctagaagc

SEQ ID NO: 2900016 - DNA, 25 bp, Homo sapien
gccatgttggctaggttggtgtcca

SEQ ID NO: 2900017 - DNA, 25 bp, Homo sapien
tttttgtggagacagtttcgccatg

SEQ ID NO: 2900018 - DNA, 25 bp, Homo sapien
ccaaaatgccgggatcataggcatg

SEQ ID NO: 2900019 - DNA, 25 bp, Homo sapien
ggctgaagtgaagtagtgcgatctt

SEQ ID NO: 2900020 - DNA, 25 bp, Homo sapien
cagcagagcattcccagggtaaagc

SEQ ID NO: 2900021 - DNA, 25 bp, Homo sapien
tctgcaacgtgggaaacccaaggtg

SEQ ID NO: 2900022 - DNA, 25 bp, Homo sapien
ggtaaagccctcatgtcctttcagt

SEQ ID NO: 2900023 - DNA, 25 bp, Homo sapien
tgggaaaataacacagaatcgcagc

SEQ ID NO: 2900024 - DNA, 25 bp, Homo sapien
agaaatcccggcgagcctctcggaa

SEQ ID NO: 2900025 - DNA, 25 bp, Homo sapien
agcctctcggaaaccccgcagacct

SEQ ID NO: 2900026 - DNA, 25 bp, Homo sapien
aacctctgcgttgtgggtcagggca

SEQ ID NO: 2900027 - DNA, 25 bp, Homo sapien
agctcgagccgtcctcaaagcagct

SEQ ID NO: 2900028 - DNA, 25 bp, Homo sapien
gcataatccagtgcccgtccccggt

SEQ ID NO: 2900029 - DNA, 25 bp, Homo sapien
gcagggcataatccagtgcccgtcc

SEQ ID NO: 2900030 - DNA, 25 bp, Homo sapien
ctgcagggcataatccagtgcccgt

SEQ ID NO: 2900031 - DNA, 25 bp, Homo sapien
gggcataatccagtgcccgtccccg

SEQ ID NO: 2900032 - DNA, 25 bp, Homo sapien
aactccatgatgtcaaacttcctct

SEQ ID NO: 2900033 - DNA, 25 bp, Homo sapien
gatgtcaaacttcctcttgtcctca

SEQ ID NO: 2900034 - DNA, 25 bp, Homo sapien
tcctcttgtcctcaatcacgttgat

SEQ ID NO: 2900035 - DNA, 25 bp, Homo sapien
cttcctcttgtcctcaatcacgttg

SEQ ID NO: 2900036 - DNA, 25 bp, Homo sapien
tcctttcgatactgggacagccggc

SEQ ID NO: 2900037 - DNA, 25 bp, Homo sapien
cgcccagctcctttcgatactggga

SEQ ID NO: 2900038 - DNA, 25 bp, Homo sapien
gatactgggacagccggctcagctc

SEQ ID NO: 2900039 - DNA, 25 bp, Homo sapien
cagctcctttcgatactgggacagc

SEQ ID NO: 2900040 - DNA, 25 bp, Homo sapien
tccatgtccctcttctctcgtgctg

SEQ ID NO: 2900041 - DNA, 25 bp, Homo sapien
ctcttctctcgtgctgaattcaaga

SEQ ID NO: 2900042 - DNA, 25 bp, Homo sapien
cctcttctctcgtgctgaattcaag

SEQ ID NO: 2900043 - DNA, 25 bp, Homo sapien
tgctccatgtccctcttctctcgtg

SEQ ID NO: 2900044 - DNA, 25 bp, Homo sapien
tgctggcccgtttgaagagatgtcc

SEQ ID NO: 2900045 - DNA, 25 bp, Homo sapien
caggtcttaaatgcgttgctggccc

SEQ ID NO: 2900046 - DNA, 25 bp, Homo sapien
ctgctccaggtcttaaatgcgttgc

SEQ ID NO: 2900047 - DNA, 25 bp, Homo sapien
taaatgcgttgctggcccgtttgaa

SEQ ID NO: 2900048 - DNA, 25 bp, Homo sapien
aaccagttggttgctctgaatggtg

SEQ ID NO: 2900049 - DNA, 25 bp, Homo sapien
ggtaaaccagttggttgctctgaat

SEQ ID NO: 2900050 - DNA, 25 bp, Homo sapien
taaaccagttggttgctctgaatgg

SEQ ID NO: 2900051 - DNA, 25 bp, Homo sapien
tctggtaaaccagttggttgctctg

SEQ ID NO: 2900052 - DNA, 25 bp, Homo sapien
aggataaggtgataaggggccagat

SEQ ID NO: 2900053 - DNA, 25 bp, Homo sapien
caggataaggtgataaggggccaga

SEQ ID NO: 2900054 - DNA, 25 bp, Homo sapien
gcaggataaggtgataaggggccag

SEQ ID NO: 2900055 - DNA, 25 bp, Homo sapien
cacctcaaagcagaaccgcctttct

SEQ ID NO: 2900056 - DNA, 25 bp, Homo sapien
gcagaaccgcctttctgagtcaggg

SEQ ID NO: 2900057 - DNA, 25 bp, Homo sapien
tcaaagcagaaccgcctttctgagt

SEQ ID NO: 2900058 - DNA, 25 bp, Homo sapien
tgcagagacgaaggtcatccaccac

SEQ ID NO: 2900059 - DNA, 25 bp, Homo sapien
ggctgtcatcaaggcgagcctgact

SEQ ID NO: 2900060 - DNA, 25 bp, Homo sapien
gctgtcatcaaggcgagcctgactg

SEQ ID NO: 2900061 - DNA, 25 bp, Homo sapien
tagggtaaagggtgccccatctcca

SEQ ID NO: 2900062 - DNA, 25 bp, Homo sapien
aagggtgccccatctccacaggcag

SEQ ID NO: 2900063 - DNA, 25 bp, Homo sapien
taaagggtgccccatctccacaggc

SEQ ID NO: 2900064 - DNA, 25 bp, Homo sapien
ggtaaagggtgccccatctccacag

SEQ ID NO: 2900065 - DNA, 25 bp, Homo sapien
tggcagcagagcctatggccaggtg

SEQ ID NO: 2900066 - DNA, 25 bp, Homo sapien
ctggctcccggcagtcgcagcactg

SEQ ID NO: 2900067 - DNA, 25 bp, Homo sapien
gggcattgccatccacactctggac

SEQ ID NO: 2900068 - DNA, 25 bp, Homo sapien
cagagggtgacaccaaggttgatgc

SEQ ID NO: 2900069 - DNA, 25 bp, Homo sapien
tcccgcatgggccttgtggagtaac

SEQ ID NO: 2900070 - DNA, 25 bp, Homo sapien
gtggggctcccgcatgggccttgtg

SEQ ID NO: 2900071 - DNA, 25 bp, Homo sapien
gagccgcactgtggcccgaaggagt

SEQ ID NO: 2900072 - DNA, 25 bp, Homo sapien
ggagccgcactgtggcccgaaggag

SEQ ID NO: 2900073 - DNA, 25 bp, Homo sapien
tacccagtgacaaagccagaagcta

SEQ ID NO: 2900074 - DNA, 25 bp, Homo sapien
aactggcaccccagaggcttgggcc

SEQ ID NO: 2900075 - DNA, 25 bp, Homo sapien
gccagaagctaagagaggaagccag

SEQ ID NO: 2900076 - DNA, 25 bp, Homo sapien
ccaggcctggtacccagtgacaaag

SEQ ID NO: 2900077 - DNA, 25 bp, Homo sapien
ccttctctagtgacacttgtgacac

SEQ ID NO: 2900078 - DNA, 25 bp, Homo sapien
ttgtgacactttggcctggacaacc

SEQ ID NO: 2900079 - DNA, 25 bp, Homo sapien
caaccaagccaacaaattctgggta

SEQ ID NO: 2900080 - DNA, 25 bp, Homo sapien
gatacttgctaaggcctcatgaccg

SEQ ID NO: 2900081 - DNA, 25 bp, Homo sapien
caggactctgcctcgtcaccattcc

SEQ ID NO: 2900082 - DNA, 25 bp, Homo sapien
aggactctgcctcgtcaccattcct

SEQ ID NO: 2900083 - DNA, 25 bp, Homo sapien
gcaggactctgcctcgtcaccattc

SEQ ID NO: 2900084 - DNA, 25 bp, Homo sapien
catgggggcccgtgcagaggtgctg

SEQ ID NO: 2900085 - DNA, 25 bp, Homo sapien
atgggggcccgtgcagaggtgctgg

SEQ ID NO: 2900086 - DNA, 25 bp, Homo sapien
tcctgaagacactgggaggcaaggc

SEQ ID NO: 2900087 - DNA, 25 bp, Homo sapien
tgctgctgctcctgaagacactggg

SEQ ID NO: 2900088 - DNA, 25 bp, Homo sapien
gtcagagaccggactttggagaagt

SEQ ID NO: 2900089 - DNA, 25 bp, Homo sapien
caagggtcagagaccggactttgga

SEQ ID NO: 2900090 - DNA, 25 bp, Homo sapien
tctggctcccatgagtcaagggtca

SEQ ID NO: 2900091 - DNA, 25 bp, Homo sapien
ctggctcccatgagtcaagggtcag

SEQ ID NO: 2900092 - DNA, 25 bp, Homo sapien
tccacgcgggcctcatagatctggt

SEQ ID NO: 2900093 - DNA, 25 bp, Homo sapien
cgcgggcctcatagatctggttgat

SEQ ID NO: 2900094 - DNA, 25 bp, Homo sapien
cctcatagatctggttgatgatgac

SEQ ID NO: 2900095 - DNA, 25 bp, Homo sapien
ccatggcctccacgcgggcctcata

SEQ ID NO: 2900096 - DNA, 25 bp, Homo sapien
cacctcttcgccctcgaatctcagg

SEQ ID NO: 2900097 - DNA, 25 bp, Homo sapien
tatttagcgtgaatccaggcctcct

SEQ ID NO: 2900098 - DNA, 25 bp, Homo sapien
tctccacgtatttagcgtgaatcca

SEQ ID NO: 2900099 - DNA, 25 bp, Homo sapien
gccctcgaatctcaggcagcttggt

SEQ ID NO: 2900100 - DNA, 25 bp, Homo sapien
gggtatgtgtaagtatgcgtatgca

SEQ ID NO: 2900101 - DNA, 25 bp, Homo sapien
catgtgtacgagtccctagggtgtg

SEQ ID NO: 2900102 - DNA, 25 bp, Homo sapien
tcagcagtgtcccaatgctataatg

SEQ ID NO: 2900103 - DNA, 25 bp, Homo sapien
ggacaggtctcttctaaatgatggg

SEQ ID NO: 2900104 - DNA, 25 bp, Homo sapien
cctggatcagcggtgtggcattatc

SEQ ID NO: 2900105 - DNA, 25 bp, Homo sapien
cccagacgctcgaaacagtagggcc

SEQ ID NO: 2900106 - DNA, 25 bp, Homo sapien
ttggcccccattgacccagttgaca

SEQ ID NO: 2900107 - DNA, 25 bp, Homo sapien
aagagatggaggatgcccagacgct

SEQ ID NO: 2900108 - DNA, 25 bp, Homo sapien
tctcctgtaagaggtgagagcctgg

SEQ ID NO: 2900109 - DNA, 25 bp, Homo sapien
tgatctctccctatgggtggaagcc

SEQ ID NO: 2900110 - DNA, 25 bp, Homo sapien
cccagagtcaggagtaggtgtcaga

SEQ ID NO: 2900111 - DNA, 25 bp, Homo sapien
caaatcacacactcttagcaaccag

SEQ ID NO: 2900112 - DNA, 25 bp, Homo sapien
aatggttgcgtggtgcagcgggccc

SEQ ID NO: 2900113 - DNA, 25 bp, Homo sapien
ccgtgtggccaagaatggttgcgtg

SEQ ID NO: 2900114 - DNA, 25 bp, Homo sapien
actgtccgcttggttcacgttcgcc

SEQ ID NO: 2900115 - DNA, 25 bp, Homo sapien
tcgccccgttctggaggagaaactc

SEQ ID NO: 2900116 - DNA, 25 bp, Homo sapien
tccatggcgatggtcagagggtccc

SEQ ID NO: 2900117 - DNA, 25 bp, Homo sapien
gatcagctccccgtttcaggaacag

SEQ ID NO: 2900118 - DNA, 25 bp, Homo sapien
gatgtcagcgttggctgtttccatg

SEQ ID NO: 2900119 - DNA, 25 bp, Homo sapien
tcagctccccgtttcaggaacaggc

SEQ ID NO: 2900120 - DNA, 25 bp, Homo sapien
cgcagcctttctcgagcctggcccc

SEQ ID NO: 2900121 - DNA, 25 bp, Homo sapien
tcgcgcagcctttctcgagcctggc

SEQ ID NO: 2900122 - DNA, 25 bp, Homo sapien
cgcgcagcctttctcgagcctggcc

SEQ ID NO: 2900123 - DNA, 25 bp, Homo sapien
ttcgcgcagcctttctcgagcctgg

SEQ ID NO: 2900124 - DNA, 25 bp, Homo sapien
ttcccatcctttgagctgggttgcg

SEQ ID NO: 2900125 - DNA, 25 bp, Homo sapien
cgtctagtgctaaaaagatgcctga

SEQ ID NO: 2900126 - DNA, 25 bp, Homo sapien
gggtcacgtctagtgctaaaaagat

SEQ ID NO: 2900127 - DNA, 25 bp, Homo sapien
gagctgggttgcgttccgttcatct

SEQ ID NO: 2900128 - DNA, 25 bp, Homo sapien
gaaatgaacgacactatctttggcc

SEQ ID NO: 2900129 - DNA, 25 bp, Homo sapien
gaattaagaaatgaacgacactatc

SEQ ID NO: 2900130 - DNA, 25 bp, Homo sapien
atgaacgacactatctttggccggg

SEQ ID NO: 2900131 - DNA, 25 bp, Homo sapien
agaggagggaattaagaaatgaacg

SEQ ID NO: 2900132 - DNA, 25 bp, Homo sapien
agcctccctcatctttgccagtcgt

SEQ ID NO: 2900133 - DNA, 25 bp, Homo sapien
cctgcccctgggccgcttcagcctc

SEQ ID NO: 2900134 - DNA, 25 bp, Homo sapien
ctccctcatctttgccagtcgtagc

SEQ ID NO: 2900135 - DNA, 25 bp, Homo sapien
ctgcctgcccctgggccgcttcagc

SEQ ID NO: 2900136 - DNA, 25 bp, Homo sapien
taacggaatgaatgcagctgggcac

SEQ ID NO: 2900137 - DNA, 25 bp, Homo sapien
agaggtcaccgtggaccagaagccc

SEQ ID NO: 2900138 - DNA, 25 bp, Homo sapien
gcgctccgagcctgggtgggaacgt

SEQ ID NO: 2900139 - DNA, 25 bp, Homo sapien
gtcgcatgcgcccaatacgcatttg

SEQ ID NO: 2900140 - DNA, 25 bp, Homo sapien
agcttctccgggtcgtctgacgcca

SEQ ID NO: 2900141 - DNA, 25 bp, Homo sapien
gagaagtcgcggaagatgtcaagat

SEQ ID NO: 2900142 - DNA, 25 bp, Homo sapien
tctccgggtcgtctgacgccatgag

SEQ ID NO: 2900143 - DNA, 25 bp, Homo sapien
cggaagatgtcaagatacgtctcat

SEQ ID NO: 2900144 - DNA, 25 bp, Homo sapien
cacagcgtgtggaggtcatgactgc

SEQ ID NO: 2900145 - DNA, 25 bp, Homo sapien
tcacagcgtgtggaggtcatgactg

SEQ ID NO: 2900146 - DNA, 25 bp, Homo sapien
cagcgtgtggaggtcatgactgcga

SEQ ID NO: 2900147 - DNA, 25 bp, Homo sapien
agcgtgtggaggtcatgactgcgac

SEQ ID NO: 2900148 - DNA, 25 bp, Homo sapien
ggctttaatggcagagggcccggtg

SEQ ID NO: 2900149 - DNA, 25 bp, Homo sapien
aggctttaatggcagagggcccggt

SEQ ID NO: 2900150 - DNA, 25 bp, Homo sapien
ggaggctttaatggcagagggcccg

SEQ ID NO: 2900151 - DNA, 25 bp, Homo sapien
cggaggctttaatggcagagggccc

SEQ ID NO: 2900152 - DNA, 25 bp, Homo sapien
gtgctgagccgccgcattccgggga

SEQ ID NO: 2900153 - DNA, 25 bp, Homo sapien
ctgagccgccgcattccggggatgc

SEQ ID NO: 2900154 - DNA, 25 bp, Homo sapien
tgctgagccgccgcattccggggat

SEQ ID NO: 2900155 - DNA, 25 bp, Homo sapien
tgagccgccgcattccggggatgcc

SEQ ID NO: 2900156 - DNA, 25 bp, Homo sapien
tttccggaatccaaccagcaggtga

SEQ ID NO: 2900157 - DNA, 25 bp, Homo sapien
actctgaagggatggcctccgagac

SEQ ID NO: 2900158 - DNA, 25 bp, Homo sapien
caggtggagcacacccagtaaggtt

SEQ ID NO: 2900159 - DNA, 25 bp, Homo sapien
cgatctcacgtctgcaagtcggcgg

SEQ ID NO: 2900160 - DNA, 25 bp, Homo sapien
gtacaggagacaccgaaagaaaaga

SEQ ID NO: 2900161 - DNA, 25 bp, Homo sapien
aaagtggtggaatatagtgtgcccc

SEQ ID NO: 2900162 - DNA, 25 bp, Homo sapien
cacattcagggtcacggggccccca

SEQ ID NO: 2900163 - DNA, 25 bp, Homo sapien
tggtggaatatagtgtgccccccac

SEQ ID NO: 2900164 - DNA, 25 bp, Homo sapien
tggaatatagtgtgccccccacatt

SEQ ID NO: 2900165 - DNA, 25 bp, Homo sapien
gggctgacatctacatctgcgtgga

SEQ ID NO: 2900166 - DNA, 25 bp, Homo sapien
aaattgaggatgtgccggaaggcct

SEQ ID NO: 2900167 - DNA, 25 bp, Homo sapien
gtcgatgaagtagtggccgcctcct

SEQ ID NO: 2900168 - DNA, 25 bp, Homo sapien
aaggccttgccatcccggtcgatga

SEQ ID NO: 2900169 - DNA, 25 bp, Homo sapien
tgagaccttctggaccacttgtgag

SEQ ID NO: 2900170 - DNA, 25 bp, Homo sapien
cagatatgaaccaggatgccaggga

SEQ ID NO: 2900171 - DNA, 25 bp, Homo sapien
tatacatcagtcagccacacgggct

SEQ ID NO: 2900172 - DNA, 25 bp, Homo sapien
gaacaagctgagagaaccttcccta

SEQ ID NO: 2900173 - DNA, 25 bp, Homo sapien
tcttgtaaatcatgaccagtgagaa

SEQ ID NO: 2900174 - DNA, 25 bp, Homo sapien
gaagctgtgcgtgagtatcccaccc

SEQ ID NO: 2900175 - DNA, 25 bp, Homo sapien
aacaggtccatggttgcctcagcaa

SEQ ID NO: 2900176 - DNA, 25 bp, Homo sapien
cagctatctcctagcaacaggtcca

SEQ ID NO: 2900177 - DNA, 25 bp, Homo sapien
agccgaggaatgctctgcagccctg

SEQ ID NO: 2900178 - DNA, 25 bp, Homo sapien
cagctgagccgaggaatgctctgca

SEQ ID NO: 2900179 - DNA, 25 bp, Homo sapien
caaggaactggggtccagaaggcat

SEQ ID NO: 2900180 - DNA, 25 bp, Homo sapien
tgccccagctgagccgaggaatgct

SEQ ID NO: 2900181 - DNA, 25 bp, Homo sapien
gctgccaggaaaaccccgcctagtg

SEQ ID NO: 2900182 - DNA, 25 bp, Homo sapien
ctgggaggcgacagaagacacaagc

SEQ ID NO: 2900183 - DNA, 25 bp, Homo sapien
caggcggcctgacaagtcgtgggct

SEQ ID NO: 2900184 - DNA, 25 bp, Homo sapien
aagacacaagcctgggcggctgcca

SEQ ID NO: 2900185 - DNA, 25 bp, Homo sapien
ggtgagtgcttgctgggcccatccc

SEQ ID NO: 2900186 - DNA, 25 bp, Homo sapien
tggaaggtcacatgccaccctctgg

SEQ ID NO: 2900187 - DNA, 25 bp, Homo sapien
gcatgtccagaaagggccacagatg

SEQ ID NO: 2900188 - DNA, 25 bp, Homo sapien
tctcagagggaaaggccagcatgtc

SEQ ID NO: 2900189 - DNA, 25 bp, Homo sapien
tgtgactttgttcatggacacctca

SEQ ID NO: 2900190 - DNA, 25 bp, Homo sapien
gtgactttgttcatggacacctcat

SEQ ID NO: 2900191 - DNA, 25 bp, Homo sapien
gggagcttggtctttcgaagccaac

SEQ ID NO: 2900192 - DNA, 25 bp, Homo sapien
tttcgaagccaactccaatatgaag

SEQ ID NO: 2900193 - DNA, 25 bp, Homo sapien
agtgaggagacagcctctttgattt

SEQ ID NO: 2900194 - DNA, 25 bp, Homo sapien
tcgaagccaactccaatatgaaggg

SEQ ID NO: 2900195 - DNA, 25 bp, Homo sapien
gtggagcagttgtacagcgtggtgc

SEQ ID NO: 2900196 - DNA, 25 bp, Homo sapien
ggaagcagcgctttcggggccagca

SEQ ID NO: 2900197 - DNA, 25 bp, Homo sapien
ctccgtccccttgcaggtggagcag

SEQ ID NO: 2900198 - DNA, 25 bp, Homo sapien
gcaggtggagcagttgtacagcgtg

SEQ ID NO: 2900199 - DNA, 25 bp, Homo sapien
caccaggaggctcagaacacccaga

SEQ ID NO: 2900200 - DNA, 25 bp, Homo sapien
aggaggctcagaacacccagaagca

SEQ ID NO: 2900201 - DNA, 25 bp, Homo sapien
agcaggaaagctccgaagatggaga

SEQ ID NO: 2900202 - DNA, 25 bp, Homo sapien
gaagcaggaaagctccgaagatgga

SEQ ID NO: 2900203 - DNA, 25 bp, Homo sapien
tgagggaagacgagggtgggaagcc

SEQ ID NO: 2900204 - DNA, 25 bp, Homo sapien
ctgagggaagacgagggtgggaagc

SEQ ID NO: 2900205 - DNA, 25 bp, Homo sapien
tcacaagccactttttgcttggagg

SEQ ID NO: 2900206 - DNA, 25 bp, Homo sapien
cacaagccactttttgcttggaggt

SEQ ID NO: 2900207 - DNA, 25 bp, Homo sapien
agccactttttgcttggaggtggtg

SEQ ID NO: 2900208 - DNA, 25 bp, Homo sapien
caagccactttttgcttggaggtgg

SEQ ID NO: 2900209 - DNA, 25 bp, Homo sapien
gctggaggctgggaggttttcagcg

SEQ ID NO: 2900210 - DNA, 25 bp, Homo sapien
tagagctggaggctgggaggttttc

SEQ ID NO: 2900211 - DNA, 25 bp, Homo sapien
tggaggctgggaggttttcagcgtc

SEQ ID NO: 2900212 - DNA, 25 bp, Homo sapien
cccttagagctggaggctgggaggt

SEQ ID NO: 2900213 - DNA, 25 bp, Homo sapien
gtttttcattatctcaccaaccaga

SEQ ID NO: 2900214 - DNA, 25 bp, Homo sapien
tggaggggaggaactttccagctgt

SEQ ID NO: 2900215 - DNA, 25 bp, Homo sapien
tcattatctcaccaaccagaagcag

SEQ ID NO: 2900216 - DNA, 25 bp, Homo sapien
ttttcattatctcaccaaccagaag

SEQ ID NO: 2900217 - DNA, 25 bp, Homo sapien
tttcaaactgttaacacgatggagg

SEQ ID NO: 2900218 - DNA, 25 bp, Homo sapien
ccatcagtcataggagggcctggaa

SEQ ID NO: 2900219 - DNA, 25 bp, Homo sapien
aagttttacttaggcctggcaggat

SEQ ID NO: 2900220 - DNA, 25 bp, Homo sapien
agaacatgcattcccggattcccca

SEQ ID NO: 2900221 - DNA, 25 bp, Homo sapien
ttggaaacgcgcaggtggactcaga

SEQ ID NO: 2900222 - DNA, 25 bp, Homo sapien
cccctacattataagcaaggaggaa

SEQ ID NO: 2900223 - DNA, 25 bp, Homo sapien
aagaagaggatcgaggctgggccta

SEQ ID NO: 2900224 - DNA, 25 bp, Homo sapien
cctacattataagcaaggaggaaga

SEQ ID NO: 2900225 - DNA, 25 bp, Homo sapien
gcactctccttcagatggtgagctc

SEQ ID NO: 2900226 - DNA, 25 bp, Homo sapien
ctaaggatgatggcactctccttca

SEQ ID NO: 2900227 - DNA, 25 bp, Homo sapien
ggtaggccctagagagaccaggtct

SEQ ID NO: 2900228 - DNA, 25 bp, Homo sapien
tcagggtaggccctagagagaccag

SEQ ID NO: 2900229 - DNA, 25 bp, Homo sapien
tgacattaagctcctcaaggatggg

SEQ ID NO: 2900230 - DNA, 25 bp, Homo sapien
tgtcccggagcagcttcagtagcca

SEQ ID NO: 2900231 - DNA, 25 bp, Homo sapien
ttacaaagtcgaagtgctctggccg

SEQ ID NO: 2900232 - DNA, 25 bp, Homo sapien
caggtcctcaggctttacaaagtcg

SEQ ID NO: 2900233 - DNA, 25 bp, Homo sapien
gacccagttcttagacttaggccca

SEQ ID NO: 2900234 - DNA, 25 bp, Homo sapien
tagacttaggcccagaacgtagcct

SEQ ID NO: 2900235 - DNA, 25 bp, Homo sapien
cgtagccttttcagagcttcggaca

SEQ ID NO: 2900236 - DNA, 25 bp, Homo sapien
cagagcttcggacagtctgcgctgg

SEQ ID NO: 2900237 - DNA, 25 bp, Homo sapien
tccttgtgctcaggggcaaaacctc

SEQ ID NO: 2900238 - DNA, 25 bp, Homo sapien
gggaggtgccgtgggctgtccgagg

SEQ ID NO: 2900239 - DNA, 25 bp, Homo sapien
gctcagggaggtgccgtgggctgtc

SEQ ID NO: 2900240 - DNA, 25 bp, Homo sapien
tgggctccttgtgctcaggggcaaa

SEQ ID NO: 2900241 - DNA, 25 bp, Homo sapien
gcgtccacagccctcggtgcaccac

SEQ ID NO: 2900242 - DNA, 25 bp, Homo sapien
gtgcaccacaccgaagcagcctgaa

SEQ ID NO: 2900243 - DNA, 25 bp, Homo sapien
ctctgggatcagacacttgaggccc

SEQ ID NO: 2900244 - DNA, 25 bp, Homo sapien
tctgggatcagacacttgaggcccc

SEQ ID NO: 2900245 - DNA, 25 bp, Homo sapien
aaggccgtgcagacgcagcacgtgt

SEQ ID NO: 2900246 - DNA, 25 bp, Homo sapien
gctggcccagtacaaggccgtgcag

SEQ ID NO: 2900247 - DNA, 25 bp, Homo sapien
gaccgatacctctcgcaggaagtcc

SEQ ID NO: 2900248 - DNA, 25 bp, Homo sapien
gacctacccggagggacttgacagc

SEQ ID NO: 2900249 - DNA, 25 bp, Homo sapien
acgccagcagtaggttgcgcgtagc

SEQ ID NO: 2900250 - DNA, 25 bp, Homo sapien
cgcgtagcgaggtctcggtgcacca

SEQ ID NO: 2900251 - DNA, 25 bp, Homo sapien
gttaggcgcgcgtgcagggagccca

SEQ ID NO: 2900252 - DNA, 25 bp, Homo sapien
cggcgacgccagcagtaggttgcgc

SEQ ID NO: 2900253 - DNA, 25 bp, Homo sapien
gcggggcccgcccatgacgtagcgg

SEQ ID NO: 2900254 - DNA, 25 bp, Homo sapien
gggcccgcccatgacgtagcggccc

SEQ ID NO: 2900255 - DNA, 25 bp, Homo sapien
cgcccatgacgtagcggccccgggc

SEQ ID NO: 2900256 - DNA, 25 bp, Homo sapien
gcccgcccatgacgtagcggccccg

SEQ ID NO: 2900257 - DNA, 25 bp, Homo sapien
tgcctaggaggataacccttctggt

SEQ ID NO: 2900258 - DNA, 25 bp, Homo sapien
gggacacgtgctccttggaggccca

SEQ ID NO: 2900259 - DNA, 25 bp, Homo sapien
ggataacccttctggtccaagcctc

SEQ ID NO: 2900260 - DNA, 25 bp, Homo sapien
aaaagtcctctttgcctaggaggat

SEQ ID NO: 2900261 - DNA, 25 bp, Homo sapien
cacgtccgaggcagacgagaaggct

SEQ ID NO: 2900262 - DNA, 25 bp, Homo sapien
gcaggatgaggtacggtgggacccc

SEQ ID NO: 2900263 - DNA, 25 bp, Homo sapien
agaaggctccgtggcgcaggctctc

SEQ ID NO: 2900264 - DNA, 25 bp, Homo sapien
gtgggaaaagctaggccggtcggca

SEQ ID NO: 2900265 - DNA, 25 bp, Homo sapien
cctcagggcgcctggttctgtgaca

SEQ ID NO: 2900266 - DNA, 25 bp, Homo sapien
ctcacacaacatgcttccgaaggcc

SEQ ID NO: 2900267 - DNA, 25 bp, Homo sapien
tgtgacatccctcacacaacatgct

SEQ ID NO: 2900268 - DNA, 25 bp, Homo sapien
cctcgatgactgtgatggggtcacc

SEQ ID NO: 2900269 - DNA, 25 bp, Homo sapien
tctggcccttccagattgtggagtc

SEQ ID NO: 2900270 - DNA, 25 bp, Homo sapien
aggtgcgaccattctggcccttcca

SEQ ID NO: 2900271 - DNA, 25 bp, Homo sapien
tggcccttccagattgtggagtcgg

SEQ ID NO: 2900272 - DNA, 25 bp, Homo sapien
tttgaaggtgcgaccattctggccc

SEQ ID NO: 2900273 - DNA, 25 bp, Homo sapien
gactggacgggtggctggcaagccc

SEQ ID NO: 2900274 - DNA, 25 bp, Homo sapien
ctctgtggactggacgggtggctgg

SEQ ID NO: 2900275 - DNA, 25 bp, Homo sapien
gcatctgccagcgtcactgccgagg

SEQ ID NO: 2900276 - DNA, 25 bp, Homo sapien
catctatgcttcctgggtgttgatc

SEQ ID NO: 2900277 - DNA, 25 bp, Homo sapien
gtgctgggggcgcatcccaaagatt

SEQ ID NO: 2900278 - DNA, 25 bp, Homo sapien
cccgtgctgggggcgcatcccaaag

SEQ ID NO: 2900279 - DNA, 25 bp, Homo sapien
gggggcgcatcccaaagatttgcct

SEQ ID NO: 2900280 - DNA, 25 bp, Homo sapien
gctgggggcgcatcccaaagatttg

SEQ ID NO: 2900281 - DNA, 25 bp, Homo sapien
agctctggcttgtcgaatttcaggg

SEQ ID NO: 2900282 - DNA, 25 bp, Homo sapien
tgtcgaatttcaggggggcttgaac

SEQ ID NO: 2900283 - DNA, 25 bp, Homo sapien
gaggaccgagggacagaactgactc

SEQ ID NO: 2900284 - DNA, 25 bp, Homo sapien
agaggataaaggtgggcgtggaggc

SEQ ID NO: 2900285 - DNA, 25 bp, Homo sapien
agcctctccctagagggctggctgg

SEQ ID NO: 2900286 - DNA, 25 bp, Homo sapien
ttgggccagggaagcctctccctag

SEQ ID NO: 2900287 - DNA, 25 bp, Homo sapien
ggaagcctctccctagagggctggc

SEQ ID NO: 2900288 - DNA, 25 bp, Homo sapien
cagggaagcctctccctagagggct

SEQ ID NO: 2900289 - DNA, 25 bp, Homo sapien
tccaggcattcccatggggtgattg

SEQ ID NO: 2900290 - DNA, 25 bp, Homo sapien
gatcggacaagaggcctccagagag

SEQ ID NO: 2900291 - DNA, 25 bp, Homo sapien
tcttcctctgcaactcaggatcgga

SEQ ID NO: 2900292 - DNA, 25 bp, Homo sapien
agcggctttacgggctccaggcatt

SEQ ID NO: 2900293 - DNA, 25 bp, Homo sapien
agaaaccacatctcccccagtggct

SEQ ID NO: 2900294 - DNA, 25 bp, Homo sapien
ccccagtggctcctagtgctgtctg

SEQ ID NO: 2900295 - DNA, 25 bp, Homo sapien
cagtggctcctagtgctgtctggca

SEQ ID NO: 2900296 - DNA, 25 bp, Homo sapien
tggctcctagtgctgtctggcactc

SEQ ID NO: 2900297 - DNA, 25 bp, Homo sapien
cactggtaatgctccaggatgcgcc

SEQ ID NO: 2900298 - DNA, 25 bp, Homo sapien
cctggccaggacatagcggctggca

SEQ ID NO: 2900299 - DNA, 25 bp, Homo sapien
gctgagaggtcccactggtaatgct

SEQ ID NO: 2900300 - DNA, 25 bp, Homo sapien
tctggaccggctactcaggtggaag

SEQ ID NO: 2900301 - DNA, 25 bp, Homo sapien
tgcaagagagcaatcgtcatcaccc

SEQ ID NO: 2900302 - DNA, 25 bp, Homo sapien
tgtgcctacggcaggtgggatctcc

SEQ ID NO: 2900303 - DNA, 25 bp, Homo sapien
ctataccccaagtcaatatggtggc

SEQ ID NO: 2900304 - DNA, 25 bp, Homo sapien
tggccctggaccaaacgaaggcagt

SEQ ID NO: 2900305 - DNA, 25 bp, Homo sapien
gattcctgtgccttatgtaactgcc

SEQ ID NO: 2900306 - DNA, 25 bp, Homo sapien
tcggcacacaggcatatcagctttc

SEQ ID NO: 2900307 - DNA, 25 bp, Homo sapien
aagggcaagctgcaccaaagacggt

SEQ ID NO: 2900308 - DNA, 25 bp, Homo sapien
tagttcagcctcagaccatggcact

SEQ ID NO: 2900309 - DNA, 25 bp, Homo sapien
cgtttggcggcctgtcacccgcgtg

SEQ ID NO: 2900310 - DNA, 25 bp, Homo sapien
gtttggcggcctgtcacccgcgtgg

SEQ ID NO: 2900311 - DNA, 25 bp, Homo sapien
tttggcggcctgtcacccgcgtggc

SEQ ID NO: 2900312 - DNA, 25 bp, Homo sapien
aaatagattccaagtgccataccac

SEQ ID NO: 2900313 - DNA, 25 bp, Homo sapien
gattccaagtgccataccactgtct

SEQ ID NO: 2900314 - DNA, 25 bp, Homo sapien
aagtgccataccactgtctccaagg

SEQ ID NO: 2900315 - DNA, 25 bp, Homo sapien
actgcactgcaaatagattccaagt

SEQ ID NO: 2900316 - DNA, 25 bp, Homo sapien
cccccccctcggagagagagagaag

SEQ ID NO: 2900317 - DNA, 25 bp, Homo sapien
ccccccctcggagagagagagaagg

SEQ ID NO: 2900318 - DNA, 25 bp, Homo sapien
tcccccgcgttgagcccccgccagc

SEQ ID NO: 2900319 - DNA, 25 bp, Homo sapien
ctcccccgcgttgagcccccgccag

SEQ ID NO: 2900320 - DNA, 25 bp, Homo sapien
taggccgtgttcaccaccgggaagc

SEQ ID NO: 2900321 - DNA, 25 bp, Homo sapien
cgctctggttctgcacgtaggtggc

SEQ ID NO: 2900322 - DNA, 25 bp, Homo sapien
gcctccaagttgtcggtgaaccaca

SEQ ID NO: 2900323 - DNA, 25 bp, Homo sapien
tggcgtagggcacgcccaagaactg

SEQ ID NO: 2900324 - DNA, 25 bp, Homo sapien
catgtgcgtttgtgggctgtgtcca

SEQ ID NO: 2900325 - DNA, 25 bp, Homo sapien
cagtgcctgagggtctgcatgtgcg

SEQ ID NO: 2900326 - DNA, 25 bp, Homo sapien
ctagagcggtgccagtgcctgaggg

SEQ ID NO: 2900327 - DNA, 25 bp, Homo sapien
ggtgcccggctttgtgcccgcgccc

SEQ ID NO: 2900328 - DNA, 25 bp, Homo sapien
ccagtgtgggcaaagcagggaaggg

SEQ ID NO: 2900329 - DNA, 25 bp, Homo sapien
cccagtgtgggcaaagcagggaagg

SEQ ID NO: 2900330 - DNA, 25 bp, Homo sapien
ccccagtgtgggcaaagcagggaag

SEQ ID NO: 2900331 - DNA, 25 bp, Homo sapien
tgagcgtcgcctcgtcacgtttttt

SEQ ID NO: 2900332 - DNA, 25 bp, Homo sapien
tctggcggattgagcgtcgcctcgt

SEQ ID NO: 2900333 - DNA, 25 bp, Homo sapien
tcgtcacgtttttttgtgagcggac

SEQ ID NO: 2900334 - DNA, 25 bp, Homo sapien
ctgtgtctggcggattgagcgtcgc

SEQ ID NO: 2900335 - DNA, 25 bp, Homo sapien
gagcaccccaagacggtagttgagc

SEQ ID NO: 2900336 - DNA, 25 bp, Homo sapien
tgagcgtggctacaatgacgttgcc

SEQ ID NO: 2900337 - DNA, 25 bp, Homo sapien
gccgccatggagaaacagcatcaca

SEQ ID NO: 2900338 - DNA, 25 bp, Homo sapien
gactgagccatcgaacatgtttccg

SEQ ID NO: 2900339 - DNA, 25 bp, Homo sapien
gctccctggaggtgtcacagcgccc

SEQ ID NO: 2900340 - DNA, 25 bp, Homo sapien
ctccctggaggtgtcacagcgcccc

SEQ ID NO: 2900341 - DNA, 25 bp, Homo sapien
tccctggaggtgtcacagcgcccct

SEQ ID NO: 2900342 - DNA, 25 bp, Homo sapien
tttgcagcctggtccccggtgctga

SEQ ID NO: 2900343 - DNA, 25 bp, Homo sapien
aaccaaagatggtgatacgctcggg

SEQ ID NO: 2900344 - DNA, 25 bp, Homo sapien
gaggatcagaaggttgacgcaggag

SEQ ID NO: 2900345 - DNA, 25 bp, Homo sapien
cccaaagtgggcgatgttttcactg

SEQ ID NO: 2900346 - DNA, 25 bp, Homo sapien
accagctggaaatggcggtgccact

SEQ ID NO: 2900347 - DNA, 25 bp, Homo sapien
tacttgagcggctggtagttgacag

SEQ ID NO: 2900348 - DNA, 25 bp, Homo sapien
agcttcagcgctgtcctctcggtca

SEQ ID NO: 2900349 - DNA, 25 bp, Homo sapien
gccagcagccgcgtgtacttgagcg

SEQ ID NO: 2900350 - DNA, 25 bp, Homo sapien
tcagcctccttggaaccttgaaggc

SEQ ID NO: 2900351 - DNA, 25 bp, Homo sapien
tggaaccttgaaggcctggacccag

SEQ ID NO: 2900352 - DNA, 25 bp, Homo sapien
gcctccttggaaccttgaaggcctg

SEQ ID NO: 2900353 - DNA, 25 bp, Homo sapien
ttggaaccttgaaggcctggaccca

SEQ ID NO: 2900354 - DNA, 25 bp, Homo sapien
catgggcacgccaaagacatagggc

SEQ ID NO: 2900355 - DNA, 25 bp, Homo sapien
cataaacttgatggtctcccgaagc

SEQ ID NO: 2900356 - DNA, 25 bp, Homo sapien
taaagagcgccagcagggttttgcg

SEQ ID NO: 2900357 - DNA, 25 bp, Homo sapien
aagcacatccttgccttccgggtag

SEQ ID NO: 2900358 - DNA, 25 bp, Homo sapien
cttaacagaggaacggcggccatgt

SEQ ID NO: 2900359 - DNA, 25 bp, Homo sapien
tggtttcactcgagcaagagggcag

SEQ ID NO: 2900360 - DNA, 25 bp, Homo sapien
cggcttctctgtctgatactgctga

SEQ ID NO: 2900361 - DNA, 25 bp, Homo sapien
gctgagcctgaatgaaacacagaca

SEQ ID NO: 2900362 - DNA, 25 bp, Homo sapien
tccgtggagtagtcccgtgagtccc

SEQ ID NO: 2900363 - DNA, 25 bp, Homo sapien
acgcgtggcttcaggcctatgtgca

SEQ ID NO: 2900364 - DNA, 25 bp, Homo sapien
ccggtcccgcttgtagtagagggca

SEQ ID NO: 2900365 - DNA, 25 bp, Homo sapien
tgttggcgcggtagttgtcacgcac

SEQ ID NO: 2900366 - DNA, 25 bp, Homo sapien
ctgcagtgacaccagctcctcctct

SEQ ID NO: 2900367 - DNA, 25 bp, Homo sapien
caccagctcctcctctggtggcagc

SEQ ID NO: 2900368 - DNA, 25 bp, Homo sapien
cagctcctcctctggtggcagctca

SEQ ID NO: 2900369 - DNA, 25 bp, Homo sapien
agctcctcctctggtggcagctcac

SEQ ID NO: 2900370 - DNA, 25 bp, Homo sapien
caagagaggcacatcgtccggtgcc

SEQ ID NO: 2900371 - DNA, 25 bp, Homo sapien
agaggcacatcgtccggtgcccggc

SEQ ID NO: 2900372 - DNA, 25 bp, Homo sapien
gccaagagaggcacatcgtccggtg

SEQ ID NO: 2900373 - DNA, 25 bp, Homo sapien
gcctcggcagggtccgccccgacgc

SEQ ID NO: 2900374 - DNA, 25 bp, Homo sapien
gggtggggtagcgtgttgttgtggc

SEQ ID NO: 2900375 - DNA, 25 bp, Homo sapien
ggtggggtagcgtgttgttgtggct

SEQ ID NO: 2900376 - DNA, 25 bp, Homo sapien
atgtccaccttagcgctgctggatg

SEQ ID NO: 2900377 - DNA, 25 bp, Homo sapien
tgtgacgactccacaggagaaaagc

SEQ ID NO: 2900378 - DNA, 25 bp, Homo sapien
gaaaagccagttgccaagtcctcct

SEQ ID NO: 2900379 - DNA, 25 bp, Homo sapien
agacacgcatcgcagggaggaatcc

SEQ ID NO: 2900380 - DNA, 25 bp, Homo sapien
cgaagactggtgtcccaatgggggg

SEQ ID NO: 2900381 - DNA, 25 bp, Homo sapien
tgttcaaaggcccagatccagagaa

SEQ ID NO: 2900382 - DNA, 25 bp, Homo sapien
aggcccagatccagagaagagactg

SEQ ID NO: 2900383 - DNA, 25 bp, Homo sapien
ccccagttgttcaaaggcccagatc

SEQ ID NO: 2900384 - DNA, 25 bp, Homo sapien
tgcgtcctggccacgggaaaataag

SEQ ID NO: 2900385 - DNA, 25 bp, Homo sapien
gcaagaacctgtttccactcagaga

SEQ ID NO: 2900386 - DNA, 25 bp, Homo sapien
acacaccccgttgtgagaaagcaca

SEQ ID NO: 2900387 - DNA, 25 bp, Homo sapien
tatgtgaacacaccacttccagggt

SEQ ID NO: 2900388 - DNA, 25 bp, Homo sapien
ggaaaaggctgtcctcggaccacaa

SEQ ID NO: 2900389 - DNA, 25 bp, Homo sapien
aaaatgtgtacagagccgcaaaggg

SEQ ID NO: 2900390 - DNA, 25 bp, Homo sapien
tttggtcaaacatgcgtggcctctg

SEQ ID NO: 2900391 - DNA, 25 bp, Homo sapien
tacccagtttggcacggatgagcaa

SEQ ID NO: 2900392 - DNA, 25 bp, Homo sapien
ctgagctagctgcctacaccagccc

SEQ ID NO: 2900393 - DNA, 25 bp, Homo sapien
agctagctgcctacaccagcccact

SEQ ID NO: 2900394 - DNA, 25 bp, Homo sapien
tgagctagctgcctacaccagccca

SEQ ID NO: 2900395 - DNA, 25 bp, Homo sapien
ctagctgcctacaccagcccactgg

SEQ ID NO: 2900396 - DNA, 25 bp, Homo sapien
cgtgccgacagtgtccactgactgc

SEQ ID NO: 2900397 - DNA, 25 bp, Homo sapien
accgtgccgacagtgtccactgact

SEQ ID NO: 2900398 - DNA, 25 bp, Homo sapien
gcccaccgtgccgacagtgtccact

SEQ ID NO: 2900399 - DNA, 25 bp, Homo sapien
gccgacagtgtccactgactgcctg

SEQ ID NO: 2900400 - DNA, 25 bp, Homo sapien
gttgctgttgcagttgtgatacgag

SEQ ID NO: 2900401 - DNA, 25 bp, Homo sapien
gttgtgatacgaggcccactcgggc

SEQ ID NO: 2900402 - DNA, 25 bp, Homo sapien
gcctcggccgctcaaccatggccat

SEQ ID NO: 2900403 - DNA, 25 bp, Homo sapien
aatgttaatgcagatgatgaggccc

SEQ ID NO: 2900404 - DNA, 25 bp, Homo sapien
taggccctggccggcaggcctgccc

SEQ ID NO: 2900405 - DNA, 25 bp, Homo sapien
agacacagtgatcccaggtaggccc

SEQ ID NO: 2900406 - DNA, 25 bp, Homo sapien
gggaagacacagtgatcccaggtag

SEQ ID NO: 2900407 - DNA, 25 bp, Homo sapien
taggtgggggaagacacagtgatcc

SEQ ID NO: 2900408 - DNA, 25 bp, Homo sapien
tataagacaccacggaatcggctcc

SEQ ID NO: 2900409 - DNA, 25 bp, Homo sapien
gtataagacaccacggaatcggctc

SEQ ID NO: 2900410 - DNA, 25 bp, Homo sapien
tcatggaacacttggtataagacac

SEQ ID NO: 2900411 - DNA, 25 bp, Homo sapien
ctcacaaatggtatcatggaacact

SEQ ID NO: 2900412 - DNA, 25 bp, Homo sapien
agccacacagctatgttgtctgaga

SEQ ID NO: 2900413 - DNA, 25 bp, Homo sapien
gaggctagagcacttggtttctgcc

SEQ ID NO: 2900414 - DNA, 25 bp, Homo sapien
gctaatttagggctgaggctagagc

SEQ ID NO: 2900415 - DNA, 25 bp, Homo sapien
ccacacagctatgttgtctgagagg

SEQ ID NO: 2900416 - DNA, 25 bp, Homo sapien
gaggtgagactagtggggaggccag

SEQ ID NO: 2900417 - DNA, 25 bp, Homo sapien
gagaggtgagactagtggggaggcc

SEQ ID NO: 2900418 - DNA, 25 bp, Homo sapien
aggtgagactagtggggaggccagc

SEQ ID NO: 2900419 - DNA, 25 bp, Homo sapien
cttcttagggggctgggtctgcttt

SEQ ID NO: 2900420 - DNA, 25 bp, Homo sapien
gcttcttagggggctgggtctgctt

SEQ ID NO: 2900421 - DNA, 25 bp, Homo sapien
tgcttcttagggggctgggtctgct

SEQ ID NO: 2900422 - DNA, 25 bp, Homo sapien
ctgagtaatgatgacttgggagctt

SEQ ID NO: 2900423 - DNA, 25 bp, Homo sapien
agggtccatggtgcaccgaagatgg

SEQ ID NO: 2900424 - DNA, 25 bp, Homo sapien
cagggtccatggtgcaccgaagatg

SEQ ID NO: 2900425 - DNA, 25 bp, Homo sapien
cagatggctgggtactgatgaggct

SEQ ID NO: 2900426 - DNA, 25 bp, Homo sapien
tactgggcagtgagcacagcgtgtg

SEQ ID NO: 2900427 - DNA, 25 bp, Homo sapien
gtgtgggagagcctcgacggcgatg

SEQ ID NO: 2900428 - DNA, 25 bp, Homo sapien
ctcgtcatcagtgtcaggagcccaa

SEQ ID NO: 2900429 - DNA, 25 bp, Homo sapien
ggactctggggcatcctgagaccag

SEQ ID NO: 2900430 - DNA, 25 bp, Homo sapien
ccctgagtgtgttggaagccttccc

SEQ ID NO: 2900431 - DNA, 25 bp, Homo sapien
acccaggtcccctgagtgtgttgga

SEQ ID NO: 2900432 - DNA, 25 bp, Homo sapien
gagtgtgttggaagccttcccagtc

SEQ ID NO: 2900433 - DNA, 25 bp, Homo sapien
tatgcctgttttgaggggcctttcc

SEQ ID NO: 2900434 - DNA, 25 bp, Homo sapien
ccagctcggaccatatgcctgtttt

SEQ ID NO: 2900435 - DNA, 25 bp, Homo sapien
ccttaggcccagctcggaccatatg

SEQ ID NO: 2900436 - DNA, 25 bp, Homo sapien
ttaggcccagctcggaccatatgcc

SEQ ID NO: 2900437 - DNA, 25 bp, Homo sapien
caccgttcttgtggctaggagcctc

SEQ ID NO: 2900438 - DNA, 25 bp, Homo sapien
gagcggtgccgggaaaattcaggga

SEQ ID NO: 2900439 - DNA, 25 bp, Homo sapien
agctgggacaggctggtactgagcc

SEQ ID NO: 2900440 - DNA, 25 bp, Homo sapien
aggctggtactgagccgcctctgcc

SEQ ID NO: 2900441 - DNA, 25 bp, Homo sapien
ttcccgaagccgccgtctcatgtcc

SEQ ID NO: 2900442 - DNA, 25 bp, Homo sapien
gccgtctcatgtcccgggcatcata

SEQ ID NO: 2900443 - DNA, 25 bp, Homo sapien
ccgaagccgccgtctcatgtcccgg

SEQ ID NO: 2900444 - DNA, 25 bp, Homo sapien
agccgccgtctcatgtcccgggcat

SEQ ID NO: 2900445 - DNA, 25 bp, Homo sapien
ggtagcagccggacagggcctccac

SEQ ID NO: 2900446 - DNA, 25 bp, Homo sapien
caattcttgcttgtctcctcggcag

SEQ ID NO: 2900447 - DNA, 25 bp, Homo sapien
gaacggtacacccaattcttgcttg

SEQ ID NO: 2900448 - DNA, 25 bp, Homo sapien
ctcggcagtgctggatccagaggct

SEQ ID NO: 2900449 - DNA, 25 bp, Homo sapien
gacttaaaacaggtgcatcactggg

SEQ ID NO: 2900450 - DNA, 25 bp, Homo sapien
tgaaccactcagcagaaagaaaggc

SEQ ID NO: 2900451 - DNA, 25 bp, Homo sapien
gtgtaaccatgagcaagacccttag

SEQ ID NO: 2900452 - DNA, 25 bp, Homo sapien
attgtgtagcagaaaggcagggcct

SEQ ID NO: 2900453 - DNA, 25 bp, Homo sapien
gccacctgggccacccccctctgcc

SEQ ID NO: 2900454 - DNA, 25 bp, Homo sapien
ggccacctgggccacccccctctgc

SEQ ID NO: 2900455 - DNA, 25 bp, Homo sapien
cttggtattgattgcaacatctcac

SEQ ID NO: 2900456 - DNA, 25 bp, Homo sapien
tgcaacatctcacggtgttatgcca

SEQ ID NO: 2900457 - DNA, 25 bp, Homo sapien
ttggtattgattgcaacatctcacg

SEQ ID NO: 2900458 - DNA, 25 bp, Homo sapien
tctcacggtgttatgccatagctgg

SEQ ID NO: 2900459 - DNA, 25 bp, Homo sapien
atgttgacaagaacgatgaggccca

SEQ ID NO: 2900460 - DNA, 25 bp, Homo sapien
gatgccaatgttgacaagaacgatg

SEQ ID NO: 2900461 - DNA, 25 bp, Homo sapien
catagttgccacgttgatgccaatg

SEQ ID NO: 2900462 - DNA, 25 bp, Homo sapien
atgtcctcggcatcgtgggggcttt

SEQ ID NO: 2900463 - DNA, 25 bp, Homo sapien
acccccagaggtagtccacaatcat

SEQ ID NO: 2900464 - DNA, 25 bp, Homo sapien
cagaggtagtccacaatcatcactg

SEQ ID NO: 2900465 - DNA, 25 bp, Homo sapien
ccccagaggtagtccacaatcatca

SEQ ID NO: 2900466 - DNA, 25 bp, Homo sapien
ccttggccctgttcacccccagagg

SEQ ID NO: 2900467 - DNA, 25 bp, Homo sapien
tcatcttgtctaaggcgttctggag

SEQ ID NO: 2900468 - DNA, 25 bp, Homo sapien
tttctgagtagcccaatcaatcatc

SEQ ID NO: 2900469 - DNA, 25 bp, Homo sapien
ccaatcaatcatcttgtctaaggcg

SEQ ID NO: 2900470 - DNA, 25 bp, Homo sapien
tgtctaaggcgttctggagtccatg

SEQ ID NO: 2900471 - DNA, 25 bp, Homo sapien
gaccacttgggggactttcactggc

SEQ ID NO: 2900472 - DNA, 25 bp, Homo sapien
tgcacagggtccaggatgcagtgga

SEQ ID NO: 2900473 - DNA, 25 bp, Homo sapien
tccaggatgcagtggatgtggacat

SEQ ID NO: 2900474 - DNA, 25 bp, Homo sapien
ccaggatgcagtggatgtggacatc

SEQ ID NO: 2900475 - DNA, 25 bp, Homo sapien
acagggtccaggatgcagtggatgt

SEQ ID NO: 2900476 - DNA, 25 bp, Homo sapien
gcagcgacggcgacaacggcggtgg

SEQ ID NO: 2900477 - DNA, 25 bp, Homo sapien
gaacacagcgaagaagactgctact

SEQ ID NO: 2900478 - DNA, 25 bp, Homo sapien
cggcggcgacgaacacagcgaagaa

SEQ ID NO: 2900479 - DNA, 25 bp, Homo sapien
gactgctactgtgatggttggagaa

SEQ ID NO: 2900480 - DNA, 25 bp, Homo sapien
tagttgtgacatcttttggctgcga

SEQ ID NO: 2900481 - DNA, 25 bp, Homo sapien
tgggttacggaagactgagtggcta

SEQ ID NO: 2900482 - DNA, 25 bp, Homo sapien
gatttgtctgtagttctgcggccgc

SEQ ID NO: 2900483 - DNA, 25 bp, Homo sapien
tcaaagaaaggcactcggtgtagtt

SEQ ID NO: 2900484 - DNA, 25 bp, Homo sapien
cttgggatacgggaagggcaggttg

SEQ ID NO: 2900485 - DNA, 25 bp, Homo sapien
ccccacattggagggcaggcccgct

SEQ ID NO: 2900486 - DNA, 25 bp, Homo sapien
cccagccgcgacgtgggtacttggg

SEQ ID NO: 2900487 - DNA, 25 bp, Homo sapien
cacattggagggcaggcccgctctc

SEQ ID NO: 2900488 - DNA, 25 bp, Homo sapien
tggtggcagactggccaggatacca

SEQ ID NO: 2900489 - DNA, 25 bp, Homo sapien
ggtggcagactggccaggataccac

SEQ ID NO: 2900490 - DNA, 25 bp, Homo sapien
gtggcagactggccaggataccacc

SEQ ID NO: 2900491 - DNA, 25 bp, Homo sapien
tacacctggtagttggcattgcccc

SEQ ID NO: 2900492 - DNA, 25 bp, Homo sapien
gctgtagcccaagggttccgtggat

SEQ ID NO: 2900493 - DNA, 25 bp, Homo sapien
cctggattccggctgagtgggacaa

SEQ ID NO: 2900494 - DNA, 25 bp, Homo sapien
tcgtccaacaccgtgagggaggcag

SEQ ID NO: 2900495 - DNA, 25 bp, Homo sapien
gtggaggtggaagccggtggcagtg

SEQ ID NO: 2900496 - DNA, 25 bp, Homo sapien
ttgagtttctcggtctggctcctgt

SEQ ID NO: 2900497 - DNA, 25 bp, Homo sapien
agtttctcggtctggctcctgtgca

SEQ ID NO: 2900498 - DNA, 25 bp, Homo sapien
gcagagagggcctcaaggtggaggt

SEQ ID NO: 2900499 - DNA, 25 bp, Homo sapien
gccccacaccccacatccgcctgct

SEQ ID NO: 2900500 - DNA, 25 bp, Homo sapien
cccacaccccacatccgcctgctgg

SEQ ID NO: 2900501 - DNA, 25 bp, Homo sapien
ctgccccacaccccacatccgcctg

SEQ ID NO: 2900502 - DNA, 25 bp, Homo sapien
ctggactctgtttctctttattcct

SEQ ID NO: 2900503 - DNA, 25 bp, Homo sapien
ccccatgataggctcgctcacccat

SEQ ID NO: 2900504 - DNA, 25 bp, Homo sapien
ggccccatgataggctcgctcaccc

SEQ ID NO: 2900505 - DNA, 25 bp, Homo sapien
ccatgataggctcgctcacccatgg

SEQ ID NO: 2900506 - DNA, 25 bp, Homo sapien
catgataggctcgctcacccatggc

SEQ ID NO: 2900507 - DNA, 25 bp, Homo sapien
gaagaagaatcgagtctcctaagtc

SEQ ID NO: 2900508 - DNA, 25 bp, Homo sapien
acacgttgagcaagatgaagctgcc

SEQ ID NO: 2900509 - DNA, 25 bp, Homo sapien
cagagtcaccacattgatccacacg

SEQ ID NO: 2900510 - DNA, 25 bp, Homo sapien
cagaagaagaagaatcgagtctcct

SEQ ID NO: 2900511 - DNA, 25 bp, Homo sapien
aaaagaatccgcaaggagctcttca

SEQ ID NO: 2900512 - DNA, 25 bp, Homo sapien
acggaaaagaatccgcaaggagctc

SEQ ID NO: 2900513 - DNA, 25 bp, Homo sapien
aaaatgacggaaaagaatccgcaag

SEQ ID NO: 2900514 - DNA, 25 bp, Homo sapien
tgacggaaaagaatccgcaaggagc

SEQ ID NO: 2900515 - DNA, 25 bp, Homo sapien
gaacgccggcatgtccacatttagg

SEQ ID NO: 2900516 - DNA, 25 bp, Homo sapien
aaatacatatgggatggctgccgct

SEQ ID NO: 2900517 - DNA, 25 bp, Homo sapien
caggagtcaaggtggttaacgcgcc

SEQ ID NO: 2900518 - DNA, 25 bp, Homo sapien
gagcacaggttcttgggatccacgg

SEQ ID NO: 2900519 - DNA, 25 bp, Homo sapien
cgtgtccaacttgctcatctttggg

SEQ ID NO: 2900520 - DNA, 25 bp, Homo sapien
ccgtgtccaacttgctcatctttgg

SEQ ID NO: 2900521 - DNA, 25 bp, Homo sapien
caacttgctcatctttgggaactgg

SEQ ID NO: 2900522 - DNA, 25 bp, Homo sapien
cttgctcatctttgggaactgggaa

SEQ ID NO: 2900523 - DNA, 25 bp, Homo sapien
aggtagcccagtatggatcctgcag

SEQ ID NO: 2900524 - DNA, 25 bp, Homo sapien
cacatgcagtatcccgggagtaggc

SEQ ID NO: 2900525 - DNA, 25 bp, Homo sapien
gcgggcatcatagaccacatggcca

SEQ ID NO: 2900526 - DNA, 25 bp, Homo sapien
gctttgtttgctcagatatgccaga

SEQ ID NO: 2900527 - DNA, 25 bp, Homo sapien
gaaggaactgtatccacagggcggt

SEQ ID NO: 2900528 - DNA, 25 bp, Homo sapien
ccagaatcttgggtaaggcctagac

SEQ ID NO: 2900529 - DNA, 25 bp, Homo sapien
taaggcctgcggtactacagactcc

SEQ ID NO: 2900530 - DNA, 25 bp, Homo sapien
tgagacatgggctcctaaggatacc

SEQ ID NO: 2900531 - DNA, 25 bp, Homo sapien
atggtttccccgagttgctgggtgc

SEQ ID NO: 2900532 - DNA, 25 bp, Homo sapien
tccttgatggtttccccgagttgct

SEQ ID NO: 2900533 - DNA, 25 bp, Homo sapien
tttccccgagttgctgggtgcctct

SEQ ID NO: 2900534 - DNA, 25 bp, Homo sapien
ccccgagttgctgggtgcctcttga

SEQ ID NO: 2900535 - DNA, 25 bp, Homo sapien
ctctttattcctgatgcacttttgt

SEQ ID NO: 2900536 - DNA, 25 bp, Homo sapien
ggttctcatcacattctgatatccc

SEQ ID NO: 2900537 - DNA, 25 bp, Homo sapien
cctctttgtccaaggttctcatcac

SEQ ID NO: 2900538 - DNA, 25 bp, Homo sapien
ttgtccaaggttctcatcacattct

SEQ ID NO: 2900539 - DNA, 25 bp, Homo sapien
ctccttcccagagggtggcttccga

SEQ ID NO: 2900540 - DNA, 25 bp, Homo sapien
cccagagggtggcttccgaggcact

SEQ ID NO: 2900541 - DNA, 25 bp, Homo sapien
ttcccagagggtggcttccgaggca

SEQ ID NO: 2900542 - DNA, 25 bp, Homo sapien
ccttcccagagggtggcttccgagg

SEQ ID NO: 2900543 - DNA, 25 bp, Homo sapien
gaggcttattagtctgcggcttccc

SEQ ID NO: 2900544 - DNA, 25 bp, Homo sapien
tacggaatgcagtagccagcctccg

SEQ ID NO: 2900545 - DNA, 25 bp, Homo sapien
tgaactggttcaccggactcagcag

SEQ ID NO: 2900546 - DNA, 25 bp, Homo sapien
ggagcagaaatagattcaacaggtt

SEQ ID NO: 2900547 - DNA, 25 bp, Homo sapien
gaggccgagcgagtgccccagacac

SEQ ID NO: 2900548 - DNA, 25 bp, Homo sapien
ttgctgccacaaagtcgtccccgtt

SEQ ID NO: 2900549 - DNA, 25 bp, Homo sapien
caacctacaaatgggtctgtagatg

SEQ ID NO: 2900550 - DNA, 25 bp, Homo sapien
gtgccccagacacaacctacaaatg

SEQ ID NO: 2900551 - DNA, 25 bp, Homo sapien
agggggcactcccccagactgcgga

SEQ ID NO: 2900552 - DNA, 25 bp, Homo sapien
cactcccccagactgcggaagccat

SEQ ID NO: 2900553 - DNA, 25 bp, Homo sapien
gggcactcccccagactgcggaagc

SEQ ID NO: 2900554 - DNA, 25 bp, Homo sapien
ggggcactcccccagactgcggaag

SEQ ID NO: 2900555 - DNA, 25 bp, Homo sapien
ggctcccggcttgggcccgtcactc

SEQ ID NO: 2900556 - DNA, 25 bp, Homo sapien
gtccttggcccggaggagatcggct

SEQ ID NO: 2900557 - DNA, 25 bp, Homo sapien
tgcgccccggagcagaagtcgatgt

SEQ ID NO: 2900558 - DNA, 25 bp, Homo sapien
cagaagtcgatgtccgtgagcggcc

SEQ ID NO: 2900559 - DNA, 25 bp, Homo sapien
gcgagggtcccggcggtgaactaga

SEQ ID NO: 2900560 - DNA, 25 bp, Homo sapien
agcgagggtcccggcggtgaactag

SEQ ID NO: 2900561 - DNA, 25 bp, Homo sapien
gattccaggtccagttgcagttcag

SEQ ID NO: 2900562 - DNA, 25 bp, Homo sapien
tcagtgccgtccagtgaaaacatgg

SEQ ID NO: 2900563 - DNA, 25 bp, Homo sapien
ggttccgcacaccatctctgggagg

SEQ ID NO: 2900564 - DNA, 25 bp, Homo sapien
gaagccggcatcgtagtgaggtccc

SEQ ID NO: 2900565 - DNA, 25 bp, Homo sapien
cgtcactaggcgatttttccaaaga

SEQ ID NO: 2900566 - DNA, 25 bp, Homo sapien
gactcggacgctgaaacgtcactag

SEQ ID NO: 2900567 - DNA, 25 bp, Homo sapien
gcgcctcgtgctcagtgacgtagct

SEQ ID NO: 2900568 - DNA, 25 bp, Homo sapien
gctctccgttcggtggatcgaatca

SEQ ID NO: 2900569 - DNA, 25 bp, Homo sapien
ccaaggtcgacgacgtcatgctgag

SEQ ID NO: 2900570 - DNA, 25 bp, Homo sapien
cggtagagccaaggtcgacgacgtc

SEQ ID NO: 2900571 - DNA, 25 bp, Homo sapien
tagagccaaggtcgacgacgtcatg

SEQ ID NO: 2900572 - DNA, 25 bp, Homo sapien
ttgttttcaaaggtgcggtagagcc

SEQ ID NO: 2900573 - DNA, 25 bp, Homo sapien
cacctgggcggaacataatgtgggc

SEQ ID NO: 2900574 - DNA, 25 bp, Homo sapien
agtacagcagcgtccgcaggaggta

SEQ ID NO: 2900575 - DNA, 25 bp, Homo sapien
gacaccactgggatcaggtcgaaga

SEQ ID NO: 2900576 - DNA, 25 bp, Homo sapien
gactgggctttcgacggctgccttg

SEQ ID NO: 2900577 - DNA, 25 bp, Homo sapien
ggagccgggccaattctccgagcag

SEQ ID NO: 2900578 - DNA, 25 bp, Homo sapien
gagctcgtctagcagcccgaggcag

SEQ ID NO: 2900579 - DNA, 25 bp, Homo sapien
cagaaaatagtgaggcaacgtcccg

SEQ ID NO: 2900580 - DNA, 25 bp, Homo sapien
gagctgtcggccgttcagaaaatag

SEQ ID NO: 2900581 - DNA, 25 bp, Homo sapien
tgggcgtagaggaggaaccaacagg

SEQ ID NO: 2900582 - DNA, 25 bp, Homo sapien
cccacgtcccgctcgcccacagagg

SEQ ID NO: 2900583 - DNA, 25 bp, Homo sapien
gaggaaccaacagggaggtcttcca

SEQ ID NO: 2900584 - DNA, 25 bp, Homo sapien
acacagtcagtccccctggcgaggg

SEQ ID NO: 2900585 - DNA, 25 bp, Homo sapien
caagagaggagtgcacccacgttgt

SEQ ID NO: 2900586 - DNA, 25 bp, Homo sapien
catagaattctagcggccaagaccc

SEQ ID NO: 2900587 - DNA, 25 bp, Homo sapien
gaccctctggctggataataccttt

SEQ ID NO: 2900588 - DNA, 25 bp, Homo sapien
ccaggttcagtaagacagggctccc

SEQ ID NO: 2900589 - DNA, 25 bp, Homo sapien
cgctgcgccgacaccggccggctgc

SEQ ID NO: 2900590 - DNA, 25 bp, Homo sapien
ttctggcaaagggacttggtgccgc

SEQ ID NO: 2900591 - DNA, 25 bp, Homo sapien
tctgccggatcaggctactggccag

SEQ ID NO: 2900592 - DNA, 25 bp, Homo sapien
gggctcgcggacctcccgcttctgc

SEQ ID NO: 2900593 - DNA, 25 bp, Homo sapien
gcgggccgccccccgcacagtcgca

SEQ ID NO: 2900594 - DNA, 25 bp, Homo sapien
cgggccgccccccgcacagtcgcac

SEQ ID NO: 2900595 - DNA, 25 bp, Homo sapien
gacgagcaggaactacgaggctttc

SEQ ID NO: 2900596 - DNA, 25 bp, Homo sapien
gattgaaagaatcgcgagaaccggc

SEQ ID NO: 2900597 - DNA, 25 bp, Homo sapien
gagactccgggttatggacaaaaga

SEQ ID NO: 2900598 - DNA, 25 bp, Homo sapien
cagtctggcagggactttgtcgtcc

SEQ ID NO: 2900599 - DNA, 25 bp, Homo sapien
tgtgtctgagttcctgccagcgtag

SEQ ID NO: 2900600 - DNA, 25 bp, Homo sapien
tccgttcttgaagcgcaggtcacag

SEQ ID NO: 2900601 - DNA, 25 bp, Homo sapien
tgagcctacgggacccgatttcgga

SEQ ID NO: 2900602 - DNA, 25 bp, Homo sapien
catctctagccgtgaactgtgtctg

SEQ ID NO: 2900603 - DNA, 25 bp, Homo sapien
cagagggactccctgactgtcgtac

SEQ ID NO: 2900604 - DNA, 25 bp, Homo sapien
gagggcgcgaggtggctacccttag

SEQ ID NO: 2900605 - DNA, 25 bp, Homo sapien
cctactcagagggtgggctgcggat

SEQ ID NO: 2900606 - DNA, 25 bp, Homo sapien
gattgtaccactatgggcagccggt

SEQ ID NO: 2900607 - DNA, 25 bp, Homo sapien
ccttcggccaggtaactcgcctggg

SEQ ID NO: 2900608 - DNA, 25 bp, Homo sapien
ccccttcggccaggtaactcgcctg

SEQ ID NO: 2900609 - DNA, 25 bp, Homo sapien
gtctgtcagtccgctggctcccggg

SEQ ID NO: 2900610 - DNA, 25 bp, Homo sapien
gtctgtctgtcagtccgctggctcc

SEQ ID NO: 2900611 - DNA, 25 bp, Homo sapien
gctgccgctagcttggcgagagcct

SEQ ID NO: 2900612 - DNA, 25 bp, Homo sapien
ttggcgagagccttgccttggccca

SEQ ID NO: 2900613 - DNA, 25 bp, Homo sapien
tgcggctgccgctagcttggcgaga

SEQ ID NO: 2900614 - DNA, 25 bp, Homo sapien
cgctagcttggcgagagccttgcct

SEQ ID NO: 2900615 - DNA, 25 bp, Homo sapien
gcagcaaattgaccacagggtaggg

SEQ ID NO: 2900616 - DNA, 25 bp, Homo sapien
gaaacattcctacacttggcaggat

SEQ ID NO: 2900617 - DNA, 25 bp, Homo sapien
ttctgtttcctataaccaggagctt

SEQ ID NO: 2900618 - DNA, 25 bp, Homo sapien
taaccaggagctttcagtgtaattt

SEQ ID NO: 2900619 - DNA, 25 bp, Homo sapien
cagtttggtgacgatgcctttgagc

SEQ ID NO: 2900620 - DNA, 25 bp, Homo sapien
cagaacagtttggtgacgatgcctt

SEQ ID NO: 2900621 - DNA, 25 bp, Homo sapien
gaacagtttggtgacgatgcctttg

SEQ ID NO: 2900622 - DNA, 25 bp, Homo sapien
tttggtgacgatgcctttgagctga

SEQ ID NO: 2900623 - DNA, 25 bp, Homo sapien
tcgggattcgcctggaggtagaaac

SEQ ID NO: 2900624 - DNA, 25 bp, Homo sapien
gccctggatgcttccgtcgggattc

SEQ ID NO: 2900625 - DNA, 25 bp, Homo sapien
cttccgtcgggattcgcctggaggt

SEQ ID NO: 2900626 - DNA, 25 bp, Homo sapien
ggatgcttccgtcgggattcgcctg

SEQ ID NO: 2900627 - DNA, 25 bp, Homo sapien
gtgacccagcttggcgctctggatg

SEQ ID NO: 2900628 - DNA, 25 bp, Homo sapien
tctggatggtgaccacacggaggcc

SEQ ID NO: 2900629 - DNA, 25 bp, Homo sapien
gaactgtagagcagtccctcagcat

SEQ ID NO: 2900630 - DNA, 25 bp, Homo sapien
cattcatggccatgtagtgacccag

SEQ ID NO: 2900631 - DNA, 25 bp, Homo sapien
gacaacttctgagtccatgtaggac

SEQ ID NO: 2900632 - DNA, 25 bp, Homo sapien
gggaggacaacttctgagtccatgt

SEQ ID NO: 2900633 - DNA, 25 bp, Homo sapien
ggacaacttctgagtccatgtagga

SEQ ID NO: 2900634 - DNA, 25 bp, Homo sapien
gaggacaacttctgagtccatgtag

SEQ ID NO: 2900635 - DNA, 25 bp, Homo sapien
tccttaaagcgacactcagctgtga

SEQ ID NO: 2900636 - DNA, 25 bp, Homo sapien
caggacgtagtaattctcaaagaca

SEQ ID NO: 2900637 - DNA, 25 bp, Homo sapien
cttgtccaggccgaggtaccaggcc

SEQ ID NO: 2900638 - DNA, 25 bp, Homo sapien
gctgccttggtcttcttaactcggt

SEQ ID NO: 2900639 - DNA, 25 bp, Homo sapien
ttcccgtacattcaccctccaagaa

SEQ ID NO: 2900640 - DNA, 25 bp, Homo sapien
ggtcctcttatcacttgtagcctga

SEQ ID NO: 2900641 - DNA, 25 bp, Homo sapien
tcaaggtcaataccctctcctgtgg

SEQ ID NO: 2900642 - DNA, 25 bp, Homo sapien
tgatctgtcacaaagggtcctctta

SEQ ID NO: 2900643 - DNA, 25 bp, Homo sapien
aggcctcggggacactgtggagaga

SEQ ID NO: 2900644 - DNA, 25 bp, Homo sapien
cactgtggagagaaggctcctggta

SEQ ID NO: 2900645 - DNA, 25 bp, Homo sapien
tggagagaaggctcctggtacatgg

SEQ ID NO: 2900646 - DNA, 25 bp, Homo sapien
agagaaggctcctggtacatggcca

SEQ ID NO: 2900647 - DNA, 25 bp, Homo sapien
taataggtatcactcaagaaggcgg

SEQ ID NO: 2900648 - DNA, 25 bp, Homo sapien
tcagggtagagcacctagtgggacc

SEQ ID NO: 2900649 - DNA, 25 bp, Homo sapien
tcctaggcccaaagatctaagggtc

SEQ ID NO: 2900650 - DNA, 25 bp, Homo sapien
gaaagaagtgatcagccaggaccat

SEQ ID NO: 2900651 - DNA, 25 bp, Homo sapien
aagtctgaggctatggaagtctccc

SEQ ID NO: 2900652 - DNA, 25 bp, Homo sapien
agtgacctgccttggagccttagtc

SEQ ID NO: 2900653 - DNA, 25 bp, Homo sapien
ctagttcactagcaggttccccatc

SEQ ID NO: 2900654 - DNA, 25 bp, Homo sapien
gtctggagtgcaagaggccttcacc

SEQ ID NO: 2900655 - DNA, 25 bp, Homo sapien
tcgctcagtgacttcgctcagagag

SEQ ID NO: 2900656 - DNA, 25 bp, Homo sapien
tcagtgacttcgctcagagagccgc

SEQ ID NO: 2900657 - DNA, 25 bp, Homo sapien
gctcagtgacttcgctcagagagcc

SEQ ID NO: 2900658 - DNA, 25 bp, Homo sapien
agtgacttcgctcagagagccgctg

SEQ ID NO: 2900659 - DNA, 25 bp, Homo sapien
agcgcccccagcagcatcagcagag

SEQ ID NO: 2900660 - DNA, 25 bp, Homo sapien
ctggggcgagcggcgcccccagcgc

SEQ ID NO: 2900661 - DNA, 25 bp, Homo sapien
ggggcgagcggcgcccccagcgccc

SEQ ID NO: 2900662 - DNA, 25 bp, Homo sapien
cccagcgcccccagcagcatcagca

SEQ ID NO: 2900663 - DNA, 25 bp, Homo sapien
cacggagctatcatagccagagaaa

SEQ ID NO: 2900664 - DNA, 25 bp, Homo sapien
gatgagttgcgccaggatgagacca

SEQ ID NO: 2900665 - DNA, 25 bp, Homo sapien
agaccaacgctgaccctgacacggt

SEQ ID NO: 2900666 - DNA, 25 bp, Homo sapien
gcgctggccgcacggagctatcata

SEQ ID NO: 2900667 - DNA, 25 bp, Homo sapien
cagttctactccaggcccgtccacc

SEQ ID NO: 2900668 - DNA, 25 bp, Homo sapien
gagcttgtccattggtctgatttcg

SEQ ID NO: 2900669 - DNA, 25 bp, Homo sapien
acccacggccagagcttgtccattg

SEQ ID NO: 2900670 - DNA, 25 bp, Homo sapien
ttggtctgatttcgatccaatcttc

SEQ ID NO: 2900671 - DNA, 25 bp, Homo sapien
caggtctaagtacacctttgtgctc

SEQ ID NO: 2900672 - DNA, 25 bp, Homo sapien
aagtacacctttgtgctcatctctt

SEQ ID NO: 2900673 - DNA, 25 bp, Homo sapien
cctttgtgctcatctcttcatcctt

SEQ ID NO: 2900674 - DNA, 25 bp, Homo sapien
aggtctaagtacacctttgtgctca

SEQ ID NO: 2900675 - DNA, 25 bp, Homo sapien
cttgggatttccaaaggaagcccag

SEQ ID NO: 2900676 - DNA, 25 bp, Homo sapien
aggcataaactgtgggtcaaggggc

SEQ ID NO: 2900677 - DNA, 25 bp, Homo sapien
caggcataaactgtgggtcaagggg

SEQ ID NO: 2900678 - DNA, 25 bp, Homo sapien
tgggatttccaaaggaagcccagga

SEQ ID NO: 2900679 - DNA, 25 bp, Homo sapien
tcgatgccgtcgtgctccgcagggt

SEQ ID NO: 2900680 - DNA, 25 bp, Homo sapien
gattccgccgtgatgcggagcgaat

SEQ ID NO: 2900681 - DNA, 25 bp, Homo sapien
ttgttcagtagcaccacgtcaggga

SEQ ID NO: 2900682 - DNA, 25 bp, Homo sapien
acgtcagggagccacacggattccg

SEQ ID NO: 2900683 - DNA, 25 bp, Homo sapien
gctaatgtccagagccacgtcaaaa

SEQ ID NO: 2900684 - DNA, 25 bp, Homo sapien
tcggaggacaccacgacgctaatgt

SEQ ID NO: 2900685 - DNA, 25 bp, Homo sapien
gttgccaacgcacggagccgtcgga

SEQ ID NO: 2900686 - DNA, 25 bp, Homo sapien
cagagccacgtcaaaattcccatca

SEQ ID NO: 2900687 - DNA, 25 bp, Homo sapien
aaaccaggagggtagacgaggtgag

SEQ ID NO: 2900688 - DNA, 25 bp, Homo sapien
aaggatgaaggatgggagtcgccgg

SEQ ID NO: 2900689 - DNA, 25 bp, Homo sapien
tcaggatgtctaaggaaagggagga

SEQ ID NO: 2900690 - DNA, 25 bp, Homo sapien
gaggatttgtaagagctccttcagc

SEQ ID NO: 2900691 - DNA, 25 bp, Homo sapien
gagtcactagagctgccagagaacc

SEQ ID NO: 2900692 - DNA, 25 bp, Homo sapien
agagaaccagtcagcgctggtggag

SEQ ID NO: 2900693 - DNA, 25 bp, Homo sapien
gatggaggagagagtcactagagct

SEQ ID NO: 2900694 - DNA, 25 bp, Homo sapien
aaccagtcagcgctggtggagtttg

SEQ ID NO: 2900695 - DNA, 25 bp, Homo sapien
tttcctgatgcccttgcccgtcagg

SEQ ID NO: 2900696 - DNA, 25 bp, Homo sapien
gctgtaggagctgaacaccatagtg

SEQ ID NO: 2900697 - DNA, 25 bp, Homo sapien
gtctgcaggctgacctccgagctgt

SEQ ID NO: 2900698 - DNA, 25 bp, Homo sapien
catagtgcaattctgccagtcgaag

SEQ ID NO: 2900699 - DNA, 25 bp, Homo sapien
atcgcctggaggctggattagccga

SEQ ID NO: 2900700 - DNA, 25 bp, Homo sapien
ttgaccaggtagaagagaggcttgc

SEQ ID NO: 2900701 - DNA, 25 bp, Homo sapien
gagagggcttgtggataatctccca

SEQ ID NO: 2900702 - DNA, 25 bp, Homo sapien
tgcatggggcaatgacgttgaccag

SEQ ID NO: 2900703 - DNA, 25 bp, Homo sapien
accgcgcccggtggctattactatt

SEQ ID NO: 2900704 - DNA, 25 bp, Homo sapien
gcccggtggctattactattatata

SEQ ID NO: 2900705 - DNA, 25 bp, Homo sapien
cgcccggtggctattactattatat

SEQ ID NO: 2900706 - DNA, 25 bp, Homo sapien
ccgcgcccggtggctattactatta

SEQ ID NO: 2900707 - DNA, 25 bp, Homo sapien
ggggaagagagaaggattagacttg

SEQ ID NO: 2900708 - DNA, 25 bp, Homo sapien
gaggggaagagagaaggattagact

SEQ ID NO: 2900709 - DNA, 25 bp, Homo sapien
gggaagagagaaggattagacttgc

SEQ ID NO: 2900710 - DNA, 25 bp, Homo sapien
cagaggggaagagagaaggattaga

SEQ ID NO: 2900711 - DNA, 25 bp, Homo sapien
gaaggtgacgaggaccatggtaaac

SEQ ID NO: 2900712 - DNA, 25 bp, Homo sapien
taatgggtactgatagtgaggtctc

SEQ ID NO: 2900713 - DNA, 25 bp, Homo sapien
gtcagcagggcaaagattgagagcc

SEQ ID NO: 2900714 - DNA, 25 bp, Homo sapien
gaggtctcaggtactttgtcagcca

SEQ ID NO: 2900715 - DNA, 25 bp, Homo sapien
ctgacggacccaaaggggcatttgg

SEQ ID NO: 2900716 - DNA, 25 bp, Homo sapien
agcggtggtgcaggttgagaaccac

SEQ ID NO: 2900717 - DNA, 25 bp, Homo sapien
tggtgcaggttgagaaccacgacac

SEQ ID NO: 2900718 - DNA, 25 bp, Homo sapien
ggtgtggggtgagcggtggtgcagg

SEQ ID NO: 2900719 - DNA, 25 bp, Homo sapien
ggtacagcggaagtttgtgaatgaa

SEQ ID NO: 2900720 - DNA, 25 bp, Homo sapien
ttgggcctttttagacgcaggtaca

SEQ ID NO: 2900721 - DNA, 25 bp, Homo sapien
gagaaaatcacttggcggcttccgg

SEQ ID NO: 2900722 - DNA, 25 bp, Homo sapien
tccggcatcaggtctctctcgggtt

SEQ ID NO: 2900723 - DNA, 25 bp, Homo sapien
gtcttccgagagcatgggccgcttc

SEQ ID NO: 2900724 - DNA, 25 bp, Homo sapien
caaagtgagcagcaggagtactaca

SEQ ID NO: 2900725 - DNA, 25 bp, Homo sapien
catgatgctcaaccacagcgtcttc

SEQ ID NO: 2900726 - DNA, 25 bp, Homo sapien
tcttatgtgggtaacgggcgtagtc

SEQ ID NO: 2900727 - DNA, 25 bp, Homo sapien
tcaaaacccgagagcccatcatgct

SEQ ID NO: 2900728 - DNA, 25 bp, Homo sapien
aagaggagtgactggccacgcccaa

SEQ ID NO: 2900729 - DNA, 25 bp, Homo sapien
tccagcagtgatctctctagccttg

SEQ ID NO: 2900730 - DNA, 25 bp, Homo sapien
acgcccaaacgcaaagacagccagt

SEQ ID NO: 2900731 - DNA, 25 bp, Homo sapien
cacagcccggtttggaccatcgata

SEQ ID NO: 2900732 - DNA, 25 bp, Homo sapien
gttcctgcagctgtcgagcgatgta

SEQ ID NO: 2900733 - DNA, 25 bp, Homo sapien
tagctgatagaggagacgacctccc

SEQ ID NO: 2900734 - DNA, 25 bp, Homo sapien
acctcccgtagctccggaagcaggg

SEQ ID NO: 2900735 - DNA, 25 bp, Homo sapien
aggaagaggcggtccactaccatgg

SEQ ID NO: 2900736 - DNA, 25 bp, Homo sapien
gtccaggaagatgactagggtccca

SEQ ID NO: 2900737 - DNA, 25 bp, Homo sapien
gggtcccaacgctggtgaagatgat

SEQ ID NO: 2900738 - DNA, 25 bp, Homo sapien
tggtacgtggcgtccaggaagatga

SEQ ID NO: 2900739 - DNA, 25 bp, Homo sapien
cagtccccagaaacgaaataagagg

SEQ ID NO: 2900740 - DNA, 25 bp, Homo sapien
tgcatttcaggtgggtccaagacac

SEQ ID NO: 2900741 - DNA, 25 bp, Homo sapien
taagaggcccagattcctcgtgaag

SEQ ID NO: 2900742 - DNA, 25 bp, Homo sapien
cactggcgacctaggtgttgatacc

SEQ ID NO: 2900743 - DNA, 25 bp, Homo sapien
gctctatacgtagtgaggacccaga

SEQ ID NO: 2900744 - DNA, 25 bp, Homo sapien
tttgcactagttaaccctggtcagg

SEQ ID NO: 2900745 - DNA, 25 bp, Homo sapien
tctatctatacagcggaaccacaag

SEQ ID NO: 2900746 - DNA, 25 bp, Homo sapien
tgtgccgcagcacgcaaaatttaga

SEQ ID NO: 2900747 - DNA, 25 bp, Homo sapien
gagcactttcccagtccagggcagg

SEQ ID NO: 2900748 - DNA, 25 bp, Homo sapien
ggtaagcagatcacacctctttctg

SEQ ID NO: 2900749 - DNA, 25 bp, Homo sapien
gaaatattggccctatcttgacccc

SEQ ID NO: 2900750 - DNA, 25 bp, Homo sapien
tcccaagccaggtcaaggaggtttg

SEQ ID NO: 2900751 - DNA, 25 bp, Homo sapien
acccgccttgttctgaagctttctc

SEQ ID NO: 2900752 - DNA, 25 bp, Homo sapien
taatgacccgccttgttctgaagct

SEQ ID NO: 2900753 - DNA, 25 bp, Homo sapien
ctaatgacccgccttgttctgaagc

SEQ ID NO: 2900754 - DNA, 25 bp, Homo sapien
cgccttgttctgaagctttctctaa

SEQ ID NO: 2900755 - DNA, 25 bp, Homo sapien
ggccaccacgttggaggcagaagct

SEQ ID NO: 2900756 - DNA, 25 bp, Homo sapien
gtgtcagatcactgtgcgaataggg

SEQ ID NO: 2900757 - DNA, 25 bp, Homo sapien
gtcaagcgccgcatctcagagactg

SEQ ID NO: 2900758 - DNA, 25 bp, Homo sapien
tactactcctacaagcctaagcgca

SEQ ID NO: 2900759 - DNA, 25 bp, Homo sapien
ccagtgggcgggattggtggaggtg

SEQ ID NO: 2900760 - DNA, 25 bp, Homo sapien
agccaagccagtgggcgggattggt

SEQ ID NO: 2900761 - DNA, 25 bp, Homo sapien
ccaagccagtgggcgggattggtgg

SEQ ID NO: 2900762 - DNA, 25 bp, Homo sapien
aagccagtgggcgggattggtggag

SEQ ID NO: 2900763 - DNA, 25 bp, Homo sapien
cctacaagacctacagccagggagc

SEQ ID NO: 2900764 - DNA, 25 bp, Homo sapien
ccttgccagtgagaagacacccaat

SEQ ID NO: 2900765 - DNA, 25 bp, Homo sapien
gaggccacccaagaaacgagaatac

SEQ ID NO: 2900766 - DNA, 25 bp, Homo sapien
gggtcccaagctgcctcggttatca

SEQ ID NO: 2900767 - DNA, 25 bp, Homo sapien
gttataattgtcatccctatctcca

SEQ ID NO: 2900768 - DNA, 25 bp, Homo sapien
actcagtccagcgtggacgatggct

SEQ ID NO: 2900769 - DNA, 25 bp, Homo sapien
gcccagaagtggtcaagttataatt

SEQ ID NO: 2900770 - DNA, 25 bp, Homo sapien
tccaggccaactcagtccagcgtgg

SEQ ID NO: 2900771 - DNA, 25 bp, Homo sapien
ttgcagcagtccatttcagaagacc

SEQ ID NO: 2900772 - DNA, 25 bp, Homo sapien
cagaagacccggatgctcagggatc

SEQ ID NO: 2900773 - DNA, 25 bp, Homo sapien
tccccagttgctgcagaacttagca

SEQ ID NO: 2900774 - DNA, 25 bp, Homo sapien
cccgggcaatcaggttgaagatctt

SEQ ID NO: 2900775 - DNA, 25 bp, Homo sapien
catctttccttggactttctcctct

SEQ ID NO: 2900776 - DNA, 25 bp, Homo sapien
gagcctgggcccctcagagctccag

SEQ ID NO: 2900777 - DNA, 25 bp, Homo sapien
ctgggcccctcagagctccagccat

SEQ ID NO: 2900778 - DNA, 25 bp, Homo sapien
ctcctggctcagggagcctgggccc

SEQ ID NO: 2900779 - DNA, 25 bp, Homo sapien
ctgggtggagcggagggcggcgatg

SEQ ID NO: 2900780 - DNA, 25 bp, Homo sapien
tcaggcgggttcaagtaggggtgac

SEQ ID NO: 2900781 - DNA, 25 bp, Homo sapien
tgtgtggagtcaggcgggttcaagt

SEQ ID NO: 2900782 - DNA, 25 bp, Homo sapien
cgggttcaagtaggggtgactgcca

SEQ ID NO: 2900783 - DNA, 25 bp, Homo sapien
gcatagaagtaggcccggcctcgga

SEQ ID NO: 2900784 - DNA, 25 bp, Homo sapien
tagaagtaggcccggcctcggatgt

SEQ ID NO: 2900785 - DNA, 25 bp, Homo sapien
gcagggcatagaagtaggcccggcc

SEQ ID NO: 2900786 - DNA, 25 bp, Homo sapien
agggcatagaagtaggcccggcctc

SEQ ID NO: 2900787 - DNA, 25 bp, Homo sapien
ccagataggaaggccactgttggga

SEQ ID NO: 2900788 - DNA, 25 bp, Homo sapien
gcagccccaccaagccagataggaa

SEQ ID NO: 2900789 - DNA, 25 bp, Homo sapien
agcagccccaccaagccagatagga

SEQ ID NO: 2900790 - DNA, 25 bp, Homo sapien
tcccctcctgtagtgtccagagtcc

SEQ ID NO: 2900791 - DNA, 25 bp, Homo sapien
tgtaccgagccatgatcctagatcc

SEQ ID NO: 2900792 - DNA, 25 bp, Homo sapien
cactgtccgggagagatcacgggac

SEQ ID NO: 2900793 - DNA, 25 bp, Homo sapien
tgcatgaacaaaccaagatggcagg

SEQ ID NO: 2900794 - DNA, 25 bp, Homo sapien
gaccagtggcttgtccggaagtagc

SEQ ID NO: 2900795 - DNA, 25 bp, Homo sapien
gaggttacggcagtttgtctctccc

SEQ ID NO: 2900796 - DNA, 25 bp, Homo sapien
gcgctctcggcgcttctgagcagcg

SEQ ID NO: 2900797 - DNA, 25 bp, Homo sapien
tcggcgcttctgagcagcgaactcg

SEQ ID NO: 2900798 - DNA, 25 bp, Homo sapien
gttcctgaacggcagaggttacggc

SEQ ID NO: 2900799 - DNA, 25 bp, Homo sapien
cgccgcctccgcctaggtgctcaga

SEQ ID NO: 2900800 - DNA, 25 bp, Homo sapien
tgctcagacctcgtcagggcggcca

SEQ ID NO: 2900801 - DNA, 25 bp, Homo sapien
cgcaggcgcaaacctcactacaaaa

SEQ ID NO: 2900802 - DNA, 25 bp, Homo sapien
aataaggagcgaaaggagcccttct

SEQ ID NO: 2900803 - DNA, 25 bp, Homo sapien
tccgaactggactctcttgatggtg

SEQ ID NO: 2900804 - DNA, 25 bp, Homo sapien
cggactcaggactccgaactggact

SEQ ID NO: 2900805 - DNA, 25 bp, Homo sapien
tctcttgatggtgcgcagcgggcat

SEQ ID NO: 2900806 - DNA, 25 bp, Homo sapien
cagttcatccggactcaggactccg

SEQ ID NO: 2900807 - DNA, 25 bp, Homo sapien
gcaaaatataactctgggaggcccg

SEQ ID NO: 2900808 - DNA, 25 bp, Homo sapien
tcacccataagcagcgagaaagcgc

SEQ ID NO: 2900809 - DNA, 25 bp, Homo sapien
taaagactccctaggattcgtcgga

SEQ ID NO: 2900810 - DNA, 25 bp, Homo sapien
tgtgtcttcaacagagcaggtgctc

SEQ ID NO: 2900811 - DNA, 25 bp, Homo sapien
tctacttagcgccacaagggaaaaa

SEQ ID NO: 2900812 - DNA, 25 bp, Homo sapien
agtcaccaatagctctcccctaggg

SEQ ID NO: 2900813 - DNA, 25 bp, Homo sapien
caaactatggcttcgacgactggct

SEQ ID NO: 2900814 - DNA, 25 bp, Homo sapien
tttcaccctgtaggacaagcccaag

SEQ ID NO: 2900815 - DNA, 25 bp, Homo sapien
cacagtgtctcagggcatcagcaca

SEQ ID NO: 2900816 - DNA, 25 bp, Homo sapien
tgaaacagaactaccaggaactagg

SEQ ID NO: 2900817 - DNA, 25 bp, Homo sapien
cacttatggcgcctgttaggcactg

SEQ ID NO: 2900818 - DNA, 25 bp, Homo sapien
tatagaaagggatttggcaccatct

SEQ ID NO: 2900819 - DNA, 25 bp, Homo sapien
tgggtatttgatgccaccctccgtc

SEQ ID NO: 2900820 - DNA, 25 bp, Homo sapien
gcagcggccagtccgctcaatcacc

SEQ ID NO: 2900821 - DNA, 25 bp, Homo sapien
ctgcacatgtttggcagcggccagt

SEQ ID NO: 2900822 - DNA, 25 bp, Homo sapien
ttggggcggcctccctcagtcgtct

SEQ ID NO: 2900823 - DNA, 25 bp, Homo sapien
tggccagttcaatgtggccaaagtg

SEQ ID NO: 2900824 - DNA, 25 bp, Homo sapien
aagaagcagacacagcgcaaaactt

SEQ ID NO: 2900825 - DNA, 25 bp, Homo sapien
cagacacagcgcaaaactttcattg

SEQ ID NO: 2900826 - DNA, 25 bp, Homo sapien
caggaagcccacgtgaaacacaggc

SEQ ID NO: 2900827 - DNA, 25 bp, Homo sapien
tcccagaccagagcctgttccccac

SEQ ID NO: 2900828 - DNA, 25 bp, Homo sapien
agaccagagcctgttccccactcac

SEQ ID NO: 2900829 - DNA, 25 bp, Homo sapien
cccccgctcccagaccagagcctgt

SEQ ID NO: 2900830 - DNA, 25 bp, Homo sapien
cacccccgctcccagaccagagcct

SEQ ID NO: 2900831 - DNA, 25 bp, Homo sapien
tcaggttgttccacaccgaacttgt

SEQ ID NO: 2900832 - DNA, 25 bp, Homo sapien
ggctgtcccttggacttagccagga

SEQ ID NO: 2900833 - DNA, 25 bp, Homo sapien
tttggtcagatcctcgtcaccctca

SEQ ID NO: 2900834 - DNA, 25 bp, Homo sapien
aaggtcgtagacatgtgtgagccgc

SEQ ID NO: 2900835 - DNA, 25 bp, Homo sapien
cctccttcccaaaagtctccgccag

SEQ ID NO: 2900836 - DNA, 25 bp, Homo sapien
tccttcccaaaagtctccgccagcc

SEQ ID NO: 2900837 - DNA, 25 bp, Homo sapien
ctccttcccaaaagtctccgccagc

SEQ ID NO: 2900838 - DNA, 25 bp, Homo sapien
gagagtcctcattaacgtgcttcca

SEQ ID NO: 2900839 - DNA, 25 bp, Homo sapien
gaagatctcatgcactcgctctgga

SEQ ID NO: 2900840 - DNA, 25 bp, Homo sapien
cattccgcatacaactctaggccag

SEQ ID NO: 2900841 - DNA, 25 bp, Homo sapien
gacaatcatccactctggccgtgca

SEQ ID NO: 2900842 - DNA, 25 bp, Homo sapien
gttctgctcattgcgccgcagctga

SEQ ID NO: 2900843 - DNA, 25 bp, Homo sapien
ctctgcaatgacatgggccgctgcg

SEQ ID NO: 2900844 - DNA, 25 bp, Homo sapien
gccgcagctgattgttgatcttcac

SEQ ID NO: 2900845 - DNA, 25 bp, Homo sapien
gatcttcacgatgtcagccagtttg

SEQ ID NO: 2900846 - DNA, 25 bp, Homo sapien
acagtacgggccgagaagtccactc

SEQ ID NO: 2900847 - DNA, 25 bp, Homo sapien
caaccgctgcttcagggacttgagg

SEQ ID NO: 2900848 - DNA, 25 bp, Homo sapien
tctccgcaaaggtcatgttggcagc

SEQ ID NO: 2900849 - DNA, 25 bp, Homo sapien
ccgagaagtccactcttttgcccat

SEQ ID NO: 2900850 - DNA, 25 bp, Homo sapien
aatgcgatcaccattgtctcggatg

SEQ ID NO: 2900851 - DNA, 25 bp, Homo sapien
tgtacttggcgcctgggtactggct

SEQ ID NO: 2900852 - DNA, 25 bp, Homo sapien
tccccctgcgcactagttcttgaag

SEQ ID NO: 2900853 - DNA, 25 bp, Homo sapien
gggtggaaacgcaagtcaatgcgat

SEQ ID NO: 2900854 - DNA, 25 bp, Homo sapien
tgaacgagacagactcagatggcct

SEQ ID NO: 2900855 - DNA, 25 bp, Homo sapien
ctggatcccaatgaacgagacagac

SEQ ID NO: 2900856 - DNA, 25 bp, Homo sapien
caatgaacgagacagactcagatgg

SEQ ID NO: 2900857 - DNA, 25 bp, Homo sapien
gacagactcagatggcctaacccag

SEQ ID NO: 2900858 - DNA, 25 bp, Homo sapien
aacagcctttaacaagacagtcaag

SEQ ID NO: 2900859 - DNA, 25 bp, Homo sapien
acagcctttaacaagacagtcaagt

SEQ ID NO: 2900860 - DNA, 25 bp, Homo sapien
cagagaccaacagctccctgcacac

SEQ ID NO: 2900861 - DNA, 25 bp, Homo sapien
gcaagctgccccgggtttataccac

SEQ ID NO: 2900862 - DNA, 25 bp, Homo sapien
tgcactgttcctccacggatccctc

SEQ ID NO: 2900863 - DNA, 25 bp, Homo sapien
tgccatatgcaagctgccccgggtt

SEQ ID NO: 2900864 - DNA, 25 bp, Homo sapien
ctgaggcgggcacgtcacttaagct

SEQ ID NO: 2900865 - DNA, 25 bp, Homo sapien
tctcagtgaaggaggtatctaagaa

SEQ ID NO: 2900866 - DNA, 25 bp, Homo sapien
gaggtgaggtaaggaaaaggtctca

SEQ ID NO: 2900867 - DNA, 25 bp, Homo sapien
cctaaagtcctttgcaagtccagtg

SEQ ID NO: 2900868 - DNA, 25 bp, Homo sapien
gacccgatgccccatcatggacatt

SEQ ID NO: 2900869 - DNA, 25 bp, Homo sapien
tagaccatgggagaatgcggacccg

SEQ ID NO: 2900870 - DNA, 25 bp, Homo sapien
gattcaagcgaaaggtagaccatgg

SEQ ID NO: 2900871 - DNA, 25 bp, Homo sapien
catggacattttgtgcagagttggc

SEQ ID NO: 2900872 - DNA, 25 bp, Homo sapien
aagtctgcattgtacggagttgtca

SEQ ID NO: 2900873 - DNA, 25 bp, Homo sapien
tgcacaatacccatgacaggccgat

SEQ ID NO: 2900874 - DNA, 25 bp, Homo sapien
ccaggaagacgtctctcttggtgaa

SEQ ID NO: 2900875 - DNA, 25 bp, Homo sapien
tgacaatcatgcgaggaaccatggc

SEQ ID NO: 2900876 - DNA, 25 bp, Homo sapien
agccaggtttccatttggaccacac

SEQ ID NO: 2900877 - DNA, 25 bp, Homo sapien
ccaggtttccatttggaccacacac

SEQ ID NO: 2900878 - DNA, 25 bp, Homo sapien
gccaggtttccatttggaccacaca

SEQ ID NO: 2900879 - DNA, 25 bp, Homo sapien
gaccactgctgggtaagtcaggaaa

SEQ ID NO: 2900880 - DNA, 25 bp, Homo sapien
caatctcacagaccactgctgggta

SEQ ID NO: 2900881 - DNA, 25 bp, Homo sapien
acgccttacacctttttggcctgag

SEQ ID NO: 2900882 - DNA, 25 bp, Homo sapien
cacagaccactgctgggtaagtcag

SEQ ID NO: 2900883 - DNA, 25 bp, Homo sapien
taagggccactgtcttcatcatcgg

SEQ ID NO: 2900884 - DNA, 25 bp, Homo sapien
aacatcaggaggttcatcacttcac

SEQ ID NO: 2900885 - DNA, 25 bp, Homo sapien
tcccacgtcgacaggaacatcagga

SEQ ID NO: 2900886 - DNA, 25 bp, Homo sapien
tgtccccaggagagatgtgcttgta

SEQ ID NO: 2900887 - DNA, 25 bp, Homo sapien
cctcgatgaggagccagttgttaat

SEQ ID NO: 2900888 - DNA, 25 bp, Homo sapien
agaagaggcgagtgatgtcatgacc

SEQ ID NO: 2900889 - DNA, 25 bp, Homo sapien
catgacccatctctaggtaggagat

SEQ ID NO: 2900890 - DNA, 25 bp, Homo sapien
tgttaatgacagtctgaatgttgga

SEQ ID NO: 2900891 - DNA, 25 bp, Homo sapien
gaatcagcaatggagtccccaatgc

SEQ ID NO: 2900892 - DNA, 25 bp, Homo sapien
taagtcttagaatcagcaatggagt

SEQ ID NO: 2900893 - DNA, 25 bp, Homo sapien
ctgaatgtcctggtaagtcttagaa

SEQ ID NO: 2900894 - DNA, 25 bp, Homo sapien
ttcttaatagtgttctgaatgtcct

SEQ ID NO: 2900895 - DNA, 25 bp, Homo sapien
tgtctcgggcatcgttaagaatgcg

SEQ ID NO: 2900896 - DNA, 25 bp, Homo sapien
tgattctcaaacgtctgccgcagag

SEQ ID NO: 2900897 - DNA, 25 bp, Homo sapien
cagaggagccagtcttgtctcgggc

SEQ ID NO: 2900898 - DNA, 25 bp, Homo sapien
agctcattgttgtgtgccttctcga

SEQ ID NO: 2900899 - DNA, 25 bp, Homo sapien
taatcttggaacctttagctccgga

SEQ ID NO: 2900900 - DNA, 25 bp, Homo sapien
tgttaatcttggaacctttagctcc

SEQ ID NO: 2900901 - DNA, 25 bp, Homo sapien
tgggagatgttaatcttggaacctt

SEQ ID NO: 2900902 - DNA, 25 bp, Homo sapien
tggaacctttagctccggacacgac

SEQ ID NO: 2900903 - DNA, 25 bp, Homo sapien
atggaatccgcttgccctcgacgtt

SEQ ID NO: 2900904 - DNA, 25 bp, Homo sapien
tcgacgttctgctgtccaacgacag

SEQ ID NO: 2900905 - DNA, 25 bp, Homo sapien
caggcccgtagtcatccttgatgaa

SEQ ID NO: 2900906 - DNA, 25 bp, Homo sapien
gcagagtccggtgcttgaagccaaa

SEQ ID NO: 2900907 - DNA, 25 bp, Homo sapien
gtcgcgtcgtacttcaccatcactg

SEQ ID NO: 2900908 - DNA, 25 bp, Homo sapien
ggcttaagcgtagccaggttctgga

SEQ ID NO: 2900909 - DNA, 25 bp, Homo sapien
acctggttgatggagttccgcacag

SEQ ID NO: 2900910 - DNA, 25 bp, Homo sapien
aaagccttgttggaaggcttaagcg

SEQ ID NO: 2900911 - DNA, 25 bp, Homo sapien
ccgcagggccctctcattggtataa

SEQ ID NO: 2900912 - DNA, 25 bp, Homo sapien
aaattcccgctccaactcgttctgg

SEQ ID NO: 2900913 - DNA, 25 bp, Homo sapien
tcgttctggatgtgtgcgttgctca

SEQ ID NO: 2900914 - DNA, 25 bp, Homo sapien
tctccagttgggaagatgaccctga

SEQ ID NO: 2900915 - DNA, 25 bp, Homo sapien
tccagatcatccgcagcaggttaca

SEQ ID NO: 2900916 - DNA, 25 bp, Homo sapien
caggtcggagggaaggcgtgggttg

SEQ ID NO: 2900917 - DNA, 25 bp, Homo sapien
agatcatccgcagcaggttacaggg

SEQ ID NO: 2900918 - DNA, 25 bp, Homo sapien
ttgatggggtgcaggtcggagggaa

SEQ ID NO: 2900919 - DNA, 25 bp, Homo sapien
aacacaacgtggaccgcaggtggat

SEQ ID NO: 2900920 - DNA, 25 bp, Homo sapien
aaactcctctgccatgcggcgggaa

SEQ ID NO: 2900921 - DNA, 25 bp, Homo sapien
tttcctgggcctgtcgacttagtgg

SEQ ID NO: 2900922 - DNA, 25 bp, Homo sapien
tgaagagcagcgtggcattttcctg

SEQ ID NO: 2900923 - DNA, 25 bp, Homo sapien
gggacagaacctacagaacctattc

SEQ ID NO: 2900924 - DNA, 25 bp, Homo sapien
aatgagagctattattaggtgggac

SEQ ID NO: 2900925 - DNA, 25 bp, Homo sapien
ttgtggacagaagtgggctgctctt

SEQ ID NO: 2900926 - DNA, 25 bp, Homo sapien
gactgctgtgaagagcacaacactc

SEQ ID NO: 2900927 - DNA, 25 bp, Homo sapien
tgacttacagtaaacaggttcagag

SEQ ID NO: 2900928 - DNA, 25 bp, Homo sapien
tcagaggtacgcctgtaacagtgct

SEQ ID NO: 2900929 - DNA, 25 bp, Homo sapien
tatacgtatcctcatgacagaagca

SEQ ID NO: 2900930 - DNA, 25 bp, Homo sapien
agccatgttctatggtgttccctaa

SEQ ID NO: 2900931 - DNA, 25 bp, Homo sapien
gatgttccctcatatggacatatca

SEQ ID NO: 2900932 - DNA, 25 bp, Homo sapien
tataatctctctaggaacgaaactg

SEQ ID NO: 2900933 - DNA, 25 bp, Homo sapien
gatagcaagcatgtagcaccacact

SEQ ID NO: 2900934 - DNA, 25 bp, Homo sapien
gcttagctactgtaacactgatacg

SEQ ID NO: 2900935 - DNA, 25 bp, Homo sapien
tctctcagcatctcgagcggactgg

SEQ ID NO: 2900936 - DNA, 25 bp, Homo sapien
caacaggaagacagtaagcgaagga

SEQ ID NO: 2900937 - DNA, 25 bp, Homo sapien
gacacaccagcatagtggaaggtat

SEQ ID NO: 2900938 - DNA, 25 bp, Homo sapien
gcaggttctccaagggactgcgcag

SEQ ID NO: 2900939 - DNA, 25 bp, Homo sapien
cgttgtatgctccagacggcacaga

SEQ ID NO: 2900940 - DNA, 25 bp, Homo sapien
tagatggctgtgttggcagtcacct

SEQ ID NO: 2900941 - DNA, 25 bp, Homo sapien
gattcgggccacatcaaagtcaggc

SEQ ID NO: 2900942 - DNA, 25 bp, Homo sapien
ggtcagtcatgtgcttccgatccag

SEQ ID NO: 2900943 - DNA, 25 bp, Homo sapien
ttaaagatgcagttcaagtcgtcac

SEQ ID NO: 2900944 - DNA, 25 bp, Homo sapien
gatgcagttcaagtcgtcaccaaaa

SEQ ID NO: 2900945 - DNA, 25 bp, Homo sapien
tgcatcttgttctcatcgctgttca

SEQ ID NO: 2900946 - DNA, 25 bp, Homo sapien
tgcgaatacggagcaccagcttctc

SEQ ID NO: 2900947 - DNA, 25 bp, Homo sapien
tttctttggtctctaacgtgattca

SEQ ID NO: 2900948 - DNA, 25 bp, Homo sapien
catgtgacacgctgacttctaggac

SEQ ID NO: 2900949 - DNA, 25 bp, Homo sapien
gtgacacgctgacttctaggacccc

SEQ ID NO: 2900950 - DNA, 25 bp, Homo sapien
taacgtgattcatgcgttttataca

SEQ ID NO: 2900951 - DNA, 25 bp, Homo sapien
taaattaggtgggtatgactggccc

SEQ ID NO: 2900952 - DNA, 25 bp, Homo sapien
tattccctaagcaaagcaagctgca

SEQ ID NO: 2900953 - DNA, 25 bp, Homo sapien
cctgttttatctactcggccggtgc

SEQ ID NO: 2900954 - DNA, 25 bp, Homo sapien
caagtatctcaggagccatgcccag

SEQ ID NO: 2900955 - DNA, 25 bp, Homo sapien
catgttcctgcaattctccagtgag

SEQ ID NO: 2900956 - DNA, 25 bp, Homo sapien
tgtgttcatctaggctgctgctggc

SEQ ID NO: 2900957 - DNA, 25 bp, Homo sapien
ttgtgcagtcctgcgcctagcgaga

SEQ ID NO: 2900958 - DNA, 25 bp, Homo sapien
acagtgatcacttctaatggccata

SEQ ID NO: 2900959 - DNA, 25 bp, Homo sapien
catgttggactcgatgcagcgcagg

SEQ ID NO: 2900960 - DNA, 25 bp, Homo sapien
ctgtcagcatgttggactcgatgca

SEQ ID NO: 2900961 - DNA, 25 bp, Homo sapien
cgatgcagcgcaggaagacatcatc

SEQ ID NO: 2900962 - DNA, 25 bp, Homo sapien
ttgctgatctgctcgatgccctgca

SEQ ID NO: 2900963 - DNA, 25 bp, Homo sapien
caatgtcattggacgtggtgcgtac

SEQ ID NO: 2900964 - DNA, 25 bp, Homo sapien
tgcagggccttgaattccccatcct

SEQ ID NO: 2900965 - DNA, 25 bp, Homo sapien
agctcacgccgtccgtctccaggat

SEQ ID NO: 2900966 - DNA, 25 bp, Homo sapien
cgcatcaagctcacgccgtccgtct

SEQ ID NO: 2900967 - DNA, 25 bp, Homo sapien
gacaggtcatggtatcacacaagag

SEQ ID NO: 2900968 - DNA, 25 bp, Homo sapien
ccatcaagtggccacgacaggtcat

SEQ ID NO: 2900969 - DNA, 25 bp, Homo sapien
ctccgtgtcgggtgatggccatcaa

SEQ ID NO: 2900970 - DNA, 25 bp, Homo sapien
tcaaaggagatgacgtggtacagct

SEQ ID NO: 2900971 - DNA, 25 bp, Homo sapien
ggcccagcatgatattctcagagac

SEQ ID NO: 2900972 - DNA, 25 bp, Homo sapien
tgtgcggctgcttccataagcacgt

SEQ ID NO: 2900973 - DNA, 25 bp, Homo sapien
gggtcactctcaccgtgtgcggctg

SEQ ID NO: 2900974 - DNA, 25 bp, Homo sapien
tctgcatcaagcaggaggtcaaagc

SEQ ID NO: 2900975 - DNA, 25 bp, Homo sapien
gagagattccacccatgggactggg

SEQ ID NO: 2900976 - DNA, 25 bp, Homo sapien
taggcaggggttgcaccctggttcc

SEQ ID NO: 2900977 - DNA, 25 bp, Homo sapien
gctgaaccaaagaacatgccggtgg

SEQ ID NO: 2900978 - DNA, 25 bp, Homo sapien
tccaaggtgtcatggcaggagagat

SEQ ID NO: 2900979 - DNA, 25 bp, Homo sapien
ctgggagagaagccggctgcccctg

SEQ ID NO: 2900980 - DNA, 25 bp, Homo sapien
gctgcccctggggtcattccactcc

SEQ ID NO: 2900981 - DNA, 25 bp, Homo sapien
ccggctgcccctggggtcattccac

SEQ ID NO: 2900982 - DNA, 25 bp, Homo sapien
gccggctgcccctggggtcattcca

SEQ ID NO: 2900983 - DNA, 25 bp, Homo sapien
aggcaggggagtaacctgggctgaa

SEQ ID NO: 2900984 - DNA, 25 bp, Homo sapien
cctgggctgaagccgctggcatctg

SEQ ID NO: 2900985 - DNA, 25 bp, Homo sapien
ggcaggggagtaacctgggctgaag

SEQ ID NO: 2900986 - DNA, 25 bp, Homo sapien
gggctgaagccgctggcatctgacg

SEQ ID NO: 2900987 - DNA, 25 bp, Homo sapien
cagactcacccagaactgtggagga

SEQ ID NO: 2900988 - DNA, 25 bp, Homo sapien
gactcacccagaactgtggaggaaa

SEQ ID NO: 2900989 - DNA, 25 bp, Homo sapien
agactcacccagaactgtggaggaa

SEQ ID NO: 2900990 - DNA, 25 bp, Homo sapien
gacagactcacccagaactgtggag

SEQ ID NO: 2900991 - DNA, 25 bp, Homo sapien
gggctcgtaggcaggtgacgttggc

SEQ ID NO: 2900992 - DNA, 25 bp, Homo sapien
ggcaggtgacgttggcgagtagctg

SEQ ID NO: 2900993 - DNA, 25 bp, Homo sapien
agagcggggctcgtaggcaggtgac

SEQ ID NO: 2900994 - DNA, 25 bp, Homo sapien
actctggggtgtgtagcccccagga

SEQ ID NO: 2900995 - DNA, 25 bp, Homo sapien
tgacgttggcgaatagctgggtgat

SEQ ID NO: 2900996 - DNA, 25 bp, Homo sapien
aatagctgggtgatgtcgggctgta

SEQ ID NO: 2900997 - DNA, 25 bp, Homo sapien
actgtggtgtgtatcgtgggctgga

SEQ ID NO: 2900998 - DNA, 25 bp, Homo sapien
gactggttggagaatagttcgggct

SEQ ID NO: 2900999 - DNA, 25 bp, Homo sapien
ggaggtgggcgagtaggtggggctg

SEQ ID NO: 2901000 - DNA, 25 bp, Homo sapien
gagtaggtggggctggtgggcgagt

SEQ ID NO: 2901001 - DNA, 25 bp, Homo sapien
gtaggtggggctggtgggcgagtac

SEQ ID NO: 2901002 - DNA, 25 bp, Homo sapien
aggtgggcgagtaggtggggctggt

SEQ ID NO: 2901003 - DNA, 25 bp, Homo sapien
catccgggctgatagccgggcttgt

SEQ ID NO: 2901004 - DNA, 25 bp, Homo sapien
ggcttgtgagactgtaggtggggct

SEQ ID NO: 2901005 - DNA, 25 bp, Homo sapien
gctggtgggcgagtaaccaggggaa

SEQ ID NO: 2901006 - DNA, 25 bp, Homo sapien
tgtcatccgggctgatagccgggct

SEQ ID NO: 2901007 - DNA, 25 bp, Homo sapien
gatccagaagttcaccgggagctct

SEQ ID NO: 2901008 - DNA, 25 bp, Homo sapien
tcttcccgaggatcagctgtaacca

SEQ ID NO: 2901009 - DNA, 25 bp, Homo sapien
agtctgcatcagaaacgggatccag

SEQ ID NO: 2901010 - DNA, 25 bp, Homo sapien
catttatgtacaacggagctgggct

SEQ ID NO: 2901011 - DNA, 25 bp, Homo sapien
caccaaaattggtccggcaggtggc

SEQ ID NO: 2901012 - DNA, 25 bp, Homo sapien
tcgcaggaggctgttatttgcttct

SEQ ID NO: 2901013 - DNA, 25 bp, Homo sapien
tgccggtagcacgttctgaagccca

SEQ ID NO: 2901014 - DNA, 25 bp, Homo sapien
ggtaagaaagatccttcggcttctg

SEQ ID NO: 2901015 - DNA, 25 bp, Homo sapien
gtgcctgcctcaccgcccccccatc

SEQ ID NO: 2901016 - DNA, 25 bp, Homo sapien
ggctgtgcctgcctcaccgcccccc

SEQ ID NO: 2901017 - DNA, 25 bp, Homo sapien
tgtgcctgcctcaccgcccccccat

SEQ ID NO: 2901018 - DNA, 25 bp, Homo sapien
gggggcggggggctgtgcctgcctc

SEQ ID NO: 2901019 - DNA, 25 bp, Homo sapien
ctgggcggacagcgatgcccggctc

SEQ ID NO: 2901020 - DNA, 25 bp, Homo sapien
tgggcggacagcgatgcccggctcc

SEQ ID NO: 2901021 - DNA, 25 bp, Homo sapien
agcgatgcccggctccccaaactga

SEQ ID NO: 2901022 - DNA, 25 bp, Homo sapien
ggctccccaaactgaccacggccag

SEQ ID NO: 2901023 - DNA, 25 bp, Homo sapien
gtcctggtcctcctctgccaccagc

SEQ ID NO: 2901024 - DNA, 25 bp, Homo sapien
ctcctctgccaccagctcctcctgg

SEQ ID NO: 2901025 - DNA, 25 bp, Homo sapien
tcctcctctgccaccagctcctcct

SEQ ID NO: 2901026 - DNA, 25 bp, Homo sapien
cctctgccaccagctcctcctgggc

SEQ ID NO: 2901027 - DNA, 25 bp, Homo sapien
ctgcagcctcggctgtgcacacttc

SEQ ID NO: 2901028 - DNA, 25 bp, Homo sapien
cagcctgcagaccgcgcccacgccc

SEQ ID NO: 2901029 - DNA, 25 bp, Homo sapien
gcagcctcggctgtgcacacttccc

SEQ ID NO: 2901030 - DNA, 25 bp, Homo sapien
agcctgcagaccgcgcccacgccca

SEQ ID NO: 2901031 - DNA, 25 bp, Homo sapien
actagtcggttcaggaaaggcgcag

SEQ ID NO: 2901032 - DNA, 25 bp, Homo sapien
gaggccgaactagtcggttcaggaa

SEQ ID NO: 2901033 - DNA, 25 bp, Homo sapien
ttctgcgaggccgaactagtcggtt

SEQ ID NO: 2901034 - DNA, 25 bp, Homo sapien
cgaactagtcggttcaggaaaggcg

SEQ ID NO: 2901035 - DNA, 25 bp, Homo sapien
gctgcgatcgctcttcgagcccgtg

SEQ ID NO: 2901036 - DNA, 25 bp, Homo sapien
gatcgctcttcgagcccgtgttttc

SEQ ID NO: 2901037 - DNA, 25 bp, Homo sapien
taatgggctgcgatcgctcttcgag

SEQ ID NO: 2901038 - DNA, 25 bp, Homo sapien
cttcataatgggctgcgatcgctct

SEQ ID NO: 2901039 - DNA, 25 bp, Homo sapien
gctccgtcctgtccaggtcgtggat

SEQ ID NO: 2901040 - DNA, 25 bp, Homo sapien
ccgtcctgtccaggtcgtggatgaa

SEQ ID NO: 2901041 - DNA, 25 bp, Homo sapien
tgcgctccgtcctgtccaggtcgtg

SEQ ID NO: 2901042 - DNA, 25 bp, Homo sapien
ctgcgctccgtcctgtccaggtcgt

SEQ ID NO: 2901043 - DNA, 25 bp, Homo sapien
tcatggcctcagacaagttgtgtaa

SEQ ID NO: 2901044 - DNA, 25 bp, Homo sapien
ctcagacaagttgtgtaacctccat

SEQ ID NO: 2901045 - DNA, 25 bp, Homo sapien
tggcctcagacaagttgtgtaacct

SEQ ID NO: 2901046 - DNA, 25 bp, Homo sapien
gcctcagacaagttgtgtaacctcc

SEQ ID NO: 2901047 - DNA, 25 bp, Homo sapien
tgaccctctggtaatggtgggagat

SEQ ID NO: 2901048 - DNA, 25 bp, Homo sapien
ccctttttggatgtggcccctgcat

SEQ ID NO: 2901049 - DNA, 25 bp, Homo sapien
acctcgcctttcatgcagaccatgt

SEQ ID NO: 2901050 - DNA, 25 bp, Homo sapien
gcagaccatgtccagtacacaggca

SEQ ID NO: 2901051 - DNA, 25 bp, Homo sapien
acaggtagtagagcccagcccgggt

SEQ ID NO: 2901052 - DNA, 25 bp, Homo sapien
ctgacagtacaggtagtagagccca

SEQ ID NO: 2901053 - DNA, 25 bp, Homo sapien
tctggcggttgtagcgcagagggct

SEQ ID NO: 2901054 - DNA, 25 bp, Homo sapien
tgactataaactccccgatctggcg

SEQ ID NO: 2901055 - DNA, 25 bp, Homo sapien
agcttcaggtagacagccttcccct

SEQ ID NO: 2901056 - DNA, 25 bp, Homo sapien
gggcccgagggaactcgccgcagtg

SEQ ID NO: 2901057 - DNA, 25 bp, Homo sapien
tggaagagtccgaagtaggtgagga

SEQ ID NO: 2901058 - DNA, 25 bp, Homo sapien
gaactcgccgcagtggctgagaatt

SEQ ID NO: 2901059 - DNA, 25 bp, Homo sapien
tgtttctcgcccctcacatttggga

SEQ ID NO: 2901060 - DNA, 25 bp, Homo sapien
cagcccctcttagtgcctgaagtgg

SEQ ID NO: 2901061 - DNA, 25 bp, Homo sapien
tggaaaacacgtgaacaggcccagg

SEQ ID NO: 2901062 - DNA, 25 bp, Homo sapien
ccttgcccacagagtacagtgaaca

SEQ ID NO: 2901063 - DNA, 25 bp, Homo sapien
cctgagccccaataaagagagagac

SEQ ID NO: 2901064 - DNA, 25 bp, Homo sapien
ccctgagccccaataaagagagaga

SEQ ID NO: 2901065 - DNA, 25 bp, Homo sapien
ccttcacgtggcccccagctaccct

SEQ ID NO: 2901066 - DNA, 25 bp, Homo sapien
gtcccctgagccccaataaagagag

SEQ ID NO: 2901067 - DNA, 25 bp, Homo sapien
gggctggaggcatggaggtccccgc

SEQ ID NO: 2901068 - DNA, 25 bp, Homo sapien
tacctctgctcccacctgggggctg

SEQ ID NO: 2901069 - DNA, 25 bp, Homo sapien
gaggcatggaggtccccgcccccaa

SEQ ID NO: 2901070 - DNA, 25 bp, Homo sapien
ctggaggcatggaggtccccgcccc

SEQ ID NO: 2901071 - DNA, 25 bp, Homo sapien
tctggacgaagagacaaagcagcgg

SEQ ID NO: 2901072 - DNA, 25 bp, Homo sapien
ggttcccgtgtgcctgctgactctc

SEQ ID NO: 2901073 - DNA, 25 bp, Homo sapien
ataaggctctggacgaagagacaaa

SEQ ID NO: 2901074 - DNA, 25 bp, Homo sapien
ggctctggacgaagagacaaagcag

SEQ ID NO: 2901075 - DNA, 25 bp, Homo sapien
tgaaattggcaagcaggacttcctg

SEQ ID NO: 2901076 - DNA, 25 bp, Homo sapien
gaattaggttccagtccctctagga

SEQ ID NO: 2901077 - DNA, 25 bp, Homo sapien
taagggtactgttagtgctcctggc

SEQ ID NO: 2901078 - DNA, 25 bp, Homo sapien
gaataaggcctgcactactccctgt

SEQ ID NO: 2901079 - DNA, 25 bp, Homo sapien
tagcaagaaaggagatgaggctggc

SEQ ID NO: 2901080 - DNA, 25 bp, Homo sapien
agcaagaaaggagatgaggctggca

SEQ ID NO: 2901081 - DNA, 25 bp, Homo sapien
gcaagaaaggagatgaggctggcat

SEQ ID NO: 2901082 - DNA, 25 bp, Homo sapien
ctagcaagaaaggagatgaggctgg

SEQ ID NO: 2901083 - DNA, 25 bp, Homo sapien
tcaaccagagggcaactgagagtgc

SEQ ID NO: 2901084 - DNA, 25 bp, Homo sapien
gcaactgagagtgccggctctctga

SEQ ID NO: 2901085 - DNA, 25 bp, Homo sapien
ggctctctgactgggccccccatgt

SEQ ID NO: 2901086 - DNA, 25 bp, Homo sapien
tgcagctctgtttgttgggtcagca

SEQ ID NO: 2901087 - DNA, 25 bp, Homo sapien
tctgccagggatacccttccccatt

SEQ ID NO: 2901088 - DNA, 25 bp, Homo sapien
gactctgccagggatacccttcccc

SEQ ID NO: 2901089 - DNA, 25 bp, Homo sapien
gccagggatacccttccccattctg

SEQ ID NO: 2901090 - DNA, 25 bp, Homo sapien
cagggatacccttccccattctggg

SEQ ID NO: 2901091 - DNA, 25 bp, Homo sapien
accctgagtgttggtgctggctgcc

SEQ ID NO: 2901092 - DNA, 25 bp, Homo sapien
tggctgccctccaggatttgttagg

SEQ ID NO: 2901093 - DNA, 25 bp, Homo sapien
gttaggttaagatgcgagggtccca

SEQ ID NO: 2901094 - DNA, 25 bp, Homo sapien
tgttaggtatgagaagcattaacct

SEQ ID NO: 2901095 - DNA, 25 bp, Homo sapien
tgctctccttttccgggatctctcc

SEQ ID NO: 2901096 - DNA, 25 bp, Homo sapien
tcttctgtttttgggtgagcactgc

SEQ ID NO: 2901097 - DNA, 25 bp, Homo sapien
gtttttgggtgagcactgctctcct

SEQ ID NO: 2901098 - DNA, 25 bp, Homo sapien
cttttccgggatctctccccattct

SEQ ID NO: 2901099 - DNA, 25 bp, Homo sapien
aatccccacgctgcttgatcacctc

SEQ ID NO: 2901100 - DNA, 25 bp, Homo sapien
cgctgcttgatcacctcccacccct

SEQ ID NO: 2901101 - DNA, 25 bp, Homo sapien
cccacgctgcttgatcacctcccac

SEQ ID NO: 2901102 - DNA, 25 bp, Homo sapien
ccacgctgcttgatcacctcccacc

SEQ ID NO: 2901103 - DNA, 25 bp, Homo sapien
gagaaggagggaatctcagccgcat

SEQ ID NO: 2901104 - DNA, 25 bp, Homo sapien
gagggaatctcagccgcatccactt

SEQ ID NO: 2901105 - DNA, 25 bp, Homo sapien
ctttcccccgttgtgctgttggcag

SEQ ID NO: 2901106 - DNA, 25 bp, Homo sapien
aaggagggaatctcagccgcatcca

SEQ ID NO: 2901107 - DNA, 25 bp, Homo sapien
gttaatgggaaccaggtgcaggaca

SEQ ID NO: 2901108 - DNA, 25 bp, Homo sapien
gcgttaatgggaaccaggtgcagga

SEQ ID NO: 2901109 - DNA, 25 bp, Homo sapien
ggtggcgttaatgggaaccaggtgc

SEQ ID NO: 2901110 - DNA, 25 bp, Homo sapien
ttggaggtggcgttaatgggaacca

SEQ ID NO: 2901111 - DNA, 25 bp, Homo sapien
tgtaggcctctcccacgcctaagag

SEQ ID NO: 2901112 - DNA, 25 bp, Homo sapien
ccacgcctaagagctggttgccaca

SEQ ID NO: 2901113 - DNA, 25 bp, Homo sapien
atcctggattcggacaccatatcct

SEQ ID NO: 2901114 - DNA, 25 bp, Homo sapien
ctggattcggacaccatatccttgg

SEQ ID NO: 2901115 - DNA, 25 bp, Homo sapien
catcggaatagagtctcctgccttc

SEQ ID NO: 2901116 - DNA, 25 bp, Homo sapien
tgggagggcatacttcttatacatc

SEQ ID NO: 2901117 - DNA, 25 bp, Homo sapien
ttggccttctcgagacaccacctga

SEQ ID NO: 2901118 - DNA, 25 bp, Homo sapien
ctgcgctatagcagctgttgtaggc

SEQ ID NO: 2901119 - DNA, 25 bp, Homo sapien
gcccggggaattatgacactcagaa

SEQ ID NO: 2901120 - DNA, 25 bp, Homo sapien
cccttgcccggggaattatgacact

SEQ ID NO: 2901121 - DNA, 25 bp, Homo sapien
gacactcagaatatccccttggtgt

SEQ ID NO: 2901122 - DNA, 25 bp, Homo sapien
cactcagaatatccccttggtgtaa

SEQ ID NO: 2901123 - DNA, 25 bp, Homo sapien
ctgggagccactttttataacacaa

SEQ ID NO: 2901124 - DNA, 25 bp, Homo sapien
cctggtcttccaagctgggagccac

SEQ ID NO: 2901125 - DNA, 25 bp, Homo sapien
caagctgggagccactttttataac

SEQ ID NO: 2901126 - DNA, 25 bp, Homo sapien
agctgggagccactttttataacac

SEQ ID NO: 2901127 - DNA, 25 bp, Homo sapien
gaagacgcctctgttcctgcacatt

SEQ ID NO: 2901128 - DNA, 25 bp, Homo sapien
ggaagacgcctctgttcctgcacat

SEQ ID NO: 2901129 - DNA, 25 bp, Homo sapien
tgggccccgaccaggtctggacaat

SEQ ID NO: 2901130 - DNA, 25 bp, Homo sapien
ttttccctagcagagggcggcttcg

SEQ ID NO: 2901131 - DNA, 25 bp, Homo sapien
cacgcaagaattcggagctccatgg

SEQ ID NO: 2901132 - DNA, 25 bp, Homo sapien
ggcggcttcgtggacttcggccaac

SEQ ID NO: 2901133 - DNA, 25 bp, Homo sapien
cccctgtagacgggcgcataatagc

SEQ ID NO: 2901134 - DNA, 25 bp, Homo sapien
agagaaggacgtaggataaggcttc

SEQ ID NO: 2901135 - DNA, 25 bp, Homo sapien
gacgggcgcataatagctacatctc

SEQ ID NO: 2901136 - DNA, 25 bp, Homo sapien
aaggacgtaggataaggcttcttgt

SEQ ID NO: 2901137 - DNA, 25 bp, Homo sapien
gcaatggagcgcgtgaaagccaaac

SEQ ID NO: 2901138 - DNA, 25 bp, Homo sapien
aacaccaacaccagggcgtacgata

SEQ ID NO: 2901139 - DNA, 25 bp, Homo sapien
aagggcttggaatggcctgccacgc

SEQ ID NO: 2901140 - DNA, 25 bp, Homo sapien
agggcgtacgatacacccgaggctc

SEQ ID NO: 2901141 - DNA, 25 bp, Homo sapien
ttatttaactttaagcagggcttga

SEQ ID NO: 2901142 - DNA, 25 bp, Homo sapien
gaggacgccggcgccacgggactgg

SEQ ID NO: 2901143 - DNA, 25 bp, Homo sapien
cgctacgcgaggctgcgcctgcgca

SEQ ID NO: 2901144 - DNA, 25 bp, Homo sapien
gcgcctgcgcacatccgccgcccgg

SEQ ID NO: 2901145 - DNA, 25 bp, Homo sapien
tggccagcccagagcgctacgcgag

SEQ ID NO: 2901146 - DNA, 25 bp, Homo sapien
cagcggtggcgcacgattagtacgt

SEQ ID NO: 2901147 - DNA, 25 bp, Homo sapien
ttaggcgcagccgtctcaattcagg

SEQ ID NO: 2901148 - DNA, 25 bp, Homo sapien
gattccaacgcttctgggccgcgtg

SEQ ID NO: 2901149 - DNA, 25 bp, Homo sapien
attagtacgtcacacccggcgaaga

SEQ ID NO: 2901150 - DNA, 25 bp, Homo sapien
aggatctggcccaaaccctccacct

SEQ ID NO: 2901151 - DNA, 25 bp, Homo sapien
tccacctgacttgagtcggggtttg

SEQ ID NO: 2901152 - DNA, 25 bp, Homo sapien
aacgaagacgctcccgcctgggact

SEQ ID NO: 2901153 - DNA, 25 bp, Homo sapien
ccggtcccttgtatagtctctttca

SEQ ID NO: 2901154 - DNA, 25 bp, Homo sapien
cgctgtgagcaggtttttcgatgag

SEQ ID NO: 2901155 - DNA, 25 bp, Homo sapien
gcttccagtggaatgtcagcgaggt

SEQ ID NO: 2901156 - DNA, 25 bp, Homo sapien
tccggaaggctctcatggctcggcg

SEQ ID NO: 2901157 - DNA, 25 bp, Homo sapien
tttgagtagagcagcatccggaagg

SEQ ID NO: 2901158 - DNA, 25 bp, Homo sapien
agggggatggcacctgtggcgtcgc

SEQ ID NO: 2901159 - DNA, 25 bp, Homo sapien
ggatggcacctgtggcgtcgcaccc

SEQ ID NO: 2901160 - DNA, 25 bp, Homo sapien
gagtcaaaacgacaacagggggatg

SEQ ID NO: 2901161 - DNA, 25 bp, Homo sapien
gtcaaaacgacaacagggggatggc

SEQ ID NO: 2901162 - DNA, 25 bp, Homo sapien
ggagaccctctcaccccatcctcag

SEQ ID NO: 2901163 - DNA, 25 bp, Homo sapien
ggagtccacctgagtccatcttcct

SEQ ID NO: 2901164 - DNA, 25 bp, Homo sapien
agtccatcttcctccatggggggcc

SEQ ID NO: 2901165 - DNA, 25 bp, Homo sapien
ccgagtcagggtccagaggagactt

SEQ ID NO: 2901166 - DNA, 25 bp, Homo sapien
tgtcaatcccactccaagaaatggg

SEQ ID NO: 2901167 - DNA, 25 bp, Homo sapien
tcatgcatgcaaataagaccgcaag

SEQ ID NO: 2901168 - DNA, 25 bp, Homo sapien
caatgggatgcacacagttgactca

SEQ ID NO: 2901169 - DNA, 25 bp, Homo sapien
gaccgcaagaaggatacactgaagc

SEQ ID NO: 2901170 - DNA, 25 bp, Homo sapien
acatggtccccgatgctgcacacat

SEQ ID NO: 2901171 - DNA, 25 bp, Homo sapien
tcacatgctcctctcgcagggggct

SEQ ID NO: 2901172 - DNA, 25 bp, Homo sapien
aaccgttgggcagagtacatgaaag

SEQ ID NO: 2901173 - DNA, 25 bp, Homo sapien
catgcccaaatctgagccctgaaaa

SEQ ID NO: 2901174 - DNA, 25 bp, Homo sapien
ctgccatacgtttgaaggaattcgt

SEQ ID NO: 2901175 - DNA, 25 bp, Homo sapien
tacgtttgaaggaattcgtccaaga

SEQ ID NO: 2901176 - DNA, 25 bp, Homo sapien
gtttgaaggaattcgtccaagatgc

SEQ ID NO: 2901177 - DNA, 25 bp, Homo sapien
gccatacgtttgaaggaattcgtcc

SEQ ID NO: 2901178 - DNA, 25 bp, Homo sapien
gcttctctactacctcatcagtgct

SEQ ID NO: 2901179 - DNA, 25 bp, Homo sapien
cagcttctctactacctcatcagtg

SEQ ID NO: 2901180 - DNA, 25 bp, Homo sapien
tactacctcatcagtgctgaggggt

SEQ ID NO: 2901181 - DNA, 25 bp, Homo sapien
actacctcatcagtgctgaggggta

SEQ ID NO: 2901182 - DNA, 25 bp, Homo sapien
gaaagataaacatgactactcaggt

SEQ ID NO: 2901183 - DNA, 25 bp, Homo sapien
agaaatacctactactccctggaat

SEQ ID NO: 2901184 - DNA, 25 bp, Homo sapien
taactgactcccttttttctggctc

SEQ ID NO: 2901185 - DNA, 25 bp, Homo sapien
ccaagggtggagtcacacaaaagat

SEQ ID NO: 2901186 - DNA, 25 bp, Homo sapien
gtaagactggatcagctgcaacacc

SEQ ID NO: 2901187 - DNA, 25 bp, Homo sapien
tggtcagcacgtgccgcttataagc

SEQ ID NO: 2901188 - DNA, 25 bp, Homo sapien
tgagccagttctgtccatacaaggt

SEQ ID NO: 2901189 - DNA, 25 bp, Homo sapien
tacaaggtccccaagtcatccatgg

SEQ ID NO: 2901190 - DNA, 25 bp, Homo sapien
gtgcggcatgggtacagggctcccc

SEQ ID NO: 2901191 - DNA, 25 bp, Homo sapien
gctccctgaatcccctctcaggcct

SEQ ID NO: 2901192 - DNA, 25 bp, Homo sapien
agggtgcggcatgggtacagggctc

SEQ ID NO: 2901193 - DNA, 25 bp, Homo sapien
ggcatgggtacagggctcccccatg

SEQ ID NO: 2901194 - DNA, 25 bp, Homo sapien
ttttcagggactgtgtccatgacca

SEQ ID NO: 2901195 - DNA, 25 bp, Homo sapien
cttttcagggactgtgtccatgacc

SEQ ID NO: 2901196 - DNA, 25 bp, Homo sapien
tttcagggactgtgtccatgaccag

SEQ ID NO: 2901197 - DNA, 25 bp, Homo sapien
tactgacctatctggttgggcctac

SEQ ID NO: 2901198 - DNA, 25 bp, Homo sapien
ccagagcccaagattacggatttga

SEQ ID NO: 2901199 - DNA, 25 bp, Homo sapien
agaagttcctctgggtactgaccta

SEQ ID NO: 2901200 - DNA, 25 bp, Homo sapien
gggctggccatagcgaaaaacacta

SEQ ID NO: 2901201 - DNA, 25 bp, Homo sapien
ccctttggtacggagtttatcatag

SEQ ID NO: 2901202 - DNA, 25 bp, Homo sapien
cctttggtacggagtttatcataga

SEQ ID NO: 2901203 - DNA, 25 bp, Homo sapien
agtttatcatagaagaaactattga

SEQ ID NO: 2901204 - DNA, 25 bp, Homo sapien
gagtttatcatagaagaaactattg

SEQ ID NO: 2901205 - DNA, 25 bp, Homo sapien
gatagtgccacaggtcaggtacaac

SEQ ID NO: 2901206 - DNA, 25 bp, Homo sapien
ccatgatgggcaggcgcttttcaca

SEQ ID NO: 2901207 - DNA, 25 bp, Homo sapien
taatgctcataacaatcctaccggg

SEQ ID NO: 2901208 - DNA, 25 bp, Homo sapien
tcagaacgaacactggagaacccat

SEQ ID NO: 2901209 - DNA, 25 bp, Homo sapien
tcaaaataggtgatggtgcgtcgcc

SEQ ID NO: 2901210 - DNA, 25 bp, Homo sapien
cggtttagggtacgctgcgagtcaa

SEQ ID NO: 2901211 - DNA, 25 bp, Homo sapien
gtgcgtcgcctcacatcaacagaga

SEQ ID NO: 2901212 - DNA, 25 bp, Homo sapien
gatgagggaccaatgcacctccagg

SEQ ID NO: 2901213 - DNA, 25 bp, Homo sapien
tctttaccgcctctgcctgtagata

SEQ ID NO: 2901214 - DNA, 25 bp, Homo sapien
tggtggaaatccagtcggtctttct

SEQ ID NO: 2901215 - DNA, 25 bp, Homo sapien
agtcggtctttctttaccgcctctg

SEQ ID NO: 2901216 - DNA, 25 bp, Homo sapien
ctgcctgtagatacttggcaatatg

SEQ ID NO: 2901217 - DNA, 25 bp, Homo sapien
tgtcattattctgcctggccacatt

SEQ ID NO: 2901218 - DNA, 25 bp, Homo sapien
ctgcaacacaaaagcaccacagtca

SEQ ID NO: 2901219 - DNA, 25 bp, Homo sapien
cactgtcattattctgcctggccac

SEQ ID NO: 2901220 - DNA, 25 bp, Homo sapien
agcaccacagtcactgtcattattc

SEQ ID NO: 2901221 - DNA, 25 bp, Homo sapien
tgtcaggacctgtgctacacatttc

SEQ ID NO: 2901222 - DNA, 25 bp, Homo sapien
gagacccagtcccaatgtgggatgg

SEQ ID NO: 2901223 - DNA, 25 bp, Homo sapien
gttagcagggagctctatgaaggcc

SEQ ID NO: 2901224 - DNA, 25 bp, Homo sapien
aaaaacagcctgactctaaagctag

SEQ ID NO: 2901225 - DNA, 25 bp, Homo sapien
gctccttgtagatctgccgacgaag

SEQ ID NO: 2901226 - DNA, 25 bp, Homo sapien
ctgagacagggccagatgcttgcag

SEQ ID NO: 2901227 - DNA, 25 bp, Homo sapien
tgtagatctgccgacgaagtttggg

SEQ ID NO: 2901228 - DNA, 25 bp, Homo sapien
ccgacgaagtttgggcatgtcctgc

SEQ ID NO: 2901229 - DNA, 25 bp, Homo sapien
caccccctgcacatcagaaatcaac

SEQ ID NO: 2901230 - DNA, 25 bp, Homo sapien
catgtctcccttcccatttatgggc

SEQ ID NO: 2901231 - DNA, 25 bp, Homo sapien
gggcttttctgtagccaccccctgc

SEQ ID NO: 2901232 - DNA, 25 bp, Homo sapien
aaatcaacaagtattctctcaaaga

SEQ ID NO: 2901233 - DNA, 25 bp, Homo sapien
gaggatgactgctccacccaggcca

SEQ ID NO: 2901234 - DNA, 25 bp, Homo sapien
agggggaggatgactgctccaccca

SEQ ID NO: 2901235 - DNA, 25 bp, Homo sapien
ggaagggggaggatgactgctccac

SEQ ID NO: 2901236 - DNA, 25 bp, Homo sapien
gggaggatgactgctccacccaggc

SEQ ID NO: 2901237 - DNA, 25 bp, Homo sapien
cacccccagcactgatttcctgctc

SEQ ID NO: 2901238 - DNA, 25 bp, Homo sapien
acccccagcactgatttcctgctcc

SEQ ID NO: 2901239 - DNA, 25 bp, Homo sapien
ggcagtgatcctattgtccgcccac

SEQ ID NO: 2901240 - DNA, 25 bp, Homo sapien
gcaggcagtgatcctattgtccgcc

SEQ ID NO: 2901241 - DNA, 25 bp, Homo sapien
agtttgaagatctggcaggcagtga

SEQ ID NO: 2901242 - DNA, 25 bp, Homo sapien
aaaagtttgaagatctggcaggcag

SEQ ID NO: 2901243 - DNA, 25 bp, Homo sapien
aaaggatcctttattgaccagagca

SEQ ID NO: 2901244 - DNA, 25 bp, Homo sapien
gaccagagcaggaccgtggcattta

SEQ ID NO: 2901245 - DNA, 25 bp, Homo sapien
gatcctttattgaccagagcaggac

SEQ ID NO: 2901246 - DNA, 25 bp, Homo sapien
gcaggaccgtggcatttatatattt

SEQ ID NO: 2901247 - DNA, 25 bp, Homo sapien
tccttagaaactagggcggagtgcc

SEQ ID NO: 2901248 - DNA, 25 bp, Homo sapien
acaacttatagagcgcccgactccg

SEQ ID NO: 2901249 - DNA, 25 bp, Homo sapien
gagtgcccgcctatcgacaacttat

SEQ ID NO: 2901250 - DNA, 25 bp, Homo sapien
catcgcattggtttggccgccccgg

SEQ ID NO: 2901251 - DNA, 25 bp, Homo sapien
gacgaagtgactggatctaaggacc

SEQ ID NO: 2901252 - DNA, 25 bp, Homo sapien
cagcacactgaacggccggtttctt

SEQ ID NO: 2901253 - DNA, 25 bp, Homo sapien
gagtggtaccgtcagaatgctccgg

SEQ ID NO: 2901254 - DNA, 25 bp, Homo sapien
tcgggtcgaggcctcgtaacagacc

SEQ ID NO: 2901255 - DNA, 25 bp, Homo sapien
tgcccatccgcagtttgccaatagc

SEQ ID NO: 2901256 - DNA, 25 bp, Homo sapien
ccgctcctcggggttaggctcagtc

SEQ ID NO: 2901257 - DNA, 25 bp, Homo sapien
caatagcccggcttgtgcggcaaaa

SEQ ID NO: 2901258 - DNA, 25 bp, Homo sapien
tgtgcggcaaaatggacccgcccgc

SEQ ID NO: 2901259 - DNA, 25 bp, Homo sapien
agaaatcctgacagccgggctctgt

SEQ ID NO: 2901260 - DNA, 25 bp, Homo sapien
ctcacggtgcccagaggtggtgctt

SEQ ID NO: 2901261 - DNA, 25 bp, Homo sapien
tgcccgaccgaagcactcagaaatc

SEQ ID NO: 2901262 - DNA, 25 bp, Homo sapien
gcataagttttgtcccctgcccgac

SEQ ID NO: 2901263 - DNA, 25 bp, Homo sapien
ctcgatgacgccttcgggctccatc

SEQ ID NO: 2901264 - DNA, 25 bp, Homo sapien
cgccttcgggctccatcccatcggg

SEQ ID NO: 2901265 - DNA, 25 bp, Homo sapien
tcccatcggggccattgtctctgga

SEQ ID NO: 2901266 - DNA, 25 bp, Homo sapien
gacgccttcgggctccatcccatcg

SEQ ID NO: 2901267 - DNA, 25 bp, Homo sapien
gtagtctccgagcaaacagaatctg

SEQ ID NO: 2901268 - DNA, 25 bp, Homo sapien
cactctaactctatacggctgaaag

SEQ ID NO: 2901269 - DNA, 25 bp, Homo sapien
gggaaatcaatcaagaggccactct

SEQ ID NO: 2901270 - DNA, 25 bp, Homo sapien
tagggaaaccagctgcttctagatg

SEQ ID NO: 2901271 - DNA, 25 bp, Homo sapien
ttctcaaaaccatacgcgtagatgc

SEQ ID NO: 2901272 - DNA, 25 bp, Homo sapien
tcaaaaccatacgcgtagatgccac

SEQ ID NO: 2901273 - DNA, 25 bp, Homo sapien
aaaccatacgcgtagatgccacgga

SEQ ID NO: 2901274 - DNA, 25 bp, Homo sapien
gagggcttctcaaaaccatacgcgt

SEQ ID NO: 2901275 - DNA, 25 bp, Homo sapien
tccacaatgtcttctgggactgaga

SEQ ID NO: 2901276 - DNA, 25 bp, Homo sapien
gtcttctgggactgagaggtctcac

SEQ ID NO: 2901277 - DNA, 25 bp, Homo sapien
tgtcttctgggactgagaggtctca

SEQ ID NO: 2901278 - DNA, 25 bp, Homo sapien
acaatgtcttctgggactgagaggt

SEQ ID NO: 2901279 - DNA, 25 bp, Homo sapien
gcatgggcacggatcaaaagccaag

SEQ ID NO: 2901280 - DNA, 25 bp, Homo sapien
caggcatgggcacggatcaaaagcc

SEQ ID NO: 2901281 - DNA, 25 bp, Homo sapien
ggcatgggcacggatcaaaagccaa

SEQ ID NO: 2901282 - DNA, 25 bp, Homo sapien
accaggcatgggcacggatcaaaag

SEQ ID NO: 2901283 - DNA, 25 bp, Homo sapien
ttcaagtcctaggttaatgaggtca

SEQ ID NO: 2901284 - DNA, 25 bp, Homo sapien
ctgtagatgcaaatataagctggct

SEQ ID NO: 2901285 - DNA, 25 bp, Homo sapien
tctagtattgcacaccaagctggac

SEQ ID NO: 2901286 - DNA, 25 bp, Homo sapien
tgtggtaaagagcataccctttggg

SEQ ID NO: 2901287 - DNA, 25 bp, Homo sapien
gcaaatgtggccgttttcccagtcc

SEQ ID NO: 2901288 - DNA, 25 bp, Homo sapien
cgatatggcaaatgtggccgttttc

SEQ ID NO: 2901289 - DNA, 25 bp, Homo sapien
caatctgctgcagaatcgatatggc

SEQ ID NO: 2901290 - DNA, 25 bp, Homo sapien
gaatcgatatggcaaatgtggccgt

SEQ ID NO: 2901291 - DNA, 25 bp, Homo sapien
caattctcgagtgggtgctaggacc

SEQ ID NO: 2901292 - DNA, 25 bp, Homo sapien
gctgagccaattctcgagtgggtgc

SEQ ID NO: 2901293 - DNA, 25 bp, Homo sapien
gagccaattctcgagtgggtgctag

SEQ ID NO: 2901294 - DNA, 25 bp, Homo sapien
gccaattctcgagtgggtgctagga

SEQ ID NO: 2901295 - DNA, 25 bp, Homo sapien
taagatcgtgctgtcaataggtggc

SEQ ID NO: 2901296 - DNA, 25 bp, Homo sapien
cagtgattcacaatgaggccgctca

SEQ ID NO: 2901297 - DNA, 25 bp, Homo sapien
taggacccaagctacgaggcatgtt

SEQ ID NO: 2901298 - DNA, 25 bp, Homo sapien
ggtctcgagagtgttagggcaccca

SEQ ID NO: 2901299 - DNA, 25 bp, Homo sapien
cgatacaggcgtgacaggaggcgcc

SEQ ID NO: 2901300 - DNA, 25 bp, Homo sapien
agcacgcacgttggtgcccccgata

SEQ ID NO: 2901301 - DNA, 25 bp, Homo sapien
cacgttggtgcccccgatacaggcg

SEQ ID NO: 2901302 - DNA, 25 bp, Homo sapien
ggttaagcatatcaaacacacggcc

SEQ ID NO: 2901303 - DNA, 25 bp, Homo sapien
tgtgggagagatatatccaacttcg

SEQ ID NO: 2901304 - DNA, 25 bp, Homo sapien
gaatgactctggcttacgctgaaag

SEQ ID NO: 2901305 - DNA, 25 bp, Homo sapien
tgctctcagagtacaaagactgatc

SEQ ID NO: 2901306 - DNA, 25 bp, Homo sapien
agcgtgcacaagagcaaagtgaccc

SEQ ID NO: 2901307 - DNA, 25 bp, Homo sapien
catttcgtcagcttcatccagtaca

SEQ ID NO: 2901308 - DNA, 25 bp, Homo sapien
taacatttcgtcagcttcatccagt

SEQ ID NO: 2901309 - DNA, 25 bp, Homo sapien
tttcgtcagcttcatccagtacaaa

SEQ ID NO: 2901310 - DNA, 25 bp, Homo sapien
acggcttaacatttcgtcagcttca

SEQ ID NO: 2901311 - DNA, 25 bp, Homo sapien
ctgaagcagatgcataaaaaggctc

SEQ ID NO: 2901312 - DNA, 25 bp, Homo sapien
tcaagaatccagtatatggttcccc

SEQ ID NO: 2901313 - DNA, 25 bp, Homo sapien
aaggccagtcttagagtgctggttc

SEQ ID NO: 2901314 - DNA, 25 bp, Homo sapien
tagctattcaagcaagactgccctc

SEQ ID NO: 2901315 - DNA, 25 bp, Homo sapien
cacatcagaaggcattgtggctgac

SEQ ID NO: 2901316 - DNA, 25 bp, Homo sapien
caagaatccgaatggggtccctcat

SEQ ID NO: 2901317 - DNA, 25 bp, Homo sapien
gacaagaatccgaatggggtccctc

SEQ ID NO: 2901318 - DNA, 25 bp, Homo sapien
gcattgtggctgacagcaaaactac

SEQ ID NO: 2901319 - DNA, 25 bp, Homo sapien
tccacgttgatgtagaactggcgga

SEQ ID NO: 2901320 - DNA, 25 bp, Homo sapien
cacgttgatgtagaactggcggata

SEQ ID NO: 2901321 - DNA, 25 bp, Homo sapien
cgttgatgtagaactggcggatacc

SEQ ID NO: 2901322 - DNA, 25 bp, Homo sapien
ttccacgttgatgtagaactggcgg

SEQ ID NO: 2901323 - DNA, 25 bp, Homo sapien
caaaaatcagtcaggggctataccc

SEQ ID NO: 2901324 - DNA, 25 bp, Homo sapien
tcagtcaggggctatacccaacaac

SEQ ID NO: 2901325 - DNA, 25 bp, Homo sapien
gtcaggggctatacccaacaactca

SEQ ID NO: 2901326 - DNA, 25 bp, Homo sapien
ggggctatacccaacaactcactac

SEQ ID NO: 2901327 - DNA, 25 bp, Homo sapien
accttcctccgggtgttgatgaaga

SEQ ID NO: 2901328 - DNA, 25 bp, Homo sapien
gaaatctcgagcatgcatcttctcg

SEQ ID NO: 2901329 - DNA, 25 bp, Homo sapien
tcttctcggtgagccagtccacctt

SEQ ID NO: 2901330 - DNA, 25 bp, Homo sapien
catggcggatacagtgaaatctcga

SEQ ID NO: 2901331 - DNA, 25 bp, Homo sapien
accaggtaggcacctgggttccagg

SEQ ID NO: 2901332 - DNA, 25 bp, Homo sapien
agacccacaacaggctggcagcggg

SEQ ID NO: 2901333 - DNA, 25 bp, Homo sapien
ggacacttctgacgggcagacccac

SEQ ID NO: 2901334 - DNA, 25 bp, Homo sapien
ttcaagtaggacacttctgacgggc

SEQ ID NO: 2901335 - DNA, 25 bp, Homo sapien
cctcataatcacgtctcgttccttt

SEQ ID NO: 2901336 - DNA, 25 bp, Homo sapien
ctccctcataatcacgtctcgttcc

SEQ ID NO: 2901337 - DNA, 25 bp, Homo sapien
tcataatcacgtctcgttccttttg

SEQ ID NO: 2901338 - DNA, 25 bp, Homo sapien
tccctcataatcacgtctcgttcct

SEQ ID NO: 2901339 - DNA, 25 bp, Homo sapien
ctttgctatcagttccctctactca

SEQ ID NO: 2901340 - DNA, 25 bp, Homo sapien
tttgctatcagttccctctactcac

SEQ ID NO: 2901341 - DNA, 25 bp, Homo sapien
cagttccccaaaggccttaggcatg

SEQ ID NO: 2901342 - DNA, 25 bp, Homo sapien
ggaaataagcatcccagttccccaa

SEQ ID NO: 2901343 - DNA, 25 bp, Homo sapien
tattccaagctgctactttcctgag

SEQ ID NO: 2901344 - DNA, 25 bp, Homo sapien
tgagaggcactgatgtccccttgga

SEQ ID NO: 2901345 - DNA, 25 bp, Homo sapien
gtgcacggaggacactctatcccgg

SEQ ID NO: 2901346 - DNA, 25 bp, Homo sapien
agcatgtgcacggaggacactctat

SEQ ID NO: 2901347 - DNA, 25 bp, Homo sapien
gaggacactctatcccggagggaag

SEQ ID NO: 2901348 - DNA, 25 bp, Homo sapien
acggaggacactctatcccggaggg

SEQ ID NO: 2901349 - DNA, 25 bp, Homo sapien
tagttgatgactaaagaaacctgct

SEQ ID NO: 2901350 - DNA, 25 bp, Homo sapien
gggaaggtcatagttgatgactaaa

SEQ ID NO: 2901351 - DNA, 25 bp, Homo sapien
tgttggtgggaaggtcatagttgat

SEQ ID NO: 2901352 - DNA, 25 bp, Homo sapien
ggtcatagttgatgactaaagaaac

SEQ ID NO: 2901353 - DNA, 25 bp, Homo sapien
gggatgaggaatatcaggagcttta

SEQ ID NO: 2901354 - DNA, 25 bp, Homo sapien
taggggagtgttccagatctacgct

SEQ ID NO: 2901355 - DNA, 25 bp, Homo sapien
aatatcaggagctttaagcccaggg

SEQ ID NO: 2901356 - DNA, 25 bp, Homo sapien
gggagtgttccagatctacgcttac

SEQ ID NO: 2901357 - DNA, 25 bp, Homo sapien
gtgttgtagaaggtctcaatgtctc

SEQ ID NO: 2901358 - DNA, 25 bp, Homo sapien
gaggtgttgtagaaggtctcaatgt

SEQ ID NO: 2901359 - DNA, 25 bp, Homo sapien
tggaggtgttgtagaaggtctcaat

SEQ ID NO: 2901360 - DNA, 25 bp, Homo sapien
gaaggtctcaatgtctcgaagagtc

SEQ ID NO: 2901361 - DNA, 25 bp, Homo sapien
tgctcctcagcccccagagattgag

SEQ ID NO: 2901362 - DNA, 25 bp, Homo sapien
cctcagcccccagagattgagccct

SEQ ID NO: 2901363 - DNA, 25 bp, Homo sapien
tcagcccccagagattgagccctgg

SEQ ID NO: 2901364 - DNA, 25 bp, Homo sapien
gacaagatgtccatcccttggctcc

SEQ ID NO: 2901365 - DNA, 25 bp, Homo sapien
tttcaaaggagctcagctgaggtga

SEQ ID NO: 2901366 - DNA, 25 bp, Homo sapien
gatctggaggttactaggttaggga

SEQ ID NO: 2901367 - DNA, 25 bp, Homo sapien
tgacatagtcccttgaatcactttc

SEQ ID NO: 2901368 - DNA, 25 bp, Homo sapien
tgaggctgagtgacatagtcccttg

SEQ ID NO: 2901369 - DNA, 25 bp, Homo sapien
agtccagctaggctgtctgcaccag

SEQ ID NO: 2901370 - DNA, 25 bp, Homo sapien
aaccgcctcacccaaagtccagcta

SEQ ID NO: 2901371 - DNA, 25 bp, Homo sapien
ggctgaaccgcctcacccaaagtcc

SEQ ID NO: 2901372 - DNA, 25 bp, Homo sapien
aaagtccagctaggctgtctgcacc

SEQ ID NO: 2901373 - DNA, 25 bp, Homo sapien
cagggcccccgagaaaagcacagcc

SEQ ID NO: 2901374 - DNA, 25 bp, Homo sapien
agcagggcccccgagaaaagcacag

SEQ ID NO: 2901375 - DNA, 25 bp, Homo sapien
gcagggcccccgagaaaagcacagc

SEQ ID NO: 2901376 - DNA, 25 bp, Homo sapien
ctgtaaccgtgggtgtcaccgtgaa

SEQ ID NO: 2901377 - DNA, 25 bp, Homo sapien
tgtcaccgtgaaggatggcagcaaa

SEQ ID NO: 2901378 - DNA, 25 bp, Homo sapien
aaccgtgggtgtcaccgtgaaggat

SEQ ID NO: 2901379 - DNA, 25 bp, Homo sapien
gtgtcaccgtgaaggatggcagcaa

SEQ ID NO: 2901380 - DNA, 25 bp, Homo sapien
gagtggcagtcgtgggtccgtggct

SEQ ID NO: 2901381 - DNA, 25 bp, Homo sapien
cctgtgagtggtggttttgtggctc

SEQ ID NO: 2901382 - DNA, 25 bp, Homo sapien
ttgtgagtggcagtcgtgggtccgt

SEQ ID NO: 2901383 - DNA, 25 bp, Homo sapien
agtggtggttttgtggctcttggta

SEQ ID NO: 2901384 - DNA, 25 bp, Homo sapien
tccatgactagtggtggcaggactg

SEQ ID NO: 2901385 - DNA, 25 bp, Homo sapien
cagaactggtgaatcctgggctggt

SEQ ID NO: 2901386 - DNA, 25 bp, Homo sapien
cctggctggtggcagtgctattgct

SEQ ID NO: 2901387 - DNA, 25 bp, Homo sapien
gcttgttggatgaaccgtggcattt

SEQ ID NO: 2901388 - DNA, 25 bp, Homo sapien
ctaggactcggagagggtggaggtg

SEQ ID NO: 2901389 - DNA, 25 bp, Homo sapien
aggactcggagagggtggaggtggt

SEQ ID NO: 2901390 - DNA, 25 bp, Homo sapien
taggactcggagagggtggaggtgg

SEQ ID NO: 2901391 - DNA, 25 bp, Homo sapien
cctgggttgtgtacatgactcgaat

SEQ ID NO: 2901392 - DNA, 25 bp, Homo sapien
cacgtgtagtctccaatggtctcct

SEQ ID NO: 2901393 - DNA, 25 bp, Homo sapien
tgtgtacatgactcgaatctgaatc

SEQ ID NO: 2901394 - DNA, 25 bp, Homo sapien
ggctgggaaccattggtccacgtgt

SEQ ID NO: 2901395 - DNA, 25 bp, Homo sapien
ctctcatcccccagttttagcttta

SEQ ID NO: 2901396 - DNA, 25 bp, Homo sapien
tctcatcccccagttttagctttac

SEQ ID NO: 2901397 - DNA, 25 bp, Homo sapien
ccctctcatcccccagttttagctt

SEQ ID NO: 2901398 - DNA, 25 bp, Homo sapien
cctctcatcccccagttttagcttt

SEQ ID NO: 2901399 - DNA, 25 bp, Homo sapien
tgagagaagcaggtggggatgggca

SEQ ID NO: 2901400 - DNA, 25 bp, Homo sapien
gttttgttggggttcagtacagaga

SEQ ID NO: 2901401 - DNA, 25 bp, Homo sapien
aagcaggtggggatgggcaccctca

SEQ ID NO: 2901402 - DNA, 25 bp, Homo sapien
gtgtccataggggaatgagagaagc

SEQ ID NO: 2901403 - DNA, 25 bp, Homo sapien
cattgtactccaccgccatgtagct

SEQ ID NO: 2901404 - DNA, 25 bp, Homo sapien
gaaggacacattgtactccaccgcc

SEQ ID NO: 2901405 - DNA, 25 bp, Homo sapien
ggacacattgtactccaccgccatg

SEQ ID NO: 2901406 - DNA, 25 bp, Homo sapien
tgggggaaggacacattgtactcca

SEQ ID NO: 2901407 - DNA, 25 bp, Homo sapien
tgcttggagatctcgaagggatgca

SEQ ID NO: 2901408 - DNA, 25 bp, Homo sapien
gcattctgagccgagaatgtccact

SEQ ID NO: 2901409 - DNA, 25 bp, Homo sapien
gaatgatgctcgagttgctgcaact

SEQ ID NO: 2901410 - DNA, 25 bp, Homo sapien
cagggagagcaggtcgaggtggaca

SEQ ID NO: 2901411 - DNA, 25 bp, Homo sapien
cctgtagccatgacaagctgggaga

SEQ ID NO: 2901412 - DNA, 25 bp, Homo sapien
aaactggcagagtcttgtagaggat

SEQ ID NO: 2901413 - DNA, 25 bp, Homo sapien
caggtaggtatttgcagtgacgtgc

SEQ ID NO: 2901414 - DNA, 25 bp, Homo sapien
agagatgagtggcttatgggcctgg

SEQ ID NO: 2901415 - DNA, 25 bp, Homo sapien
gccaagaaggatcaggccgatgatg

SEQ ID NO: 2901416 - DNA, 25 bp, Homo sapien
tgggcgtctccggatgatgcagaaa

SEQ ID NO: 2901417 - DNA, 25 bp, Homo sapien
aagcaataagcaccagggcgaggag

SEQ ID NO: 2901418 - DNA, 25 bp, Homo sapien
aggcagcaagatggaccggtcactg

SEQ ID NO: 2901419 - DNA, 25 bp, Homo sapien
ttgtctttgagccagttgcgtgtcg

SEQ ID NO: 2901420 - DNA, 25 bp, Homo sapien
tgcgtgtcgaggaaataagggtacc

SEQ ID NO: 2901421 - DNA, 25 bp, Homo sapien
gatcttggcttagtggcgcgatgac

SEQ ID NO: 2901422 - DNA, 25 bp, Homo sapien
tacaggccagctgggattacgccgc

SEQ ID NO: 2901423 - DNA, 25 bp, Homo sapien
gaaaaccccgtcaaagatttgcata

SEQ ID NO: 2901424 - DNA, 25 bp, Homo sapien
gggcagttcgtcacatttaataaaa

SEQ ID NO: 2901425 - DNA, 25 bp, Homo sapien
aactcatggcttttaatcctggcag

SEQ ID NO: 2901426 - DNA, 25 bp, Homo sapien
tggcttttaatcctggcaggacaag

SEQ ID NO: 2901427 - DNA, 25 bp, Homo sapien
cattgactttcgttgcgcgtgcgcg

SEQ ID NO: 2901428 - DNA, 25 bp, Homo sapien
tcagggaccacgttttggacgcgct

SEQ ID NO: 2901429 - DNA, 25 bp, Homo sapien
ctctagtggcgtaaaataagtctca

SEQ ID NO: 2901430 - DNA, 25 bp, Homo sapien
taaagcttgccgaagctgcacgcct

SEQ ID NO: 2901431 - DNA, 25 bp, Homo sapien
agcagccgtttaagcggtccgtccg

SEQ ID NO: 2901432 - DNA, 25 bp, Homo sapien
caagtcccactgaacgaaaagttgg

SEQ ID NO: 2901433 - DNA, 25 bp, Homo sapien
aaaagttggtcgtagcatttctcag

SEQ ID NO: 2901434 - DNA, 25 bp, Homo sapien
tcaggtaaaagaatcggcacgagca

SEQ ID NO: 2901435 - DNA, 25 bp, Homo sapien
gtgacttccgtccagctcggcatgg

SEQ ID NO: 2901436 - DNA, 25 bp, Homo sapien
cacggtcactcgagtaggacttgga

SEQ ID NO: 2901437 - DNA, 25 bp, Homo sapien
tgccgtcacttagtcgccgatcaag

SEQ ID NO: 2901438 - DNA, 25 bp, Homo sapien
tcaaggcttggactaagggcccacg

SEQ ID NO: 2901439 - DNA, 25 bp, Homo sapien
tgacctccacggctctccattgctt

SEQ ID NO: 2901440 - DNA, 25 bp, Homo sapien
taacacccaaacttggcttgacctc

SEQ ID NO: 2901441 - DNA, 25 bp, Homo sapien
ttataagctcgagctaccgcaccgg

SEQ ID NO: 2901442 - DNA, 25 bp, Homo sapien
cgcaccgggccccagactgttactt

SEQ ID NO: 2901443 - DNA, 25 bp, Homo sapien
aaaagggtaagcagacaggagatgt

SEQ ID NO: 2901444 - DNA, 25 bp, Homo sapien
ctagaagtgagccagccacaatgcc

SEQ ID NO: 2901445 - DNA, 25 bp, Homo sapien
caggcctttgctgaggagaatcttg

SEQ ID NO: 2901446 - DNA, 25 bp, Homo sapien
cctttgctgaggagaatcttgaggc

SEQ ID NO: 2901447 - DNA, 25 bp, Homo sapien
cccaggcctttgctgaggagaatct

SEQ ID NO: 2901448 - DNA, 25 bp, Homo sapien
tggctcccaggattttaaacacctg

SEQ ID NO: 2901449 - DNA, 25 bp, Homo sapien
caatgccactagctccagcattaca

SEQ ID NO: 2901450 - DNA, 25 bp, Homo sapien
tgtagaccatggtcccagtcaatgc

SEQ ID NO: 2901451 - DNA, 25 bp, Homo sapien
ctccagcattacagactggagactc

SEQ ID NO: 2901452 - DNA, 25 bp, Homo sapien
tgttagtgatgctgtagaccatggt

SEQ ID NO: 2901453 - DNA, 25 bp, Homo sapien
tgccttgtaacctccttcaccttaa

SEQ ID NO: 2901454 - DNA, 25 bp, Homo sapien
cttaatccccattagagttgtgggt

SEQ ID NO: 2901455 - DNA, 25 bp, Homo sapien
caccttaatccccattagagttgtg

SEQ ID NO: 2901456 - DNA, 25 bp, Homo sapien
tccttcaccttaatccccattagag

SEQ ID NO: 2901457 - DNA, 25 bp, Homo sapien
tgcagagtcaagagttgggaggaag

SEQ ID NO: 2901458 - DNA, 25 bp, Homo sapien
ctgcagagtcaagagttgggaggaa

SEQ ID NO: 2901459 - DNA, 25 bp, Homo sapien
atggtgatcgtctggagcatcagga

SEQ ID NO: 2901460 - DNA, 25 bp, Homo sapien
tggtgatcgtctggagcatcaggaa

SEQ ID NO: 2901461 - DNA, 25 bp, Homo sapien
agatggtgatcgtctggagcatcag

SEQ ID NO: 2901462 - DNA, 25 bp, Homo sapien
cagatggtgatcgtctggagcatca

SEQ ID NO: 2901463 - DNA, 25 bp, Homo sapien
ctttcacagtctgtcctctgtagtg

SEQ ID NO: 2901464 - DNA, 25 bp, Homo sapien
cagtctgtcctctgtagtgcatgac

SEQ ID NO: 2901465 - DNA, 25 bp, Homo sapien
ttcacagtctgtcctctgtagtgca

SEQ ID NO: 2901466 - DNA, 25 bp, Homo sapien
cacagtctgtcctctgtagtgcatg

SEQ ID NO: 2901467 - DNA, 25 bp, Homo sapien
cagcctgctcttgggtaagtcccca

SEQ ID NO: 2901468 - DNA, 25 bp, Homo sapien
cacacagcctgctcttgggtaagtc

SEQ ID NO: 2901469 - DNA, 25 bp, Homo sapien
cacagcctgctcttgggtaagtccc

SEQ ID NO: 2901470 - DNA, 25 bp, Homo sapien
aaccacacagcctgctcttgggtaa

SEQ ID NO: 2901471 - DNA, 25 bp, Homo sapien
ttgtcaatctctccacatcatttgg

SEQ ID NO: 2901472 - DNA, 25 bp, Homo sapien
ctctccacatcatttggctttccca

SEQ ID NO: 2901473 - DNA, 25 bp, Homo sapien
gggagacaggagtccttgtcaatct

SEQ ID NO: 2901474 - DNA, 25 bp, Homo sapien
ggagtccttgtcaatctctccacat

SEQ ID NO: 2901475 - DNA, 25 bp, Homo sapien
agcaggaccaggccgtagcaagcga

SEQ ID NO: 2901476 - DNA, 25 bp, Homo sapien
ccaggccgtagcaagcgaggaaagc

SEQ ID NO: 2901477 - DNA, 25 bp, Homo sapien
gaccaggccgtagcaagcgaggaaa

SEQ ID NO: 2901478 - DNA, 25 bp, Homo sapien
ccgtagcaagcgaggaaagcgacac

SEQ ID NO: 2901479 - DNA, 25 bp, Homo sapien
gtcaagggcgtcagaggtgagagaa

SEQ ID NO: 2901480 - DNA, 25 bp, Homo sapien
ggtgactacagtcaagggcgtcaga

SEQ ID NO: 2901481 - DNA, 25 bp, Homo sapien
tcaagggcgtcagaggtgagagaag

SEQ ID NO: 2901482 - DNA, 25 bp, Homo sapien
gactacagtcaagggcgtcagaggt

SEQ ID NO: 2901483 - DNA, 25 bp, Homo sapien
tttgatcttctactcttccccccca

SEQ ID NO: 2901484 - DNA, 25 bp, Homo sapien
acactttgatcttctactcttcccc

SEQ ID NO: 2901485 - DNA, 25 bp, Homo sapien
aagtacaacacccccacactttgat

SEQ ID NO: 2901486 - DNA, 25 bp, Homo sapien
cccacactttgatcttctactcttc

SEQ ID NO: 2901487 - DNA, 25 bp, Homo sapien
gcccgttgtggtagttggtggctgc

SEQ ID NO: 2901488 - DNA, 25 bp, Homo sapien
gaagtgaagattcgggccagggagc

SEQ ID NO: 2901489 - DNA, 25 bp, Homo sapien
tggaagtgaagattcgggccaggga

SEQ ID NO: 2901490 - DNA, 25 bp, Homo sapien
gcctgtgtgcccgttgtggtagttg

SEQ ID NO: 2901491 - DNA, 25 bp, Homo sapien
agagcagctgggcggcgatgaggcc

SEQ ID NO: 2901492 - DNA, 25 bp, Homo sapien
tgggcggcgatgaggccgttgcaga

SEQ ID NO: 2901493 - DNA, 25 bp, Homo sapien
cagctgggcggcgatgaggccgttg

SEQ ID NO: 2901494 - DNA, 25 bp, Homo sapien
ggcgatgaggccgttgcagagagag

SEQ ID NO: 2901495 - DNA, 25 bp, Homo sapien
tgtacagggcttacgaaagcactca

SEQ ID NO: 2901496 - DNA, 25 bp, Homo sapien
tggaggacagggtaaaacatttgcc

SEQ ID NO: 2901497 - DNA, 25 bp, Homo sapien
tttgcccaggatagtgttacacagc

SEQ ID NO: 2901498 - DNA, 25 bp, Homo sapien
aaaccctggctcagaaagtctgcaa

SEQ ID NO: 2901499 - DNA, 25 bp, Homo sapien
gcagcaggaaccagccccatctcca

SEQ ID NO: 2901500 - DNA, 25 bp, Homo sapien
cagcaggaaccagccccatctccac

SEQ ID NO: 2901501 - DNA, 25 bp, Homo sapien
caaggagaggccgagctcattctgc

SEQ ID NO: 2901502 - DNA, 25 bp, Homo sapien
tgtcctagttagatgccccgtttcc

SEQ ID NO: 2901503 - DNA, 25 bp, Homo sapien
tcccagagggcgtttccatctcagt

SEQ ID NO: 2901504 - DNA, 25 bp, Homo sapien
gactgacccctggatgcgactgtgt

SEQ ID NO: 2901505 - DNA, 25 bp, Homo sapien
cctcctcggcctttcttgccccagg

SEQ ID NO: 2901506 - DNA, 25 bp, Homo sapien
gactcaggaaacaaaaatggtctcc

SEQ ID NO: 2901507 - DNA, 25 bp, Homo sapien
ggcagttctgggatttgaggagcaa

SEQ ID NO: 2901508 - DNA, 25 bp, Homo sapien
tttgaggagcaacaggcaccaggaa

SEQ ID NO: 2901509 - DNA, 25 bp, Homo sapien
tgggctgggccgttgggcagagtgg

SEQ ID NO: 2901510 - DNA, 25 bp, Homo sapien
ttaatccgattacctgaggcctggg

SEQ ID NO: 2901511 - DNA, 25 bp, Homo sapien
gggagcagggttccctcacagcagc

SEQ ID NO: 2901512 - DNA, 25 bp, Homo sapien
tggtggtgttctgttctggctccag

SEQ ID NO: 2901513 - DNA, 25 bp, Homo sapien
agtcacagcacaggctaggcagggc

SEQ ID NO: 2901514 - DNA, 25 bp, Homo sapien
gagttgggccactcctataccctga

SEQ ID NO: 2901515 - DNA, 25 bp, Homo sapien
gagctgttcctgtagaagctgagag

SEQ ID NO: 2901516 - DNA, 25 bp, Homo sapien
cctgtagaagctgagagccaaggca

SEQ ID NO: 2901517 - DNA, 25 bp, Homo sapien
ctgacattcctaaactccccaggcc

SEQ ID NO: 2901518 - DNA, 25 bp, Homo sapien
gacattcctaaactccccaggccca

SEQ ID NO: 2901519 - DNA, 25 bp, Homo sapien
ttcctgacattcctaaactccccag

SEQ ID NO: 2901520 - DNA, 25 bp, Homo sapien
caggttctccctcctggttcagagg

SEQ ID NO: 2901521 - DNA, 25 bp, Homo sapien
ccaaagatggtcttacttctgggaa

SEQ ID NO: 2901522 - DNA, 25 bp, Homo sapien
gtttctctaggactgacctgccctg

SEQ ID NO: 2901523 - DNA, 25 bp, Homo sapien
cagtttggtccatttgtttctctag

SEQ ID NO: 2901524 - DNA, 25 bp, Homo sapien
tcattgtctcttgtcccaaagatgg

SEQ ID NO: 2901525 - DNA, 25 bp, Homo sapien
gaatttctactcaccgcttcttgct

SEQ ID NO: 2901526 - DNA, 25 bp, Homo sapien
tgtgtaacagggtcataccccctcc

SEQ ID NO: 2901527 - DNA, 25 bp, Homo sapien
ctcagggtgactctgtcagcaagct

SEQ ID NO: 2901528 - DNA, 25 bp, Homo sapien
aactgacctgcgctggagctgctct

SEQ ID NO: 2901529 - DNA, 25 bp, Homo sapien
tatctcacgagcagagtctcagagc

SEQ ID NO: 2901530 - DNA, 25 bp, Homo sapien
tggaacgcactaaaccctcagaaga

SEQ ID NO: 2901531 - DNA, 25 bp, Homo sapien
taggcaggcaagatgtgctttaccc

SEQ ID NO: 2901532 - DNA, 25 bp, Homo sapien
tgactgtggctgactatatctcacg

SEQ ID NO: 2901533 - DNA, 25 bp, Homo sapien
tgcgactcgaacctatgggggcagc

SEQ ID NO: 2901534 - DNA, 25 bp, Homo sapien
gcctatggtgagacagttatgggaa

SEQ ID NO: 2901535 - DNA, 25 bp, Homo sapien
cgactcgaacctatgggggcagcta

SEQ ID NO: 2901536 - DNA, 25 bp, Homo sapien
tttggggaaatctggaatggagatg

SEQ ID NO: 2901537 - DNA, 25 bp, Homo sapien
agactgggcggcgttaatccttcca

SEQ ID NO: 2901538 - DNA, 25 bp, Homo sapien
tggcacccgagagaacatcagcaat

SEQ ID NO: 2901539 - DNA, 25 bp, Homo sapien
gatttagagcccagaatgatcccac

SEQ ID NO: 2901540 - DNA, 25 bp, Homo sapien
tacccaggccgggagagaaaaatgc

SEQ ID NO: 2901541 - DNA, 25 bp, Homo sapien
acctgatgggactggcaattgggac

SEQ ID NO: 2901542 - DNA, 25 bp, Homo sapien
tccaagaggagttcacagtgcgaga

SEQ ID NO: 2901543 - DNA, 25 bp, Homo sapien
taagttatgcaaagggtcgtgtgcc

SEQ ID NO: 2901544 - DNA, 25 bp, Homo sapien
gtgcctgggactgtgagattctacc

SEQ ID NO: 2901545 - DNA, 25 bp, Homo sapien
aattgttaccctggagcgacttcgg

SEQ ID NO: 2901546 - DNA, 25 bp, Homo sapien
cattgaatatgctgcctgtgatgcc

SEQ ID NO: 2901547 - DNA, 25 bp, Homo sapien
ctgtgcccgaggatctgagagaagc

SEQ ID NO: 2901548 - DNA, 25 bp, Homo sapien
tcaaggttaccatggctgtgcccga

SEQ ID NO: 2901549 - DNA, 25 bp, Homo sapien
ggtgttagcacctggctctaaccaa

SEQ ID NO: 2901550 - DNA, 25 bp, Homo sapien
cacaaccttggtgttagcacctggc

SEQ ID NO: 2901551 - DNA, 25 bp, Homo sapien
ccttggtgttagcacctggctctaa

SEQ ID NO: 2901552 - DNA, 25 bp, Homo sapien
cccacgtggcgatcaaatccacaac

SEQ ID NO: 2901553 - DNA, 25 bp, Homo sapien
catggacttgtacaaggccctagga

SEQ ID NO: 2901554 - DNA, 25 bp, Homo sapien
aaagtgacgccatccctaggaggat

SEQ ID NO: 2901555 - DNA, 25 bp, Homo sapien
tctgctttcaaggagaggcaacgag

SEQ ID NO: 2901556 - DNA, 25 bp, Homo sapien
gcccaagatctgacggaagctgagg

SEQ ID NO: 2901557 - DNA, 25 bp, Homo sapien
ccagagcccagccggtgtcattttc

SEQ ID NO: 2901558 - DNA, 25 bp, Homo sapien
tgatccccttcagctcaaacaatag

SEQ ID NO: 2901559 - DNA, 25 bp, Homo sapien
tatctatgtgatgccggaatatcgg

SEQ ID NO: 2901560 - DNA, 25 bp, Homo sapien
catttatctggaggatatctatgtg

SEQ ID NO: 2901561 - DNA, 25 bp, Homo sapien
cactgcatatgtcaatttaaaaagc

SEQ ID NO: 2901562 - DNA, 25 bp, Homo sapien
ggcgggtgagtgagcctgaggctaa

SEQ ID NO: 2901563 - DNA, 25 bp, Homo sapien
gtgagcctgaggctaaagcaggtta

SEQ ID NO: 2901564 - DNA, 25 bp, Homo sapien
ggctaaagcaggttatcactgcata

SEQ ID NO: 2901565 - DNA, 25 bp, Homo sapien
ccactgtccactcggcggctcagac

SEQ ID NO: 2901566 - DNA, 25 bp, Homo sapien
cactgtccactcggcggctcagaca

SEQ ID NO: 2901567 - DNA, 25 bp, Homo sapien
actgtccactcggcggctcagacaa

SEQ ID NO: 2901568 - DNA, 25 bp, Homo sapien
gcccatccctggcgggtgtgacgca

SEQ ID NO: 2901569 - DNA, 25 bp, Homo sapien
cgggtgtgacgcagtagtagcaaca

SEQ ID NO: 2901570 - DNA, 25 bp, Homo sapien
agcagcaggcgcgaggtagccagtg

SEQ ID NO: 2901571 - DNA, 25 bp, Homo sapien
gggagaacaggtctcagggcccatc

SEQ ID NO: 2901572 - DNA, 25 bp, Homo sapien
agctgagtgccctgtcccgctcctg

SEQ ID NO: 2901573 - DNA, 25 bp, Homo sapien
aagctgagtagggacatgtcagaga

SEQ ID NO: 2901574 - DNA, 25 bp, Homo sapien
gaggccctgctacagggccagagga

SEQ ID NO: 2901575 - DNA, 25 bp, Homo sapien
agtagggacatgtcagagacagaca

SEQ ID NO: 2901576 - DNA, 25 bp, Homo sapien
agcgataggctcttgtcctgggcca

SEQ ID NO: 2901577 - DNA, 25 bp, Homo sapien
tcatgacagcgataggctcttgtcc

SEQ ID NO: 2901578 - DNA, 25 bp, Homo sapien
aggtcaaaggtcatgacagcgatag

SEQ ID NO: 2901579 - DNA, 25 bp, Homo sapien
ccattgctgaggtggacagccggag

SEQ ID NO: 2901580 - DNA, 25 bp, Homo sapien
cgtctcgaagtcccagcataaacca

SEQ ID NO: 2901581 - DNA, 25 bp, Homo sapien
tggatctcaggcctgccgtctcgaa

SEQ ID NO: 2901582 - DNA, 25 bp, Homo sapien
ccaccgtaagctgggcccagtgatt

SEQ ID NO: 2901583 - DNA, 25 bp, Homo sapien
catccttagggttggtatccccata

SEQ ID NO: 2901584 - DNA, 25 bp, Homo sapien
ccatcatccagccgtggtccagcac

SEQ ID NO: 2901585 - DNA, 25 bp, Homo sapien
cagagtccccctccatcttgacttc

SEQ ID NO: 2901586 - DNA, 25 bp, Homo sapien
ctcctccccatccacctccagcagc

SEQ ID NO: 2901587 - DNA, 25 bp, Homo sapien
agtccccctccatcttgacttccac

SEQ ID NO: 2901588 - DNA, 25 bp, Homo sapien
cacagagtccccctccatcttgact

SEQ ID NO: 2901589 - DNA, 25 bp, Homo sapien
gatgggatggcgtttgctggtcagg

SEQ ID NO: 2901590 - DNA, 25 bp, Homo sapien
ccagagacctgtctcaggcgcagca

SEQ ID NO: 2901591 - DNA, 25 bp, Homo sapien
ccccaagcgcaatcctcatgatggg

SEQ ID NO: 2901592 - DNA, 25 bp, Homo sapien
agcgcaatcctcatgatgggatggc

SEQ ID NO: 2901593 - DNA, 25 bp, Homo sapien
gtccagccaggaatcccggcgcagg

SEQ ID NO: 2901594 - DNA, 25 bp, Homo sapien
ccaggaatcccggcgcaggcagcca

SEQ ID NO: 2901595 - DNA, 25 bp, Homo sapien
tttgtccagccaggaatcccggcgc

SEQ ID NO: 2901596 - DNA, 25 bp, Homo sapien
gccaggaatcccggcgcaggcagcc

SEQ ID NO: 2901597 - DNA, 25 bp, Homo sapien
tcccgggatttgattctacatcaca

SEQ ID NO: 2901598 - DNA, 25 bp, Homo sapien
atcacagcttctgaggctagtgggg

SEQ ID NO: 2901599 - DNA, 25 bp, Homo sapien
gcttctgaggctagtgggggcagat

SEQ ID NO: 2901600 - DNA, 25 bp, Homo sapien
atatcccgggatttgattctacatc

SEQ ID NO: 2901601 - DNA, 25 bp, Homo sapien
gctggccagggtgggaaaaatagac

SEQ ID NO: 2901602 - DNA, 25 bp, Homo sapien
ctggccagggtgggaaaaatagact

SEQ ID NO: 2901603 - DNA, 25 bp, Homo sapien
tggagactgagccaagatgggttct

SEQ ID NO: 2901604 - DNA, 25 bp, Homo sapien
tctctggtgtcccaagagcaaggag

SEQ ID NO: 2901605 - DNA, 25 bp, Homo sapien
ctgagccaagatgggttctctggtg

SEQ ID NO: 2901606 - DNA, 25 bp, Homo sapien
aggtccaaagagaaggcccagggct

SEQ ID NO: 2901607 - DNA, 25 bp, Homo sapien
ccgacccagaagacaacaccacctt

SEQ ID NO: 2901608 - DNA, 25 bp, Homo sapien
tcagctgaagagggagtcccaagac

SEQ ID NO: 2901609 - DNA, 25 bp, Homo sapien
agaccaccctggacatactcagctt

SEQ ID NO: 2901610 - DNA, 25 bp, Homo sapien
ggcaagggccttcatcttcgaccct

SEQ ID NO: 2901611 - DNA, 25 bp, Homo sapien
cccaggaagagacgcccttgaggct

SEQ ID NO: 2901612 - DNA, 25 bp, Homo sapien
gaagagacgcccttgaggcttggcc

SEQ ID NO: 2901613 - DNA, 25 bp, Homo sapien
acgcccttgaggcttggcccagagg

SEQ ID NO: 2901614 - DNA, 25 bp, Homo sapien
aagcccccaggaagagacgcccttg

SEQ ID NO: 2901615 - DNA, 25 bp, Homo sapien
tgtttccaatgttgtgctcatgaac

SEQ ID NO: 2901616 - DNA, 25 bp, Homo sapien
tcctccaacctgagtttgcaaaagc

SEQ ID NO: 2901617 - DNA, 25 bp, Homo sapien
tcttgtggcctattcttcttccctc

SEQ ID NO: 2901618 - DNA, 25 bp, Homo sapien
gagcattaaggtggctcggatccag

SEQ ID NO: 2901619 - DNA, 25 bp, Homo sapien
acatccagcctctgaccttgtgccc

SEQ ID NO: 2901620 - DNA, 25 bp, Homo sapien
cccaaaggccattcaggcaaaaaga

SEQ ID NO: 2901621 - DNA, 25 bp, Homo sapien
ttaatgggaagcgtcagtgccattg

SEQ ID NO: 2901622 - DNA, 25 bp, Homo sapien
tgggaagcgtcagtgccattgcctg

SEQ ID NO: 2901623 - DNA, 25 bp, Homo sapien
gaggcagttgtagatcctgagaggg

SEQ ID NO: 2901624 - DNA, 25 bp, Homo sapien
tgaagactccactaccaacactgct

SEQ ID NO: 2901625 - DNA, 25 bp, Homo sapien
attgctgaagactccactaccaaca

SEQ ID NO: 2901626 - DNA, 25 bp, Homo sapien
actaccaacactgctggctgggtgg

SEQ ID NO: 2901627 - DNA, 25 bp, Homo sapien
gctacaaaaaccgagcagaacgcag

SEQ ID NO: 2901628 - DNA, 25 bp, Homo sapien
gcggaagatgcaccgatcctaggcc

SEQ ID NO: 2901629 - DNA, 25 bp, Homo sapien
gggtgcaaaaacagacggctacaaa

SEQ ID NO: 2901630 - DNA, 25 bp, Homo sapien
tgtggaacgaagctcaaggctcgct

SEQ ID NO: 2901631 - DNA, 25 bp, Homo sapien
cttggtggcgcggggcgagtccggg

SEQ ID NO: 2901632 - DNA, 25 bp, Homo sapien
gtggcgcggggcgagtccgggcgcg

SEQ ID NO: 2901633 - DNA, 25 bp, Homo sapien
ggttgcggagaagcgggggcgccgc

SEQ ID NO: 2901634 - DNA, 25 bp, Homo sapien
gttgcggagaagcgggggcgccgcg

SEQ ID NO: 2901635 - DNA, 25 bp, Homo sapien
ggtgcggcccataaactggtgcgtc

SEQ ID NO: 2901636 - DNA, 25 bp, Homo sapien
actggtgcgtcctcgggttccacac

SEQ ID NO: 2901637 - DNA, 25 bp, Homo sapien
taaactggtgcgtcctcgggttcca

SEQ ID NO: 2901638 - DNA, 25 bp, Homo sapien
agctggtcccggtgcggcccataaa

SEQ ID NO: 2901639 - DNA, 25 bp, Homo sapien
catggcggtgaggaacccataaaaa

SEQ ID NO: 2901640 - DNA, 25 bp, Homo sapien
agggtgaacatggcggtgaggaacc

SEQ ID NO: 2901641 - DNA, 25 bp, Homo sapien
gggtgaacatggcggtgaggaaccc

SEQ ID NO: 2901642 - DNA, 25 bp, Homo sapien
ggtgaacatggcggtgaggaaccca

SEQ ID NO: 2901643 - DNA, 25 bp, Homo sapien
tggtacttgggggtatggtcggaga

SEQ ID NO: 2901644 - DNA, 25 bp, Homo sapien
tgtggccagtcggtcctggtacttg

SEQ ID NO: 2901645 - DNA, 25 bp, Homo sapien
gggtatggtcggagacagtctgcag

SEQ ID NO: 2901646 - DNA, 25 bp, Homo sapien
ccggtgtggccagtcggtcctggta

SEQ ID NO: 2901647 - DNA, 25 bp, Homo sapien
gttctcagtcttggggcgaatcatc

SEQ ID NO: 2901648 - DNA, 25 bp, Homo sapien
ctgaacatgctggtcccagctttca

SEQ ID NO: 2901649 - DNA, 25 bp, Homo sapien
ttctgaacatgctggtcccagcttt

SEQ ID NO: 2901650 - DNA, 25 bp, Homo sapien
tcagtcttggggcgaatcatcaagc

SEQ ID NO: 2901651 - DNA, 25 bp, Homo sapien
gttcgtaatagcgtccagggcggca

SEQ ID NO: 2901652 - DNA, 25 bp, Homo sapien
tccggttgaattggcaggcacgttt

SEQ ID NO: 2901653 - DNA, 25 bp, Homo sapien
tgtaaccatagtgggtggagtcccc

SEQ ID NO: 2901654 - DNA, 25 bp, Homo sapien
tagttgaggactccattatctggct

SEQ ID NO: 2901655 - DNA, 25 bp, Homo sapien
ggtttgctcctgcatagaagttgat

SEQ ID NO: 2901656 - DNA, 25 bp, Homo sapien
tggtttgctcctgcatagaagttga

SEQ ID NO: 2901657 - DNA, 25 bp, Homo sapien
gaaaccatgaaggacactcaggtga

SEQ ID NO: 2901658 - DNA, 25 bp, Homo sapien
gggagagacaggtgaattacacaga

SEQ ID NO: 2901659 - DNA, 25 bp, Homo sapien
ttacacagaaaccatgaaggacact

SEQ ID NO: 2901660 - DNA, 25 bp, Homo sapien
catgaaggacactcaggtgagccac

SEQ ID NO: 2901661 - DNA, 25 bp, Homo sapien
ccccttgtttctatggtgatggggc

SEQ ID NO: 2901662 - DNA, 25 bp, Homo sapien
cccttgtttctatggtgatggggcc

SEQ ID NO: 2901663 - DNA, 25 bp, Homo sapien
ccttgtttctatggtgatggggcct

SEQ ID NO: 2901664 - DNA, 25 bp, Homo sapien
gggccctcggagttcaagctacagt

SEQ ID NO: 2901665 - DNA, 25 bp, Homo sapien
caaggacaacgaactggtggcagat

SEQ ID NO: 2901666 - DNA, 25 bp, Homo sapien
tacggacaatctgggaatgaaggag

SEQ ID NO: 2901667 - DNA, 25 bp, Homo sapien
aagctacagtggagcccaaaagccc

SEQ ID NO: 2901668 - DNA, 25 bp, Homo sapien
aagaagagatacatgattaagggtt

SEQ ID NO: 2901669 - DNA, 25 bp, Homo sapien
catgattaagggttgaataggaagc

SEQ ID NO: 2901670 - DNA, 25 bp, Homo sapien
gatacatgattaagggttgaatagg

SEQ ID NO: 2901671 - DNA, 25 bp, Homo sapien
gattaagggttgaataggaagcaag

SEQ ID NO: 2901672 - DNA, 25 bp, Homo sapien
tgaaggctgctaatggcacgaaagc

SEQ ID NO: 2901673 - DNA, 25 bp, Homo sapien
gctaatggcacgaaagcctcctact

SEQ ID NO: 2901674 - DNA, 25 bp, Homo sapien
tctaggaactcctgaaggctgctaa

SEQ ID NO: 2901675 - DNA, 25 bp, Homo sapien
tctgtccctgtcatcattctaggaa

SEQ ID NO: 2901676 - DNA, 25 bp, Homo sapien
gggaacatgacgaagttgccgagat

SEQ ID NO: 2901677 - DNA, 25 bp, Homo sapien
catagtaggggaagtacatgaggtc

SEQ ID NO: 2901678 - DNA, 25 bp, Homo sapien
acatgaggtcgatgttgccgttggc

SEQ ID NO: 2901679 - DNA, 25 bp, Homo sapien
gaagttgccgagattctcagcatct

SEQ ID NO: 2901680 - DNA, 25 bp, Homo sapien
tgttgatgcggagtttgaaggccac

SEQ ID NO: 2901681 - DNA, 25 bp, Homo sapien
acgcggccggcgaacttgtctcgct

SEQ ID NO: 2901682 - DNA, 25 bp, Homo sapien
tgttggcggcgttgatgcgacattc

SEQ ID NO: 2901683 - DNA, 25 bp, Homo sapien
ctcatcgtctgtggcgatgttggcg

SEQ ID NO: 2901684 - DNA, 25 bp, Homo sapien
taaattcaaagtcaccaagatggcg

SEQ ID NO: 2901685 - DNA, 25 bp, Homo sapien
gctatttgggtgacagaacggccta

SEQ ID NO: 2901686 - DNA, 25 bp, Homo sapien
gaatagtcccaaagccagccgatgt

SEQ ID NO: 2901687 - DNA, 25 bp, Homo sapien
ggatattcagcctaggtcaaccccg

SEQ ID NO: 2901688 - DNA, 25 bp, Homo sapien
tttcactgtgtcgccaggctagcct

SEQ ID NO: 2901689 - DNA, 25 bp, Homo sapien
tcactgtgtcgccaggctagcctcg

SEQ ID NO: 2901690 - DNA, 25 bp, Homo sapien
gatttcactgtgtcgccaggctagc

SEQ ID NO: 2901691 - DNA, 25 bp, Homo sapien
aggatttcactgtgtcgccaggcta

SEQ ID NO: 2901692 - DNA, 25 bp, Homo sapien
ttgcactccagcctggacgagagca

SEQ ID NO: 2901693 - DNA, 25 bp, Homo sapien
tgcactccagcctggacgagagcaa

SEQ ID NO: 2901694 - DNA, 25 bp, Homo sapien
cactccagcctggacgagagcaaaa

SEQ ID NO: 2901695 - DNA, 25 bp, Homo sapien
ctccagcctggacgagagcaaaact

SEQ ID NO: 2901696 - DNA, 25 bp, Homo sapien
ccgagccggttcttcctggtaggag

SEQ ID NO: 2901697 - DNA, 25 bp, Homo sapien
cattccagttccagacgcaggctga

SEQ ID NO: 2901698 - DNA, 25 bp, Homo sapien
tgttatctagctttgggctaggcca

SEQ ID NO: 2901699 - DNA, 25 bp, Homo sapien
ggtaggaggcggaactcgaattcat

SEQ ID NO: 2901700 - DNA, 25 bp, Homo sapien
tattttagagcccatggcatcctag

SEQ ID NO: 2901701 - DNA, 25 bp, Homo sapien
tgcacaaagcattgaggtctgagac

SEQ ID NO: 2901702 - DNA, 25 bp, Homo sapien
cgaggaggaccgtcgcaatctgaga

SEQ ID NO: 2901703 - DNA, 25 bp, Homo sapien
aaatccaattgaaggctgtcagtcg

SEQ ID NO: 2901704 - DNA, 25 bp, Homo sapien
gggatgttaggaccatccgaactca

SEQ ID NO: 2901705 - DNA, 25 bp, Homo sapien
ttgagccggcctaaagcgtacttct

SEQ ID NO: 2901706 - DNA, 25 bp, Homo sapien
tctttgcacatccacccggtgctgg

SEQ ID NO: 2901707 - DNA, 25 bp, Homo sapien
aagttgaacgcctaggcagaggagt

SEQ ID NO: 2901708 - DNA, 25 bp, Homo sapien
taagctcctgactgaacttgatgag

SEQ ID NO: 2901709 - DNA, 25 bp, Homo sapien
ttttcagctcgggaaaatcgctggg

SEQ ID NO: 2901710 - DNA, 25 bp, Homo sapien
gacggtgacacgcttccctggattg

SEQ ID NO: 2901711 - DNA, 25 bp, Homo sapien
gaagcttggctagagggatcatcat

SEQ ID NO: 2901712 - DNA, 25 bp, Homo sapien
gggttttcccctcccatgtgctcaa

SEQ ID NO: 2901713 - DNA, 25 bp, Homo sapien
tgtgctcaagactggcgctaaaagt

SEQ ID NO: 2901714 - DNA, 25 bp, Homo sapien
tcatggcgactgtccagctttgtgc

SEQ ID NO: 2901715 - DNA, 25 bp, Homo sapien
tggcgctaaaagttttgagcttctc

SEQ ID NO: 2901716 - DNA, 25 bp, Homo sapien
tgttagtatctacggcaccaggtcg

SEQ ID NO: 2901717 - DNA, 25 bp, Homo sapien
ctgtgttccttagcaccgcgggtcg

SEQ ID NO: 2901718 - DNA, 25 bp, Homo sapien
gagtcccgcggtaattcttaaagca

SEQ ID NO: 2901719 - DNA, 25 bp, Homo sapien
tgctgtcgcgggatttcggtccacc

SEQ ID NO: 2901720 - DNA, 25 bp, Homo sapien
atggcttcgaagttctcagggatcc

SEQ ID NO: 2901721 - DNA, 25 bp, Homo sapien
ggaagcacagcggagattagcctca

SEQ ID NO: 2901722 - DNA, 25 bp, Homo sapien
acagcggagattagcctcagccagg

SEQ ID NO: 2901723 - DNA, 25 bp, Homo sapien
tccgacgcagagctaaagaaaccca

SEQ ID NO: 2901724 - DNA, 25 bp, Homo sapien
cccctttcgggaggcggtggcatca

SEQ ID NO: 2901725 - DNA, 25 bp, Homo sapien
tgaaggacagcagtccggagctaac

SEQ ID NO: 2901726 - DNA, 25 bp, Homo sapien
ggtggcatcagttcagagtccgcat

SEQ ID NO: 2901727 - DNA, 25 bp, Homo sapien
cggagctaacggttgagtctccaaa

SEQ ID NO: 2901728 - DNA, 25 bp, Homo sapien
cctcccgtagctcctgggacacagc

SEQ ID NO: 2901729 - DNA, 25 bp, Homo sapien
tccccctcccgtagctcctgggaca

SEQ ID NO: 2901730 - DNA, 25 bp, Homo sapien
cccctcccgtagctcctgggacaca

SEQ ID NO: 2901731 - DNA, 25 bp, Homo sapien
tcccgtagctcctgggacacagctg

SEQ ID NO: 2901732 - DNA, 25 bp, Homo sapien
tggcccgttcgcttcttcttcagaa

SEQ ID NO: 2901733 - DNA, 25 bp, Homo sapien
tctgcagcgggttccccagaggtat

SEQ ID NO: 2901734 - DNA, 25 bp, Homo sapien
cagaggtatcttccatggcttttcc

SEQ ID NO: 2901735 - DNA, 25 bp, Homo sapien
aaagttcttgctcctcgattcgagg

SEQ ID NO: 2901736 - DNA, 25 bp, Homo sapien
aggaaccactgagaaatcgaggcag

SEQ ID NO: 2901737 - DNA, 25 bp, Homo sapien
cacttacagcctttcaagaagttct

SEQ ID NO: 2901738 - DNA, 25 bp, Homo sapien
ttacagcctttcaagaagttctcag

SEQ ID NO: 2901739 - DNA, 25 bp, Homo sapien
aggttgggtgctgaactctgaccag

SEQ ID NO: 2901740 - DNA, 25 bp, Homo sapien
taaattcgcaagatgttatcagcac

SEQ ID NO: 2901741 - DNA, 25 bp, Homo sapien
tcagcactattggtcaagatgcagg

SEQ ID NO: 2901742 - DNA, 25 bp, Homo sapien
gggcaggttataaattcgcaagatg

SEQ ID NO: 2901743 - DNA, 25 bp, Homo sapien
tcaagatgcaggaaccgtcaggagc

SEQ ID NO: 2901744 - DNA, 25 bp, Homo sapien
tcagtagtcaatcaataaatagcta

SEQ ID NO: 2901745 - DNA, 25 bp, Homo sapien
cagtgactaacatatatcagtagtc

SEQ ID NO: 2901746 - DNA, 25 bp, Homo sapien
cagtagtcaatcaataaatagctat

SEQ ID NO: 2901747 - DNA, 25 bp, Homo sapien
actaacatatatcagtagtcaatca

SEQ ID NO: 2901748 - DNA, 25 bp, Homo sapien
gcagtaatcatagatggtatcacct

SEQ ID NO: 2901749 - DNA, 25 bp, Homo sapien
gaggacatcagagaataccagcagt

SEQ ID NO: 2901750 - DNA, 25 bp, Homo sapien
cttccaccattcgaaggacagggac

SEQ ID NO: 2901751 - DNA, 25 bp, Homo sapien
tggtatcaccttccaccattcgaag

SEQ ID NO: 2901752 - DNA, 25 bp, Homo sapien
tggctcatgcctgtaatccaagcac

SEQ ID NO: 2901753 - DNA, 25 bp, Homo sapien
ttcaggaggccaaggcaggtggatc

SEQ ID NO: 2901754 - DNA, 25 bp, Homo sapien
tctatgaaaaatacacaattagctg

SEQ ID NO: 2901755 - DNA, 25 bp, Homo sapien
aatacaaaaatgaggctgggtgtgg

SEQ ID NO: 2901756 - DNA, 25 bp, Homo sapien
agacatggacactgaaaccccggtg

SEQ ID NO: 2901757 - DNA, 25 bp, Homo sapien
tatgaatcgggttctcccggctgct

SEQ ID NO: 2901758 - DNA, 25 bp, Homo sapien
gctctccagtgaatgcgtcccagat

SEQ ID NO: 2901759 - DNA, 25 bp, Homo sapien
ttgtaggcgcgaaaggaagcccgga

SEQ ID NO: 2901760 - DNA, 25 bp, Homo sapien
tgaatgcgtcccagatatgaatcgg

SEQ ID NO: 2901761 - DNA, 25 bp, Homo sapien
aaatgtggctcggacctcgcagtct

SEQ ID NO: 2901762 - DNA, 25 bp, Homo sapien
gcagtctcggccaggccgggccgtg

SEQ ID NO: 2901763 - DNA, 25 bp, Homo sapien
gaaaaaacacgcacagtccggttga

SEQ ID NO: 2901764 - DNA, 25 bp, Homo sapien
gagcgaatgggctgccgtcagctca

SEQ ID NO: 2901765 - DNA, 25 bp, Homo sapien
cctacaggaaaacggaatcagcttt

SEQ ID NO: 2901766 - DNA, 25 bp, Homo sapien
taaccaggctaagcagaggtctgtc

SEQ ID NO: 2901767 - DNA, 25 bp, Homo sapien
gatgcaagttgaaggcctacaggaa

SEQ ID NO: 2901768 - DNA, 25 bp, Homo sapien
ggcaatggctcctggcactaaccag

SEQ ID NO: 2901769 - DNA, 25 bp, Homo sapien
tatgcaggagatgatgccgctctgg

SEQ ID NO: 2901770 - DNA, 25 bp, Homo sapien
cttgcgggctcctgagaagaagcgg

SEQ ID NO: 2901771 - DNA, 25 bp, Homo sapien
agaagcggttgccatcgggatgaaa

SEQ ID NO: 2901772 - DNA, 25 bp, Homo sapien
aaggctatgcaggagatgatgccgc

SEQ ID NO: 2901773 - DNA, 25 bp, Homo sapien
tgggtaaccagactgccggagatcc

SEQ ID NO: 2901774 - DNA, 25 bp, Homo sapien
ttggtggtcacctctcgacccaggg

SEQ ID NO: 2901775 - DNA, 25 bp, Homo sapien
aagtagatgcgctgattggtggtca

SEQ ID NO: 2901776 - DNA, 25 bp, Homo sapien
accacagtgggtaaccagactgccg

SEQ ID NO: 2901777 - DNA, 25 bp, Homo sapien
tcctaggcttatcagggccctgtgt

SEQ ID NO: 2901778 - DNA, 25 bp, Homo sapien
gggctctggcattcctaggcttatc

SEQ ID NO: 2901779 - DNA, 25 bp, Homo sapien
ttatcagggccctgtgtaggaagga

SEQ ID NO: 2901780 - DNA, 25 bp, Homo sapien
cctgtgtaggaaggagtcacagcca

SEQ ID NO: 2901781 - DNA, 25 bp, Homo sapien
ctcacacccagggactgggacccta

SEQ ID NO: 2901782 - DNA, 25 bp, Homo sapien
agatttgctggcagaggcctcaccc

SEQ ID NO: 2901783 - DNA, 25 bp, Homo sapien
gagagatttgctggcagaggcctca

SEQ ID NO: 2901784 - DNA, 25 bp, Homo sapien
gagaggagagatttgctggcagagg

SEQ ID NO: 2901785 - DNA, 25 bp, Homo sapien
agacagccccgctcgtgctgccact

SEQ ID NO: 2901786 - DNA, 25 bp, Homo sapien
gtgctgccactcactaggaactgcc

SEQ ID NO: 2901787 - DNA, 25 bp, Homo sapien
tgccactcactaggaactgcccggt

SEQ ID NO: 2901788 - DNA, 25 bp, Homo sapien
cgctcgtgctgccactcactaggaa

SEQ ID NO: 2901789 - DNA, 25 bp, Homo sapien
catcattgccaggcccgtccgtgtc

SEQ ID NO: 2901790 - DNA, 25 bp, Homo sapien
ccatcattgccaggcccgtccgtgt

SEQ ID NO: 2901791 - DNA, 25 bp, Homo sapien
gccattggtgcagtccttctggggc

SEQ ID NO: 2901792 - DNA, 25 bp, Homo sapien
attggtgcagtccttctggggcaga

SEQ ID NO: 2901793 - DNA, 25 bp, Homo sapien
gggagggtctatcagtgccttcagt

SEQ ID NO: 2901794 - DNA, 25 bp, Homo sapien
gagggtctatcagtgccttcagtga

SEQ ID NO: 2901795 - DNA, 25 bp, Homo sapien
agggtctatcagtgccttcagtgag

SEQ ID NO: 2901796 - DNA, 25 bp, Homo sapien
ggagggtctatcagtgccttcagtg

SEQ ID NO: 2901797 - DNA, 25 bp, Homo sapien
gcagtggccaggagaggcaggctag

SEQ ID NO: 2901798 - DNA, 25 bp, Homo sapien
ccaggagaggcaggctagggtgcag

SEQ ID NO: 2901799 - DNA, 25 bp, Homo sapien
tgaccggaggcagtggccaggagag

SEQ ID NO: 2901800 - DNA, 25 bp, Homo sapien
ctgaccggaggcagtggccaggaga

SEQ ID NO: 2901801 - DNA, 25 bp, Homo sapien
agagctgaagccgacattcaaggtg

SEQ ID NO: 2901802 - DNA, 25 bp, Homo sapien
ccgacattcaaggtggacgtggcgc

SEQ ID NO: 2901803 - DNA, 25 bp, Homo sapien
aagccgacattcaaggtggacgtgg

SEQ ID NO: 2901804 - DNA, 25 bp, Homo sapien
gctgaagccgacattcaaggtggac

SEQ ID NO: 2901805 - DNA, 25 bp, Homo sapien
tttctcgccctggtgatcatcaggg

SEQ ID NO: 2901806 - DNA, 25 bp, Homo sapien
ggatgctggagtctggcgccccccc

SEQ ID NO: 2901807 - DNA, 25 bp, Homo sapien
ctttctcgccctggtgatcatcagg

SEQ ID NO: 2901808 - DNA, 25 bp, Homo sapien
gctggagtctggcgcccccccacac

SEQ ID NO: 2901809 - DNA, 25 bp, Homo sapien
ctacaaccccaaaccggcgctgcgc

SEQ ID NO: 2901810 - DNA, 25 bp, Homo sapien
acaaccccaaaccggcgctgcgcag

SEQ ID NO: 2901811 - DNA, 25 bp, Homo sapien
tacaaccccaaaccggcgctgcgca

SEQ ID NO: 2901812 - DNA, 25 bp, Homo sapien
aaccccaaaccggcgctgcgcagga

SEQ ID NO: 2901813 - DNA, 25 bp, Homo sapien
cgggatctgtgagcccgcctaagtg

SEQ ID NO: 2901814 - DNA, 25 bp, Homo sapien
gctggagctcgaggcggagcgggcg

SEQ ID NO: 2901815 - DNA, 25 bp, Homo sapien
ggattgagggcagcgggctaaggga

SEQ ID NO: 2901816 - DNA, 25 bp, Homo sapien
cggaccaccccggtagctgatgccc

SEQ ID NO: 2901817 - DNA, 25 bp, Homo sapien
ctcttattcgccgagttccagtaga

SEQ ID NO: 2901818 - DNA, 25 bp, Homo sapien
tcgccgagttccagtagacaggctc

SEQ ID NO: 2901819 - DNA, 25 bp, Homo sapien
gccgagttccagtagacaggctcca

SEQ ID NO: 2901820 - DNA, 25 bp, Homo sapien
tattcgccgagttccagtagacagg

SEQ ID NO: 2901821 - DNA, 25 bp, Homo sapien
gccatggcaacaggatgccagttac

SEQ ID NO: 2901822 - DNA, 25 bp, Homo sapien
cagttaccaaggagctggcctctct

SEQ ID NO: 2901823 - DNA, 25 bp, Homo sapien
tgcacaccgccatctcccgctccat

SEQ ID NO: 2901824 - DNA, 25 bp, Homo sapien
gccatctcccgctccatcaccagcc

SEQ ID NO: 2901825 - DNA, 25 bp, Homo sapien
taatcgtggtgcgagcggaactcgt

SEQ ID NO: 2901826 - DNA, 25 bp, Homo sapien
ggagatccaggtctgggcgatcaca

SEQ ID NO: 2901827 - DNA, 25 bp, Homo sapien
tagccggtccccgatctgagggtac

SEQ ID NO: 2901828 - DNA, 25 bp, Homo sapien
gagattagggctatactcctggaac

SEQ ID NO: 2901829 - DNA, 25 bp, Homo sapien
cctggtgtgaacactgcctgagggc

SEQ ID NO: 2901830 - DNA, 25 bp, Homo sapien
gatctccctcttggctgcaggggtc

SEQ ID NO: 2901831 - DNA, 25 bp, Homo sapien
ggtgtgaacactgcctgagggcact

SEQ ID NO: 2901832 - DNA, 25 bp, Homo sapien
ccactcaatcgtgccctctgcccag

SEQ ID NO: 2901833 - DNA, 25 bp, Homo sapien
ctctccaggccctcccgggtcccat

SEQ ID NO: 2901834 - DNA, 25 bp, Homo sapien
ccctcccgggtcccatccgatgtgg

SEQ ID NO: 2901835 - DNA, 25 bp, Homo sapien
tctccaggccctcccgggtcccatc

SEQ ID NO: 2901836 - DNA, 25 bp, Homo sapien
caggccctcccgggtcccatccgat

SEQ ID NO: 2901837 - DNA, 25 bp, Homo sapien
tcccactcggagaagcaccttcatg

SEQ ID NO: 2901838 - DNA, 25 bp, Homo sapien
cactcggagaagcaccttcatgcct

SEQ ID NO: 2901839 - DNA, 25 bp, Homo sapien
tttgtcccactcggagaagcacctt

SEQ ID NO: 2901840 - DNA, 25 bp, Homo sapien
ttgtcccactcggagaagcaccttc

SEQ ID NO: 2901841 - DNA, 25 bp, Homo sapien
tctttccatgggcatttcagacaca

SEQ ID NO: 2901842 - DNA, 25 bp, Homo sapien
tcggtctctttccatgggcatttca

SEQ ID NO: 2901843 - DNA, 25 bp, Homo sapien
cctcggtctctttccatgggcattt

SEQ ID NO: 2901844 - DNA, 25 bp, Homo sapien
cccctcggtctctttccatgggcat

SEQ ID NO: 2901845 - DNA, 25 bp, Homo sapien
tggcagggaaggggtgaaggaggaa

SEQ ID NO: 2901846 - DNA, 25 bp, Homo sapien
ctggcagggaaggggtgaaggagga

SEQ ID NO: 2901847 - DNA, 25 bp, Homo sapien
ccaccccgcagagctatccctagct

SEQ ID NO: 2901848 - DNA, 25 bp, Homo sapien
caccccgggaggttgcattgctggt

SEQ ID NO: 2901849 - DNA, 25 bp, Homo sapien
tggcgactctccgaaggcttggccc

SEQ ID NO: 2901850 - DNA, 25 bp, Homo sapien
accagggtggcgactctccgaaggc

SEQ ID NO: 2901851 - DNA, 25 bp, Homo sapien
ctgcacgatatacacaggatgccca

SEQ ID NO: 2901852 - DNA, 25 bp, Homo sapien
gggcccatcctgcacgatatacaca

SEQ ID NO: 2901853 - DNA, 25 bp, Homo sapien
acaggatgcccatagtcaccactca

SEQ ID NO: 2901854 - DNA, 25 bp, Homo sapien
tcctgcacgatatacacaggatgcc

SEQ ID NO: 2901855 - DNA, 25 bp, Homo sapien
tcaggatagccacgtgagaggagcc

SEQ ID NO: 2901856 - DNA, 25 bp, Homo sapien
agtaagtatgtagaggcctgggcca

SEQ ID NO: 2901857 - DNA, 25 bp, Homo sapien
tattggccactggacaaaacgggac

SEQ ID NO: 2901858 - DNA, 25 bp, Homo sapien
gaggtgtccctcaaaccaggaatta

SEQ ID NO: 2901859 - DNA, 25 bp, Homo sapien
ttcctgtttcagaagtgctacttcc

SEQ ID NO: 2901860 - DNA, 25 bp, Homo sapien
aggccatttctgtccgggcctggtc

SEQ ID NO: 2901861 - DNA, 25 bp, Homo sapien
tccacagaataagaaccatccacct

SEQ ID NO: 2901862 - DNA, 25 bp, Homo sapien
acttggagttccagccagaccactt

SEQ ID NO: 2901863 - DNA, 25 bp, Homo sapien
gaacaagacaaattaggcctgccac

SEQ ID NO: 2901864 - DNA, 25 bp, Homo sapien
gaaacagtggcctttgctaagtacc

SEQ ID NO: 2901865 - DNA, 25 bp, Homo sapien
gattgaggtggccaacctggtgccc

SEQ ID NO: 2901866 - DNA, 25 bp, Homo sapien
gttactcgggagagcacatgggttc

SEQ ID NO: 2901867 - DNA, 25 bp, Homo sapien
cccgccaccatggcaatatcaactt

SEQ ID NO: 2901868 - DNA, 25 bp, Homo sapien
ccgccaccatggcaatatcaacttc

SEQ ID NO: 2901869 - DNA, 25 bp, Homo sapien
tacagtaaaactactgaggtgacgg

SEQ ID NO: 2901870 - DNA, 25 bp, Homo sapien
cagtaaaactactgaggtgacggca

SEQ ID NO: 2901871 - DNA, 25 bp, Homo sapien
tttacagtaaaactactgaggtgac

SEQ ID NO: 2901872 - DNA, 25 bp, Homo sapien
taaaactactgaggtgacggcatac

SEQ ID NO: 2901873 - DNA, 25 bp, Homo sapien
ccagccactggggttgcggtgcctg

SEQ ID NO: 2901874 - DNA, 25 bp, Homo sapien
gttgcggtgcctgagtttctgatgg

SEQ ID NO: 2901875 - DNA, 25 bp, Homo sapien
cccgccagccactggggttgcggtg

SEQ ID NO: 2901876 - DNA, 25 bp, Homo sapien
actggggttgcggtgcctgagtttc

SEQ ID NO: 2901877 - DNA, 25 bp, Homo sapien
cggcctgctgtccggatcattcatc

SEQ ID NO: 2901878 - DNA, 25 bp, Homo sapien
cggatcattcatcagagacagaggc

SEQ ID NO: 2901879 - DNA, 25 bp, Homo sapien
ggcctgctgtccggatcattcatca

SEQ ID NO: 2901880 - DNA, 25 bp, Homo sapien
gtgccgggaggagctttggggagac

SEQ ID NO: 2901881 - DNA, 25 bp, Homo sapien
tggtgccgggaggagctttggggag

SEQ ID NO: 2901882 - DNA, 25 bp, Homo sapien
ctggtgccgggaggagctttgggga

SEQ ID NO: 2901883 - DNA, 25 bp, Homo sapien
ggtgccgggaggagctttggggaga

SEQ ID NO: 2901884 - DNA, 25 bp, Homo sapien
ccaggccggcgagggatattcgcga

SEQ ID NO: 2901885 - DNA, 25 bp, Homo sapien
gtagaaggcgttccaggatttccag

SEQ ID NO: 2901886 - DNA, 25 bp, Homo sapien
tctgtgcgccccagccggaacgggt

SEQ ID NO: 2901887 - DNA, 25 bp, Homo sapien
tgcagctggatccgggggaaaaacc

SEQ ID NO: 2901888 - DNA, 25 bp, Homo sapien
ccagggcttgaaggctccgggacta

SEQ ID NO: 2901889 - DNA, 25 bp, Homo sapien
accgccccgcaggacattgaaaagg

SEQ ID NO: 2901890 - DNA, 25 bp, Homo sapien
actctaagaagttgcccctcgcagc

SEQ ID NO: 2901891 - DNA, 25 bp, Homo sapien
gtagccacatctggcgagccgaagg

SEQ ID NO: 2901892 - DNA, 25 bp, Homo sapien
caaactagagcctgaggcgcatgca

SEQ ID NO: 2901893 - DNA, 25 bp, Homo sapien
gctgcgctttcctgcctcaaactag

SEQ ID NO: 2901894 - DNA, 25 bp, Homo sapien
tctagtactaggaaataccgcaggg

SEQ ID NO: 2901895 - DNA, 25 bp, Homo sapien
gcagctggtatccttaaactggtta

SEQ ID NO: 2901896 - DNA, 25 bp, Homo sapien
caaacttgaaggatttgtactttgc

SEQ ID NO: 2901897 - DNA, 25 bp, Homo sapien
gatttgtactttgctccaaggaaaa

SEQ ID NO: 2901898 - DNA, 25 bp, Homo sapien
acaggcattgatctcaggttatgaa

SEQ ID NO: 2901899 - DNA, 25 bp, Homo sapien
atttcaaacttgaaggatttgtact

SEQ ID NO: 2901900 - DNA, 25 bp, Homo sapien
caaaatgccctgagaacagattgga

SEQ ID NO: 2901901 - DNA, 25 bp, Homo sapien
gaaggtcacagtggtgcctctctca

SEQ ID NO: 2901902 - DNA, 25 bp, Homo sapien
cgcaaagtctgaggcgctgggcact

SEQ ID NO: 2901903 - DNA, 25 bp, Homo sapien
gctcagaatcccaggcgcaaagtct

SEQ ID NO: 2901904 - DNA, 25 bp, Homo sapien
gaggtctcttagcagagttggctga

SEQ ID NO: 2901905 - DNA, 25 bp, Homo sapien
tggctgaggaactctgtgctaatgg

SEQ ID NO: 2901906 - DNA, 25 bp, Homo sapien
gtctatcgctttgaagtcctgaggg

SEQ ID NO: 2901907 - DNA, 25 bp, Homo sapien
actgttttgtgtgtactgaggtctc

SEQ ID NO: 2901908 - DNA, 25 bp, Homo sapien
tggctcactgacagccggggcattc

SEQ ID NO: 2901909 - DNA, 25 bp, Homo sapien
agctctggctcactgacagccgggg

SEQ ID NO: 2901910 - DNA, 25 bp, Homo sapien
gagtggcccgccctgaccagcttgc

SEQ ID NO: 2901911 - DNA, 25 bp, Homo sapien
ttcctcggccactcaatcgctgctt

SEQ ID NO: 2901912 - DNA, 25 bp, Homo sapien
gcttgaggtccctccaaccgtggct

SEQ ID NO: 2901913 - DNA, 25 bp, Homo sapien
tgtgcttgaggtccctccaaccgtg

SEQ ID NO: 2901914 - DNA, 25 bp, Homo sapien
ctgcctcgggctccactgattcttc

SEQ ID NO: 2901915 - DNA, 25 bp, Homo sapien
tctgtgcttgaggtccctccaaccg

SEQ ID NO: 2901916 - DNA, 25 bp, Homo sapien
caaaacaagggtcaatgaagatggt

SEQ ID NO: 2901917 - DNA, 25 bp, Homo sapien
atggattctgtagggtcctgggcaa

SEQ ID NO: 2901918 - DNA, 25 bp, Homo sapien
cagctctagcttcagcccaaaacaa

SEQ ID NO: 2901919 - DNA, 25 bp, Homo sapien
tcctgggcaaagtgttccagaatgg

SEQ ID NO: 2901920 - DNA, 25 bp, Homo sapien
aagaacttgtgcagatgagaagcaa

SEQ ID NO: 2901921 - DNA, 25 bp, Homo sapien
tgcacagttgcctcgaagttctccc

SEQ ID NO: 2901922 - DNA, 25 bp, Homo sapien
tgaagtagacaagctggttctgggt

SEQ ID NO: 2901923 - DNA, 25 bp, Homo sapien
ctggtgcttggcgaatgaagtagac

SEQ ID NO: 2901924 - DNA, 25 bp, Homo sapien
tgcccctccagtttgtaccgagtgt

SEQ ID NO: 2901925 - DNA, 25 bp, Homo sapien
tctctagccgttgcaccagctcttt

SEQ ID NO: 2901926 - DNA, 25 bp, Homo sapien
cagggatgtagaggaccgtgtgccc

SEQ ID NO: 2901927 - DNA, 25 bp, Homo sapien
gaccgtgtgcccctccagtttgtac

SEQ ID NO: 2901928 - DNA, 25 bp, Homo sapien
tgcaggatggattcaacgtgcttca

SEQ ID NO: 2901929 - DNA, 25 bp, Homo sapien
catgcatcggttgcgccagaactca

SEQ ID NO: 2901930 - DNA, 25 bp, Homo sapien
ccagtttcataaagggcgccaagta

SEQ ID NO: 2901931 - DNA, 25 bp, Homo sapien
caagtaggacgacttggcaaggtgc

SEQ ID NO: 2901932 - DNA, 25 bp, Homo sapien
gtttgactgtgcttgacgagagcca

SEQ ID NO: 2901933 - DNA, 25 bp, Homo sapien
gatgagactgatcagcttagggagc

SEQ ID NO: 2901934 - DNA, 25 bp, Homo sapien
gagagttgacccagatgatgcggat

SEQ ID NO: 2901935 - DNA, 25 bp, Homo sapien
tcatgaaagccaactcctggtaagg

SEQ ID NO: 2901936 - DNA, 25 bp, Homo sapien
caaagatccggtccagggagatggc

SEQ ID NO: 2901937 - DNA, 25 bp, Homo sapien
cgtggcagcataagcggatgatctc

SEQ ID NO: 2901938 - DNA, 25 bp, Homo sapien
ggtcctccttgctggaagagacata

SEQ ID NO: 2901939 - DNA, 25 bp, Homo sapien
tgatctttccaagcgtgacaacaga

SEQ ID NO: 2901940 - DNA, 25 bp, Homo sapien
ggatgttaggggaggcgtatcatac

SEQ ID NO: 2901941 - DNA, 25 bp, Homo sapien
ctgacaagggagttgagacatggga

SEQ ID NO: 2901942 - DNA, 25 bp, Homo sapien
caagggagttgagacatgggatgtt

SEQ ID NO: 2901943 - DNA, 25 bp, Homo sapien
gggctgacaagggagttgagacatg

SEQ ID NO: 2901944 - DNA, 25 bp, Homo sapien
ctgagcaaagatgctggtctgatct

SEQ ID NO: 2901945 - DNA, 25 bp, Homo sapien
tggtctgatctaggacccagccccg

SEQ ID NO: 2901946 - DNA, 25 bp, Homo sapien
aaaggcatcaacctgagcaaagatg

SEQ ID NO: 2901947 - DNA, 25 bp, Homo sapien
atctaggacccagccccgactggag

SEQ ID NO: 2901948 - DNA, 25 bp, Homo sapien
gaacggctcgcagcgtgtgcagatt

SEQ ID NO: 2901949 - DNA, 25 bp, Homo sapien
gcaagttccgtgttatctgtggccc

SEQ ID NO: 2901950 - DNA, 25 bp, Homo sapien
ttgccatcttcccagcgggcgaagt

SEQ ID NO: 2901951 - DNA, 25 bp, Homo sapien
tatgaaagatgtcctcaatctccag

SEQ ID NO: 2901952 - DNA, 25 bp, Homo sapien
ccaggtccttgattccggcacggaa

SEQ ID NO: 2901953 - DNA, 25 bp, Homo sapien
gcaagcctgtggaaggtgtccagca

SEQ ID NO: 2901954 - DNA, 25 bp, Homo sapien
gtcccgcaccaactcgaaggctgag

SEQ ID NO: 2901955 - DNA, 25 bp, Homo sapien
tccagcagaagcacgccgtgcggca

SEQ ID NO: 2901956 - DNA, 25 bp, Homo sapien
aagaggcgcccgaatgctggacatg

SEQ ID NO: 2901957 - DNA, 25 bp, Homo sapien
cccgctgcgggagtcacactcccgg

SEQ ID NO: 2901958 - DNA, 25 bp, Homo sapien
cagaggaaagctgcaccccgctgcg

SEQ ID NO: 2901959 - DNA, 25 bp, Homo sapien
tccggtcactcatcccagaggaaag

SEQ ID NO: 2901960 - DNA, 25 bp, Homo sapien
tgactctgtcgatgcgacgccggag

SEQ ID NO: 2901961 - DNA, 25 bp, Homo sapien
aatactgggccacgtagggctccag

SEQ ID NO: 2901962 - DNA, 25 bp, Homo sapien
ccagggccagctcgctattgaacag

SEQ ID NO: 2901963 - DNA, 25 bp, Homo sapien
gcatgtagagatccaccgccttctt

SEQ ID NO: 2901964 - DNA, 25 bp, Homo sapien
gaatgcaatccttgtccagacttga

SEQ ID NO: 2901965 - DNA, 25 bp, Homo sapien
tctcctggctgattcgcagcaatgg

SEQ ID NO: 2901966 - DNA, 25 bp, Homo sapien
cagacttgatgtccactcttggaag

SEQ ID NO: 2901967 - DNA, 25 bp, Homo sapien
catctgctgataggtgtgcacactc

SEQ ID NO: 2901968 - DNA, 25 bp, Homo sapien
aaagatgggagtgaaattcttggga

SEQ ID NO: 2901969 - DNA, 25 bp, Homo sapien
tagcaaacatattgtatgagaaaga

SEQ ID NO: 2901970 - DNA, 25 bp, Homo sapien
tcaaaagatgggagtgaaattcttg

SEQ ID NO: 2901971 - DNA, 25 bp, Homo sapien
aagtaaaatgacgatagcaaacata

SEQ ID NO: 2901972 - DNA, 25 bp, Homo sapien
gctgtagaagaaggcatggtctgac

SEQ ID NO: 2901973 - DNA, 25 bp, Homo sapien
ggtgacttagctgagccattatggc

SEQ ID NO: 2901974 - DNA, 25 bp, Homo sapien
catctagtggcagaacagcgacatc

SEQ ID NO: 2901975 - DNA, 25 bp, Homo sapien
caccaacagtcaggaaagggacagg

SEQ ID NO: 2901976 - DNA, 25 bp, Homo sapien
tggaatattatacaagaatctgaaa

SEQ ID NO: 2901977 - DNA, 25 bp, Homo sapien
cactgactgtcttcagagtgaaact

SEQ ID NO: 2901978 - DNA, 25 bp, Homo sapien
tgtcttcagagtgaaactgggtccc

SEQ ID NO: 2901979 - DNA, 25 bp, Homo sapien
tgaaacactgactgtcttcagagtg

SEQ ID NO: 2901980 - DNA, 25 bp, Homo sapien
gctccacacagggtgataatacagc

SEQ ID NO: 2901981 - DNA, 25 bp, Homo sapien
aattgagtggttagagcccagagcg

SEQ ID NO: 2901982 - DNA, 25 bp, Homo sapien
gcagtagaggtagaaaggaaagcca

SEQ ID NO: 2901983 - DNA, 25 bp, Homo sapien
tatctccaaacaagtggtcaggcag

SEQ ID NO: 2901984 - DNA, 25 bp, Homo sapien
gaatgatgttcagtctttaactgaa

SEQ ID NO: 2901985 - DNA, 25 bp, Homo sapien
ttcattgacaaatatcagtttttct

SEQ ID NO: 2901986 - DNA, 25 bp, Homo sapien
cagtctttaactgaagtttgtcaag

SEQ ID NO: 2901987 - DNA, 25 bp, Homo sapien
gtttgtcaagaaatttccagaatgc

SEQ ID NO: 2901988 - DNA, 25 bp, Homo sapien
ggtggtgtatggtgtggacttggcc

SEQ ID NO: 2901989 - DNA, 25 bp, Homo sapien
ccggaagcctgggctgcctattcta

SEQ ID NO: 2901990 - DNA, 25 bp, Homo sapien
cgggactggtggtgtatggtgtgga

SEQ ID NO: 2901991 - DNA, 25 bp, Homo sapien
cggaagcctgggctgcctattctag

SEQ ID NO: 2901992 - DNA, 25 bp, Homo sapien
agagcctcggcacgtggactcatgg

SEQ ID NO: 2901993 - DNA, 25 bp, Homo sapien
ccttgagagcctcggcacgtggact

SEQ ID NO: 2901994 - DNA, 25 bp, Homo sapien
gagcctcggcacgtggactcatggc

SEQ ID NO: 2901995 - DNA, 25 bp, Homo sapien
gggccttgagagcctcggcacgtgg

SEQ ID NO: 2901996 - DNA, 25 bp, Homo sapien
gcaagtcgatcaagtttatggctga

SEQ ID NO: 2901997 - DNA, 25 bp, Homo sapien
agtcgatcaagtttatggctgacac

SEQ ID NO: 2901998 - DNA, 25 bp, Homo sapien
caagtcgatcaagtttatggctgac

SEQ ID NO: 2901999 - DNA, 25 bp, Homo sapien
ggcaagtcgatcaagtttatggctg

SEQ ID NO: 2902000 - DNA, 25 bp, Homo sapien
cttatttgtaccaatagcgcaggag

SEQ ID NO: 2902001 - DNA, 25 bp, Homo sapien
tagcagattttcacgcagaatgcgc

SEQ ID NO: 2902002 - DNA, 25 bp, Homo sapien
tcagctacgttcaccacgtaatggg

SEQ ID NO: 2902003 - DNA, 25 bp, Homo sapien
gcagccgctcccagtagtcaatttc

SEQ ID NO: 2902004 - DNA, 25 bp, Homo sapien
tgtagtctctagcaacgagtagcag

SEQ ID NO: 2902005 - DNA, 25 bp, Homo sapien
ggcactccgtgatgaagaaggcact

SEQ ID NO: 2902006 - DNA, 25 bp, Homo sapien
gagtcccgggtggatcttcttatcc

SEQ ID NO: 2902007 - DNA, 25 bp, Homo sapien
ttcttatccaggagccgaatacgct

SEQ ID NO: 2902008 - DNA, 25 bp, Homo sapien
gctctttgaatagggcctgctcatc

SEQ ID NO: 2902009 - DNA, 25 bp, Homo sapien
caatggtcagagtggatgccttgaa

SEQ ID NO: 2902010 - DNA, 25 bp, Homo sapien
tgtatacccgtttgccactaatgcg

SEQ ID NO: 2902011 - DNA, 25 bp, Homo sapien
cagctgcccgatgctctctttggtc

SEQ ID NO: 2902012 - DNA, 25 bp, Homo sapien
tctctgacatctcttgggctcgcca

SEQ ID NO: 2902013 - DNA, 25 bp, Homo sapien
accacttcacattcaggcgcagggc

SEQ ID NO: 2902014 - DNA, 25 bp, Homo sapien
ccttggatagttctagcagtgacca

SEQ ID NO: 2902015 - DNA, 25 bp, Homo sapien
gggctggtctttccatccccgttga

SEQ ID NO: 2902016 - DNA, 25 bp, Homo sapien
tccatcatgcggtccagccgaatca

SEQ ID NO: 2902017 - DNA, 25 bp, Homo sapien
gatgggttcacgatgtaacttgcgc

SEQ ID NO: 2902018 - DNA, 25 bp, Homo sapien
cacaactgtttggatgggttcacga

SEQ ID NO: 2902019 - DNA, 25 bp, Homo sapien
taacttgcgcttggtgagaatgtca

SEQ ID NO: 2902020 - DNA, 25 bp, Homo sapien
aatgtcattgaccacacctgccaaa

SEQ ID NO: 2902021 - DNA, 25 bp, Homo sapien
agatctcccggtacatgtcccaggt

SEQ ID NO: 2902022 - DNA, 25 bp, Homo sapien
ctggtagcgatgaatgaaggagtcc

SEQ ID NO: 2902023 - DNA, 25 bp, Homo sapien
tagtcatgccgctgctgatttgggt

SEQ ID NO: 2902024 - DNA, 25 bp, Homo sapien
gcaggcttgcgttgttagtcatgcc

SEQ ID NO: 2902025 - DNA, 25 bp, Homo sapien
tcctccttctgcacgttattagcaa

SEQ ID NO: 2902026 - DNA, 25 bp, Homo sapien
tccctgagcagagtcgcgaacttgt

SEQ ID NO: 2902027 - DNA, 25 bp, Homo sapien
cacgttattagcaacttccgtgtag

SEQ ID NO: 2902028 - DNA, 25 bp, Homo sapien
ccagggagaacttgaggtgcgaaca

SEQ ID NO: 2902029 - DNA, 25 bp, Homo sapien
caaattgctcgtgtatgggagggat

SEQ ID NO: 2902030 - DNA, 25 bp, Homo sapien
gcatccacgagctgcaagctgaccc

SEQ ID NO: 2902031 - DNA, 25 bp, Homo sapien
gactggcacctcgtacttttcaaga

SEQ ID NO: 2902032 - DNA, 25 bp, Homo sapien
ccacgttggccaagtcgtgcttcag

SEQ ID NO: 2902033 - DNA, 25 bp, Homo sapien
gccgagtggatcaggcctgtcttga

SEQ ID NO: 2902034 - DNA, 25 bp, Homo sapien
tggaagacaacccactccccgttga

SEQ ID NO: 2902035 - DNA, 25 bp, Homo sapien
ttcttgaagtcatctgccgagtgga

SEQ ID NO: 2902036 - DNA, 25 bp, Homo sapien
ctttgaattcgaaatcttccagaag

SEQ ID NO: 2902037 - DNA, 25 bp, Homo sapien
ttcccgctcacgtctggcaaggaca

SEQ ID NO: 2902038 - DNA, 25 bp, Homo sapien
tcagcttcccgctcacgtctggcaa

SEQ ID NO: 2902039 - DNA, 25 bp, Homo sapien
agcttcccgctcacgtctggcaagg

SEQ ID NO: 2902040 - DNA, 25 bp, Homo sapien
tcccgctcacgtctggcaaggacag

SEQ ID NO: 2902041 - DNA, 25 bp, Homo sapien
catggcccgcacttgtgtaatctgg

SEQ ID NO: 2902042 - DNA, 25 bp, Homo sapien
gacatgtatcccacgttgctggtga

SEQ ID NO: 2902043 - DNA, 25 bp, Homo sapien
cgatcttgaagatgcccaggttggc

SEQ ID NO: 2902044 - DNA, 25 bp, Homo sapien
caggttggctcggagactattttcc

SEQ ID NO: 2902045 - DNA, 25 bp, Homo sapien
cagatttgctggagggcatcgagct

SEQ ID NO: 2902046 - DNA, 25 bp, Homo sapien
ttttgtgaggcgacgaaacagcccg

SEQ ID NO: 2902047 - DNA, 25 bp, Homo sapien
gtctccatggtttccgtctgcagga

SEQ ID NO: 2902048 - DNA, 25 bp, Homo sapien
gcaggatcaggaaccggccagtctt

SEQ ID NO: 2902049 - DNA, 25 bp, Homo sapien
tgagcaaaagttgggggcatgagaa

SEQ ID NO: 2902050 - DNA, 25 bp, Homo sapien
ggcatgagaagacccgacgacctcc

SEQ ID NO: 2902051 - DNA, 25 bp, Homo sapien
ctgagcaaaagttgggggcatgaga

SEQ ID NO: 2902052 - DNA, 25 bp, Homo sapien
gggggcatgagaagacccgacgacc

SEQ ID NO: 2902053 - DNA, 25 bp, Homo sapien
tctctaagggcagggttccgcaggt

SEQ ID NO: 2902054 - DNA, 25 bp, Homo sapien
gaactgctctatttttgagcgagtg

SEQ ID NO: 2902055 - DNA, 25 bp, Homo sapien
ttgagcgagtggtttcaataatttc

SEQ ID NO: 2902056 - DNA, 25 bp, Homo sapien
gagaggcatggtcctcttgaactgc

SEQ ID NO: 2902057 - DNA, 25 bp, Homo sapien
gctggatctcatcccggacctggtc

SEQ ID NO: 2902058 - DNA, 25 bp, Homo sapien
tcaaactcccgctggatctcatccc

SEQ ID NO: 2902059 - DNA, 25 bp, Homo sapien
gatccatcccaagctccacaatctg

SEQ ID NO: 2902060 - DNA, 25 bp, Homo sapien
gctgatccatcccaagctccacaat

SEQ ID NO: 2902061 - DNA, 25 bp, Homo sapien
ccagctctttagttgctgaagcaga

SEQ ID NO: 2902062 - DNA, 25 bp, Homo sapien
ctatagccagctctttagttgctga

SEQ ID NO: 2902063 - DNA, 25 bp, Homo sapien
tagccagctctttagttgctgaagc

SEQ ID NO: 2902064 - DNA, 25 bp, Homo sapien
gctctttagttgctgaagcagagat

SEQ ID NO: 2902065 - DNA, 25 bp, Homo sapien
gacacagcagtcaggtatctcttca

SEQ ID NO: 2902066 - DNA, 25 bp, Homo sapien
cagtcaggtatctcttcactaaggg

SEQ ID NO: 2902067 - DNA, 25 bp, Homo sapien
cagcagtcaggtatctcttcactaa

SEQ ID NO: 2902068 - DNA, 25 bp, Homo sapien
cacagcagtcaggtatctcttcact

SEQ ID NO: 2902069 - DNA, 25 bp, Homo sapien
gggtactatgtcgagctgagtcaca

SEQ ID NO: 2902070 - DNA, 25 bp, Homo sapien
agtcacatcccaggtcttggcaatg

SEQ ID NO: 2902071 - DNA, 25 bp, Homo sapien
tatccttgtagggtactatgtcgag

SEQ ID NO: 2902072 - DNA, 25 bp, Homo sapien
ctgagccgatgatggcccttatcct

SEQ ID NO: 2902073 - DNA, 25 bp, Homo sapien
gtcaaaatcatagttcatccccacc

SEQ ID NO: 2902074 - DNA, 25 bp, Homo sapien
ctgagacacaaggggtcaaaatcat

SEQ ID NO: 2902075 - DNA, 25 bp, Homo sapien
acctgcccaaccttggtcccactct

SEQ ID NO: 2902076 - DNA, 25 bp, Homo sapien
aaccttggtcccactctgcagcctg

SEQ ID NO: 2902077 - DNA, 25 bp, Homo sapien
cagtgcctggaatacttcttctgta

SEQ ID NO: 2902078 - DNA, 25 bp, Homo sapien
ccttcatggtagacagagctacctg

SEQ ID NO: 2902079 - DNA, 25 bp, Homo sapien
gtacatccactgacgctgcactgtg

SEQ ID NO: 2902080 - DNA, 25 bp, Homo sapien
caaaggccttgacaaagcgtgatgc

SEQ ID NO: 2902081 - DNA, 25 bp, Homo sapien
gattcattgggcagctgcttgcgga

SEQ ID NO: 2902082 - DNA, 25 bp, Homo sapien
gctccggagagcattgttgtccttg

SEQ ID NO: 2902083 - DNA, 25 bp, Homo sapien
cctggtcaaataaggtcgattcatt

SEQ ID NO: 2902084 - DNA, 25 bp, Homo sapien
tccagttgctgttgacctggtcaaa

SEQ ID NO: 2902085 - DNA, 25 bp, Homo sapien
ccaggattgtattcatttctatcaa

SEQ ID NO: 2902086 - DNA, 25 bp, Homo sapien
cagcaggtcatcattggacaagaag

SEQ ID NO: 2902087 - DNA, 25 bp, Homo sapien
gggaaaatatgtcgcttggtctcta

SEQ ID NO: 2902088 - DNA, 25 bp, Homo sapien
tgggtttcgggactggcccagaatc

SEQ ID NO: 2902089 - DNA, 25 bp, Homo sapien
agtggaggaagtcaatgtactcgcc

SEQ ID NO: 2902090 - DNA, 25 bp, Homo sapien
aatactgagtggaggaagtcaatgt

SEQ ID NO: 2902091 - DNA, 25 bp, Homo sapien
ggaagtcaatgtactcgccgtcgcc

SEQ ID NO: 2902092 - DNA, 25 bp, Homo sapien
tactgagtggaggaagtcaatgtac

SEQ ID NO: 2902093 - DNA, 25 bp, Homo sapien
tcacccatttgtccctcttgttgag

SEQ ID NO: 2902094 - DNA, 25 bp, Homo sapien
ccaggtggcagttccggagaaggtc

SEQ ID NO: 2902095 - DNA, 25 bp, Homo sapien
gccagcccactccttcacccatttg

SEQ ID NO: 2902096 - DNA, 25 bp, Homo sapien
ggtctgttccacatcgccaagccag

SEQ ID NO: 2902097 - DNA, 25 bp, Homo sapien
cacttggtgacatcagccgtccact

SEQ ID NO: 2902098 - DNA, 25 bp, Homo sapien
tgacatcagccgtccactggatctg

SEQ ID NO: 2902099 - DNA, 25 bp, Homo sapien
ggatctgactggcagtgatcaccac

SEQ ID NO: 2902100 - DNA, 25 bp, Homo sapien
tgtctgcccgctccttcgctgtcag

SEQ ID NO: 2902101 - DNA, 25 bp, Homo sapien
caaaggaattgacatccatgaggcc

SEQ ID NO: 2902102 - DNA, 25 bp, Homo sapien
cagagccacaattttaagccgcatg

SEQ ID NO: 2902103 - DNA, 25 bp, Homo sapien
tctcccagtagaaccgaagttggct

SEQ ID NO: 2902104 - DNA, 25 bp, Homo sapien
gaatttctatcgtcaccagagccac

SEQ ID NO: 2902105 - DNA, 25 bp, Homo sapien
tcaggggggtgatgacgagccggcc

SEQ ID NO: 2902106 - DNA, 25 bp, Homo sapien
tgacgagccggcccgagttacccaa

SEQ ID NO: 2902107 - DNA, 25 bp, Homo sapien
tactgaaattgcgtgttggtctggc

SEQ ID NO: 2902108 - DNA, 25 bp, Homo sapien
tgttggtctggcggatgacacagtc

SEQ ID NO: 2902109 - DNA, 25 bp, Homo sapien
tgacggtctcggtcttgcctgtgcc

SEQ ID NO: 2902110 - DNA, 25 bp, Homo sapien
ggccttgcccaggtccttgacggtc

SEQ ID NO: 2902111 - DNA, 25 bp, Homo sapien
aatgccgtggtcagtgtcatgtaac

SEQ ID NO: 2902112 - DNA, 25 bp, Homo sapien
agccccctcggtgcaggtgcaatgc

SEQ ID NO: 2902113 - DNA, 25 bp, Homo sapien
gcagttgaccacaatgacatatatg

SEQ ID NO: 2902114 - DNA, 25 bp, Homo sapien
cctgagtacattcggcccatggact

SEQ ID NO: 2902115 - DNA, 25 bp, Homo sapien
ccagacctgagtacattcggcccat

SEQ ID NO: 2902116 - DNA, 25 bp, Homo sapien
cattcggcccatggacttgtagtcc

SEQ ID NO: 2902117 - DNA, 25 bp, Homo sapien
gatgttgatgcggttaaactcatca

SEQ ID NO: 2902118 - DNA, 25 bp, Homo sapien
agcacctcgatgttgatgcggttaa

SEQ ID NO: 2902119 - DNA, 25 bp, Homo sapien
gatctggtgggccaccactgacagc

SEQ ID NO: 2902120 - DNA, 25 bp, Homo sapien
tggaaatgggtgaggccggcagcca

SEQ ID NO: 2902121 - DNA, 25 bp, Homo sapien
catggatttaagattttcgggaagc

SEQ ID NO: 2902122 - DNA, 25 bp, Homo sapien
tcaggcaccaccatggcaattgggc

SEQ ID NO: 2902123 - DNA, 25 bp, Homo sapien
gcaattgggcggaacatggatttaa

SEQ ID NO: 2902124 - DNA, 25 bp, Homo sapien
gatttaagattttcgggaagctctg

SEQ ID NO: 2902125 - DNA, 25 bp, Homo sapien
taggcggcgcttcttgccagcatag

SEQ ID NO: 2902126 - DNA, 25 bp, Homo sapien
caggccaaagtcatagtggtcctgt

SEQ ID NO: 2902127 - DNA, 25 bp, Homo sapien
agtgagtagagtgtgtacaccttct

SEQ ID NO: 2902128 - DNA, 25 bp, Homo sapien
tcatcagtcagatccggctgtaggc

SEQ ID NO: 2902129 - DNA, 25 bp, Homo sapien
tgagcttggcgatgttcatatctct

SEQ ID NO: 2902130 - DNA, 25 bp, Homo sapien
gatcttgcacgatggcattgaacag

SEQ ID NO: 2902131 - DNA, 25 bp, Homo sapien
tgcatcaactgaagtgagcttggcg

SEQ ID NO: 2902132 - DNA, 25 bp, Homo sapien
tcaatgacaggcagctcaatgttgg

SEQ ID NO: 2902133 - DNA, 25 bp, Homo sapien
tgaacggcgtgctttgcaggcccat

SEQ ID NO: 2902134 - DNA, 25 bp, Homo sapien
ccgtgcagcccacgatcatggtgga

SEQ ID NO: 2902135 - DNA, 25 bp, Homo sapien
caatgttgaagttagggtctccggc

SEQ ID NO: 2902136 - DNA, 25 bp, Homo sapien
tagaatgcgccatgaggcagtcttg

SEQ ID NO: 2902137 - DNA, 25 bp, Homo sapien
ctccattgtcttcttactactcaag

SEQ ID NO: 2902138 - DNA, 25 bp, Homo sapien
gacccctcttaggtacgtgcatttg

SEQ ID NO: 2902139 - DNA, 25 bp, Homo sapien
tgctgatggacaaaaacccctcttt

SEQ ID NO: 2902140 - DNA, 25 bp, Homo sapien
atggtcccaggtacagctctcccgg

SEQ ID NO: 2902141 - DNA, 25 bp, Homo sapien
agggacaatgccttggggttcaaag

SEQ ID NO: 2902142 - DNA, 25 bp, Homo sapien
tgcacatgccgtccgcatgacactg

SEQ ID NO: 2902143 - DNA, 25 bp, Homo sapien
attggtgctgaggtcatattcccca

SEQ ID NO: 2902144 - DNA, 25 bp, Homo sapien
cgtccgcatgacactggacaagatg

SEQ ID NO: 2902145 - DNA, 25 bp, Homo sapien
gccgctcaccttgcaccctccgctc

SEQ ID NO: 2902146 - DNA, 25 bp, Homo sapien
cggggagccgctcaccttgcaccct

SEQ ID NO: 2902147 - DNA, 25 bp, Homo sapien
tcgcgatgcgctcgccgttgatgag

SEQ ID NO: 2902148 - DNA, 25 bp, Homo sapien
ggtcaacaccttgttatcgtccatg

SEQ ID NO: 2902149 - DNA, 25 bp, Homo sapien
catgttctcgatccacagtgtgtcc

SEQ ID NO: 2902150 - DNA, 25 bp, Homo sapien
gggccatcgaacaggatccacttct

SEQ ID NO: 2902151 - DNA, 25 bp, Homo sapien
ctctgggtgcacaaacgagggtcct

SEQ ID NO: 2902152 - DNA, 25 bp, Homo sapien
tatcattgttctcaacagccgcggc

SEQ ID NO: 2902153 - DNA, 25 bp, Homo sapien
gaaaagggtgtgcttgccagtccgt

SEQ ID NO: 2902154 - DNA, 25 bp, Homo sapien
tcatgcatccgtgagaacgagccga

SEQ ID NO: 2902155 - DNA, 25 bp, Homo sapien
agtgtagaccatcccgcagcgggat

SEQ ID NO: 2902156 - DNA, 25 bp, Homo sapien
atcccgcagcgggatacagtggccg

SEQ ID NO: 2902157 - DNA, 25 bp, Homo sapien
cagcccaggtcagcgtagtcagtgt

SEQ ID NO: 2902158 - DNA, 25 bp, Homo sapien
tgactgaacatagggcttccagccc

SEQ ID NO: 2902159 - DNA, 25 bp, Homo sapien
cccattctctggcgtggccagggca

SEQ ID NO: 2902160 - DNA, 25 bp, Homo sapien
gaggtgataccgctgtactcgggca

SEQ ID NO: 2902161 - DNA, 25 bp, Homo sapien
gagcttttcgaacatgcgttgaagg

SEQ ID NO: 2902162 - DNA, 25 bp, Homo sapien
cagttgtccttcttaaaggccagca

SEQ ID NO: 2902163 - DNA, 25 bp, Homo sapien
tggatggagaacgagaagaggaaat

SEQ ID NO: 2902164 - DNA, 25 bp, Homo sapien
gatggagaacgagaagaggaaataa

SEQ ID NO: 2902165 - DNA, 25 bp, Homo sapien
tggagaacgagaagaggaaataacc

SEQ ID NO: 2902166 - DNA, 25 bp, Homo sapien
ctggatggagaacgagaagaggaaa

SEQ ID NO: 2902167 - DNA, 25 bp, Homo sapien
tagttctcgccgtcagctgggttca

SEQ ID NO: 2902168 - DNA, 25 bp, Homo sapien
aggtagctgtcgatcctcttccggc

SEQ ID NO: 2902169 - DNA, 25 bp, Homo sapien
gcacacacagaccagatcatgctga

SEQ ID NO: 2902170 - DNA, 25 bp, Homo sapien
gatcatgctgaacacaaatgtcatc

SEQ ID NO: 2902171 - DNA, 25 bp, Homo sapien
tcttagggagcttgtcctcaaatga

SEQ ID NO: 2902172 - DNA, 25 bp, Homo sapien
atgatgtccaactccgtattttggg

SEQ ID NO: 2902173 - DNA, 25 bp, Homo sapien
gggtccacaaaatactcatataccg

SEQ ID NO: 2902174 - DNA, 25 bp, Homo sapien
agggtagcgccaactcttagggagc

SEQ ID NO: 2902175 - DNA, 25 bp, Homo sapien
acatgttgacaacgagcaccgacca

SEQ ID NO: 2902176 - DNA, 25 bp, Homo sapien
tagttgtagcgaacagtgtcgacgg

SEQ ID NO: 2902177 - DNA, 25 bp, Homo sapien
gaatgggattctggttggccaccaa

SEQ ID NO: 2902178 - DNA, 25 bp, Homo sapien
cggtgggcaccatgatcttatagaa

SEQ ID NO: 2902179 - DNA, 25 bp, Homo sapien
tagtcaatccagaggcggatcagct

SEQ ID NO: 2902180 - DNA, 25 bp, Homo sapien
tacggtcataccagaagccatagtc

SEQ ID NO: 2902181 - DNA, 25 bp, Homo sapien
gacccaaacatgtccttagcgggca

SEQ ID NO: 2902182 - DNA, 25 bp, Homo sapien
ttagcgggcatatttaggtcatcca

SEQ ID NO: 2902183 - DNA, 25 bp, Homo sapien
gttgaagcgactccgtagccttggg

SEQ ID NO: 2902184 - DNA, 25 bp, Homo sapien
tgttgataatgttgaagcgactccg

SEQ ID NO: 2902185 - DNA, 25 bp, Homo sapien
gccttggggagatgacagtccgtcc

SEQ ID NO: 2902186 - DNA, 25 bp, Homo sapien
aaggtcatgttgataatgttgaagc

SEQ ID NO: 2902187 - DNA, 25 bp, Homo sapien
ccacggtgttgtacatgtccagggt

SEQ ID NO: 2902188 - DNA, 25 bp, Homo sapien
cgaatatgcggatgatctgggactt

SEQ ID NO: 2902189 - DNA, 25 bp, Homo sapien
cttggagatgtctcgaaggttgaag

SEQ ID NO: 2902190 - DNA, 25 bp, Homo sapien
tcctgaagcttctgattgatcatgg

SEQ ID NO: 2902191 - DNA, 25 bp, Homo sapien
ccttgttggctctaagcatgccctg

SEQ ID NO: 2902192 - DNA, 25 bp, Homo sapien
gccgtgtgatgctggacttggtatc

SEQ ID NO: 2902193 - DNA, 25 bp, Homo sapien
tgaaacattcatggatccagagccg

SEQ ID NO: 2902194 - DNA, 25 bp, Homo sapien
ttggtatcatggaagtccttgttgg

SEQ ID NO: 2902195 - DNA, 25 bp, Homo sapien
gcttgtcgcttatgatgcccatgaa

SEQ ID NO: 2902196 - DNA, 25 bp, Homo sapien
ggtcaaagaaggagccgagcttgtc

SEQ ID NO: 2902197 - DNA, 25 bp, Homo sapien
gcttctgtgtctgccgcatcaacca

SEQ ID NO: 2902198 - DNA, 25 bp, Homo sapien
caaagataggaggacgcttgctggg

SEQ ID NO: 2902199 - DNA, 25 bp, Homo sapien
gcactgtcagatccgtgaggtcttc

SEQ ID NO: 2902200 - DNA, 25 bp, Homo sapien
gagctgtctccatgactgtcttcag

SEQ ID NO: 2902201 - DNA, 25 bp, Homo sapien
agcactagctgcatgggcacgacag

SEQ ID NO: 2902202 - DNA, 25 bp, Homo sapien
gttatactcatttagagctgtctcc

SEQ ID NO: 2902203 - DNA, 25 bp, Homo sapien
gcttccgataatgtttggtgacctc

SEQ ID NO: 2902204 - DNA, 25 bp, Homo sapien
gcatgttgccccgaggctgtccaat

SEQ ID NO: 2902205 - DNA, 25 bp, Homo sapien
ccaatgacccgcacgatccgtgtga

SEQ ID NO: 2902206 - DNA, 25 bp, Homo sapien
cgatacccaccaggagcatgttgcc

SEQ ID NO: 2902207 - DNA, 25 bp, Homo sapien
gatgttgttgatgtcctctaggaag

SEQ ID NO: 2902208 - DNA, 25 bp, Homo sapien
ccagcctggcgatacagacgcttga

SEQ ID NO: 2902209 - DNA, 25 bp, Homo sapien
agattgggcacctcgcctgagctga

SEQ ID NO: 2902210 - DNA, 25 bp, Homo sapien
gaaggacgtggtcttgagctccacc

SEQ ID NO: 2902211 - DNA, 25 bp, Homo sapien
caggttgttctgcacgcgttcaatg

SEQ ID NO: 2902212 - DNA, 25 bp, Homo sapien
taggcgaagaggctgtccgatgact

SEQ ID NO: 2902213 - DNA, 25 bp, Homo sapien
cacgcgttcaatgaggtaggcgaag

SEQ ID NO: 2902214 - DNA, 25 bp, Homo sapien
cacccgggcctggtctatgatatgc

SEQ ID NO: 2902215 - DNA, 25 bp, Homo sapien
cactttcgaggtgtggatctccagc

SEQ ID NO: 2902216 - DNA, 25 bp, Homo sapien
agtatctaagctctttgaatgccag

SEQ ID NO: 2902217 - DNA, 25 bp, Homo sapien
tgtaaattccgtgcacagacacagc

SEQ ID NO: 2902218 - DNA, 25 bp, Homo sapien
taatacatgctgactaggatggttg

SEQ ID NO: 2902219 - DNA, 25 bp, Homo sapien
tcccaggtctactcctatgaggcac

SEQ ID NO: 2902220 - DNA, 25 bp, Homo sapien
attctcctgagttcccaggtctact

SEQ ID NO: 2902221 - DNA, 25 bp, Homo sapien
agccacctcgagcagggcctcttgg

SEQ ID NO: 2902222 - DNA, 25 bp, Homo sapien
cactctgagaaccagttgatggttg

SEQ ID NO: 2902223 - DNA, 25 bp, Homo sapien
tgcatagtgacaaagatctgggcca

SEQ ID NO: 2902224 - DNA, 25 bp, Homo sapien
tgagctactgaccagtgcatagtga

SEQ ID NO: 2902225 - DNA, 25 bp, Homo sapien
acatagttgtgtctccgcagttcca

SEQ ID NO: 2902226 - DNA, 25 bp, Homo sapien
ccaggtatttggtgggtgtgacata

SEQ ID NO: 2902227 - DNA, 25 bp, Homo sapien
agcctgtccgcagtttattggcttg

SEQ ID NO: 2902228 - DNA, 25 bp, Homo sapien
gatcttgaacaagcctgtccgcagt

SEQ ID NO: 2902229 - DNA, 25 bp, Homo sapien
cttttccctagtttcgtcgatcttg

SEQ ID NO: 2902230 - DNA, 25 bp, Homo sapien
gctccaacgacatcacttgcacctt

SEQ ID NO: 2902231 - DNA, 25 bp, Homo sapien
cccgcttctgctgcacaatgatgac

SEQ ID NO: 2902232 - DNA, 25 bp, Homo sapien
gcctcccgcttctgctgcacaatga

SEQ ID NO: 2902233 - DNA, 25 bp, Homo sapien
ctgctgctcatctgcctcccgcttc

SEQ ID NO: 2902234 - DNA, 25 bp, Homo sapien
tctgctgctcatctgcctcccgctt

SEQ ID NO: 2902235 - DNA, 25 bp, Homo sapien
cctgacgcagtagccggcactggtg

SEQ ID NO: 2902236 - DNA, 25 bp, Homo sapien
ttccctgacgcagtagccggcactg

SEQ ID NO: 2902237 - DNA, 25 bp, Homo sapien
catgggttccctgacgcagtagccg

SEQ ID NO: 2902238 - DNA, 25 bp, Homo sapien
ggttccctgacgcagtagccggcac

SEQ ID NO: 2902239 - DNA, 25 bp, Homo sapien
ttctagatctttctgggcattgtca

SEQ ID NO: 2902240 - DNA, 25 bp, Homo sapien
cctcaactgcaatcttttcactgtt

SEQ ID NO: 2902241 - DNA, 25 bp, Homo sapien
tagatctttctgggcattgtcagcc

SEQ ID NO: 2902242 - DNA, 25 bp, Homo sapien
ctagatctttctgggcattgtcagc

SEQ ID NO: 2902243 - DNA, 25 bp, Homo sapien
gggccgtccataagacttgatctct

SEQ ID NO: 2902244 - DNA, 25 bp, Homo sapien
tgggctcgttgcctcgaagaatcat

SEQ ID NO: 2902245 - DNA, 25 bp, Homo sapien
tgcatcactatctccacttgggctg

SEQ ID NO: 2902246 - DNA, 25 bp, Homo sapien
gaagaatcataactgcctgcatcac

SEQ ID NO: 2902247 - DNA, 25 bp, Homo sapien
gatgatatcaggctggaagtcaggc

SEQ ID NO: 2902248 - DNA, 25 bp, Homo sapien
tgatcagtgacttgatgaagttctg

SEQ ID NO: 2902249 - DNA, 25 bp, Homo sapien
ctttatcaaagttgatcagtgactt

SEQ ID NO: 2902250 - DNA, 25 bp, Homo sapien
gagacgcggccgatgatatcaggct

SEQ ID NO: 2902251 - DNA, 25 bp, Homo sapien
gcggcttgcttctcccgaagctgag

SEQ ID NO: 2902252 - DNA, 25 bp, Homo sapien
ccaaggcagcgttcattcggattcg

SEQ ID NO: 2902253 - DNA, 25 bp, Homo sapien
gcgagcgcggcttgcttctcccgaa

SEQ ID NO: 2902254 - DNA, 25 bp, Homo sapien
tgggctccaccacccgatatagccg

SEQ ID NO: 2902255 - DNA, 25 bp, Homo sapien
tttgtacctttcacacttcaaacca

SEQ ID NO: 2902256 - DNA, 25 bp, Homo sapien
gggacagagtagtatcacctattaa

SEQ ID NO: 2902257 - DNA, 25 bp, Homo sapien
agaggaaagctggtgactagagaac

SEQ ID NO: 2902258 - DNA, 25 bp, Homo sapien
cagtaatatcggctgctttcagaga

SEQ ID NO: 2902259 - DNA, 25 bp, Homo sapien
gagcatcccagctcgctccagcttc

SEQ ID NO: 2902260 - DNA, 25 bp, Homo sapien
accccgacacgagcatcccagctcg

SEQ ID NO: 2902261 - DNA, 25 bp, Homo sapien
ttcagacttcttgcgaagctcctcc

SEQ ID NO: 2902262 - DNA, 25 bp, Homo sapien
ccatctggccttctcgccagccaac

SEQ ID NO: 2902263 - DNA, 25 bp, Homo sapien
gatttggttgacaatctcatcccgg

SEQ ID NO: 2902264 - DNA, 25 bp, Homo sapien
gtcaggaagggtcccatgtaggaca

SEQ ID NO: 2902265 - DNA, 25 bp, Homo sapien
cttcccgatccagatttggttgaca

SEQ ID NO: 2902266 - DNA, 25 bp, Homo sapien
aatctcatcccggtagttggtcagg

SEQ ID NO: 2902267 - DNA, 25 bp, Homo sapien
gcacaggaagttatcgatggcgaaa

SEQ ID NO: 2902268 - DNA, 25 bp, Homo sapien
ctgttgcctcgggtgacgatgatgc

SEQ ID NO: 2902269 - DNA, 25 bp, Homo sapien
ctcgggtgacgatgatgccattctc

SEQ ID NO: 2902270 - DNA, 25 bp, Homo sapien
cacaggaagttatcgatggcgaaag

SEQ ID NO: 2902271 - DNA, 25 bp, Homo sapien
cctgggcctgagggtcgatcatcag

SEQ ID NO: 2902272 - DNA, 25 bp, Homo sapien
cctgagggtcgatcatcagtgccca

SEQ ID NO: 2902273 - DNA, 25 bp, Homo sapien
tcttaatccatttcagggcctgggc

SEQ ID NO: 2902274 - DNA, 25 bp, Homo sapien
ggcctgagggtcgatcatcagtgcc

SEQ ID NO: 2902275 - DNA, 25 bp, Homo sapien
cacgttctgaagtagcaccgggtat

SEQ ID NO: 2902276 - DNA, 25 bp, Homo sapien
aggtaatcgctcatctgcaggtcga

SEQ ID NO: 2902277 - DNA, 25 bp, Homo sapien
caccgggtatccaaagtgaatggcg

SEQ ID NO: 2902278 - DNA, 25 bp, Homo sapien
aatggcgtgttctaggattcgcagg

SEQ ID NO: 2902279 - DNA, 25 bp, Homo sapien
atattccacctccttatcgccaatg

SEQ ID NO: 2902280 - DNA, 25 bp, Homo sapien
tttaacagcaaagttgacgatggtg

SEQ ID NO: 2902281 - DNA, 25 bp, Homo sapien
cttggtggtgatgtagaaacggaaa

SEQ ID NO: 2902282 - DNA, 25 bp, Homo sapien
gatgtagaaacggaaattggtatta

SEQ ID NO: 2902283 - DNA, 25 bp, Homo sapien
gatgttgatgaccagtgagtccttc

SEQ ID NO: 2902284 - DNA, 25 bp, Homo sapien
cttgagcttccttttaccagccgcg

SEQ ID NO: 2902285 - DNA, 25 bp, Homo sapien
gagcttccttttaccagccgcgatg

SEQ ID NO: 2902286 - DNA, 25 bp, Homo sapien
tttaccagccgcgatgttgatgacc

SEQ ID NO: 2902287 - DNA, 25 bp, Homo sapien
agtcacctctgtggctgtgatcttg

SEQ ID NO: 2902288 - DNA, 25 bp, Homo sapien
ttggaggtatgcagcgtgttcacca

SEQ ID NO: 2902289 - DNA, 25 bp, Homo sapien
ctgtgatcttggaggtatgcagcgt

SEQ ID NO: 2902290 - DNA, 25 bp, Homo sapien
tgatcttggaggtatgcagcgtgtt

SEQ ID NO: 2902291 - DNA, 25 bp, Homo sapien
tcaggtagtcaatgcggtcctccag

SEQ ID NO: 2902292 - DNA, 25 bp, Homo sapien
cggtggcttttgtcaatgctgagaa

SEQ ID NO: 2902293 - DNA, 25 bp, Homo sapien
cagcgtaggtgtggtagtcattcag

SEQ ID NO: 2902294 - DNA, 25 bp, Homo sapien
cacgaagaacaggattgatgcccgc

SEQ ID NO: 2902295 - DNA, 25 bp, Homo sapien
tttggcacacatatgaaaactgaat

SEQ ID NO: 2902296 - DNA, 25 bp, Homo sapien
acgtagaaagaagttgtattcatcc

SEQ ID NO: 2902297 - DNA, 25 bp, Homo sapien
tgtggcgttcgaaaagggtacggca

SEQ ID NO: 2902298 - DNA, 25 bp, Homo sapien
gaaaactgaatagtagtttgtggcg

SEQ ID NO: 2902299 - DNA, 25 bp, Homo sapien
cacgagggtactgctcaaaggagtt

SEQ ID NO: 2902300 - DNA, 25 bp, Homo sapien
ggattgtccatttggccctcccgat

SEQ ID NO: 2902301 - DNA, 25 bp, Homo sapien
caaaggagttcatgagtccgtggaa

SEQ ID NO: 2902302 - DNA, 25 bp, Homo sapien
tggtataccacaggtgccagtcacg

SEQ ID NO: 2902303 - DNA, 25 bp, Homo sapien
aggtcacgcagaaggccacgcggtc

SEQ ID NO: 2902304 - DNA, 25 bp, Homo sapien
aacgatcagcatccgttgcatttca

SEQ ID NO: 2902305 - DNA, 25 bp, Homo sapien
attcagcacaggcggctcgatgaag

SEQ ID NO: 2902306 - DNA, 25 bp, Homo sapien
tcctggcgcagggagcgaacgatca

SEQ ID NO: 2902307 - DNA, 25 bp, Homo sapien
gaagcacaggtatagcatcaggcag

SEQ ID NO: 2902308 - DNA, 25 bp, Homo sapien
gatgaaggagactgaaacagagcga

SEQ ID NO: 2902309 - DNA, 25 bp, Homo sapien
gaggcaggaaagacccatgggccgt

SEQ ID NO: 2902310 - DNA, 25 bp, Homo sapien
gggacaaggaagccgagccaccgac

SEQ ID NO: 2902311 - DNA, 25 bp, Homo sapien
cctctcggaggagccgagcagcgat

SEQ ID NO: 2902312 - DNA, 25 bp, Homo sapien
gacaggatgaacacgagtggggatc

SEQ ID NO: 2902313 - DNA, 25 bp, Homo sapien
ggggatcgtggggttgaatcctcca

SEQ ID NO: 2902314 - DNA, 25 bp, Homo sapien
acagggcgtggaagcgctgggccat

SEQ ID NO: 2902315 - DNA, 25 bp, Homo sapien
gacctgcaagattgagatagggaag

SEQ ID NO: 2902316 - DNA, 25 bp, Homo sapien
aagacagtgacaggtggcagtttgc

SEQ ID NO: 2902317 - DNA, 25 bp, Homo sapien
ggtcatcttgatgctgacctgcaag

SEQ ID NO: 2902318 - DNA, 25 bp, Homo sapien
tggatgaggatcctccacctgcagc

SEQ ID NO: 2902319 - DNA, 25 bp, Homo sapien
ttggcacaaacaggagaggaatgag

SEQ ID NO: 2902320 - DNA, 25 bp, Homo sapien
catgttgttgttggttaagccctct

SEQ ID NO: 2902321 - DNA, 25 bp, Homo sapien
cctctctctggtgctagcaggaggt

SEQ ID NO: 2902322 - DNA, 25 bp, Homo sapien
cagatggccctgatgatgctggttc

SEQ ID NO: 2902323 - DNA, 25 bp, Homo sapien
aaactgtggttctgacatcagttgg

SEQ ID NO: 2902324 - DNA, 25 bp, Homo sapien
gctgcaggaactttttgcgttcaag

SEQ ID NO: 2902325 - DNA, 25 bp, Homo sapien
caaagtcggagtcattgaagccata

SEQ ID NO: 2902326 - DNA, 25 bp, Homo sapien
gacgtgtcatgttggcctttaggcc

SEQ ID NO: 2902327 - DNA, 25 bp, Homo sapien
taggacgtgtaaggagagagggctg

SEQ ID NO: 2902328 - DNA, 25 bp, Homo sapien
ggatgaggacccctggctaatgcaa

SEQ ID NO: 2902329 - DNA, 25 bp, Homo sapien
cccattcccagagttatggcaggaa

SEQ ID NO: 2902330 - DNA, 25 bp, Homo sapien
tgtccacggatattcccacagggga

SEQ ID NO: 2902331 - DNA, 25 bp, Homo sapien
tccaccatagttgatgccggcaatg

SEQ ID NO: 2902332 - DNA, 25 bp, Homo sapien
tactcatcgagatagaggctcagca

SEQ ID NO: 2902333 - DNA, 25 bp, Homo sapien
aagggagttgatagagactggtcac

SEQ ID NO: 2902334 - DNA, 25 bp, Homo sapien
taagtgcgtcccaaggtgtctcctc

SEQ ID NO: 2902335 - DNA, 25 bp, Homo sapien
gatgaaataagtctccagtgctgac

SEQ ID NO: 2902336 - DNA, 25 bp, Homo sapien
ggtgtaatctgaggttgcaaggaaa

SEQ ID NO: 2902337 - DNA, 25 bp, Homo sapien
ttgtaagaagcgaggctgccatcct

SEQ ID NO: 2902338 - DNA, 25 bp, Homo sapien
gccaggcaataagctgatgtattcc

SEQ ID NO: 2902339 - DNA, 25 bp, Homo sapien
caggcaggagctcttgagtgtagcc

SEQ ID NO: 2902340 - DNA, 25 bp, Homo sapien
tgagcaggcaggagctcttgagtgt

SEQ ID NO: 2902341 - DNA, 25 bp, Homo sapien
agctcttgagtgtagccccctcttc

SEQ ID NO: 2902342 - DNA, 25 bp, Homo sapien
gctcttgagtgtagccccctcttct

SEQ ID NO: 2902343 - DNA, 25 bp, Homo sapien
tgcttcacatcagcggccaactcaa

SEQ ID NO: 2902344 - DNA, 25 bp, Homo sapien
ggtcgagagctagcagtttttgagt

SEQ ID NO: 2902345 - DNA, 25 bp, Homo sapien
tcgatcatttcagggatcttctgct

SEQ ID NO: 2902346 - DNA, 25 bp, Homo sapien
gagtcccctcatagtcgatcatttc

SEQ ID NO: 2902347 - DNA, 25 bp, Homo sapien
catgacgatgagaccctggatgcct

SEQ ID NO: 2902348 - DNA, 25 bp, Homo sapien
gcttgtagacatgacgatgagaccc

SEQ ID NO: 2902349 - DNA, 25 bp, Homo sapien
ttccaggcttgtagacatgacgatg

SEQ ID NO: 2902350 - DNA, 25 bp, Homo sapien
tagacatgacgatgagaccctggat

SEQ ID NO: 2902351 - DNA, 25 bp, Homo sapien
tggggaaggagtgcgtgtgtattca

SEQ ID NO: 2902352 - DNA, 25 bp, Homo sapien
ctggggaaggagtgcgtgtgtattc

SEQ ID NO: 2902353 - DNA, 25 bp, Homo sapien
tttggcgagctgaagactgcagcac

SEQ ID NO: 2902354 - DNA, 25 bp, Homo sapien
acaaccagaagatcacaggaggccg

SEQ ID NO: 2902355 - DNA, 25 bp, Homo sapien
aactgctccacacgcatggccaagt

SEQ ID NO: 2902356 - DNA, 25 bp, Homo sapien
gaaaggtgaaaccagacaaccagaa

SEQ ID NO: 2902357 - DNA, 25 bp, Homo sapien
aaacgataaactcccaggagaggct

SEQ ID NO: 2902358 - DNA, 25 bp, Homo sapien
gatacactaggttgctgtcatccac

SEQ ID NO: 2902359 - DNA, 25 bp, Homo sapien
tccacagtggaaacgataaactccc

SEQ ID NO: 2902360 - DNA, 25 bp, Homo sapien
gggatacactaggttgctgtcatcc

SEQ ID NO: 2902361 - DNA, 25 bp, Homo sapien
gagaaatgggagcaggtctgggaga

SEQ ID NO: 2902362 - DNA, 25 bp, Homo sapien
ctggggagaaatgggagcaggtctg

SEQ ID NO: 2902363 - DNA, 25 bp, Homo sapien
gggagaaatgggagcaggtctggga

SEQ ID NO: 2902364 - DNA, 25 bp, Homo sapien
gaaatgggagcaggtctgggagaag

SEQ ID NO: 2902365 - DNA, 25 bp, Homo sapien
catgaggcagacaagctgcatgggc

SEQ ID NO: 2902366 - DNA, 25 bp, Homo sapien
ggcgctcttcttgcggctctctgca

SEQ ID NO: 2902367 - DNA, 25 bp, Homo sapien
tctgcaggccggaagtggatcgtgg

SEQ ID NO: 2902368 - DNA, 25 bp, Homo sapien
aagcaggagttcttccggtcccagc

SEQ ID NO: 2902369 - DNA, 25 bp, Homo sapien
tcaatgccgatgacaaaggaggctc

SEQ ID NO: 2902370 - DNA, 25 bp, Homo sapien
tcaaagtctgagtgaggtccggcct

SEQ ID NO: 2902371 - DNA, 25 bp, Homo sapien
aatgatcaggtgtcatggccccaga

SEQ ID NO: 2902372 - DNA, 25 bp, Homo sapien
gctgcctgcccggttgggatagtaa

SEQ ID NO: 2902373 - DNA, 25 bp, Homo sapien
cacttttatggctaacacaactagg

SEQ ID NO: 2902374 - DNA, 25 bp, Homo sapien
ggctaacacaactaggtatctccag

SEQ ID NO: 2902375 - DNA, 25 bp, Homo sapien
cagcactgagctccaatacaactct

SEQ ID NO: 2902376 - DNA, 25 bp, Homo sapien
agcactgagctccaatacaactctt

SEQ ID NO: 2902377 - DNA, 25 bp, Homo sapien
ggagtttggtgtgccctgtctcatt

SEQ ID NO: 2902378 - DNA, 25 bp, Homo sapien
gtgccctgtctcattggaaccacca

SEQ ID NO: 2902379 - DNA, 25 bp, Homo sapien
ggtgtgccctgtctcattggaacca

SEQ ID NO: 2902380 - DNA, 25 bp, Homo sapien
cagatggagtttggtgtgccctgtc

SEQ ID NO: 2902381 - DNA, 25 bp, Homo sapien
acaactcctatagggacaaagctgt

SEQ ID NO: 2902382 - DNA, 25 bp, Homo sapien
caaaagccagggtgttcaacaactc

SEQ ID NO: 2902383 - DNA, 25 bp, Homo sapien
cctccagggtagctcatatccactt

SEQ ID NO: 2902384 - DNA, 25 bp, Homo sapien
tgtggctggcagtgatctccactat

SEQ ID NO: 2902385 - DNA, 25 bp, Homo sapien
gccaggctgggagatcgatatactt

SEQ ID NO: 2902386 - DNA, 25 bp, Homo sapien
agactcctcgaagacaggcgagagg

SEQ ID NO: 2902387 - DNA, 25 bp, Homo sapien
tcctcgaagacaggcgagaggtaga

SEQ ID NO: 2902388 - DNA, 25 bp, Homo sapien
gagatcgatatacttctgaggcaga

SEQ ID NO: 2902389 - DNA, 25 bp, Homo sapien
agccgactcggctcccgggatcggt

SEQ ID NO: 2902390 - DNA, 25 bp, Homo sapien
ctcccgggatcggtccattgagagt

SEQ ID NO: 2902391 - DNA, 25 bp, Homo sapien
tccccgcaggtagggagccgactcg

SEQ ID NO: 2902392 - DNA, 25 bp, Homo sapien
cgtccccgcaggtagggagccgact

SEQ ID NO: 2902393 - DNA, 25 bp, Homo sapien
agctcttccttctcgcctctctgag

SEQ ID NO: 2902394 - DNA, 25 bp, Homo sapien
cttccctttagccccagctcttcct

SEQ ID NO: 2902395 - DNA, 25 bp, Homo sapien
ccaggagctgcgtccccgcgcctcc

SEQ ID NO: 2902396 - DNA, 25 bp, Homo sapien
cttctcgcctctctgagcccaggag

SEQ ID NO: 2902397 - DNA, 25 bp, Homo sapien
tcgtggctcgcgtatcctctctgcc

SEQ ID NO: 2902398 - DNA, 25 bp, Homo sapien
cagcggaagcggtgtgtgtaaatgt

SEQ ID NO: 2902399 - DNA, 25 bp, Homo sapien
gtggcccctctctcgtggctcgcgt

SEQ ID NO: 2902400 - DNA, 25 bp, Homo sapien
acgtggctacttgcgcagcggaagc

SEQ ID NO: 2902401 - DNA, 25 bp, Homo sapien
gatgaggccggttagtcgcatgctc

SEQ ID NO: 2902402 - DNA, 25 bp, Homo sapien
gccaggacaagacgcatgcggatga

SEQ ID NO: 2902403 - DNA, 25 bp, Homo sapien
atctaggatccgacactccggccgt

SEQ ID NO: 2902404 - DNA, 25 bp, Homo sapien
taagaccgacggacgacagacggat

SEQ ID NO: 2902405 - DNA, 25 bp, Homo sapien
atcacccgtgtctccgcctcagtaa

SEQ ID NO: 2902406 - DNA, 25 bp, Homo sapien
agcgtcctcacaccgcgtcggcaag

SEQ ID NO: 2902407 - DNA, 25 bp, Homo sapien
tctccccagaaagccaatcatcacc

SEQ ID NO: 2902408 - DNA, 25 bp, Homo sapien
tggccaatcacaggacttcctctct

SEQ ID NO: 2902409 - DNA, 25 bp, Homo sapien
aagagtgcccgctacccccagatgg

SEQ ID NO: 2902410 - DNA, 25 bp, Homo sapien
tgataagagtgcccgctacccccag

SEQ ID NO: 2902411 - DNA, 25 bp, Homo sapien
ggctgcctcagtcctttcacagcca

SEQ ID NO: 2902412 - DNA, 25 bp, Homo sapien
tgcctcagtcctttcacagccaatt

SEQ ID NO: 2902413 - DNA, 25 bp, Homo sapien
ccagctctctgggacgatggtccgg

SEQ ID NO: 2902414 - DNA, 25 bp, Homo sapien
gctctctgggacgatggtccggctc

SEQ ID NO: 2902415 - DNA, 25 bp, Homo sapien
agccctggagattgggcacggcccc

SEQ ID NO: 2902416 - DNA, 25 bp, Homo sapien
tctctgggacgatggtccggctcca

SEQ ID NO: 2902417 - DNA, 25 bp, Homo sapien
aaaggcttcccgtgcagcgcgggcc

SEQ ID NO: 2902418 - DNA, 25 bp, Homo sapien
cccaagggcaaaggcttcccgtgca

SEQ ID NO: 2902419 - DNA, 25 bp, Homo sapien
gctcaggcccccaagggcaaaggct

SEQ ID NO: 2902420 - DNA, 25 bp, Homo sapien
tggagggtccactgcccgatgcatc

SEQ ID NO: 2902421 - DNA, 25 bp, Homo sapien
gcccagaactactgccatgtgaagg

SEQ ID NO: 2902422 - DNA, 25 bp, Homo sapien
cataatatggtttgctggggtgccc

SEQ ID NO: 2902423 - DNA, 25 bp, Homo sapien
gggctgcccaatgctggctgagcat

SEQ ID NO: 2902424 - DNA, 25 bp, Homo sapien
gggtgcccagaactactgccatgtg

SEQ ID NO: 2902425 - DNA, 25 bp, Homo sapien
cccagaaccttcaaatatccactca

SEQ ID NO: 2902426 - DNA, 25 bp, Homo sapien
ccagaaccttcaaatatccactcac

SEQ ID NO: 2902427 - DNA, 25 bp, Homo sapien
cagctcagcgaagcttcctccgtat

SEQ ID NO: 2902428 - DNA, 25 bp, Homo sapien
ctccgtatcgaagggcgctgtggta

SEQ ID NO: 2902429 - DNA, 25 bp, Homo sapien
tgactcgtacagttgcccaagctgt

SEQ ID NO: 2902430 - DNA, 25 bp, Homo sapien
tgtggcctcctcactatcgtgctct

SEQ ID NO: 2902431 - DNA, 25 bp, Homo sapien
gcaggaccttggctcggtgctggca

SEQ ID NO: 2902432 - DNA, 25 bp, Homo sapien
gttccacacttgctccagtgggggc

SEQ ID NO: 2902433 - DNA, 25 bp, Homo sapien
aagttccacacttgctccagtgggg

SEQ ID NO: 2902434 - DNA, 25 bp, Homo sapien
ggcaggagccagtatgaaagttcca

SEQ ID NO: 2902435 - DNA, 25 bp, Homo sapien
cgcttggctccatagttccgtttgt

SEQ ID NO: 2902436 - DNA, 25 bp, Homo sapien
cccgcttggctccatagttccgttt

SEQ ID NO: 2902437 - DNA, 25 bp, Homo sapien
gcttggctccatagttccgtttgtg

SEQ ID NO: 2902438 - DNA, 25 bp, Homo sapien
ccgcttggctccatagttccgtttg

SEQ ID NO: 2902439 - DNA, 25 bp, Homo sapien
tgcagcctctccttcgcttgcctcc

SEQ ID NO: 2902440 - DNA, 25 bp, Homo sapien
cagcctctccttcgcttgcctccag

SEQ ID NO: 2902441 - DNA, 25 bp, Homo sapien
tctccttcgcttgcctccagggctg

SEQ ID NO: 2902442 - DNA, 25 bp, Homo sapien
gcctctccttcgcttgcctccaggg

SEQ ID NO: 2902443 - DNA, 25 bp, Homo sapien
ctggtagccaggccaggcaggggtg

SEQ ID NO: 2902444 - DNA, 25 bp, Homo sapien
gtggtggtaatggtggtggaggcag

SEQ ID NO: 2902445 - DNA, 25 bp, Homo sapien
gtggtggaggcagtggcagccctgg

SEQ ID NO: 2902446 - DNA, 25 bp, Homo sapien
ggtggaggcagtggcagccctgggg

SEQ ID NO: 2902447 - DNA, 25 bp, Homo sapien
gtgctgaacccttgcgctctgggcc

SEQ ID NO: 2902448 - DNA, 25 bp, Homo sapien
gcagggtactccacagccctggctt

SEQ ID NO: 2902449 - DNA, 25 bp, Homo sapien
tctgggggtgctgaacccttgcgct

SEQ ID NO: 2902450 - DNA, 25 bp, Homo sapien
atctccatgcagggtactccacagc

SEQ ID NO: 2902451 - DNA, 25 bp, Homo sapien
gggtgcgcggtgtacgctggagctg

SEQ ID NO: 2902452 - DNA, 25 bp, Homo sapien
ggtgcgcggtgtacgctggagctgg

SEQ ID NO: 2902453 - DNA, 25 bp, Homo sapien
gctggagctgggtatggatatgggt

SEQ ID NO: 2902454 - DNA, 25 bp, Homo sapien
gtatggatatgggtgaggcagcgag

SEQ ID NO: 2902455 - DNA, 25 bp, Homo sapien
ggagtccatccgcgacctctgaact

SEQ ID NO: 2902456 - DNA, 25 bp, Homo sapien
gtccatccgcgacctctgaactctg

SEQ ID NO: 2902457 - DNA, 25 bp, Homo sapien
acgctggagtccatccgcgacctct

SEQ ID NO: 2902458 - DNA, 25 bp, Homo sapien
gctggagtccatccgcgacctctga

SEQ ID NO: 2902459 - DNA, 25 bp, Homo sapien
tggtggtggtgccggggaggccagg

SEQ ID NO: 2902460 - DNA, 25 bp, Homo sapien
ctgctggtggtggtgccggggaggc

SEQ ID NO: 2902461 - DNA, 25 bp, Homo sapien
gctggtggtggtgccggggaggcca

SEQ ID NO: 2902462 - DNA, 25 bp, Homo sapien
tgctggtggtggtgccggggaggcc

SEQ ID NO: 2902463 - DNA, 25 bp, Homo sapien
tgggttcggctccacgccccggaga

SEQ ID NO: 2902464 - DNA, 25 bp, Homo sapien
ctccacgccccggagaccagtgttg

SEQ ID NO: 2902465 - DNA, 25 bp, Homo sapien
aatgcctgggttcggctccacgccc

SEQ ID NO: 2902466 - DNA, 25 bp, Homo sapien
cgccccggagaccagtgttgctgct

SEQ ID NO: 2902467 - DNA, 25 bp, Homo sapien
cccaggcggccatggtgagagacct

SEQ ID NO: 2902468 - DNA, 25 bp, Homo sapien
tttccgactgctgtgtgccgagggc

SEQ ID NO: 2902469 - DNA, 25 bp, Homo sapien
gagtttggtaatggtcagcgccggg

SEQ ID NO: 2902470 - DNA, 25 bp, Homo sapien
tgagagacctccagcgcgggagttt

SEQ ID NO: 2902471 - DNA, 25 bp, Homo sapien
ggaggggtgtgagaatcctgagtgc

SEQ ID NO: 2902472 - DNA, 25 bp, Homo sapien
gggtgtgagaatcctgagtgcccac

SEQ ID NO: 2902473 - DNA, 25 bp, Homo sapien
ggggtgtgagaatcctgagtgccca

SEQ ID NO: 2902474 - DNA, 25 bp, Homo sapien
agtgggaggggtgtgagaatcctga

SEQ ID NO: 2902475 - DNA, 25 bp, Homo sapien
tgggggaaaggacacaggcccagca

SEQ ID NO: 2902476 - DNA, 25 bp, Homo sapien
aggacacaggcccagcagggctgct

SEQ ID NO: 2902477 - DNA, 25 bp, Homo sapien
tggccagatagggtggtgggggaaa

SEQ ID NO: 2902478 - DNA, 25 bp, Homo sapien
ctggccagatagggtggtgggggaa

SEQ ID NO: 2902479 - DNA, 25 bp, Homo sapien
tcaggggtacaagaggtgggtcctg

SEQ ID NO: 2902480 - DNA, 25 bp, Homo sapien
cagggcaagagtcaggggtacaaga

SEQ ID NO: 2902481 - DNA, 25 bp, Homo sapien
aggcagggcaagagtcaggggtaca

SEQ ID NO: 2902482 - DNA, 25 bp, Homo sapien
caagagtcaggggtacaagaggtgg

SEQ ID NO: 2902483 - DNA, 25 bp, Homo sapien
gggctctccgggcgcctgaagcttc

SEQ ID NO: 2902484 - DNA, 25 bp, Homo sapien
tctccgggcgcctgaagcttcctga

SEQ ID NO: 2902485 - DNA, 25 bp, Homo sapien
cctgaagcttcctgaggtattttgg

SEQ ID NO: 2902486 - DNA, 25 bp, Homo sapien
cgggcgcctgaagcttcctgaggta

SEQ ID NO: 2902487 - DNA, 25 bp, Homo sapien
ggccagcccatcaggtaggatcttg

SEQ ID NO: 2902488 - DNA, 25 bp, Homo sapien
tcaaactggtcctccagcggagtgg

SEQ ID NO: 2902489 - DNA, 25 bp, Homo sapien
taggatcttgaattcggctggctcc

SEQ ID NO: 2902490 - DNA, 25 bp, Homo sapien
aaatcaaagagtcgagggcctcggg

SEQ ID NO: 2902491 - DNA, 25 bp, Homo sapien
caaggatttgagcaggctggccggg

SEQ ID NO: 2902492 - DNA, 25 bp, Homo sapien
cggaggccaaggatttgagcaggct

SEQ ID NO: 2902493 - DNA, 25 bp, Homo sapien
gccaaggatttgagcaggctggccg

SEQ ID NO: 2902494 - DNA, 25 bp, Homo sapien
gaggccaaggatttgagcaggctgg

SEQ ID NO: 2902495 - DNA, 25 bp, Homo sapien
agctgctccagtcccccgataacag

SEQ ID NO: 2902496 - DNA, 25 bp, Homo sapien
cagtcccccgataacagtacttttg

SEQ ID NO: 2902497 - DNA, 25 bp, Homo sapien
ggcggcagggcggtagcacctgatg

SEQ ID NO: 2902498 - DNA, 25 bp, Homo sapien
aggggaatactgagtggtgggcaag

SEQ ID NO: 2902499 - DNA, 25 bp, Homo sapien
gcagcagtcgctcagtcccactgtc

SEQ ID NO: 2902500 - DNA, 25 bp, Homo sapien
tgtccactgggtcggctgggtcagt

SEQ ID NO: 2902501 - DNA, 25 bp, Homo sapien
caagcccggctgatctcttctagca

SEQ ID NO: 2902502 - DNA, 25 bp, Homo sapien
acccgctccacaagggtctcgcaag

SEQ ID NO: 2902503 - DNA, 25 bp, Homo sapien
cttctgtcgccgcttacagctgcct

SEQ ID NO: 2902504 - DNA, 25 bp, Homo sapien
ctgtcgccgcttacagctgcctgac

SEQ ID NO: 2902505 - DNA, 25 bp, Homo sapien
tctgtcgccgcttacagctgcctga

SEQ ID NO: 2902506 - DNA, 25 bp, Homo sapien
ttctgtcgccgcttacagctgcctg

SEQ ID NO: 2902507 - DNA, 25 bp, Homo sapien
ctgtgccgccgatgctccttctgat

SEQ ID NO: 2902508 - DNA, 25 bp, Homo sapien
tgccgccgatgctccttctgatgct

SEQ ID NO: 2902509 - DNA, 25 bp, Homo sapien
gccgccgatgctccttctgatgctc

SEQ ID NO: 2902510 - DNA, 25 bp, Homo sapien
tgtgccgccgatgctccttctgatg

SEQ ID NO: 2902511 - DNA, 25 bp, Homo sapien
ggccttggaggccccgccaagatcg

SEQ ID NO: 2902512 - DNA, 25 bp, Homo sapien
ttggaggccccgccaagatcgggcc

SEQ ID NO: 2902513 - DNA, 25 bp, Homo sapien
gaccctggatctcctcgctctgcag

SEQ ID NO: 2902514 - DNA, 25 bp, Homo sapien
agatcgggccgggacttctcacgac

SEQ ID NO: 2902515 - DNA, 25 bp, Homo sapien
agcttcagcatgtcggcccggctga

SEQ ID NO: 2902516 - DNA, 25 bp, Homo sapien
cttgatgagccggatcttcagctcc

SEQ ID NO: 2902517 - DNA, 25 bp, Homo sapien
ccctcactaagtgagcgcagcttca

SEQ ID NO: 2902518 - DNA, 25 bp, Homo sapien
tcttccacctcagaggcgataaagg

SEQ ID NO: 2902519 - DNA, 25 bp, Homo sapien
tgatcttcggtttcacagactgggc

SEQ ID NO: 2902520 - DNA, 25 bp, Homo sapien
tgggcaggggaaaggtaggactctc

SEQ ID NO: 2902521 - DNA, 25 bp, Homo sapien
tcctcagtgttgatcttcggtttca

SEQ ID NO: 2902522 - DNA, 25 bp, Homo sapien
gcagcttctcctcagtgttgatctt

SEQ ID NO: 2902523 - DNA, 25 bp, Homo sapien
caggccccggatcactgtgatggga

SEQ ID NO: 2902524 - DNA, 25 bp, Homo sapien
tgatgggatttcgagggtctgtaca

SEQ ID NO: 2902525 - DNA, 25 bp, Homo sapien
ggtctgtacagaactgcagcaggac

SEQ ID NO: 2902526 - DNA, 25 bp, Homo sapien
tcactgtgatgggatttcgagggtc

SEQ ID NO: 2902527 - DNA, 25 bp, Homo sapien
ggcctggtactgtgcgtacttggca

SEQ ID NO: 2902528 - DNA, 25 bp, Homo sapien
tctcacaaggccagatctgccgagt

SEQ ID NO: 2902529 - DNA, 25 bp, Homo sapien
acttccacggtgtgttcgccactcg

SEQ ID NO: 2902530 - DNA, 25 bp, Homo sapien
gctgctgcacctgggtgcgaacttc

SEQ ID NO: 2902531 - DNA, 25 bp, Homo sapien
aggaggggttccagtggtgctgtct

SEQ ID NO: 2902532 - DNA, 25 bp, Homo sapien
ctaggaggggttccagtggtgctgt

SEQ ID NO: 2902533 - DNA, 25 bp, Homo sapien
taggaggggttccagtggtgctgtc

SEQ ID NO: 2902534 - DNA, 25 bp, Homo sapien
gacaagtcgatgttggtgccaaact

SEQ ID NO: 2902535 - DNA, 25 bp, Homo sapien
gatgatgtgatggttcttcgggtct

SEQ ID NO: 2902536 - DNA, 25 bp, Homo sapien
cgcttagcatcagacaagtcgatgt

SEQ ID NO: 2902537 - DNA, 25 bp, Homo sapien
tggtgccaaacttgatgatgtgatg

SEQ ID NO: 2902538 - DNA, 25 bp, Homo sapien
gctcagcatgttgcccgtggatgtt

SEQ ID NO: 2902539 - DNA, 25 bp, Homo sapien
tgcaccgtgttcatgcccaggatgg

SEQ ID NO: 2902540 - DNA, 25 bp, Homo sapien
tgccgggcaccttcatgtacagctg

SEQ ID NO: 2902541 - DNA, 25 bp, Homo sapien
tacccgcatgaaggcgggcagcttc

SEQ ID NO: 2902542 - DNA, 25 bp, Homo sapien
gcgaaccactcgcagtcgcctgggc

SEQ ID NO: 2902543 - DNA, 25 bp, Homo sapien
tagtgctcgtgcaccgcgaaccact

SEQ ID NO: 2902544 - DNA, 25 bp, Homo sapien
tcccagtagtgctcgtgcaccgcga

SEQ ID NO: 2902545 - DNA, 25 bp, Homo sapien
ccaatgttgatgttgacggagcaga

SEQ ID NO: 2902546 - DNA, 25 bp, Homo sapien
gcggtacacaggaatattggatgca

SEQ ID NO: 2902547 - DNA, 25 bp, Homo sapien
caggaacccgtcaagtagtccacgc

SEQ ID NO: 2902548 - DNA, 25 bp, Homo sapien
tagagatcatccaggattggccacc

SEQ ID NO: 2902549 - DNA, 25 bp, Homo sapien
cattaatccacacgaggtctccggg

SEQ ID NO: 2902550 - DNA, 25 bp, Homo sapien
catgacacgtgaatcatgggcacga

SEQ ID NO: 2902551 - DNA, 25 bp, Homo sapien
gatggatttgacgttcttcacctca

SEQ ID NO: 2902552 - DNA, 25 bp, Homo sapien
tcattccactcgtatcgttccaggg

SEQ ID NO: 2902553 - DNA, 25 bp, Homo sapien
ttgaccgtgcgagccacgttccatg

SEQ ID NO: 2902554 - DNA, 25 bp, Homo sapien
cctggcagtgcttcatggactgcag

SEQ ID NO: 2902555 - DNA, 25 bp, Homo sapien
cactcgttgcagtagtaggctggct

SEQ ID NO: 2902556 - DNA, 25 bp, Homo sapien
ttgacacggccctggtaagcgattt

SEQ ID NO: 2902557 - DNA, 25 bp, Homo sapien
aggctctcgcgttgcacctggcagt

SEQ ID NO: 2902558 - DNA, 25 bp, Homo sapien
acagccctcgcagtgtaccaggtac

SEQ ID NO: 2902559 - DNA, 25 bp, Homo sapien
gccattctcacttgtcacgaacagg

SEQ ID NO: 2902560 - DNA, 25 bp, Homo sapien
gagccagctcctcagtgcggtactg

SEQ ID NO: 2902561 - DNA, 25 bp, Homo sapien
taccaggtacgtgttgcggctgcca

SEQ ID NO: 2902562 - DNA, 25 bp, Homo sapien
cggcgggggctcagggaaaggcgcg

SEQ ID NO: 2902563 - DNA, 25 bp, Homo sapien
cgggctcccgaagcccgtccctgca

SEQ ID NO: 2902564 - DNA, 25 bp, Homo sapien
ggctcagggaaaggcgcggccgggc

SEQ ID NO: 2902565 - DNA, 25 bp, Homo sapien
tgccccagtgccctcctccgctgcc

SEQ ID NO: 2902566 - DNA, 25 bp, Homo sapien
tatgtacatacacgagccgcgtgca

SEQ ID NO: 2902567 - DNA, 25 bp, Homo sapien
tcattaaaaacctcggctgccgtaa

SEQ ID NO: 2902568 - DNA, 25 bp, Homo sapien
cacttcttcccctacagtacaggag

SEQ ID NO: 2902569 - DNA, 25 bp, Homo sapien
agtacaggagttgctcaccctcagg

SEQ ID NO: 2902570 - DNA, 25 bp, Homo sapien
cagtgcgagggtgcgggactgtaaa

SEQ ID NO: 2902571 - DNA, 25 bp, Homo sapien
tggccctgggttgtttcacacttaa

SEQ ID NO: 2902572 - DNA, 25 bp, Homo sapien
gcagagagacagtgcagtgcgaggg

SEQ ID NO: 2902573 - DNA, 25 bp, Homo sapien
cagtgcagtgcgagggtgcgggact

SEQ ID NO: 2902574 - DNA, 25 bp, Homo sapien
ttttaatattaatattctcacacaa

SEQ ID NO: 2902575 - DNA, 25 bp, Homo sapien
tttttaatattaatattctcacaca

SEQ ID NO: 2902576 - DNA, 25 bp, Homo sapien
agagccctggacattccacaggcgc

SEQ ID NO: 2902577 - DNA, 25 bp, Homo sapien
tcccgaggagcggaccagagccctg

SEQ ID NO: 2902578 - DNA, 25 bp, Homo sapien
accaccagccgttagcgaaacagga

SEQ ID NO: 2902579 - DNA, 25 bp, Homo sapien
aatgcggctctaggattaggcaccc

SEQ ID NO: 2902580 - DNA, 25 bp, Homo sapien
agcatggtgacagcgggtagcaaga

SEQ ID NO: 2902581 - DNA, 25 bp, Homo sapien
aagaacagcgcaggcccaacagtcc

SEQ ID NO: 2902582 - DNA, 25 bp, Homo sapien
caggagaagattgaaggcagccacc

SEQ ID NO: 2902583 - DNA, 25 bp, Homo sapien
gggtagcaagatggtccctagcacc

SEQ ID NO: 2902584 - DNA, 25 bp, Homo sapien
tcacacgcacaccccggggcgcacg

SEQ ID NO: 2902585 - DNA, 25 bp, Homo sapien
gtagctggccagagcaagcacgagc

SEQ ID NO: 2902586 - DNA, 25 bp, Homo sapien
ctttcctgatgtgggaacggcctgg

SEQ ID NO: 2902587 - DNA, 25 bp, Homo sapien
acgaggagcaggaatccggtgacca

SEQ ID NO: 2902588 - DNA, 25 bp, Homo sapien
ctgtagggcacgaggcaatcggcta

SEQ ID NO: 2902589 - DNA, 25 bp, Homo sapien
agggttgttcttgactcgagggtca

SEQ ID NO: 2902590 - DNA, 25 bp, Homo sapien
gagggcagccgtcagggttgttctt

SEQ ID NO: 2902591 - DNA, 25 bp, Homo sapien
cagggttgttcttgactcgagggtc

SEQ ID NO: 2902592 - DNA, 25 bp, Homo sapien
tcagggttgttcttgactcgagggt

SEQ ID NO: 2902593 - DNA, 25 bp, Homo sapien
tgttgtcccattcacgacggagctg

SEQ ID NO: 2902594 - DNA, 25 bp, Homo sapien
caggtcggaagatgccgggcttcaa

SEQ ID NO: 2902595 - DNA, 25 bp, Homo sapien
gagaagctgcaccataaaacgaggg

SEQ ID NO: 2902596 - DNA, 25 bp, Homo sapien
caggttccagcctagatgttcagga

SEQ ID NO: 2902597 - DNA, 25 bp, Homo sapien
gaacggacaaaagcgataaggccag

SEQ ID NO: 2902598 - DNA, 25 bp, Homo sapien
gcaacaccgagttcctctaagctgg

SEQ ID NO: 2902599 - DNA, 25 bp, Homo sapien
gctgggcccctccactctattgagg

SEQ ID NO: 2902600 - DNA, 25 bp, Homo sapien
tgatagtacttgtgccacgcctctg

SEQ ID NO: 2902601 - DNA, 25 bp, Homo sapien
catcgtttccattgaggtgcagagg

SEQ ID NO: 2902602 - DNA, 25 bp, Homo sapien
accacgatggcgcttacctttcaga

SEQ ID NO: 2902603 - DNA, 25 bp, Homo sapien
gatgccggtgcaggatagcacaccc

SEQ ID NO: 2902604 - DNA, 25 bp, Homo sapien
ttaaacttatgaccgaatgggcctg

SEQ ID NO: 2902605 - DNA, 25 bp, Homo sapien
gaaacgtagtatgagtcccgcgtgg

SEQ ID NO: 2902606 - DNA, 25 bp, Homo sapien
gatcaagtaattgagttgcgccgct

SEQ ID NO: 2902607 - DNA, 25 bp, Homo sapien
tacgctccgttttaattcagtggcc

SEQ ID NO: 2902608 - DNA, 25 bp, Homo sapien
gtttggactgcacgtgttcacggga

SEQ ID NO: 2902609 - DNA, 25 bp, Homo sapien
tccgccggcgtgaaatagcgacgct

SEQ ID NO: 2902610 - DNA, 25 bp, Homo sapien
cctgtgccaatgacgttaggtcgta

SEQ ID NO: 2902611 - DNA, 25 bp, Homo sapien
tgaaaatactccaagtctggcccag

SEQ ID NO: 2902612 - DNA, 25 bp, Homo sapien
ttaggtcgtacacgcgtcccaggta

SEQ ID NO: 2902613 - DNA, 25 bp, Homo sapien
gcaacttccacgatgggtttcagca

SEQ ID NO: 2902614 - DNA, 25 bp, Homo sapien
aaaccagtggctgatatcctggcct

SEQ ID NO: 2902615 - DNA, 25 bp, Homo sapien
tcaaaccagtggctgatatcctggc

SEQ ID NO: 2902616 - DNA, 25 bp, Homo sapien
tccacgatgggtttcagcagcaggt

SEQ ID NO: 2902617 - DNA, 25 bp, Homo sapien
cagtgtgtgctcctgcgacgtgagc

SEQ ID NO: 2902618 - DNA, 25 bp, Homo sapien
cgtgttaatgatgcggatgctccgg

SEQ ID NO: 2902619 - DNA, 25 bp, Homo sapien
tcgttggcccagtccgaacagggca

SEQ ID NO: 2902620 - DNA, 25 bp, Homo sapien
tcaggcagccggtcagcggatctat

SEQ ID NO: 2902621 - DNA, 25 bp, Homo sapien
agaaaatacactcccaccggttatg

SEQ ID NO: 2902622 - DNA, 25 bp, Homo sapien
tgttcccaggcttataaaggagtct

SEQ ID NO: 2902623 - DNA, 25 bp, Homo sapien
aatgttgccctgaagatcggcctgg

SEQ ID NO: 2902624 - DNA, 25 bp, Homo sapien
agatacatgaactgctgttcccagg

SEQ ID NO: 2902625 - DNA, 25 bp, Homo sapien
cagcatgtgagttataggggagata

SEQ ID NO: 2902626 - DNA, 25 bp, Homo sapien
gtaggatttcccatatggactccag

SEQ ID NO: 2902627 - DNA, 25 bp, Homo sapien
ggagatagcggtgtaggatttccca

SEQ ID NO: 2902628 - DNA, 25 bp, Homo sapien
tagcggtgtaggatttcccatatgg

SEQ ID NO: 2902629 - DNA, 25 bp, Homo sapien
ctccgtgagatcatcattgaagtac

SEQ ID NO: 2902630 - DNA, 25 bp, Homo sapien
ggtgtgtgaagtgtaccgtccatac

SEQ ID NO: 2902631 - DNA, 25 bp, Homo sapien
tgtaccgtccatactgagatagtca

SEQ ID NO: 2902632 - DNA, 25 bp, Homo sapien
cctcatcccggatcccattctcttc

SEQ ID NO: 2902633 - DNA, 25 bp, Homo sapien
gcctgaattgcctataatgacgcac

SEQ ID NO: 2902634 - DNA, 25 bp, Homo sapien
taagccagctttgtatggtcaatga

SEQ ID NO: 2902635 - DNA, 25 bp, Homo sapien
tacacttcagaagggcacaggctag

SEQ ID NO: 2902636 - DNA, 25 bp, Homo sapien
gaaatacgtcttgagtctacacgag

SEQ ID NO: 2902637 - DNA, 25 bp, Homo sapien
ttaacaaagaagtagccccaatagc

SEQ ID NO: 2902638 - DNA, 25 bp, Homo sapien
gatactgccgaagccaacagcaatg

SEQ ID NO: 2902639 - DNA, 25 bp, Homo sapien
gaaaatgcctatatagcccaccagt

SEQ ID NO: 2902640 - DNA, 25 bp, Homo sapien
ttggagtcaccgtcttgcaaccctg

SEQ ID NO: 2902641 - DNA, 25 bp, Homo sapien
gacatgtaatgaactgaaagccagt

SEQ ID NO: 2902642 - DNA, 25 bp, Homo sapien
ccctgaggcttgcactagaggaaca

SEQ ID NO: 2902643 - DNA, 25 bp, Homo sapien
tccgtagcagtttagacaagaggtg

SEQ ID NO: 2902644 - DNA, 25 bp, Homo sapien
aagggatgtgtttctagcaagagac

SEQ ID NO: 2902645 - DNA, 25 bp, Homo sapien
gatgtgaacaagatctctgccctcg

SEQ ID NO: 2902646 - DNA, 25 bp, Homo sapien
ggaacatttaggatcagctaggtgg

SEQ ID NO: 2902647 - DNA, 25 bp, Homo sapien
cgcagccagcctattacagccataa

SEQ ID NO: 2902648 - DNA, 25 bp, Homo sapien
gcttacaatctagcagcgcagccag

SEQ ID NO: 2902649 - DNA, 25 bp, Homo sapien
caaaatttattgagctgcaactgtg

SEQ ID NO: 2902650 - DNA, 25 bp, Homo sapien
ttcaaaatttattgagctgcaactg

SEQ ID NO: 2902651 - DNA, 25 bp, Homo sapien
tcaaaatttattgagctgcaactgt

SEQ ID NO: 2902652 - DNA, 25 bp, Homo sapien
ctgtgggaaatcttgccagttgagt

SEQ ID NO: 2902653 - DNA, 25 bp, Homo sapien
aagctgctgtgattcactgaggacg

SEQ ID NO: 2902654 - DNA, 25 bp, Homo sapien
gtgggaaatcttgccagttgagtcc

SEQ ID NO: 2902655 - DNA, 25 bp, Homo sapien
ctgctgtgattcactgaggacggca

SEQ ID NO: 2902656 - DNA, 25 bp, Homo sapien
tgcttccggtgtgcctagaatacct

SEQ ID NO: 2902657 - DNA, 25 bp, Homo sapien
gcttccaggataaagatcagtcagg

SEQ ID NO: 2902658 - DNA, 25 bp, Homo sapien
tctactgacccatgatcaagtggct

SEQ ID NO: 2902659 - DNA, 25 bp, Homo sapien
cacccctttgggagtagaagtgagc

SEQ ID NO: 2902660 - DNA, 25 bp, Homo sapien
gcttgagatgatacttccccagaag

SEQ ID NO: 2902661 - DNA, 25 bp, Homo sapien
cttgtccttcaaatcttagcttgag

SEQ ID NO: 2902662 - DNA, 25 bp, Homo sapien
cctgatgtgtgtttcatacttagct

SEQ ID NO: 2902663 - DNA, 25 bp, Homo sapien
cagaaggcttggtccccccgaactg

SEQ ID NO: 2902664 - DNA, 25 bp, Homo sapien
aagatctggacatgtgcctgcctgc

SEQ ID NO: 2902665 - DNA, 25 bp, Homo sapien
gggatctgatccttgactggctaca

SEQ ID NO: 2902666 - DNA, 25 bp, Homo sapien
gtagattgcacttcgtccttaaggg

SEQ ID NO: 2902667 - DNA, 25 bp, Homo sapien
catcttacgtgacctctgtgcagca

SEQ ID NO: 2902668 - DNA, 25 bp, Homo sapien
tgtagtgacacgatctcggctcacc

SEQ ID NO: 2902669 - DNA, 25 bp, Homo sapien
cacctcccaggttcaagcaattctc

SEQ ID NO: 2902670 - DNA, 25 bp, Homo sapien
ctcaccgaaacctccacctcccagg

SEQ ID NO: 2902671 - DNA, 25 bp, Homo sapien
cgcccccaagctggagtgtagtgac

SEQ ID NO: 2902672 - DNA, 25 bp, Homo sapien
ggtgaccttaggatccacatgaatg

SEQ ID NO: 2902673 - DNA, 25 bp, Homo sapien
cattcattgaagactgacatctggc

SEQ ID NO: 2902674 - DNA, 25 bp, Homo sapien
gagacaatgtagtcccttagctcct

SEQ ID NO: 2902675 - DNA, 25 bp, Homo sapien
tagtcctgccatcatcttgggtgac

SEQ ID NO: 2902676 - DNA, 25 bp, Homo sapien
gattacgttagcaactggagccaaa

SEQ ID NO: 2902677 - DNA, 25 bp, Homo sapien
tatgtagacctcatatggctggagt

SEQ ID NO: 2902678 - DNA, 25 bp, Homo sapien
tagttgcatttgaggttagctccca

SEQ ID NO: 2902679 - DNA, 25 bp, Homo sapien
gaaaccacagtagttgccactggga

SEQ ID NO: 2902680 - DNA, 25 bp, Homo sapien
gatttgccatatctatatatcagct

SEQ ID NO: 2902681 - DNA, 25 bp, Homo sapien
taagatcaagttagtagttagagac

SEQ ID NO: 2902682 - DNA, 25 bp, Homo sapien
caaggaggaaacttcagtccttcat

SEQ ID NO: 2902683 - DNA, 25 bp, Homo sapien
tgcatgctactaataatataggtac

SEQ ID NO: 2902684 - DNA, 25 bp, Homo sapien
agtctctgactgtgtgtggctcttc

SEQ ID NO: 2902685 - DNA, 25 bp, Homo sapien
catactgtgtatgggaagtgtctcc

SEQ ID NO: 2902686 - DNA, 25 bp, Homo sapien
atgtgggccacactgcgcatcatgt

SEQ ID NO: 2902687 - DNA, 25 bp, Homo sapien
tgactgggaagatgacgcacatttt

SEQ ID NO: 2902688 - DNA, 25 bp, Homo sapien
acccatcttcggcggtgctcaggag

SEQ ID NO: 2902689 - DNA, 25 bp, Homo sapien
gccacccatcttcggcggtgctcag

SEQ ID NO: 2902690 - DNA, 25 bp, Homo sapien
catcttcggcggtgctcaggagcac

SEQ ID NO: 2902691 - DNA, 25 bp, Homo sapien
gctggccacccatcttcggcggtgc

SEQ ID NO: 2902692 - DNA, 25 bp, Homo sapien
ctcattgaagtcacaacgcatttaa

SEQ ID NO: 2902693 - DNA, 25 bp, Homo sapien
tcttttaaatgagaagcgggactgg

SEQ ID NO: 2902694 - DNA, 25 bp, Homo sapien
gggagagatatgaatagatacgatg

SEQ ID NO: 2902695 - DNA, 25 bp, Homo sapien
gatagaaatcctagtgacttttggg

SEQ ID NO: 2902696 - DNA, 25 bp, Homo sapien
catgctcagtctgacatcagcataa

SEQ ID NO: 2902697 - DNA, 25 bp, Homo sapien
tccccttcaggcattgaaaaggaaa

SEQ ID NO: 2902698 - DNA, 25 bp, Homo sapien
tgattagtgcacagattaatagaga

SEQ ID NO: 2902699 - DNA, 25 bp, Homo sapien
ggcattaatcagtactcatgctcag

SEQ ID NO: 2902700 - DNA, 25 bp, Homo sapien
cggcccgcgcccgagtactccctcg

SEQ ID NO: 2902701 - DNA, 25 bp, Homo sapien
gcccgcgcccgagtactccctcgtc

SEQ ID NO: 2902702 - DNA, 25 bp, Homo sapien
cgcccgagtactccctcgtcgtcgt

SEQ ID NO: 2902703 - DNA, 25 bp, Homo sapien
ccgcgcccgagtactccctcgtcgt

SEQ ID NO: 2902704 - DNA, 25 bp, Homo sapien
gccgccagggtctcggcggtccctc

SEQ ID NO: 2902705 - DNA, 25 bp, Homo sapien
cgaaagccgcgaccgagtggcccgg

SEQ ID NO: 2902706 - DNA, 25 bp, Homo sapien
tggcttcgccttggccgtttcctgc

SEQ ID NO: 2902707 - DNA, 25 bp, Homo sapien
cggtccctcgctcggccagggaggg

SEQ ID NO: 2902708 - DNA, 25 bp, Homo sapien
gaaagtcatctgagggggtgtatct

SEQ ID NO: 2902709 - DNA, 25 bp, Homo sapien
ctgggtcactcattcgacttggagg

SEQ ID NO: 2902710 - DNA, 25 bp, Homo sapien
agggggtgtatctgggtcactcatt

SEQ ID NO: 2902711 - DNA, 25 bp, Homo sapien
tgggtcactcattcgacttggaggg

SEQ ID NO: 2902712 - DNA, 25 bp, Homo sapien
ctgcacatgcgtactgcaggcaggg

SEQ ID NO: 2902713 - DNA, 25 bp, Homo sapien
caccataataggtctgctgcacatg

SEQ ID NO: 2902714 - DNA, 25 bp, Homo sapien
gaaactaccagaattttccgcacca

SEQ ID NO: 2902715 - DNA, 25 bp, Homo sapien
taggtctgctgcacatgcgtactgc

SEQ ID NO: 2902716 - DNA, 25 bp, Homo sapien
gactctcccacatccccggctcgga

SEQ ID NO: 2902717 - DNA, 25 bp, Homo sapien
agcagccactcaatgctggcctgga

SEQ ID NO: 2902718 - DNA, 25 bp, Homo sapien
cagccactcaatgctggcctggagc

SEQ ID NO: 2902719 - DNA, 25 bp, Homo sapien
tcggtctcagcagccactcaatgct

SEQ ID NO: 2902720 - DNA, 25 bp, Homo sapien
gcagggataggtccctggctttctc

SEQ ID NO: 2902721 - DNA, 25 bp, Homo sapien
cccaccccattatctgtgaaggtgt

SEQ ID NO: 2902722 - DNA, 25 bp, Homo sapien
tctgtgaaggtgtcactctgtgaag

SEQ ID NO: 2902723 - DNA, 25 bp, Homo sapien
tcagcagggataggtccctggcttt

SEQ ID NO: 2902724 - DNA, 25 bp, Homo sapien
tatacgcagtatgggagacccaaac

SEQ ID NO: 2902725 - DNA, 25 bp, Homo sapien
agatataggcacagacagacacacc

SEQ ID NO: 2902726 - DNA, 25 bp, Homo sapien
gagaaagtctccacaattacctaaa

SEQ ID NO: 2902727 - DNA, 25 bp, Homo sapien
tatgccttctcaaaagcacgcgcgc

SEQ ID NO: 2902728 - DNA, 25 bp, Homo sapien
tcatttttacttcttgcccacagga

SEQ ID NO: 2902729 - DNA, 25 bp, Homo sapien
aaagaaatcctcagctggtcatttt

SEQ ID NO: 2902730 - DNA, 25 bp, Homo sapien
cttgcccacaggatcacagtgtctg

SEQ ID NO: 2902731 - DNA, 25 bp, Homo sapien
ggcatcctgtcaccccaacacagtc

SEQ ID NO: 2902732 - DNA, 25 bp, Homo sapien
aggcatcctgtcaccccaacacagt

SEQ ID NO: 2902733 - DNA, 25 bp, Homo sapien
caggcatcctgtcaccccaacacag

SEQ ID NO: 2902734 - DNA, 25 bp, Homo sapien
ccctgacatccttttgccaagaggg

SEQ ID NO: 2902735 - DNA, 25 bp, Homo sapien
gcctctatttacatttcctcggata

SEQ ID NO: 2902736 - DNA, 25 bp, Homo sapien
ggaggcctctatttacatttcctcg

SEQ ID NO: 2902737 - DNA, 25 bp, Homo sapien
tccttttgccaagagggaggcctct

SEQ ID NO: 2902738 - DNA, 25 bp, Homo sapien
tggggagacacaagctggcagctcc

SEQ ID NO: 2902739 - DNA, 25 bp, Homo sapien
agtggggagacacaagctggcagct

SEQ ID NO: 2902740 - DNA, 25 bp, Homo sapien
ggagacacaagctggcagctcccta

SEQ ID NO: 2902741 - DNA, 25 bp, Homo sapien
gggagacacaagctggcagctccct

SEQ ID NO: 2902742 - DNA, 25 bp, Homo sapien
tctgactgtggcaggtcctttcagt

SEQ ID NO: 2902743 - DNA, 25 bp, Homo sapien
tgtggcaggtcctttcagtcaccgc

SEQ ID NO: 2902744 - DNA, 25 bp, Homo sapien
cctcacttcgccagctggcatcctg

SEQ ID NO: 2902745 - DNA, 25 bp, Homo sapien
aggtcctttcagtcaccgccagggc

SEQ ID NO: 2902746 - DNA, 25 bp, Homo sapien
tctgcttcttgggtcctcgttttct

SEQ ID NO: 2902747 - DNA, 25 bp, Homo sapien
tcacacccaatgctgacggcagcag

SEQ ID NO: 2902748 - DNA, 25 bp, Homo sapien
ggcagcagccgaatgtcatccttat

SEQ ID NO: 2902749 - DNA, 25 bp, Homo sapien
tgcttcttgggtcctcgttttctct

SEQ ID NO: 2902750 - DNA, 25 bp, Homo sapien
acccggtccggttccatattcactg

SEQ ID NO: 2902751 - DNA, 25 bp, Homo sapien
ttctcccggtactcatctcgctcag

SEQ ID NO: 2902752 - DNA, 25 bp, Homo sapien
tcagaaccaaattcctcctcactgt

SEQ ID NO: 2902753 - DNA, 25 bp, Homo sapien
tcatctcgctcagaaccaaattcct

SEQ ID NO: 2902754 - DNA, 25 bp, Homo sapien
ccccaggtcagaagcagagttgctg

SEQ ID NO: 2902755 - DNA, 25 bp, Homo sapien
agaacacatgctccacatcctccag

SEQ ID NO: 2902756 - DNA, 25 bp, Homo sapien
gcagagttgctgatgacttctgttc

SEQ ID NO: 2902757 - DNA, 25 bp, Homo sapien
ggtaatcctcctcagagaacacatg

SEQ ID NO: 2902758 - DNA, 25 bp, Homo sapien
gggttgttggcactgaactctctcc

SEQ ID NO: 2902759 - DNA, 25 bp, Homo sapien
ttaggattcttcttagcaattaggg

SEQ ID NO: 2902760 - DNA, 25 bp, Homo sapien
gaactctctccatttggccccaagg

SEQ ID NO: 2902761 - DNA, 25 bp, Homo sapien
ccaaggatggtcatcatcttagaca

SEQ ID NO: 2902762 - DNA, 25 bp, Homo sapien
cgctgccgccgccacagcagctgct

SEQ ID NO: 2902763 - DNA, 25 bp, Homo sapien
tgccgccgccacagcagctgctgac

SEQ ID NO: 2902764 - DNA, 25 bp, Homo sapien
ctgccgccgccacagcagctgctga

SEQ ID NO: 2902765 - DNA, 25 bp, Homo sapien
cgacgagacagcagctgacacctgc

SEQ ID NO: 2902766 - DNA, 25 bp, Homo sapien
gccgacgagacagcagctgacacct

SEQ ID NO: 2902767 - DNA, 25 bp, Homo sapien
gggtggccgacgagacagcagctga

SEQ ID NO: 2902768 - DNA, 25 bp, Homo sapien
gtggccgacgagacagcagctgaca

SEQ ID NO: 2902769 - DNA, 25 bp, Homo sapien
tcggatgggtgggggctggatatca

SEQ ID NO: 2902770 - DNA, 25 bp, Homo sapien
cttcggatgggtgggggctggatat

SEQ ID NO: 2902771 - DNA, 25 bp, Homo sapien
ggatgggtgggggctggatatcagc

SEQ ID NO: 2902772 - DNA, 25 bp, Homo sapien
gatgggtgggggctggatatcagca

SEQ ID NO: 2902773 - DNA, 25 bp, Homo sapien
ttcttgcgtccatcaggcactcggg

SEQ ID NO: 2902774 - DNA, 25 bp, Homo sapien
gggctcttactccgcctcttatggc

SEQ ID NO: 2902775 - DNA, 25 bp, Homo sapien
ttctttccccgaagcttcttgcgtc

SEQ ID NO: 2902776 - DNA, 25 bp, Homo sapien
tagttttattttgagtggtgccatt

SEQ ID NO: 2902777 - DNA, 25 bp, Homo sapien
tttcttggtgcggacagggccatca

SEQ ID NO: 2902778 - DNA, 25 bp, Homo sapien
tccaggtctgattcctcagcctctg

SEQ ID NO: 2902779 - DNA, 25 bp, Homo sapien
tttagtttcttggtgcggacagggc

SEQ ID NO: 2902780 - DNA, 25 bp, Homo sapien
tcagcctctggttcaggaccttcgt

SEQ ID NO: 2902781 - DNA, 25 bp, Homo sapien
tcctggtgatccgtctcgtagccat

SEQ ID NO: 2902782 - DNA, 25 bp, Homo sapien
acagtaatcctggtgatccgtctcg

SEQ ID NO: 2902783 - DNA, 25 bp, Homo sapien
gtaatcctggtgatccgtctcgtag

SEQ ID NO: 2902784 - DNA, 25 bp, Homo sapien
tgatccgtctcgtagccatcaacct

SEQ ID NO: 2902785 - DNA, 25 bp, Homo sapien
taggcacgagggcaggtgtcacaca

SEQ ID NO: 2902786 - DNA, 25 bp, Homo sapien
atttgccctctggagcccggtcaag

SEQ ID NO: 2902787 - DNA, 25 bp, Homo sapien
ggtgtcacacagaataatttcccca

SEQ ID NO: 2902788 - DNA, 25 bp, Homo sapien
tcaggatcaaggcagacgaggtggt

SEQ ID NO: 2902789 - DNA, 25 bp, Homo sapien
tagacactcggacatctgttactaa

SEQ ID NO: 2902790 - DNA, 25 bp, Homo sapien
tacattaggatcctagacactcgga

SEQ ID NO: 2902791 - DNA, 25 bp, Homo sapien
ttactaagaagtccagccatctggg

SEQ ID NO: 2902792 - DNA, 25 bp, Homo sapien
tgggagaaaggaatacattaggatc

SEQ ID NO: 2902793 - DNA, 25 bp, Homo sapien
ctccatgtgatcatcctcctcctcc

SEQ ID NO: 2902794 - DNA, 25 bp, Homo sapien
cttcctctccctcctcttcgtattc

SEQ ID NO: 2902795 - DNA, 25 bp, Homo sapien
tcctctccctcctcttcgtattctt

SEQ ID NO: 2902796 - DNA, 25 bp, Homo sapien
ctctccctcctcttcgtattcttct

SEQ ID NO: 2902797 - DNA, 25 bp, Homo sapien
taggaggagatgcacgcgtcacagc

SEQ ID NO: 2902798 - DNA, 25 bp, Homo sapien
gagggtttagacaatgaatgtggta

SEQ ID NO: 2902799 - DNA, 25 bp, Homo sapien
tcaccattgggaatgtcaggcaggg

SEQ ID NO: 2902800 - DNA, 25 bp, Homo sapien
gagatgcacgcgtcacagcacagga

SEQ ID NO: 2902801 - DNA, 25 bp, Homo sapien
gagcagtgccagtaggatagtccta

SEQ ID NO: 2902802 - DNA, 25 bp, Homo sapien
aggatcttctgcactcgacccttca

SEQ ID NO: 2902803 - DNA, 25 bp, Homo sapien
gacaaagaactctcgctctgatctg

SEQ ID NO: 2902804 - DNA, 25 bp, Homo sapien
gatagtcctacccacttgacaaaga

SEQ ID NO: 2902805 - DNA, 25 bp, Homo sapien
gatgatgcggtggacggtcatccac

SEQ ID NO: 2902806 - DNA, 25 bp, Homo sapien
gcttgatgccaaaacgatagtactt

SEQ ID NO: 2902807 - DNA, 25 bp, Homo sapien
tcctccatctcagcatagtgcgggt

SEQ ID NO: 2902808 - DNA, 25 bp, Homo sapien
tccgctggtagtttcgatacataac

SEQ ID NO: 2902809 - DNA, 25 bp, Homo sapien
atggtaagtccctccattttactag

SEQ ID NO: 2902810 - DNA, 25 bp, Homo sapien
tcatcttcctcccacgtggactggt

SEQ ID NO: 2902811 - DNA, 25 bp, Homo sapien
tgcttatgttcttcgtattcaggga

SEQ ID NO: 2902812 - DNA, 25 bp, Homo sapien
tgttcttcgtattcagggatattca

SEQ ID NO: 2902813 - DNA, 25 bp, Homo sapien
atcattagtgggagaactgggaggc

SEQ ID NO: 2902814 - DNA, 25 bp, Homo sapien
cttcttcttatacttgcggggctgg

SEQ ID NO: 2902815 - DNA, 25 bp, Homo sapien
tcattagtgggagaactgggaggcc

SEQ ID NO: 2902816 - DNA, 25 bp, Homo sapien
tcttcttatacttgcggggctgggc

SEQ ID NO: 2902817 - DNA, 25 bp, Homo sapien
catcagctagaatggtgtcagtgcc

SEQ ID NO: 2902818 - DNA, 25 bp, Homo sapien
gagaagcgtagccagttcagccctt

SEQ ID NO: 2902819 - DNA, 25 bp, Homo sapien
gtttgtatggtcttgcctagcccca

SEQ ID NO: 2902820 - DNA, 25 bp, Homo sapien
tgtgataaaccgtggctgagtctca

SEQ ID NO: 2902821 - DNA, 25 bp, Homo sapien
caggcggtccccttcaaggtcctag

SEQ ID NO: 2902822 - DNA, 25 bp, Homo sapien
cagtccaggcggtccccttcaaggt

SEQ ID NO: 2902823 - DNA, 25 bp, Homo sapien
tccccagtccaggcggtccccttca

SEQ ID NO: 2902824 - DNA, 25 bp, Homo sapien
gtccccttcaaggtcctagaatcca

SEQ ID NO: 2902825 - DNA, 25 bp, Homo sapien
ggagtcaagaatgggggcagcataa

SEQ ID NO: 2902826 - DNA, 25 bp, Homo sapien
agtcaagaatgggggcagcataagt

SEQ ID NO: 2902827 - DNA, 25 bp, Homo sapien
gggagtcaagaatgggggcagcata

SEQ ID NO: 2902828 - DNA, 25 bp, Homo sapien
gagtcaagaatgggggcagcataag

SEQ ID NO: 2902829 - DNA, 25 bp, Homo sapien
tcaccaggaagggaccttttgtgtg

SEQ ID NO: 2902830 - DNA, 25 bp, Homo sapien
gatggcattgtcctcaaaggagaat

SEQ ID NO: 2902831 - DNA, 25 bp, Homo sapien
gtgtatgtcaccacatagaatttgg

SEQ ID NO: 2902832 - DNA, 25 bp, Homo sapien
ttctcacgaatgatggcccggctgt

SEQ ID NO: 2902833 - DNA, 25 bp, Homo sapien
catacgatgtcaggagaacatggaa

SEQ ID NO: 2902834 - DNA, 25 bp, Homo sapien
tcaatggtgatcagctcatacgatg

SEQ ID NO: 2902835 - DNA, 25 bp, Homo sapien
ggaaccaagtgctgcctgatcaatg

SEQ ID NO: 2902836 - DNA, 25 bp, Homo sapien
tgtcaggagaacatggaacttcacc

SEQ ID NO: 2902837 - DNA, 25 bp, Homo sapien
aacttatgatctatcttgtaaccat

SEQ ID NO: 2902838 - DNA, 25 bp, Homo sapien
atcttgtaaccattgagaaccctga

SEQ ID NO: 2902839 - DNA, 25 bp, Homo sapien
tatgatctatcttgtaaccattgag

SEQ ID NO: 2902840 - DNA, 25 bp, Homo sapien
tctgcaatggggttcctgtcagcag

SEQ ID NO: 2902841 - DNA, 25 bp, Homo sapien
ctgccttgagtctccgcagcatgtg

SEQ ID NO: 2902842 - DNA, 25 bp, Homo sapien
tgtggccccagcaaatcatgcagtt

SEQ ID NO: 2902843 - DNA, 25 bp, Homo sapien
ggcttagctccacccgaacgatgag

SEQ ID NO: 2902844 - DNA, 25 bp, Homo sapien
ggctggcatgttcttaaagacatct

SEQ ID NO: 2902845 - DNA, 25 bp, Homo sapien
tattaagcagcgacacctggttccc

SEQ ID NO: 2902846 - DNA, 25 bp, Homo sapien
caaggcctcaaaatttcgagtcagg

SEQ ID NO: 2902847 - DNA, 25 bp, Homo sapien
tagcagccacgggaaaaaggtatgg

SEQ ID NO: 2902848 - DNA, 25 bp, Homo sapien
ggttcccaccacctcgtgaattcaa

SEQ ID NO: 2902849 - DNA, 25 bp, Homo sapien
ttcagctttcgcagcatcttctgga

SEQ ID NO: 2902850 - DNA, 25 bp, Homo sapien
tgagcttcccagacgacttaataag

SEQ ID NO: 2902851 - DNA, 25 bp, Homo sapien
gatgagcactcggtgtccttgctcc

SEQ ID NO: 2902852 - DNA, 25 bp, Homo sapien
cagacgacttaataagtgccccacc

SEQ ID NO: 2902853 - DNA, 25 bp, Homo sapien
tgataccaccatcgatgcgctcata

SEQ ID NO: 2902854 - DNA, 25 bp, Homo sapien
cattaaaccgatcgatggcctcctg

SEQ ID NO: 2902855 - DNA, 25 bp, Homo sapien
tacttgtagccttcatagtctaaga

SEQ ID NO: 2902856 - DNA, 25 bp, Homo sapien
tagtctaagaagtcctcaagcaagt

SEQ ID NO: 2902857 - DNA, 25 bp, Homo sapien
acaggaggaagcagaattgttgggc

SEQ ID NO: 2902858 - DNA, 25 bp, Homo sapien
gaagcagaattgttgggccccagga

SEQ ID NO: 2902859 - DNA, 25 bp, Homo sapien
aggaagcagaattgttgggccccag

SEQ ID NO: 2902860 - DNA, 25 bp, Homo sapien
caggaggaagcagaattgttgggcc

SEQ ID NO: 2902861 - DNA, 25 bp, Homo sapien
tttgagaatgtcgtcaagctcctgc

SEQ ID NO: 2902862 - DNA, 25 bp, Homo sapien
gcgcgagtcacaaaccggtaaatca

SEQ ID NO: 2902863 - DNA, 25 bp, Homo sapien
tgattcgctcttccactgacgcgcg

SEQ ID NO: 2902864 - DNA, 25 bp, Homo sapien
cacaaccaggtgtgtcagcatcatc

SEQ ID NO: 2902865 - DNA, 25 bp, Homo sapien
tcttcttcccgcacgacgtactgtg

SEQ ID NO: 2902866 - DNA, 25 bp, Homo sapien
cagccgagcgatggcctcattgtca

SEQ ID NO: 2902867 - DNA, 25 bp, Homo sapien
tactcattcatgttctgcacgtcag

SEQ ID NO: 2902868 - DNA, 25 bp, Homo sapien
tgtcataatgaatcacactgctgtc

SEQ ID NO: 2902869 - DNA, 25 bp, Homo sapien
cctgggatagataatgtctggcccc

SEQ ID NO: 2902870 - DNA, 25 bp, Homo sapien
acagaccctcctacttcaaggctga

SEQ ID NO: 2902871 - DNA, 25 bp, Homo sapien
aagaagttgtttgaggtccactact

SEQ ID NO: 2902872 - DNA, 25 bp, Homo sapien
ggatactgccttttggagatggcct

SEQ ID NO: 2902873 - DNA, 25 bp, Homo sapien
catgccatctcttacctgcaatgtg

SEQ ID NO: 2902874 - DNA, 25 bp, Homo sapien
tacccttctgtgtttaccagtactg

SEQ ID NO: 2902875 - DNA, 25 bp, Homo sapien
ggacattgcgcatgttccatgccat

SEQ ID NO: 2902876 - DNA, 25 bp, Homo sapien
ggaaatccctactctgctgcgtcag

SEQ ID NO: 2902877 - DNA, 25 bp, Homo sapien
tagttaacttgcttgcgaacccgct

SEQ ID NO: 2902878 - DNA, 25 bp, Homo sapien
tagattccgggctaggtcttcctgc

SEQ ID NO: 2902879 - DNA, 25 bp, Homo sapien
tcctgcttgatgatctctcgctcaa

SEQ ID NO: 2902880 - DNA, 25 bp, Homo sapien
cctgctgttgctcatagtgatgcct

SEQ ID NO: 2902881 - DNA, 25 bp, Homo sapien
tcctctgaacccaccgagtactctg

SEQ ID NO: 2902882 - DNA, 25 bp, Homo sapien
cttcaggacgttcatcgaagtcttc

SEQ ID NO: 2902883 - DNA, 25 bp, Homo sapien
caggacgttcatcgaagtcttcatc

SEQ ID NO: 2902884 - DNA, 25 bp, Homo sapien
cgttcatcgaagtcttcatcctcct

SEQ ID NO: 2902885 - DNA, 25 bp, Homo sapien
cagtgggcttaaagcaaactggaaa

SEQ ID NO: 2902886 - DNA, 25 bp, Homo sapien
aacgggaagaggtgaggtagagtca

SEQ ID NO: 2902887 - DNA, 25 bp, Homo sapien
aacagtgggcttaaagcaaactgga

SEQ ID NO: 2902888 - DNA, 25 bp, Homo sapien
ggtagagtcaggaacacagatgcca

SEQ ID NO: 2902889 - DNA, 25 bp, Homo sapien
ctttctcattccggagctgcctctt

SEQ ID NO: 2902890 - DNA, 25 bp, Homo sapien
ctcattccggagctgcctctttgac

SEQ ID NO: 2902891 - DNA, 25 bp, Homo sapien
aatgttgcccccgactcgggccagc

SEQ ID NO: 2902892 - DNA, 25 bp, Homo sapien
ccgactcgggccagcagtggaggca

SEQ ID NO: 2902893 - DNA, 25 bp, Homo sapien
gctgacgggtgttgaagcccagcac

SEQ ID NO: 2902894 - DNA, 25 bp, Homo sapien
gccactgtgtggtgaaggcatcctg

SEQ ID NO: 2902895 - DNA, 25 bp, Homo sapien
tgaggaaagccttccgctgacgggt

SEQ ID NO: 2902896 - DNA, 25 bp, Homo sapien
cactgtgtggtgaaggcatcctgtg

SEQ ID NO: 2902897 - DNA, 25 bp, Homo sapien
caagtaaatgtgaggctaggacagc

SEQ ID NO: 2902898 - DNA, 25 bp, Homo sapien
ggagaggctccttgcttcaacgccc

SEQ ID NO: 2902899 - DNA, 25 bp, Homo sapien
ccccaggaaatcgagccaggaagta

SEQ ID NO: 2902900 - DNA, 25 bp, Homo sapien
ccaggaagtattgtatgacagggag

SEQ ID NO: 2902901 - DNA, 25 bp, Homo sapien
tctttttgacgagagacatgactcc

SEQ ID NO: 2902902 - DNA, 25 bp, Homo sapien
cacagatggcgcatgaacaaagaca

SEQ ID NO: 2902903 - DNA, 25 bp, Homo sapien
ggaccccatcggcaaaggtttcaga

SEQ ID NO: 2902904 - DNA, 25 bp, Homo sapien
ggtcaacacctgctggcgactcagt

SEQ ID NO: 2902905 - DNA, 25 bp, Homo sapien
tagaggtgcagggactgttggtagc

SEQ ID NO: 2902906 - DNA, 25 bp, Homo sapien
tctggaggagcgcttagaatcggcg

SEQ ID NO: 2902907 - DNA, 25 bp, Homo sapien
caggcatcagttccggcattgacca

SEQ ID NO: 2902908 - DNA, 25 bp, Homo sapien
cctcaggagtggtgggagacgtttt

SEQ ID NO: 2902909 - DNA, 25 bp, Homo sapien
ttcctccttctcaagaggtgtcctt

SEQ ID NO: 2902910 - DNA, 25 bp, Homo sapien
tccttctcaagaggtgtccttatgc

SEQ ID NO: 2902911 - DNA, 25 bp, Homo sapien
tctcaagaggtgtccttatgccttc

SEQ ID NO: 2902912 - DNA, 25 bp, Homo sapien
tctcctttctcacttggagctggag

SEQ ID NO: 2902913 - DNA, 25 bp, Homo sapien
tcccgctccacaggggaatccaggg

SEQ ID NO: 2902914 - DNA, 25 bp, Homo sapien
gggtcaggatgagccagagggctcc

SEQ ID NO: 2902915 - DNA, 25 bp, Homo sapien
cccgctccacaggggaatccaggga

SEQ ID NO: 2902916 - DNA, 25 bp, Homo sapien
tctctctgtccccacggtacccagg

SEQ ID NO: 2902917 - DNA, 25 bp, Homo sapien
ctgtccccacggtacccaggttcag

SEQ ID NO: 2902918 - DNA, 25 bp, Homo sapien
ttctctctgtccccacggtacccag

SEQ ID NO: 2902919 - DNA, 25 bp, Homo sapien
tctgtccccacggtacccaggttca

SEQ ID NO: 2902920 - DNA, 25 bp, Homo sapien
catcccctgaccccagaagagggaa

SEQ ID NO: 2902921 - DNA, 25 bp, Homo sapien
ataggaagggaggatgttaccctca

SEQ ID NO: 2902922 - DNA, 25 bp, Homo sapien
gaggatgttaccctcatcccctgac

SEQ ID NO: 2902923 - DNA, 25 bp, Homo sapien
catcactcctaaggccatgcaccca

SEQ ID NO: 2902924 - DNA, 25 bp, Homo sapien
ctgtgttcctgtccatccaacggct

SEQ ID NO: 2902925 - DNA, 25 bp, Homo sapien
tgttcctgtccatccaacggcttct

SEQ ID NO: 2902926 - DNA, 25 bp, Homo sapien
cccctttctcctggcgtcgactctg

SEQ ID NO: 2902927 - DNA, 25 bp, Homo sapien
ctttctcctggcgtcgactctgtgg

SEQ ID NO: 2902928 - DNA, 25 bp, Homo sapien
ccaggtcccaagactactatctgta

SEQ ID NO: 2902929 - DNA, 25 bp, Homo sapien
tactggcctttcaaacagctacccg

SEQ ID NO: 2902930 - DNA, 25 bp, Homo sapien
aggacccaagcattcggttccccag

SEQ ID NO: 2902931 - DNA, 25 bp, Homo sapien
tactgtactgtactggcctttcaaa

SEQ ID NO: 2902932 - DNA, 25 bp, Homo sapien
tgtcttttcctctcgtcgcccattg

SEQ ID NO: 2902933 - DNA, 25 bp, Homo sapien
catctcgaggccctggtcgaagctc

SEQ ID NO: 2902934 - DNA, 25 bp, Homo sapien
tgtgaagccaccatcggcgatattg

SEQ ID NO: 2902935 - DNA, 25 bp, Homo sapien
ccattggaccgtggctcatctcgag

SEQ ID NO: 2902936 - DNA, 25 bp, Homo sapien
aatgaaagggaactaagggctcctg

SEQ ID NO: 2902937 - DNA, 25 bp, Homo sapien
caaactcagttctaaccaggttcgt

SEQ ID NO: 2902938 - DNA, 25 bp, Homo sapien
atttagagcaaggatcggagtcagc

SEQ ID NO: 2902939 - DNA, 25 bp, Homo sapien
tcagtccaacagacaggtagagatg

SEQ ID NO: 2902940 - DNA, 25 bp, Homo sapien
ttgagtttccccgaggaaatagctg

SEQ ID NO: 2902941 - DNA, 25 bp, Homo sapien
aatagctgcccgttcctcattctgc

SEQ ID NO: 2902942 - DNA, 25 bp, Homo sapien
tctgtgccagatctcattgagtttc

SEQ ID NO: 2902943 - DNA, 25 bp, Homo sapien
ccagccagaagccaatagtcatgtc

SEQ ID NO: 2902944 - DNA, 25 bp, Homo sapien
aaagtgtggcactagccctgtccct

SEQ ID NO: 2902945 - DNA, 25 bp, Homo sapien
tttttgccagcttgagagaaccttt

SEQ ID NO: 2902946 - DNA, 25 bp, Homo sapien
acaggaatgggcttggctttgaaca

SEQ ID NO: 2902947 - DNA, 25 bp, Homo sapien
tttggcttgactccccaaagtgtgg

SEQ ID NO: 2902948 - DNA, 25 bp, Homo sapien
ggctcgttgataatggcaaattgag

SEQ ID NO: 2902949 - DNA, 25 bp, Homo sapien
gttttaaatggctcgttgataatgg

SEQ ID NO: 2902950 - DNA, 25 bp, Homo sapien
taaatggctcgttgataatggcaaa

SEQ ID NO: 2902951 - DNA, 25 bp, Homo sapien
gataatggcaaattgagcatcattc

SEQ ID NO: 2902952 - DNA, 25 bp, Homo sapien
gcacagagttgggaggtgaaggtag

SEQ ID NO: 2902953 - DNA, 25 bp, Homo sapien
acagagttgggaggtgaaggtaggg

SEQ ID NO: 2902954 - DNA, 25 bp, Homo sapien
gagggcacagagttgggaggtgaag

SEQ ID NO: 2902955 - DNA, 25 bp, Homo sapien
ctgagggcacagagttgggaggtga

SEQ ID NO: 2902956 - DNA, 25 bp, Homo sapien
tcctgcgacaggttcaggtaggccg

SEQ ID NO: 2902957 - DNA, 25 bp, Homo sapien
gcgttggccggcttgttccccgcca

SEQ ID NO: 2902958 - DNA, 25 bp, Homo sapien
gcgaagcgggcgtggagggccatgg

SEQ ID NO: 2902959 - DNA, 25 bp, Homo sapien
aggcactcggcctcggcgaagcggg

SEQ ID NO: 2902960 - DNA, 25 bp, Homo sapien
agcgttgtgggccctcccccgcgcg

SEQ ID NO: 2902961 - DNA, 25 bp, Homo sapien
cagcgttgtgggccctcccccgcgc

SEQ ID NO: 2902962 - DNA, 25 bp, Homo sapien
gcagcgttgtgggccctcccccgcg

SEQ ID NO: 2902963 - DNA, 25 bp, Homo sapien
gacagagagaccagattaccacaga

SEQ ID NO: 2902964 - DNA, 25 bp, Homo sapien
gagtcagtgactacaccaggcagga

SEQ ID NO: 2902965 - DNA, 25 bp, Homo sapien
cagggatctgtatggtgcattcaca

SEQ ID NO: 2902966 - DNA, 25 bp, Homo sapien
tatggcaggcatgcagttccactgc

SEQ ID NO: 2902967 - DNA, 25 bp, Homo sapien
gatggggggtattcgggacagcgtg

SEQ ID NO: 2902968 - DNA, 25 bp, Homo sapien
ggggtattcgggacagcgtggctgg

SEQ ID NO: 2902969 - DNA, 25 bp, Homo sapien
atgctgcgctcggacatctgaaggc

SEQ ID NO: 2902970 - DNA, 25 bp, Homo sapien
gtgaggctccgtgcccttgctggcc

SEQ ID NO: 2902971 - DNA, 25 bp, Homo sapien
acactccacaactgctaagggtagg

SEQ ID NO: 2902972 - DNA, 25 bp, Homo sapien
gcagggagactcactcaagggtgat

SEQ ID NO: 2902973 - DNA, 25 bp, Homo sapien
catagtctgtgagaggaaagaagct

SEQ ID NO: 2902974 - DNA, 25 bp, Homo sapien
gagagacattatgagccacactcca

SEQ ID NO: 2902975 - DNA, 25 bp, Homo sapien
ggtgcggcgctgaaggccgccccgt

SEQ ID NO: 2902976 - DNA, 25 bp, Homo sapien
gtgcggcgctgaaggccgccccgta

SEQ ID NO: 2902977 - DNA, 25 bp, Homo sapien
gcggcgctgaaggccgccccgtacc

SEQ ID NO: 2902978 - DNA, 25 bp, Homo sapien
tgcggcgctgaaggccgccccgtac

SEQ ID NO: 2902979 - DNA, 25 bp, Homo sapien
tgtgatgaaggaccctgcaggcatc

SEQ ID NO: 2902980 - DNA, 25 bp, Homo sapien
tctggctgtaattggcgcctgcggc

SEQ ID NO: 2902981 - DNA, 25 bp, Homo sapien
aggcatctggctgtaattggcgcct

SEQ ID NO: 2902982 - DNA, 25 bp, Homo sapien
ctgtaattggcgcctgcggcggcca

SEQ ID NO: 2902983 - DNA, 25 bp, Homo sapien
cggctcggggctccttccgatccag

SEQ ID NO: 2902984 - DNA, 25 bp, Homo sapien
tccttccgatccagcccgtctgaca

SEQ ID NO: 2902985 - DNA, 25 bp, Homo sapien
tcacaagcactggagggccgttggt

SEQ ID NO: 2902986 - DNA, 25 bp, Homo sapien
atccagcccgtctgacaccaatgcc

SEQ ID NO: 2902987 - DNA, 25 bp, Homo sapien
gccccagcgcttgagctgggggtcg

SEQ ID NO: 2902988 - DNA, 25 bp, Homo sapien
cagcgcttgagctgggggtcggcct

SEQ ID NO: 2902989 - DNA, 25 bp, Homo sapien
cccagcgcttgagctgggggtcggc

SEQ ID NO: 2902990 - DNA, 25 bp, Homo sapien
gcaggccccagcgcttgagctgggg

SEQ ID NO: 2902991 - DNA, 25 bp, Homo sapien
tgaacggcacctttattctgaggct

SEQ ID NO: 2902992 - DNA, 25 bp, Homo sapien
gagctgattctgcagggaaacggct

SEQ ID NO: 2902993 - DNA, 25 bp, Homo sapien
aaggtacttggaagaccctgccagc

SEQ ID NO: 2902994 - DNA, 25 bp, Homo sapien
tccacttccacatgagacagagctg

SEQ ID NO: 2902995 - DNA, 25 bp, Homo sapien
cacccaaccattactctttttgtag

SEQ ID NO: 2902996 - DNA, 25 bp, Homo sapien
ccaacacaagatgccggtacacagg

SEQ ID NO: 2902997 - DNA, 25 bp, Homo sapien
acatctggcccattgtattctctcc

SEQ ID NO: 2902998 - DNA, 25 bp, Homo sapien
ttggcttgagggagtatcacccaac

SEQ ID NO: 2902999 - DNA, 25 bp, Homo sapien
tggggggttcgccatgcaaactgcc

SEQ ID NO: 2903000 - DNA, 25 bp, Homo sapien
gatgtgcccacatttccctagcctg

SEQ ID NO: 2903001 - DNA, 25 bp, Homo sapien
gggatcaggacagaccaggagtggg

SEQ ID NO: 2903002 - DNA, 25 bp, Homo sapien
tctggtcccaacgacaaggtagctc

SEQ ID NO: 2903003 - DNA, 25 bp, Homo sapien
ggaaagtataatttatatgtacaac

SEQ ID NO: 2903004 - DNA, 25 bp, Homo sapien
aagtataatttatatgtacaaccaa

SEQ ID NO: 2903005 - DNA, 25 bp, Homo sapien
gaaagtataatttatatgtacaacc

SEQ ID NO: 2903006 - DNA, 25 bp, Homo sapien
tataatttatatgtacaaccaataa

SEQ ID NO: 2903007 - DNA, 25 bp, Homo sapien
taaatgctccctcttttgggaggcc

SEQ ID NO: 2903008 - DNA, 25 bp, Homo sapien
tattgctaaagaaatcctaacctac

SEQ ID NO: 2903009 - DNA, 25 bp, Homo sapien
ccctctgtaacataatgccctgttt

SEQ ID NO: 2903010 - DNA, 25 bp, Homo sapien
tgccttcaacatagtagagcctttt

SEQ ID NO: 2903011 - DNA, 25 bp, Homo sapien
cagtctcaagagagggcggaacctc

SEQ ID NO: 2903012 - DNA, 25 bp, Homo sapien
taagtcgtccctaagaagcacgccg

SEQ ID NO: 2903013 - DNA, 25 bp, Homo sapien
tagcgagcttccttgttccctagaa

SEQ ID NO: 2903014 - DNA, 25 bp, Homo sapien
tcccgactacgagtgctggaagctg

SEQ ID NO: 2903015 - DNA, 25 bp, Homo sapien
gctcctgggaacagcgttaagaggg

SEQ ID NO: 2903016 - DNA, 25 bp, Homo sapien
agcgcagagcgggtgcggacagaag

SEQ ID NO: 2903017 - DNA, 25 bp, Homo sapien
gagcgggtgcggacagaagacctac

SEQ ID NO: 2903018 - DNA, 25 bp, Homo sapien
aacagcgttaagagggtgcagcgca

SEQ ID NO: 2903019 - DNA, 25 bp, Homo sapien
cttggtgaattaaggatatcgaggc

SEQ ID NO: 2903020 - DNA, 25 bp, Homo sapien
ttggtgaattaaggatatcgaggct

SEQ ID NO: 2903021 - DNA, 25 bp, Homo sapien
tggtgaattaaggatatcgaggctt

SEQ ID NO: 2903022 - DNA, 25 bp, Homo sapien
ggtgaattaaggatatcgaggcttt

SEQ ID NO: 2903023 - DNA, 25 bp, Homo sapien
agagacaaccggagacagcaaagag

SEQ ID NO: 2903024 - DNA, 25 bp, Homo sapien
ttcacggagaaagacttgggagaag

SEQ ID NO: 2903025 - DNA, 25 bp, Homo sapien
aagttcacggagaaagacttgggag

SEQ ID NO: 2903026 - DNA, 25 bp, Homo sapien
cagggaagagacaaccggagacagc

SEQ ID NO: 2903027 - DNA, 25 bp, Homo sapien
agctgggaggtcacttcagacgaca

SEQ ID NO: 2903028 - DNA, 25 bp, Homo sapien
tcagacgacacttggttgagcccag

SEQ ID NO: 2903029 - DNA, 25 bp, Homo sapien
caattcttgggcgaagccgtctaac

SEQ ID NO: 2903030 - DNA, 25 bp, Homo sapien
ctgaggcgcaaagaagcatagagct

SEQ ID NO: 2903031 - DNA, 25 bp, Homo sapien
gataggctgtatcacgtgaggtttg

SEQ ID NO: 2903032 - DNA, 25 bp, Homo sapien
tctcaaagatatgcttagaaccatc

SEQ ID NO: 2903033 - DNA, 25 bp, Homo sapien
tttggagcatggtctggagctgacc

SEQ ID NO: 2903034 - DNA, 25 bp, Homo sapien
ggagctgaccccgaacactttccat

SEQ ID NO: 2903035 - DNA, 25 bp, Homo sapien
ccagcgccaggaatgagaggatccc

SEQ ID NO: 2903036 - DNA, 25 bp, Homo sapien
ttgagcaaggtggctgtgctatcac

SEQ ID NO: 2903037 - DNA, 25 bp, Homo sapien
gcaaggtggctgtgctatcactgtc

SEQ ID NO: 2903038 - DNA, 25 bp, Homo sapien
ctatcactgtcaaaggagtcctctt

SEQ ID NO: 2903039 - DNA, 25 bp, Homo sapien
tgtcaaaggagtcctcttcccgtct

SEQ ID NO: 2903040 - DNA, 25 bp, Homo sapien
gcaaatcaggtagagaatgttaggg

SEQ ID NO: 2903041 - DNA, 25 bp, Homo sapien
gagcaaatcaggtagagaatgttag

SEQ ID NO: 2903042 - DNA, 25 bp, Homo sapien
aaatcaggtagagaatgttagggct

SEQ ID NO: 2903043 - DNA, 25 bp, Homo sapien
ctgagcaaatcaggtagagaatgtt

SEQ ID NO: 2903044 - DNA, 25 bp, Homo sapien
gagacaagtcttgcaggggccgggt

SEQ ID NO: 2903045 - DNA, 25 bp, Homo sapien
atggagacaagtcttgcaggggccg

SEQ ID NO: 2903046 - DNA, 25 bp, Homo sapien
agacaagtcttgcaggggccgggtg

SEQ ID NO: 2903047 - DNA, 25 bp, Homo sapien
ctagatggagacaagtcttgcaggg

SEQ ID NO: 2903048 - DNA, 25 bp, Homo sapien
tctgaatccaatgcatctctcagcc

SEQ ID NO: 2903049 - DNA, 25 bp, Homo sapien
tggtgtagcggggaaacagctcctc

SEQ ID NO: 2903050 - DNA, 25 bp, Homo sapien
tatgctctgaatccaatgcatctct

SEQ ID NO: 2903051 - DNA, 25 bp, Homo sapien
gaggccctggccgaaggctggtgta

SEQ ID NO: 2903052 - DNA, 25 bp, Homo sapien
tgtatattctagaccttaggcagcc

SEQ ID NO: 2903053 - DNA, 25 bp, Homo sapien
gggtcccaagaacagaataggtctg

SEQ ID NO: 2903054 - DNA, 25 bp, Homo sapien
tgtccattcgacaaacacagagtgt

SEQ ID NO: 2903055 - DNA, 25 bp, Homo sapien
taaatcctgtgcacaagctagcaga

SEQ ID NO: 2903056 - DNA, 25 bp, Homo sapien
ccacagccacggctaattgttgctg

SEQ ID NO: 2903057 - DNA, 25 bp, Homo sapien
tagctctaacactcgggtctgcagg

SEQ ID NO: 2903058 - DNA, 25 bp, Homo sapien
ggtatctttcttgcggtcggcagcc

SEQ ID NO: 2903059 - DNA, 25 bp, Homo sapien
caggctctgaatatggcgctcacaa

SEQ ID NO: 2903060 - DNA, 25 bp, Homo sapien
tttgcctctttctacccacaggggc

SEQ ID NO: 2903061 - DNA, 25 bp, Homo sapien
cccaacagtcagcaaaccaacccct

SEQ ID NO: 2903062 - DNA, 25 bp, Homo sapien
ttctcccaacagtcagcaaaccaac

SEQ ID NO: 2903063 - DNA, 25 bp, Homo sapien
agggcaagtaagatgaaatttcaaa

SEQ ID NO: 2903064 - DNA, 25 bp, Homo sapien
ggtgttcctcttgaagtcccctgag

SEQ ID NO: 2903065 - DNA, 25 bp, Homo sapien
cgctcagcctcatgccggttccagc

SEQ ID NO: 2903066 - DNA, 25 bp, Homo sapien
cctggtgttcctcttgaagtcccct

SEQ ID NO: 2903067 - DNA, 25 bp, Homo sapien
gctcagcctcatgccggttccagcc

SEQ ID NO: 2903068 - DNA, 25 bp, Homo sapien
aggctttgttccaggcgggttactg

SEQ ID NO: 2903069 - DNA, 25 bp, Homo sapien
tcagaaaggctttgttccaggcggg

SEQ ID NO: 2903070 - DNA, 25 bp, Homo sapien
ctggcactttcctgctcacgattca

SEQ ID NO: 2903071 - DNA, 25 bp, Homo sapien
ctgctcacgattcagggcctccatg

SEQ ID NO: 2903072 - DNA, 25 bp, Homo sapien
tgcctccaacctcagagtcagagct

SEQ ID NO: 2903073 - DNA, 25 bp, Homo sapien
gctgttctgcctccaacctcagagt

SEQ ID NO: 2903074 - DNA, 25 bp, Homo sapien
tccaacctcagagtcagagcttgcc

SEQ ID NO: 2903075 - DNA, 25 bp, Homo sapien
cagagtcagagcttgcctttcctcc

SEQ ID NO: 2903076 - DNA, 25 bp, Homo sapien
cagcccgagctgcatcccgctcttc

SEQ ID NO: 2903077 - DNA, 25 bp, Homo sapien
ggcagcccgaagagtctccaactct

SEQ ID NO: 2903078 - DNA, 25 bp, Homo sapien
agagtctccaactctcgatgctcac

SEQ ID NO: 2903079 - DNA, 25 bp, Homo sapien
gcccgaagagtctccaactctcgat

SEQ ID NO: 2903080 - DNA, 25 bp, Homo sapien
ctcctgcagcgcctggtagtgttcc

SEQ ID NO: 2903081 - DNA, 25 bp, Homo sapien
gactgcaccaatgccaactggtgct

SEQ ID NO: 2903082 - DNA, 25 bp, Homo sapien
ccgccgcacctcagactgcaccaat

SEQ ID NO: 2903083 - DNA, 25 bp, Homo sapien
gcaccaatgccaactggtgctgggt

SEQ ID NO: 2903084 - DNA, 25 bp, Homo sapien
cagactgcaccaatgccaactggtg

SEQ ID NO: 2903085 - DNA, 25 bp, Homo sapien
accataccgggccaaaggattgtgg

SEQ ID NO: 2903086 - DNA, 25 bp, Homo sapien
atttataaggaacatagcctctcag

SEQ ID NO: 2903087 - DNA, 25 bp, Homo sapien
aaggaacatagcctctcagactggc

SEQ ID NO: 2903088 - DNA, 25 bp, Homo sapien
ggccaaaggattgtggttctcaaat

SEQ ID NO: 2903089 - DNA, 25 bp, Homo sapien
ggatccgctggctttcataccgggc

SEQ ID NO: 2903090 - DNA, 25 bp, Homo sapien
gctggatccgctggctttcataccg

SEQ ID NO: 2903091 - DNA, 25 bp, Homo sapien
cagctggatccgctggctttcatac

SEQ ID NO: 2903092 - DNA, 25 bp, Homo sapien
tccagctggatccgctggctttcat

SEQ ID NO: 2903093 - DNA, 25 bp, Homo sapien
gctgagagaagtgacacccagtgag

SEQ ID NO: 2903094 - DNA, 25 bp, Homo sapien
ctaacgatacgtgctgtggctgaga

SEQ ID NO: 2903095 - DNA, 25 bp, Homo sapien
cactaacgatacgtgctgtggctga

SEQ ID NO: 2903096 - DNA, 25 bp, Homo sapien
aagtgacacccagtgagtcccacgt

SEQ ID NO: 2903097 - DNA, 25 bp, Homo sapien
ccatttccaccttgaactgagctag

SEQ ID NO: 2903098 - DNA, 25 bp, Homo sapien
tgaactgagctagctgactggccag

SEQ ID NO: 2903099 - DNA, 25 bp, Homo sapien
tggtgctgtccactcaggtcctgca

SEQ ID NO: 2903100 - DNA, 25 bp, Homo sapien
tgctgttgccgttcctctcgttctg

SEQ ID NO: 2903101 - DNA, 25 bp, Homo sapien
gatacttgggagctaaaaagagcca

SEQ ID NO: 2903102 - DNA, 25 bp, Homo sapien
gctcttcaccgttcccagtttgggc

SEQ ID NO: 2903103 - DNA, 25 bp, Homo sapien
ccatgtagaggaggacagatcaatc

SEQ ID NO: 2903104 - DNA, 25 bp, Homo sapien
catctgatattctgaaaggagctgg

SEQ ID NO: 2903105 - DNA, 25 bp, Homo sapien
caaagagagaagaagtgactcaggg

SEQ ID NO: 2903106 - DNA, 25 bp, Homo sapien
tgaagcaaagagagaagaagtgact

SEQ ID NO: 2903107 - DNA, 25 bp, Homo sapien
agcaaagagagaagaagtgactcag

SEQ ID NO: 2903108 - DNA, 25 bp, Homo sapien
aaagagagaagaagtgactcagggc

SEQ ID NO: 2903109 - DNA, 25 bp, Homo sapien
tgcagttcgcacactcgcgcttgct

SEQ ID NO: 2903110 - DNA, 25 bp, Homo sapien
ttgggcggcgggagagtggtgctga

SEQ ID NO: 2903111 - DNA, 25 bp, Homo sapien
agctggttggcctcatcccagtggg

SEQ ID NO: 2903112 - DNA, 25 bp, Homo sapien
ggttggcctcatcccagtgggcctg

SEQ ID NO: 2903113 - DNA, 25 bp, Homo sapien
tcaacgtatgaagggctaggaagtg

SEQ ID NO: 2903114 - DNA, 25 bp, Homo sapien
gagactagagttatgcccaatggaa

SEQ ID NO: 2903115 - DNA, 25 bp, Homo sapien
gtgagactccctactctactctggg

SEQ ID NO: 2903116 - DNA, 25 bp, Homo sapien
taattaattcagctgtccctccaca

SEQ ID NO: 2903117 - DNA, 25 bp, Homo sapien
gaagattgcttgagcgctctgggca

SEQ ID NO: 2903118 - DNA, 25 bp, Homo sapien
ttgcttgagcgctctgggcaacaga

SEQ ID NO: 2903119 - DNA, 25 bp, Homo sapien
aagaagggtcaaagcacagtaggtt

SEQ ID NO: 2903120 - DNA, 25 bp, Homo sapien
gaccgtttgaggctggcagtttgaa

SEQ ID NO: 2903121 - DNA, 25 bp, Homo sapien
aggaggcgctccaggtagctcgtcc

SEQ ID NO: 2903122 - DNA, 25 bp, Homo sapien
tgggaggcatagtccagaccctcct

SEQ ID NO: 2903123 - DNA, 25 bp, Homo sapien
gctctgctgcaatacaggcttcagg

SEQ ID NO: 2903124 - DNA, 25 bp, Homo sapien
gggcccaacaggaggctaagatctg

SEQ ID NO: 2903125 - DNA, 25 bp, Homo sapien
caacttgcgatcactaaaggcatct

SEQ ID NO: 2903126 - DNA, 25 bp, Homo sapien
gttctcattaagtccagcgatgtca

SEQ ID NO: 2903127 - DNA, 25 bp, Homo sapien
gcatctgggaaactaaatgctcaag

SEQ ID NO: 2903128 - DNA, 25 bp, Homo sapien
cagggtacgaaagagggagccaatt

SEQ ID NO: 2903129 - DNA, 25 bp, Homo sapien
gaaagctgtggtactcaaactctaa

SEQ ID NO: 2903130 - DNA, 25 bp, Homo sapien
aatcaactcacctaatactcagaag

SEQ ID NO: 2903131 - DNA, 25 bp, Homo sapien
ggaaatgagtaacacacatgttctg

SEQ ID NO: 2903132 - DNA, 25 bp, Homo sapien
aataaataccctcacaaactccctg

SEQ ID NO: 2903133 - DNA, 25 bp, Homo sapien
tatgatcgggatggaaggccccaag

SEQ ID NO: 2903134 - DNA, 25 bp, Homo sapien
ctatgatcgggatggaaggccccaa

SEQ ID NO: 2903135 - DNA, 25 bp, Homo sapien
atcgggatggaaggccccaagtgca

SEQ ID NO: 2903136 - DNA, 25 bp, Homo sapien
tgatcgggatggaaggccccaagtg

SEQ ID NO: 2903137 - DNA, 25 bp, Homo sapien
tgctttaggaggccctccccgtcag

SEQ ID NO: 2903138 - DNA, 25 bp, Homo sapien
atcttcctcagggaatggcctttct

SEQ ID NO: 2903139 - DNA, 25 bp, Homo sapien
caggatcttcctcagggaatggcct

SEQ ID NO: 2903140 - DNA, 25 bp, Homo sapien
ttgctttaggaggccctccccgtca

SEQ ID NO: 2903141 - DNA, 25 bp, Homo sapien
ctgatagagaaaaacgcccagggat

SEQ ID NO: 2903142 - DNA, 25 bp, Homo sapien
gaataagattgtcaagttccctagg

SEQ ID NO: 2903143 - DNA, 25 bp, Homo sapien
ataagattgtcaagttccctaggga

SEQ ID NO: 2903144 - DNA, 25 bp, Homo sapien
ggtgaataagattgtcaagttccct

SEQ ID NO: 2903145 - DNA, 25 bp, Homo sapien
ctgtgggtgaataagattgtcaagt

SEQ ID NO: 2903146 - DNA, 25 bp, Homo sapien
tcgacagaagggttctcattgttct

SEQ ID NO: 2903147 - DNA, 25 bp, Homo sapien
caggtcgacagaagggttctcattg

SEQ ID NO: 2903148 - DNA, 25 bp, Homo sapien
acttagggggcaacaggtcgacaga

SEQ ID NO: 2903149 - DNA, 25 bp, Homo sapien
ggcaacaggtcgacagaagggttct

SEQ ID NO: 2903150 - DNA, 25 bp, Homo sapien
actggatgccatggctaagggaact

SEQ ID NO: 2903151 - DNA, 25 bp, Homo sapien
gctgggaccactgccttgtgaatgg

SEQ ID NO: 2903152 - DNA, 25 bp, Homo sapien
gttttgtggacaggcggtggaatac

SEQ ID NO: 2903153 - DNA, 25 bp, Homo sapien
tacgtggcacttgaggggcttcctc

SEQ ID NO: 2903154 - DNA, 25 bp, Homo sapien
gagcaggagatcctcagcaggcaga

SEQ ID NO: 2903155 - DNA, 25 bp, Homo sapien
cagctgccttgggaatgtaagccca

SEQ ID NO: 2903156 - DNA, 25 bp, Homo sapien
gtcgcaacagttgagacacctccat

SEQ ID NO: 2903157 - DNA, 25 bp, Homo sapien
gcctcttcaggtagagcaggagatc

SEQ ID NO: 2903158 - DNA, 25 bp, Homo sapien
cagcttccacccggagaatccttcc

SEQ ID NO: 2903159 - DNA, 25 bp, Homo sapien
gcttccacccggagaatccttcctc

SEQ ID NO: 2903160 - DNA, 25 bp, Homo sapien
agcttccacccggagaatccttcct

SEQ ID NO: 2903161 - DNA, 25 bp, Homo sapien
tccagcttccacccggagaatcctt

SEQ ID NO: 2903162 - DNA, 25 bp, Homo sapien
ggcagttagagaagatctgtggatc

SEQ ID NO: 2903163 - DNA, 25 bp, Homo sapien
gatctgtggatccacctctcatcct

SEQ ID NO: 2903164 - DNA, 25 bp, Homo sapien
aaaaggacaacgattcaattcagtg

SEQ ID NO: 2903165 - DNA, 25 bp, Homo sapien
ccccagaaaaggacaacgattcaat

SEQ ID NO: 2903166 - DNA, 25 bp, Homo sapien
tggatggaagaactactccccaatt

SEQ ID NO: 2903167 - DNA, 25 bp, Homo sapien
tagacctgggcatcaactgggagga

SEQ ID NO: 2903168 - DNA, 25 bp, Homo sapien
taagatcaaactcgatagacctggg

SEQ ID NO: 2903169 - DNA, 25 bp, Homo sapien
aaataacgagttacactagctagtc

SEQ ID NO: 2903170 - DNA, 25 bp, Homo sapien
gacattatcccctcggccatcagtc

SEQ ID NO: 2903171 - DNA, 25 bp, Homo sapien
ggggacattatcccctcggccatca

SEQ ID NO: 2903172 - DNA, 25 bp, Homo sapien
gtgttccttctggggacattatccc

SEQ ID NO: 2903173 - DNA, 25 bp, Homo sapien
tgtgttccttctggggacattatcc

SEQ ID NO: 2903174 - DNA, 25 bp, Homo sapien
ccaccccactgaggaaatgcacgtg

SEQ ID NO: 2903175 - DNA, 25 bp, Homo sapien
gaaatcagcgtcagatcctctcaat

SEQ ID NO: 2903176 - DNA, 25 bp, Homo sapien
ggaaaggccatgctacagaatgcag

SEQ ID NO: 2903177 - DNA, 25 bp, Homo sapien
ggtgaaggagctggtcagtgagagc

SEQ ID NO: 2903178 - DNA, 25 bp, Homo sapien
aaggcggcgagggacagcctgggag

SEQ ID NO: 2903179 - DNA, 25 bp, Homo sapien
tcctcatgctactcggggcagggtg

SEQ ID NO: 2903180 - DNA, 25 bp, Homo sapien
gggctgtagcaaggcggcgagggac

SEQ ID NO: 2903181 - DNA, 25 bp, Homo sapien
ccgtgcgggaggtttttcagtcttg

SEQ ID NO: 2903182 - DNA, 25 bp, Homo sapien
attaaaataacaacaatgagagaac

SEQ ID NO: 2903183 - DNA, 25 bp, Homo sapien
cagactaatgagcatttattaaaat

SEQ ID NO: 2903184 - DNA, 25 bp, Homo sapien
taaaataacaacaatgagagaacaa

SEQ ID NO: 2903185 - DNA, 25 bp, Homo sapien
aaataacaacaatgagagaacaaag

SEQ ID NO: 2903186 - DNA, 25 bp, Homo sapien
taattccactaccacccagagttca

SEQ ID NO: 2903187 - DNA, 25 bp, Homo sapien
aaatcttgtcatagaccgtcttcca

SEQ ID NO: 2903188 - DNA, 25 bp, Homo sapien
cttattaaagtttgggtctgttctg

SEQ ID NO: 2903189 - DNA, 25 bp, Homo sapien
tctttacgaagtgattccctacaaa

SEQ ID NO: 2903190 - DNA, 25 bp, Homo sapien
gcactctagtcttttacacgtttta

SEQ ID NO: 2903191 - DNA, 25 bp, Homo sapien
gctgtaagcgtgaagactatagcaa

SEQ ID NO: 2903192 - DNA, 25 bp, Homo sapien
gtttaattaggacccagcactctag

SEQ ID NO: 2903193 - DNA, 25 bp, Homo sapien
gattattaacgagcattttttcaaa

SEQ ID NO: 2903194 - DNA, 25 bp, Homo sapien
cagtttctccgctggtgcatgccag

SEQ ID NO: 2903195 - DNA, 25 bp, Homo sapien
gggctgaggatcaagccgttctgac

SEQ ID NO: 2903196 - DNA, 25 bp, Homo sapien
gctgaggatcaagccgttctgacac

SEQ ID NO: 2903197 - DNA, 25 bp, Homo sapien
tcctgcgccagtgtgcctccagttt

SEQ ID NO: 2903198 - DNA, 25 bp, Homo sapien
taggcgggaatccaggagataatga

SEQ ID NO: 2903199 - DNA, 25 bp, Homo sapien
agagctgtttcagggaatattctcc

SEQ ID NO: 2903200 - DNA, 25 bp, Homo sapien
tgatagtgtgccatgaatctgagag

SEQ ID NO: 2903201 - DNA, 25 bp, Homo sapien
tccaggctgtgcttcacgtcaagaa

SEQ ID NO: 2903202 - DNA, 25 bp, Homo sapien
cgcctggcctacaatactgcctttc

SEQ ID NO: 2903203 - DNA, 25 bp, Homo sapien
aggtgcttaacgtgcccaatacgca

SEQ ID NO: 2903204 - DNA, 25 bp, Homo sapien
gcttttcaggaagtagtcttggctc

SEQ ID NO: 2903205 - DNA, 25 bp, Homo sapien
ctcttagaggtgcttaacgtgccca

SEQ ID NO: 2903206 - DNA, 25 bp, Homo sapien
tcatgcttttcaggaagtagtcttg

SEQ ID NO: 2903207 - DNA, 25 bp, Homo sapien
ttccagttgcttctcgcttgccagg

SEQ ID NO: 2903208 - DNA, 25 bp, Homo sapien
tgcttctcgcttgccaggcatcttt

SEQ ID NO: 2903209 - DNA, 25 bp, Homo sapien
agttacagagcattccagttgcttc

SEQ ID NO: 2903210 - DNA, 25 bp, Homo sapien
gctctcttggctcttgcccagcccc

SEQ ID NO: 2903211 - DNA, 25 bp, Homo sapien
taaagacagggatttacaagcctac

SEQ ID NO: 2903212 - DNA, 25 bp, Homo sapien
ttttaggagaacaaaccaggagaca

SEQ ID NO: 2903213 - DNA, 25 bp, Homo sapien
tagtggcagtctcactcccagaagt

SEQ ID NO: 2903214 - DNA, 25 bp, Homo sapien
gataagggagtattcagacaaagcc

SEQ ID NO: 2903215 - DNA, 25 bp, Homo sapien
agtccctggggactgtcgcctgtgc

SEQ ID NO: 2903216 - DNA, 25 bp, Homo sapien
ggagtccctggggactgtcgcctgt

SEQ ID NO: 2903217 - DNA, 25 bp, Homo sapien
cctggggactgtcgcctgtgccaca

SEQ ID NO: 2903218 - DNA, 25 bp, Homo sapien
ggactgtcgcctgtgccacagtcct

SEQ ID NO: 2903219 - DNA, 25 bp, Homo sapien
cacggcccccggtgaggggtcacag

SEQ ID NO: 2903220 - DNA, 25 bp, Homo sapien
acggagcccaccacgcgggaccgca

SEQ ID NO: 2903221 - DNA, 25 bp, Homo sapien
aagcccacccgctcggcgggcgcag

SEQ ID NO: 2903222 - DNA, 25 bp, Homo sapien
ccgggcgagcccgagagaagatggg

SEQ ID NO: 2903223 - DNA, 25 bp, Homo sapien
ccaccgtgaacacggcggagagggc

SEQ ID NO: 2903224 - DNA, 25 bp, Homo sapien
atcccggcttcttcggcgagcagct

SEQ ID NO: 2903225 - DNA, 25 bp, Homo sapien
cgggctccagacaggtccaagggct

SEQ ID NO: 2903226 - DNA, 25 bp, Homo sapien
tgccgtggacagtgagcgtcccgcc

SEQ ID NO: 2903227 - DNA, 25 bp, Homo sapien
tccatggaagtcacggaggcgacag

SEQ ID NO: 2903228 - DNA, 25 bp, Homo sapien
gcagcaccgagtgcatcaccatgat

SEQ ID NO: 2903229 - DNA, 25 bp, Homo sapien
accagggagccatcggtcaggccca

SEQ ID NO: 2903230 - DNA, 25 bp, Homo sapien
acaaggcgtagtggatcgtgtcgaa

SEQ ID NO: 2903231 - DNA, 25 bp, Homo sapien
tcagagggcagctcgcggcgctctt

SEQ ID NO: 2903232 - DNA, 25 bp, Homo sapien
tgtttggatcgaaccagcacgaggg

SEQ ID NO: 2903233 - DNA, 25 bp, Homo sapien
gcaggatccagcatgtatgtggcaa

SEQ ID NO: 2903234 - DNA, 25 bp, Homo sapien
gaagaccgcgtcatagatggtgcca

SEQ ID NO: 2903235 - DNA, 25 bp, Homo sapien
tatgtggcaaaaagccggtctcccg

SEQ ID NO: 2903236 - DNA, 25 bp, Homo sapien
ccaagaaagacgaggcccggctcca

SEQ ID NO: 2903237 - DNA, 25 bp, Homo sapien
agaaagacgaggcccggctccagtc

SEQ ID NO: 2903238 - DNA, 25 bp, Homo sapien
gccaagaaagacgaggcccggctcc

SEQ ID NO: 2903239 - DNA, 25 bp, Homo sapien
caagaaagacgaggcccggctccag

SEQ ID NO: 2903240 - DNA, 25 bp, Homo sapien
gagaaaggtgatgtcgtccacggtc

SEQ ID NO: 2903241 - DNA, 25 bp, Homo sapien
ccacggtcaggatgatcttgttggg

SEQ ID NO: 2903242 - DNA, 25 bp, Homo sapien
catttgcatgtgaagtagccggtgc

SEQ ID NO: 2903243 - DNA, 25 bp, Homo sapien
tgatgtcgtccacggtcaggatgat

SEQ ID NO: 2903244 - DNA, 25 bp, Homo sapien
acaccaatgttggggctgtccaagt

SEQ ID NO: 2903245 - DNA, 25 bp, Homo sapien
ccagacttgatcgactcccctgggc

SEQ ID NO: 2903246 - DNA, 25 bp, Homo sapien
gggccgctgcgaatgtctgacatgc

SEQ ID NO: 2903247 - DNA, 25 bp, Homo sapien
tccaagtgttggctggggccgctgc

SEQ ID NO: 2903248 - DNA, 25 bp, Homo sapien
gggcggatagctatgtgctgatccc

SEQ ID NO: 2903249 - DNA, 25 bp, Homo sapien
agaaggccgtcttggttgctgggcg

SEQ ID NO: 2903250 - DNA, 25 bp, Homo sapien
tgtgctgatcccctgggaatttctt

SEQ ID NO: 2903251 - DNA, 25 bp, Homo sapien
tcttggttgctgggcggatagctat

SEQ ID NO: 2903252 - DNA, 25 bp, Homo sapien
gagagccccgcgtgcagtgctctga

SEQ ID NO: 2903253 - DNA, 25 bp, Homo sapien
ttctgctccccgagccaggaaaagc

SEQ ID NO: 2903254 - DNA, 25 bp, Homo sapien
atccagtccagctttatttctctct

SEQ ID NO: 2903255 - DNA, 25 bp, Homo sapien
ctctgagcgaggaggtcctgaagag

SEQ ID NO: 2903256 - DNA, 25 bp, Homo sapien
tgggtagggtaagaggcagcctcag

SEQ ID NO: 2903257 - DNA, 25 bp, Homo sapien
tgcccccaggacgtcaccccaccac

SEQ ID NO: 2903258 - DNA, 25 bp, Homo sapien
atgggtagggtaagaggcagcctca

SEQ ID NO: 2903259 - DNA, 25 bp, Homo sapien
ctgcccccaggacgtcaccccacca

SEQ ID NO: 2903260 - DNA, 25 bp, Homo sapien
gcagtctcccgtggccgtggtcagt

SEQ ID NO: 2903261 - DNA, 25 bp, Homo sapien
cagtgatcttgagtacgaatctgcc

SEQ ID NO: 2903262 - DNA, 25 bp, Homo sapien
tatgcagttccgtgacttcagccgc

SEQ ID NO: 2903263 - DNA, 25 bp, Homo sapien
atgagccacgcctcgatggtgcaga

SEQ ID NO: 2903264 - DNA, 25 bp, Homo sapien
gggcactgcggcacactacttcttg

SEQ ID NO: 2903265 - DNA, 25 bp, Homo sapien
catgatgatggccaagctaaagacg

SEQ ID NO: 2903266 - DNA, 25 bp, Homo sapien
cagggctgggtccctaagcagctcc

SEQ ID NO: 2903267 - DNA, 25 bp, Homo sapien
agctaaagacgtcgccggccagcgt

SEQ ID NO: 2903268 - DNA, 25 bp, Homo sapien
gatacactcgacaggtgcctggtcc

SEQ ID NO: 2903269 - DNA, 25 bp, Homo sapien
gcactgcttcatcaggaggatacac

SEQ ID NO: 2903270 - DNA, 25 bp, Homo sapien
gaagttccggctgctctgcccagca

SEQ ID NO: 2903271 - DNA, 25 bp, Homo sapien
tgcctggtccatggacaccaagggc

SEQ ID NO: 2903272 - DNA, 25 bp, Homo sapien
tcaatgatgttcgtcttccggccct

SEQ ID NO: 2903273 - DNA, 25 bp, Homo sapien
gagtactgctccagcatccgaagca

SEQ ID NO: 2903274 - DNA, 25 bp, Homo sapien
tccggcccttgttgatgttcttgaa

SEQ ID NO: 2903275 - DNA, 25 bp, Homo sapien
catctgtgtaagcagccggtctgtc

SEQ ID NO: 2903276 - DNA, 25 bp, Homo sapien
tagggatggcaggcagtgaggtcac

SEQ ID NO: 2903277 - DNA, 25 bp, Homo sapien
ctagggatggcaggcagtgaggtca

SEQ ID NO: 2903278 - DNA, 25 bp, Homo sapien
gctcactcatggcagagatggtggt

SEQ ID NO: 2903279 - DNA, 25 bp, Homo sapien
aaagtactcgggctccactggtgtc

SEQ ID NO: 2903280 - DNA, 25 bp, Homo sapien
cgtgggaaccaatgatggcatcaaa

SEQ ID NO: 2903281 - DNA, 25 bp, Homo sapien
gagatcgttgagcaggtccacaacc

SEQ ID NO: 2903282 - DNA, 25 bp, Homo sapien
tgttggcgatctctgccgcgtgtcg

SEQ ID NO: 2903283 - DNA, 25 bp, Homo sapien
cacgggaacctcaggcatatggcgc

SEQ ID NO: 2903284 - DNA, 25 bp, Homo sapien
gcctatgcggatgcgcacgggaacc

SEQ ID NO: 2903285 - DNA, 25 bp, Homo sapien
catatggcgcatgcggaaagtgccc

SEQ ID NO: 2903286 - DNA, 25 bp, Homo sapien
ctgtggagatgctgggggtcggcgg

SEQ ID NO: 2903287 - DNA, 25 bp, Homo sapien
tgtggagatgctgggggtcggcggg

SEQ ID NO: 2903288 - DNA, 25 bp, Homo sapien
aaacaggcagtaccgcggcatggtg

SEQ ID NO: 2903289 - DNA, 25 bp, Homo sapien
gcagcccggtggactccatgcgcga

SEQ ID NO: 2903290 - DNA, 25 bp, Homo sapien
actccatgcgcgaggcggtgttgac

SEQ ID NO: 2903291 - DNA, 25 bp, Homo sapien
cggtgttgaccgtgtccccaaacag

SEQ ID NO: 2903292 - DNA, 25 bp, Homo sapien
agctccacctggtagcccgagtcca

SEQ ID NO: 2903293 - DNA, 25 bp, Homo sapien
gagcacggagaatccccacagtgct

SEQ ID NO: 2903294 - DNA, 25 bp, Homo sapien
ccagagcacggagaatccccacagt

SEQ ID NO: 2903295 - DNA, 25 bp, Homo sapien
tggtagcccgagtccagagcacgga

SEQ ID NO: 2903296 - DNA, 25 bp, Homo sapien
cactagccagaaagtgtcctcggcg

SEQ ID NO: 2903297 - DNA, 25 bp, Homo sapien
gcgtctgcccactagccagaaagtg

SEQ ID NO: 2903298 - DNA, 25 bp, Homo sapien
agaaagtgtcctcggcgcccttgcc

SEQ ID NO: 2903299 - DNA, 25 bp, Homo sapien
tgggcttgttgaagccgcgtctgcc

SEQ ID NO: 2903300 - DNA, 25 bp, Homo sapien
tccgtcgccgctcgggtgggatctc

SEQ ID NO: 2903301 - DNA, 25 bp, Homo sapien
ttccgtcgccgctcgggtgggatct

SEQ ID NO: 2903302 - DNA, 25 bp, Homo sapien
cgtcgccgctcgggtgggatctcct

SEQ ID NO: 2903303 - DNA, 25 bp, Homo sapien
cgccgctcgggtgggatctcctgca

SEQ ID NO: 2903304 - DNA, 25 bp, Homo sapien
caccagcattagacagacttccagt

SEQ ID NO: 2903305 - DNA, 25 bp, Homo sapien
cagctcttgtaaaaggcccaaaatc

SEQ ID NO: 2903306 - DNA, 25 bp, Homo sapien
gtcacatggctggttttgcaaccag

SEQ ID NO: 2903307 - DNA, 25 bp, Homo sapien
gcagcaactttcaggaaaaggacct

SEQ ID NO: 2903308 - DNA, 25 bp, Homo sapien
tgtagcctggctttatgagatctta

SEQ ID NO: 2903309 - DNA, 25 bp, Homo sapien
tcagaaactttaatgagcgtgtcaa

SEQ ID NO: 2903310 - DNA, 25 bp, Homo sapien
gaaatttggtggctagtttgtagcc

SEQ ID NO: 2903311 - DNA, 25 bp, Homo sapien
tagggtgatttagttctatgattca

SEQ ID NO: 2903312 - DNA, 25 bp, Homo sapien
tctgtagcaacatcaccttcggtaa

SEQ ID NO: 2903313 - DNA, 25 bp, Homo sapien
gaacttacaagtgctggattctcga

SEQ ID NO: 2903314 - DNA, 25 bp, Homo sapien
taatacctgctaaggagtcctaagc

SEQ ID NO: 2903315 - DNA, 25 bp, Homo sapien
aagaaggcaaagtcccgtccaggag

SEQ ID NO: 2903316 - DNA, 25 bp, Homo sapien
ttgaggcagccgaaatcacacacca

SEQ ID NO: 2903317 - DNA, 25 bp, Homo sapien
taatcctggactcttccttgaggca

SEQ ID NO: 2903318 - DNA, 25 bp, Homo sapien
gagagctctatccacacagtcaggt

SEQ ID NO: 2903319 - DNA, 25 bp, Homo sapien
tgaatctgcgcttcaatccctggga

SEQ ID NO: 2903320 - DNA, 25 bp, Homo sapien
gccagcctgggaaggaggctgagtg

SEQ ID NO: 2903321 - DNA, 25 bp, Homo sapien
ccagcctgggaaggaggctgagtga

SEQ ID NO: 2903322 - DNA, 25 bp, Homo sapien
agcctgggaaggaggctgagtgaag

SEQ ID NO: 2903323 - DNA, 25 bp, Homo sapien
aggccagcctgggaaggaggctgag

SEQ ID NO: 2903324 - DNA, 25 bp, Homo sapien
cctgagactggataaccgactgggt

SEQ ID NO: 2903325 - DNA, 25 bp, Homo sapien
caaggacaaccgcaagtgtgggctc

SEQ ID NO: 2903326 - DNA, 25 bp, Homo sapien
cagctggcagaggtagtgtaaacac

SEQ ID NO: 2903327 - DNA, 25 bp, Homo sapien
gaagcagcagctatgagaggtccct

SEQ ID NO: 2903328 - DNA, 25 bp, Homo sapien
agcaatgcagtgtcacaaatccctg

SEQ ID NO: 2903329 - DNA, 25 bp, Homo sapien
agacagcatgcctttatttcaccca

SEQ ID NO: 2903330 - DNA, 25 bp, Homo sapien
ataccatggcacatggcctggtatc

SEQ ID NO: 2903331 - DNA, 25 bp, Homo sapien
aggtccagaagagcccgaggaacac

SEQ ID NO: 2903332 - DNA, 25 bp, Homo sapien
agtccagctctctacggcgcacagg

SEQ ID NO: 2903333 - DNA, 25 bp, Homo sapien
aagtccagctctctacggcgcacag

SEQ ID NO: 2903334 - DNA, 25 bp, Homo sapien
gtccagctctctacggcgcacaggg

SEQ ID NO: 2903335 - DNA, 25 bp, Homo sapien
taagtccagctctctacggcgcaca

SEQ ID NO: 2903336 - DNA, 25 bp, Homo sapien
gaactccttgccgagattgtccagg

SEQ ID NO: 2903337 - DNA, 25 bp, Homo sapien
tcccatgtgccagccccgaaggctt

SEQ ID NO: 2903338 - DNA, 25 bp, Homo sapien
cgaaggcttctccggtggacaccct

SEQ ID NO: 2903339 - DNA, 25 bp, Homo sapien
gcccgcagtgaactccttgccgaga

SEQ ID NO: 2903340 - DNA, 25 bp, Homo sapien
agcactcggcctacgtcctccggga

SEQ ID NO: 2903341 - DNA, 25 bp, Homo sapien
ctccgggagcgtcacctggaagtcc

SEQ ID NO: 2903342 - DNA, 25 bp, Homo sapien
tacgtcctccgggagcgtcacctgg

SEQ ID NO: 2903343 - DNA, 25 bp, Homo sapien
gggggcgccttgtgcacgcgcagca

SEQ ID NO: 2903344 - DNA, 25 bp, Homo sapien
ccgccccgcggcggtgtcagctgga

SEQ ID NO: 2903345 - DNA, 25 bp, Homo sapien
cgccccgcggcggtgtcagctggaa

SEQ ID NO: 2903346 - DNA, 25 bp, Homo sapien
cctcctgcagcaccagggtccccgc

SEQ ID NO: 2903347 - DNA, 25 bp, Homo sapien
tgtaccctcctgcagcaccagggtc

SEQ ID NO: 2903348 - DNA, 25 bp, Homo sapien
cctgcagcaccagggtccccgcccc

SEQ ID NO: 2903349 - DNA, 25 bp, Homo sapien
ctgtaccctcctgcagcaccagggt

SEQ ID NO: 2903350 - DNA, 25 bp, Homo sapien
ctcctggcgctgttgctggagcaca

SEQ ID NO: 2903351 - DNA, 25 bp, Homo sapien
tcctggcgctgttgctggagcacag

SEQ ID NO: 2903352 - DNA, 25 bp, Homo sapien
ctggcgctgttgctggagcacaggg

SEQ ID NO: 2903353 - DNA, 25 bp, Homo sapien
cctcctggcgctgttgctggagcac

SEQ ID NO: 2903354 - DNA, 25 bp, Homo sapien
gcagagccagcctgtagataaaagt

SEQ ID NO: 2903355 - DNA, 25 bp, Homo sapien
ccagcctgtagataaaagttggcat

SEQ ID NO: 2903356 - DNA, 25 bp, Homo sapien
tttgatattgagctccaagtcttcc

SEQ ID NO: 2903357 - DNA, 25 bp, Homo sapien
gccaacctgggttgtaagccttcca

SEQ ID NO: 2903358 - DNA, 25 bp, Homo sapien
tcagccagccttatgcctcttggga

SEQ ID NO: 2903359 - DNA, 25 bp, Homo sapien
cctgggcaggactatgtgactcata

SEQ ID NO: 2903360 - DNA, 25 bp, Homo sapien
tacccctaaggtagctgttgctctg

SEQ ID NO: 2903361 - DNA, 25 bp, Homo sapien
ttgggatcctgaaccagcctccggg

SEQ ID NO: 2903362 - DNA, 25 bp, Homo sapien
tgcggtccagcaaccccttgatttt

SEQ ID NO: 2903363 - DNA, 25 bp, Homo sapien
cttgcggtccagcaaccccttgatt

SEQ ID NO: 2903364 - DNA, 25 bp, Homo sapien
cccttgcggtccagcaaccccttga

SEQ ID NO: 2903365 - DNA, 25 bp, Homo sapien
tccagagccccttgcggtccagcaa

SEQ ID NO: 2903366 - DNA, 25 bp, Homo sapien
acagcggcggatcaggacagggttg

SEQ ID NO: 2903367 - DNA, 25 bp, Homo sapien
tggcatcagtgacggggaagttctt

SEQ ID NO: 2903368 - DNA, 25 bp, Homo sapien
gggaggtagtgacagcggcggatca

SEQ ID NO: 2903369 - DNA, 25 bp, Homo sapien
aacactgaggccaccatggcatcag

SEQ ID NO: 2903370 - DNA, 25 bp, Homo sapien
ggatgccgtgatccaccaagaacag

SEQ ID NO: 2903371 - DNA, 25 bp, Homo sapien
agagaggatgccgtgatccaccaag

SEQ ID NO: 2903372 - DNA, 25 bp, Homo sapien
tgggctctggtatagcagggtcatt

SEQ ID NO: 2903373 - DNA, 25 bp, Homo sapien
cctgggctctggtatagcagggtca

SEQ ID NO: 2903374 - DNA, 25 bp, Homo sapien
acctcaggcagcagatgtgagtgca

SEQ ID NO: 2903375 - DNA, 25 bp, Homo sapien
caaccagtcccacttgtcatcagtg

SEQ ID NO: 2903376 - DNA, 25 bp, Homo sapien
tcatggaaggagaactcggcattgc

SEQ ID NO: 2903377 - DNA, 25 bp, Homo sapien
tcggcattgcgcacccaggtcttgg

SEQ ID NO: 2903378 - DNA, 25 bp, Homo sapien
accacctgccctggcacgataagca

SEQ ID NO: 2903379 - DNA, 25 bp, Homo sapien
cccgggcgagtgtgttgatgtgcag

SEQ ID NO: 2903380 - DNA, 25 bp, Homo sapien
tgtatcgggtgtgcgggatcagcag

SEQ ID NO: 2903381 - DNA, 25 bp, Homo sapien
gatgtgcagggtgtatcgggtgtgc

SEQ ID NO: 2903382 - DNA, 25 bp, Homo sapien
caggaggtagcactggtgtcgggga

SEQ ID NO: 2903383 - DNA, 25 bp, Homo sapien
cctacagaccttgctccagaagcag

SEQ ID NO: 2903384 - DNA, 25 bp, Homo sapien
ctgagagacaggactcttgggtcct

SEQ ID NO: 2903385 - DNA, 25 bp, Homo sapien
ggactcttgggtcctacagaccttg

SEQ ID NO: 2903386 - DNA, 25 bp, Homo sapien
gaagccttcaatgccgatgcctgtg

SEQ ID NO: 2903387 - DNA, 25 bp, Homo sapien
ggatgtcttcaactcctcgggtccg

SEQ ID NO: 2903388 - DNA, 25 bp, Homo sapien
caggagagaatagttcagctgcttc

SEQ ID NO: 2903389 - DNA, 25 bp, Homo sapien
cacggtagtagtagcctgggatgtc

SEQ ID NO: 2903390 - DNA, 25 bp, Homo sapien
tgagctctcctggtttaggaagccc

SEQ ID NO: 2903391 - DNA, 25 bp, Homo sapien
catcttggacagactcatcacttgg

SEQ ID NO: 2903392 - DNA, 25 bp, Homo sapien
gcccttggagaagatctctctgacc

SEQ ID NO: 2903393 - DNA, 25 bp, Homo sapien
gtagataccgatgatttcagagaca

SEQ ID NO: 2903394 - DNA, 25 bp, Homo sapien
gcttgagggtgagccttgagggtgg

SEQ ID NO: 2903395 - DNA, 25 bp, Homo sapien
gcaggtgaatatcaccatggtgaca

SEQ ID NO: 2903396 - DNA, 25 bp, Homo sapien
gcttggcggagcaggtgaatatcac

SEQ ID NO: 2903397 - DNA, 25 bp, Homo sapien
cctgcactgacagccgcatgcttgg

SEQ ID NO: 2903398 - DNA, 25 bp, Homo sapien
catggtgacatactgcaccagggct

SEQ ID NO: 2903399 - DNA, 25 bp, Homo sapien
cacctcgggcgctggcctttcctca

SEQ ID NO: 2903400 - DNA, 25 bp, Homo sapien
gccacctcgggcgctggcctttcct

SEQ ID NO: 2903401 - DNA, 25 bp, Homo sapien
ccagcctgccacctcgggcgctggc

SEQ ID NO: 2903402 - DNA, 25 bp, Homo sapien
agcctgccacctcgggcgctggcct

SEQ ID NO: 2903403 - DNA, 25 bp, Homo sapien
tggcaggttgggcatccaagcacag

SEQ ID NO: 2903404 - DNA, 25 bp, Homo sapien
gggtggcaggttgggcatccaagca

SEQ ID NO: 2903405 - DNA, 25 bp, Homo sapien
gccctcgcatgttgccaggcctttg

SEQ ID NO: 2903406 - DNA, 25 bp, Homo sapien
ctatgaagccctcgcatgttgccag

SEQ ID NO: 2903407 - DNA, 25 bp, Homo sapien
gctcagcaaccagagagcaaggatg

SEQ ID NO: 2903408 - DNA, 25 bp, Homo sapien
gacatcacatgtggcattgacaggt

SEQ ID NO: 2903409 - DNA, 25 bp, Homo sapien
tgacatcacatgtggcattgacagg

SEQ ID NO: 2903410 - DNA, 25 bp, Homo sapien
ggatgacatcacatgtggcattgac

SEQ ID NO: 2903411 - DNA, 25 bp, Homo sapien
cttagccagctctggccctagcccc

SEQ ID NO: 2903412 - DNA, 25 bp, Homo sapien
ccccaagtgtgggacctgaagtagc

SEQ ID NO: 2903413 - DNA, 25 bp, Homo sapien
gctgcaacttgccttagccagctct

SEQ ID NO: 2903414 - DNA, 25 bp, Homo sapien
cctagcccccaagtgtgggacctga

SEQ ID NO: 2903415 - DNA, 25 bp, Homo sapien
tagatggagacgctgttctcgatga

SEQ ID NO: 2903416 - DNA, 25 bp, Homo sapien
agtgctcatccggataggtgcccag

SEQ ID NO: 2903417 - DNA, 25 bp, Homo sapien
tctaggtaggtgtagggcagcacca

SEQ ID NO: 2903418 - DNA, 25 bp, Homo sapien
ggatgcccctcgagatctgggccag

SEQ ID NO: 2903419 - DNA, 25 bp, Homo sapien
ctctgcgggcactttgaggcttgga

SEQ ID NO: 2903420 - DNA, 25 bp, Homo sapien
caatcagtggatgctagtgggccct

SEQ ID NO: 2903421 - DNA, 25 bp, Homo sapien
caactagcaaaaccctcaaggtggg

SEQ ID NO: 2903422 - DNA, 25 bp, Homo sapien
cagttatcctagagcgatgtggtca

SEQ ID NO: 2903423 - DNA, 25 bp, Homo sapien
tccaagccccctatttcaacccaca

SEQ ID NO: 2903424 - DNA, 25 bp, Homo sapien
agccccctatttcaacccacacatc

SEQ ID NO: 2903425 - DNA, 25 bp, Homo sapien
catccaagccccctatttcaaccca

SEQ ID NO: 2903426 - DNA, 25 bp, Homo sapien
cccctatttcaacccacacatccct

SEQ ID NO: 2903427 - DNA, 25 bp, Homo sapien
aaagtgggtccaaggatccatcgca

SEQ ID NO: 2903428 - DNA, 25 bp, Homo sapien
caaggagaccgtgttgggtgccaaa

SEQ ID NO: 2903429 - DNA, 25 bp, Homo sapien
tcacaacgaccacgctcaggtgtaa

SEQ ID NO: 2903430 - DNA, 25 bp, Homo sapien
gaccacacgttctcgggagttcctg

SEQ ID NO: 2903431 - DNA, 25 bp, Homo sapien
ggaatgctccgagtgcacaagctta

SEQ ID NO: 2903432 - DNA, 25 bp, Homo sapien
ccgattgaaacggttccgaggctgc

SEQ ID NO: 2903433 - DNA, 25 bp, Homo sapien
gacgatattgctctactgttggaaa

SEQ ID NO: 2903434 - DNA, 25 bp, Homo sapien
tagcccagtttgaccaggctgttag

SEQ ID NO: 2903435 - DNA, 25 bp, Homo sapien
gaggagccgactgctcctcaaggcc

SEQ ID NO: 2903436 - DNA, 25 bp, Homo sapien
agccgactgctcctcaaggcccttc

SEQ ID NO: 2903437 - DNA, 25 bp, Homo sapien
aatgaggagccgactgctcctcaag

SEQ ID NO: 2903438 - DNA, 25 bp, Homo sapien
tcccaatgaggagccgactgctcct

SEQ ID NO: 2903439 - DNA, 25 bp, Homo sapien
tcttgaaggcgagcaatgaaatcag

SEQ ID NO: 2903440 - DNA, 25 bp, Homo sapien
cactgggtgaatagctgactggcat

SEQ ID NO: 2903441 - DNA, 25 bp, Homo sapien
taattctacaatcaccttcctggca

SEQ ID NO: 2903442 - DNA, 25 bp, Homo sapien
tttaactctgtcgtggcttgaacca

SEQ ID NO: 2903443 - DNA, 25 bp, Homo sapien
aaatctaagcctgtactccctgctg

SEQ ID NO: 2903444 - DNA, 25 bp, Homo sapien
tacccttctggcacctgggacataa

SEQ ID NO: 2903445 - DNA, 25 bp, Homo sapien
tagctggcgccaattgtgttactgt

SEQ ID NO: 2903446 - DNA, 25 bp, Homo sapien
cgactgcggttgtaacggttggcca

SEQ ID NO: 2903447 - DNA, 25 bp, Homo sapien
ttaactgagacctcaatcggctggg

SEQ ID NO: 2903448 - DNA, 25 bp, Homo sapien
tatctcctgggtttgcactccaagg

SEQ ID NO: 2903449 - DNA, 25 bp, Homo sapien
cagtggccgcacctaagaaggatat

SEQ ID NO: 2903450 - DNA, 25 bp, Homo sapien
tttgttgaggaagcggccactgatc

SEQ ID NO: 2903451 - DNA, 25 bp, Homo sapien
taataaaggcttgtcgaacctgtgc

SEQ ID NO: 2903452 - DNA, 25 bp, Homo sapien
cgatcggtgccaatgagtctgacta

SEQ ID NO: 2903453 - DNA, 25 bp, Homo sapien
tatagcgagacctgtaagtcccacc

SEQ ID NO: 2903454 - DNA, 25 bp, Homo sapien
taaagatagttacggctccctccaa

SEQ ID NO: 2903455 - DNA, 25 bp, Homo sapien
cagctatcataagtcggcccaggca

SEQ ID NO: 2903456 - DNA, 25 bp, Homo sapien
tcctcaggctatgcaggacagctat

SEQ ID NO: 2903457 - DNA, 25 bp, Homo sapien
gaggtacgtagaccatccaactttg

SEQ ID NO: 2903458 - DNA, 25 bp, Homo sapien
gatgggttgaaaagacattccactc

SEQ ID NO: 2903459 - DNA, 25 bp, Homo sapien
ccaatactgggccacgatgttctgc

SEQ ID NO: 2903460 - DNA, 25 bp, Homo sapien
aagagaagacatagctacacccacc

SEQ ID NO: 2903461 - DNA, 25 bp, Homo sapien
gtgcagaaagggagatcttagcccc

SEQ ID NO: 2903462 - DNA, 25 bp, Homo sapien
aggtcgtccccatccgttcactgag

SEQ ID NO: 2903463 - DNA, 25 bp, Homo sapien
caaacatgggcaattaccccacgat

SEQ ID NO: 2903464 - DNA, 25 bp, Homo sapien
ccccacgatgagagaggacatgttg

SEQ ID NO: 2903465 - DNA, 25 bp, Homo sapien
gaagccctgataggtgagaatggct

SEQ ID NO: 2903466 - DNA, 25 bp, Homo sapien
tttggaagccctgataggtgagaat

SEQ ID NO: 2903467 - DNA, 25 bp, Homo sapien
tattcaaggacaggtgttcccagtg

SEQ ID NO: 2903468 - DNA, 25 bp, Homo sapien
cagaaaagtagcattggtgcttgcc

SEQ ID NO: 2903469 - DNA, 25 bp, Homo sapien
gcttcctgtgggaccgaagtcacgg

SEQ ID NO: 2903470 - DNA, 25 bp, Homo sapien
gcaagcaggcacaattttggaagga

SEQ ID NO: 2903471 - DNA, 25 bp, Homo sapien
caagggatagcaagggcctgttgcc

SEQ ID NO: 2903472 - DNA, 25 bp, Homo sapien
cagtcatcccgaggatgtaatagac

SEQ ID NO: 2903473 - DNA, 25 bp, Homo sapien
cctgttgccgttgggacgctggtgc

SEQ ID NO: 2903474 - DNA, 25 bp, Homo sapien
gatgtaatagacttcccctacccca

SEQ ID NO: 2903475 - DNA, 25 bp, Homo sapien
cggtgtggacacctcccgaatgggt

SEQ ID NO: 2903476 - DNA, 25 bp, Homo sapien
tgaagtgacccaaggcatcgtgttg

SEQ ID NO: 2903477 - DNA, 25 bp, Homo sapien
aacacggttgaactgccaaaggtgc

SEQ ID NO: 2903478 - DNA, 25 bp, Homo sapien
tagtacaatcgattctgacaccctg

SEQ ID NO: 2903479 - DNA, 25 bp, Homo sapien
agtgcgggctggatgttgatgtgga

SEQ ID NO: 2903480 - DNA, 25 bp, Homo sapien
ttgatgtggaaggtgcagaagaaag

SEQ ID NO: 2903481 - DNA, 25 bp, Homo sapien
ctggtacaaagagcccagtgcgggc

SEQ ID NO: 2903482 - DNA, 25 bp, Homo sapien
ccttgacctggtggatgagctttcc

SEQ ID NO: 2903483 - DNA, 25 bp, Homo sapien
tctctatggctgcccagatctggag

SEQ ID NO: 2903484 - DNA, 25 bp, Homo sapien
ctttggtgatcagctccaggcagcc

SEQ ID NO: 2903485 - DNA, 25 bp, Homo sapien
tggagtgtagtagcgggcgaggtcc

SEQ ID NO: 2903486 - DNA, 25 bp, Homo sapien
ggcgaggtcctggaccttgaagtca

SEQ ID NO: 2903487 - DNA, 25 bp, Homo sapien
acggtgactaacagccgggagccaa

SEQ ID NO: 2903488 - DNA, 25 bp, Homo sapien
agccgggagccaacactgcacaggg

SEQ ID NO: 2903489 - DNA, 25 bp, Homo sapien
gaatacacggtgactaacagccggg

SEQ ID NO: 2903490 - DNA, 25 bp, Homo sapien
ggtcgggaatacacggtgactaaca

SEQ ID NO: 2903491 - DNA, 25 bp, Homo sapien
tccgggtagtagatgttaacaatat

SEQ ID NO: 2903492 - DNA, 25 bp, Homo sapien
cgtatcgtccgggtagtagatgtta

SEQ ID NO: 2903493 - DNA, 25 bp, Homo sapien
tcgtccgggtagtagatgttaacaa

SEQ ID NO: 2903494 - DNA, 25 bp, Homo sapien
tgccgtatcgtccgggtagtagatg

SEQ ID NO: 2903495 - DNA, 25 bp, Homo sapien
aggcctggagctctgagtccctgct

SEQ ID NO: 2903496 - DNA, 25 bp, Homo sapien
ccaggcctggagctctgagtccctg

SEQ ID NO: 2903497 - DNA, 25 bp, Homo sapien
gcctggagctctgagtccctgctca

SEQ ID NO: 2903498 - DNA, 25 bp, Homo sapien
cctggagctctgagtccctgctcac

SEQ ID NO: 2903499 - DNA, 25 bp, Homo sapien
tggcttggaaaaccctcctggaaga

SEQ ID NO: 2903500 - DNA, 25 bp, Homo sapien
agcatttggcttggaaaaccctcct

SEQ ID NO: 2903501 - DNA, 25 bp, Homo sapien
catttggcttggaaaaccctcctgg

SEQ ID NO: 2903502 - DNA, 25 bp, Homo sapien
cttggaaaaccctcctggaagatct

SEQ ID NO: 2903503 - DNA, 25 bp, Homo sapien
aacaccggatgagcccagcacagtg

SEQ ID NO: 2903504 - DNA, 25 bp, Homo sapien
tgatggcagcatgttgggctgagca

SEQ ID NO: 2903505 - DNA, 25 bp, Homo sapien
tgacgatgatcgtcgtgaaacaccg

SEQ ID NO: 2903506 - DNA, 25 bp, Homo sapien
ctgagcaggtgacgatgatcgtcgt

SEQ ID NO: 2903507 - DNA, 25 bp, Homo sapien
cagtacagagcttccagtgctgcta

SEQ ID NO: 2903508 - DNA, 25 bp, Homo sapien
cccgtgaccctgcttgtccccctgg

SEQ ID NO: 2903509 - DNA, 25 bp, Homo sapien
tgctcctcccgtgaccctgcttgtc

SEQ ID NO: 2903510 - DNA, 25 bp, Homo sapien
gtgctgctagggctgctcctcccgt

SEQ ID NO: 2903511 - DNA, 25 bp, Homo sapien
gccttggttccattgctgacccccc

SEQ ID NO: 2903512 - DNA, 25 bp, Homo sapien
ttccattgctgaccccccacaggag

SEQ ID NO: 2903513 - DNA, 25 bp, Homo sapien
ggcatcgaccgcagggagtgaggct

SEQ ID NO: 2903514 - DNA, 25 bp, Homo sapien
ggtggtgtgtggcatcgaccgcagg

SEQ ID NO: 2903515 - DNA, 25 bp, Homo sapien
atgttcccactctctagaagctgag

SEQ ID NO: 2903516 - DNA, 25 bp, Homo sapien
tcaatgttcccactctctagaagct

SEQ ID NO: 2903517 - DNA, 25 bp, Homo sapien
cactctctagaagctgagaccccag

SEQ ID NO: 2903518 - DNA, 25 bp, Homo sapien
tctagaagctgagaccccagccatc

SEQ ID NO: 2903519 - DNA, 25 bp, Homo sapien
gattctgttccagcttaagtctccc

SEQ ID NO: 2903520 - DNA, 25 bp, Homo sapien
aggacgtccgccgagatctgggcca

SEQ ID NO: 2903521 - DNA, 25 bp, Homo sapien
gaccttggccggctgcattttcagc

SEQ ID NO: 2903522 - DNA, 25 bp, Homo sapien
tctcggtgaagtgctcctctgggta

SEQ ID NO: 2903523 - DNA, 25 bp, Homo sapien
tctctgcaactggagcttagggtgg

SEQ ID NO: 2903524 - DNA, 25 bp, Homo sapien
tgcacagcctggttaagggccagag

SEQ ID NO: 2903525 - DNA, 25 bp, Homo sapien
gcttactgtaatcatgttctctgca

SEQ ID NO: 2903526 - DNA, 25 bp, Homo sapien
cagacttgtatgctagaatatcagg

SEQ ID NO: 2903527 - DNA, 25 bp, Homo sapien
gactaccgcatcatggagggcatcc

SEQ ID NO: 2903528 - DNA, 25 bp, Homo sapien
ggccgactaccgcatcatggagggc

SEQ ID NO: 2903529 - DNA, 25 bp, Homo sapien
ctggccgactaccgcatcatggagg

SEQ ID NO: 2903530 - DNA, 25 bp, Homo sapien
ccgactaccgcatcatggagggcat

SEQ ID NO: 2903531 - DNA, 25 bp, Homo sapien
cctgagtaaggacccgaagctgtgc

SEQ ID NO: 2903532 - DNA, 25 bp, Homo sapien
tcttggaaaatgtcgcaccgggctc

SEQ ID NO: 2903533 - DNA, 25 bp, Homo sapien
tgatatttccggacaggacgcacct

SEQ ID NO: 2903534 - DNA, 25 bp, Homo sapien
caagcaggacttctaccagtgaggg

SEQ ID NO: 2903535 - DNA, 25 bp, Homo sapien
tgagttcctggtgcacgaaaacaac

SEQ ID NO: 2903536 - DNA, 25 bp, Homo sapien
gaacatcttcctagcggactactgg

SEQ ID NO: 2903537 - DNA, 25 bp, Homo sapien
cgtgggtgcgcaactctgagttcct

SEQ ID NO: 2903538 - DNA, 25 bp, Homo sapien
cacactcgatacacgctgcaggtga

SEQ ID NO: 2903539 - DNA, 25 bp, Homo sapien
ctctaccgactgagctatccgggct

SEQ ID NO: 2903540 - DNA, 25 bp, Homo sapien
cgcccgaacagggacttgaaccctg

SEQ ID NO: 2903541 - DNA, 25 bp, Homo sapien
cctcagattaaaagtctgatgctct

SEQ ID NO: 2903542 - DNA, 25 bp, Homo sapien
ttgaaccctggaccctcagattaaa

SEQ ID NO: 2903543 - DNA, 25 bp, Homo sapien
tttgaactcggatcgctggattcag

SEQ ID NO: 2903544 - DNA, 25 bp, Homo sapien
aggttccaccgagatttgaactcgg

SEQ ID NO: 2903545 - DNA, 25 bp, Homo sapien
tccaccgagatttgaactcggatcg

SEQ ID NO: 2903546 - DNA, 25 bp, Homo sapien
tgaactcggatcgctggattcagag

SEQ ID NO: 2903547 - DNA, 25 bp, Homo sapien
cacaacctttgaattgctctattcg

SEQ ID NO: 2903548 - DNA, 25 bp, Homo sapien
ctattcgtcactagaagtccaatgc

SEQ ID NO: 2903549 - DNA, 25 bp, Homo sapien
caacctttgaattgctctattcgtc

SEQ ID NO: 2903550 - DNA, 25 bp, Homo sapien
ttgctctattcgtcactagaagtcc

SEQ ID NO: 2903551 - DNA, 25 bp, Homo sapien
cgaacccgggcctcccgcgtggcag

SEQ ID NO: 2903552 - DNA, 25 bp, Homo sapien
tcgaacccgggcctcccgcgtggca

SEQ ID NO: 2903553 - DNA, 25 bp, Homo sapien
attctaccactgaaccaccaatgcg

SEQ ID NO: 2903554 - DNA, 25 bp, Homo sapien
cgcgtggcaggcgagaattctacca

SEQ ID NO: 2903555 - DNA, 25 bp, Homo sapien
cagaactcagatgtggctagaccaa

SEQ ID NO: 2903556 - DNA, 25 bp, Homo sapien
caggagtccatgagaggctttcttc

SEQ ID NO: 2903557 - DNA, 25 bp, Homo sapien
tacctacagcaggaaactgcaccag

SEQ ID NO: 2903558 - DNA, 25 bp, Homo sapien
tcccctggacaaagttgctgacaag

SEQ ID NO: 2903559 - DNA, 25 bp, Homo sapien
gctaggctatcagacagggagggtg

SEQ ID NO: 2903560 - DNA, 25 bp, Homo sapien
tgtggtatggatgtgttgacccctg

SEQ ID NO: 2903561 - DNA, 25 bp, Homo sapien
tgaagtggttctgatgacctttccc

SEQ ID NO: 2903562 - DNA, 25 bp, Homo sapien
atggaggacctgcctggcctagccc

SEQ ID NO: 2903563 - DNA, 25 bp, Homo sapien
aagcgcgtggtggggccgcgcacgt

SEQ ID NO: 2903564 - DNA, 25 bp, Homo sapien
gtggtggggccgcgcacgtcggcgc

SEQ ID NO: 2903565 - DNA, 25 bp, Homo sapien
cgtggtggggccgcgcacgtcggcg

SEQ ID NO: 2903566 - DNA, 25 bp, Homo sapien
cgcgtggtggggccgcgcacgtcgg

SEQ ID NO: 2903567 - DNA, 25 bp, Homo sapien
tattgcctgcaaatcgtgcccctgt

SEQ ID NO: 2903568 - DNA, 25 bp, Homo sapien
ggagccctgcgaggaactactcatc

SEQ ID NO: 2903569 - DNA, 25 bp, Homo sapien
tactcatcacggtcctggatggagg

SEQ ID NO: 2903570 - DNA, 25 bp, Homo sapien
cattgttcaggaaagcttaggccac

SEQ ID NO: 2903571 - DNA, 25 bp, Homo sapien
tacaggttggttaacacctcacagg

SEQ ID NO: 2903572 - DNA, 25 bp, Homo sapien
ggtaagaaaccagaatgacaagcca

SEQ ID NO: 2903573 - DNA, 25 bp, Homo sapien
tcctggcaccaaacttagaattggc

SEQ ID NO: 2903574 - DNA, 25 bp, Homo sapien
gagaccatgttatgaggcactggac

SEQ ID NO: 2903575 - DNA, 25 bp, Homo sapien
cattggtaatggactggactttgca

SEQ ID NO: 2903576 - DNA, 25 bp, Homo sapien
ggactttgcaagaggccctgacctt

SEQ ID NO: 2903577 - DNA, 25 bp, Homo sapien
gatttaacttctagacgctctgccg

SEQ ID NO: 2903578 - DNA, 25 bp, Homo sapien
aagtgtcatagccagcccgtgtctc

SEQ ID NO: 2903579 - DNA, 25 bp, Homo sapien
ctattgagcccagagagagctgtcc

SEQ ID NO: 2903580 - DNA, 25 bp, Homo sapien
ccccagctggtatgtaagtgtcttg

SEQ ID NO: 2903581 - DNA, 25 bp, Homo sapien
tgcacgacattactcgcaggtggtg

SEQ ID NO: 2903582 - DNA, 25 bp, Homo sapien
ggaccaataattctgccacttcggg

SEQ ID NO: 2903583 - DNA, 25 bp, Homo sapien
gcatctgctatgcaatagtccctct

SEQ ID NO: 2903584 - DNA, 25 bp, Homo sapien
tttgtatccattgggaggctctgag

SEQ ID NO: 2903585 - DNA, 25 bp, Homo sapien
gactggccccacttggtcctaagaa

SEQ ID NO: 2903586 - DNA, 25 bp, Homo sapien
caaggtctttgggagcgtccagcat

SEQ ID NO: 2903587 - DNA, 25 bp, Homo sapien
tggaccgagaccagggcttacatcg

SEQ ID NO: 2903588 - DNA, 25 bp, Homo sapien
ggcttacatcgggtggccttcctcc

SEQ ID NO: 2903589 - DNA, 25 bp, Homo sapien
tcacgcagctcatcggcggcagggc

SEQ ID NO: 2903590 - DNA, 25 bp, Homo sapien
tccaaacctcaccagtaacaggaga

SEQ ID NO: 2903591 - DNA, 25 bp, Homo sapien
agtggttcacctggtttgcctacta

SEQ ID NO: 2903592 - DNA, 25 bp, Homo sapien
gaaacagtggttcacctggtttgcc

SEQ ID NO: 2903593 - DNA, 25 bp, Homo sapien
tctcccactcccctcttttgcactt

SEQ ID NO: 2903594 - DNA, 25 bp, Homo sapien
aacagtggttcacctggtttgccta

SEQ ID NO: 2903595 - DNA, 25 bp, Homo sapien
ggctagagtgcagtgtgcagtggtg

SEQ ID NO: 2903596 - DNA, 25 bp, Homo sapien
agagtgcagtgtgcagtggtgggat

SEQ ID NO: 2903597 - DNA, 25 bp, Homo sapien
gctagagtgcagtgtgcagtggtgg

SEQ ID NO: 2903598 - DNA, 25 bp, Homo sapien
gtgggatcatggctcactgcagcct

SEQ ID NO: 2903599 - DNA, 25 bp, Homo sapien
gagcagtccaggaacaccggcctct

SEQ ID NO: 2903600 - DNA, 25 bp, Homo sapien
tcttcctcaaggaaggttcaggcct

SEQ ID NO: 2903601 - DNA, 25 bp, Homo sapien
aatcagtcttcctcaaggaaggttc

SEQ ID NO: 2903602 - DNA, 25 bp, Homo sapien
caaccaggggctccgtgacaatctg

SEQ ID NO: 2903603 - DNA, 25 bp, Homo sapien
gcccaaaggtcatgaggtcgccgat

SEQ ID NO: 2903604 - DNA, 25 bp, Homo sapien
taagagcttcttggactgtagctgg

SEQ ID NO: 2903605 - DNA, 25 bp, Homo sapien
gggacttgactcagcaattaaagaa

SEQ ID NO: 2903606 - DNA, 25 bp, Homo sapien
taggctggctaaaagcactgagatg

SEQ ID NO: 2903607 - DNA, 25 bp, Homo sapien
tctggataattattagccttctgtt

SEQ ID NO: 2903608 - DNA, 25 bp, Homo sapien
ctccacctcctttgtccaagcctca

SEQ ID NO: 2903609 - DNA, 25 bp, Homo sapien
ccaagtccagacttcctttatcttc

SEQ ID NO: 2903610 - DNA, 25 bp, Homo sapien
ggataattattagccttctgtttaa

SEQ ID NO: 2903611 - DNA, 25 bp, Homo sapien
aaaagaagtgtgtaggagacacttg

SEQ ID NO: 2903612 - DNA, 25 bp, Homo sapien
caaaataacctggtgtgtgccatga

SEQ ID NO: 2903613 - DNA, 25 bp, Homo sapien
tttggacccagattcaaacaaactg

SEQ ID NO: 2903614 - DNA, 25 bp, Homo sapien
gagacacttgggcaatttgaactgt

SEQ ID NO: 2903615 - DNA, 25 bp, Homo sapien
gcgctaccgttgcgccacgaggtcg

SEQ ID NO: 2903616 - DNA, 25 bp, Homo sapien
tgaccccgacgtgatttgaacacgc

SEQ ID NO: 2903617 - DNA, 25 bp, Homo sapien
gatctggagtcagacgcgctaccgt

SEQ ID NO: 2903618 - DNA, 25 bp, Homo sapien
cgacgtgatttgaacacgcaacctt

SEQ ID NO: 2903619 - DNA, 25 bp, Homo sapien
agcacaatggattagcagtccatcg

SEQ ID NO: 2903620 - DNA, 25 bp, Homo sapien
gcacaatggattagcagtccatcgc

SEQ ID NO: 2903621 - DNA, 25 bp, Homo sapien
atggattagcagtccatcgccttaa

SEQ ID NO: 2903622 - DNA, 25 bp, Homo sapien
cacaatggattagcagtccatcgcc

SEQ ID NO: 2903623 - DNA, 25 bp, Homo sapien
gcgctttaaccaactaagccacggc

SEQ ID NO: 2903624 - DNA, 25 bp, Homo sapien
gacaggcgctttaaccaactaagcc

SEQ ID NO: 2903625 - DNA, 25 bp, Homo sapien
aggcgctttaaccaactaagccacg

SEQ ID NO: 2903626 - DNA, 25 bp, Homo sapien
gctttaaccaactaagccacggcgc

SEQ ID NO: 2903627 - DNA, 25 bp, Homo sapien
gatcgaacccgcgaccttggcgtta

SEQ ID NO: 2903628 - DNA, 25 bp, Homo sapien
tctaaccaactgagctaaccggcca

SEQ ID NO: 2903629 - DNA, 25 bp, Homo sapien
tggcgttattagcaccacgctctaa

SEQ ID NO: 2903630 - DNA, 25 bp, Homo sapien
acccgcgaccttggcgttattagca

SEQ ID NO: 2903631 - DNA, 25 bp, Homo sapien
gtgggaggcgtctcactgctctcag

SEQ ID NO: 2903632 - DNA, 25 bp, Homo sapien
tgtggctatcctgactccagtggcc

SEQ ID NO: 2903633 - DNA, 25 bp, Homo sapien
tgaaggtgaggacgtgactcccaca

SEQ ID NO: 2903634 - DNA, 25 bp, Homo sapien
ctcagggttcaggtagaatgttgct

SEQ ID NO: 2903635 - DNA, 25 bp, Homo sapien
taccgcgatgctgtggactccttag

SEQ ID NO: 2903636 - DNA, 25 bp, Homo sapien
gactccttaggtgaagccgtggaca

SEQ ID NO: 2903637 - DNA, 25 bp, Homo sapien
tgagcgtgggttgcatccagaccta

SEQ ID NO: 2903638 - DNA, 25 bp, Homo sapien
ttggaggccctgtgcaagtgaccag

SEQ ID NO: 2903639 - DNA, 25 bp, Homo sapien
tgacaaacgcataggaaagcccaga

SEQ ID NO: 2903640 - DNA, 25 bp, Homo sapien
tgcagtaacagctcttcttccggga

SEQ ID NO: 2903641 - DNA, 25 bp, Homo sapien
taggttcaaccctgatggtccaaga

SEQ ID NO: 2903642 - DNA, 25 bp, Homo sapien
ggtacaattacaggcagaaaggatc

SEQ ID NO: 2903643 - DNA, 25 bp, Homo sapien
ttatttcctgtatagcacatatcaa

SEQ ID NO: 2903644 - DNA, 25 bp, Homo sapien
tatcaaaatttgtgatcatttcatt

SEQ ID NO: 2903645 - DNA, 25 bp, Homo sapien
ctttatttcctgtatagcacatatc

SEQ ID NO: 2903646 - DNA, 25 bp, Homo sapien
gcacatatcaaaatttgtgatcatt

SEQ ID NO: 2903647 - DNA, 25 bp, Homo sapien
gctctgcctcaatatctgtgtggag

SEQ ID NO: 2903648 - DNA, 25 bp, Homo sapien
aagagtgacgacagactgacacagg

SEQ ID NO: 2903649 - DNA, 25 bp, Homo sapien
tcaggccaactttatatctgtaagc

SEQ ID NO: 2903650 - DNA, 25 bp, Homo sapien
tttccaaaactagatgcactgtcag

SEQ ID NO: 2903651 - DNA, 25 bp, Homo sapien
tgcagtagagtgcaggtgatccacc

SEQ ID NO: 2903652 - DNA, 25 bp, Homo sapien
agtgcagtagagtgcaggtgatcca

SEQ ID NO: 2903653 - DNA, 25 bp, Homo sapien
gagtgcagtagagtgcaggtgatcc

SEQ ID NO: 2903654 - DNA, 25 bp, Homo sapien
gtgcagtagagtgcaggtgatccac

SEQ ID NO: 2903655 - DNA, 25 bp, Homo sapien
atgcttaccactataccaccaacgc

SEQ ID NO: 2903656 - DNA, 25 bp, Homo sapien
gcttggaaggcagctatgcttacca

SEQ ID NO: 2903657 - DNA, 25 bp, Homo sapien
atcgaacccgggtcaactgcttgga

SEQ ID NO: 2903658 - DNA, 25 bp, Homo sapien
gaatcgaacccgggtcaactgcttg

SEQ ID NO: 2903659 - DNA, 25 bp, Homo sapien
tccagatgcggtcctctaactggtc

SEQ ID NO: 2903660 - DNA, 25 bp, Homo sapien
accaggtttcgtgcagcagggtgca

SEQ ID NO: 2903661 - DNA, 25 bp, Homo sapien
gtcccctagaacctgagccactttg

SEQ ID NO: 2903662 - DNA, 25 bp, Homo sapien
tcattcgggagtcgctagggatcct

SEQ ID NO: 2903663 - DNA, 25 bp, Homo sapien
tgtcctttgctggagagatgtgtcc

SEQ ID NO: 2903664 - DNA, 25 bp, Homo sapien
gtcctttgctggagagatgtgtcct

SEQ ID NO: 2903665 - DNA, 25 bp, Homo sapien
ccagagggacgaacatagaagtgaa

SEQ ID NO: 2903666 - DNA, 25 bp, Homo sapien
tgtagcacagttcagtctcgacgcc

SEQ ID NO: 2903667 - DNA, 25 bp, Homo sapien
gacgccctgcagctctggcagtttc

SEQ ID NO: 2903668 - DNA, 25 bp, Homo sapien
tgtccagttcacgttgtagcacagt

SEQ ID NO: 2903669 - DNA, 25 bp, Homo sapien
gagcaacatcatccagcagtaaggg

SEQ ID NO: 2903670 - DNA, 25 bp, Homo sapien
ggagccaggactcccgagcaacatc

SEQ ID NO: 2903671 - DNA, 25 bp, Homo sapien
taaggggcaaccaaacagccacatc

SEQ ID NO: 2903672 - DNA, 25 bp, Homo sapien
agcaggtcattggagccaggaagga

SEQ ID NO: 2903673 - DNA, 25 bp, Homo sapien
tggcgcggcacactgacacgatgtt

SEQ ID NO: 2903674 - DNA, 25 bp, Homo sapien
gggtggtctccacacgatccacagg

SEQ ID NO: 2903675 - DNA, 25 bp, Homo sapien
cgagagccggtagcgccgggtggtc

SEQ ID NO: 2903676 - DNA, 25 bp, Homo sapien
cactgacacgatgttggtggatgtt

SEQ ID NO: 2903677 - DNA, 25 bp, Homo sapien
agccggccctcacccagtatattga

SEQ ID NO: 2903678 - DNA, 25 bp, Homo sapien
cattgaggggttccggcatgctctc

SEQ ID NO: 2903679 - DNA, 25 bp, Homo sapien
gttggccttctccagcgcaagccgg

SEQ ID NO: 2903680 - DNA, 25 bp, Homo sapien
ctctgtcatccggtcgtgcagggta

SEQ ID NO: 2903681 - DNA, 25 bp, Homo sapien
ctccacagtgctcgggttccgctgt

SEQ ID NO: 2903682 - DNA, 25 bp, Homo sapien
cttggtgtagaagtctaggtcccaa

SEQ ID NO: 2903683 - DNA, 25 bp, Homo sapien
ctaggtcccaagagtctaaagccag

SEQ ID NO: 2903684 - DNA, 25 bp, Homo sapien
agtgctcgggttccgctgtagctcc

SEQ ID NO: 2903685 - DNA, 25 bp, Homo sapien
tgctgttatcacagaatttgaggac

SEQ ID NO: 2903686 - DNA, 25 bp, Homo sapien
tgaggacgttgttggggttcgagga

SEQ ID NO: 2903687 - DNA, 25 bp, Homo sapien
ggttcgaggattcctgggtgctcat

SEQ ID NO: 2903688 - DNA, 25 bp, Homo sapien
cctgggtgctcatgatggactcaaa

SEQ ID NO: 2903689 - DNA, 25 bp, Homo sapien
ccgggtcctgacgccaacccagtct

SEQ ID NO: 2903690 - DNA, 25 bp, Homo sapien
gacgccaacccagtctagggcacag

SEQ ID NO: 2903691 - DNA, 25 bp, Homo sapien
tgacgccaacccagtctagggcaca

SEQ ID NO: 2903692 - DNA, 25 bp, Homo sapien
gtcctgacgccaacccagtctaggg

SEQ ID NO: 2903693 - DNA, 25 bp, Homo sapien
gtcatggaccttgcttcctttctgg

SEQ ID NO: 2903694 - DNA, 25 bp, Homo sapien
atggaccttgcttcctttctgggac

SEQ ID NO: 2903695 - DNA, 25 bp, Homo sapien
ccgtcatggaccttgcttcctttct

SEQ ID NO: 2903696 - DNA, 25 bp, Homo sapien
catggaccttgcttcctttctggga

SEQ ID NO: 2903697 - DNA, 25 bp, Homo sapien
tctgctgtgaagacaacatgtctca

SEQ ID NO: 2903698 - DNA, 25 bp, Homo sapien
tcaggccgtaggaatcggacttcct

SEQ ID NO: 2903699 - DNA, 25 bp, Homo sapien
ccttgctgttgctggaagcggcttg

SEQ ID NO: 2903700 - DNA, 25 bp, Homo sapien
ggtcctcaggccgtaggaatcggac

SEQ ID NO: 2903701 - DNA, 25 bp, Homo sapien
tgtgccagtggttgcaccactaaag

SEQ ID NO: 2903702 - DNA, 25 bp, Homo sapien
gcactggacatctcgaatccggccc

SEQ ID NO: 2903703 - DNA, 25 bp, Homo sapien
aatccggccccctgtgccagtggtt

SEQ ID NO: 2903704 - DNA, 25 bp, Homo sapien
ccccgcggcctgtgcactggacatc

SEQ ID NO: 2903705 - DNA, 25 bp, Homo sapien
gatttccaaagcaatagccggcagt

SEQ ID NO: 2903706 - DNA, 25 bp, Homo sapien
tccaaagcaatagccggcagtgcca

SEQ ID NO: 2903707 - DNA, 25 bp, Homo sapien
tatgcagatttccaaagcaatagcc

SEQ ID NO: 2903708 - DNA, 25 bp, Homo sapien
cagatttccaaagcaatagccggca

SEQ ID NO: 2903709 - DNA, 25 bp, Homo sapien
gccgggcaaaattcccaggatactg

SEQ ID NO: 2903710 - DNA, 25 bp, Homo sapien
ctccattactggcttcaatggcaac

SEQ ID NO: 2903711 - DNA, 25 bp, Homo sapien
cttgttgccatagtcagaagctcca

SEQ ID NO: 2903712 - DNA, 25 bp, Homo sapien
gatactggaagcttggatcctccca

SEQ ID NO: 2903713 - DNA, 25 bp, Homo sapien
tggaggcccaaggagcgggcgaagc

SEQ ID NO: 2903714 - DNA, 25 bp, Homo sapien
tgcttatgtggtcagcttccatgga

SEQ ID NO: 2903715 - DNA, 25 bp, Homo sapien
gcttatgtggtcagcttccatggac

SEQ ID NO: 2903716 - DNA, 25 bp, Homo sapien
gggcttgatccactcacgccgctgg

SEQ ID NO: 2903717 - DNA, 25 bp, Homo sapien
caatgcccccactaaacatgatggg

SEQ ID NO: 2903718 - DNA, 25 bp, Homo sapien
atcctgtagacgggacctccaacct

SEQ ID NO: 2903719 - DNA, 25 bp, Homo sapien
caatcctgtagacgggacctccaac

SEQ ID NO: 2903720 - DNA, 25 bp, Homo sapien
gatcacacggttcatcttctgttcc

SEQ ID NO: 2903721 - DNA, 25 bp, Homo sapien
ttgccaccagcgccctgatcatgaa

SEQ ID NO: 2903722 - DNA, 25 bp, Homo sapien
caagccctgatcacacggttcatct

SEQ ID NO: 2903723 - DNA, 25 bp, Homo sapien
ggcctccacacaagccctgatcaca

SEQ ID NO: 2903724 - DNA, 25 bp, Homo sapien
ggcaggcccagtctcttgttccaac

SEQ ID NO: 2903725 - DNA, 25 bp, Homo sapien
caggcaggcccagtctcttgttcca

SEQ ID NO: 2903726 - DNA, 25 bp, Homo sapien
gcaggcccagtctcttgttccaact

SEQ ID NO: 2903727 - DNA, 25 bp, Homo sapien
aggcaggcccagtctcttgttccaa

SEQ ID NO: 2903728 - DNA, 25 bp, Homo sapien
caccaatcatcccacggcagcaggc

SEQ ID NO: 2903729 - DNA, 25 bp, Homo sapien
tcactcagctcttttaggacattgc

SEQ ID NO: 2903730 - DNA, 25 bp, Homo sapien
ctggaagcggctggtgtaaatgatg

SEQ ID NO: 2903731 - DNA, 25 bp, Homo sapien
aagcggctggtgtaaatgatggctc

SEQ ID NO: 2903732 - DNA, 25 bp, Homo sapien
gcggctggtgtaaatgatggctcca

SEQ ID NO: 2903733 - DNA, 25 bp, Homo sapien
tgacatgagtcaggaagtcccggtt

SEQ ID NO: 2903734 - DNA, 25 bp, Homo sapien
agatttccagggcattcagggttgg

SEQ ID NO: 2903735 - DNA, 25 bp, Homo sapien
tctccggtctccagtgatggtgccc

SEQ ID NO: 2903736 - DNA, 25 bp, Homo sapien
gggacctcagcagaagagcatttga

SEQ ID NO: 2903737 - DNA, 25 bp, Homo sapien
tgtcgggggggcatccccctggcca

SEQ ID NO: 2903738 - DNA, 25 bp, Homo sapien
tgacaggacactcccgatcgtccac

SEQ ID NO: 2903739 - DNA, 25 bp, Homo sapien
actcccgatcgtccaccagcactat

SEQ ID NO: 2903740 - DNA, 25 bp, Homo sapien
ggacactcccgatcgtccaccagca

SEQ ID NO: 2903741 - DNA, 25 bp, Homo sapien
gtagcgcttgctggccacggcgggc

SEQ ID NO: 2903742 - DNA, 25 bp, Homo sapien
tattggtgaggtagcgcttgctggc

SEQ ID NO: 2903743 - DNA, 25 bp, Homo sapien
agagcctggtgcacgctcagccctg

SEQ ID NO: 2903744 - DNA, 25 bp, Homo sapien
cagagcctggtgcacgctcagccct

SEQ ID NO: 2903745 - DNA, 25 bp, Homo sapien
gctgtggcagcccctatgagctcct

SEQ ID NO: 2903746 - DNA, 25 bp, Homo sapien
gcgacttttgggtccagcaggctct

SEQ ID NO: 2903747 - DNA, 25 bp, Homo sapien
tggctcagtgccacaaccgctacat

SEQ ID NO: 2903748 - DNA, 25 bp, Homo sapien
ttgactggctgttctcccaaggctg

SEQ ID NO: 2903749 - DNA, 25 bp, Homo sapien
tccagttcccgctacacttcacatc

SEQ ID NO: 2903750 - DNA, 25 bp, Homo sapien
gggagcttggctgcccacatccagt

SEQ ID NO: 2903751 - DNA, 25 bp, Homo sapien
tgccaacccgagcagccatgctgag

SEQ ID NO: 2903752 - DNA, 25 bp, Homo sapien
ggagcccgcacggtctcagtgccaa

SEQ ID NO: 2903753 - DNA, 25 bp, Homo sapien
gcagacggcataggctgagatgacc

SEQ ID NO: 2903754 - DNA, 25 bp, Homo sapien
aggatgcttgaggtctggggtcaca

SEQ ID NO: 2903755 - DNA, 25 bp, Homo sapien
tgtctgggcagacggcataggctga

SEQ ID NO: 2903756 - DNA, 25 bp, Homo sapien
gcataggctgagatgaccagtgacc

SEQ ID NO: 2903757 - DNA, 25 bp, Homo sapien
gcaaagatcacaaaggatggggcca

SEQ ID NO: 2903758 - DNA, 25 bp, Homo sapien
cacaagcaaagatcacaaaggatgg

SEQ ID NO: 2903759 - DNA, 25 bp, Homo sapien
aaagcaggagccaaacaaagatcac

SEQ ID NO: 2903760 - DNA, 25 bp, Homo sapien
aacaaagatcacacaagcaaagatc

SEQ ID NO: 2903761 - DNA, 25 bp, Homo sapien
cagcccctgagtgatgctgaaggcc

SEQ ID NO: 2903762 - DNA, 25 bp, Homo sapien
cctgagtgatgctgaaggcccgcac

SEQ ID NO: 2903763 - DNA, 25 bp, Homo sapien
aggtctggagggtgttccccaagct

SEQ ID NO: 2903764 - DNA, 25 bp, Homo sapien
gcccctgagtgatgctgaaggcccg

SEQ ID NO: 2903765 - DNA, 25 bp, Homo sapien
ctgtagcccgcaatttccagcaaag

SEQ ID NO: 2903766 - DNA, 25 bp, Homo sapien
aggcctccgtcactgacatcgtggc

SEQ ID NO: 2903767 - DNA, 25 bp, Homo sapien
tcactgacatcgtggcctgagcaga

SEQ ID NO: 2903768 - DNA, 25 bp, Homo sapien
tctccagcaggcatgtgacgaggcc

SEQ ID NO: 2903769 - DNA, 25 bp, Homo sapien
gggatgcaagaagggccaagggagt

SEQ ID NO: 2903770 - DNA, 25 bp, Homo sapien
ggcgggatcagggaaatgcaggaag

SEQ ID NO: 2903771 - DNA, 25 bp, Homo sapien
catctcagggatgggaagtctcaga

SEQ ID NO: 2903772 - DNA, 25 bp, Homo sapien
agggatgcagccagagagtagggta

SEQ ID NO: 2903773 - DNA, 25 bp, Homo sapien
tcccggtaacgcttcagcacctggg

SEQ ID NO: 2903774 - DNA, 25 bp, Homo sapien
caatggaggccagcatcccggtaac

SEQ ID NO: 2903775 - DNA, 25 bp, Homo sapien
tggctcctcagcgaacagcacagac

SEQ ID NO: 2903776 - DNA, 25 bp, Homo sapien
gctcctcagcgaacagcacagacag

SEQ ID NO: 2903777 - DNA, 25 bp, Homo sapien
aggcaatagctgggccccatccgct

SEQ ID NO: 2903778 - DNA, 25 bp, Homo sapien
tgtagccggtccagctggaaactcg

SEQ ID NO: 2903779 - DNA, 25 bp, Homo sapien
cagcgaggctctgcctgtagccggt

SEQ ID NO: 2903780 - DNA, 25 bp, Homo sapien
agggctcgcagctccccaacaggct

SEQ ID NO: 2903781 - DNA, 25 bp, Homo sapien
gccctcctctcgcaagatggcgact

SEQ ID NO: 2903782 - DNA, 25 bp, Homo sapien
gaaggcatcggccatctcccggtct

SEQ ID NO: 2903783 - DNA, 25 bp, Homo sapien
tcctctcgcaagatggcgactcggg

SEQ ID NO: 2903784 - DNA, 25 bp, Homo sapien
ctaagtggaaggcatcggccatctc

SEQ ID NO: 2903785 - DNA, 25 bp, Homo sapien
cgaaggccacgccacggaaagtgtc

SEQ ID NO: 2903786 - DNA, 25 bp, Homo sapien
tgcatagctgaagccgcccacgaag

SEQ ID NO: 2903787 - DNA, 25 bp, Homo sapien
acggaaagtgtccagcccaattgcc

SEQ ID NO: 2903788 - DNA, 25 bp, Homo sapien
atctgcatagctgaagccgcccacg

SEQ ID NO: 2903789 - DNA, 25 bp, Homo sapien
ccagccctgggatgaaaggtcacag

SEQ ID NO: 2903790 - DNA, 25 bp, Homo sapien
ctgaaggtgtctggccgcttccgga

SEQ ID NO: 2903791 - DNA, 25 bp, Homo sapien
cagcagttgacagccattacacacg

SEQ ID NO: 2903792 - DNA, 25 bp, Homo sapien
ccagacaggttgtggcgtagcagaa

SEQ ID NO: 2903793 - DNA, 25 bp, Homo sapien
cacgctggcccagcgagactcgtag

SEQ ID NO: 2903794 - DNA, 25 bp, Homo sapien
agagccaaggtccttcatgcccacc

SEQ ID NO: 2903795 - DNA, 25 bp, Homo sapien
aggagggaagtgagagccaaggtcc

SEQ ID NO: 2903796 - DNA, 25 bp, Homo sapien
gtgagagccaaggtccttcatgccc

SEQ ID NO: 2903797 - DNA, 25 bp, Homo sapien
ggaagtgagagccaaggtccttcat

SEQ ID NO: 2903798 - DNA, 25 bp, Homo sapien
tcaatctgagcttggagttccggag

SEQ ID NO: 2903799 - DNA, 25 bp, Homo sapien
ggttcccgtcatcatcagcccagtg

SEQ ID NO: 2903800 - DNA, 25 bp, Homo sapien
ctctgtggggttcccgtcatcatca

SEQ ID NO: 2903801 - DNA, 25 bp, Homo sapien
ttgggattcagagggtactgctctg

SEQ ID NO: 2903802 - DNA, 25 bp, Homo sapien
agtatcaaatggagggggtcgccat

SEQ ID NO: 2903803 - DNA, 25 bp, Homo sapien
ggaggtggtcagagtatcaaatgga

SEQ ID NO: 2903804 - DNA, 25 bp, Homo sapien
gtttcgggcattgataaagagctgg

SEQ ID NO: 2903805 - DNA, 25 bp, Homo sapien
ccttccagggtccagtttcgggcat

SEQ ID NO: 2903806 - DNA, 25 bp, Homo sapien
acccacttaggtgaaaagccatggg

SEQ ID NO: 2903807 - DNA, 25 bp, Homo sapien
gcaggacccacttaggtgaaaagcc

SEQ ID NO: 2903808 - DNA, 25 bp, Homo sapien
ggacccacttaggtgaaaagccatg

SEQ ID NO: 2903809 - DNA, 25 bp, Homo sapien
caggacccacttaggtgaaaagcca

SEQ ID NO: 2903810 - DNA, 25 bp, Homo sapien
agggcatgccatgttagagcagaac

SEQ ID NO: 2903811 - DNA, 25 bp, Homo sapien
cagattatcgagtccgctgagattt

SEQ ID NO: 2903812 - DNA, 25 bp, Homo sapien
ccttgtctgtccaagatatttttgg

SEQ ID NO: 2903813 - DNA, 25 bp, Homo sapien
atcagcaggcagattatcgagtccg

SEQ ID NO: 2903814 - DNA, 25 bp, Homo sapien
caccggtgatcactgggtgttgtga

SEQ ID NO: 2903815 - DNA, 25 bp, Homo sapien
gaagcccctgttcggacctcaggag

SEQ ID NO: 2903816 - DNA, 25 bp, Homo sapien
ccctcagagccaaggaggcaattgc

SEQ ID NO: 2903817 - DNA, 25 bp, Homo sapien
ctcaggagtcctaacttttccttgt

SEQ ID NO: 2903818 - DNA, 25 bp, Homo sapien
cagtgtagcacttcaagagaaatcc

SEQ ID NO: 2903819 - DNA, 25 bp, Homo sapien
gctgaatttgtctgcacccgctaac

SEQ ID NO: 2903820 - DNA, 25 bp, Homo sapien
ccaatgatgagaaaagggagcgcaa

SEQ ID NO: 2903821 - DNA, 25 bp, Homo sapien
gggctgatctgcatactattgctga

SEQ ID NO: 2903822 - DNA, 25 bp, Homo sapien
aagagagctgctaatttagaagcaa

SEQ ID NO: 2903823 - DNA, 25 bp, Homo sapien
gggttctgaggccagccctaagaca

SEQ ID NO: 2903824 - DNA, 25 bp, Homo sapien
aatgctgggttctgaggccagccct

SEQ ID NO: 2903825 - DNA, 25 bp, Homo sapien
aaacttccacaagcaacaattcctt

SEQ ID NO: 2903826 - DNA, 25 bp, Homo sapien
gcctgggagacatggtgaaacccta

SEQ ID NO: 2903827 - DNA, 25 bp, Homo sapien
ctatctctactaaaaatacaaaaat

SEQ ID NO: 2903828 - DNA, 25 bp, Homo sapien
tagctgggtgtggtggtgtgtgcct

SEQ ID NO: 2903829 - DNA, 25 bp, Homo sapien
gtactcccagctactcgggaggctg

SEQ ID NO: 2903830 - DNA, 25 bp, Homo sapien
tgcagtaagtgaagagtagaattcc

SEQ ID NO: 2903831 - DNA, 25 bp, Homo sapien
gcgtggcttgagctaagtgttatac

SEQ ID NO: 2903832 - DNA, 25 bp, Homo sapien
caaatgcctcacacatgcgtggctt

SEQ ID NO: 2903833 - DNA, 25 bp, Homo sapien
gaattccagcatactaaagggttag

SEQ ID NO: 2903834 - DNA, 25 bp, Homo sapien
tactgctcagggtaggtcgctttgc

SEQ ID NO: 2903835 - DNA, 25 bp, Homo sapien
tgtcaaaaatgatccggaggagtcc

SEQ ID NO: 2903836 - DNA, 25 bp, Homo sapien
tcagggtggctactctaccaggagc

SEQ ID NO: 2903837 - DNA, 25 bp, Homo sapien
cagtctggcagtggtacgaggaccc

SEQ ID NO: 2903838 - DNA, 25 bp, Homo sapien
aatgatgaacttatgagagaacctg

SEQ ID NO: 2903839 - DNA, 25 bp, Homo sapien
gaaaaggtcatagctcaagtgaagg

SEQ ID NO: 2903840 - DNA, 25 bp, Homo sapien
cattccctgtttccccatacgtggt

SEQ ID NO: 2903841 - DNA, 25 bp, Homo sapien
caggtaggttgggagtttgccaaat

SEQ ID NO: 2903842 - DNA, 25 bp, Homo sapien
tatgtgaatctacctaagagcagga

SEQ ID NO: 2903843 - DNA, 25 bp, Homo sapien
gacaacatggcggatcagcatccaa

SEQ ID NO: 2903844 - DNA, 25 bp, Homo sapien
caggcagccgtcagtcagttatccc

SEQ ID NO: 2903845 - DNA, 25 bp, Homo sapien
gatgcaaaaggtacacatgcctcag

SEQ ID NO: 2903846 - DNA, 25 bp, Homo sapien
ccggaagccgcgctcttaggagtgc

SEQ ID NO: 2903847 - DNA, 25 bp, Homo sapien
acgtggcatcggctccctgggtttc

SEQ ID NO: 2903848 - DNA, 25 bp, Homo sapien
tctcgttggccaatcggcgccaaga

SEQ ID NO: 2903849 - DNA, 25 bp, Homo sapien
tttaagatttggctccgccctgcgc

SEQ ID NO: 2903850 - DNA, 25 bp, Homo sapien
aaggcgcccccgaacagcgggcagt

SEQ ID NO: 2903851 - DNA, 25 bp, Homo sapien
ttacgtcaatggcccccatggggag

SEQ ID NO: 2903852 - DNA, 25 bp, Homo sapien
gcgggcagtctctcgtgggctccat

SEQ ID NO: 2903853 - DNA, 25 bp, Homo sapien
catggggaggatggcggaaaaggcg

SEQ ID NO: 2903854 - DNA, 25 bp, Homo sapien
ccgtcacgggatggcagaaaacttc

SEQ ID NO: 2903855 - DNA, 25 bp, Homo sapien
agttccactatcaggctctggtccg

SEQ ID NO: 2903856 - DNA, 25 bp, Homo sapien
gcctgcagctcgagaagttccacta

SEQ ID NO: 2903857 - DNA, 25 bp, Homo sapien
cttcttgattgtccgggaccggtcg

SEQ ID NO: 2903858 - DNA, 25 bp, Homo sapien
gtcaggaagggacatctctggtcgc

SEQ ID NO: 2903859 - DNA, 25 bp, Homo sapien
ggtcaggaagggacatctctggtcg

SEQ ID NO: 2903860 - DNA, 25 bp, Homo sapien
tcaggaagggacatctctggtcgcc

SEQ ID NO: 2903861 - DNA, 25 bp, Homo sapien
gccaggttctccaaactgagaggct

SEQ ID NO: 2903862 - DNA, 25 bp, Homo sapien
ggctgaacagactccacatggacag

SEQ ID NO: 2903863 - DNA, 25 bp, Homo sapien
actgagaggctgaacagactccaca

SEQ ID NO: 2903864 - DNA, 25 bp, Homo sapien
gggccaggttctccaaactgagagg

SEQ ID NO: 2903865 - DNA, 25 bp, Homo sapien
tctgctgcttgccagagaggaccca

SEQ ID NO: 2903866 - DNA, 25 bp, Homo sapien
atctgctgcttgccagagaggaccc

SEQ ID NO: 2903867 - DNA, 25 bp, Homo sapien
tatctgctgcttgccagagaggacc

SEQ ID NO: 2903868 - DNA, 25 bp, Homo sapien
tccaggacattacacactctcgggc

SEQ ID NO: 2903869 - DNA, 25 bp, Homo sapien
ccccgctaccgcccttccaggacat

SEQ ID NO: 2903870 - DNA, 25 bp, Homo sapien
ctggatctctgcgtccccgctaccg

SEQ ID NO: 2903871 - DNA, 25 bp, Homo sapien
ttccaggacattacacactctcggg

SEQ ID NO: 2903872 - DNA, 25 bp, Homo sapien
ctaaggggatcagagtcaggatgct

SEQ ID NO: 2903873 - DNA, 25 bp, Homo sapien
aaggcctgatgaagtgtcacgtcct

SEQ ID NO: 2903874 - DNA, 25 bp, Homo sapien
ggcctgatgaagtgtcacgtccttt

SEQ ID NO: 2903875 - DNA, 25 bp, Homo sapien
caaggcctgatgaagtgtcacgtcc

SEQ ID NO: 2903876 - DNA, 25 bp, Homo sapien
agcaaggcctgatgaagtgtcacgt

SEQ ID NO: 2903877 - DNA, 25 bp, Homo sapien
ggggctgattgaaggtaagcaagag

SEQ ID NO: 2903878 - DNA, 25 bp, Homo sapien
gggggctgattgaaggtaagcaaga

SEQ ID NO: 2903879 - DNA, 25 bp, Homo sapien
gggctgattgaaggtaagcaagaga

SEQ ID NO: 2903880 - DNA, 25 bp, Homo sapien
gaggacctgggtatcagttacccca

SEQ ID NO: 2903881 - DNA, 25 bp, Homo sapien
agtcatgagatacccgcccgttcct

SEQ ID NO: 2903882 - DNA, 25 bp, Homo sapien
gatggagacagaacatcatccaggc

SEQ ID NO: 2903883 - DNA, 25 bp, Homo sapien
cctgggaacccagtcatgagatacc

SEQ ID NO: 2903884 - DNA, 25 bp, Homo sapien
gtgacagattttcggggccaagaga

SEQ ID NO: 2903885 - DNA, 25 bp, Homo sapien
tgttaggatcgtgaagggtcagact

SEQ ID NO: 2903886 - DNA, 25 bp, Homo sapien
gggaccaaagatgttaggatcgtga

SEQ ID NO: 2903887 - DNA, 25 bp, Homo sapien
agggtgcaggtgacagattttcggg

SEQ ID NO: 2903888 - DNA, 25 bp, Homo sapien
ctgaagagggattgtcttatgttta

SEQ ID NO: 2903889 - DNA, 25 bp, Homo sapien
tatgtttacgcacagggaagaaata

SEQ ID NO: 2903890 - DNA, 25 bp, Homo sapien
caagtttattctgaagagggattgt

SEQ ID NO: 2903891 - DNA, 25 bp, Homo sapien
cctcacagaaccgagtccccaagtt

SEQ ID NO: 2903892 - DNA, 25 bp, Homo sapien
gccccttggagcgaggaatgcaggg

SEQ ID NO: 2903893 - DNA, 25 bp, Homo sapien
cccttggagcgaggaatgcagggct

SEQ ID NO: 2903894 - DNA, 25 bp, Homo sapien
ctgccccttggagcgaggaatgcag

SEQ ID NO: 2903895 - DNA, 25 bp, Homo sapien
ccttggagcgaggaatgcagggctg

SEQ ID NO: 2903896 - DNA, 25 bp, Homo sapien
tgctcttcaaaggagtgaggtgctc

SEQ ID NO: 2903897 - DNA, 25 bp, Homo sapien
gctcttcaaaggagtgaggtgctct

SEQ ID NO: 2903898 - DNA, 25 bp, Homo sapien
ttcaaaggagtgaggtgctctgctg

SEQ ID NO: 2903899 - DNA, 25 bp, Homo sapien
tcttcaaaggagtgaggtgctctgc

SEQ ID NO: 2903900 - DNA, 25 bp, Homo sapien
gggttggtgcatcattggagtttcg

SEQ ID NO: 2903901 - DNA, 25 bp, Homo sapien
tctggggaagtctgggagtcgaggc

SEQ ID NO: 2903902 - DNA, 25 bp, Homo sapien
gcgccgggacactggactaggtgtg

SEQ ID NO: 2903903 - DNA, 25 bp, Homo sapien
tgggcagccctggaacgagaaggag

SEQ ID NO: 2903904 - DNA, 25 bp, Homo sapien
gagcagaggcgtgcagggtgaccca

SEQ ID NO: 2903905 - DNA, 25 bp, Homo sapien
agcagaggcgtgcagggtgacccag

SEQ ID NO: 2903906 - DNA, 25 bp, Homo sapien
ggagcagaggcgtgcagggtgaccc

SEQ ID NO: 2903907 - DNA, 25 bp, Homo sapien
agcctccgcacagtgccaggagctg

SEQ ID NO: 2903908 - DNA, 25 bp, Homo sapien
cagcctccgcacagtgccaggagct

SEQ ID NO: 2903909 - DNA, 25 bp, Homo sapien
tgctctcgcttggagacctggctcc

SEQ ID NO: 2903910 - DNA, 25 bp, Homo sapien
atctgctctcgcttggagacctggc

SEQ ID NO: 2903911 - DNA, 25 bp, Homo sapien
tggagcaccgttctcctgggaccca

SEQ ID NO: 2903912 - DNA, 25 bp, Homo sapien
gcaccgttctcctgggacccactcc

SEQ ID NO: 2903913 - DNA, 25 bp, Homo sapien
gagcaccgttctcctgggacccact

SEQ ID NO: 2903914 - DNA, 25 bp, Homo sapien
ctggagcaccgttctcctgggaccc

SEQ ID NO: 2903915 - DNA, 25 bp, Homo sapien
gacaggtagcctaaggagaaagccc

SEQ ID NO: 2903916 - DNA, 25 bp, Homo sapien
ggtagcccctgaaagttgttagcac

SEQ ID NO: 2903917 - DNA, 25 bp, Homo sapien
ccagcaactgcaatatcaaggtcca

SEQ ID NO: 2903918 - DNA, 25 bp, Homo sapien
caaggtccaggcatctatagatctc

SEQ ID NO: 2903919 - DNA, 25 bp, Homo sapien
gggcgggagcgagaggtccgcagcg

SEQ ID NO: 2903920 - DNA, 25 bp, Homo sapien
tggagcggtaggatgtgaggacaac

SEQ ID NO: 2903921 - DNA, 25 bp, Homo sapien
gagtggcaggagtttgcgctcagca

SEQ ID NO: 2903922 - DNA, 25 bp, Homo sapien
gacaacggcagggtgaccgatgctt

SEQ ID NO: 2903923 - DNA, 25 bp, Homo sapien
aagcagatcaagatctggctgtggg

SEQ ID NO: 2903924 - DNA, 25 bp, Homo sapien
tcttcagaaagcagatcaagatctg

SEQ ID NO: 2903925 - DNA, 25 bp, Homo sapien
ggtccccgaaaatggtggcatcctg

SEQ ID NO: 2903926 - DNA, 25 bp, Homo sapien
ctgtttggattccatcttcagaaag

SEQ ID NO: 2903927 - DNA, 25 bp, Homo sapien
tgcctgttggggattgtagtttgct

SEQ ID NO: 2903928 - DNA, 25 bp, Homo sapien
ccccagcagggatggttactataaa

SEQ ID NO: 2903929 - DNA, 25 bp, Homo sapien
ggatccccagccaggactcccgact

SEQ ID NO: 2903930 - DNA, 25 bp, Homo sapien
cagcagggatggttactataaaaac

SEQ ID NO: 2903931 - DNA, 25 bp, Homo sapien
tccacagttgctggaggagtattct

SEQ ID NO: 2903932 - DNA, 25 bp, Homo sapien
ctccacagttgctggaggagtattc

SEQ ID NO: 2903933 - DNA, 25 bp, Homo sapien
ccacagttgctggaggagtattctg

SEQ ID NO: 2903934 - DNA, 25 bp, Homo sapien
ggtagaagcatggtggggagagaac

SEQ ID NO: 2903935 - DNA, 25 bp, Homo sapien
tctgccctcaggtagaagcatggtg

SEQ ID NO: 2903936 - DNA, 25 bp, Homo sapien
gagctgaaggttagtctgccctcag

SEQ ID NO: 2903937 - DNA, 25 bp, Homo sapien
ggagctgaaggttagtctgccctca

SEQ ID NO: 2903938 - DNA, 25 bp, Homo sapien
agctgggattcgaaacaagggctgc

SEQ ID NO: 2903939 - DNA, 25 bp, Homo sapien
tcacagaattgataagggccagagc

SEQ ID NO: 2903940 - DNA, 25 bp, Homo sapien
cagaattgataagggccagagctgg

SEQ ID NO: 2903941 - DNA, 25 bp, Homo sapien
gggctgcttatctctagagccctgg

SEQ ID NO: 2903942 - DNA, 25 bp, Homo sapien
gtgcactcacttactctggacccgg

SEQ ID NO: 2903943 - DNA, 25 bp, Homo sapien
tatttgtgtgtcaaggaagctcaac

SEQ ID NO: 2903944 - DNA, 25 bp, Homo sapien
tcaacgtgatggactgcaaactctc

SEQ ID NO: 2903945 - DNA, 25 bp, Homo sapien
gcaaccattgtctggaacgccctat

SEQ ID NO: 2903946 - DNA, 25 bp, Homo sapien
ggggcagctcccaattctgctcctt

SEQ ID NO: 2903947 - DNA, 25 bp, Homo sapien
cttcagcacctctagcccctcctct

SEQ ID NO: 2903948 - DNA, 25 bp, Homo sapien
ttcagcacctctagcccctcctctt

SEQ ID NO: 2903949 - DNA, 25 bp, Homo sapien
tcagcacctctagcccctcctcttc

SEQ ID NO: 2903950 - DNA, 25 bp, Homo sapien
ggctgagggtatccagaagaccgct

SEQ ID NO: 2903951 - DNA, 25 bp, Homo sapien
cacggctgctcggtaggtctggtac

SEQ ID NO: 2903952 - DNA, 25 bp, Homo sapien
tgctggagaaggactcccatcctca

SEQ ID NO: 2903953 - DNA, 25 bp, Homo sapien
ctggcttgcacagccggaagctcct

SEQ ID NO: 2903954 - DNA, 25 bp, Homo sapien
aaaagcaggcagtcgtgggaagccc

SEQ ID NO: 2903955 - DNA, 25 bp, Homo sapien
ttcaccgtgggaagctaggaccctg

SEQ ID NO: 2903956 - DNA, 25 bp, Homo sapien
tgggaagcccagttcaccgtgggaa

SEQ ID NO: 2903957 - DNA, 25 bp, Homo sapien
aaagcaggcagtcgtgggaagccca

SEQ ID NO: 2903958 - DNA, 25 bp, Homo sapien
tcggacgtcaccacctcgaaaagac

SEQ ID NO: 2903959 - DNA, 25 bp, Homo sapien
cgcaggtaggaagcctcggacgtca

SEQ ID NO: 2903960 - DNA, 25 bp, Homo sapien
tggctcagcacgaaggtgtcggtca

SEQ ID NO: 2903961 - DNA, 25 bp, Homo sapien
cctggactcgctgcacattggagaa

SEQ ID NO: 2903962 - DNA, 25 bp, Homo sapien
taatccacatacaccgagaaaggcc

SEQ ID NO: 2903963 - DNA, 25 bp, Homo sapien
gaggcggctgtaggtctcctcctga

SEQ ID NO: 2903964 - DNA, 25 bp, Homo sapien
aaaggccccacagcgtgggcatgca

SEQ ID NO: 2903965 - DNA, 25 bp, Homo sapien
cacacgggacaggagcgttgctaga

SEQ ID NO: 2903966 - DNA, 25 bp, Homo sapien
cagccgggtgatgcgctggaagggc

SEQ ID NO: 2903967 - DNA, 25 bp, Homo sapien
agcagcatgcgcagccgggtgatgc

SEQ ID NO: 2903968 - DNA, 25 bp, Homo sapien
gctcggcggagaagcgcacgttggt

SEQ ID NO: 2903969 - DNA, 25 bp, Homo sapien
cgctcacacttagggaggctctgca

SEQ ID NO: 2903970 - DNA, 25 bp, Homo sapien
cacaggtgtatagcacttagaacca

SEQ ID NO: 2903971 - DNA, 25 bp, Homo sapien
cacatagttgcaggtaaggttacac

SEQ ID NO: 2903972 - DNA, 25 bp, Homo sapien
caattatttctgtatgacctgaggc

SEQ ID NO: 2903973 - DNA, 25 bp, Homo sapien
caagttatgtgacctgtgccttagc

SEQ ID NO: 2903974 - DNA, 25 bp, Homo sapien
cctcttctgtctggcgcaggatatt

SEQ ID NO: 2903975 - DNA, 25 bp, Homo sapien
acctcagcgctgcaacgctcgatga

SEQ ID NO: 2903976 - DNA, 25 bp, Homo sapien
ggaagcgcagcctttgggtgagccg

SEQ ID NO: 2903977 - DNA, 25 bp, Homo sapien
cttcatgcgccccacctcagcgctg

SEQ ID NO: 2903978 - DNA, 25 bp, Homo sapien
ttgactttgtggaagcgcagccttt

SEQ ID NO: 2903979 - DNA, 25 bp, Homo sapien
attccaggcgccgtgaccaggagac

SEQ ID NO: 2903980 - DNA, 25 bp, Homo sapien
ggcaccctaactcagtcagctctcc

SEQ ID NO: 2903981 - DNA, 25 bp, Homo sapien
gcagcaggtcgctaaagagcagcag

SEQ ID NO: 2903982 - DNA, 25 bp, Homo sapien
gggcgcgaggcaaagagcacgcccc

SEQ ID NO: 2903983 - DNA, 25 bp, Homo sapien
ctggaccagggagcgatgggcatag

SEQ ID NO: 2903984 - DNA, 25 bp, Homo sapien
accagggagcgatgggcatagtcca

SEQ ID NO: 2903985 - DNA, 25 bp, Homo sapien
gggagcgatgggcatagtccagaac

SEQ ID NO: 2903986 - DNA, 25 bp, Homo sapien
ggaccagggagcgatgggcatagtc

SEQ ID NO: 2903987 - DNA, 25 bp, Homo sapien
gtagggggtccagatggatccggaa

SEQ ID NO: 2903988 - DNA, 25 bp, Homo sapien
gtccagatggatccggaacctgctg

SEQ ID NO: 2903989 - DNA, 25 bp, Homo sapien
gggtccagatggatccggaacctgc

SEQ ID NO: 2903990 - DNA, 25 bp, Homo sapien
ggaagaagcttggagtagtcggtgg

SEQ ID NO: 2903991 - DNA, 25 bp, Homo sapien
aagtgtcacagttggcccaaaagat

SEQ ID NO: 2903992 - DNA, 25 bp, Homo sapien
tgtcacagttggcccaaaagatcct

SEQ ID NO: 2903993 - DNA, 25 bp, Homo sapien
gtgtcacagttggcccaaaagatcc

SEQ ID NO: 2903994 - DNA, 25 bp, Homo sapien
agtgtcacagttggcccaaaagatc

SEQ ID NO: 2903995 - DNA, 25 bp, Homo sapien
gggaaggctcccagccagcgctgca

SEQ ID NO: 2903996 - DNA, 25 bp, Homo sapien
aaggctcccagccagcgctgcatgt

SEQ ID NO: 2903997 - DNA, 25 bp, Homo sapien
ggttgggaaggctcccagccagcgc

SEQ ID NO: 2903998 - DNA, 25 bp, Homo sapien
tcccagccagcgctgcatgtctgat

SEQ ID NO: 2903999 - DNA, 25 bp, Homo sapien
cttcaggggtcttgtgcaggtgttt

SEQ ID NO: 2904000 - DNA, 25 bp, Homo sapien
gactccgtccttcagtcttggcagg

SEQ ID NO: 2904001 - DNA, 25 bp, Homo sapien
cagtcttggcaggtgcagacgactc

SEQ ID NO: 2904002 - DNA, 25 bp, Homo sapien
tggactccagactccgtccttcagt

SEQ ID NO: 2904003 - DNA, 25 bp, Homo sapien
agatccaacagcctcgagaagcctc

SEQ ID NO: 2904004 - DNA, 25 bp, Homo sapien
tctggttctggcgaaggtgcctcct

SEQ ID NO: 2904005 - DNA, 25 bp, Homo sapien
gggtgcctgaagaagatccaacagc

SEQ ID NO: 2904006 - DNA, 25 bp, Homo sapien
ctcctttcgtgttcccctgtgactt

SEQ ID NO: 2904007 - DNA, 25 bp, Homo sapien
tataaaccatgcttggagaccactg

SEQ ID NO: 2904008 - DNA, 25 bp, Homo sapien
gaagctcgatctctatggttgccac

SEQ ID NO: 2904009 - DNA, 25 bp, Homo sapien
tccaagagacccaaagctcagggct

SEQ ID NO: 2904010 - DNA, 25 bp, Homo sapien
tctgcaggcaggaattatggaggcc

SEQ ID NO: 2904011 - DNA, 25 bp, Homo sapien
cgctgagaggtttctcccatgggcc

SEQ ID NO: 2904012 - DNA, 25 bp, Homo sapien
tgcctggaacgcagacagggcaccg

SEQ ID NO: 2904013 - DNA, 25 bp, Homo sapien
cagcatgcctggaacgcagacaggg

SEQ ID NO: 2904014 - DNA, 25 bp, Homo sapien
gccctcctacgccacctatgaggaa

SEQ ID NO: 2904015 - DNA, 25 bp, Homo sapien
ggacttcgaggagctccagcgctct

SEQ ID NO: 2904016 - DNA, 25 bp, Homo sapien
tctgtagctgaacctgcgagtatgg

SEQ ID NO: 2904017 - DNA, 25 bp, Homo sapien
gacgtcgggcagtgttctgaacagc

SEQ ID NO: 2904018 - DNA, 25 bp, Homo sapien
cctggagaacctgagcctgcagtta

SEQ ID NO: 2904019 - DNA, 25 bp, Homo sapien
agtttgggcgcagcccacggcttca

SEQ ID NO: 2904020 - DNA, 25 bp, Homo sapien
ttgaaaaactccatcgggcgtggag

SEQ ID NO: 2904021 - DNA, 25 bp, Homo sapien
gaagccaaacctagtcggatcaagc

SEQ ID NO: 2904022 - DNA, 25 bp, Homo sapien
gacctggtgactgccgttgcgacct

SEQ ID NO: 2904023 - DNA, 25 bp, Homo sapien
ccccaaaagtctggattcaatccca

SEQ ID NO: 2904024 - DNA, 25 bp, Homo sapien
caacgctttctcacagagggcagct

SEQ ID NO: 2904025 - DNA, 25 bp, Homo sapien
gattcaatcccaacgctttctcaca

SEQ ID NO: 2904026 - DNA, 25 bp, Homo sapien
ttccccaaaagtctggattcaatcc

SEQ ID NO: 2904027 - DNA, 25 bp, Homo sapien
tactctcacaaagacaaatcaaaaa

SEQ ID NO: 2904028 - DNA, 25 bp, Homo sapien
gcagcataatgatggtatttagtat

SEQ ID NO: 2904029 - DNA, 25 bp, Homo sapien
caatctgtcgtgattttactctcac

SEQ ID NO: 2904030 - DNA, 25 bp, Homo sapien
ttcagcagcataatgatggtattta

SEQ ID NO: 2904031 - DNA, 25 bp, Homo sapien
tgctagtcaatcaccaccagttcct

SEQ ID NO: 2904032 - DNA, 25 bp, Homo sapien
agaggtgtcatgccttctgagattg

SEQ ID NO: 2904033 - DNA, 25 bp, Homo sapien
ggatgagaatgggtcctagaggtgt

SEQ ID NO: 2904034 - DNA, 25 bp, Homo sapien
ccagaaagaggaggatgtaggatga

SEQ ID NO: 2904035 - DNA, 25 bp, Homo sapien
tctccaaggttcttcgtgggttgca

SEQ ID NO: 2904036 - DNA, 25 bp, Homo sapien
gacccacgaggatacgggaatccag

SEQ ID NO: 2904037 - DNA, 25 bp, Homo sapien
gctttattgtgagctgacccacgag

SEQ ID NO: 2904038 - DNA, 25 bp, Homo sapien
ttgctgtcagccatacgggttccca

SEQ ID NO: 2904039 - DNA, 25 bp, Homo sapien
agaatgaggaagtctaataacagac

SEQ ID NO: 2904040 - DNA, 25 bp, Homo sapien
taacagacctcgatcaaataagaga

SEQ ID NO: 2904041 - DNA, 25 bp, Homo sapien
caccagactcaattgtctcttctca

SEQ ID NO: 2904042 - DNA, 25 bp, Homo sapien
aaataagagactcttgatccaagag

SEQ ID NO: 2904043 - DNA, 25 bp, Homo sapien
tcattcccagagtactctgcatcca

SEQ ID NO: 2904044 - DNA, 25 bp, Homo sapien
actcattcccagagtactctgcatc

SEQ ID NO: 2904045 - DNA, 25 bp, Homo sapien
ctcattcccagagtactctgcatcc

SEQ ID NO: 2904046 - DNA, 25 bp, Homo sapien
cattcccagagtactctgcatccat

SEQ ID NO: 2904047 - DNA, 25 bp, Homo sapien
ctgatgttggtctctttctccttct

SEQ ID NO: 2904048 - DNA, 25 bp, Homo sapien
caggtctctgatgttggtctctttc

SEQ ID NO: 2904049 - DNA, 25 bp, Homo sapien
ctttccaggtctctgatgttggtct

SEQ ID NO: 2904050 - DNA, 25 bp, Homo sapien
ggtctctgatgttggtctctttctc

SEQ ID NO: 2904051 - DNA, 25 bp, Homo sapien
aggacagcagtctcccatcttgtcc

SEQ ID NO: 2904052 - DNA, 25 bp, Homo sapien
agtctcccatcttgtcccagctcac

SEQ ID NO: 2904053 - DNA, 25 bp, Homo sapien
ggaggacagcagtctcccatcttgt

SEQ ID NO: 2904054 - DNA, 25 bp, Homo sapien
acagcagtctcccatcttgtcccag

SEQ ID NO: 2904055 - DNA, 25 bp, Homo sapien
agcggagagttctggcgctggccca

SEQ ID NO: 2904056 - DNA, 25 bp, Homo sapien
gctgtgtgtgattctccattgaaag

SEQ ID NO: 2904057 - DNA, 25 bp, Homo sapien
ccattgaaagggcagcggagagttc

SEQ ID NO: 2904058 - DNA, 25 bp, Homo sapien
gcgctggcccaaggacctgttacta

SEQ ID NO: 2904059 - DNA, 25 bp, Homo sapien
tagtaggataaaggcaaccaggctg

SEQ ID NO: 2904060 - DNA, 25 bp, Homo sapien
ccaatagtaggataaaggcaaccag

SEQ ID NO: 2904061 - DNA, 25 bp, Homo sapien
gaaggccacgaccaatagtaggata

SEQ ID NO: 2904062 - DNA, 25 bp, Homo sapien
cttggagaaggccacgaccaatagt

SEQ ID NO: 2904063 - DNA, 25 bp, Homo sapien
taacgtgggctgatgtgtggattct

SEQ ID NO: 2904064 - DNA, 25 bp, Homo sapien
ttctctaagtcagaacagctcctgg

SEQ ID NO: 2904065 - DNA, 25 bp, Homo sapien
tctgttgctgacatccacgggccag

SEQ ID NO: 2904066 - DNA, 25 bp, Homo sapien
tgcaggagccccatggacataacgt

SEQ ID NO: 2904067 - DNA, 25 bp, Homo sapien
gggctgattgtccacagcttaaaac

SEQ ID NO: 2904068 - DNA, 25 bp, Homo sapien
ctgattgtccacagcttaaaactgc

SEQ ID NO: 2904069 - DNA, 25 bp, Homo sapien
ggctgattgtccacagcttaaaact

SEQ ID NO: 2904070 - DNA, 25 bp, Homo sapien
gctgattgtccacagcttaaaactg

SEQ ID NO: 2904071 - DNA, 25 bp, Homo sapien
gaagctcaagatggtcccgaagccc

SEQ ID NO: 2904072 - DNA, 25 bp, Homo sapien
gaagcccacaaagggcaatttttga

SEQ ID NO: 2904073 - DNA, 25 bp, Homo sapien
caaccagatggtgaggacgaggccc

SEQ ID NO: 2904074 - DNA, 25 bp, Homo sapien
caatttttgaacagcgggcaggtag

SEQ ID NO: 2904075 - DNA, 25 bp, Homo sapien
caggaggcagagggtctcattgtca

SEQ ID NO: 2904076 - DNA, 25 bp, Homo sapien
ggagacaggaggcagagggtctcat

SEQ ID NO: 2904077 - DNA, 25 bp, Homo sapien
gagacaggaggcagagggtctcatt

SEQ ID NO: 2904078 - DNA, 25 bp, Homo sapien
gacaggaggcagagggtctcattgt

SEQ ID NO: 2904079 - DNA, 25 bp, Homo sapien
cctttccaactcgaagatccagatg

SEQ ID NO: 2904080 - DNA, 25 bp, Homo sapien
ccagcctatggggatggatacattc

SEQ ID NO: 2904081 - DNA, 25 bp, Homo sapien
agcaccagccaaccaatgaaatagc

SEQ ID NO: 2904082 - DNA, 25 bp, Homo sapien
tgaagtataggataagcaccagcca

SEQ ID NO: 2904083 - DNA, 25 bp, Homo sapien
tctactgagccgaaactgctgctgc

SEQ ID NO: 2904084 - DNA, 25 bp, Homo sapien
tgtctgtgatcgtctgtgcccttgg

SEQ ID NO: 2904085 - DNA, 25 bp, Homo sapien
ccactggggtggctcagaatcagac

SEQ ID NO: 2904086 - DNA, 25 bp, Homo sapien
cagactccagaaacttttatggttg

SEQ ID NO: 2904087 - DNA, 25 bp, Homo sapien
gatgaatggacagaacttggtgcca

SEQ ID NO: 2904088 - DNA, 25 bp, Homo sapien
gaggaccaacctattcaagggctgg

SEQ ID NO: 2904089 - DNA, 25 bp, Homo sapien
tcactcaagctcaatcaaggcaggg

SEQ ID NO: 2904090 - DNA, 25 bp, Homo sapien
gaagagacggacaatttattccaca

SEQ ID NO: 2904091 - DNA, 25 bp, Homo sapien
tgcaaaagtccatagactgggcgcc

SEQ ID NO: 2904092 - DNA, 25 bp, Homo sapien
tcaaattgaggtctgcggatcggga

SEQ ID NO: 2904093 - DNA, 25 bp, Homo sapien
caaagaagttgtgtccatcagcagt

SEQ ID NO: 2904094 - DNA, 25 bp, Homo sapien
gttaaattctcacccacaccgtgtg

SEQ ID NO: 2904095 - DNA, 25 bp, Homo sapien
ccatgcttaataattttggacccca

SEQ ID NO: 2904096 - DNA, 25 bp, Homo sapien
atgcttaataattttggaccccagt

SEQ ID NO: 2904097 - DNA, 25 bp, Homo sapien
catgcttaataattttggaccccag

SEQ ID NO: 2904098 - DNA, 25 bp, Homo sapien
catttcccgcgacattacagggtga

SEQ ID NO: 2904099 - DNA, 25 bp, Homo sapien
tcctgatgcaatggccaaaatgctg

SEQ ID NO: 2904100 - DNA, 25 bp, Homo sapien
gggaccattaggatctcgctcaaca

SEQ ID NO: 2904101 - DNA, 25 bp, Homo sapien
cagatgagtgcttgtgagcctttcc

SEQ ID NO: 2904102 - DNA, 25 bp, Homo sapien
gaccagcgagattctgcatgtgaag

SEQ ID NO: 2904103 - DNA, 25 bp, Homo sapien
ggattgtcctgagagaccagcgaga

SEQ ID NO: 2904104 - DNA, 25 bp, Homo sapien
acaggattgtcctgagagaccagcg

SEQ ID NO: 2904105 - DNA, 25 bp, Homo sapien
tcctgagagaccagcgagattctgc

SEQ ID NO: 2904106 - DNA, 25 bp, Homo sapien
gattcagagtaaggatgactgaccc

SEQ ID NO: 2904107 - DNA, 25 bp, Homo sapien
cctatgttcccaatgcctaagagtg

SEQ ID NO: 2904108 - DNA, 25 bp, Homo sapien
tggaatttgggtatgcgtctgccac

SEQ ID NO: 2904109 - DNA, 25 bp, Homo sapien
caagagttggcctgagatcactgct

SEQ ID NO: 2904110 - DNA, 25 bp, Homo sapien
gatgcaaagcgaagtgctccagtga

SEQ ID NO: 2904111 - DNA, 25 bp, Homo sapien
gaactggtcgactaaagatgcaaag

SEQ ID NO: 2904112 - DNA, 25 bp, Homo sapien
tgagtgtggtacaggttgttgagat

SEQ ID NO: 2904113 - DNA, 25 bp, Homo sapien
tgtatatatctgaactggtcgacta

SEQ ID NO: 2904114 - DNA, 25 bp, Homo sapien
agctctgtattcgtgggccctccaa

SEQ ID NO: 2904115 - DNA, 25 bp, Homo sapien
aatgaattcccaagcgtagactcgg

SEQ ID NO: 2904116 - DNA, 25 bp, Homo sapien
gtcctcaggaataagcgggcgtgcc

SEQ ID NO: 2904117 - DNA, 25 bp, Homo sapien
ggaaggctacacaaaggaggcgaca

SEQ ID NO: 2904118 - DNA, 25 bp, Homo sapien
ctggagacttggcaacaacgtggga

SEQ ID NO: 2904119 - DNA, 25 bp, Homo sapien
gccgcgtctggtgtgtccctttctc

SEQ ID NO: 2904120 - DNA, 25 bp, Homo sapien
ctggcatctgggtgaacagcgctgc

SEQ ID NO: 2904121 - DNA, 25 bp, Homo sapien
cgggcccgagttaagtcactggctt

SEQ ID NO: 2904122 - DNA, 25 bp, Homo sapien
gaggtctcgggttcaggttatctga

SEQ ID NO: 2904123 - DNA, 25 bp, Homo sapien
ttactgcgtaaaagtttgtattgcc

SEQ ID NO: 2904124 - DNA, 25 bp, Homo sapien
ggaagtcttgctttcaataggataa

SEQ ID NO: 2904125 - DNA, 25 bp, Homo sapien
tattgccattggataggaagtcttg

SEQ ID NO: 2904126 - DNA, 25 bp, Homo sapien
taagccaggtttgatggctaaagag

SEQ ID NO: 2904127 - DNA, 25 bp, Homo sapien
gtattgaatgttgggctttcccttg

SEQ ID NO: 2904128 - DNA, 25 bp, Homo sapien
ggctaaagagtgatttctggagttt

SEQ ID NO: 2904129 - DNA, 25 bp, Homo sapien
tatttttctgcaggtggttatcact

SEQ ID NO: 2904130 - DNA, 25 bp, Homo sapien
tgttgacaggtcgtatcagagatga

SEQ ID NO: 2904131 - DNA, 25 bp, Homo sapien
ttcatgcagagccagaacgagagac

SEQ ID NO: 2904132 - DNA, 25 bp, Homo sapien
tattgatctgggtggcaccagcgga

SEQ ID NO: 2904133 - DNA, 25 bp, Homo sapien
caccagcggatccatcagtgcaggg

SEQ ID NO: 2904134 - DNA, 25 bp, Homo sapien
tgctcccaaagagtggcaagatgag

SEQ ID NO: 2904135 - DNA, 25 bp, Homo sapien
tgcagttgcgtggtcatggctcttg

SEQ ID NO: 2904136 - DNA, 25 bp, Homo sapien
tgagttgagccagggaccaaaaaac

SEQ ID NO: 2904137 - DNA, 25 bp, Homo sapien
cacttagcttagaagagagattgca

SEQ ID NO: 2904138 - DNA, 25 bp, Homo sapien
tgtcgtttcctagagaatggtctcg

SEQ ID NO: 2904139 - DNA, 25 bp, Homo sapien
taaacttacagaaccggaagcagcg

SEQ ID NO: 2904140 - DNA, 25 bp, Homo sapien
tgctttcttaaatcaagggccgccg

SEQ ID NO: 2904141 - DNA, 25 bp, Homo sapien
gagagtctcttgtcggccgagtagc

SEQ ID NO: 2904142 - DNA, 25 bp, Homo sapien
gcttctgggtcgggcctgcagttcc

SEQ ID NO: 2904143 - DNA, 25 bp, Homo sapien
agaagtggaggcgcggtgggaggag

SEQ ID NO: 2904144 - DNA, 25 bp, Homo sapien
gtggaggcgcggtgggaggagggtc

SEQ ID NO: 2904145 - DNA, 25 bp, Homo sapien
tgagaagtggaggcgcggtgggagg

SEQ ID NO: 2904146 - DNA, 25 bp, Homo sapien
aggcgcggtgggaggagggtcaagg

SEQ ID NO: 2904147 - DNA, 25 bp, Homo sapien
cacagtcaccagatcaagcaggatg

SEQ ID NO: 2904148 - DNA, 25 bp, Homo sapien
cctctgtgtaggcttccctagggac

SEQ ID NO: 2904149 - DNA, 25 bp, Homo sapien
tagggacacggccatactttactcc

SEQ ID NO: 2904150 - DNA, 25 bp, Homo sapien
cgggacgccccagcggcatcctgtg

SEQ ID NO: 2904151 - DNA, 25 bp, Homo sapien
ttaaaagatatagaggaaggccaag

SEQ ID NO: 2904152 - DNA, 25 bp, Homo sapien
cctcgggtcaccgtccttccttgct

SEQ ID NO: 2904153 - DNA, 25 bp, Homo sapien
ctcgggtcaccgtccttccttgcta

SEQ ID NO: 2904154 - DNA, 25 bp, Homo sapien
tctccaaatgctgccgtgtccctga

SEQ ID NO: 2904155 - DNA, 25 bp, Homo sapien
gtgtccctgagaacaaacctctcca

SEQ ID NO: 2904156 - DNA, 25 bp, Homo sapien
aacaaacctctccactgtcttggtg

SEQ ID NO: 2904157 - DNA, 25 bp, Homo sapien
aaatgctgccgtgtccctgagaaca

SEQ ID NO: 2904158 - DNA, 25 bp, Homo sapien
tcctgtcgctggttcagataactcg

SEQ ID NO: 2904159 - DNA, 25 bp, Homo sapien
cattcactattcctgtcgctggttc

SEQ ID NO: 2904160 - DNA, 25 bp, Homo sapien
gataactcgttactctctaaatggc

SEQ ID NO: 2904161 - DNA, 25 bp, Homo sapien
cgctggttcagataactcgttactc

SEQ ID NO: 2904162 - DNA, 25 bp, Homo sapien
caaggatgggaaatggattagagcc

SEQ ID NO: 2904163 - DNA, 25 bp, Homo sapien
gaatcaccgtccgaccaaagatacg

SEQ ID NO: 2904164 - DNA, 25 bp, Homo sapien
ggaagagtgagaatcaccgtccgac

SEQ ID NO: 2904165 - DNA, 25 bp, Homo sapien
caaagatacgcaaggatgggaaatg

SEQ ID NO: 2904166 - DNA, 25 bp, Homo sapien
tgatcagatccacggcagcatacgg

SEQ ID NO: 2904167 - DNA, 25 bp, Homo sapien
tcagctgatcagatccacggcagca

SEQ ID NO: 2904168 - DNA, 25 bp, Homo sapien
cagctgatcagatccacggcagcat

SEQ ID NO: 2904169 - DNA, 25 bp, Homo sapien
gctgatcagatccacggcagcatac

SEQ ID NO: 2904170 - DNA, 25 bp, Homo sapien
cagcaatagacacaatgcagggagc

SEQ ID NO: 2904171 - DNA, 25 bp, Homo sapien
ggcttgtatcctccaggcaggagat

SEQ ID NO: 2904172 - DNA, 25 bp, Homo sapien
gctacatacagaatgatgagacccc

SEQ ID NO: 2904173 - DNA, 25 bp, Homo sapien
cctagaatgttagcagcctggcttg

SEQ ID NO: 2904174 - DNA, 25 bp, Homo sapien
cggctcctccccgacacgtcaggga

SEQ ID NO: 2904175 - DNA, 25 bp, Homo sapien
ggctcctccccgacacgtcagggac

SEQ ID NO: 2904176 - DNA, 25 bp, Homo sapien
gctcctccccgacacgtcagggact

SEQ ID NO: 2904177 - DNA, 25 bp, Homo sapien
gctcggctcagctcccctacgcagc

SEQ ID NO: 2904178 - DNA, 25 bp, Homo sapien
gcagccccgagctccactcagcgta

SEQ ID NO: 2904179 - DNA, 25 bp, Homo sapien
ctccaatgtgtcaaaagcgcatgtt

SEQ ID NO: 2904180 - DNA, 25 bp, Homo sapien
gttcgccgccgctcaaccgacgtct

SEQ ID NO: 2904181 - DNA, 25 bp, Homo sapien
ccacacatcggaccagggaagggag

SEQ ID NO: 2904182 - DNA, 25 bp, Homo sapien
gacagttagagcggttggaacagtt

SEQ ID NO: 2904183 - DNA, 25 bp, Homo sapien
gaacggggcacatcttccggaggcc

SEQ ID NO: 2904184 - DNA, 25 bp, Homo sapien
gaggccaccggaatcgttcccttgc

SEQ ID NO: 2904185 - DNA, 25 bp, Homo sapien
actgggccactccttgcgccgccag

SEQ ID NO: 2904186 - DNA, 25 bp, Homo sapien
ccagcccacggtgccacgtcccggc

SEQ ID NO: 2904187 - DNA, 25 bp, Homo sapien
ctccgactgggccactccttgcgcc

SEQ ID NO: 2904188 - DNA, 25 bp, Homo sapien
gcctccgtcaccgccagccctcacc

SEQ ID NO: 2904189 - DNA, 25 bp, Homo sapien
gagtcaggagaatgccaatccgagc

SEQ ID NO: 2904190 - DNA, 25 bp, Homo sapien
tggtgacactttgccgaactccagg

SEQ ID NO: 2904191 - DNA, 25 bp, Homo sapien
tccaagccaccctcgcaaatgaagg

SEQ ID NO: 2904192 - DNA, 25 bp, Homo sapien
aaaagagtcgagcacaagtaacccg

SEQ ID NO: 2904193 - DNA, 25 bp, Homo sapien
ggcgataacataatcagttgcaacc

SEQ ID NO: 2904194 - DNA, 25 bp, Homo sapien
ccacaaggtgatgcggttagaaaaa

SEQ ID NO: 2904195 - DNA, 25 bp, Homo sapien
tcgaaatggcgataacataatcagt

SEQ ID NO: 2904196 - DNA, 25 bp, Homo sapien
gagtgctctgaaacgtgtaaaggtg

SEQ ID NO: 2904197 - DNA, 25 bp, Homo sapien
cagagaaatctaagcacaagcataa

SEQ ID NO: 2904198 - DNA, 25 bp, Homo sapien
agaacagagaaatctaagcacaagc

SEQ ID NO: 2904199 - DNA, 25 bp, Homo sapien
tgggacaacactgaactgcagcatt

SEQ ID NO: 2904200 - DNA, 25 bp, Homo sapien
aaaatctgggacaacactgaactgc

SEQ ID NO: 2904201 - DNA, 25 bp, Homo sapien
gttccttccaataagcagtttcctc

SEQ ID NO: 2904202 - DNA, 25 bp, Homo sapien
aaatctggtatatcttcaccatcca

SEQ ID NO: 2904203 - DNA, 25 bp, Homo sapien
tcaaggaaagttccttccaataagc

SEQ ID NO: 2904204 - DNA, 25 bp, Homo sapien
ctttgcttatacttcaaggaaagtt

SEQ ID NO: 2904205 - DNA, 25 bp, Homo sapien
tataaaacgttccatgcccctgaag

SEQ ID NO: 2904206 - DNA, 25 bp, Homo sapien
taaagtctgttctatggagccccag

SEQ ID NO: 2904207 - DNA, 25 bp, Homo sapien
gaatcagtgcatgcaaaacgggcca

SEQ ID NO: 2904208 - DNA, 25 bp, Homo sapien
gacactgatcatgcttgcctgagga

SEQ ID NO: 2904209 - DNA, 25 bp, Homo sapien
tgtactaattgtgcctccaactctg

SEQ ID NO: 2904210 - DNA, 25 bp, Homo sapien
ggttatcagcctgcaagtctctatt

SEQ ID NO: 2904211 - DNA, 25 bp, Homo sapien
ggaattcaactagctcatcccgagc

SEQ ID NO: 2904212 - DNA, 25 bp, Homo sapien
ttgttcagcctgtactaattgtgcc

SEQ ID NO: 2904213 - DNA, 25 bp, Homo sapien
tcgctccaggtcgtcgttggcctgc

SEQ ID NO: 2904214 - DNA, 25 bp, Homo sapien
tatagctctgtgcatattgatgctc

SEQ ID NO: 2904215 - DNA, 25 bp, Homo sapien
taaatcatcttctaacactgagacc

SEQ ID NO: 2904216 - DNA, 25 bp, Homo sapien
cttaatggcccgagtctgacttaaa

SEQ ID NO: 2904217 - DNA, 25 bp, Homo sapien
aaatgcatttcgttcaatggcctgg

SEQ ID NO: 2904218 - DNA, 25 bp, Homo sapien
tgtacagagaccaacaaagattcct

SEQ ID NO: 2904219 - DNA, 25 bp, Homo sapien
gtcttccagtgaaactattgttgcc

SEQ ID NO: 2904220 - DNA, 25 bp, Homo sapien
gcttcatcctttaacctctgtacag

SEQ ID NO: 2904221 - DNA, 25 bp, Homo sapien
acatctaaaatgtcataaaggtctt

SEQ ID NO: 2904222 - DNA, 25 bp, Homo sapien
agggcaggaatactcactagaggga

SEQ ID NO: 2904223 - DNA, 25 bp, Homo sapien
tatatcaagcaaagtgacatctaaa

SEQ ID NO: 2904224 - DNA, 25 bp, Homo sapien
ctagagggagcaaatatatcaagca

SEQ ID NO: 2904225 - DNA, 25 bp, Homo sapien
caaagaaagtgatgcttggacggcg

SEQ ID NO: 2904226 - DNA, 25 bp, Homo sapien
gttggagagctaggagccgactttc

SEQ ID NO: 2904227 - DNA, 25 bp, Homo sapien
cctgttgtctttcccgaactgctag

SEQ ID NO: 2904228 - DNA, 25 bp, Homo sapien
ttttcacagtctagagttggagagc

SEQ ID NO: 2904229 - DNA, 25 bp, Homo sapien
tacctaaacatacggctgtaatcac

SEQ ID NO: 2904230 - DNA, 25 bp, Homo sapien
cgtaagctgatcatctaacacatcg

SEQ ID NO: 2904231 - DNA, 25 bp, Homo sapien
taaaccttagcaaccgccttcagca

SEQ ID NO: 2904232 - DNA, 25 bp, Homo sapien
tattagtggcctaggaaaacaattc

SEQ ID NO: 2904233 - DNA, 25 bp, Homo sapien
cactgtgtttcggtaggagaacctt

SEQ ID NO: 2904234 - DNA, 25 bp, Homo sapien
gaaaatcagctgtttagtctttgta

SEQ ID NO: 2904235 - DNA, 25 bp, Homo sapien
caaatggagagccaattgtcctagt

SEQ ID NO: 2904236 - DNA, 25 bp, Homo sapien
tagatgttctatctctcagcgtgac

SEQ ID NO: 2904237 - DNA, 25 bp, Homo sapien
cccacgatgtttagtgctgatatcc

SEQ ID NO: 2904238 - DNA, 25 bp, Homo sapien
ctggtaccaaaaccatttggtatag

SEQ ID NO: 2904239 - DNA, 25 bp, Homo sapien
tttccgtaagagatcccccacgatg

SEQ ID NO: 2904240 - DNA, 25 bp, Homo sapien
tcctagcagagggagttagtggact

SEQ ID NO: 2904241 - DNA, 25 bp, Homo sapien
cctgatcgagagaactttgtgccat

SEQ ID NO: 2904242 - DNA, 25 bp, Homo sapien
tataggattttcgtgatgcttggtc

SEQ ID NO: 2904243 - DNA, 25 bp, Homo sapien
cctttgtcgaagaaagatgtatgcc

SEQ ID NO: 2904244 - DNA, 25 bp, Homo sapien
attcagcaccccacagttaacattc

SEQ ID NO: 2904245 - DNA, 25 bp, Homo sapien
tttgactcaccagagcctcacactg

SEQ ID NO: 2904246 - DNA, 25 bp, Homo sapien
tccaagtctgccagcctgtaagcac

SEQ ID NO: 2904247 - DNA, 25 bp, Homo sapien
gatccagtgcctaagtacttcaggg

SEQ ID NO: 2904248 - DNA, 25 bp, Homo sapien
gagaacagggaccttatcgcagtca

SEQ ID NO: 2904249 - DNA, 25 bp, Homo sapien
taagagcctattcagagtgcaccgt

SEQ ID NO: 2904250 - DNA, 25 bp, Homo sapien
ccataattattgaggacggcagaaa

SEQ ID NO: 2904251 - DNA, 25 bp, Homo sapien
tctccagggtaaaatcagggacaga

SEQ ID NO: 2904252 - DNA, 25 bp, Homo sapien
cactccactgcaaggataagagcct

SEQ ID NO: 2904253 - DNA, 25 bp, Homo sapien
cacagagcaatacgcccagttaagg

SEQ ID NO: 2904254 - DNA, 25 bp, Homo sapien
tgtttttgagagactccaagcgacc

SEQ ID NO: 2904255 - DNA, 25 bp, Homo sapien
ggcacggcagcccatgtttcaggaa

SEQ ID NO: 2904256 - DNA, 25 bp, Homo sapien
ttgaaggaaacagctcggcacctgg

SEQ ID NO: 2904257 - DNA, 25 bp, Homo sapien
atgaacaacgtgggaaatatgactt

SEQ ID NO: 2904258 - DNA, 25 bp, Homo sapien
tgaacaacgtgggaaatatgacttt

SEQ ID NO: 2904259 - DNA, 25 bp, Homo sapien
tcagaatgtaactaacactaagtgg

SEQ ID NO: 2904260 - DNA, 25 bp, Homo sapien
taaatccacaaagcagggacagagg

SEQ ID NO: 2904261 - DNA, 25 bp, Homo sapien
tctagattctagactatagcccctt

SEQ ID NO: 2904262 - DNA, 25 bp, Homo sapien
gatgcaggttaccaaactctgtaga

SEQ ID NO: 2904263 - DNA, 25 bp, Homo sapien
ccggcgctgacgatggacgcgagga

SEQ ID NO: 2904264 - DNA, 25 bp, Homo sapien
cgatggacgcgaggagcccagacca

SEQ ID NO: 2904265 - DNA, 25 bp, Homo sapien
acgatggacgcgaggagcccagacc

SEQ ID NO: 2904266 - DNA, 25 bp, Homo sapien
gctgacgatggacgcgaggagccca

SEQ ID NO: 2904267 - DNA, 25 bp, Homo sapien
ggtgaggcgtgggtgtcctgggttg

SEQ ID NO: 2904268 - DNA, 25 bp, Homo sapien
caccgaggggtgaggcgtgggtgtc

SEQ ID NO: 2904269 - DNA, 25 bp, Homo sapien
cccaggcaccgaggggtgaggcgtg

SEQ ID NO: 2904270 - DNA, 25 bp, Homo sapien
tgggtgtcctgggttgttggaggag

SEQ ID NO: 2904271 - DNA, 25 bp, Homo sapien
cacgtatgtatcaccttgcgaccca

SEQ ID NO: 2904272 - DNA, 25 bp, Homo sapien
taatcaaaggatgcacagggacagc

SEQ ID NO: 2904273 - DNA, 25 bp, Homo sapien
aatcctatcagtacagcagagtggg

SEQ ID NO: 2904274 - DNA, 25 bp, Homo sapien
ccagtattgatatcgcgcagagttc

SEQ ID NO: 2904275 - DNA, 25 bp, Homo sapien
aagtattttttgtaaccacatgatg

SEQ ID NO: 2904276 - DNA, 25 bp, Homo sapien
tattttttgtaaccacatgatgatc

SEQ ID NO: 2904277 - DNA, 25 bp, Homo sapien
ggaagtattttttgtaaccacatga

SEQ ID NO: 2904278 - DNA, 25 bp, Homo sapien
tgaaatttattgtttccacattaaa

SEQ ID NO: 2904279 - DNA, 25 bp, Homo sapien
gggacaacatctgcaccaagagctt

SEQ ID NO: 2904280 - DNA, 25 bp, Homo sapien
cacctgccatttgggaatcaagcag

SEQ ID NO: 2904281 - DNA, 25 bp, Homo sapien
agagaagtccacttccttctgtagg

SEQ ID NO: 2904282 - DNA, 25 bp, Homo sapien
ccaaaatgccgtcctaagtcagctg

SEQ ID NO: 2904283 - DNA, 25 bp, Homo sapien
gggcagcctctctagtgcgggccaa

SEQ ID NO: 2904284 - DNA, 25 bp, Homo sapien
ttttggaggattcagtgatgaggcc

SEQ ID NO: 2904285 - DNA, 25 bp, Homo sapien
ttcaggggtccaggacatttcaggc

SEQ ID NO: 2904286 - DNA, 25 bp, Homo sapien
ttttcaggcagacacgcattgaaga

SEQ ID NO: 2904287 - DNA, 25 bp, Homo sapien
tggcgccaggccctttttgctgagg

SEQ ID NO: 2904288 - DNA, 25 bp, Homo sapien
cagtgcctcacaggatgcacacgca

SEQ ID NO: 2904289 - DNA, 25 bp, Homo sapien
tgtctcccaggtcagacgacagaat

SEQ ID NO: 2904290 - DNA, 25 bp, Homo sapien
accaacttcaaatgatggcgccagg

SEQ ID NO: 2904291 - DNA, 25 bp, Homo sapien
ccttgatcctctgcaatgtgcttga

SEQ ID NO: 2904292 - DNA, 25 bp, Homo sapien
ggttttgtgtccgaggcttgttcca

SEQ ID NO: 2904293 - DNA, 25 bp, Homo sapien
caaactgacattacggaaagtgcct

SEQ ID NO: 2904294 - DNA, 25 bp, Homo sapien
tcatgtacctctctagtcaaagtgg

SEQ ID NO: 2904295 - DNA, 25 bp, Homo sapien
atggtctcccgaaccgcctggctct

SEQ ID NO: 2904296 - DNA, 25 bp, Homo sapien
tcacgtcaggagcaagcagccgtgg

SEQ ID NO: 2904297 - DNA, 25 bp, Homo sapien
gacccctaagccgagctggtggaag

SEQ ID NO: 2904298 - DNA, 25 bp, Homo sapien
gatcatgtagacttccagatggtct

SEQ ID NO: 2904299 - DNA, 25 bp, Homo sapien
ccaccgaggccaacgagggcctgag

SEQ ID NO: 2904300 - DNA, 25 bp, Homo sapien
cgcatctcggcgtaaactccagcgg

SEQ ID NO: 2904301 - DNA, 25 bp, Homo sapien
tccagcgggaactggatgatgccac

SEQ ID NO: 2904302 - DNA, 25 bp, Homo sapien
accgaggccaacgagggcctgagcc

SEQ ID NO: 2904303 - DNA, 25 bp, Homo sapien
gagcagccgccaacaaattagtccg

SEQ ID NO: 2904304 - DNA, 25 bp, Homo sapien
gacacgcggaccagtataaagagca

SEQ ID NO: 2904305 - DNA, 25 bp, Homo sapien
agtaattaacacctacacgtgcagg

SEQ ID NO: 2904306 - DNA, 25 bp, Homo sapien
ttagtccgtcgcactgagaagaagc

SEQ ID NO: 2904307 - DNA, 25 bp, Homo sapien
tcaggtttccagcaacagggtgggt

SEQ ID NO: 2904308 - DNA, 25 bp, Homo sapien
tctggaagctcggatcgcacagctg

SEQ ID NO: 2904309 - DNA, 25 bp, Homo sapien
tgcgttttgaaagcgactctggctg

SEQ ID NO: 2904310 - DNA, 25 bp, Homo sapien
tgaactgaacgtccatcatgcgcct

SEQ ID NO: 2904311 - DNA, 25 bp, Homo sapien
gagcattgatccttgttgcggcaca

SEQ ID NO: 2904312 - DNA, 25 bp, Homo sapien
tcacagccagagcttaacgcagtct

SEQ ID NO: 2904313 - DNA, 25 bp, Homo sapien
gaacatagccacctcttacgttgga

SEQ ID NO: 2904314 - DNA, 25 bp, Homo sapien
gcttgaggtgcaggtaaacagtgac

SEQ ID NO: 2904315 - DNA, 25 bp, Homo sapien
ggctcagatgaaggattaccaacgt

SEQ ID NO: 2904316 - DNA, 25 bp, Homo sapien
tagaagaagctcgtgcatccagaga

SEQ ID NO: 2904317 - DNA, 25 bp, Homo sapien
tgtagccacatgaacaagtaccgca

SEQ ID NO: 2904318 - DNA, 25 bp, Homo sapien
gaactgtgtaactccaaccttggtg

SEQ ID NO: 2904319 - DNA, 25 bp, Homo sapien
caaaggcaaaaaccaattgagttct

SEQ ID NO: 2904320 - DNA, 25 bp, Homo sapien
tttccttgagatagagtctcacttt

SEQ ID NO: 2904321 - DNA, 25 bp, Homo sapien
ttcttcaaaggcaaaaaccaattga

SEQ ID NO: 2904322 - DNA, 25 bp, Homo sapien
cttcaaaggcaaaaaccaattgagt

SEQ ID NO: 2904323 - DNA, 25 bp, Homo sapien
catgctggttataatgctggaagcc

SEQ ID NO: 2904324 - DNA, 25 bp, Homo sapien
gagacacgccagaaactaaacctga

SEQ ID NO: 2904325 - DNA, 25 bp, Homo sapien
gagcttcttcaggaggagacacgcc

SEQ ID NO: 2904326 - DNA, 25 bp, Homo sapien
ctaaacctgagcagtcggatccggc

SEQ ID NO: 2904327 - DNA, 25 bp, Homo sapien
aaacaggcctgtgaacgaatggtaa

SEQ ID NO: 2904328 - DNA, 25 bp, Homo sapien
tatcttcttccaggccgtttgcaga

SEQ ID NO: 2904329 - DNA, 25 bp, Homo sapien
cctggccagaaagtgagtgggtatt

SEQ ID NO: 2904330 - DNA, 25 bp, Homo sapien
cgtttgcagaggttacctggccaga

SEQ ID NO: 2904331 - DNA, 25 bp, Homo sapien
tgtgcagctcagtgaacatatgtat

SEQ ID NO: 2904332 - DNA, 25 bp, Homo sapien
cagattctcttttgcgtcttaagga

SEQ ID NO: 2904333 - DNA, 25 bp, Homo sapien
ttttgacctgaaagaactaacctca

SEQ ID NO: 2904334 - DNA, 25 bp, Homo sapien
gaatagaagcctatgaacacagctc

SEQ ID NO: 2904335 - DNA, 25 bp, Homo sapien
tcaccttgagaagcttttccagtcc

SEQ ID NO: 2904336 - DNA, 25 bp, Homo sapien
cactgttccagatagaatcaccttg

SEQ ID NO: 2904337 - DNA, 25 bp, Homo sapien
ataaatggtgctgccaggtcaaaga

SEQ ID NO: 2904338 - DNA, 25 bp, Homo sapien
tccatgtgtgtcttgaggaaagcca

SEQ ID NO: 2904339 - DNA, 25 bp, Homo sapien
tatatttaaccatagcctctagcta

SEQ ID NO: 2904340 - DNA, 25 bp, Homo sapien
taagggtctccattgcagaagggtt

SEQ ID NO: 2904341 - DNA, 25 bp, Homo sapien
tcagttttgtatcacacacttgcca

SEQ ID NO: 2904342 - DNA, 25 bp, Homo sapien
catgagtgtgccctagaactggtac

SEQ ID NO: 2904343 - DNA, 25 bp, Homo sapien
cattgcaggtttggtgactaacacc

SEQ ID NO: 2904344 - DNA, 25 bp, Homo sapien
aaaatcagtatctaggctagagggc

SEQ ID NO: 2904345 - DNA, 25 bp, Homo sapien
aatttgatggcataaaatcagtatc

SEQ ID NO: 2904346 - DNA, 25 bp, Homo sapien
gggcattgcaggtttggtgactaac

SEQ ID NO: 2904347 - DNA, 25 bp, Homo sapien
ttttcctccagtgctcagtgcacga

SEQ ID NO: 2904348 - DNA, 25 bp, Homo sapien
cactgtttttggaactttgtcggca

SEQ ID NO: 2904349 - DNA, 25 bp, Homo sapien
agtgcacgaaagttttccactgttt

SEQ ID NO: 2904350 - DNA, 25 bp, Homo sapien
ggcagataaaataaaccctggaata

SEQ ID NO: 2904351 - DNA, 25 bp, Homo sapien
ttttcagcacgacctttgttccttc

SEQ ID NO: 2904352 - DNA, 25 bp, Homo sapien
cttttcagcacgacctttgttcctt

SEQ ID NO: 2904353 - DNA, 25 bp, Homo sapien
tagtgcagcgaatagcctgcacgtg

SEQ ID NO: 2904354 - DNA, 25 bp, Homo sapien
gcagcgaatagcctgcacgtggccg

SEQ ID NO: 2904355 - DNA, 25 bp, Homo sapien
agcgaatagcctgcacgtggccgcg

SEQ ID NO: 2904356 - DNA, 25 bp, Homo sapien
agttagtgcagcgaatagcctgcac

SEQ ID NO: 2904357 - DNA, 25 bp, Homo sapien
gggaagcacataggcatcgaagaca

SEQ ID NO: 2904358 - DNA, 25 bp, Homo sapien
gaagcacataggcatcgaagacact

SEQ ID NO: 2904359 - DNA, 25 bp, Homo sapien
tcacacacagcttgggaagcacata

SEQ ID NO: 2904360 - DNA, 25 bp, Homo sapien
agcacataggcatcgaagacacttg

SEQ ID NO: 2904361 - DNA, 25 bp, Homo sapien
gaattgcacaactcacacggtaatg

SEQ ID NO: 2904362 - DNA, 25 bp, Homo sapien
tccttgcgggcttcacgagatcgat

SEQ ID NO: 2904363 - DNA, 25 bp, Homo sapien
ggtgggagacatggggcagcacccg

SEQ ID NO: 2904364 - DNA, 25 bp, Homo sapien
atgggctttggtgggagacatgggg

SEQ ID NO: 2904365 - DNA, 25 bp, Homo sapien
tttctccagagaatagtctgtcttc

SEQ ID NO: 2904366 - DNA, 25 bp, Homo sapien
atttttctccagagaatagtctgtc

SEQ ID NO: 2904367 - DNA, 25 bp, Homo sapien
tctgtcttcagtctttaagaactca

SEQ ID NO: 2904368 - DNA, 25 bp, Homo sapien
tccagagaatagtctgtcttcagtc

SEQ ID NO: 2904369 - DNA, 25 bp, Homo sapien
tagtatcaagctctaggagcacccc

SEQ ID NO: 2904370 - DNA, 25 bp, Homo sapien
taatgaaagcacgtccggattctgc

SEQ ID NO: 2904371 - DNA, 25 bp, Homo sapien
taggcatcctccttacagtttggcg

SEQ ID NO: 2904372 - DNA, 25 bp, Homo sapien
tttgtaagttgcatgcagcccagct

SEQ ID NO: 2904373 - DNA, 25 bp, Homo sapien
ttcccggtcattgccgatttgcatg

SEQ ID NO: 2904374 - DNA, 25 bp, Homo sapien
tgccgatttgcatgtcgtactgcat

SEQ ID NO: 2904375 - DNA, 25 bp, Homo sapien
ggtcattgccgatttgcatgtcgta

SEQ ID NO: 2904376 - DNA, 25 bp, Homo sapien
cattgccgatttgcatgtcgtactg

SEQ ID NO: 2904377 - DNA, 25 bp, Homo sapien
gtggccggcccaaatagtgcaattc

SEQ ID NO: 2904378 - DNA, 25 bp, Homo sapien
cagaggccgtaattcaggtctcgct

SEQ ID NO: 2904379 - DNA, 25 bp, Homo sapien
aacttttgaaatgtgccagccttgc

SEQ ID NO: 2904380 - DNA, 25 bp, Homo sapien
gcttcagtgtttgagcagaggccgt

SEQ ID NO: 2904381 - DNA, 25 bp, Homo sapien
gacacagggatgaagacatcatttc

SEQ ID NO: 2904382 - DNA, 25 bp, Homo sapien
ctgggagacacagggatgaagacat

SEQ ID NO: 2904383 - DNA, 25 bp, Homo sapien
gggagacacagggatgaagacatca

SEQ ID NO: 2904384 - DNA, 25 bp, Homo sapien
ggagacacagggatgaagacatcat

SEQ ID NO: 2904385 - DNA, 25 bp, Homo sapien
gttttggattgcacatccctttgag

SEQ ID NO: 2904386 - DNA, 25 bp, Homo sapien
tgttttggattgcacatccctttga

SEQ ID NO: 2904387 - DNA, 25 bp, Homo sapien
ttttggattgcacatccctttgaga

SEQ ID NO: 2904388 - DNA, 25 bp, Homo sapien
aaggaggcagatgagtaccaatgcg

SEQ ID NO: 2904389 - DNA, 25 bp, Homo sapien
ctcttctccagtgacgggccaagga

SEQ ID NO: 2904390 - DNA, 25 bp, Homo sapien
tttctatgaagtagaagacttggta

SEQ ID NO: 2904391 - DNA, 25 bp, Homo sapien
taacattttgggagtggcttggatt

SEQ ID NO: 2904392 - DNA, 25 bp, Homo sapien
tgtttctttagacttgcctttgccc

SEQ ID NO: 2904393 - DNA, 25 bp, Homo sapien
gcctttgcccttacgtaatctagaa

SEQ ID NO: 2904394 - DNA, 25 bp, Homo sapien
ctcatatgctgttaaaatttttgga

SEQ ID NO: 2904395 - DNA, 25 bp, Homo sapien
gttatcctcctccagttcgtgcttg

SEQ ID NO: 2904396 - DNA, 25 bp, Homo sapien
accccaggtagcttccattcagcag

SEQ ID NO: 2904397 - DNA, 25 bp, Homo sapien
caggtagcttccattcagcagcagg

SEQ ID NO: 2904398 - DNA, 25 bp, Homo sapien
ccaccccaggtagcttccattcagc

SEQ ID NO: 2904399 - DNA, 25 bp, Homo sapien
cccaggtagcttccattcagcagca

SEQ ID NO: 2904400 - DNA, 25 bp, Homo sapien
taaaatatgtctctcataaactgct

SEQ ID NO: 2904401 - DNA, 25 bp, Homo sapien
cagctggaatatttagtttatgtac

SEQ ID NO: 2904402 - DNA, 25 bp, Homo sapien
tacattttagcttaaatctgtcctc

SEQ ID NO: 2904403 - DNA, 25 bp, Homo sapien
tctttttatcctacccgctctatgt

SEQ ID NO: 2904404 - DNA, 25 bp, Homo sapien
gtgatgtttcccaccttgaagccat

SEQ ID NO: 2904405 - DNA, 25 bp, Homo sapien
tgtgatgtttcccaccttgaagcca

SEQ ID NO: 2904406 - DNA, 25 bp, Homo sapien
ctgtgatgtttcccaccttgaagcc

SEQ ID NO: 2904407 - DNA, 25 bp, Homo sapien
tggttcggagggaagttgaagccgc

SEQ ID NO: 2904408 - DNA, 25 bp, Homo sapien
aagccgcggagtcctggcatttgtg

SEQ ID NO: 2904409 - DNA, 25 bp, Homo sapien
aatcggactggaattggttcggagg

SEQ ID NO: 2904410 - DNA, 25 bp, Homo sapien
tgggcctgtggtgggcggatgcggc

SEQ ID NO: 2904411 - DNA, 25 bp, Homo sapien
tggagctggcccaatgagggtaggg

SEQ ID NO: 2904412 - DNA, 25 bp, Homo sapien
gggcggcggtgatgggcgtggagct

SEQ ID NO: 2904413 - DNA, 25 bp, Homo sapien
tgaggcgctggatctgtggtcgcgg

SEQ ID NO: 2904414 - DNA, 25 bp, Homo sapien
gcgcaaaccaaccagtgggtctggg

SEQ ID NO: 2904415 - DNA, 25 bp, Homo sapien
gagccggactcgggaaggtagcttc

SEQ ID NO: 2904416 - DNA, 25 bp, Homo sapien
agccggactcgggaaggtagcttcg

SEQ ID NO: 2904417 - DNA, 25 bp, Homo sapien
gaaggtagcttcgttcgggttgcta

SEQ ID NO: 2904418 - DNA, 25 bp, Homo sapien
gcctcgcgggatcgccgggcgttca

SEQ ID NO: 2904419 - DNA, 25 bp, Homo sapien
agcctcgcgggatcgccgggcgttc

SEQ ID NO: 2904420 - DNA, 25 bp, Homo sapien
gcacagccaatgtcagcgcagcgcg

SEQ ID NO: 2904421 - DNA, 25 bp, Homo sapien
gcggcccgcacagccaatgtcagcg

SEQ ID NO: 2904422 - DNA, 25 bp, Homo sapien
ggcgaccgggcgctcgaatgtgctg

SEQ ID NO: 2904423 - DNA, 25 bp, Homo sapien
cgggcgctcgaatgtgctgcggctg

SEQ ID NO: 2904424 - DNA, 25 bp, Homo sapien
tgccgcaagcacagggggcgaccgg

SEQ ID NO: 2904425 - DNA, 25 bp, Homo sapien
cgaccgggcgctcgaatgtgctgcg

SEQ ID NO: 2904426 - DNA, 25 bp, Homo sapien
tgacgtcaggactctggaccgcgct

SEQ ID NO: 2904427 - DNA, 25 bp, Homo sapien
tgcgaccttggaggaccgtgtcctg

SEQ ID NO: 2904428 - DNA, 25 bp, Homo sapien
aaaccctgtgcgcatgggcggagca

SEQ ID NO: 2904429 - DNA, 25 bp, Homo sapien
ccactgcaggtgagtcgcagcgccg

SEQ ID NO: 2904430 - DNA, 25 bp, Homo sapien
tcagtctccaacgttttcataagcc

SEQ ID NO: 2904431 - DNA, 25 bp, Homo sapien
tctcatagcccttcacgtagggagc

SEQ ID NO: 2904432 - DNA, 25 bp, Homo sapien
tatgacagcgctacaggaatccagc

SEQ ID NO: 2904433 - DNA, 25 bp, Homo sapien
tgaaggagcgactgaacgagtgaat

SEQ ID NO: 2904434 - DNA, 25 bp, Homo sapien
agtctttctttacctcgactcccat

SEQ ID NO: 2904435 - DNA, 25 bp, Homo sapien
tgtcagatgcaacttttccattccc

SEQ ID NO: 2904436 - DNA, 25 bp, Homo sapien
catacgtgggaaatagtaagaccac

SEQ ID NO: 2904437 - DNA, 25 bp, Homo sapien
taagaccactgcgtggggcttgact

SEQ ID NO: 2904438 - DNA, 25 bp, Homo sapien
ctatcggtcgctgagagaatgtgcc

SEQ ID NO: 2904439 - DNA, 25 bp, Homo sapien
gagaatgtgccgtcatacgtgggaa

SEQ ID NO: 2904440 - DNA, 25 bp, Homo sapien
ctcagttgttctttcgcctctagag

SEQ ID NO: 2904441 - DNA, 25 bp, Homo sapien
tctttcgcctctagagctggtatca

SEQ ID NO: 2904442 - DNA, 25 bp, Homo sapien
cacttcttggatagttctctctcag

SEQ ID NO: 2904443 - DNA, 25 bp, Homo sapien
aaacacttcttggatagttctctct

SEQ ID NO: 2904444 - DNA, 25 bp, Homo sapien
gatccctctctggaggcaagaagaa

SEQ ID NO: 2904445 - DNA, 25 bp, Homo sapien
atcacagcttttcttggatccctct

SEQ ID NO: 2904446 - DNA, 25 bp, Homo sapien
tgctgacagtagcagtttctggcta

SEQ ID NO: 2904447 - DNA, 25 bp, Homo sapien
caagaagaagatggctacaacctcc

SEQ ID NO: 2904448 - DNA, 25 bp, Homo sapien
ggccattgctgaactctttatagac

SEQ ID NO: 2904449 - DNA, 25 bp, Homo sapien
agaggtggacatcagcccagcatct

SEQ ID NO: 2904450 - DNA, 25 bp, Homo sapien
catctgaactttggcagcgatactg

SEQ ID NO: 2904451 - DNA, 25 bp, Homo sapien
tggtatggagaaagttgtcggccat

SEQ ID NO: 2904452 - DNA, 25 bp, Homo sapien
agtagtagagatcaatttcatcctt

SEQ ID NO: 2904453 - DNA, 25 bp, Homo sapien
tagtagtagagatcaatttcatcct

SEQ ID NO: 2904454 - DNA, 25 bp, Homo sapien
ttagtagtagagatcaatttcatcc

SEQ ID NO: 2904455 - DNA, 25 bp, Homo sapien
ggaccgctgaagaccgtggatgccc

SEQ ID NO: 2904456 - DNA, 25 bp, Homo sapien
gaccgctgaagaccgtggatgcccc

SEQ ID NO: 2904457 - DNA, 25 bp, Homo sapien
tccagagtgggaccgctgaagaccg

SEQ ID NO: 2904458 - DNA, 25 bp, Homo sapien
gaggctccagagtgggaccgctgaa

SEQ ID NO: 2904459 - DNA, 25 bp, Homo sapien
aagcctgctggttggttgaactcat

SEQ ID NO: 2904460 - DNA, 25 bp, Homo sapien
gaagcctgctggttggttgaactca

SEQ ID NO: 2904461 - DNA, 25 bp, Homo sapien
ggaagcctgctggttggttgaactc

SEQ ID NO: 2904462 - DNA, 25 bp, Homo sapien
cccgctgtttgatgtcaggtgaggt

SEQ ID NO: 2904463 - DNA, 25 bp, Homo sapien
ggtgaggtgtccgattcaggatgat

SEQ ID NO: 2904464 - DNA, 25 bp, Homo sapien
tgtccgattcaggatgatggcatcc

SEQ ID NO: 2904465 - DNA, 25 bp, Homo sapien
gtcccgctgtttgatgtcaggtgag

SEQ ID NO: 2904466 - DNA, 25 bp, Homo sapien
tgggtgaaggatatgctgctgaaat

SEQ ID NO: 2904467 - DNA, 25 bp, Homo sapien
tgaaggatatgctgctgaaataact

SEQ ID NO: 2904468 - DNA, 25 bp, Homo sapien
gatctccagaaacggccgtgggtga

SEQ ID NO: 2904469 - DNA, 25 bp, Homo sapien
ttggggatctccagaaacggccgtg

SEQ ID NO: 2904470 - DNA, 25 bp, Homo sapien
tatgtctcatatacgtggcggggag

SEQ ID NO: 2904471 - DNA, 25 bp, Homo sapien
gatttcacggacaatcaaggatatg

SEQ ID NO: 2904472 - DNA, 25 bp, Homo sapien
gaccacctgatttcacggacaatca

SEQ ID NO: 2904473 - DNA, 25 bp, Homo sapien
ttcacggacaatcaaggatatgtct

SEQ ID NO: 2904474 - DNA, 25 bp, Homo sapien
tgtgtcaaggatcataaactgggtc

SEQ ID NO: 2904475 - DNA, 25 bp, Homo sapien
cacattttggtgtctggcagtggac

SEQ ID NO: 2904476 - DNA, 25 bp, Homo sapien
ggagtggcactagcaacatgctgtt

SEQ ID NO: 2904477 - DNA, 25 bp, Homo sapien
tcagggctatcttagagcaaggtac

SEQ ID NO: 2904478 - DNA, 25 bp, Homo sapien
cctgttgctccctcacatggcagag

SEQ ID NO: 2904479 - DNA, 25 bp, Homo sapien
tgagtaacttcacctatcagactgg

SEQ ID NO: 2904480 - DNA, 25 bp, Homo sapien
taccatgttagtgagtgtcttagtc

SEQ ID NO: 2904481 - DNA, 25 bp, Homo sapien
catttgctggtttgcagactggaaa

SEQ ID NO: 2904482 - DNA, 25 bp, Homo sapien
tttatggcaagtcataagagggatc

SEQ ID NO: 2904483 - DNA, 25 bp, Homo sapien
gagggatctgaatgtctccccccat

SEQ ID NO: 2904484 - DNA, 25 bp, Homo sapien
tcatttttatggcaagtcataagag

SEQ ID NO: 2904485 - DNA, 25 bp, Homo sapien
ggcaagtcataagagggatctgaat

SEQ ID NO: 2904486 - DNA, 25 bp, Homo sapien
aaatctcatcagtgtatattccagt

SEQ ID NO: 2904487 - DNA, 25 bp, Homo sapien
ccaaatctcatcagtgtatattcca

SEQ ID NO: 2904488 - DNA, 25 bp, Homo sapien
gcccaaatctcatcagtgtatattc

SEQ ID NO: 2904489 - DNA, 25 bp, Homo sapien
tgcccaaatctcatcagtgtatatt

SEQ ID NO: 2904490 - DNA, 25 bp, Homo sapien
tggggtgaggtgttgcagagtcaga

SEQ ID NO: 2904491 - DNA, 25 bp, Homo sapien
ctggggtgaggtgttgcagagtcag

SEQ ID NO: 2904492 - DNA, 25 bp, Homo sapien
attttgctgtcacgagcttcccgaa

SEQ ID NO: 2904493 - DNA, 25 bp, Homo sapien
cctgcaggcttctgtctttatgctg

SEQ ID NO: 2904494 - DNA, 25 bp, Homo sapien
ttgagccctgcaggcttctgtcttt

SEQ ID NO: 2904495 - DNA, 25 bp, Homo sapien
ttgctgtcacgagcttcccgaattc

SEQ ID NO: 2904496 - DNA, 25 bp, Homo sapien
tgctgatccagcaaggaacgaatgg

SEQ ID NO: 2904497 - DNA, 25 bp, Homo sapien
tctgttctggcacatgaaggaccat

SEQ ID NO: 2904498 - DNA, 25 bp, Homo sapien
tgctgaaggcccaacaggatcatct

SEQ ID NO: 2904499 - DNA, 25 bp, Homo sapien
cacttttacgggagtggctgtagcc

SEQ ID NO: 2904500 - DNA, 25 bp, Homo sapien
ggttaaagctgctgtcttggccaga

SEQ ID NO: 2904501 - DNA, 25 bp, Homo sapien
caggtgtctctatcaggtgagagaa

SEQ ID NO: 2904502 - DNA, 25 bp, Homo sapien
aaaatgtcagactcaataaatgtac

SEQ ID NO: 2904503 - DNA, 25 bp, Homo sapien
agcccaggcaggtgtctctatcagg

SEQ ID NO: 2904504 - DNA, 25 bp, Homo sapien
cagtaaacagatgaacctgatgtct

SEQ ID NO: 2904505 - DNA, 25 bp, Homo sapien
ctttaaatgacataacaattgagca

SEQ ID NO: 2904506 - DNA, 25 bp, Homo sapien
gaaactacatactatgtttctagct

SEQ ID NO: 2904507 - DNA, 25 bp, Homo sapien
actacatactatgtttctagctcag

SEQ ID NO: 2904508 - DNA, 25 bp, Homo sapien
gacttgagagacgtggacagagcca

SEQ ID NO: 2904509 - DNA, 25 bp, Homo sapien
agtggcgggccatgtatcttcaata

SEQ ID NO: 2904510 - DNA, 25 bp, Homo sapien
gccttacgtgaaattccagcccaga

SEQ ID NO: 2904511 - DNA, 25 bp, Homo sapien
tagccacggaagcatgaactgtatc

SEQ ID NO: 2904512 - DNA, 25 bp, Homo sapien
tctgtatcagattggccctcccact

SEQ ID NO: 2904513 - DNA, 25 bp, Homo sapien
attgtctgcaaagcacctagcccag

SEQ ID NO: 2904514 - DNA, 25 bp, Homo sapien
cagttcgtggctgaggcagaaccca

SEQ ID NO: 2904515 - DNA, 25 bp, Homo sapien
tgggatactctcattgccgttggga

SEQ ID NO: 2904516 - DNA, 25 bp, Homo sapien
actgtggcatgctgcgcacccctgg

SEQ ID NO: 2904517 - DNA, 25 bp, Homo sapien
ctgggtgccatagccggtcccctgt

SEQ ID NO: 2904518 - DNA, 25 bp, Homo sapien
tcctgtggtcacctcctcgagctct

SEQ ID NO: 2904519 - DNA, 25 bp, Homo sapien
tgctgctgaacccagtggaagtgca

SEQ ID NO: 2904520 - DNA, 25 bp, Homo sapien
tgttagcatttggacgtgtaaccat

SEQ ID NO: 2904521 - DNA, 25 bp, Homo sapien
tctgttagcatttggacgtgtaacc

SEQ ID NO: 2904522 - DNA, 25 bp, Homo sapien
atttctgttagcatttggacgtgta

SEQ ID NO: 2904523 - DNA, 25 bp, Homo sapien
ataatttctgttagcatttggacgt

SEQ ID NO: 2904524 - DNA, 25 bp, Homo sapien
agaagatctcccctgaagaagtgac

SEQ ID NO: 2904525 - DNA, 25 bp, Homo sapien
cagaagatctcccctgaagaagtga

SEQ ID NO: 2904526 - DNA, 25 bp, Homo sapien
tcagaagatctcccctgaagaagtg

SEQ ID NO: 2904527 - DNA, 25 bp, Homo sapien
tcagagggagtaaggcgaagaaact

SEQ ID NO: 2904528 - DNA, 25 bp, Homo sapien
ctggagattcttcgaacatcaccag

SEQ ID NO: 2904529 - DNA, 25 bp, Homo sapien
aggcgaagaaactgttgagggattt

SEQ ID NO: 2904530 - DNA, 25 bp, Homo sapien
gtaaggcgaagaaactgttgaggga

SEQ ID NO: 2904531 - DNA, 25 bp, Homo sapien
gctggtgcccctcgggccactgcca

SEQ ID NO: 2904532 - DNA, 25 bp, Homo sapien
gccactgccatggaccggccagggt

SEQ ID NO: 2904533 - DNA, 25 bp, Homo sapien
ggaccggccagggtctgcttcttcc

SEQ ID NO: 2904534 - DNA, 25 bp, Homo sapien
gggtcgctggtgctccgcgctggtg

SEQ ID NO: 2904535 - DNA, 25 bp, Homo sapien
gaaggatgcgggtcaaggtgcccgt

SEQ ID NO: 2904536 - DNA, 25 bp, Homo sapien
ttctatgaaggttcctgcagaagga

SEQ ID NO: 2904537 - DNA, 25 bp, Homo sapien
acagcagtgctgaacgccgggactg

SEQ ID NO: 2904538 - DNA, 25 bp, Homo sapien
gtagccttggtgccggccagggagg

SEQ ID NO: 2904539 - DNA, 25 bp, Homo sapien
gaagtgctactcttccattgtgagg

SEQ ID NO: 2904540 - DNA, 25 bp, Homo sapien
taacgtatgaccatgaccttgtggc

SEQ ID NO: 2904541 - DNA, 25 bp, Homo sapien
tggtagagcatcatctgcaacgtcg

SEQ ID NO: 2904542 - DNA, 25 bp, Homo sapien
aagcgcagtgtcttgtgggattccc

SEQ ID NO: 2904543 - DNA, 25 bp, Homo sapien
caccaatgagccactcttttgcagt

SEQ ID NO: 2904544 - DNA, 25 bp, Homo sapien
ggcgtggcataacatgcaggctcca

SEQ ID NO: 2904545 - DNA, 25 bp, Homo sapien
gaactcagtgttgacggcgtggcat

SEQ ID NO: 2904546 - DNA, 25 bp, Homo sapien
taggtgtcaggtgctgatcagatct

SEQ ID NO: 2904547 - DNA, 25 bp, Homo sapien
tagaaatcttactatccactggtgg

SEQ ID NO: 2904548 - DNA, 25 bp, Homo sapien
gaattacagatctggagctcaagag

SEQ ID NO: 2904549 - DNA, 25 bp, Homo sapien
ccactggtggatagtaatgatgtca

SEQ ID NO: 2904550 - DNA, 25 bp, Homo sapien
gatgtcaactgagatagggaaggca

SEQ ID NO: 2904551 - DNA, 25 bp, Homo sapien
gattacctcatgtgaacagaaagaa

SEQ ID NO: 2904552 - DNA, 25 bp, Homo sapien
cccatgtcctattcatgtgatgaac

SEQ ID NO: 2904553 - DNA, 25 bp, Homo sapien
caggtttcactggtgcatgctccca

SEQ ID NO: 2904554 - DNA, 25 bp, Homo sapien
aatgaagtgtcttccagccagtggg

SEQ ID NO: 2904555 - DNA, 25 bp, Homo sapien
cgcccgggatggccgcccccagacg

SEQ ID NO: 2904556 - DNA, 25 bp, Homo sapien
cgctgaccattctgaaacgccaaat

SEQ ID NO: 2904557 - DNA, 25 bp, Homo sapien
gcaccgggaggtgtgaaaatagcga

SEQ ID NO: 2904558 - DNA, 25 bp, Homo sapien
tgaaaatagcgagcggctggagatg

SEQ ID NO: 2904559 - DNA, 25 bp, Homo sapien
tactaagcactgaatcaggcgccgg

SEQ ID NO: 2904560 - DNA, 25 bp, Homo sapien
gggctgcggcgggagcgcacgatcc

SEQ ID NO: 2904561 - DNA, 25 bp, Homo sapien
gcggcgcggtcctctggattagggc

SEQ ID NO: 2904562 - DNA, 25 bp, Homo sapien
cgcacgatcccgctgcaccagtggg

SEQ ID NO: 2904563 - DNA, 25 bp, Homo sapien
ctggaggcgccacagcctggctgaa

SEQ ID NO: 2904564 - DNA, 25 bp, Homo sapien
atgttgcacgtcatgttggcttggc

SEQ ID NO: 2904565 - DNA, 25 bp, Homo sapien
ctgggcatagcattagttgggttaa

SEQ ID NO: 2904566 - DNA, 25 bp, Homo sapien
taccagggcatccatatgcaaggaa

SEQ ID NO: 2904567 - DNA, 25 bp, Homo sapien
catatgcaaggaacatggatttctt

SEQ ID NO: 2904568 - DNA, 25 bp, Homo sapien
atgctgatatcaggcaggagcatca

SEQ ID NO: 2904569 - DNA, 25 bp, Homo sapien
gtggatgctgatatcaggcaggagc

SEQ ID NO: 2904570 - DNA, 25 bp, Homo sapien
ggatgctgatatcaggcaggagcat

SEQ ID NO: 2904571 - DNA, 25 bp, Homo sapien
gatatcaggcaggagcatcaccatg

SEQ ID NO: 2904572 - DNA, 25 bp, Homo sapien
gctggccggcgcgcactcacacaca

SEQ ID NO: 2904573 - DNA, 25 bp, Homo sapien
acacacacgcgcgctcgcccccgaa

SEQ ID NO: 2904574 - DNA, 25 bp, Homo sapien
ctcacacacacgcgcgctcgccccc

SEQ ID NO: 2904575 - DNA, 25 bp, Homo sapien
cacacacgcgcgctcgcccccgaag

SEQ ID NO: 2904576 - DNA, 25 bp, Homo sapien
gaggatctgtccgcctgccgcagaa

SEQ ID NO: 2904577 - DNA, 25 bp, Homo sapien
tgccgcgccgaggatctgtccgcct

SEQ ID NO: 2904578 - DNA, 25 bp, Homo sapien
gcgccgaggatctgtccgcctgccg

SEQ ID NO: 2904579 - DNA, 25 bp, Homo sapien
atctgtccgcctgccgcagaaggcg

SEQ ID NO: 2904580 - DNA, 25 bp, Homo sapien
ttcgaacttcttgccgagggacagt

SEQ ID NO: 2904581 - DNA, 25 bp, Homo sapien
tacatcttgcggcactgcgtggagt

SEQ ID NO: 2904582 - DNA, 25 bp, Homo sapien
gaactgcaggctcacgtaggtcact

SEQ ID NO: 2904583 - DNA, 25 bp, Homo sapien
gaaggccgcattgacaaagtccggg

SEQ ID NO: 2904584 - DNA, 25 bp, Homo sapien
atgaactcgccgctgcgaggcccag

SEQ ID NO: 2904585 - DNA, 25 bp, Homo sapien
ctcgacccgcgctcctatgaactcg

SEQ ID NO: 2904586 - DNA, 25 bp, Homo sapien
ccgttccctcgacccgcgctcctat

SEQ ID NO: 2904587 - DNA, 25 bp, Homo sapien
ccgcgctcctatgaactcgccgctg

SEQ ID NO: 2904588 - DNA, 25 bp, Homo sapien
tgggttttgggttacagctgagcaa

SEQ ID NO: 2904589 - DNA, 25 bp, Homo sapien
gcacggtgctcgtcttgcagagaca

SEQ ID NO: 2904590 - DNA, 25 bp, Homo sapien
gagtgagtcgcaaaacaagttttca

SEQ ID NO: 2904591 - DNA, 25 bp, Homo sapien
aatgcaaagccatagagtgagtcgc

SEQ ID NO: 2904592 - DNA, 25 bp, Homo sapien
ttttcaatacgttccagtgaagcaa

SEQ ID NO: 2904593 - DNA, 25 bp, Homo sapien
tacgttccagtgaagcaaagggata

SEQ ID NO: 2904594 - DNA, 25 bp, Homo sapien
ggattttttcaatacgttccagtga

SEQ ID NO: 2904595 - DNA, 25 bp, Homo sapien
caatacgttccagtgaagcaaaggg

SEQ ID NO: 2904596 - DNA, 25 bp, Homo sapien
gcagacaccgtagaagccatcaaga

SEQ ID NO: 2904597 - DNA, 25 bp, Homo sapien
taacatgagtaacaatccagtggac

SEQ ID NO: 2904598 - DNA, 25 bp, Homo sapien
taaaggcagtgtgcattgcagacac

SEQ ID NO: 2904599 - DNA, 25 bp, Homo sapien
tataatccagttccctagagagcca

SEQ ID NO: 2904600 - DNA, 25 bp, Homo sapien
tggcggtactcctgaaccataggta

SEQ ID NO: 2904601 - DNA, 25 bp, Homo sapien
tcctgacacaggcaagagcggagca

SEQ ID NO: 2904602 - DNA, 25 bp, Homo sapien
gttagtacactaatcccaatgacag

SEQ ID NO: 2904603 - DNA, 25 bp, Homo sapien
cagctgcctctgatagaactgtgct

SEQ ID NO: 2904604 - DNA, 25 bp, Homo sapien
tacatttctttacatgcccagacca

SEQ ID NO: 2904605 - DNA, 25 bp, Homo sapien
catttctttacatgcccagaccaaa

SEQ ID NO: 2904606 - DNA, 25 bp, Homo sapien
tctttacatgcccagaccaaacaga

SEQ ID NO: 2904607 - DNA, 25 bp, Homo sapien
tttacatgcccagaccaaacagagc

SEQ ID NO: 2904608 - DNA, 25 bp, Homo sapien
ggtcagcagacaaaataagcgagag

SEQ ID NO: 2904609 - DNA, 25 bp, Homo sapien
taagcgagaggatcagtatccccaa

SEQ ID NO: 2904610 - DNA, 25 bp, Homo sapien
ggcatttccataactaacagcagtg

SEQ ID NO: 2904611 - DNA, 25 bp, Homo sapien
tagtccagtgatacctctagaatgt

SEQ ID NO: 2904612 - DNA, 25 bp, Homo sapien
tcagcttactgtaactcgacctcct

SEQ ID NO: 2904613 - DNA, 25 bp, Homo sapien
aatctcagcttactgtaactcgacc

SEQ ID NO: 2904614 - DNA, 25 bp, Homo sapien
aaactacaagcacataccaccgtgc

SEQ ID NO: 2904615 - DNA, 25 bp, Homo sapien
ctgaaactacaagcacataccaccg

SEQ ID NO: 2904616 - DNA, 25 bp, Homo sapien
tctaacgaatccggacccagggtca

SEQ ID NO: 2904617 - DNA, 25 bp, Homo sapien
agcaacagaagcaatcccgggaggg

SEQ ID NO: 2904618 - DNA, 25 bp, Homo sapien
ggtcagcaacagaagcaatcccggg

SEQ ID NO: 2904619 - DNA, 25 bp, Homo sapien
cccgggaggggagctctaaggcagg

SEQ ID NO: 2904620 - DNA, 25 bp, Homo sapien
acagtccccgctctgggagcactgg

SEQ ID NO: 2904621 - DNA, 25 bp, Homo sapien
cttggcctgttgcacagtccccgct

SEQ ID NO: 2904622 - DNA, 25 bp, Homo sapien
tggcctgttgcacagtccccgctct

SEQ ID NO: 2904623 - DNA, 25 bp, Homo sapien
agtccccgctctgggagcactggct

SEQ ID NO: 2904624 - DNA, 25 bp, Homo sapien
ggatctgtgtgcaatcaaccagtca

SEQ ID NO: 2904625 - DNA, 25 bp, Homo sapien
tatttcagccaacataccccaattg

SEQ ID NO: 2904626 - DNA, 25 bp, Homo sapien
ttcttcagccaaagcagcccgagtt

SEQ ID NO: 2904627 - DNA, 25 bp, Homo sapien
caaccagtcacacgtaaaattgagg

SEQ ID NO: 2904628 - DNA, 25 bp, Homo sapien
gaatggaaaatacccgagaaatcaa

SEQ ID NO: 2904629 - DNA, 25 bp, Homo sapien
aaggagccacgtgtcattttctgga

SEQ ID NO: 2904630 - DNA, 25 bp, Homo sapien
tgccttcgtgcctgatggtttaaag

SEQ ID NO: 2904631 - DNA, 25 bp, Homo sapien
ttccctggccaaacaagtctataat

SEQ ID NO: 2904632 - DNA, 25 bp, Homo sapien
catttaaaatagacaatccggtggc

SEQ ID NO: 2904633 - DNA, 25 bp, Homo sapien
cagtcaccgtcatattaaacccagg

SEQ ID NO: 2904634 - DNA, 25 bp, Homo sapien
gctgggtcacactgcaattctaggt

SEQ ID NO: 2904635 - DNA, 25 bp, Homo sapien
cacgtagcaggtaggcatcaccatg

SEQ ID NO: 2904636 - DNA, 25 bp, Homo sapien
tactacgagctgacgttgtgacacc

SEQ ID NO: 2904637 - DNA, 25 bp, Homo sapien
ttagctaaaggttcccctggctgca

SEQ ID NO: 2904638 - DNA, 25 bp, Homo sapien
tacatgaagtgtaatccccgaacat

SEQ ID NO: 2904639 - DNA, 25 bp, Homo sapien
gaagcgagtgttaagtgcacacctg

SEQ ID NO: 2904640 - DNA, 25 bp, Homo sapien
cacttgagcatagtccacaatctga

SEQ ID NO: 2904641 - DNA, 25 bp, Homo sapien
tccctaacacttgagcatagtccac

SEQ ID NO: 2904642 - DNA, 25 bp, Homo sapien
taacacttgagcatagtccacaatc

SEQ ID NO: 2904643 - DNA, 25 bp, Homo sapien
cttgagcatagtccacaatctgaga

SEQ ID NO: 2904644 - DNA, 25 bp, Homo sapien
gacagaccaagaagggcctcaaatt

SEQ ID NO: 2904645 - DNA, 25 bp, Homo sapien
ctcaaattccacgtaaaggagtttg

SEQ ID NO: 2904646 - DNA, 25 bp, Homo sapien
gagtgggttgggacagaccaagaag

SEQ ID NO: 2904647 - DNA, 25 bp, Homo sapien
tgggacagaccaagaagggcctcaa

SEQ ID NO: 2904648 - DNA, 25 bp, Homo sapien
agcataaacacgatggggcatggga

SEQ ID NO: 2904649 - DNA, 25 bp, Homo sapien
tgcttgcacagcataaacacgatgg

SEQ ID NO: 2904650 - DNA, 25 bp, Homo sapien
cacagcataaacacgatggggcatg

SEQ ID NO: 2904651 - DNA, 25 bp, Homo sapien
gcttgcacagcataaacacgatggg

SEQ ID NO: 2904652 - DNA, 25 bp, Homo sapien
ggggctagatgggcagagatgcctg

SEQ ID NO: 2904653 - DNA, 25 bp, Homo sapien
ttgaggggctagatgggcagagatg

SEQ ID NO: 2904654 - DNA, 25 bp, Homo sapien
ggctagatgggcagagatgcctgga

SEQ ID NO: 2904655 - DNA, 25 bp, Homo sapien
gaggggctagatgggcagagatgcc

SEQ ID NO: 2904656 - DNA, 25 bp, Homo sapien
caacagcacccgacaagtagggcag

SEQ ID NO: 2904657 - DNA, 25 bp, Homo sapien
tctatgacctctaaatagtgaagac

SEQ ID NO: 2904658 - DNA, 25 bp, Homo sapien
cagtggcagcttagatgagtggcaa

SEQ ID NO: 2904659 - DNA, 25 bp, Homo sapien
ggagactaaggtcctaattccatct

SEQ ID NO: 2904660 - DNA, 25 bp, Homo sapien
tcacgaacaatggtccttcttggca

SEQ ID NO: 2904661 - DNA, 25 bp, Homo sapien
ttcttggcagacagtccacgggtgt

SEQ ID NO: 2904662 - DNA, 25 bp, Homo sapien
gagccagggaggaattctcacgaac

SEQ ID NO: 2904663 - DNA, 25 bp, Homo sapien
tcttggcagacagtccacgggtgtg

SEQ ID NO: 2904664 - DNA, 25 bp, Homo sapien
ggcccaggtgggatacgcgactcct

SEQ ID NO: 2904665 - DNA, 25 bp, Homo sapien
cttcacccgcggctttgattcccac

SEQ ID NO: 2904666 - DNA, 25 bp, Homo sapien
actgtttgcaaatgcggcccctgtg

SEQ ID NO: 2904667 - DNA, 25 bp, Homo sapien
cccaagtctcggcgctcaggagaca

SEQ ID NO: 2904668 - DNA, 25 bp, Homo sapien
gctgaggaaccacttcccaggggga

SEQ ID NO: 2904669 - DNA, 25 bp, Homo sapien
cctgctgaggaaccacttcccaggg

SEQ ID NO: 2904670 - DNA, 25 bp, Homo sapien
ttggtggtcaggaaacaggccactg

SEQ ID NO: 2904671 - DNA, 25 bp, Homo sapien
tgctggggaaccacttccttggtgg

SEQ ID NO: 2904672 - DNA, 25 bp, Homo sapien
ccttaggggccagtaaacaagcctg

SEQ ID NO: 2904673 - DNA, 25 bp, Homo sapien
gggaaacacgtcctcatgggaacca

SEQ ID NO: 2904674 - DNA, 25 bp, Homo sapien
cctcaggggaaccagttcctccagg

SEQ ID NO: 2904675 - DNA, 25 bp, Homo sapien
cacttcctcaggggaaccagttcct

SEQ ID NO: 2904676 - DNA, 25 bp, Homo sapien
tggggaaacacgtcctcatgggaac

SEQ ID NO: 2904677 - DNA, 25 bp, Homo sapien
ccagagctctctctgcgacagcagt

SEQ ID NO: 2904678 - DNA, 25 bp, Homo sapien
cctgttgtgatgaaaggtagtactt

SEQ ID NO: 2904679 - DNA, 25 bp, Homo sapien
tctctctgcgacagcagtcggcttc

SEQ ID NO: 2904680 - DNA, 25 bp, Homo sapien
cggcttcctcgttaacctgttgtga

SEQ ID NO: 2904681 - DNA, 25 bp, Homo sapien
tgagtaacaaatgggacactacctg

SEQ ID NO: 2904682 - DNA, 25 bp, Homo sapien
gagaagctgagctccgagaactgga

SEQ ID NO: 2904683 - DNA, 25 bp, Homo sapien
ggaaatcccatgtgtagtagcagtg

SEQ ID NO: 2904684 - DNA, 25 bp, Homo sapien
aacgaatctcacttaggctctctgg

SEQ ID NO: 2904685 - DNA, 25 bp, Homo sapien
agagaaaaatcgcttctctccctaa

SEQ ID NO: 2904686 - DNA, 25 bp, Homo sapien
ctgtcctggccaatggagaagtgag

SEQ ID NO: 2904687 - DNA, 25 bp, Homo sapien
gcagcatctcactaacctctctctt

SEQ ID NO: 2904688 - DNA, 25 bp, Homo sapien
taatctcccctacgatttacattcc

SEQ ID NO: 2904689 - DNA, 25 bp, Homo sapien
gaagcacaggaagctttgtacggcc

SEQ ID NO: 2904690 - DNA, 25 bp, Homo sapien
gcacaggaagctttgtacggcccat

SEQ ID NO: 2904691 - DNA, 25 bp, Homo sapien
agcacaggaagctttgtacggccca

SEQ ID NO: 2904692 - DNA, 25 bp, Homo sapien
cgaagcacaggaagctttgtacggc

SEQ ID NO: 2904693 - DNA, 25 bp, Homo sapien
cgccccgcctaaagtctccctgtct

SEQ ID NO: 2904694 - DNA, 25 bp, Homo sapien
aatcgccccgcctaaagtctccctg

SEQ ID NO: 2904695 - DNA, 25 bp, Homo sapien
atcgccccgcctaaagtctccctgt

SEQ ID NO: 2904696 - DNA, 25 bp, Homo sapien
tcgccccgcctaaagtctccctgtc

SEQ ID NO: 2904697 - DNA, 25 bp, Homo sapien
aggactgtggccaacctcgcactcc

SEQ ID NO: 2904698 - DNA, 25 bp, Homo sapien
aggtccctggctgtcaggtcaggac

SEQ ID NO: 2904699 - DNA, 25 bp, Homo sapien
tgtgagcagcaggtccctggctgtc

SEQ ID NO: 2904700 - DNA, 25 bp, Homo sapien
tgtcaggtcaggactgtggccaacc

SEQ ID NO: 2904701 - DNA, 25 bp, Homo sapien
tggtacaggaacacctcgtaagtgt

SEQ ID NO: 2904702 - DNA, 25 bp, Homo sapien
ggaacacctcgtaagtgttgaggaa

SEQ ID NO: 2904703 - DNA, 25 bp, Homo sapien
ctcgtaagtgttgaggaatctggct

SEQ ID NO: 2904704 - DNA, 25 bp, Homo sapien
tacaggaacacctcgtaagtgttga

SEQ ID NO: 2904705 - DNA, 25 bp, Homo sapien
ttctaaagaaccagtgacaaattgg

SEQ ID NO: 2904706 - DNA, 25 bp, Homo sapien
aaagaaccagtgacaaattggctgt

SEQ ID NO: 2904707 - DNA, 25 bp, Homo sapien
tctaaagaaccagtgacaaattggc

SEQ ID NO: 2904708 - DNA, 25 bp, Homo sapien
taaagaaccagtgacaaattggctg

SEQ ID NO: 2904709 - DNA, 25 bp, Homo sapien
ttaaaagtatcagacccgtcatact

SEQ ID NO: 2904710 - DNA, 25 bp, Homo sapien
catacttacacttgaatcttccttt

SEQ ID NO: 2904711 - DNA, 25 bp, Homo sapien
tataccttatacaccctaaatatgt

SEQ ID NO: 2904712 - DNA, 25 bp, Homo sapien
aataatacacaatatctgaatagct

SEQ ID NO: 2904713 - DNA, 25 bp, Homo sapien
ccagctccaggaacgtcacgtggat

SEQ ID NO: 2904714 - DNA, 25 bp, Homo sapien
gatttcagccgggatctgtccagct

SEQ ID NO: 2904715 - DNA, 25 bp, Homo sapien
tcacgtggatgaggacactggtcca

SEQ ID NO: 2904716 - DNA, 25 bp, Homo sapien
tatcaaatccctctccagatttcag

SEQ ID NO: 2904717 - DNA, 25 bp, Homo sapien
tatccgacatcaactgttaatagga

SEQ ID NO: 2904718 - DNA, 25 bp, Homo sapien
caactgttaataggatgtgccccat

SEQ ID NO: 2904719 - DNA, 25 bp, Homo sapien
tgaaagcagacaagatatccgacat

SEQ ID NO: 2904720 - DNA, 25 bp, Homo sapien
gcagacaagatatccgacatcaact

SEQ ID NO: 2904721 - DNA, 25 bp, Homo sapien
gcacattttcatatcaaaagccacc

SEQ ID NO: 2904722 - DNA, 25 bp, Homo sapien
cacaatgcacattttcatatcaaaa

SEQ ID NO: 2904723 - DNA, 25 bp, Homo sapien
ttcatatcaaaagccaccccttgta

SEQ ID NO: 2904724 - DNA, 25 bp, Homo sapien
cattttcatatcaaaagccacccct

SEQ ID NO: 2904725 - DNA, 25 bp, Homo sapien
gacagtaagcgctcccggtgttttc

SEQ ID NO: 2904726 - DNA, 25 bp, Homo sapien
caacaacatgaataacccttcacat

SEQ ID NO: 2904727 - DNA, 25 bp, Homo sapien
gcgctcccggtgttttcaaagatct

SEQ ID NO: 2904728 - DNA, 25 bp, Homo sapien
tcaccagcgaggacagtaagcgctc

SEQ ID NO: 2904729 - DNA, 25 bp, Homo sapien
ccacgctccccagtgctacaaagag

SEQ ID NO: 2904730 - DNA, 25 bp, Homo sapien
cacgctccccagtgctacaaagagg

SEQ ID NO: 2904731 - DNA, 25 bp, Homo sapien
ctccccagtgctacaaagagggacc

SEQ ID NO: 2904732 - DNA, 25 bp, Homo sapien
cgctccccagtgctacaaagaggga

SEQ ID NO: 2904733 - DNA, 25 bp, Homo sapien
caggtacagcactcggagaatttgg

SEQ ID NO: 2904734 - DNA, 25 bp, Homo sapien
gggacacccgtgtccaggtacagca

SEQ ID NO: 2904735 - DNA, 25 bp, Homo sapien
tgtccaggtacagcactcggagaat

SEQ ID NO: 2904736 - DNA, 25 bp, Homo sapien
acccgtgtccaggtacagcactcgg

SEQ ID NO: 2904737 - DNA, 25 bp, Homo sapien
ggtgagggcttgacctctggtcctc

SEQ ID NO: 2904738 - DNA, 25 bp, Homo sapien
ctgcgaagagcctgaaattgtggca

SEQ ID NO: 2904739 - DNA, 25 bp, Homo sapien
gaaaggtctgaacaggctccgactg

SEQ ID NO: 2904740 - DNA, 25 bp, Homo sapien
cctttttgtgcgctgaagtgatggg

SEQ ID NO: 2904741 - DNA, 25 bp, Homo sapien
aaggaccaggagacctactcagcat

SEQ ID NO: 2904742 - DNA, 25 bp, Homo sapien
ggagacctactcagcatgtacaact

SEQ ID NO: 2904743 - DNA, 25 bp, Homo sapien
caggagacctactcagcatgtacaa

SEQ ID NO: 2904744 - DNA, 25 bp, Homo sapien
gaccaggagacctactcagcatgta

SEQ ID NO: 2904745 - DNA, 25 bp, Homo sapien
tcctctgctaggtaagtccatggct

SEQ ID NO: 2904746 - DNA, 25 bp, Homo sapien
ctcctctgctaggtaagtccatggc

SEQ ID NO: 2904747 - DNA, 25 bp, Homo sapien
cctctgctaggtaagtccatggctc

SEQ ID NO: 2904748 - DNA, 25 bp, Homo sapien
gctcctctgctaggtaagtccatgg

SEQ ID NO: 2904749 - DNA, 25 bp, Homo sapien
cacatgggcaggttgggacatggca

SEQ ID NO: 2904750 - DNA, 25 bp, Homo sapien
ggcaggttgggacatggcaaaaatt

SEQ ID NO: 2904751 - DNA, 25 bp, Homo sapien
catgggcaggttgggacatggcaaa

SEQ ID NO: 2904752 - DNA, 25 bp, Homo sapien
ggccacatgggcaggttgggacatg

SEQ ID NO: 2904753 - DNA, 25 bp, Homo sapien
tgtcatgattgttgacacatttcca

SEQ ID NO: 2904754 - DNA, 25 bp, Homo sapien
gtcatgattgttgacacatttccac

SEQ ID NO: 2904755 - DNA, 25 bp, Homo sapien
ctgtcatgattgttgacacatttcc

SEQ ID NO: 2904756 - DNA, 25 bp, Homo sapien
tcatgattgttgacacatttccaca

SEQ ID NO: 2904757 - DNA, 25 bp, Homo sapien
gcatccagcagacattggtgagcag

SEQ ID NO: 2904758 - DNA, 25 bp, Homo sapien
ctaccccaggtccagaaagcatcca

SEQ ID NO: 2904759 - DNA, 25 bp, Homo sapien
ctcaatcccatcaggactaccccag

SEQ ID NO: 2904760 - DNA, 25 bp, Homo sapien
gaaagcatccagcagacattggtga

SEQ ID NO: 2904761 - DNA, 25 bp, Homo sapien
caggccttccggtgggtgatgggct

SEQ ID NO: 2904762 - DNA, 25 bp, Homo sapien
gcgccgggcatgcaggttgcagtta

SEQ ID NO: 2904763 - DNA, 25 bp, Homo sapien
ttgcgccccgaaagcttgtagagct

SEQ ID NO: 2904764 - DNA, 25 bp, Homo sapien
atgtcgcggtagtagccctccttgc

SEQ ID NO: 2904765 - DNA, 25 bp, Homo sapien
tgagtggccgctgttgggtaaaatt

SEQ ID NO: 2904766 - DNA, 25 bp, Homo sapien
gccagctgtttacaagacccctggc

SEQ ID NO: 2904767 - DNA, 25 bp, Homo sapien
agctgtttacaagacccctggcctc

SEQ ID NO: 2904768 - DNA, 25 bp, Homo sapien
actgcccacctgagtggccgctgtt

SEQ ID NO: 2904769 - DNA, 25 bp, Homo sapien
caggaagtgaccagtgccctttctc

SEQ ID NO: 2904770 - DNA, 25 bp, Homo sapien
gcatgacaggaagtgaccagtgccc

SEQ ID NO: 2904771 - DNA, 25 bp, Homo sapien
tgacaggaagtgaccagtgcccttt

SEQ ID NO: 2904772 - DNA, 25 bp, Homo sapien
ggaagtgaccagtgccctttctcac

SEQ ID NO: 2904773 - DNA, 25 bp, Homo sapien
caaggccggggcagctgctgtccat

SEQ ID NO: 2904774 - DNA, 25 bp, Homo sapien
aggccggggcagctgctgtccatgg

SEQ ID NO: 2904775 - DNA, 25 bp, Homo sapien
aaggccggggcagctgctgtccatg

SEQ ID NO: 2904776 - DNA, 25 bp, Homo sapien
caggctgttcttgtctgggtccacc

SEQ ID NO: 2904777 - DNA, 25 bp, Homo sapien
tatcattcacagaccattcagcgga

SEQ ID NO: 2904778 - DNA, 25 bp, Homo sapien
aacagcttgcaccataacgaggccg

SEQ ID NO: 2904779 - DNA, 25 bp, Homo sapien
gaatagctggagagtgcagccgcct

SEQ ID NO: 2904780 - DNA, 25 bp, Homo sapien
tgaagggatccctgaaggctcctgg

SEQ ID NO: 2904781 - DNA, 25 bp, Homo sapien
tcatcgtcagtttcttgtgcccaag

SEQ ID NO: 2904782 - DNA, 25 bp, Homo sapien
ttgagatttggtttgtcggtgaaga

SEQ ID NO: 2904783 - DNA, 25 bp, Homo sapien
gcatggtgccagaatcttgttgaga

SEQ ID NO: 2904784 - DNA, 25 bp, Homo sapien
ggaaggcagagcccgtagccctcat

SEQ ID NO: 2904785 - DNA, 25 bp, Homo sapien
tttcaaataccttctcgggaaggca

SEQ ID NO: 2904786 - DNA, 25 bp, Homo sapien
gggaaggcagagcccgtagccctca

SEQ ID NO: 2904787 - DNA, 25 bp, Homo sapien
aagtgaaatgcagaagccctttgga

SEQ ID NO: 2904788 - DNA, 25 bp, Homo sapien
gcacccacagggtggcaatcacagg

SEQ ID NO: 2904789 - DNA, 25 bp, Homo sapien
aggtgatacccgtcacgccgtcctt

SEQ ID NO: 2904790 - DNA, 25 bp, Homo sapien
tctgctggtagcctttggcgcagcg

SEQ ID NO: 2904791 - DNA, 25 bp, Homo sapien
tgcagggggcgatgggagagcggct

SEQ ID NO: 2904792 - DNA, 25 bp, Homo sapien
ggctgcagtcgtcggcggcgctaca

SEQ ID NO: 2904793 - DNA, 25 bp, Homo sapien
cacgctgctggctgcagtcgtcggc

SEQ ID NO: 2904794 - DNA, 25 bp, Homo sapien
gtcgtcggcggcgctacagggatct

SEQ ID NO: 2904795 - DNA, 25 bp, Homo sapien
ctgctggctgcagtcgtcggcggcg

SEQ ID NO: 2904796 - DNA, 25 bp, Homo sapien
tgacaacccctcagcctggaaggtg

SEQ ID NO: 2904797 - DNA, 25 bp, Homo sapien
ataaatcaggatctagcagcaggtc

SEQ ID NO: 2904798 - DNA, 25 bp, Homo sapien
tgtgtaaaccgctgtgacttccgcc

SEQ ID NO: 2904799 - DNA, 25 bp, Homo sapien
tgcattctgcttgtgcgaccctgtg

SEQ ID NO: 2904800 - DNA, 25 bp, Homo sapien
tgcctgtgcaagtgccgaatctgtc

SEQ ID NO: 2904801 - DNA, 25 bp, Homo sapien
ggcactccctgaaacgcatttctgt

SEQ ID NO: 2904802 - DNA, 25 bp, Homo sapien
tgcaaacaacgcaagactcaactgt

SEQ ID NO: 2904803 - DNA, 25 bp, Homo sapien
ctcaagtttccagcgcactgccaat

SEQ ID NO: 2904804 - DNA, 25 bp, Homo sapien
gctaagactgggctaaactacttcc

SEQ ID NO: 2904805 - DNA, 25 bp, Homo sapien
tgttgggcagaatgcacaccctggg

SEQ ID NO: 2904806 - DNA, 25 bp, Homo sapien
gaggtcatgccttggaacccaatgt

SEQ ID NO: 2904807 - DNA, 25 bp, Homo sapien
gatgcttgtagtcctgtaacgtcca

SEQ ID NO: 2904808 - DNA, 25 bp, Homo sapien
ggtgattcagctgagctgagcaggg

SEQ ID NO: 2904809 - DNA, 25 bp, Homo sapien
tgattcagctgagctgagcagggct

SEQ ID NO: 2904810 - DNA, 25 bp, Homo sapien
attcagctgagctgagcagggctcc

SEQ ID NO: 2904811 - DNA, 25 bp, Homo sapien
ctgaagggtgattcagctgagctga

SEQ ID NO: 2904812 - DNA, 25 bp, Homo sapien
tcccaatagggaaccagttggctct

SEQ ID NO: 2904813 - DNA, 25 bp, Homo sapien
taataagctgaagccattcgggcgc

SEQ ID NO: 2904814 - DNA, 25 bp, Homo sapien
cactcggcgggcagagttatcctgt

SEQ ID NO: 2904815 - DNA, 25 bp, Homo sapien
ttcattggtatctgctcccaccggg

SEQ ID NO: 2904816 - DNA, 25 bp, Homo sapien
tagtgcatctgatccgttgctagga

SEQ ID NO: 2904817 - DNA, 25 bp, Homo sapien
gaggccatatgtgtgagaggcacca

SEQ ID NO: 2904818 - DNA, 25 bp, Homo sapien
tccacagaccaatgggaactggcgt

SEQ ID NO: 2904819 - DNA, 25 bp, Homo sapien
gaactggcgtgagagaatcacagcc

SEQ ID NO: 2904820 - DNA, 25 bp, Homo sapien
aaagattcccttgcagctcaccgtg

SEQ ID NO: 2904821 - DNA, 25 bp, Homo sapien
caccgtggccatgaatctacttctg

SEQ ID NO: 2904822 - DNA, 25 bp, Homo sapien
ttctggccccaggacgtaagtggaa

SEQ ID NO: 2904823 - DNA, 25 bp, Homo sapien
ctgagtctgacaggtccgctctggc

SEQ ID NO: 2904824 - DNA, 25 bp, Homo sapien
caggacacagctctttgtctgatga

SEQ ID NO: 2904825 - DNA, 25 bp, Homo sapien
cacagctctttgtctgatgagcaga

SEQ ID NO: 2904826 - DNA, 25 bp, Homo sapien
gacacagctctttgtctgatgagca

SEQ ID NO: 2904827 - DNA, 25 bp, Homo sapien
acagctctttgtctgatgagcagaa

SEQ ID NO: 2904828 - DNA, 25 bp, Homo sapien
cttcaaactggcatctatttggcag

SEQ ID NO: 2904829 - DNA, 25 bp, Homo sapien
caatgaggaaacctgaacattcaca

SEQ ID NO: 2904830 - DNA, 25 bp, Homo sapien
ctggcatctatttggcagcctctca

SEQ ID NO: 2904831 - DNA, 25 bp, Homo sapien
agacaatgaggaaacctgaacattc

SEQ ID NO: 2904832 - DNA, 25 bp, Homo sapien
gccaaggcgcacctctccatctcag

SEQ ID NO: 2904833 - DNA, 25 bp, Homo sapien
gccttgtagatagcataggctgtgg

SEQ ID NO: 2904834 - DNA, 25 bp, Homo sapien
cagccttgtagatagcataggctgt

SEQ ID NO: 2904835 - DNA, 25 bp, Homo sapien
cttgtagatagcataggctgtggca

SEQ ID NO: 2904836 - DNA, 25 bp, Homo sapien
ttccaatcaggaggaaatccctttc

SEQ ID NO: 2904837 - DNA, 25 bp, Homo sapien
gaaatccctttcaccggcctcctca

SEQ ID NO: 2904838 - DNA, 25 bp, Homo sapien
ttcatttccaatcaggaggaaatcc

SEQ ID NO: 2904839 - DNA, 25 bp, Homo sapien
atttccaatcaggaggaaatccctt

SEQ ID NO: 2904840 - DNA, 25 bp, Homo sapien
ttcatgttaatcttcagcttcccct

SEQ ID NO: 2904841 - DNA, 25 bp, Homo sapien
ctttttcatgttaatcttcagcttc

SEQ ID NO: 2904842 - DNA, 25 bp, Homo sapien
gaggccttgcagtaggaatcgcagt

SEQ ID NO: 2904843 - DNA, 25 bp, Homo sapien
tagtccttcttgcagtactttttca

SEQ ID NO: 2904844 - DNA, 25 bp, Homo sapien
tcttcaccctgtagaaggccagaag

SEQ ID NO: 2904845 - DNA, 25 bp, Homo sapien
cttcttcaccctgtagaaggccaga

SEQ ID NO: 2904846 - DNA, 25 bp, Homo sapien
ttcaccctgtagaaggccagaaggc

SEQ ID NO: 2904847 - DNA, 25 bp, Homo sapien
ctcttcttcaccctgtagaaggcca

SEQ ID NO: 2904848 - DNA, 25 bp, Homo sapien
gaagggccttgaactttgatgccca

SEQ ID NO: 2904849 - DNA, 25 bp, Homo sapien
ttaggaattgactgtagacccctga

SEQ ID NO: 2904850 - DNA, 25 bp, Homo sapien
cctgaagggccttgaactttgatgc

SEQ ID NO: 2904851 - DNA, 25 bp, Homo sapien
gccttgaactttgatgcccatagcc

SEQ ID NO: 2904852 - DNA, 25 bp, Homo sapien
tggccgctgcccaggtccgcggagc

SEQ ID NO: 2904853 - DNA, 25 bp, Homo sapien
cccagacccgcgctcttcagccaca

SEQ ID NO: 2904854 - DNA, 25 bp, Homo sapien
ttcagccacacgagggcaaggtctg

SEQ ID NO: 2904855 - DNA, 25 bp, Homo sapien
caggtccgcggagccccagacccgc

SEQ ID NO: 2904856 - DNA, 25 bp, Homo sapien
gtaggaagaagccagcggcagcacc

SEQ ID NO: 2904857 - DNA, 25 bp, Homo sapien
cccctctttctgagtcccagggagt

SEQ ID NO: 2904858 - DNA, 25 bp, Homo sapien
gggagtaggaagaagccagcggcag

SEQ ID NO: 2904859 - DNA, 25 bp, Homo sapien
ctctttctgagtcccagggagtagg

SEQ ID NO: 2904860 - DNA, 25 bp, Homo sapien
ggaaatcagaggattccccaggggc

SEQ ID NO: 2904861 - DNA, 25 bp, Homo sapien
agtctccgaaacaccatgccacgtg

SEQ ID NO: 2904862 - DNA, 25 bp, Homo sapien
cagggaagggtcagcaagtctccga

SEQ ID NO: 2904863 - DNA, 25 bp, Homo sapien
tggcctccatatggggctggcactc

SEQ ID NO: 2904864 - DNA, 25 bp, Homo sapien
ctctcctgactccttgccggggagt

SEQ ID NO: 2904865 - DNA, 25 bp, Homo sapien
gccaaggcttggtctcagtgatgct

SEQ ID NO: 2904866 - DNA, 25 bp, Homo sapien
ccgccagagccaaggcttggtctca

SEQ ID NO: 2904867 - DNA, 25 bp, Homo sapien
ctgcgaagggaggaagggccgccag

SEQ ID NO: 2904868 - DNA, 25 bp, Homo sapien
aaatctcccgctgtggaaagcgtgt

SEQ ID NO: 2904869 - DNA, 25 bp, Homo sapien
tgtggaaagcgtgtcacgagctgca

SEQ ID NO: 2904870 - DNA, 25 bp, Homo sapien
tctcccgctgtggaaagcgtgtcac

SEQ ID NO: 2904871 - DNA, 25 bp, Homo sapien
cccgctgtggaaagcgtgtcacgag

SEQ ID NO: 2904872 - DNA, 25 bp, Homo sapien
atctgcctcggagacagcggccagg

SEQ ID NO: 2904873 - DNA, 25 bp, Homo sapien
ataccttcctgttgggccggtccag

SEQ ID NO: 2904874 - DNA, 25 bp, Homo sapien
gggaggcttgtcacccatctgcctc

SEQ ID NO: 2904875 - DNA, 25 bp, Homo sapien
taggggaggcttgtcacccatctgc

SEQ ID NO: 2904876 - DNA, 25 bp, Homo sapien
gtcccaatgttgacccattaccagg

SEQ ID NO: 2904877 - DNA, 25 bp, Homo sapien
gacccattaccaggccgtcaaaggc

SEQ ID NO: 2904878 - DNA, 25 bp, Homo sapien
cccagagtcccaatgttgacccatt

SEQ ID NO: 2904879 - DNA, 25 bp, Homo sapien
caatgttgacccattaccaggccgt

SEQ ID NO: 2904880 - DNA, 25 bp, Homo sapien
ccatgggggccagagtcaacaaggg

SEQ ID NO: 2904881 - DNA, 25 bp, Homo sapien
ggggccagagtcaacaagggcagcc

SEQ ID NO: 2904882 - DNA, 25 bp, Homo sapien
cagcctgccgcagtgtggagttggt

SEQ ID NO: 2904883 - DNA, 25 bp, Homo sapien
agtgtggagttggttacagccaatg

SEQ ID NO: 2904884 - DNA, 25 bp, Homo sapien
ggtgcctagaaaagatgcccaaggg

SEQ ID NO: 2904885 - DNA, 25 bp, Homo sapien
ggccacccctcgtctgtgcagtaaa

SEQ ID NO: 2904886 - DNA, 25 bp, Homo sapien
gccaccaggacagtgcgagctaaga

SEQ ID NO: 2904887 - DNA, 25 bp, Homo sapien
cacagagctcggtgaacaaggctgc

SEQ ID NO: 2904888 - DNA, 25 bp, Homo sapien
ggaccccttgtacagctgtggtgtc

SEQ ID NO: 2904889 - DNA, 25 bp, Homo sapien
tcggaccccttgtacagctgtggtg

SEQ ID NO: 2904890 - DNA, 25 bp, Homo sapien
ctcggaccccttgtacagctgtggt

SEQ ID NO: 2904891 - DNA, 25 bp, Homo sapien
cggaccccttgtacagctgtggtgt

SEQ ID NO: 2904892 - DNA, 25 bp, Homo sapien
tcaccaagggactcaacactcagtg

SEQ ID NO: 2904893 - DNA, 25 bp, Homo sapien
gtgcagacagaggtcaccgtggcaa

SEQ ID NO: 2904894 - DNA, 25 bp, Homo sapien
ccgagtgtatttgactgtgcagaca

SEQ ID NO: 2904895 - DNA, 25 bp, Homo sapien
gtctgagggctccaaagaatggctg

SEQ ID NO: 2904896 - DNA, 25 bp, Homo sapien
cagccgagtgcaggagagcactgaa

SEQ ID NO: 2904897 - DNA, 25 bp, Homo sapien
ggcagggacagccgagtgcaggaga

SEQ ID NO: 2904898 - DNA, 25 bp, Homo sapien
cagggacagccgagtgcaggagagc

SEQ ID NO: 2904899 - DNA, 25 bp, Homo sapien
gacagccgagtgcaggagagcactg

SEQ ID NO: 2904900 - DNA, 25 bp, Homo sapien
agcacaggcagacgggtgggctccc

SEQ ID NO: 2904901 - DNA, 25 bp, Homo sapien
cagctgctgtggctaggtccgccct

SEQ ID NO: 2904902 - DNA, 25 bp, Homo sapien
ggaagcacaggcagacgggtgggct

SEQ ID NO: 2904903 - DNA, 25 bp, Homo sapien
gctgctgtggctaggtccgccctgc

SEQ ID NO: 2904904 - DNA, 25 bp, Homo sapien
gccctgcttatacacggagatgatg

SEQ ID NO: 2904905 - DNA, 25 bp, Homo sapien
cgagcggatccacaggctctggtca

SEQ ID NO: 2904906 - DNA, 25 bp, Homo sapien
cacgctgctggaacttgcgcagccg

SEQ ID NO: 2904907 - DNA, 25 bp, Homo sapien
tttatcggccacgatgccgctctgg

SEQ ID NO: 2904908 - DNA, 25 bp, Homo sapien
ggcgcccgctctcgctcggccccgc

SEQ ID NO: 2904909 - DNA, 25 bp, Homo sapien
gctctcgctcggccccgccctggcg

SEQ ID NO: 2904910 - DNA, 25 bp, Homo sapien
aaggcgcccgctctcgctcggcccc

SEQ ID NO: 2904911 - DNA, 25 bp, Homo sapien
gccaaggcgcccgctctcgctcggc

SEQ ID NO: 2904912 - DNA, 25 bp, Homo sapien
gagccaggcctcttaattcagtgcg

SEQ ID NO: 2904913 - DNA, 25 bp, Homo sapien
aaaggcacggtcaaggtgtggccca

SEQ ID NO: 2904914 - DNA, 25 bp, Homo sapien
catagacagaaataggacaaccgcc

SEQ ID NO: 2904915 - DNA, 25 bp, Homo sapien
gagttcagtctcattccaacctggg

SEQ ID NO: 2904916 - DNA, 25 bp, Homo sapien
cagtccttagcagcaacgcagctta

SEQ ID NO: 2904917 - DNA, 25 bp, Homo sapien
tgtgtctgctacaagtgggcctccc

SEQ ID NO: 2904918 - DNA, 25 bp, Homo sapien
tggtgatcacccagcttccttgtga

SEQ ID NO: 2904919 - DNA, 25 bp, Homo sapien
catttcttactggatagcactggct

SEQ ID NO: 2904920 - DNA, 25 bp, Homo sapien
aaagaaatccagatacctgggtaca

SEQ ID NO: 2904921 - DNA, 25 bp, Homo sapien
gcattttaactctggataccatata

SEQ ID NO: 2904922 - DNA, 25 bp, Homo sapien
taattataagcattttaactctgga

SEQ ID NO: 2904923 - DNA, 25 bp, Homo sapien
tacctgggtacagctggtacttttg

SEQ ID NO: 2904924 - DNA, 25 bp, Homo sapien
agtctggccgaccaactgatggcag

SEQ ID NO: 2904925 - DNA, 25 bp, Homo sapien
atggcagtaaagagaccaccagcag

SEQ ID NO: 2904926 - DNA, 25 bp, Homo sapien
tgcagacactcagaatgtgtgatgc

SEQ ID NO: 2904927 - DNA, 25 bp, Homo sapien
gcttgtggctatcgtggttgttgca

SEQ ID NO: 2904928 - DNA, 25 bp, Homo sapien
cgcagctgagcagcggctgtaggaa

SEQ ID NO: 2904929 - DNA, 25 bp, Homo sapien
gtctgggcagagacctcaagcatag

SEQ ID NO: 2904930 - DNA, 25 bp, Homo sapien
gtaggaaggctgctagtgtcacact

SEQ ID NO: 2904931 - DNA, 25 bp, Homo sapien
gctgctagtgtcacactctgggtcc

SEQ ID NO: 2904932 - DNA, 25 bp, Homo sapien
gctgtgtacgggctgagcagtcttc

SEQ ID NO: 2904933 - DNA, 25 bp, Homo sapien
gagcaatggccttgctgcagatacc

SEQ ID NO: 2904934 - DNA, 25 bp, Homo sapien
ggacatgaaatacagaggatgagcc

SEQ ID NO: 2904935 - DNA, 25 bp, Homo sapien
tgcagataccctcggattccaggac

SEQ ID NO: 2904936 - DNA, 25 bp, Homo sapien
acattccaccctgaacttccaacct

SEQ ID NO: 2904937 - DNA, 25 bp, Homo sapien
tgcccttcctgtagctaataactga

SEQ ID NO: 2904938 - DNA, 25 bp, Homo sapien
agctgcccttcctgtagctaataac

SEQ ID NO: 2904939 - DNA, 25 bp, Homo sapien
ttcctgtagctaataactgacacag

SEQ ID NO: 2904940 - DNA, 25 bp, Homo sapien
ctgcctgcctgctgaccgccgccag

SEQ ID NO: 2904941 - DNA, 25 bp, Homo sapien
cctgcctgctgaccgccgccagcat

SEQ ID NO: 2904942 - DNA, 25 bp, Homo sapien
tgtccacttggctgtgttctgcctg

SEQ ID NO: 2904943 - DNA, 25 bp, Homo sapien
ctggtgtccacttggctgtgttctg

SEQ ID NO: 2904944 - DNA, 25 bp, Homo sapien
gttctcttttccgacagttgctgcc

SEQ ID NO: 2904945 - DNA, 25 bp, Homo sapien
agagcagtgcctcatcagcccggtg

SEQ ID NO: 2904946 - DNA, 25 bp, Homo sapien
ttctcttttccgacagttgctgcct

SEQ ID NO: 2904947 - DNA, 25 bp, Homo sapien
cagtgcctcatcagcccggtgctgg

SEQ ID NO: 2904948 - DNA, 25 bp, Homo sapien
aagcggcggcctcaccagagtcctg

SEQ ID NO: 2904949 - DNA, 25 bp, Homo sapien
ctgactcgccctggccgggccgtga

SEQ ID NO: 2904950 - DNA, 25 bp, Homo sapien
tgtggccgtgactgctgctccacgg

SEQ ID NO: 2904951 - DNA, 25 bp, Homo sapien
gaggtctcacatgcggtctccactg

SEQ ID NO: 2904952 - DNA, 25 bp, Homo sapien
gcacggcgctgaagtaaaacggccg

SEQ ID NO: 2904953 - DNA, 25 bp, Homo sapien
gccagcacggcgctgaagtaaaacg

SEQ ID NO: 2904954 - DNA, 25 bp, Homo sapien
ccagctggtggccaacactttgcag

SEQ ID NO: 2904955 - DNA, 25 bp, Homo sapien
cagctggtggccaacactttgcagc

SEQ ID NO: 2904956 - DNA, 25 bp, Homo sapien
cttgcactgcagagtgtgaatactc

SEQ ID NO: 2904957 - DNA, 25 bp, Homo sapien
gggatagtactgaatcggggggaca

SEQ ID NO: 2904958 - DNA, 25 bp, Homo sapien
cactgcggcctcatcccccaagatg

SEQ ID NO: 2904959 - DNA, 25 bp, Homo sapien
ttcacaggaggacgtctttagggtg

SEQ ID NO: 2904960 - DNA, 25 bp, Homo sapien
gcgattctcatccttcagccacctg

SEQ ID NO: 2904961 - DNA, 25 bp, Homo sapien
gctagagtgcaaaggcgcatctcgg

SEQ ID NO: 2904962 - DNA, 25 bp, Homo sapien
caggctagagtgcaaaggcgcatct

SEQ ID NO: 2904963 - DNA, 25 bp, Homo sapien
cacgcccggccgcatttctttcttt

SEQ ID NO: 2904964 - DNA, 25 bp, Homo sapien
gggcatttcctcgggcttctgtgag

SEQ ID NO: 2904965 - DNA, 25 bp, Homo sapien
tgaggaagaaggcagcgtccttagt

SEQ ID NO: 2904966 - DNA, 25 bp, Homo sapien
cctgccgggtagttatctggtcctt

SEQ ID NO: 2904967 - DNA, 25 bp, Homo sapien
gcagcgtccttagtggccaaggcca

SEQ ID NO: 2904968 - DNA, 25 bp, Homo sapien
ggctcgatggatgttcggaatatta

SEQ ID NO: 2904969 - DNA, 25 bp, Homo sapien
ctagccaggctcgatggatgttcgg

SEQ ID NO: 2904970 - DNA, 25 bp, Homo sapien
caggctcgatggatgttcggaatat

SEQ ID NO: 2904971 - DNA, 25 bp, Homo sapien
gccaggctcgatggatgttcggaat

SEQ ID NO: 2904972 - DNA, 25 bp, Homo sapien
caagcaggtaacagatctgggcagg

SEQ ID NO: 2904973 - DNA, 25 bp, Homo sapien
aagttatgaacaaagccaagctgat

SEQ ID NO: 2904974 - DNA, 25 bp, Homo sapien
cagtggttgagatctaacctccacc

SEQ ID NO: 2904975 - DNA, 25 bp, Homo sapien
agcaggtaacagatctgggcaggaa

SEQ ID NO: 2904976 - DNA, 25 bp, Homo sapien
ccagttaactgaggtatgagtgtcc

SEQ ID NO: 2904977 - DNA, 25 bp, Homo sapien
tctcccgaggaaatacaccacagta

SEQ ID NO: 2904978 - DNA, 25 bp, Homo sapien
taatccatagagaccaaggttgttg

SEQ ID NO: 2904979 - DNA, 25 bp, Homo sapien
cgttctatccattgcgaaagctcca

SEQ ID NO: 2904980 - DNA, 25 bp, Homo sapien
ttggttcgctgcaacaagagattct

SEQ ID NO: 2904981 - DNA, 25 bp, Homo sapien
tggttcgctgcaacaagagattctt

SEQ ID NO: 2904982 - DNA, 25 bp, Homo sapien
ttacttattctgtccagcaggacca

SEQ ID NO: 2904983 - DNA, 25 bp, Homo sapien
tgtgagtcctaaggaactcagtgac

SEQ ID NO: 2904984 - DNA, 25 bp, Homo sapien
ctgtgagtcctaaggaactcagtga

SEQ ID NO: 2904985 - DNA, 25 bp, Homo sapien
taaacaagggatccaagagaactct

SEQ ID NO: 2904986 - DNA, 25 bp, Homo sapien
gactggtgtgaatggatccctgctg

SEQ ID NO: 2904987 - DNA, 25 bp, Homo sapien
tagcataaatagcagtctccaaggg

SEQ ID NO: 2904988 - DNA, 25 bp, Homo sapien
tgctcacaatataagactaaggccg

SEQ ID NO: 2904989 - DNA, 25 bp, Homo sapien
caggagctcacagggtggagaactg

SEQ ID NO: 2904990 - DNA, 25 bp, Homo sapien
aggagctcacagggtggagaactgt

SEQ ID NO: 2904991 - DNA, 25 bp, Homo sapien
ggagctcacagggtggagaactgtc

SEQ ID NO: 2904992 - DNA, 25 bp, Homo sapien
gagctcacagggtggagaactgtca

SEQ ID NO: 2904993 - DNA, 25 bp, Homo sapien
gctcttaacacgctcatggccctgt

SEQ ID NO: 2904994 - DNA, 25 bp, Homo sapien
cagtgactggaaaatcacccagcca

SEQ ID NO: 2904995 - DNA, 25 bp, Homo sapien
cttcataattgggtctttctgctct

SEQ ID NO: 2904996 - DNA, 25 bp, Homo sapien
gggattcttcataattgggtctttc

SEQ ID NO: 2904997 - DNA, 25 bp, Homo sapien
gctgcaacggcctgagtggtccgat

SEQ ID NO: 2904998 - DNA, 25 bp, Homo sapien
gcagctccagctgcaacggcctgag

SEQ ID NO: 2904999 - DNA, 25 bp, Homo sapien
tggcattactttgcctcaggcaggc

SEQ ID NO: 2905000 - DNA, 25 bp, Homo sapien
cgatgggactcgaagtggctctgca

SEQ ID NO: 2905001 - DNA, 25 bp, Homo sapien
gcagtggttaatcagctaattcgca

SEQ ID NO: 2905002 - DNA, 25 bp, Homo sapien
tgagtactttactcacttgggaaag

SEQ ID NO: 2905003 - DNA, 25 bp, Homo sapien
aaataaagccctgggtatgagtact

SEQ ID NO: 2905004 - DNA, 25 bp, Homo sapien
agcttacggagggactctgcctcct

SEQ ID NO: 2905005 - DNA, 25 bp, Homo sapien
cttgagaataatttccccctggtgg

SEQ ID NO: 2905006 - DNA, 25 bp, Homo sapien
ccaggccagggcctaattttgcctt

SEQ ID NO: 2905007 - DNA, 25 bp, Homo sapien
aattttgccttggtcgctgttcttg

SEQ ID NO: 2905008 - DNA, 25 bp, Homo sapien
tggtgggctactgtggcctacccta

SEQ ID NO: 2905009 - DNA, 25 bp, Homo sapien
ggtgggagtggttagagcctggctc

SEQ ID NO: 2905010 - DNA, 25 bp, Homo sapien
gtgggagtggttagagcctggctcc

SEQ ID NO: 2905011 - DNA, 25 bp, Homo sapien
tgggagtggttagagcctggctcca

SEQ ID NO: 2905012 - DNA, 25 bp, Homo sapien
gggtgggagtggttagagcctggct

SEQ ID NO: 2905013 - DNA, 25 bp, Homo sapien
cagcctggaaagtgtatacaagcca

SEQ ID NO: 2905014 - DNA, 25 bp, Homo sapien
catcccttgttgttcgtaaacgtga

SEQ ID NO: 2905015 - DNA, 25 bp, Homo sapien
taccgcctttgtgttgtgttgccaa

SEQ ID NO: 2905016 - DNA, 25 bp, Homo sapien
aaacagaaagccgaagccagtgcac

SEQ ID NO: 2905017 - DNA, 25 bp, Homo sapien
gaatcacatctccactgcttcttga

SEQ ID NO: 2905018 - DNA, 25 bp, Homo sapien
caaaggctctataaaaacttggagt

SEQ ID NO: 2905019 - DNA, 25 bp, Homo sapien
tggtttctaaggctacgtatcgaag

SEQ ID NO: 2905020 - DNA, 25 bp, Homo sapien
ggttttgtggtccagatcctcttgg

SEQ ID NO: 2905021 - DNA, 25 bp, Homo sapien
tattttggctggtataacttatctg

SEQ ID NO: 2905022 - DNA, 25 bp, Homo sapien
gagtaaatatagtagagatggtagc

SEQ ID NO: 2905023 - DNA, 25 bp, Homo sapien
aatatagtagagatggtagctcaac

SEQ ID NO: 2905024 - DNA, 25 bp, Homo sapien
tttcttgcagacagggaattaagat

SEQ ID NO: 2905025 - DNA, 25 bp, Homo sapien
gacgaccttgccaacctagtggaga

SEQ ID NO: 2905026 - DNA, 25 bp, Homo sapien
accaggcgggtaaacatggtggaca

SEQ ID NO: 2905027 - DNA, 25 bp, Homo sapien
ggacagaaagtcagcctcttgtggt

SEQ ID NO: 2905028 - DNA, 25 bp, Homo sapien
aaacttcgcaatgaaaccaggcggg

SEQ ID NO: 2905029 - DNA, 25 bp, Homo sapien
caagtgatcacccctcttgacctcc

SEQ ID NO: 2905030 - DNA, 25 bp, Homo sapien
ctcaagtgatcacccctcttgacct

SEQ ID NO: 2905031 - DNA, 25 bp, Homo sapien
tcaagtgatcacccctcttgacctc

SEQ ID NO: 2905032 - DNA, 25 bp, Homo sapien
tgacagtggagtatttacataaact

SEQ ID NO: 2905033 - DNA, 25 bp, Homo sapien
tacataaactagctggagatttgtc

SEQ ID NO: 2905034 - DNA, 25 bp, Homo sapien
catgcagcctacacctaagaaagag

SEQ ID NO: 2905035 - DNA, 25 bp, Homo sapien
tttgaaaggagtcactacatgcagc

SEQ ID NO: 2905036 - DNA, 25 bp, Homo sapien
tacagccatcgcatttgtctgttct

SEQ ID NO: 2905037 - DNA, 25 bp, Homo sapien
caacagctgtacagccatcgcattt

SEQ ID NO: 2905038 - DNA, 25 bp, Homo sapien
tggaagatatttgggtgggatgaag

SEQ ID NO: 2905039 - DNA, 25 bp, Homo sapien
aacagagtggaagatatttgggtgg

SEQ ID NO: 2905040 - DNA, 25 bp, Homo sapien
gttgatgtgcaataacagagtaggg

SEQ ID NO: 2905041 - DNA, 25 bp, Homo sapien
gcttgccagttgatgtgcaataaca

SEQ ID NO: 2905042 - DNA, 25 bp, Homo sapien
tgccagttgatgtgcaataacagag

SEQ ID NO: 2905043 - DNA, 25 bp, Homo sapien
ggcagtgcttgccagttgatgtgca

SEQ ID NO: 2905044 - DNA, 25 bp, Homo sapien
cgttgaggtatacacgagcacagcc

SEQ ID NO: 2905045 - DNA, 25 bp, Homo sapien
tccgttgaggtatacacgagcacag

SEQ ID NO: 2905046 - DNA, 25 bp, Homo sapien
tttttccgttgaggtatacacgagc

SEQ ID NO: 2905047 - DNA, 25 bp, Homo sapien
tatatttgtggctgtccctgcaagt

SEQ ID NO: 2905048 - DNA, 25 bp, Homo sapien
cttttatctttggaggatcactgac

SEQ ID NO: 2905049 - DNA, 25 bp, Homo sapien
ttcttttatctttggaggatcactg

SEQ ID NO: 2905050 - DNA, 25 bp, Homo sapien
ctgtggcacagtgtttttcttttat

SEQ ID NO: 2905051 - DNA, 25 bp, Homo sapien
ttttcttttatctttggaggatcac

SEQ ID NO: 2905052 - DNA, 25 bp, Homo sapien
tcgaagttgatcaagaatgggccag

SEQ ID NO: 2905053 - DNA, 25 bp, Homo sapien
gagctgattctgtaactcgaagttg

SEQ ID NO: 2905054 - DNA, 25 bp, Homo sapien
ctgttcagaatgcttgtatgagaga

SEQ ID NO: 2905055 - DNA, 25 bp, Homo sapien
tatgagagagctgattctgtaactc

SEQ ID NO: 2905056 - DNA, 25 bp, Homo sapien
gaattgccggagtagagttacagcc

SEQ ID NO: 2905057 - DNA, 25 bp, Homo sapien
gggtccatagcacgagtcagctcaa

SEQ ID NO: 2905058 - DNA, 25 bp, Homo sapien
tgtgctacagcccttgggtccatag

SEQ ID NO: 2905059 - DNA, 25 bp, Homo sapien
tcctaggagtgcagttctgtgtgct

SEQ ID NO: 2905060 - DNA, 25 bp, Homo sapien
tgcttatgatgctcaagaagagcat

SEQ ID NO: 2905061 - DNA, 25 bp, Homo sapien
tccttgcttatgatgctcaagaaga

SEQ ID NO: 2905062 - DNA, 25 bp, Homo sapien
tgttctccttgcttatgatgctcaa

SEQ ID NO: 2905063 - DNA, 25 bp, Homo sapien
tgctgttctccttgcttatgatgct

SEQ ID NO: 2905064 - DNA, 25 bp, Homo sapien
accatgttatgttgatcgtggtcgt

SEQ ID NO: 2905065 - DNA, 25 bp, Homo sapien
cttcatcatccaccatgttatgttg

SEQ ID NO: 2905066 - DNA, 25 bp, Homo sapien
tatgttgatcgtggtcgtaattgtt

SEQ ID NO: 2905067 - DNA, 25 bp, Homo sapien
gttgatcgtggtcgtaattgttatc

SEQ ID NO: 2905068 - DNA, 25 bp, Homo sapien
tttgaggaacaagagcacgagagca

SEQ ID NO: 2905069 - DNA, 25 bp, Homo sapien
gaccctggccgatacgcctatataa

SEQ ID NO: 2905070 - DNA, 25 bp, Homo sapien
ttctgtcgcctgatcagaccctggc

SEQ ID NO: 2905071 - DNA, 25 bp, Homo sapien
gcaaactcgaagttagaacctctcg

SEQ ID NO: 2905072 - DNA, 25 bp, Homo sapien
gacctcctggattgcctccatcccc

SEQ ID NO: 2905073 - DNA, 25 bp, Homo sapien
ttgacctcctggattgcctccatcc

SEQ ID NO: 2905074 - DNA, 25 bp, Homo sapien
tgttgacctcctggattgcctccat

SEQ ID NO: 2905075 - DNA, 25 bp, Homo sapien
tcctaccctccactggaaaccactc

SEQ ID NO: 2905076 - DNA, 25 bp, Homo sapien
aaggagattggaggctgaccacgta

SEQ ID NO: 2905077 - DNA, 25 bp, Homo sapien
tgaccacgtagctcagtgtgcctcc

SEQ ID NO: 2905078 - DNA, 25 bp, Homo sapien
cctttatctgattggaaccacgcaa

SEQ ID NO: 2905079 - DNA, 25 bp, Homo sapien
cagccttctcctaggttgagcttta

SEQ ID NO: 2905080 - DNA, 25 bp, Homo sapien
tggattcactcctagctcgtgtagg

SEQ ID NO: 2905081 - DNA, 25 bp, Homo sapien
ttgaggtcctgtgtccaagagtgac

SEQ ID NO: 2905082 - DNA, 25 bp, Homo sapien
caggtgaatttaggagaccctccaa

SEQ ID NO: 2905083 - DNA, 25 bp, Homo sapien
tactcccttgggtcatttgaacagg

SEQ ID NO: 2905084 - DNA, 25 bp, Homo sapien
cagttactccttcctcatgaggtga

SEQ ID NO: 2905085 - DNA, 25 bp, Homo sapien
gtctgttcatacctctgggccactg

SEQ ID NO: 2905086 - DNA, 25 bp, Homo sapien
tccttggcctcgattactgcaatag

SEQ ID NO: 2905087 - DNA, 25 bp, Homo sapien
ttttctaagcgacaaggtcttggca

SEQ ID NO: 2905088 - DNA, 25 bp, Homo sapien
ccacaatgattgaaagacaagtcac

SEQ ID NO: 2905089 - DNA, 25 bp, Homo sapien
caaggataggcagataaacccgtgg

SEQ ID NO: 2905090 - DNA, 25 bp, Homo sapien
gagggttcagaagcagtctaacaca

SEQ ID NO: 2905091 - DNA, 25 bp, Homo sapien
gaggactcacatgaccagttatcca

SEQ ID NO: 2905092 - DNA, 25 bp, Homo sapien
tccacacgtggttagcagtagcaac

SEQ ID NO: 2905093 - DNA, 25 bp, Homo sapien
tatctctttggatgactgatggagc

SEQ ID NO: 2905094 - DNA, 25 bp, Homo sapien
tatccagccattaccatgtgaaaga

SEQ ID NO: 2905095 - DNA, 25 bp, Homo sapien
gaaaggaagctctattaacagcctg

SEQ ID NO: 2905096 - DNA, 25 bp, Homo sapien
ggctacagcagagaagctggactta

SEQ ID NO: 2905097 - DNA, 25 bp, Homo sapien
aggctacagcagagaagctggactt

SEQ ID NO: 2905098 - DNA, 25 bp, Homo sapien
tacagcagagaagctggacttatgc

SEQ ID NO: 2905099 - DNA, 25 bp, Homo sapien
cagcagagaagctggacttatgcat

SEQ ID NO: 2905100 - DNA, 25 bp, Homo sapien
gacaatcagagctttgttgcagaac

SEQ ID NO: 2905101 - DNA, 25 bp, Homo sapien
cgtgacaatcagagctttgttgcag

SEQ ID NO: 2905102 - DNA, 25 bp, Homo sapien
gtgacaatcagagctttgttgcaga

SEQ ID NO: 2905103 - DNA, 25 bp, Homo sapien
tgacaatcagagctttgttgcagaa

SEQ ID NO: 2905104 - DNA, 25 bp, Homo sapien
ctggatgtgtgcagtctgggccagt

SEQ ID NO: 2905105 - DNA, 25 bp, Homo sapien
ttttggagctagctggctggtgcag

SEQ ID NO: 2905106 - DNA, 25 bp, Homo sapien
tttctgggctgcatctcgttgcggg

SEQ ID NO: 2905107 - DNA, 25 bp, Homo sapien
ttgcggggatttcccgcccatcctg

SEQ ID NO: 2905108 - DNA, 25 bp, Homo sapien
caaatctctgaatattcctttagct

SEQ ID NO: 2905109 - DNA, 25 bp, Homo sapien
caggaagagtccgagcggcgggcgg

SEQ ID NO: 2905110 - DNA, 25 bp, Homo sapien
agagcaggaagagtccgagcggcgg

SEQ ID NO: 2905111 - DNA, 25 bp, Homo sapien
ctaagagcaggaagagtccgagcgg

SEQ ID NO: 2905112 - DNA, 25 bp, Homo sapien
agcaggaagagtccgagcggcgggc

SEQ ID NO: 2905113 - DNA, 25 bp, Homo sapien
gccgcgcgggccgccgtagtcagct

SEQ ID NO: 2905114 - DNA, 25 bp, Homo sapien
gcaaactccaggctccggtcgcgca

SEQ ID NO: 2905115 - DNA, 25 bp, Homo sapien
tccggtcgcgcacgggacgaactgc

SEQ ID NO: 2905116 - DNA, 25 bp, Homo sapien
ctccaggctccggtcgcgcacggga

SEQ ID NO: 2905117 - DNA, 25 bp, Homo sapien
cttgggaggttctgattactttgct

SEQ ID NO: 2905118 - DNA, 25 bp, Homo sapien
ttactttgctctcctccctagtggc

SEQ ID NO: 2905119 - DNA, 25 bp, Homo sapien
ctgattactttgctctcctccctag

SEQ ID NO: 2905120 - DNA, 25 bp, Homo sapien
gaggttctgattactttgctctcct

SEQ ID NO: 2905121 - DNA, 25 bp, Homo sapien
cattgaagccgatcacggcgtcaag

SEQ ID NO: 2905122 - DNA, 25 bp, Homo sapien
gcctccggcgaaattttgttatcca

SEQ ID NO: 2905123 - DNA, 25 bp, Homo sapien
cacttgggcctccggcgaaattttg

SEQ ID NO: 2905124 - DNA, 25 bp, Homo sapien
ccgatcacggcgtcaagttccagct

SEQ ID NO: 2905125 - DNA, 25 bp, Homo sapien
ctgtttgcactacacgtcctccgaa

SEQ ID NO: 2905126 - DNA, 25 bp, Homo sapien
attcctaaaccagccagcccaaaga

SEQ ID NO: 2905127 - DNA, 25 bp, Homo sapien
tcctgtttgcactacacgtcctccg

SEQ ID NO: 2905128 - DNA, 25 bp, Homo sapien
tcctaaaccagccagcccaaagatg

SEQ ID NO: 2905129 - DNA, 25 bp, Homo sapien
tcactaaaaacagtttcaggagaac

SEQ ID NO: 2905130 - DNA, 25 bp, Homo sapien
ttttgcttgagttggtagtttattc

SEQ ID NO: 2905131 - DNA, 25 bp, Homo sapien
attcactaaaaacagtttcaggaga

SEQ ID NO: 2905132 - DNA, 25 bp, Homo sapien
gtttgtatgcttgaatgtaattatt

SEQ ID NO: 2905133 - DNA, 25 bp, Homo sapien
gaagagcctgggacctttcatggtg

SEQ ID NO: 2905134 - DNA, 25 bp, Homo sapien
tctgccaaggtaacactactgcttc

SEQ ID NO: 2905135 - DNA, 25 bp, Homo sapien
gcaactcccgtactccaaatatctg

SEQ ID NO: 2905136 - DNA, 25 bp, Homo sapien
acctctttccacaggcaactcccgt

SEQ ID NO: 2905137 - DNA, 25 bp, Homo sapien
ggataaatcatatgctcctggtcag

SEQ ID NO: 2905138 - DNA, 25 bp, Homo sapien
aatcatatgctcctggtcaggatgg

SEQ ID NO: 2905139 - DNA, 25 bp, Homo sapien
catttgagaccagtgggcacatgtc

SEQ ID NO: 2905140 - DNA, 25 bp, Homo sapien
ggcatttgagaccagtgggcacatg

SEQ ID NO: 2905141 - DNA, 25 bp, Homo sapien
tgtactctccagacctggagatggc

SEQ ID NO: 2905142 - DNA, 25 bp, Homo sapien
tgtccggaggcgatgtactctccag

SEQ ID NO: 2905143 - DNA, 25 bp, Homo sapien
cttgaaccccatgaatgtgacttgt

SEQ ID NO: 2905144 - DNA, 25 bp, Homo sapien
ccaagcaggagacgttgttgccatg

SEQ ID NO: 2905145 - DNA, 25 bp, Homo sapien
cttccgtcatctgggcctcctagtg

SEQ ID NO: 2905146 - DNA, 25 bp, Homo sapien
catttggagaaaaggccagagcttc

SEQ ID NO: 2905147 - DNA, 25 bp, Homo sapien
gggacagccgagcaagcagctctct

SEQ ID NO: 2905148 - DNA, 25 bp, Homo sapien
agtgataccaagtacaaatcatttg

SEQ ID NO: 2905149 - DNA, 25 bp, Homo sapien
tctgcgccacctgctctgaagatac

SEQ ID NO: 2905150 - DNA, 25 bp, Homo sapien
ggtgtagccctttgccagagaaagt

SEQ ID NO: 2905151 - DNA, 25 bp, Homo sapien
cataggtaagccaaagggtgtagcc

SEQ ID NO: 2905152 - DNA, 25 bp, Homo sapien
tgccctctgccgtggcaaaaagaag

SEQ ID NO: 2905153 - DNA, 25 bp, Homo sapien
cagtcataaacatctcatcccggca

SEQ ID NO: 2905154 - DNA, 25 bp, Homo sapien
ttccagcagtcataaacatctcatc

SEQ ID NO: 2905155 - DNA, 25 bp, Homo sapien
tctctcttggctatgctccacacca

SEQ ID NO: 2905156 - DNA, 25 bp, Homo sapien
tgccaacattgaggccggctgcagg

SEQ ID NO: 2905157 - DNA, 25 bp, Homo sapien
tatccaggactaaagacgtgttccc

SEQ ID NO: 2905158 - DNA, 25 bp, Homo sapien
aaactatgatgtaaggtatttatcc

SEQ ID NO: 2905159 - DNA, 25 bp, Homo sapien
caatttatgagttctgaaaactccg

SEQ ID NO: 2905160 - DNA, 25 bp, Homo sapien
tgaaaactccgaacgcagacacata

SEQ ID NO: 2905161 - DNA, 25 bp, Homo sapien
gtcctgtttggcactcagttggcca

SEQ ID NO: 2905162 - DNA, 25 bp, Homo sapien
cctgtttggcactcagttggccaga

SEQ ID NO: 2905163 - DNA, 25 bp, Homo sapien
caattcccatactcgaattgtccca

SEQ ID NO: 2905164 - DNA, 25 bp, Homo sapien
ttctatttggaagatccaattccca

SEQ ID NO: 2905165 - DNA, 25 bp, Homo sapien
actgctaacaggaacgtgtgctaat

SEQ ID NO: 2905166 - DNA, 25 bp, Homo sapien
caggaacgtgtgctaattgttactt

SEQ ID NO: 2905167 - DNA, 25 bp, Homo sapien
cctatgtctataccccactttccta

SEQ ID NO: 2905168 - DNA, 25 bp, Homo sapien
ccaaagtgagcttcttcaatcaaca

SEQ ID NO: 2905169 - DNA, 25 bp, Homo sapien
ctgtgctgtgtctaggtgactcttc

SEQ ID NO: 2905170 - DNA, 25 bp, Homo sapien
gctgtgtctaggtgactcttccctg

SEQ ID NO: 2905171 - DNA, 25 bp, Homo sapien
tgtgtctaggtgactcttccctgac

SEQ ID NO: 2905172 - DNA, 25 bp, Homo sapien
tgtctaggtgactcttccctgactc

SEQ ID NO: 2905173 - DNA, 25 bp, Homo sapien
caaactgaatttgtccttcgcaggc

SEQ ID NO: 2905174 - DNA, 25 bp, Homo sapien
ttttagaatatctccagtcgtggtg

SEQ ID NO: 2905175 - DNA, 25 bp, Homo sapien
gaatttgtccttcgcaggcccaaca

SEQ ID NO: 2905176 - DNA, 25 bp, Homo sapien
gccaaggtagaaaaagctatcatca

SEQ ID NO: 2905177 - DNA, 25 bp, Homo sapien
gccagggcttttacagaagaccagc

SEQ ID NO: 2905178 - DNA, 25 bp, Homo sapien
ggcttttacagaagaccagcagtcc

SEQ ID NO: 2905179 - DNA, 25 bp, Homo sapien
cagggcttttacagaagaccagcag

SEQ ID NO: 2905180 - DNA, 25 bp, Homo sapien
aagaccagcagtccggctccagagc

SEQ ID NO: 2905181 - DNA, 25 bp, Homo sapien
tctttgaaatccgtgaagctgacac

SEQ ID NO: 2905182 - DNA, 25 bp, Homo sapien
gaagtgtgatagaagtgatgccgcc

SEQ ID NO: 2905183 - DNA, 25 bp, Homo sapien
tctgttcctacgagaaactggtgtc

SEQ ID NO: 2905184 - DNA, 25 bp, Homo sapien
caaagtgacaagtcgctatgagcgt

SEQ ID NO: 2905185 - DNA, 25 bp, Homo sapien
attaaatgccctggcacactgcatc

SEQ ID NO: 2905186 - DNA, 25 bp, Homo sapien
aaattaaatgccctggcacactgca

SEQ ID NO: 2905187 - DNA, 25 bp, Homo sapien
ataaaattaaatgccctggcacact

SEQ ID NO: 2905188 - DNA, 25 bp, Homo sapien
tcataaaattaaatgccctggcaca

SEQ ID NO: 2905189 - DNA, 25 bp, Homo sapien
aattaacagcacctaataacagagc

SEQ ID NO: 2905190 - DNA, 25 bp, Homo sapien
gaagaagatctgtatgacactaact

SEQ ID NO: 2905191 - DNA, 25 bp, Homo sapien
taatctatgagactagttcaggtag

SEQ ID NO: 2905192 - DNA, 25 bp, Homo sapien
tcattgcctgagaccttaacatttt

SEQ ID NO: 2905193 - DNA, 25 bp, Homo sapien
catctgtggaccatcttttgtagtc

SEQ ID NO: 2905194 - DNA, 25 bp, Homo sapien
gccttgatgattgtcttacagacca

SEQ ID NO: 2905195 - DNA, 25 bp, Homo sapien
actactttattgaggcctgatatgg

SEQ ID NO: 2905196 - DNA, 25 bp, Homo sapien
ccaagaaaggaggatcccatgactt

SEQ ID NO: 2905197 - DNA, 25 bp, Homo sapien
ttgggcacggtgatccgcagcagct

SEQ ID NO: 2905198 - DNA, 25 bp, Homo sapien
aagtcgatgccgtggcaggtcatgt

SEQ ID NO: 2905199 - DNA, 25 bp, Homo sapien
gtcatgttgggcacggtgatccgca

SEQ ID NO: 2905200 - DNA, 25 bp, Homo sapien
gaaatgatgcttttgccgtccctca

SEQ ID NO: 2905201 - DNA, 25 bp, Homo sapien
cggtgacgccgatcctgtgagcatt

SEQ ID NO: 2905202 - DNA, 25 bp, Homo sapien
tttacagtcactggtggtggcgatg

SEQ ID NO: 2905203 - DNA, 25 bp, Homo sapien
cgccactgatgacccttttacagtc

SEQ ID NO: 2905204 - DNA, 25 bp, Homo sapien
taatgacatacatcagtcggcctgt

SEQ ID NO: 2905205 - DNA, 25 bp, Homo sapien
gcacaggatcttgatccacacttgg

SEQ ID NO: 2905206 - DNA, 25 bp, Homo sapien
gagcacaggatcttgatccacactt

SEQ ID NO: 2905207 - DNA, 25 bp, Homo sapien
agccacagagcacaggatcttgatc

SEQ ID NO: 2905208 - DNA, 25 bp, Homo sapien
cacagagcacaggatcttgatccac

SEQ ID NO: 2905209 - DNA, 25 bp, Homo sapien
tggcggtgacacactcctcgttgtt

SEQ ID NO: 2905210 - DNA, 25 bp, Homo sapien
ggtcccaaatgatacaagtcccatc

SEQ ID NO: 2905211 - DNA, 25 bp, Homo sapien
cagcttctgggtctgacagcctatc

SEQ ID NO: 2905212 - DNA, 25 bp, Homo sapien
aagtcccatcggtgctggcggtgac

SEQ ID NO: 2905213 - DNA, 25 bp, Homo sapien
ggaataaggtgttggctagtatcat

SEQ ID NO: 2905214 - DNA, 25 bp, Homo sapien
acacacactggaataaggtgttggc

SEQ ID NO: 2905215 - DNA, 25 bp, Homo sapien
aactcctcagggtgatagcacacac

SEQ ID NO: 2905216 - DNA, 25 bp, Homo sapien
tttctgtctgttccgctggtgatga

SEQ ID NO: 2905217 - DNA, 25 bp, Homo sapien
caccccttcctgtgtgatatccatg

SEQ ID NO: 2905218 - DNA, 25 bp, Homo sapien
gaaccttccaattctctgattactg

SEQ ID NO: 2905219 - DNA, 25 bp, Homo sapien
tatcgacccagacagggaaccttcc

SEQ ID NO: 2905220 - DNA, 25 bp, Homo sapien
tatccatgccatttatcgacccaga

SEQ ID NO: 2905221 - DNA, 25 bp, Homo sapien
aaaaagataaacacgtatatggcat

SEQ ID NO: 2905222 - DNA, 25 bp, Homo sapien
aaaagataaacacgtatatggcatt

SEQ ID NO: 2905223 - DNA, 25 bp, Homo sapien
aaagataaacacgtatatggcattg

SEQ ID NO: 2905224 - DNA, 25 bp, Homo sapien
gaaaaagataaacacgtatatggca

SEQ ID NO: 2905225 - DNA, 25 bp, Homo sapien
tcctggacttatgcggatgcgtgtg

SEQ ID NO: 2905226 - DNA, 25 bp, Homo sapien
gtgagtcacttcaccctcattataa

SEQ ID NO: 2905227 - DNA, 25 bp, Homo sapien
taatcccaaactttgaccagatggt

SEQ ID NO: 2905228 - DNA, 25 bp, Homo sapien
gtgtcccaccccaacgtgagtcact

SEQ ID NO: 2905229 - DNA, 25 bp, Homo sapien
cttccatcgcaaaatggctccatcg

SEQ ID NO: 2905230 - DNA, 25 bp, Homo sapien
tatatgggtacttccatcgcaaaat

SEQ ID NO: 2905231 - DNA, 25 bp, Homo sapien
tgggtacttccatcgcaaaatggct

SEQ ID NO: 2905232 - DNA, 25 bp, Homo sapien
gtacttccatcgcaaaatggctcca

SEQ ID NO: 2905233 - DNA, 25 bp, Homo sapien
gactgcgtgcaacgccaaggctcag

SEQ ID NO: 2905234 - DNA, 25 bp, Homo sapien
agactagtgttggagttatctaaac

SEQ ID NO: 2905235 - DNA, 25 bp, Homo sapien
tatctaaactcagtcttcaacagga

SEQ ID NO: 2905236 - DNA, 25 bp, Homo sapien
gaaatgaagactagtgttggagtta

SEQ ID NO: 2905237 - DNA, 25 bp, Homo sapien
aaaagttctaattagagtctgcaca

SEQ ID NO: 2905238 - DNA, 25 bp, Homo sapien
taaaagttctaattagagtctgcac

SEQ ID NO: 2905239 - DNA, 25 bp, Homo sapien
gttctaattagagtctgcacaaatt

SEQ ID NO: 2905240 - DNA, 25 bp, Homo sapien
aagttctaattagagtctgcacaaa

SEQ ID NO: 2905241 - DNA, 25 bp, Homo sapien
ttctgaaagcgcctagtaaatggta

SEQ ID NO: 2905242 - DNA, 25 bp, Homo sapien
tcctgttcctcgagcagccttcaag

SEQ ID NO: 2905243 - DNA, 25 bp, Homo sapien
gggtttcgccgctgctcctgttcct

SEQ ID NO: 2905244 - DNA, 25 bp, Homo sapien
ccttcaagcagtggaaattacggag

SEQ ID NO: 2905245 - DNA, 25 bp, Homo sapien
gggcgcgagcggtccccctcctgcc

SEQ ID NO: 2905246 - DNA, 25 bp, Homo sapien
gcggtgagtccccggggcgtgagcg

SEQ ID NO: 2905247 - DNA, 25 bp, Homo sapien
ggcggtgagtccccggggcgtgagc

SEQ ID NO: 2905248 - DNA, 25 bp, Homo sapien
gagcggtccccctcctgccgcgtcc

SEQ ID NO: 2905249 - DNA, 25 bp, Homo sapien
gccgcgccccatcgccggcggggag

SEQ ID NO: 2905250 - DNA, 25 bp, Homo sapien
cgcgccccatcgccggcggggagct

SEQ ID NO: 2905251 - DNA, 25 bp, Homo sapien
ggccgcgccccatcgccggcgggga

SEQ ID NO: 2905252 - DNA, 25 bp, Homo sapien
cggccgcgccccatcgccggcgggg

SEQ ID NO: 2905253 - DNA, 25 bp, Homo sapien
ccgcgttcatgaaacaggtgttgcc

SEQ ID NO: 2905254 - DNA, 25 bp, Homo sapien
caggtgttgccgtggttcttcaagc

SEQ ID NO: 2905255 - DNA, 25 bp, Homo sapien
tgagacactgcaccaccgcgttcat

SEQ ID NO: 2905256 - DNA, 25 bp, Homo sapien
tgtattcgcgagtccagagcgcgcg

SEQ ID NO: 2905257 - DNA, 25 bp, Homo sapien
cagcaacccgagtaagtagaccgtg

SEQ ID NO: 2905258 - DNA, 25 bp, Homo sapien
tctcgggctgaaactcaagagcggt

SEQ ID NO: 2905259 - DNA, 25 bp, Homo sapien
caagcccgtgctcatacattgtagg

SEQ ID NO: 2905260 - DNA, 25 bp, Homo sapien
cctaggtcttacgtgatctggcgaa

SEQ ID NO: 2905261 - DNA, 25 bp, Homo sapien
gggctggcactgtgttctacataga

SEQ ID NO: 2905262 - DNA, 25 bp, Homo sapien
accgcgctcggccaatttcgaagtg

SEQ ID NO: 2905263 - DNA, 25 bp, Homo sapien
cattgctgtggtaactggatggaaa

SEQ ID NO: 2905264 - DNA, 25 bp, Homo sapien
tgttttcaaactactgcagccctct

SEQ ID NO: 2905265 - DNA, 25 bp, Homo sapien
tgggaattgccttggaactgagagc

SEQ ID NO: 2905266 - DNA, 25 bp, Homo sapien
ccaggtcctcatgtacacgatccag

SEQ ID NO: 2905267 - DNA, 25 bp, Homo sapien
ccagcaaccagagcaggaattccag

SEQ ID NO: 2905268 - DNA, 25 bp, Homo sapien
aattccagggcgtcgtgctgggaat

SEQ ID NO: 2905269 - DNA, 25 bp, Homo sapien
tcagaggttttagtggcttcaggcg

SEQ ID NO: 2905270 - DNA, 25 bp, Homo sapien
agaggttttagtggcttcaggcgga

SEQ ID NO: 2905271 - DNA, 25 bp, Homo sapien
tgagctgatggtgacaggcagttct

SEQ ID NO: 2905272 - DNA, 25 bp, Homo sapien
aggttttagtggcttcaggcggaag

SEQ ID NO: 2905273 - DNA, 25 bp, Homo sapien
tgcttgaaagtggctttgcacaaag

SEQ ID NO: 2905274 - DNA, 25 bp, Homo sapien
attgtgcttgaaagtggctttgcac

SEQ ID NO: 2905275 - DNA, 25 bp, Homo sapien
tgtgcttgaaagtggctttgcacaa

SEQ ID NO: 2905276 - DNA, 25 bp, Homo sapien
ctatattgtgcttgaaagtggcttt

SEQ ID NO: 2905277 - DNA, 25 bp, Homo sapien
ttggttctagcaccctctgcgttgg

SEQ ID NO: 2905278 - DNA, 25 bp, Homo sapien
tatttttggttctagcaccctctgc

SEQ ID NO: 2905279 - DNA, 25 bp, Homo sapien
tctccttatttttggttctagcacc

SEQ ID NO: 2905280 - DNA, 25 bp, Homo sapien
ttctagcaccctctgcgttgggcac

SEQ ID NO: 2905281 - DNA, 25 bp, Homo sapien
tgccagttcatctttagcgtgaaca

SEQ ID NO: 2905282 - DNA, 25 bp, Homo sapien
agcaggcacaaagctggcattttta

SEQ ID NO: 2905283 - DNA, 25 bp, Homo sapien
ttcatctttagcgtgaacacctcgc

SEQ ID NO: 2905284 - DNA, 25 bp, Homo sapien
tagcgtgaacacctcgcctcttact

SEQ ID NO: 2905285 - DNA, 25 bp, Homo sapien
ctttccaagatctgttctgaggaag

SEQ ID NO: 2905286 - DNA, 25 bp, Homo sapien
tccaagatctgttctgaggaagcct

SEQ ID NO: 2905287 - DNA, 25 bp, Homo sapien
ttccaagatctgttctgaggaagcc

SEQ ID NO: 2905288 - DNA, 25 bp, Homo sapien
ccaagatctgttctgaggaagcctt

SEQ ID NO: 2905289 - DNA, 25 bp, Homo sapien
gtttcaggcagtggggacaagtcaa

SEQ ID NO: 2905290 - DNA, 25 bp, Homo sapien
caggcagtggggacaagtcaaggaa

SEQ ID NO: 2905291 - DNA, 25 bp, Homo sapien
ctgtttcaggcagtggggacaagtc

SEQ ID NO: 2905292 - DNA, 25 bp, Homo sapien
ggcagtggggacaagtcaaggaaga

SEQ ID NO: 2905293 - DNA, 25 bp, Homo sapien
cgtctggcgcaaggggataggtagg

SEQ ID NO: 2905294 - DNA, 25 bp, Homo sapien
gcgcaaggggataggtagggacaca

SEQ ID NO: 2905295 - DNA, 25 bp, Homo sapien
gggataggtagggacacacacagga

SEQ ID NO: 2905296 - DNA, 25 bp, Homo sapien
caaggggataggtagggacacacac

SEQ ID NO: 2905297 - DNA, 25 bp, Homo sapien
tcatctgcagggacgcctccttcct

SEQ ID NO: 2905298 - DNA, 25 bp, Homo sapien
gcacggccaggccaacccgcaggaa

SEQ ID NO: 2905299 - DNA, 25 bp, Homo sapien
actgtgctgaggatcggcacggcca

SEQ ID NO: 2905300 - DNA, 25 bp, Homo sapien
tcttagaggggaagaccaaggtgac

SEQ ID NO: 2905301 - DNA, 25 bp, Homo sapien
tgcgatggtattcaggtcctcttca

SEQ ID NO: 2905302 - DNA, 25 bp, Homo sapien
tcatcaaagaaagaccgctggaatc

SEQ ID NO: 2905303 - DNA, 25 bp, Homo sapien
cacattatctccctctgcgatggta

SEQ ID NO: 2905304 - DNA, 25 bp, Homo sapien
tgagggaggaacttgaaaggcatac

SEQ ID NO: 2905305 - DNA, 25 bp, Homo sapien
caaaatgtggggccagggcgtagga

SEQ ID NO: 2905306 - DNA, 25 bp, Homo sapien
aatgtggggccagggcgtaggaatc

SEQ ID NO: 2905307 - DNA, 25 bp, Homo sapien
ctaggctggccaaaatgtggggcca

SEQ ID NO: 2905308 - DNA, 25 bp, Homo sapien
tgtggggccagggcgtaggaatcat

SEQ ID NO: 2905309 - DNA, 25 bp, Homo sapien
gaggattagcaccttgctctcactg

SEQ ID NO: 2905310 - DNA, 25 bp, Homo sapien
agttacagaagaggattagcacctt

SEQ ID NO: 2905311 - DNA, 25 bp, Homo sapien
agagagggagaatcgctggccctca

SEQ ID NO: 2905312 - DNA, 25 bp, Homo sapien
gaggccgacagacccagtggatgag

SEQ ID NO: 2905313 - DNA, 25 bp, Homo sapien
tttcttatagccagtttcttttagc

SEQ ID NO: 2905314 - DNA, 25 bp, Homo sapien
ctggacagacaaccaaattatcacc

SEQ ID NO: 2905315 - DNA, 25 bp, Homo sapien
tcttatagccagtttcttttagcac

SEQ ID NO: 2905316 - DNA, 25 bp, Homo sapien
gacagacaaccaaattatcacctct

SEQ ID NO: 2905317 - DNA, 25 bp, Homo sapien
gcagtgagctcatggtgtacagaat

SEQ ID NO: 2905318 - DNA, 25 bp, Homo sapien
ccaacatagtaagcgcacagcagtg

SEQ ID NO: 2905319 - DNA, 25 bp, Homo sapien
tactcaaaatgaccagctagctggc

SEQ ID NO: 2905320 - DNA, 25 bp, Homo sapien
ggatggtatccatgtcccaacatag

SEQ ID NO: 2905321 - DNA, 25 bp, Homo sapien
tggcggaccttgctgaggatagact

SEQ ID NO: 2905322 - DNA, 25 bp, Homo sapien
accttgctgaggatagactgctgga

SEQ ID NO: 2905323 - DNA, 25 bp, Homo sapien
cactcttcataagatggcggacctt

SEQ ID NO: 2905324 - DNA, 25 bp, Homo sapien
taagatggcggaccttgctgaggat

SEQ ID NO: 2905325 - DNA, 25 bp, Homo sapien
catatttaacggaagatgcctctta

SEQ ID NO: 2905326 - DNA, 25 bp, Homo sapien
tataccctgtaatgcagtgatctaa

SEQ ID NO: 2905327 - DNA, 25 bp, Homo sapien
taagccacataaagagatagcacct

SEQ ID NO: 2905328 - DNA, 25 bp, Homo sapien
cagatactggtacatgtaatggaac

SEQ ID NO: 2905329 - DNA, 25 bp, Homo sapien
gacatggatcattacgtagccccta

SEQ ID NO: 2905330 - DNA, 25 bp, Homo sapien
ttacgtagcccctatattgatttaa

SEQ ID NO: 2905331 - DNA, 25 bp, Homo sapien
ggatcattacgtagcccctatattg

SEQ ID NO: 2905332 - DNA, 25 bp, Homo sapien
aacagacatggatcattacgtagcc

SEQ ID NO: 2905333 - DNA, 25 bp, Homo sapien
gagacaaatagctgcaggccacaga

SEQ ID NO: 2905334 - DNA, 25 bp, Homo sapien
gggccgactgtccttcggagacaaa

SEQ ID NO: 2905335 - DNA, 25 bp, Homo sapien
acacggatggagaacagagacccca

SEQ ID NO: 2905336 - DNA, 25 bp, Homo sapien
acagagagtcccacaacacggatgg

SEQ ID NO: 2905337 - DNA, 25 bp, Homo sapien
tccttgacagagctatcccactcca

SEQ ID NO: 2905338 - DNA, 25 bp, Homo sapien
cgccagcttgacatgtggagggcct

SEQ ID NO: 2905339 - DNA, 25 bp, Homo sapien
ttgacatgtggagggcctcctggcc

SEQ ID NO: 2905340 - DNA, 25 bp, Homo sapien
tccaccgccagcttgacatgtggag

SEQ ID NO: 2905341 - DNA, 25 bp, Homo sapien
cctgcgctcgctcctcctggaggct

SEQ ID NO: 2905342 - DNA, 25 bp, Homo sapien
ctcgctcctcctggaggctcccgaa

SEQ ID NO: 2905343 - DNA, 25 bp, Homo sapien
gctcctcctggaggctcccgaacag

SEQ ID NO: 2905344 - DNA, 25 bp, Homo sapien
ctcctcctggaggctcccgaacagg

SEQ ID NO: 2905345 - DNA, 25 bp, Homo sapien
cttggtgtagaactgaaaacattca

SEQ ID NO: 2905346 - DNA, 25 bp, Homo sapien
tgctgctgccacacactgtcggcat

SEQ ID NO: 2905347 - DNA, 25 bp, Homo sapien
tgaaaacattcatccaaggtacagc

SEQ ID NO: 2905348 - DNA, 25 bp, Homo sapien
ccaaggtacagctgtgctgctgatg

SEQ ID NO: 2905349 - DNA, 25 bp, Homo sapien
aggcagccagcccccttcccggccg

SEQ ID NO: 2905350 - DNA, 25 bp, Homo sapien
caaaggcagccagcccccttcccgg

SEQ ID NO: 2905351 - DNA, 25 bp, Homo sapien
cagcccccttcccggccggggcatg

SEQ ID NO: 2905352 - DNA, 25 bp, Homo sapien
tgaggcccccgcagcacgtggccaa

SEQ ID NO: 2905353 - DNA, 25 bp, Homo sapien
ctggaaagcaaaccacccggactgt

SEQ ID NO: 2905354 - DNA, 25 bp, Homo sapien
ggaaagcaaaccacccggactgtga

SEQ ID NO: 2905355 - DNA, 25 bp, Homo sapien
aagcaaaccacccggactgtgaggc

SEQ ID NO: 2905356 - DNA, 25 bp, Homo sapien
ggcagtgaggacacttccaggcgtc

SEQ ID NO: 2905357 - DNA, 25 bp, Homo sapien
gtgaggacacttccaggcgtcatcc

SEQ ID NO: 2905358 - DNA, 25 bp, Homo sapien
gaggacacttccaggcgtcatcctg

SEQ ID NO: 2905359 - DNA, 25 bp, Homo sapien
cagtgaggacacttccaggcgtcat

SEQ ID NO: 2905360 - DNA, 25 bp, Homo sapien
tcgtacaggaagtccagcgggtaac

SEQ ID NO: 2905361 - DNA, 25 bp, Homo sapien
ccatggtggttgcagacggcataca

SEQ ID NO: 2905362 - DNA, 25 bp, Homo sapien
ggatgtcaggcagcgtccacaaact

SEQ ID NO: 2905363 - DNA, 25 bp, Homo sapien
gagagcggaaacttcaccagcgtgg

SEQ ID NO: 2905364 - DNA, 25 bp, Homo sapien
aatgcaaactcccatccgtggccta

SEQ ID NO: 2905365 - DNA, 25 bp, Homo sapien
tcagtcgccctttcaaaatgtcagg

SEQ ID NO: 2905366 - DNA, 25 bp, Homo sapien
caagccagccacctaggagttcatc

SEQ ID NO: 2905367 - DNA, 25 bp, Homo sapien
tccatacagcagagcaactagtttg

SEQ ID NO: 2905368 - DNA, 25 bp, Homo sapien
ctgagttattggagccccaaaaggt

SEQ ID NO: 2905369 - DNA, 25 bp, Homo sapien
tgagttattggagccccaaaaggta

SEQ ID NO: 2905370 - DNA, 25 bp, Homo sapien
ggccatccagagagttccggcagta

SEQ ID NO: 2905371 - DNA, 25 bp, Homo sapien
tgttgacctcatcttctcgaagcgg

SEQ ID NO: 2905372 - DNA, 25 bp, Homo sapien
ccagggagggatgctgttccgcttc

SEQ ID NO: 2905373 - DNA, 25 bp, Homo sapien
gaacaggatataagcccctctggtg

SEQ ID NO: 2905374 - DNA, 25 bp, Homo sapien
ccagtgatcagacagggaggagctg

SEQ ID NO: 2905375 - DNA, 25 bp, Homo sapien
tgttggtgaagatgggagagtcagg

SEQ ID NO: 2905376 - DNA, 25 bp, Homo sapien
tgaagatgggagagtcaggaacctg

SEQ ID NO: 2905377 - DNA, 25 bp, Homo sapien
cccgagccgtaagagccagtgatca

SEQ ID NO: 2905378 - DNA, 25 bp, Homo sapien
aggccagatttctccaggtcagacc

SEQ ID NO: 2905379 - DNA, 25 bp, Homo sapien
cacaaggctagcctccacaacagat

SEQ ID NO: 2905380 - DNA, 25 bp, Homo sapien
ggctagcctccacaacagattccag

SEQ ID NO: 2905381 - DNA, 25 bp, Homo sapien
agggtgctccccttgatgaccaggc

SEQ ID NO: 2905382 - DNA, 25 bp, Homo sapien
atgcttctgcctttcacgccccgta

SEQ ID NO: 2905383 - DNA, 25 bp, Homo sapien
cttctgcctttcacgccccgtacca

SEQ ID NO: 2905384 - DNA, 25 bp, Homo sapien
ctaatgcttctgcctttcacgcccc

SEQ ID NO: 2905385 - DNA, 25 bp, Homo sapien
ttctgcctttcacgccccgtaccaa

SEQ ID NO: 2905386 - DNA, 25 bp, Homo sapien
catggtcttgaatggtccctgcttg

SEQ ID NO: 2905387 - DNA, 25 bp, Homo sapien
tgcccgtcaacagcgacacaatgga

SEQ ID NO: 2905388 - DNA, 25 bp, Homo sapien
ggacctcggcgatgctgacttctca

SEQ ID NO: 2905389 - DNA, 25 bp, Homo sapien
ccaccatcttcgctgttagcaggaa

SEQ ID NO: 2905390 - DNA, 25 bp, Homo sapien
tgggttgagccgagggacagggcac

SEQ ID NO: 2905391 - DNA, 25 bp, Homo sapien
cagtggttgggttgagccgagggac

SEQ ID NO: 2905392 - DNA, 25 bp, Homo sapien
tgctgtgtttggaccatctgagttt

SEQ ID NO: 2905393 - DNA, 25 bp, Homo sapien
tccttgctgtgtttggaccatctga

SEQ ID NO: 2905394 - DNA, 25 bp, Homo sapien
tctggccctccggtcgagctggttt

SEQ ID NO: 2905395 - DNA, 25 bp, Homo sapien
cagtgagaggcaggtcaaactttct

SEQ ID NO: 2905396 - DNA, 25 bp, Homo sapien
tccggtcgagctggtttctcatgct

SEQ ID NO: 2905397 - DNA, 25 bp, Homo sapien
ctccactgaaggcatcacagtgaga

SEQ ID NO: 2905398 - DNA, 25 bp, Homo sapien
ggtgcctcggcgactgtctttgctg

SEQ ID NO: 2905399 - DNA, 25 bp, Homo sapien
tctgtctagctcagaggtgcctcgg

SEQ ID NO: 2905400 - DNA, 25 bp, Homo sapien
ccgaaacacggacctcagaagggtg

SEQ ID NO: 2905401 - DNA, 25 bp, Homo sapien
tgtttccagagaatcccatataggg

SEQ ID NO: 2905402 - DNA, 25 bp, Homo sapien
tgtggagagacctctgccctctcat

SEQ ID NO: 2905403 - DNA, 25 bp, Homo sapien
agagacctctgccctctcattcctc

SEQ ID NO: 2905404 - DNA, 25 bp, Homo sapien
acctgtggagagacctctgccctct

SEQ ID NO: 2905405 - DNA, 25 bp, Homo sapien
gggagacggggggcacctgtggaga

SEQ ID NO: 2905406 - DNA, 25 bp, Homo sapien
aagagtgtgatatttgactctctga

SEQ ID NO: 2905407 - DNA, 25 bp, Homo sapien
aaggtgccataagaagcctgctccc

SEQ ID NO: 2905408 - DNA, 25 bp, Homo sapien
ctgctggctttacgagggaggcgga

SEQ ID NO: 2905409 - DNA, 25 bp, Homo sapien
gaacagtcctttgtgacatgcccag

SEQ ID NO: 2905410 - DNA, 25 bp, Homo sapien
gagctgcctacagttgcttggcaaa

SEQ ID NO: 2905411 - DNA, 25 bp, Homo sapien
gccagcgtcacacaatactgacacg

SEQ ID NO: 2905412 - DNA, 25 bp, Homo sapien
cctacagttgcttggcaaagtccca

SEQ ID NO: 2905413 - DNA, 25 bp, Homo sapien
tcaacatgagctgcctacagttgct

SEQ ID NO: 2905414 - DNA, 25 bp, Homo sapien
tagagattacaagacaacgggtttc

SEQ ID NO: 2905415 - DNA, 25 bp, Homo sapien
gcatcctctagtggccaaactgtag

SEQ ID NO: 2905416 - DNA, 25 bp, Homo sapien
caatgatgcaggaaggttttcgacc

SEQ ID NO: 2905417 - DNA, 25 bp, Homo sapien
cgaccttgggttatatggaccttgg

SEQ ID NO: 2905418 - DNA, 25 bp, Homo sapien
catttatcagacttgaataattcag

SEQ ID NO: 2905419 - DNA, 25 bp, Homo sapien
taactactttctgatagcaatagca

SEQ ID NO: 2905420 - DNA, 25 bp, Homo sapien
gcaacgaaccaagtttactcagcag

SEQ ID NO: 2905421 - DNA, 25 bp, Homo sapien
tgatagcaatagcaacgaaccaagt

SEQ ID NO: 2905422 - DNA, 25 bp, Homo sapien
tgaagagccttgtgttgacggtgtc

SEQ ID NO: 2905423 - DNA, 25 bp, Homo sapien
ccctgtttcaggtgtggatgcggat

SEQ ID NO: 2905424 - DNA, 25 bp, Homo sapien
ggtgtcttgcccagcgtcctcagtc

SEQ ID NO: 2905425 - DNA, 25 bp, Homo sapien
tggatgcggatgtctggttttcccc

SEQ ID NO: 2905426 - DNA, 25 bp, Homo sapien
ctaatagaagccctactccgagatt

SEQ ID NO: 2905427 - DNA, 25 bp, Homo sapien
gccctactccgagattcttttatct

SEQ ID NO: 2905428 - DNA, 25 bp, Homo sapien
tagaagccctactccgagattcttt

SEQ ID NO: 2905429 - DNA, 25 bp, Homo sapien
tatctttagaagaatcctgaaggaa

SEQ ID NO: 2905430 - DNA, 25 bp, Homo sapien
ttgattgagttgtttttatcctgac

SEQ ID NO: 2905431 - DNA, 25 bp, Homo sapien
acatctgtttctggcgtgacctctg

SEQ ID NO: 2905432 - DNA, 25 bp, Homo sapien
caactgtgtccttccacgggagtca

SEQ ID NO: 2905433 - DNA, 25 bp, Homo sapien
tcaggagcattcagcggacatctgt

SEQ ID NO: 2905434 - DNA, 25 bp, Homo sapien
caccaacaagggcagtcttgctcat

SEQ ID NO: 2905435 - DNA, 25 bp, Homo sapien
ttccatgcacgaggaagtatatggg

SEQ ID NO: 2905436 - DNA, 25 bp, Homo sapien
gaggcccttccatgcacgaggaagt

SEQ ID NO: 2905437 - DNA, 25 bp, Homo sapien
agccaccaacaagggcagtcttgct

SEQ ID NO: 2905438 - DNA, 25 bp, Homo sapien
ctgttcaggagcactgatggggatg

SEQ ID NO: 2905439 - DNA, 25 bp, Homo sapien
tgttcaggagcactgatggggatga

SEQ ID NO: 2905440 - DNA, 25 bp, Homo sapien
aggagcactgatggggatgatgcac

SEQ ID NO: 2905441 - DNA, 25 bp, Homo sapien
tcaggagcactgatggggatgatgc

SEQ ID NO: 2905442 - DNA, 25 bp, Homo sapien
tccactggacaatccaaaaacaaga

SEQ ID NO: 2905443 - DNA, 25 bp, Homo sapien
ctccaaggaatggtgaggccattcc

SEQ ID NO: 2905444 - DNA, 25 bp, Homo sapien
aacctgtattgcctctccactggac

SEQ ID NO: 2905445 - DNA, 25 bp, Homo sapien
cccctgagtcaaacctgtattgcct

SEQ ID NO: 2905446 - DNA, 25 bp, Homo sapien
tcccttgggcccaggaagaatcttc

SEQ ID NO: 2905447 - DNA, 25 bp, Homo sapien
cccttgggcccaggaagaatcttca

SEQ ID NO: 2905448 - DNA, 25 bp, Homo sapien
ccttgggcccaggaagaatcttcag

SEQ ID NO: 2905449 - DNA, 25 bp, Homo sapien
cttgggcccaggaagaatcttcagt

SEQ ID NO: 2905450 - DNA, 25 bp, Homo sapien
ctgtttgttgccgaatgagtcctgg

SEQ ID NO: 2905451 - DNA, 25 bp, Homo sapien
gccgaatgagtcctggatgccaaaa

SEQ ID NO: 2905452 - DNA, 25 bp, Homo sapien
tgttgccgaatgagtcctggatgcc

SEQ ID NO: 2905453 - DNA, 25 bp, Homo sapien
aaaatgggtgttgttcagaatgttt

SEQ ID NO: 2905454 - DNA, 25 bp, Homo sapien
gcaaaatctagccactcgtgtcaca

SEQ ID NO: 2905455 - DNA, 25 bp, Homo sapien
ctgaaggccagtaaggcaaaatcta

SEQ ID NO: 2905456 - DNA, 25 bp, Homo sapien
ctgttttaagggcttgatctgtatt

SEQ ID NO: 2905457 - DNA, 25 bp, Homo sapien
tcgtgtcacatcctgagtgcacacg

SEQ ID NO: 2905458 - DNA, 25 bp, Homo sapien
gaagaaagccagtggtcagtcagac

SEQ ID NO: 2905459 - DNA, 25 bp, Homo sapien
cagaaggcaactggtcactgaggct

SEQ ID NO: 2905460 - DNA, 25 bp, Homo sapien
tgctatatcctctgagctcacaagg

SEQ ID NO: 2905461 - DNA, 25 bp, Homo sapien
tgaggctcaagtcaaaaaccattcc

SEQ ID NO: 2905462 - DNA, 25 bp, Homo sapien
tcctcgtgcaccttcacaagtaggg

SEQ ID NO: 2905463 - DNA, 25 bp, Homo sapien
caagtaggggtacatctctctagcc

SEQ ID NO: 2905464 - DNA, 25 bp, Homo sapien
gccgtccaagatgcaccgcaggcag

SEQ ID NO: 2905465 - DNA, 25 bp, Homo sapien
cttcctcgtgcaccttcacaagtag

SEQ ID NO: 2905466 - DNA, 25 bp, Homo sapien
gggcagctcgtggacgccaggcagg

SEQ ID NO: 2905467 - DNA, 25 bp, Homo sapien
ctgccctgctcgatcccagcttcat

SEQ ID NO: 2905468 - DNA, 25 bp, Homo sapien
ctcgtggacgccaggcaggagtccc

SEQ ID NO: 2905469 - DNA, 25 bp, Homo sapien
cttgatggaaaccagcaggaccaga

SEQ ID NO: 2905470 - DNA, 25 bp, Homo sapien
catggaacgaaggaggaagacagcc

SEQ ID NO: 2905471 - DNA, 25 bp, Homo sapien
cctgcccatggaacgaaggaggaag

SEQ ID NO: 2905472 - DNA, 25 bp, Homo sapien
cccatggaacgaaggaggaagacag

SEQ ID NO: 2905473 - DNA, 25 bp, Homo sapien
tgcccatggaacgaaggaggaagac

SEQ ID NO: 2905474 - DNA, 25 bp, Homo sapien
tactgagcccacttccgagtcgttt

SEQ ID NO: 2905475 - DNA, 25 bp, Homo sapien
tctctcagacatgcctgtttgtact

SEQ ID NO: 2905476 - DNA, 25 bp, Homo sapien
tttcctcaaggagggatcctgtaac

SEQ ID NO: 2905477 - DNA, 25 bp, Homo sapien
cagaaggttccttgagtaagtctct

SEQ ID NO: 2905478 - DNA, 25 bp, Homo sapien
cttcctggcactggaagctggtgta

SEQ ID NO: 2905479 - DNA, 25 bp, Homo sapien
ttcctggcactggaagctggtgtaa

SEQ ID NO: 2905480 - DNA, 25 bp, Homo sapien
tcctggcactggaagctggtgtaac

SEQ ID NO: 2905481 - DNA, 25 bp, Homo sapien
ggtaagtatgaagggcagggtacag

SEQ ID NO: 2905482 - DNA, 25 bp, Homo sapien
ggagaagaatgaggccaacacacgt

SEQ ID NO: 2905483 - DNA, 25 bp, Homo sapien
cacacgtactgatcaaatgtcccgt

SEQ ID NO: 2905484 - DNA, 25 bp, Homo sapien
cttcactccaccaaggtaagtatga

SEQ ID NO: 2905485 - DNA, 25 bp, Homo sapien
tttagttgtccttgtatttgctggt

SEQ ID NO: 2905486 - DNA, 25 bp, Homo sapien
cctggagcttgtaaccacttatctt

SEQ ID NO: 2905487 - DNA, 25 bp, Homo sapien
gcttgtaaccacttatctttcctga

SEQ ID NO: 2905488 - DNA, 25 bp, Homo sapien
agaacagttttagttgtccttgtat

SEQ ID NO: 2905489 - DNA, 25 bp, Homo sapien
aaggtcagaacacacagcccgttcc

SEQ ID NO: 2905490 - DNA, 25 bp, Homo sapien
ctggaggaaaggtcagaacacacag

SEQ ID NO: 2905491 - DNA, 25 bp, Homo sapien
gaaaggtcagaacacacagcccgtt

SEQ ID NO: 2905492 - DNA, 25 bp, Homo sapien
ggaggaaaggtcagaacacacagcc

SEQ ID NO: 2905493 - DNA, 25 bp, Homo sapien
tctatcgtctgccaagtcccctgag

SEQ ID NO: 2905494 - DNA, 25 bp, Homo sapien
gccaagcagtgtctgtaggcccttc

SEQ ID NO: 2905495 - DNA, 25 bp, Homo sapien
gttctctatcgtctgccaagtcccc

SEQ ID NO: 2905496 - DNA, 25 bp, Homo sapien
caagtcccctgagccaagcagtgtc

SEQ ID NO: 2905497 - DNA, 25 bp, Homo sapien
cttgaagctgtggttctcggagcat

SEQ ID NO: 2905498 - DNA, 25 bp, Homo sapien
gagcattcggagtcatcctgccaaa

SEQ ID NO: 2905499 - DNA, 25 bp, Homo sapien
ggttctcggagcattcggagtcatc

SEQ ID NO: 2905500 - DNA, 25 bp, Homo sapien
gagtcatcctgccaaatatccgtgg

SEQ ID NO: 2905501 - DNA, 25 bp, Homo sapien
aaaccaaggtgtggccgtagatatc

SEQ ID NO: 2905502 - DNA, 25 bp, Homo sapien
gaaagtgagcagatgttggacaaac

SEQ ID NO: 2905503 - DNA, 25 bp, Homo sapien
tgttcctccgctttgtgcagcctct

SEQ ID NO: 2905504 - DNA, 25 bp, Homo sapien
gagcaagagtccaacgagaaagtat

SEQ ID NO: 2905505 - DNA, 25 bp, Homo sapien
gagaagtgtttgtagggtccaggga

SEQ ID NO: 2905506 - DNA, 25 bp, Homo sapien
tgtttgtagggtccagggaagatag

SEQ ID NO: 2905507 - DNA, 25 bp, Homo sapien
gagagaagtgtttgtagggtccagg

SEQ ID NO: 2905508 - DNA, 25 bp, Homo sapien
ctaggactgaaccagagaggccagg

SEQ ID NO: 2905509 - DNA, 25 bp, Homo sapien
ttgacagcaaggcataacgatccac

SEQ ID NO: 2905510 - DNA, 25 bp, Homo sapien
aggagtatcccacggtgtacatcag

SEQ ID NO: 2905511 - DNA, 25 bp, Homo sapien
ggaagagggagataagagagaagga

SEQ ID NO: 2905512 - DNA, 25 bp, Homo sapien
gagagaaggagtatcccacggtgta

SEQ ID NO: 2905513 - DNA, 25 bp, Homo sapien
gaagacgacgtccttcaccagtaca

SEQ ID NO: 2905514 - DNA, 25 bp, Homo sapien
tggagtaagagttgtagaagacgac

SEQ ID NO: 2905515 - DNA, 25 bp, Homo sapien
tctgacaggtaggacatccacccat

SEQ ID NO: 2905516 - DNA, 25 bp, Homo sapien
cattgtcaggcctcttggagtaaga

SEQ ID NO: 2905517 - DNA, 25 bp, Homo sapien
ccataagtaattggcacccacaaag

SEQ ID NO: 2905518 - DNA, 25 bp, Homo sapien
aatgcaagagaacctggactgagcg

SEQ ID NO: 2905519 - DNA, 25 bp, Homo sapien
gccttcaaccagcagccataagtaa

SEQ ID NO: 2905520 - DNA, 25 bp, Homo sapien
cagccgcctctcaggaagcactgtg

SEQ ID NO: 2905521 - DNA, 25 bp, Homo sapien
accccagggtacaacaaatagcaca

SEQ ID NO: 2905522 - DNA, 25 bp, Homo sapien
gggtacaacaaatagcacagggaag

SEQ ID NO: 2905523 - DNA, 25 bp, Homo sapien
caggtgtgcacgggcgaaaccccag

SEQ ID NO: 2905524 - DNA, 25 bp, Homo sapien
cagggtacaacaaatagcacaggga

SEQ ID NO: 2905525 - DNA, 25 bp, Homo sapien
catcatgggtcctcggatgatccac

SEQ ID NO: 2905526 - DNA, 25 bp, Homo sapien
agagcatcatgggtcctcggatgat

SEQ ID NO: 2905527 - DNA, 25 bp, Homo sapien
ctcggatgatccaccagattttctt

SEQ ID NO: 2905528 - DNA, 25 bp, Homo sapien
gatccaccagattttcttattccca

SEQ ID NO: 2905529 - DNA, 25 bp, Homo sapien
tgaatatgtttatcaagaacccacc

SEQ ID NO: 2905530 - DNA, 25 bp, Homo sapien
tacttgaaatggtgttggctagggc

SEQ ID NO: 2905531 - DNA, 25 bp, Homo sapien
aacccaccatatgcttgggctggct

SEQ ID NO: 2905532 - DNA, 25 bp, Homo sapien
tggctgccaggatgatcagaacatg

SEQ ID NO: 2905533 - DNA, 25 bp, Homo sapien
ttcaagcccgtttcctctagtccaa

SEQ ID NO: 2905534 - DNA, 25 bp, Homo sapien
aagcccgtttcctctagtccaagtg

SEQ ID NO: 2905535 - DNA, 25 bp, Homo sapien
tccttgtgaccaaagggaatgctcc

SEQ ID NO: 2905536 - DNA, 25 bp, Homo sapien
ctcttcaagcccgtttcctctagtc

SEQ ID NO: 2905537 - DNA, 25 bp, Homo sapien
cctagaatcctagagctgtgcagat

SEQ ID NO: 2905538 - DNA, 25 bp, Homo sapien
tcacaagtcagtcatagagcccagg

SEQ ID NO: 2905539 - DNA, 25 bp, Homo sapien
gggagccctagaaccaatgcacaga

SEQ ID NO: 2905540 - DNA, 25 bp, Homo sapien
ccatcagtctgggtaagtctgggct

SEQ ID NO: 2905541 - DNA, 25 bp, Homo sapien
tccaaagtcccaaaggtcatctgaa

SEQ ID NO: 2905542 - DNA, 25 bp, Homo sapien
taagtgacgaattccacatagctgt

SEQ ID NO: 2905543 - DNA, 25 bp, Homo sapien
taaaggccatctgaatctccactgt

SEQ ID NO: 2905544 - DNA, 25 bp, Homo sapien
tgaacttcaaggtcaggctgggctc

SEQ ID NO: 2905545 - DNA, 25 bp, Homo sapien
catttgatgagctttgagcttagaa

SEQ ID NO: 2905546 - DNA, 25 bp, Homo sapien
gtatttataatctctgaagcacatt

SEQ ID NO: 2905547 - DNA, 25 bp, Homo sapien
ctgtatttataatctctgaagcaca

SEQ ID NO: 2905548 - DNA, 25 bp, Homo sapien
tataatctctgaagcacatttgatg

SEQ ID NO: 2905549 - DNA, 25 bp, Homo sapien
tctggacttcgctgtcagccctcat

SEQ ID NO: 2905550 - DNA, 25 bp, Homo sapien
ctttctggacttcgctgtcagccct

SEQ ID NO: 2905551 - DNA, 25 bp, Homo sapien
ttctggacttcgctgtcagccctca

SEQ ID NO: 2905552 - DNA, 25 bp, Homo sapien
cctttctggacttcgctgtcagccc

SEQ ID NO: 2905553 - DNA, 25 bp, Homo sapien
gagaagaggatctcatgaacgccca

SEQ ID NO: 2905554 - DNA, 25 bp, Homo sapien
gaatgaaaagtcgtataagttttgc

SEQ ID NO: 2905555 - DNA, 25 bp, Homo sapien
cttcaacttgatcatcagtgatgaa

SEQ ID NO: 2905556 - DNA, 25 bp, Homo sapien
gaaaggagctcagtgtcaactgaat

SEQ ID NO: 2905557 - DNA, 25 bp, Homo sapien
ttggcaaaaccatactgcaaggcca

SEQ ID NO: 2905558 - DNA, 25 bp, Homo sapien
ggcaaaaccatactgcaaggccacc

SEQ ID NO: 2905559 - DNA, 25 bp, Homo sapien
caaaaccatactgcaaggccaccag

SEQ ID NO: 2905560 - DNA, 25 bp, Homo sapien
ccattggcaaaaccatactgcaagg

SEQ ID NO: 2905561 - DNA, 25 bp, Homo sapien
caagacctcgcatggctagatgtag

SEQ ID NO: 2905562 - DNA, 25 bp, Homo sapien
taggagccgcccactgttaagtgag

SEQ ID NO: 2905563 - DNA, 25 bp, Homo sapien
ggctagcaagaagcggacccagtat

SEQ ID NO: 2905564 - DNA, 25 bp, Homo sapien
tggtgttggccatggtgacatcccc

SEQ ID NO: 2905565 - DNA, 25 bp, Homo sapien
tacttgctgggaatacgagatgacc

SEQ ID NO: 2905566 - DNA, 25 bp, Homo sapien
gagaatgattccgtgcccagcaacg

SEQ ID NO: 2905567 - DNA, 25 bp, Homo sapien
gcttgaatttagagccaggccctag

SEQ ID NO: 2905568 - DNA, 25 bp, Homo sapien
caaagacgacattcagagggtcccc

SEQ ID NO: 2905569 - DNA, 25 bp, Homo sapien
tcatgttaaagagccgtgtctcccg

SEQ ID NO: 2905570 - DNA, 25 bp, Homo sapien
cagggacagacattcaaagggacgc

SEQ ID NO: 2905571 - DNA, 25 bp, Homo sapien
agttaagtcacatcccctgtcggga

SEQ ID NO: 2905572 - DNA, 25 bp, Homo sapien
cgagcacatcggcaaaccctatgaa

SEQ ID NO: 2905573 - DNA, 25 bp, Homo sapien
tttggagaggcaagcacgctatccg

SEQ ID NO: 2905574 - DNA, 25 bp, Homo sapien
ccagggctagagtcaacagtccaga

SEQ ID NO: 2905575 - DNA, 25 bp, Homo sapien
aagtgaagctcaagggtaaccagtg

SEQ ID NO: 2905576 - DNA, 25 bp, Homo sapien
cagaacccctatccgtatgaacagg

SEQ ID NO: 2905577 - DNA, 25 bp, Homo sapien
catgggatggagaaccactctgtcc

SEQ ID NO: 2905578 - DNA, 25 bp, Homo sapien
tcagtcaacgtgctagaaaccgatg

SEQ ID NO: 2905579 - DNA, 25 bp, Homo sapien
taatctgaggacactataatggccc

SEQ ID NO: 2905580 - DNA, 25 bp, Homo sapien
tcttccagggtagctcaggttggcc

SEQ ID NO: 2905581 - DNA, 25 bp, Homo sapien
gactgcagcgaggaaattacttccc

SEQ ID NO: 2905582 - DNA, 25 bp, Homo sapien
aagaaggcgcggagaaagtccacac

SEQ ID NO: 2905583 - DNA, 25 bp, Homo sapien
ggagatcaagctgagcaacaagaca

SEQ ID NO: 2905584 - DNA, 25 bp, Homo sapien
caacaagacagaggaggacatcaag

SEQ ID NO: 2905585 - DNA, 25 bp, Homo sapien
ggcagacagcgtatgcacctcgtgt

SEQ ID NO: 2905586 - DNA, 25 bp, Homo sapien
ggagcgtggcatggatagatctact

SEQ ID NO: 2905587 - DNA, 25 bp, Homo sapien
tgcatgctgtcggcattgaggagcc

SEQ ID NO: 2905588 - DNA, 25 bp, Homo sapien
cacgctgtcgtcctggaggtgagac

SEQ ID NO: 2905589 - DNA, 25 bp, Homo sapien
ctgataagaaggacccccaaggcaa

SEQ ID NO: 2905590 - DNA, 25 bp, Homo sapien
ggctgggtttgaactactgctccag

SEQ ID NO: 2905591 - DNA, 25 bp, Homo sapien
ccaaggcaacggcaccgtggctggg

SEQ ID NO: 2905592 - DNA, 25 bp, Homo sapien
gtaggctgataagaaggacccccaa

SEQ ID NO: 2905593 - DNA, 25 bp, Homo sapien
ggatgggatctgagagatgcaaccc

SEQ ID NO: 2905594 - DNA, 25 bp, Homo sapien
gatgggatctgagagatgcaaccca

SEQ ID NO: 2905595 - DNA, 25 bp, Homo sapien
tggatgggatctgagagatgcaacc

SEQ ID NO: 2905596 - DNA, 25 bp, Homo sapien
tgggatctgagagatgcaacccacc

SEQ ID NO: 2905597 - DNA, 25 bp, Homo sapien
gactgtgaccccgtaggatggtgat

SEQ ID NO: 2905598 - DNA, 25 bp, Homo sapien
gcctttgagttatggcacccgaggg

SEQ ID NO: 2905599 - DNA, 25 bp, Homo sapien
ggatggtgatctccctgtcatcagg

SEQ ID NO: 2905600 - DNA, 25 bp, Homo sapien
actgggaaggtgtccataaaatcct

SEQ ID NO: 2905601 - DNA, 25 bp, Homo sapien
tagcattcgtagagtgaagcacaga

SEQ ID NO: 2905602 - DNA, 25 bp, Homo sapien
ggttttccccagagtgcatagctca

SEQ ID NO: 2905603 - DNA, 25 bp, Homo sapien
catatccatcctagaagggaggcag

SEQ ID NO: 2905604 - DNA, 25 bp, Homo sapien
gcagatttgagctcagtatttggat

SEQ ID NO: 2905605 - DNA, 25 bp, Homo sapien
caccgaacactttgaacttggatcc

SEQ ID NO: 2905606 - DNA, 25 bp, Homo sapien
ccaccgaacactttgaacttggatc

SEQ ID NO: 2905607 - DNA, 25 bp, Homo sapien
cccaccgaacactttgaacttggat

SEQ ID NO: 2905608 - DNA, 25 bp, Homo sapien
ctccccaccgaacactttgaacttg

SEQ ID NO: 2905609 - DNA, 25 bp, Homo sapien
gagggagggattgggcctgaggcat

SEQ ID NO: 2905610 - DNA, 25 bp, Homo sapien
tgagtgttgagcactagtctggtta

SEQ ID NO: 2905611 - DNA, 25 bp, Homo sapien
tgttgagcactagtctggttagagg

SEQ ID NO: 2905612 - DNA, 25 bp, Homo sapien
aaaagatgaagacctggttcttgcc

SEQ ID NO: 2905613 - DNA, 25 bp, Homo sapien
agcactagtctggttagaggtgaaa

SEQ ID NO: 2905614 - DNA, 25 bp, Homo sapien
ggtttctctgcctgattctcagaac

SEQ ID NO: 2905615 - DNA, 25 bp, Homo sapien
gtttctctgcctgattctcagaact

SEQ ID NO: 2905616 - DNA, 25 bp, Homo sapien
cactggccttgtaggagaaactcgt

SEQ ID NO: 2905617 - DNA, 25 bp, Homo sapien
tggccttgtaggagaaactcgtatc

SEQ ID NO: 2905618 - DNA, 25 bp, Homo sapien
tgtaggagaaactcgtatcctggtt

SEQ ID NO: 2905619 - DNA, 25 bp, Homo sapien
gccttgtaggagaaactcgtatcct

SEQ ID NO: 2905620 - DNA, 25 bp, Homo sapien
gaatagtcctcattgttggtatgcg

SEQ ID NO: 2905621 - DNA, 25 bp, Homo sapien
ccagcagagtgtccctaaagcttga

SEQ ID NO: 2905622 - DNA, 25 bp, Homo sapien
tgctttggtggacacgaaaaacaaa

SEQ ID NO: 2905623 - DNA, 25 bp, Homo sapien
gtttctggatcctcccagcagagtg

SEQ ID NO: 2905624 - DNA, 25 bp, Homo sapien
cagaggagtctcaggtatgatggga

SEQ ID NO: 2905625 - DNA, 25 bp, Homo sapien
ttcgactgtaacttcaaccctggag

SEQ ID NO: 2905626 - DNA, 25 bp, Homo sapien
tattggattcctagacgccgcagag

SEQ ID NO: 2905627 - DNA, 25 bp, Homo sapien
ggctcgttttcattcagcccatcag

SEQ ID NO: 2905628 - DNA, 25 bp, Homo sapien
gagactgagtaggacaggctttcca

SEQ ID NO: 2905629 - DNA, 25 bp, Homo sapien
acttccaaaccttctcagctgatgg

SEQ ID NO: 2905630 - DNA, 25 bp, Homo sapien
tccaaagaaggttaggcccaggctc

SEQ ID NO: 2905631 - DNA, 25 bp, Homo sapien
tctgcctcaggaatcttgtcttgtg

SEQ ID NO: 2905632 - DNA, 25 bp, Homo sapien
tagcagtctgtaacccatggaccat

SEQ ID NO: 2905633 - DNA, 25 bp, Homo sapien
ccattggtcgtattccttaggttca

SEQ ID NO: 2905634 - DNA, 25 bp, Homo sapien
ccttaggttagcgattagcagtctg

SEQ ID NO: 2905635 - DNA, 25 bp, Homo sapien
ggtctttgccttaggttagcgatta

SEQ ID NO: 2905636 - DNA, 25 bp, Homo sapien
aacaggaaggtggatcagtgacttc

SEQ ID NO: 2905637 - DNA, 25 bp, Homo sapien
aggaacaggaaggtggatcagtgac

SEQ ID NO: 2905638 - DNA, 25 bp, Homo sapien
gaacaggaaggtggatcagtgactt

SEQ ID NO: 2905639 - DNA, 25 bp, Homo sapien
ggaggaacaggaaggtggatcagtg

SEQ ID NO: 2905640 - DNA, 25 bp, Homo sapien
tgtgctctgggtgcccaagagtctc

SEQ ID NO: 2905641 - DNA, 25 bp, Homo sapien
ttccatgtgctctgggtgcccaaga

SEQ ID NO: 2905642 - DNA, 25 bp, Homo sapien
catgtgctctgggtgcccaagagtc

SEQ ID NO: 2905643 - DNA, 25 bp, Homo sapien
ttattccatgtgctctgggtgccca

SEQ ID NO: 2905644 - DNA, 25 bp, Homo sapien
cattttgtggtggatggagagatct

SEQ ID NO: 2905645 - DNA, 25 bp, Homo sapien
ctcgttaggttcattttgtggtgga

SEQ ID NO: 2905646 - DNA, 25 bp, Homo sapien
catcctcgttaggttcattttgtgg

SEQ ID NO: 2905647 - DNA, 25 bp, Homo sapien
catcaccctgcatcctcgttaggtt

SEQ ID NO: 2905648 - DNA, 25 bp, Homo sapien
ggatggttagtgttagagaagttgt

SEQ ID NO: 2905649 - DNA, 25 bp, Homo sapien
gatggttagtgttagagaagttgta

SEQ ID NO: 2905650 - DNA, 25 bp, Homo sapien
caggatggttagtgttagagaagtt

SEQ ID NO: 2905651 - DNA, 25 bp, Homo sapien
gcaggatggttagtgttagagaagt

SEQ ID NO: 2905652 - DNA, 25 bp, Homo sapien
gttcacagatgaggattttgagcct

SEQ ID NO: 2905653 - DNA, 25 bp, Homo sapien
cacagatgaggattttgagcctgtg

SEQ ID NO: 2905654 - DNA, 25 bp, Homo sapien
caggtagtgagtggagctgttcaca

SEQ ID NO: 2905655 - DNA, 25 bp, Homo sapien
ggctgcattccagaatccagctgtg

SEQ ID NO: 2905656 - DNA, 25 bp, Homo sapien
ggaggcgaggcacgtgtttttggag

SEQ ID NO: 2905657 - DNA, 25 bp, Homo sapien
tggaggcgaggcacgtgtttttgga

SEQ ID NO: 2905658 - DNA, 25 bp, Homo sapien
tgggtctcgatctcagtgtgcacgt

SEQ ID NO: 2905659 - DNA, 25 bp, Homo sapien
cagataaaagtgtgctcccgggaga

SEQ ID NO: 2905660 - DNA, 25 bp, Homo sapien
tgggtaccaccggtgtgcacagata

SEQ ID NO: 2905661 - DNA, 25 bp, Homo sapien
gctctgtttgcaacccctcagtggg

SEQ ID NO: 2905662 - DNA, 25 bp, Homo sapien
agctggcacactcacttcctgggcc

SEQ ID NO: 2905663 - DNA, 25 bp, Homo sapien
gctggcacactcacttcctgggcca

SEQ ID NO: 2905664 - DNA, 25 bp, Homo sapien
ctggcacactcacttcctgggccat

SEQ ID NO: 2905665 - DNA, 25 bp, Homo sapien
ccagctggcacactcacttcctggg

SEQ ID NO: 2905666 - DNA, 25 bp, Homo sapien
ctgtcctcctgggcgtctttcggca

SEQ ID NO: 2905667 - DNA, 25 bp, Homo sapien
gtcctcctgggcgtctttcggcagc

SEQ ID NO: 2905668 - DNA, 25 bp, Homo sapien
ctcctgggcgtctttcggcagccat

SEQ ID NO: 2905669 - DNA, 25 bp, Homo sapien
tcctcctgggcgtctttcggcagcc

SEQ ID NO: 2905670 - DNA, 25 bp, Homo sapien
ctgatactggggatctgccgagatt

SEQ ID NO: 2905671 - DNA, 25 bp, Homo sapien
tactggggatctgccgagattggcc

SEQ ID NO: 2905672 - DNA, 25 bp, Homo sapien
ggatctgccgagattggccactcat

SEQ ID NO: 2905673 - DNA, 25 bp, Homo sapien
tggggatctgccgagattggccact

SEQ ID NO: 2905674 - DNA, 25 bp, Homo sapien
tgctggctgtcagccccagacacca

SEQ ID NO: 2905675 - DNA, 25 bp, Homo sapien
gacaccagggcgtctgcagccctga

SEQ ID NO: 2905676 - DNA, 25 bp, Homo sapien
ggctgtggatttctgttggtcttct

SEQ ID NO: 2905677 - DNA, 25 bp, Homo sapien
aggctgtctgccagtgtggggctgt

SEQ ID NO: 2905678 - DNA, 25 bp, Homo sapien
gcctgagtgctgtttatcctcaatg

SEQ ID NO: 2905679 - DNA, 25 bp, Homo sapien
gctgtttatcctcaatgttgcccag

SEQ ID NO: 2905680 - DNA, 25 bp, Homo sapien
agtgctgtttatcctcaatgttgcc

SEQ ID NO: 2905681 - DNA, 25 bp, Homo sapien
gggcctgagtgctgtttatcctcaa

SEQ ID NO: 2905682 - DNA, 25 bp, Homo sapien
cagcagcaagcgtggttgtatccct

SEQ ID NO: 2905683 - DNA, 25 bp, Homo sapien
agaaacagcggaactgccaatgccc

SEQ ID NO: 2905684 - DNA, 25 bp, Homo sapien
tatactgtccgttcagcagcaagcg

SEQ ID NO: 2905685 - DNA, 25 bp, Homo sapien
cctggcagaaacagcggaactgcca

SEQ ID NO: 2905686 - DNA, 25 bp, Homo sapien
ttctctcaaggtccatcagcgcagg

SEQ ID NO: 2905687 - DNA, 25 bp, Homo sapien
ttgaaagcgtccaagctgagagagc

SEQ ID NO: 2905688 - DNA, 25 bp, Homo sapien
tgctcgatgtggacagttttacccc

SEQ ID NO: 2905689 - DNA, 25 bp, Homo sapien
tccacactaagtggcgaggctctgg

SEQ ID NO: 2905690 - DNA, 25 bp, Homo sapien
ctgatgacgtcagaccaggtgaagc

SEQ ID NO: 2905691 - DNA, 25 bp, Homo sapien
ccagtccatggccatattcctaatc

SEQ ID NO: 2905692 - DNA, 25 bp, Homo sapien
tgcacagtgcaaaattaacggggca

SEQ ID NO: 2905693 - DNA, 25 bp, Homo sapien
accgcgcccagtccatggccatatt

SEQ ID NO: 2905694 - DNA, 25 bp, Homo sapien
gaagatgtcagcttcatccctccac

SEQ ID NO: 2905695 - DNA, 25 bp, Homo sapien
agcttcatccctccaccgtctccct

SEQ ID NO: 2905696 - DNA, 25 bp, Homo sapien
tcagctggttttcctgtgaagatgt

SEQ ID NO: 2905697 - DNA, 25 bp, Homo sapien
ttcagggagagatcagctggttttc

SEQ ID NO: 2905698 - DNA, 25 bp, Homo sapien
tagaggctatactccatctgagaag

SEQ ID NO: 2905699 - DNA, 25 bp, Homo sapien
ggctccccattgcttgaagtgtcaa

SEQ ID NO: 2905700 - DNA, 25 bp, Homo sapien
gaaggtaacacctccataggagcag

SEQ ID NO: 2905701 - DNA, 25 bp, Homo sapien
gaccttgcacaaatatggaccctgt

SEQ ID NO: 2905702 - DNA, 25 bp, Homo sapien
tctgaattgcgtgttgaggtagttg

SEQ ID NO: 2905703 - DNA, 25 bp, Homo sapien
ggtctgctttattattagtcttggg

SEQ ID NO: 2905704 - DNA, 25 bp, Homo sapien
ctgggtggctggtctgctttattat

SEQ ID NO: 2905705 - DNA, 25 bp, Homo sapien
ttgtttctgaattgcgtgttgaggt

SEQ ID NO: 2905706 - DNA, 25 bp, Homo sapien
tctgtcctggccgtataatcggatc

SEQ ID NO: 2905707 - DNA, 25 bp, Homo sapien
tataatcggatcctccaaggtggtg

SEQ ID NO: 2905708 - DNA, 25 bp, Homo sapien
tggccgtataatcggatcctccaag

SEQ ID NO: 2905709 - DNA, 25 bp, Homo sapien
tctctctgctcaccttttttctcta

SEQ ID NO: 2905710 - DNA, 25 bp, Homo sapien
tttcattggggcacacagggcggat

SEQ ID NO: 2905711 - DNA, 25 bp, Homo sapien
tcctgtatgctctggtgatcatagt

SEQ ID NO: 2905712 - DNA, 25 bp, Homo sapien
tctgaggtcgtactgcaagactgtc

SEQ ID NO: 2905713 - DNA, 25 bp, Homo sapien
ctgacagctgcctgttaactggagt

SEQ ID NO: 2905714 - DNA, 25 bp, Homo sapien
aaagaccagcgtgctttctgacatc

SEQ ID NO: 2905715 - DNA, 25 bp, Homo sapien
tgttcacaaaaggtgcaattagggc

SEQ ID NO: 2905716 - DNA, 25 bp, Homo sapien
ggtgggtaattgtgactgaaaagac

SEQ ID NO: 2905717 - DNA, 25 bp, Homo sapien
tctgacatcttcactaaatcaccct

SEQ ID NO: 2905718 - DNA, 25 bp, Homo sapien
atggtgtcagtattcctaaacattc

SEQ ID NO: 2905719 - DNA, 25 bp, Homo sapien
aacattctggtaaaacactgccgga

SEQ ID NO: 2905720 - DNA, 25 bp, Homo sapien
tctggtaaaacactgccggaagaaa

SEQ ID NO: 2905721 - DNA, 25 bp, Homo sapien
ggtgtcagtattcctaaacattctg

SEQ ID NO: 2905722 - DNA, 25 bp, Homo sapien
ggcgggagcgttcccggcagtggca

SEQ ID NO: 2905723 - DNA, 25 bp, Homo sapien
tgagttaaggagcaggcgggagcgt

SEQ ID NO: 2905724 - DNA, 25 bp, Homo sapien
agttaaggagcaggcgggagcgttc

SEQ ID NO: 2905725 - DNA, 25 bp, Homo sapien
aggagcaggcgggagcgttcccggc

SEQ ID NO: 2905726 - DNA, 25 bp, Homo sapien
gggcgtgggcaacgcggactcgcgg

SEQ ID NO: 2905727 - DNA, 25 bp, Homo sapien
tgccggcgctacctgtagctccacg

SEQ ID NO: 2905728 - DNA, 25 bp, Homo sapien
atgccgcagcgtcccggtcggaggg

SEQ ID NO: 2905729 - DNA, 25 bp, Homo sapien
ggagcttccaccttgcgccgggcct

SEQ ID NO: 2905730 - DNA, 25 bp, Homo sapien
ccgcgggcgagctgatcacgctgct

SEQ ID NO: 2905731 - DNA, 25 bp, Homo sapien
gaaggcgagaaggaggacgggctcc

SEQ ID NO: 2905732 - DNA, 25 bp, Homo sapien
gctgctgcaggtcccggacggcggc

SEQ ID NO: 2905733 - DNA, 25 bp, Homo sapien
tccggggagcggcacggccaggggc

SEQ ID NO: 2905734 - DNA, 25 bp, Homo sapien
aatgacaaccacaaacgatccctcg

SEQ ID NO: 2905735 - DNA, 25 bp, Homo sapien
gtgagacaagttcaaccccaggttc

SEQ ID NO: 2905736 - DNA, 25 bp, Homo sapien
cccattgttcagtttccggtgagac

SEQ ID NO: 2905737 - DNA, 25 bp, Homo sapien
catttatccccatcgactgtttcca

SEQ ID NO: 2905738 - DNA, 25 bp, Homo sapien
tcaaccttgagggtggttgtcttcc

SEQ ID NO: 2905739 - DNA, 25 bp, Homo sapien
ctatcgtatccaacggttcaacctt

SEQ ID NO: 2905740 - DNA, 25 bp, Homo sapien
tagactctttttgaatattgtagcc

SEQ ID NO: 2905741 - DNA, 25 bp, Homo sapien
tttttgaatattgtagccagacaaa

SEQ ID NO: 2905742 - DNA, 25 bp, Homo sapien
ttttccattctcaaccaccttatga

SEQ ID NO: 2905743 - DNA, 25 bp, Homo sapien
taatgtccgtcaaagtggcttgctg

SEQ ID NO: 2905744 - DNA, 25 bp, Homo sapien
agggcacccacgacgaaggcaacta

SEQ ID NO: 2905745 - DNA, 25 bp, Homo sapien
gcttgctgtaaacactccaacacca

SEQ ID NO: 2905746 - DNA, 25 bp, Homo sapien
ttgagggttccttagagcaggagaa

SEQ ID NO: 2905747 - DNA, 25 bp, Homo sapien
aggagaagaaactgcgggcggactt

SEQ ID NO: 2905748 - DNA, 25 bp, Homo sapien
agcttgagggttccttagagcagga

SEQ ID NO: 2905749 - DNA, 25 bp, Homo sapien
agaaactgcgggcggacttggaaag

SEQ ID NO: 2905750 - DNA, 25 bp, Homo sapien
acaggagtgtgaggatgcagtgggc

SEQ ID NO: 2905751 - DNA, 25 bp, Homo sapien
gcagtgggctacactcacaccactg

SEQ ID NO: 2905752 - DNA, 25 bp, Homo sapien
tgtgaggatgcagtgggctacactc

SEQ ID NO: 2905753 - DNA, 25 bp, Homo sapien
ggatgcagtgggctacactcacacc

SEQ ID NO: 2905754 - DNA, 25 bp, Homo sapien
aggaggtaaattcatgaaagaaact

SEQ ID NO: 2905755 - DNA, 25 bp, Homo sapien
taaattcatgaaagaaactacaaac

SEQ ID NO: 2905756 - DNA, 25 bp, Homo sapien
tactttcagttacttactctttaga

SEQ ID NO: 2905757 - DNA, 25 bp, Homo sapien
tagagataagcagggattaaagaat

SEQ ID NO: 2905758 - DNA, 25 bp, Homo sapien
taataaataggaaatgggcacatgc

SEQ ID NO: 2905759 - DNA, 25 bp, Homo sapien
acacacagtcatgctagaccccggg

SEQ ID NO: 2905760 - DNA, 25 bp, Homo sapien
caactctaacataagaccctgtgtg

SEQ ID NO: 2905761 - DNA, 25 bp, Homo sapien
tacattgcataacctcgcctagaga

SEQ ID NO: 2905762 - DNA, 25 bp, Homo sapien
tatagcctgcctggtatagtctccc

SEQ ID NO: 2905763 - DNA, 25 bp, Homo sapien
gattcaagggatggccatcatggcc

SEQ ID NO: 2905764 - DNA, 25 bp, Homo sapien
gacccttccctaggacagagatatg

SEQ ID NO: 2905765 - DNA, 25 bp, Homo sapien
cagagatatgcaaccctgaaatggg

SEQ ID NO: 2905766 - DNA, 25 bp, Homo sapien
gaatgattcatgagttggaccacac

SEQ ID NO: 2905767 - DNA, 25 bp, Homo sapien
aaagggccaggctaatgactgctac

SEQ ID NO: 2905768 - DNA, 25 bp, Homo sapien
cagcttgattaggtacaggtctgcc

SEQ ID NO: 2905769 - DNA, 25 bp, Homo sapien
taagtcatgtcctcaccaagatgcc

SEQ ID NO: 2905770 - DNA, 25 bp, Homo sapien
taaatgggccctaatatacacctct

SEQ ID NO: 2905771 - DNA, 25 bp, Homo sapien
ttaacacagatctgaaagcgcaggg

SEQ ID NO: 2905772 - DNA, 25 bp, Homo sapien
gaaaaactacaagcccacgcaatgc

SEQ ID NO: 2905773 - DNA, 25 bp, Homo sapien
tgctttgcctaaatgggacagtgta

SEQ ID NO: 2905774 - DNA, 25 bp, Homo sapien
ccaggcctgccgcagctacggcagg

SEQ ID NO: 2905775 - DNA, 25 bp, Homo sapien
gcctgccgcagctacggcaggagtc

SEQ ID NO: 2905776 - DNA, 25 bp, Homo sapien
ccgcagctacggcaggagtcacttc

SEQ ID NO: 2905777 - DNA, 25 bp, Homo sapien
ctgccgcagctacggcaggagtcac

SEQ ID NO: 2905778 - DNA, 25 bp, Homo sapien
cagtatggagatgatttgtgactct

SEQ ID NO: 2905779 - DNA, 25 bp, Homo sapien
ctcctgcagtatggagatgatttgt

SEQ ID NO: 2905780 - DNA, 25 bp, Homo sapien
ctgcagtatggagatgatttgtgac

SEQ ID NO: 2905781 - DNA, 25 bp, Homo sapien
tatggagatgatttgtgactctctc

SEQ ID NO: 2905782 - DNA, 25 bp, Homo sapien
atttatttacacctgatccaagtac

SEQ ID NO: 2905783 - DNA, 25 bp, Homo sapien
tcgttatttatttacacctgatcca

SEQ ID NO: 2905784 - DNA, 25 bp, Homo sapien
caaggtatatcgttatttatttaca

SEQ ID NO: 2905785 - DNA, 25 bp, Homo sapien
gtatatcgttatttatttacacctg

SEQ ID NO: 2905786 - DNA, 25 bp, Homo sapien
ggacttcttcgagctgtgaccctgg

SEQ ID NO: 2905787 - DNA, 25 bp, Homo sapien
tctctgattcactatgctggcactg

SEQ ID NO: 2905788 - DNA, 25 bp, Homo sapien
ggactacaacattactggctggctg

SEQ ID NO: 2905789 - DNA, 25 bp, Homo sapien
tatgaccagcacctgggcaagtctg

SEQ ID NO: 2905790 - DNA, 25 bp, Homo sapien
cagttactagacacctacctcttga

SEQ ID NO: 2905791 - DNA, 25 bp, Homo sapien
agagattccactacaaaccaacaag

SEQ ID NO: 2905792 - DNA, 25 bp, Homo sapien
cactagcgaggatgtaaaacagtac

SEQ ID NO: 2905793 - DNA, 25 bp, Homo sapien
aatatggtacatcctcacaacggag

SEQ ID NO: 2905794 - DNA, 25 bp, Homo sapien
atatcacaaccaggcccgcattgag

SEQ ID NO: 2905795 - DNA, 25 bp, Homo sapien
tccaccttttctgggcattacagga

SEQ ID NO: 2905796 - DNA, 25 bp, Homo sapien
acaagcccttgcaatacagctacaa

SEQ ID NO: 2905797 - DNA, 25 bp, Homo sapien
ggcctcccgggccaaagcagagaag

SEQ ID NO: 2905798 - DNA, 25 bp, Homo sapien
gatgaatgatgcaacagccaaactg

SEQ ID NO: 2905799 - DNA, 25 bp, Homo sapien
gagatatccatggaaagtcctccag

SEQ ID NO: 2905800 - DNA, 25 bp, Homo sapien
gagtctgcccatgaactaggaatgc

SEQ ID NO: 2905801 - DNA, 25 bp, Homo sapien
cattatgcagaggaaacatgcatgg

SEQ ID NO: 2905802 - DNA, 25 bp, Homo sapien
tatagctagtcatgagagtctgccc

SEQ ID NO: 2905803 - DNA, 25 bp, Homo sapien
ataaaatgataggaaatccttcatc

SEQ ID NO: 2905804 - DNA, 25 bp, Homo sapien
tcataaaatgataggaaatccttca

SEQ ID NO: 2905805 - DNA, 25 bp, Homo sapien
ttcataaaatgataggaaatccttc

SEQ ID NO: 2905806 - DNA, 25 bp, Homo sapien
tcttcataaaatgataggaaatcct

SEQ ID NO: 2905807 - DNA, 25 bp, Homo sapien
catgatagagagcagctaggcagac

SEQ ID NO: 2905808 - DNA, 25 bp, Homo sapien
tctaactgctgaaaggtgaccaaag

SEQ ID NO: 2905809 - DNA, 25 bp, Homo sapien
attccgcaggatccagcacgagctg

SEQ ID NO: 2905810 - DNA, 25 bp, Homo sapien
gcagacccggtaagtgccaccatat

SEQ ID NO: 2905811 - DNA, 25 bp, Homo sapien
ctaagcatcaccttgaacatgttcc

SEQ ID NO: 2905812 - DNA, 25 bp, Homo sapien
tcccagcaacctgctagaaacccaa

SEQ ID NO: 2905813 - DNA, 25 bp, Homo sapien
accttgaacatgttccattcccttt

SEQ ID NO: 2905814 - DNA, 25 bp, Homo sapien
gcaacctgctagaaacccaatcctt

SEQ ID NO: 2905815 - DNA, 25 bp, Homo sapien
tcagtggtcactaaggagagatcta

SEQ ID NO: 2905816 - DNA, 25 bp, Homo sapien
caaagaagagctggctaagaccgag

SEQ ID NO: 2905817 - DNA, 25 bp, Homo sapien
tgagtatcccgaagtcatttcctgc

SEQ ID NO: 2905818 - DNA, 25 bp, Homo sapien
tctgcatccagtacaatgtccgtgc

SEQ ID NO: 2905819 - DNA, 25 bp, Homo sapien
tgaagagtgatcatgtcctgatgcc

SEQ ID NO: 2905820 - DNA, 25 bp, Homo sapien
gggaggttcacacaaaagtcataag

SEQ ID NO: 2905821 - DNA, 25 bp, Homo sapien
gaggaacaatccaacaccaatctag

SEQ ID NO: 2905822 - DNA, 25 bp, Homo sapien
taaattccgcaagctccagcatgag

SEQ ID NO: 2905823 - DNA, 25 bp, Homo sapien
aagctggcccagctgattacccgaa

SEQ ID NO: 2905824 - DNA, 25 bp, Homo sapien
tgattacccgaacccaggccaggtg

SEQ ID NO: 2905825 - DNA, 25 bp, Homo sapien
gcgagatgacaagctggcccagctg

SEQ ID NO: 2905826 - DNA, 25 bp, Homo sapien
ctcctagaggagatgcgagatgaca

SEQ ID NO: 2905827 - DNA, 25 bp, Homo sapien
cagacttcaaacagaggtcagtttc

SEQ ID NO: 2905828 - DNA, 25 bp, Homo sapien
aggtgccatggagcatgagcttgtc

SEQ ID NO: 2905829 - DNA, 25 bp, Homo sapien
caagcagaatcctttatgcagactt

SEQ ID NO: 2905830 - DNA, 25 bp, Homo sapien
ccatggagcatgagcttgtcctcca

SEQ ID NO: 2905831 - DNA, 25 bp, Homo sapien
tacaagaaggaaggcatcgagtgga

SEQ ID NO: 2905832 - DNA, 25 bp, Homo sapien
caccacatgttcgtgctggagcagg

SEQ ID NO: 2905833 - DNA, 25 bp, Homo sapien
tggagcagctgtgcatcaacttcac

SEQ ID NO: 2905834 - DNA, 25 bp, Homo sapien
acctggctgcctgcatcgagctcat

SEQ ID NO: 2905835 - DNA, 25 bp, Homo sapien
aaaatcaagtgaagatcaagaaact

SEQ ID NO: 2905836 - DNA, 25 bp, Homo sapien
gaaaatcaagtgaagatcaagaaac

SEQ ID NO: 2905837 - DNA, 25 bp, Homo sapien
tgaaaatcaagtgaagatcaagaaa

SEQ ID NO: 2905838 - DNA, 25 bp, Homo sapien
ctcagtagctctggacataaatggc

SEQ ID NO: 2905839 - DNA, 25 bp, Homo sapien
tagctctggacataaatggcatctg

SEQ ID NO: 2905840 - DNA, 25 bp, Homo sapien
ctggacataaatggcatctgtaaac

SEQ ID NO: 2905841 - DNA, 25 bp, Homo sapien
cagtagctctggacataaatggcat

SEQ ID NO: 2905842 - DNA, 25 bp, Homo sapien
tcgtggcttcagtggggtcccaatg

SEQ ID NO: 2905843 - DNA, 25 bp, Homo sapien
gagattgcataaatgagtccgatgc

SEQ ID NO: 2905844 - DNA, 25 bp, Homo sapien
aatgagtccgatgcacagaattttg

SEQ ID NO: 2905845 - DNA, 25 bp, Homo sapien
ttacaaaacgacatctgttggcacc

SEQ ID NO: 2905846 - DNA, 25 bp, Homo sapien
gggcagttctacacgtgcacatgta

SEQ ID NO: 2905847 - DNA, 25 bp, Homo sapien
gcttggactctatagtaaggctggc

SEQ ID NO: 2905848 - DNA, 25 bp, Homo sapien
caggcattcctctagtgatggacac

SEQ ID NO: 2905849 - DNA, 25 bp, Homo sapien
taaggctggcctcagtatactcagg

SEQ ID NO: 2905850 - DNA, 25 bp, Homo sapien
ccccaccacatttcacgtagaccat

SEQ ID NO: 2905851 - DNA, 25 bp, Homo sapien
caccacatttcacgtagaccataaa

SEQ ID NO: 2905852 - DNA, 25 bp, Homo sapien
catttcacgtagaccataaattgta

SEQ ID NO: 2905853 - DNA, 25 bp, Homo sapien
tccattccggatgtttcccccacca

SEQ ID NO: 2905854 - DNA, 25 bp, Homo sapien
cagagcaggagcttacttagaattc

SEQ ID NO: 2905855 - DNA, 25 bp, Homo sapien
tcccgggacagccaacctcccagaa

SEQ ID NO: 2905856 - DNA, 25 bp, Homo sapien
tagggtaactggagcccttcagctg

SEQ ID NO: 2905857 - DNA, 25 bp, Homo sapien
tgtttgggtgcctgtttgaaaggac

SEQ ID NO: 2905858 - DNA, 25 bp, Homo sapien
tgataggttgtttaatatattctaa

SEQ ID NO: 2905859 - DNA, 25 bp, Homo sapien
tctggaaaggctacaggtcaccctg

SEQ ID NO: 2905860 - DNA, 25 bp, Homo sapien
tgaagctgcctatccatcacctgga

SEQ ID NO: 2905861 - DNA, 25 bp, Homo sapien
gagtctgtcagtcctcggcagcact

SEQ ID NO: 2905862 - DNA, 25 bp, Homo sapien
gctggtccaaacacgctgaaattga

SEQ ID NO: 2905863 - DNA, 25 bp, Homo sapien
aagctgcaggtgaccacatgtacca

SEQ ID NO: 2905864 - DNA, 25 bp, Homo sapien
ctgcaggtgaccacatgtaccaggc

SEQ ID NO: 2905865 - DNA, 25 bp, Homo sapien
gaagctgcaggtgaccacatgtacc

SEQ ID NO: 2905866 - DNA, 25 bp, Homo sapien
aagaagctgcaggtgaccacatgta

SEQ ID NO: 2905867 - DNA, 25 bp, Homo sapien
taagaacaattaagatgcgatggac

SEQ ID NO: 2905868 - DNA, 25 bp, Homo sapien
catcacgccttgtgcatgtatcaca

SEQ ID NO: 2905869 - DNA, 25 bp, Homo sapien
gatggacttcgcagtcgaccacctt

SEQ ID NO: 2905870 - DNA, 25 bp, Homo sapien
tagctcctgctgtacatcacgcctt

SEQ ID NO: 2905871 - DNA, 25 bp, Homo sapien
aaattgatttgaagagggcccccag

SEQ ID NO: 2905872 - DNA, 25 bp, Homo sapien
aatccctgatctagtccaatgcctg

SEQ ID NO: 2905873 - DNA, 25 bp, Homo sapien
tccgggtgattcaaaggtgaaggca

SEQ ID NO: 2905874 - DNA, 25 bp, Homo sapien
tgtccctaccctaagttgttgatga

SEQ ID NO: 2905875 - DNA, 25 bp, Homo sapien
tgctacctacacatgacaatcactg

SEQ ID NO: 2905876 - DNA, 25 bp, Homo sapien
gaaaggaacctcagacatcacctta

SEQ ID NO: 2905877 - DNA, 25 bp, Homo sapien
tcaatgctacctacacatgacaatc

SEQ ID NO: 2905878 - DNA, 25 bp, Homo sapien
ctcagacatcaccttacttagtgac

SEQ ID NO: 2905879 - DNA, 25 bp, Homo sapien
tgttgacccaatcctggagtgtgag

SEQ ID NO: 2905880 - DNA, 25 bp, Homo sapien
tgtgagaaacatcacgcttgttatg

SEQ ID NO: 2905881 - DNA, 25 bp, Homo sapien
caagcactatggtaggaactggtga

SEQ ID NO: 2905882 - DNA, 25 bp, Homo sapien
tgttatggctgagcctgaaagggac

SEQ ID NO: 2905883 - DNA, 25 bp, Homo sapien
tgtagctcaatgcaagaacaaggct

SEQ ID NO: 2905884 - DNA, 25 bp, Homo sapien
cacaaggttccgcttcaagattggc

SEQ ID NO: 2905885 - DNA, 25 bp, Homo sapien
caaatctgcgtacagtggctaagca

SEQ ID NO: 2905886 - DNA, 25 bp, Homo sapien
ctgaaatagaaggaatacggtctcc

SEQ ID NO: 2905887 - DNA, 25 bp, Homo sapien
cacgtggccattcagatctaatctc

SEQ ID NO: 2905888 - DNA, 25 bp, Homo sapien
tgcagattcttacagatgggactca

SEQ ID NO: 2905889 - DNA, 25 bp, Homo sapien
gatgggactcagaagatcacgtggc

SEQ ID NO: 2905890 - DNA, 25 bp, Homo sapien
aagagcagtctaaaacagcacaaaa

SEQ ID NO: 2905891 - DNA, 25 bp, Homo sapien
tagctgactgaatgatataagatgc

SEQ ID NO: 2905892 - DNA, 25 bp, Homo sapien
cactgcttagatcagagagatcaca

SEQ ID NO: 2905893 - DNA, 25 bp, Homo sapien
aggtccttgacatgagcgctacaga

SEQ ID NO: 2905894 - DNA, 25 bp, Homo sapien
caaaaggtttaacactgcttagatc

SEQ ID NO: 2905895 - DNA, 25 bp, Homo sapien
ccttcgaacatccaaatgctcttgg

SEQ ID NO: 2905896 - DNA, 25 bp, Homo sapien
gctcctctttccacgacgggttaga

SEQ ID NO: 2905897 - DNA, 25 bp, Homo sapien
tgtgcctgcgggtttgcatttaaga

SEQ ID NO: 2905898 - DNA, 25 bp, Homo sapien
gggttagatgtcaaacatcctctcc

SEQ ID NO: 2905899 - DNA, 25 bp, Homo sapien
gaacctgggctactctctgcaaggg

SEQ ID NO: 2905900 - DNA, 25 bp, Homo sapien
tctgattcccgtctgcaactgaggg

SEQ ID NO: 2905901 - DNA, 25 bp, Homo sapien
cacctgtggcagagcaatcgtaaat

SEQ ID NO: 2905902 - DNA, 25 bp, Homo sapien
tatactgtagttggaccctgccatg

SEQ ID NO: 2905903 - DNA, 25 bp, Homo sapien
tcctcctcggtaacgtgaataatta

SEQ ID NO: 2905904 - DNA, 25 bp, Homo sapien
tgctacgaagcaaattcaaggccct

SEQ ID NO: 2905905 - DNA, 25 bp, Homo sapien
aatgcaggcccaccagggtagctgc

SEQ ID NO: 2905906 - DNA, 25 bp, Homo sapien
ttttaaacccaggtgcagttgatgg

SEQ ID NO: 2905907 - DNA, 25 bp, Homo sapien
ttccactgtctgaaggatggactgg

SEQ ID NO: 2905908 - DNA, 25 bp, Homo sapien
tgaggaggtgccattgttaacaggt

SEQ ID NO: 2905909 - DNA, 25 bp, Homo sapien
cccaaaactgaatgtcatacctatc

SEQ ID NO: 2905910 - DNA, 25 bp, Homo sapien
cataaaatagaaagtgcccctccct

SEQ ID NO: 2905911 - DNA, 25 bp, Homo sapien
acaacgaggcggatacaagctggcc

SEQ ID NO: 2905912 - DNA, 25 bp, Homo sapien
caaacctggaacgagtgcagcaacg

SEQ ID NO: 2905913 - DNA, 25 bp, Homo sapien
gaggccgcgagcattcagacgtgat

SEQ ID NO: 2905914 - DNA, 25 bp, Homo sapien
tgtgtcccggtcttgcatgtagtga

SEQ ID NO: 2905915 - DNA, 25 bp, Homo sapien
aactgcctatgccatgcccaggaac

SEQ ID NO: 2905916 - DNA, 25 bp, Homo sapien
gcgaagccagaacacccttagcaaa

SEQ ID NO: 2905917 - DNA, 25 bp, Homo sapien
agcccgaagagaggatcgagcgtcc

SEQ ID NO: 2905918 - DNA, 25 bp, Homo sapien
ttcacactgctcagaagcccgaaga

SEQ ID NO: 2905919 - DNA, 25 bp, Homo sapien
gaagcctggcgcgaacttgctgaga

SEQ ID NO: 2905920 - DNA, 25 bp, Homo sapien
cataggactccttagtgactcaggg

SEQ ID NO: 2905921 - DNA, 25 bp, Homo sapien
ggacgatagacacccttaggtggcc

SEQ ID NO: 2905922 - DNA, 25 bp, Homo sapien
ggtgaagcctcacacctcaaggaca

SEQ ID NO: 2905923 - DNA, 25 bp, Homo sapien
taatcccggtgctaaaaacaacagc

SEQ ID NO: 2905924 - DNA, 25 bp, Homo sapien
tatttggaacggctgagatctcgat

SEQ ID NO: 2905925 - DNA, 25 bp, Homo sapien
gatccggttaccctcagcaatgctg

SEQ ID NO: 2905926 - DNA, 25 bp, Homo sapien
tggatcacccgacagctgagagctt

SEQ ID NO: 2905927 - DNA, 25 bp, Homo sapien
tacatggccaagcacaagattaaaa

SEQ ID NO: 2905928 - DNA, 25 bp, Homo sapien
catggccaagcacaagattaaaaaa

SEQ ID NO: 2905929 - DNA, 25 bp, Homo sapien
aaatacatggccaagcacaagatta

SEQ ID NO: 2905930 - DNA, 25 bp, Homo sapien
aatacatggccaagcacaagattaa

SEQ ID NO: 2905931 - DNA, 25 bp, Homo sapien
cattagagggacctggcgttagcac

SEQ ID NO: 2905932 - DNA, 25 bp, Homo sapien
tctcctgggcgtataaaaacacatg

SEQ ID NO: 2905933 - DNA, 25 bp, Homo sapien
taaatgcggtgctgggccattagag

SEQ ID NO: 2905934 - DNA, 25 bp, Homo sapien
tcagcgccttcaagattccgaggaa

SEQ ID NO: 2905935 - DNA, 25 bp, Homo sapien
tccgcatctgcaggaaagggttccc

SEQ ID NO: 2905936 - DNA, 25 bp, Homo sapien
ttcgaaagaacagatatggacctcc

SEQ ID NO: 2905937 - DNA, 25 bp, Homo sapien
tgagacacctgctggctcgctaggt

SEQ ID NO: 2905938 - DNA, 25 bp, Homo sapien
tctgcaccagctgcggtgtaacggt

SEQ ID NO: 2905939 - DNA, 25 bp, Homo sapien
ccacgtttgccacggcggatggtaa

SEQ ID NO: 2905940 - DNA, 25 bp, Homo sapien
tatgcgggcaccgtggactacagtg

SEQ ID NO: 2905941 - DNA, 25 bp, Homo sapien
gctcatcgagaaggtatccagttcc

SEQ ID NO: 2905942 - DNA, 25 bp, Homo sapien
gaacaaggaccctctgaacgagact

SEQ ID NO: 2905943 - DNA, 25 bp, Homo sapien
gttttgctcaaatcattcttctcgg

SEQ ID NO: 2905944 - DNA, 25 bp, Homo sapien
ttgctcaaatcattcttctcggctt

SEQ ID NO: 2905945 - DNA, 25 bp, Homo sapien
ctgttttgctcaaatcattcttctc

SEQ ID NO: 2905946 - DNA, 25 bp, Homo sapien
tttgctcaaatcattcttctcggct

SEQ ID NO: 2905947 - DNA, 25 bp, Homo sapien
tgaggccccaaagtgccaactagtg

SEQ ID NO: 2905948 - DNA, 25 bp, Homo sapien
tagtgcacctaaacttcaactctct

SEQ ID NO: 2905949 - DNA, 25 bp, Homo sapien
gaaaaattagggcagcttttagaca

SEQ ID NO: 2905950 - DNA, 25 bp, Homo sapien
gcagcttttagacatgaggccccaa

SEQ ID NO: 2905951 - DNA, 25 bp, Homo sapien
tcgccatcacaatgtcagacgtgtc

SEQ ID NO: 2905952 - DNA, 25 bp, Homo sapien
caatgtcagacgtgtcacacaccat

SEQ ID NO: 2905953 - DNA, 25 bp, Homo sapien
ggccttggccaccaaggtttcgtga

SEQ ID NO: 2905954 - DNA, 25 bp, Homo sapien
ttcgtgaggaccttgaggtggtttc

SEQ ID NO: 2905955 - DNA, 25 bp, Homo sapien
cagctggtcgttgtcagtcaagctc

SEQ ID NO: 2905956 - DNA, 25 bp, Homo sapien
gttgtcagtcaagctccggaccact

SEQ ID NO: 2905957 - DNA, 25 bp, Homo sapien
cttttagagacttctagggccctgg

SEQ ID NO: 2905958 - DNA, 25 bp, Homo sapien
caagctccggaccactctgatgatg

SEQ ID NO: 2905959 - DNA, 25 bp, Homo sapien
caaaacggaggttccgtatgccagt

SEQ ID NO: 2905960 - DNA, 25 bp, Homo sapien
tgactgtgtgaatccaaccaaaacg

SEQ ID NO: 2905961 - DNA, 25 bp, Homo sapien
tgctatcgtgcgcttatggtgactg

SEQ ID NO: 2905962 - DNA, 25 bp, Homo sapien
gggcaacgtttttcagctgcaaatc

SEQ ID NO: 2905963 - DNA, 25 bp, Homo sapien
ggaattcatgctgtacatttgctaa

SEQ ID NO: 2905964 - DNA, 25 bp, Homo sapien
ggcctactgccataagaatttgact

SEQ ID NO: 2905965 - DNA, 25 bp, Homo sapien
gaggtcacagattttcatccatagg

SEQ ID NO: 2905966 - DNA, 25 bp, Homo sapien
gtagaatgtatctttggccccattt

SEQ ID NO: 2905967 - DNA, 25 bp, Homo sapien
tatgtttgaaatccctgccccagta

SEQ ID NO: 2905968 - DNA, 25 bp, Homo sapien
aaaggcagagagtaagtagattatc

SEQ ID NO: 2905969 - DNA, 25 bp, Homo sapien
tcctggaagtctttagcaatcacat

SEQ ID NO: 2905970 - DNA, 25 bp, Homo sapien
caatcacatttgctattggaggagc

SEQ ID NO: 2905971 - DNA, 25 bp, Homo sapien
aggcctctgactacgggctatgtaa

SEQ ID NO: 2905972 - DNA, 25 bp, Homo sapien
aaggcctctgactacgggctatgta

SEQ ID NO: 2905973 - DNA, 25 bp, Homo sapien
ggcctctgactacgggctatgtaac

SEQ ID NO: 2905974 - DNA, 25 bp, Homo sapien
cctctgactacgggctatgtaacag

SEQ ID NO: 2905975 - DNA, 25 bp, Homo sapien
aacagaacagttggctagtttggct

SEQ ID NO: 2905976 - DNA, 25 bp, Homo sapien
caatcatcagagcacgagtttctcc

SEQ ID NO: 2905977 - DNA, 25 bp, Homo sapien
catgctctggtccaacaatcatcag

SEQ ID NO: 2905978 - DNA, 25 bp, Homo sapien
tttggctaactcatagaaaacaagc

SEQ ID NO: 2905979 - DNA, 25 bp, Homo sapien
ctctgaactgtcacttagggcttca

SEQ ID NO: 2905980 - DNA, 25 bp, Homo sapien
tcacttagggcttcaggattgggtt

SEQ ID NO: 2905981 - DNA, 25 bp, Homo sapien
gaactgtcacttagggcttcaggat

SEQ ID NO: 2905982 - DNA, 25 bp, Homo sapien
tgtcacttagggcttcaggattggg

SEQ ID NO: 2905983 - DNA, 25 bp, Homo sapien
tattttggagaagactgatccacgc

SEQ ID NO: 2905984 - DNA, 25 bp, Homo sapien
tgaaggacacaacagggcatgctgc

SEQ ID NO: 2905985 - DNA, 25 bp, Homo sapien
tatgtctgtagtatcgccgcctggt

SEQ ID NO: 2905986 - DNA, 25 bp, Homo sapien
tgaacatctgcgatgacgccaaagg

SEQ ID NO: 2905987 - DNA, 25 bp, Homo sapien
tttaaagacaatctattagattctc

SEQ ID NO: 2905988 - DNA, 25 bp, Homo sapien
cctccattaaactggacaaactggg

SEQ ID NO: 2905989 - DNA, 25 bp, Homo sapien
tgtgtcagagaatgttagcacttca

SEQ ID NO: 2905990 - DNA, 25 bp, Homo sapien
tttagctgttcttggctgaatcctc

SEQ ID NO: 2905991 - DNA, 25 bp, Homo sapien
cattcaaccagtttagctgttcttg

SEQ ID NO: 2905992 - DNA, 25 bp, Homo sapien
gatttggtatggtcccctaactgaa

SEQ ID NO: 2905993 - DNA, 25 bp, Homo sapien
gagcctgtagcacacatgccctgtg

SEQ ID NO: 2905994 - DNA, 25 bp, Homo sapien
tataagctgattgcaacctggattc

SEQ ID NO: 2905995 - DNA, 25 bp, Homo sapien
gaggaaaggatccaagccctggtaa

SEQ ID NO: 2905996 - DNA, 25 bp, Homo sapien
ctctgccttctggtttcaggtgatt

SEQ ID NO: 2905997 - DNA, 25 bp, Homo sapien
tgccttctggtttcaggtgattctc

SEQ ID NO: 2905998 - DNA, 25 bp, Homo sapien
caacctctgccttctggtttcaggt

SEQ ID NO: 2905999 - DNA, 25 bp, Homo sapien
acctctgccttctggtttcaggtga

SEQ ID NO: 2906000 - DNA, 25 bp, Homo sapien
gacgtggtatacaccaaaaggatcc

SEQ ID NO: 2906001 - DNA, 25 bp, Homo sapien
ccatcatgggtgtgaccagcaaaga

SEQ ID NO: 2906002 - DNA, 25 bp, Homo sapien
gatagacatgaactgtgccaaaggc

SEQ ID NO: 2906003 - DNA, 25 bp, Homo sapien
ggatcctcagagtagccaccatcat

SEQ ID NO: 2906004 - DNA, 25 bp, Homo sapien
taaattagactaacaatggaaggct

SEQ ID NO: 2906005 - DNA, 25 bp, Homo sapien
taggagggacaaacacaaagctcat

SEQ ID NO: 2906006 - DNA, 25 bp, Homo sapien
tgtaattcataattctatctggaac

SEQ ID NO: 2906007 - DNA, 25 bp, Homo sapien
ctaacaatggaaggctctttctttc

SEQ ID NO: 2906008 - DNA, 25 bp, Homo sapien
tacctgagcttatatgctgaacttg

SEQ ID NO: 2906009 - DNA, 25 bp, Homo sapien
ttatgaggactatacacccctgcct

SEQ ID NO: 2906010 - DNA, 25 bp, Homo sapien
gccaaataagatccctcatgaggac

SEQ ID NO: 2906011 - DNA, 25 bp, Homo sapien
tgaggactatatgccccttatgagg

SEQ ID NO: 2906012 - DNA, 25 bp, Homo sapien
gcacctttctggtgaatcgtcacag

SEQ ID NO: 2906013 - DNA, 25 bp, Homo sapien
gagtacattatagtcacctctgtgg

SEQ ID NO: 2906014 - DNA, 25 bp, Homo sapien
taagggctccacactatctggcaag

SEQ ID NO: 2906015 - DNA, 25 bp, Homo sapien
tctgtggtcagctgaacagtggccc

SEQ ID NO: 2906016 - DNA, 25 bp, Homo sapien
tccacaggttaggagagtgtaaatg

SEQ ID NO: 2906017 - DNA, 25 bp, Homo sapien
tctaggaaagagatctgggaaatac

SEQ ID NO: 2906018 - DNA, 25 bp, Homo sapien
aagaacgagtagtgccttccacagg

SEQ ID NO: 2906019 - DNA, 25 bp, Homo sapien
tgtgggctctatccattgaccaagt

SEQ ID NO: 2906020 - DNA, 25 bp, Homo sapien
tgataagccctgacaagacaaaaag

SEQ ID NO: 2906021 - DNA, 25 bp, Homo sapien
taacattgataagccctgacaagac

SEQ ID NO: 2906022 - DNA, 25 bp, Homo sapien
caaggtcaaatattgattctctaaa

SEQ ID NO: 2906023 - DNA, 25 bp, Homo sapien
tataacattgataagccctgacaag

SEQ ID NO: 2906024 - DNA, 25 bp, Homo sapien
cacaataaaccaagaatggcaggat

SEQ ID NO: 2906025 - DNA, 25 bp, Homo sapien
tacaaaaagactatatgtttggcca

SEQ ID NO: 2906026 - DNA, 25 bp, Homo sapien
aaggactgaaatcctacagagtatg

SEQ ID NO: 2906027 - DNA, 25 bp, Homo sapien
gtatggacctaataacatagcttcc

SEQ ID NO: 2906028 - DNA, 25 bp, Homo sapien
tttatcctgatgtaggccggatgcg

SEQ ID NO: 2906029 - DNA, 25 bp, Homo sapien
tatcctgatgtaggccggatgcggt

SEQ ID NO: 2906030 - DNA, 25 bp, Homo sapien
catatttttctatgtggctatctgg

SEQ ID NO: 2906031 - DNA, 25 bp, Homo sapien
ggttatctcaacaccacttattaga

SEQ ID NO: 2906032 - DNA, 25 bp, Homo sapien
tgacatgaccctagtaaacctttga

SEQ ID NO: 2906033 - DNA, 25 bp, Homo sapien
tttaatgtgtttcagtccgtgacag

SEQ ID NO: 2906034 - DNA, 25 bp, Homo sapien
tgttccaggcgcatgttatacccag

SEQ ID NO: 2906035 - DNA, 25 bp, Homo sapien
tacccaggatcatgttttaggccac

SEQ ID NO: 2906036 - DNA, 25 bp, Homo sapien
tggcgccagcgctgtggcgggcctg

SEQ ID NO: 2906037 - DNA, 25 bp, Homo sapien
tgtggcgggcctgcaacggactcat

SEQ ID NO: 2906038 - DNA, 25 bp, Homo sapien
gcgccgtgttctccgagccatggcg

SEQ ID NO: 2906039 - DNA, 25 bp, Homo sapien
gccccgcgccgtgttctccgagcca

SEQ ID NO: 2906040 - DNA, 25 bp, Homo sapien
tcctgatttgaagcgataaagactc

SEQ ID NO: 2906041 - DNA, 25 bp, Homo sapien
cagaaatgaggcctatggatgtgta

SEQ ID NO: 2906042 - DNA, 25 bp, Homo sapien
tatttcagtgtcttcggttcataag

SEQ ID NO: 2906043 - DNA, 25 bp, Homo sapien
gcagaagggcgaattacaaaacaga

SEQ ID NO: 2906044 - DNA, 25 bp, Homo sapien
gatattgtttatatccaggtatgtc

SEQ ID NO: 2906045 - DNA, 25 bp, Homo sapien
cttggatattgtttatatccaggta

SEQ ID NO: 2906046 - DNA, 25 bp, Homo sapien
tgtttatatccaggtatgtcaggtg

SEQ ID NO: 2906047 - DNA, 25 bp, Homo sapien
tattgtttatatccaggtatgtcag

SEQ ID NO: 2906048 - DNA, 25 bp, Homo sapien
aatacagtaaagcccgtagctgtca

SEQ ID NO: 2906049 - DNA, 25 bp, Homo sapien
cagtaaagcccgtagctgtcatcag

SEQ ID NO: 2906050 - DNA, 25 bp, Homo sapien
tacagtaaagcccgtagctgtcatc

SEQ ID NO: 2906051 - DNA, 25 bp, Homo sapien
acagtaaagcccgtagctgtcatca

SEQ ID NO: 2906052 - DNA, 25 bp, Homo sapien
cagccttcgcttcagacttggttct

SEQ ID NO: 2906053 - DNA, 25 bp, Homo sapien
gacttggttcttaagagagcatatt

SEQ ID NO: 2906054 - DNA, 25 bp, Homo sapien
agttcaagtacagccttcgcttcag

SEQ ID NO: 2906055 - DNA, 25 bp, Homo sapien
ctgagtggtccagccagcccgaagt

SEQ ID NO: 2906056 - DNA, 25 bp, Homo sapien
ctcaggaagaatcccacgccctctg

SEQ ID NO: 2906057 - DNA, 25 bp, Homo sapien
aggaagaatcccacgccctctgctg

SEQ ID NO: 2906058 - DNA, 25 bp, Homo sapien
gctcctcaggaagaatcccacgccc

SEQ ID NO: 2906059 - DNA, 25 bp, Homo sapien
acggaagtgactagaagtcagaagg

SEQ ID NO: 2906060 - DNA, 25 bp, Homo sapien
gacagggcacacaacaaggaattat

SEQ ID NO: 2906061 - DNA, 25 bp, Homo sapien
gcaggactggcaaactcagaactcc

SEQ ID NO: 2906062 - DNA, 25 bp, Homo sapien
gagccagatagtgaatgtctcagac

SEQ ID NO: 2906063 - DNA, 25 bp, Homo sapien
ggctctcagagtgggtcattatcat

SEQ ID NO: 2906064 - DNA, 25 bp, Homo sapien
gggacaagagcacacgagactggca

SEQ ID NO: 2906065 - DNA, 25 bp, Homo sapien
aaagctccctgagtgcattccacag

SEQ ID NO: 2906066 - DNA, 25 bp, Homo sapien
aaggtaaatcctatgcagtctgtta

SEQ ID NO: 2906067 - DNA, 25 bp, Homo sapien
gagtccaagtggatccctgaggtgt

SEQ ID NO: 2906068 - DNA, 25 bp, Homo sapien
caagtgaacattatacgggaacagg

SEQ ID NO: 2906069 - DNA, 25 bp, Homo sapien
gatggtggtcatatgttccaggaga

SEQ ID NO: 2906070 - DNA, 25 bp, Homo sapien
gggactcccgtgttcatgttcttgc

SEQ ID NO: 2906071 - DNA, 25 bp, Homo sapien
agcattagttgctcgtgtctgggac

SEQ ID NO: 2906072 - DNA, 25 bp, Homo sapien
gctttgagcataaaccacagatgaa

SEQ ID NO: 2906073 - DNA, 25 bp, Homo sapien
cactgacgggggctatgggaataaa

SEQ ID NO: 2906074 - DNA, 25 bp, Homo sapien
tagcagaggcctcaagctcaaagtg

SEQ ID NO: 2906075 - DNA, 25 bp, Homo sapien
catcacccagtgctgtccatagcag

SEQ ID NO: 2906076 - DNA, 25 bp, Homo sapien
catccctggacaaggagctctctgt

SEQ ID NO: 2906077 - DNA, 25 bp, Homo sapien
cagatgcagcatccctggacaagga

SEQ ID NO: 2906078 - DNA, 25 bp, Homo sapien
gagctctctgttccagaagtttctc

SEQ ID NO: 2906079 - DNA, 25 bp, Homo sapien
agaagtttctcctctgcaatagccc

SEQ ID NO: 2906080 - DNA, 25 bp, Homo sapien
tggccacacttgcaccatatccaag

SEQ ID NO: 2906081 - DNA, 25 bp, Homo sapien
ggccacacttgcaccatatccaagg

SEQ ID NO: 2906082 - DNA, 25 bp, Homo sapien
gccacacttgcaccatatccaagga

SEQ ID NO: 2906083 - DNA, 25 bp, Homo sapien
ctggccacacttgcaccatatccaa

SEQ ID NO: 2906084 - DNA, 25 bp, Homo sapien
gtcacagtggtccatccagattcag

SEQ ID NO: 2906085 - DNA, 25 bp, Homo sapien
tgaaggggcaactactgcctcaaac

SEQ ID NO: 2906086 - DNA, 25 bp, Homo sapien
ggttcctgagagaccaatattctga

SEQ ID NO: 2906087 - DNA, 25 bp, Homo sapien
cctgggtgcacatatgaaggggcaa

SEQ ID NO: 2906088 - DNA, 25 bp, Homo sapien
caatgtgattacctgtctggcaggg

SEQ ID NO: 2906089 - DNA, 25 bp, Homo sapien
ctgagattcaagctggcgtgcctgc

SEQ ID NO: 2906090 - DNA, 25 bp, Homo sapien
tttaaactgagagagtgaccggctc

SEQ ID NO: 2906091 - DNA, 25 bp, Homo sapien
tcttgccatagtctaaccactgagg

SEQ ID NO: 2906092 - DNA, 25 bp, Homo sapien
gaccggctctagaagcacatatggg

SEQ ID NO: 2906093 - DNA, 25 bp, Homo sapien
gggctaaggaaggtagccgtatgtc

SEQ ID NO: 2906094 - DNA, 25 bp, Homo sapien
aaattcaggcttacctccacactcg

SEQ ID NO: 2906095 - DNA, 25 bp, Homo sapien
gtccaaattcaggcttacctccaca

SEQ ID NO: 2906096 - DNA, 25 bp, Homo sapien
ttcaggcttacctccacactcgagg

SEQ ID NO: 2906097 - DNA, 25 bp, Homo sapien
tccttgacatctacatccggctttc

SEQ ID NO: 2906098 - DNA, 25 bp, Homo sapien
cctccttgacatctacatccggctt

SEQ ID NO: 2906099 - DNA, 25 bp, Homo sapien
ctccttgacatctacatccggcttt

SEQ ID NO: 2906100 - DNA, 25 bp, Homo sapien
taccacagcactgagcccatgggtg

SEQ ID NO: 2906101 - DNA, 25 bp, Homo sapien
acgctgctctgcgtcacttcagata

SEQ ID NO: 2906102 - DNA, 25 bp, Homo sapien
gctgtgccgcgtgcccaggaaggaa

SEQ ID NO: 2906103 - DNA, 25 bp, Homo sapien
aaggaacaggcctccacgctgctct

SEQ ID NO: 2906104 - DNA, 25 bp, Homo sapien
gctgtttatgaagggcctgagtagc

SEQ ID NO: 2906105 - DNA, 25 bp, Homo sapien
caggtttttatcaggagccctgctg

SEQ ID NO: 2906106 - DNA, 25 bp, Homo sapien
accagatctgacatcgctgctgttg

SEQ ID NO: 2906107 - DNA, 25 bp, Homo sapien
tggcaggttccagactccatcacaa

SEQ ID NO: 2906108 - DNA, 25 bp, Homo sapien
acattgagcaagacggtaagtggag

SEQ ID NO: 2906109 - DNA, 25 bp, Homo sapien
gatagacgaagatgaacctgtgatc

SEQ ID NO: 2906110 - DNA, 25 bp, Homo sapien
agaggatgctgacgtgatagacgaa

SEQ ID NO: 2906111 - DNA, 25 bp, Homo sapien
ctggcataaccgtgctaaggtggga

SEQ ID NO: 2906112 - DNA, 25 bp, Homo sapien
ctacagcagatcgggggtggcattg

SEQ ID NO: 2906113 - DNA, 25 bp, Homo sapien
gggtggcattgtcaaagccttcaga

SEQ ID NO: 2906114 - DNA, 25 bp, Homo sapien
ggggtggcattgtcaaagccttcag

SEQ ID NO: 2906115 - DNA, 25 bp, Homo sapien
gcagatcgggggtggcattgtcaaa

SEQ ID NO: 2906116 - DNA, 25 bp, Homo sapien
catgtggtcctttctcagtatgtgt

SEQ ID NO: 2906117 - DNA, 25 bp, Homo sapien
gacaacattaacctaatgaccgctt

SEQ ID NO: 2906118 - DNA, 25 bp, Homo sapien
agggcccaccctcatgacaacatta

SEQ ID NO: 2906119 - DNA, 25 bp, Homo sapien
aatctcatcttcttacagggacacc

SEQ ID NO: 2906120 - DNA, 25 bp, Homo sapien
cagtggcccctctgataatcatgta

SEQ ID NO: 2906121 - DNA, 25 bp, Homo sapien
gaccatgttgggctctttttcaatc

SEQ ID NO: 2906122 - DNA, 25 bp, Homo sapien
ggaaagagagattgcaggccttctc

SEQ ID NO: 2906123 - DNA, 25 bp, Homo sapien
agtccaggtctcctattccaaagag

SEQ ID NO: 2906124 - DNA, 25 bp, Homo sapien
ccaggatggccatagccttcatgga

SEQ ID NO: 2906125 - DNA, 25 bp, Homo sapien
gccttcatggagacccatgccagtg

SEQ ID NO: 2906126 - DNA, 25 bp, Homo sapien
caggatggccatagccttcatggag

SEQ ID NO: 2906127 - DNA, 25 bp, Homo sapien
ctgcattgtgagaaaatccatggag

SEQ ID NO: 2906128 - DNA, 25 bp, Homo sapien
gcattgtgagaaaatccatggagga

SEQ ID NO: 2906129 - DNA, 25 bp, Homo sapien
tgcattgtgagaaaatccatggagg

SEQ ID NO: 2906130 - DNA, 25 bp, Homo sapien
cagagccagaatccatccttgttcc

SEQ ID NO: 2906131 - DNA, 25 bp, Homo sapien
cctgcatggcagttccatatgcaga

SEQ ID NO: 2906132 - DNA, 25 bp, Homo sapien
agagccagaatccatccttgttcct

SEQ ID NO: 2906133 - DNA, 25 bp, Homo sapien
gactccgctgaaattgacgtcgtcg

SEQ ID NO: 2906134 - DNA, 25 bp, Homo sapien
cattaccaaggccaaattccgaagg

SEQ ID NO: 2906135 - DNA, 25 bp, Homo sapien
tgcctacagttacaaaagcaccttg

SEQ ID NO: 2906136 - DNA, 25 bp, Homo sapien
gaagcacacactgggtgcctacagt

SEQ ID NO: 2906137 - DNA, 25 bp, Homo sapien
tagacgctgcgtagcctcaagacag

SEQ ID NO: 2906138 - DNA, 25 bp, Homo sapien
tacacaattgccctcgctttagcgc

SEQ ID NO: 2906139 - DNA, 25 bp, Homo sapien
cttaggctcacagaattgcgtctcc

SEQ ID NO: 2906140 - DNA, 25 bp, Homo sapien
ctcaagacagcttacggagcccagc

SEQ ID NO: 2906141 - DNA, 25 bp, Homo sapien
gatgcatacatgactacatgagtct

SEQ ID NO: 2906142 - DNA, 25 bp, Homo sapien
caatatttgatggtgagatgcatac

SEQ ID NO: 2906143 - DNA, 25 bp, Homo sapien
tataagagacctatataatcaatat

SEQ ID NO: 2906144 - DNA, 25 bp, Homo sapien
tatttccaatgcctaacctaaaaca

SEQ ID NO: 2906145 - DNA, 25 bp, Homo sapien
ttcaggcccgtctatgactaatggt

SEQ ID NO: 2906146 - DNA, 25 bp, Homo sapien
ttgtacaatttttcaggcccgtcta

SEQ ID NO: 2906147 - DNA, 25 bp, Homo sapien
actaatggtggaatcttcaagaaat

SEQ ID NO: 2906148 - DNA, 25 bp, Homo sapien
cttcaagaaatcatgatgcatatcc

SEQ ID NO: 2906149 - DNA, 25 bp, Homo sapien
cgaatgctggagacacgttccagga

SEQ ID NO: 2906150 - DNA, 25 bp, Homo sapien
gagctctggcatgggtctgtattac

SEQ ID NO: 2906151 - DNA, 25 bp, Homo sapien
aaagtcactggcttggcgaatgctg

SEQ ID NO: 2906152 - DNA, 25 bp, Homo sapien
ttgtaggtcctagtgaagcttgcag

SEQ ID NO: 2906153 - DNA, 25 bp, Homo sapien
tggggtggatgaccgcctgcctcat

SEQ ID NO: 2906154 - DNA, 25 bp, Homo sapien
atggggtggatgaccgcctgcctca

SEQ ID NO: 2906155 - DNA, 25 bp, Homo sapien
gtgatggggtggatgaccgcctgcc

SEQ ID NO: 2906156 - DNA, 25 bp, Homo sapien
tgatggggtggatgaccgcctgcct

SEQ ID NO: 2906157 - DNA, 25 bp, Homo sapien
taaagctgaggttgctaagcagttc

SEQ ID NO: 2906158 - DNA, 25 bp, Homo sapien
tgagaatactaaacctgggctggct

SEQ ID NO: 2906159 - DNA, 25 bp, Homo sapien
gaatcatgcattctaacagaggctg

SEQ ID NO: 2906160 - DNA, 25 bp, Homo sapien
gctcagcaactgtaccactaataga

SEQ ID NO: 2906161 - DNA, 25 bp, Homo sapien
atgaatgggctgatagctgcaggct

SEQ ID NO: 2906162 - DNA, 25 bp, Homo sapien
tggagaaggtgcaatactctctggc

SEQ ID NO: 2906163 - DNA, 25 bp, Homo sapien
tgcaatactctctggctccaccgtt

SEQ ID NO: 2906164 - DNA, 25 bp, Homo sapien
acaggaagatgaatgggctgatagc

SEQ ID NO: 2906165 - DNA, 25 bp, Homo sapien
gctgtttgccagttggcacagagca

SEQ ID NO: 2906166 - DNA, 25 bp, Homo sapien
caatgcagccaaggcgatcaggagg

SEQ ID NO: 2906167 - DNA, 25 bp, Homo sapien
ggtgaggaaacctgcagccaatgca

SEQ ID NO: 2906168 - DNA, 25 bp, Homo sapien
ctttgatggtggctgtttgccagtt

SEQ ID NO: 2906169 - DNA, 25 bp, Homo sapien
gaatgaatgaacatgccctaggcat

SEQ ID NO: 2906170 - DNA, 25 bp, Homo sapien
tccaaaggctctaccattaacaggt

SEQ ID NO: 2906171 - DNA, 25 bp, Homo sapien
gcttaaatcacaatcccgccagtgg

SEQ ID NO: 2906172 - DNA, 25 bp, Homo sapien
ccatttgtgaagcaaaagtgcacgt

SEQ ID NO: 2906173 - DNA, 25 bp, Homo sapien
aaggcttcaacaaggccatcccaag

SEQ ID NO: 2906174 - DNA, 25 bp, Homo sapien
tctctgtgtgtacaaggcttcaaca

SEQ ID NO: 2906175 - DNA, 25 bp, Homo sapien
ggcttcaacaaggccatcccaagat

SEQ ID NO: 2906176 - DNA, 25 bp, Homo sapien
tctgtgtgtacaaggcttcaacaag

SEQ ID NO: 2906177 - DNA, 25 bp, Homo sapien
ggaaggagcctgtgatgggtggtcc

SEQ ID NO: 2906178 - DNA, 25 bp, Homo sapien
tgggtggtccaggaaagaaccagcc

SEQ ID NO: 2906179 - DNA, 25 bp, Homo sapien
cgtgggggaaggagcctgtgatggg

SEQ ID NO: 2906180 - DNA, 25 bp, Homo sapien
ggtggtccaggaaagaaccagccat

SEQ ID NO: 2906181 - DNA, 25 bp, Homo sapien
tcctggtccttactatggtcttgca

SEQ ID NO: 2906182 - DNA, 25 bp, Homo sapien
ctctgtgtcttattagcctcatgga

SEQ ID NO: 2906183 - DNA, 25 bp, Homo sapien
ggaaaggacgatgttaataacagca

SEQ ID NO: 2906184 - DNA, 25 bp, Homo sapien
aataaaatcctggtccttactatgg

SEQ ID NO: 2906185 - DNA, 25 bp, Homo sapien
tttcttggacagaggcaatctcctt

SEQ ID NO: 2906186 - DNA, 25 bp, Homo sapien
ccctgagcagcttatcaagatattt

SEQ ID NO: 2906187 - DNA, 25 bp, Homo sapien
tgttggaccgggattctggaactag

SEQ ID NO: 2906188 - DNA, 25 bp, Homo sapien
ttctgccctgagcagcttatcaaga

SEQ ID NO: 2906189 - DNA, 25 bp, Homo sapien
tcctgcttgggtctgggctatggtt

SEQ ID NO: 2906190 - DNA, 25 bp, Homo sapien
cctgcttgggtctgggctatggttc

SEQ ID NO: 2906191 - DNA, 25 bp, Homo sapien
acacccatgccttcagggtctctca

SEQ ID NO: 2906192 - DNA, 25 bp, Homo sapien
tggacacccatgccttcagggtctc

SEQ ID NO: 2906193 - DNA, 25 bp, Homo sapien
tgtaatgccacggaaaagaaatttc

SEQ ID NO: 2906194 - DNA, 25 bp, Homo sapien
tggagttgtaatgccacggaaaaga

SEQ ID NO: 2906195 - DNA, 25 bp, Homo sapien
cttggagttgtaatgccacggaaaa

SEQ ID NO: 2906196 - DNA, 25 bp, Homo sapien
agttgtaatgccacggaaaagaaat

SEQ ID NO: 2906197 - DNA, 25 bp, Homo sapien
tgaggaagacgtcagatcatccagg

SEQ ID NO: 2906198 - DNA, 25 bp, Homo sapien
tagacatagtgagagcttgatcagt

SEQ ID NO: 2906199 - DNA, 25 bp, Homo sapien
gttttcctcacgctggttcctcagg

SEQ ID NO: 2906200 - DNA, 25 bp, Homo sapien
ggttcctcaggttccttgccattcc

SEQ ID NO: 2906201 - DNA, 25 bp, Homo sapien
tgtgccttccgtgtatcaacttaaa

SEQ ID NO: 2906202 - DNA, 25 bp, Homo sapien
tatgcccaaccctttagtgatagag

SEQ ID NO: 2906203 - DNA, 25 bp, Homo sapien
agcatcctcaaggtaggtggcagag

SEQ ID NO: 2906204 - DNA, 25 bp, Homo sapien
tagacacatgagacaagaggttcca

SEQ ID NO: 2906205 - DNA, 25 bp, Homo sapien
gcaagacaatcacaggtacagaggt

SEQ ID NO: 2906206 - DNA, 25 bp, Homo sapien
gagggaatctgaccaagagcttaga

SEQ ID NO: 2906207 - DNA, 25 bp, Homo sapien
caaagtcaagaggaggcccctgagt

SEQ ID NO: 2906208 - DNA, 25 bp, Homo sapien
accccagggatatgccagtgaacca

SEQ ID NO: 2906209 - DNA, 25 bp, Homo sapien
tcctgtaccgaacaatagagagcca

SEQ ID NO: 2906210 - DNA, 25 bp, Homo sapien
tgtttgctctggtaggaacgtcacc

SEQ ID NO: 2906211 - DNA, 25 bp, Homo sapien
tagagagccacaaaataaccaagct

SEQ ID NO: 2906212 - DNA, 25 bp, Homo sapien
tgatagcagaggcaaaccagcaact

SEQ ID NO: 2906213 - DNA, 25 bp, Homo sapien
gccaggtggtaacagtccagcccac

SEQ ID NO: 2906214 - DNA, 25 bp, Homo sapien
ctgccaggtggtaacagtccagccc

SEQ ID NO: 2906215 - DNA, 25 bp, Homo sapien
tgccaggtggtaacagtccagccca

SEQ ID NO: 2906216 - DNA, 25 bp, Homo sapien
ggatctgtatcagcgtctttagtag

SEQ ID NO: 2906217 - DNA, 25 bp, Homo sapien
ggaacaacattccacacaaaagaat

SEQ ID NO: 2906218 - DNA, 25 bp, Homo sapien
gggacctgggttatgcagaaatgac

SEQ ID NO: 2906219 - DNA, 25 bp, Homo sapien
ggaaagatctacatctttatctgga

SEQ ID NO: 2906220 - DNA, 25 bp, Homo sapien
aacaataccaggaggtacaatgtgt

SEQ ID NO: 2906221 - DNA, 25 bp, Homo sapien
ggagtgggcttatatttagatatat

SEQ ID NO: 2906222 - DNA, 25 bp, Homo sapien
atgatgacagtaagaaagtctagca

SEQ ID NO: 2906223 - DNA, 25 bp, Homo sapien
caatgtgtagtagtggagtgggctt

SEQ ID NO: 2906224 - DNA, 25 bp, Homo sapien
caaatgtaggatggtcacttgcaga

SEQ ID NO: 2906225 - DNA, 25 bp, Homo sapien
taagtcctaactccaacctttatca

SEQ ID NO: 2906226 - DNA, 25 bp, Homo sapien
cttgaccttcaaatgtaggatggtc

SEQ ID NO: 2906227 - DNA, 25 bp, Homo sapien
ggtcacttgcagataagtcctaact

SEQ ID NO: 2906228 - DNA, 25 bp, Homo sapien
cactcataagctggtctcttgctga

SEQ ID NO: 2906229 - DNA, 25 bp, Homo sapien
gctgtgatcatctttttaattggcc

SEQ ID NO: 2906230 - DNA, 25 bp, Homo sapien
attggcccaactctggtggagctga

SEQ ID NO: 2906231 - DNA, 25 bp, Homo sapien
catcttggtcactcataagctggtc

SEQ ID NO: 2906232 - DNA, 25 bp, Homo sapien
tctccctatttctgaacacacattt

SEQ ID NO: 2906233 - DNA, 25 bp, Homo sapien
ccctatttctgaacacacatttctc

SEQ ID NO: 2906234 - DNA, 25 bp, Homo sapien
cctatttctgaacacacatttctcc

SEQ ID NO: 2906235 - DNA, 25 bp, Homo sapien
atttctgaacacacatttctccttt

SEQ ID NO: 2906236 - DNA, 25 bp, Homo sapien
taaacaaaacatcatgtgtttgatc

SEQ ID NO: 2906237 - DNA, 25 bp, Homo sapien
aacaaaacatcatgtgtttgatcat

SEQ ID NO: 2906238 - DNA, 25 bp, Homo sapien
aaacaaaacatcatgtgtttgatca

SEQ ID NO: 2906239 - DNA, 25 bp, Homo sapien
ctaaacaaaacatcatgtgtttgat

SEQ ID NO: 2906240 - DNA, 25 bp, Homo sapien
gatcagaagttctggttgcaaggta

SEQ ID NO: 2906241 - DNA, 25 bp, Homo sapien
ctgatctccaggtagtaggcagaat

SEQ ID NO: 2906242 - DNA, 25 bp, Homo sapien
gttctggttgcaaggtaagagctac

SEQ ID NO: 2906243 - DNA, 25 bp, Homo sapien
ctctgatctccaggtagtaggcaga

SEQ ID NO: 2906244 - DNA, 25 bp, Homo sapien
aaactctgtatcactcccactggct

SEQ ID NO: 2906245 - DNA, 25 bp, Homo sapien
attttatcctcatagagtgcaatgc

SEQ ID NO: 2906246 - DNA, 25 bp, Homo sapien
aactctgtatcactcccactggctg

SEQ ID NO: 2906247 - DNA, 25 bp, Homo sapien
atcctcatagagtgcaatgcttcca

SEQ ID NO: 2906248 - DNA, 25 bp, Homo sapien
tgtcccatattctggctaggacctg

SEQ ID NO: 2906249 - DNA, 25 bp, Homo sapien
gtcccatattctggctaggacctga

SEQ ID NO: 2906250 - DNA, 25 bp, Homo sapien
tcccatattctggctaggacctgac

SEQ ID NO: 2906251 - DNA, 25 bp, Homo sapien
cccatattctggctaggacctgacc

SEQ ID NO: 2906252 - DNA, 25 bp, Homo sapien
gaatatcctttttcgtgcttgtgca

SEQ ID NO: 2906253 - DNA, 25 bp, Homo sapien
cctttttcgtgcttgtgcatggcta

SEQ ID NO: 2906254 - DNA, 25 bp, Homo sapien
tccagaatatcctttttcgtgcttg

SEQ ID NO: 2906255 - DNA, 25 bp, Homo sapien
gcttgtgcatggctataaggttgga

SEQ ID NO: 2906256 - DNA, 25 bp, Homo sapien
agttaaccatgagcccacagagtct

SEQ ID NO: 2906257 - DNA, 25 bp, Homo sapien
tccttttggtccttagagtctactg

SEQ ID NO: 2906258 - DNA, 25 bp, Homo sapien
tggtccttagagtctactggaagaa

SEQ ID NO: 2906259 - DNA, 25 bp, Homo sapien
ctagagatggtccaaacattcttgt

SEQ ID NO: 2906260 - DNA, 25 bp, Homo sapien
taatgaagactgtgtagaagaggaa

SEQ ID NO: 2906261 - DNA, 25 bp, Homo sapien
aggaaaggtgggttctggacagcac

SEQ ID NO: 2906262 - DNA, 25 bp, Homo sapien
tgtgggctccagtgattgatttaat

SEQ ID NO: 2906263 - DNA, 25 bp, Homo sapien
gaggaagggcagcaatgtgggctcc

SEQ ID NO: 2906264 - DNA, 25 bp, Homo sapien
cacagtaggtttcttggactcttac

SEQ ID NO: 2906265 - DNA, 25 bp, Homo sapien
aaattaagggagcttgccagtttgc

SEQ ID NO: 2906266 - DNA, 25 bp, Homo sapien
aagggagcttgccagtttgccacag

SEQ ID NO: 2906267 - DNA, 25 bp, Homo sapien
agtttgccacagtaggtttcttgga

SEQ ID NO: 2906268 - DNA, 25 bp, Homo sapien
ctgctgtaagtatctttcattttca

SEQ ID NO: 2906269 - DNA, 25 bp, Homo sapien
gatgtctgcttctgctgtaagtatc

SEQ ID NO: 2906270 - DNA, 25 bp, Homo sapien
gcagatgtctgcttctgctgtaagt

SEQ ID NO: 2906271 - DNA, 25 bp, Homo sapien
tctgctgtaagtatctttcattttc

SEQ ID NO: 2906272 - DNA, 25 bp, Homo sapien
taaccccatgtgtaggtaaatactg

SEQ ID NO: 2906273 - DNA, 25 bp, Homo sapien
caactgtcctgagattgcagcatac

SEQ ID NO: 2906274 - DNA, 25 bp, Homo sapien
taagctcataaaaatccccaggtac

SEQ ID NO: 2906275 - DNA, 25 bp, Homo sapien
ttggcttggagtaatgaagatcccc

SEQ ID NO: 2906276 - DNA, 25 bp, Homo sapien
gatagccgtccgtgttcccaactct

SEQ ID NO: 2906277 - DNA, 25 bp, Homo sapien
aactctcttagatccctcaataacc

SEQ ID NO: 2906278 - DNA, 25 bp, Homo sapien
tcaattccgatagccgtccgtgttc

SEQ ID NO: 2906279 - DNA, 25 bp, Homo sapien
ccaactctcttagatccctcaataa

SEQ ID NO: 2906280 - DNA, 25 bp, Homo sapien
tcaatcggtccattgggctgcctgt

SEQ ID NO: 2906281 - DNA, 25 bp, Homo sapien
aaacagaagggtttcctgcctggtg

SEQ ID NO: 2906282 - DNA, 25 bp, Homo sapien
acagaagggtttcctgcctggtggt

SEQ ID NO: 2906283 - DNA, 25 bp, Homo sapien
ctggtggtgagagaagtcctcaatc

SEQ ID NO: 2906284 - DNA, 25 bp, Homo sapien
tgaagtctgggtcagctgaaacctc

SEQ ID NO: 2906285 - DNA, 25 bp, Homo sapien
aaacctctggcttgaagagcctcat

SEQ ID NO: 2906286 - DNA, 25 bp, Homo sapien
gaagtctgggtcagctgaaacctct

SEQ ID NO: 2906287 - DNA, 25 bp, Homo sapien
gctgaaacctctggcttgaagagcc

SEQ ID NO: 2906288 - DNA, 25 bp, Homo sapien
gggcttgatagatgaagtagaatga

SEQ ID NO: 2906289 - DNA, 25 bp, Homo sapien
cattcccgtttgaagattcaaatac

SEQ ID NO: 2906290 - DNA, 25 bp, Homo sapien
ctttcttaggggcttgatagatgaa

SEQ ID NO: 2906291 - DNA, 25 bp, Homo sapien
aaactcattcccgtttgaagattca

SEQ ID NO: 2906292 - DNA, 25 bp, Homo sapien
cttaaatatcagcaggctgtaccaa

SEQ ID NO: 2906293 - DNA, 25 bp, Homo sapien
cagcaggctgtaccaaaaatcaaaa

SEQ ID NO: 2906294 - DNA, 25 bp, Homo sapien
tcccttaaatatcagcaggctgtac

SEQ ID NO: 2906295 - DNA, 25 bp, Homo sapien
tattcccttaaatatcagcaggctg

SEQ ID NO: 2906296 - DNA, 25 bp, Homo sapien
tgctcctcttttctctttgaagcta

SEQ ID NO: 2906297 - DNA, 25 bp, Homo sapien
tcagaagagaatctctgctcctctt

SEQ ID NO: 2906298 - DNA, 25 bp, Homo sapien
gaagagaatctctgctcctcttttc

SEQ ID NO: 2906299 - DNA, 25 bp, Homo sapien
gctcctcttttctctttgaagctac

SEQ ID NO: 2906300 - DNA, 25 bp, Homo sapien
ctggacccatcataagaaccagaca

SEQ ID NO: 2906301 - DNA, 25 bp, Homo sapien
tggacccatcataagaaccagacat

SEQ ID NO: 2906302 - DNA, 25 bp, Homo sapien
gctggacccatcataagaaccagac

SEQ ID NO: 2906303 - DNA, 25 bp, Homo sapien
atacaggtatgctcaagggatcctg

SEQ ID NO: 2906304 - DNA, 25 bp, Homo sapien
acagctttttgcaaatcgtactgga

SEQ ID NO: 2906305 - DNA, 25 bp, Homo sapien
ggagctcagacaaatcaagatgtct

SEQ ID NO: 2906306 - DNA, 25 bp, Homo sapien
tttgcaaatcgtactggagctcaga

SEQ ID NO: 2906307 - DNA, 25 bp, Homo sapien
gcaaatcgtactggagctcagacaa

SEQ ID NO: 2906308 - DNA, 25 bp, Homo sapien
tctaaatgatacctaaatcctgttg

SEQ ID NO: 2906309 - DNA, 25 bp, Homo sapien
tcatctaaatgatacctaaatcctg

SEQ ID NO: 2906310 - DNA, 25 bp, Homo sapien
taaatgatacctaaatcctgttgtt

SEQ ID NO: 2906311 - DNA, 25 bp, Homo sapien
ctgcttcatctaaatgatacctaaa

SEQ ID NO: 2906312 - DNA, 25 bp, Homo sapien
tacactcacctttgcaatgatttgt

SEQ ID NO: 2906313 - DNA, 25 bp, Homo sapien
tatacactcacctttgcaatgattt

SEQ ID NO: 2906314 - DNA, 25 bp, Homo sapien
gtatacactcacctttgcaatgatt

SEQ ID NO: 2906315 - DNA, 25 bp, Homo sapien
tgtatacactcacctttgcaatgat

SEQ ID NO: 2906316 - DNA, 25 bp, Homo sapien
tattgtgaaagtctcttgagcaagt

SEQ ID NO: 2906317 - DNA, 25 bp, Homo sapien
ttaggacactctggagttttttgga

SEQ ID NO: 2906318 - DNA, 25 bp, Homo sapien
aggacactctggagttttttggaca

SEQ ID NO: 2906319 - DNA, 25 bp, Homo sapien
aaagtctcttgagcaagtacatttc

SEQ ID NO: 2906320 - DNA, 25 bp, Homo sapien
ctgctggtaggcatatgtgcatgtg

SEQ ID NO: 2906321 - DNA, 25 bp, Homo sapien
actgctggtaggcatatgtgcatgt

SEQ ID NO: 2906322 - DNA, 25 bp, Homo sapien
gtctattggtgttttgcagccgctc

SEQ ID NO: 2906323 - DNA, 25 bp, Homo sapien
gcactgaggtattacatatcccgac

SEQ ID NO: 2906324 - DNA, 25 bp, Homo sapien
tcccgcagacgctggagagtatgtg

SEQ ID NO: 2906325 - DNA, 25 bp, Homo sapien
gacctcttttcttcccgctgtgaca

SEQ ID NO: 2906326 - DNA, 25 bp, Homo sapien
ggtgtacttttacggctgccacaca

SEQ ID NO: 2906327 - DNA, 25 bp, Homo sapien
ttgaagagaaatccgagtggtgtac

SEQ ID NO: 2906328 - DNA, 25 bp, Homo sapien
tgagtgatttatgatgagcagtgta

SEQ ID NO: 2906329 - DNA, 25 bp, Homo sapien
tgatgagcagtgtatctttgcattc

SEQ ID NO: 2906330 - DNA, 25 bp, Homo sapien
gttggcaaagtgcacagcagtccag

SEQ ID NO: 2906331 - DNA, 25 bp, Homo sapien
tggcaaagtgcacagcagtccagaa

SEQ ID NO: 2906332 - DNA, 25 bp, Homo sapien
aatactggcgcatcccaccatacct

SEQ ID NO: 2906333 - DNA, 25 bp, Homo sapien
gggaatactggcgcatcccaccata

SEQ ID NO: 2906334 - DNA, 25 bp, Homo sapien
tggagcctcaaagtctatgccccga

SEQ ID NO: 2906335 - DNA, 25 bp, Homo sapien
gcttgaatgaagtgctaccccacca

SEQ ID NO: 2906336 - DNA, 25 bp, Homo sapien
cgtggatttccacacagaatgctgc

SEQ ID NO: 2906337 - DNA, 25 bp, Homo sapien
tttcaggcagggctagggaacagac

SEQ ID NO: 2906338 - DNA, 25 bp, Homo sapien
tccacttgagaagctctgaaactct

SEQ ID NO: 2906339 - DNA, 25 bp, Homo sapien
gcaacatttccactggtgtgctttc

SEQ ID NO: 2906340 - DNA, 25 bp, Homo sapien
aaacatggcagacactctttgcaac

SEQ ID NO: 2906341 - DNA, 25 bp, Homo sapien
tccacaaaggatgtgggaatgccaa

SEQ ID NO: 2906342 - DNA, 25 bp, Homo sapien
gacagcagactgcaggaatagcttg

SEQ ID NO: 2906343 - DNA, 25 bp, Homo sapien
tgagaagagatcagtgacctgtggc

SEQ ID NO: 2906344 - DNA, 25 bp, Homo sapien
cgaggtgacatagtccagtgagcac

SEQ ID NO: 2906345 - DNA, 25 bp, Homo sapien
tgagcaccctggcacttgactgaga

SEQ ID NO: 2906346 - DNA, 25 bp, Homo sapien
ttgctagaaagcgaggagaaccgtc

SEQ ID NO: 2906347 - DNA, 25 bp, Homo sapien
gctgtgagggtttatttgctagaaa

SEQ ID NO: 2906348 - DNA, 25 bp, Homo sapien
cactgattccattgaagctgtgagg

SEQ ID NO: 2906349 - DNA, 25 bp, Homo sapien
gaaccgtcaacaattgaatcatgtg

SEQ ID NO: 2906350 - DNA, 25 bp, Homo sapien
tggctgtgactggaaattcttgtgt

SEQ ID NO: 2906351 - DNA, 25 bp, Homo sapien
tctgtggctgtgactggaaattctt

SEQ ID NO: 2906352 - DNA, 25 bp, Homo sapien
tcctgctttaagcttatggcagtcc

SEQ ID NO: 2906353 - DNA, 25 bp, Homo sapien
tattttccattaagagcctgtttgc

SEQ ID NO: 2906354 - DNA, 25 bp, Homo sapien
caggggagagaactaaggtactaat

SEQ ID NO: 2906355 - DNA, 25 bp, Homo sapien
gggagagaactaaggtactaatgag

SEQ ID NO: 2906356 - DNA, 25 bp, Homo sapien
gagaactaaggtactaatgagcaca

SEQ ID NO: 2906357 - DNA, 25 bp, Homo sapien
actaaggtactaatgagcacatcaa

SEQ ID NO: 2906358 - DNA, 25 bp, Homo sapien
cagggttttatcaccataattaaca

SEQ ID NO: 2906359 - DNA, 25 bp, Homo sapien
attggatctacttctagccattcat

SEQ ID NO: 2906360 - DNA, 25 bp, Homo sapien
gccattcattccagggttttatcac

SEQ ID NO: 2906361 - DNA, 25 bp, Homo sapien
accataattaacattgctgtgtgga

SEQ ID NO: 2906362 - DNA, 25 bp, Homo sapien
tggtggcagtgggcattagggtgga

SEQ ID NO: 2906363 - DNA, 25 bp, Homo sapien
gatggtggcagtgggcattagggtg

SEQ ID NO: 2906364 - DNA, 25 bp, Homo sapien
ggtggcagtgggcattagggtggaa

SEQ ID NO: 2906365 - DNA, 25 bp, Homo sapien
tggcagtgggcattagggtggaaga

SEQ ID NO: 2906366 - DNA, 25 bp, Homo sapien
tcaccaccagagttttccgaggcct

SEQ ID NO: 2906367 - DNA, 25 bp, Homo sapien
cgtttcctgaataggaatcaccacc

SEQ ID NO: 2906368 - DNA, 25 bp, Homo sapien
ttgctcttcgctttctcggcaaggc

SEQ ID NO: 2906369 - DNA, 25 bp, Homo sapien
cttgctcttcgctttctcggcaagg

SEQ ID NO: 2906370 - DNA, 25 bp, Homo sapien
cctagaaggtcttgtaagcctccat

SEQ ID NO: 2906371 - DNA, 25 bp, Homo sapien
ggtcttgtaagcctccattttccag

SEQ ID NO: 2906372 - DNA, 25 bp, Homo sapien
gaaggtcttgtaagcctccattttc

SEQ ID NO: 2906373 - DNA, 25 bp, Homo sapien
gtcttgtaagcctccattttccagg

SEQ ID NO: 2906374 - DNA, 25 bp, Homo sapien
gattcctactttccgccatgctcag

SEQ ID NO: 2906375 - DNA, 25 bp, Homo sapien
tcttgatgagttccctgcagttgcc

SEQ ID NO: 2906376 - DNA, 25 bp, Homo sapien
tgtggcaagtctatgagttggaacc

SEQ ID NO: 2906377 - DNA, 25 bp, Homo sapien
catgcagatcgtcagagtgtggcaa

SEQ ID NO: 2906378 - DNA, 25 bp, Homo sapien
ggtggcattggtgtggcggaggcag

SEQ ID NO: 2906379 - DNA, 25 bp, Homo sapien
ccctctattcaggaggaatccccta

SEQ ID NO: 2906380 - DNA, 25 bp, Homo sapien
aaggaattccctgcaaaccctctat

SEQ ID NO: 2906381 - DNA, 25 bp, Homo sapien
ccctactggcaagtgcacaccaggg

SEQ ID NO: 2906382 - DNA, 25 bp, Homo sapien
ccaagtccacctcctagaagttcag

SEQ ID NO: 2906383 - DNA, 25 bp, Homo sapien
gcaatttctaagctattcccttctt

SEQ ID NO: 2906384 - DNA, 25 bp, Homo sapien
aatttctaagctattcccttctttg

SEQ ID NO: 2906385 - DNA, 25 bp, Homo sapien
tgcaatttctaagctattcccttct

SEQ ID NO: 2906386 - DNA, 25 bp, Homo sapien
caatttctaagctattcccttcttt

SEQ ID NO: 2906387 - DNA, 25 bp, Homo sapien
gggcgatggcgccatcgaggcgcgg

SEQ ID NO: 2906388 - DNA, 25 bp, Homo sapien
ggctccggggcgatggcgccatcga

SEQ ID NO: 2906389 - DNA, 25 bp, Homo sapien
gcggcgcgcggtgcgcacggaccgg

SEQ ID NO: 2906390 - DNA, 25 bp, Homo sapien
atggcgccatcgaggcgcgggcggc

SEQ ID NO: 2906391 - DNA, 25 bp, Homo sapien
ggcgcggggaggcttccgcggcagg

SEQ ID NO: 2906392 - DNA, 25 bp, Homo sapien
gcggggaggcttccgcggcaggccg

SEQ ID NO: 2906393 - DNA, 25 bp, Homo sapien
gggaggcttccgcggcaggccgctc

SEQ ID NO: 2906394 - DNA, 25 bp, Homo sapien
ggaggcgccgcagcgccatggcggg

SEQ ID NO: 2906395 - DNA, 25 bp, Homo sapien
ggccgcgggctccgtggacgctggg

SEQ ID NO: 2906396 - DNA, 25 bp, Homo sapien
gccgcgggctccgtggacgctgggc

SEQ ID NO: 2906397 - DNA, 25 bp, Homo sapien
cgggctccgtggacgctgggcagca

SEQ ID NO: 2906398 - DNA, 25 bp, Homo sapien
tactggccgctcacgtcgtagtagc

SEQ ID NO: 2906399 - DNA, 25 bp, Homo sapien
tagtagcaggtaccgcagcagtaca

SEQ ID NO: 2906400 - DNA, 25 bp, Homo sapien
cgtaggagaccttggcgaagacgcc

SEQ ID NO: 2906401 - DNA, 25 bp, Homo sapien
caggtagccgctctcgctgttgtta

SEQ ID NO: 2906402 - DNA, 25 bp, Homo sapien
gggcagcattcagcgtgcaaccagg

SEQ ID NO: 2906403 - DNA, 25 bp, Homo sapien
gctcttggcgtaagttttggtagga

SEQ ID NO: 2906404 - DNA, 25 bp, Homo sapien
gggactgccatagtttgagctcttg

SEQ ID NO: 2906405 - DNA, 25 bp, Homo sapien
agcgtgcaaccagggactgccatag

SEQ ID NO: 2906406 - DNA, 25 bp, Homo sapien
ccagcacgcgagtttgaggtaccca

SEQ ID NO: 2906407 - DNA, 25 bp, Homo sapien
ggtctccttttggaatcactccaat

SEQ ID NO: 2906408 - DNA, 25 bp, Homo sapien
tcactccaattccagcacgcgagtt

SEQ ID NO: 2906409 - DNA, 25 bp, Homo sapien
catgaggtgcaagtggaagacaggg

SEQ ID NO: 2906410 - DNA, 25 bp, Homo sapien
ctgtgtgaggtggaagggtcagggc

SEQ ID NO: 2906411 - DNA, 25 bp, Homo sapien
gtgaggtggaagggtcagggcagca

SEQ ID NO: 2906412 - DNA, 25 bp, Homo sapien
gaggtggaagggtcagggcagcagg

SEQ ID NO: 2906413 - DNA, 25 bp, Homo sapien
gtgtgaggtggaagggtcagggcag

SEQ ID NO: 2906414 - DNA, 25 bp, Homo sapien
atcatcccaggcgatgacgaataaa

SEQ ID NO: 2906415 - DNA, 25 bp, Homo sapien
cagcatccaaagatgcctgctgcca

SEQ ID NO: 2906416 - DNA, 25 bp, Homo sapien
gcatccaaagatgcctgctgccagc

SEQ ID NO: 2906417 - DNA, 25 bp, Homo sapien
ggacaccgccctctgtatcatccca

SEQ ID NO: 2906418 - DNA, 25 bp, Homo sapien
cctagtttggcgtaaggggcatcag

SEQ ID NO: 2906419 - DNA, 25 bp, Homo sapien
aaaacaccaagagggacagtgacct

SEQ ID NO: 2906420 - DNA, 25 bp, Homo sapien
accaagagggacagtgacctctcca

SEQ ID NO: 2906421 - DNA, 25 bp, Homo sapien
aacaccaagagggacagtgacctct

SEQ ID NO: 2906422 - DNA, 25 bp, Homo sapien
acaaccggaccttgaggcgtgtggc

SEQ ID NO: 2906423 - DNA, 25 bp, Homo sapien
aaccggaccttgaggcgtgtggcag

SEQ ID NO: 2906424 - DNA, 25 bp, Homo sapien
tcaccgccctgtgacaaccggacct

SEQ ID NO: 2906425 - DNA, 25 bp, Homo sapien
tgacaaccggaccttgaggcgtgtg

SEQ ID NO: 2906426 - DNA, 25 bp, Homo sapien
cgtgggtcatcctggaagggaccat

SEQ ID NO: 2906427 - DNA, 25 bp, Homo sapien
tcccactccggcttaaggatggaaa

SEQ ID NO: 2906428 - DNA, 25 bp, Homo sapien
tcccgtcaggtcaccatggatttgc

SEQ ID NO: 2906429 - DNA, 25 bp, Homo sapien
tatgaccacacacccgtttctgctg

SEQ ID NO: 2906430 - DNA, 25 bp, Homo sapien
aaggtgcaaatgggctgctgctgcc

SEQ ID NO: 2906431 - DNA, 25 bp, Homo sapien
ctgtgtacaaggtgcaaatgggctg

SEQ ID NO: 2906432 - DNA, 25 bp, Homo sapien
ggtgcaaatgggctgctgctgccat

SEQ ID NO: 2906433 - DNA, 25 bp, Homo sapien
acaaggtgcaaatgggctgctgctg

SEQ ID NO: 2906434 - DNA, 25 bp, Homo sapien
tctggatttctgagctgtctaaatg

SEQ ID NO: 2906435 - DNA, 25 bp, Homo sapien
acgtctctggatttctgagctgtct

SEQ ID NO: 2906436 - DNA, 25 bp, Homo sapien
cttcggcctctgccacgtctctgga

SEQ ID NO: 2906437 - DNA, 25 bp, Homo sapien
tcggcctctgccacgtctctggatt

SEQ ID NO: 2906438 - DNA, 25 bp, Homo sapien
ttgtcttaagatgtcagccagagcc

SEQ ID NO: 2906439 - DNA, 25 bp, Homo sapien
tgcttggccgtacgcacaggagtgt

SEQ ID NO: 2906440 - DNA, 25 bp, Homo sapien
tttttggaggacgatctgaccggcg

SEQ ID NO: 2906441 - DNA, 25 bp, Homo sapien
tctttgggagaggtatcgatagccg

SEQ ID NO: 2906442 - DNA, 25 bp, Homo sapien
gatactattcccatctctaagcgca

SEQ ID NO: 2906443 - DNA, 25 bp, Homo sapien
gacgaggtatacagaaaccagaaga

SEQ ID NO: 2906444 - DNA, 25 bp, Homo sapien
tcagctcactagaagagacgaggta

SEQ ID NO: 2906445 - DNA, 25 bp, Homo sapien
tctaagcgcaaagtgaagagttcca

SEQ ID NO: 2906446 - DNA, 25 bp, Homo sapien
agtttcccagttcagctgcacagcc

SEQ ID NO: 2906447 - DNA, 25 bp, Homo sapien
gaagtttcccagttcagctgcacag

SEQ ID NO: 2906448 - DNA, 25 bp, Homo sapien
gcacagcccaggttttctggcttca

SEQ ID NO: 2906449 - DNA, 25 bp, Homo sapien
cagaagtttcccagttcagctgcac

SEQ ID NO: 2906450 - DNA, 25 bp, Homo sapien
cttggcccctctataggagggtgtc

SEQ ID NO: 2906451 - DNA, 25 bp, Homo sapien
ttggcccctctataggagggtgtct

SEQ ID NO: 2906452 - DNA, 25 bp, Homo sapien
ggcccctctataggagggtgtcttc

SEQ ID NO: 2906453 - DNA, 25 bp, Homo sapien
tggcccctctataggagggtgtctt

SEQ ID NO: 2906454 - DNA, 25 bp, Homo sapien
cttactggacagcttgagtatgcca

SEQ ID NO: 2906455 - DNA, 25 bp, Homo sapien
gggttcacatcattgctagtcactt

SEQ ID NO: 2906456 - DNA, 25 bp, Homo sapien
tgacccaaatatggggttcacatca

SEQ ID NO: 2906457 - DNA, 25 bp, Homo sapien
cactttgtgagtacttactggacag

SEQ ID NO: 2906458 - DNA, 25 bp, Homo sapien
gagtgagcagctcgttgcatggcaa

SEQ ID NO: 2906459 - DNA, 25 bp, Homo sapien
tcgttgcatggcaaggtggtccgac

SEQ ID NO: 2906460 - DNA, 25 bp, Homo sapien
gcttaaaatcatcacggagtgagca

SEQ ID NO: 2906461 - DNA, 25 bp, Homo sapien
cagccttcctctcaagctggaaatg

SEQ ID NO: 2906462 - DNA, 25 bp, Homo sapien
tgagtgattagtgagccagctccgt

SEQ ID NO: 2906463 - DNA, 25 bp, Homo sapien
tctaaccctgtcctccgtgctttgg

SEQ ID NO: 2906464 - DNA, 25 bp, Homo sapien
tcattttgggaacagcccggccata

SEQ ID NO: 2906465 - DNA, 25 bp, Homo sapien
tcgttttgccaactcatggaggtaa

SEQ ID NO: 2906466 - DNA, 25 bp, Homo sapien
gaaggaatctggttgcctggacact

SEQ ID NO: 2906467 - DNA, 25 bp, Homo sapien
gaaggcacgtgcttaggaagccaga

SEQ ID NO: 2906468 - DNA, 25 bp, Homo sapien
tcttgggctatgacatggaaggcac

SEQ ID NO: 2906469 - DNA, 25 bp, Homo sapien
tccctcctgatgtctggaacgcaga

SEQ ID NO: 2906470 - DNA, 25 bp, Homo sapien
taatagcccccaatagccattcttc

SEQ ID NO: 2906471 - DNA, 25 bp, Homo sapien
gaagcattacacagtccccttgtgg

SEQ ID NO: 2906472 - DNA, 25 bp, Homo sapien
caacggtttgtggtagaagcattac

SEQ ID NO: 2906473 - DNA, 25 bp, Homo sapien
gccattcttctctagtcaaagaact

SEQ ID NO: 2906474 - DNA, 25 bp, Homo sapien
cctctctttctacgatgacagtgct

SEQ ID NO: 2906475 - DNA, 25 bp, Homo sapien
tctggttgccctggagctgaagttg

SEQ ID NO: 2906476 - DNA, 25 bp, Homo sapien
caaataattgcaggaagcatgcttg

SEQ ID NO: 2906477 - DNA, 25 bp, Homo sapien
gttgtggcccgaggaagacctgcaa

SEQ ID NO: 2906478 - DNA, 25 bp, Homo sapien
ttagtcctgactcccatgtgagaaa

SEQ ID NO: 2906479 - DNA, 25 bp, Homo sapien
taacagctacgattttccttacaaa

SEQ ID NO: 2906480 - DNA, 25 bp, Homo sapien
gagtgcaaccgagaggtacaagcca

SEQ ID NO: 2906481 - DNA, 25 bp, Homo sapien
cattcaaatgcataacttgggtcaa

SEQ ID NO: 2906482 - DNA, 25 bp, Homo sapien
tttagcctcatttcgggtcagccag

SEQ ID NO: 2906483 - DNA, 25 bp, Homo sapien
gagaaaatatttgaggcccggcaca

SEQ ID NO: 2906484 - DNA, 25 bp, Homo sapien
cagtcttcaccgagtaacctttggg

SEQ ID NO: 2906485 - DNA, 25 bp, Homo sapien
tactatcttccatggccaacagcag

SEQ ID NO: 2906486 - DNA, 25 bp, Homo sapien
gatgcagtcctagaaaagtattggc

SEQ ID NO: 2906487 - DNA, 25 bp, Homo sapien
cctagtttgcttaggaaatattgca

SEQ ID NO: 2906488 - DNA, 25 bp, Homo sapien
cagatgtcccagtttatccgatgca

SEQ ID NO: 2906489 - DNA, 25 bp, Homo sapien
atgccctcgggtagccgcagcagtg

SEQ ID NO: 2906490 - DNA, 25 bp, Homo sapien
gcccaagttcatgagagatggccac

SEQ ID NO: 2906491 - DNA, 25 bp, Homo sapien
tttctgatccgaaggcagggcttcc

SEQ ID NO: 2906492 - DNA, 25 bp, Homo sapien
ttggcatcaaacctaaaacctggac

SEQ ID NO: 2906493 - DNA, 25 bp, Homo sapien
tagataagttgtgttgcagccacca

SEQ ID NO: 2906494 - DNA, 25 bp, Homo sapien
catgtctagcgctctcctggagggc

SEQ ID NO: 2906495 - DNA, 25 bp, Homo sapien
ttgcacgatgtttctcagaggtggc

SEQ ID NO: 2906496 - DNA, 25 bp, Homo sapien
caactgtcaggcctttaattgcacg

SEQ ID NO: 2906497 - DNA, 25 bp, Homo sapien
gcctttaattgcacgatgtttctca

SEQ ID NO: 2906498 - DNA, 25 bp, Homo sapien
gacagatggcaactgtcaggccttt

SEQ ID NO: 2906499 - DNA, 25 bp, Homo sapien
tcacaatgtgccggctccaaatccc

SEQ ID NO: 2906500 - DNA, 25 bp, Homo sapien
cacaatgtgccggctccaaatccct

SEQ ID NO: 2906501 - DNA, 25 bp, Homo sapien
agaggtgacagagcactgtagagta

SEQ ID NO: 2906502 - DNA, 25 bp, Homo sapien
tgccctggagggagttttcggacgc

SEQ ID NO: 2906503 - DNA, 25 bp, Homo sapien
agttttcggacgctggggcagctcc

SEQ ID NO: 2906504 - DNA, 25 bp, Homo sapien
ggcagctcccacacaggtctgctta

SEQ ID NO: 2906505 - DNA, 25 bp, Homo sapien
gctcccacacaggtctgcttaatga

SEQ ID NO: 2906506 - DNA, 25 bp, Homo sapien
catttagtatattatgaacagagct

SEQ ID NO: 2906507 - DNA, 25 bp, Homo sapien
gcttcatatcaacaaagacaagttg

SEQ ID NO: 2906508 - DNA, 25 bp, Homo sapien
caatttagtggcctcgtggttttct

SEQ ID NO: 2906509 - DNA, 25 bp, Homo sapien
tcaatgaactctctgttgctgggca

SEQ ID NO: 2906510 - DNA, 25 bp, Homo sapien
ctctctgggtcctctgggggatctg

SEQ ID NO: 2906511 - DNA, 25 bp, Homo sapien
ctgggtcctctgggggatctgggat

SEQ ID NO: 2906512 - DNA, 25 bp, Homo sapien
tctgggtcctctgggggatctggga

SEQ ID NO: 2906513 - DNA, 25 bp, Homo sapien
ctctgggtcctctgggggatctggg

SEQ ID NO: 2906514 - DNA, 25 bp, Homo sapien
ctgcagctccatggatctcactttt

SEQ ID NO: 2906515 - DNA, 25 bp, Homo sapien
cagctccatggatctcacttttatg

SEQ ID NO: 2906516 - DNA, 25 bp, Homo sapien
gctccatggatctcacttttatgtt

SEQ ID NO: 2906517 - DNA, 25 bp, Homo sapien
tccatggatctcacttttatgttag

SEQ ID NO: 2906518 - DNA, 25 bp, Homo sapien
tacgtgggacaacccataagcacca

SEQ ID NO: 2906519 - DNA, 25 bp, Homo sapien
tctggcagtccaaaaacaatcctgt

SEQ ID NO: 2906520 - DNA, 25 bp, Homo sapien
gaaagtcagcgcatgaaagagaagc

SEQ ID NO: 2906521 - DNA, 25 bp, Homo sapien
tgacacttccttgttcgtaggtagg

SEQ ID NO: 2906522 - DNA, 25 bp, Homo sapien
gctggaacgttggtgctctggtctc

SEQ ID NO: 2906523 - DNA, 25 bp, Homo sapien
tggttccccaatcgccccaacttca

SEQ ID NO: 2906524 - DNA, 25 bp, Homo sapien
ttcatcgctggaacgttggtgctct

SEQ ID NO: 2906525 - DNA, 25 bp, Homo sapien
gaacgttggtgctctggtctcttgg

SEQ ID NO: 2906526 - DNA, 25 bp, Homo sapien
acatggaagacaagcgcagctgcat

SEQ ID NO: 2906527 - DNA, 25 bp, Homo sapien
ggcgcatccacgacaccaacatgga

SEQ ID NO: 2906528 - DNA, 25 bp, Homo sapien
ctggcgcatccacgacaccaacatg

SEQ ID NO: 2906529 - DNA, 25 bp, Homo sapien
cgcatccacgacaccaacatggaag

SEQ ID NO: 2906530 - DNA, 25 bp, Homo sapien
ctgcaagaagatggggcagaattac

SEQ ID NO: 2906531 - DNA, 25 bp, Homo sapien
tcctaatgtgacaaatccagatgag

SEQ ID NO: 2906532 - DNA, 25 bp, Homo sapien
agatgaagttatggagatcaggtcc

SEQ ID NO: 2906533 - DNA, 25 bp, Homo sapien
tcggtaagcatccttcccataatgc

SEQ ID NO: 2906534 - DNA, 25 bp, Homo sapien
gatcaggtcctccacttcggtaagc

SEQ ID NO: 2906535 - DNA, 25 bp, Homo sapien
tcagaagccacgcatgtcaccagga

SEQ ID NO: 2906536 - DNA, 25 bp, Homo sapien
accaccccacttattcctgtcccag

SEQ ID NO: 2906537 - DNA, 25 bp, Homo sapien
gccacgcatgtcaccaggacaagct

SEQ ID NO: 2906538 - DNA, 25 bp, Homo sapien
aagccacgcatgtcaccaggacaag

SEQ ID NO: 2906539 - DNA, 25 bp, Homo sapien
ggatgggtgtctcttggaagtctat

SEQ ID NO: 2906540 - DNA, 25 bp, Homo sapien
ttggaagtctatcgccctctaaagt

SEQ ID NO: 2906541 - DNA, 25 bp, Homo sapien
gtctcttggaagtctatcgccctct

SEQ ID NO: 2906542 - DNA, 25 bp, Homo sapien
ggtgtctcttggaagtctatcgccc

SEQ ID NO: 2906543 - DNA, 25 bp, Homo sapien
tacatccaccggcagttttccacca

SEQ ID NO: 2906544 - DNA, 25 bp, Homo sapien
ccttcccacaaggagccgccggcat

SEQ ID NO: 2906545 - DNA, 25 bp, Homo sapien
ctacatccaccggcagttttccacc

SEQ ID NO: 2906546 - DNA, 25 bp, Homo sapien
aaaaggaataatagccaagaggcga

SEQ ID NO: 2906547 - DNA, 25 bp, Homo sapien
aaaggaataatagccaagaggcgaa

SEQ ID NO: 2906548 - DNA, 25 bp, Homo sapien
aggaataatagccaagaggcgaaca

SEQ ID NO: 2906549 - DNA, 25 bp, Homo sapien
gaataatagccaagaggcgaacaca

SEQ ID NO: 2906550 - DNA, 25 bp, Homo sapien
cagaattgaggaggagtccatgccc

SEQ ID NO: 2906551 - DNA, 25 bp, Homo sapien
gacagaatgctcacaacactcgtag

SEQ ID NO: 2906552 - DNA, 25 bp, Homo sapien
cacacaggtgttgggacggtaatta

SEQ ID NO: 2906553 - DNA, 25 bp, Homo sapien
tgcacaccggcttagataccacagt

SEQ ID NO: 2906554 - DNA, 25 bp, Homo sapien
tgccttagaccccatggagtgcctg

SEQ ID NO: 2906555 - DNA, 25 bp, Homo sapien
tatttggatgggatgacgagatctg

SEQ ID NO: 2906556 - DNA, 25 bp, Homo sapien
gcaggatggccatacccaaaccagt

SEQ ID NO: 2906557 - DNA, 25 bp, Homo sapien
tctggaaaggtgctcgcaggccaac

SEQ ID NO: 2906558 - DNA, 25 bp, Homo sapien
tggtctggggttcttgcccaaatcc

SEQ ID NO: 2906559 - DNA, 25 bp, Homo sapien
ggcagcctgtgactttacagaggcc

SEQ ID NO: 2906560 - DNA, 25 bp, Homo sapien
tgccacaatccactgttggtctggg

SEQ ID NO: 2906561 - DNA, 25 bp, Homo sapien
tgactttacagaggcccacacatac

SEQ ID NO: 2906562 - DNA, 25 bp, Homo sapien
tgattggggccatggttgagtctct

SEQ ID NO: 2906563 - DNA, 25 bp, Homo sapien
gggagcacgaaatccataaacccac

SEQ ID NO: 2906564 - DNA, 25 bp, Homo sapien
agtctgagctgcaccacaattcaca

SEQ ID NO: 2906565 - DNA, 25 bp, Homo sapien
caattcacacaaacggggacagtcg

SEQ ID NO: 2906566 - DNA, 25 bp, Homo sapien
agtcactcacaggtatggtcttgca

SEQ ID NO: 2906567 - DNA, 25 bp, Homo sapien
tcggtagtggcttgtccaggtccct

SEQ ID NO: 2906568 - DNA, 25 bp, Homo sapien
tccggaggcatgtgacaactgtaag

SEQ ID NO: 2906569 - DNA, 25 bp, Homo sapien
tctcatttttgttgctccggaggca

SEQ ID NO: 2906570 - DNA, 25 bp, Homo sapien
cgtacgtgttcctcctttgactgca

SEQ ID NO: 2906571 - DNA, 25 bp, Homo sapien
catgctcagagtgggccttttcagg

SEQ ID NO: 2906572 - DNA, 25 bp, Homo sapien
ctgccttcgccgttataaaagactg

SEQ ID NO: 2906573 - DNA, 25 bp, Homo sapien
atgccgaactctgccttcgccgtta

SEQ ID NO: 2906574 - DNA, 25 bp, Homo sapien
gataattgagcgttttgactgttga

SEQ ID NO: 2906575 - DNA, 25 bp, Homo sapien
ccaccctactgagagttgcaagaga

SEQ ID NO: 2906576 - DNA, 25 bp, Homo sapien
agtccaccctactgagagttgcaag

SEQ ID NO: 2906577 - DNA, 25 bp, Homo sapien
gaggagtccaccctactgagagttg

SEQ ID NO: 2906578 - DNA, 25 bp, Homo sapien
attcatgtgcccataagtctgagac

SEQ ID NO: 2906579 - DNA, 25 bp, Homo sapien
tgtgcccataagtctgagactccac

SEQ ID NO: 2906580 - DNA, 25 bp, Homo sapien
catgtgcccataagtctgagactcc

SEQ ID NO: 2906581 - DNA, 25 bp, Homo sapien
cccataagtctgagactccacttct

SEQ ID NO: 2906582 - DNA, 25 bp, Homo sapien
cactttatgttgagatgtgcagcct

SEQ ID NO: 2906583 - DNA, 25 bp, Homo sapien
catacactttatgttgagatgtgca

SEQ ID NO: 2906584 - DNA, 25 bp, Homo sapien
tactcatacactttatgttgagatg

SEQ ID NO: 2906585 - DNA, 25 bp, Homo sapien
tatgttgagatgtgcagcctttgac

SEQ ID NO: 2906586 - DNA, 25 bp, Homo sapien
gaagactgcaggttactctggttct

SEQ ID NO: 2906587 - DNA, 25 bp, Homo sapien
tccctcctcggaaaactgtgaagac

SEQ ID NO: 2906588 - DNA, 25 bp, Homo sapien
ctcctcggaaaactgtgaagactgc

SEQ ID NO: 2906589 - DNA, 25 bp, Homo sapien
actgtgaagactgcaggttactctg

SEQ ID NO: 2906590 - DNA, 25 bp, Homo sapien
cagttgcacagtggatgagcaggac

SEQ ID NO: 2906591 - DNA, 25 bp, Homo sapien
aagcagttgcacagtggatgagcag

SEQ ID NO: 2906592 - DNA, 25 bp, Homo sapien
acagagccaggcattgctgctcccc

SEQ ID NO: 2906593 - DNA, 25 bp, Homo sapien
agagccaggcattgctgctccccac

SEQ ID NO: 2906594 - DNA, 25 bp, Homo sapien
actgctggagataaagcttattctc

SEQ ID NO: 2906595 - DNA, 25 bp, Homo sapien
catgcctggctctacgtgaagagcc

SEQ ID NO: 2906596 - DNA, 25 bp, Homo sapien
gctggagataaagcttattctccat

SEQ ID NO: 2906597 - DNA, 25 bp, Homo sapien
tggctctacgtgaagagcctctgac

SEQ ID NO: 2906598 - DNA, 25 bp, Homo sapien
ggacctcaggctctcttctaccaag

SEQ ID NO: 2906599 - DNA, 25 bp, Homo sapien
taggtctcaccctgtttagggactg

SEQ ID NO: 2906600 - DNA, 25 bp, Homo sapien
tgggcctcttccaaaatcatgagca

SEQ ID NO: 2906601 - DNA, 25 bp, Homo sapien
ggaaattaatgccaatgcctgtctg

SEQ ID NO: 2906602 - DNA, 25 bp, Homo sapien
ttgggttaggcagtaagtaagcact

SEQ ID NO: 2906603 - DNA, 25 bp, Homo sapien
agcactgtcccgctgagggtctctg

SEQ ID NO: 2906604 - DNA, 25 bp, Homo sapien
taagtaagcactgtcccgctgaggg

SEQ ID NO: 2906605 - DNA, 25 bp, Homo sapien
taaaagcaggttgggttaggcagta

SEQ ID NO: 2906606 - DNA, 25 bp, Homo sapien
gaagggtctgtgttctgttcttgtg

SEQ ID NO: 2906607 - DNA, 25 bp, Homo sapien
tttctgtgcaaattgggggtgtcag

SEQ ID NO: 2906608 - DNA, 25 bp, Homo sapien
tcagcggggtgagaacctttactcc

SEQ ID NO: 2906609 - DNA, 25 bp, Homo sapien
agtgtgaagggtctgtgttctgttc

SEQ ID NO: 2906610 - DNA, 25 bp, Homo sapien
tgagtgcaaaggtactcccaagagc

SEQ ID NO: 2906611 - DNA, 25 bp, Homo sapien
tcgatggccagtaggtagtgcaccc

SEQ ID NO: 2906612 - DNA, 25 bp, Homo sapien
ccaagagcttttcgatgaccagaag

SEQ ID NO: 2906613 - DNA, 25 bp, Homo sapien
tgcagatacaaatagtacccagcgt

SEQ ID NO: 2906614 - DNA, 25 bp, Homo sapien
ggctgcatgcattcgaaacgctggg

SEQ ID NO: 2906615 - DNA, 25 bp, Homo sapien
ttgtaactgtcgactgcatgggtgg

SEQ ID NO: 2906616 - DNA, 25 bp, Homo sapien
gatggattaggatcaacagtaaagg

SEQ ID NO: 2906617 - DNA, 25 bp, Homo sapien
tcagaaaagcttcctcgggaagact

SEQ ID NO: 2906618 - DNA, 25 bp, Homo sapien
cctcattagcacatggtctgctaca

SEQ ID NO: 2906619 - DNA, 25 bp, Homo sapien
gtctgctacactcaacagcgtggcg

SEQ ID NO: 2906620 - DNA, 25 bp, Homo sapien
tggcgacagaaatcatcactccttc

SEQ ID NO: 2906621 - DNA, 25 bp, Homo sapien
tcttcggcgtctgcttctgtagggc

SEQ ID NO: 2906622 - DNA, 25 bp, Homo sapien
gcattatgctatcttctcaggagag

SEQ ID NO: 2906623 - DNA, 25 bp, Homo sapien
gagtaagcagcagatccatgtggag

SEQ ID NO: 2906624 - DNA, 25 bp, Homo sapien
catgtggagcctgtctaaatctggg

SEQ ID NO: 2906625 - DNA, 25 bp, Homo sapien
aattctcacaactacccaacgatgg

SEQ ID NO: 2906626 - DNA, 25 bp, Homo sapien
caatccattcattatggcattctgc

SEQ ID NO: 2906627 - DNA, 25 bp, Homo sapien
ctagtgttttgctgattaaaacaca

SEQ ID NO: 2906628 - DNA, 25 bp, Homo sapien
atccattcattatggcattctgcta

SEQ ID NO: 2906629 - DNA, 25 bp, Homo sapien
tagtgttttgctgattaaaacacat

SEQ ID NO: 2906630 - DNA, 25 bp, Homo sapien
gtccccgtgggaggcaattgccaat

SEQ ID NO: 2906631 - DNA, 25 bp, Homo sapien
tctttgaggacggatggcatctgga

SEQ ID NO: 2906632 - DNA, 25 bp, Homo sapien
acacgggctgagaacggtccccgtg

SEQ ID NO: 2906633 - DNA, 25 bp, Homo sapien
ctcaaagttcagaaaaaagtgccta

SEQ ID NO: 2906634 - DNA, 25 bp, Homo sapien
ggctgaagtctctgaccgcccattt

SEQ ID NO: 2906635 - DNA, 25 bp, Homo sapien
ggtgtctccactggtgaggaaaggc

SEQ ID NO: 2906636 - DNA, 25 bp, Homo sapien
tgcacagcccaacgcagggctgaag

SEQ ID NO: 2906637 - DNA, 25 bp, Homo sapien
tgaggaaaggcacttaaggataaca

SEQ ID NO: 2906638 - DNA, 25 bp, Homo sapien
taaacttagtagtgacagtctgcct

SEQ ID NO: 2906639 - DNA, 25 bp, Homo sapien
ggatagctagtctcttgggaaagtc

SEQ ID NO: 2906640 - DNA, 25 bp, Homo sapien
tctttcgcgctccttctgtagtggg

SEQ ID NO: 2906641 - DNA, 25 bp, Homo sapien
cagtctgcctatttctttcgcgctc

SEQ ID NO: 2906642 - DNA, 25 bp, Homo sapien
tcttcactgagaggcactttacggc

SEQ ID NO: 2906643 - DNA, 25 bp, Homo sapien
tttacggccctcacggaagctggcc

SEQ ID NO: 2906644 - DNA, 25 bp, Homo sapien
cgttggaaacgtaatgctccttggg

SEQ ID NO: 2906645 - DNA, 25 bp, Homo sapien
tgcctttcaaggcaacttgggcaaa

SEQ ID NO: 2906646 - DNA, 25 bp, Homo sapien
gctgagattgggcaagagccctgaa

SEQ ID NO: 2906647 - DNA, 25 bp, Homo sapien
gatagggcttgctgcattcctcaca

SEQ ID NO: 2906648 - DNA, 25 bp, Homo sapien
gaactccggctattgaagggtctca

SEQ ID NO: 2906649 - DNA, 25 bp, Homo sapien
ttgacgttggagatgcccctaaccc

SEQ ID NO: 2906650 - DNA, 25 bp, Homo sapien
ctagtgacaaatggccaatctccaa

SEQ ID NO: 2906651 - DNA, 25 bp, Homo sapien
aagaagacacctagtgacaaatggc

SEQ ID NO: 2906652 - DNA, 25 bp, Homo sapien
gaagacacctagtgacaaatggcca

SEQ ID NO: 2906653 - DNA, 25 bp, Homo sapien
gacacctagtgacaaatggccaatc

SEQ ID NO: 2906654 - DNA, 25 bp, Homo sapien
ctgtccatggtactgttgttccgtg

SEQ ID NO: 2906655 - DNA, 25 bp, Homo sapien
caagacaaatcctgtgaattcccac

SEQ ID NO: 2906656 - DNA, 25 bp, Homo sapien
ccgtgggcctggaatgtgaaacttc

SEQ ID NO: 2906657 - DNA, 25 bp, Homo sapien
tatccagtgtatcccaaagtcctct

SEQ ID NO: 2906658 - DNA, 25 bp, Homo sapien
ggcagaggtcattgtatgaggctcc

SEQ ID NO: 2906659 - DNA, 25 bp, Homo sapien
tctaagaaaggcagaggtcattgta

SEQ ID NO: 2906660 - DNA, 25 bp, Homo sapien
tgtatgaggctccaagaaacgtccc

SEQ ID NO: 2906661 - DNA, 25 bp, Homo sapien
gctccaagaaacgtcccctgctgtt

SEQ ID NO: 2906662 - DNA, 25 bp, Homo sapien
cactgctcaaaatcggatggttata

SEQ ID NO: 2906663 - DNA, 25 bp, Homo sapien
tctgggtaacactgctcaaaatcgg

SEQ ID NO: 2906664 - DNA, 25 bp, Homo sapien
atcggatggttatattgatgatcac

SEQ ID NO: 2906665 - DNA, 25 bp, Homo sapien
catgtggcgggatctgggtaacact

SEQ ID NO: 2906666 - DNA, 25 bp, Homo sapien
ccaagttctggaacgagcgggagaa

SEQ ID NO: 2906667 - DNA, 25 bp, Homo sapien
agggctcggtggctgatgtcaggat

SEQ ID NO: 2906668 - DNA, 25 bp, Homo sapien
ctttactgcagactcgtaggatggg

SEQ ID NO: 2906669 - DNA, 25 bp, Homo sapien
cgggagaaggagaggtcatagggct

SEQ ID NO: 2906670 - DNA, 25 bp, Homo sapien
aaatgctcagcccttgaggctccaa

SEQ ID NO: 2906671 - DNA, 25 bp, Homo sapien
gcagttgggtggtcatcaaaagaga

SEQ ID NO: 2906672 - DNA, 25 bp, Homo sapien
ggtggctgatgtggacttgggctgc

SEQ ID NO: 2906673 - DNA, 25 bp, Homo sapien
cttgggctgcacttctgtcagggta

SEQ ID NO: 2906674 - DNA, 25 bp, Homo sapien
gcaggtgccgccgtctcatgtaata

SEQ ID NO: 2906675 - DNA, 25 bp, Homo sapien
gcggtcgtagggcatgctgaactca

SEQ ID NO: 2906676 - DNA, 25 bp, Homo sapien
aacggcttctgttgggacatctgga

SEQ ID NO: 2906677 - DNA, 25 bp, Homo sapien
catcttgctcatgcggtagcggtcc

SEQ ID NO: 2906678 - DNA, 25 bp, Homo sapien
gtggcaaggctagaagctctgctcc

SEQ ID NO: 2906679 - DNA, 25 bp, Homo sapien
tgaatgagaccgagtagcctatccg

SEQ ID NO: 2906680 - DNA, 25 bp, Homo sapien
ttcagaccacagtcaagcaagggtc

SEQ ID NO: 2906681 - DNA, 25 bp, Homo sapien
tcagcccactgattggacccgctgg

SEQ ID NO: 2906682 - DNA, 25 bp, Homo sapien
ccagtgaggcaaacagaagaccgaa

SEQ ID NO: 2906683 - DNA, 25 bp, Homo sapien
ataggagtctttggccagagcagga

SEQ ID NO: 2906684 - DNA, 25 bp, Homo sapien
gagatgaaggatacaccagtgaggc

SEQ ID NO: 2906685 - DNA, 25 bp, Homo sapien
gcttctgggctaacatcaggctggg

SEQ ID NO: 2906686 - DNA, 25 bp, Homo sapien
ttcacaagccttcaccgggaggacg

SEQ ID NO: 2906687 - DNA, 25 bp, Homo sapien
tctggagtccgagtgattggcagcc

SEQ ID NO: 2906688 - DNA, 25 bp, Homo sapien
taaacttcaggtacgagggcatccc

SEQ ID NO: 2906689 - DNA, 25 bp, Homo sapien
cccagattcggacaggatgacagga

SEQ ID NO: 2906690 - DNA, 25 bp, Homo sapien
ctagagcactgcttaccatgaggct

SEQ ID NO: 2906691 - DNA, 25 bp, Homo sapien
tacagagaagcagttactagagcac

SEQ ID NO: 2906692 - DNA, 25 bp, Homo sapien
tacatatgagtaacgaagaaactgc

SEQ ID NO: 2906693 - DNA, 25 bp, Homo sapien
gacaggtaagtagaacgatgagatt

SEQ ID NO: 2906694 - DNA, 25 bp, Homo sapien
aaatgcttaatcctctgtacaccca

SEQ ID NO: 2906695 - DNA, 25 bp, Homo sapien
tcctcatttcctaaatgcttaatcc

SEQ ID NO: 2906696 - DNA, 25 bp, Homo sapien
tcatttcctaaatgcttaatcctct

SEQ ID NO: 2906697 - DNA, 25 bp, Homo sapien
ttcctaaatgcttaatcctctgtac

SEQ ID NO: 2906698 - DNA, 25 bp, Homo sapien
gctctatctgggctagattgtcaga

SEQ ID NO: 2906699 - DNA, 25 bp, Homo sapien
attgtcagattgttttccggtgcat

SEQ ID NO: 2906700 - DNA, 25 bp, Homo sapien
tccggtgcatattgtacacacttgt

SEQ ID NO: 2906701 - DNA, 25 bp, Homo sapien
gaagatgctgctctatctgggctag

SEQ ID NO: 2906702 - DNA, 25 bp, Homo sapien
ccgtgatctgctcccagaggtgcca

SEQ ID NO: 2906703 - DNA, 25 bp, Homo sapien
tctgctcccagaggtgccacattgg

SEQ ID NO: 2906704 - DNA, 25 bp, Homo sapien
tgaggcctgtggcccgtgatctgct

SEQ ID NO: 2906705 - DNA, 25 bp, Homo sapien
tgaccaccagacctgacactccaga

SEQ ID NO: 2906706 - DNA, 25 bp, Homo sapien
tccagctgcatcggtttccctagcg

SEQ ID NO: 2906707 - DNA, 25 bp, Homo sapien
ctgcatcggtttccctagcgacggg

SEQ ID NO: 2906708 - DNA, 25 bp, Homo sapien
cagctgcatcggtttccctagcgac

SEQ ID NO: 2906709 - DNA, 25 bp, Homo sapien
gctgcatcggtttccctagcgacgg

SEQ ID NO: 2906710 - DNA, 25 bp, Homo sapien
gtccccaggagtcgcagtcgtcggt

SEQ ID NO: 2906711 - DNA, 25 bp, Homo sapien
tgctccagaggtgccgcgggcaggt

SEQ ID NO: 2906712 - DNA, 25 bp, Homo sapien
agaacagcgcggctaggtgctccag

SEQ ID NO: 2906713 - DNA, 25 bp, Homo sapien
aaaaaagcgccttagcgccagccag

SEQ ID NO: 2906714 - DNA, 25 bp, Homo sapien
tcattggccaggacgggtagaacaa

SEQ ID NO: 2906715 - DNA, 25 bp, Homo sapien
taactgagaggtcacattggaggct

SEQ ID NO: 2906716 - DNA, 25 bp, Homo sapien
tggaagaggcagcaaagtttttccc

SEQ ID NO: 2906717 - DNA, 25 bp, Homo sapien
actgtctcacttttggaatccgcaa

SEQ ID NO: 2906718 - DNA, 25 bp, Homo sapien
ctggacttggtagctccatttgatc

SEQ ID NO: 2906719 - DNA, 25 bp, Homo sapien
gggattctccccttgtaagagtggc

SEQ ID NO: 2906720 - DNA, 25 bp, Homo sapien
caatggcatagatgactgacttatc

SEQ ID NO: 2906721 - DNA, 25 bp, Homo sapien
ctgggaagactctctcttgagtacc

SEQ ID NO: 2906722 - DNA, 25 bp, Homo sapien
ctgcaacaacatctctgtacatggc

SEQ ID NO: 2906723 - DNA, 25 bp, Homo sapien
ggccatgcccctcaccgttattgtt

SEQ ID NO: 2906724 - DNA, 25 bp, Homo sapien
tgcaacaacatctctgtacatggct

SEQ ID NO: 2906725 - DNA, 25 bp, Homo sapien
tcagttgattatagatgtatttcag

SEQ ID NO: 2906726 - DNA, 25 bp, Homo sapien
gtatgccccataaccaacacacgta

SEQ ID NO: 2906727 - DNA, 25 bp, Homo sapien
aacacacgtactaaagctcagaggg

SEQ ID NO: 2906728 - DNA, 25 bp, Homo sapien
tgccaccatgctagtttgtgtcggg

SEQ ID NO: 2906729 - DNA, 25 bp, Homo sapien
catcattcgacggtaacttgagtca

SEQ ID NO: 2906730 - DNA, 25 bp, Homo sapien
aagttcttccacctgtataatctca

SEQ ID NO: 2906731 - DNA, 25 bp, Homo sapien
tccacctgtataatctcacacggac

SEQ ID NO: 2906732 - DNA, 25 bp, Homo sapien
gtcaataagttcttccacctgtata

SEQ ID NO: 2906733 - DNA, 25 bp, Homo sapien
ggaacattgttgtgttaagtcaata

SEQ ID NO: 2906734 - DNA, 25 bp, Homo sapien
ccagggaggtacaagcacttagtta

SEQ ID NO: 2906735 - DNA, 25 bp, Homo sapien
ggtagtccttgattaggacagatgg

SEQ ID NO: 2906736 - DNA, 25 bp, Homo sapien
agaaagacctttgaccagacccagg

SEQ ID NO: 2906737 - DNA, 25 bp, Homo sapien
ctgtcttgccagaagggtagtcctt

SEQ ID NO: 2906738 - DNA, 25 bp, Homo sapien
gatttgtacagtgcaaagcagcagc

SEQ ID NO: 2906739 - DNA, 25 bp, Homo sapien
ggcagatcggatggaagaactttct

SEQ ID NO: 2906740 - DNA, 25 bp, Homo sapien
tccagaggtgagaggtaacaacatg

SEQ ID NO: 2906741 - DNA, 25 bp, Homo sapien
ggtgagaggtaacaacatggatttg

SEQ ID NO: 2906742 - DNA, 25 bp, Homo sapien
taggaatagaaaatgcagaatggag

SEQ ID NO: 2906743 - DNA, 25 bp, Homo sapien
agtaggaatagaaaatgcagaatgg

SEQ ID NO: 2906744 - DNA, 25 bp, Homo sapien
gacagtaggaatagaaaatgcagaa

SEQ ID NO: 2906745 - DNA, 25 bp, Homo sapien
ctgacagtaggaatagaaaatgcag

SEQ ID NO: 2906746 - DNA, 25 bp, Homo sapien
gcaattttgataagcgtagatcttg

SEQ ID NO: 2906747 - DNA, 25 bp, Homo sapien
atcatagactttgctggcttggcaa

SEQ ID NO: 2906748 - DNA, 25 bp, Homo sapien
caattttgataagcgtagatcttgt

SEQ ID NO: 2906749 - DNA, 25 bp, Homo sapien
gactttgctggcttggcaattttga

SEQ ID NO: 2906750 - DNA, 25 bp, Homo sapien
gctttaattaagcttagaccatgtg

SEQ ID NO: 2906751 - DNA, 25 bp, Homo sapien
tactgaagagcaaagaggagatttt

SEQ ID NO: 2906752 - DNA, 25 bp, Homo sapien
cattttgacctatggtactgaagag

SEQ ID NO: 2906753 - DNA, 25 bp, Homo sapien
ttaagcttagaccatgtgaaatgac

SEQ ID NO: 2906754 - DNA, 25 bp, Homo sapien
cactggatgctaatatctgcgtagc

SEQ ID NO: 2906755 - DNA, 25 bp, Homo sapien
gaaatccagcagcactggatgctaa

SEQ ID NO: 2906756 - DNA, 25 bp, Homo sapien
taaccagtcgtcttgtggtgactga

SEQ ID NO: 2906757 - DNA, 25 bp, Homo sapien
tggtgactgacacgggaaactagga

SEQ ID NO: 2906758 - DNA, 25 bp, Homo sapien
ctggtggagccctagtccctgggaa

SEQ ID NO: 2906759 - DNA, 25 bp, Homo sapien
agcggtaggacttgcatgtggccca

SEQ ID NO: 2906760 - DNA, 25 bp, Homo sapien
gcttcacctccggaaattctgcatt

SEQ ID NO: 2906761 - DNA, 25 bp, Homo sapien
tggcccaaatcagacagaccacgtg

SEQ ID NO: 2906762 - DNA, 25 bp, Homo sapien
cgctggagcggtatcaggtgcacat

SEQ ID NO: 2906763 - DNA, 25 bp, Homo sapien
catccaatcgcacaaagaccaaaga

SEQ ID NO: 2906764 - DNA, 25 bp, Homo sapien
gttgtcccaggaagccatccaatcg

SEQ ID NO: 2906765 - DNA, 25 bp, Homo sapien
tgaagtaagtgtggagattctccct

SEQ ID NO: 2906766 - DNA, 25 bp, Homo sapien
gaagaagctcaaagtgtctgagacc

SEQ ID NO: 2906767 - DNA, 25 bp, Homo sapien
gtgttgtgcattttcctattccact

SEQ ID NO: 2906768 - DNA, 25 bp, Homo sapien
ttggctatgaggttgtgttgtgcat

SEQ ID NO: 2906769 - DNA, 25 bp, Homo sapien
tattatggattattccagctgatgg

SEQ ID NO: 2906770 - DNA, 25 bp, Homo sapien
ttccagctgatggagggttggctat

SEQ ID NO: 2906771 - DNA, 25 bp, Homo sapien
cctgagcacgtctagcaggacagat

SEQ ID NO: 2906772 - DNA, 25 bp, Homo sapien
tccgataggattggagcttcctcct

SEQ ID NO: 2906773 - DNA, 25 bp, Homo sapien
aatcacaaaacctccaaaccaagat

SEQ ID NO: 2906774 - DNA, 25 bp, Homo sapien
tcatgacttccaatttgtgtgcaca

SEQ ID NO: 2906775 - DNA, 25 bp, Homo sapien
aaatccagggccgtcttcagaagac

SEQ ID NO: 2906776 - DNA, 25 bp, Homo sapien
tgaactccacctttcccagtttgtg

SEQ ID NO: 2906777 - DNA, 25 bp, Homo sapien
aatccagggccgtcttcagaagacc

SEQ ID NO: 2906778 - DNA, 25 bp, Homo sapien
agagcattccctctgacgccgctga

SEQ ID NO: 2906779 - DNA, 25 bp, Homo sapien
ggtacaggcagtcggaggaggatcc

SEQ ID NO: 2906780 - DNA, 25 bp, Homo sapien
tttggaggtacaggcagtcggagga

SEQ ID NO: 2906781 - DNA, 25 bp, Homo sapien
gaggtacaggcagtcggaggaggat

SEQ ID NO: 2906782 - DNA, 25 bp, Homo sapien
tgctttggaggtacaggcagtcgga

SEQ ID NO: 2906783 - DNA, 25 bp, Homo sapien
agcatctctgaaaccctggtgtcat

SEQ ID NO: 2906784 - DNA, 25 bp, Homo sapien
tacaactaccaatccgtcatctagg

SEQ ID NO: 2906785 - DNA, 25 bp, Homo sapien
gtggtttgctacaactaccaatccg

SEQ ID NO: 2906786 - DNA, 25 bp, Homo sapien
gtttgctacaactaccaatccgtca

SEQ ID NO: 2906787 - DNA, 25 bp, Homo sapien
ccacggtggtttgctacaactacca

SEQ ID NO: 2906788 - DNA, 25 bp, Homo sapien
tacaggtgagatgcgggctctttgt

SEQ ID NO: 2906789 - DNA, 25 bp, Homo sapien
ctacaggtgagatgcgggctctttg

SEQ ID NO: 2906790 - DNA, 25 bp, Homo sapien
gctacaggtgagatgcgggctcttt

SEQ ID NO: 2906791 - DNA, 25 bp, Homo sapien
gggctacaggtgagatgcgggctct

SEQ ID NO: 2906792 - DNA, 25 bp, Homo sapien
gatagtccccaatcttcggtcaaga

SEQ ID NO: 2906793 - DNA, 25 bp, Homo sapien
tccaagccaggtgcatcatcaaaag

SEQ ID NO: 2906794 - DNA, 25 bp, Homo sapien
gcttgaataaagatagtccccaatc

SEQ ID NO: 2906795 - DNA, 25 bp, Homo sapien
tcttcggtcaagatcttctactttc

SEQ ID NO: 2906796 - DNA, 25 bp, Homo sapien
taaaactggaagctgaacagtctgc

SEQ ID NO: 2906797 - DNA, 25 bp, Homo sapien
tcttagatggctcctagaagtctga

SEQ ID NO: 2906798 - DNA, 25 bp, Homo sapien
tgtggaacccttgctttaagtcaac

SEQ ID NO: 2906799 - DNA, 25 bp, Homo sapien
caggccatgttatgcagaatgacca

SEQ ID NO: 2906800 - DNA, 25 bp, Homo sapien
catttggatgaggaccaggtattta

SEQ ID NO: 2906801 - DNA, 25 bp, Homo sapien
ctcctggacgtgctgactgtagatc

SEQ ID NO: 2906802 - DNA, 25 bp, Homo sapien
gactgtagatcatcctcactgcatc

SEQ ID NO: 2906803 - DNA, 25 bp, Homo sapien
gctaccagcggtctttcaaggaggt

SEQ ID NO: 2906804 - DNA, 25 bp, Homo sapien
aggccgccagccacggtgggcatgt

SEQ ID NO: 2906805 - DNA, 25 bp, Homo sapien
gccagccacggtgggcatgttcttg

SEQ ID NO: 2906806 - DNA, 25 bp, Homo sapien
agccacggtgggcatgttcttgtgc

SEQ ID NO: 2906807 - DNA, 25 bp, Homo sapien
cacggtgggcatgttcttgtgcacc

SEQ ID NO: 2906808 - DNA, 25 bp, Homo sapien
ggtgtgtgatgcgtccaaagttgct

SEQ ID NO: 2906809 - DNA, 25 bp, Homo sapien
gtgatgcgtccaaagttgctgaaag

SEQ ID NO: 2906810 - DNA, 25 bp, Homo sapien
tgtgtgatgcgtccaaagttgctga

SEQ ID NO: 2906811 - DNA, 25 bp, Homo sapien
tgtgatgcgtccaaagttgctgaaa

SEQ ID NO: 2906812 - DNA, 25 bp, Homo sapien
ttgccaataggtgtctaatcccttg

SEQ ID NO: 2906813 - DNA, 25 bp, Homo sapien
actgttttgccaataggtgtctaat

SEQ ID NO: 2906814 - DNA, 25 bp, Homo sapien
cagagcaaaatgagtcagccagtta

SEQ ID NO: 2906815 - DNA, 25 bp, Homo sapien
tccagaaatgaatcccccagagcaa

SEQ ID NO: 2906816 - DNA, 25 bp, Homo sapien
tccaatggccagagtttgattcttt

SEQ ID NO: 2906817 - DNA, 25 bp, Homo sapien
tggtgttgagtcttcccacttgggc

SEQ ID NO: 2906818 - DNA, 25 bp, Homo sapien
ttccaaaacctgtgtgctgtcagca

SEQ ID NO: 2906819 - DNA, 25 bp, Homo sapien
cctaactccaaaaagcctgtgagtc

SEQ ID NO: 2906820 - DNA, 25 bp, Homo sapien
ttccagcttatctccaacagtcagg

SEQ ID NO: 2906821 - DNA, 25 bp, Homo sapien
aatccagtttccagcttatctccaa

SEQ ID NO: 2906822 - DNA, 25 bp, Homo sapien
ccagtttccagcttatctccaacag

SEQ ID NO: 2906823 - DNA, 25 bp, Homo sapien
ccagcttatctccaacagtcaggag

SEQ ID NO: 2906824 - DNA, 25 bp, Homo sapien
tagcaatgacagcatatcttcatat

SEQ ID NO: 2906825 - DNA, 25 bp, Homo sapien
ttttctagcaatgacagcatatctt

SEQ ID NO: 2906826 - DNA, 25 bp, Homo sapien
tttctagcaatgacagcatatcttc

SEQ ID NO: 2906827 - DNA, 25 bp, Homo sapien
tctagcaatgacagcatatcttcat

SEQ ID NO: 2906828 - DNA, 25 bp, Homo sapien
tgcagacccacgcaatgccagaagt

SEQ ID NO: 2906829 - DNA, 25 bp, Homo sapien
tacttcggagccactgaggaatctg

SEQ ID NO: 2906830 - DNA, 25 bp, Homo sapien
acaaactcggagctgcaaaaggcag

SEQ ID NO: 2906831 - DNA, 25 bp, Homo sapien
tgtgtgtgtgcaacccggaaatact

SEQ ID NO: 2906832 - DNA, 25 bp, Homo sapien
ggtcagagacaacagccacctcata

SEQ ID NO: 2906833 - DNA, 25 bp, Homo sapien
caagggtcagagacaacagccacct

SEQ ID NO: 2906834 - DNA, 25 bp, Homo sapien
gggtcagagacaacagccacctcat

SEQ ID NO: 2906835 - DNA, 25 bp, Homo sapien
aagggtcagagacaacagccacctc

SEQ ID NO: 2906836 - DNA, 25 bp, Homo sapien
ttctctgatactgtccggcaccaat

SEQ ID NO: 2906837 - DNA, 25 bp, Homo sapien
cggcaccaatcctcataaagtcttg

SEQ ID NO: 2906838 - DNA, 25 bp, Homo sapien
tctctgggtcacgttttagaagtgg

SEQ ID NO: 2906839 - DNA, 25 bp, Homo sapien
gaaagattgtactgtgacttctctg

SEQ ID NO: 2906840 - DNA, 25 bp, Homo sapien
gctgtctcaggcatgtgtttcatct

SEQ ID NO: 2906841 - DNA, 25 bp, Homo sapien
tctgaggcggagatcaatattttgc

SEQ ID NO: 2906842 - DNA, 25 bp, Homo sapien
tctctctgggttcaagatagctcat

SEQ ID NO: 2906843 - DNA, 25 bp, Homo sapien
gctgccgatagaaatccctggagga

SEQ ID NO: 2906844 - DNA, 25 bp, Homo sapien
gatttcagtgacataatcgcaaatg

SEQ ID NO: 2906845 - DNA, 25 bp, Homo sapien
cgatcatgccgatcatccagagaaa

SEQ ID NO: 2906846 - DNA, 25 bp, Homo sapien
ttgtcttaaatattggagtcaccca

SEQ ID NO: 2906847 - DNA, 25 bp, Homo sapien
ggatcttaaggccagattccttgat

SEQ ID NO: 2906848 - DNA, 25 bp, Homo sapien
cactttttgatgctttccctaaact

SEQ ID NO: 2906849 - DNA, 25 bp, Homo sapien
tgcgcctgagtggctgggttattac

SEQ ID NO: 2906850 - DNA, 25 bp, Homo sapien
tgatgctttccctaaactcgtagta

SEQ ID NO: 2906851 - DNA, 25 bp, Homo sapien
taaactcgtagtatgtgcgcctgag

SEQ ID NO: 2906852 - DNA, 25 bp, Homo sapien
ccattcagcaacaaattgtcaatag

SEQ ID NO: 2906853 - DNA, 25 bp, Homo sapien
cactcaatggcaagaaagaatccat

SEQ ID NO: 2906854 - DNA, 25 bp, Homo sapien
tctgctgaaaatagacccaggtttt

SEQ ID NO: 2906855 - DNA, 25 bp, Homo sapien
ttttccagaagatacttgagggagc

SEQ ID NO: 2906856 - DNA, 25 bp, Homo sapien
tgttatctttccaataataacccac

SEQ ID NO: 2906857 - DNA, 25 bp, Homo sapien
tctggattctcaacgtaggtgtctg

SEQ ID NO: 2906858 - DNA, 25 bp, Homo sapien
tggattctcaacgtaggtgtctgca

SEQ ID NO: 2906859 - DNA, 25 bp, Homo sapien
ctctggattctcaacgtaggtgtct

SEQ ID NO: 2906860 - DNA, 25 bp, Homo sapien
ggattctcaacgtaggtgtctgcat

SEQ ID NO: 2906861 - DNA, 25 bp, Homo sapien
ctatcaagaccatggggatggccat

SEQ ID NO: 2906862 - DNA, 25 bp, Homo sapien
caaagaccatgcctaacacctcagc

SEQ ID NO: 2906863 - DNA, 25 bp, Homo sapien
aaagaccatgcctaacacctcagcc

SEQ ID NO: 2906864 - DNA, 25 bp, Homo sapien
gcaaagaccatgcctaacacctcag

SEQ ID NO: 2906865 - DNA, 25 bp, Homo sapien
cctgttgttgatttccttagtttgg

SEQ ID NO: 2906866 - DNA, 25 bp, Homo sapien
gttgttgatttccttagtttggagc

SEQ ID NO: 2906867 - DNA, 25 bp, Homo sapien
tggatttcctgagtcctgttgttga

SEQ ID NO: 2906868 - DNA, 25 bp, Homo sapien
cttgctaactatgctggatttcctg

SEQ ID NO: 2906869 - DNA, 25 bp, Homo sapien
caccagtgctggtccgtaagagcca

SEQ ID NO: 2906870 - DNA, 25 bp, Homo sapien
gtgcccgtgttccatgccccattgg

SEQ ID NO: 2906871 - DNA, 25 bp, Homo sapien
ggcttggtcagttcactaaggtgga

SEQ ID NO: 2906872 - DNA, 25 bp, Homo sapien
atccagacttggtgcccgtgttcca

SEQ ID NO: 2906873 - DNA, 25 bp, Homo sapien
tctgggatggctagactcagttgtg

SEQ ID NO: 2906874 - DNA, 25 bp, Homo sapien
actccagactccagagacggataga

SEQ ID NO: 2906875 - DNA, 25 bp, Homo sapien
aaatgctggtgatgagaccctcaac

SEQ ID NO: 2906876 - DNA, 25 bp, Homo sapien
gacggatagaaaactagctctggga

SEQ ID NO: 2906877 - DNA, 25 bp, Homo sapien
tgtgcccgtacagcagaaactgacc

SEQ ID NO: 2906878 - DNA, 25 bp, Homo sapien
gagtgtgcgccgcatgtttgccaaa

SEQ ID NO: 2906879 - DNA, 25 bp, Homo sapien
tcttccggagtgaggatgtgcccgt

SEQ ID NO: 2906880 - DNA, 25 bp, Homo sapien
gacgtggtccacaagatgctgtttg

SEQ ID NO: 2906881 - DNA, 25 bp, Homo sapien
taatcaacacaaacagaacatgagg

SEQ ID NO: 2906882 - DNA, 25 bp, Homo sapien
acacaaacagaacatgaggaaccat

SEQ ID NO: 2906883 - DNA, 25 bp, Homo sapien
ctaatcaacacaaacagaacatgag

SEQ ID NO: 2906884 - DNA, 25 bp, Homo sapien
tcaacacaaacagaacatgaggaac

SEQ ID NO: 2906885 - DNA, 25 bp, Homo sapien
tataaacgcatccaggttggccaag

SEQ ID NO: 2906886 - DNA, 25 bp, Homo sapien
tcaactttcttgagtaagccgctct

SEQ ID NO: 2906887 - DNA, 25 bp, Homo sapien
taacagccataaggtgtcccatgat

SEQ ID NO: 2906888 - DNA, 25 bp, Homo sapien
gtcccatgatctcaaccaagccttg

SEQ ID NO: 2906889 - DNA, 25 bp, Homo sapien
tgctgctgttctgcatcgaaggctg

SEQ ID NO: 2906890 - DNA, 25 bp, Homo sapien
ctgtgcacctctggcggaggagtgt

SEQ ID NO: 2906891 - DNA, 25 bp, Homo sapien
gcttcacagtaatggccaccttttt

SEQ ID NO: 2906892 - DNA, 25 bp, Homo sapien
ttcatttgcctgcagtggggccacc

SEQ ID NO: 2906893 - DNA, 25 bp, Homo sapien
gccccacaaaaagattatccatgac

SEQ ID NO: 2906894 - DNA, 25 bp, Homo sapien
cacaaaaagattatccatgactcaa

SEQ ID NO: 2906895 - DNA, 25 bp, Homo sapien
actcaaagactgcagtgttcacaga

SEQ ID NO: 2906896 - DNA, 25 bp, Homo sapien
aaagactgcagtgttcacagaaaga

SEQ ID NO: 2906897 - DNA, 25 bp, Homo sapien
cagtggaccagaagcagaccgcttc

SEQ ID NO: 2906898 - DNA, 25 bp, Homo sapien
cacagagctggagcgttagggcaaa

SEQ ID NO: 2906899 - DNA, 25 bp, Homo sapien
caaagggcacccaatctagctggca

SEQ ID NO: 2906900 - DNA, 25 bp, Homo sapien
taggaccattgagctccagcttggc

SEQ ID NO: 2906901 - DNA, 25 bp, Homo sapien
tcctttgtaagtatggcacgcaggg

SEQ ID NO: 2906902 - DNA, 25 bp, Homo sapien
gttcctttgtaagtatggcacgcag

SEQ ID NO: 2906903 - DNA, 25 bp, Homo sapien
gtatggcacgcaggggcccatctcc

SEQ ID NO: 2906904 - DNA, 25 bp, Homo sapien
tgtaagtatggcacgcaggggccca

SEQ ID NO: 2906905 - DNA, 25 bp, Homo sapien
ttgatgagggtggatgctatcaaac

SEQ ID NO: 2906906 - DNA, 25 bp, Homo sapien
atctcgatgtgcctggcatccagca

SEQ ID NO: 2906907 - DNA, 25 bp, Homo sapien
gattccatctgctggatctcgatgt

SEQ ID NO: 2906908 - DNA, 25 bp, Homo sapien
catctgctggatctcgatgtgcctg

SEQ ID NO: 2906909 - DNA, 25 bp, Homo sapien
gctggatctcgatgtgcctggcatc

SEQ ID NO: 2906910 - DNA, 25 bp, Homo sapien
ccaggtttcggatatgccgggcaaa

SEQ ID NO: 2906911 - DNA, 25 bp, Homo sapien
caaaccagatagagatgacagcgtc

SEQ ID NO: 2906912 - DNA, 25 bp, Homo sapien
tactggaattccatgccagcccagg

SEQ ID NO: 2906913 - DNA, 25 bp, Homo sapien
catagtgaagctcacaccggtggcc

SEQ ID NO: 2906914 - DNA, 25 bp, Homo sapien
tgtcgatgccttcaaaccttttaga

SEQ ID NO: 2906915 - DNA, 25 bp, Homo sapien
cagcttttcatacaggcctggcttg

SEQ ID NO: 2906916 - DNA, 25 bp, Homo sapien
gaattttctgggcatcataagctag

SEQ ID NO: 2906917 - DNA, 25 bp, Homo sapien
cctggcttgttggtggtttgcacta

SEQ ID NO: 2906918 - DNA, 25 bp, Homo sapien
cctcttggtgtcgaggtactctgcc

SEQ ID NO: 2906919 - DNA, 25 bp, Homo sapien
tctaacagatcggaggaggagagaa

SEQ ID NO: 2906920 - DNA, 25 bp, Homo sapien
gctgtgccgttggaaaggatgtcta

SEQ ID NO: 2906921 - DNA, 25 bp, Homo sapien
aaaccgcgggaaggcaagcctcttg

SEQ ID NO: 2906922 - DNA, 25 bp, Homo sapien
actggcatctagctggaatcgcatc

SEQ ID NO: 2906923 - DNA, 25 bp, Homo sapien
ctggaatcgcatcttggccatgttg

SEQ ID NO: 2906924 - DNA, 25 bp, Homo sapien
tctttgctgtacatgccgaggcttg

SEQ ID NO: 2906925 - DNA, 25 bp, Homo sapien
agtcacagggctcactgaaagccac

SEQ ID NO: 2906926 - DNA, 25 bp, Homo sapien
ggacatggttcagccatatttctac

SEQ ID NO: 2906927 - DNA, 25 bp, Homo sapien
agctgggtggtcaaaaagccactgc

SEQ ID NO: 2906928 - DNA, 25 bp, Homo sapien
ctgagctgggtggtcaaaaagccac

SEQ ID NO: 2906929 - DNA, 25 bp, Homo sapien
ttcatgtgaccaaggacatggttca

SEQ ID NO: 2906930 - DNA, 25 bp, Homo sapien
agcaagagttgcctagtaaagctgt

SEQ ID NO: 2906931 - DNA, 25 bp, Homo sapien
gcagcaagagttgcctagtaaagct

SEQ ID NO: 2906932 - DNA, 25 bp, Homo sapien
cagcaagagttgcctagtaaagctg

SEQ ID NO: 2906933 - DNA, 25 bp, Homo sapien
cacatcgatggtgcatatagtcata

SEQ ID NO: 2906934 - DNA, 25 bp, Homo sapien
ttggctaccacatcccgggcatgca

SEQ ID NO: 2906935 - DNA, 25 bp, Homo sapien
aatcttctgccggtctcccttggag

SEQ ID NO: 2906936 - DNA, 25 bp, Homo sapien
gagctgggccacttgcttcttataa

SEQ ID NO: 2906937 - DNA, 25 bp, Homo sapien
caagcgaggtgtgtttcccaggtac

SEQ ID NO: 2906938 - DNA, 25 bp, Homo sapien
ctgtcagtcaaaggtgtgatcacca

SEQ ID NO: 2906939 - DNA, 25 bp, Homo sapien
tgacctcgtcatcccaacgatggcg

SEQ ID NO: 2906940 - DNA, 25 bp, Homo sapien
tggcaaagcagtgtttgacctcgtc

SEQ ID NO: 2906941 - DNA, 25 bp, Homo sapien
tggacaaatagcaagtgacagggac

SEQ ID NO: 2906942 - DNA, 25 bp, Homo sapien
tagaactcgggtgtgtatgaccatt

SEQ ID NO: 2906943 - DNA, 25 bp, Homo sapien
aacaggctgtgttgagtcaggccct

SEQ ID NO: 2906944 - DNA, 25 bp, Homo sapien
ggactttgaccctagatgcccacta

SEQ ID NO: 2906945 - DNA, 25 bp, Homo sapien
gctccgagcagttgaacacatagac

SEQ ID NO: 2906946 - DNA, 25 bp, Homo sapien
agaccaggatgcccagtgcgcggcc

SEQ ID NO: 2906947 - DNA, 25 bp, Homo sapien
tccgagcagttgaacacatagacca

SEQ ID NO: 2906948 - DNA, 25 bp, Homo sapien
ctgctccgagcagttgaacacatag

SEQ ID NO: 2906949 - DNA, 25 bp, Homo sapien
ctgacaagacctccacggagattcg

SEQ ID NO: 2906950 - DNA, 25 bp, Homo sapien
aagacctccacggagattcgattaa

SEQ ID NO: 2906951 - DNA, 25 bp, Homo sapien
cctccacggagattcgattaaactc

SEQ ID NO: 2906952 - DNA, 25 bp, Homo sapien
gacaagacctccacggagattcgat

SEQ ID NO: 2906953 - DNA, 25 bp, Homo sapien
acagctttgatcatcacatggtgcc

SEQ ID NO: 2906954 - DNA, 25 bp, Homo sapien
acatggtgcccttgtgattgctttg

SEQ ID NO: 2906955 - DNA, 25 bp, Homo sapien
tgctttgctctgttaagggcaggat

SEQ ID NO: 2906956 - DNA, 25 bp, Homo sapien
gcatgtggaatagaagctggcaaac

SEQ ID NO: 2906957 - DNA, 25 bp, Homo sapien
cacccacagccccacgtccacacct

SEQ ID NO: 2906958 - DNA, 25 bp, Homo sapien
agtgccccacccacagccccacgtc

SEQ ID NO: 2906959 - DNA, 25 bp, Homo sapien
gccccacccacagccccacgtccac

SEQ ID NO: 2906960 - DNA, 25 bp, Homo sapien
cccacagccccacgtccacacctac

SEQ ID NO: 2906961 - DNA, 25 bp, Homo sapien
cgatttcaaatgttacccgctcaga

SEQ ID NO: 2906962 - DNA, 25 bp, Homo sapien
gcttctgaaccaatatgccagcctg

SEQ ID NO: 2906963 - DNA, 25 bp, Homo sapien
gcagcataatcgcttctgtaggagt

SEQ ID NO: 2906964 - DNA, 25 bp, Homo sapien
tgccagcctggattgccgtgtgaat

SEQ ID NO: 2906965 - DNA, 25 bp, Homo sapien
ttgacacactggtgtttttcccaag

SEQ ID NO: 2906966 - DNA, 25 bp, Homo sapien
tggaattgacacactggtgtttttc

SEQ ID NO: 2906967 - DNA, 25 bp, Homo sapien
tttttggaattgacacactggtgtt

SEQ ID NO: 2906968 - DNA, 25 bp, Homo sapien
ttttttggaattgacacactggtgt

SEQ ID NO: 2906969 - DNA, 25 bp, Homo sapien
gataccgacagaaggattcaggctg

SEQ ID NO: 2906970 - DNA, 25 bp, Homo sapien
tccccaaggaagctgaaccactgct

SEQ ID NO: 2906971 - DNA, 25 bp, Homo sapien
gatgaagataccgacagaaggattc

SEQ ID NO: 2906972 - DNA, 25 bp, Homo sapien
tatctctaatcgcatcttgaatgct

SEQ ID NO: 2906973 - DNA, 25 bp, Homo sapien
tgaagagagacttgagattctctgg

SEQ ID NO: 2906974 - DNA, 25 bp, Homo sapien
gagacttgagattctctggcagctc

SEQ ID NO: 2906975 - DNA, 25 bp, Homo sapien
gagagacttgagattctctggcagc

SEQ ID NO: 2906976 - DNA, 25 bp, Homo sapien
gctctgtgcggccagcatagcctgg

SEQ ID NO: 2906977 - DNA, 25 bp, Homo sapien
gactgggcttcaatgaatccttctg

SEQ ID NO: 2906978 - DNA, 25 bp, Homo sapien
tctttgcacaactggtaaagagtga

SEQ ID NO: 2906979 - DNA, 25 bp, Homo sapien
gatttcacagatcaattcaaagtct

SEQ ID NO: 2906980 - DNA, 25 bp, Homo sapien
ggtaaagagtgatgaactttctggc

SEQ ID NO: 2906981 - DNA, 25 bp, Homo sapien
gtgccaccttggaggccttcacatt

SEQ ID NO: 2906982 - DNA, 25 bp, Homo sapien
atgtgccaccttggaggccttcaca

SEQ ID NO: 2906983 - DNA, 25 bp, Homo sapien
tgtgccaccttggaggccttcacat

SEQ ID NO: 2906984 - DNA, 25 bp, Homo sapien
tatcgccttcctaaccaaagcttcg

SEQ ID NO: 2906985 - DNA, 25 bp, Homo sapien
ccagcacggacttgatggcccgtag

SEQ ID NO: 2906986 - DNA, 25 bp, Homo sapien
aaatcccgcaaggagcgcatcagga

SEQ ID NO: 2906987 - DNA, 25 bp, Homo sapien
gcctggagcttcagatccactatcg

SEQ ID NO: 2906988 - DNA, 25 bp, Homo sapien
tttgtgactgctttgggattgaggt

SEQ ID NO: 2906989 - DNA, 25 bp, Homo sapien
ccacaaatacagagtgccgcacagc

SEQ ID NO: 2906990 - DNA, 25 bp, Homo sapien
gacggggcgccgtttcatgatctga

SEQ ID NO: 2906991 - DNA, 25 bp, Homo sapien
agcacctgtgacttgccggtaccag

SEQ ID NO: 2906992 - DNA, 25 bp, Homo sapien
ctctttcacttaaacacagctttcc

SEQ ID NO: 2906993 - DNA, 25 bp, Homo sapien
tctttcacttaaacacagctttccc

SEQ ID NO: 2906994 - DNA, 25 bp, Homo sapien
cctctttcacttaaacacagctttc

SEQ ID NO: 2906995 - DNA, 25 bp, Homo sapien
tctatgtcgccatccagtaaaatcc

SEQ ID NO: 2906996 - DNA, 25 bp, Homo sapien
atgggtgatgttggcaagctcccgc

SEQ ID NO: 2906997 - DNA, 25 bp, Homo sapien
gggtgatgttggcaagctcccgcat

SEQ ID NO: 2906998 - DNA, 25 bp, Homo sapien
tcagggattcaatccacattggatc

SEQ ID NO: 2906999 - DNA, 25 bp, Homo sapien
ctctcattgctggccaatgtcagca

SEQ ID NO: 2907000 - DNA, 25 bp, Homo sapien
catggtggggttcagaggaatcctc

SEQ ID NO: 2907001 - DNA, 25 bp, Homo sapien
cagttgctggagtggctgtgcgcag

SEQ ID NO: 2907002 - DNA, 25 bp, Homo sapien
agacagttgctggagtggctgtgcg

SEQ ID NO: 2907003 - DNA, 25 bp, Homo sapien
tcaatccagctgctcactggagggt

SEQ ID NO: 2907004 - DNA, 25 bp, Homo sapien
tctgccgggttgatgtacaagatcc

SEQ ID NO: 2907005 - DNA, 25 bp, Homo sapien
ctaggcaggttggaagatacttgtc

SEQ ID NO: 2907006 - DNA, 25 bp, Homo sapien
ctggagggttccatcccaagtctgc

SEQ ID NO: 2907007 - DNA, 25 bp, Homo sapien
attgctccgccgaaagcccagatgg

SEQ ID NO: 2907008 - DNA, 25 bp, Homo sapien
tctgcagggatgtcctccgtggtca

SEQ ID NO: 2907009 - DNA, 25 bp, Homo sapien
tcttggaccattgctccgccgaaag

SEQ ID NO: 2907010 - DNA, 25 bp, Homo sapien
gctctgggatgggaatgatcttctt

SEQ ID NO: 2907011 - DNA, 25 bp, Homo sapien
cttggaccaaggctcgaatttcttg

SEQ ID NO: 2907012 - DNA, 25 bp, Homo sapien
tcaaattcgaactgggggacgagct

SEQ ID NO: 2907013 - DNA, 25 bp, Homo sapien
tttgaactcagtcagccaccatttg

SEQ ID NO: 2907014 - DNA, 25 bp, Homo sapien
cttggtctctgggtcgatgtaatag

SEQ ID NO: 2907015 - DNA, 25 bp, Homo sapien
ggctgctactggagccactgcagat

SEQ ID NO: 2907016 - DNA, 25 bp, Homo sapien
cccgcagttaggcagagagcttccc

SEQ ID NO: 2907017 - DNA, 25 bp, Homo sapien
tagttcctagcaaggacaaatgctc

SEQ ID NO: 2907018 - DNA, 25 bp, Homo sapien
acaaatgctcagatagccatgcggg

SEQ ID NO: 2907019 - DNA, 25 bp, Homo sapien
gcacaataagcctgccaagggtggg

SEQ ID NO: 2907020 - DNA, 25 bp, Homo sapien
cacaataagcctgccaagggtgggc

SEQ ID NO: 2907021 - DNA, 25 bp, Homo sapien
ctggaatgggagcacaataagcctg

SEQ ID NO: 2907022 - DNA, 25 bp, Homo sapien
gaatgggagcacaataagcctgcca

SEQ ID NO: 2907023 - DNA, 25 bp, Homo sapien
cgctccatgaagtagcacacacgga

SEQ ID NO: 2907024 - DNA, 25 bp, Homo sapien
ggtgtagtagttgaatggcacgttt

SEQ ID NO: 2907025 - DNA, 25 bp, Homo sapien
cgtttttcaccaggtatgcctcggg

SEQ ID NO: 2907026 - DNA, 25 bp, Homo sapien
gcagcattgctgacgtggtgtagta

SEQ ID NO: 2907027 - DNA, 25 bp, Homo sapien
gatgtagcggataacgagagtgcca

SEQ ID NO: 2907028 - DNA, 25 bp, Homo sapien
ttgcaagtctgctggcctaaggcct

SEQ ID NO: 2907029 - DNA, 25 bp, Homo sapien
tggtttacaccaggcagggatggca

SEQ ID NO: 2907030 - DNA, 25 bp, Homo sapien
tatggctcctaacttatccagctgc

SEQ ID NO: 2907031 - DNA, 25 bp, Homo sapien
ttggggttcagtctttggccacaca

SEQ ID NO: 2907032 - DNA, 25 bp, Homo sapien
caagacccgtatggaacaggttggg

SEQ ID NO: 2907033 - DNA, 25 bp, Homo sapien
aaggtcgtctgtacattctggctga

SEQ ID NO: 2907034 - DNA, 25 bp, Homo sapien
tttggccacacagacccgtgtcagc

SEQ ID NO: 2907035 - DNA, 25 bp, Homo sapien
gaaaagtgttgatgttgaaggagct

SEQ ID NO: 2907036 - DNA, 25 bp, Homo sapien
taaagaaatgtgaccctctcgccac

SEQ ID NO: 2907037 - DNA, 25 bp, Homo sapien
tgttctcaacaagcctggaaactca

SEQ ID NO: 2907038 - DNA, 25 bp, Homo sapien
gatgttgaaggagctgaacgaatga

SEQ ID NO: 2907039 - DNA, 25 bp, Homo sapien
aggcatgttcatgtcatcaatgaaa

SEQ ID NO: 2907040 - DNA, 25 bp, Homo sapien
aatagatgagtttcttgttccctgg

SEQ ID NO: 2907041 - DNA, 25 bp, Homo sapien
tggggctgcaccgtcccgtaggcat

SEQ ID NO: 2907042 - DNA, 25 bp, Homo sapien
gagggccatagtttctgccagcctt

SEQ ID NO: 2907043 - DNA, 25 bp, Homo sapien
catactgtacatttgtgatctcctt

SEQ ID NO: 2907044 - DNA, 25 bp, Homo sapien
aacatactgtacatttgtgatctcc

SEQ ID NO: 2907045 - DNA, 25 bp, Homo sapien
cctgccgtggggttcatacaggaaa

SEQ ID NO: 2907046 - DNA, 25 bp, Homo sapien
ggttcatacaggaaacatactgtac

SEQ ID NO: 2907047 - DNA, 25 bp, Homo sapien
ctgtagatagaggacagggcatctg

SEQ ID NO: 2907048 - DNA, 25 bp, Homo sapien
gaagtttccgagcttcagatgctga

SEQ ID NO: 2907049 - DNA, 25 bp, Homo sapien
aaatgttggcaaaatctctgaggtt

SEQ ID NO: 2907050 - DNA, 25 bp, Homo sapien
tgtagtggaatttgattcctgtggg

SEQ ID NO: 2907051 - DNA, 25 bp, Homo sapien
tagagccttataagatcccatgtgg

SEQ ID NO: 2907052 - DNA, 25 bp, Homo sapien
tgcagatagagccttataagatccc

SEQ ID NO: 2907053 - DNA, 25 bp, Homo sapien
actcgatttgattcatgcagataga

SEQ ID NO: 2907054 - DNA, 25 bp, Homo sapien
ctaccatcttatcccgataaactcg

SEQ ID NO: 2907055 - DNA, 25 bp, Homo sapien
tgggtgatcatctgtataattatct

SEQ ID NO: 2907056 - DNA, 25 bp, Homo sapien
agaaaatccatagggcaatactcac

SEQ ID NO: 2907057 - DNA, 25 bp, Homo sapien
tccattaaacagctagattttatca

SEQ ID NO: 2907058 - DNA, 25 bp, Homo sapien
tatcattgggtgatcatctgtataa

SEQ ID NO: 2907059 - DNA, 25 bp, Homo sapien
tttcctcctaaagttcagactggaa

SEQ ID NO: 2907060 - DNA, 25 bp, Homo sapien
tgggtcaaaagttcccaagactgta

SEQ ID NO: 2907061 - DNA, 25 bp, Homo sapien
tacaggcatgtatttgggctcccca

SEQ ID NO: 2907062 - DNA, 25 bp, Homo sapien
tcaaagagaactaggtccatcactg

SEQ ID NO: 2907063 - DNA, 25 bp, Homo sapien
caaagtgacaatacaggttcgggct

SEQ ID NO: 2907064 - DNA, 25 bp, Homo sapien
gacatccatggagctgatgaaagct

SEQ ID NO: 2907065 - DNA, 25 bp, Homo sapien
tagcctttgcgcagtgtgatctgga

SEQ ID NO: 2907066 - DNA, 25 bp, Homo sapien
gcggggactccaagatgcgattgat

SEQ ID NO: 2907067 - DNA, 25 bp, Homo sapien
cagcagagcatttccccgcggggac

SEQ ID NO: 2907068 - DNA, 25 bp, Homo sapien
atcattgatgagcacaaggaacctc

SEQ ID NO: 2907069 - DNA, 25 bp, Homo sapien
tgagcacaaggaacctctcatcagc

SEQ ID NO: 2907070 - DNA, 25 bp, Homo sapien
tcatcagccacttgggcatcagtca

SEQ ID NO: 2907071 - DNA, 25 bp, Homo sapien
ggaacctctcatcagccacttgggc

SEQ ID NO: 2907072 - DNA, 25 bp, Homo sapien
tcttcacctttgtataactctgatt

SEQ ID NO: 2907073 - DNA, 25 bp, Homo sapien
tcttcccaccctggacgaaatcttc

SEQ ID NO: 2907074 - DNA, 25 bp, Homo sapien
acctttgtataactctgattccagg

SEQ ID NO: 2907075 - DNA, 25 bp, Homo sapien
ttcccaccctggacgaaatcttcac

SEQ ID NO: 2907076 - DNA, 25 bp, Homo sapien
taagagagctccacgattactgtct

SEQ ID NO: 2907077 - DNA, 25 bp, Homo sapien
caggtctagtcccactaagagagct

SEQ ID NO: 2907078 - DNA, 25 bp, Homo sapien
tgagaaggacctcaatgaaccagtc

SEQ ID NO: 2907079 - DNA, 25 bp, Homo sapien
gattactgtctgttttgcaatgaaa

SEQ ID NO: 2907080 - DNA, 25 bp, Homo sapien
tgcacagtttcaccagcagttgcat

SEQ ID NO: 2907081 - DNA, 25 bp, Homo sapien
catgcacagtttcaccagcagttgc

SEQ ID NO: 2907082 - DNA, 25 bp, Homo sapien
atttcatgcacagtttcaccagcag

SEQ ID NO: 2907083 - DNA, 25 bp, Homo sapien
tcatgcacagtttcaccagcagttg

SEQ ID NO: 2907084 - DNA, 25 bp, Homo sapien
aggaatgttagtgatgaaagaagtc

SEQ ID NO: 2907085 - DNA, 25 bp, Homo sapien
gaatgttagtgatgaaagaagtcat

SEQ ID NO: 2907086 - DNA, 25 bp, Homo sapien
ctgacagaaatgttagcatcatagg

SEQ ID NO: 2907087 - DNA, 25 bp, Homo sapien
tgttagcatcataggaatgttagtg

SEQ ID NO: 2907088 - DNA, 25 bp, Homo sapien
cagctgtcgccggatccgatctata

SEQ ID NO: 2907089 - DNA, 25 bp, Homo sapien
gccggatccgatctataaagaactt

SEQ ID NO: 2907090 - DNA, 25 bp, Homo sapien
ccagaccctggctcttgacttcatt

SEQ ID NO: 2907091 - DNA, 25 bp, Homo sapien
ctggctcttgacttcattcctcaca

SEQ ID NO: 2907092 - DNA, 25 bp, Homo sapien
tgttctgcaagaagcggaggctgac

SEQ ID NO: 2907093 - DNA, 25 bp, Homo sapien
gctgggaacttcctgctgcggactc

SEQ ID NO: 2907094 - DNA, 25 bp, Homo sapien
gaggctgacagactccaatgcttgc

SEQ ID NO: 2907095 - DNA, 25 bp, Homo sapien
ggactcttagcttgtttcccacagg

SEQ ID NO: 2907096 - DNA, 25 bp, Homo sapien
taagactgggatgtttggttgacac

SEQ ID NO: 2907097 - DNA, 25 bp, Homo sapien
gctctggtagagtctgatgaactcc

SEQ ID NO: 2907098 - DNA, 25 bp, Homo sapien
tgctaatcgactgctttactgtggg

SEQ ID NO: 2907099 - DNA, 25 bp, Homo sapien
gcagaggtgctatgcagcttcagca

SEQ ID NO: 2907100 - DNA, 25 bp, Homo sapien
ggtggaaggagcgggacattgctca

SEQ ID NO: 2907101 - DNA, 25 bp, Homo sapien
aggtggaaggagcgggacattgctc

SEQ ID NO: 2907102 - DNA, 25 bp, Homo sapien
gtggaaggagcgggacattgctcac

SEQ ID NO: 2907103 - DNA, 25 bp, Homo sapien
agatcttgattgtgatccctccagt

SEQ ID NO: 2907104 - DNA, 25 bp, Homo sapien
gatcttgattgtgatccctccagtt

SEQ ID NO: 2907105 - DNA, 25 bp, Homo sapien
atcttgattgtgatccctccagttc

SEQ ID NO: 2907106 - DNA, 25 bp, Homo sapien
gatactgatgacatgggagtctctg

SEQ ID NO: 2907107 - DNA, 25 bp, Homo sapien
tgatgacatgggagtctctggaaaa

SEQ ID NO: 2907108 - DNA, 25 bp, Homo sapien
gagaacataatagatactgatgaca

SEQ ID NO: 2907109 - DNA, 25 bp, Homo sapien
catgggagtctctggaaaaccgtac

SEQ ID NO: 2907110 - DNA, 25 bp, Homo sapien
ctacaatgtagagaaaaaaagccaa

SEQ ID NO: 2907111 - DNA, 25 bp, Homo sapien
tagagaaaaaaagccaaagggatga

SEQ ID NO: 2907112 - DNA, 25 bp, Homo sapien
aaaagccaaagggatgaaagcaaca

SEQ ID NO: 2907113 - DNA, 25 bp, Homo sapien
agccaaagggatgaaagcaacacac

SEQ ID NO: 2907114 - DNA, 25 bp, Homo sapien
tcaatgagagcggatggatcagacc

SEQ ID NO: 2907115 - DNA, 25 bp, Homo sapien
gaggatactgttactatggacaagg

SEQ ID NO: 2907116 - DNA, 25 bp, Homo sapien
gatcagacctgagcggggcatatgc

SEQ ID NO: 2907117 - DNA, 25 bp, Homo sapien
tactgtttctgatggtgaggatact

SEQ ID NO: 2907118 - DNA, 25 bp, Homo sapien
aggaactcttgatgtcctctctcca

SEQ ID NO: 2907119 - DNA, 25 bp, Homo sapien
gatacaaaggtacaaagctgcgctg

SEQ ID NO: 2907120 - DNA, 25 bp, Homo sapien
tagatgacagctcctgatacaaagg

SEQ ID NO: 2907121 - DNA, 25 bp, Homo sapien
aggacccaactctgtggagcagaat

SEQ ID NO: 2907122 - DNA, 25 bp, Homo sapien
tgcattggagaagcacgggacttat

SEQ ID NO: 2907123 - DNA, 25 bp, Homo sapien
ggactagtcactggcctgttgggca

SEQ ID NO: 2907124 - DNA, 25 bp, Homo sapien
acttatcaggagttgtgactggagg

SEQ ID NO: 2907125 - DNA, 25 bp, Homo sapien
ctgtgggcactggactagtcactgg

SEQ ID NO: 2907126 - DNA, 25 bp, Homo sapien
cacacccacgacctgaatcagtttg

SEQ ID NO: 2907127 - DNA, 25 bp, Homo sapien
gcttctgtttcacctctagcatgat

SEQ ID NO: 2907128 - DNA, 25 bp, Homo sapien
cttgttcagggtgttgagagctgcc

SEQ ID NO: 2907129 - DNA, 25 bp, Homo sapien
tctagcatgatgacggccaccttct

SEQ ID NO: 2907130 - DNA, 25 bp, Homo sapien
aaggtggtctctgcgtctaccagcc

SEQ ID NO: 2907131 - DNA, 25 bp, Homo sapien
tccttgcatctcttgggaatgccaa

SEQ ID NO: 2907132 - DNA, 25 bp, Homo sapien
gggaatgccaaggtggtctctgcgt

SEQ ID NO: 2907133 - DNA, 25 bp, Homo sapien
tctcccaacattgtccttgcatctc

SEQ ID NO: 2907134 - DNA, 25 bp, Homo sapien
agtttattagcgagtccaggaagcc

SEQ ID NO: 2907135 - DNA, 25 bp, Homo sapien
cagaggcggagagccaaatgacttc

SEQ ID NO: 2907136 - DNA, 25 bp, Homo sapien
ggcgcttgggttccacatcacagaa

SEQ ID NO: 2907137 - DNA, 25 bp, Homo sapien
agcgctgacattgctgacggccaga

SEQ ID NO: 2907138 - DNA, 25 bp, Homo sapien
tcatcatgggctgggctctagtctc

SEQ ID NO: 2907139 - DNA, 25 bp, Homo sapien
gagtcacaggacaggcagctataac

SEQ ID NO: 2907140 - DNA, 25 bp, Homo sapien
tatagtcacgctcacacagtagtgg

SEQ ID NO: 2907141 - DNA, 25 bp, Homo sapien
cataatagtcccatgaagcaggtac

SEQ ID NO: 2907142 - DNA, 25 bp, Homo sapien
atctgctgcagctagtctggggctg

SEQ ID NO: 2907143 - DNA, 25 bp, Homo sapien
ggctgtccggaatctaagtcctcca

SEQ ID NO: 2907144 - DNA, 25 bp, Homo sapien
gggctgggctgtccggaatctaagt

SEQ ID NO: 2907145 - DNA, 25 bp, Homo sapien
ctgggctgtccggaatctaagtcct

SEQ ID NO: 2907146 - DNA, 25 bp, Homo sapien
tgctgttgctttctcaaacctggct

SEQ ID NO: 2907147 - DNA, 25 bp, Homo sapien
ggtcacttcggcttcttgctgacat

SEQ ID NO: 2907148 - DNA, 25 bp, Homo sapien
tggtgactgcggtcacttcggcttc

SEQ ID NO: 2907149 - DNA, 25 bp, Homo sapien
catttgagtttgtctgctgttgctt

SEQ ID NO: 2907150 - DNA, 25 bp, Homo sapien
tgtttgaagttctgcacggcatctg

SEQ ID NO: 2907151 - DNA, 25 bp, Homo sapien
cacgttttcagaagcgagtcctcca

SEQ ID NO: 2907152 - DNA, 25 bp, Homo sapien
gaggctctgccggtatttctttgtg

SEQ ID NO: 2907153 - DNA, 25 bp, Homo sapien
caggtagggcctccaagttctgtcc

SEQ ID NO: 2907154 - DNA, 25 bp, Homo sapien
gactcttgcaaacctgcctgctggt

SEQ ID NO: 2907155 - DNA, 25 bp, Homo sapien
tcccatgcctagtgggtttgctcct

SEQ ID NO: 2907156 - DNA, 25 bp, Homo sapien
tgtgtttcttgtgcacgctccatga

SEQ ID NO: 2907157 - DNA, 25 bp, Homo sapien
tcctgtctgtaccaaccggcacaaa

SEQ ID NO: 2907158 - DNA, 25 bp, Homo sapien
cccacgctcagaacagaagcagaca

SEQ ID NO: 2907159 - DNA, 25 bp, Homo sapien
tgaagaagaaacaccaccccacgct

SEQ ID NO: 2907160 - DNA, 25 bp, Homo sapien
ccaccccacgctcagaacagaagca

SEQ ID NO: 2907161 - DNA, 25 bp, Homo sapien
cacgctcagaacagaagcagacatt

SEQ ID NO: 2907162 - DNA, 25 bp, Homo sapien
tttctgaccaatctgcgtgacccgg

SEQ ID NO: 2907163 - DNA, 25 bp, Homo sapien
attctccacggacatgcggtcggct

SEQ ID NO: 2907164 - DNA, 25 bp, Homo sapien
ccatttgatgccttgtagctgaggg

SEQ ID NO: 2907165 - DNA, 25 bp, Homo sapien
tgagggtcaaccatgagtggccagc

SEQ ID NO: 2907166 - DNA, 25 bp, Homo sapien
ccccaggtgtcctgatgacatagaa

SEQ ID NO: 2907167 - DNA, 25 bp, Homo sapien
caggtgtcctgatgacatagaacag

SEQ ID NO: 2907168 - DNA, 25 bp, Homo sapien
caggatgagtactgaaaccacaagg

SEQ ID NO: 2907169 - DNA, 25 bp, Homo sapien
tccccattgccccatcctgtttccc

SEQ ID NO: 2907170 - DNA, 25 bp, Homo sapien
cagaacaggatcaatggactcctct

SEQ ID NO: 2907171 - DNA, 25 bp, Homo sapien
gggtcccagaacaggatcaatggac

SEQ ID NO: 2907172 - DNA, 25 bp, Homo sapien
ggactcctctagattttcaatcagc

SEQ ID NO: 2907173 - DNA, 25 bp, Homo sapien
aatggactcctctagattttcaatc

SEQ ID NO: 2907174 - DNA, 25 bp, Homo sapien
ggaacttgggattgtattcacattc

SEQ ID NO: 2907175 - DNA, 25 bp, Homo sapien
ggccatccctggtcacggtgaagtt

SEQ ID NO: 2907176 - DNA, 25 bp, Homo sapien
ctcaggctggtagtgaggattagcc

SEQ ID NO: 2907177 - DNA, 25 bp, Homo sapien
tgtggaggatgagccggaacttggg

SEQ ID NO: 2907178 - DNA, 25 bp, Homo sapien
agcctttggattcgtgggaagaaca

SEQ ID NO: 2907179 - DNA, 25 bp, Homo sapien
ggtgctggtatccaagtggatctca

SEQ ID NO: 2907180 - DNA, 25 bp, Homo sapien
taaaagcttcctcgaggctggagtg

SEQ ID NO: 2907181 - DNA, 25 bp, Homo sapien
ttcctgttggaggttccaaccacag

SEQ ID NO: 2907182 - DNA, 25 bp, Homo sapien
gcttggtgatctctaggttttccac

SEQ ID NO: 2907183 - DNA, 25 bp, Homo sapien
gaggcggaggagaggcgagagagaa

SEQ ID NO: 2907184 - DNA, 25 bp, Homo sapien
tggtgatctctaggttttccaccag

SEQ ID NO: 2907185 - DNA, 25 bp, Homo sapien
cttggtgatctctaggttttccacc

SEQ ID NO: 2907186 - DNA, 25 bp, Homo sapien
aatgcccttctgatgcaagcgcgag

SEQ ID NO: 2907187 - DNA, 25 bp, Homo sapien
caagcgcgagactgagactgcaaaa

SEQ ID NO: 2907188 - DNA, 25 bp, Homo sapien
ggcaataagcatcttccgtcaaagg

SEQ ID NO: 2907189 - DNA, 25 bp, Homo sapien
tgctcagggccaatatctccaatgc

SEQ ID NO: 2907190 - DNA, 25 bp, Homo sapien
tgagaatcaacttggcccctctgtg

SEQ ID NO: 2907191 - DNA, 25 bp, Homo sapien
tgggaagcgtgagccatgaaagcct

SEQ ID NO: 2907192 - DNA, 25 bp, Homo sapien
tctgtgtgagtagacatgcgtctgc

SEQ ID NO: 2907193 - DNA, 25 bp, Homo sapien
acttctagtgctttcggagggtgag

SEQ ID NO: 2907194 - DNA, 25 bp, Homo sapien
ctggccggtagtgctctcgggcctc

SEQ ID NO: 2907195 - DNA, 25 bp, Homo sapien
ccggtagtgctctcgggcctcgttg

SEQ ID NO: 2907196 - DNA, 25 bp, Homo sapien
gcagctgctggccggtagtgctctc

SEQ ID NO: 2907197 - DNA, 25 bp, Homo sapien
agctgctggccggtagtgctctcgg

SEQ ID NO: 2907198 - DNA, 25 bp, Homo sapien
attggatggatcttgctgaggtcgt

SEQ ID NO: 2907199 - DNA, 25 bp, Homo sapien
aaactggtacattggatggatcttg

SEQ ID NO: 2907200 - DNA, 25 bp, Homo sapien
ggtacattggatggatcttgctgag

SEQ ID NO: 2907201 - DNA, 25 bp, Homo sapien
ggatggatcttgctgaggtcgttca

SEQ ID NO: 2907202 - DNA, 25 bp, Homo sapien
tgctgtctattaggttggccacccg

SEQ ID NO: 2907203 - DNA, 25 bp, Homo sapien
agcccgcggatggtgtactggtaca

SEQ ID NO: 2907204 - DNA, 25 bp, Homo sapien
ggcaaggtaggtcagcttatcacac

SEQ ID NO: 2907205 - DNA, 25 bp, Homo sapien
ttatcacactcaaagagcccgcgga

SEQ ID NO: 2907206 - DNA, 25 bp, Homo sapien
tgcactggagatcgaagcaggaaat

SEQ ID NO: 2907207 - DNA, 25 bp, Homo sapien
tgacttctcggttcatgaggagaat

SEQ ID NO: 2907208 - DNA, 25 bp, Homo sapien
tccactgcattgacttctcggttca

SEQ ID NO: 2907209 - DNA, 25 bp, Homo sapien
ggtgcccgtctgcactggagatcga

SEQ ID NO: 2907210 - DNA, 25 bp, Homo sapien
ttagcagatccctctatgtcccgat

SEQ ID NO: 2907211 - DNA, 25 bp, Homo sapien
tctttctcaggacattcggactcca

SEQ ID NO: 2907212 - DNA, 25 bp, Homo sapien
tgtcccgatccagattagagaattc

SEQ ID NO: 2907213 - DNA, 25 bp, Homo sapien
gcaaagcataggtcatccggtcggg

SEQ ID NO: 2907214 - DNA, 25 bp, Homo sapien
caaatgaggttgcaaaatctagggc

SEQ ID NO: 2907215 - DNA, 25 bp, Homo sapien
tccttcagtgggtccacccctggag

SEQ ID NO: 2907216 - DNA, 25 bp, Homo sapien
gctggtcccgattcttcaaatgagg

SEQ ID NO: 2907217 - DNA, 25 bp, Homo sapien
cacgtatttgcttcctaacttctct

SEQ ID NO: 2907218 - DNA, 25 bp, Homo sapien
aatagcatttagttataacataccc

SEQ ID NO: 2907219 - DNA, 25 bp, Homo sapien
tacccaacagatgatctaaacactt

SEQ ID NO: 2907220 - DNA, 25 bp, Homo sapien
tcaaaattaaggaggtgtttatcaa

SEQ ID NO: 2907221 - DNA, 25 bp, Homo sapien
tatggtaagtgactcaaagagaaat

SEQ ID NO: 2907222 - DNA, 25 bp, Homo sapien
tttcttggcagcgaggtccagcgca

SEQ ID NO: 2907223 - DNA, 25 bp, Homo sapien
ctgtccttgccccaaagacacgttg

SEQ ID NO: 2907224 - DNA, 25 bp, Homo sapien
aaagacacgttgtgaaagttctgat

SEQ ID NO: 2907225 - DNA, 25 bp, Homo sapien
acctttcttggcagcgaggtccagc

SEQ ID NO: 2907226 - DNA, 25 bp, Homo sapien
ggagagctctgagcaaccacatcag

SEQ ID NO: 2907227 - DNA, 25 bp, Homo sapien
cacaagattttgatgccctgcatgg

SEQ ID NO: 2907228 - DNA, 25 bp, Homo sapien
cggagaagtctcttggcaaatgtgc

SEQ ID NO: 2907229 - DNA, 25 bp, Homo sapien
ctctgatgtccatgacaagtgcctg

SEQ ID NO: 2907230 - DNA, 25 bp, Homo sapien
ggtgatcttaatggagttctccagg

SEQ ID NO: 2907231 - DNA, 25 bp, Homo sapien
cattggtgatcttaatggagttctc

SEQ ID NO: 2907232 - DNA, 25 bp, Homo sapien
attggtgatcttaatggagttctcc

SEQ ID NO: 2907233 - DNA, 25 bp, Homo sapien
tgatcttaatggagttctccaggat

SEQ ID NO: 2907234 - DNA, 25 bp, Homo sapien
agtttgcatcagctgactgtgaggt

SEQ ID NO: 2907235 - DNA, 25 bp, Homo sapien
gactgtgaggtgtgctgctgttttt

SEQ ID NO: 2907236 - DNA, 25 bp, Homo sapien
acatcagcattgctccgtagcccaa

SEQ ID NO: 2907237 - DNA, 25 bp, Homo sapien
gactcccttctgagttgcatgctct

SEQ ID NO: 2907238 - DNA, 25 bp, Homo sapien
tgagagtgtcgcttttaaggttcgc

SEQ ID NO: 2907239 - DNA, 25 bp, Homo sapien
gtcgcttttaaggttcgcacacaac

SEQ ID NO: 2907240 - DNA, 25 bp, Homo sapien
ctgaaatgagagtgtcgcttttaag

SEQ ID NO: 2907241 - DNA, 25 bp, Homo sapien
taaggttcgcacacaacttctctta

SEQ ID NO: 2907242 - DNA, 25 bp, Homo sapien
tgccaccaccgcatggaagtaacaa

SEQ ID NO: 2907243 - DNA, 25 bp, Homo sapien
tcccgagaacacatctccagagtgt

SEQ ID NO: 2907244 - DNA, 25 bp, Homo sapien
ccaccaccgcatggaagtaacaaag

SEQ ID NO: 2907245 - DNA, 25 bp, Homo sapien
ttaaactccgtctcccgagaacaca

SEQ ID NO: 2907246 - DNA, 25 bp, Homo sapien
ggaagttgtagaggacattcacaga

SEQ ID NO: 2907247 - DNA, 25 bp, Homo sapien
tccagtgttaaaggggtatgagcga

SEQ ID NO: 2907248 - DNA, 25 bp, Homo sapien
tgaggtctccagtgttaaaggggta

SEQ ID NO: 2907249 - DNA, 25 bp, Homo sapien
ggcctccaggaagttgtagaggaca

SEQ ID NO: 2907250 - DNA, 25 bp, Homo sapien
gctggtccctgaatgtccatggcct

SEQ ID NO: 2907251 - DNA, 25 bp, Homo sapien
tggtccctgaatgtccatggccttt

SEQ ID NO: 2907252 - DNA, 25 bp, Homo sapien
tggctggtccctgaatgtccatggc

SEQ ID NO: 2907253 - DNA, 25 bp, Homo sapien
gtccctgaatgtccatggcctttac

SEQ ID NO: 2907254 - DNA, 25 bp, Homo sapien
cccctctgattcacccctcaaaatt

SEQ ID NO: 2907255 - DNA, 25 bp, Homo sapien
tgattcacccctcaaaattaaataa

SEQ ID NO: 2907256 - DNA, 25 bp, Homo sapien
cctctgattcacccctcaaaattaa

SEQ ID NO: 2907257 - DNA, 25 bp, Homo sapien
tctgattcacccctcaaaattaaat

SEQ ID NO: 2907258 - DNA, 25 bp, Homo sapien
tgatgggggaaagaaagagaggaag

SEQ ID NO: 2907259 - DNA, 25 bp, Homo sapien
gtgatgggggaaagaaagagaggaa

SEQ ID NO: 2907260 - DNA, 25 bp, Homo sapien
ctgagtgatgggggaaagaaagaga

SEQ ID NO: 2907261 - DNA, 25 bp, Homo sapien
gagtgatgggggaaagaaagagagg

SEQ ID NO: 2907262 - DNA, 25 bp, Homo sapien
acatttctggtcgaatgaattcccc

SEQ ID NO: 2907263 - DNA, 25 bp, Homo sapien
ggtaggttctgcagagtcttctgtc

SEQ ID NO: 2907264 - DNA, 25 bp, Homo sapien
tccatacatgatctctccaaacagg

SEQ ID NO: 2907265 - DNA, 25 bp, Homo sapien
gatgataaccattgtagtccatgtt

SEQ ID NO: 2907266 - DNA, 25 bp, Homo sapien
cgcccgctccgtctctggcctggct

SEQ ID NO: 2907267 - DNA, 25 bp, Homo sapien
ctccagcacagtgcggaagagcttt

SEQ ID NO: 2907268 - DNA, 25 bp, Homo sapien
cttttcttctcttgtggcgcccgct

SEQ ID NO: 2907269 - DNA, 25 bp, Homo sapien
ctctgcgttcgggtggaggccatag

SEQ ID NO: 2907270 - DNA, 25 bp, Homo sapien
ggccatcagttctgggatgttaaac

SEQ ID NO: 2907271 - DNA, 25 bp, Homo sapien
tcctggaaggcaactacaatgtaag

SEQ ID NO: 2907272 - DNA, 25 bp, Homo sapien
ccagctccctcagtgagcgctgaat

SEQ ID NO: 2907273 - DNA, 25 bp, Homo sapien
tctggtgaggatattcatccggcca

SEQ ID NO: 2907274 - DNA, 25 bp, Homo sapien
cagtctgggcacagcatttgggttt

SEQ ID NO: 2907275 - DNA, 25 bp, Homo sapien
tctatgggaacatatttgtggcccc

SEQ ID NO: 2907276 - DNA, 25 bp, Homo sapien
gcagtctgttgtcagtatatgcccc

SEQ ID NO: 2907277 - DNA, 25 bp, Homo sapien
tatgctcaacctgaaacagccctgg

SEQ ID NO: 2907278 - DNA, 25 bp, Homo sapien
tgtgatggaaatgtcctggtcgttt

SEQ ID NO: 2907279 - DNA, 25 bp, Homo sapien
ggactgctggcggtacactggacta

SEQ ID NO: 2907280 - DNA, 25 bp, Homo sapien
tcctggtcgtttgggatgtgctttg

SEQ ID NO: 2907281 - DNA, 25 bp, Homo sapien
tacactggactaagtgtgatggaaa

SEQ ID NO: 2907282 - DNA, 25 bp, Homo sapien
catgtcacattgcagggccatctgg

SEQ ID NO: 2907283 - DNA, 25 bp, Homo sapien
ggcaccatatcgaagtacagggcat

SEQ ID NO: 2907284 - DNA, 25 bp, Homo sapien
tcattcttgcgagccgtggactgca

SEQ ID NO: 2907285 - DNA, 25 bp, Homo sapien
ggcattgtaaagtcacccgtccaag

SEQ ID NO: 2907286 - DNA, 25 bp, Homo sapien
tgggtccccgctgactagtcttgta

SEQ ID NO: 2907287 - DNA, 25 bp, Homo sapien
tcaggttgaaagtccacacgtaggt

SEQ ID NO: 2907288 - DNA, 25 bp, Homo sapien
tgtacacaggacaggaatagacact

SEQ ID NO: 2907289 - DNA, 25 bp, Homo sapien
agctttgcctctgtaatgatcccag

SEQ ID NO: 2907290 - DNA, 25 bp, Homo sapien
cagcttttttattttctcggtggct

SEQ ID NO: 2907291 - DNA, 25 bp, Homo sapien
tttttattttctcggtggctctgca

SEQ ID NO: 2907292 - DNA, 25 bp, Homo sapien
cttttttattttctcggtggctctg

SEQ ID NO: 2907293 - DNA, 25 bp, Homo sapien
ttattttctcggtggctctgcagga

SEQ ID NO: 2907294 - DNA, 25 bp, Homo sapien
tcagctcagcctcaccttaggcaca

SEQ ID NO: 2907295 - DNA, 25 bp, Homo sapien
tctgtggtgacccttcacccacctg

SEQ ID NO: 2907296 - DNA, 25 bp, Homo sapien
ttaccgttctaagtgtctgtggtga

SEQ ID NO: 2907297 - DNA, 25 bp, Homo sapien
gctcatggtttcttaccgttctaag

SEQ ID NO: 2907298 - DNA, 25 bp, Homo sapien
tgttgtgtaacaaggtcagggccct

SEQ ID NO: 2907299 - DNA, 25 bp, Homo sapien
tgttggtctaccacggcaaagttgc

SEQ ID NO: 2907300 - DNA, 25 bp, Homo sapien
aaaatgttggtgacccctgctccag

SEQ ID NO: 2907301 - DNA, 25 bp, Homo sapien
ggcattgtggcctgtaaatcactaa

SEQ ID NO: 2907302 - DNA, 25 bp, Homo sapien
gcctgacagtgagacttccccctcc

SEQ ID NO: 2907303 - DNA, 25 bp, Homo sapien
ggcctgacagtgagacttccccctc

SEQ ID NO: 2907304 - DNA, 25 bp, Homo sapien
cggcaccaaatttcatgtgcgtccg

SEQ ID NO: 2907305 - DNA, 25 bp, Homo sapien
caaatttcatgtgcgtccgtgtgaa

SEQ ID NO: 2907306 - DNA, 25 bp, Homo sapien
gcaccaaatttcatgtgcgtccgtg

SEQ ID NO: 2907307 - DNA, 25 bp, Homo sapien
accaaatttcatgtgcgtccgtgtg

SEQ ID NO: 2907308 - DNA, 25 bp, Homo sapien
catctgggcgtataggtgcaaatca

SEQ ID NO: 2907309 - DNA, 25 bp, Homo sapien
tgggcgtataggtgcaaatcacagg

SEQ ID NO: 2907310 - DNA, 25 bp, Homo sapien
ccatctgggcgtataggtgcaaatc

SEQ ID NO: 2907311 - DNA, 25 bp, Homo sapien
tctgggcgtataggtgcaaatcaca

SEQ ID NO: 2907312 - DNA, 25 bp, Homo sapien
taatgggattagctgtagtcactgc

SEQ ID NO: 2907313 - DNA, 25 bp, Homo sapien
gcatagagggcctgtgagctcacgt

SEQ ID NO: 2907314 - DNA, 25 bp, Homo sapien
gaattgtgtctaagaggatacccct

SEQ ID NO: 2907315 - DNA, 25 bp, Homo sapien
gtcactgcttatgggaagaacctca

SEQ ID NO: 2907316 - DNA, 25 bp, Homo sapien
aaagcacacttcgtgagaaccagta

SEQ ID NO: 2907317 - DNA, 25 bp, Homo sapien
cacttcgtgagaaccagtaggaaga

SEQ ID NO: 2907318 - DNA, 25 bp, Homo sapien
gcacacttcgtgagaaccagtagga

SEQ ID NO: 2907319 - DNA, 25 bp, Homo sapien
cgtgagaaccagtaggaagaagcct

SEQ ID NO: 2907320 - DNA, 25 bp, Homo sapien
aaatatgattcaggggaaccgccat

SEQ ID NO: 2907321 - DNA, 25 bp, Homo sapien
ggcatgttaagcacgtgaagagcca

SEQ ID NO: 2907322 - DNA, 25 bp, Homo sapien
ctttggccgtgcacaggcgaatcta

SEQ ID NO: 2907323 - DNA, 25 bp, Homo sapien
gcacaggcgaatctagaagaaaggt

SEQ ID NO: 2907324 - DNA, 25 bp, Homo sapien
tgttgggagtgaagagccgagcggc

SEQ ID NO: 2907325 - DNA, 25 bp, Homo sapien
tgacggccgggtggcctggcgccgg

SEQ ID NO: 2907326 - DNA, 25 bp, Homo sapien
ctgctgacggccgggtggcctggcg

SEQ ID NO: 2907327 - DNA, 25 bp, Homo sapien
gcatgctgctgacggccgggtggcc

SEQ ID NO: 2907328 - DNA, 25 bp, Homo sapien
ccgccgctcgggctcggagccgcca

SEQ ID NO: 2907329 - DNA, 25 bp, Homo sapien
ctagagactacaaaggagactgacc

SEQ ID NO: 2907330 - DNA, 25 bp, Homo sapien
aaaggctaccagtcacccaggtggt

SEQ ID NO: 2907331 - DNA, 25 bp, Homo sapien
catgaagtgcaccattcttggagca

SEQ ID NO: 2907332 - DNA, 25 bp, Homo sapien
tcaggttgtatcattggagccatct

SEQ ID NO: 2907333 - DNA, 25 bp, Homo sapien
tatatctgggtgaactatctgtacc

SEQ ID NO: 2907334 - DNA, 25 bp, Homo sapien
gggcttaatttgacatgatcctcca

SEQ ID NO: 2907335 - DNA, 25 bp, Homo sapien
tctctggaggtactagataatccgt

SEQ ID NO: 2907336 - DNA, 25 bp, Homo sapien
cattttaagtcgtgtgtgcctcact

SEQ ID NO: 2907337 - DNA, 25 bp, Homo sapien
ttcacagaagtttatctgaaagcct

SEQ ID NO: 2907338 - DNA, 25 bp, Homo sapien
gaagtttatctgaaagcctaaagta

SEQ ID NO: 2907339 - DNA, 25 bp, Homo sapien
ttgtgccttttcacagaagtttatc

SEQ ID NO: 2907340 - DNA, 25 bp, Homo sapien
cacagaagtttatctgaaagcctaa

SEQ ID NO: 2907341 - DNA, 25 bp, Homo sapien
ctggctttgaaaacgatatgtggca

SEQ ID NO: 2907342 - DNA, 25 bp, Homo sapien
taactggatgttatgcaggttctct

SEQ ID NO: 2907343 - DNA, 25 bp, Homo sapien
ggcgatcttttgtatactccaccaa

SEQ ID NO: 2907344 - DNA, 25 bp, Homo sapien
catgagtcataagacgtggcgatct

SEQ ID NO: 2907345 - DNA, 25 bp, Homo sapien
catgatctgtccttaagaatccgga

SEQ ID NO: 2907346 - DNA, 25 bp, Homo sapien
tgcggctttcacctcccgagcttag

SEQ ID NO: 2907347 - DNA, 25 bp, Homo sapien
taaagcaaagagtgtgtacgtccac

SEQ ID NO: 2907348 - DNA, 25 bp, Homo sapien
tcaggaaagtcagagagtctacctt

SEQ ID NO: 2907349 - DNA, 25 bp, Homo sapien
ttcccacgaagaccaaacacatcca

SEQ ID NO: 2907350 - DNA, 25 bp, Homo sapien
aaagataagcctcctttctaccaga

SEQ ID NO: 2907351 - DNA, 25 bp, Homo sapien
ggcccctagatctgctttcaaagat

SEQ ID NO: 2907352 - DNA, 25 bp, Homo sapien
ctttctaccagatcatgtgaattcc

SEQ ID NO: 2907353 - DNA, 25 bp, Homo sapien
aagtcacaccaaaaggcaagagaac

SEQ ID NO: 2907354 - DNA, 25 bp, Homo sapien
acaaaacaggtactattctgagggc

SEQ ID NO: 2907355 - DNA, 25 bp, Homo sapien
taacaaacagttaatataggacaat

SEQ ID NO: 2907356 - DNA, 25 bp, Homo sapien
tattctgagggcataagaaagtcac

SEQ ID NO: 2907357 - DNA, 25 bp, Homo sapien
gttttgaactcctgtaggattggga

SEQ ID NO: 2907358 - DNA, 25 bp, Homo sapien
ctcctgtaggattgggattcagagt

SEQ ID NO: 2907359 - DNA, 25 bp, Homo sapien
ttgaactcctgtaggattgggattc

SEQ ID NO: 2907360 - DNA, 25 bp, Homo sapien
aaccttgctgtagatttgaaaggtg

SEQ ID NO: 2907361 - DNA, 25 bp, Homo sapien
gaataaacaatattcccagagagtt

SEQ ID NO: 2907362 - DNA, 25 bp, Homo sapien
gtgaaaatttgtacagttggacaga

SEQ ID NO: 2907363 - DNA, 25 bp, Homo sapien
tgcttgagttgagcctttgattacc

SEQ ID NO: 2907364 - DNA, 25 bp, Homo sapien
tgagttgagcctttgattaccaaga

SEQ ID NO: 2907365 - DNA, 25 bp, Homo sapien
aggaactctagtttaaaagactgat

SEQ ID NO: 2907366 - DNA, 25 bp, Homo sapien
taatcgatttcaagagaaggaactc

SEQ ID NO: 2907367 - DNA, 25 bp, Homo sapien
aactctagtttaaaagactgatcag

SEQ ID NO: 2907368 - DNA, 25 bp, Homo sapien
agaaaaactaatcgatttcaagaga

SEQ ID NO: 2907369 - DNA, 25 bp, Homo sapien
gcaacgtttataagacacagttctc

SEQ ID NO: 2907370 - DNA, 25 bp, Homo sapien
gcccggcctcgtcattaattctaag

SEQ ID NO: 2907371 - DNA, 25 bp, Homo sapien
tgagaaggctcatcaagaaatacga

SEQ ID NO: 2907372 - DNA, 25 bp, Homo sapien
taagataaagttctactgagaaggc

SEQ ID NO: 2907373 - DNA, 25 bp, Homo sapien
ttccacagtaaactcggtctgtcag

SEQ ID NO: 2907374 - DNA, 25 bp, Homo sapien
actgttacgatctctagatgaatac

SEQ ID NO: 2907375 - DNA, 25 bp, Homo sapien
gcacatcactgcaactgttcttctg

SEQ ID NO: 2907376 - DNA, 25 bp, Homo sapien
gttcttctgtgtccgtactgttacg

SEQ ID NO: 2907377 - DNA, 25 bp, Homo sapien
ccaatgaacactacataaggttcca

SEQ ID NO: 2907378 - DNA, 25 bp, Homo sapien
aatgaacactacataaggttccaac

SEQ ID NO: 2907379 - DNA, 25 bp, Homo sapien
tccaatgaacactacataaggttcc

SEQ ID NO: 2907380 - DNA, 25 bp, Homo sapien
caatgaacactacataaggttccaa

SEQ ID NO: 2907381 - DNA, 25 bp, Homo sapien
ttttgaagtttttcatttgtgtcat

SEQ ID NO: 2907382 - DNA, 25 bp, Homo sapien
tttttgaagtttttcatttgtgtca

SEQ ID NO: 2907383 - DNA, 25 bp, Homo sapien
atattgggaagcaatttttccacat

SEQ ID NO: 2907384 - DNA, 25 bp, Homo sapien
aatattgggaagcaatttttccaca

SEQ ID NO: 2907385 - DNA, 25 bp, Homo sapien
tattgggaagcaatttttccacatt

SEQ ID NO: 2907386 - DNA, 25 bp, Homo sapien
gttgacagaaccataagctcctcgt

SEQ ID NO: 2907387 - DNA, 25 bp, Homo sapien
tgttgacagaaccataagctcctcg

SEQ ID NO: 2907388 - DNA, 25 bp, Homo sapien
tgacagaaccataagctcctcgtcc

SEQ ID NO: 2907389 - DNA, 25 bp, Homo sapien
acagaaccataagctcctcgtccaa

SEQ ID NO: 2907390 - DNA, 25 bp, Homo sapien
ccagtgtgctgcgtcttcttccagc

SEQ ID NO: 2907391 - DNA, 25 bp, Homo sapien
agccgcccagcctgaactcaccttg

SEQ ID NO: 2907392 - DNA, 25 bp, Homo sapien
agtgtgctgcgtcttcttccagctc

SEQ ID NO: 2907393 - DNA, 25 bp, Homo sapien
cttgcccaacccagtgtgctgcgtc

SEQ ID NO: 2907394 - DNA, 25 bp, Homo sapien
cctctgtcagccatctgagcttgta

SEQ ID NO: 2907395 - DNA, 25 bp, Homo sapien
ccctctgtcagccatctgagcttgt

SEQ ID NO: 2907396 - DNA, 25 bp, Homo sapien
agtccttatactccctctcattttc

SEQ ID NO: 2907397 - DNA, 25 bp, Homo sapien
cgtttctttggtttttcgcacatat

SEQ ID NO: 2907398 - DNA, 25 bp, Homo sapien
ggtacttcagtccttatactccctc

SEQ ID NO: 2907399 - DNA, 25 bp, Homo sapien
gacaggtacttcagtccttatactc

SEQ ID NO: 2907400 - DNA, 25 bp, Homo sapien
tcctaccaagttaagctcttgaaca

SEQ ID NO: 2907401 - DNA, 25 bp, Homo sapien
actgccggtgtcctgatgtgacaac

SEQ ID NO: 2907402 - DNA, 25 bp, Homo sapien
gatgtgacaactactgattctccca

SEQ ID NO: 2907403 - DNA, 25 bp, Homo sapien
tccttcctaccaagttaagctcttg

SEQ ID NO: 2907404 - DNA, 25 bp, Homo sapien
aactaaactcgcttaaggactggag

SEQ ID NO: 2907405 - DNA, 25 bp, Homo sapien
ggcaggctgacaacgcaaaggctaa

SEQ ID NO: 2907406 - DNA, 25 bp, Homo sapien
ttgcagacgaggcaaaataaaggct

SEQ ID NO: 2907407 - DNA, 25 bp, Homo sapien
taggaagactcaagtgtggcaaagg

SEQ ID NO: 2907408 - DNA, 25 bp, Homo sapien
catgccattggttggatcagccaca

SEQ ID NO: 2907409 - DNA, 25 bp, Homo sapien
tgcatataagcccaataaagcaggt

SEQ ID NO: 2907410 - DNA, 25 bp, Homo sapien
tctgtatggattaggccgcggtaat

SEQ ID NO: 2907411 - DNA, 25 bp, Homo sapien
ggtagatacaggtcagaaatgccaa

SEQ ID NO: 2907412 - DNA, 25 bp, Homo sapien
tccgcattactacatccaaatccat

SEQ ID NO: 2907413 - DNA, 25 bp, Homo sapien
ctctgaagagtgcaccataaaactg

SEQ ID NO: 2907414 - DNA, 25 bp, Homo sapien
tttcatccactgttgaccgaattct

SEQ ID NO: 2907415 - DNA, 25 bp, Homo sapien
caatgtatgggcaatcactactccg

SEQ ID NO: 2907416 - DNA, 25 bp, Homo sapien
tgtatactgatgtaacggaatgctg

SEQ ID NO: 2907417 - DNA, 25 bp, Homo sapien
gatacagtcatgcacatgaatacat

SEQ ID NO: 2907418 - DNA, 25 bp, Homo sapien
aatatttaggtccaagatacagtca

SEQ ID NO: 2907419 - DNA, 25 bp, Homo sapien
ggtaagattcttgtgcaacatgaag

SEQ ID NO: 2907420 - DNA, 25 bp, Homo sapien
ggatggctgactgaaccaaaccaag

SEQ ID NO: 2907421 - DNA, 25 bp, Homo sapien
tcagaaagtacctattacagactgc

SEQ ID NO: 2907422 - DNA, 25 bp, Homo sapien
ggaattgaaagcactgtctctctca

SEQ ID NO: 2907423 - DNA, 25 bp, Homo sapien
cataagctccttgatggatggctga

SEQ ID NO: 2907424 - DNA, 25 bp, Homo sapien
cgtggtgtaaggaaactcgtaagtg

SEQ ID NO: 2907425 - DNA, 25 bp, Homo sapien
ggcaggtattacctacgtggtgtaa

SEQ ID NO: 2907426 - DNA, 25 bp, Homo sapien
ggaacattacagatagtacttggca

SEQ ID NO: 2907427 - DNA, 25 bp, Homo sapien
gggaggtaacttgcttcagccagca

SEQ ID NO: 2907428 - DNA, 25 bp, Homo sapien
ttaacaaagcagatcatagcaaaag

SEQ ID NO: 2907429 - DNA, 25 bp, Homo sapien
gagatactgacctactacacaaaga

SEQ ID NO: 2907430 - DNA, 25 bp, Homo sapien
gggacaactggccttccatatagaa

SEQ ID NO: 2907431 - DNA, 25 bp, Homo sapien
tcaagatgagaagcacgtcaaattc

SEQ ID NO: 2907432 - DNA, 25 bp, Homo sapien
gttccatacagatccaacagtcacc

SEQ ID NO: 2907433 - DNA, 25 bp, Homo sapien
atcaaacgaggtagacatgagttcc

SEQ ID NO: 2907434 - DNA, 25 bp, Homo sapien
aaacttatcaaacgaggtagacatg

SEQ ID NO: 2907435 - DNA, 25 bp, Homo sapien
agttccatacagatccaacagtcac

SEQ ID NO: 2907436 - DNA, 25 bp, Homo sapien
tcatggtcaccctgttatacagcgg

SEQ ID NO: 2907437 - DNA, 25 bp, Homo sapien
gaggtaacactatttaccacagaga

SEQ ID NO: 2907438 - DNA, 25 bp, Homo sapien
tgaatagctatgcttgtttgctggt

SEQ ID NO: 2907439 - DNA, 25 bp, Homo sapien
tatacagcggttaagagcagggttc

SEQ ID NO: 2907440 - DNA, 25 bp, Homo sapien
ttaagtggtttagtgctttcacagt

SEQ ID NO: 2907441 - DNA, 25 bp, Homo sapien
ggtagtgattcggtgtgtttcctca

SEQ ID NO: 2907442 - DNA, 25 bp, Homo sapien
agtgattcggtgtgtttcctcaaag

SEQ ID NO: 2907443 - DNA, 25 bp, Homo sapien
caaatttgctgaggggtagtgattc

SEQ ID NO: 2907444 - DNA, 25 bp, Homo sapien
tccgttacaaatttgctgaggggta

SEQ ID NO: 2907445 - DNA, 25 bp, Homo sapien
tagacatgatagtgggaactgctct

SEQ ID NO: 2907446 - DNA, 25 bp, Homo sapien
gaggcacttctggtgaatgagccaa

SEQ ID NO: 2907447 - DNA, 25 bp, Homo sapien
cacgaggcagccacatatagacatg

SEQ ID NO: 2907448 - DNA, 25 bp, Homo sapien
tgcacagcacgagagcacctcttct

SEQ ID NO: 2907449 - DNA, 25 bp, Homo sapien
tccactgatgccgaagtcacagagc

SEQ ID NO: 2907450 - DNA, 25 bp, Homo sapien
tagcagtttcatggtaaaaccgtat

SEQ ID NO: 2907451 - DNA, 25 bp, Homo sapien
caatgactatcaagcaagaaggcct

SEQ ID NO: 2907452 - DNA, 25 bp, Homo sapien
ctctgtgcaatgactatcaagcaag

SEQ ID NO: 2907453 - DNA, 25 bp, Homo sapien
taatggccagcacaaaagagcacag

SEQ ID NO: 2907454 - DNA, 25 bp, Homo sapien
cctccgcagcctggtagtcttccat

SEQ ID NO: 2907455 - DNA, 25 bp, Homo sapien
aatttgctcacttcatcaacaacaa

SEQ ID NO: 2907456 - DNA, 25 bp, Homo sapien
atttgctcacttcatcaacaacaaa

SEQ ID NO: 2907457 - DNA, 25 bp, Homo sapien
acaaaagcagtctcctccgcagcct

SEQ ID NO: 2907458 - DNA, 25 bp, Homo sapien
taagcgttaaccaccaattgtgctt

SEQ ID NO: 2907459 - DNA, 25 bp, Homo sapien
taataagcgttaaccaccaattgtg

SEQ ID NO: 2907460 - DNA, 25 bp, Homo sapien
cgttaaccaccaattgtgctttcta

SEQ ID NO: 2907461 - DNA, 25 bp, Homo sapien
ctgtgttaataagcgttaaccacca

SEQ ID NO: 2907462 - DNA, 25 bp, Homo sapien
tcacaggctggactaggaggtccaa

SEQ ID NO: 2907463 - DNA, 25 bp, Homo sapien
gactaggaggtccaatacacagtcc

SEQ ID NO: 2907464 - DNA, 25 bp, Homo sapien
caaaggtgccgacgatgcagtacat

SEQ ID NO: 2907465 - DNA, 25 bp, Homo sapien
tacacagtccaaaggtgccgacgat

SEQ ID NO: 2907466 - DNA, 25 bp, Homo sapien
ggtaacgtttcatatttgggagcat

SEQ ID NO: 2907467 - DNA, 25 bp, Homo sapien
gaatcaacaagatgtggtgcacctg

SEQ ID NO: 2907468 - DNA, 25 bp, Homo sapien
ttgaatgtgacccatcgcataaggt

SEQ ID NO: 2907469 - DNA, 25 bp, Homo sapien
tccacttgggtcacactagtgttgg

SEQ ID NO: 2907470 - DNA, 25 bp, Homo sapien
gccagaggttatgccaagcaggcat

SEQ ID NO: 2907471 - DNA, 25 bp, Homo sapien
ttcggttgcagcataagcagaacag

SEQ ID NO: 2907472 - DNA, 25 bp, Homo sapien
tatcccgagtgatccaggccttttg

SEQ ID NO: 2907473 - DNA, 25 bp, Homo sapien
ctgatctaaggatatcctggtcaca

SEQ ID NO: 2907474 - DNA, 25 bp, Homo sapien
ggatgaggccataccacaatatatt

SEQ ID NO: 2907475 - DNA, 25 bp, Homo sapien
aaagactttgctcggtggatgaggc

SEQ ID NO: 2907476 - DNA, 25 bp, Homo sapien
gaggaatccatgtctagcgtcagaa

SEQ ID NO: 2907477 - DNA, 25 bp, Homo sapien
aagaattacaaggtcgccaggtgca

SEQ ID NO: 2907478 - DNA, 25 bp, Homo sapien
catatccttgtcgtgatgcgcttgg

SEQ ID NO: 2907479 - DNA, 25 bp, Homo sapien
cagagcggacatcatatccttgtcg

SEQ ID NO: 2907480 - DNA, 25 bp, Homo sapien
ccttgtcgtgatgcgcttgggtcta

SEQ ID NO: 2907481 - DNA, 25 bp, Homo sapien
gcggacatcatatccttgtcgtgat

SEQ ID NO: 2907482 - DNA, 25 bp, Homo sapien
tcttgataagattatagcccagagg

SEQ ID NO: 2907483 - DNA, 25 bp, Homo sapien
ggagcagcctgaactaatacagata

SEQ ID NO: 2907484 - DNA, 25 bp, Homo sapien
ttgtaagaaagaccccagacagctc

SEQ ID NO: 2907485 - DNA, 25 bp, Homo sapien
ggtcagcatttggttggagcagcct

SEQ ID NO: 2907486 - DNA, 25 bp, Homo sapien
tgatgaaactcggggagaattccct

SEQ ID NO: 2907487 - DNA, 25 bp, Homo sapien
ttgatgaaactcggggagaattccc

SEQ ID NO: 2907488 - DNA, 25 bp, Homo sapien
gaaatcggcctgtggccaactcata

SEQ ID NO: 2907489 - DNA, 25 bp, Homo sapien
ggaaatcggcctgtggccaactcat

SEQ ID NO: 2907490 - DNA, 25 bp, Homo sapien
caggtcttgctgctaagagaaaggc

SEQ ID NO: 2907491 - DNA, 25 bp, Homo sapien
ccagctgcctgtgagatctagcaca

SEQ ID NO: 2907492 - DNA, 25 bp, Homo sapien
ggatcgagctttactgcctaattag

SEQ ID NO: 2907493 - DNA, 25 bp, Homo sapien
gcacaattaggcagtcccacaagtt

SEQ ID NO: 2907494 - DNA, 25 bp, Homo sapien
aaaatgcttatccaggccaggtaca

SEQ ID NO: 2907495 - DNA, 25 bp, Homo sapien
taagaccaaccagggtaatacagtg

SEQ ID NO: 2907496 - DNA, 25 bp, Homo sapien
aagccttgtcattgtgtagtaccat

SEQ ID NO: 2907497 - DNA, 25 bp, Homo sapien
tagcttgcttaaagctgtggcccag

SEQ ID NO: 2907498 - DNA, 25 bp, Homo sapien
gcaaaaccagtatctaaagccttgt

SEQ ID NO: 2907499 - DNA, 25 bp, Homo sapien
cccaggaagtaactgatatcatttt

SEQ ID NO: 2907500 - DNA, 25 bp, Homo sapien
atcctacatgataaagagacttcac

SEQ ID NO: 2907501 - DNA, 25 bp, Homo sapien
tttcaatctgaaaacctatactaaa

SEQ ID NO: 2907502 - DNA, 25 bp, Homo sapien
tgatctctgtaaacattgcttctcc

SEQ ID NO: 2907503 - DNA, 25 bp, Homo sapien
tccactttcagagttgccttcttta

SEQ ID NO: 2907504 - DNA, 25 bp, Homo sapien
tatctctaggatagtcagtgtagga

SEQ ID NO: 2907505 - DNA, 25 bp, Homo sapien
tccttcagatccaaagtaacaacgc

SEQ ID NO: 2907506 - DNA, 25 bp, Homo sapien
cagtgtaggatgattagttaaaaat

SEQ ID NO: 2907507 - DNA, 25 bp, Homo sapien
taacaacgcagacagcctgctaaac

SEQ ID NO: 2907508 - DNA, 25 bp, Homo sapien
ttggccttttggattcatccttcgt

SEQ ID NO: 2907509 - DNA, 25 bp, Homo sapien
gccttttggattcatccttcgtaag

SEQ ID NO: 2907510 - DNA, 25 bp, Homo sapien
ctttggccttttggattcatccttc

SEQ ID NO: 2907511 - DNA, 25 bp, Homo sapien
cagaagctctttatactttggcctt

SEQ ID NO: 2907512 - DNA, 25 bp, Homo sapien
taggatgtacctacaatccccacag

SEQ ID NO: 2907513 - DNA, 25 bp, Homo sapien
tccatgagaatttagctagtattag

SEQ ID NO: 2907514 - DNA, 25 bp, Homo sapien
gcccactgcttgcttagtgaaccag

SEQ ID NO: 2907515 - DNA, 25 bp, Homo sapien
tgtttatgacagagaggcccactgc

SEQ ID NO: 2907516 - DNA, 25 bp, Homo sapien
gcatgcgacctcaacggcacgttct

SEQ ID NO: 2907517 - DNA, 25 bp, Homo sapien
aatcgacatacatgggagagctggg

SEQ ID NO: 2907518 - DNA, 25 bp, Homo sapien
caacggcacgttcttcatacatcaa

SEQ ID NO: 2907519 - DNA, 25 bp, Homo sapien
tcaatcgacatacatgggagagctg

SEQ ID NO: 2907520 - DNA, 25 bp, Homo sapien
catgatggaaacgaacaccaatctt

SEQ ID NO: 2907521 - DNA, 25 bp, Homo sapien
cgaacaccaatcttattgcacatgg

SEQ ID NO: 2907522 - DNA, 25 bp, Homo sapien
tgacaggagtatacagacatgatgg

SEQ ID NO: 2907523 - DNA, 25 bp, Homo sapien
gcccttttttctagagtctgatgta

SEQ ID NO: 2907524 - DNA, 25 bp, Homo sapien
tctttgacaagtggcagactcctga

SEQ ID NO: 2907525 - DNA, 25 bp, Homo sapien
tggtcatccacacaatagaacggtc

SEQ ID NO: 2907526 - DNA, 25 bp, Homo sapien
caaagcctaaggttcagtgccaggg

SEQ ID NO: 2907527 - DNA, 25 bp, Homo sapien
ggaacatccctgctaactgtaaagg

SEQ ID NO: 2907528 - DNA, 25 bp, Homo sapien
cctctcagggtctgatttcagaaaa

SEQ ID NO: 2907529 - DNA, 25 bp, Homo sapien
tctcagggtctgatttcagaaaatc

SEQ ID NO: 2907530 - DNA, 25 bp, Homo sapien
ctctcagggtctgatttcagaaaat

SEQ ID NO: 2907531 - DNA, 25 bp, Homo sapien
ttcctgttcatcttgactcttctgc

SEQ ID NO: 2907532 - DNA, 25 bp, Homo sapien
ccctccggagcccagttttgcgtct

SEQ ID NO: 2907533 - DNA, 25 bp, Homo sapien
ggagcccagttttgcgtctcctgtt

SEQ ID NO: 2907534 - DNA, 25 bp, Homo sapien
ctggcccctccggagcccagttttg

SEQ ID NO: 2907535 - DNA, 25 bp, Homo sapien
ctcctgtgtgaatccctctttttcc

SEQ ID NO: 2907536 - DNA, 25 bp, Homo sapien
tcctgtgtgaatccctctttttcct

SEQ ID NO: 2907537 - DNA, 25 bp, Homo sapien
tctcagcttcttgtgcaccaagacc

SEQ ID NO: 2907538 - DNA, 25 bp, Homo sapien
cagcttcttgtgcaccaagacccat

SEQ ID NO: 2907539 - DNA, 25 bp, Homo sapien
cctcagaacgcctgggtagttggct

SEQ ID NO: 2907540 - DNA, 25 bp, Homo sapien
gtgagaggaacctgcccgtagacct

SEQ ID NO: 2907541 - DNA, 25 bp, Homo sapien
tcacctttagaaatcactactatgg

SEQ ID NO: 2907542 - DNA, 25 bp, Homo sapien
ctactatggaggcaaatcatttctc

SEQ ID NO: 2907543 - DNA, 25 bp, Homo sapien
caagtgtgttctgtgtctcagatga

SEQ ID NO: 2907544 - DNA, 25 bp, Homo sapien
cgcgtccagccctatatatgtacag

SEQ ID NO: 2907545 - DNA, 25 bp, Homo sapien
aacagacgtgggaggcaacctcaca

SEQ ID NO: 2907546 - DNA, 25 bp, Homo sapien
gaaaagacacaacctgatccacgtt

SEQ ID NO: 2907547 - DNA, 25 bp, Homo sapien
aagttcttgtcatccaactggagac

SEQ ID NO: 2907548 - DNA, 25 bp, Homo sapien
aattttaagttcttgtcatccaact

SEQ ID NO: 2907549 - DNA, 25 bp, Homo sapien
tactccattattcaagtcccacaat

SEQ ID NO: 2907550 - DNA, 25 bp, Homo sapien
ggaaaatactccattattcaagtcc

SEQ ID NO: 2907551 - DNA, 25 bp, Homo sapien
ggagtggagacaaccctgttagaat

SEQ ID NO: 2907552 - DNA, 25 bp, Homo sapien
tcaacagccgagctagggaggtttt

SEQ ID NO: 2907553 - DNA, 25 bp, Homo sapien
gatggcagattgtgggactcctcag

SEQ ID NO: 2907554 - DNA, 25 bp, Homo sapien
gggtattacctgtagcactcctcaa

SEQ ID NO: 2907555 - DNA, 25 bp, Homo sapien
ggtccagccactgttaacggtgatg

SEQ ID NO: 2907556 - DNA, 25 bp, Homo sapien
tagcacagtgcacaccagcaagtga

SEQ ID NO: 2907557 - DNA, 25 bp, Homo sapien
ccctcttggagagccttgtgagtct

SEQ ID NO: 2907558 - DNA, 25 bp, Homo sapien
ggaaatccagatactcacagctaag

SEQ ID NO: 2907559 - DNA, 25 bp, Homo sapien
ttgttatatgtacaggatttattgc

SEQ ID NO: 2907560 - DNA, 25 bp, Homo sapien
gctgctaggggcttccagtgctgtt

SEQ ID NO: 2907561 - DNA, 25 bp, Homo sapien
atcactgttcttcatccatcttctt

SEQ ID NO: 2907562 - DNA, 25 bp, Homo sapien
cttcttaatgaggtcaaagtgttgt

SEQ ID NO: 2907563 - DNA, 25 bp, Homo sapien
aggccacacagtgagggtcagtgtc

SEQ ID NO: 2907564 - DNA, 25 bp, Homo sapien
cctgagagctgggaccaagaaggaa

SEQ ID NO: 2907565 - DNA, 25 bp, Homo sapien
ggaaacagaaaaggatgcttcagca

SEQ ID NO: 2907566 - DNA, 25 bp, Homo sapien
aagcagcaggatttcaggccacaca

SEQ ID NO: 2907567 - DNA, 25 bp, Homo sapien
tgaatagaaagggaggaccataaag

SEQ ID NO: 2907568 - DNA, 25 bp, Homo sapien
tatgaaactgccaatatcatgaata

SEQ ID NO: 2907569 - DNA, 25 bp, Homo sapien
gatgttcagtgatgttcgtgtgaac

SEQ ID NO: 2907570 - DNA, 25 bp, Homo sapien
ggagaaagaacgtgatgttcagtga

SEQ ID NO: 2907571 - DNA, 25 bp, Homo sapien
aaccagttgaattccattgcttgca

SEQ ID NO: 2907572 - DNA, 25 bp, Homo sapien
caaagaatctttggaccctgagccc

SEQ ID NO: 2907573 - DNA, 25 bp, Homo sapien
cctgagccccagtcaacagtgtaga

SEQ ID NO: 2907574 - DNA, 25 bp, Homo sapien
ggttttgttgatatcaaccagttga

SEQ ID NO: 2907575 - DNA, 25 bp, Homo sapien
gaatattgtcaacgcagatcctgga

SEQ ID NO: 2907576 - DNA, 25 bp, Homo sapien
taggttttggcacatcagctgaaca

SEQ ID NO: 2907577 - DNA, 25 bp, Homo sapien
ttagcacaatccagacctagggttt

SEQ ID NO: 2907578 - DNA, 25 bp, Homo sapien
cagctgaacacgttggaatattgtc

SEQ ID NO: 2907579 - DNA, 25 bp, Homo sapien
ggctgcactgggcaatagaatgcct

SEQ ID NO: 2907580 - DNA, 25 bp, Homo sapien
atatgttgtggtttaggctgcactg

SEQ ID NO: 2907581 - DNA, 25 bp, Homo sapien
tgggcaatagaatgcctgtgatcct

SEQ ID NO: 2907582 - DNA, 25 bp, Homo sapien
tatgttgtggtttaggctgcactgg

SEQ ID NO: 2907583 - DNA, 25 bp, Homo sapien
cttgcaggaatgacaccacagagcc

SEQ ID NO: 2907584 - DNA, 25 bp, Homo sapien
tcagaccacaagctgaacttgcagg

SEQ ID NO: 2907585 - DNA, 25 bp, Homo sapien
gagccaaacacacttaggacctctg

SEQ ID NO: 2907586 - DNA, 25 bp, Homo sapien
cagagccaaacacacttaggacctc

SEQ ID NO: 2907587 - DNA, 25 bp, Homo sapien
aaatgagtggaatctcccatctgct

SEQ ID NO: 2907588 - DNA, 25 bp, Homo sapien
tatcccagacccattcaaatgagtg

SEQ ID NO: 2907589 - DNA, 25 bp, Homo sapien
ggctccagggactgacagctttatc

SEQ ID NO: 2907590 - DNA, 25 bp, Homo sapien
tattggctgacaccataaaatgtcc

SEQ ID NO: 2907591 - DNA, 25 bp, Homo sapien
caagcagcaggtaatctgagtgagc

SEQ ID NO: 2907592 - DNA, 25 bp, Homo sapien
tacagtgaagtaggacagagtgaga

SEQ ID NO: 2907593 - DNA, 25 bp, Homo sapien
acacagtaagatacagtgaagtagg

SEQ ID NO: 2907594 - DNA, 25 bp, Homo sapien
cacagcccacatcggttaagggcat

SEQ ID NO: 2907595 - DNA, 25 bp, Homo sapien
ttgcaccaatataccaaccagatgg

SEQ ID NO: 2907596 - DNA, 25 bp, Homo sapien
cacatatggagaacgtgacccagca

SEQ ID NO: 2907597 - DNA, 25 bp, Homo sapien
cttgatgtgggctagtgaaaagacc

SEQ ID NO: 2907598 - DNA, 25 bp, Homo sapien
gatcgatgtaaacttcttgctgccc

SEQ ID NO: 2907599 - DNA, 25 bp, Homo sapien
tactgagcagtaatgtgtgcctccc

SEQ ID NO: 2907600 - DNA, 25 bp, Homo sapien
ggaaggcacttcgtatcccatactg

SEQ ID NO: 2907601 - DNA, 25 bp, Homo sapien
gctgctctcaagagtcctcagatat

SEQ ID NO: 2907602 - DNA, 25 bp, Homo sapien
cctcagatataaagggcagacattc

SEQ ID NO: 2907603 - DNA, 25 bp, Homo sapien
tcttccagatgttgtatactgggcc

SEQ ID NO: 2907604 - DNA, 25 bp, Homo sapien
gtcataaaagctcagaaatgtcttc

SEQ ID NO: 2907605 - DNA, 25 bp, Homo sapien
aagatcactctgcatgtcataaaag

SEQ ID NO: 2907606 - DNA, 25 bp, Homo sapien
tccgatgtcaaaccataaatgttgg

SEQ ID NO: 2907607 - DNA, 25 bp, Homo sapien
tgagataaaggcttttcctggggca

SEQ ID NO: 2907608 - DNA, 25 bp, Homo sapien
gagataaaggcttttcctggggcat

SEQ ID NO: 2907609 - DNA, 25 bp, Homo sapien
cttgagataaaggcttttcctgggg

SEQ ID NO: 2907610 - DNA, 25 bp, Homo sapien
ttgagataaaggcttttcctggggc

SEQ ID NO: 2907611 - DNA, 25 bp, Homo sapien
tgttcaagcggataaagcagatgga

SEQ ID NO: 2907612 - DNA, 25 bp, Homo sapien
ggcccttcagaaaagatcaagtgtt

SEQ ID NO: 2907613 - DNA, 25 bp, Homo sapien
gcaaggactcctcggtgaaagacag

SEQ ID NO: 2907614 - DNA, 25 bp, Homo sapien
gaagaaacagccaccagataaaggg

SEQ ID NO: 2907615 - DNA, 25 bp, Homo sapien
atgaaatgtaagcaataggtgattt

SEQ ID NO: 2907616 - DNA, 25 bp, Homo sapien
gattttggcatttgcctggggtctc

SEQ ID NO: 2907617 - DNA, 25 bp, Homo sapien
aaatcagttccaataggtactggtt

SEQ ID NO: 2907618 - DNA, 25 bp, Homo sapien
caataggtactggtttaatggagat

SEQ ID NO: 2907619 - DNA, 25 bp, Homo sapien
gtacatctcgcacggcacatgaaga

SEQ ID NO: 2907620 - DNA, 25 bp, Homo sapien
cggctccatcagtgtcgtcttgtac

SEQ ID NO: 2907621 - DNA, 25 bp, Homo sapien
cgtcttgtacatctcgcacggcaca

SEQ ID NO: 2907622 - DNA, 25 bp, Homo sapien
ggctccatcagtgtcgtcttgtaca

SEQ ID NO: 2907623 - DNA, 25 bp, Homo sapien
cctctctcagagaacgtacgtggat

SEQ ID NO: 2907624 - DNA, 25 bp, Homo sapien
ggatggtgtcatctacctctctcag

SEQ ID NO: 2907625 - DNA, 25 bp, Homo sapien
gaacgtacgtggatcttcccctcat

SEQ ID NO: 2907626 - DNA, 25 bp, Homo sapien
ttccagaagtgctggtacggatggt

SEQ ID NO: 2907627 - DNA, 25 bp, Homo sapien
ttatttcgtcgttctgatgccgctc

SEQ ID NO: 2907628 - DNA, 25 bp, Homo sapien
ccttgttctatgctgagggagttaa

SEQ ID NO: 2907629 - DNA, 25 bp, Homo sapien
tgttctatgctgagggagttaaagg

SEQ ID NO: 2907630 - DNA, 25 bp, Homo sapien
gctctgccccgactttggaattcct

SEQ ID NO: 2907631 - DNA, 25 bp, Homo sapien
tgctttgtttttgtggccccactgc

SEQ ID NO: 2907632 - DNA, 25 bp, Homo sapien
atgctttgtttttgtggccccactg

SEQ ID NO: 2907633 - DNA, 25 bp, Homo sapien
gatcagaagaaaccactgcgatgct

SEQ ID NO: 2907634 - DNA, 25 bp, Homo sapien
gaagaaaccactgcgatgcttgacc

SEQ ID NO: 2907635 - DNA, 25 bp, Homo sapien
ctgcgatgcttgaccaagaaagtca

SEQ ID NO: 2907636 - DNA, 25 bp, Homo sapien
caagaaagtcagatgatgaaaaatc

SEQ ID NO: 2907637 - DNA, 25 bp, Homo sapien
tatcaccatacatgtgcttatcagt

SEQ ID NO: 2907638 - DNA, 25 bp, Homo sapien
gctttactatcttgtcaggtctcca

SEQ ID NO: 2907639 - DNA, 25 bp, Homo sapien
actatcttgtcaggtctccagggtg

SEQ ID NO: 2907640 - DNA, 25 bp, Homo sapien
tgccttttggctttactatcttgtc

SEQ ID NO: 2907641 - DNA, 25 bp, Homo sapien
cacctcagatgacgtattagtttgc

SEQ ID NO: 2907642 - DNA, 25 bp, Homo sapien
ggattagagcccacctatataacct

SEQ ID NO: 2907643 - DNA, 25 bp, Homo sapien
acatgtccctggtatctcttgtggg

SEQ ID NO: 2907644 - DNA, 25 bp, Homo sapien
cgaggtgccaatagggttgactcct

SEQ ID NO: 2907645 - DNA, 25 bp, Homo sapien
gatggagacacaaatcaggccctgt

SEQ ID NO: 2907646 - DNA, 25 bp, Homo sapien
tgcatgaggcttcagagggaccaac

SEQ ID NO: 2907647 - DNA, 25 bp, Homo sapien
ccatggaggaattcgtgccagatgt

SEQ ID NO: 2907648 - DNA, 25 bp, Homo sapien
gatatttgctcccttcccgaatgtg

SEQ ID NO: 2907649 - DNA, 25 bp, Homo sapien
aaattaacaagcaaattcacaacaa

SEQ ID NO: 2907650 - DNA, 25 bp, Homo sapien
gcacgctggccccagcaattttata

SEQ ID NO: 2907651 - DNA, 25 bp, Homo sapien
gccacttgcacgctggccccagcaa

SEQ ID NO: 2907652 - DNA, 25 bp, Homo sapien
cgctggccccagcaattttatacat

SEQ ID NO: 2907653 - DNA, 25 bp, Homo sapien
cacttgcacgctggccccagcaatt

SEQ ID NO: 2907654 - DNA, 25 bp, Homo sapien
aaagctttgttagtgtgcaaggcaa

SEQ ID NO: 2907655 - DNA, 25 bp, Homo sapien
tctaatttagctatgactccactag

SEQ ID NO: 2907656 - DNA, 25 bp, Homo sapien
gctcctcagtcccagtaacatatca

SEQ ID NO: 2907657 - DNA, 25 bp, Homo sapien
taatgtcccttaatgtctttgtgtc

SEQ ID NO: 2907658 - DNA, 25 bp, Homo sapien
aaacatggtgccagaaaatgagcag

SEQ ID NO: 2907659 - DNA, 25 bp, Homo sapien
tattccaaaatcgacaaagaccagg

SEQ ID NO: 2907660 - DNA, 25 bp, Homo sapien
tccttgcaacttgaaagtaaatgct

SEQ ID NO: 2907661 - DNA, 25 bp, Homo sapien
gagcagtatcgtgctcagtgggaaa

SEQ ID NO: 2907662 - DNA, 25 bp, Homo sapien
cattcttctatgagagcaccctgtt

SEQ ID NO: 2907663 - DNA, 25 bp, Homo sapien
aaatcctcggaatgcacagctcttg

SEQ ID NO: 2907664 - DNA, 25 bp, Homo sapien
caggccagctagtttcccgtattat

SEQ ID NO: 2907665 - DNA, 25 bp, Homo sapien
gcaggttgtcacgtgtatgtttcca

SEQ ID NO: 2907666 - DNA, 25 bp, Homo sapien
gaaaccacaaatatcagggcggcac

SEQ ID NO: 2907667 - DNA, 25 bp, Homo sapien
caggatcctgacactttgcctggag

SEQ ID NO: 2907668 - DNA, 25 bp, Homo sapien
cgaggcgagcctttgaatgacaaca

SEQ ID NO: 2907669 - DNA, 25 bp, Homo sapien
ggcggcactcctcaattagacgtct

SEQ ID NO: 2907670 - DNA, 25 bp, Homo sapien
ttatttgtaatttccaggaatccac

SEQ ID NO: 2907671 - DNA, 25 bp, Homo sapien
cccattatttgtaatttccaggaat

SEQ ID NO: 2907672 - DNA, 25 bp, Homo sapien
agacaagtgcccaacccccattatt

SEQ ID NO: 2907673 - DNA, 25 bp, Homo sapien
cagagagatgcagacaagtgcccaa

SEQ ID NO: 2907674 - DNA, 25 bp, Homo sapien
tgtaaaccagaagtaagagtgtact

SEQ ID NO: 2907675 - DNA, 25 bp, Homo sapien
tgtacttgccgatttgaagaaacaa

SEQ ID NO: 2907676 - DNA, 25 bp, Homo sapien
gctttagcagtgtataattgtaaac

SEQ ID NO: 2907677 - DNA, 25 bp, Homo sapien
tcaaatgcggtcctttaggtgcttt

SEQ ID NO: 2907678 - DNA, 25 bp, Homo sapien
aaattttctcttggtacactggagt

SEQ ID NO: 2907679 - DNA, 25 bp, Homo sapien
cacacttaatcatagcctgataaaa

SEQ ID NO: 2907680 - DNA, 25 bp, Homo sapien
taaacacacttaatcatagcctgat

SEQ ID NO: 2907681 - DNA, 25 bp, Homo sapien
tggtgaataaacacacttaatcata

SEQ ID NO: 2907682 - DNA, 25 bp, Homo sapien
caaggatactgcctaccgtcaggga

SEQ ID NO: 2907683 - DNA, 25 bp, Homo sapien
ggacagccgcattctttcaaggata

SEQ ID NO: 2907684 - DNA, 25 bp, Homo sapien
ttgacagggacagccgcattctttc

SEQ ID NO: 2907685 - DNA, 25 bp, Homo sapien
cattctttcaaggatactgcctacc

SEQ ID NO: 2907686 - DNA, 25 bp, Homo sapien
tccaatgcttgacgatttgactggt

SEQ ID NO: 2907687 - DNA, 25 bp, Homo sapien
gggaccactaagcacgttatgttct

SEQ ID NO: 2907688 - DNA, 25 bp, Homo sapien
tactgcttatgaacaaggtccctga

SEQ ID NO: 2907689 - DNA, 25 bp, Homo sapien
tcatttttcctgatagggaccacta

SEQ ID NO: 2907690 - DNA, 25 bp, Homo sapien
cgaagatctagcttgggaccagacg

SEQ ID NO: 2907691 - DNA, 25 bp, Homo sapien
gaccagacgttgtgaaaatgtagcc

SEQ ID NO: 2907692 - DNA, 25 bp, Homo sapien
tgtagccagcctccacgaaggagtt

SEQ ID NO: 2907693 - DNA, 25 bp, Homo sapien
gaggaatagtcatttccttgatccc

SEQ ID NO: 2907694 - DNA, 25 bp, Homo sapien
cactggcttttcttcgctggctgcc

SEQ ID NO: 2907695 - DNA, 25 bp, Homo sapien
ccctgccagagacggcactggcttt

SEQ ID NO: 2907696 - DNA, 25 bp, Homo sapien
gttccctgccagagacggcactggc

SEQ ID NO: 2907697 - DNA, 25 bp, Homo sapien
tgcccagctgacatgctaggcttct

SEQ ID NO: 2907698 - DNA, 25 bp, Homo sapien
tgcttcctgtttcgccagagatctg

SEQ ID NO: 2907699 - DNA, 25 bp, Homo sapien
caagcatcgaatgagtaaatcagtg

SEQ ID NO: 2907700 - DNA, 25 bp, Homo sapien
atcagtgcttcctgtttcgccagag

SEQ ID NO: 2907701 - DNA, 25 bp, Homo sapien
ggtgcctgattcacaagcatcgaat

SEQ ID NO: 2907702 - DNA, 25 bp, Homo sapien
tctgctccgacccctttcagactca

SEQ ID NO: 2907703 - DNA, 25 bp, Homo sapien
gcccagagcaacagtcaggctgcag

SEQ ID NO: 2907704 - DNA, 25 bp, Homo sapien
tgcagttgctgtgggttctttgcaa

SEQ ID NO: 2907705 - DNA, 25 bp, Homo sapien
cagagcaacagtcaggctgcagttg

SEQ ID NO: 2907706 - DNA, 25 bp, Homo sapien
agtgataaaggcaggtgaagacgct

SEQ ID NO: 2907707 - DNA, 25 bp, Homo sapien
agacgctgaagctctcgtcctgttc

SEQ ID NO: 2907708 - DNA, 25 bp, Homo sapien
tctcgtcctgttcaaaatatccgtg

SEQ ID NO: 2907709 - DNA, 25 bp, Homo sapien
tatgaggctttcataagctgatctc

SEQ ID NO: 2907710 - DNA, 25 bp, Homo sapien
atttgcagtactctgccgtggagta

SEQ ID NO: 2907711 - DNA, 25 bp, Homo sapien
tgcttctcagtttcacgaggctttc

SEQ ID NO: 2907712 - DNA, 25 bp, Homo sapien
atatttgccaccactttgatccaac

SEQ ID NO: 2907713 - DNA, 25 bp, Homo sapien
gccgtggagtatattcactcttgat

SEQ ID NO: 2907714 - DNA, 25 bp, Homo sapien
gatggtcccgtgagactcatgggaa

SEQ ID NO: 2907715 - DNA, 25 bp, Homo sapien
aagatggtcccgtgagactcatggg

SEQ ID NO: 2907716 - DNA, 25 bp, Homo sapien
agaaattcagattatgagacatctc

SEQ ID NO: 2907717 - DNA, 25 bp, Homo sapien
ctaagatggtcccgtgagactcatg

SEQ ID NO: 2907718 - DNA, 25 bp, Homo sapien
ccagaatccatgaaagatgtgcagc

SEQ ID NO: 2907719 - DNA, 25 bp, Homo sapien
tatgacgagctggtgactgatttgc

SEQ ID NO: 2907720 - DNA, 25 bp, Homo sapien
cctgctatggcaaatgacaaccctt

SEQ ID NO: 2907721 - DNA, 25 bp, Homo sapien
tcagcagatatgacgtgggacactc

SEQ ID NO: 2907722 - DNA, 25 bp, Homo sapien
ttgcatcttgttaaacggtgtgtag

SEQ ID NO: 2907723 - DNA, 25 bp, Homo sapien
taaacggtgtgtagtccacaggatg

SEQ ID NO: 2907724 - DNA, 25 bp, Homo sapien
tagtccacaggatgtttacgactct

SEQ ID NO: 2907725 - DNA, 25 bp, Homo sapien
cacaggatgtttacgactctcttgg

SEQ ID NO: 2907726 - DNA, 25 bp, Homo sapien
gactcaattatcctctccgacacag

SEQ ID NO: 2907727 - DNA, 25 bp, Homo sapien
tatgcttgcaatgccaacgtgtgta

SEQ ID NO: 2907728 - DNA, 25 bp, Homo sapien
tgcttggtttcttaattcatgggcc

SEQ ID NO: 2907729 - DNA, 25 bp, Homo sapien
tagtggtatctcgaatatgcttgca

SEQ ID NO: 2907730 - DNA, 25 bp, Homo sapien
ctccgggtctttgtgagtgatagag

SEQ ID NO: 2907731 - DNA, 25 bp, Homo sapien
cttttgccaaaaatctagaatcagt

SEQ ID NO: 2907732 - DNA, 25 bp, Homo sapien
ccagtttagaatctccgggtctttg

SEQ ID NO: 2907733 - DNA, 25 bp, Homo sapien
cagttttggaccagtttagaatctc

SEQ ID NO: 2907734 - DNA, 25 bp, Homo sapien
tgaaagcaagcgcttctgccacaca

SEQ ID NO: 2907735 - DNA, 25 bp, Homo sapien
ccagtgaaagcaagcgcttctgcca

SEQ ID NO: 2907736 - DNA, 25 bp, Homo sapien
cagtgaaagcaagcgcttctgccac

SEQ ID NO: 2907737 - DNA, 25 bp, Homo sapien
aaagcaagcgcttctgccacacact

SEQ ID NO: 2907738 - DNA, 25 bp, Homo sapien
ccatcagcttggaacgcaaatgaga

SEQ ID NO: 2907739 - DNA, 25 bp, Homo sapien
tgtcaggcccaatagggacaggact

SEQ ID NO: 2907740 - DNA, 25 bp, Homo sapien
tcactggagaccgtgtcatcaaggg

SEQ ID NO: 2907741 - DNA, 25 bp, Homo sapien
aaaaacaatgctttggctggttcac

SEQ ID NO: 2907742 - DNA, 25 bp, Homo sapien
tgacaggcacaccagtccctaattg

SEQ ID NO: 2907743 - DNA, 25 bp, Homo sapien
gaaggaagacctcacgcattacaga

SEQ ID NO: 2907744 - DNA, 25 bp, Homo sapien
cattacagatcttaccaggaagcgg

SEQ ID NO: 2907745 - DNA, 25 bp, Homo sapien
gatggagctcgggaaactcggcaaa

SEQ ID NO: 2907746 - DNA, 25 bp, Homo sapien
cccgataacggtgcatgaggatttc

SEQ ID NO: 2907747 - DNA, 25 bp, Homo sapien
taacggtgcatgaggatttcctcct

SEQ ID NO: 2907748 - DNA, 25 bp, Homo sapien
gataacggtgcatgaggatttcctc

SEQ ID NO: 2907749 - DNA, 25 bp, Homo sapien
tcactcccgataacggtgcatgagg

SEQ ID NO: 2907750 - DNA, 25 bp, Homo sapien
gagttgcgactgaatgaacccgtgg

SEQ ID NO: 2907751 - DNA, 25 bp, Homo sapien
gaacccgtggattcctgagactgca

SEQ ID NO: 2907752 - DNA, 25 bp, Homo sapien
tgcctattgtcgtgttggaagcccc

SEQ ID NO: 2907753 - DNA, 25 bp, Homo sapien
tatgagccctcaccggttttgacag

SEQ ID NO: 2907754 - DNA, 25 bp, Homo sapien
gtctctgcacgtctgagagcatctc

SEQ ID NO: 2907755 - DNA, 25 bp, Homo sapien
tttgaaagtctctgcacgtctgaga

SEQ ID NO: 2907756 - DNA, 25 bp, Homo sapien
gaactgatgtactggtgaagtttga

SEQ ID NO: 2907757 - DNA, 25 bp, Homo sapien
tttattttgcgggaagcaccttctc

SEQ ID NO: 2907758 - DNA, 25 bp, Homo sapien
gtgcatatcaggttccataatgttg

SEQ ID NO: 2907759 - DNA, 25 bp, Homo sapien
aatatgtgcatatcaggttccataa

SEQ ID NO: 2907760 - DNA, 25 bp, Homo sapien
gttttttagtgatagtaaaagatga

SEQ ID NO: 2907761 - DNA, 25 bp, Homo sapien
tatcaggttccataatgttgaaggg

SEQ ID NO: 2907762 - DNA, 25 bp, Homo sapien
cagcctcacgactctatagttggaa

SEQ ID NO: 2907763 - DNA, 25 bp, Homo sapien
tatagttggaaatgacaccccatgt

SEQ ID NO: 2907764 - DNA, 25 bp, Homo sapien
gatggaatttagaaacagcctcacg

SEQ ID NO: 2907765 - DNA, 25 bp, Homo sapien
tggtccttgaagaagcattgatgga

SEQ ID NO: 2907766 - DNA, 25 bp, Homo sapien
ccaatagagcatgtctgcacactga

SEQ ID NO: 2907767 - DNA, 25 bp, Homo sapien
gaagagtcaaatggagccaatagag

SEQ ID NO: 2907768 - DNA, 25 bp, Homo sapien
cccacaaggcccatacaagtgtgtg

SEQ ID NO: 2907769 - DNA, 25 bp, Homo sapien
gaaatgctttctaattgcatcctgc

SEQ ID NO: 2907770 - DNA, 25 bp, Homo sapien
gaaggaagggctgcgacgccgcggg

SEQ ID NO: 2907771 - DNA, 25 bp, Homo sapien
gctcttaactctttgcggcgggccc

SEQ ID NO: 2907772 - DNA, 25 bp, Homo sapien
ctaaagagcggatgcccggaggaaa

SEQ ID NO: 2907773 - DNA, 25 bp, Homo sapien
cgaagccgtctcgggaaccggctct

SEQ ID NO: 2907774 - DNA, 25 bp, Homo sapien
tcccctgggtaggagtacagtggca

SEQ ID NO: 2907775 - DNA, 25 bp, Homo sapien
gaattcatccaactctccgtgagct

SEQ ID NO: 2907776 - DNA, 25 bp, Homo sapien
gctaattaactcttagccggcggga

SEQ ID NO: 2907777 - DNA, 25 bp, Homo sapien
tgaccgcagctaacaacccagaatt

SEQ ID NO: 2907778 - DNA, 25 bp, Homo sapien
tcagcaaggaatgctcagaccccag

SEQ ID NO: 2907779 - DNA, 25 bp, Homo sapien
gaacttgctcctaatcagcaaggaa

SEQ ID NO: 2907780 - DNA, 25 bp, Homo sapien
tgatctgaacttgctcctaatcagc

SEQ ID NO: 2907781 - DNA, 25 bp, Homo sapien
tgctcctaatcagcaaggaatgctc

SEQ ID NO: 2907782 - DNA, 25 bp, Homo sapien
tttatgttccaaccccatgctcgct

SEQ ID NO: 2907783 - DNA, 25 bp, Homo sapien
tggctgttactgagtcacgatagag

SEQ ID NO: 2907784 - DNA, 25 bp, Homo sapien
ccatgctcgctcattcttcacagag

SEQ ID NO: 2907785 - DNA, 25 bp, Homo sapien
tgagtccagcccaaagatgacattt

SEQ ID NO: 2907786 - DNA, 25 bp, Homo sapien
ctgtttgagcagaaggttacttttt

SEQ ID NO: 2907787 - DNA, 25 bp, Homo sapien
tttgagcagaaggttactttttggc

SEQ ID NO: 2907788 - DNA, 25 bp, Homo sapien
gaacccatcatagctaaaagtactg

SEQ ID NO: 2907789 - DNA, 25 bp, Homo sapien
catcatagctaaaagtactgtttga

SEQ ID NO: 2907790 - DNA, 25 bp, Homo sapien
gcttgctgcgcccatttgtgtccca

SEQ ID NO: 2907791 - DNA, 25 bp, Homo sapien
agcttgctgcgcccatttgtgtccc

SEQ ID NO: 2907792 - DNA, 25 bp, Homo sapien
gacacttcagacagaaaccttgccc

SEQ ID NO: 2907793 - DNA, 25 bp, Homo sapien
cactggccttatgcttggtgaagct

SEQ ID NO: 2907794 - DNA, 25 bp, Homo sapien
tgacacttcagacagaaaccttgcc

SEQ ID NO: 2907795 - DNA, 25 bp, Homo sapien
ctggccttatgcttggtgaagctac

SEQ ID NO: 2907796 - DNA, 25 bp, Homo sapien
acccatccctctctgcggctgcttc

SEQ ID NO: 2907797 - DNA, 25 bp, Homo sapien
tcaaatgcacccatccctctctgcg

SEQ ID NO: 2907798 - DNA, 25 bp, Homo sapien
catccctctctgcggctgcttccca

SEQ ID NO: 2907799 - DNA, 25 bp, Homo sapien
caaatgcacccatccctctctgcgg

SEQ ID NO: 2907800 - DNA, 25 bp, Homo sapien
agtggaattcgtccctgggtggctt

SEQ ID NO: 2907801 - DNA, 25 bp, Homo sapien
tctccaggttcggctgagctttgat

SEQ ID NO: 2907802 - DNA, 25 bp, Homo sapien
ctccaggttcggctgagctttgata

SEQ ID NO: 2907803 - DNA, 25 bp, Homo sapien
gccttgttgctcctatcacatggaa

SEQ ID NO: 2907804 - DNA, 25 bp, Homo sapien
taaaaggttgttctgatcttcccac

SEQ ID NO: 2907805 - DNA, 25 bp, Homo sapien
gcagagagctaagtcctggatgatc

SEQ ID NO: 2907806 - DNA, 25 bp, Homo sapien
ggtacgtatgacaatagctctccta

SEQ ID NO: 2907807 - DNA, 25 bp, Homo sapien
tatgccttggttagccagttgttcc

SEQ ID NO: 2907808 - DNA, 25 bp, Homo sapien
ctgggtccttctttgttgaagtctt

SEQ ID NO: 2907809 - DNA, 25 bp, Homo sapien
ttatgccttggttagccagttgttc

SEQ ID NO: 2907810 - DNA, 25 bp, Homo sapien
ccagttgttcctgggtccttctttg

SEQ ID NO: 2907811 - DNA, 25 bp, Homo sapien
ggttttgcagtaagtatgtggctgc

SEQ ID NO: 2907812 - DNA, 25 bp, Homo sapien
cagggatttaccaaggttttgcagt

SEQ ID NO: 2907813 - DNA, 25 bp, Homo sapien
ttcagggatttaccaaggttttgca

SEQ ID NO: 2907814 - DNA, 25 bp, Homo sapien
tgcagtaagtatgtggctgctgtag

SEQ ID NO: 2907815 - DNA, 25 bp, Homo sapien
agcagccgtgaacaacctggatgga

SEQ ID NO: 2907816 - DNA, 25 bp, Homo sapien
tcatggaattcagctggacgtttca

SEQ ID NO: 2907817 - DNA, 25 bp, Homo sapien
catggaattcagctggacgtttcag

SEQ ID NO: 2907818 - DNA, 25 bp, Homo sapien
atggaattcagctggacgtttcagt

SEQ ID NO: 2907819 - DNA, 25 bp, Homo sapien
tggaattcagctggacgtttcagtg

SEQ ID NO: 2907820 - DNA, 25 bp, Homo sapien
atattaaccaagtcggcactgttgc

SEQ ID NO: 2907821 - DNA, 25 bp, Homo sapien
cacctgtttctggctttgcgcttca

SEQ ID NO: 2907822 - DNA, 25 bp, Homo sapien
gcatattaaccaagtcggcactgtt

SEQ ID NO: 2907823 - DNA, 25 bp, Homo sapien
ctgtttctggctttgcgcttcaggg

SEQ ID NO: 2907824 - DNA, 25 bp, Homo sapien
attcaggacagggatacacacgagg

SEQ ID NO: 2907825 - DNA, 25 bp, Homo sapien
acatgctgagaaagcggatcgccca

SEQ ID NO: 2907826 - DNA, 25 bp, Homo sapien
acagggatacacacgaggaatgggt

SEQ ID NO: 2907827 - DNA, 25 bp, Homo sapien
caagaagggtctccggtttgtggca

SEQ ID NO: 2907828 - DNA, 25 bp, Homo sapien
gcaagggcagcttgctggctctctg

SEQ ID NO: 2907829 - DNA, 25 bp, Homo sapien
tcctctccaaagcaccccttacagt

SEQ ID NO: 2907830 - DNA, 25 bp, Homo sapien
ccccttacagttccttgcaagggca

SEQ ID NO: 2907831 - DNA, 25 bp, Homo sapien
aaagcccatgtcctctccaaagcac

SEQ ID NO: 2907832 - DNA, 25 bp, Homo sapien
tactccaaaccaaagaatgggcata

SEQ ID NO: 2907833 - DNA, 25 bp, Homo sapien
tcaatggagggaatgtcaatactcc

SEQ ID NO: 2907834 - DNA, 25 bp, Homo sapien
ggatgtcttattggttgccacaggc

SEQ ID NO: 2907835 - DNA, 25 bp, Homo sapien
aagcatttcacattcaatggaggga

SEQ ID NO: 2907836 - DNA, 25 bp, Homo sapien
gcgagtcgggctcttttcagcttca

SEQ ID NO: 2907837 - DNA, 25 bp, Homo sapien
ttttcattgagatcatcggcgagtc

SEQ ID NO: 2907838 - DNA, 25 bp, Homo sapien
ctctttcacagcagaatccacagga

SEQ ID NO: 2907839 - DNA, 25 bp, Homo sapien
ccagtggccctggtcgtagagcaat

SEQ ID NO: 2907840 - DNA, 25 bp, Homo sapien
gcttttggtattcagtgttctggcc

SEQ ID NO: 2907841 - DNA, 25 bp, Homo sapien
tgaggtgcatgctctcagatacagc

SEQ ID NO: 2907842 - DNA, 25 bp, Homo sapien
tgttctggcctgataagcggttttc

SEQ ID NO: 2907843 - DNA, 25 bp, Homo sapien
tctacgaaggcgaaataggcaatga

SEQ ID NO: 2907844 - DNA, 25 bp, Homo sapien
gctcgtcgctgttgatgggaaaaac

SEQ ID NO: 2907845 - DNA, 25 bp, Homo sapien
gggagcccagacacagctatagact

SEQ ID NO: 2907846 - DNA, 25 bp, Homo sapien
actctttcagggctacaagtgactg

SEQ ID NO: 2907847 - DNA, 25 bp, Homo sapien
tgtcaatcaccactctttcagggct

SEQ ID NO: 2907848 - DNA, 25 bp, Homo sapien
tgacagctgcactgaggaccactgg

SEQ ID NO: 2907849 - DNA, 25 bp, Homo sapien
actgaggaccactggtcgctgtcca

SEQ ID NO: 2907850 - DNA, 25 bp, Homo sapien
tgcactgaggaccactggtcgctgt

SEQ ID NO: 2907851 - DNA, 25 bp, Homo sapien
agctgcactgaggaccactggtcgc

SEQ ID NO: 2907852 - DNA, 25 bp, Homo sapien
tcagccgttggaatctcagactcac

SEQ ID NO: 2907853 - DNA, 25 bp, Homo sapien
gaacacattgtaaggtcaggtctac

SEQ ID NO: 2907854 - DNA, 25 bp, Homo sapien
tcaggtctacccagttattttgaga

SEQ ID NO: 2907855 - DNA, 25 bp, Homo sapien
tattttgagactgaactaggaccac

SEQ ID NO: 2907856 - DNA, 25 bp, Homo sapien
tctaaatgcatgtggaccttctctg

SEQ ID NO: 2907857 - DNA, 25 bp, Homo sapien
ctcagagaccctgcatgtgactttg

SEQ ID NO: 2907858 - DNA, 25 bp, Homo sapien
gtagtttacctagcagtggcagcaa

SEQ ID NO: 2907859 - DNA, 25 bp, Homo sapien
tctgagagctttgtgatgtcacctc

SEQ ID NO: 2907860 - DNA, 25 bp, Homo sapien
taatggaacaaatgtggctttgggc

SEQ ID NO: 2907861 - DNA, 25 bp, Homo sapien
ttgtcatcgccaccactgctggcat

SEQ ID NO: 2907862 - DNA, 25 bp, Homo sapien
attgcaaaggcaacgaggagctgga

SEQ ID NO: 2907863 - DNA, 25 bp, Homo sapien
cgaggagctggaagtaatggaacaa

SEQ ID NO: 2907864 - DNA, 25 bp, Homo sapien
aacttggtcagtggcttaggagcat

SEQ ID NO: 2907865 - DNA, 25 bp, Homo sapien
tgagggggtgaaatccaggaacttg

SEQ ID NO: 2907866 - DNA, 25 bp, Homo sapien
ctgagggggtgaaatccaggaactt

SEQ ID NO: 2907867 - DNA, 25 bp, Homo sapien
gaacttggtcagtggcttaggagca

SEQ ID NO: 2907868 - DNA, 25 bp, Homo sapien
ttcacttcgagtctgatccggagaa

SEQ ID NO: 2907869 - DNA, 25 bp, Homo sapien
caaaggcaaaagcatccgtggattt

SEQ ID NO: 2907870 - DNA, 25 bp, Homo sapien
cccagagaacctgtcgaaggggtat

SEQ ID NO: 2907871 - DNA, 25 bp, Homo sapien
tatctgaggctttagcgtctggcgg

SEQ ID NO: 2907872 - DNA, 25 bp, Homo sapien
ttacagcagcatgcacggctatggg

SEQ ID NO: 2907873 - DNA, 25 bp, Homo sapien
gcttccccgcatctgactggtggct

SEQ ID NO: 2907874 - DNA, 25 bp, Homo sapien
ctgcttccccgcatctgactggtgg

SEQ ID NO: 2907875 - DNA, 25 bp, Homo sapien
ctttacagcagcatgcacggctatg

SEQ ID NO: 2907876 - DNA, 25 bp, Homo sapien
ggcagggcttggaggctgatgtgtc

SEQ ID NO: 2907877 - DNA, 25 bp, Homo sapien
caggcagggcttggaggctgatgtg

SEQ ID NO: 2907878 - DNA, 25 bp, Homo sapien
tcaggcagggcttggaggctgatgt

SEQ ID NO: 2907879 - DNA, 25 bp, Homo sapien
cagggcttggaggctgatgtgtccg

SEQ ID NO: 2907880 - DNA, 25 bp, Homo sapien
ttgtcagctgggtttaagctcttgt

SEQ ID NO: 2907881 - DNA, 25 bp, Homo sapien
cataatttccgacctgttgagctga

SEQ ID NO: 2907882 - DNA, 25 bp, Homo sapien
tagaaataacgggactcatctcctc

SEQ ID NO: 2907883 - DNA, 25 bp, Homo sapien
gggagccttattggcaaactgaagt

SEQ ID NO: 2907884 - DNA, 25 bp, Homo sapien
ttcttactgtcacccaaggatttgg

SEQ ID NO: 2907885 - DNA, 25 bp, Homo sapien
ctttttgtggcggttcttactgtca

SEQ ID NO: 2907886 - DNA, 25 bp, Homo sapien
ggcggttcttactgtcacccaagga

SEQ ID NO: 2907887 - DNA, 25 bp, Homo sapien
tttgtggcggttcttactgtcaccc

SEQ ID NO: 2907888 - DNA, 25 bp, Homo sapien
tctgccttctggtctgggggaatgt

SEQ ID NO: 2907889 - DNA, 25 bp, Homo sapien
tctctgccttctggtctgggggaat

SEQ ID NO: 2907890 - DNA, 25 bp, Homo sapien
tgccttctggtctgggggaatgtac

SEQ ID NO: 2907891 - DNA, 25 bp, Homo sapien
ttctctgccttctggtctgggggaa

SEQ ID NO: 2907892 - DNA, 25 bp, Homo sapien
agcagccgagcgtaggctgagtcca

SEQ ID NO: 2907893 - DNA, 25 bp, Homo sapien
tgttgctggagcagccgagcgtagg

SEQ ID NO: 2907894 - DNA, 25 bp, Homo sapien
ccgagcgtaggctgagtccataggt

SEQ ID NO: 2907895 - DNA, 25 bp, Homo sapien
tgctgttgctggagcagccgagcgt

SEQ ID NO: 2907896 - DNA, 25 bp, Homo sapien
tccctaggtagctgaatcggtgttg

SEQ ID NO: 2907897 - DNA, 25 bp, Homo sapien
taggtagctgaatcggtgttgctgc

SEQ ID NO: 2907898 - DNA, 25 bp, Homo sapien
agcttggtgcatccctaggtagctg

SEQ ID NO: 2907899 - DNA, 25 bp, Homo sapien
ctgagcttggtgcatccctaggtag

SEQ ID NO: 2907900 - DNA, 25 bp, Homo sapien
ctgtgattcagctgatgctctgtcc

SEQ ID NO: 2907901 - DNA, 25 bp, Homo sapien
acacacctggtgaagcttggttgcg

SEQ ID NO: 2907902 - DNA, 25 bp, Homo sapien
gcttggttgcgtttagtgctcagca

SEQ ID NO: 2907903 - DNA, 25 bp, Homo sapien
gattcagctgatgctctgtcctggg

SEQ ID NO: 2907904 - DNA, 25 bp, Homo sapien
gtattgctcagtggcgttgaagaag

SEQ ID NO: 2907905 - DNA, 25 bp, Homo sapien
gagacaagggggtattgctcagtgg

SEQ ID NO: 2907906 - DNA, 25 bp, Homo sapien
gctcagtggcgttgaagaagagttt

SEQ ID NO: 2907907 - DNA, 25 bp, Homo sapien
acaggagacaagggggtattgctca

SEQ ID NO: 2907908 - DNA, 25 bp, Homo sapien
agatcatccaggttaggtgggagtg

SEQ ID NO: 2907909 - DNA, 25 bp, Homo sapien
tccgcctaccgcagcacccaaagtg

SEQ ID NO: 2907910 - DNA, 25 bp, Homo sapien
aaaaattatccacatactgtgatat

SEQ ID NO: 2907911 - DNA, 25 bp, Homo sapien
tgtgatatataaccatgaacttttc

SEQ ID NO: 2907912 - DNA, 25 bp, Homo sapien
atgatccgcctaccgcagcacccaa

SEQ ID NO: 2907913 - DNA, 25 bp, Homo sapien
ttttagaatctgtcttgccactgaa

SEQ ID NO: 2907914 - DNA, 25 bp, Homo sapien
tatatgcattttaaacctagaagga

SEQ ID NO: 2907915 - DNA, 25 bp, Homo sapien
gccagtaatttatgtgcacgtaatt

SEQ ID NO: 2907916 - DNA, 25 bp, Homo sapien
tatttaccctatagtcttgctggaa

SEQ ID NO: 2907917 - DNA, 25 bp, Homo sapien
tatatccccaaagttcggcactggg

SEQ ID NO: 2907918 - DNA, 25 bp, Homo sapien
catcattgaaggtgtccggcaggga

SEQ ID NO: 2907919 - DNA, 25 bp, Homo sapien
gagagccgttttggtgcctgacaca

SEQ ID NO: 2907920 - DNA, 25 bp, Homo sapien
tcacaagccggtgggtgacactctg

SEQ ID NO: 2907921 - DNA, 25 bp, Homo sapien
tttcccccggcaccatgactgctgt

SEQ ID NO: 2907922 - DNA, 25 bp, Homo sapien
tttgctgtacacatgggcttttggg

SEQ ID NO: 2907923 - DNA, 25 bp, Homo sapien
gagagaagcttggaggatggccatc

SEQ ID NO: 2907924 - DNA, 25 bp, Homo sapien
aggatggccatcgtgtgctcctgag

SEQ ID NO: 2907925 - DNA, 25 bp, Homo sapien
tgctttacggcatcttcataggatg

SEQ ID NO: 2907926 - DNA, 25 bp, Homo sapien
aaattgctgaacttgacttagaaaa

SEQ ID NO: 2907927 - DNA, 25 bp, Homo sapien
gctgtgttacctctgaaattgctga

SEQ ID NO: 2907928 - DNA, 25 bp, Homo sapien
tatcagaagagtgtaaaccagccat

SEQ ID NO: 2907929 - DNA, 25 bp, Homo sapien
gtttaatcatatcaaacaatgtctg

SEQ ID NO: 2907930 - DNA, 25 bp, Homo sapien
gagtcagtctattcttccataaaga

SEQ ID NO: 2907931 - DNA, 25 bp, Homo sapien
tctgttcattgagtcagtctattct

SEQ ID NO: 2907932 - DNA, 25 bp, Homo sapien
tcaaacaatgtctgttcattgagtc

SEQ ID NO: 2907933 - DNA, 25 bp, Homo sapien
tccgctttcaataagcacgtccagg

SEQ ID NO: 2907934 - DNA, 25 bp, Homo sapien
caataagcacgtccaggagttcatc

SEQ ID NO: 2907935 - DNA, 25 bp, Homo sapien
atccatctgctgactccgggtcatt

SEQ ID NO: 2907936 - DNA, 25 bp, Homo sapien
ccatctgctgactccgggtcatttg

SEQ ID NO: 2907937 - DNA, 25 bp, Homo sapien
cactgtcggtggcatagggatcaaa

SEQ ID NO: 2907938 - DNA, 25 bp, Homo sapien
cttgttcaaaggaagccgagggctt

SEQ ID NO: 2907939 - DNA, 25 bp, Homo sapien
ccaatttttagaagggtgacatcac

SEQ ID NO: 2907940 - DNA, 25 bp, Homo sapien
acagcagttggacttcgggaagatc

SEQ ID NO: 2907941 - DNA, 25 bp, Homo sapien
gcttatgccccaacaatgcctgaga

SEQ ID NO: 2907942 - DNA, 25 bp, Homo sapien
tattagtgaccacatcgagtcctgg

SEQ ID NO: 2907943 - DNA, 25 bp, Homo sapien
tatcagtcctgggtcatagcctcaa

SEQ ID NO: 2907944 - DNA, 25 bp, Homo sapien
caataacgttgatagaagcagggtc

SEQ ID NO: 2907945 - DNA, 25 bp, Homo sapien
atgcccggggcagagcaatgcctgg

SEQ ID NO: 2907946 - DNA, 25 bp, Homo sapien
cgcctgtgcggagaacgccgtgcat

SEQ ID NO: 2907947 - DNA, 25 bp, Homo sapien
gccgtcctcggcaccggcccgctcc

SEQ ID NO: 2907948 - DNA, 25 bp, Homo sapien
cgggagtctccgcaggctggctggc

SEQ ID NO: 2907949 - DNA, 25 bp, Homo sapien
ccgagggcgccgccgcctactcctc

SEQ ID NO: 2907950 - DNA, 25 bp, Homo sapien
gagggcgccgccgcctactcctccc

SEQ ID NO: 2907951 - DNA, 25 bp, Homo sapien
ccgggcgccgtctggcccgcgcgca

SEQ ID NO: 2907952 - DNA, 25 bp, Homo sapien
gcgccgtctggcccgcgcgcagctc

SEQ ID NO: 2907953 - DNA, 25 bp, Homo sapien
ggagcccgccgcagggttacatggc

SEQ ID NO: 2907954 - DNA, 25 bp, Homo sapien
gccgcagggttacatggctcccgcg

SEQ ID NO: 2907955 - DNA, 25 bp, Homo sapien
cccgccgcagggttacatggctccc

SEQ ID NO: 2907956 - DNA, 25 bp, Homo sapien
cgcagggttacatggctcccgcgcg

SEQ ID NO: 2907957 - DNA, 25 bp, Homo sapien
ggccagctggcgcatgcgattgaac

SEQ ID NO: 2907958 - DNA, 25 bp, Homo sapien
ggcgcatgcgattgaactgcttctt

SEQ ID NO: 2907959 - DNA, 25 bp, Homo sapien
ggttggccagctggcgcatgcgatt

SEQ ID NO: 2907960 - DNA, 25 bp, Homo sapien
gctggcgcatgcgattgaactgctt

SEQ ID NO: 2907961 - DNA, 25 bp, Homo sapien
acactttgcgcttggcaaccggagc

SEQ ID NO: 2907962 - DNA, 25 bp, Homo sapien
aaggcagggaggacgaagcgaaggg

SEQ ID NO: 2907963 - DNA, 25 bp, Homo sapien
gaaggcggcgagtgagaagagctcc

SEQ ID NO: 2907964 - DNA, 25 bp, Homo sapien
gacgcaggtaaaggatgcgtcacac

SEQ ID NO: 2907965 - DNA, 25 bp, Homo sapien
agatctccggagaccgactgcggtt

SEQ ID NO: 2907966 - DNA, 25 bp, Homo sapien
cgggagcagccctgaactcggcgca

SEQ ID NO: 2907967 - DNA, 25 bp, Homo sapien
agggaagagatctccggagaccgac

SEQ ID NO: 2907968 - DNA, 25 bp, Homo sapien
agaccgactgcggttcggctgcctc

SEQ ID NO: 2907969 - DNA, 25 bp, Homo sapien
tccagaatctcgtacagtcatagtc

SEQ ID NO: 2907970 - DNA, 25 bp, Homo sapien
ccagaatctcgtacagtcatagtcc

SEQ ID NO: 2907971 - DNA, 25 bp, Homo sapien
atccagaatctcgtacagtcatagt

SEQ ID NO: 2907972 - DNA, 25 bp, Homo sapien
caggcagcaacgccattccaccagc

SEQ ID NO: 2907973 - DNA, 25 bp, Homo sapien
aggcagcaacgccattccaccagca

SEQ ID NO: 2907974 - DNA, 25 bp, Homo sapien
agcaggcagcaacgccattccacca

SEQ ID NO: 2907975 - DNA, 25 bp, Homo sapien
gcaggcagcaacgccattccaccag

SEQ ID NO: 2907976 - DNA, 25 bp, Homo sapien
acctagtggagagccctcgaggtgt

SEQ ID NO: 2907977 - DNA, 25 bp, Homo sapien
cgaggtgttgagcttgcatttgaac

SEQ ID NO: 2907978 - DNA, 25 bp, Homo sapien
gtaaacctagtggagagccctcgag

SEQ ID NO: 2907979 - DNA, 25 bp, Homo sapien
ttctccgtaaacctagtggagagcc

SEQ ID NO: 2907980 - DNA, 25 bp, Homo sapien
gagaaatgtgtgcttcgtgggccct

SEQ ID NO: 2907981 - DNA, 25 bp, Homo sapien
gaaatcccatgcgtccttccgaagt

SEQ ID NO: 2907982 - DNA, 25 bp, Homo sapien
gaagttatggtgtcctgaccacagg

SEQ ID NO: 2907983 - DNA, 25 bp, Homo sapien
tactggaatataagcccctcgaggg

SEQ ID NO: 2907984 - DNA, 25 bp, Homo sapien
cactgaggtactcctcttgtttttc

SEQ ID NO: 2907985 - DNA, 25 bp, Homo sapien
ttttcatgtctatctggcacactcc

SEQ ID NO: 2907986 - DNA, 25 bp, Homo sapien
tcctccactgaggtactcctcttgt

SEQ ID NO: 2907987 - DNA, 25 bp, Homo sapien
ttaacttttcatgtctatctggcac

SEQ ID NO: 2907988 - DNA, 25 bp, Homo sapien
gtgtaaattaagcaaaacaccagat

SEQ ID NO: 2907989 - DNA, 25 bp, Homo sapien
cattgtgtgtaaattaagcaaaaca

SEQ ID NO: 2907990 - DNA, 25 bp, Homo sapien
gatgagagctgtcaggaatagctcc

SEQ ID NO: 2907991 - DNA, 25 bp, Homo sapien
agcaaaacaccagatgagagctgtc

SEQ ID NO: 2907992 - DNA, 25 bp, Homo sapien
tcaggagtcatgaagctaagaggcc

SEQ ID NO: 2907993 - DNA, 25 bp, Homo sapien
cccttttacaaacaagagcagtgac

SEQ ID NO: 2907994 - DNA, 25 bp, Homo sapien
tatgagctggaacaaaattaactcc

SEQ ID NO: 2907995 - DNA, 25 bp, Homo sapien
gccaggttgggcttctagcagaaca

SEQ ID NO: 2907996 - DNA, 25 bp, Homo sapien
ggatgttctttctcgacatcacaca

SEQ ID NO: 2907997 - DNA, 25 bp, Homo sapien
taatattatgcctcttctgagaaca

SEQ ID NO: 2907998 - DNA, 25 bp, Homo sapien
aaatttgtcaaaaggccaggccctg

SEQ ID NO: 2907999 - DNA, 25 bp, Homo sapien
ttgcaatgattagagtaagctgtac

SEQ ID NO: 2908000 - DNA, 25 bp, Homo sapien
tgtggaaaatcagtcagtcagaggc

SEQ ID NO: 2908001 - DNA, 25 bp, Homo sapien
gctaatacgggtactggcaaaagaa

SEQ ID NO: 2908002 - DNA, 25 bp, Homo sapien
tttataggcaaacataggcattttt

SEQ ID NO: 2908003 - DNA, 25 bp, Homo sapien
ggagccactgatttctagtgtggaa

SEQ ID NO: 2908004 - DNA, 25 bp, Homo sapien
ggccagtggcttcaatggaccatct

SEQ ID NO: 2908005 - DNA, 25 bp, Homo sapien
caatgtgacaactctcatccctgaa

SEQ ID NO: 2908006 - DNA, 25 bp, Homo sapien
tgattgaacaaggtaggatgcacag

SEQ ID NO: 2908007 - DNA, 25 bp, Homo sapien
cacagtttactagattcccctggga

SEQ ID NO: 2908008 - DNA, 25 bp, Homo sapien
tcttctaaatcttccccattttcca

SEQ ID NO: 2908009 - DNA, 25 bp, Homo sapien
ccactctgagttaacaaactcatct

SEQ ID NO: 2908010 - DNA, 25 bp, Homo sapien
ttcaatgtcttctaaatcttcccca

SEQ ID NO: 2908011 - DNA, 25 bp, Homo sapien
tctgagttaacaaactcatctcttc

SEQ ID NO: 2908012 - DNA, 25 bp, Homo sapien
ctgaagaaggtcttcactcaaaact

SEQ ID NO: 2908013 - DNA, 25 bp, Homo sapien
tgaagaaggtcttcactcaaaactt

SEQ ID NO: 2908014 - DNA, 25 bp, Homo sapien
aggtcttcactcaaaacttctgtct

SEQ ID NO: 2908015 - DNA, 25 bp, Homo sapien
agaaggtcttcactcaaaacttctg

SEQ ID NO: 2908016 - DNA, 25 bp, Homo sapien
gcagacatgcggtgagcttcttgtg

SEQ ID NO: 2908017 - DNA, 25 bp, Homo sapien
ccctgcagacatgcggtgagcttct

SEQ ID NO: 2908018 - DNA, 25 bp, Homo sapien
ttgctggccctgcagacatgcggtg

SEQ ID NO: 2908019 - DNA, 25 bp, Homo sapien
tgtgggacacctgtttcaccagctc

SEQ ID NO: 2908020 - DNA, 25 bp, Homo sapien
caattctcaggcacgtaagcagcta

SEQ ID NO: 2908021 - DNA, 25 bp, Homo sapien
taggaaccttgtcctcagtaggcaa

SEQ ID NO: 2908022 - DNA, 25 bp, Homo sapien
caggagtgtcacaggagtaggaacc

SEQ ID NO: 2908023 - DNA, 25 bp, Homo sapien
gctacataaacagctacatccagga

SEQ ID NO: 2908024 - DNA, 25 bp, Homo sapien
acctcaacttgcctgtggagggcgg

SEQ ID NO: 2908025 - DNA, 25 bp, Homo sapien
aggtgggatctcaagcacgcccctg

SEQ ID NO: 2908026 - DNA, 25 bp, Homo sapien
ctgccgtcttcccagttgctccaag

SEQ ID NO: 2908027 - DNA, 25 bp, Homo sapien
gggagaggacctcaacttgcctgtg

SEQ ID NO: 2908028 - DNA, 25 bp, Homo sapien
taatcaatcctatatctgctgcaga

SEQ ID NO: 2908029 - DNA, 25 bp, Homo sapien
tgcaaaccaatctggagctcacact

SEQ ID NO: 2908030 - DNA, 25 bp, Homo sapien
taatcacccttgactggtaggtcag

SEQ ID NO: 2908031 - DNA, 25 bp, Homo sapien
ggtcagacaactagaaatcgtccgt

SEQ ID NO: 2908032 - DNA, 25 bp, Homo sapien
tctaaaactatcttgggcacaagca

SEQ ID NO: 2908033 - DNA, 25 bp, Homo sapien
caacacagtttgtaggatgacccag

SEQ ID NO: 2908034 - DNA, 25 bp, Homo sapien
gagtttcgatatagtcaatctgaca

SEQ ID NO: 2908035 - DNA, 25 bp, Homo sapien
taagcctcattctaatatccactcc

SEQ ID NO: 2908036 - DNA, 25 bp, Homo sapien
aacttacttctaatggtgaagataa

SEQ ID NO: 2908037 - DNA, 25 bp, Homo sapien
catcatcatactttgccctaagttt

SEQ ID NO: 2908038 - DNA, 25 bp, Homo sapien
acatcatcatactttgccctaagtt

SEQ ID NO: 2908039 - DNA, 25 bp, Homo sapien
cccaggatagctgacccctccatca

SEQ ID NO: 2908040 - DNA, 25 bp, Homo sapien
caggatagctgacccctccatcaga

SEQ ID NO: 2908041 - DNA, 25 bp, Homo sapien
ccaggatagctgacccctccatcag

SEQ ID NO: 2908042 - DNA, 25 bp, Homo sapien
tcaaaatgtatcagctcctgagcca

SEQ ID NO: 2908043 - DNA, 25 bp, Homo sapien
caatcacgtctctctctacttgcaa

SEQ ID NO: 2908044 - DNA, 25 bp, Homo sapien
aggggctcaatcacgtctctctcta

SEQ ID NO: 2908045 - DNA, 25 bp, Homo sapien
actcaaaatgtatcagctcctgagc

SEQ ID NO: 2908046 - DNA, 25 bp, Homo sapien
ggttcgtgaggaatccatgtccagc

SEQ ID NO: 2908047 - DNA, 25 bp, Homo sapien
tggttcgtgaggaatccatgtccag

SEQ ID NO: 2908048 - DNA, 25 bp, Homo sapien
ctggttcgtgaggaatccatgtcca

SEQ ID NO: 2908049 - DNA, 25 bp, Homo sapien
gccagtgacgtatgctaagtgagaa

SEQ ID NO: 2908050 - DNA, 25 bp, Homo sapien
tgacgtatgctaagtgagaagacat

SEQ ID NO: 2908051 - DNA, 25 bp, Homo sapien
tgaagccagtgacgtatgctaagtg

SEQ ID NO: 2908052 - DNA, 25 bp, Homo sapien
gcttgaagccagtgacgtatgctaa

SEQ ID NO: 2908053 - DNA, 25 bp, Homo sapien
tcagccttggcacccgcaggctgta

SEQ ID NO: 2908054 - DNA, 25 bp, Homo sapien
taagctgctggacaaacctgaagac

SEQ ID NO: 2908055 - DNA, 25 bp, Homo sapien
cgcaggctgtaagctgctggacaaa

SEQ ID NO: 2908056 - DNA, 25 bp, Homo sapien
ttccctgagggcatcagccttggca

SEQ ID NO: 2908057 - DNA, 25 bp, Homo sapien
ggactccttggagatgctagccggc

SEQ ID NO: 2908058 - DNA, 25 bp, Homo sapien
tgtctaggtcaccatcaaagcccca

SEQ ID NO: 2908059 - DNA, 25 bp, Homo sapien
tcaactagagcctcactgacagagt

SEQ ID NO: 2908060 - DNA, 25 bp, Homo sapien
tttgcctagcatgcaggaccaccaa

SEQ ID NO: 2908061 - DNA, 25 bp, Homo sapien
taagttctgtccgatataaatttag

SEQ ID NO: 2908062 - DNA, 25 bp, Homo sapien
tctgtccgatataaatttagtgact

SEQ ID NO: 2908063 - DNA, 25 bp, Homo sapien
aatttagtgactcagaacctgtggg

SEQ ID NO: 2908064 - DNA, 25 bp, Homo sapien
cagatctaagttctgtccgatataa

SEQ ID NO: 2908065 - DNA, 25 bp, Homo sapien
gctgccctgaaaattggagacacag

SEQ ID NO: 2908066 - DNA, 25 bp, Homo sapien
tgaagtgagttcacagagcaaactg

SEQ ID NO: 2908067 - DNA, 25 bp, Homo sapien
gaaacctctgcggaaatcagtactg

SEQ ID NO: 2908068 - DNA, 25 bp, Homo sapien
ggcaggcaaacacaagaattataac

SEQ ID NO: 2908069 - DNA, 25 bp, Homo sapien
cagactgctctatggtatgaaaatg

SEQ ID NO: 2908070 - DNA, 25 bp, Homo sapien
taagaactagtaattcaaagctcta

SEQ ID NO: 2908071 - DNA, 25 bp, Homo sapien
agaactgttcatgaattgagcagac

SEQ ID NO: 2908072 - DNA, 25 bp, Homo sapien
atttatcagatgaaatcacattgta

SEQ ID NO: 2908073 - DNA, 25 bp, Homo sapien
tttctttggccacaaaactgtacat

SEQ ID NO: 2908074 - DNA, 25 bp, Homo sapien
gaaagtagtttgcatagtcaatttc

SEQ ID NO: 2908075 - DNA, 25 bp, Homo sapien
gtttgcatagtcaatttctttggcc

SEQ ID NO: 2908076 - DNA, 25 bp, Homo sapien
cgtttgaaagtagtttgcatagtca

SEQ ID NO: 2908077 - DNA, 25 bp, Homo sapien
tgaggcaatacagcctgcaatagtg

SEQ ID NO: 2908078 - DNA, 25 bp, Homo sapien
cctgttgtgctttgatctgaggcaa

SEQ ID NO: 2908079 - DNA, 25 bp, Homo sapien
ctgtggtattcagcttgcacttcta

SEQ ID NO: 2908080 - DNA, 25 bp, Homo sapien
cctgcaatagtgtcagggacttcct

SEQ ID NO: 2908081 - DNA, 25 bp, Homo sapien
cacacgcctcgatggggaaggcgat

SEQ ID NO: 2908082 - DNA, 25 bp, Homo sapien
atcccacactcaagcagcatggtca

SEQ ID NO: 2908083 - DNA, 25 bp, Homo sapien
ctccagcggcttcccgaaggaaggc

SEQ ID NO: 2908084 - DNA, 25 bp, Homo sapien
ggtcacacacgcctcgatggggaag

SEQ ID NO: 2908085 - DNA, 25 bp, Homo sapien
caaaacatccgctatcttacagaga

SEQ ID NO: 2908086 - DNA, 25 bp, Homo sapien
gatataatgtctaggttgtacttca

SEQ ID NO: 2908087 - DNA, 25 bp, Homo sapien
caagaatgcccataaactgagtggt

SEQ ID NO: 2908088 - DNA, 25 bp, Homo sapien
agtggtaaggctcattatgttatct

SEQ ID NO: 2908089 - DNA, 25 bp, Homo sapien
tatatgtgaggaagctacatgaaca

SEQ ID NO: 2908090 - DNA, 25 bp, Homo sapien
tgggcatatatgtgaggaagctaca

SEQ ID NO: 2908091 - DNA, 25 bp, Homo sapien
gtgtatcagtaaggctgctacgaca

SEQ ID NO: 2908092 - DNA, 25 bp, Homo sapien
gaacatgtttggatgagtgtatcag

SEQ ID NO: 2908093 - DNA, 25 bp, Homo sapien
gggtctgccgagtactcctgcacat

SEQ ID NO: 2908094 - DNA, 25 bp, Homo sapien
cagagggggctactcggaagagtcc

SEQ ID NO: 2908095 - DNA, 25 bp, Homo sapien
cagcagtccagggccgctttcagct

SEQ ID NO: 2908096 - DNA, 25 bp, Homo sapien
ccagggccgctttcagcttcttcag

SEQ ID NO: 2908097 - DNA, 25 bp, Homo sapien
gatccactcatcatagagttcaaag

SEQ ID NO: 2908098 - DNA, 25 bp, Homo sapien
ggcaactctcggaggtaagatttca

SEQ ID NO: 2908099 - DNA, 25 bp, Homo sapien
agttcaaaggtcataagaggttctg

SEQ ID NO: 2908100 - DNA, 25 bp, Homo sapien
ctggatccactcatcatagagttca

SEQ ID NO: 2908101 - DNA, 25 bp, Homo sapien
gaggccccaagtgaatatgtgccag

SEQ ID NO: 2908102 - DNA, 25 bp, Homo sapien
cagaggccccaagtgaatatgtgcc

SEQ ID NO: 2908103 - DNA, 25 bp, Homo sapien
agaggccccaagtgaatatgtgcca

SEQ ID NO: 2908104 - DNA, 25 bp, Homo sapien
tgtcctgtgcgattttaacagtgct

SEQ ID NO: 2908105 - DNA, 25 bp, Homo sapien
tctgtcttgtcctgtgcgattttaa

SEQ ID NO: 2908106 - DNA, 25 bp, Homo sapien
gtcttgtcctgtgcgattttaacag

SEQ ID NO: 2908107 - DNA, 25 bp, Homo sapien
ccttctgtcttgtcctgtgcgattt

SEQ ID NO: 2908108 - DNA, 25 bp, Homo sapien
cacaagcattccatagagcctgaag

SEQ ID NO: 2908109 - DNA, 25 bp, Homo sapien
agcattccatagagcctgaagcttc

SEQ ID NO: 2908110 - DNA, 25 bp, Homo sapien
ttttcacaagcattccatagagcct

SEQ ID NO: 2908111 - DNA, 25 bp, Homo sapien
gatgttgttgtgattggccttgggc

SEQ ID NO: 2908112 - DNA, 25 bp, Homo sapien
aacaattgccatattactgggagtc

SEQ ID NO: 2908113 - DNA, 25 bp, Homo sapien
cttgatattctgacagcttggataa

SEQ ID NO: 2908114 - DNA, 25 bp, Homo sapien
cttgtttacatcttgatattctgac

SEQ ID NO: 2908115 - DNA, 25 bp, Homo sapien
gttgggtcctaaaacaattgccata

SEQ ID NO: 2908116 - DNA, 25 bp, Homo sapien
gatgataggttcaatgatcccaaca

SEQ ID NO: 2908117 - DNA, 25 bp, Homo sapien
gatcccaacaatttgcagcgacact

SEQ ID NO: 2908118 - DNA, 25 bp, Homo sapien
gtctgcatgctggatgataggttca

SEQ ID NO: 2908119 - DNA, 25 bp, Homo sapien
tgcagcgacactgtggtcatcatct

SEQ ID NO: 2908120 - DNA, 25 bp, Homo sapien
gttggcattatggttcacgtgtact

SEQ ID NO: 2908121 - DNA, 25 bp, Homo sapien
cgtgtactggactcccataattgcc

SEQ ID NO: 2908122 - DNA, 25 bp, Homo sapien
cataattgccagtaatgttgaactc

SEQ ID NO: 2908123 - DNA, 25 bp, Homo sapien
catattatccgtggcgacgctgagg

SEQ ID NO: 2908124 - DNA, 25 bp, Homo sapien
cctaatccccagtgctgagaaagag

SEQ ID NO: 2908125 - DNA, 25 bp, Homo sapien
ctcccctaatccccagtgctgagaa

SEQ ID NO: 2908126 - DNA, 25 bp, Homo sapien
cccctaatccccagtgctgagaaag

SEQ ID NO: 2908127 - DNA, 25 bp, Homo sapien
ctaatccccagtgctgagaaagaga

SEQ ID NO: 2908128 - DNA, 25 bp, Homo sapien
acctaaactgctgagagtcagtgca

SEQ ID NO: 2908129 - DNA, 25 bp, Homo sapien
tacagtttaattgctacgagtcacc

SEQ ID NO: 2908130 - DNA, 25 bp, Homo sapien
cagtgcagccttcccgtaattgtat

SEQ ID NO: 2908131 - DNA, 25 bp, Homo sapien
ttgctacgagtcacctaaactgctg

SEQ ID NO: 2908132 - DNA, 25 bp, Homo sapien
gttgccatggctgagccggtgctca

SEQ ID NO: 2908133 - DNA, 25 bp, Homo sapien
ttagtccacgtcctctggttgccat

SEQ ID NO: 2908134 - DNA, 25 bp, Homo sapien
gaggtattcgtggatgcctgcagct

SEQ ID NO: 2908135 - DNA, 25 bp, Homo sapien
tgctgaacacgctcattagtccacg

SEQ ID NO: 2908136 - DNA, 25 bp, Homo sapien
agcttgtccaggctcagtcggggat

SEQ ID NO: 2908137 - DNA, 25 bp, Homo sapien
tccaaagcccaatgctggctccatg

SEQ ID NO: 2908138 - DNA, 25 bp, Homo sapien
tgggtgctccctgaccaaccagcaa

SEQ ID NO: 2908139 - DNA, 25 bp, Homo sapien
ccctgaccaaccagcaagagtgcag

SEQ ID NO: 2908140 - DNA, 25 bp, Homo sapien
tccagtacacataaaggccaagtcc

SEQ ID NO: 2908141 - DNA, 25 bp, Homo sapien
tgaggcctgaattcggtattttcca

SEQ ID NO: 2908142 - DNA, 25 bp, Homo sapien
tcagtaagtagcgacgaagcacctt

SEQ ID NO: 2908143 - DNA, 25 bp, Homo sapien
catttcagacttggtcccagcatcc

SEQ ID NO: 2908144 - DNA, 25 bp, Homo sapien
taggttctagaacgacccaggcctc

SEQ ID NO: 2908145 - DNA, 25 bp, Homo sapien
tggcaaggtagacccactgaagaac

SEQ ID NO: 2908146 - DNA, 25 bp, Homo sapien
cattgagatgcacaggatgggagtc

SEQ ID NO: 2908147 - DNA, 25 bp, Homo sapien
taaccatttgctgactcagtagagc

SEQ ID NO: 2908148 - DNA, 25 bp, Homo sapien
taccaagggaaggtgtcagcttggg

SEQ ID NO: 2908149 - DNA, 25 bp, Homo sapien
caagggaaggtgtcagcttgggcat

SEQ ID NO: 2908150 - DNA, 25 bp, Homo sapien
ctggtttaccaagggaaggtgtcag

SEQ ID NO: 2908151 - DNA, 25 bp, Homo sapien
tttaccaagggaaggtgtcagcttg

SEQ ID NO: 2908152 - DNA, 25 bp, Homo sapien
tgggccaaagctggtgggggatgcc

SEQ ID NO: 2908153 - DNA, 25 bp, Homo sapien
tatttccccaacagtaccttctagc

SEQ ID NO: 2908154 - DNA, 25 bp, Homo sapien
gtgggggatgccttctatttcccca

SEQ ID NO: 2908155 - DNA, 25 bp, Homo sapien
cccaacagtaccttctagcatcagg

SEQ ID NO: 2908156 - DNA, 25 bp, Homo sapien
ctcaggatgatggcccggcaagctc

SEQ ID NO: 2908157 - DNA, 25 bp, Homo sapien
atgatggcccggcaagctccctggg

SEQ ID NO: 2908158 - DNA, 25 bp, Homo sapien
gcccggcaagctccctgggtgtaaa

SEQ ID NO: 2908159 - DNA, 25 bp, Homo sapien
ggcaagctccctgggtgtaaactgc

SEQ ID NO: 2908160 - DNA, 25 bp, Homo sapien
cccacgcgtaacagatgacaggaga

SEQ ID NO: 2908161 - DNA, 25 bp, Homo sapien
cattcaagcaggtccgcgttgggag

SEQ ID NO: 2908162 - DNA, 25 bp, Homo sapien
aagagcagcgcagctttagcacccc

SEQ ID NO: 2908163 - DNA, 25 bp, Homo sapien
ccccctcactgaggcaaggagcagg

SEQ ID NO: 2908164 - DNA, 25 bp, Homo sapien
gaccggccgaggagcctcttcgagc

SEQ ID NO: 2908165 - DNA, 25 bp, Homo sapien
gacactttccgaccggccgaggagc

SEQ ID NO: 2908166 - DNA, 25 bp, Homo sapien
ccggatggagagagcgcgggggccg

SEQ ID NO: 2908167 - DNA, 25 bp, Homo sapien
gcggggcgcaggacactttccgacc

SEQ ID NO: 2908168 - DNA, 25 bp, Homo sapien
cagactctgcttctccaatgaactc

SEQ ID NO: 2908169 - DNA, 25 bp, Homo sapien
tggcccaccactctcagactctgct

SEQ ID NO: 2908170 - DNA, 25 bp, Homo sapien
tgtgcccgcatctgcatctctcagg

SEQ ID NO: 2908171 - DNA, 25 bp, Homo sapien
tccaatgaactcactgtgcccgcat

SEQ ID NO: 2908172 - DNA, 25 bp, Homo sapien
agagcctggagaaagttccttgctt

SEQ ID NO: 2908173 - DNA, 25 bp, Homo sapien
gagcctggagaaagttccttgcttt

SEQ ID NO: 2908174 - DNA, 25 bp, Homo sapien
agcccctggttgagtccctgcacag

SEQ ID NO: 2908175 - DNA, 25 bp, Homo sapien
gctccaggttgagcccctggttgag

SEQ ID NO: 2908176 - DNA, 25 bp, Homo sapien
gttcatagaggaaaacgagccttca

SEQ ID NO: 2908177 - DNA, 25 bp, Homo sapien
caaagctctaatgtccagatgggaa

SEQ ID NO: 2908178 - DNA, 25 bp, Homo sapien
gggaattagtcactaaaccacacag

SEQ ID NO: 2908179 - DNA, 25 bp, Homo sapien
accacacagtttctcaatatccaag

SEQ ID NO: 2908180 - DNA, 25 bp, Homo sapien
cttcattatccttttcccaatctcc

SEQ ID NO: 2908181 - DNA, 25 bp, Homo sapien
ttttggctgaacctgtccagtggct

SEQ ID NO: 2908182 - DNA, 25 bp, Homo sapien
gaattgtacccgctggtctaagcat

SEQ ID NO: 2908183 - DNA, 25 bp, Homo sapien
tggctcccctaacagtgatatgtga

SEQ ID NO: 2908184 - DNA, 25 bp, Homo sapien
caggtcctcgggatagaaaactgac

SEQ ID NO: 2908185 - DNA, 25 bp, Homo sapien
ctgaaagagaaaacacaacacaaca

SEQ ID NO: 2908186 - DNA, 25 bp, Homo sapien
tgaaagagaaaacacaacacaacaa

SEQ ID NO: 2908187 - DNA, 25 bp, Homo sapien
agagaaaacacaacacaacaacaaa

SEQ ID NO: 2908188 - DNA, 25 bp, Homo sapien
aagagaaaacacaacacaacaacaa

SEQ ID NO: 2908189 - DNA, 25 bp, Homo sapien
tgggtggaatcggtgccagcttctt

SEQ ID NO: 2908190 - DNA, 25 bp, Homo sapien
ggtggaatcggtgccagcttctttg

SEQ ID NO: 2908191 - DNA, 25 bp, Homo sapien
ggaatcggtgccagcttctttgaaa

SEQ ID NO: 2908192 - DNA, 25 bp, Homo sapien
accttgggtggaatcggtgccagct

SEQ ID NO: 2908193 - DNA, 25 bp, Homo sapien
agtaggtctctgtcgcggcttagga

SEQ ID NO: 2908194 - DNA, 25 bp, Homo sapien
gctcaaagtgcttgtaaagacagaa

SEQ ID NO: 2908195 - DNA, 25 bp, Homo sapien
agtgggccgcgatttgctcaaagtg

SEQ ID NO: 2908196 - DNA, 25 bp, Homo sapien
gactagaggccgagaggtttactgt

SEQ ID NO: 2908197 - DNA, 25 bp, Homo sapien
cataaaaaaaagtgagggagcctgt

SEQ ID NO: 2908198 - DNA, 25 bp, Homo sapien
aaagtgagggagcctgtggcttggt

SEQ ID NO: 2908199 - DNA, 25 bp, Homo sapien
gtgagggagcctgtggcttggttac

SEQ ID NO: 2908200 - DNA, 25 bp, Homo sapien
tcataaaaaaaagtgagggagcctg

SEQ ID NO: 2908201 - DNA, 25 bp, Homo sapien
ggtttgtccaattagctcctcaggg

SEQ ID NO: 2908202 - DNA, 25 bp, Homo sapien
ttaaaatagggtccgcacagggcga

SEQ ID NO: 2908203 - DNA, 25 bp, Homo sapien
gagatcttatgagctacccctggtg

SEQ ID NO: 2908204 - DNA, 25 bp, Homo sapien
tcagagacctgaacgtatgggacaa

SEQ ID NO: 2908205 - DNA, 25 bp, Homo sapien
ctcacacgtatccaaaactgcgcca

SEQ ID NO: 2908206 - DNA, 25 bp, Homo sapien
cccctcacacgtatccaaaactgcg

SEQ ID NO: 2908207 - DNA, 25 bp, Homo sapien
tgaaaatccccctcacacgtatcca

SEQ ID NO: 2908208 - DNA, 25 bp, Homo sapien
cgtatccaaaactgcgccactcatg

SEQ ID NO: 2908209 - DNA, 25 bp, Homo sapien
cagggttcgctatcaggtaagagca

SEQ ID NO: 2908210 - DNA, 25 bp, Homo sapien
cacttagctttgcaaggctgggagc

SEQ ID NO: 2908211 - DNA, 25 bp, Homo sapien
tacagctccacggtctaagcctgag

SEQ ID NO: 2908212 - DNA, 25 bp, Homo sapien
gctacttgggtcatgtctctacaca

SEQ ID NO: 2908213 - DNA, 25 bp, Homo sapien
gacccgagctctatgtggatcgagg

SEQ ID NO: 2908214 - DNA, 25 bp, Homo sapien
cagttactgagtgtcgccgcatgtg

SEQ ID NO: 2908215 - DNA, 25 bp, Homo sapien
ctcaggcggagcgtcgacccgagct

SEQ ID NO: 2908216 - DNA, 25 bp, Homo sapien
tcctccgagtccctcttgtcagtta

SEQ ID NO: 2908217 - DNA, 25 bp, Homo sapien
cgtccaaggaaaaggtagcagccct

SEQ ID NO: 2908218 - DNA, 25 bp, Homo sapien
tcctgcaagacctgacatgagccgt

SEQ ID NO: 2908219 - DNA, 25 bp, Homo sapien
caagtgtgaaaaggctacccggtgc

SEQ ID NO: 2908220 - DNA, 25 bp, Homo sapien
tcctagggcccgtgatgtatgtaca

SEQ ID NO: 2908221 - DNA, 25 bp, Homo sapien
cagggataataaatctattttaata

SEQ ID NO: 2908222 - DNA, 25 bp, Homo sapien
cactagtctatagatgcctcttagg

SEQ ID NO: 2908223 - DNA, 25 bp, Homo sapien
gtcttggaaacagacggcggcacct

SEQ ID NO: 2908224 - DNA, 25 bp, Homo sapien
tgggctcccacataagcactagtct

SEQ ID NO: 2908225 - DNA, 25 bp, Homo sapien
gatcagtgggtctaagtgtccgaga

SEQ ID NO: 2908226 - DNA, 25 bp, Homo sapien
gccgtcattacggagaccaggtgga

SEQ ID NO: 2908227 - DNA, 25 bp, Homo sapien
gacacgtctctgctactggactgtg

SEQ ID NO: 2908228 - DNA, 25 bp, Homo sapien
cagcagtcttcctagtggcagtgac

SEQ ID NO: 2908229 - DNA, 25 bp, Homo sapien
tttgctataaagaggatgacacatg

SEQ ID NO: 2908230 - DNA, 25 bp, Homo sapien
aagtgaacagccttactgccccaca

SEQ ID NO: 2908231 - DNA, 25 bp, Homo sapien
ccagtacaatccaaccaggaaagtg

SEQ ID NO: 2908232 - DNA, 25 bp, Homo sapien
gccatcttgaaagcctcttccagta

SEQ ID NO: 2908233 - DNA, 25 bp, Homo sapien
cctaaatgtgggattactggcccag

SEQ ID NO: 2908234 - DNA, 25 bp, Homo sapien
ctgtcgtggtcaagagtccgtgtta

SEQ ID NO: 2908235 - DNA, 25 bp, Homo sapien
tagttggtgggctccggtgtacaca

SEQ ID NO: 2908236 - DNA, 25 bp, Homo sapien
ccgtgttatgggatggactcacagc

SEQ ID NO: 2908237 - DNA, 25 bp, Homo sapien
gggaatgtcttttgggctaactgcc

SEQ ID NO: 2908238 - DNA, 25 bp, Homo sapien
caaacaccgtgtacctgcaggtggt

SEQ ID NO: 2908239 - DNA, 25 bp, Homo sapien
cacacatgtggttcactgttgcggg

SEQ ID NO: 2908240 - DNA, 25 bp, Homo sapien
gagttcaaccggtcagtcaacgagc

SEQ ID NO: 2908241 - DNA, 25 bp, Homo sapien
caaggccagtgtgtcgttgttagcg

SEQ ID NO: 2908242 - DNA, 25 bp, Homo sapien
ccagggagcacaggatcctgcacca

SEQ ID NO: 2908243 - DNA, 25 bp, Homo sapien
tccagggagcacaggatcctgcacc

SEQ ID NO: 2908244 - DNA, 25 bp, Homo sapien
tcctgggatacctccagggagcaca

SEQ ID NO: 2908245 - DNA, 25 bp, Homo sapien
cctgggatacctccagggagcacag

SEQ ID NO: 2908246 - DNA, 25 bp, Homo sapien
tgccctttgataaattctgtacttg

SEQ ID NO: 2908247 - DNA, 25 bp, Homo sapien
ggaaataattcctagagcaaccgat

SEQ ID NO: 2908248 - DNA, 25 bp, Homo sapien
tgtacttgtaagcaaacttcccctg

SEQ ID NO: 2908249 - DNA, 25 bp, Homo sapien
ttcccctgctgaccaataccagtta

SEQ ID NO: 2908250 - DNA, 25 bp, Homo sapien
tggtgggggaagaggccttcaccca

SEQ ID NO: 2908251 - DNA, 25 bp, Homo sapien
tcccagcagcacggttgctgccgct

SEQ ID NO: 2908252 - DNA, 25 bp, Homo sapien
agtggccaaaatgtcatcctctctt

SEQ ID NO: 2908253 - DNA, 25 bp, Homo sapien
cccagcagcacggttgctgccgctg

SEQ ID NO: 2908254 - DNA, 25 bp, Homo sapien
gtggccaaaatgtcatcctctcttc

SEQ ID NO: 2908255 - DNA, 25 bp, Homo sapien
gtatttgcccacaacagagtccagg

SEQ ID NO: 2908256 - DNA, 25 bp, Homo sapien
ttcatggacgtttgcctgggtcccg

SEQ ID NO: 2908257 - DNA, 25 bp, Homo sapien
ctgggtcccgaagccacagaatgtg

SEQ ID NO: 2908258 - DNA, 25 bp, Homo sapien
gcgtcccagtggttacaagtttctc

SEQ ID NO: 2908259 - DNA, 25 bp, Homo sapien
tcatgtgaaaggtgaagacattttg

SEQ ID NO: 2908260 - DNA, 25 bp, Homo sapien
gacattttggaaggggctttggtgc

SEQ ID NO: 2908261 - DNA, 25 bp, Homo sapien
catgtgaaaggtgaagacattttgg

SEQ ID NO: 2908262 - DNA, 25 bp, Homo sapien
gtgaaaggtgaagacattttggaag

SEQ ID NO: 2908263 - DNA, 25 bp, Homo sapien
tttgcttggcacgtaggatgagaac

SEQ ID NO: 2908264 - DNA, 25 bp, Homo sapien
tcatcaagagagacggaatggtttt

SEQ ID NO: 2908265 - DNA, 25 bp, Homo sapien
ccgaggccatgtctgcagtcaacaa

SEQ ID NO: 2908266 - DNA, 25 bp, Homo sapien
ggctggctaggattcccgaggccat

SEQ ID NO: 2908267 - DNA, 25 bp, Homo sapien
taagctggccagcaacctgagatgt

SEQ ID NO: 2908268 - DNA, 25 bp, Homo sapien
cctgagatgtggactggcacaaaac

SEQ ID NO: 2908269 - DNA, 25 bp, Homo sapien
tgcagcccgaaaagccaggtggctt

SEQ ID NO: 2908270 - DNA, 25 bp, Homo sapien
taagactgtcccatgaagatgcagc

SEQ ID NO: 2908271 - DNA, 25 bp, Homo sapien
attgtggaatattatcctccacggg

SEQ ID NO: 2908272 - DNA, 25 bp, Homo sapien
tgtggaatattatcctccacggggt

SEQ ID NO: 2908273 - DNA, 25 bp, Homo sapien
ttgtggaatattatcctccacgggg

SEQ ID NO: 2908274 - DNA, 25 bp, Homo sapien
tggaatattatcctccacggggtta

SEQ ID NO: 2908275 - DNA, 25 bp, Homo sapien
cttcatgtgccccaatccggagaga

SEQ ID NO: 2908276 - DNA, 25 bp, Homo sapien
caatccggagagatttgcttcccat

SEQ ID NO: 2908277 - DNA, 25 bp, Homo sapien
gcttttcatcacttcatgtgcccca

SEQ ID NO: 2908278 - DNA, 25 bp, Homo sapien
tgccccaatccggagagatttgctt

SEQ ID NO: 2908279 - DNA, 25 bp, Homo sapien
tcatcaaaggccaaaggtctcaagc

SEQ ID NO: 2908280 - DNA, 25 bp, Homo sapien
tctcaagctaaaggactggtccagc

SEQ ID NO: 2908281 - DNA, 25 bp, Homo sapien
tcaatgtgccctagtagtcgttcca

SEQ ID NO: 2908282 - DNA, 25 bp, Homo sapien
tctctagctcacagggatggttact

SEQ ID NO: 2908283 - DNA, 25 bp, Homo sapien
gaatggagctttgggggcatttgct

SEQ ID NO: 2908284 - DNA, 25 bp, Homo sapien
ttccgtgaaacatcaagaacttttc

SEQ ID NO: 2908285 - DNA, 25 bp, Homo sapien
ggtggaagaacaagatgggtgtggt

SEQ ID NO: 2908286 - DNA, 25 bp, Homo sapien
tgtggtaggatgtgggaaggttttc

SEQ ID NO: 2908287 - DNA, 25 bp, Homo sapien
tggcttccactcattcactctctcc

SEQ ID NO: 2908288 - DNA, 25 bp, Homo sapien
tggctctcatctccaataattaaaa

SEQ ID NO: 2908289 - DNA, 25 bp, Homo sapien
tgtgctgtttggggttggggttgtg

SEQ ID NO: 2908290 - DNA, 25 bp, Homo sapien
tgagagctcatcacacgttggctga

SEQ ID NO: 2908291 - DNA, 25 bp, Homo sapien
cacacgttggctgacgggtacacat

SEQ ID NO: 2908292 - DNA, 25 bp, Homo sapien
caaggtctgaacgtgagagctcatc

SEQ ID NO: 2908293 - DNA, 25 bp, Homo sapien
tctgaacgtgagagctcatcacacg

SEQ ID NO: 2908294 - DNA, 25 bp, Homo sapien
taggagctggagacatctgaaggca

SEQ ID NO: 2908295 - DNA, 25 bp, Homo sapien
tccagctcaagaccgatggtgcctt

SEQ ID NO: 2908296 - DNA, 25 bp, Homo sapien
aaggcagttggcatcttcgtcgagc

SEQ ID NO: 2908297 - DNA, 25 bp, Homo sapien
gaacacgtcttcatggagcacacat

SEQ ID NO: 2908298 - DNA, 25 bp, Homo sapien
gaggtggtaccggatatcagattaa

SEQ ID NO: 2908299 - DNA, 25 bp, Homo sapien
taagacatgtgtgggtggctgactc

SEQ ID NO: 2908300 - DNA, 25 bp, Homo sapien
tgtcttttgtcacaggcgtcccagc

SEQ ID NO: 2908301 - DNA, 25 bp, Homo sapien
aatctacgacaaaaaccattcaggt

SEQ ID NO: 2908302 - DNA, 25 bp, Homo sapien
ctcaggggaggagtaacgactttca

SEQ ID NO: 2908303 - DNA, 25 bp, Homo sapien
gtaacgactttcagttcacacctca

SEQ ID NO: 2908304 - DNA, 25 bp, Homo sapien
ctctgggtaacccagcagtcaagct

SEQ ID NO: 2908305 - DNA, 25 bp, Homo sapien
gaggagtaacgactttcagttcaca

SEQ ID NO: 2908306 - DNA, 25 bp, Homo sapien
gactgcctgcactaccattgctata

SEQ ID NO: 2908307 - DNA, 25 bp, Homo sapien
cacatcatagagtcgaaggcaactg

SEQ ID NO: 2908308 - DNA, 25 bp, Homo sapien
gctatagccgtcaaacccacagctg

SEQ ID NO: 2908309 - DNA, 25 bp, Homo sapien
aaggcaactgtcactaccccaagtt

SEQ ID NO: 2908310 - DNA, 25 bp, Homo sapien
gagctcagctgataatagagtctca

SEQ ID NO: 2908311 - DNA, 25 bp, Homo sapien
ttagatgccgctgaattctgatgcc

SEQ ID NO: 2908312 - DNA, 25 bp, Homo sapien
agttgtttactcttagatgccgctg

SEQ ID NO: 2908313 - DNA, 25 bp, Homo sapien
ggtgagctcagctgataatagagtc

SEQ ID NO: 2908314 - DNA, 25 bp, Homo sapien
tgtggcaaaatccaggggcactttt

SEQ ID NO: 2908315 - DNA, 25 bp, Homo sapien
cttgtggcaaaatccaggggcactt

SEQ ID NO: 2908316 - DNA, 25 bp, Homo sapien
tggcaaaatccaggggcacttttgt

SEQ ID NO: 2908317 - DNA, 25 bp, Homo sapien
tttgtgtcatactcgacaaagggca

SEQ ID NO: 2908318 - DNA, 25 bp, Homo sapien
gagtcgcttgcagtagctccataca

SEQ ID NO: 2908319 - DNA, 25 bp, Homo sapien
gctcagtactctgaagtttggcagg

SEQ ID NO: 2908320 - DNA, 25 bp, Homo sapien
cactcatgggaagagtcgcttgcag

SEQ ID NO: 2908321 - DNA, 25 bp, Homo sapien
ggcaggctcgtttccactgaaaccc

SEQ ID NO: 2908322 - DNA, 25 bp, Homo sapien
tcatgggtctgcattagggcagccc

SEQ ID NO: 2908323 - DNA, 25 bp, Homo sapien
gtccccataagtgaggttgaggtca

SEQ ID NO: 2908324 - DNA, 25 bp, Homo sapien
ccagagggtggtccccataagtgag

SEQ ID NO: 2908325 - DNA, 25 bp, Homo sapien
agaggtcaggcgtttcctgctgcac

SEQ ID NO: 2908326 - DNA, 25 bp, Homo sapien
tttgcacaccacaaggggtgtgtgc

SEQ ID NO: 2908327 - DNA, 25 bp, Homo sapien
gataaccaccagaaaatgaccaacc

SEQ ID NO: 2908328 - DNA, 25 bp, Homo sapien
ccagaaaatgaccaaccatttgcac

SEQ ID NO: 2908329 - DNA, 25 bp, Homo sapien
gaaaatgaccaaccatttgcacacc

SEQ ID NO: 2908330 - DNA, 25 bp, Homo sapien
cgggtaagcagtgaaatagaggcaa

SEQ ID NO: 2908331 - DNA, 25 bp, Homo sapien
caaacccatggccacttaggaaggg

SEQ ID NO: 2908332 - DNA, 25 bp, Homo sapien
taaggaggagtccatcgtccaggtg

SEQ ID NO: 2908333 - DNA, 25 bp, Homo sapien
gacaccagcggacaagcaattccag

SEQ ID NO: 2908334 - DNA, 25 bp, Homo sapien
gcaaatagttgctccttttgtcctc

SEQ ID NO: 2908335 - DNA, 25 bp, Homo sapien
tttgagctttatggcaaatagttgc

SEQ ID NO: 2908336 - DNA, 25 bp, Homo sapien
aagagatgtcatccgcgtgggaaag

SEQ ID NO: 2908337 - DNA, 25 bp, Homo sapien
aaagggcgccagagacgctgaacca

SEQ ID NO: 2908338 - DNA, 25 bp, Homo sapien
ccctgtgcacgctacgtctgacggt

SEQ ID NO: 2908339 - DNA, 25 bp, Homo sapien
gagtccctgagtcaagtccgcgacc

SEQ ID NO: 2908340 - DNA, 25 bp, Homo sapien
cataattcaagattaatggctgctt

SEQ ID NO: 2908341 - DNA, 25 bp, Homo sapien
aatggctgctttaaatcgcttatcc

SEQ ID NO: 2908342 - DNA, 25 bp, Homo sapien
tgaagcagctgcagactgttcatgt

SEQ ID NO: 2908343 - DNA, 25 bp, Homo sapien
caaggtgaaacttcggtctaatggg

SEQ ID NO: 2908344 - DNA, 25 bp, Homo sapien
gaaggcaattctcctgtaccgaggg

SEQ ID NO: 2908345 - DNA, 25 bp, Homo sapien
gaacagggctggagacttaacacac

SEQ ID NO: 2908346 - DNA, 25 bp, Homo sapien
tagattcagtctggactgaaaccat

SEQ ID NO: 2908347 - DNA, 25 bp, Homo sapien
tgctcagtagattcagtctggactg

SEQ ID NO: 2908348 - DNA, 25 bp, Homo sapien
cagtagattcagtctggactgaaac

SEQ ID NO: 2908349 - DNA, 25 bp, Homo sapien
tctgttgctcagtagattcagtctg

SEQ ID NO: 2908350 - DNA, 25 bp, Homo sapien
tggtcttctcattgtcatctttatc

SEQ ID NO: 2908351 - DNA, 25 bp, Homo sapien
tcattgtcatctttatcccctgaac

SEQ ID NO: 2908352 - DNA, 25 bp, Homo sapien
ctctgatgcagctgacatggtcttc

SEQ ID NO: 2908353 - DNA, 25 bp, Homo sapien
tttctctgatgcagctgacatggtc

SEQ ID NO: 2908354 - DNA, 25 bp, Homo sapien
cttggctgagctactctcatcattc

SEQ ID NO: 2908355 - DNA, 25 bp, Homo sapien
aaggcctccgtatgacttggctgag

SEQ ID NO: 2908356 - DNA, 25 bp, Homo sapien
gctactctcatcattcacacagcag

SEQ ID NO: 2908357 - DNA, 25 bp, Homo sapien
ccccttttcttggaatatctgatca

SEQ ID NO: 2908358 - DNA, 25 bp, Homo sapien
aacatcattaaagctctcatcatca

SEQ ID NO: 2908359 - DNA, 25 bp, Homo sapien
cattaaagctctcatcatcagggcc

SEQ ID NO: 2908360 - DNA, 25 bp, Homo sapien
catcattaaagctctcatcatcagg

SEQ ID NO: 2908361 - DNA, 25 bp, Homo sapien
taaacatcattaaagctctcatcat

SEQ ID NO: 2908362 - DNA, 25 bp, Homo sapien
gattcagtaaaaaggcactgtcttc

SEQ ID NO: 2908363 - DNA, 25 bp, Homo sapien
ggattcagtaaaaaggcactgtctt

SEQ ID NO: 2908364 - DNA, 25 bp, Homo sapien
cactgggcaaatgggcttgtcttaa

SEQ ID NO: 2908365 - DNA, 25 bp, Homo sapien
catattggcctttagtgtctctgac

SEQ ID NO: 2908366 - DNA, 25 bp, Homo sapien
tggactcaacagtgagccagccaaa

SEQ ID NO: 2908367 - DNA, 25 bp, Homo sapien
gatgtgctgacatattactgaaagg

SEQ ID NO: 2908368 - DNA, 25 bp, Homo sapien
cagatggaaaccagtcatcctctag

SEQ ID NO: 2908369 - DNA, 25 bp, Homo sapien
aagtttctggctgtctgtcccacca

SEQ ID NO: 2908370 - DNA, 25 bp, Homo sapien
aaaccagtcatcctctagacccact

SEQ ID NO: 2908371 - DNA, 25 bp, Homo sapien
tctagacccactttcaagtttctgg

SEQ ID NO: 2908372 - DNA, 25 bp, Homo sapien
gtttactttgggctgatttaggcca

SEQ ID NO: 2908373 - DNA, 25 bp, Homo sapien
ttactttgggctgatttaggccaga

SEQ ID NO: 2908374 - DNA, 25 bp, Homo sapien
actttgggctgatttaggccagagt

SEQ ID NO: 2908375 - DNA, 25 bp, Homo sapien
tactttgggctgatttaggccagag

SEQ ID NO: 2908376 - DNA, 25 bp, Homo sapien
ttccatcttcaacgcacggccccct

SEQ ID NO: 2908377 - DNA, 25 bp, Homo sapien
catgaggagccattcgttgctttgt

SEQ ID NO: 2908378 - DNA, 25 bp, Homo sapien
ggccatgaggagccattcgttgctt

SEQ ID NO: 2908379 - DNA, 25 bp, Homo sapien
tgaggagccattcgttgctttgttc

SEQ ID NO: 2908380 - DNA, 25 bp, Homo sapien
tccaggtcggcttacgggatcaggt

SEQ ID NO: 2908381 - DNA, 25 bp, Homo sapien
cttacgggatcaggttggctccact

SEQ ID NO: 2908382 - DNA, 25 bp, Homo sapien
ccatgaggcttccaggtcggcttac

SEQ ID NO: 2908383 - DNA, 25 bp, Homo sapien
gctccaagagttctgcaagatcatt

SEQ ID NO: 2908384 - DNA, 25 bp, Homo sapien
tagagtgtaccatccctacagcaga

SEQ ID NO: 2908385 - DNA, 25 bp, Homo sapien
caaggattacagtggtccctgttga

SEQ ID NO: 2908386 - DNA, 25 bp, Homo sapien
catgtaagtaggttaaggatttgcc

SEQ ID NO: 2908387 - DNA, 25 bp, Homo sapien
tctcctgaatgggagcatactccag

SEQ ID NO: 2908388 - DNA, 25 bp, Homo sapien
tctgcagaaacgattcttctttcac

SEQ ID NO: 2908389 - DNA, 25 bp, Homo sapien
ccagggaaaggatctccttggatct

SEQ ID NO: 2908390 - DNA, 25 bp, Homo sapien
cagtctgggctacacttgaagatcc

SEQ ID NO: 2908391 - DNA, 25 bp, Homo sapien
cattttctaaggctccgagttcacc

SEQ ID NO: 2908392 - DNA, 25 bp, Homo sapien
tgaatcctcagacccgaaagcttgg

SEQ ID NO: 2908393 - DNA, 25 bp, Homo sapien
taaacacagtgaaccaaggcgccat

SEQ ID NO: 2908394 - DNA, 25 bp, Homo sapien
taaaattcggtctccataggtgcaa

SEQ ID NO: 2908395 - DNA, 25 bp, Homo sapien
gatgtggccccagtacgtacaatag

SEQ ID NO: 2908396 - DNA, 25 bp, Homo sapien
tcatgtgtccatttgctgatggtcc

SEQ ID NO: 2908397 - DNA, 25 bp, Homo sapien
tggctcttcctgagacgtgacacat

SEQ ID NO: 2908398 - DNA, 25 bp, Homo sapien
gatggtcccacagtatctactggct

SEQ ID NO: 2908399 - DNA, 25 bp, Homo sapien
cctgagacgtgacacattcttctaa

SEQ ID NO: 2908400 - DNA, 25 bp, Homo sapien
catttctcttttaggggagtggcat

SEQ ID NO: 2908401 - DNA, 25 bp, Homo sapien
agtggcatagccctgtggttggatt

SEQ ID NO: 2908402 - DNA, 25 bp, Homo sapien
tagccctgtggttggattgtttcca

SEQ ID NO: 2908403 - DNA, 25 bp, Homo sapien
ttttaggggagtggcatagccctgt

SEQ ID NO: 2908404 - DNA, 25 bp, Homo sapien
ttccaagccgctgcgaagcaccagc

SEQ ID NO: 2908405 - DNA, 25 bp, Homo sapien
aagccgctgcgaagcaccagctact

SEQ ID NO: 2908406 - DNA, 25 bp, Homo sapien
ccaagccgctgcgaagcaccagcta

SEQ ID NO: 2908407 - DNA, 25 bp, Homo sapien
gccgctgcgaagcaccagctacttt

SEQ ID NO: 2908408 - DNA, 25 bp, Homo sapien
catagggaactcctttggatactga

SEQ ID NO: 2908409 - DNA, 25 bp, Homo sapien
tttgagacgttcctgcagctgtgac

SEQ ID NO: 2908410 - DNA, 25 bp, Homo sapien
ggtcctagggtcagccttttgtatg

SEQ ID NO: 2908411 - DNA, 25 bp, Homo sapien
tcagaatttctacgtaggagggtcc

SEQ ID NO: 2908412 - DNA, 25 bp, Homo sapien
gaaaccttgtcatccctacagcata

SEQ ID NO: 2908413 - DNA, 25 bp, Homo sapien
cagcatagctgtcatccatggaatt

SEQ ID NO: 2908414 - DNA, 25 bp, Homo sapien
acataggccggaagaggcagaaaga

SEQ ID NO: 2908415 - DNA, 25 bp, Homo sapien
tggcagcatccagacataggccgga

SEQ ID NO: 2908416 - DNA, 25 bp, Homo sapien
ctttccttcttgcagcagctctcca

SEQ ID NO: 2908417 - DNA, 25 bp, Homo sapien
tcctttccttcttgcagcagctctc

SEQ ID NO: 2908418 - DNA, 25 bp, Homo sapien
tttccttcttgcagcagctctccat

SEQ ID NO: 2908419 - DNA, 25 bp, Homo sapien
ctcctttccttcttgcagcagctct

SEQ ID NO: 2908420 - DNA, 25 bp, Homo sapien
taatgtctgcgttatcactccagca

SEQ ID NO: 2908421 - DNA, 25 bp, Homo sapien
tcaaagccgtaaagatctgaccctc

SEQ ID NO: 2908422 - DNA, 25 bp, Homo sapien
tacatcaccccaagtaccaagattg

SEQ ID NO: 2908423 - DNA, 25 bp, Homo sapien
catgggccactgagacaacccaaga

SEQ ID NO: 2908424 - DNA, 25 bp, Homo sapien
agaacagcttaacaacccctctaga

SEQ ID NO: 2908425 - DNA, 25 bp, Homo sapien
aagagtttttatgaagaacagctta

SEQ ID NO: 2908426 - DNA, 25 bp, Homo sapien
cattccgtaagcaatattacaagct

SEQ ID NO: 2908427 - DNA, 25 bp, Homo sapien
acttcaatgctcaggaacggtccca

SEQ ID NO: 2908428 - DNA, 25 bp, Homo sapien
aaggattcgggagtccaatagagaa

SEQ ID NO: 2908429 - DNA, 25 bp, Homo sapien
tcgggagtccaatagagaactggct

SEQ ID NO: 2908430 - DNA, 25 bp, Homo sapien
gaaaggattcgggagtccaatagag

SEQ ID NO: 2908431 - DNA, 25 bp, Homo sapien
gattcgggagtccaatagagaactg

SEQ ID NO: 2908432 - DNA, 25 bp, Homo sapien
tgcagtgtgcctctatagctctccc

SEQ ID NO: 2908433 - DNA, 25 bp, Homo sapien
ggaaggactgcagattgcagtgtgc

SEQ ID NO: 2908434 - DNA, 25 bp, Homo sapien
gcctctatagctctccctgtgatat

SEQ ID NO: 2908435 - DNA, 25 bp, Homo sapien
ggctctttgccacaggagagtggaa

SEQ ID NO: 2908436 - DNA, 25 bp, Homo sapien
ccaggaggagcctctgtctcagtcc

SEQ ID NO: 2908437 - DNA, 25 bp, Homo sapien
tctgtctcagtcctgtaatagtcat

SEQ ID NO: 2908438 - DNA, 25 bp, Homo sapien
ctctgtctcagtcctgtaatagtca

SEQ ID NO: 2908439 - DNA, 25 bp, Homo sapien
gaggagcctctgtctcagtcctgta

SEQ ID NO: 2908440 - DNA, 25 bp, Homo sapien
tctgaggtgtatctgccggctgtcc

SEQ ID NO: 2908441 - DNA, 25 bp, Homo sapien
cggctgtccctgtatcccattataa

SEQ ID NO: 2908442 - DNA, 25 bp, Homo sapien
gcagaaagaaaatgacgtggacaga

SEQ ID NO: 2908443 - DNA, 25 bp, Homo sapien
aatgtcacaatctacgctcagctgg

SEQ ID NO: 2908444 - DNA, 25 bp, Homo sapien
taagcctgaatctttatgtgctgca

SEQ ID NO: 2908445 - DNA, 25 bp, Homo sapien
tgtctgtaagctgccctctcaaaga

SEQ ID NO: 2908446 - DNA, 25 bp, Homo sapien
tgaaccagttcttgataagcctgaa

SEQ ID NO: 2908447 - DNA, 25 bp, Homo sapien
cagaaggacgtatagttgaaccagt

SEQ ID NO: 2908448 - DNA, 25 bp, Homo sapien
gaatggctgttgttgaggacccact

SEQ ID NO: 2908449 - DNA, 25 bp, Homo sapien
ttcagaaggaatggctgttgttgag

SEQ ID NO: 2908450 - DNA, 25 bp, Homo sapien
tgttgaggacccacttgaaaactta

SEQ ID NO: 2908451 - DNA, 25 bp, Homo sapien
aaggaatggctgttgttgaggaccc

SEQ ID NO: 2908452 - DNA, 25 bp, Homo sapien
cataagtggcgtctcattcacagcc

SEQ ID NO: 2908453 - DNA, 25 bp, Homo sapien
atcagctccagtttgggtaaattca

SEQ ID NO: 2908454 - DNA, 25 bp, Homo sapien
ccttgatgatgtcagcggtggctcc

SEQ ID NO: 2908455 - DNA, 25 bp, Homo sapien
acagccacgctaattttagccacgg

SEQ ID NO: 2908456 - DNA, 25 bp, Homo sapien
gcatcctcttcagtaggacttacat

SEQ ID NO: 2908457 - DNA, 25 bp, Homo sapien
gatcccacagaggtatctctctccc

SEQ ID NO: 2908458 - DNA, 25 bp, Homo sapien
ccacagaggtatctctctccctatg

SEQ ID NO: 2908459 - DNA, 25 bp, Homo sapien
agtgcttgcatcctcttcagtagga

SEQ ID NO: 2908460 - DNA, 25 bp, Homo sapien
ccattgtccgtggttcagtctcttt

SEQ ID NO: 2908461 - DNA, 25 bp, Homo sapien
tacaacagccattgtccgtggttca

SEQ ID NO: 2908462 - DNA, 25 bp, Homo sapien
tcattcccctggtcggatatttctt

SEQ ID NO: 2908463 - DNA, 25 bp, Homo sapien
ccctggtcggatatttcttacaaca

SEQ ID NO: 2908464 - DNA, 25 bp, Homo sapien
ttggactttttattagaatagacat

SEQ ID NO: 2908465 - DNA, 25 bp, Homo sapien
ttttattagaatagacattggttct

SEQ ID NO: 2908466 - DNA, 25 bp, Homo sapien
tagactcttgccaactgacctggtt

SEQ ID NO: 2908467 - DNA, 25 bp, Homo sapien
gatcaacctgaacgcatgaggaaca

SEQ ID NO: 2908468 - DNA, 25 bp, Homo sapien
tagcctggatctagactcctcatga

SEQ ID NO: 2908469 - DNA, 25 bp, Homo sapien
acagggatagactcttgccaactga

SEQ ID NO: 2908470 - DNA, 25 bp, Homo sapien
tgactgtcctccagtcggctcctgt

SEQ ID NO: 2908471 - DNA, 25 bp, Homo sapien
tgagcgttttgaaggacttcggcaa

SEQ ID NO: 2908472 - DNA, 25 bp, Homo sapien
ggctcctgtgcatgagcgttttgaa

SEQ ID NO: 2908473 - DNA, 25 bp, Homo sapien
gaaggacttcggcaagaagccaaag

SEQ ID NO: 2908474 - DNA, 25 bp, Homo sapien
aaaaggaatactggggtcctgagca

SEQ ID NO: 2908475 - DNA, 25 bp, Homo sapien
attttatctaaattggcaaaacact

SEQ ID NO: 2908476 - DNA, 25 bp, Homo sapien
ggtcctgagcatgcattagctgtgg

SEQ ID NO: 2908477 - DNA, 25 bp, Homo sapien
ctgagcatgcattagctgtggtttc

SEQ ID NO: 2908478 - DNA, 25 bp, Homo sapien
gaaatcagacaatttgattcggtac

SEQ ID NO: 2908479 - DNA, 25 bp, Homo sapien
ctattccccttcatggattaagtta

SEQ ID NO: 2908480 - DNA, 25 bp, Homo sapien
ttccccttcatggattaagttagaa

SEQ ID NO: 2908481 - DNA, 25 bp, Homo sapien
ccccttcatggattaagttagaaga

SEQ ID NO: 2908482 - DNA, 25 bp, Homo sapien
aaggagtgtgaaagaggcaagtctt

SEQ ID NO: 2908483 - DNA, 25 bp, Homo sapien
gttggataatttattaaactctgga

SEQ ID NO: 2908484 - DNA, 25 bp, Homo sapien
tgaaagaggcaagtcttacctttaa

SEQ ID NO: 2908485 - DNA, 25 bp, Homo sapien
tattaaactctggaaggagtgtgaa

SEQ ID NO: 2908486 - DNA, 25 bp, Homo sapien
ctgagctagcattttccacagactg

SEQ ID NO: 2908487 - DNA, 25 bp, Homo sapien
gctgttgtttggttgcatcgggtcc

SEQ ID NO: 2908488 - DNA, 25 bp, Homo sapien
cagactggatatggtggccccaaag

SEQ ID NO: 2908489 - DNA, 25 bp, Homo sapien
ttgcatcgggtcctgtccaactggg

SEQ ID NO: 2908490 - DNA, 25 bp, Homo sapien
gctcactaatgtttcacccccaatt

SEQ ID NO: 2908491 - DNA, 25 bp, Homo sapien
ttggccattaagctcttttcatgaa

SEQ ID NO: 2908492 - DNA, 25 bp, Homo sapien
cactaatgtttcacccccaatttct

SEQ ID NO: 2908493 - DNA, 25 bp, Homo sapien
ctgctcactaatgtttcacccccaa

SEQ ID NO: 2908494 - DNA, 25 bp, Homo sapien
attttgccaattgaccatgaagagt

SEQ ID NO: 2908495 - DNA, 25 bp, Homo sapien
aaagtccagtgttctcaggagacac

SEQ ID NO: 2908496 - DNA, 25 bp, Homo sapien
tgacgaaagtccaagaaagtcccga

SEQ ID NO: 2908497 - DNA, 25 bp, Homo sapien
agtaaaggaacgtcctcttgtgacg

SEQ ID NO: 2908498 - DNA, 25 bp, Homo sapien
cgtcctcttgtgacgaaagtccaag

SEQ ID NO: 2908499 - DNA, 25 bp, Homo sapien
ggtcttgactgccaaccacactaca

SEQ ID NO: 2908500 - DNA, 25 bp, Homo sapien
tggtcttgactgccaaccacactac

SEQ ID NO: 2908501 - DNA, 25 bp, Homo sapien
acactgaattgtcttaggctctaca

SEQ ID NO: 2908502 - DNA, 25 bp, Homo sapien
ctgaattgtcttaggctctacacac

SEQ ID NO: 2908503 - DNA, 25 bp, Homo sapien
cttatttgaatctttcgtctgaaag

SEQ ID NO: 2908504 - DNA, 25 bp, Homo sapien
caagaagtctcgtaggaggtggaac

SEQ ID NO: 2908505 - DNA, 25 bp, Homo sapien
aacttccaagaagtctcgtaggagg

SEQ ID NO: 2908506 - DNA, 25 bp, Homo sapien
tccctgaggtactggctgaatgaag

SEQ ID NO: 2908507 - DNA, 25 bp, Homo sapien
ttttatctacatgccggattttctg

SEQ ID NO: 2908508 - DNA, 25 bp, Homo sapien
atcaaacttttatctacatgccgga

SEQ ID NO: 2908509 - DNA, 25 bp, Homo sapien
ctttgtggactctataatttgcctg

SEQ ID NO: 2908510 - DNA, 25 bp, Homo sapien
tgccggattttctggcacactgtgt

SEQ ID NO: 2908511 - DNA, 25 bp, Homo sapien
ctggccagcaagtcgtttccttctc

SEQ ID NO: 2908512 - DNA, 25 bp, Homo sapien
ccatgcgttgtagcactccaaagga

SEQ ID NO: 2908513 - DNA, 25 bp, Homo sapien
aagtcgtttccttctcctcgtgcct

SEQ ID NO: 2908514 - DNA, 25 bp, Homo sapien
gccttcgggccatgcgttgtagcac

SEQ ID NO: 2908515 - DNA, 25 bp, Homo sapien
tgagatttctacttccatttcaaac

SEQ ID NO: 2908516 - DNA, 25 bp, Homo sapien
gaggccagtggtttgccaaaaggca

SEQ ID NO: 2908517 - DNA, 25 bp, Homo sapien
tatgaagtgttctgagatttctact

SEQ ID NO: 2908518 - DNA, 25 bp, Homo sapien
gagggagccctcctagatttatgaa

SEQ ID NO: 2908519 - DNA, 25 bp, Homo sapien
taatgactgtcattgtcaaaagctt

SEQ ID NO: 2908520 - DNA, 25 bp, Homo sapien
ttgtgattctgcgtctctattttac

SEQ ID NO: 2908521 - DNA, 25 bp, Homo sapien
gtgattctgcgtctctattttacaa

SEQ ID NO: 2908522 - DNA, 25 bp, Homo sapien
ttttcaggtggaagttaatgactgt

SEQ ID NO: 2908523 - DNA, 25 bp, Homo sapien
tgcatgaatatgtttgtgtacttag

SEQ ID NO: 2908524 - DNA, 25 bp, Homo sapien
atgacagtgctatgcatgaatatgt

SEQ ID NO: 2908525 - DNA, 25 bp, Homo sapien
gctatgcatgaatatgtttgtgtac

SEQ ID NO: 2908526 - DNA, 25 bp, Homo sapien
cagtgctatgcatgaatatgtttgt

SEQ ID NO: 2908527 - DNA, 25 bp, Homo sapien
ctcagttagattctccagttcctct

SEQ ID NO: 2908528 - DNA, 25 bp, Homo sapien
tagttcctcagttagattctccagt

SEQ ID NO: 2908529 - DNA, 25 bp, Homo sapien
tcccctagttcctcagttagattct

SEQ ID NO: 2908530 - DNA, 25 bp, Homo sapien
acactcccctagttcctcagttaga

SEQ ID NO: 2908531 - DNA, 25 bp, Homo sapien
agtcccgacattatcacccttcctg

SEQ ID NO: 2908532 - DNA, 25 bp, Homo sapien
tcccgacattatcacccttcctgag

SEQ ID NO: 2908533 - DNA, 25 bp, Homo sapien
tgaagtcccgacattatcacccttc

SEQ ID NO: 2908534 - DNA, 25 bp, Homo sapien
cctgaagtcccgacattatcaccct

SEQ ID NO: 2908535 - DNA, 25 bp, Homo sapien
gatgtaccatatctgaggatgtcca

SEQ ID NO: 2908536 - DNA, 25 bp, Homo sapien
tcagatgtaccatatctgaggatgt

SEQ ID NO: 2908537 - DNA, 25 bp, Homo sapien
tgtaccatatctgaggatgtccatt

SEQ ID NO: 2908538 - DNA, 25 bp, Homo sapien
cagtctgaatatctgatatagaccc

SEQ ID NO: 2908539 - DNA, 25 bp, Homo sapien
taccaatcggtagagaagagacagt

SEQ ID NO: 2908540 - DNA, 25 bp, Homo sapien
agttctaccagatgaccgggcacga

SEQ ID NO: 2908541 - DNA, 25 bp, Homo sapien
tgtataaccaacaccaaacacgtgg

SEQ ID NO: 2908542 - DNA, 25 bp, Homo sapien
acgactttggctgggatggataacc

SEQ ID NO: 2908543 - DNA, 25 bp, Homo sapien
gaaacacatcctccaggttacactg

SEQ ID NO: 2908544 - DNA, 25 bp, Homo sapien
ccaggttacactgcacaccactgtg

SEQ ID NO: 2908545 - DNA, 25 bp, Homo sapien
actcttgaaacacatcctccaggtt

SEQ ID NO: 2908546 - DNA, 25 bp, Homo sapien
tccaggttacactgcacaccactgt

SEQ ID NO: 2908547 - DNA, 25 bp, Homo sapien
gaagagggatttctgttccgtcaca

SEQ ID NO: 2908548 - DNA, 25 bp, Homo sapien
gagggatttctgttccgtcacacag

SEQ ID NO: 2908549 - DNA, 25 bp, Homo sapien
gtcacacagatgtgaggcgtctgca

SEQ ID NO: 2908550 - DNA, 25 bp, Homo sapien
gatttctgttccgtcacacagatgt

SEQ ID NO: 2908551 - DNA, 25 bp, Homo sapien
tgtcatttgacccataacttcttgt

SEQ ID NO: 2908552 - DNA, 25 bp, Homo sapien
ttgtgattgtcatttgacccataac

SEQ ID NO: 2908553 - DNA, 25 bp, Homo sapien
tcatttgacccataacttcttgtca

SEQ ID NO: 2908554 - DNA, 25 bp, Homo sapien
gattgtcatttgacccataacttct

SEQ ID NO: 2908555 - DNA, 25 bp, Homo sapien
catgaagtaatgaagctgaagccaa

SEQ ID NO: 2908556 - DNA, 25 bp, Homo sapien
tgttcagactgattcgcttaatgtg

SEQ ID NO: 2908557 - DNA, 25 bp, Homo sapien
tcgcttaatgtgtttggagtaagta

SEQ ID NO: 2908558 - DNA, 25 bp, Homo sapien
aattaaatgtcaagggagatatatc

SEQ ID NO: 2908559 - DNA, 25 bp, Homo sapien
gctgccattgagtttctgagtgcat

SEQ ID NO: 2908560 - DNA, 25 bp, Homo sapien
ggctgccattgagtttctgagtgca

SEQ ID NO: 2908561 - DNA, 25 bp, Homo sapien
tgtcctgaggatattctgctgggtg

SEQ ID NO: 2908562 - DNA, 25 bp, Homo sapien
tattctgctgggtgcaagtatgtgc

SEQ ID NO: 2908563 - DNA, 25 bp, Homo sapien
ttcagggaatctgttcgctgtcctg

SEQ ID NO: 2908564 - DNA, 25 bp, Homo sapien
gaatctgttcgctgtcctgaggata

SEQ ID NO: 2908565 - DNA, 25 bp, Homo sapien
tgcagaatgagcgatcctggactcc

SEQ ID NO: 2908566 - DNA, 25 bp, Homo sapien
tgttcgcagaatagacgaggctgtc

SEQ ID NO: 2908567 - DNA, 25 bp, Homo sapien
cgagcagccacactggtgacaggat

SEQ ID NO: 2908568 - DNA, 25 bp, Homo sapien
tgtctgactcatctcctggcatgtg

SEQ ID NO: 2908569 - DNA, 25 bp, Homo sapien
tcaggaattggatagggttactttc

SEQ ID NO: 2908570 - DNA, 25 bp, Homo sapien
gggccattcaatcccaggatgtaat

SEQ ID NO: 2908571 - DNA, 25 bp, Homo sapien
tgtaatggagatcagagcgggtgtg

SEQ ID NO: 2908572 - DNA, 25 bp, Homo sapien
ttgaatctgtctttcacggtggaca

SEQ ID NO: 2908573 - DNA, 25 bp, Homo sapien
gtgtacttgctgacaggccgcagca

SEQ ID NO: 2908574 - DNA, 25 bp, Homo sapien
tgtacttgctgacaggccgcagcag

SEQ ID NO: 2908575 - DNA, 25 bp, Homo sapien
tgattcatgcaggctttgtgtactt

SEQ ID NO: 2908576 - DNA, 25 bp, Homo sapien
atgactgtcctgagacatcagaggc

SEQ ID NO: 2908577 - DNA, 25 bp, Homo sapien
tcctgatccctctgaggatatgact

SEQ ID NO: 2908578 - DNA, 25 bp, Homo sapien
ctgaggatatgactgtcctgagaca

SEQ ID NO: 2908579 - DNA, 25 bp, Homo sapien
ttcctgatccctctgaggatatgac

SEQ ID NO: 2908580 - DNA, 25 bp, Homo sapien
gaatcatcagatttcgatttctggt

SEQ ID NO: 2908581 - DNA, 25 bp, Homo sapien
ggagaggaagaatcatcagatttcg

SEQ ID NO: 2908582 - DNA, 25 bp, Homo sapien
catcagatttcgatttctggttggt

SEQ ID NO: 2908583 - DNA, 25 bp, Homo sapien
ggaagaatcatcagatttcgatttc

SEQ ID NO: 2908584 - DNA, 25 bp, Homo sapien
agagacacagctactgtcttttggg

SEQ ID NO: 2908585 - DNA, 25 bp, Homo sapien
ggtgggaactctgccagagacacag

SEQ ID NO: 2908586 - DNA, 25 bp, Homo sapien
ggaactctgccagagacacagctac

SEQ ID NO: 2908587 - DNA, 25 bp, Homo sapien
acagctactgtcttttgggctggtg

SEQ ID NO: 2908588 - DNA, 25 bp, Homo sapien
ggatggtttcaaggtccgtggtatc

SEQ ID NO: 2908589 - DNA, 25 bp, Homo sapien
tgctggtaatgaggatgggaggatg

SEQ ID NO: 2908590 - DNA, 25 bp, Homo sapien
atttccacaataaatgctggtaatg

SEQ ID NO: 2908591 - DNA, 25 bp, Homo sapien
gtttcaaggtccgtggtatcaaata

SEQ ID NO: 2908592 - DNA, 25 bp, Homo sapien
tgatctttccctcagctgatttcat

SEQ ID NO: 2908593 - DNA, 25 bp, Homo sapien
tccgacaggacaggcgtttctgcgc

SEQ ID NO: 2908594 - DNA, 25 bp, Homo sapien
tttgagagttccgacaggacaggcg

SEQ ID NO: 2908595 - DNA, 25 bp, Homo sapien
cacaggaaagcgctttgagagttcc

SEQ ID NO: 2908596 - DNA, 25 bp, Homo sapien
gaaagcgctttgagagttccgacag

SEQ ID NO: 2908597 - DNA, 25 bp, Homo sapien
ggtgcctgagatgccctgttgagaa

SEQ ID NO: 2908598 - DNA, 25 bp, Homo sapien
ctgagatgccctgttgagaatcctg

SEQ ID NO: 2908599 - DNA, 25 bp, Homo sapien
cctgagatgccctgttgagaatcct

SEQ ID NO: 2908600 - DNA, 25 bp, Homo sapien
tgttgagaatcctgtccaccacaca

SEQ ID NO: 2908601 - DNA, 25 bp, Homo sapien
actgtgcaagccccttctgtgtgaa

SEQ ID NO: 2908602 - DNA, 25 bp, Homo sapien
agtctggccgcccatgcaaggtcat

SEQ ID NO: 2908603 - DNA, 25 bp, Homo sapien
ccgagccacgaagctgcagtctggc

SEQ ID NO: 2908604 - DNA, 25 bp, Homo sapien
agtttgaaatgaaatccgagccacg

SEQ ID NO: 2908605 - DNA, 25 bp, Homo sapien
ttttctggcctcgaacgatcatggc

SEQ ID NO: 2908606 - DNA, 25 bp, Homo sapien
gatcatggccccgtttttcaagtcc

SEQ ID NO: 2908607 - DNA, 25 bp, Homo sapien
tagagaggcatactgagcagaggcc

SEQ ID NO: 2908608 - DNA, 25 bp, Homo sapien
agtttaggagctagtgctcccctga

SEQ ID NO: 2908609 - DNA, 25 bp, Homo sapien
ctttatttccacaaagtaggattgt

SEQ ID NO: 2908610 - DNA, 25 bp, Homo sapien
tatttgagggcacggtgtatctgca

SEQ ID NO: 2908611 - DNA, 25 bp, Homo sapien
aaatgagtatttgagggcacggtgt

SEQ ID NO: 2908612 - DNA, 25 bp, Homo sapien
ggcacggtgtatctgcagacctgga

SEQ ID NO: 2908613 - DNA, 25 bp, Homo sapien
ctcctggacgaaggcagcaagcagc

SEQ ID NO: 2908614 - DNA, 25 bp, Homo sapien
cctgggaagaagagtcccctggcct

SEQ ID NO: 2908615 - DNA, 25 bp, Homo sapien
tgccgcaggccatcatcatcggagt

SEQ ID NO: 2908616 - DNA, 25 bp, Homo sapien
ctgctggagttcctgcgcgtgcacc

SEQ ID NO: 2908617 - DNA, 25 bp, Homo sapien
gatggtttcttaagcacggacccgc

SEQ ID NO: 2908618 - DNA, 25 bp, Homo sapien
tggtaagtttcctgcaccgtggacc

SEQ ID NO: 2908619 - DNA, 25 bp, Homo sapien
taacctctttgcgagcgtgcatgcg

SEQ ID NO: 2908620 - DNA, 25 bp, Homo sapien
taggtgccccttggaagctgaaaaa

SEQ ID NO: 2908621 - DNA, 25 bp, Homo sapien
gcagagctgccctacatgtcatgca

SEQ ID NO: 2908622 - DNA, 25 bp, Homo sapien
tgtttataagcattcacgggactgc

SEQ ID NO: 2908623 - DNA, 25 bp, Homo sapien
gctagaagggaacttcgagtccatc

SEQ ID NO: 2908624 - DNA, 25 bp, Homo sapien
gagaaccatgtttcctacatcgagc

SEQ ID NO: 2908625 - DNA, 25 bp, Homo sapien
gcttctgtgatagcaagataaacct

SEQ ID NO: 2908626 - DNA, 25 bp, Homo sapien
gctttcaagggttttgaaagcatgc

SEQ ID NO: 2908627 - DNA, 25 bp, Homo sapien
gcaagataaacctggagctttttcc

SEQ ID NO: 2908628 - DNA, 25 bp, Homo sapien
tttcaccaccaagcataagaccagc

SEQ ID NO: 2908629 - DNA, 25 bp, Homo sapien
ttaagtttgcaggaaaatcaactat

SEQ ID NO: 2908630 - DNA, 25 bp, Homo sapien
gttaagtttgcaggaaaatcaacta

SEQ ID NO: 2908631 - DNA, 25 bp, Homo sapien
tctcatctctgtaatggttttctcc

SEQ ID NO: 2908632 - DNA, 25 bp, Homo sapien
ttgtaatcacatgagaccactctca

SEQ ID NO: 2908633 - DNA, 25 bp, Homo sapien
ccttgactgtggcattgtaatcaca

SEQ ID NO: 2908634 - DNA, 25 bp, Homo sapien
catctctgtaatggttttctccgac

SEQ ID NO: 2908635 - DNA, 25 bp, Homo sapien
gcccgtgaggaccagaatgtctgag

SEQ ID NO: 2908636 - DNA, 25 bp, Homo sapien
ccagaatgtctgagggtttttccac

SEQ ID NO: 2908637 - DNA, 25 bp, Homo sapien
gtgataagggattggagctctggcc

SEQ ID NO: 2908638 - DNA, 25 bp, Homo sapien
ccagcttggcccgtgaggaccagaa

SEQ ID NO: 2908639 - DNA, 25 bp, Homo sapien
cagagaaaggtgatttgttaaaact

SEQ ID NO: 2908640 - DNA, 25 bp, Homo sapien
tctgggttcacgcttttgtgccctg

SEQ ID NO: 2908641 - DNA, 25 bp, Homo sapien
tcttgagtgattagcctcagagaaa

SEQ ID NO: 2908642 - DNA, 25 bp, Homo sapien
gtgccctgggcctaggacatctggc

SEQ ID NO: 2908643 - DNA, 25 bp, Homo sapien
caaggctacagatcattggagaagt

SEQ ID NO: 2908644 - DNA, 25 bp, Homo sapien
gaggttgagcaaggctacagatcat

SEQ ID NO: 2908645 - DNA, 25 bp, Homo sapien
ttgagcaaggctacagatcattgga

SEQ ID NO: 2908646 - DNA, 25 bp, Homo sapien
tacagatcattggagaagtaccaac

SEQ ID NO: 2908647 - DNA, 25 bp, Homo sapien
gcaactccaatggctgactccaact

SEQ ID NO: 2908648 - DNA, 25 bp, Homo sapien
gcttgatacgttcaatttgtcccaa

SEQ ID NO: 2908649 - DNA, 25 bp, Homo sapien
actacagcagggctcatgctgccat

SEQ ID NO: 2908650 - DNA, 25 bp, Homo sapien
ctggtgcttgatacgttcaatttgt

SEQ ID NO: 2908651 - DNA, 25 bp, Homo sapien
tacagcagggctcatgctgccatct

SEQ ID NO: 2908652 - DNA, 25 bp, Homo sapien
tagaaggtgataagctgatttgcac

SEQ ID NO: 2908653 - DNA, 25 bp, Homo sapien
cacatacctccaggtgtgccaaggg

SEQ ID NO: 2908654 - DNA, 25 bp, Homo sapien
gatttgcaccattcttctttctgac

SEQ ID NO: 2908655 - DNA, 25 bp, Homo sapien
taaatcatgccaaatgggtagtaaa

SEQ ID NO: 2908656 - DNA, 25 bp, Homo sapien
caccaaagcttatcataaatacaac

SEQ ID NO: 2908657 - DNA, 25 bp, Homo sapien
gaatagtaactgctacaccaaagct

SEQ ID NO: 2908658 - DNA, 25 bp, Homo sapien
gagtctttatactgctacccttgtg

SEQ ID NO: 2908659 - DNA, 25 bp, Homo sapien
ttgaaatctgcaccaaatacaggga

SEQ ID NO: 2908660 - DNA, 25 bp, Homo sapien
tttttggacccctgagtaaggctga

SEQ ID NO: 2908661 - DNA, 25 bp, Homo sapien
caatgactgacaccagaaaggcttc

SEQ ID NO: 2908662 - DNA, 25 bp, Homo sapien
tgaccccctaaagggaagcacaatg

SEQ ID NO: 2908663 - DNA, 25 bp, Homo sapien
tccgataaatggttattgacttgaa

SEQ ID NO: 2908664 - DNA, 25 bp, Homo sapien
tcagttttgggattcagattggctt

SEQ ID NO: 2908665 - DNA, 25 bp, Homo sapien
gttctgggtcgctgacagctccctc

SEQ ID NO: 2908666 - DNA, 25 bp, Homo sapien
agttctgggtcgctgacagctccct

SEQ ID NO: 2908667 - DNA, 25 bp, Homo sapien
caacacagtcatctggttgtaaagt

SEQ ID NO: 2908668 - DNA, 25 bp, Homo sapien
aaacaaatccatgtcaaagtgtacc

SEQ ID NO: 2908669 - DNA, 25 bp, Homo sapien
ttcccagaaaacaaatccatgtcaa

SEQ ID NO: 2908670 - DNA, 25 bp, Homo sapien
aatccatgtcaaagtgtaccagggc

SEQ ID NO: 2908671 - DNA, 25 bp, Homo sapien
tgccttgatccggatgagcaaacag

SEQ ID NO: 2908672 - DNA, 25 bp, Homo sapien
tttcaagtggacacaggttgctctc

SEQ ID NO: 2908673 - DNA, 25 bp, Homo sapien
gctgccttgatccggatgagcaaac

SEQ ID NO: 2908674 - DNA, 25 bp, Homo sapien
tgctgccttgatccggatgagcaaa

SEQ ID NO: 2908675 - DNA, 25 bp, Homo sapien
cttgcaaccaagtcctttttcagca

SEQ ID NO: 2908676 - DNA, 25 bp, Homo sapien
cccttgcaaccaagtcctttttcag

SEQ ID NO: 2908677 - DNA, 25 bp, Homo sapien
aaataagaggacatacagccacata

SEQ ID NO: 2908678 - DNA, 25 bp, Homo sapien
aacaaaataagaggacatacagcca

SEQ ID NO: 2908679 - DNA, 25 bp, Homo sapien
tgttcatctttagcaccttcgcaag

SEQ ID NO: 2908680 - DNA, 25 bp, Homo sapien
gtcctgttcatctttagcaccttcg

SEQ ID NO: 2908681 - DNA, 25 bp, Homo sapien
caaagcccactttcctcctagcctc

SEQ ID NO: 2908682 - DNA, 25 bp, Homo sapien
tctttagcaccttcgcaagtgccca

SEQ ID NO: 2908683 - DNA, 25 bp, Homo sapien
gcaggtcggtcgatggcttggtggt

SEQ ID NO: 2908684 - DNA, 25 bp, Homo sapien
ctggcaggtcggtcgatggcttggt

SEQ ID NO: 2908685 - DNA, 25 bp, Homo sapien
caggtcggtcgatggcttggtggtc

SEQ ID NO: 2908686 - DNA, 25 bp, Homo sapien
ggtcggtcgatggcttggtggtccc

SEQ ID NO: 2908687 - DNA, 25 bp, Homo sapien
ctgaatatccaggtgcatttgttcc

SEQ ID NO: 2908688 - DNA, 25 bp, Homo sapien
gaatatccaggtgcatttgttccat

SEQ ID NO: 2908689 - DNA, 25 bp, Homo sapien
tgaatatccaggtgcatttgttcca

SEQ ID NO: 2908690 - DNA, 25 bp, Homo sapien
ggaacgtgaagtaccaaattcaaga

SEQ ID NO: 2908691 - DNA, 25 bp, Homo sapien
ttatatttgggaacgtgaagtacca

SEQ ID NO: 2908692 - DNA, 25 bp, Homo sapien
gaagtaccaaattcaagatctcgaa

SEQ ID NO: 2908693 - DNA, 25 bp, Homo sapien
ttgggaacgtgaagtaccaaattca

SEQ ID NO: 2908694 - DNA, 25 bp, Homo sapien
ctagcttccctgatggtttaatcat

SEQ ID NO: 2908695 - DNA, 25 bp, Homo sapien
atggtttaatcattcctgttaaaca

SEQ ID NO: 2908696 - DNA, 25 bp, Homo sapien
gatggtttaatcattcctgttaaac

SEQ ID NO: 2908697 - DNA, 25 bp, Homo sapien
ctctagcttccctgatggtttaatc

SEQ ID NO: 2908698 - DNA, 25 bp, Homo sapien
ggagtgaggacccctagcacaagca

SEQ ID NO: 2908699 - DNA, 25 bp, Homo sapien
gggagtgaggacccctagcacaagc

SEQ ID NO: 2908700 - DNA, 25 bp, Homo sapien
gagtgaggacccctagcacaagcat

SEQ ID NO: 2908701 - DNA, 25 bp, Homo sapien
gcttttgcaaatacgcattatctgc

SEQ ID NO: 2908702 - DNA, 25 bp, Homo sapien
caatgttctacgtctctacttgaca

SEQ ID NO: 2908703 - DNA, 25 bp, Homo sapien
tcatgatcaggtgtggactcgtgca

SEQ ID NO: 2908704 - DNA, 25 bp, Homo sapien
caaaagtggttcaatttggagatca

SEQ ID NO: 2908705 - DNA, 25 bp, Homo sapien
actttttcctgtctgctcagattgc

SEQ ID NO: 2908706 - DNA, 25 bp, Homo sapien
gatgagagtccacactttttcctgt

SEQ ID NO: 2908707 - DNA, 25 bp, Homo sapien
acagtatcgaagtggatgagagtcc

SEQ ID NO: 2908708 - DNA, 25 bp, Homo sapien
ctccatccaacgtgggacagtatcg

SEQ ID NO: 2908709 - DNA, 25 bp, Homo sapien
caattcccactatatgtggtcagac

SEQ ID NO: 2908710 - DNA, 25 bp, Homo sapien
tgtaacaattcccactatatgtggt

SEQ ID NO: 2908711 - DNA, 25 bp, Homo sapien
cacagcaagtttgtaacaattccca

SEQ ID NO: 2908712 - DNA, 25 bp, Homo sapien
ctaggtgatattcacagcaagtttg

SEQ ID NO: 2908713 - DNA, 25 bp, Homo sapien
tgctcaagggtgcaagatggctgca

SEQ ID NO: 2908714 - DNA, 25 bp, Homo sapien
agaaggccgtgtctttgtgcgtgta

SEQ ID NO: 2908715 - DNA, 25 bp, Homo sapien
cattgcatgcgtaagaagaaggccg

SEQ ID NO: 2908716 - DNA, 25 bp, Homo sapien
tcagcagctcagtggcatcatcaga

SEQ ID NO: 2908717 - DNA, 25 bp, Homo sapien
taggtttacagcattttggctcaga

SEQ ID NO: 2908718 - DNA, 25 bp, Homo sapien
aatcccaggaatgatgtcccaggtt

SEQ ID NO: 2908719 - DNA, 25 bp, Homo sapien
tgttttacatagagctcaatggagg

SEQ ID NO: 2908720 - DNA, 25 bp, Homo sapien
agatcctcttcggaactcttccctt

SEQ ID NO: 2908721 - DNA, 25 bp, Homo sapien
ctgtcttggctccaactcaaagacc

SEQ ID NO: 2908722 - DNA, 25 bp, Homo sapien
aaccttgggctttttcatcatggag

SEQ ID NO: 2908723 - DNA, 25 bp, Homo sapien
tgatgagaaagtctaaaccttgggc

SEQ ID NO: 2908724 - DNA, 25 bp, Homo sapien
taaaccttgggctttttcatcatgg

SEQ ID NO: 2908725 - DNA, 25 bp, Homo sapien
tcagatgtcattgatgagaaagtct

SEQ ID NO: 2908726 - DNA, 25 bp, Homo sapien
taaaagagtatctgagaattgtctg

SEQ ID NO: 2908727 - DNA, 25 bp, Homo sapien
ctaaaagagtatctgagaattgtct

SEQ ID NO: 2908728 - DNA, 25 bp, Homo sapien
ggtagatcccctcttgtcagagttc

SEQ ID NO: 2908729 - DNA, 25 bp, Homo sapien
ctgacaggggagtttgggtagatcc

SEQ ID NO: 2908730 - DNA, 25 bp, Homo sapien
tgggtagatcccctcttgtcagagt

SEQ ID NO: 2908731 - DNA, 25 bp, Homo sapien
tagatcccctcttgtcagagttctc

SEQ ID NO: 2908732 - DNA, 25 bp, Homo sapien
tacctaggctgcacaggtccaggaa

SEQ ID NO: 2908733 - DNA, 25 bp, Homo sapien
catggcgtaagctgtactttggccc

SEQ ID NO: 2908734 - DNA, 25 bp, Homo sapien
tcatattattccacatgcggcccct

SEQ ID NO: 2908735 - DNA, 25 bp, Homo sapien
tccaggtctcacacaaaggtcgtgc

SEQ ID NO: 2908736 - DNA, 25 bp, Homo sapien
gtgggtctaatatctgcatctgtgc

SEQ ID NO: 2908737 - DNA, 25 bp, Homo sapien
cacgctggtccacagatatattatc

SEQ ID NO: 2908738 - DNA, 25 bp, Homo sapien
attgcatgtcttatggtccccaaag

SEQ ID NO: 2908739 - DNA, 25 bp, Homo sapien
tgtcataagggaacgggcatctttc

SEQ ID NO: 2908740 - DNA, 25 bp, Homo sapien
cgccaacaggcaagcctggatccat

SEQ ID NO: 2908741 - DNA, 25 bp, Homo sapien
ctgggactgtcacgccaacaggcaa

SEQ ID NO: 2908742 - DNA, 25 bp, Homo sapien
tgggactgtcacgccaacaggcaag

SEQ ID NO: 2908743 - DNA, 25 bp, Homo sapien
gagacaggatgtgaggtgggcaaac

SEQ ID NO: 2908744 - DNA, 25 bp, Homo sapien
tgggcaaacactcctcttagaatct

SEQ ID NO: 2908745 - DNA, 25 bp, Homo sapien
cttagaatcttatgtgtctgcaggg

SEQ ID NO: 2908746 - DNA, 25 bp, Homo sapien
gacaactttgatggggactgtagca

SEQ ID NO: 2908747 - DNA, 25 bp, Homo sapien
gcgtctgtgtcgctttgaatctgaa

SEQ ID NO: 2908748 - DNA, 25 bp, Homo sapien
ccagtgcattgctcagcggcaagtg

SEQ ID NO: 2908749 - DNA, 25 bp, Homo sapien
gctttgaagcccagagcgtctgtgt

SEQ ID NO: 2908750 - DNA, 25 bp, Homo sapien
gaaagactaaaccagctgcatgagc

SEQ ID NO: 2908751 - DNA, 25 bp, Homo sapien
agtgctgtgggattgtgtgcagggc

SEQ ID NO: 2908752 - DNA, 25 bp, Homo sapien
ttgtgtgcagggcaggcgagaccag

SEQ ID NO: 2908753 - DNA, 25 bp, Homo sapien
gactgtcagagagtctctctgagag

SEQ ID NO: 2908754 - DNA, 25 bp, Homo sapien
agaccagtgccagaagggctaggaa

SEQ ID NO: 2908755 - DNA, 25 bp, Homo sapien
aactttgaacctgtgactggaggtg

SEQ ID NO: 2908756 - DNA, 25 bp, Homo sapien
ttgaacctgtgactggaggtgtgac

SEQ ID NO: 2908757 - DNA, 25 bp, Homo sapien
aaactttgaacctgtgactggaggt

SEQ ID NO: 2908758 - DNA, 25 bp, Homo sapien
ctttgaacctgtgactggaggtgtg

SEQ ID NO: 2908759 - DNA, 25 bp, Homo sapien
cactagggtcaccttgttcctgcag

SEQ ID NO: 2908760 - DNA, 25 bp, Homo sapien
ttgaggaggtgatccctcagttacc

SEQ ID NO: 2908761 - DNA, 25 bp, Homo sapien
acttcttcactagggtcaccttgtt

SEQ ID NO: 2908762 - DNA, 25 bp, Homo sapien
tgaggaggtgatccctcagttaccc

SEQ ID NO: 2908763 - DNA, 25 bp, Homo sapien
agtccaggtggagggatgtcccatt

SEQ ID NO: 2908764 - DNA, 25 bp, Homo sapien
taagtctctctctaccgtcagcagt

SEQ ID NO: 2908765 - DNA, 25 bp, Homo sapien
gttgctgattataaagcaacaacct

SEQ ID NO: 2908766 - DNA, 25 bp, Homo sapien
gggatgtcccatttggaggcttctt

SEQ ID NO: 2908767 - DNA, 25 bp, Homo sapien
tctgaagtccttagtatgatttgtg

SEQ ID NO: 2908768 - DNA, 25 bp, Homo sapien
cacagctaagtcttttctgaagtcc

SEQ ID NO: 2908769 - DNA, 25 bp, Homo sapien
tacactgcttataataaattgccac

SEQ ID NO: 2908770 - DNA, 25 bp, Homo sapien
tggctgcctgactgatgaaaattac

SEQ ID NO: 2908771 - DNA, 25 bp, Homo sapien
cttgacataccacgctgccttctct

SEQ ID NO: 2908772 - DNA, 25 bp, Homo sapien
ttgacataccacgctgccttctctt

SEQ ID NO: 2908773 - DNA, 25 bp, Homo sapien
gacataccacgctgccttctcttct

SEQ ID NO: 2908774 - DNA, 25 bp, Homo sapien
tgacataccacgctgccttctcttc

SEQ ID NO: 2908775 - DNA, 25 bp, Homo sapien
ctattctcttctattctacgttgag

SEQ ID NO: 2908776 - DNA, 25 bp, Homo sapien
ctcttctattctacgttgagtataa

SEQ ID NO: 2908777 - DNA, 25 bp, Homo sapien
tctcagaaggcgaagttgtgcattg

SEQ ID NO: 2908778 - DNA, 25 bp, Homo sapien
gcattgcctacagtcacctcattta

SEQ ID NO: 2908779 - DNA, 25 bp, Homo sapien
ctgtaaacagggtcacactggcctg

SEQ ID NO: 2908780 - DNA, 25 bp, Homo sapien
ggtcacactggcctgctttatctct

SEQ ID NO: 2908781 - DNA, 25 bp, Homo sapien
tgtaaacagggtcacactggcctgc

SEQ ID NO: 2908782 - DNA, 25 bp, Homo sapien
aacagggtcacactggcctgcttta

SEQ ID NO: 2908783 - DNA, 25 bp, Homo sapien
gagctgtgagggaccttctcacata

SEQ ID NO: 2908784 - DNA, 25 bp, Homo sapien
ggaccttctcacataggcttcctga

SEQ ID NO: 2908785 - DNA, 25 bp, Homo sapien
gtgtgcaaagttggcaaatgtgtcc

SEQ ID NO: 2908786 - DNA, 25 bp, Homo sapien
tagagtaaaactgctgacagcacca

SEQ ID NO: 2908787 - DNA, 25 bp, Homo sapien
ttggactgtggaagaaacgcccgtg

SEQ ID NO: 2908788 - DNA, 25 bp, Homo sapien
tcctttgtgctaacacaaatgccat

SEQ ID NO: 2908789 - DNA, 25 bp, Homo sapien
tgactcattagtcgccactctttcc

SEQ ID NO: 2908790 - DNA, 25 bp, Homo sapien
gctccttcccagacgcttggactgt

SEQ ID NO: 2908791 - DNA, 25 bp, Homo sapien
actttgagtccagggtccacctggg

SEQ ID NO: 2908792 - DNA, 25 bp, Homo sapien
tatacactttgagtccagggtccac

SEQ ID NO: 2908793 - DNA, 25 bp, Homo sapien
ggggactgacgtctgcctggaggac

SEQ ID NO: 2908794 - DNA, 25 bp, Homo sapien
ctggtatacactttgagtccagggt

SEQ ID NO: 2908795 - DNA, 25 bp, Homo sapien
gtgttcaacatgggcctgctgtcca

SEQ ID NO: 2908796 - DNA, 25 bp, Homo sapien
tggcctactgggtcttgttgttcac

SEQ ID NO: 2908797 - DNA, 25 bp, Homo sapien
cctgatggcctactgggtcttgttg

SEQ ID NO: 2908798 - DNA, 25 bp, Homo sapien
ggcctgatggcctactgggtcttgt

SEQ ID NO: 2908799 - DNA, 25 bp, Homo sapien
tgatggcctactgggtcttgttgtt

SEQ ID NO: 2908800 - DNA, 25 bp, Homo sapien
gttctaagttctgttcgtgtggtca

SEQ ID NO: 2908801 - DNA, 25 bp, Homo sapien
caagtgagctgtttacggcgctgac

SEQ ID NO: 2908802 - DNA, 25 bp, Homo sapien
gcgctgactctaggatatgggtgcc

SEQ ID NO: 2908803 - DNA, 25 bp, Homo sapien
tctcttgagcgtctcccaccaagtg

SEQ ID NO: 2908804 - DNA, 25 bp, Homo sapien
atgagccttcttcggcatcgtcaga

SEQ ID NO: 2908805 - DNA, 25 bp, Homo sapien
agggatgagccttcttcggcatcgt

SEQ ID NO: 2908806 - DNA, 25 bp, Homo sapien
ttcttcggcatcgtcagaaaaggct

SEQ ID NO: 2908807 - DNA, 25 bp, Homo sapien
ttcggcatcgtcagaaaaggctctc

SEQ ID NO: 2908808 - DNA, 25 bp, Homo sapien
tgtctgtgcctcaatgagctcctga

SEQ ID NO: 2908809 - DNA, 25 bp, Homo sapien
cagctgcagccccaatgggatctct

SEQ ID NO: 2908810 - DNA, 25 bp, Homo sapien
ccccaatgggatctctggtgtggcc

SEQ ID NO: 2908811 - DNA, 25 bp, Homo sapien
tcctggacaaggacagtgtgcagct

SEQ ID NO: 2908812 - DNA, 25 bp, Homo sapien
tgctcttacttctgcacatggacca

SEQ ID NO: 2908813 - DNA, 25 bp, Homo sapien
cctcattggtctggtccttggctgg

SEQ ID NO: 2908814 - DNA, 25 bp, Homo sapien
gctctggctccgccgctggtgctgg

SEQ ID NO: 2908815 - DNA, 25 bp, Homo sapien
tgctggcagtgctcttacttctgca

SEQ ID NO: 2908816 - DNA, 25 bp, Homo sapien
tcagttccagggttagggccagtgg

SEQ ID NO: 2908817 - DNA, 25 bp, Homo sapien
gccacgctttcagttccagggttag

SEQ ID NO: 2908818 - DNA, 25 bp, Homo sapien
gctttcagttccagggttagggcca

SEQ ID NO: 2908819 - DNA, 25 bp, Homo sapien
ccagccacgctttcagttccagggt

SEQ ID NO: 2908820 - DNA, 25 bp, Homo sapien
tctgcctgcatgtttgccaccgtgc

SEQ ID NO: 2908821 - DNA, 25 bp, Homo sapien
ttgtaatctcgtttcatcaacttgt

SEQ ID NO: 2908822 - DNA, 25 bp, Homo sapien
tgttaagggcctgtcccgggcagca

SEQ ID NO: 2908823 - DNA, 25 bp, Homo sapien
tgtggacccgcatccatgcctggag

SEQ ID NO: 2908824 - DNA, 25 bp, Homo sapien
gggcacaacggctgtcgttaaaagc

SEQ ID NO: 2908825 - DNA, 25 bp, Homo sapien
tggatatgtgcacactggaatgtgg

SEQ ID NO: 2908826 - DNA, 25 bp, Homo sapien
tgaggttgtaacatttgcttgcatg

SEQ ID NO: 2908827 - DNA, 25 bp, Homo sapien
tgtgtaaatgctctcatgtcttgca

SEQ ID NO: 2908828 - DNA, 25 bp, Homo sapien
gcttgcatgtgaggatgcatatcta

SEQ ID NO: 2908829 - DNA, 25 bp, Homo sapien
gcctcgccaggagtctgctgagcac

SEQ ID NO: 2908830 - DNA, 25 bp, Homo sapien
acagcctcgccaggagtctgctgag

SEQ ID NO: 2908831 - DNA, 25 bp, Homo sapien
acacagcctcgccaggagtctgctg

SEQ ID NO: 2908832 - DNA, 25 bp, Homo sapien
tcacacagcctcgccaggagtctgc

SEQ ID NO: 2908833 - DNA, 25 bp, Homo sapien
ctgtaaagtcgtaagtatttataat

SEQ ID NO: 2908834 - DNA, 25 bp, Homo sapien
atatgtgttgccaattactgtaaag

SEQ ID NO: 2908835 - DNA, 25 bp, Homo sapien
tctggttctgatttgatgggcactt

SEQ ID NO: 2908836 - DNA, 25 bp, Homo sapien
taattctggttctgatttgatgggc

SEQ ID NO: 2908837 - DNA, 25 bp, Homo sapien
tgcaggaaagatgcacccctgtact

SEQ ID NO: 2908838 - DNA, 25 bp, Homo sapien
taccatcactactcgtattagtcca

SEQ ID NO: 2908839 - DNA, 25 bp, Homo sapien
caaattgctaccatcactactcgta

SEQ ID NO: 2908840 - DNA, 25 bp, Homo sapien
tgtacagggagactcccgttttgaa

SEQ ID NO: 2908841 - DNA, 25 bp, Homo sapien
cattgagttcgctgatttttgctaa

SEQ ID NO: 2908842 - DNA, 25 bp, Homo sapien
gttgtaaacaccttcccatggtagc

SEQ ID NO: 2908843 - DNA, 25 bp, Homo sapien
gattgctagagaggtaagagcatct

SEQ ID NO: 2908844 - DNA, 25 bp, Homo sapien
gcagttctgccagcactgtataagt

SEQ ID NO: 2908845 - DNA, 25 bp, Homo sapien
gttcgtgtatctggggtgtggccat

SEQ ID NO: 2908846 - DNA, 25 bp, Homo sapien
tctgtaaggcccctcagatgcagtg

SEQ ID NO: 2908847 - DNA, 25 bp, Homo sapien
tggaggccccttttgcctagaagtg

SEQ ID NO: 2908848 - DNA, 25 bp, Homo sapien
acaggaaactgcacaaggtggaggc

SEQ ID NO: 2908849 - DNA, 25 bp, Homo sapien
ggtccctgctgagttgtccctctgt

SEQ ID NO: 2908850 - DNA, 25 bp, Homo sapien
tctccccactggtgatccctggttt

SEQ ID NO: 2908851 - DNA, 25 bp, Homo sapien
tggtgatccctggtttggcttggct

SEQ ID NO: 2908852 - DNA, 25 bp, Homo sapien
acatttgcagttctccccactggtg

SEQ ID NO: 2908853 - DNA, 25 bp, Homo sapien
aaacatttgcagttctccccactgg

SEQ ID NO: 2908854 - DNA, 25 bp, Homo sapien
aattaatgattgatgggtttgagca

SEQ ID NO: 2908855 - DNA, 25 bp, Homo sapien
gaatctagatctgactcaaagctag

SEQ ID NO: 2908856 - DNA, 25 bp, Homo sapien
tttggttcctattgctcctataaca

SEQ ID NO: 2908857 - DNA, 25 bp, Homo sapien
taacaagcaccacaaacttggtgct

SEQ ID NO: 2908858 - DNA, 25 bp, Homo sapien
aatccaggtagcgtccccttggcta

SEQ ID NO: 2908859 - DNA, 25 bp, Homo sapien
aggtagcgtccccttggctataatt

SEQ ID NO: 2908860 - DNA, 25 bp, Homo sapien
ttgaatccaggtagcgtccccttgg

SEQ ID NO: 2908861 - DNA, 25 bp, Homo sapien
gtccccttggctataatttctaaga

SEQ ID NO: 2908862 - DNA, 25 bp, Homo sapien
aatatggaagggtagctttggagcc

SEQ ID NO: 2908863 - DNA, 25 bp, Homo sapien
cataggaattgcaggcggacaggaa

SEQ ID NO: 2908864 - DNA, 25 bp, Homo sapien
tagcattactaaggcctcattggca

SEQ ID NO: 2908865 - DNA, 25 bp, Homo sapien
gccagctctcggcacaatatggaag

SEQ ID NO: 2908866 - DNA, 25 bp, Homo sapien
ctggaatgaagagggttccatggcc

SEQ ID NO: 2908867 - DNA, 25 bp, Homo sapien
tggaatgaagagggttccatggcca

SEQ ID NO: 2908868 - DNA, 25 bp, Homo sapien
tggccatatacattgacttggccat

SEQ ID NO: 2908869 - DNA, 25 bp, Homo sapien
cctgaagaaaaagccgcgcgcggac

SEQ ID NO: 2908870 - DNA, 25 bp, Homo sapien
tccgggaaccgcaaagcacggtgtg

SEQ ID NO: 2908871 - DNA, 25 bp, Homo sapien
gtgtgcctccgctgtcctgaagaaa

SEQ ID NO: 2908872 - DNA, 25 bp, Homo sapien
tgtggcgggctgacaggtctgaggc

SEQ ID NO: 2908873 - DNA, 25 bp, Homo sapien
agagagtgtgcggagatgcggccat

SEQ ID NO: 2908874 - DNA, 25 bp, Homo sapien
aggagagagtgtgcggagatgcggc

SEQ ID NO: 2908875 - DNA, 25 bp, Homo sapien
gaggagagagtgtgcggagatgcgg

SEQ ID NO: 2908876 - DNA, 25 bp, Homo sapien
gagagagtgtgcggagatgcggcca

SEQ ID NO: 2908877 - DNA, 25 bp, Homo sapien
cggcctcgcacgtggtaataagaga

SEQ ID NO: 2908878 - DNA, 25 bp, Homo sapien
gccacagtgcaagactggaccctag

SEQ ID NO: 2908879 - DNA, 25 bp, Homo sapien
tctgataaggaggactgtggaaccc

SEQ ID NO: 2908880 - DNA, 25 bp, Homo sapien
tgtgtggaccactaaagccacagtg

SEQ ID NO: 2908881 - DNA, 25 bp, Homo sapien
atgcagcaacaaaccatatgggcca

SEQ ID NO: 2908882 - DNA, 25 bp, Homo sapien
gatgcagcaacaaaccatatgggcc

SEQ ID NO: 2908883 - DNA, 25 bp, Homo sapien
tgatgcagcaacaaaccatatgggc

SEQ ID NO: 2908884 - DNA, 25 bp, Homo sapien
agggagtaagctgtctattaattcc

SEQ ID NO: 2908885 - DNA, 25 bp, Homo sapien
cagcttcagggagtaagctgtctat

SEQ ID NO: 2908886 - DNA, 25 bp, Homo sapien
tatgttcacagcttcagggagtaag

SEQ ID NO: 2908887 - DNA, 25 bp, Homo sapien
tctattaattccttccataccacca

SEQ ID NO: 2908888 - DNA, 25 bp, Homo sapien
cactgcttattgacattcctgagaa

SEQ ID NO: 2908889 - DNA, 25 bp, Homo sapien
gaagatgtaagaacttgtgagggga

SEQ ID NO: 2908890 - DNA, 25 bp, Homo sapien
ctgcttattgacattcctgagaaga

SEQ ID NO: 2908891 - DNA, 25 bp, Homo sapien
tgtaagaacttgtgaggggagtcct

SEQ ID NO: 2908892 - DNA, 25 bp, Homo sapien
tctggcttgggtcttacttgctggt

SEQ ID NO: 2908893 - DNA, 25 bp, Homo sapien
tttcaaggaaaggagatgctactgg

SEQ ID NO: 2908894 - DNA, 25 bp, Homo sapien
tatatttctgctttggcttgacctg

SEQ ID NO: 2908895 - DNA, 25 bp, Homo sapien
tggctttctggacaaagataggctg

SEQ ID NO: 2908896 - DNA, 25 bp, Homo sapien
ggacctgcagttccaaattattctt

SEQ ID NO: 2908897 - DNA, 25 bp, Homo sapien
aaagatagagtttcaaataagtaag

SEQ ID NO: 2908898 - DNA, 25 bp, Homo sapien
tcccagttaaattgaagagaggaaa

SEQ ID NO: 2908899 - DNA, 25 bp, Homo sapien
aaaaatactaagacaggacctgcag

SEQ ID NO: 2908900 - DNA, 25 bp, Homo sapien
taattgcaaaggaaagggtgactat

SEQ ID NO: 2908901 - DNA, 25 bp, Homo sapien
atgcaatactatttacaattctgtg

SEQ ID NO: 2908902 - DNA, 25 bp, Homo sapien
agcaggataaacattcaactttaat

SEQ ID NO: 2908903 - DNA, 25 bp, Homo sapien
ttttaatacaatacttacaatgcaa

SEQ ID NO: 2908904 - DNA, 25 bp, Homo sapien
aacgccagacagtaagcatttcagg

SEQ ID NO: 2908905 - DNA, 25 bp, Homo sapien
tgtgctctccgacagaaggtcagca

SEQ ID NO: 2908906 - DNA, 25 bp, Homo sapien
caagtcgtttctcagttgaccacca

SEQ ID NO: 2908907 - DNA, 25 bp, Homo sapien
caattaactctgtcactgcggcatg

SEQ ID NO: 2908908 - DNA, 25 bp, Homo sapien
tgagacaaggcagaacacttttctg

SEQ ID NO: 2908909 - DNA, 25 bp, Homo sapien
ttgccaccatactttggcacactgt

SEQ ID NO: 2908910 - DNA, 25 bp, Homo sapien
gccacccattgccaccatactttgg

SEQ ID NO: 2908911 - DNA, 25 bp, Homo sapien
acactgtggtattcttccaactcag

SEQ ID NO: 2908912 - DNA, 25 bp, Homo sapien
cactttttcatgaagatgtacactt

SEQ ID NO: 2908913 - DNA, 25 bp, Homo sapien
actttttcatgaagatgtacacttg

SEQ ID NO: 2908914 - DNA, 25 bp, Homo sapien
aacgttcactaacagctttgccacc

SEQ ID NO: 2908915 - DNA, 25 bp, Homo sapien
cctggtttgctttctggtttagctg

SEQ ID NO: 2908916 - DNA, 25 bp, Homo sapien
gctttctggtttagctgaagttcca

SEQ ID NO: 2908917 - DNA, 25 bp, Homo sapien
tcaacttcttcaacgttcactaaca

SEQ ID NO: 2908918 - DNA, 25 bp, Homo sapien
tgcagaatctaagaggaccccaggt

SEQ ID NO: 2908919 - DNA, 25 bp, Homo sapien
tagagggagatctgcttggacttgc

SEQ ID NO: 2908920 - DNA, 25 bp, Homo sapien
tcatttgcttccctcgagtgattca

SEQ ID NO: 2908921 - DNA, 25 bp, Homo sapien
gataacattctctccacatagtaga

SEQ ID NO: 2908922 - DNA, 25 bp, Homo sapien
aatggggaacgaacagtctctcctg

SEQ ID NO: 2908923 - DNA, 25 bp, Homo sapien
caatggggaacgaacagtctctcct

SEQ ID NO: 2908924 - DNA, 25 bp, Homo sapien
ccaatggggaacgaacagtctctcc

SEQ ID NO: 2908925 - DNA, 25 bp, Homo sapien
gccaatggggaacgaacagtctctc

SEQ ID NO: 2908926 - DNA, 25 bp, Homo sapien
cagggccagaaagtgtccaagagtg

SEQ ID NO: 2908927 - DNA, 25 bp, Homo sapien
taggccctggcgcttctttcctggg

SEQ ID NO: 2908928 - DNA, 25 bp, Homo sapien
gctgctccttttcggtaggccctgg

SEQ ID NO: 2908929 - DNA, 25 bp, Homo sapien
gaaatccgctggaaaaaggatcacc

SEQ ID NO: 2908930 - DNA, 25 bp, Homo sapien
aatgcgtagtgggagatgataatcc

SEQ ID NO: 2908931 - DNA, 25 bp, Homo sapien
gcgtagtgggagatgataatcctac

SEQ ID NO: 2908932 - DNA, 25 bp, Homo sapien
cagagaatgcgtagtgggagatgat

SEQ ID NO: 2908933 - DNA, 25 bp, Homo sapien
cagcggtcagagaatgcgtagtggg

SEQ ID NO: 2908934 - DNA, 25 bp, Homo sapien
gacaaactgcagacaagcctaggag

SEQ ID NO: 2908935 - DNA, 25 bp, Homo sapien
gacagcaaataacaaggatcccaag

SEQ ID NO: 2908936 - DNA, 25 bp, Homo sapien
tcagtacgcactgccagggataaag

SEQ ID NO: 2908937 - DNA, 25 bp, Homo sapien
actaatttgaaagggagacggcaga

SEQ ID NO: 2908938 - DNA, 25 bp, Homo sapien
agggcccggagccaatgcaaatcca

SEQ ID NO: 2908939 - DNA, 25 bp, Homo sapien
cacaggatgcaaggcctgtcccaac

SEQ ID NO: 2908940 - DNA, 25 bp, Homo sapien
gtcccaacagaagtaagcaggaaac

SEQ ID NO: 2908941 - DNA, 25 bp, Homo sapien
gctgcagtggtacttacaaccagag

SEQ ID NO: 2908942 - DNA, 25 bp, Homo sapien
tttcttgatccaactgagaggtttt

SEQ ID NO: 2908943 - DNA, 25 bp, Homo sapien
aatactttcttgatccaactgagag

SEQ ID NO: 2908944 - DNA, 25 bp, Homo sapien
actttcttgatccaactgagaggtt

SEQ ID NO: 2908945 - DNA, 25 bp, Homo sapien
tactttcttgatccaactgagaggt

SEQ ID NO: 2908946 - DNA, 25 bp, Homo sapien
gttataaacaccaatgccaaattca

SEQ ID NO: 2908947 - DNA, 25 bp, Homo sapien
tttggttataaacaccaatgccaaa

SEQ ID NO: 2908948 - DNA, 25 bp, Homo sapien
attcactccactgagatggatcatt

SEQ ID NO: 2908949 - DNA, 25 bp, Homo sapien
accaatgccaaattcactccactga

SEQ ID NO: 2908950 - DNA, 25 bp, Homo sapien
cactaaggcaaagagagtatgagac

SEQ ID NO: 2908951 - DNA, 25 bp, Homo sapien
tagcttgctcaaagcagtctggagc

SEQ ID NO: 2908952 - DNA, 25 bp, Homo sapien
gaaatctggcataggatctgaagga

SEQ ID NO: 2908953 - DNA, 25 bp, Homo sapien
cctgtgatcgttgtttccggaagaa

SEQ ID NO: 2908954 - DNA, 25 bp, Homo sapien
cagctgggtactactaatatggagc

SEQ ID NO: 2908955 - DNA, 25 bp, Homo sapien
caatcaactgtaactgttgtaaaca

SEQ ID NO: 2908956 - DNA, 25 bp, Homo sapien
ggcaagcctagtttcacagctgggt

SEQ ID NO: 2908957 - DNA, 25 bp, Homo sapien
gagaaatgtgaaactaaccaccatg

SEQ ID NO: 2908958 - DNA, 25 bp, Homo sapien
taagtacaggattcaaacggccaaa

SEQ ID NO: 2908959 - DNA, 25 bp, Homo sapien
gaaacatcagtatgtcccacacaag

SEQ ID NO: 2908960 - DNA, 25 bp, Homo sapien
ctcagccgtgctttatggcaagaaa

SEQ ID NO: 2908961 - DNA, 25 bp, Homo sapien
cacaagccaaatgtcagtctgagca

SEQ ID NO: 2908962 - DNA, 25 bp, Homo sapien
ggttaccaattctctgttgccttac

SEQ ID NO: 2908963 - DNA, 25 bp, Homo sapien
ctctggttaccaattctctgttgcc

SEQ ID NO: 2908964 - DNA, 25 bp, Homo sapien
tggttaccaattctctgttgcctta

SEQ ID NO: 2908965 - DNA, 25 bp, Homo sapien
tctggttaccaattctctgttgcct

SEQ ID NO: 2908966 - DNA, 25 bp, Homo sapien
atgtgccattactttcagcttacaa

SEQ ID NO: 2908967 - DNA, 25 bp, Homo sapien
tgtgccattactttcagcttacaaa

SEQ ID NO: 2908968 - DNA, 25 bp, Homo sapien
catgtgccattactttcagcttaca

SEQ ID NO: 2908969 - DNA, 25 bp, Homo sapien
gtgccattactttcagcttacaaat

SEQ ID NO: 2908970 - DNA, 25 bp, Homo sapien
tatctgattcaaactgggccaactg

SEQ ID NO: 2908971 - DNA, 25 bp, Homo sapien
gaaggctcttgttcacggtctcaaa

SEQ ID NO: 2908972 - DNA, 25 bp, Homo sapien
caggtcaagctaattctgtcaggga

SEQ ID NO: 2908973 - DNA, 25 bp, Homo sapien
tcagggaccagtcttgtactgcacc

SEQ ID NO: 2908974 - DNA, 25 bp, Homo sapien
cattcccacagcagtatatgaaagt

SEQ ID NO: 2908975 - DNA, 25 bp, Homo sapien
cagttgcagaaatgaggactagaac

SEQ ID NO: 2908976 - DNA, 25 bp, Homo sapien
gaaatgaatggcacctaaagatgaa

SEQ ID NO: 2908977 - DNA, 25 bp, Homo sapien
ctatttcacgaagtggttgtgccac

SEQ ID NO: 2908978 - DNA, 25 bp, Homo sapien
cactatccccacagcattaagagag

SEQ ID NO: 2908979 - DNA, 25 bp, Homo sapien
gaaggatgggctacacatgttaagc

SEQ ID NO: 2908980 - DNA, 25 bp, Homo sapien
gaggattccctgtcattcatagtaa

SEQ ID NO: 2908981 - DNA, 25 bp, Homo sapien
tgcaaaaggaactgtctaccaagcc

SEQ ID NO: 2908982 - DNA, 25 bp, Homo sapien
ctttgtcctattcatgtttgagtca

SEQ ID NO: 2908983 - DNA, 25 bp, Homo sapien
cacgaaccagcggtctgttctttgt

SEQ ID NO: 2908984 - DNA, 25 bp, Homo sapien
agcggtctgttctttgtcctattca

SEQ ID NO: 2908985 - DNA, 25 bp, Homo sapien
gatctgtccacgaaccagcggtctg

SEQ ID NO: 2908986 - DNA, 25 bp, Homo sapien
tgcaagctccacgacagcaagaatt

SEQ ID NO: 2908987 - DNA, 25 bp, Homo sapien
tattaagcattagctacctgccagg

SEQ ID NO: 2908988 - DNA, 25 bp, Homo sapien
gcagcagatgccatgtattccttct

SEQ ID NO: 2908989 - DNA, 25 bp, Homo sapien
aatggccttctcattgccttggcag

SEQ ID NO: 2908990 - DNA, 25 bp, Homo sapien
gtatccagaatggaagccatgggtc

SEQ ID NO: 2908991 - DNA, 25 bp, Homo sapien
cagtgtgagtatccagaatggaagc

SEQ ID NO: 2908992 - DNA, 25 bp, Homo sapien
agaatggaagccatgggtccctgag

SEQ ID NO: 2908993 - DNA, 25 bp, Homo sapien
tgagtatccagaatggaagccatgg

SEQ ID NO: 2908994 - DNA, 25 bp, Homo sapien
gttggaaaaactaatgctgacatgt

SEQ ID NO: 2908995 - DNA, 25 bp, Homo sapien
tattatttccctgtcagcgttacca

SEQ ID NO: 2908996 - DNA, 25 bp, Homo sapien
gcgttaccaagctggaaaatagata

SEQ ID NO: 2908997 - DNA, 25 bp, Homo sapien
gatcactctcatctgatccattaag

SEQ ID NO: 2908998 - DNA, 25 bp, Homo sapien
tcttagacctcatgctaacatgagc

SEQ ID NO: 2908999 - DNA, 25 bp, Homo sapien
acagcacttcttagacctcatgcta

SEQ ID NO: 2909000 - DNA, 25 bp, Homo sapien
tcatgctaacatgagctgctgccat

SEQ ID NO: 2909001 - DNA, 25 bp, Homo sapien
ttcctgagcccctccacatggttgg

SEQ ID NO: 2909002 - DNA, 25 bp, Homo sapien
aaatgaatctccctcattgctgacc

SEQ ID NO: 2909003 - DNA, 25 bp, Homo sapien
ggagtacgtggtgacccctgaatta

SEQ ID NO: 2909004 - DNA, 25 bp, Homo sapien
tgctgaccactgagattcagccttc

SEQ ID NO: 2909005 - DNA, 25 bp, Homo sapien
gaattatgctacaccaattcatctt

SEQ ID NO: 2909006 - DNA, 25 bp, Homo sapien
actgaaagaatcctgttaatctaga

SEQ ID NO: 2909007 - DNA, 25 bp, Homo sapien
tgcatcatgatgttcggcgcagaga

SEQ ID NO: 2909008 - DNA, 25 bp, Homo sapien
gcatgcatcatgatgttcggcgcag

SEQ ID NO: 2909009 - DNA, 25 bp, Homo sapien
catcatgatgttcggcgcagagact

SEQ ID NO: 2909010 - DNA, 25 bp, Homo sapien
agagactgtggtattatattaataa

SEQ ID NO: 2909011 - DNA, 25 bp, Homo sapien
tcaagtgttactctgacatctggtt

SEQ ID NO: 2909012 - DNA, 25 bp, Homo sapien
gcttccagttcaagtgttactctga

SEQ ID NO: 2909013 - DNA, 25 bp, Homo sapien
agttcaagtgttactctgacatctg

SEQ ID NO: 2909014 - DNA, 25 bp, Homo sapien
caagtgttactctgacatctggttt

SEQ ID NO: 2909015 - DNA, 25 bp, Homo sapien
tgagtggattcacccccaaggtcag

SEQ ID NO: 2909016 - DNA, 25 bp, Homo sapien
accacagctccgacccatgtgttgg

SEQ ID NO: 2909017 - DNA, 25 bp, Homo sapien
tccttttcagtggtgtgtagcagca

SEQ ID NO: 2909018 - DNA, 25 bp, Homo sapien
tagcagcaggtatacaggaaaatgt

SEQ ID NO: 2909019 - DNA, 25 bp, Homo sapien
gattttcatcatagcttcaggtact

SEQ ID NO: 2909020 - DNA, 25 bp, Homo sapien
gtcacaggtaggcagcactgcttcc

SEQ ID NO: 2909021 - DNA, 25 bp, Homo sapien
cgccccatgaattcgttagtcctag

SEQ ID NO: 2909022 - DNA, 25 bp, Homo sapien
ctttctttatccacctgtagtcaca

SEQ ID NO: 2909023 - DNA, 25 bp, Homo sapien
tgtgcagaatcaaaccaagtgcggc

SEQ ID NO: 2909024 - DNA, 25 bp, Homo sapien
gaatcaaaccaagtgcggcagttcc

SEQ ID NO: 2909025 - DNA, 25 bp, Homo sapien
cggcagttcctgtgacaacaagctg

SEQ ID NO: 2909026 - DNA, 25 bp, Homo sapien
gccattccctgtgtgcagaatcaaa

SEQ ID NO: 2909027 - DNA, 25 bp, Homo sapien
cagtacctggtacttagtaagccct

SEQ ID NO: 2909028 - DNA, 25 bp, Homo sapien
taaaggaaatcattaagtgcttggg

SEQ ID NO: 2909029 - DNA, 25 bp, Homo sapien
tgaataaattcactccgactctact

SEQ ID NO: 2909030 - DNA, 25 bp, Homo sapien
tctcatccaggaataagggaggtaa

SEQ ID NO: 2909031 - DNA, 25 bp, Homo sapien
agaggatgtggggccagtttatcaa

SEQ ID NO: 2909032 - DNA, 25 bp, Homo sapien
gggaagaggatgtggggccagttta

SEQ ID NO: 2909033 - DNA, 25 bp, Homo sapien
ctgcagataaagggaagaggatgtg

SEQ ID NO: 2909034 - DNA, 25 bp, Homo sapien
aagaggatgtggggccagtttatca

SEQ ID NO: 2909035 - DNA, 25 bp, Homo sapien
gatcagcttcaacagtgcaatagac

SEQ ID NO: 2909036 - DNA, 25 bp, Homo sapien
gggaggtcttccctcgccagtacaa

SEQ ID NO: 2909037 - DNA, 25 bp, Homo sapien
tctgatgtggcccacggtagcgcgt

SEQ ID NO: 2909038 - DNA, 25 bp, Homo sapien
ggtagcgcgtctgctccatgactgg

SEQ ID NO: 2909039 - DNA, 25 bp, Homo sapien
ggtgggtgaccgacatcatgcagta

SEQ ID NO: 2909040 - DNA, 25 bp, Homo sapien
gaaactgccaggagtagaggattcc

SEQ ID NO: 2909041 - DNA, 25 bp, Homo sapien
tgcagaagaacagtctccgcgagct

SEQ ID NO: 2909042 - DNA, 25 bp, Homo sapien
tctgcgtccacgtagaagcggaagc

SEQ ID NO: 2909043 - DNA, 25 bp, Homo sapien
gactaaaaagctgcaggtaaccgta

SEQ ID NO: 2909044 - DNA, 25 bp, Homo sapien
ttcaagacctttgggcagatgggac

SEQ ID NO: 2909045 - DNA, 25 bp, Homo sapien
tttggtaaccgagaccacacctggc

SEQ ID NO: 2909046 - DNA, 25 bp, Homo sapien
gacccgtgggagcacaaaggactaa

SEQ ID NO: 2909047 - DNA, 25 bp, Homo sapien
ccagctcttgaaggcgtgatcaagt

SEQ ID NO: 2909048 - DNA, 25 bp, Homo sapien
tacttccaatgacgtcacacacact

SEQ ID NO: 2909049 - DNA, 25 bp, Homo sapien
gtgatcaagtgtcggttctaccaag

SEQ ID NO: 2909050 - DNA, 25 bp, Homo sapien
tgcgaactcagcacaggatgattac

SEQ ID NO: 2909051 - DNA, 25 bp, Homo sapien
cagttatgatgagtacgtctcctcc

SEQ ID NO: 2909052 - DNA, 25 bp, Homo sapien
taatcatggcctcacatagtgatgc

SEQ ID NO: 2909053 - DNA, 25 bp, Homo sapien
cagaaggtgctgctcttaagcgaaa

SEQ ID NO: 2909054 - DNA, 25 bp, Homo sapien
ctttgacgtacatcacacactgtgt

SEQ ID NO: 2909055 - DNA, 25 bp, Homo sapien
cttggttcgactttggcagtttgct

SEQ ID NO: 2909056 - DNA, 25 bp, Homo sapien
acgaagcaggcagaaacgtgcacct

SEQ ID NO: 2909057 - DNA, 25 bp, Homo sapien
gccataaaaggtactcattcattcc

SEQ ID NO: 2909058 - DNA, 25 bp, Homo sapien
tcacatggtcatttatggattgtct

SEQ ID NO: 2909059 - DNA, 25 bp, Homo sapien
caacctttaaaagactgtcaggcca

SEQ ID NO: 2909060 - DNA, 25 bp, Homo sapien
ggtactctgctatctctaaaggcaa

SEQ ID NO: 2909061 - DNA, 25 bp, Homo sapien
cacatatagtttcggttgaaggcat

SEQ ID NO: 2909062 - DNA, 25 bp, Homo sapien
tgttcataacctcaaatagctgtgg

SEQ ID NO: 2909063 - DNA, 25 bp, Homo sapien
cagcaggcctagtcccacagtcttt

SEQ ID NO: 2909064 - DNA, 25 bp, Homo sapien
ggtagcctttccagcagggtgctca

SEQ ID NO: 2909065 - DNA, 25 bp, Homo sapien
gatgggagaacaccagcagaccagc

SEQ ID NO: 2909066 - DNA, 25 bp, Homo sapien
caagaaaagagatgagggccctgca

SEQ ID NO: 2909067 - DNA, 25 bp, Homo sapien
tcacccatagtcttctctgtggatc

SEQ ID NO: 2909068 - DNA, 25 bp, Homo sapien
catgccagaacgtgcctcttgtagc

SEQ ID NO: 2909069 - DNA, 25 bp, Homo sapien
gggtcatctttcacccatagtcttc

SEQ ID NO: 2909070 - DNA, 25 bp, Homo sapien
agccagtatcattcatgccagaacg

SEQ ID NO: 2909071 - DNA, 25 bp, Homo sapien
tacaggtggctggattaagcacaac

SEQ ID NO: 2909072 - DNA, 25 bp, Homo sapien
tcaggagctgcgatagcgtaaatct

SEQ ID NO: 2909073 - DNA, 25 bp, Homo sapien
tcgcccagtgagaatataacagcct

SEQ ID NO: 2909074 - DNA, 25 bp, Homo sapien
tccagggccacgtctgatgaataag

SEQ ID NO: 2909075 - DNA, 25 bp, Homo sapien
tggtggtgaccgcaatccccgcaat

SEQ ID NO: 2909076 - DNA, 25 bp, Homo sapien
tatatttgtgtacatgcacgactgt

SEQ ID NO: 2909077 - DNA, 25 bp, Homo sapien
tctcaatgagacagcagccttcggt

SEQ ID NO: 2909078 - DNA, 25 bp, Homo sapien
ctgctccagtaaatttatatttgtg

SEQ ID NO: 2909079 - DNA, 25 bp, Homo sapien
gaacaggtaagagtaacccaggtga

SEQ ID NO: 2909080 - DNA, 25 bp, Homo sapien
taaatgggtgatgccacaacaggag

SEQ ID NO: 2909081 - DNA, 25 bp, Homo sapien
tagctgatctctaacatcgttggag

SEQ ID NO: 2909082 - DNA, 25 bp, Homo sapien
gagctacatcccagacagagttgat

SEQ ID NO: 2909083 - DNA, 25 bp, Homo sapien
aagaaactatggactaatatccctc

SEQ ID NO: 2909084 - DNA, 25 bp, Homo sapien
gtttgttactcacggtcagccacag

SEQ ID NO: 2909085 - DNA, 25 bp, Homo sapien
tgttctgcagtttcgctttcctggg

SEQ ID NO: 2909086 - DNA, 25 bp, Homo sapien
cagtaattcaccctttctcccatcc

SEQ ID NO: 2909087 - DNA, 25 bp, Homo sapien
tcagccaaagggctctcgaaccagc

SEQ ID NO: 2909088 - DNA, 25 bp, Homo sapien
caaagggctctcgaaccagcagcat

SEQ ID NO: 2909089 - DNA, 25 bp, Homo sapien
agccaaagggctctcgaaccagcag

SEQ ID NO: 2909090 - DNA, 25 bp, Homo sapien
ccaaagggctctcgaaccagcagca

SEQ ID NO: 2909091 - DNA, 25 bp, Homo sapien
gtcagtcctccaggcagacgtcagt

SEQ ID NO: 2909092 - DNA, 25 bp, Homo sapien
cctcactcaggaggacgtcagtcct

SEQ ID NO: 2909093 - DNA, 25 bp, Homo sapien
acctcactcaggaggacgtcagtcc

SEQ ID NO: 2909094 - DNA, 25 bp, Homo sapien
gaggacgtcagtcctccaggcagac

SEQ ID NO: 2909095 - DNA, 25 bp, Homo sapien
atagggaccactctgcccaacagca

SEQ ID NO: 2909096 - DNA, 25 bp, Homo sapien
tggaagtgagtctttcccacacgcc

SEQ ID NO: 2909097 - DNA, 25 bp, Homo sapien
tgagtcatcctgttgaaaccatagg

SEQ ID NO: 2909098 - DNA, 25 bp, Homo sapien
ccaggtatcacctgactctcggttc

SEQ ID NO: 2909099 - DNA, 25 bp, Homo sapien
tgcttgacattaagtctcctccagg

SEQ ID NO: 2909100 - DNA, 25 bp, Homo sapien
ttgacattaagtctcctccaggtaa

SEQ ID NO: 2909101 - DNA, 25 bp, Homo sapien
cattaagtctcctccaggtaatttt

SEQ ID NO: 2909102 - DNA, 25 bp, Homo sapien
gacattaagtctcctccaggtaatt

SEQ ID NO: 2909103 - DNA, 25 bp, Homo sapien
gagactcagtagcacattccttggg

SEQ ID NO: 2909104 - DNA, 25 bp, Homo sapien
gactcagtagcacattccttggggc

SEQ ID NO: 2909105 - DNA, 25 bp, Homo sapien
ctcagtagcacattccttggggctt

SEQ ID NO: 2909106 - DNA, 25 bp, Homo sapien
agactcagtagcacattccttgggg

SEQ ID NO: 2909107 - DNA, 25 bp, Homo sapien
agtgcttggaggaagttgcctgccc

SEQ ID NO: 2909108 - DNA, 25 bp, Homo sapien
agatcagccaagtggctccatgtat

SEQ ID NO: 2909109 - DNA, 25 bp, Homo sapien
aagtggctccatgtattccaccagg

SEQ ID NO: 2909110 - DNA, 25 bp, Homo sapien
atctcctccgtgaagatcagccaag

SEQ ID NO: 2909111 - DNA, 25 bp, Homo sapien
gaagcactctggcttagtcagggaa

SEQ ID NO: 2909112 - DNA, 25 bp, Homo sapien
tgagtagcagaccagaattcgaatc

SEQ ID NO: 2909113 - DNA, 25 bp, Homo sapien
cgaatctgggtctgtatggctttca

SEQ ID NO: 2909114 - DNA, 25 bp, Homo sapien
catggttgttccagcagtatgcaga

SEQ ID NO: 2909115 - DNA, 25 bp, Homo sapien
ctctctctggtttggcaagcccctg

SEQ ID NO: 2909116 - DNA, 25 bp, Homo sapien
tctacacagcttctgacagcaattc

SEQ ID NO: 2909117 - DNA, 25 bp, Homo sapien
ttccagttgttctagttattctctc

SEQ ID NO: 2909118 - DNA, 25 bp, Homo sapien
tctggtttggcaagcccctgccggg

SEQ ID NO: 2909119 - DNA, 25 bp, Homo sapien
cgtaggccagttgttctctgtttct

SEQ ID NO: 2909120 - DNA, 25 bp, Homo sapien
gttctctgtttctgcacctgcctcc

SEQ ID NO: 2909121 - DNA, 25 bp, Homo sapien
gcttctccttcttctgctgtccctc

SEQ ID NO: 2909122 - DNA, 25 bp, Homo sapien
tgcctcctttccctgtctttcagct

SEQ ID NO: 2909123 - DNA, 25 bp, Homo sapien
ctctggtgataggagttcattgtaa

SEQ ID NO: 2909124 - DNA, 25 bp, Homo sapien
ggtgataggagttcattgtaaggac

SEQ ID NO: 2909125 - DNA, 25 bp, Homo sapien
tctggtgataggagttcattgtaag

SEQ ID NO: 2909126 - DNA, 25 bp, Homo sapien
tgataggagttcattgtaaggacgc

SEQ ID NO: 2909127 - DNA, 25 bp, Homo sapien
tgttgcttatgacacccggtgattc

SEQ ID NO: 2909128 - DNA, 25 bp, Homo sapien
tgctgttgcttatgacacccggtga

SEQ ID NO: 2909129 - DNA, 25 bp, Homo sapien
gctgttgcttatgacacccggtgat

SEQ ID NO: 2909130 - DNA, 25 bp, Homo sapien
tttgctgttgcttatgacacccggt

SEQ ID NO: 2909131 - DNA, 25 bp, Homo sapien
cacagcgctctgcccagcttttaaa

SEQ ID NO: 2909132 - DNA, 25 bp, Homo sapien
cagttatgtaactgaatggcaggct

SEQ ID NO: 2909133 - DNA, 25 bp, Homo sapien
caggctttgtctccacagcgctctg

SEQ ID NO: 2909134 - DNA, 25 bp, Homo sapien
ttaaacttccggaggccacaatcac

SEQ ID NO: 2909135 - DNA, 25 bp, Homo sapien
aacacattttcctttccgcggctgc

SEQ ID NO: 2909136 - DNA, 25 bp, Homo sapien
acacattttcctttccgcggctgcc

SEQ ID NO: 2909137 - DNA, 25 bp, Homo sapien
ctgattccaaattcttccacgcggc

SEQ ID NO: 2909138 - DNA, 25 bp, Homo sapien
tgtgtcatgaggagtaggggtgtgc

SEQ ID NO: 2909139 - DNA, 25 bp, Homo sapien
taggggtgtgcgctgattccaaatt

SEQ ID NO: 2909140 - DNA, 25 bp, Homo sapien
gattccaaattcttccacgcggcat

SEQ ID NO: 2909141 - DNA, 25 bp, Homo sapien
tgggattgtcacaggaagcgctgcc

SEQ ID NO: 2909142 - DNA, 25 bp, Homo sapien
cagcggactgggaagggaactttat

SEQ ID NO: 2909143 - DNA, 25 bp, Homo sapien
gctccttgggaatggtgcactttcc

SEQ ID NO: 2909144 - DNA, 25 bp, Homo sapien
tggactcccgctgtacctttgttgg

SEQ ID NO: 2909145 - DNA, 25 bp, Homo sapien
cagttcctgccaccggaatccggac

SEQ ID NO: 2909146 - DNA, 25 bp, Homo sapien
agcctgaaccggtggcccagagccc

SEQ ID NO: 2909147 - DNA, 25 bp, Homo sapien
tctgcggcaccgcaaagcaggcatt

SEQ ID NO: 2909148 - DNA, 25 bp, Homo sapien
cggcaccgcaaagcaggcatttcct

SEQ ID NO: 2909149 - DNA, 25 bp, Homo sapien
acccgaggctcaaacctggacagag

SEQ ID NO: 2909150 - DNA, 25 bp, Homo sapien
tcggtccacccttggcaaaggccat

SEQ ID NO: 2909151 - DNA, 25 bp, Homo sapien
agagtcgtaggctgtgccgtgaaat

SEQ ID NO: 2909152 - DNA, 25 bp, Homo sapien
tgccgtgaaattcccacgcgcggcg

SEQ ID NO: 2909153 - DNA, 25 bp, Homo sapien
ccggcacaaggtcggagggtcgtct

SEQ ID NO: 2909154 - DNA, 25 bp, Homo sapien
ccttttgcccacctagctgatcctc

SEQ ID NO: 2909155 - DNA, 25 bp, Homo sapien
aagcggcgccagaggacgacctggg

SEQ ID NO: 2909156 - DNA, 25 bp, Homo sapien
gaactgacgctttggcccttttgcc

SEQ ID NO: 2909157 - DNA, 25 bp, Homo sapien
tgagcccaagacgttttcttacaaa

SEQ ID NO: 2909158 - DNA, 25 bp, Homo sapien
ccggctgtgctacgggagacttctt

SEQ ID NO: 2909159 - DNA, 25 bp, Homo sapien
cctgagcagcggtaatggccagaga

SEQ ID NO: 2909160 - DNA, 25 bp, Homo sapien
ggattcagatagcacagctgccagc

SEQ ID NO: 2909161 - DNA, 25 bp, Homo sapien
tctcacttcctgagtaaatgttccc

SEQ ID NO: 2909162 - DNA, 25 bp, Homo sapien
ccaagtgtccccgagtttacgcagc

SEQ ID NO: 2909163 - DNA, 25 bp, Homo sapien
caaacgcagaaagccagattgacgt

SEQ ID NO: 2909164 - DNA, 25 bp, Homo sapien
agcggaaccgacctgagccctggtc

SEQ ID NO: 2909165 - DNA, 25 bp, Homo sapien
gagccgccgcccgcactgtacttac

SEQ ID NO: 2909166 - DNA, 25 bp, Homo sapien
ggagccgccgcccgcactgtactta

SEQ ID NO: 2909167 - DNA, 25 bp, Homo sapien
cgggagccgccgcccgcactgtact

SEQ ID NO: 2909168 - DNA, 25 bp, Homo sapien
gggagccgccgcccgcactgtactt

SEQ ID NO: 2909169 - DNA, 25 bp, Homo sapien
tggggcggataaacgcgtcttccaa

SEQ ID NO: 2909170 - DNA, 25 bp, Homo sapien
tactcgaagtcacccccaaccacat

SEQ ID NO: 2909171 - DNA, 25 bp, Homo sapien
gactggggcggataaacgcgtcttc

SEQ ID NO: 2909172 - DNA, 25 bp, Homo sapien
ggataaacgcgtcttccaagaaaca

SEQ ID NO: 2909173 - DNA, 25 bp, Homo sapien
ggagatgcactaggcactggaaccc

SEQ ID NO: 2909174 - DNA, 25 bp, Homo sapien
agatgcactaggcactggaaccccc

SEQ ID NO: 2909175 - DNA, 25 bp, Homo sapien
ggtaggagatgcactaggcactgga

SEQ ID NO: 2909176 - DNA, 25 bp, Homo sapien
taggagatgcactaggcactggaac

SEQ ID NO: 2909177 - DNA, 25 bp, Homo sapien
ggttgctattggcttcggaacaagg

SEQ ID NO: 2909178 - DNA, 25 bp, Homo sapien
gcttctgggcggtgtagggcggtca

SEQ ID NO: 2909179 - DNA, 25 bp, Homo sapien
caaaaaccccgaacgccatgcaaat

SEQ ID NO: 2909180 - DNA, 25 bp, Homo sapien
aggcgcttctccgagagctcagcag

SEQ ID NO: 2909181 - DNA, 25 bp, Homo sapien
ggccagggacatggctcagcacatg

SEQ ID NO: 2909182 - DNA, 25 bp, Homo sapien
tcctaagaactgagcctcgagcagc

SEQ ID NO: 2909183 - DNA, 25 bp, Homo sapien
ggctgcctccttgcagtcctaagaa

SEQ ID NO: 2909184 - DNA, 25 bp, Homo sapien
ctgcaactggaacggaaagtcggga

SEQ ID NO: 2909185 - DNA, 25 bp, Homo sapien
gagtccggcacctcgggactctgct

SEQ ID NO: 2909186 - DNA, 25 bp, Homo sapien
gacatcgaggcaagatctgccgcca

SEQ ID NO: 2909187 - DNA, 25 bp, Homo sapien
ccggcgcacgagtacaggaacatat

SEQ ID NO: 2909188 - DNA, 25 bp, Homo sapien
cagacgcagagcatggcgaagagca

SEQ ID NO: 2909189 - DNA, 25 bp, Homo sapien
gcgcaatctgccgtagtttccctgc

SEQ ID NO: 2909190 - DNA, 25 bp, Homo sapien
cgggtggtccgaagctgtaaccctg

SEQ ID NO: 2909191 - DNA, 25 bp, Homo sapien
gatgcgctgcgcaatctgccgtagt

SEQ ID NO: 2909192 - DNA, 25 bp, Homo sapien
gcacccggacaggatgcgctgcgca

SEQ ID NO: 2909193 - DNA, 25 bp, Homo sapien
ggcgaggtcgcctgatgaattcaag

SEQ ID NO: 2909194 - DNA, 25 bp, Homo sapien
gcccttcttctttgcggcgaggtcg

SEQ ID NO: 2909195 - DNA, 25 bp, Homo sapien
ggcaccagtgctccgcgagaacttt

SEQ ID NO: 2909196 - DNA, 25 bp, Homo sapien
attcaagggcaccagtgctccgcga

SEQ ID NO: 2909197 - DNA, 25 bp, Homo sapien
ggtggctcgctttgctgagggcggt

SEQ ID NO: 2909198 - DNA, 25 bp, Homo sapien
gtggctcgctttgctgagggcggtc

SEQ ID NO: 2909199 - DNA, 25 bp, Homo sapien
ttagagggtggctcgctttgctgag

SEQ ID NO: 2909200 - DNA, 25 bp, Homo sapien
gagggtggctcgctttgctgagggc

SEQ ID NO: 2909201 - DNA, 25 bp, Homo sapien
ttaaggaggtagaaaggctgccact

SEQ ID NO: 2909202 - DNA, 25 bp, Homo sapien
gaaaatatccaccaactctgcggcc

SEQ ID NO: 2909203 - DNA, 25 bp, Homo sapien
tcagaaaatcctaggctgcctcggg

SEQ ID NO: 2909204 - DNA, 25 bp, Homo sapien
cagttgcggcatttacagtgggctc

SEQ ID NO: 2909205 - DNA, 25 bp, Homo sapien
tagagggagtttctgccgctgtaca

SEQ ID NO: 2909206 - DNA, 25 bp, Homo sapien
ccgctgtacagtctaaggcatattt

SEQ ID NO: 2909207 - DNA, 25 bp, Homo sapien
tttgtataacgcagaatggaaaggg

SEQ ID NO: 2909208 - DNA, 25 bp, Homo sapien
tgggccacagcattaacgtgtcagc

SEQ ID NO: 2909209 - DNA, 25 bp, Homo sapien
tctgcgctgagaccactaaaggcat

SEQ ID NO: 2909210 - DNA, 25 bp, Homo sapien
ctggaacatagggaaaacattcggt

SEQ ID NO: 2909211 - DNA, 25 bp, Homo sapien
ggaagtgtgatccagaatggtccag

SEQ ID NO: 2909212 - DNA, 25 bp, Homo sapien
gcaaactcagttttggacccatgct

SEQ ID NO: 2909213 - DNA, 25 bp, Homo sapien
tccccagggagattgtactttaatg

SEQ ID NO: 2909214 - DNA, 25 bp, Homo sapien
gaggaaacctatccgcaaaggctgg

SEQ ID NO: 2909215 - DNA, 25 bp, Homo sapien
cataggcctttagaaacgcgaggaa

SEQ ID NO: 2909216 - DNA, 25 bp, Homo sapien
cacaagagttgttggcaccacggag

SEQ ID NO: 2909217 - DNA, 25 bp, Homo sapien
gataaggtaatgatcacttcactgc

SEQ ID NO: 2909218 - DNA, 25 bp, Homo sapien
tcattgactatagaaaaggatttta

SEQ ID NO: 2909219 - DNA, 25 bp, Homo sapien
tgcctttctctctttacctcatccc

SEQ ID NO: 2909220 - DNA, 25 bp, Homo sapien
catgatttatacgaatgtattattc

SEQ ID NO: 2909221 - DNA, 25 bp, Homo sapien
ttccttagctctctttggaaagctc

SEQ ID NO: 2909222 - DNA, 25 bp, Homo sapien
acgaaggtgcttaggacagtcatcc

SEQ ID NO: 2909223 - DNA, 25 bp, Homo sapien
cttcaaaccacagaacgaaggtgct

SEQ ID NO: 2909224 - DNA, 25 bp, Homo sapien
cagtcatccaagctacccaaggagg

SEQ ID NO: 2909225 - DNA, 25 bp, Homo sapien
tttccctcagtacttcaaaccacag

SEQ ID NO: 2909226 - DNA, 25 bp, Homo sapien
ggaggctgatcaaccacaaacaact

SEQ ID NO: 2909227 - DNA, 25 bp, Homo sapien
gcaaatgctcttttcgcagaacaca

SEQ ID NO: 2909228 - DNA, 25 bp, Homo sapien
tcagtcttgaggaagccagtacatc

SEQ ID NO: 2909229 - DNA, 25 bp, Homo sapien
gcttctgggacttacgatccatcca

SEQ ID NO: 2909230 - DNA, 25 bp, Homo sapien
agcataacacttaggcccacccaaa

SEQ ID NO: 2909231 - DNA, 25 bp, Homo sapien
ggttagcataacacttaggcccacc

SEQ ID NO: 2909232 - DNA, 25 bp, Homo sapien
gaggttagcataacacttaggccca

SEQ ID NO: 2909233 - DNA, 25 bp, Homo sapien
ctgggaggttagcataacacttagg

SEQ ID NO: 2909234 - DNA, 25 bp, Homo sapien
tgttctgctggtcaaaagcctggtt

SEQ ID NO: 2909235 - DNA, 25 bp, Homo sapien
agctgtccaccagccacgggttggt

SEQ ID NO: 2909236 - DNA, 25 bp, Homo sapien
agactccagagcaactgtgggccca

SEQ ID NO: 2909237 - DNA, 25 bp, Homo sapien
tgtgggcccagattaagagccttgg

SEQ ID NO: 2909238 - DNA, 25 bp, Homo sapien
tccctggcagggcatatatgaattc

SEQ ID NO: 2909239 - DNA, 25 bp, Homo sapien
tgagaatgacctgcaaactccctgg

SEQ ID NO: 2909240 - DNA, 25 bp, Homo sapien
tgagacagccattgggccacttagc

SEQ ID NO: 2909241 - DNA, 25 bp, Homo sapien
cacctgtggtttctccagtggatca

SEQ ID NO: 2909242 - DNA, 25 bp, Homo sapien
cattggcttcgtgaaaaactgaccc

SEQ ID NO: 2909243 - DNA, 25 bp, Homo sapien
taagtaactaaaccatcagtgagag

SEQ ID NO: 2909244 - DNA, 25 bp, Homo sapien
cattcttcacccgtaaggaacgaca

SEQ ID NO: 2909245 - DNA, 25 bp, Homo sapien
gagattagccttttaccctgcattg

SEQ ID NO: 2909246 - DNA, 25 bp, Homo sapien
tgtgctcaaccaacagaaccctact

SEQ ID NO: 2909247 - DNA, 25 bp, Homo sapien
gaaaagactcagtatcgtcagcgac

SEQ ID NO: 2909248 - DNA, 25 bp, Homo sapien
taagtctgagataatggctccatcc

SEQ ID NO: 2909249 - DNA, 25 bp, Homo sapien
ccactaggagtttgggacaagagaa

SEQ ID NO: 2909250 - DNA, 25 bp, Homo sapien
cctgtgaaatcaatgatcctgtgtc

SEQ ID NO: 2909251 - DNA, 25 bp, Homo sapien
aatcctgtgaaatcaatgatcctgt

SEQ ID NO: 2909252 - DNA, 25 bp, Homo sapien
aatcaatgatcctgtgtcctatttc

SEQ ID NO: 2909253 - DNA, 25 bp, Homo sapien
tgtgaaatcaatgatcctgtgtcct

SEQ ID NO: 2909254 - DNA, 25 bp, Homo sapien
tggtttcttggagctgcgggctctt

SEQ ID NO: 2909255 - DNA, 25 bp, Homo sapien
ctggtttcttggagctgcgggctct

SEQ ID NO: 2909256 - DNA, 25 bp, Homo sapien
ggtttcttggagctgcgggctcttc

SEQ ID NO: 2909257 - DNA, 25 bp, Homo sapien
tgagtgcctgataaaccgacaaaca

SEQ ID NO: 2909258 - DNA, 25 bp, Homo sapien
taatcggcatgtcccagtggttact

SEQ ID NO: 2909259 - DNA, 25 bp, Homo sapien
tataagaaatccctgatgagcctgg

SEQ ID NO: 2909260 - DNA, 25 bp, Homo sapien
ccaagagcacgggacaggaaattgt

SEQ ID NO: 2909261 - DNA, 25 bp, Homo sapien
tgaacgtcaagctctcgaaggtggg

SEQ ID NO: 2909262 - DNA, 25 bp, Homo sapien
ggcctcccgcgtgacgaagtaactg

SEQ ID NO: 2909263 - DNA, 25 bp, Homo sapien
tgtccttggacatggccgagatgcg

SEQ ID NO: 2909264 - DNA, 25 bp, Homo sapien
gttgaaaggccggtagaactcgcgc

SEQ ID NO: 2909265 - DNA, 25 bp, Homo sapien
ggtaaggtacatagcccgggtctgc

SEQ ID NO: 2909266 - DNA, 25 bp, Homo sapien
taagccacgtgggtaaggtacatag

SEQ ID NO: 2909267 - DNA, 25 bp, Homo sapien
tataatctctgtcaatagataagcc

SEQ ID NO: 2909268 - DNA, 25 bp, Homo sapien
tctgtcaatagataagccacgtggg

SEQ ID NO: 2909269 - DNA, 25 bp, Homo sapien
ttataaatcaacagagaggcacggg

SEQ ID NO: 2909270 - DNA, 25 bp, Homo sapien
tcaggctacatcattggacgggaca

SEQ ID NO: 2909271 - DNA, 25 bp, Homo sapien
caccttggtagacgctgatgccgag

SEQ ID NO: 2909272 - DNA, 25 bp, Homo sapien
ggaattccaaagacgcatcaagctg

SEQ ID NO: 2909273 - DNA, 25 bp, Homo sapien
tcagaaagtagacagggcaagacca

SEQ ID NO: 2909274 - DNA, 25 bp, Homo sapien
tcagacccttgcagacccttatgag

SEQ ID NO: 2909275 - DNA, 25 bp, Homo sapien
ggaggaagtccaaaacacgtgccag

SEQ ID NO: 2909276 - DNA, 25 bp, Homo sapien
tgttcgtgactaaatgaccctcctt

SEQ ID NO: 2909277 - DNA, 25 bp, Homo sapien
aactgaggaccttgatgaccaggga

SEQ ID NO: 2909278 - DNA, 25 bp, Homo sapien
tgaggaccttgatgaccagggagcc

SEQ ID NO: 2909279 - DNA, 25 bp, Homo sapien
gaaactgaggaccttgatgaccagg

SEQ ID NO: 2909280 - DNA, 25 bp, Homo sapien
ggaaactgaggaccttgatgaccag

SEQ ID NO: 2909281 - DNA, 25 bp, Homo sapien
cacagctgccaaagtaagagtcggg

SEQ ID NO: 2909282 - DNA, 25 bp, Homo sapien
ctgccaaagtaagagtcgggaacat

SEQ ID NO: 2909283 - DNA, 25 bp, Homo sapien
cagctgccaaagtaagagtcgggaa

SEQ ID NO: 2909284 - DNA, 25 bp, Homo sapien
gctgccaaagtaagagtcgggaaca

SEQ ID NO: 2909285 - DNA, 25 bp, Homo sapien
agccttcggctggacttccttcttc

SEQ ID NO: 2909286 - DNA, 25 bp, Homo sapien
tcctccatcaagcttgcattcccgc

SEQ ID NO: 2909287 - DNA, 25 bp, Homo sapien
cgcacagcttcagccttcggctgga

SEQ ID NO: 2909288 - DNA, 25 bp, Homo sapien
ccatcaagcttgcattcccgcacag

SEQ ID NO: 2909289 - DNA, 25 bp, Homo sapien
tgttggaggtgatgctagcaaaatg

SEQ ID NO: 2909290 - DNA, 25 bp, Homo sapien
catgttggaggtgatgctagcaaaa

SEQ ID NO: 2909291 - DNA, 25 bp, Homo sapien
gaggtgatgctagcaaaatggaagg

SEQ ID NO: 2909292 - DNA, 25 bp, Homo sapien
tcatgttggaggtgatgctagcaaa

SEQ ID NO: 2909293 - DNA, 25 bp, Homo sapien
cgtaataacagatcattagacgcat

SEQ ID NO: 2909294 - DNA, 25 bp, Homo sapien
tgggagtcatgcctggtccagttaa

SEQ ID NO: 2909295 - DNA, 25 bp, Homo sapien
cagttagagacgcactgagcacgta

SEQ ID NO: 2909296 - DNA, 25 bp, Homo sapien
tccagctcattagagcagttagaga

SEQ ID NO: 2909297 - DNA, 25 bp, Homo sapien
aaagacactgcccacaatcctaagg

SEQ ID NO: 2909298 - DNA, 25 bp, Homo sapien
tcggattcttcacccaaagacactg

SEQ ID NO: 2909299 - DNA, 25 bp, Homo sapien
tgagatcatgttcggattcttcacc

SEQ ID NO: 2909300 - DNA, 25 bp, Homo sapien
ctaaggcacctctgagaggccccat

SEQ ID NO: 2909301 - DNA, 25 bp, Homo sapien
gtgctaggcccattgtcatcttttt

SEQ ID NO: 2909302 - DNA, 25 bp, Homo sapien
tctctaacttcatgtggcaataggc

SEQ ID NO: 2909303 - DNA, 25 bp, Homo sapien
gcaataggcgaggagggacctccat

SEQ ID NO: 2909304 - DNA, 25 bp, Homo sapien
gctcccaaatatctctagtgctagg

SEQ ID NO: 2909305 - DNA, 25 bp, Homo sapien
catacctgacatgggataaagtcct

SEQ ID NO: 2909306 - DNA, 25 bp, Homo sapien
acaatgaaccgtcccgcagaaaggg

SEQ ID NO: 2909307 - DNA, 25 bp, Homo sapien
tgacctactctttctcccggagaag

SEQ ID NO: 2909308 - DNA, 25 bp, Homo sapien
ggttactctgaccagcaagggccag

SEQ ID NO: 2909309 - DNA, 25 bp, Homo sapien
tatgtctctgaaaccacatgacctc

SEQ ID NO: 2909310 - DNA, 25 bp, Homo sapien
acatgacctcacaggtcttgggaac

SEQ ID NO: 2909311 - DNA, 25 bp, Homo sapien
tcgcgcccggatgggatggcttctc

SEQ ID NO: 2909312 - DNA, 25 bp, Homo sapien
tgtaatatataccaagcttagctta

SEQ ID NO: 2909313 - DNA, 25 bp, Homo sapien
caaggtcgctggacctggcatgcat

SEQ ID NO: 2909314 - DNA, 25 bp, Homo sapien
ggccatgtgtgccatttagctgcag

SEQ ID NO: 2909315 - DNA, 25 bp, Homo sapien
ggacaatcgtggcttgttctcaggg

SEQ ID NO: 2909316 - DNA, 25 bp, Homo sapien
gccatttagctgcagaattgaagaa

SEQ ID NO: 2909317 - DNA, 25 bp, Homo sapien
cattctgaactcgatcccctgtaca

SEQ ID NO: 2909318 - DNA, 25 bp, Homo sapien
accaacacgcaatagggaggtacca

SEQ ID NO: 2909319 - DNA, 25 bp, Homo sapien
gttccttcagcaccaacacgcaata

SEQ ID NO: 2909320 - DNA, 25 bp, Homo sapien
tgtgaggctaagcaatcgtaaggtc

SEQ ID NO: 2909321 - DNA, 25 bp, Homo sapien
agtagcataactgaatttcctcatc

SEQ ID NO: 2909322 - DNA, 25 bp, Homo sapien
gcagtagcataactgaatttcctca

SEQ ID NO: 2909323 - DNA, 25 bp, Homo sapien
ggctggcctgtcccatgcagcttca

SEQ ID NO: 2909324 - DNA, 25 bp, Homo sapien
ccacaacccagtcccggctggcctg

SEQ ID NO: 2909325 - DNA, 25 bp, Homo sapien
acaacccagtcccggctggcctgtc

SEQ ID NO: 2909326 - DNA, 25 bp, Homo sapien
ccggctggcctgtcccatgcagctt

SEQ ID NO: 2909327 - DNA, 25 bp, Homo sapien
gagtcaattctggaagtaggtttcc

SEQ ID NO: 2909328 - DNA, 25 bp, Homo sapien
cattctacccgagtcaattctggaa

SEQ ID NO: 2909329 - DNA, 25 bp, Homo sapien
tttcctaagacatgatactcgttgc

SEQ ID NO: 2909330 - DNA, 25 bp, Homo sapien
gatactcgttgccattctacccgag

SEQ ID NO: 2909331 - DNA, 25 bp, Homo sapien
catactatactgcaggcaagcaggg

SEQ ID NO: 2909332 - DNA, 25 bp, Homo sapien
aggctgcatactatactgcaggcaa

SEQ ID NO: 2909333 - DNA, 25 bp, Homo sapien
tcttttttcaatgccccttgagttg

SEQ ID NO: 2909334 - DNA, 25 bp, Homo sapien
tttcaatgccccttgagttgtaagt

SEQ ID NO: 2909335 - DNA, 25 bp, Homo sapien
gccagccagggaaatacgaatctaa

SEQ ID NO: 2909336 - DNA, 25 bp, Homo sapien
gaagtaaatagggttgacagatgct

SEQ ID NO: 2909337 - DNA, 25 bp, Homo sapien
gattgggagcgatctcagcatctgt

SEQ ID NO: 2909338 - DNA, 25 bp, Homo sapien
gctggtaaaatacaagccagccagg

SEQ ID NO: 2909339 - DNA, 25 bp, Homo sapien
cataggaatcgccagagagggagca

SEQ ID NO: 2909340 - DNA, 25 bp, Homo sapien
cattcattgtctgccccataggaat

SEQ ID NO: 2909341 - DNA, 25 bp, Homo sapien
gaggaaataggtaggtgtcagtatc

SEQ ID NO: 2909342 - DNA, 25 bp, Homo sapien
gtatcttgtggctggtcattcattg

SEQ ID NO: 2909343 - DNA, 25 bp, Homo sapien
ctcccaggtggtaggtcaagatcag

SEQ ID NO: 2909344 - DNA, 25 bp, Homo sapien
tcccaggtggtaggtcaagatcaga

SEQ ID NO: 2909345 - DNA, 25 bp, Homo sapien
gaatgctgttccagtctcggctttt

SEQ ID NO: 2909346 - DNA, 25 bp, Homo sapien
tggaatgctgttccagtctcggctt

SEQ ID NO: 2909347 - DNA, 25 bp, Homo sapien
tccagtctcggcttttggaatctcc

SEQ ID NO: 2909348 - DNA, 25 bp, Homo sapien
gcttttggaatctccattgttcttc

SEQ ID NO: 2909349 - DNA, 25 bp, Homo sapien
tacagcgtgcccttttagccttgcc

SEQ ID NO: 2909350 - DNA, 25 bp, Homo sapien
gccgtccacagacagcttgagtgtt

SEQ ID NO: 2909351 - DNA, 25 bp, Homo sapien
cagtgttcagacgttcccagagtta

SEQ ID NO: 2909352 - DNA, 25 bp, Homo sapien
cggactcaaagcatgaatgcgggag

SEQ ID NO: 2909353 - DNA, 25 bp, Homo sapien
tcctcctctgaacacggcttttcaa

SEQ ID NO: 2909354 - DNA, 25 bp, Homo sapien
tctgatgcccaataggacctcctgc

SEQ ID NO: 2909355 - DNA, 25 bp, Homo sapien
ctctgatgcccaataggacctcctg

SEQ ID NO: 2909356 - DNA, 25 bp, Homo sapien
acggcttttcaatcttagctaggca

SEQ ID NO: 2909357 - DNA, 25 bp, Homo sapien
tctggtcaccctccatggtcatcca

SEQ ID NO: 2909358 - DNA, 25 bp, Homo sapien
cttggctaggagaggtaggtctgta

SEQ ID NO: 2909359 - DNA, 25 bp, Homo sapien
tggctaggagaggtaggtctgtagc

SEQ ID NO: 2909360 - DNA, 25 bp, Homo sapien
acttctggtcaccctccatggtcat

SEQ ID NO: 2909361 - DNA, 25 bp, Homo sapien
taaccattatcctgaattagtgtgg

SEQ ID NO: 2909362 - DNA, 25 bp, Homo sapien
tatcctgaattagtgtggattgtcc

SEQ ID NO: 2909363 - DNA, 25 bp, Homo sapien
ttagtgtggattgtcctgttctcat

SEQ ID NO: 2909364 - DNA, 25 bp, Homo sapien
tctctccctggagtaaccattatcc

SEQ ID NO: 2909365 - DNA, 25 bp, Homo sapien
ggagagtctcataccgcctccactg

SEQ ID NO: 2909366 - DNA, 25 bp, Homo sapien
aagcttcaagtccacaagggagagt

SEQ ID NO: 2909367 - DNA, 25 bp, Homo sapien
tcccatgtgccttcgaggctgcttc

SEQ ID NO: 2909368 - DNA, 25 bp, Homo sapien
taaaaatgcccttgctattggcttc

SEQ ID NO: 2909369 - DNA, 25 bp, Homo sapien
cctgaaattattgggtgcgaaatgc

SEQ ID NO: 2909370 - DNA, 25 bp, Homo sapien
gaaacggctgggctgaacaatcaca

SEQ ID NO: 2909371 - DNA, 25 bp, Homo sapien
tctctaatttaaggcagagagagcc

SEQ ID NO: 2909372 - DNA, 25 bp, Homo sapien
cttcaactaggcctgctaaagtggt

SEQ ID NO: 2909373 - DNA, 25 bp, Homo sapien
gtagcgagtactatccagttgccaa

SEQ ID NO: 2909374 - DNA, 25 bp, Homo sapien
gacagctatttagaggcccacgact

SEQ ID NO: 2909375 - DNA, 25 bp, Homo sapien
cagctggtccagaggaatagtagcg

SEQ ID NO: 2909376 - DNA, 25 bp, Homo sapien
taagaactccctcatgacagctatt

SEQ ID NO: 2909377 - DNA, 25 bp, Homo sapien
cagagctggctgtcatagaatggct

SEQ ID NO: 2909378 - DNA, 25 bp, Homo sapien
ttggctgtagccagattttgaagag

SEQ ID NO: 2909379 - DNA, 25 bp, Homo sapien
tgggcttggctgtagccagattttg

SEQ ID NO: 2909380 - DNA, 25 bp, Homo sapien
agagctggctgtcatagaatggcta

SEQ ID NO: 2909381 - DNA, 25 bp, Homo sapien
gtatgttagtcatggagttaggtgt

SEQ ID NO: 2909382 - DNA, 25 bp, Homo sapien
ctgctgtatgttagtcatggagtta

SEQ ID NO: 2909383 - DNA, 25 bp, Homo sapien
ggtgttggagcacaaagatgttctc

SEQ ID NO: 2909384 - DNA, 25 bp, Homo sapien
aggtgttggagcacaaagatgttct

SEQ ID NO: 2909385 - DNA, 25 bp, Homo sapien
tgtcctttccaaggtgtggctggga

SEQ ID NO: 2909386 - DNA, 25 bp, Homo sapien
cttccactccaaaaaagttgataca

SEQ ID NO: 2909387 - DNA, 25 bp, Homo sapien
tacccccaattatccttccactcca

SEQ ID NO: 2909388 - DNA, 25 bp, Homo sapien
gtcctttccaaggtgtggctgggag

SEQ ID NO: 2909389 - DNA, 25 bp, Homo sapien
ggcaggctggatccataagaagacc

SEQ ID NO: 2909390 - DNA, 25 bp, Homo sapien
tacccatatctctcatctgggtcac

SEQ ID NO: 2909391 - DNA, 25 bp, Homo sapien
cactgtcagtacttcttaggctgcc

SEQ ID NO: 2909392 - DNA, 25 bp, Homo sapien
ttccaaaccctatgtctacacaggc

SEQ ID NO: 2909393 - DNA, 25 bp, Homo sapien
gagaatcactgccaatgaggcaaac

SEQ ID NO: 2909394 - DNA, 25 bp, Homo sapien
tcaataaacagtgaaatgaggccag

SEQ ID NO: 2909395 - DNA, 25 bp, Homo sapien
tgcgccaagtgcaatcatatcccag

SEQ ID NO: 2909396 - DNA, 25 bp, Homo sapien
taaaggtcgaatgccagtaatagag

SEQ ID NO: 2909397 - DNA, 25 bp, Homo sapien
gactctatctgatgacaaagcggct

SEQ ID NO: 2909398 - DNA, 25 bp, Homo sapien
gatgaaaacttggtgaattgcgcca

SEQ ID NO: 2909399 - DNA, 25 bp, Homo sapien
ggtgcctggtgggattgaaatgacg

SEQ ID NO: 2909400 - DNA, 25 bp, Homo sapien
ttaacaccctctgggcaatgggtga

SEQ ID NO: 2909401 - DNA, 25 bp, Homo sapien
aaatgacgaggatctaagtgatgca

SEQ ID NO: 2909402 - DNA, 25 bp, Homo sapien
caatgggtgatggatagaaaccaga

SEQ ID NO: 2909403 - DNA, 25 bp, Homo sapien
tatttaacggccaaatccatttcac

SEQ ID NO: 2909404 - DNA, 25 bp, Homo sapien
tttaacggccaaatccatttcacag

SEQ ID NO: 2909405 - DNA, 25 bp, Homo sapien
ttatttaacggccaaatccatttca

SEQ ID NO: 2909406 - DNA, 25 bp, Homo sapien
taacggccaaatccatttcacagtc

SEQ ID NO: 2909407 - DNA, 25 bp, Homo sapien
ggtgtgggccgaagatatgctcatg

SEQ ID NO: 2909408 - DNA, 25 bp, Homo sapien
agggtgtgggccgaagatatgctca

SEQ ID NO: 2909409 - DNA, 25 bp, Homo sapien
tgggccgaagatatgctcatgtggt

SEQ ID NO: 2909410 - DNA, 25 bp, Homo sapien
tgtgggccgaagatatgctcatgtg

SEQ ID NO: 2909411 - DNA, 25 bp, Homo sapien
gtaatggctgtcctcatccaccttc

SEQ ID NO: 2909412 - DNA, 25 bp, Homo sapien
tgcctcaggaaagtaatggctgtcc

SEQ ID NO: 2909413 - DNA, 25 bp, Homo sapien
caggaaagtaatggctgtcctcatc

SEQ ID NO: 2909414 - DNA, 25 bp, Homo sapien
taactgcctcaggaaagtaatggct

SEQ ID NO: 2909415 - DNA, 25 bp, Homo sapien
ggcagtacaattcccatttccgtat

SEQ ID NO: 2909416 - DNA, 25 bp, Homo sapien
cgagcctgtgacttcggagggcata

SEQ ID NO: 2909417 - DNA, 25 bp, Homo sapien
tcagactcttgttccgagcctgtga

SEQ ID NO: 2909418 - DNA, 25 bp, Homo sapien
tattccgcactcacgggcagtacaa

SEQ ID NO: 2909419 - DNA, 25 bp, Homo sapien
caaatctggaattctgctggaaagt

SEQ ID NO: 2909420 - DNA, 25 bp, Homo sapien
aaagtgtgcacatttggatcattta

SEQ ID NO: 2909421 - DNA, 25 bp, Homo sapien
ttccaaatctggaattctgctggaa

SEQ ID NO: 2909422 - DNA, 25 bp, Homo sapien
ccaaatctggaattctgctggaaag

SEQ ID NO: 2909423 - DNA, 25 bp, Homo sapien
tgcaagagaacctcggaaggaacag

SEQ ID NO: 2909424 - DNA, 25 bp, Homo sapien
ggtaacaacctctactggaagctaa

SEQ ID NO: 2909425 - DNA, 25 bp, Homo sapien
ttaaagactgcggtaacaacctcta

SEQ ID NO: 2909426 - DNA, 25 bp, Homo sapien
aagctaagaaaagtgctggctctcc

SEQ ID NO: 2909427 - DNA, 25 bp, Homo sapien
tgctcccagatgctcattaggagac

SEQ ID NO: 2909428 - DNA, 25 bp, Homo sapien
taattgtgcttctgatgagatggcc

SEQ ID NO: 2909429 - DNA, 25 bp, Homo sapien
gaaagcatgtatcaagttgctccca

SEQ ID NO: 2909430 - DNA, 25 bp, Homo sapien
gactttagtaataattgtgcttctg

SEQ ID NO: 2909431 - DNA, 25 bp, Homo sapien
ctagacggcatgcatatagggacag

SEQ ID NO: 2909432 - DNA, 25 bp, Homo sapien
cttcttctcaattgcatcaactgca

SEQ ID NO: 2909433 - DNA, 25 bp, Homo sapien
ggcatgcatatagggacagtggccc

SEQ ID NO: 2909434 - DNA, 25 bp, Homo sapien
ccgtccttcttctcaattgcatcaa

SEQ ID NO: 2909435 - DNA, 25 bp, Homo sapien
gaggacaacatttgcaggcgtctgc

SEQ ID NO: 2909436 - DNA, 25 bp, Homo sapien
aagaaccagccagacaggtagattg

SEQ ID NO: 2909437 - DNA, 25 bp, Homo sapien
cattgtactcagagtcttccagccc

SEQ ID NO: 2909438 - DNA, 25 bp, Homo sapien
ccatctcctttccagggcattgtac

SEQ ID NO: 2909439 - DNA, 25 bp, Homo sapien
tggagtagaagggctctcgggatcc

SEQ ID NO: 2909440 - DNA, 25 bp, Homo sapien
gagtagaagggctctcgggatccca

SEQ ID NO: 2909441 - DNA, 25 bp, Homo sapien
agtagaagggctctcgggatcccag

SEQ ID NO: 2909442 - DNA, 25 bp, Homo sapien
gtagaagggctctcgggatcccagg

SEQ ID NO: 2909443 - DNA, 25 bp, Homo sapien
caggtgctagagacaagatcactca

SEQ ID NO: 2909444 - DNA, 25 bp, Homo sapien
tgtgtcccctcagcgtactttgacc

SEQ ID NO: 2909445 - DNA, 25 bp, Homo sapien
cagggatcccaaaggagtccctcca

SEQ ID NO: 2909446 - DNA, 25 bp, Homo sapien
tcagcgtactttgaccaggtgctag

SEQ ID NO: 2909447 - DNA, 25 bp, Homo sapien
tcatgggacacccacatcaggctct

SEQ ID NO: 2909448 - DNA, 25 bp, Homo sapien
catgattttctctgcggtgctcctg

SEQ ID NO: 2909449 - DNA, 25 bp, Homo sapien
gagtcatggctgtcggatctgtttc

SEQ ID NO: 2909450 - DNA, 25 bp, Homo sapien
gaacatccgcattcctgagtcatgg

SEQ ID NO: 2909451 - DNA, 25 bp, Homo sapien
tcctctgaactgcatcctccgggga

SEQ ID NO: 2909452 - DNA, 25 bp, Homo sapien
gactcatctggaaatcaaatctcct

SEQ ID NO: 2909453 - DNA, 25 bp, Homo sapien
gagcacgacacagcccatcaagtct

SEQ ID NO: 2909454 - DNA, 25 bp, Homo sapien
gcatcctccggggatagttcagaaa

SEQ ID NO: 2909455 - DNA, 25 bp, Homo sapien
gaagggaagactccgagagcgccca

SEQ ID NO: 2909456 - DNA, 25 bp, Homo sapien
tctgcaattggcaaggtgtctggga

SEQ ID NO: 2909457 - DNA, 25 bp, Homo sapien
gctattcctcttacaaaccagctct

SEQ ID NO: 2909458 - DNA, 25 bp, Homo sapien
ggcctcctctgtgccgagctagctg

SEQ ID NO: 2909459 - DNA, 25 bp, Homo sapien
atgctgatctgcaattggcaaggtg

SEQ ID NO: 2909460 - DNA, 25 bp, Homo sapien
cagaagtagatggaattgtctaggg

SEQ ID NO: 2909461 - DNA, 25 bp, Homo sapien
aaatatagttgtgaattgaagccac

SEQ ID NO: 2909462 - DNA, 25 bp, Homo sapien
tgggggctgaaccctatagaattcc

SEQ ID NO: 2909463 - DNA, 25 bp, Homo sapien
aaatccagttaccaaattgtatata

SEQ ID NO: 2909464 - DNA, 25 bp, Homo sapien
tcagtgagcaaaacatagtaaatgt

SEQ ID NO: 2909465 - DNA, 25 bp, Homo sapien
ggctaatgtgtatatctctaatgtc

SEQ ID NO: 2909466 - DNA, 25 bp, Homo sapien
gaatgtgcagcaattgtccaagtga

SEQ ID NO: 2909467 - DNA, 25 bp, Homo sapien
aataagttgtggctcaggtaggaat

SEQ ID NO: 2909468 - DNA, 25 bp, Homo sapien
gctttccagccatgattggcaccat

SEQ ID NO: 2909469 - DNA, 25 bp, Homo sapien
gtcgtgtctccaagatttctgtgca

SEQ ID NO: 2909470 - DNA, 25 bp, Homo sapien
gcttccacactgcttttctgtcgtg

SEQ ID NO: 2909471 - DNA, 25 bp, Homo sapien
tgcattgctttccagccatgattgg

SEQ ID NO: 2909472 - DNA, 25 bp, Homo sapien
cctgtgggacttataatcaggttcc

SEQ ID NO: 2909473 - DNA, 25 bp, Homo sapien
gttatcagcagggaagtgttctgag

SEQ ID NO: 2909474 - DNA, 25 bp, Homo sapien
caacaatgaccttttatcccgtttg

SEQ ID NO: 2909475 - DNA, 25 bp, Homo sapien
acaatatggcattgtcctgtgggac

SEQ ID NO: 2909476 - DNA, 25 bp, Homo sapien
tgtgtgtttacccatgactcccgct

SEQ ID NO: 2909477 - DNA, 25 bp, Homo sapien
gagtcgttattccactcccaagcct

SEQ ID NO: 2909478 - DNA, 25 bp, Homo sapien
aggcttaggaggttggaaggctctc

SEQ ID NO: 2909479 - DNA, 25 bp, Homo sapien
actttcagccatcccgggacgtgtg

SEQ ID NO: 2909480 - DNA, 25 bp, Homo sapien
gcgttcttggttaggatgactccaa

SEQ ID NO: 2909481 - DNA, 25 bp, Homo sapien
ccattatcgtggagttttaggcaga

SEQ ID NO: 2909482 - DNA, 25 bp, Homo sapien
ttagctgaagccaccaacaaagata

SEQ ID NO: 2909483 - DNA, 25 bp, Homo sapien
aattcctagaggtaatctttgccag

SEQ ID NO: 2909484 - DNA, 25 bp, Homo sapien
ttctcatttgggctgacattggaca

SEQ ID NO: 2909485 - DNA, 25 bp, Homo sapien
catgcaatatttcagattccacgga

SEQ ID NO: 2909486 - DNA, 25 bp, Homo sapien
aatccactcaggtgatgttaacgcc

SEQ ID NO: 2909487 - DNA, 25 bp, Homo sapien
tgttaacgccataacagagtcagca

SEQ ID NO: 2909488 - DNA, 25 bp, Homo sapien
tcagggggacgggagaaacacctgc

SEQ ID NO: 2909489 - DNA, 25 bp, Homo sapien
cactatcatggttactgctggaggt

SEQ ID NO: 2909490 - DNA, 25 bp, Homo sapien
gaggtgacaccaaagtcagggggac

SEQ ID NO: 2909491 - DNA, 25 bp, Homo sapien
cctcttcctattttccagctgacaa

SEQ ID NO: 2909492 - DNA, 25 bp, Homo sapien
ctgtctgaataacattctggtttac

SEQ ID NO: 2909493 - DNA, 25 bp, Homo sapien
tagaggcatccccctctggcctgtt

SEQ ID NO: 2909494 - DNA, 25 bp, Homo sapien
tctggtttacccatagaggcatccc

SEQ ID NO: 2909495 - DNA, 25 bp, Homo sapien
ctctggcctgttcagaggaagctga

SEQ ID NO: 2909496 - DNA, 25 bp, Homo sapien
ttggcagccacatgaatattgcatc

SEQ ID NO: 2909497 - DNA, 25 bp, Homo sapien
gacacagcgcagctgcacttaattt

SEQ ID NO: 2909498 - DNA, 25 bp, Homo sapien
gagctaattagtccatatgcaggac

SEQ ID NO: 2909499 - DNA, 25 bp, Homo sapien
taattagtccatatgcaggacacag

SEQ ID NO: 2909500 - DNA, 25 bp, Homo sapien
ttagtccatatgcaggacacagcgc

SEQ ID NO: 2909501 - DNA, 25 bp, Homo sapien
gaagctgataaaccagagaggactg

SEQ ID NO: 2909502 - DNA, 25 bp, Homo sapien
tgacaagaaccaggcggactgctct

SEQ ID NO: 2909503 - DNA, 25 bp, Homo sapien
aatcggaatcatgtgggtgtcccgc

SEQ ID NO: 2909504 - DNA, 25 bp, Homo sapien
ctgggtgctgaatctactagtcttg

SEQ ID NO: 2909505 - DNA, 25 bp, Homo sapien
agagtttgttccttcggagtctgga

SEQ ID NO: 2909506 - DNA, 25 bp, Homo sapien
caccgtgagtgtaatagcttttaaa

SEQ ID NO: 2909507 - DNA, 25 bp, Homo sapien
tggtctcggcgacttcaagaaagaa

SEQ ID NO: 2909508 - DNA, 25 bp, Homo sapien
tccggtgggttcgtacactcgcttg

SEQ ID NO: 2909509 - DNA, 25 bp, Homo sapien
tctcccggttgtccagagaaccaag

SEQ ID NO: 2909510 - DNA, 25 bp, Homo sapien
gagaaccaaggactattattccact

SEQ ID NO: 2909511 - DNA, 25 bp, Homo sapien
attaacggttgggtgcttatcgtgg

SEQ ID NO: 2909512 - DNA, 25 bp, Homo sapien
tcgtgggcctcagaaaatgcaattc

SEQ ID NO: 2909513 - DNA, 25 bp, Homo sapien
aagcctttaacactgttgctgctag

SEQ ID NO: 2909514 - DNA, 25 bp, Homo sapien
ttgctgctagcatcacttgatcatc

SEQ ID NO: 2909515 - DNA, 25 bp, Homo sapien
gcgttaaagcctttaacactgttgc

SEQ ID NO: 2909516 - DNA, 25 bp, Homo sapien
actgttgctgctagcatcacttgat

SEQ ID NO: 2909517 - DNA, 25 bp, Homo sapien
ccaaggcatttagagacactttctc

SEQ ID NO: 2909518 - DNA, 25 bp, Homo sapien
ctagactgtgcccaaggcatttaga

SEQ ID NO: 2909519 - DNA, 25 bp, Homo sapien
tgtgcccaaggcatttagagacact

SEQ ID NO: 2909520 - DNA, 25 bp, Homo sapien
gactgtgcccaaggcatttagagac

SEQ ID NO: 2909521 - DNA, 25 bp, Homo sapien
ggcaacaggttactttcttctggaa

SEQ ID NO: 2909522 - DNA, 25 bp, Homo sapien
cagttcacatttgcagctggtacct

SEQ ID NO: 2909523 - DNA, 25 bp, Homo sapien
gaagggctctctcgcttctgccagt

SEQ ID NO: 2909524 - DNA, 25 bp, Homo sapien
gaacgatttctgcttgtggcaacag

SEQ ID NO: 2909525 - DNA, 25 bp, Homo sapien
gagtggtttgtagtgaagaccgctc

SEQ ID NO: 2909526 - DNA, 25 bp, Homo sapien
taggaggggccttaactgattgttc

SEQ ID NO: 2909527 - DNA, 25 bp, Homo sapien
ttaactgattgttcggatttggcca

SEQ ID NO: 2909528 - DNA, 25 bp, Homo sapien
aagggtattcaagagtggtttgtag

SEQ ID NO: 2909529 - DNA, 25 bp, Homo sapien
tccatagatgagcaaatagagactt

SEQ ID NO: 2909530 - DNA, 25 bp, Homo sapien
tgaagctttccatatcgacccattc

SEQ ID NO: 2909531 - DNA, 25 bp, Homo sapien
catagatgagcaaatagagacttgt

SEQ ID NO: 2909532 - DNA, 25 bp, Homo sapien
tatcgacccattccatagatgagca

SEQ ID NO: 2909533 - DNA, 25 bp, Homo sapien
taacaggatctagtgtatccctgca

SEQ ID NO: 2909534 - DNA, 25 bp, Homo sapien
aatctctgtctggttgtagaagtgc

SEQ ID NO: 2909535 - DNA, 25 bp, Homo sapien
taacataggccaattatcagcaggc

SEQ ID NO: 2909536 - DNA, 25 bp, Homo sapien
gcactgggagttgcctattttgcag

SEQ ID NO: 2909537 - DNA, 25 bp, Homo sapien
ttaacaatgcatccaaccgaacaaa

SEQ ID NO: 2909538 - DNA, 25 bp, Homo sapien
ttgagtgatgggctttgcactgtct

SEQ ID NO: 2909539 - DNA, 25 bp, Homo sapien
aaccgaacaaaacaaggaggtgcag

SEQ ID NO: 2909540 - DNA, 25 bp, Homo sapien
ctctggttgtggagaggtttcttga

SEQ ID NO: 2909541 - DNA, 25 bp, Homo sapien
gtctctggctccaaaagtggtagga

SEQ ID NO: 2909542 - DNA, 25 bp, Homo sapien
tggtttaagcgactcttgtgcccca

SEQ ID NO: 2909543 - DNA, 25 bp, Homo sapien
ccccgccagtagcacgaattacagg

SEQ ID NO: 2909544 - DNA, 25 bp, Homo sapien
acctgtctctggctccaaaagtggt

SEQ ID NO: 2909545 - DNA, 25 bp, Homo sapien
tctcagacaatctcacccaatgtgg

SEQ ID NO: 2909546 - DNA, 25 bp, Homo sapien
ttagcttcaggcaaggctggaacca

SEQ ID NO: 2909547 - DNA, 25 bp, Homo sapien
cagtaaaaaggaagcatagaggtgc

SEQ ID NO: 2909548 - DNA, 25 bp, Homo sapien
tggaaccagggctccaactaggttg

SEQ ID NO: 2909549 - DNA, 25 bp, Homo sapien
tagctggagattatacacattgtaa

SEQ ID NO: 2909550 - DNA, 25 bp, Homo sapien
gatttggtcatgcaagctttgtaac

SEQ ID NO: 2909551 - DNA, 25 bp, Homo sapien
gggaacacaattcctcccagggcca

SEQ ID NO: 2909552 - DNA, 25 bp, Homo sapien
tctctttgaaggcttgcagaccatg

SEQ ID NO: 2909553 - DNA, 25 bp, Homo sapien
atatcaaggtgtgtctgtgcctcat

SEQ ID NO: 2909554 - DNA, 25 bp, Homo sapien
tccttaacacatatcaaggtgtgtc

SEQ ID NO: 2909555 - DNA, 25 bp, Homo sapien
ttctcatccttaacacatatcaagg

SEQ ID NO: 2909556 - DNA, 25 bp, Homo sapien
tttcattctcatccttaacacatat

SEQ ID NO: 2909557 - DNA, 25 bp, Homo sapien
ctatggtggctgtagaggataaaat

SEQ ID NO: 2909558 - DNA, 25 bp, Homo sapien
cagcacatgacttcagctggctggc

SEQ ID NO: 2909559 - DNA, 25 bp, Homo sapien
gctggccagagctagtcctgagctc

SEQ ID NO: 2909560 - DNA, 25 bp, Homo sapien
gaggataaaatgagaatccagagac

SEQ ID NO: 2909561 - DNA, 25 bp, Homo sapien
gccaaggtgatgaacgtagtccact

SEQ ID NO: 2909562 - DNA, 25 bp, Homo sapien
gatgaacgtagtccactgtccatca

SEQ ID NO: 2909563 - DNA, 25 bp, Homo sapien
ggtgatgaacgtagtccactgtcca

SEQ ID NO: 2909564 - DNA, 25 bp, Homo sapien
acagccaaggtgatgaacgtagtcc

SEQ ID NO: 2909565 - DNA, 25 bp, Homo sapien
gcctgttctatgggtgcccatgaca

SEQ ID NO: 2909566 - DNA, 25 bp, Homo sapien
cctgttctatgggtgcccatgacat

SEQ ID NO: 2909567 - DNA, 25 bp, Homo sapien
cactgacaataaaacagctgtcact

SEQ ID NO: 2909568 - DNA, 25 bp, Homo sapien
ggacaggaacgctgacgcctggcat

SEQ ID NO: 2909569 - DNA, 25 bp, Homo sapien
ccttctgtacagcaacagatacaga

SEQ ID NO: 2909570 - DNA, 25 bp, Homo sapien
agctgtcactgccttctgtacagca

SEQ ID NO: 2909571 - DNA, 25 bp, Homo sapien
gttcatccatcgcaatttggcgact

SEQ ID NO: 2909572 - DNA, 25 bp, Homo sapien
catccatcgcaatttggcgactggc

SEQ ID NO: 2909573 - DNA, 25 bp, Homo sapien
ctggttcatccatcgcaatttggcg

SEQ ID NO: 2909574 - DNA, 25 bp, Homo sapien
tccatcgcaatttggcgactggcat

SEQ ID NO: 2909575 - DNA, 25 bp, Homo sapien
tatctcccgagaatctttgagaaac

SEQ ID NO: 2909576 - DNA, 25 bp, Homo sapien
tgccatctccggtatctcccgagaa

SEQ ID NO: 2909577 - DNA, 25 bp, Homo sapien
tagtcacaggaaagtccacctttta

SEQ ID NO: 2909578 - DNA, 25 bp, Homo sapien
cttttaaaaccgtccactctgccat

SEQ ID NO: 2909579 - DNA, 25 bp, Homo sapien
taccgtaggcttcacaactacattc

SEQ ID NO: 2909580 - DNA, 25 bp, Homo sapien
tgaacagccaatggggtggctagtt

SEQ ID NO: 2909581 - DNA, 25 bp, Homo sapien
cgtaggcttcacaactacattctga

SEQ ID NO: 2909582 - DNA, 25 bp, Homo sapien
cagccaatggggtggctagttctcc

SEQ ID NO: 2909583 - DNA, 25 bp, Homo sapien
taacgaatcttaagtgtgcttcccc

SEQ ID NO: 2909584 - DNA, 25 bp, Homo sapien
gcataaccaagcctcagtgaacctc

SEQ ID NO: 2909585 - DNA, 25 bp, Homo sapien
ttgtaccacagccaagaatgtggca

SEQ ID NO: 2909586 - DNA, 25 bp, Homo sapien
acatgccagatgatgttccaagaca

SEQ ID NO: 2909587 - DNA, 25 bp, Homo sapien
gtggatgccaaagccaacaagtgcc

SEQ ID NO: 2909588 - DNA, 25 bp, Homo sapien
cagaagacaaccacatgcctgtgtt

SEQ ID NO: 2909589 - DNA, 25 bp, Homo sapien
gccaatgtcaataacctaatcaggg

SEQ ID NO: 2909590 - DNA, 25 bp, Homo sapien
atcgtcaggctcccaactgccgagt

SEQ ID NO: 2909591 - DNA, 25 bp, Homo sapien
aaatagcataaatctggctgaagca

SEQ ID NO: 2909592 - DNA, 25 bp, Homo sapien
tcttcagacacaatggttctcacca

SEQ ID NO: 2909593 - DNA, 25 bp, Homo sapien
tctgtaagcagaataaattccagac

SEQ ID NO: 2909594 - DNA, 25 bp, Homo sapien
ggccatggaacagtaattctcttca

SEQ ID NO: 2909595 - DNA, 25 bp, Homo sapien
cagcttccatatgtgtcagtgcagt

SEQ ID NO: 2909596 - DNA, 25 bp, Homo sapien
ctttccagtagaccaaaatagtaca

SEQ ID NO: 2909597 - DNA, 25 bp, Homo sapien
tttccaactatgctgtaatgaaggg

SEQ ID NO: 2909598 - DNA, 25 bp, Homo sapien
cctctgattttgtattacagggatt

SEQ ID NO: 2909599 - DNA, 25 bp, Homo sapien
gttttccgctggtttcctgctttgc

SEQ ID NO: 2909600 - DNA, 25 bp, Homo sapien
ccttgggacgtcctctgggacctct

SEQ ID NO: 2909601 - DNA, 25 bp, Homo sapien
cttctggataactagttcatgggct

SEQ ID NO: 2909602 - DNA, 25 bp, Homo sapien
tgttgttgtttggctgcataaagat

SEQ ID NO: 2909603 - DNA, 25 bp, Homo sapien
tgccagggcttgcttacacgtacga

SEQ ID NO: 2909604 - DNA, 25 bp, Homo sapien
caaactgttttggttgaactgctga

SEQ ID NO: 2909605 - DNA, 25 bp, Homo sapien
cacgtacgagctccttagatgaggt

SEQ ID NO: 2909606 - DNA, 25 bp, Homo sapien
cattgcttgttaccgtgcagggtcc

SEQ ID NO: 2909607 - DNA, 25 bp, Homo sapien
ggaaaataccacagccttatctcag

SEQ ID NO: 2909608 - DNA, 25 bp, Homo sapien
ctttgatcaggttggccgtttgaag

SEQ ID NO: 2909609 - DNA, 25 bp, Homo sapien
attgtggaatagcagggaaaatacc

SEQ ID NO: 2909610 - DNA, 25 bp, Homo sapien
ccgtttgaagggatttggcacagaa

SEQ ID NO: 2909611 - DNA, 25 bp, Homo sapien
cgggaactgtgagattagtggtcaa

SEQ ID NO: 2909612 - DNA, 25 bp, Homo sapien
gattggtcaacatcagcgggaactg

SEQ ID NO: 2909613 - DNA, 25 bp, Homo sapien
agttttccttacatcatcggattgg

SEQ ID NO: 2909614 - DNA, 25 bp, Homo sapien
tagtggtcaaatatgcagacttgga

SEQ ID NO: 2909615 - DNA, 25 bp, Homo sapien
aggctgaaatcaggcatttgtacca

SEQ ID NO: 2909616 - DNA, 25 bp, Homo sapien
ttccatggggcagcgggccccactg

SEQ ID NO: 2909617 - DNA, 25 bp, Homo sapien
gcagcgggccccactgtttccttta

SEQ ID NO: 2909618 - DNA, 25 bp, Homo sapien
cactgtttcctttatgaagaaggct

SEQ ID NO: 2909619 - DNA, 25 bp, Homo sapien
gttttcagcggtctgcctgtgtcca

SEQ ID NO: 2909620 - DNA, 25 bp, Homo sapien
tgactttactaccccactttgccaa

SEQ ID NO: 2909621 - DNA, 25 bp, Homo sapien
tgagcatgtgagtgttttcagcggt

SEQ ID NO: 2909622 - DNA, 25 bp, Homo sapien
gaagtattgttggtccatttcacag

SEQ ID NO: 2909623 - DNA, 25 bp, Homo sapien
caaattcccaacaagcacttaaccg

SEQ ID NO: 2909624 - DNA, 25 bp, Homo sapien
caacaagcacttaaccgtagcctca

SEQ ID NO: 2909625 - DNA, 25 bp, Homo sapien
ccgtagcctcaaatccaatacacat

SEQ ID NO: 2909626 - DNA, 25 bp, Homo sapien
cacttaaccgtagcctcaaatccaa

SEQ ID NO: 2909627 - DNA, 25 bp, Homo sapien
acttgattccatacggggcactggg

SEQ ID NO: 2909628 - DNA, 25 bp, Homo sapien
tctactggggaaggatagtccctgc

SEQ ID NO: 2909629 - DNA, 25 bp, Homo sapien
gggccagcccagttcacttgattcc

SEQ ID NO: 2909630 - DNA, 25 bp, Homo sapien
gttccagcgaatatgtacttcattt

SEQ ID NO: 2909631 - DNA, 25 bp, Homo sapien
catttgtgttgatttagcaccattg

SEQ ID NO: 2909632 - DNA, 25 bp, Homo sapien
ttgactccaggtagcagcccagaaa

SEQ ID NO: 2909633 - DNA, 25 bp, Homo sapien
ggtagcagcccagaaaaggctaaaa

SEQ ID NO: 2909634 - DNA, 25 bp, Homo sapien
tgagaattcctgtgccccatgtctg

SEQ ID NO: 2909635 - DNA, 25 bp, Homo sapien
tggggcagtgattacagcacggtgc

SEQ ID NO: 2909636 - DNA, 25 bp, Homo sapien
ggcagtgattacagcacggtgccac

SEQ ID NO: 2909637 - DNA, 25 bp, Homo sapien
tgtctggggcagtgattacagcacg

SEQ ID NO: 2909638 - DNA, 25 bp, Homo sapien
tctggggcagtgattacagcacggt

SEQ ID NO: 2909639 - DNA, 25 bp, Homo sapien
ccagtgagtgtttgcatggccccgg

SEQ ID NO: 2909640 - DNA, 25 bp, Homo sapien
cgttctttgctgtgtaggctccaag

SEQ ID NO: 2909641 - DNA, 25 bp, Homo sapien
gttcttgctgacacatgggcgttct

SEQ ID NO: 2909642 - DNA, 25 bp, Homo sapien
ccatgtaaatccctagttcccagtg

SEQ ID NO: 2909643 - DNA, 25 bp, Homo sapien
cttagcccagcaaggagatggaaag

SEQ ID NO: 2909644 - DNA, 25 bp, Homo sapien
ttagcccagcaaggagatggaaagg

SEQ ID NO: 2909645 - DNA, 25 bp, Homo sapien
ttcttagcccagcaaggagatggaa

SEQ ID NO: 2909646 - DNA, 25 bp, Homo sapien
tcttagcccagcaaggagatggaaa

SEQ ID NO: 2909647 - DNA, 25 bp, Homo sapien
catgataggcatcctgaccagccat

SEQ ID NO: 2909648 - DNA, 25 bp, Homo sapien
tgcagagccccacaattgaaacatt

SEQ ID NO: 2909649 - DNA, 25 bp, Homo sapien
ttgaaacatttacgtggcatgcatg

SEQ ID NO: 2909650 - DNA, 25 bp, Homo sapien
catttacgtggcatgcatgataggc

SEQ ID NO: 2909651 - DNA, 25 bp, Homo sapien
ctaatgggagttagcagagggtgga

SEQ ID NO: 2909652 - DNA, 25 bp, Homo sapien
agacactccgagtgagtaagcaggg

SEQ ID NO: 2909653 - DNA, 25 bp, Homo sapien
agtagcgggtaacaggagaaagaca

SEQ ID NO: 2909654 - DNA, 25 bp, Homo sapien
gagggtggagagtagcgggtaacag

SEQ ID NO: 2909655 - DNA, 25 bp, Homo sapien
cagcagctgcatgataggcccagat

SEQ ID NO: 2909656 - DNA, 25 bp, Homo sapien
gctgcatgataggcccagatgggcc

SEQ ID NO: 2909657 - DNA, 25 bp, Homo sapien
cagctgcatgataggcccagatggg

SEQ ID NO: 2909658 - DNA, 25 bp, Homo sapien
gcagctgcatgataggcccagatgg

SEQ ID NO: 2909659 - DNA, 25 bp, Homo sapien
atttttctaaggatacagtatgata

SEQ ID NO: 2909660 - DNA, 25 bp, Homo sapien
gatattgctgtattgcttttacgta

SEQ ID NO: 2909661 - DNA, 25 bp, Homo sapien
ttgcttttacgtaaacttctctgac

SEQ ID NO: 2909662 - DNA, 25 bp, Homo sapien
tctaaggatacagtatgatattgct

SEQ ID NO: 2909663 - DNA, 25 bp, Homo sapien
agcgaagttaaggagtaaggagaga

SEQ ID NO: 2909664 - DNA, 25 bp, Homo sapien
cagagcacgaagcatgggggacaat

SEQ ID NO: 2909665 - DNA, 25 bp, Homo sapien
ggacaatgaagaggagcgaagttaa

SEQ ID NO: 2909666 - DNA, 25 bp, Homo sapien
taaggagagattgactacagtattc

SEQ ID NO: 2909667 - DNA, 25 bp, Homo sapien
tggctccagcagtcggctaggtctg

SEQ ID NO: 2909668 - DNA, 25 bp, Homo sapien
tcttccacatgtaaggtagggatgg

SEQ ID NO: 2909669 - DNA, 25 bp, Homo sapien
caaactaccaatgcgatgtccctgg

SEQ ID NO: 2909670 - DNA, 25 bp, Homo sapien
tgtgaataggtagataagccctgct

SEQ ID NO: 2909671 - DNA, 25 bp, Homo sapien
aatgtctagcaatgctctctccctg

SEQ ID NO: 2909672 - DNA, 25 bp, Homo sapien
tccaggtagtgtacagatgaatgtc

SEQ ID NO: 2909673 - DNA, 25 bp, Homo sapien
ttaaatatctcctcacgtctcatgg

SEQ ID NO: 2909674 - DNA, 25 bp, Homo sapien
ctctggttaggtcctttgatggcca

SEQ ID NO: 2909675 - DNA, 25 bp, Homo sapien
tggaaggaacagtcaaaggtgccat

SEQ ID NO: 2909676 - DNA, 25 bp, Homo sapien
ctggaaggaacagtcaaaggtgcca

SEQ ID NO: 2909677 - DNA, 25 bp, Homo sapien
catattagggatgccaatcccttct

SEQ ID NO: 2909678 - DNA, 25 bp, Homo sapien
agggatgccaatcccttcttccatg

SEQ ID NO: 2909679 - DNA, 25 bp, Homo sapien
ttcttccatgcccttacacctcctc

SEQ ID NO: 2909680 - DNA, 25 bp, Homo sapien
atgcccttacacctcctctttagag

SEQ ID NO: 2909681 - DNA, 25 bp, Homo sapien
cagaataaatgtactgggtcgtcat

SEQ ID NO: 2909682 - DNA, 25 bp, Homo sapien
taaatgtactgggtcgtcatggatg

SEQ ID NO: 2909683 - DNA, 25 bp, Homo sapien
gaataaatgtactgggtcgtcatgg

SEQ ID NO: 2909684 - DNA, 25 bp, Homo sapien
aatgtactgggtcgtcatggatgac

SEQ ID NO: 2909685 - DNA, 25 bp, Homo sapien
aaagggagaatgactcagactcagc

SEQ ID NO: 2909686 - DNA, 25 bp, Homo sapien
gggagaatgactcagactcagcagg

SEQ ID NO: 2909687 - DNA, 25 bp, Homo sapien
ggtgaggagcccacaccgtgtgctg

SEQ ID NO: 2909688 - DNA, 25 bp, Homo sapien
agggaaagggagaatgactcagact

SEQ ID NO: 2909689 - DNA, 25 bp, Homo sapien
tgggcgctcttgcacataatatccg

SEQ ID NO: 2909690 - DNA, 25 bp, Homo sapien
tatccgaagctataaatcaaactgc

SEQ ID NO: 2909691 - DNA, 25 bp, Homo sapien
aaactgcttaatggaagctcagagc

SEQ ID NO: 2909692 - DNA, 25 bp, Homo sapien
aaacactttgggttgtgggcgctct

SEQ ID NO: 2909693 - DNA, 25 bp, Homo sapien
cccttctcggaagtggaatacccag

SEQ ID NO: 2909694 - DNA, 25 bp, Homo sapien
tctccgttgtgcagaagggcgtctc

SEQ ID NO: 2909695 - DNA, 25 bp, Homo sapien
cttgcgggaagcttgagatcaacca

SEQ ID NO: 2909696 - DNA, 25 bp, Homo sapien
gaaacttaggcgaactgatcaatgc

SEQ ID NO: 2909697 - DNA, 25 bp, Homo sapien
gaggattcatgggatgtttgcagca

SEQ ID NO: 2909698 - DNA, 25 bp, Homo sapien
cattgtcaatttaaggccaggttca

SEQ ID NO: 2909699 - DNA, 25 bp, Homo sapien
gaattcttctaaaaagctctggtcc

SEQ ID NO: 2909700 - DNA, 25 bp, Homo sapien
gttgtacacctgttccaagtagctg

SEQ ID NO: 2909701 - DNA, 25 bp, Homo sapien
ctctgagatccagttgcatccatct

SEQ ID NO: 2909702 - DNA, 25 bp, Homo sapien
aaccaactgtctgaagactcttgca

SEQ ID NO: 2909703 - DNA, 25 bp, Homo sapien
gtagcaacacttcgccctctgagat

SEQ ID NO: 2909704 - DNA, 25 bp, Homo sapien
gcaaatcgatgaagatcttgtagca

SEQ ID NO: 2909705 - DNA, 25 bp, Homo sapien
tgagagattactttctgagctctgg

SEQ ID NO: 2909706 - DNA, 25 bp, Homo sapien
ccactatgatcaggtctgagagatt

SEQ ID NO: 2909707 - DNA, 25 bp, Homo sapien
tgagacctcttagtgtaaaaccctg

SEQ ID NO: 2909708 - DNA, 25 bp, Homo sapien
ctcttagtgtaaaaccctgaaatgc

SEQ ID NO: 2909709 - DNA, 25 bp, Homo sapien
caactgaggcttgcatcatcatggg

SEQ ID NO: 2909710 - DNA, 25 bp, Homo sapien
actgaggcttgcatcatcatgggcc

SEQ ID NO: 2909711 - DNA, 25 bp, Homo sapien
aactgaggcttgcatcatcatgggc

SEQ ID NO: 2909712 - DNA, 25 bp, Homo sapien
ctgaggcttgcatcatcatgggcct

SEQ ID NO: 2909713 - DNA, 25 bp, Homo sapien
agatactcctaggttgagccaccgc

SEQ ID NO: 2909714 - DNA, 25 bp, Homo sapien
cctgacgttttatcacctgaagatt

SEQ ID NO: 2909715 - DNA, 25 bp, Homo sapien
tgacgttttatcacctgaagattag

SEQ ID NO: 2909716 - DNA, 25 bp, Homo sapien
ttgagagatactcctaggttgagcc

SEQ ID NO: 2909717 - DNA, 25 bp, Homo sapien
ctgtgttatctagagtatgggagat

SEQ ID NO: 2909718 - DNA, 25 bp, Homo sapien
ggatgccatgatgctctgtgttatc

SEQ ID NO: 2909719 - DNA, 25 bp, Homo sapien
aagggatgccatgatgctctgtgtt

SEQ ID NO: 2909720 - DNA, 25 bp, Homo sapien
tatctagagtatgggagattctcac

SEQ ID NO: 2909721 - DNA, 25 bp, Homo sapien
cagagaaccactctttagagaggca

SEQ ID NO: 2909722 - DNA, 25 bp, Homo sapien
tctaagccttgcttcccacagacat

SEQ ID NO: 2909723 - DNA, 25 bp, Homo sapien
ctccttttccgtgggcctctctttg

SEQ ID NO: 2909724 - DNA, 25 bp, Homo sapien
ttctttttctaagccttgcttccca

SEQ ID NO: 2909725 - DNA, 25 bp, Homo sapien
ttctcttcgtgttctaagggaagcc

SEQ ID NO: 2909726 - DNA, 25 bp, Homo sapien
ttgccatcaaaagccattttatgct

SEQ ID NO: 2909727 - DNA, 25 bp, Homo sapien
ggtggcgtcttggttctcttcgtgt

SEQ ID NO: 2909728 - DNA, 25 bp, Homo sapien
gcgtcttggttctcttcgtgttcta

SEQ ID NO: 2909729 - DNA, 25 bp, Homo sapien
tgattttgttcttaggcaagctgtc

SEQ ID NO: 2909730 - DNA, 25 bp, Homo sapien
tgagaccaatagcaaacccaacctg

SEQ ID NO: 2909731 - DNA, 25 bp, Homo sapien
tctgctcggcgtttttgcacaatca

SEQ ID NO: 2909732 - DNA, 25 bp, Homo sapien
gcctgaagtcgatgctgggaactga

SEQ ID NO: 2909733 - DNA, 25 bp, Homo sapien
cttggcctgggcaactgcagacagt

SEQ ID NO: 2909734 - DNA, 25 bp, Homo sapien
gccactcttgcatatgtgcatttca

SEQ ID NO: 2909735 - DNA, 25 bp, Homo sapien
ccactcttgcatatgtgcatttcag

SEQ ID NO: 2909736 - DNA, 25 bp, Homo sapien
actcttgcatatgtgcatttcagtg

SEQ ID NO: 2909737 - DNA, 25 bp, Homo sapien
agccactcttgcatatgtgcatttc

SEQ ID NO: 2909738 - DNA, 25 bp, Homo sapien
tccaggtctaatgggaccatgtacg

SEQ ID NO: 2909739 - DNA, 25 bp, Homo sapien
agaggctccttcaaaacactgttct

SEQ ID NO: 2909740 - DNA, 25 bp, Homo sapien
tgttcttgtcagaagaatcagctgc

SEQ ID NO: 2909741 - DNA, 25 bp, Homo sapien
tgtacgctcataagaggctccttca

SEQ ID NO: 2909742 - DNA, 25 bp, Homo sapien
tgatcatccgaagatgtactaagct

SEQ ID NO: 2909743 - DNA, 25 bp, Homo sapien
tcatccgaagatgtactaagctttt

SEQ ID NO: 2909744 - DNA, 25 bp, Homo sapien
cgaagatgtactaagctttttcctc

SEQ ID NO: 2909745 - DNA, 25 bp, Homo sapien
tgagctgatcatccgaagatgtact

SEQ ID NO: 2909746 - DNA, 25 bp, Homo sapien
tctttagagatcctatgatgagatc

SEQ ID NO: 2909747 - DNA, 25 bp, Homo sapien
cccaaaggacaagtctggccctgtc

SEQ ID NO: 2909748 - DNA, 25 bp, Homo sapien
agtctggccctgtcaaatgctttaa

SEQ ID NO: 2909749 - DNA, 25 bp, Homo sapien
gatgagatctacactccttagcttg

SEQ ID NO: 2909750 - DNA, 25 bp, Homo sapien
ctgccttctggaccaatgcatttgt

SEQ ID NO: 2909751 - DNA, 25 bp, Homo sapien
gcatttgttctcttactggtccctt

SEQ ID NO: 2909752 - DNA, 25 bp, Homo sapien
caatgtcacatcatcccaacacatt

SEQ ID NO: 2909753 - DNA, 25 bp, Homo sapien
cgggatttacactccttatcttgtc

SEQ ID NO: 2909754 - DNA, 25 bp, Homo sapien
ctgagcctgcatcccggtatgcatg

SEQ ID NO: 2909755 - DNA, 25 bp, Homo sapien
gagcctgcatcccggtatgcatgag

SEQ ID NO: 2909756 - DNA, 25 bp, Homo sapien
ctgccatcccagaggtcagcatgct

SEQ ID NO: 2909757 - DNA, 25 bp, Homo sapien
gctgccatcccagaggtcagcatgc

SEQ ID NO: 2909758 - DNA, 25 bp, Homo sapien
ttgtgtggacatattattatacctc

SEQ ID NO: 2909759 - DNA, 25 bp, Homo sapien
tttgtgtggacatattattatacct

SEQ ID NO: 2909760 - DNA, 25 bp, Homo sapien
cgtactggtgttccattgcgggcca

SEQ ID NO: 2909761 - DNA, 25 bp, Homo sapien
ttatgagagacagaacgtactggtg

SEQ ID NO: 2909762 - DNA, 25 bp, Homo sapien
tttctcctgtaacaaccacagtgcc

SEQ ID NO: 2909763 - DNA, 25 bp, Homo sapien
cagaacgtactggtgttccattgcg

SEQ ID NO: 2909764 - DNA, 25 bp, Homo sapien
ttgctctgtccagaaatcctggcct

SEQ ID NO: 2909765 - DNA, 25 bp, Homo sapien
ggcagctggtgtctaaaggccatcg

SEQ ID NO: 2909766 - DNA, 25 bp, Homo sapien
cgtctacgtactttctgtcgttcca

SEQ ID NO: 2909767 - DNA, 25 bp, Homo sapien
tccaccatagaaggagtggcagtgt

SEQ ID NO: 2909768 - DNA, 25 bp, Homo sapien
aacggtattagagcattctgtctgc

SEQ ID NO: 2909769 - DNA, 25 bp, Homo sapien
ttctcttaggcatacagcatggtcc

SEQ ID NO: 2909770 - DNA, 25 bp, Homo sapien
gagagctagagttctttaggcctaa

SEQ ID NO: 2909771 - DNA, 25 bp, Homo sapien
taacttgcagtcttgaaaacggtat

SEQ ID NO: 2909772 - DNA, 25 bp, Homo sapien
tacgtcctagcctgtgtgtggtgca

SEQ ID NO: 2909773 - DNA, 25 bp, Homo sapien
tcgaccacgtgggagcgctgtttac

SEQ ID NO: 2909774 - DNA, 25 bp, Homo sapien
gagcgctgtttacgtcctagcctgt

SEQ ID NO: 2909775 - DNA, 25 bp, Homo sapien
tcagggtccttgtgtcgaccacgtg

SEQ ID NO: 2909776 - DNA, 25 bp, Homo sapien
tgtaacgcgagctatgaatgagagg

SEQ ID NO: 2909777 - DNA, 25 bp, Homo sapien
tgagaggtatgtgtaaatctgaagc

SEQ ID NO: 2909778 - DNA, 25 bp, Homo sapien
gccagattgttctgaggagttctgc

SEQ ID NO: 2909779 - DNA, 25 bp, Homo sapien
caggttgtgtcgaaatagtttaagc

SEQ ID NO: 2909780 - DNA, 25 bp, Homo sapien
ccctgtgggctaagagagaccttct

SEQ ID NO: 2909781 - DNA, 25 bp, Homo sapien
gttgcactgaggctactttgaagaa

SEQ ID NO: 2909782 - DNA, 25 bp, Homo sapien
ggtctttgcctacacaatcctgaga

SEQ ID NO: 2909783 - DNA, 25 bp, Homo sapien
tgctaggttagatcctgtggtcccc

SEQ ID NO: 2909784 - DNA, 25 bp, Homo sapien
cctactggccgcaagttcatggaag

SEQ ID NO: 2909785 - DNA, 25 bp, Homo sapien
ggatcttggttgtatgcttcttata

SEQ ID NO: 2909786 - DNA, 25 bp, Homo sapien
tgagctccgcctagtgtcacatcag

SEQ ID NO: 2909787 - DNA, 25 bp, Homo sapien
tgctggtatacaagcctgctatata

SEQ ID NO: 2909788 - DNA, 25 bp, Homo sapien
ttctgagacaatgaacacaatccat

SEQ ID NO: 2909789 - DNA, 25 bp, Homo sapien
accctgcaatagatgcgagtttctg

SEQ ID NO: 2909790 - DNA, 25 bp, Homo sapien
tcatcaccctgcaatagatgcgagt

SEQ ID NO: 2909791 - DNA, 25 bp, Homo sapien
gagtttctgagacaatgaacacaat

SEQ ID NO: 2909792 - DNA, 25 bp, Homo sapien
tcaattgtggcatctaaccacagcg

SEQ ID NO: 2909793 - DNA, 25 bp, Homo sapien
catctaaccacagcgcatgctcatt

SEQ ID NO: 2909794 - DNA, 25 bp, Homo sapien
cacagcgcatgctcatttaattgtc

SEQ ID NO: 2909795 - DNA, 25 bp, Homo sapien
gagttaatttctcaattgtggcatc

SEQ ID NO: 2909796 - DNA, 25 bp, Homo sapien
taaggtcacccaaagcttcctggct

SEQ ID NO: 2909797 - DNA, 25 bp, Homo sapien
ttgcttgtcgatctctgtccctcct

SEQ ID NO: 2909798 - DNA, 25 bp, Homo sapien
tctacctcccaaatttgcttgtcga

SEQ ID NO: 2909799 - DNA, 25 bp, Homo sapien
aactgccgagtgctcagagccacag

SEQ ID NO: 2909800 - DNA, 25 bp, Homo sapien
gaactgtgcgggatcctatggagaa

SEQ ID NO: 2909801 - DNA, 25 bp, Homo sapien
gagtatccagtctgtgcagaactgt

SEQ ID NO: 2909802 - DNA, 25 bp, Homo sapien
tggagaattccagaagacacggaca

SEQ ID NO: 2909803 - DNA, 25 bp, Homo sapien
aattccagaagacacggacagtgct

SEQ ID NO: 2909804 - DNA, 25 bp, Homo sapien
aaatggctccaacgcattccctttc

SEQ ID NO: 2909805 - DNA, 25 bp, Homo sapien
tggctccaacgcattccctttcctg

SEQ ID NO: 2909806 - DNA, 25 bp, Homo sapien
ggctccaacgcattccctttcctgt

SEQ ID NO: 2909807 - DNA, 25 bp, Homo sapien
aaaaaatggctccaacgcattccct

SEQ ID NO: 2909808 - DNA, 25 bp, Homo sapien
gcaacctactattacactccttggg

SEQ ID NO: 2909809 - DNA, 25 bp, Homo sapien
caatcagctcttggttttcaatcgg

SEQ ID NO: 2909810 - DNA, 25 bp, Homo sapien
taacgtgctaaaaacatgatgtctg

SEQ ID NO: 2909811 - DNA, 25 bp, Homo sapien
aatgcagccgctagattaagggacg

SEQ ID NO: 2909812 - DNA, 25 bp, Homo sapien
ctgtatttctcagaggcctgtgcag

SEQ ID NO: 2909813 - DNA, 25 bp, Homo sapien
agggtgcttcacagcgctgtgatgc

SEQ ID NO: 2909814 - DNA, 25 bp, Homo sapien
tcagggtgcttcacagcgctgtgat

SEQ ID NO: 2909815 - DNA, 25 bp, Homo sapien
gtctcagggtgcttcacagcgctgt

SEQ ID NO: 2909816 - DNA, 25 bp, Homo sapien
tagagcttcttgtttttccctataa

SEQ ID NO: 2909817 - DNA, 25 bp, Homo sapien
ctagagcttcttgtttttccctata

SEQ ID NO: 2909818 - DNA, 25 bp, Homo sapien
tgcagataaaacattggttggcacc

SEQ ID NO: 2909819 - DNA, 25 bp, Homo sapien
gcaccaactaagctcctaatgccat

SEQ ID NO: 2909820 - DNA, 25 bp, Homo sapien
gatggtgacttgaggccacacttgc

SEQ ID NO: 2909821 - DNA, 25 bp, Homo sapien
ctgaggtatgatatggtgaaaggtc

SEQ ID NO: 2909822 - DNA, 25 bp, Homo sapien
gtctctcttgagtttttgtgggaac

SEQ ID NO: 2909823 - DNA, 25 bp, Homo sapien
tggtctctcttgagtttttgtggga

SEQ ID NO: 2909824 - DNA, 25 bp, Homo sapien
ttgtgggaacttgggtgtgggtaca

SEQ ID NO: 2909825 - DNA, 25 bp, Homo sapien
gaacttgggtgtgggtacaaggtgc

SEQ ID NO: 2909826 - DNA, 25 bp, Homo sapien
gaccgtgagttcctagagcttggct

SEQ ID NO: 2909827 - DNA, 25 bp, Homo sapien
ggtcggagcatcagaacaagcgtct

SEQ ID NO: 2909828 - DNA, 25 bp, Homo sapien
gcgtctagactccttgggaccgtga

SEQ ID NO: 2909829 - DNA, 25 bp, Homo sapien
ccacatttttcttacggtcggagca

SEQ ID NO: 2909830 - DNA, 25 bp, Homo sapien
tgcccttacaggtggagtatcttcg

SEQ ID NO: 2909831 - DNA, 25 bp, Homo sapien
tacaggtggagtatcttcgtcacac

SEQ ID NO: 2909832 - DNA, 25 bp, Homo sapien
ccttacaggtggagtatcttcgtca

SEQ ID NO: 2909833 - DNA, 25 bp, Homo sapien
caggtggagtatcttcgtcacacat

SEQ ID NO: 2909834 - DNA, 25 bp, Homo sapien
tgcatccaacagaaacagccgctgc

SEQ ID NO: 2909835 - DNA, 25 bp, Homo sapien
tgcccgaacctctgtgtgaagcttt

SEQ ID NO: 2909836 - DNA, 25 bp, Homo sapien
aaaacacggcttgtggcattggcat

SEQ ID NO: 2909837 - DNA, 25 bp, Homo sapien
tttacgcgcacacggacaaaatgcc

SEQ ID NO: 2909838 - DNA, 25 bp, Homo sapien
tagctaaggaactttacatcctaac

SEQ ID NO: 2909839 - DNA, 25 bp, Homo sapien
gaaataagataactccatctcgccc

SEQ ID NO: 2909840 - DNA, 25 bp, Homo sapien
gagccttaaagaagtagctaaggaa

SEQ ID NO: 2909841 - DNA, 25 bp, Homo sapien
gtgttgagccttaaagaagtagcta

SEQ ID NO: 2909842 - DNA, 25 bp, Homo sapien
catctatgtgatcttgcggaaacgc

SEQ ID NO: 2909843 - DNA, 25 bp, Homo sapien
ggagtggcatctcaactcggattac

SEQ ID NO: 2909844 - DNA, 25 bp, Homo sapien
agtgctgcggccatctacacggtga

SEQ ID NO: 2909845 - DNA, 25 bp, Homo sapien
aatgaggcgcccagacggtctgtct

SEQ ID NO: 2909846 - DNA, 25 bp, Homo sapien
aattctggacctggaagcagatttc

SEQ ID NO: 2909847 - DNA, 25 bp, Homo sapien
tcaattctggacctggaagcagatt

SEQ ID NO: 2909848 - DNA, 25 bp, Homo sapien
tttcaattctggacctggaagcaga

SEQ ID NO: 2909849 - DNA, 25 bp, Homo sapien
ctttcaattctggacctggaagcag

SEQ ID NO: 2909850 - DNA, 25 bp, Homo sapien
tgcttcacctggtatgtggcaactc

SEQ ID NO: 2909851 - DNA, 25 bp, Homo sapien
gcaactctgttagggggaccatagg

SEQ ID NO: 2909852 - DNA, 25 bp, Homo sapien
cataggcattgcttgcttcacctgg

SEQ ID NO: 2909853 - DNA, 25 bp, Homo sapien
cacctggtatgtggcaactctgtta

SEQ ID NO: 2909854 - DNA, 25 bp, Homo sapien
tggcctgacccacctgcatatccag

SEQ ID NO: 2909855 - DNA, 25 bp, Homo sapien
tgcatatccagtgccctttagcctt

SEQ ID NO: 2909856 - DNA, 25 bp, Homo sapien
gggtggcctgacccacctgcatatc

SEQ ID NO: 2909857 - DNA, 25 bp, Homo sapien
acctgcatatccagtgccctttagc

SEQ ID NO: 2909858 - DNA, 25 bp, Homo sapien
agctggggccatcagtttgagcgtg

SEQ ID NO: 2909859 - DNA, 25 bp, Homo sapien
atcagtttgagcgtggctgctccac

SEQ ID NO: 2909860 - DNA, 25 bp, Homo sapien
ggccatcagtttgagcgtggctgct

SEQ ID NO: 2909861 - DNA, 25 bp, Homo sapien
gggacgctgtctgtcacgtgagctg

SEQ ID NO: 2909862 - DNA, 25 bp, Homo sapien
cccaggagcagtcattggaaggttg

SEQ ID NO: 2909863 - DNA, 25 bp, Homo sapien
gagggcaaaggatgtagcatctctt

SEQ ID NO: 2909864 - DNA, 25 bp, Homo sapien
tgagttggttgtcagaatgcccatg

SEQ ID NO: 2909865 - DNA, 25 bp, Homo sapien
gacacagcccaaggttagatgttgg

SEQ ID NO: 2909866 - DNA, 25 bp, Homo sapien
actgggctttgattgactgttgtca

SEQ ID NO: 2909867 - DNA, 25 bp, Homo sapien
tgcttccagttcctagattctactg

SEQ ID NO: 2909868 - DNA, 25 bp, Homo sapien
tactgggctttgattgactgttgtc

SEQ ID NO: 2909869 - DNA, 25 bp, Homo sapien
tccagttcctagattctactgggct

SEQ ID NO: 2909870 - DNA, 25 bp, Homo sapien
ccatgtggaagcggggtgcatccaa

SEQ ID NO: 2909871 - DNA, 25 bp, Homo sapien
atgtggaagcggggtgcatccaagt

SEQ ID NO: 2909872 - DNA, 25 bp, Homo sapien
tccatgtggaagcggggtgcatcca

SEQ ID NO: 2909873 - DNA, 25 bp, Homo sapien
agtccatgtggaagcggggtgcatc

SEQ ID NO: 2909874 - DNA, 25 bp, Homo sapien
ggttttacatcactggaatcttcca

SEQ ID NO: 2909875 - DNA, 25 bp, Homo sapien
gtccaggccaccatgatcctgtcga

SEQ ID NO: 2909876 - DNA, 25 bp, Homo sapien
tgtcgatcatcttcagcattctgtc

SEQ ID NO: 2909877 - DNA, 25 bp, Homo sapien
aaggggggcaggttttacatcactg

SEQ ID NO: 2909878 - DNA, 25 bp, Homo sapien
taaaattccatatcttatgagtgcc

SEQ ID NO: 2909879 - DNA, 25 bp, Homo sapien
gatcatcagagtcaaccagagggct

SEQ ID NO: 2909880 - DNA, 25 bp, Homo sapien
tggctcaaagcagtaggtattcaac

SEQ ID NO: 2909881 - DNA, 25 bp, Homo sapien
tagacttactatcttaatgcatgtg

SEQ ID NO: 2909882 - DNA, 25 bp, Homo sapien
ctagcaaatgcttagaagtgtatac

SEQ ID NO: 2909883 - DNA, 25 bp, Homo sapien
tgtggctctctatataattccttgc

SEQ ID NO: 2909884 - DNA, 25 bp, Homo sapien
taatccgaggaattatctggaacac

SEQ ID NO: 2909885 - DNA, 25 bp, Homo sapien
gagaactgctttggttacaacccac

SEQ ID NO: 2909886 - DNA, 25 bp, Homo sapien
taactcactaggttgtaggccctgg

SEQ ID NO: 2909887 - DNA, 25 bp, Homo sapien
taggccctgggctaagaatatagct

SEQ ID NO: 2909888 - DNA, 25 bp, Homo sapien
gatctttgtgcaactcgagcttccc

SEQ ID NO: 2909889 - DNA, 25 bp, Homo sapien
tataccggacactctcagaacagga

SEQ ID NO: 2909890 - DNA, 25 bp, Homo sapien
ttgtctccatctgttttgctttccg

SEQ ID NO: 2909891 - DNA, 25 bp, Homo sapien
tctccatctgttttgctttccgcat

SEQ ID NO: 2909892 - DNA, 25 bp, Homo sapien
agttgtctccatctgttttgctttc

SEQ ID NO: 2909893 - DNA, 25 bp, Homo sapien
gtctccatctgttttgctttccgca

SEQ ID NO: 2909894 - DNA, 25 bp, Homo sapien
cacgtcaccttcatcgcctttgtga

SEQ ID NO: 2909895 - DNA, 25 bp, Homo sapien
accttcatcgcctttgtgagctcca

SEQ ID NO: 2909896 - DNA, 25 bp, Homo sapien
gagagccgcccacgtcaccttcatc

SEQ ID NO: 2909897 - DNA, 25 bp, Homo sapien
ttcatcgcctttgtgagctccatgc

SEQ ID NO: 2909898 - DNA, 25 bp, Homo sapien
tgcacattgcatgggtcccggagcc

SEQ ID NO: 2909899 - DNA, 25 bp, Homo sapien
tcccggagcctctgttcatgttcag

SEQ ID NO: 2909900 - DNA, 25 bp, Homo sapien
agcaggcattgaggtaggacctgaa

SEQ ID NO: 2909901 - DNA, 25 bp, Homo sapien
cctgaagttgaggtaggacctgcac

SEQ ID NO: 2909902 - DNA, 25 bp, Homo sapien
ccttccaccctctctagtttttgtg

SEQ ID NO: 2909903 - DNA, 25 bp, Homo sapien
atgagcagagaataagggaagccgc

SEQ ID NO: 2909904 - DNA, 25 bp, Homo sapien
gggaagccgctctctctttgccaca

SEQ ID NO: 2909905 - DNA, 25 bp, Homo sapien
ccctctctagtttttgtggattcta

SEQ ID NO: 2909906 - DNA, 25 bp, Homo sapien
tgaagtttggtcagtggtttggctt

SEQ ID NO: 2909907 - DNA, 25 bp, Homo sapien
ctgaagtttggtcagtggtttggct

SEQ ID NO: 2909908 - DNA, 25 bp, Homo sapien
agtttggtcagtggtttggcttggc

SEQ ID NO: 2909909 - DNA, 25 bp, Homo sapien
ttggtcagtggtttggcttggcagg

SEQ ID NO: 2909910 - DNA, 25 bp, Homo sapien
tcaaacagttgacgattgcagtttt

SEQ ID NO: 2909911 - DNA, 25 bp, Homo sapien
aacagttgacgattgcagtttttct

SEQ ID NO: 2909912 - DNA, 25 bp, Homo sapien
caaacagttgacgattgcagttttt

SEQ ID NO: 2909913 - DNA, 25 bp, Homo sapien
aaacagttgacgattgcagtttttc

SEQ ID NO: 2909914 - DNA, 25 bp, Homo sapien
gcctcctggacaatgactgcagggt

SEQ ID NO: 2909915 - DNA, 25 bp, Homo sapien
ccccgtctctcctctacacgatgac

SEQ ID NO: 2909916 - DNA, 25 bp, Homo sapien
cgtctctcctctacacgatgactct

SEQ ID NO: 2909917 - DNA, 25 bp, Homo sapien
tggacaatgactgcagggtgacccc

SEQ ID NO: 2909918 - DNA, 25 bp, Homo sapien
ttctcagtggtccatttgattccaa

SEQ ID NO: 2909919 - DNA, 25 bp, Homo sapien
cacatggatgcatttctaatctttg

SEQ ID NO: 2909920 - DNA, 25 bp, Homo sapien
tggtccatttgattccaagttggag

SEQ ID NO: 2909921 - DNA, 25 bp, Homo sapien
gacctgctgtcttccacgggtttct

SEQ ID NO: 2909922 - DNA, 25 bp, Homo sapien
agcactccggatgggagtctccgta

SEQ ID NO: 2909923 - DNA, 25 bp, Homo sapien
ttagggtctggctgaagttcccgga

SEQ ID NO: 2909924 - DNA, 25 bp, Homo sapien
cctgagaatgtgaccgtagcactgc

SEQ ID NO: 2909925 - DNA, 25 bp, Homo sapien
aatgaaatactcatgagtgcctgag

SEQ ID NO: 2909926 - DNA, 25 bp, Homo sapien
gggtgggcggtgtggctaggtggat

SEQ ID NO: 2909927 - DNA, 25 bp, Homo sapien
tgggcggtgtggctaggtggatgcg

SEQ ID NO: 2909928 - DNA, 25 bp, Homo sapien
ggtggatgcgggtgcttttcgccat

SEQ ID NO: 2909929 - DNA, 25 bp, Homo sapien
tgtggctaggtggatgcgggtgctt

SEQ ID NO: 2909930 - DNA, 25 bp, Homo sapien
taaagttattttcttggcgatgaag

SEQ ID NO: 2909931 - DNA, 25 bp, Homo sapien
ggctttcacttcttaatttaaggca

SEQ ID NO: 2909932 - DNA, 25 bp, Homo sapien
cattgttagtaaagcttccactggt

SEQ ID NO: 2909933 - DNA, 25 bp, Homo sapien
aactgtccagcccattagatcttaa

SEQ ID NO: 2909934 - DNA, 25 bp, Homo sapien
ctgtgttatttgcagacagttggaa

SEQ ID NO: 2909935 - DNA, 25 bp, Homo sapien
tgtgttatttgcagacagttggaag

SEQ ID NO: 2909936 - DNA, 25 bp, Homo sapien
ttatttgcagacagttggaagtctc

SEQ ID NO: 2909937 - DNA, 25 bp, Homo sapien
tgttatttgcagacagttggaagtc

SEQ ID NO: 2909938 - DNA, 25 bp, Homo sapien
tgagcagaacttgccgccagaatgc

SEQ ID NO: 2909939 - DNA, 25 bp, Homo sapien
caggcagaaactccgctgagcagaa

SEQ ID NO: 2909940 - DNA, 25 bp, Homo sapien
acgatcgtcagcgtgagtgcctggc

SEQ ID NO: 2909941 - DNA, 25 bp, Homo sapien
tgagtatcatcgtcctccacgtcgc

SEQ ID NO: 2909942 - DNA, 25 bp, Homo sapien
ctcggcccagtgcgttcggcctcac

SEQ ID NO: 2909943 - DNA, 25 bp, Homo sapien
ttagacgtgcgaaccgcttgttttg

SEQ ID NO: 2909944 - DNA, 25 bp, Homo sapien
gggtctcggagaacgtgacctctca

SEQ ID NO: 2909945 - DNA, 25 bp, Homo sapien
tctccaggtctcagacggaaatctg

SEQ ID NO: 2909946 - DNA, 25 bp, Homo sapien
aagatgttccgttgcaggcgggccc

SEQ ID NO: 2909947 - DNA, 25 bp, Homo sapien
gacaaacggaatgcggagagcactg

SEQ ID NO: 2909948 - DNA, 25 bp, Homo sapien
cagagtctgcgcgaggctgagctgg

SEQ ID NO: 2909949 - DNA, 25 bp, Homo sapien
gagttgggtggaaacttggagacaa

SEQ ID NO: 2909950 - DNA, 25 bp, Homo sapien
cgttcctctacgctggcagagttgg

SEQ ID NO: 2909951 - DNA, 25 bp, Homo sapien
ggcaaccctctcgagccattctttt

SEQ ID NO: 2909952 - DNA, 25 bp, Homo sapien
gcagggtccgggcaaccctctcgag

SEQ ID NO: 2909953 - DNA, 25 bp, Homo sapien
gaagcgcgcggtggacgggaagcgc

SEQ ID NO: 2909954 - DNA, 25 bp, Homo sapien
gcgcgcggtggacgggaagcgcagg

SEQ ID NO: 2909955 - DNA, 25 bp, Homo sapien
cccagaccggagctcaggcttgttg

SEQ ID NO: 2909956 - DNA, 25 bp, Homo sapien
ggtctagcgcaagagcagaatgccc

SEQ ID NO: 2909957 - DNA, 25 bp, Homo sapien
cttgttggggttcgtgtcctggctt

SEQ ID NO: 2909958 - DNA, 25 bp, Homo sapien
ccctaggcgagcacgtgggtctagc

SEQ ID NO: 2909959 - DNA, 25 bp, Homo sapien
tacttgggataaatgtcctgccggc

SEQ ID NO: 2909960 - DNA, 25 bp, Homo sapien
gccatgcatgtcctctaacaggtca

SEQ ID NO: 2909961 - DNA, 25 bp, Homo sapien
gttattgaaacgttgtctccctggc

SEQ ID NO: 2909962 - DNA, 25 bp, Homo sapien
gctctgaccggctgaaattctcgga

SEQ ID NO: 2909963 - DNA, 25 bp, Homo sapien
agtgttggactcctgtggttcccca

SEQ ID NO: 2909964 - DNA, 25 bp, Homo sapien
cggcttaattcaaaccctctgggag

SEQ ID NO: 2909965 - DNA, 25 bp, Homo sapien
gactctgggacacactggcaaaaca

SEQ ID NO: 2909966 - DNA, 25 bp, Homo sapien
cctgtggcggacatcccgagagtgt

SEQ ID NO: 2909967 - DNA, 25 bp, Homo sapien
acgaggagagcctttatggtctata

SEQ ID NO: 2909968 - DNA, 25 bp, Homo sapien
cttggagtaatacaacgaggagagc

SEQ ID NO: 2909969 - DNA, 25 bp, Homo sapien
ggagtaatacaacgaggagagcctt

SEQ ID NO: 2909970 - DNA, 25 bp, Homo sapien
atacaacgaggagagcctttatggt

SEQ ID NO: 2909971 - DNA, 25 bp, Homo sapien
cttccagtgagggtgccagaaagcg

SEQ ID NO: 2909972 - DNA, 25 bp, Homo sapien
gggtgccagaaagcgcagcgcaggc

SEQ ID NO: 2909973 - DNA, 25 bp, Homo sapien
catcttccagtgagggtgccagaaa

SEQ ID NO: 2909974 - DNA, 25 bp, Homo sapien
tccagtgagggtgccagaaagcgca

SEQ ID NO: 2909975 - DNA, 25 bp, Homo sapien
caccctgaggatcgggacagctgtt

SEQ ID NO: 2909976 - DNA, 25 bp, Homo sapien
aggccaccctgaggatcgggacagc

SEQ ID NO: 2909977 - DNA, 25 bp, Homo sapien
cctgaggatcgggacagctgttcct

SEQ ID NO: 2909978 - DNA, 25 bp, Homo sapien
gaggatcgggacagctgttcctttg

SEQ ID NO: 2909979 - DNA, 25 bp, Homo sapien
tttcttgaggcgcatttaaggccaa

SEQ ID NO: 2909980 - DNA, 25 bp, Homo sapien
tctggtttcgagtaaaagtcgccgc

SEQ ID NO: 2909981 - DNA, 25 bp, Homo sapien
gggcatccgctgagctacatttggc

SEQ ID NO: 2909982 - DNA, 25 bp, Homo sapien
ttaaggccaagtgactgtctcctgc

SEQ ID NO: 2909983 - DNA, 25 bp, Homo sapien
tagcctctctccctgtaacgctggg

SEQ ID NO: 2909984 - DNA, 25 bp, Homo sapien
catgctatccagtagtcggccggac

SEQ ID NO: 2909985 - DNA, 25 bp, Homo sapien
aatccccgccaatcctaggaagctg

SEQ ID NO: 2909986 - DNA, 25 bp, Homo sapien
catgcttcgtaggtgcagacagtaa

SEQ ID NO: 2909987 - DNA, 25 bp, Homo sapien
taccgtaagaatatacaattagcta

SEQ ID NO: 2909988 - DNA, 25 bp, Homo sapien
cacagtacactagaggtagggaagt

SEQ ID NO: 2909989 - DNA, 25 bp, Homo sapien
cctttcaaatcgtaaaataatatag

SEQ ID NO: 2909990 - DNA, 25 bp, Homo sapien
tttgaatcattgagagtgatgagct

SEQ ID NO: 2909991 - DNA, 25 bp, Homo sapien
caggaaaagactgtctggagaggct

SEQ ID NO: 2909992 - DNA, 25 bp, Homo sapien
aggcttgatcctggcctgacggaca

SEQ ID NO: 2909993 - DNA, 25 bp, Homo sapien
tgacggacagcagcctctgtcgtgt

SEQ ID NO: 2909994 - DNA, 25 bp, Homo sapien
tagcctttggagctgatcatggcag

SEQ ID NO: 2909995 - DNA, 25 bp, Homo sapien
gcacacaacagtgaacagctctact

SEQ ID NO: 2909996 - DNA, 25 bp, Homo sapien
gcatctggtagacagggccagtggc

SEQ ID NO: 2909997 - DNA, 25 bp, Homo sapien
gagtctggcccagatgggtaaagac

SEQ ID NO: 2909998 - DNA, 25 bp, Homo sapien
taaagacaagtgtgttggcatctgg

SEQ ID NO: 2909999 - DNA, 25 bp, Homo sapien
acccagctccttactcagaatcaca

SEQ ID NO: 2910000 - DNA, 25 bp, Homo sapien
ctgtggagaaccacatgacctcaga

SEQ ID NO: 2910001 - DNA, 25 bp, Homo sapien
ggagaaccacatgacctcagaccac

SEQ ID NO: 2910002 - DNA, 25 bp, Homo sapien
gaatcacagcaacacacttctttgg

SEQ ID NO: 2910003 - DNA, 25 bp, Homo sapien
gaaataaacatatgacgagggagag

SEQ ID NO: 2910004 - DNA, 25 bp, Homo sapien
agccccactgggaacgatgtctctc

SEQ ID NO: 2910005 - DNA, 25 bp, Homo sapien
catatgacgagggagagcctgagcc

SEQ ID NO: 2910006 - DNA, 25 bp, Homo sapien
tgtgacaaggtcactccctgaattg

SEQ ID NO: 2910007 - DNA, 25 bp, Homo sapien
gggtgtatccctagcaatccacatg

SEQ ID NO: 2910008 - DNA, 25 bp, Homo sapien
caagtcttcgctctcagcttgcggg

SEQ ID NO: 2910009 - DNA, 25 bp, Homo sapien
tcctaacaagtcttcgctctcagct

SEQ ID NO: 2910010 - DNA, 25 bp, Homo sapien
cctagcaatccacatgaaccacttt

SEQ ID NO: 2910011 - DNA, 25 bp, Homo sapien
tcttctgtttactctctcatcgtgg

SEQ ID NO: 2910012 - DNA, 25 bp, Homo sapien
tttactctctcatcgtggaagaagc

SEQ ID NO: 2910013 - DNA, 25 bp, Homo sapien
catcgtggaagaagctgcaaaggtc

SEQ ID NO: 2910014 - DNA, 25 bp, Homo sapien
ctgcaaaggtcagtgaccttagtaa

SEQ ID NO: 2910015 - DNA, 25 bp, Homo sapien
ttagtgtggcccatagagcccagag

SEQ ID NO: 2910016 - DNA, 25 bp, Homo sapien
cccagagagggtagagccatattgg

SEQ ID NO: 2910017 - DNA, 25 bp, Homo sapien
caaatcctgcgatgggcctttttcc

SEQ ID NO: 2910018 - DNA, 25 bp, Homo sapien
tttcctccctgacaagtacttagtg

SEQ ID NO: 2910019 - DNA, 25 bp, Homo sapien
tcaggaagccactgtaaacaccaga

SEQ ID NO: 2910020 - DNA, 25 bp, Homo sapien
gccctgtttgcctgtagaaccaatg

SEQ ID NO: 2910021 - DNA, 25 bp, Homo sapien
aagttttgatgagttgcacagtccc

SEQ ID NO: 2910022 - DNA, 25 bp, Homo sapien
cgataactggcctgcttcaggaagc

SEQ ID NO: 2910023 - DNA, 25 bp, Homo sapien
gactcacaccataattgttaactaa

SEQ ID NO: 2910024 - DNA, 25 bp, Homo sapien
tttccaacaggaaaacaccaccagc

SEQ ID NO: 2910025 - DNA, 25 bp, Homo sapien
cacaccataattgttaactaaaaca

SEQ ID NO: 2910026 - DNA, 25 bp, Homo sapien
catgactcacaccataattgttaac

SEQ ID NO: 2910027 - DNA, 25 bp, Homo sapien
aaacctatgtaacgtttcatgaatt

SEQ ID NO: 2910028 - DNA, 25 bp, Homo sapien
tggggcggccactgtgatctgtcca

SEQ ID NO: 2910029 - DNA, 25 bp, Homo sapien
ggcagccaaggtcttcccatcttgg

SEQ ID NO: 2910030 - DNA, 25 bp, Homo sapien
ggcggccactgtgatctgtccaggg

SEQ ID NO: 2910031 - DNA, 25 bp, Homo sapien
cattaggcactaacagggcagccaa

SEQ ID NO: 2910032 - DNA, 25 bp, Homo sapien
ccagaaagggtagctgatgggtcat

SEQ ID NO: 2910033 - DNA, 25 bp, Homo sapien
gagagacgtttcagcatttcagccc

SEQ ID NO: 2910034 - DNA, 25 bp, Homo sapien
cagtccaaggcggttctcctctaag

SEQ ID NO: 2910035 - DNA, 25 bp, Homo sapien
tgagttccagagatgtcagacctgc

SEQ ID NO: 2910036 - DNA, 25 bp, Homo sapien
tgagaatgcaaccaatgagttccag

SEQ ID NO: 2910037 - DNA, 25 bp, Homo sapien
ttctcctggatgtatatagtattgt

SEQ ID NO: 2910038 - DNA, 25 bp, Homo sapien
cgtttctgtttagcttggctgcaaa

SEQ ID NO: 2910039 - DNA, 25 bp, Homo sapien
aagctttcgcttgtgtttgggcagt

SEQ ID NO: 2910040 - DNA, 25 bp, Homo sapien
ggctgcaaagctttcgcttgtgttt

SEQ ID NO: 2910041 - DNA, 25 bp, Homo sapien
ccgccccgcacgctgttcctcgtcc

SEQ ID NO: 2910042 - DNA, 25 bp, Homo sapien
cccctctgcttcaatagccgagcct

SEQ ID NO: 2910043 - DNA, 25 bp, Homo sapien
ctctgcttcaatagccgagccttca

SEQ ID NO: 2910044 - DNA, 25 bp, Homo sapien
gcctttccactgcggtgctggccgc

SEQ ID NO: 2910045 - DNA, 25 bp, Homo sapien
ctcaaaggggctgatagcatcttga

SEQ ID NO: 2910046 - DNA, 25 bp, Homo sapien
tgataaggatagacagctcaaaggg

SEQ ID NO: 2910047 - DNA, 25 bp, Homo sapien
taggaaggctcagaaagactggaga

SEQ ID NO: 2910048 - DNA, 25 bp, Homo sapien
aagggcgatggttgagtgataggaa

SEQ ID NO: 2910049 - DNA, 25 bp, Homo sapien
tttgtttaaactctcttggaccagc

SEQ ID NO: 2910050 - DNA, 25 bp, Homo sapien
ctctgtggccactctgtggaccact

SEQ ID NO: 2910051 - DNA, 25 bp, Homo sapien
cactctcctctctggagagtgtcat

SEQ ID NO: 2910052 - DNA, 25 bp, Homo sapien
taaactctcttggaccagccacctg

SEQ ID NO: 2910053 - DNA, 25 bp, Homo sapien
taccattggactttgtgctaacagc

SEQ ID NO: 2910054 - DNA, 25 bp, Homo sapien
tttaaaggatctcacaaagtagttg

SEQ ID NO: 2910055 - DNA, 25 bp, Homo sapien
caaacatcgcctgtaaggactccag

SEQ ID NO: 2910056 - DNA, 25 bp, Homo sapien
cattgccctattataatcttgcaga

SEQ ID NO: 2910057 - DNA, 25 bp, Homo sapien
ctgtggtccaaacattcatggccaa

SEQ ID NO: 2910058 - DNA, 25 bp, Homo sapien
gtggggaacacaccacataaaacat

SEQ ID NO: 2910059 - DNA, 25 bp, Homo sapien
cattcatggccaataaatgggggtg

SEQ ID NO: 2910060 - DNA, 25 bp, Homo sapien
tggtccaaacattcatggccaataa

SEQ ID NO: 2910061 - DNA, 25 bp, Homo sapien
gttagattttcttccacgagctgat

SEQ ID NO: 2910062 - DNA, 25 bp, Homo sapien
aggagggggagtaatgagaaagttg

SEQ ID NO: 2910063 - DNA, 25 bp, Homo sapien
gtaatgagaaagttgttagattttc

SEQ ID NO: 2910064 - DNA, 25 bp, Homo sapien
gggagtaatgagaaagttgttagat

SEQ ID NO: 2910065 - DNA, 25 bp, Homo sapien
tgacagggacctcgcctttccttct

SEQ ID NO: 2910066 - DNA, 25 bp, Homo sapien
ctgacagggacctcgcctttccttc

SEQ ID NO: 2910067 - DNA, 25 bp, Homo sapien
ctcgcctttccttctcgtactggga

SEQ ID NO: 2910068 - DNA, 25 bp, Homo sapien
gacctcgcctttccttctcgtactg

SEQ ID NO: 2910069 - DNA, 25 bp, Homo sapien
tctgcgtctctctcccaaaagggaa

SEQ ID NO: 2910070 - DNA, 25 bp, Homo sapien
gggcttttgcgggaggtggggcatg

SEQ ID NO: 2910071 - DNA, 25 bp, Homo sapien
aaagggaagtagcgcccgagctgca

SEQ ID NO: 2910072 - DNA, 25 bp, Homo sapien
ccaaaagggaagtagcgcccgagct

SEQ ID NO: 2910073 - DNA, 25 bp, Homo sapien
ttaggattatctgggcaaaagtcag

SEQ ID NO: 2910074 - DNA, 25 bp, Homo sapien
aatgaaaggctctcaaaattagaga

SEQ ID NO: 2910075 - DNA, 25 bp, Homo sapien
ccatgtgttatcatctggaaatgaa

SEQ ID NO: 2910076 - DNA, 25 bp, Homo sapien
aattagagattaggattatctgggc

SEQ ID NO: 2910077 - DNA, 25 bp, Homo sapien
tgcgtttgaccatctgtcagtaaag

SEQ ID NO: 2910078 - DNA, 25 bp, Homo sapien
agaagcaagtgccaactcccctgtt

SEQ ID NO: 2910079 - DNA, 25 bp, Homo sapien
gggtgctcacatcatggagacagca

SEQ ID NO: 2910080 - DNA, 25 bp, Homo sapien
aactcccctgtttcttgggtgctca

SEQ ID NO: 2910081 - DNA, 25 bp, Homo sapien
tgtagagtgatatgtttctcatccc

SEQ ID NO: 2910082 - DNA, 25 bp, Homo sapien
ctgtagagtgatatgtttctcatcc

SEQ ID NO: 2910083 - DNA, 25 bp, Homo sapien
tctcttagttgtccaagccccaagg

SEQ ID NO: 2910084 - DNA, 25 bp, Homo sapien
gactctgttcgacaatggtatgcca

SEQ ID NO: 2910085 - DNA, 25 bp, Homo sapien
ggtatgccagttccggatgctgcca

SEQ ID NO: 2910086 - DNA, 25 bp, Homo sapien
tctggcccaggcaactctcttagtt

SEQ ID NO: 2910087 - DNA, 25 bp, Homo sapien
cctcgacagttttctgggattgaca

SEQ ID NO: 2910088 - DNA, 25 bp, Homo sapien
caacagtgttttagctgcagcagcc

SEQ ID NO: 2910089 - DNA, 25 bp, Homo sapien
gcagcagccagaacaccgtattcag

SEQ ID NO: 2910090 - DNA, 25 bp, Homo sapien
gttaacccacgccttctcactggag

SEQ ID NO: 2910091 - DNA, 25 bp, Homo sapien
tctgtgtgattgaacataggaatgc

SEQ ID NO: 2910092 - DNA, 25 bp, Homo sapien
acagcattcgctgctcggcttttag

SEQ ID NO: 2910093 - DNA, 25 bp, Homo sapien
aggaggttcaggctgacacagcatt

SEQ ID NO: 2910094 - DNA, 25 bp, Homo sapien
gattgaacataggaatgcaggagag

SEQ ID NO: 2910095 - DNA, 25 bp, Homo sapien
cacttggccctcaaagcgtgttgac

SEQ ID NO: 2910096 - DNA, 25 bp, Homo sapien
gcttatcagcagctctaggtggtcc

SEQ ID NO: 2910097 - DNA, 25 bp, Homo sapien
gcgccaacatgggaacttgtttgga

SEQ ID NO: 2910098 - DNA, 25 bp, Homo sapien
tggtccacctgctttgtggcgccaa

SEQ ID NO: 2910099 - DNA, 25 bp, Homo sapien
catagcccagaactatagcctagat

SEQ ID NO: 2910100 - DNA, 25 bp, Homo sapien
gcagtggtatttacagatgcatccc

SEQ ID NO: 2910101 - DNA, 25 bp, Homo sapien
tatgttgccctgggcggaatgcagt

SEQ ID NO: 2910102 - DNA, 25 bp, Homo sapien
cagatgcatccccagtactgatcag

SEQ ID NO: 2910103 - DNA, 25 bp, Homo sapien
ggagacaccatgaactgagcagaat

SEQ ID NO: 2910104 - DNA, 25 bp, Homo sapien
aaatctcttggctcaggacacagtg

SEQ ID NO: 2910105 - DNA, 25 bp, Homo sapien
tgagcagaatcatacgggcagccac

SEQ ID NO: 2910106 - DNA, 25 bp, Homo sapien
acgttctcagctgcggtcgggtgca

SEQ ID NO: 2910107 - DNA, 25 bp, Homo sapien
cagccgtaaacctctttaaatggct

SEQ ID NO: 2910108 - DNA, 25 bp, Homo sapien
tctctcaatgccactgtttccttta

SEQ ID NO: 2910109 - DNA, 25 bp, Homo sapien
actgctaacaccttggtatatatcc

SEQ ID NO: 2910110 - DNA, 25 bp, Homo sapien
ataggagaaggaattagaatccgtg

SEQ ID NO: 2910111 - DNA, 25 bp, Homo sapien
tcacgatgagatggtggagtccctg

SEQ ID NO: 2910112 - DNA, 25 bp, Homo sapien
caggatgccagtgacgtggaaatac

SEQ ID NO: 2910113 - DNA, 25 bp, Homo sapien
ggattagttgagatgagattttcag

SEQ ID NO: 2910114 - DNA, 25 bp, Homo sapien
aaaccagtgaagaacgacattgctc

SEQ ID NO: 2910115 - DNA, 25 bp, Homo sapien
acagcccctatgctcatgggaaccg

SEQ ID NO: 2910116 - DNA, 25 bp, Homo sapien
ctatgctcatgggaaccgtcacttc

SEQ ID NO: 2910117 - DNA, 25 bp, Homo sapien
tgctcatgggaaccgtcacttctga

SEQ ID NO: 2910118 - DNA, 25 bp, Homo sapien
atgggaaccgtcacttctgatgcac

SEQ ID NO: 2910119 - DNA, 25 bp, Homo sapien
tgggctgcctccatatcctgcacat

SEQ ID NO: 2910120 - DNA, 25 bp, Homo sapien
gctgcctccatatcctgcacatact

SEQ ID NO: 2910121 - DNA, 25 bp, Homo sapien
gggctgcctccatatcctgcacata

SEQ ID NO: 2910122 - DNA, 25 bp, Homo sapien
tgcctccatatcctgcacatactcc

SEQ ID NO: 2910123 - DNA, 25 bp, Homo sapien
tcactaggtaagttgggtgtcactg

SEQ ID NO: 2910124 - DNA, 25 bp, Homo sapien
ccaggtacagcttggaacgccacat

SEQ ID NO: 2910125 - DNA, 25 bp, Homo sapien
aataatccgatcatttgaggcagac

SEQ ID NO: 2910126 - DNA, 25 bp, Homo sapien
aaagatgctgtccaataatccgatc

SEQ ID NO: 2910127 - DNA, 25 bp, Homo sapien
gggcctataattaggtgcaaataac

SEQ ID NO: 2910128 - DNA, 25 bp, Homo sapien
ttagagggggcctataattaggtgc

SEQ ID NO: 2910129 - DNA, 25 bp, Homo sapien
gggggcctataattaggtgcaaata

SEQ ID NO: 2910130 - DNA, 25 bp, Homo sapien
gagggggcctataattaggtgcaaa

SEQ ID NO: 2910131 - DNA, 25 bp, Homo sapien
ggaggggctcttgtcggctgtggga

SEQ ID NO: 2910132 - DNA, 25 bp, Homo sapien
tcaatgcaggcagtaataatggcaa

SEQ ID NO: 2910133 - DNA, 25 bp, Homo sapien
ctcttgtcggctgtgggaggggcat

SEQ ID NO: 2910134 - DNA, 25 bp, Homo sapien
catctgcttcccatggctgatgaga

SEQ ID NO: 2910135 - DNA, 25 bp, Homo sapien
ttctcagagaccacgctaatgtgtg

SEQ ID NO: 2910136 - DNA, 25 bp, Homo sapien
tacttataagccaagatgagcacct

SEQ ID NO: 2910137 - DNA, 25 bp, Homo sapien
gtgcccacagcttggtacttataag

SEQ ID NO: 2910138 - DNA, 25 bp, Homo sapien
agcgaacacagctgggcatcttctc

SEQ ID NO: 2910139 - DNA, 25 bp, Homo sapien
taccagtgaatgtagcagtctgaag

SEQ ID NO: 2910140 - DNA, 25 bp, Homo sapien
tagcagtctgaagatataagttttc

SEQ ID NO: 2910141 - DNA, 25 bp, Homo sapien
cgatgggacgggtcaaaacttgaat

SEQ ID NO: 2910142 - DNA, 25 bp, Homo sapien
cttggattgtcggtagcagacgcga

SEQ ID NO: 2910143 - DNA, 25 bp, Homo sapien
tgaatactggcttatcaacagcttg

SEQ ID NO: 2910144 - DNA, 25 bp, Homo sapien
gcagctaaagctataagcagaggat

SEQ ID NO: 2910145 - DNA, 25 bp, Homo sapien
aacagccatgtagggttttgggcag

SEQ ID NO: 2910146 - DNA, 25 bp, Homo sapien
ttcctgagaataatgaacagccatg

SEQ ID NO: 2910147 - DNA, 25 bp, Homo sapien
ttgggttacttcactaactctggac

SEQ ID NO: 2910148 - DNA, 25 bp, Homo sapien
gggttacttcactaactctggacac

SEQ ID NO: 2910149 - DNA, 25 bp, Homo sapien
caaaacataaatccgcacaaataaa

SEQ ID NO: 2910150 - DNA, 25 bp, Homo sapien
aataaactccaaagtgagccctctc

SEQ ID NO: 2910151 - DNA, 25 bp, Homo sapien
tgctaggttcgccacagccaaccat

SEQ ID NO: 2910152 - DNA, 25 bp, Homo sapien
ccttccccaccatagctattcggtc

SEQ ID NO: 2910153 - DNA, 25 bp, Homo sapien
atagctattcggtccccctgcagct

SEQ ID NO: 2910154 - DNA, 25 bp, Homo sapien
cacagctctgctaggttcgccacag

SEQ ID NO: 2910155 - DNA, 25 bp, Homo sapien
gctctaagaaatgcttgcgtattcc

SEQ ID NO: 2910156 - DNA, 25 bp, Homo sapien
aaatgcttgcgtattccacaaaacc

SEQ ID NO: 2910157 - DNA, 25 bp, Homo sapien
taagaaatgcttgcgtattccacaa

SEQ ID NO: 2910158 - DNA, 25 bp, Homo sapien
gggaagctctaagaaatgcttgcgt

SEQ ID NO: 2910159 - DNA, 25 bp, Homo sapien
tcctcttcattggtgttacccatga

SEQ ID NO: 2910160 - DNA, 25 bp, Homo sapien
tgtgtttgtccagtagctgctgacc

SEQ ID NO: 2910161 - DNA, 25 bp, Homo sapien
tactgtgaagcagccccgttggaga

SEQ ID NO: 2910162 - DNA, 25 bp, Homo sapien
catgacaaccctgctggtgttctca

SEQ ID NO: 2910163 - DNA, 25 bp, Homo sapien
atttacccatttgcaaattccacgg

SEQ ID NO: 2910164 - DNA, 25 bp, Homo sapien
gagcagattctttggctccttgtac

SEQ ID NO: 2910165 - DNA, 25 bp, Homo sapien
aacctcggcaacatgactgagcctg

SEQ ID NO: 2910166 - DNA, 25 bp, Homo sapien
ggctccttgtacagagtatggtatt

SEQ ID NO: 2910167 - DNA, 25 bp, Homo sapien
aatgcatcaacaagaaggtcccacc

SEQ ID NO: 2910168 - DNA, 25 bp, Homo sapien
gaaacagccaggtctggtagaccca

SEQ ID NO: 2910169 - DNA, 25 bp, Homo sapien
aagagacatccttggcactcccaga

SEQ ID NO: 2910170 - DNA, 25 bp, Homo sapien
ctctgggtatggacaagaaacagcc

SEQ ID NO: 2910171 - DNA, 25 bp, Homo sapien
cgtttatagacatggaggcaggcaa

SEQ ID NO: 2910172 - DNA, 25 bp, Homo sapien
gcctaaattaggagctctagacctg

SEQ ID NO: 2910173 - DNA, 25 bp, Homo sapien
ccaactgttggccagaatgaattct

SEQ ID NO: 2910174 - DNA, 25 bp, Homo sapien
tgcttttatgttgggacagctgcct

SEQ ID NO: 2910175 - DNA, 25 bp, Homo sapien
ttctagaatgttagcagtctgattg

SEQ ID NO: 2910176 - DNA, 25 bp, Homo sapien
agaatgttagcagtctgattgctga

SEQ ID NO: 2910177 - DNA, 25 bp, Homo sapien
attttctagaatgttagcagtctga

SEQ ID NO: 2910178 - DNA, 25 bp, Homo sapien
tctagaatgttagcagtctgattgc

SEQ ID NO: 2910179 - DNA, 25 bp, Homo sapien
tgagtaaaatagtccaaacggtagc

SEQ ID NO: 2910180 - DNA, 25 bp, Homo sapien
agtaaaatagtccaaacggtagcag

SEQ ID NO: 2910181 - DNA, 25 bp, Homo sapien
atgagtaaaatagtccaaacggtag

SEQ ID NO: 2910182 - DNA, 25 bp, Homo sapien
gagtaaaatagtccaaacggtagca

SEQ ID NO: 2910183 - DNA, 25 bp, Homo sapien
attttggatttcgacaggagaccca

SEQ ID NO: 2910184 - DNA, 25 bp, Homo sapien
agaaattttggatttcgacaggaga

SEQ ID NO: 2910185 - DNA, 25 bp, Homo sapien
ttggatttcgacaggagacccattc

SEQ ID NO: 2910186 - DNA, 25 bp, Homo sapien
tggatttcgacaggagacccattct

SEQ ID NO: 2910187 - DNA, 25 bp, Homo sapien
agttcctttttcagagacatatata

SEQ ID NO: 2910188 - DNA, 25 bp, Homo sapien
gttcctttttcagagacatatatac

SEQ ID NO: 2910189 - DNA, 25 bp, Homo sapien
gcccattcgggtggagatcagcatg

SEQ ID NO: 2910190 - DNA, 25 bp, Homo sapien
cactgagaatccgtaggtgtgcact

SEQ ID NO: 2910191 - DNA, 25 bp, Homo sapien
tgctaagtggatccttgctcaggag

SEQ ID NO: 2910192 - DNA, 25 bp, Homo sapien
tagtggtagcttcctctttagccaa

SEQ ID NO: 2910193 - DNA, 25 bp, Homo sapien
ctgcaatgctgcacgagggtggttt

SEQ ID NO: 2910194 - DNA, 25 bp, Homo sapien
cagaacacgctccatgaagggcccg

SEQ ID NO: 2910195 - DNA, 25 bp, Homo sapien
caatgctgcacgagggtggttttta

SEQ ID NO: 2910196 - DNA, 25 bp, Homo sapien
aacacgctccatgaagggcccgttc

SEQ ID NO: 2910197 - DNA, 25 bp, Homo sapien
cgtcttcagatactgaaatccatac

SEQ ID NO: 2910198 - DNA, 25 bp, Homo sapien
caattgccgtcttcagatactgaaa

SEQ ID NO: 2910199 - DNA, 25 bp, Homo sapien
tgaaatccatacacaataatattgc

SEQ ID NO: 2910200 - DNA, 25 bp, Homo sapien
tgaattctcctatcaattgccgtct

SEQ ID NO: 2910201 - DNA, 25 bp, Homo sapien
tggttgcaaaggctgtttagcgccc

SEQ ID NO: 2910202 - DNA, 25 bp, Homo sapien
caaaggctgtttagcgcccgctctg

SEQ ID NO: 2910203 - DNA, 25 bp, Homo sapien
gttgcaaaggctgtttagcgcccgc

SEQ ID NO: 2910204 - DNA, 25 bp, Homo sapien
ctgtggttgcaaaggctgtttagcg

SEQ ID NO: 2910205 - DNA, 25 bp, Homo sapien
tcctgtgtctgaattgactgggtgt

SEQ ID NO: 2910206 - DNA, 25 bp, Homo sapien
tgggcaccttctgcgtctagaatat

SEQ ID NO: 2910207 - DNA, 25 bp, Homo sapien
ggctccacgttgcagctccaacggg

SEQ ID NO: 2910208 - DNA, 25 bp, Homo sapien
cagaaacaggtttacggcagttggc

SEQ ID NO: 2910209 - DNA, 25 bp, Homo sapien
gatgatgagggagggattccagtgt

SEQ ID NO: 2910210 - DNA, 25 bp, Homo sapien
tgatgagggagggattccagtgttt

SEQ ID NO: 2910211 - DNA, 25 bp, Homo sapien
atgagggagggattccagtgtttac

SEQ ID NO: 2910212 - DNA, 25 bp, Homo sapien
ctggatgatgagggagggattccag

SEQ ID NO: 2910213 - DNA, 25 bp, Homo sapien
caggggggcttttttgagaagctgc

SEQ ID NO: 2910214 - DNA, 25 bp, Homo sapien
gggcttttttgagaagctgctgagc

SEQ ID NO: 2910215 - DNA, 25 bp, Homo sapien
tcaggggggcttttttgagaagctg

SEQ ID NO: 2910216 - DNA, 25 bp, Homo sapien
ggggggcttttttgagaagctgctg

SEQ ID NO: 2910217 - DNA, 25 bp, Homo sapien
ctgtctgtggccccaaaagcaaagc

SEQ ID NO: 2910218 - DNA, 25 bp, Homo sapien
tctgtggccccaaaagcaaagcagc

SEQ ID NO: 2910219 - DNA, 25 bp, Homo sapien
ccctgtcttggcagcgtgtggagca

SEQ ID NO: 2910220 - DNA, 25 bp, Homo sapien
cctgtcttggcagcgtgtggagcat

SEQ ID NO: 2910221 - DNA, 25 bp, Homo sapien
ttcacaagttcagcggcctttgcac

SEQ ID NO: 2910222 - DNA, 25 bp, Homo sapien
tcacaagttcagcggcctttgcaca

SEQ ID NO: 2910223 - DNA, 25 bp, Homo sapien
tttccttcgggctttcacaagttca

SEQ ID NO: 2910224 - DNA, 25 bp, Homo sapien
ctttcacaagttcagcggcctttgc

SEQ ID NO: 2910225 - DNA, 25 bp, Homo sapien
ctgaagagaatggcacactcacacc

SEQ ID NO: 2910226 - DNA, 25 bp, Homo sapien
ggctcttgactgatgctgaagagaa

SEQ ID NO: 2910227 - DNA, 25 bp, Homo sapien
cagggctcttgactgatgctgaaga

SEQ ID NO: 2910228 - DNA, 25 bp, Homo sapien
tgaagagaatggcacactcacaccc

SEQ ID NO: 2910229 - DNA, 25 bp, Homo sapien
gagagggcagctgggagcagcttca

SEQ ID NO: 2910230 - DNA, 25 bp, Homo sapien
agagggcagctgggagcagcttcat

SEQ ID NO: 2910231 - DNA, 25 bp, Homo sapien
cagagagggcagctgggagcagctt

SEQ ID NO: 2910232 - DNA, 25 bp, Homo sapien
cgcagagagggcagctgggagcagc

SEQ ID NO: 2910233 - DNA, 25 bp, Homo sapien
gtcagcagagctgcgagtgtggatg

SEQ ID NO: 2910234 - DNA, 25 bp, Homo sapien
tgtgcctctgttcccgtatccctgc

SEQ ID NO: 2910235 - DNA, 25 bp, Homo sapien
agcagagctgcgagtgtggatgcca

SEQ ID NO: 2910236 - DNA, 25 bp, Homo sapien
ctgtcagcagagctgcgagtgtgga

SEQ ID NO: 2910237 - DNA, 25 bp, Homo sapien
tcactctaatgtccgtgtttgagga

SEQ ID NO: 2910238 - DNA, 25 bp, Homo sapien
tgtccgtgtttgaggactgcattgc

SEQ ID NO: 2910239 - DNA, 25 bp, Homo sapien
aggactgcattgctggtgaccgctg

SEQ ID NO: 2910240 - DNA, 25 bp, Homo sapien
gggtgggaataatcactctaatgtc

SEQ ID NO: 2910241 - DNA, 25 bp, Homo sapien
ccagatacaggatctgttgactcac

SEQ ID NO: 2910242 - DNA, 25 bp, Homo sapien
gggtcacattgcatgtttgctcagc

SEQ ID NO: 2910243 - DNA, 25 bp, Homo sapien
gcactgaggtcaagtccctgagtcc

SEQ ID NO: 2910244 - DNA, 25 bp, Homo sapien
cagcaagatacactgagggacccca

SEQ ID NO: 2910245 - DNA, 25 bp, Homo sapien
cctgagagataattggattggccca

SEQ ID NO: 2910246 - DNA, 25 bp, Homo sapien
tggtttgtcaagacctctcgtggcc

SEQ ID NO: 2910247 - DNA, 25 bp, Homo sapien
gatgtaatcggttcagtccagacca

SEQ ID NO: 2910248 - DNA, 25 bp, Homo sapien
tagaggcgcttgctaaaggacacta

SEQ ID NO: 2910249 - DNA, 25 bp, Homo sapien
aatggctagacataatggtgtgcac

SEQ ID NO: 2910250 - DNA, 25 bp, Homo sapien
aaagttgttagcaggccgggtgttg

SEQ ID NO: 2910251 - DNA, 25 bp, Homo sapien
gagcttgcccagatgcaaggcacaa

SEQ ID NO: 2910252 - DNA, 25 bp, Homo sapien
tgagcaaaatattgagactcctgtc

SEQ ID NO: 2910253 - DNA, 25 bp, Homo sapien
tgtggttcctatactcttgatggtt

SEQ ID NO: 2910254 - DNA, 25 bp, Homo sapien
aacctatttctagggctttctatgc

SEQ ID NO: 2910255 - DNA, 25 bp, Homo sapien
cctatactcttgatggtttaaccta

SEQ ID NO: 2910256 - DNA, 25 bp, Homo sapien
taacctatttctagggctttctatg

SEQ ID NO: 2910257 - DNA, 25 bp, Homo sapien
gctcatgtccccattggcatcttct

SEQ ID NO: 2910258 - DNA, 25 bp, Homo sapien
ggagctcatgtccccattggcatct

SEQ ID NO: 2910259 - DNA, 25 bp, Homo sapien
agctcatgtccccattggcatcttc

SEQ ID NO: 2910260 - DNA, 25 bp, Homo sapien
gaggagctcatgtccccattggcat

SEQ ID NO: 2910261 - DNA, 25 bp, Homo sapien
tggatgccgttaaaacctctccaga

SEQ ID NO: 2910262 - DNA, 25 bp, Homo sapien
tccagaagatgctggtttcccagcc

SEQ ID NO: 2910263 - DNA, 25 bp, Homo sapien
cgttaaaacctctccagaagatgct

SEQ ID NO: 2910264 - DNA, 25 bp, Homo sapien
ccagcagcttcagagttacgcaggg

SEQ ID NO: 2910265 - DNA, 25 bp, Homo sapien
tggaggaggccccattgctgcaccc

SEQ ID NO: 2910266 - DNA, 25 bp, Homo sapien
gcccttgggaaacccatgtggagga

SEQ ID NO: 2910267 - DNA, 25 bp, Homo sapien
gttgatgacagctggagcaatgacc

SEQ ID NO: 2910268 - DNA, 25 bp, Homo sapien
gataagagctttcatcatagatgtg

SEQ ID NO: 2910269 - DNA, 25 bp, Homo sapien
tggggggcttgagcatcgctgctcc

SEQ ID NO: 2910270 - DNA, 25 bp, Homo sapien
gggggcttgagcatcgctgctcctt

SEQ ID NO: 2910271 - DNA, 25 bp, Homo sapien
gtggggggcttgagcatcgctgctc

SEQ ID NO: 2910272 - DNA, 25 bp, Homo sapien
gggcttgagcatcgctgctcctttg

SEQ ID NO: 2910273 - DNA, 25 bp, Homo sapien
gcggacaaagctcttggcatgacag

SEQ ID NO: 2910274 - DNA, 25 bp, Homo sapien
acagggctctgtcccaaagcggaca

SEQ ID NO: 2910275 - DNA, 25 bp, Homo sapien
gtgagactgcgtggcgtttctgttc

SEQ ID NO: 2910276 - DNA, 25 bp, Homo sapien
tgtcccaaagcggacaaagctcttg

SEQ ID NO: 2910277 - DNA, 25 bp, Homo sapien
cattgcaagtttaatcaaggacagg

SEQ ID NO: 2910278 - DNA, 25 bp, Homo sapien
tgtcattgcaagtttaatcaaggac

SEQ ID NO: 2910279 - DNA, 25 bp, Homo sapien
caagtttaatcaaggacagggaccg

SEQ ID NO: 2910280 - DNA, 25 bp, Homo sapien
ctgggcattgggcactacctgggct

SEQ ID NO: 2910281 - DNA, 25 bp, Homo sapien
ttgtcctgggatgaaacaggcatga

SEQ ID NO: 2910282 - DNA, 25 bp, Homo sapien
tgagcttgtcctgggatgaaacagg

SEQ ID NO: 2910283 - DNA, 25 bp, Homo sapien
gctggtgacactcggaacctgttgc

SEQ ID NO: 2910284 - DNA, 25 bp, Homo sapien
aacctgttgccagggcaggcgagta

SEQ ID NO: 2910285 - DNA, 25 bp, Homo sapien
aattaggtccgtttggtgtgaagag

SEQ ID NO: 2910286 - DNA, 25 bp, Homo sapien
aagaggacaggtggactccttagaa

SEQ ID NO: 2910287 - DNA, 25 bp, Homo sapien
tggactccttagaaggcggcccaag

SEQ ID NO: 2910288 - DNA, 25 bp, Homo sapien
acaggtggactccttagaaggcggc

SEQ ID NO: 2910289 - DNA, 25 bp, Homo sapien
cttcattaacctccgttgctcctaa

SEQ ID NO: 2910290 - DNA, 25 bp, Homo sapien
ttaacctccgttgctcctaaaggca

SEQ ID NO: 2910291 - DNA, 25 bp, Homo sapien
atttccacttcagtcgcactaccgc

SEQ ID NO: 2910292 - DNA, 25 bp, Homo sapien
actaccgctggctgccccattgtgg

SEQ ID NO: 2910293 - DNA, 25 bp, Homo sapien
caaaatttcatctggcatccggaat

SEQ ID NO: 2910294 - DNA, 25 bp, Homo sapien
gagagtcccaatagcagaggaactg

SEQ ID NO: 2910295 - DNA, 25 bp, Homo sapien
acaaatctgaagctcctcgcaggag

SEQ ID NO: 2910296 - DNA, 25 bp, Homo sapien
ctggtgagcccgggccaaaatttca

SEQ ID NO: 2910297 - DNA, 25 bp, Homo sapien
tatttctctccttgcggctttgggc

SEQ ID NO: 2910298 - DNA, 25 bp, Homo sapien
ctcttcgtgcggctccaggcaactg

SEQ ID NO: 2910299 - DNA, 25 bp, Homo sapien
caggcaactgccaacagatggcgcc

SEQ ID NO: 2910300 - DNA, 25 bp, Homo sapien
tccacctcttcgtgcggctccaggc

SEQ ID NO: 2910301 - DNA, 25 bp, Homo sapien
gatcacggatcgagctctttactgg

SEQ ID NO: 2910302 - DNA, 25 bp, Homo sapien
tagacattaattctttcacgaggat

SEQ ID NO: 2910303 - DNA, 25 bp, Homo sapien
gccatccctcgaggaagtttcatca

SEQ ID NO: 2910304 - DNA, 25 bp, Homo sapien
ttaattctttcacgaggatcacgga

SEQ ID NO: 2910305 - DNA, 25 bp, Homo sapien
gacaaattggcaaagacaaaggtgg

SEQ ID NO: 2910306 - DNA, 25 bp, Homo sapien
tctgtgtcaccaaaccccagggaca

SEQ ID NO: 2910307 - DNA, 25 bp, Homo sapien
ccccagggacaaattggcaaagaca

SEQ ID NO: 2910308 - DNA, 25 bp, Homo sapien
ttttctggccactgcctctgtgtca

SEQ ID NO: 2910309 - DNA, 25 bp, Homo sapien
ccaagggctccccgttgatggcgat

SEQ ID NO: 2910310 - DNA, 25 bp, Homo sapien
caagggctccccgttgatggcgatg

SEQ ID NO: 2910311 - DNA, 25 bp, Homo sapien
ttagggtgaagtcctcgacatcaaa

SEQ ID NO: 2910312 - DNA, 25 bp, Homo sapien
tccccgtagaggcaccagtgccatt

SEQ ID NO: 2910313 - DNA, 25 bp, Homo sapien
ggtgaagtcctcgacatcaaatttc

SEQ ID NO: 2910314 - DNA, 25 bp, Homo sapien
tctccccgtagaggcaccagtgcca

SEQ ID NO: 2910315 - DNA, 25 bp, Homo sapien
tggtccagtggttaagataaagcgt

SEQ ID NO: 2910316 - DNA, 25 bp, Homo sapien
ttcccattcaaccacgctgtcttgg

SEQ ID NO: 2910317 - DNA, 25 bp, Homo sapien
gaaagcgctccatgggcttcacaat

SEQ ID NO: 2910318 - DNA, 25 bp, Homo sapien
cgtttgtatcgggtcctgcatttgc

SEQ ID NO: 2910319 - DNA, 25 bp, Homo sapien
agggatccgcggggatctgggtggc

SEQ ID NO: 2910320 - DNA, 25 bp, Homo sapien
ctgtaaaagggatccgcggggatct

SEQ ID NO: 2910321 - DNA, 25 bp, Homo sapien
tggcacactcatggtgtttgccaca

SEQ ID NO: 2910322 - DNA, 25 bp, Homo sapien
cacactcatggtgtttgccacagcc

SEQ ID NO: 2910323 - DNA, 25 bp, Homo sapien
tccggcttgtgtattctggcagctg

SEQ ID NO: 2910324 - DNA, 25 bp, Homo sapien
cttgtgtattctggcagctgtgttt

SEQ ID NO: 2910325 - DNA, 25 bp, Homo sapien
ggcttgtgtattctggcagctgtgt

SEQ ID NO: 2910326 - DNA, 25 bp, Homo sapien
acctccggcttgtgtattctggcag

SEQ ID NO: 2910327 - DNA, 25 bp, Homo sapien
ggtaaaaggaccaattcatcagaaa

SEQ ID NO: 2910328 - DNA, 25 bp, Homo sapien
acagattggcaaaaaacatgatcca

SEQ ID NO: 2910329 - DNA, 25 bp, Homo sapien
cagatataccatgcaagcagcaatc

SEQ ID NO: 2910330 - DNA, 25 bp, Homo sapien
gagtgactatgctaatgtcaaacag

SEQ ID NO: 2910331 - DNA, 25 bp, Homo sapien
tgtaggcatctgtaaattctgttgt

SEQ ID NO: 2910332 - DNA, 25 bp, Homo sapien
gctttgaaggtgcaaaactttatat

SEQ ID NO: 2910333 - DNA, 25 bp, Homo sapien
taagtgtcttattggagtgatagct

SEQ ID NO: 2910334 - DNA, 25 bp, Homo sapien
tgttgaagtcttaatcagcagatta

SEQ ID NO: 2910335 - DNA, 25 bp, Homo sapien
ggcgcccagcctagcatgtctactt

SEQ ID NO: 2910336 - DNA, 25 bp, Homo sapien
tgattgggccattgtatgtaaggta

SEQ ID NO: 2910337 - DNA, 25 bp, Homo sapien
tagaatgttttcctaggcctaggcc

SEQ ID NO: 2910338 - DNA, 25 bp, Homo sapien
tgtaaggtaatgctctgcttagaaa

SEQ ID NO: 2910339 - DNA, 25 bp, Homo sapien
tcacctagagggcacaagattgctg

SEQ ID NO: 2910340 - DNA, 25 bp, Homo sapien
tgtaggacagggattcttaaactcg

SEQ ID NO: 2910341 - DNA, 25 bp, Homo sapien
gctaatagtggtacaaagctagatc

SEQ ID NO: 2910342 - DNA, 25 bp, Homo sapien
gcgcctggccgtgactaggtcttta

SEQ ID NO: 2910343 - DNA, 25 bp, Homo sapien
ctttaagtgaatgcccttgcagaat

SEQ ID NO: 2910344 - DNA, 25 bp, Homo sapien
cttgcagaatgtatgttgtatgttt

SEQ ID NO: 2910345 - DNA, 25 bp, Homo sapien
gcccttgcagaatgtatgttgtatg

SEQ ID NO: 2910346 - DNA, 25 bp, Homo sapien
gctttaagtgaatgcccttgcagaa

SEQ ID NO: 2910347 - DNA, 25 bp, Homo sapien
tgcaggttccgtgggactggagccc

SEQ ID NO: 2910348 - DNA, 25 bp, Homo sapien
gcgcccgctactcgaactcgaggag

SEQ ID NO: 2910349 - DNA, 25 bp, Homo sapien
tgcggcgcagagcaagtacttcttg

SEQ ID NO: 2910350 - DNA, 25 bp, Homo sapien
tacttcttgcggctgtggggacgcc

SEQ ID NO: 2910351 - DNA, 25 bp, Homo sapien
ggacccgtacgctgctgcgctgacg

SEQ ID NO: 2910352 - DNA, 25 bp, Homo sapien
cccggacccgtacgctgctgcgctg

SEQ ID NO: 2910353 - DNA, 25 bp, Homo sapien
cgacccggacccgtacgctgctgcg

SEQ ID NO: 2910354 - DNA, 25 bp, Homo sapien
cccgtacgctgctgcgctgacgtgg

SEQ ID NO: 2910355 - DNA, 25 bp, Homo sapien
caaagagggccagtaacatcaagtg

SEQ ID NO: 2910356 - DNA, 25 bp, Homo sapien
gtgcattgaggtttctgcttaaacc

SEQ ID NO: 2910357 - DNA, 25 bp, Homo sapien
tatttatcctctgtacaaagagggc

SEQ ID NO: 2910358 - DNA, 25 bp, Homo sapien
acatcaagtgcattgaggtttctgc

SEQ ID NO: 2910359 - DNA, 25 bp, Homo sapien
gcatctgacaacattgagcttttcc

SEQ ID NO: 2910360 - DNA, 25 bp, Homo sapien
gggttgacctgctgcatctgacaac

SEQ ID NO: 2910361 - DNA, 25 bp, Homo sapien
tgacctgctgcatctgacaacattg

SEQ ID NO: 2910362 - DNA, 25 bp, Homo sapien
tcagtggggttgacctgctgcatct

SEQ ID NO: 2910363 - DNA, 25 bp, Homo sapien
ggcaggaatcagcatttcacacaag

SEQ ID NO: 2910364 - DNA, 25 bp, Homo sapien
agcgtgagagacacctggcgactgc

SEQ ID NO: 2910365 - DNA, 25 bp, Homo sapien
gatacctcagacacatggagttggt

SEQ ID NO: 2910366 - DNA, 25 bp, Homo sapien
ctctagaacagtgacggaggcaacc

SEQ ID NO: 2910367 - DNA, 25 bp, Homo sapien
tcttagacctcatgctaacatgagc

SEQ ID NO: 2910368 - DNA, 25 bp, Homo sapien
ttcctgagcccctccacatggttgg

SEQ ID NO: 2910369 - DNA, 25 bp, Homo sapien
acagcacttcttagacctcatgcta

SEQ ID NO: 2910370 - DNA, 25 bp, Homo sapien
tcatgctaacatgagctgctgccat

SEQ ID NO: 2910371 - DNA, 25 bp, Homo sapien
tcaagtgttactctgacatctggtt

SEQ ID NO: 2910372 - DNA, 25 bp, Homo sapien
gcttccagttcaagtgttactctga

SEQ ID NO: 2910373 - DNA, 25 bp, Homo sapien
agttcaagtgttactctgacatctg

SEQ ID NO: 2910374 - DNA, 25 bp, Homo sapien
caagtgttactctgacatctggttt

SEQ ID NO: 2910375 - DNA, 25 bp, Homo sapien
tgagtggattcacccccaaggtcag

SEQ ID NO: 2910376 - DNA, 25 bp, Homo sapien
tccttttcagtggtgtgtagcagca

SEQ ID NO: 2910377 - DNA, 25 bp, Homo sapien
accacagctccgacccatgtgttgg

SEQ ID NO: 2910378 - DNA, 25 bp, Homo sapien
tagcagcaggtatacaggaaaatgt

SEQ ID NO: 2910379 - DNA, 25 bp, Homo sapien
gcctgtttgagtaccactggcgcca

SEQ ID NO: 2910380 - DNA, 25 bp, Homo sapien
gagaggtcgcagatgtccttcgcat

SEQ ID NO: 2910381 - DNA, 25 bp, Homo sapien
ctgtgagtcggtctgatgaggccta

SEQ ID NO: 2910382 - DNA, 25 bp, Homo sapien
gctgctcgtagcctgaatacttgag

SEQ ID NO: 2910383 - DNA, 25 bp, Homo sapien
tgtctcccagaaggaagtagtccaa

SEQ ID NO: 2910384 - DNA, 25 bp, Homo sapien
ctcccagaaggaagtagtccaagta

SEQ ID NO: 2910385 - DNA, 25 bp, Homo sapien
cccactgtctcccagaaggaagtag

SEQ ID NO: 2910386 - DNA, 25 bp, Homo sapien
cactgtctcccagaaggaagtagtc

SEQ ID NO: 2910387 - DNA, 25 bp, Homo sapien
tggcttcctcagatttcagcaccga

SEQ ID NO: 2910388 - DNA, 25 bp, Homo sapien
ttttcgcaggccatctttagggact

SEQ ID NO: 2910389 - DNA, 25 bp, Homo sapien
tgtccttgagtgacctactccctgg

SEQ ID NO: 2910390 - DNA, 25 bp, Homo sapien
ctagggtgctgctgcgttttcgcag

SEQ ID NO: 2910391 - DNA, 25 bp, Homo sapien
aaatgtcacactgtgcccagaatgg

SEQ ID NO: 2910392 - DNA, 25 bp, Homo sapien
ctgcgccctgcctgtttgtagtaat

SEQ ID NO: 2910393 - DNA, 25 bp, Homo sapien
tttttaggcaccaaatctccctcat

SEQ ID NO: 2910394 - DNA, 25 bp, Homo sapien
tagtaatttttaggcaccaaatctc

SEQ ID NO: 2910395 - DNA, 25 bp, Homo sapien
gtatcatcttagacatgcatttggc

SEQ ID NO: 2910396 - DNA, 25 bp, Homo sapien
tgtatgtggtagagacagtatcatc

SEQ ID NO: 2910397 - DNA, 25 bp, Homo sapien
gtctgcaccctaaacattttatggg

SEQ ID NO: 2910398 - DNA, 25 bp, Homo sapien
gaattgcttgggtgccatggtcgtc

SEQ ID NO: 2910399 - DNA, 25 bp, Homo sapien
gcaatctcgtctctgtaccaactgg

SEQ ID NO: 2910400 - DNA, 25 bp, Homo sapien
tgtccgtcgctaagggcatagttga

SEQ ID NO: 2910401 - DNA, 25 bp, Homo sapien
tgaagggaaggtacacgcagtgccc

SEQ ID NO: 2910402 - DNA, 25 bp, Homo sapien
tccttagctggcagatgtccgtcgc

SEQ ID NO: 2910403 - DNA, 25 bp, Homo sapien
ttcggagacttagggaagaaatgac

SEQ ID NO: 2910404 - DNA, 25 bp, Homo sapien
cttcggagacttagggaagaaatga

SEQ ID NO: 2910405 - DNA, 25 bp, Homo sapien
tcggagacttagggaagaaatgacc

SEQ ID NO: 2910406 - DNA, 25 bp, Homo sapien
ggtatcccagcaaatagcaagatta

SEQ ID NO: 2910407 - DNA, 25 bp, Homo sapien
gtgtggtatcccagcaaatagcaag

SEQ ID NO: 2910408 - DNA, 25 bp, Homo sapien
agaggtgcccattttgactgggagc

SEQ ID NO: 2910409 - DNA, 25 bp, Homo sapien
ctggcctgagataagtctgcccttt

SEQ ID NO: 2910410 - DNA, 25 bp, Homo sapien
gctgagctgcttctcagtgccctgg

SEQ ID NO: 2910411 - DNA, 25 bp, Homo sapien
ctcagtgccctggaggcattcacac

SEQ ID NO: 2910412 - DNA, 25 bp, Homo sapien
gccctggccattggccttgctgagc

SEQ ID NO: 2910413 - DNA, 25 bp, Homo sapien
cctgcccagcaagcccggcctgccc

SEQ ID NO: 2910414 - DNA, 25 bp, Homo sapien
ttccctaaggctacgtccagtcctg

SEQ ID NO: 2910415 - DNA, 25 bp, Homo sapien
tacgtgctctgttttgagtttcacc

SEQ ID NO: 2910416 - DNA, 25 bp, Homo sapien
gtcctgctacgtgctctgttttgag

SEQ ID NO: 2910417 - DNA, 25 bp, Homo sapien
tacgtccagtcctgctacgtgctct

SEQ ID NO: 2910418 - DNA, 25 bp, Homo sapien
taactggtactaggctagccctccc

SEQ ID NO: 2910419 - DNA, 25 bp, Homo sapien
gcacaggtttggctcagatcataca

SEQ ID NO: 2910420 - DNA, 25 bp, Homo sapien
agacaggagaaaacggcaagggact

SEQ ID NO: 2910421 - DNA, 25 bp, Homo sapien
ctggctatgatggagtaactggtac

SEQ ID NO: 2910422 - DNA, 25 bp, Homo sapien
aatgtggcagagctttcgtgtagtt

SEQ ID NO: 2910423 - DNA, 25 bp, Homo sapien
tgtggcagagctttcgtgtagttca

SEQ ID NO: 2910424 - DNA, 25 bp, Homo sapien
tggcagagctttcgtgtagttcagc

SEQ ID NO: 2910425 - DNA, 25 bp, Homo sapien
ggcagagctttcgtgtagttcagcc

SEQ ID NO: 2910426 - DNA, 25 bp, Homo sapien
atgaaccctctgatgctgggtaaga

SEQ ID NO: 2910427 - DNA, 25 bp, Homo sapien
cctacagtctttacaggtgtagggt

SEQ ID NO: 2910428 - DNA, 25 bp, Homo sapien
gctttcctacagtctttacaggtgt

SEQ ID NO: 2910429 - DNA, 25 bp, Homo sapien
ctctccagtgtagacctttatatgt

SEQ ID NO: 2910430 - DNA, 25 bp, Homo sapien
ctgatgttgggtaacatgggcgctt

SEQ ID NO: 2910431 - DNA, 25 bp, Homo sapien
tgttgggtaacatgggcgcttctac

SEQ ID NO: 2910432 - DNA, 25 bp, Homo sapien
catgggcgcttctactgaaggcttt

SEQ ID NO: 2910433 - DNA, 25 bp, Homo sapien
gtaacatgggcgcttctactgaagg

SEQ ID NO: 2910434 - DNA, 25 bp, Homo sapien
tgaacttcactaggaagaatggaga

SEQ ID NO: 2910435 - DNA, 25 bp, Homo sapien
agcttgggtccttccaccccagatt

SEQ ID NO: 2910436 - DNA, 25 bp, Homo sapien
gctcagagagtcttgtacagggatg

SEQ ID NO: 2910437 - DNA, 25 bp, Homo sapien
tacagggatgtaatgctggagaact

SEQ ID NO: 2910438 - DNA, 25 bp, Homo sapien
ttttgctgctgtgactccctttttc

SEQ ID NO: 2910439 - DNA, 25 bp, Homo sapien
gctgctgtgactccctttttcttgt

SEQ ID NO: 2910440 - DNA, 25 bp, Homo sapien
actgctgtcttttgctgctgtgact

SEQ ID NO: 2910441 - DNA, 25 bp, Homo sapien
tgtcttttgctgctgtgactccctt

SEQ ID NO: 2910442 - DNA, 25 bp, Homo sapien
tggggtggctaaaggtgtctgtgac

SEQ ID NO: 2910443 - DNA, 25 bp, Homo sapien
cctggaatactcacgatggggtggc

SEQ ID NO: 2910444 - DNA, 25 bp, Homo sapien
aatactcacgatggggtggctaaag

SEQ ID NO: 2910445 - DNA, 25 bp, Homo sapien
tgggcctggaatactcacgatgggg

SEQ ID NO: 2910446 - DNA, 25 bp, Homo sapien
gagataagcgcaaagaaatgctcaa

SEQ ID NO: 2910447 - DNA, 25 bp, Homo sapien
tagagataagcgcaaagaaatgctc

SEQ ID NO: 2910448 - DNA, 25 bp, Homo sapien
tacctagagataagcgcaaagaaat

SEQ ID NO: 2910449 - DNA, 25 bp, Homo sapien
gataagcgcaaagaaatgctcaaag

SEQ ID NO: 2910450 - DNA, 25 bp, Homo sapien
ggtggaaccgtttcatagactgaag

SEQ ID NO: 2910451 - DNA, 25 bp, Homo sapien
ggaaccgtttcatagactgaagtgt

SEQ ID NO: 2910452 - DNA, 25 bp, Homo sapien
ctgcagtgtggtggaaccgtttcat

SEQ ID NO: 2910453 - DNA, 25 bp, Homo sapien
tgtggtggaaccgtttcatagactg

SEQ ID NO: 2910454 - DNA, 25 bp, Homo sapien
aggcaccaacgcgtcccttatgtct

SEQ ID NO: 2910455 - DNA, 25 bp, Homo sapien
ccaacgcgtcccttatgtctctgca

SEQ ID NO: 2910456 - DNA, 25 bp, Homo sapien
aacgcgtcccttatgtctctgcagc

SEQ ID NO: 2910457 - DNA, 25 bp, Homo sapien
ttaggcaccaacgcgtcccttatgt

SEQ ID NO: 2910458 - DNA, 25 bp, Homo sapien
ggagcggagccaggcgtgctgccct

SEQ ID NO: 2910459 - DNA, 25 bp, Homo sapien
ggggacgaacttctttggccagctc

SEQ ID NO: 2910460 - DNA, 25 bp, Homo sapien
aggggacgaacttctttggccagct

SEQ ID NO: 2910461 - DNA, 25 bp, Homo sapien
ggaagaggtgacgctggggcatcag

SEQ ID NO: 2910462 - DNA, 25 bp, Homo sapien
ggtgacgctggggcatcaggagttt

SEQ ID NO: 2910463 - DNA, 25 bp, Homo sapien
agaggtgacgctggggcatcaggag

SEQ ID NO: 2910464 - DNA, 25 bp, Homo sapien
gaagaggtgacgctggggcatcagg

SEQ ID NO: 2910465 - DNA, 25 bp, Homo sapien
aagcccggggacagcatccctgagg

SEQ ID NO: 2910466 - DNA, 25 bp, Homo sapien
tctgcctcagtcctacggcgctgga

SEQ ID NO: 2910467 - DNA, 25 bp, Homo sapien
tgtctgtccctaccgcttgaagctg

SEQ ID NO: 2910468 - DNA, 25 bp, Homo sapien
agatgtctgtccctaccgcttgaag

SEQ ID NO: 2910469 - DNA, 25 bp, Homo sapien
gcctgggttagatcgggtctctttc

SEQ ID NO: 2910470 - DNA, 25 bp, Homo sapien
gggttagatcgggtctctttctcac

SEQ ID NO: 2910471 - DNA, 25 bp, Homo sapien
ccgggcctcgtggtcccacttcctg

SEQ ID NO: 2910472 - DNA, 25 bp, Homo sapien
ctggccagacgagttagaagccccc

SEQ ID NO: 2910473 - DNA, 25 bp, Homo sapien
ggagattctgctcttcaccccaatt

SEQ ID NO: 2910474 - DNA, 25 bp, Homo sapien
gagattctgctcttcaccccaattc

SEQ ID NO: 2910475 - DNA, 25 bp, Homo sapien
tcaggcatttcagccaaatctgtct

SEQ ID NO: 2910476 - DNA, 25 bp, Homo sapien
ttctcaggcatttcagccaaatctg

SEQ ID NO: 2910477 - DNA, 25 bp, Homo sapien
gcatttcagccaaatctgtctccat

SEQ ID NO: 2910478 - DNA, 25 bp, Homo sapien
aggcatttcagccaaatctgtctcc

SEQ ID NO: 2910479 - DNA, 25 bp, Homo sapien
gctacaagttcaacacgtccgcaat

SEQ ID NO: 2910480 - DNA, 25 bp, Homo sapien
gaatttcgtccttccacgctacaag

SEQ ID NO: 2910481 - DNA, 25 bp, Homo sapien
gctttgaagggtccactgtgtgccc

SEQ ID NO: 2910482 - DNA, 25 bp, Homo sapien
tgtgtgcccagctgccatggaaagg

SEQ ID NO: 2910483 - DNA, 25 bp, Homo sapien
tgggatctggccgtgaggcgcagag

SEQ ID NO: 2910484 - DNA, 25 bp, Homo sapien
ggatctggccgtgaggcgcagagca

SEQ ID NO: 2910485 - DNA, 25 bp, Homo sapien
gggatctggccgtgaggcgcagagc

SEQ ID NO: 2910486 - DNA, 25 bp, Homo sapien
ctgggatctggccgtgaggcgcaga

SEQ ID NO: 2910487 - DNA, 25 bp, Homo sapien
taagaaacaaggtgtaattccaata

SEQ ID NO: 2910488 - DNA, 25 bp, Homo sapien
ctaagaaacaaggtgtaattccaat

SEQ ID NO: 2910489 - DNA, 25 bp, Homo sapien
tcacaaagaagggagtgcatctgta

SEQ ID NO: 2910490 - DNA, 25 bp, Homo sapien
cacaaagaagggagtgcatctgtac

SEQ ID NO: 2910491 - DNA, 25 bp, Homo sapien
tctgcagatgggctttagtggataa

SEQ ID NO: 2910492 - DNA, 25 bp, Homo sapien
tagtctcctgactagtctcttagat

SEQ ID NO: 2910493 - DNA, 25 bp, Homo sapien
taaatagggaagaaatccatccagt

SEQ ID NO: 2910494 - DNA, 25 bp, Homo sapien
tagatttagaactcagctctgcaga

SEQ ID NO: 2910495 - DNA, 25 bp, Homo sapien
cagagggctggattctaactgtaac

SEQ ID NO: 2910496 - DNA, 25 bp, Homo sapien
catatttaccttttgggagagaggg

SEQ ID NO: 2910497 - DNA, 25 bp, Homo sapien
cacagaaatgagcataggaggctaa

SEQ ID NO: 2910498 - DNA, 25 bp, Homo sapien
gttgcagacatgatcataccttagc

SEQ ID NO: 2910499 - DNA, 25 bp, Homo sapien
gaagctggcggccaagaaaaagacg

SEQ ID NO: 2910500 - DNA, 25 bp, Homo sapien
aaaagacggacaagaagcgggcgct

SEQ ID NO: 2910501 - DNA, 25 bp, Homo sapien
ctggcgagcgcgataagaagctggc

SEQ ID NO: 2910502 - DNA, 25 bp, Homo sapien
cggcggctgtagtgggctctcttcc

SEQ ID NO: 2910503 - DNA, 25 bp, Homo sapien
tctggtgtaaagtccatggccacat

SEQ ID NO: 2910504 - DNA, 25 bp, Homo sapien
cctctggtgtaaagtccatggccac

SEQ ID NO: 2910505 - DNA, 25 bp, Homo sapien
cacatccctttgtgcaggatccagc

SEQ ID NO: 2910506 - DNA, 25 bp, Homo sapien
atcacatccctttgtgcaggatcca

SEQ ID NO: 2910507 - DNA, 25 bp, Homo sapien
aagttgtagctctcaggtttggaaa

SEQ ID NO: 2910508 - DNA, 25 bp, Homo sapien
caagttgtagctctcaggtttggaa

SEQ ID NO: 2910509 - DNA, 25 bp, Homo sapien
ccaagttgtagctctcaggtttgga

SEQ ID NO: 2910510 - DNA, 25 bp, Homo sapien
ttttccattctccaagttgtagctc

SEQ ID NO: 2910511 - DNA, 25 bp, Homo sapien
tatcatttatgaagactcccatcta

SEQ ID NO: 2910512 - DNA, 25 bp, Homo sapien
tgtcctgctgggctatcatttatga

SEQ ID NO: 2910513 - DNA, 25 bp, Homo sapien
gaagactcccatctatctggctcac

SEQ ID NO: 2910514 - DNA, 25 bp, Homo sapien
ttcattgtcctgctgggctatcatt

SEQ ID NO: 2910515 - DNA, 25 bp, Homo sapien
acaccggtgcttctagaggcgctgg

SEQ ID NO: 2910516 - DNA, 25 bp, Homo sapien
gctataagttaggataaggtgaccc

SEQ ID NO: 2910517 - DNA, 25 bp, Homo sapien
cagctaatgtgcagtgaaggaagcc

SEQ ID NO: 2910518 - DNA, 25 bp, Homo sapien
tggaacaactagaacgcacatactc

SEQ ID NO: 2910519 - DNA, 25 bp, Homo sapien
tcactgcaactgctaacagaaaaaa

SEQ ID NO: 2910520 - DNA, 25 bp, Homo sapien
ggctaagaagatacactcagagaag

SEQ ID NO: 2910521 - DNA, 25 bp, Homo sapien
gaagatacactcagagaagtaagaa

SEQ ID NO: 2910522 - DNA, 25 bp, Homo sapien
taagaagatacactcagagaagtaa

SEQ ID NO: 2910523 - DNA, 25 bp, Homo sapien
gaaggctaagaagatacactcagag

SEQ ID NO: 2910524 - DNA, 25 bp, Homo sapien
tttgctgatcaaaaacctcctatga

SEQ ID NO: 2910525 - DNA, 25 bp, Homo sapien
ttttgctgatcaaaaacctcctatg

SEQ ID NO: 2910526 - DNA, 25 bp, Homo sapien
ctcctatgatctcccaaaggcataa

SEQ ID NO: 2910527 - DNA, 25 bp, Homo sapien
tcaaaaacctcctatgatctcccaa

SEQ ID NO: 2910528 - DNA, 25 bp, Homo sapien
ggaaacaaatgctcagactatgcag

SEQ ID NO: 2910529 - DNA, 25 bp, Homo sapien
gaaaagcatgccttcaaggagcaag

SEQ ID NO: 2910530 - DNA, 25 bp, Homo sapien
gagcaagtggatttgactctttcag

SEQ ID NO: 2910531 - DNA, 25 bp, Homo sapien
taggtaagagttaatgaaagtgaaa

SEQ ID NO: 2910532 - DNA, 25 bp, Homo sapien
cattggaaatgcaaatttccttcgt

SEQ ID NO: 2910533 - DNA, 25 bp, Homo sapien
attggaaatgcaaatttccttcgtt

SEQ ID NO: 2910534 - DNA, 25 bp, Homo sapien
ctgaaagacattggaaatgcaaatt

SEQ ID NO: 2910535 - DNA, 25 bp, Homo sapien
aaagacattggaaatgcaaatttcc

SEQ ID NO: 2910536 - DNA, 25 bp, Homo sapien
tcttgcactgaagttgaatccttgc

SEQ ID NO: 2910537 - DNA, 25 bp, Homo sapien
caagtgtatggaaggcataagatcc

SEQ ID NO: 2910538 - DNA, 25 bp, Homo sapien
aagggctgcttccaagttagagtca

SEQ ID NO: 2910539 - DNA, 25 bp, Homo sapien
gaatccttgctctgtggtctagtct

SEQ ID NO: 2910540 - DNA, 25 bp, Homo sapien
caagatgtgtacttcgattaaaacc

SEQ ID NO: 2910541 - DNA, 25 bp, Homo sapien
tcaactgatgctgcacaagatgtgt

SEQ ID NO: 2910542 - DNA, 25 bp, Homo sapien
gaactctctgatgcttagttaggga

SEQ ID NO: 2910543 - DNA, 25 bp, Homo sapien
tgttgaacaagatgtgtgctctgac

SEQ ID NO: 2910544 - DNA, 25 bp, Homo sapien
tgatgtctgatgagagatgaactgc

SEQ ID NO: 2910545 - DNA, 25 bp, Homo sapien
atgtctgatgagagatgaactgcac

SEQ ID NO: 2910546 - DNA, 25 bp, Homo sapien
tttgatgtctgatgagagatgaact

SEQ ID NO: 2910547 - DNA, 25 bp, Homo sapien
tcagggttgctcttcagtgtgaact

SEQ ID NO: 2910548 - DNA, 25 bp, Homo sapien
tcagggacatacaacctactatggg

SEQ ID NO: 2910549 - DNA, 25 bp, Homo sapien
tacttcacgtgaactcccagggaaa

SEQ ID NO: 2910550 - DNA, 25 bp, Homo sapien
gaattctaaggactttgaacccagc

SEQ ID NO: 2910551 - DNA, 25 bp, Homo sapien
tctccgcggtagagggataacaatg

SEQ ID NO: 2910552 - DNA, 25 bp, Homo sapien
gctcatctgctaagttgcctgtcta

SEQ ID NO: 2910553 - DNA, 25 bp, Homo sapien
ttttagcccgtttcagtagacagag

SEQ ID NO: 2910554 - DNA, 25 bp, Homo sapien
gcctgtctaatgtagagagttctga

SEQ ID NO: 2910555 - DNA, 25 bp, Homo sapien
gggctcattgcaactgagatgtcat

SEQ ID NO: 2910556 - DNA, 25 bp, Homo sapien
caaaggatagccaggttcctcttag

SEQ ID NO: 2910557 - DNA, 25 bp, Homo sapien
gaggatattattaatactttacaca

SEQ ID NO: 2910558 - DNA, 25 bp, Homo sapien
aatttcatacattactcttctttac

SEQ ID NO: 2910559 - DNA, 25 bp, Homo sapien
ctgacacacagttaacgtttaatcc

SEQ ID NO: 2910560 - DNA, 25 bp, Homo sapien
ctgcagacgtcatcgagagcacacc

SEQ ID NO: 2910561 - DNA, 25 bp, Homo sapien
cacacctggggtcgtctagggtcat

SEQ ID NO: 2910562 - DNA, 25 bp, Homo sapien
ccatccctgcagacgtcatcgagag

SEQ ID NO: 2910563 - DNA, 25 bp, Homo sapien
cagtgcaatacccaatggcaggggc

SEQ ID NO: 2910564 - DNA, 25 bp, Homo sapien
gggacgtttgtcagaccaggcaccc

SEQ ID NO: 2910565 - DNA, 25 bp, Homo sapien
caggcaccccgttttgctgggtctc

SEQ ID NO: 2910566 - DNA, 25 bp, Homo sapien
cccagatggccagaagaccctttgc

SEQ ID NO: 2910567 - DNA, 25 bp, Homo sapien
tgtctcggcctattcctgagccgca

SEQ ID NO: 2910568 - DNA, 25 bp, Homo sapien
agtcagttgtgtctctcacttagca

SEQ ID NO: 2910569 - DNA, 25 bp, Homo sapien
agctccagacatagagacggcaagt

SEQ ID NO: 2910570 - DNA, 25 bp, Homo sapien
aagagctccagacatagagacggca

SEQ ID NO: 2910571 - DNA, 25 bp, Homo sapien
agttgagtcagttgtgtctctcact

SEQ ID NO: 2910572 - DNA, 25 bp, Homo sapien
acccataggagttccatcccagtgg

SEQ ID NO: 2910573 - DNA, 25 bp, Homo sapien
caccacacccataggagttccatcc

SEQ ID NO: 2910574 - DNA, 25 bp, Homo sapien
cacagacttggaccgagcaccacct

SEQ ID NO: 2910575 - DNA, 25 bp, Homo sapien
ccagaaaaccctgggcagatttgga

SEQ ID NO: 2910576 - DNA, 25 bp, Homo sapien
ttgaggcctgtggccagcatcagag

SEQ ID NO: 2910577 - DNA, 25 bp, Homo sapien
ctgtggccagcatcagagcatccat

SEQ ID NO: 2910578 - DNA, 25 bp, Homo sapien
ttcccttgaggcctgtggccagcat

SEQ ID NO: 2910579 - DNA, 25 bp, Homo sapien
ggcctgtggccagcatcagagcatc

SEQ ID NO: 2910580 - DNA, 25 bp, Homo sapien
gacagcacccatcgccacagagttt

SEQ ID NO: 2910581 - DNA, 25 bp, Homo sapien
ttggggacagcacccatcgccacag

SEQ ID NO: 2910582 - DNA, 25 bp, Homo sapien
ggggacagcacccatcgccacagag

SEQ ID NO: 2910583 - DNA, 25 bp, Homo sapien
ggacagcacccatcgccacagagtt

SEQ ID NO: 2910584 - DNA, 25 bp, Homo sapien
cttcaggaacaacgccagccaagca

SEQ ID NO: 2910585 - DNA, 25 bp, Homo sapien
cgccagccaagcagtttggtttggg

SEQ ID NO: 2910586 - DNA, 25 bp, Homo sapien
gcaggtcgaggacggtggacaccac

SEQ ID NO: 2910587 - DNA, 25 bp, Homo sapien
ctctgtgctcatggagaccccgtcg

SEQ ID NO: 2910588 - DNA, 25 bp, Homo sapien
gatgtctctataggatcgttcaggg

SEQ ID NO: 2910589 - DNA, 25 bp, Homo sapien
gatcgttcagggaccaggaatataa

SEQ ID NO: 2910590 - DNA, 25 bp, Homo sapien
agggactggatgtctctataggatc

SEQ ID NO: 2910591 - DNA, 25 bp, Homo sapien
cagggaccaggaatataatcagttt

SEQ ID NO: 2910592 - DNA, 25 bp, Homo sapien
caggcaggttatacgggtccccatc

SEQ ID NO: 2910593 - DNA, 25 bp, Homo sapien
catacttagtaatgatgatattgcc

SEQ ID NO: 2910594 - DNA, 25 bp, Homo sapien
ggttatacgggtccccatccatctc

SEQ ID NO: 2910595 - DNA, 25 bp, Homo sapien
ctgggcaggcaggttatacgggtcc

SEQ ID NO: 2910596 - DNA, 25 bp, Homo sapien
tttctgacatcaacctgctcatgcc

SEQ ID NO: 2910597 - DNA, 25 bp, Homo sapien
attggtgtattttctgacatcaacc

SEQ ID NO: 2910598 - DNA, 25 bp, Homo sapien
tgcacaatcccgaggttattggtgt

SEQ ID NO: 2910599 - DNA, 25 bp, Homo sapien
tgctcatgccccaagtccactgctg

SEQ ID NO: 2910600 - DNA, 25 bp, Homo sapien
ggccaagccctgactaacagcagta

SEQ ID NO: 2910601 - DNA, 25 bp, Homo sapien
aggtgacaccctctgtggacgctaa

SEQ ID NO: 2910602 - DNA, 25 bp, Homo sapien
tctcagcctgggacaaggcacagag

SEQ ID NO: 2910603 - DNA, 25 bp, Homo sapien
ggatctgacactagcaaggcactgg

SEQ ID NO: 2910604 - DNA, 25 bp, Homo sapien
tccagggcactgacgtggggcagct

SEQ ID NO: 2910605 - DNA, 25 bp, Homo sapien
cttcacctccagggcactgacgtgg

SEQ ID NO: 2910606 - DNA, 25 bp, Homo sapien
ttcacctccagggcactgacgtggg

SEQ ID NO: 2910607 - DNA, 25 bp, Homo sapien
agggcactgacgtggggcagctcca

SEQ ID NO: 2910608 - DNA, 25 bp, Homo sapien
cttggttcaaacaggcagtggactc

SEQ ID NO: 2910609 - DNA, 25 bp, Homo sapien
tgaagggacccaacttgaagaagcc

SEQ ID NO: 2910610 - DNA, 25 bp, Homo sapien
ggttttggtcaagtcctcatgggaa

SEQ ID NO: 2910611 - DNA, 25 bp, Homo sapien
aagttttggtcaggtccagccttca

SEQ ID NO: 2910612 - DNA, 25 bp, Homo sapien
cagtctgcaagcatcttttgccact

SEQ ID NO: 2910613 - DNA, 25 bp, Homo sapien
ttcttggtgctcctatattttgtcc

SEQ ID NO: 2910614 - DNA, 25 bp, Homo sapien
gcatcttttgccacttgttggtacg

SEQ ID NO: 2910615 - DNA, 25 bp, Homo sapien
tgctcctatattttgtccagtctgc

SEQ ID NO: 2910616 - DNA, 25 bp, Homo sapien
agacggtgccaggtcacaaccatgg

SEQ ID NO: 2910617 - DNA, 25 bp, Homo sapien
cctatggcaaggatggggtaccacc

SEQ ID NO: 2910618 - DNA, 25 bp, Homo sapien
gggcgaccccgcagagcaaagctgg

SEQ ID NO: 2910619 - DNA, 25 bp, Homo sapien
agagagcagtcacgcgggccacttc

SEQ ID NO: 2910620 - DNA, 25 bp, Homo sapien
gaatgactttgtatactctttgaga

SEQ ID NO: 2910621 - DNA, 25 bp, Homo sapien
cttatatttgcctgggttctgggac

SEQ ID NO: 2910622 - DNA, 25 bp, Homo sapien
atctagcaaaagtgaccacgcccgg

SEQ ID NO: 2910623 - DNA, 25 bp, Homo sapien
tctgggacttgattctgtcaatatc

SEQ ID NO: 2910624 - DNA, 25 bp, Homo sapien
ggctgacatctagctggatgcagtg

SEQ ID NO: 2910625 - DNA, 25 bp, Homo sapien
cagtggatgattctggaggacctct

SEQ ID NO: 2910626 - DNA, 25 bp, Homo sapien
ccgaatctttgtatgaacatcatgt

SEQ ID NO: 2910627 - DNA, 25 bp, Homo sapien
ttgactccgaatctttgtatgaaca

SEQ ID NO: 2910628 - DNA, 25 bp, Homo sapien
ggttatatgcagaataggccacgag

SEQ ID NO: 2910629 - DNA, 25 bp, Homo sapien
agggttatatgcagaataggccacg

SEQ ID NO: 2910630 - DNA, 25 bp, Homo sapien
gttatatgcagaataggccacgagg

SEQ ID NO: 2910631 - DNA, 25 bp, Homo sapien
gggttatatgcagaataggccacga

SEQ ID NO: 2910632 - DNA, 25 bp, Homo sapien
tcacatggcccgaaagggcacagtc

SEQ ID NO: 2910633 - DNA, 25 bp, Homo sapien
gactgagcaggtcacgcacaactca

SEQ ID NO: 2910634 - DNA, 25 bp, Homo sapien
gagtcaccgtggaaagatgtcacct

SEQ ID NO: 2910635 - DNA, 25 bp, Homo sapien
tgggaggacttatgtcaccagaggt

SEQ ID NO: 2910636 - DNA, 25 bp, Homo sapien
ggatggcagtgatgcggctcaggtc

SEQ ID NO: 2910637 - DNA, 25 bp, Homo sapien
gcatcttcctctggcagacacagga

SEQ ID NO: 2910638 - DNA, 25 bp, Homo sapien
aaagcatcttcctctggcagacaca

SEQ ID NO: 2910639 - DNA, 25 bp, Homo sapien
ggaggatggcagtgatgcggctcag

SEQ ID NO: 2910640 - DNA, 25 bp, Homo sapien
cccctggcatggctgtgtaaggccc

SEQ ID NO: 2910641 - DNA, 25 bp, Homo sapien
tggcatggctgtgtaaggccccggg

SEQ ID NO: 2910642 - DNA, 25 bp, Homo sapien
catggctgtgtaaggccccgggggc

SEQ ID NO: 2910643 - DNA, 25 bp, Homo sapien
cctggcatggctgtgtaaggccccg

SEQ ID NO: 2910644 - DNA, 25 bp, Homo sapien
gggcagcctgcatttgacaccacaa

SEQ ID NO: 2910645 - DNA, 25 bp, Homo sapien
gatgggcagacacttccatcttggc

SEQ ID NO: 2910646 - DNA, 25 bp, Homo sapien
tctgatgttagggatgaaagccgtc

SEQ ID NO: 2910647 - DNA, 25 bp, Homo sapien
cctggaggctccaaacaagctggga

SEQ ID NO: 2910648 - DNA, 25 bp, Homo sapien
tggtgcgataggagcctctcgagcc

SEQ ID NO: 2910649 - DNA, 25 bp, Homo sapien
cgataggagcctctcgagccaggca

SEQ ID NO: 2910650 - DNA, 25 bp, Homo sapien
cctggtgcgataggagcctctcgag

SEQ ID NO: 2910651 - DNA, 25 bp, Homo sapien
tgcgataggagcctctcgagccagg

SEQ ID NO: 2910652 - DNA, 25 bp, Homo sapien
gaagggaggagcacacgtgctcagg

SEQ ID NO: 2910653 - DNA, 25 bp, Homo sapien
ccttaatggcacaacccagggcggt

SEQ ID NO: 2910654 - DNA, 25 bp, Homo sapien
ttaatggcacaacccagggcggtgg

SEQ ID NO: 2910655 - DNA, 25 bp, Homo sapien
cttccttaatggcacaacccagggc

SEQ ID NO: 2910656 - DNA, 25 bp, Homo sapien
tcgtcagcatggaaccctcaatgca

SEQ ID NO: 2910657 - DNA, 25 bp, Homo sapien
cctcgtcagcatggaaccctcaatg

SEQ ID NO: 2910658 - DNA, 25 bp, Homo sapien
gagcctcgtcagcatggaaccctca

SEQ ID NO: 2910659 - DNA, 25 bp, Homo sapien
gcctcgtcagcatggaaccctcaat

SEQ ID NO: 2910660 - DNA, 25 bp, Homo sapien
gcgcgccctccaagatgaacacatc

SEQ ID NO: 2910661 - DNA, 25 bp, Homo sapien
atggctgtcagtacccgcgcgccct

SEQ ID NO: 2910662 - DNA, 25 bp, Homo sapien
gatgaacacatcccacagtctcagg

SEQ ID NO: 2910663 - DNA, 25 bp, Homo sapien
cagtctcagggtgagcccgaaggat

SEQ ID NO: 2910664 - DNA, 25 bp, Homo sapien
tcctgtgtattttgaatgatgcatg

SEQ ID NO: 2910665 - DNA, 25 bp, Homo sapien
ctgtgtattttgaatgatgcatgca

SEQ ID NO: 2910666 - DNA, 25 bp, Homo sapien
cctgtgtattttgaatgatgcatgc

SEQ ID NO: 2910667 - DNA, 25 bp, Homo sapien
tgtgtattttgaatgatgcatgcac

SEQ ID NO: 2910668 - DNA, 25 bp, Homo sapien
ctcccactgggtggtgtctggtcct

SEQ ID NO: 2910669 - DNA, 25 bp, Homo sapien
caccctggggttcagctgtgcacag

SEQ ID NO: 2910670 - DNA, 25 bp, Homo sapien
tgtctggtcctttttggccaccctg

SEQ ID NO: 2910671 - DNA, 25 bp, Homo sapien
ctggggttcagctgtgcacaggagg

SEQ ID NO: 2910672 - DNA, 25 bp, Homo sapien
ttttttgtgagttccttcatagagg

SEQ ID NO: 2910673 - DNA, 25 bp, Homo sapien
gctcctgaaactcccagacagtgct

SEQ ID NO: 2910674 - DNA, 25 bp, Homo sapien
ttcatagaggtttgaaggttcctga

SEQ ID NO: 2910675 - DNA, 25 bp, Homo sapien
tgaaggttcctgaggaccgcgttgt

SEQ ID NO: 2910676 - DNA, 25 bp, Homo sapien
caatgtgcattttgtagcaagctcc

SEQ ID NO: 2910677 - DNA, 25 bp, Homo sapien
tatggtatagcaatgtgcattttgt

SEQ ID NO: 2910678 - DNA, 25 bp, Homo sapien
ctatggtatagcaatgtgcattttg

SEQ ID NO: 2910679 - DNA, 25 bp, Homo sapien
tagcaatgtgcattttgtagcaagc

SEQ ID NO: 2910680 - DNA, 25 bp, Homo sapien
tgccagccttggattgcaagcccca

SEQ ID NO: 2910681 - DNA, 25 bp, Homo sapien
ccaggattcaggagagccttctgac

SEQ ID NO: 2910682 - DNA, 25 bp, Homo sapien
acttgggtgtgcatgaaagtcacct

SEQ ID NO: 2910683 - DNA, 25 bp, Homo sapien
gaggcccttgacgtgcaggaatcct

SEQ ID NO: 2910684 - DNA, 25 bp, Homo sapien
gcatccctggtccaagtcagtggcc

SEQ ID NO: 2910685 - DNA, 25 bp, Homo sapien
gcccaaagttttgtctgggtgtcag

SEQ ID NO: 2910686 - DNA, 25 bp, Homo sapien
ggtgtcaggaaggccatgcactcac

SEQ ID NO: 2910687 - DNA, 25 bp, Homo sapien
cagcctggctttgtgcccaaagttt

SEQ ID NO: 2910688 - DNA, 25 bp, Homo sapien
ggagccagagggtgtcaagagcagc

SEQ ID NO: 2910689 - DNA, 25 bp, Homo sapien
ccagagggtgtcaagagcagccagg

SEQ ID NO: 2910690 - DNA, 25 bp, Homo sapien
caggagccagagggtgtcaagagca

SEQ ID NO: 2910691 - DNA, 25 bp, Homo sapien
agccagagggtgtcaagagcagcca

SEQ ID NO: 2910692 - DNA, 25 bp, Homo sapien
ggcaggttctcccttcctaacgcag

SEQ ID NO: 2910693 - DNA, 25 bp, Homo sapien
tattaccaacatatttacaccttcc

SEQ ID NO: 2910694 - DNA, 25 bp, Homo sapien
ctttcctatgttataataaagctac

SEQ ID NO: 2910695 - DNA, 25 bp, Homo sapien
tcctcctcccgtaataacttgcagt

SEQ ID NO: 2910696 - DNA, 25 bp, Homo sapien
tcagtagtattcctctatgccaaca

SEQ ID NO: 2910697 - DNA, 25 bp, Homo sapien
aaatcagtagtattcctctatgcca

SEQ ID NO: 2910698 - DNA, 25 bp, Homo sapien
tagtattcctctatgccaacagtga

SEQ ID NO: 2910699 - DNA, 25 bp, Homo sapien
taacatacgaaaatcagtagtattc

SEQ ID NO: 2910700 - DNA, 25 bp, Homo sapien
tgaagtaatccacgccaaccacgct

SEQ ID NO: 2910701 - DNA, 25 bp, Homo sapien
tgccaccgtggtttccgggaaggca

SEQ ID NO: 2910702 - DNA, 25 bp, Homo sapien
gcagaatcaaggcatgaagtaatcc

SEQ ID NO: 2910703 - DNA, 25 bp, Homo sapien
aagcctgctgccaccgtggtttccg

SEQ ID NO: 2910704 - DNA, 25 bp, Homo sapien
caaaagtgtagagagatgaagtagc

SEQ ID NO: 2910705 - DNA, 25 bp, Homo sapien
ggccccatgctttgacattaagaag

SEQ ID NO: 2910706 - DNA, 25 bp, Homo sapien
cagtgataatgacctagaggcacgt

SEQ ID NO: 2910707 - DNA, 25 bp, Homo sapien
gtggttaacacatttcgtagcagag

SEQ ID NO: 2910708 - DNA, 25 bp, Homo sapien
tgcaaacgtgctgttcccaggagct

SEQ ID NO: 2910709 - DNA, 25 bp, Homo sapien
aggatttgcatctgacagtgggatg

SEQ ID NO: 2910710 - DNA, 25 bp, Homo sapien
gaatgccccatttctagctctagga

SEQ ID NO: 2910711 - DNA, 25 bp, Homo sapien
agctctgtctaccttgaatgcccca

SEQ ID NO: 2910712 - DNA, 25 bp, Homo sapien
ctgggtgcgccttcttacaaagggc

SEQ ID NO: 2910713 - DNA, 25 bp, Homo sapien
gggtgcgccttcttacaaagggcca

SEQ ID NO: 2910714 - DNA, 25 bp, Homo sapien
tgggtgcgccttcttacaaagggcc

SEQ ID NO: 2910715 - DNA, 25 bp, Homo sapien
ttagcacaataaacaggccctgcag

SEQ ID NO: 2910716 - DNA, 25 bp, Homo sapien
catgctggctttggctcgacagccg

SEQ ID NO: 2910717 - DNA, 25 bp, Homo sapien
ccgcaagtgctgctatgtctgcgta

SEQ ID NO: 2910718 - DNA, 25 bp, Homo sapien
ggtacaggagtccagtctgaatgcc

SEQ ID NO: 2910719 - DNA, 25 bp, Homo sapien
ttaagagcccgttcggggcagcaca

SEQ ID NO: 2910720 - DNA, 25 bp, Homo sapien
cctgttaagagcccgttcggggcag

SEQ ID NO: 2910721 - DNA, 25 bp, Homo sapien
tgttaagagcccgttcggggcagca

SEQ ID NO: 2910722 - DNA, 25 bp, Homo sapien
gttaagagcccgttcggggcagcac

SEQ ID NO: 2910723 - DNA, 25 bp, Homo sapien
cttctccgcagaagtagagcgccgc

SEQ ID NO: 2910724 - DNA, 25 bp, Homo sapien
aaagctcgcggatctttctccggaa

SEQ ID NO: 2910725 - DNA, 25 bp, Homo sapien
gaaagctcgtcgatccttctccgca

SEQ ID NO: 2910726 - DNA, 25 bp, Homo sapien
tggatcctctgcgtctccacagcac

SEQ ID NO: 2910727 - DNA, 25 bp, Homo sapien
aatgtcacactttttccattggctt

SEQ ID NO: 2910728 - DNA, 25 bp, Homo sapien
acatcttgcgcagatatttccaaat

SEQ ID NO: 2910729 - DNA, 25 bp, Homo sapien
aataaagctggcactagccaagtct

SEQ ID NO: 2910730 - DNA, 25 bp, Homo sapien
gtcttctgcttctaaatgtcacact

SEQ ID NO: 2910731 - DNA, 25 bp, Homo sapien
taatatattgctccttaagaatagc

SEQ ID NO: 2910732 - DNA, 25 bp, Homo sapien
atatattgctccttaagaatagcaa

SEQ ID NO: 2910733 - DNA, 25 bp, Homo sapien
aatatattgctccttaagaatagca

SEQ ID NO: 2910734 - DNA, 25 bp, Homo sapien
gtttttctggaggcaagcctgaaat

SEQ ID NO: 2910735 - DNA, 25 bp, Homo sapien
tttttctggaggcaagcctgaaatt

SEQ ID NO: 2910736 - DNA, 25 bp, Homo sapien
ttttctggaggcaagcctgaaatta

SEQ ID NO: 2910737 - DNA, 25 bp, Homo sapien
tttctggaggcaagcctgaaattat

SEQ ID NO: 2910738 - DNA, 25 bp, Homo sapien
tgtgtgttgcccattcagagtttaa

SEQ ID NO: 2910739 - DNA, 25 bp, Homo sapien
ccaagtgtgtttcccttccacgatc

SEQ ID NO: 2910740 - DNA, 25 bp, Homo sapien
tcagcaaacttgtgtgttgcccatt

SEQ ID NO: 2910741 - DNA, 25 bp, Homo sapien
tggttgcaatcagcaaacttgtgtg

SEQ ID NO: 2910742 - DNA, 25 bp, Homo sapien
tgggcaatatgactctttgaaggat

SEQ ID NO: 2910743 - DNA, 25 bp, Homo sapien
tacatcagtgaaattgccatctgaa

SEQ ID NO: 2910744 - DNA, 25 bp, Homo sapien
gtgaccactgggcaatatgactctt

SEQ ID NO: 2910745 - DNA, 25 bp, Homo sapien
ccatctgaatacatttgatcttttg

SEQ ID NO: 2910746 - DNA, 25 bp, Homo sapien
tgtgtaccacagcagaatactggac

SEQ ID NO: 2910747 - DNA, 25 bp, Homo sapien
gagaagacctggactgatggaactt

SEQ ID NO: 2910748 - DNA, 25 bp, Homo sapien
tgtttgaagtagtgttgcctgggca

SEQ ID NO: 2910749 - DNA, 25 bp, Homo sapien
ggcaaaatgccatcaccgccatctg

SEQ ID NO: 2910750 - DNA, 25 bp, Homo sapien
agtctaacaaaatcttcctcattga

SEQ ID NO: 2910751 - DNA, 25 bp, Homo sapien
atatctggactggattcatgctgac

SEQ ID NO: 2910752 - DNA, 25 bp, Homo sapien
caggattgtgaaatatgatctgaaa

SEQ ID NO: 2910753 - DNA, 25 bp, Homo sapien
tcctcattgactgatgaaacttgct

SEQ ID NO: 2910754 - DNA, 25 bp, Homo sapien
ttgaaacgagtcagattactaatta

SEQ ID NO: 2910755 - DNA, 25 bp, Homo sapien
aacaaatttttgaaacgagtcagat

SEQ ID NO: 2910756 - DNA, 25 bp, Homo sapien
cctagctcttaatcgtggcactctg

SEQ ID NO: 2910757 - DNA, 25 bp, Homo sapien
gctcttaatcgtggcactctgttga

SEQ ID NO: 2910758 - DNA, 25 bp, Homo sapien
tcatcgtacctttgggccatgggct

SEQ ID NO: 2910759 - DNA, 25 bp, Homo sapien
ggaagagcgggtgtccatagatctc

SEQ ID NO: 2910760 - DNA, 25 bp, Homo sapien
gggaagagcgggtgtccatagatct

SEQ ID NO: 2910761 - DNA, 25 bp, Homo sapien
cacggggagagcatgtagccagttc

SEQ ID NO: 2910762 - DNA, 25 bp, Homo sapien
cggggagagcatgtagccagttcac

SEQ ID NO: 2910763 - DNA, 25 bp, Homo sapien
ggagagcatgtagccagttcacatt

SEQ ID NO: 2910764 - DNA, 25 bp, Homo sapien
gggagagcatgtagccagttcacat

SEQ ID NO: 2910765 - DNA, 25 bp, Homo sapien
cgccgcgggggtgtccccagcccag

SEQ ID NO: 2910766 - DNA, 25 bp, Homo sapien
aatcagaggagcagacgtcgccgcc

SEQ ID NO: 2910767 - DNA, 25 bp, Homo sapien
aaggaatcagaggagcagacgtcgc

SEQ ID NO: 2910768 - DNA, 25 bp, Homo sapien
ctcgttgaaggaatcagaggagcag

SEQ ID NO: 2910769 - DNA, 25 bp, Homo sapien
acctgcttggcgaaggcagtgttgt

SEQ ID NO: 2910770 - DNA, 25 bp, Homo sapien
cctgcttggcgaaggcagtgttgtc

SEQ ID NO: 2910771 - DNA, 25 bp, Homo sapien
ccgcagcacttggattgcctggatc

SEQ ID NO: 2910772 - DNA, 25 bp, Homo sapien
tagcaggtggaaccgcagcacttgg

SEQ ID NO: 2910773 - DNA, 25 bp, Homo sapien
tccagctctagcaggtggaaccgca

SEQ ID NO: 2910774 - DNA, 25 bp, Homo sapien
cgatgggcatctttcccttctccag

SEQ ID NO: 2910775 - DNA, 25 bp, Homo sapien
gtagtcctcgaagtcctccctgcag

SEQ ID NO: 2910776 - DNA, 25 bp, Homo sapien
tgggtagtcctcgaagtcctccctg

SEQ ID NO: 2910777 - DNA, 25 bp, Homo sapien
ggctgggtagtcctcgaagtcctcc

SEQ ID NO: 2910778 - DNA, 25 bp, Homo sapien
gaggctgggtagtcctcgaagtcct

SEQ ID NO: 2910779 - DNA, 25 bp, Homo sapien
tggagttgtccccactctgggaggc

SEQ ID NO: 2910780 - DNA, 25 bp, Homo sapien
cagccccccgctggatggacctggg

SEQ ID NO: 2910781 - DNA, 25 bp, Homo sapien
tgtacagacccgctatcctcatggt

SEQ ID NO: 2910782 - DNA, 25 bp, Homo sapien
gtccccaaatgtacagacccgctat

SEQ ID NO: 2910783 - DNA, 25 bp, Homo sapien
tggtgtccagcccgactccttggtc

SEQ ID NO: 2910784 - DNA, 25 bp, Homo sapien
gtgtccagcccgactccttggtcac

SEQ ID NO: 2910785 - DNA, 25 bp, Homo sapien
ctggtgtccagcccgactccttggt

SEQ ID NO: 2910786 - DNA, 25 bp, Homo sapien
ggtgtccagcccgactccttggtca

SEQ ID NO: 2910787 - DNA, 25 bp, Homo sapien
caggctcgcatgatgttggtggcca

SEQ ID NO: 2910788 - DNA, 25 bp, Homo sapien
ccaggctcgcatgatgttggtggcc

SEQ ID NO: 2910789 - DNA, 25 bp, Homo sapien
ctccgggcattaatgaaccagttgt

SEQ ID NO: 2910790 - DNA, 25 bp, Homo sapien
gggtacgggtgtgagaggtgctgga

SEQ ID NO: 2910791 - DNA, 25 bp, Homo sapien
atggtaagccccgtgtcctgcgcca

SEQ ID NO: 2910792 - DNA, 25 bp, Homo sapien
cagttgttgacttgcaggatggtaa

SEQ ID NO: 2910793 - DNA, 25 bp, Homo sapien
tctcggtatagcccccgatgggctg

SEQ ID NO: 2910794 - DNA, 25 bp, Homo sapien
tggattgatcgatcataggttgcac

SEQ ID NO: 2910795 - DNA, 25 bp, Homo sapien
tgcggttggattgatcgatcatagg

SEQ ID NO: 2910796 - DNA, 25 bp, Homo sapien
gttggattgatcgatcataggttgc

SEQ ID NO: 2910797 - DNA, 25 bp, Homo sapien
gaaggatcaggcattatatcaatgc

SEQ ID NO: 2910798 - DNA, 25 bp, Homo sapien
tgaaggatcaggcattatatcaatg

SEQ ID NO: 2910799 - DNA, 25 bp, Homo sapien
tcattcccgtagataaagagttcac

SEQ ID NO: 2910800 - DNA, 25 bp, Homo sapien
gaccctgaaatgtacaaacttcgca

SEQ ID NO: 2910801 - DNA, 25 bp, Homo sapien
tatatcatggccttcaatgatcctc

SEQ ID NO: 2910802 - DNA, 25 bp, Homo sapien
tctccttagggcagaagatgtacat

SEQ ID NO: 2910803 - DNA, 25 bp, Homo sapien
acatcaacacgtagattactctaag

SEQ ID NO: 2910804 - DNA, 25 bp, Homo sapien
cgtagattactctaagacatgctcg

SEQ ID NO: 2910805 - DNA, 25 bp, Homo sapien
acgtagattactctaagacatgctc

SEQ ID NO: 2910806 - DNA, 25 bp, Homo sapien
gtagattactctaagacatgctcgg

SEQ ID NO: 2910807 - DNA, 25 bp, Homo sapien
cttggtcaatatatgttagtaaaca

SEQ ID NO: 2910808 - DNA, 25 bp, Homo sapien
tgtggactataacagaatgaaggaa

SEQ ID NO: 2910809 - DNA, 25 bp, Homo sapien
ctctcctgcttgatgtacttggtca

SEQ ID NO: 2910810 - DNA, 25 bp, Homo sapien
ttagaatgatgtggactataacaga

SEQ ID NO: 2910811 - DNA, 25 bp, Homo sapien
tacatatatacattgagactagaga

SEQ ID NO: 2910812 - DNA, 25 bp, Homo sapien
caaatgaatgacagaagagctcacc

SEQ ID NO: 2910813 - DNA, 25 bp, Homo sapien
aaaaaaatctgtcactattggcctt

SEQ ID NO: 2910814 - DNA, 25 bp, Homo sapien
cccagtttatacaaatattgactga

SEQ ID NO: 2910815 - DNA, 25 bp, Homo sapien
gttttgtacaacatatctatgtacg

SEQ ID NO: 2910816 - DNA, 25 bp, Homo sapien
catggtagactataattcatacagt

SEQ ID NO: 2910817 - DNA, 25 bp, Homo sapien
aaaaaattactcaggcgtgtgcctg

SEQ ID NO: 2910818 - DNA, 25 bp, Homo sapien
ctatgtacgaatatctgttgtagaa

SEQ ID NO: 2910819 - DNA, 25 bp, Homo sapien
cgaaagtcctccaggaacacgtgaa

SEQ ID NO: 2910820 - DNA, 25 bp, Homo sapien
gccgaaagtcctccaggaacacgtg

SEQ ID NO: 2910821 - DNA, 25 bp, Homo sapien
gaaagtcctccaggaacacgtgaag

SEQ ID NO: 2910822 - DNA, 25 bp, Homo sapien
gagccgaaagtcctccaggaacacg

SEQ ID NO: 2910823 - DNA, 25 bp, Homo sapien
actgataagttgagtactgtgtaac

SEQ ID NO: 2910824 - DNA, 25 bp, Homo sapien
tgagtactgtgtaacttgataaccc

SEQ ID NO: 2910825 - DNA, 25 bp, Homo sapien
gtaacttgataacccagtgctgttc

SEQ ID NO: 2910826 - DNA, 25 bp, Homo sapien
tattttttagctcactgataagttg

SEQ ID NO: 2910827 - DNA, 25 bp, Homo sapien
gctgggttctttagtgtcctactca

SEQ ID NO: 2910828 - DNA, 25 bp, Homo sapien
gctgctgggttctttagtgtcctac

SEQ ID NO: 2910829 - DNA, 25 bp, Homo sapien
ctgggttctttagtgtcctactcac

SEQ ID NO: 2910830 - DNA, 25 bp, Homo sapien
tgctgggttctttagtgtcctactc

SEQ ID NO: 2910831 - DNA, 25 bp, Homo sapien
gaaagactcttcataaaccccagcc

SEQ ID NO: 2910832 - DNA, 25 bp, Homo sapien
aagactcttcataaaccccagccaa

SEQ ID NO: 2910833 - DNA, 25 bp, Homo sapien
atgaaagactcttcataaaccccag

SEQ ID NO: 2910834 - DNA, 25 bp, Homo sapien
caaatgaaagactcttcataaaccc

SEQ ID NO: 2910835 - DNA, 25 bp, Homo sapien
tccaagccgatcaggctgctcagag

SEQ ID NO: 2910836 - DNA, 25 bp, Homo sapien
aggaaaagtccctgtgaactctcac

SEQ ID NO: 2910837 - DNA, 25 bp, Homo sapien
gaaaagtccctgtgaactctcacac

SEQ ID NO: 2910838 - DNA, 25 bp, Homo sapien
gtggcctccaagccgatcaggctgc

SEQ ID NO: 2910839 - DNA, 25 bp, Homo sapien
gcaagttcctccaaaatagggaaca

SEQ ID NO: 2910840 - DNA, 25 bp, Homo sapien
ttctgtttctccagcttgatcacat

SEQ ID NO: 2910841 - DNA, 25 bp, Homo sapien
tgtttctccagcttgatcacattac

SEQ ID NO: 2910842 - DNA, 25 bp, Homo sapien
tctgtttctccagcttgatcacatt

SEQ ID NO: 2910843 - DNA, 25 bp, Homo sapien
ctgtttctccagcttgatcacatta

SEQ ID NO: 2910844 - DNA, 25 bp, Homo sapien
acattgttggccactgccaccgcag

SEQ ID NO: 2910845 - DNA, 25 bp, Homo sapien
actgccaccgcagtctgcagatccg

SEQ ID NO: 2910846 - DNA, 25 bp, Homo sapien
ttgttggccactgccaccgcagtct

SEQ ID NO: 2910847 - DNA, 25 bp, Homo sapien
cgcagtctgcagatccggctggaac

SEQ ID NO: 2910848 - DNA, 25 bp, Homo sapien
tcagaaagatgctaaggctggcaca

SEQ ID NO: 2910849 - DNA, 25 bp, Homo sapien
ggtctttccccgctgctgttagaga

SEQ ID NO: 2910850 - DNA, 25 bp, Homo sapien
aatagcagagcttaaacggaccttg

SEQ ID NO: 2910851 - DNA, 25 bp, Homo sapien
tgtaagaattaggtaagtcaccctg

SEQ ID NO: 2910852 - DNA, 25 bp, Homo sapien
actggccagcagcatcgaccttggg

SEQ ID NO: 2910853 - DNA, 25 bp, Homo sapien
cgaccttgggggactctggctcttc

SEQ ID NO: 2910854 - DNA, 25 bp, Homo sapien
cactggccagcagcatcgaccttgg

SEQ ID NO: 2910855 - DNA, 25 bp, Homo sapien
agcagcatcgaccttgggggactct

SEQ ID NO: 2910856 - DNA, 25 bp, Homo sapien
tcattggtatttcgcttagggggct

SEQ ID NO: 2910857 - DNA, 25 bp, Homo sapien
gggaggtcctcattggtatttcgct

SEQ ID NO: 2910858 - DNA, 25 bp, Homo sapien
gcttctaagggccttatggacagaa

SEQ ID NO: 2910859 - DNA, 25 bp, Homo sapien
acagaagtattctgtccagttccat

SEQ ID NO: 2910860 - DNA, 25 bp, Homo sapien
gagcatgccatgatacctggtcaga

SEQ ID NO: 2910861 - DNA, 25 bp, Homo sapien
tagagctacatagcaagccagagac

SEQ ID NO: 2910862 - DNA, 25 bp, Homo sapien
tcagatgatatttcgtaaaggacca

SEQ ID NO: 2910863 - DNA, 25 bp, Homo sapien
ttgctgcccatgacccacaaacagt

SEQ ID NO: 2910864 - DNA, 25 bp, Homo sapien
tgcttcgtggttccctctttcttgg

SEQ ID NO: 2910865 - DNA, 25 bp, Homo sapien
ctgaaactgcttcgtggttccctct

SEQ ID NO: 2910866 - DNA, 25 bp, Homo sapien
tctggtggaggtgctcagcagtctc

SEQ ID NO: 2910867 - DNA, 25 bp, Homo sapien
ccactttccctctggtggaggtgct

SEQ ID NO: 2910868 - DNA, 25 bp, Homo sapien
caaggccaccagagggtttcttctt

SEQ ID NO: 2910869 - DNA, 25 bp, Homo sapien
catttcagtacagcattgcacttga

SEQ ID NO: 2910870 - DNA, 25 bp, Homo sapien
gccaaggccaccagagggtttcttc

SEQ ID NO: 2910871 - DNA, 25 bp, Homo sapien
ttgcacttgaaaccgccatattccc

SEQ ID NO: 2910872 - DNA, 25 bp, Homo sapien
ttacatgcatattggtccaccaagc

SEQ ID NO: 2910873 - DNA, 25 bp, Homo sapien
catattggtccaccaagcacaggca

SEQ ID NO: 2910874 - DNA, 25 bp, Homo sapien
cacatggaacatgtactggcacagg

SEQ ID NO: 2910875 - DNA, 25 bp, Homo sapien
tggcacaggcctactactgcccagg

SEQ ID NO: 2910876 - DNA, 25 bp, Homo sapien
tgacgctgtcatcccaggagagcac

SEQ ID NO: 2910877 - DNA, 25 bp, Homo sapien
gagagcaccctcctcatgggtttta

SEQ ID NO: 2910878 - DNA, 25 bp, Homo sapien
gctaagggcatttttaggtaagcca

SEQ ID NO: 2910879 - DNA, 25 bp, Homo sapien
taacacagtatatgcaattcaggct

SEQ ID NO: 2910880 - DNA, 25 bp, Homo sapien
gatcatgctctcatttctctgctca

SEQ ID NO: 2910881 - DNA, 25 bp, Homo sapien
ctctcatttctctgctcagcagcaa

SEQ ID NO: 2910882 - DNA, 25 bp, Homo sapien
tcagatcatgctctcatttctctgc

SEQ ID NO: 2910883 - DNA, 25 bp, Homo sapien
tctcatttctctgctcagcagcaac

SEQ ID NO: 2910884 - DNA, 25 bp, Homo sapien
tcacaggaatttggcaggtcagaag

SEQ ID NO: 2910885 - DNA, 25 bp, Homo sapien
tggcaggtcagaagaggcacaatgt

SEQ ID NO: 2910886 - DNA, 25 bp, Homo sapien
ccggtcttcctagatgctcctctca

SEQ ID NO: 2910887 - DNA, 25 bp, Homo sapien
agaggcacaatgtgggcccttagcc

SEQ ID NO: 2910888 - DNA, 25 bp, Homo sapien
ctttaactggagtccagtgcagtct

SEQ ID NO: 2910889 - DNA, 25 bp, Homo sapien
ggagtccagtgcagtctctaaaagc

SEQ ID NO: 2910890 - DNA, 25 bp, Homo sapien
aactggagtccagtgcagtctctaa

SEQ ID NO: 2910891 - DNA, 25 bp, Homo sapien
ctggagtccagtgcagtctctaaaa

SEQ ID NO: 2910892 - DNA, 25 bp, Homo sapien
tgggtggtgtcatgctgcagcacca

SEQ ID NO: 2910893 - DNA, 25 bp, Homo sapien
tggtgttgggtggtgtcatgctgca

SEQ ID NO: 2910894 - DNA, 25 bp, Homo sapien
ttggtgttgggtggtgtcatgctgc

SEQ ID NO: 2910895 - DNA, 25 bp, Homo sapien
tgttgggtggtgtcatgctgcagca

SEQ ID NO: 2910896 - DNA, 25 bp, Homo sapien
gccaccatggcttgaaaaccctttg

SEQ ID NO: 2910897 - DNA, 25 bp, Homo sapien
agtggagttagacccatattcctgg

SEQ ID NO: 2910898 - DNA, 25 bp, Homo sapien
tgcaactctgtagccagtggagtta

SEQ ID NO: 2910899 - DNA, 25 bp, Homo sapien
tgccaccatggcttgaaaacccttt

SEQ ID NO: 2910900 - DNA, 25 bp, Homo sapien
cagttcaggacccacatgattccct

SEQ ID NO: 2910901 - DNA, 25 bp, Homo sapien
ctgaaggcaggcgaaacccagtggc

SEQ ID NO: 2910902 - DNA, 25 bp, Homo sapien
aggcaggcgaaacccagtggctcag

SEQ ID NO: 2910903 - DNA, 25 bp, Homo sapien
actccaggcctctggacaaacactt

SEQ ID NO: 2910904 - DNA, 25 bp, Homo sapien
agcagctcaggcagtgctggccctg

SEQ ID NO: 2910905 - DNA, 25 bp, Homo sapien
gctcaggcagtgctggccctgcaca

SEQ ID NO: 2910906 - DNA, 25 bp, Homo sapien
cagcagctcaggcagtgctggccct

SEQ ID NO: 2910907 - DNA, 25 bp, Homo sapien
aggcagtgctggccctgcacagcgc

SEQ ID NO: 2910908 - DNA, 25 bp, Homo sapien
gacacagggtctggttgccttgcaa

SEQ ID NO: 2910909 - DNA, 25 bp, Homo sapien
acacagggtctggttgccttgcaag

SEQ ID NO: 2910910 - DNA, 25 bp, Homo sapien
caagaggacggctgcgtcccagaga

SEQ ID NO: 2910911 - DNA, 25 bp, Homo sapien
ccagagatgttcaggcagatgctgc

SEQ ID NO: 2910912 - DNA, 25 bp, Homo sapien
aggagacagtgaccacggtgagctg

SEQ ID NO: 2910913 - DNA, 25 bp, Homo sapien
cactgacggcacttggggtttgaga

SEQ ID NO: 2910914 - DNA, 25 bp, Homo sapien
ctctgaaacacgagctgcaggcgcc

SEQ ID NO: 2910915 - DNA, 25 bp, Homo sapien
tctgaaacacgagctgcaggcgcca

SEQ ID NO: 2910916 - DNA, 25 bp, Homo sapien
actacgtccggcctaggctgagtaa

SEQ ID NO: 2910917 - DNA, 25 bp, Homo sapien
aaagctcatggcaaaactgatgttc

SEQ ID NO: 2910918 - DNA, 25 bp, Homo sapien
gcctaggctgagtaaacatctaaaa

SEQ ID NO: 2910919 - DNA, 25 bp, Homo sapien
tactccatttgctaatcttcagaca

SEQ ID NO: 2910920 - DNA, 25 bp, Homo sapien
atgtaatatacagtgctccagcagg

SEQ ID NO: 2910921 - DNA, 25 bp, Homo sapien
gccaaggtcttgaaacacgaaggtg

SEQ ID NO: 2910922 - DNA, 25 bp, Homo sapien
tcttgaaacacgaaggtgagattcc

SEQ ID NO: 2910923 - DNA, 25 bp, Homo sapien
cagggaatgttttgttggtgcttgc

SEQ ID NO: 2910924 - DNA, 25 bp, Homo sapien
ctcgtcaccaccacagactttgcga

SEQ ID NO: 2910925 - DNA, 25 bp, Homo sapien
ccaccacagactttgcgatcagcat

SEQ ID NO: 2910926 - DNA, 25 bp, Homo sapien
tcgtcaccaccacagactttgcgat

SEQ ID NO: 2910927 - DNA, 25 bp, Homo sapien
tcaccaccacagactttgcgatcag

SEQ ID NO: 2910928 - DNA, 25 bp, Homo sapien
atgtgcactgaccaggaaaactgct

SEQ ID NO: 2910929 - DNA, 25 bp, Homo sapien
gtgcactgaccaggaaaactgctgt

SEQ ID NO: 2910930 - DNA, 25 bp, Homo sapien
tgtgcactgaccaggaaaactgctg

SEQ ID NO: 2910931 - DNA, 25 bp, Homo sapien
ccgggccagatccagcacttctgag

SEQ ID NO: 2910932 - DNA, 25 bp, Homo sapien
ttaattaacaacaggacttcactgc

SEQ ID NO: 2910933 - DNA, 25 bp, Homo sapien
ttcactgcccatccctaagggcttc

SEQ ID NO: 2910934 - DNA, 25 bp, Homo sapien
tgctgccactcagggtaaccagtag

SEQ ID NO: 2910935 - DNA, 25 bp, Homo sapien
aagtgatgatcccttatccgagcct

SEQ ID NO: 2910936 - DNA, 25 bp, Homo sapien
ccttatccgagcctgtgctgtctga

SEQ ID NO: 2910937 - DNA, 25 bp, Homo sapien
ggtgataagtgatgatcccttatcc

SEQ ID NO: 2910938 - DNA, 25 bp, Homo sapien
gatcccttatccgagcctgtgctgt

SEQ ID NO: 2910939 - DNA, 25 bp, Homo sapien
gggaagtgagccgtggctgctatcc

SEQ ID NO: 2910940 - DNA, 25 bp, Homo sapien
gaagtgagccgtggctgctatcctg

SEQ ID NO: 2910941 - DNA, 25 bp, Homo sapien
aagagggaagtgagccgtggctgct

SEQ ID NO: 2910942 - DNA, 25 bp, Homo sapien
ccaagagggaagtgagccgtggctg

SEQ ID NO: 2910943 - DNA, 25 bp, Homo sapien
tgcaagagtcttcgcctgttcgtaa

SEQ ID NO: 2910944 - DNA, 25 bp, Homo sapien
ttagtgacccgtgaggtgatcccat

SEQ ID NO: 2910945 - DNA, 25 bp, Homo sapien
agggcagccgactgctgactggtta

SEQ ID NO: 2910946 - DNA, 25 bp, Homo sapien
cagccatagtgagtgccatgtgacc

SEQ ID NO: 2910947 - DNA, 25 bp, Homo sapien
cagtgcaggctcgagagggagggag

SEQ ID NO: 2910948 - DNA, 25 bp, Homo sapien
ctggacgtacaatcacccacaagga

SEQ ID NO: 2910949 - DNA, 25 bp, Homo sapien
gagcccgagcactcgcctggacagg

SEQ ID NO: 2910950 - DNA, 25 bp, Homo sapien
cccacaaggatacggaggaggacag

SEQ ID NO: 2910951 - DNA, 25 bp, Homo sapien
ctttagaacaagacacctccagtgg

SEQ ID NO: 2910952 - DNA, 25 bp, Homo sapien
gaggaggtcacactgcatctggagt

SEQ ID NO: 2910953 - DNA, 25 bp, Homo sapien
ggcagggagcccatcacagtttcct

SEQ ID NO: 2910954 - DNA, 25 bp, Homo sapien
caaattggttcctaccagggcctgg

SEQ ID NO: 2910955 - DNA, 25 bp, Homo sapien
caggctgagaccttccagttgagta

SEQ ID NO: 2910956 - DNA, 25 bp, Homo sapien
cagttgagtaaaagccgcctgttgc

SEQ ID NO: 2910957 - DNA, 25 bp, Homo sapien
tgagacctagaagatgcttggagcc

SEQ ID NO: 2910958 - DNA, 25 bp, Homo sapien
gccagttctgattgagatttgccaa

SEQ ID NO: 2910959 - DNA, 25 bp, Homo sapien
cttgatggttctactgtagcctcag

SEQ ID NO: 2910960 - DNA, 25 bp, Homo sapien
agaaaagcatggtcagtgagtttct

SEQ ID NO: 2910961 - DNA, 25 bp, Homo sapien
aaagcatggtcagtgagtttcttcc

SEQ ID NO: 2910962 - DNA, 25 bp, Homo sapien
gtttcttccttgatggttctactgt

SEQ ID NO: 2910963 - DNA, 25 bp, Homo sapien
gcccgtctcgggctgggcggagcac

SEQ ID NO: 2910964 - DNA, 25 bp, Homo sapien
tccaggcgccgtgccgcgtcttggt

SEQ ID NO: 2910965 - DNA, 25 bp, Homo sapien
tggcggcggataactaacaaattgc

SEQ ID NO: 2910966 - DNA, 25 bp, Homo sapien
agacccgccgggcatggccatagcg

SEQ ID NO: 2910967 - DNA, 25 bp, Homo sapien
aagaggcagccgtagaagtcagtgc

SEQ ID NO: 2910968 - DNA, 25 bp, Homo sapien
gccaggtatctgtcgactgccacgg

SEQ ID NO: 2910969 - DNA, 25 bp, Homo sapien
gcgtctgcagagtgttcgccgtgcc

SEQ ID NO: 2910970 - DNA, 25 bp, Homo sapien
actgccacggccagaaggctgaaga

SEQ ID NO: 2910971 - DNA, 25 bp, Homo sapien
taggaacggccttcgtggcaggagt

SEQ ID NO: 2910972 - DNA, 25 bp, Homo sapien
tagagctgtccctacgcagatctcc

SEQ ID NO: 2910973 - DNA, 25 bp, Homo sapien
gcagatctccttagagcgacgcgca

SEQ ID NO: 2910974 - DNA, 25 bp, Homo sapien
agatgtgatcaccaaaactcccgcg

SEQ ID NO: 2910975 - DNA, 25 bp, Homo sapien
ggaccaggcccaacacatctgccta

SEQ ID NO: 2910976 - DNA, 25 bp, Homo sapien
gcaaggaccaggcccaacacatctg

SEQ ID NO: 2910977 - DNA, 25 bp, Homo sapien
caacacatctgcctactcaaatggc

SEQ ID NO: 2910978 - DNA, 25 bp, Homo sapien
ctgcaaggaccaggcccaacacatc

SEQ ID NO: 2910979 - DNA, 25 bp, Homo sapien
ttcctgctgggacccacgaaacaac

SEQ ID NO: 2910980 - DNA, 25 bp, Homo sapien
agcagcacatggagtggccagacac

SEQ ID NO: 2910981 - DNA, 25 bp, Homo sapien
tcctgttcctgctgggacccacgaa

SEQ ID NO: 2910982 - DNA, 25 bp, Homo sapien
tcctggtccaacagcacgggcagca

SEQ ID NO: 2910983 - DNA, 25 bp, Homo sapien
tgctgtcctccctaagccttggaaa

SEQ ID NO: 2910984 - DNA, 25 bp, Homo sapien
aactgctgtcctccctaagccttgg

SEQ ID NO: 2910985 - DNA, 25 bp, Homo sapien
gaagaaactgctgtcctccctaagc

SEQ ID NO: 2910986 - DNA, 25 bp, Homo sapien
gagaagaaactgctgtcctccctaa

SEQ ID NO: 2910987 - DNA, 25 bp, Homo sapien
gccaggtcagacgactaactctggg

SEQ ID NO: 2910988 - DNA, 25 bp, Homo sapien
tggccaggtcagacgactaactctg

SEQ ID NO: 2910989 - DNA, 25 bp, Homo sapien
tgctgtggccaggtcagacgactaa

SEQ ID NO: 2910990 - DNA, 25 bp, Homo sapien
tgtggccaggtcagacgactaactc

SEQ ID NO: 2910991 - DNA, 25 bp, Homo sapien
tccaactttactctcacctggagtt

SEQ ID NO: 2910992 - DNA, 25 bp, Homo sapien
gtgcttggggcgccatgcacccagc

SEQ ID NO: 2910993 - DNA, 25 bp, Homo sapien
gccaagtcagtgcttggggcgccat

SEQ ID NO: 2910994 - DNA, 25 bp, Homo sapien
ttccaactttactctcacctggagt

SEQ ID NO: 2910995 - DNA, 25 bp, Homo sapien
aacaccttggcaatgcggtggcagg

SEQ ID NO: 2910996 - DNA, 25 bp, Homo sapien
caggccaagggcgtcatatttgtcc

SEQ ID NO: 2910997 - DNA, 25 bp, Homo sapien
acttctgtttgtggccagccctgtc

SEQ ID NO: 2910998 - DNA, 25 bp, Homo sapien
ctatggacttgaaccagaggcaatg

SEQ ID NO: 2910999 - DNA, 25 bp, Homo sapien
tccacaatgtgctttcctagcctgt

SEQ ID NO: 2911000 - DNA, 25 bp, Homo sapien
agcctgtgccggcatcgcgctgcat

SEQ ID NO: 2911001 - DNA, 25 bp, Homo sapien
tttcacccagtcactcatgcattca

SEQ ID NO: 2911002 - DNA, 25 bp, Homo sapien
catgcattcatccacaatgtgcttt

SEQ ID NO: 2911003 - DNA, 25 bp, Homo sapien
ggttttcctgtcttccgatcattag

SEQ ID NO: 2911004 - DNA, 25 bp, Homo sapien
tcttctggcgtttcacagagccctt

SEQ ID NO: 2911005 - DNA, 25 bp, Homo sapien
tcccttaggcccatgagagatgttt

SEQ ID NO: 2911006 - DNA, 25 bp, Homo sapien
tgatgcaggtaacagggtggctcct

SEQ ID NO: 2911007 - DNA, 25 bp, Homo sapien
caggcggtgtttccctggctgtgct

SEQ ID NO: 2911008 - DNA, 25 bp, Homo sapien
aattcagtgggaatgtccacagcat

SEQ ID NO: 2911009 - DNA, 25 bp, Homo sapien
tgggaatgtccacagcatgaggcca

SEQ ID NO: 2911010 - DNA, 25 bp, Homo sapien
gaggccaggcggtgtttccctggct

SEQ ID NO: 2911011 - DNA, 25 bp, Homo sapien
agaggcagcgcgctcacagtaacag

SEQ ID NO: 2911012 - DNA, 25 bp, Homo sapien
cgcggctcacagaaaccaggagcag

SEQ ID NO: 2911013 - DNA, 25 bp, Homo sapien
gctcacagtaacagcgcggctcaca

SEQ ID NO: 2911014 - DNA, 25 bp, Homo sapien
gtaacagcgcggctcacagaaacca

SEQ ID NO: 2911015 - DNA, 25 bp, Homo sapien
gtctgcatgcgtttgtccatctccc

SEQ ID NO: 2911016 - DNA, 25 bp, Homo sapien
tcaggtctgcatgcgtttgtccatc

SEQ ID NO: 2911017 - DNA, 25 bp, Homo sapien
tccttccgtccttccgttcgccagc

SEQ ID NO: 2911018 - DNA, 25 bp, Homo sapien
cttccgttcgccagcccgtggcagt

SEQ ID NO: 2911019 - DNA, 25 bp, Homo sapien
tcggctccacacgtccagtgcctgc

SEQ ID NO: 2911020 - DNA, 25 bp, Homo sapien
gtgtaagacgtatacttcccagcat

SEQ ID NO: 2911021 - DNA, 25 bp, Homo sapien
tgccattcttaaccaatggctccct

SEQ ID NO: 2911022 - DNA, 25 bp, Homo sapien
ctgcagtgtaagacgtatacttccc

SEQ ID NO: 2911023 - DNA, 25 bp, Homo sapien
gctctttgagtctaggtcttctgta

SEQ ID NO: 2911024 - DNA, 25 bp, Homo sapien
ctaggtaccgctctttgagtctagg

SEQ ID NO: 2911025 - DNA, 25 bp, Homo sapien
taccgctctttgagtctaggtcttc

SEQ ID NO: 2911026 - DNA, 25 bp, Homo sapien
ctttgagtctaggtcttctgtaagg

SEQ ID NO: 2911027 - DNA, 25 bp, Homo sapien
tttaccctcaatactaaagacatgc

SEQ ID NO: 2911028 - DNA, 25 bp, Homo sapien
caccttccagggcactaaggccttt

SEQ ID NO: 2911029 - DNA, 25 bp, Homo sapien
cctcaatactaaagacatgcaagca

SEQ ID NO: 2911030 - DNA, 25 bp, Homo sapien
caatactaaagacatgcaagcaggg

SEQ ID NO: 2911031 - DNA, 25 bp, Homo sapien
tctgttacggtcagtttatagcgct

SEQ ID NO: 2911032 - DNA, 25 bp, Homo sapien
aagaataccatctgttacggtcagt

SEQ ID NO: 2911033 - DNA, 25 bp, Homo sapien
taccatctgttacggtcagtttata

SEQ ID NO: 2911034 - DNA, 25 bp, Homo sapien
catctgttacggtcagtttatagcg

SEQ ID NO: 2911035 - DNA, 25 bp, Homo sapien
gacaactgaattggcatgtgacaga

SEQ ID NO: 2911036 - DNA, 25 bp, Homo sapien
tgacttggctgcatggatctcccgc

SEQ ID NO: 2911037 - DNA, 25 bp, Homo sapien
gagtcaatccgatgccaaaggcaag

SEQ ID NO: 2911038 - DNA, 25 bp, Homo sapien
tcggttccggtaagcatagacaatg

SEQ ID NO: 2911039 - DNA, 25 bp, Homo sapien
ataggcccacaccgagagcaggctg

SEQ ID NO: 2911040 - DNA, 25 bp, Homo sapien
aggcccacaccgagagcaggctgta

SEQ ID NO: 2911041 - DNA, 25 bp, Homo sapien
tcataggcccacaccgagagcaggc

SEQ ID NO: 2911042 - DNA, 25 bp, Homo sapien
taggcccacaccgagagcaggctgt

SEQ ID NO: 2911043 - DNA, 25 bp, Homo sapien
ctagatacgtggtagctccagggaa

SEQ ID NO: 2911044 - DNA, 25 bp, Homo sapien
aatccttggagcctactactgacac

SEQ ID NO: 2911045 - DNA, 25 bp, Homo sapien
tctcctggaagaggcgagagcctag

SEQ ID NO: 2911046 - DNA, 25 bp, Homo sapien
ttcacaatgaaaaccagccgtgtcc

SEQ ID NO: 2911047 - DNA, 25 bp, Homo sapien
catgcccggccgaataattatactt

SEQ ID NO: 2911048 - DNA, 25 bp, Homo sapien
tttgaggtcaccttcctggcaacaa

SEQ ID NO: 2911049 - DNA, 25 bp, Homo sapien
taatttttgaggtcaccttcctggc

SEQ ID NO: 2911050 - DNA, 25 bp, Homo sapien
tcaccttcctggcaacaagtataca

SEQ ID NO: 2911051 - DNA, 25 bp, Homo sapien
ctatctatctagctctagaaggcag

SEQ ID NO: 2911052 - DNA, 25 bp, Homo sapien
tttcacactttgagttccaagaact

SEQ ID NO: 2911053 - DNA, 25 bp, Homo sapien
tgacttatgagactatcaatcaatc

SEQ ID NO: 2911054 - DNA, 25 bp, Homo sapien
tccctaaattaatacagcagtttct

SEQ ID NO: 2911055 - DNA, 25 bp, Homo sapien
tagttgtccactgctagataagcga

SEQ ID NO: 2911056 - DNA, 25 bp, Homo sapien
gagtcttagcccttgaaaggctcag

SEQ ID NO: 2911057 - DNA, 25 bp, Homo sapien
tagacacccaagaattataggccgg

SEQ ID NO: 2911058 - DNA, 25 bp, Homo sapien
gtttattcagcatgatccagggagg

SEQ ID NO: 2911059 - DNA, 25 bp, Homo sapien
caagttactgaggtgactttgagaa

SEQ ID NO: 2911060 - DNA, 25 bp, Homo sapien
caggccttggacctagttgatcgac

SEQ ID NO: 2911061 - DNA, 25 bp, Homo sapien
ccccttaggacaaaatgttcttcat

SEQ ID NO: 2911062 - DNA, 25 bp, Homo sapien
tgatccctacagaaaccccttagga

SEQ ID NO: 2911063 - DNA, 25 bp, Homo sapien
aagttgccaaaagaagtctacgata

SEQ ID NO: 2911064 - DNA, 25 bp, Homo sapien
ggaacagcaaaaagaagcctacaat

SEQ ID NO: 2911065 - DNA, 25 bp, Homo sapien
taaaaataaatgtccgtcaacatgc

SEQ ID NO: 2911066 - DNA, 25 bp, Homo sapien
actttggagagctattggcaatatc

SEQ ID NO: 2911067 - DNA, 25 bp, Homo sapien
accgaggtcgtgtgtggctgcgcca

SEQ ID NO: 2911068 - DNA, 25 bp, Homo sapien
gggccctgacgactgagcaggacat

SEQ ID NO: 2911069 - DNA, 25 bp, Homo sapien
ggctccagctcaggagccggaacat

SEQ ID NO: 2911070 - DNA, 25 bp, Homo sapien
ttgccggcggttgtggaggagctcc

SEQ ID NO: 2911071 - DNA, 25 bp, Homo sapien
cctcctctgccgcagcgggcctcga

SEQ ID NO: 2911072 - DNA, 25 bp, Homo sapien
tcgtccgccccgtcctcggcagcgg

SEQ ID NO: 2911073 - DNA, 25 bp, Homo sapien
tgccgcagcgggcctcgagaaccag

SEQ ID NO: 2911074 - DNA, 25 bp, Homo sapien
ggcagcggccccgtcggctccctgc

SEQ ID NO: 2911075 - DNA, 25 bp, Homo sapien
tccatccactcttcggcgaggcgga

SEQ ID NO: 2911076 - DNA, 25 bp, Homo sapien
gagtaatgcgcagcaacgccaagac

SEQ ID NO: 2911077 - DNA, 25 bp, Homo sapien
ttcggcgaggcggagagagtaatgc

SEQ ID NO: 2911078 - DNA, 25 bp, Homo sapien
cgctcacaaaggctaccgcgctcgg

SEQ ID NO: 2911079 - DNA, 25 bp, Homo sapien
gactactggagcatagttggtggca

SEQ ID NO: 2911080 - DNA, 25 bp, Homo sapien
gacagcaagggagatagacaaaagg

SEQ ID NO: 2911081 - DNA, 25 bp, Homo sapien
aatgcagtgggtagccattcagagc

SEQ ID NO: 2911082 - DNA, 25 bp, Homo sapien
caatgatggtttgcactagggtgac

SEQ ID NO: 2911083 - DNA, 25 bp, Homo sapien
acgaagagcgtcatgcaaaattaac

SEQ ID NO: 2911084 - DNA, 25 bp, Homo sapien
taggcgagacgaagagcgtcatgca

SEQ ID NO: 2911085 - DNA, 25 bp, Homo sapien
tgttatcagtctgataggcgagacg

SEQ ID NO: 2911086 - DNA, 25 bp, Homo sapien
tctgataggcgagacgaagagcgtc

SEQ ID NO: 2911087 - DNA, 25 bp, Homo sapien
gtggttcagactggttataagagtt

SEQ ID NO: 2911088 - DNA, 25 bp, Homo sapien
ggttcagactggttataagagttac

SEQ ID NO: 2911089 - DNA, 25 bp, Homo sapien
tggttcagactggttataagagtta

SEQ ID NO: 2911090 - DNA, 25 bp, Homo sapien
aatactgtgttcctacttatttcaa

SEQ ID NO: 2911091 - DNA, 25 bp, Homo sapien
gtttagaatactgtgttcctactta

SEQ ID NO: 2911092 - DNA, 25 bp, Homo sapien
tactgtgttcctacttatttcaaaa

SEQ ID NO: 2911093 - DNA, 25 bp, Homo sapien
tttcagtttagaatactgtgttcct

SEQ ID NO: 2911094 - DNA, 25 bp, Homo sapien
attttcaagctgaccccgtataaat

SEQ ID NO: 2911095 - DNA, 25 bp, Homo sapien
cccgtataaatgctaagttggccat

SEQ ID NO: 2911096 - DNA, 25 bp, Homo sapien
gaccccgtataaatgctaagttggc

SEQ ID NO: 2911097 - DNA, 25 bp, Homo sapien
ccccgtataaatgctaagttggcca

SEQ ID NO: 2911098 - DNA, 25 bp, Homo sapien
cttcatgccccctccaaggaggtaa

SEQ ID NO: 2911099 - DNA, 25 bp, Homo sapien
ctgcttcatgccccctccaaggagg

SEQ ID NO: 2911100 - DNA, 25 bp, Homo sapien
tgcttcatgccccctccaaggaggt

SEQ ID NO: 2911101 - DNA, 25 bp, Homo sapien
gcttcatgccccctccaaggaggta

SEQ ID NO: 2911102 - DNA, 25 bp, Homo sapien
ctggccagctttagggaaatttcaa

SEQ ID NO: 2911103 - DNA, 25 bp, Homo sapien
gcagcatagatactggccagcttta

SEQ ID NO: 2911104 - DNA, 25 bp, Homo sapien
ctttagggaaatttcaattattgca

SEQ ID NO: 2911105 - DNA, 25 bp, Homo sapien
tgttctgcgcagcatagatactggc

SEQ ID NO: 2911106 - DNA, 25 bp, Homo sapien
taatactaccctaaacagttcaggc

SEQ ID NO: 2911107 - DNA, 25 bp, Homo sapien
aagtctaagtagtgtcaaatctgcc

SEQ ID NO: 2911108 - DNA, 25 bp, Homo sapien
cagtgaggattccaactgttgacct

SEQ ID NO: 2911109 - DNA, 25 bp, Homo sapien
gttcaggccgccctacagtgaggat

SEQ ID NO: 2911110 - DNA, 25 bp, Homo sapien
tgacataatgtcttctgctaattcc

SEQ ID NO: 2911111 - DNA, 25 bp, Homo sapien
gaaatgcagaattcatagccagcaa

SEQ ID NO: 2911112 - DNA, 25 bp, Homo sapien
atagccagcaacagcaaattcctgt

SEQ ID NO: 2911113 - DNA, 25 bp, Homo sapien
ttttcctctagagttgaaatgcaga

SEQ ID NO: 2911114 - DNA, 25 bp, Homo sapien
tgaactaagagatacgagaaacacc

SEQ ID NO: 2911115 - DNA, 25 bp, Homo sapien
gcattttgattggtagctgaactaa

SEQ ID NO: 2911116 - DNA, 25 bp, Homo sapien
tgagtgaggatggattgtaaaaaca

SEQ ID NO: 2911117 - DNA, 25 bp, Homo sapien
tatctagggctaaaacgtaataagc

SEQ ID NO: 2911118 - DNA, 25 bp, Homo sapien
caaaataattatcctagagcaaggt

SEQ ID NO: 2911119 - DNA, 25 bp, Homo sapien
cctagaatagagatagttgtgtcaa

SEQ ID NO: 2911120 - DNA, 25 bp, Homo sapien
gcaaaactgaataggtaggaattcc

SEQ ID NO: 2911121 - DNA, 25 bp, Homo sapien
gaaattagcttgctctatctaacaa

SEQ ID NO: 2911122 - DNA, 25 bp, Homo sapien
gcaattaacctacaagcaagcctgg

SEQ ID NO: 2911123 - DNA, 25 bp, Homo sapien
gcctggtccgctctagatatataat

SEQ ID NO: 2911124 - DNA, 25 bp, Homo sapien
taactcaggagttctggtccatctg

SEQ ID NO: 2911125 - DNA, 25 bp, Homo sapien
tactgtggatctcataagaaacgca

SEQ ID NO: 2911126 - DNA, 25 bp, Homo sapien
taagggtaagatatagtagataata

SEQ ID NO: 2911127 - DNA, 25 bp, Homo sapien
ggttttcagattctgtatcagaaga

SEQ ID NO: 2911128 - DNA, 25 bp, Homo sapien
ctcagaaaagttaagggtaagatat

SEQ ID NO: 2911129 - DNA, 25 bp, Homo sapien
gttttcagattctgtatcagaagac

SEQ ID NO: 2911130 - DNA, 25 bp, Homo sapien
gtaaatgacattccagggtaagagg

SEQ ID NO: 2911131 - DNA, 25 bp, Homo sapien
tcaactgaagaaactcccaaaatat

SEQ ID NO: 2911132 - DNA, 25 bp, Homo sapien
catggtgacatgagcatgcagtctc

SEQ ID NO: 2911133 - DNA, 25 bp, Homo sapien
aagagaggtcaacatacaggtaaat

SEQ ID NO: 2911134 - DNA, 25 bp, Homo sapien
tacaagtgcaataagtaggcaaaca

SEQ ID NO: 2911135 - DNA, 25 bp, Homo sapien
aaaaccaaactcaggatagtagcta

SEQ ID NO: 2911136 - DNA, 25 bp, Homo sapien
tggccaaggctgaaagtacacagat

SEQ ID NO: 2911137 - DNA, 25 bp, Homo sapien
tagctacccctaggcagggagggaa

SEQ ID NO: 2911138 - DNA, 25 bp, Homo sapien
tataccatggttgtagtgagggaac

SEQ ID NO: 2911139 - DNA, 25 bp, Homo sapien
cagtttggcaagcaaacagggcctc

SEQ ID NO: 2911140 - DNA, 25 bp, Homo sapien
gacgcaacccagcagacatgcagtt

SEQ ID NO: 2911141 - DNA, 25 bp, Homo sapien
cagggccacctttagcttgtatcca

SEQ ID NO: 2911142 - DNA, 25 bp, Homo sapien
gagtttaaggaagactatgttacta

SEQ ID NO: 2911143 - DNA, 25 bp, Homo sapien
gcagcttgcttctatatcgcttacc

SEQ ID NO: 2911144 - DNA, 25 bp, Homo sapien
agagtttaaggaagactatgttact

SEQ ID NO: 2911145 - DNA, 25 bp, Homo sapien
tatatcgcttacctaattttacata

SEQ ID NO: 2911146 - DNA, 25 bp, Homo sapien
tcgttcatatcaagcccgttccctt

SEQ ID NO: 2911147 - DNA, 25 bp, Homo sapien
gcccgttcccttctatgtcttcagt

SEQ ID NO: 2911148 - DNA, 25 bp, Homo sapien
gctgtcgttcatatcaagcccgttc

SEQ ID NO: 2911149 - DNA, 25 bp, Homo sapien
agcccgttcccttctatgtcttcag

SEQ ID NO: 2911150 - DNA, 25 bp, Homo sapien
taagtagattaagagtccgcacatc

SEQ ID NO: 2911151 - DNA, 25 bp, Homo sapien
cacagatctagagaacggtaaccta

SEQ ID NO: 2911152 - DNA, 25 bp, Homo sapien
aaatgacctattccagactagctgg

SEQ ID NO: 2911153 - DNA, 25 bp, Homo sapien
tcctgaagtgcaaagtcacaagctg

SEQ ID NO: 2911154 - DNA, 25 bp, Homo sapien
tgcctgtgacggctgcttggagaac

SEQ ID NO: 2911155 - DNA, 25 bp, Homo sapien
taagcacatgcccaagaggaggtgg

SEQ ID NO: 2911156 - DNA, 25 bp, Homo sapien
ttggagaacagaaggtagcgagcac

SEQ ID NO: 2911157 - DNA, 25 bp, Homo sapien
cgagcacaggcgtctaagcacatgc

SEQ ID NO: 2911158 - DNA, 25 bp, Homo sapien
tacccagttagaagcaccaaatgaa

SEQ ID NO: 2911159 - DNA, 25 bp, Homo sapien
tcctttaaggctgagcaactttgag

SEQ ID NO: 2911160 - DNA, 25 bp, Homo sapien
gaagccagcctcctatggtttgatt

SEQ ID NO: 2911161 - DNA, 25 bp, Homo sapien
ggtttgattgcctctggagccccac

SEQ ID NO: 2911162 - DNA, 25 bp, Homo sapien
gcatccagggtagtagccaggtcac

SEQ ID NO: 2911163 - DNA, 25 bp, Homo sapien
gccaggtcactcatcagcacaatgg

SEQ ID NO: 2911164 - DNA, 25 bp, Homo sapien
taaatataggcctcatcaaagcggc

SEQ ID NO: 2911165 - DNA, 25 bp, Homo sapien
gagtaccatgtgtagctcaggatga

SEQ ID NO: 2911166 - DNA, 25 bp, Homo sapien
tctgtaaagcactactgacgtaagg

SEQ ID NO: 2911167 - DNA, 25 bp, Homo sapien
aatgctgtgggattcctaacggccc

SEQ ID NO: 2911168 - DNA, 25 bp, Homo sapien
catgtttattcgttggcccttgccc

SEQ ID NO: 2911169 - DNA, 25 bp, Homo sapien
tatcctgaggactttgatgagccca

SEQ ID NO: 2911170 - DNA, 25 bp, Homo sapien
actcttccctgatgtgttgtacaga

SEQ ID NO: 2911171 - DNA, 25 bp, Homo sapien
tagagcttgacagaatttgtcaaag

SEQ ID NO: 2911172 - DNA, 25 bp, Homo sapien
ttagagcttgacagaatttgtcaaa

SEQ ID NO: 2911173 - DNA, 25 bp, Homo sapien
taagccattgatcgggtgccacaga

SEQ ID NO: 2911174 - DNA, 25 bp, Homo sapien
tacagttctacttagaccagcaggg

SEQ ID NO: 2911175 - DNA, 25 bp, Homo sapien
caaaaatggcagtgtgtacaacccc

SEQ ID NO: 2911176 - DNA, 25 bp, Homo sapien
aaatgggtgctatactgtcacgtgc

SEQ ID NO: 2911177 - DNA, 25 bp, Homo sapien
gcacagcagtctattcattcaaagt

SEQ ID NO: 2911178 - DNA, 25 bp, Homo sapien
taagatccaggtcagtagttcagct

SEQ ID NO: 2911179 - DNA, 25 bp, Homo sapien
tagttcagctataccagcagtacac

SEQ ID NO: 2911180 - DNA, 25 bp, Homo sapien
gactcagttgtgtgactaaggctgc

SEQ ID NO: 2911181 - DNA, 25 bp, Homo sapien
agaaatgcaaagattactgggatac

SEQ ID NO: 2911182 - DNA, 25 bp, Homo sapien
aatgcaaagattactgggatacata

SEQ ID NO: 2911183 - DNA, 25 bp, Homo sapien
tgcaaagattactgggatacataca

SEQ ID NO: 2911184 - DNA, 25 bp, Homo sapien
gcaaagattactgggatacatacaa

SEQ ID NO: 2911185 - DNA, 25 bp, Homo sapien
cctgaggatttggacctcaaggttt

SEQ ID NO: 2911186 - DNA, 25 bp, Homo sapien
aggatttggacctcaaggtttctgg

SEQ ID NO: 2911187 - DNA, 25 bp, Homo sapien
tttacatctgcaacatacaaaactc

SEQ ID NO: 2911188 - DNA, 25 bp, Homo sapien
tctgcaacatacaaaactctagttt

SEQ ID NO: 2911189 - DNA, 25 bp, Homo sapien
gaaaactccagtgaccattggacag

SEQ ID NO: 2911190 - DNA, 25 bp, Homo sapien
tttccaacaacgagaccatgagctg

SEQ ID NO: 2911191 - DNA, 25 bp, Homo sapien
caatcagtaaaggagatcagtcctc

SEQ ID NO: 2911192 - DNA, 25 bp, Homo sapien
caatgcaaaaggtgagtggttgaca

SEQ ID NO: 2911193 - DNA, 25 bp, Homo sapien
tattgccaacctaccataaaagaga

SEQ ID NO: 2911194 - DNA, 25 bp, Homo sapien
tttcaggtactggtaatattttaga

SEQ ID NO: 2911195 - DNA, 25 bp, Homo sapien
ggtcttaagctattctgagtcagaa

SEQ ID NO: 2911196 - DNA, 25 bp, Homo sapien
ttctatgaccctgagggtcttaagc

SEQ ID NO: 2911197 - DNA, 25 bp, Homo sapien
tgtgattagctactgaccaagaccc

SEQ ID NO: 2911198 - DNA, 25 bp, Homo sapien
gacacaggtttagtactttgcccat

SEQ ID NO: 2911199 - DNA, 25 bp, Homo sapien
gataggccataagcccacatttgtc

SEQ ID NO: 2911200 - DNA, 25 bp, Homo sapien
taaattagtgacagagataggccat

SEQ ID NO: 2911201 - DNA, 25 bp, Homo sapien
tttaaaggcttatttgaggcatacc

SEQ ID NO: 2911202 - DNA, 25 bp, Homo sapien
tacagcccagttacataatgttggc

SEQ ID NO: 2911203 - DNA, 25 bp, Homo sapien
gaggcatacctcactgttacgcaca

SEQ ID NO: 2911204 - DNA, 25 bp, Homo sapien
tattgtaaatttccagtgcaggctt

SEQ ID NO: 2911205 - DNA, 25 bp, Homo sapien
tgggcaaggctacttaggaacggaa

SEQ ID NO: 2911206 - DNA, 25 bp, Homo sapien
tcaggaggagtttgcaaaccaaagc

SEQ ID NO: 2911207 - DNA, 25 bp, Homo sapien
tatgttccactttcccgaatagaag

SEQ ID NO: 2911208 - DNA, 25 bp, Homo sapien
tctaagtctcctatacctgggcaag

SEQ ID NO: 2911209 - DNA, 25 bp, Homo sapien
tgtaggagaaatagcaagagaggcc

SEQ ID NO: 2911210 - DNA, 25 bp, Homo sapien
aagagaggccgggtatgatgactca

SEQ ID NO: 2911211 - DNA, 25 bp, Homo sapien
gctttagtgagctggtaagccgtga

SEQ ID NO: 2911212 - DNA, 25 bp, Homo sapien
ttccagctcccatggataacttggg

SEQ ID NO: 2911213 - DNA, 25 bp, Homo sapien
tgatcctgccagtaatcttgggctg

SEQ ID NO: 2911214 - DNA, 25 bp, Homo sapien
tggaagacattatcaggaaggctct

SEQ ID NO: 2911215 - DNA, 25 bp, Homo sapien
caggctcagttagctctagaggcca

SEQ ID NO: 2911216 - DNA, 25 bp, Homo sapien
gagttgtcatgtcccagcctatggg

SEQ ID NO: 2911217 - DNA, 25 bp, Homo sapien
ccagttagccatgcagggaaacaca

SEQ ID NO: 2911218 - DNA, 25 bp, Homo sapien
agattacaagttgcacagtcagcag

SEQ ID NO: 2911219 - DNA, 25 bp, Homo sapien
tgctttattataggcggttcccagg

SEQ ID NO: 2911220 - DNA, 25 bp, Homo sapien
tatttgtggcggtcatcccagagtc

SEQ ID NO: 2911221 - DNA, 25 bp, Homo sapien
gaagctgtatgatgaaacaagtacc

SEQ ID NO: 2911222 - DNA, 25 bp, Homo sapien
ttatattaaagaaccagtgggctcc

SEQ ID NO: 2911223 - DNA, 25 bp, Homo sapien
ggtgttttagtatgccacatggtct

SEQ ID NO: 2911224 - DNA, 25 bp, Homo sapien
caagtacctaactttaacaggagat

SEQ ID NO: 2911225 - DNA, 25 bp, Homo sapien
ctgaggaaaggacgatctgctttat

SEQ ID NO: 2911226 - DNA, 25 bp, Homo sapien
tatttctgtgatctaccatctacta

SEQ ID NO: 2911227 - DNA, 25 bp, Homo sapien
gctttatttctgtgatctaccatct

SEQ ID NO: 2911228 - DNA, 25 bp, Homo sapien
gaaaggacgatctgctttatttctg

SEQ ID NO: 2911229 - DNA, 25 bp, Homo sapien
cttggaaggaccaagcactgtggtg

SEQ ID NO: 2911230 - DNA, 25 bp, Homo sapien
tccttggaaggaccaagcactgtgg

SEQ ID NO: 2911231 - DNA, 25 bp, Homo sapien
ccttggaaggaccaagcactgtggt

SEQ ID NO: 2911232 - DNA, 25 bp, Homo sapien
ttccttggaaggaccaagcactgtg

SEQ ID NO: 2911233 - DNA, 25 bp, Homo sapien
acgtggtggtagttgccggatgaag

SEQ ID NO: 2911234 - DNA, 25 bp, Homo sapien
cgtggtggtagttgccggatgaagt

SEQ ID NO: 2911235 - DNA, 25 bp, Homo sapien
ggcgctgccggacgtggtggtagtt

SEQ ID NO: 2911236 - DNA, 25 bp, Homo sapien
tggtggtagttgccggatgaagtga

SEQ ID NO: 2911237 - DNA, 25 bp, Homo sapien
tgcaaacaagctggaccaaaaaggt

SEQ ID NO: 2911238 - DNA, 25 bp, Homo sapien
agtgggcaggatcccactggtgcag

SEQ ID NO: 2911239 - DNA, 25 bp, Homo sapien
gtgggcaggatcccactggtgcagc

SEQ ID NO: 2911240 - DNA, 25 bp, Homo sapien
actcctcagattcttctttgtttgc

SEQ ID NO: 2911241 - DNA, 25 bp, Homo sapien
atcagactcctcagattcttctttg

SEQ ID NO: 2911242 - DNA, 25 bp, Homo sapien
caaaacaaccaaaagcccatgtcat

SEQ ID NO: 2911243 - DNA, 25 bp, Homo sapien
tcaaaacaaccaaaagcccatgtca

SEQ ID NO: 2911244 - DNA, 25 bp, Homo sapien
tttcttaagttcagctttgtattga

SEQ ID NO: 2911245 - DNA, 25 bp, Homo sapien
attgaacacgttataagaaatttag

SEQ ID NO: 2911246 - DNA, 25 bp, Homo sapien
gctttgtattgaacacgttataaga

SEQ ID NO: 2911247 - DNA, 25 bp, Homo sapien
aagttcagctttgtattgaacacgt

SEQ ID NO: 2911248 - DNA, 25 bp, Homo sapien
taatgaggctgcagttcaaacccag

SEQ ID NO: 2911249 - DNA, 25 bp, Homo sapien
gagttggcacaggttacatatctag

SEQ ID NO: 2911250 - DNA, 25 bp, Homo sapien
tgttgctaatgatggaccaactggc

SEQ ID NO: 2911251 - DNA, 25 bp, Homo sapien
gtccccttgatagagagactttggg

SEQ ID NO: 2911252 - DNA, 25 bp, Homo sapien
gctccaagtataggacaagtccaag

SEQ ID NO: 2911253 - DNA, 25 bp, Homo sapien
gaagctgtgccgtttctctttgaag

SEQ ID NO: 2911254 - DNA, 25 bp, Homo sapien
ttatgtaggactggattaactctcc

SEQ ID NO: 2911255 - DNA, 25 bp, Homo sapien
gacgtgtctttcaggagtcctctca

SEQ ID NO: 2911256 - DNA, 25 bp, Homo sapien
aggtgatattggccagacatagtgg

SEQ ID NO: 2911257 - DNA, 25 bp, Homo sapien
ttctaggcctcagacttctgtcagt

SEQ ID NO: 2911258 - DNA, 25 bp, Homo sapien
gacttctgtcagtgaataattttat

SEQ ID NO: 2911259 - DNA, 25 bp, Homo sapien
aaggtgatattggccagacatagtg

SEQ ID NO: 2911260 - DNA, 25 bp, Homo sapien
aagacatctatgtgttctctcctag

SEQ ID NO: 2911261 - DNA, 25 bp, Homo sapien
cagacattcctggagtaagacatct

SEQ ID NO: 2911262 - DNA, 25 bp, Homo sapien
tcactatcgaccacagcaggaatca

SEQ ID NO: 2911263 - DNA, 25 bp, Homo sapien
cctaccagacaatatgaaggaccat

SEQ ID NO: 2911264 - DNA, 25 bp, Homo sapien
catgtcttaaagcccataaaacttc

SEQ ID NO: 2911265 - DNA, 25 bp, Homo sapien
ccttttctgatgtgggtatcctcca

SEQ ID NO: 2911266 - DNA, 25 bp, Homo sapien
tgaaaagctgcctgttagccccact

SEQ ID NO: 2911267 - DNA, 25 bp, Homo sapien
ctctgaggctatggcaggactgtga

SEQ ID NO: 2911268 - DNA, 25 bp, Homo sapien
aattcagaggttcctgagcaggcgg

SEQ ID NO: 2911269 - DNA, 25 bp, Homo sapien
ctggtcgtaaactcctggcctccgg

SEQ ID NO: 2911270 - DNA, 25 bp, Homo sapien
gtcgtaaactcctggcctccggtga

SEQ ID NO: 2911271 - DNA, 25 bp, Homo sapien
tcgtaaactcctggcctccggtgat

SEQ ID NO: 2911272 - DNA, 25 bp, Homo sapien
aggctggtcgtaaactcctggcctc

SEQ ID NO: 2911273 - DNA, 25 bp, Homo sapien
cagctgtcactagataccttaggaa

SEQ ID NO: 2911274 - DNA, 25 bp, Homo sapien
tacacagattactttccctcccagg

SEQ ID NO: 2911275 - DNA, 25 bp, Homo sapien
tagtagttcttatgtgccagctgtc

SEQ ID NO: 2911276 - DNA, 25 bp, Homo sapien
ctccaggtgagattgtacagttaca

SEQ ID NO: 2911277 - DNA, 25 bp, Homo sapien
catgaaaggaaatcgacactgaccc

SEQ ID NO: 2911278 - DNA, 25 bp, Homo sapien
caggcgaggtttatcggagccacct

SEQ ID NO: 2911279 - DNA, 25 bp, Homo sapien
gaaagtatcccagcgaagtctccag

SEQ ID NO: 2911280 - DNA, 25 bp, Homo sapien
tgtcgtgagccacagtccgtttgat

SEQ ID NO: 2911281 - DNA, 25 bp, Homo sapien
tgctcctttcaatagttactacccc

SEQ ID NO: 2911282 - DNA, 25 bp, Homo sapien
tcttgctcctttcaatagttactac

SEQ ID NO: 2911283 - DNA, 25 bp, Homo sapien
gcacctcagaagttacggtgcttgt

SEQ ID NO: 2911284 - DNA, 25 bp, Homo sapien
aaaaggcacctcagaagttacggtg

SEQ ID NO: 2911285 - DNA, 25 bp, Homo sapien
gtaactgaccctagtttgttgcatg

SEQ ID NO: 2911286 - DNA, 25 bp, Homo sapien
ttttcctgctctgggtacatggtga

SEQ ID NO: 2911287 - DNA, 25 bp, Homo sapien
gctgtgtttagaaccatccaatttc

SEQ ID NO: 2911288 - DNA, 25 bp, Homo sapien
catttatacgagttgacctctgctt

SEQ ID NO: 2911289 - DNA, 25 bp, Homo sapien
gattgattgaaacggtcatttccag

SEQ ID NO: 2911290 - DNA, 25 bp, Homo sapien
tagtacctgtatggtcagcccttga

SEQ ID NO: 2911291 - DNA, 25 bp, Homo sapien
tcctccaggtatacttagcaggtgc

SEQ ID NO: 2911292 - DNA, 25 bp, Homo sapien
taaggagccataaaacagtagtagc

SEQ ID NO: 2911293 - DNA, 25 bp, Homo sapien
tatgtgcgctgctgaagtgagtacg

SEQ ID NO: 2911294 - DNA, 25 bp, Homo sapien
atgctttgcaaatttgcatgttttt

SEQ ID NO: 2911295 - DNA, 25 bp, Homo sapien
aatataaaatgctttgcaaatttgc

SEQ ID NO: 2911296 - DNA, 25 bp, Homo sapien
ttgcaaatttgcatgtttttcttgc

SEQ ID NO: 2911297 - DNA, 25 bp, Homo sapien
ttccaaaagtggatcagatgtaact

SEQ ID NO: 2911298 - DNA, 25 bp, Homo sapien
tattgtcaaacatgtgacctccttg

SEQ ID NO: 2911299 - DNA, 25 bp, Homo sapien
gcactttaaccagaactattgtcaa

SEQ ID NO: 2911300 - DNA, 25 bp, Homo sapien
taaaggcgagccatctacacaaaat

SEQ ID NO: 2911301 - DNA, 25 bp, Homo sapien
aaaagatcataatattgaagtgttg

SEQ ID NO: 2911302 - DNA, 25 bp, Homo sapien
taatattgaagtgttgacttgtttc

SEQ ID NO: 2911303 - DNA, 25 bp, Homo sapien
ggaggagaggttactatcctatttc

SEQ ID NO: 2911304 - DNA, 25 bp, Homo sapien
ggtggagatcactaagtgggaagct

SEQ ID NO: 2911305 - DNA, 25 bp, Homo sapien
gtcctagtattggatcacaccgtgg

SEQ ID NO: 2911306 - DNA, 25 bp, Homo sapien
cactggtgatgcaaacactgtaagg

SEQ ID NO: 2911307 - DNA, 25 bp, Homo sapien
aacttgtatacgcagagggagtggc

SEQ ID NO: 2911308 - DNA, 25 bp, Homo sapien
gaagtcagacaggtcagtcctagta

SEQ ID NO: 2911309 - DNA, 25 bp, Homo sapien
tcattgccaaggtcggtgtcccaga

SEQ ID NO: 2911310 - DNA, 25 bp, Homo sapien
ccatgttgtggatggcaagatctca

SEQ ID NO: 2911311 - DNA, 25 bp, Homo sapien
tggcctgacctcttgatatgcaaaa

SEQ ID NO: 2911312 - DNA, 25 bp, Homo sapien
tctgtgtctacaggctgctgactca

SEQ ID NO: 2911313 - DNA, 25 bp, Homo sapien
tcttgcctgtggatatgggatgttg

SEQ ID NO: 2911314 - DNA, 25 bp, Homo sapien
ctttactgggtactgagagaattcc

SEQ ID NO: 2911315 - DNA, 25 bp, Homo sapien
gaactttttgctgtagctcccattt

SEQ ID NO: 2911316 - DNA, 25 bp, Homo sapien
gttgctaatgagaagcctgctttta

SEQ ID NO: 2911317 - DNA, 25 bp, Homo sapien
ggacgtcatcatataaatgctgaac

SEQ ID NO: 2911318 - DNA, 25 bp, Homo sapien
tagacatctgattggcatagcccag

SEQ ID NO: 2911319 - DNA, 25 bp, Homo sapien
gtagacatctgattggcatagccca

SEQ ID NO: 2911320 - DNA, 25 bp, Homo sapien
gggacgtcatcatataaatgctgaa

SEQ ID NO: 2911321 - DNA, 25 bp, Homo sapien
ttctaaaggaacgtatgcgtgcggt

SEQ ID NO: 2911322 - DNA, 25 bp, Homo sapien
gtgcacttaacagtcgcgagggcca

SEQ ID NO: 2911323 - DNA, 25 bp, Homo sapien
aacatcgtggacaaatcggcctcgc

SEQ ID NO: 2911324 - DNA, 25 bp, Homo sapien
tcttgggcaggtcgaaatgcacccc

SEQ ID NO: 2911325 - DNA, 25 bp, Homo sapien
taggcgggccaagcctagcactgtg

SEQ ID NO: 2911326 - DNA, 25 bp, Homo sapien
acatggcttcatcgtcagggtgcgc

SEQ ID NO: 2911327 - DNA, 25 bp, Homo sapien
gttctgaggagtcccaaacccagag

SEQ ID NO: 2911328 - DNA, 25 bp, Homo sapien
caggtacacccagtgccttaggcgg

SEQ ID NO: 2911329 - DNA, 25 bp, Homo sapien
gagatcggttagcacttaaatccct

SEQ ID NO: 2911330 - DNA, 25 bp, Homo sapien
aagaaggcgactgagatcggttagc

SEQ ID NO: 2911331 - DNA, 25 bp, Homo sapien
cttcgagaagaaggcgactgagatc

SEQ ID NO: 2911332 - DNA, 25 bp, Homo sapien
cgactgagatcggttagcacttaaa

SEQ ID NO: 2911333 - DNA, 25 bp, Homo sapien
taactttaaggattgagcaggcacg

SEQ ID NO: 2911334 - DNA, 25 bp, Homo sapien
gaggtaagaccttcggtgtattcac

SEQ ID NO: 2911335 - DNA, 25 bp, Homo sapien
ctcaatcctgctggcgtagtacgcg

SEQ ID NO: 2911336 - DNA, 25 bp, Homo sapien
ttcccaacggaaatgcaggtactga

SEQ ID NO: 2911337 - DNA, 25 bp, Homo sapien
taagtttggtgaacctgtaggcact

SEQ ID NO: 2911338 - DNA, 25 bp, Homo sapien
agtttggtgaacctgtaggcactta

SEQ ID NO: 2911339 - DNA, 25 bp, Homo sapien
tttggtgaacctgtaggcacttaac

SEQ ID NO: 2911340 - DNA, 25 bp, Homo sapien
aataagtttggtgaacctgtaggca

SEQ ID NO: 2911341 - DNA, 25 bp, Homo sapien
gttctggaagctgaagtcaaggacc

SEQ ID NO: 2911342 - DNA, 25 bp, Homo sapien
cagttctggaagctgaagtcaagga

SEQ ID NO: 2911343 - DNA, 25 bp, Homo sapien
ttctggaagctgaagtcaaggacca

SEQ ID NO: 2911344 - DNA, 25 bp, Homo sapien
tctggaagctgaagtcaaggaccat

SEQ ID NO: 2911345 - DNA, 25 bp, Homo sapien
tagtctcatgtacattagtgttgca

SEQ ID NO: 2911346 - DNA, 25 bp, Homo sapien
tatgattatggttatcagaaactgc

SEQ ID NO: 2911347 - DNA, 25 bp, Homo sapien
caaaggctgtgcacattagtctatg

SEQ ID NO: 2911348 - DNA, 25 bp, Homo sapien
tgcaattgctaagttcaaaggctgt

SEQ ID NO: 2911349 - DNA, 25 bp, Homo sapien
ttgtcaataatcattacactggaga

SEQ ID NO: 2911350 - DNA, 25 bp, Homo sapien
ttcttacgagtctctccttgattgt

SEQ ID NO: 2911351 - DNA, 25 bp, Homo sapien
ctgttgtcaataatcattacactgg

SEQ ID NO: 2911352 - DNA, 25 bp, Homo sapien
aagttctttcttacgagtctctcct

SEQ ID NO: 2911353 - DNA, 25 bp, Homo sapien
atttattgccaataaatttctacat

SEQ ID NO: 2911354 - DNA, 25 bp, Homo sapien
tatttattgccaataaatttctaca

SEQ ID NO: 2911355 - DNA, 25 bp, Homo sapien
catatttattgccaataaatttcta

SEQ ID NO: 2911356 - DNA, 25 bp, Homo sapien
gcatatttattgccaataaatttct

SEQ ID NO: 2911357 - DNA, 25 bp, Homo sapien
cttcaatacatgcataatgaaatag

SEQ ID NO: 2911358 - DNA, 25 bp, Homo sapien
cacaaatgcaacagcaatgactgtc

SEQ ID NO: 2911359 - DNA, 25 bp, Homo sapien
taatgaaatagctgtccacaaatgc

SEQ ID NO: 2911360 - DNA, 25 bp, Homo sapien
tgaaatagctgtccacaaatgcaac

SEQ ID NO: 2911361 - DNA, 25 bp, Homo sapien
cattcgagttcttagagaccacaca

SEQ ID NO: 2911362 - DNA, 25 bp, Homo sapien
tatccagtgtggcaatcaggaacag

SEQ ID NO: 2911363 - DNA, 25 bp, Homo sapien
tattatatatcgagggttcaaaggg

SEQ ID NO: 2911364 - DNA, 25 bp, Homo sapien
acaggaagagagtttatggtgcaaa

SEQ ID NO: 2911365 - DNA, 25 bp, Homo sapien
gactggaactgtgcccttgagcctc

SEQ ID NO: 2911366 - DNA, 25 bp, Homo sapien
gatccgctttggcagcaagctatgg

SEQ ID NO: 2911367 - DNA, 25 bp, Homo sapien
tttgggagaaccagagccctgccct

SEQ ID NO: 2911368 - DNA, 25 bp, Homo sapien
gaggacgcgtggtcagatccgcttt

SEQ ID NO: 2911369 - DNA, 25 bp, Homo sapien
gctgcaactttacttgtcccaaggg

SEQ ID NO: 2911370 - DNA, 25 bp, Homo sapien
tgtctcagccttaaggaactaggtc

SEQ ID NO: 2911371 - DNA, 25 bp, Homo sapien
tctgaaagactgacccaataacctt

SEQ ID NO: 2911372 - DNA, 25 bp, Homo sapien
ccaaactagtagatgtagcaacaca

SEQ ID NO: 2911373 - DNA, 25 bp, Homo sapien
tgcagcccttagtggagaagagaca

SEQ ID NO: 2911374 - DNA, 25 bp, Homo sapien
ccaacgagtatccagctgtcagagg

SEQ ID NO: 2911375 - DNA, 25 bp, Homo sapien
gaggcagaaccattctcaggagacc

SEQ ID NO: 2911376 - DNA, 25 bp, Homo sapien
tgaagtacacggacaactagagggt

SEQ ID NO: 2911377 - DNA, 25 bp, Homo sapien
ggaggctgacaatcatctaatgaaa

SEQ ID NO: 2911378 - DNA, 25 bp, Homo sapien
aatttgaaattaattgtgggatcac

SEQ ID NO: 2911379 - DNA, 25 bp, Homo sapien
cctggcctgactacttaagttttca

SEQ ID NO: 2911380 - DNA, 25 bp, Homo sapien
aagttttcatgggtaacatctagca

SEQ ID NO: 2911381 - DNA, 25 bp, Homo sapien
gcataggtcagaactattgacaaaa

SEQ ID NO: 2911382 - DNA, 25 bp, Homo sapien
taggtcagaactattgacaaaatgt

SEQ ID NO: 2911383 - DNA, 25 bp, Homo sapien
atggcataggtcagaactattgaca

SEQ ID NO: 2911384 - DNA, 25 bp, Homo sapien
ggtcagaactattgacaaaatgtca

SEQ ID NO: 2911385 - DNA, 25 bp, Homo sapien
tgggcaagatccaagaactccctct

SEQ ID NO: 2911386 - DNA, 25 bp, Homo sapien
cttcccggtaacatcttccaggtga

SEQ ID NO: 2911387 - DNA, 25 bp, Homo sapien
ccctgaagggacaatactgaggaaa

SEQ ID NO: 2911388 - DNA, 25 bp, Homo sapien
gctgtacctgcttatgatgccctag

SEQ ID NO: 2911389 - DNA, 25 bp, Homo sapien
ctcactggcgtgtgctgttgaggtc

SEQ ID NO: 2911390 - DNA, 25 bp, Homo sapien
cattcccaggctactataatctgat

SEQ ID NO: 2911391 - DNA, 25 bp, Homo sapien
tgtgcctctgatagacacatcagtc

SEQ ID NO: 2911392 - DNA, 25 bp, Homo sapien
taatctgatgactgactcactggcg

SEQ ID NO: 2911393 - DNA, 25 bp, Homo sapien
aaggaggactctggccacgtgctct

SEQ ID NO: 2911394 - DNA, 25 bp, Homo sapien
aggaggactctggccacgtgctctg

SEQ ID NO: 2911395 - DNA, 25 bp, Homo sapien
cagattgatgccattcacttctatg

SEQ ID NO: 2911396 - DNA, 25 bp, Homo sapien
ccagtttcctgcattgatggctgca

SEQ ID NO: 2911397 - DNA, 25 bp, Homo sapien
gagcttatgctctcatcctggtgca

SEQ ID NO: 2911398 - DNA, 25 bp, Homo sapien
tctccccatggcttagactgtgctc

SEQ ID NO: 2911399 - DNA, 25 bp, Homo sapien
tgttcctgcagtactacagagctgg

SEQ ID NO: 2911400 - DNA, 25 bp, Homo sapien
tttctaagacactggttctcaccta

SEQ ID NO: 2911401 - DNA, 25 bp, Homo sapien
agaccccaataaataggtaactgtg

SEQ ID NO: 2911402 - DNA, 25 bp, Homo sapien
tgccccagggtcatttggtaacttc

SEQ ID NO: 2911403 - DNA, 25 bp, Homo sapien
ctcacctaggatagttttgccccag

SEQ ID NO: 2911404 - DNA, 25 bp, Homo sapien
agcaatgtgattgctgtggccactt

SEQ ID NO: 2911405 - DNA, 25 bp, Homo sapien
agagcaatgtgattgctgtggccac

SEQ ID NO: 2911406 - DNA, 25 bp, Homo sapien
gagcaatgtgattgctgtggccact

SEQ ID NO: 2911407 - DNA, 25 bp, Homo sapien
cagagcaatgtgattgctgtggcca

SEQ ID NO: 2911408 - DNA, 25 bp, Homo sapien
tgacagtgcaggtcattctgtgctc

SEQ ID NO: 2911409 - DNA, 25 bp, Homo sapien
gtgcaggtcattctgtgctcgccac

SEQ ID NO: 2911410 - DNA, 25 bp, Homo sapien
cagtgcaggtcattctgtgctcgcc

SEQ ID NO: 2911411 - DNA, 25 bp, Homo sapien
cttctgacagtgcaggtcattctgt

SEQ ID NO: 2911412 - DNA, 25 bp, Homo sapien
ccctccatgtgagtctccaggtggt

SEQ ID NO: 2911413 - DNA, 25 bp, Homo sapien
tcttttgcataaatcactgtataga

SEQ ID NO: 2911414 - DNA, 25 bp, Homo sapien
aggaaaggctgccatgcccatggtc

SEQ ID NO: 2911415 - DNA, 25 bp, Homo sapien
catttcctttgtaggtaacaggagg

SEQ ID NO: 2911416 - DNA, 25 bp, Homo sapien
taacttcccttctgagtgcagggcc

SEQ ID NO: 2911417 - DNA, 25 bp, Homo sapien
gaatcttcgtattgcgccggtgagg

SEQ ID NO: 2911418 - DNA, 25 bp, Homo sapien
tgcggtgtgccctaccagaaaaagg

SEQ ID NO: 2911419 - DNA, 25 bp, Homo sapien
cagtaaatggtcaggtagggtcaaa

SEQ ID NO: 2911420 - DNA, 25 bp, Homo sapien
ggcagattggttcatcaagcaccca

SEQ ID NO: 2911421 - DNA, 25 bp, Homo sapien
gtttctgtggcactaaagctgccct

SEQ ID NO: 2911422 - DNA, 25 bp, Homo sapien
acagtggccacagcattgccacgtg

SEQ ID NO: 2911423 - DNA, 25 bp, Homo sapien
ggccacagcattgccacgtgtttct

SEQ ID NO: 2911424 - DNA, 25 bp, Homo sapien
cacgtgtttctgtggcactaaagct

SEQ ID NO: 2911425 - DNA, 25 bp, Homo sapien
ggtgaagtgataagccttgaggcct

SEQ ID NO: 2911426 - DNA, 25 bp, Homo sapien
tgataagccttgaggcctccagcca

SEQ ID NO: 2911427 - DNA, 25 bp, Homo sapien
gaagtgataagccttgaggcctcca

SEQ ID NO: 2911428 - DNA, 25 bp, Homo sapien
gacagggtgaagtgataagccttga

SEQ ID NO: 2911429 - DNA, 25 bp, Homo sapien
tgcgcagcacattcacagactgaag

SEQ ID NO: 2911430 - DNA, 25 bp, Homo sapien
tgaagcagagacaagggcagatcca

SEQ ID NO: 2911431 - DNA, 25 bp, Homo sapien
gcacgaagaggacatcctgcgtatg

SEQ ID NO: 2911432 - DNA, 25 bp, Homo sapien
cagactgaagcgtgagcacagagca

SEQ ID NO: 2911433 - DNA, 25 bp, Homo sapien
tctcagggacaggtgctgaaccact

SEQ ID NO: 2911434 - DNA, 25 bp, Homo sapien
gctggcctagccctaattctcaggg

SEQ ID NO: 2911435 - DNA, 25 bp, Homo sapien
aaaccttcagttagggcttctgcag

SEQ ID NO: 2911436 - DNA, 25 bp, Homo sapien
gcctcccaagatctagctggcctag

SEQ ID NO: 2911437 - DNA, 25 bp, Homo sapien
ttcctgtaacccacgaacctctctg

SEQ ID NO: 2911438 - DNA, 25 bp, Homo sapien
gaacctctctggattggcctcctgt

SEQ ID NO: 2911439 - DNA, 25 bp, Homo sapien
taacccacgaacctctctggattgg

SEQ ID NO: 2911440 - DNA, 25 bp, Homo sapien
acgaacctctctggattggcctcct

SEQ ID NO: 2911441 - DNA, 25 bp, Homo sapien
gagttgattctcatgtaccgggaga

SEQ ID NO: 2911442 - DNA, 25 bp, Homo sapien
accgggagaagataatgtagaggcg

SEQ ID NO: 2911443 - DNA, 25 bp, Homo sapien
cagaggaagctcagtgagttgattc

SEQ ID NO: 2911444 - DNA, 25 bp, Homo sapien
aggcggcggaaccagaggagctggc

SEQ ID NO: 2911445 - DNA, 25 bp, Homo sapien
tccttgagctcaggtaaataagcca

SEQ ID NO: 2911446 - DNA, 25 bp, Homo sapien
catctgtggagtgtttttagagcac

SEQ ID NO: 2911447 - DNA, 25 bp, Homo sapien
tttatgataatagggacctgcccag

SEQ ID NO: 2911448 - DNA, 25 bp, Homo sapien
tacatgggctcccttttgcagaggc

SEQ ID NO: 2911449 - DNA, 25 bp, Homo sapien
cacttccctggagcgttagctggat

SEQ ID NO: 2911450 - DNA, 25 bp, Homo sapien
tccaaaaagactgagagctgacata

SEQ ID NO: 2911451 - DNA, 25 bp, Homo sapien
tggcttcaatcgcaggactaccagc

SEQ ID NO: 2911452 - DNA, 25 bp, Homo sapien
cagtgacctgtacttggatgcttca

SEQ ID NO: 2911453 - DNA, 25 bp, Homo sapien
tgaaagattaccttgccagctagta

SEQ ID NO: 2911454 - DNA, 25 bp, Homo sapien
gcactggccgacttctacttaatta

SEQ ID NO: 2911455 - DNA, 25 bp, Homo sapien
taatggtgacactaagcaaaggagg

SEQ ID NO: 2911456 - DNA, 25 bp, Homo sapien
tattagtcttatgtggcccctagga

SEQ ID NO: 2911457 - DNA, 25 bp, Homo sapien
tttgaattgagatacagtttgaata

SEQ ID NO: 2911458 - DNA, 25 bp, Homo sapien
tattttcacgtgaatttttgaattg

SEQ ID NO: 2911459 - DNA, 25 bp, Homo sapien
ttaatgcaatcttattttcacgtga

SEQ ID NO: 2911460 - DNA, 25 bp, Homo sapien
tcagtgttagtatactttagtattc

SEQ ID NO: 2911461 - DNA, 25 bp, Homo sapien
taatatatagaaaggcaggcctcac

SEQ ID NO: 2911462 - DNA, 25 bp, Homo sapien
ggcctcacgtcactatcctttttga

SEQ ID NO: 2911463 - DNA, 25 bp, Homo sapien
attttggcgatacttggacattttc

SEQ ID NO: 2911464 - DNA, 25 bp, Homo sapien
gatgtttatattttggcgatacttg

SEQ ID NO: 2911465 - DNA, 25 bp, Homo sapien
ctgggctgctggttccgttgactag

SEQ ID NO: 2911466 - DNA, 25 bp, Homo sapien
ctggttccgttgactagggtcatct

SEQ ID NO: 2911467 - DNA, 25 bp, Homo sapien
tgatgtagtctaattgacatccttc

SEQ ID NO: 2911468 - DNA, 25 bp, Homo sapien
taattgacatccttctcttcccaac

SEQ ID NO: 2911469 - DNA, 25 bp, Homo sapien
ggtggtgctcctgaatgtggctgac

SEQ ID NO: 2911470 - DNA, 25 bp, Homo sapien
cagcagagcgctttccacatgatag

SEQ ID NO: 2911471 - DNA, 25 bp, Homo sapien
tattcactggtgctggtagagctgg

SEQ ID NO: 2911472 - DNA, 25 bp, Homo sapien
tgtgagtcgggctccggtgaaactt

SEQ ID NO: 2911473 - DNA, 25 bp, Homo sapien
gaaacttttctgaatcccatatctg

SEQ ID NO: 2911474 - DNA, 25 bp, Homo sapien
tctacttccccaggctcaactgatg

SEQ ID NO: 2911475 - DNA, 25 bp, Homo sapien
cctctacttccccaggctcaactga

SEQ ID NO: 2911476 - DNA, 25 bp, Homo sapien
tccccaggctcaactgatgctccta

SEQ ID NO: 2911477 - DNA, 25 bp, Homo sapien
tacttccccaggctcaactgatgct

SEQ ID NO: 2911478 - DNA, 25 bp, Homo sapien
cacaattctggacggtatggctggg

SEQ ID NO: 2911479 - DNA, 25 bp, Homo sapien
cagggagctatttctataggaagca

SEQ ID NO: 2911480 - DNA, 25 bp, Homo sapien
tcttggatccctcttcaaagataca

SEQ ID NO: 2911481 - DNA, 25 bp, Homo sapien
tctgatttctctccctaaaggtaag

SEQ ID NO: 2911482 - DNA, 25 bp, Homo sapien
cactggtgaacctccttggtataca

SEQ ID NO: 2911483 - DNA, 25 bp, Homo sapien
tctttaggatcaattctcttagaaa

SEQ ID NO: 2911484 - DNA, 25 bp, Homo sapien
taagttctctggctattctgggcac

SEQ ID NO: 2911485 - DNA, 25 bp, Homo sapien
tttctgattatcaacaacactggtg

SEQ ID NO: 2911486 - DNA, 25 bp, Homo sapien
acagccgatttcctggtctacttac

SEQ ID NO: 2911487 - DNA, 25 bp, Homo sapien
ccacagccgatttcctggtctactt

SEQ ID NO: 2911488 - DNA, 25 bp, Homo sapien
cacagccgatttcctggtctactta

SEQ ID NO: 2911489 - DNA, 25 bp, Homo sapien
acagagcttcaacagcatggcccag

SEQ ID NO: 2911490 - DNA, 25 bp, Homo sapien
gggtgtatacacctggaggctcccc

SEQ ID NO: 2911491 - DNA, 25 bp, Homo sapien
ctcagggcttgtggcttgtggcagc

SEQ ID NO: 2911492 - DNA, 25 bp, Homo sapien
tcaccctcagactgacactgctgag

SEQ ID NO: 2911493 - DNA, 25 bp, Homo sapien
gacctctggacttgattgagtacac

SEQ ID NO: 2911494 - DNA, 25 bp, Homo sapien
tcggtaagggtagcaatcgtgtctg

SEQ ID NO: 2911495 - DNA, 25 bp, Homo sapien
tagtgttctctccttcgtgcctagc

SEQ ID NO: 2911496 - DNA, 25 bp, Homo sapien
caactatgtaaaacgcatgtgtatg

SEQ ID NO: 2911497 - DNA, 25 bp, Homo sapien
ttttctcccactagattgccatgac

SEQ ID NO: 2911498 - DNA, 25 bp, Homo sapien
tgtaaagattacaggaggctttcac

SEQ ID NO: 2911499 - DNA, 25 bp, Homo sapien
caaaaagtgtgtataactgtaccat

SEQ ID NO: 2911500 - DNA, 25 bp, Homo sapien
aattaactgtagatccctctgggtg

SEQ ID NO: 2911501 - DNA, 25 bp, Homo sapien
ggagcaagagccaggcggtggagaa

SEQ ID NO: 2911502 - DNA, 25 bp, Homo sapien
gagaagccgcggctgaggcgctcgt

SEQ ID NO: 2911503 - DNA, 25 bp, Homo sapien
agaagcttacctccgagggtgccgc

SEQ ID NO: 2911504 - DNA, 25 bp, Homo sapien
tcggcgtccaacctggacctgggcg

SEQ ID NO: 2911505 - DNA, 25 bp, Homo sapien
tcttggctacactgagccgagatcc

SEQ ID NO: 2911506 - DNA, 25 bp, Homo sapien
gagttcttggctacactgagccgag

SEQ ID NO: 2911507 - DNA, 25 bp, Homo sapien
ggggggcgccgcctgttgttccagc

SEQ ID NO: 2911508 - DNA, 25 bp, Homo sapien
ttggctacactgagccgagatcccg

SEQ ID NO: 2911509 - DNA, 25 bp, Homo sapien
taagatatttgcacgttgctgtgtg

SEQ ID NO: 2911510 - DNA, 25 bp, Homo sapien
acataagctgtacatctaagatatt

SEQ ID NO: 2911511 - DNA, 25 bp, Homo sapien
ctgtatctgaagtggtggtggtcac

SEQ ID NO: 2911512 - DNA, 25 bp, Homo sapien
ttcttttgcctgagggaaactctgg

SEQ ID NO: 2911513 - DNA, 25 bp, Homo sapien
gagctaagtcttacacacactgaag

SEQ ID NO: 2911514 - DNA, 25 bp, Homo sapien
ttgagctaagtcttacacacactga

SEQ ID NO: 2911515 - DNA, 25 bp, Homo sapien
aattgagctaagtcttacacacact

SEQ ID NO: 2911516 - DNA, 25 bp, Homo sapien
ttaaattgagctaagtcttacacac

SEQ ID NO: 2911517 - DNA, 25 bp, Homo sapien
tttaagcgattatcctagctgggac

SEQ ID NO: 2911518 - DNA, 25 bp, Homo sapien
cgggtttaagcgattatcctagctg

SEQ ID NO: 2911519 - DNA, 25 bp, Homo sapien
ggtttaagcgattatcctagctggg

SEQ ID NO: 2911520 - DNA, 25 bp, Homo sapien
ttaagcgattatcctagctgggact

SEQ ID NO: 2911521 - DNA, 25 bp, Homo sapien
ggagcccatggtgacagtggccggg

SEQ ID NO: 2911522 - DNA, 25 bp, Homo sapien
agtggccgggcttcgctctggctcc

SEQ ID NO: 2911523 - DNA, 25 bp, Homo sapien
tctggctccagcaatacctgcaaat

SEQ ID NO: 2911524 - DNA, 25 bp, Homo sapien
caggcccagagaggcgaggctggag

SEQ ID NO: 2911525 - DNA, 25 bp, Homo sapien
ctgcggggaccggaaacctgttgct

SEQ ID NO: 2911526 - DNA, 25 bp, Homo sapien
taaatcgggagttcagagtgggacc

SEQ ID NO: 2911527 - DNA, 25 bp, Homo sapien
tcagagtgctcttagttgcattgtc

SEQ ID NO: 2911528 - DNA, 25 bp, Homo sapien
tcacggcccgagaacagtctgtaaa

SEQ ID NO: 2911529 - DNA, 25 bp, Homo sapien
tggcttagcgccgaggttgctaagt

SEQ ID NO: 2911530 - DNA, 25 bp, Homo sapien
tggaaacttccttgcagcgccggca

SEQ ID NO: 2911531 - DNA, 25 bp, Homo sapien
actgattggttaggcctgcgaaggc

SEQ ID NO: 2911532 - DNA, 25 bp, Homo sapien
tgctaagtaactgagcgcgcgtgcg

SEQ ID NO: 2911533 - DNA, 25 bp, Homo sapien
tccgtgcgccgctgaaagtagttcg

SEQ ID NO: 2911534 - DNA, 25 bp, Homo sapien
cccgagaggcagtttaggcttttca

SEQ ID NO: 2911535 - DNA, 25 bp, Homo sapien
gccccaaattcctcatagccgtaag

SEQ ID NO: 2911536 - DNA, 25 bp, Homo sapien
ctggcggagcgcaaatttatgcaac

SEQ ID NO: 2911537 - DNA, 25 bp, Homo sapien
caggatcctgccaatcaccaaccac

SEQ ID NO: 2911538 - DNA, 25 bp, Homo sapien
gccaatcaccaaccacgtccaccca

SEQ ID NO: 2911539 - DNA, 25 bp, Homo sapien
tcctgccaatcaccaaccacgtcca

SEQ ID NO: 2911540 - DNA, 25 bp, Homo sapien
ggatcctgccaatcaccaaccacgt

SEQ ID NO: 2911541 - DNA, 25 bp, Homo sapien
gtcaacaaggcccactgtcccggaa

SEQ ID NO: 2911542 - DNA, 25 bp, Homo sapien
ccaaggtcgttacggctgcgggcca

SEQ ID NO: 2911543 - DNA, 25 bp, Homo sapien
taaactcgacagaatcgccgatcgg

SEQ ID NO: 2911544 - DNA, 25 bp, Homo sapien
cgccgatcggttaggcgtccgttag

SEQ ID NO: 2911545 - DNA, 25 bp, Homo sapien
ggcttccagaaaccacacaaactac

SEQ ID NO: 2911546 - DNA, 25 bp, Homo sapien
ctttctcacactgggattccaaagt

SEQ ID NO: 2911547 - DNA, 25 bp, Homo sapien
taaaggcttccagaaaccacacaaa

SEQ ID NO: 2911548 - DNA, 25 bp, Homo sapien
gattccaaagtaaaggcttccagaa

SEQ ID NO: 2911549 - DNA, 25 bp, Homo sapien
tgcctcaaacctaagcacggtgtta

SEQ ID NO: 2911550 - DNA, 25 bp, Homo sapien
tacgttaatattccgcaagcctccc

SEQ ID NO: 2911551 - DNA, 25 bp, Homo sapien
gcggaaaatccagagcgctctctta

SEQ ID NO: 2911552 - DNA, 25 bp, Homo sapien
caaggtttcaacgtcaacagcggaa

SEQ ID NO: 2911553 - DNA, 25 bp, Homo sapien
tcaagggtgatggtcttgccggtaa

SEQ ID NO: 2911554 - DNA, 25 bp, Homo sapien
agggtgatggtcttgccggtaaggg

SEQ ID NO: 2911555 - DNA, 25 bp, Homo sapien
ctcaagggtgatggtcttgccggta

SEQ ID NO: 2911556 - DNA, 25 bp, Homo sapien
caagggtgatggtcttgccggtaag

SEQ ID NO: 2911557 - DNA, 25 bp, Homo sapien
cttggccttcacattttcgatggtg

SEQ ID NO: 2911558 - DNA, 25 bp, Homo sapien
atcttggccttcacattttcgatgg

SEQ ID NO: 2911559 - DNA, 25 bp, Homo sapien
cggggggaatgccttccttatcctg

SEQ ID NO: 2911560 - DNA, 25 bp, Homo sapien
ggccttcacattttcgatggtgtca

SEQ ID NO: 2911561 - DNA, 25 bp, Homo sapien
tgttgtagtcagaaagagtacggcc

SEQ ID NO: 2911562 - DNA, 25 bp, Homo sapien
ggccttcacattttcgatggtgtca

SEQ ID NO: 2911563 - DNA, 25 bp, Homo sapien
ctggtcgggagggatgccttcttta

SEQ ID NO: 2911564 - DNA, 25 bp, Homo sapien
ctccagagtgatggtcttgccggtc

SEQ ID NO: 2911565 - DNA, 25 bp, Homo sapien
gcttgcctgcaaagatgagcctctg

SEQ ID NO: 2911566 - DNA, 25 bp, Homo sapien
tctttatcttggatcttggccttca

SEQ ID NO: 2911567 - DNA, 25 bp, Homo sapien
gagcctctgctggtcgggggggatg

SEQ ID NO: 2911568 - DNA, 25 bp, Homo sapien
agtcagaaagagtgcggccatcttc

SEQ ID NO: 2911569 - DNA, 25 bp, Homo sapien
gggcactgcgaatgccatgactgaa

SEQ ID NO: 2911570 - DNA, 25 bp, Homo sapien
cactgcgaatgccatgactgaagaa

SEQ ID NO: 2911571 - DNA, 25 bp, Homo sapien
gcactgcgaatgccatgactgaaga

SEQ ID NO: 2911572 - DNA, 25 bp, Homo sapien
ggcactgcgaatgccatgactgaag

SEQ ID NO: 2911573 - DNA, 25 bp, Homo sapien
attttgaacaggttcagctattact

SEQ ID NO: 2911574 - DNA, 25 bp, Homo sapien
tttgaacaggttcagctattactga

SEQ ID NO: 2911575 - DNA, 25 bp, Homo sapien
ttttgaacaggttcagctattactg

SEQ ID NO: 2911576 - DNA, 25 bp, Homo sapien
cattttgaacaggttcagctattac

SEQ ID NO: 2911577 - DNA, 25 bp, Homo sapien
gtcaagtgacttaactttgagcaca

SEQ ID NO: 2911578 - DNA, 25 bp, Homo sapien
gccatttacccaggatcctaacttg

SEQ ID NO: 2911579 - DNA, 25 bp, Homo sapien
aattcgagcttcagaaagtttgcca

SEQ ID NO: 2911580 - DNA, 25 bp, Homo sapien
gcgtacccacacatcactagagaat

SEQ ID NO: 2911581 - DNA, 25 bp, Homo sapien
gatgacagcattcctttccgcagag

SEQ ID NO: 2911582 - DNA, 25 bp, Homo sapien
taactagagattaactggcccgtga

SEQ ID NO: 2911583 - DNA, 25 bp, Homo sapien
cattaagaaccaacagcgtggccgg

SEQ ID NO: 2911584 - DNA, 25 bp, Homo sapien
tccgcagagtataggacagaaccct

SEQ ID NO: 2911585 - DNA, 25 bp, Homo sapien
ctttttaccgttccagattatctga

SEQ ID NO: 2911586 - DNA, 25 bp, Homo sapien
tttttaccgttccagattatctgaa

SEQ ID NO: 2911587 - DNA, 25 bp, Homo sapien
tctttttaccgttccagattatctg

SEQ ID NO: 2911588 - DNA, 25 bp, Homo sapien
gctatcaatagttacctccagatga

SEQ ID NO: 2911589 - DNA, 25 bp, Homo sapien
gagtcacgtggtcccagagcttact

SEQ ID NO: 2911590 - DNA, 25 bp, Homo sapien
taattcatatccatccctaccgcag

SEQ ID NO: 2911591 - DNA, 25 bp, Homo sapien
taaagcagattatgctcaggcctga

SEQ ID NO: 2911592 - DNA, 25 bp, Homo sapien
ccctgggtcaaaggaaaggctgctt

SEQ ID NO: 2911593 - DNA, 25 bp, Homo sapien
tctagccactaaggtctcaggtggg

SEQ ID NO: 2911594 - DNA, 25 bp, Homo sapien
cacggtggagaacgggagcttaact

SEQ ID NO: 2911595 - DNA, 25 bp, Homo sapien
tgtcaggacaggctagccaccagag

SEQ ID NO: 2911596 - DNA, 25 bp, Homo sapien
gttctggtctctcggtcaccctcag

SEQ ID NO: 2911597 - DNA, 25 bp, Homo sapien
tgaggccagggcgtggcggctgctg

SEQ ID NO: 2911598 - DNA, 25 bp, Homo sapien
atcccggagcttctcagtagcaggg

SEQ ID NO: 2911599 - DNA, 25 bp, Homo sapien
gctgggatcccggagcttctcagta

SEQ ID NO: 2911600 - DNA, 25 bp, Homo sapien
cggctgctgggatcccggagcttct

SEQ ID NO: 2911601 - DNA, 25 bp, Homo sapien
ttcactgtcaggcttggagacccgg

SEQ ID NO: 2911602 - DNA, 25 bp, Homo sapien
catcattcactgtcaggcttggaga

SEQ ID NO: 2911603 - DNA, 25 bp, Homo sapien
ggctgtagaagccaggagcccacta

SEQ ID NO: 2911604 - DNA, 25 bp, Homo sapien
gagggtgctggagccccacacagac

SEQ ID NO: 2911605 - DNA, 25 bp, Homo sapien
gctgctcggtccagccaggacctct

SEQ ID NO: 2911606 - DNA, 25 bp, Homo sapien
aggaggctgctcggtccagccagga

SEQ ID NO: 2911607 - DNA, 25 bp, Homo sapien
cgcgtcggtgttggcctgactggag

SEQ ID NO: 2911608 - DNA, 25 bp, Homo sapien
cccagctgcgcgtcggtgttggcct

SEQ ID NO: 2911609 - DNA, 25 bp, Homo sapien
tcttcttggcctccatctaatgtct

SEQ ID NO: 2911610 - DNA, 25 bp, Homo sapien
gcagcccgctcccaaaatccagctt

SEQ ID NO: 2911611 - DNA, 25 bp, Homo sapien
tgtccgcctcagagccatcttcttg

SEQ ID NO: 2911612 - DNA, 25 bp, Homo sapien
ttggcctccatctaatgtctccaac

SEQ ID NO: 2911613 - DNA, 25 bp, Homo sapien
gcacctgttccctttcggtagttga

SEQ ID NO: 2911614 - DNA, 25 bp, Homo sapien
agttgaggttgactcttatctgagg

SEQ ID NO: 2911615 - DNA, 25 bp, Homo sapien
tcctcgccctggaactgtgactcca

SEQ ID NO: 2911616 - DNA, 25 bp, Homo sapien
tatctgaggggcgaatttccggtcc

SEQ ID NO: 2911617 - DNA, 25 bp, Homo sapien
cccaatgttgaaacatatcagacac

SEQ ID NO: 2911618 - DNA, 25 bp, Homo sapien
ttgaaacatatcagacaccaccaag

SEQ ID NO: 2911619 - DNA, 25 bp, Homo sapien
tgggcccaacgctgggcccaatgtt

SEQ ID NO: 2911620 - DNA, 25 bp, Homo sapien
aatgttgaaacatatcagacaccac

SEQ ID NO: 2911621 - DNA, 25 bp, Homo sapien
gaagagccgatctcggtcaaatcgg

SEQ ID NO: 2911622 - DNA, 25 bp, Homo sapien
gtcaaatcggtttggatccggctga

SEQ ID NO: 2911623 - DNA, 25 bp, Homo sapien
acaccccgggagaccgcattgaaga

SEQ ID NO: 2911624 - DNA, 25 bp, Homo sapien
tattccgagtcggtgaggtacttgc

SEQ ID NO: 2911625 - DNA, 25 bp, Homo sapien
gaatgcaggcattgactccgtcctt

SEQ ID NO: 2911626 - DNA, 25 bp, Homo sapien
tcaggcacgtcttacctgtggagcc

SEQ ID NO: 2911627 - DNA, 25 bp, Homo sapien
gctgtggcctcggtaatagtcatct

SEQ ID NO: 2911628 - DNA, 25 bp, Homo sapien
tgcagactcctcttctcaatggcga

SEQ ID NO: 2911629 - DNA, 25 bp, Homo sapien
ggttctccaggaggtagcttaccac

SEQ ID NO: 2911630 - DNA, 25 bp, Homo sapien
tccgagatcatcactagggcatgca

SEQ ID NO: 2911631 - DNA, 25 bp, Homo sapien
tgtcctcaagctgcacggtagggca

SEQ ID NO: 2911632 - DNA, 25 bp, Homo sapien
agcttcagaggcgtgagatcctgca

SEQ ID NO: 2911633 - DNA, 25 bp, Homo sapien
agaagccaggtcatacagcgacacc

SEQ ID NO: 2911634 - DNA, 25 bp, Homo sapien
ggctcagtcctgaaaactcccgctg

SEQ ID NO: 2911635 - DNA, 25 bp, Homo sapien
gcaccactcggtgaactttcgggaa

SEQ ID NO: 2911636 - DNA, 25 bp, Homo sapien
gaaaggcaatgatctccagcactga

SEQ ID NO: 2911637 - DNA, 25 bp, Homo sapien
tgggtcctctgcgtgcacccatgct

SEQ ID NO: 2911638 - DNA, 25 bp, Homo sapien
ggtcctctgcgtgcacccatgctcc

SEQ ID NO: 2911639 - DNA, 25 bp, Homo sapien
cttgctggaaactctgctgggtcct

SEQ ID NO: 2911640 - DNA, 25 bp, Homo sapien
tggaaactctgctgggtcctctgcg

SEQ ID NO: 2911641 - DNA, 25 bp, Homo sapien
ccggatggttgccacgaggcccttg

SEQ ID NO: 2911642 - DNA, 25 bp, Homo sapien
tagagtatggattgagtatgggccc

SEQ ID NO: 2911643 - DNA, 25 bp, Homo sapien
gatgctggttaacagagaggacccg

SEQ ID NO: 2911644 - DNA, 25 bp, Homo sapien
tgatccccgtcttggatgggactag

SEQ ID NO: 2911645 - DNA, 25 bp, Homo sapien
tcaggggctccaaaacgaccattcg

SEQ ID NO: 2911646 - DNA, 25 bp, Homo sapien
agcagatcccatttcgcctgcagca

SEQ ID NO: 2911647 - DNA, 25 bp, Homo sapien
ccaaaacgaccattcggtgtcggtg

SEQ ID NO: 2911648 - DNA, 25 bp, Homo sapien
cccatttcgcctgcagcagtttgtt

SEQ ID NO: 2911649 - DNA, 25 bp, Homo sapien
agaggctcctcagaacggcatggga

SEQ ID NO: 2911650 - DNA, 25 bp, Homo sapien
tcaccgttagtactgcagtgctggc

SEQ ID NO: 2911651 - DNA, 25 bp, Homo sapien
tcagatgagacctagggccttgggt

SEQ ID NO: 2911652 - DNA, 25 bp, Homo sapien
cagggttgtttcaagcaggcctccc

SEQ ID NO: 2911653 - DNA, 25 bp, Homo sapien
agtttccaacctccgctttcaggtg

SEQ ID NO: 2911654 - DNA, 25 bp, Homo sapien
tccaacctccgctttcaggtgaggg

SEQ ID NO: 2911655 - DNA, 25 bp, Homo sapien
aacctccgctttcaggtgaggggcg

SEQ ID NO: 2911656 - DNA, 25 bp, Homo sapien
ttccaacctccgctttcaggtgagg

SEQ ID NO: 2911657 - DNA, 25 bp, Homo sapien
aggataaggatgtggcccgtcagca

SEQ ID NO: 2911658 - DNA, 25 bp, Homo sapien
ggtagatcccccctagcaggataag

SEQ ID NO: 2911659 - DNA, 25 bp, Homo sapien
ctggcccacgaggaggtagatcccc

SEQ ID NO: 2911660 - DNA, 25 bp, Homo sapien
gatcccccctagcaggataaggatg

SEQ ID NO: 2911661 - DNA, 25 bp, Homo sapien
agatccagatgaacacgtggcgccg

SEQ ID NO: 2911662 - DNA, 25 bp, Homo sapien
gctgtctatgaacgagatccagatg

SEQ ID NO: 2911663 - DNA, 25 bp, Homo sapien
tcaaagtagctgtctatgaacgaga

SEQ ID NO: 2911664 - DNA, 25 bp, Homo sapien
tatgaacgagatccagatgaacacg

SEQ ID NO: 2911665 - DNA, 25 bp, Homo sapien
gttgagagaaggaggagtgagaacc

SEQ ID NO: 2911666 - DNA, 25 bp, Homo sapien
tcagagacagttgagagaaggagga

SEQ ID NO: 2911667 - DNA, 25 bp, Homo sapien
gagagaaggaggagtgagaacccac

SEQ ID NO: 2911668 - DNA, 25 bp, Homo sapien
ctcagagacagttgagagaaggagg

SEQ ID NO: 2911669 - DNA, 25 bp, Homo sapien
gcctgtgtgctggaagccacgtgta

SEQ ID NO: 2911670 - DNA, 25 bp, Homo sapien
catgacactgtagatgcctgtgtgc

SEQ ID NO: 2911671 - DNA, 25 bp, Homo sapien
tatagtaaagcaggttcagccagcc

SEQ ID NO: 2911672 - DNA, 25 bp, Homo sapien
gcaggtaccactcgatggccaggaa

SEQ ID NO: 2911673 - DNA, 25 bp, Homo sapien
tacagcgaagccgaaaaggaagact

SEQ ID NO: 2911674 - DNA, 25 bp, Homo sapien
ggaagactaagtagatcagaaggaa

SEQ ID NO: 2911675 - DNA, 25 bp, Homo sapien
gccgaaaaggaagactaagtagatc

SEQ ID NO: 2911676 - DNA, 25 bp, Homo sapien
ctaagtagatcagaaggaagcgcag

SEQ ID NO: 2911677 - DNA, 25 bp, Homo sapien
ttccaggatacccctgtactgggcc

SEQ ID NO: 2911678 - DNA, 25 bp, Homo sapien
tgtactgggccccgttgccctcgtc

SEQ ID NO: 2911679 - DNA, 25 bp, Homo sapien
tcggggcgccaagcctcctggctca

SEQ ID NO: 2911680 - DNA, 25 bp, Homo sapien
cattggggcctgtaggagcttcggg

SEQ ID NO: 2911681 - DNA, 25 bp, Homo sapien
acggtctcgctcatgagggcgatga

SEQ ID NO: 2911682 - DNA, 25 bp, Homo sapien
accatgccgcggaagtgcagctgct

SEQ ID NO: 2911683 - DNA, 25 bp, Homo sapien
gcaggatgtaggtgagcagcacgta

SEQ ID NO: 2911684 - DNA, 25 bp, Homo sapien
tccagctgtcagtggcgacactgtt

SEQ ID NO: 2911685 - DNA, 25 bp, Homo sapien
ggtgggggcagggagcctctctggt

SEQ ID NO: 2911686 - DNA, 25 bp, Homo sapien
tgggggcagggagcctctctggtgg

SEQ ID NO: 2911687 - DNA, 25 bp, Homo sapien
gggcagggagcctctctggtggcac

SEQ ID NO: 2911688 - DNA, 25 bp, Homo sapien
ggggcagggagcctctctggtggca

SEQ ID NO: 2911689 - DNA, 25 bp, Homo sapien
caacccggcatctcctggctaggga

SEQ ID NO: 2911690 - DNA, 25 bp, Homo sapien
aaggtagagctgcccaacccggcat

SEQ ID NO: 2911691 - DNA, 25 bp, Homo sapien
ctccgcagggtccggagcactcccc

SEQ ID NO: 2911692 - DNA, 25 bp, Homo sapien
ggtagagctgcccaacccggcatct

SEQ ID NO: 2911693 - DNA, 25 bp, Homo sapien
aagaaacactggacagcaatgatga

SEQ ID NO: 2911694 - DNA, 25 bp, Homo sapien
gggcactgtcctaagtacatctatg

SEQ ID NO: 2911695 - DNA, 25 bp, Homo sapien
tagcacattgagcacctgcttggtg

SEQ ID NO: 2911696 - DNA, 25 bp, Homo sapien
gatgataagagtagctggtagcaca

SEQ ID NO: 2911697 - DNA, 25 bp, Homo sapien
taaacacgcggattcgaatctggct

SEQ ID NO: 2911698 - DNA, 25 bp, Homo sapien
tggctccaacatccggttacctgtg

SEQ ID NO: 2911699 - DNA, 25 bp, Homo sapien
gctcttacatcgttccaggctccag

SEQ ID NO: 2911700 - DNA, 25 bp, Homo sapien
tataacgcgaagtcaactaaacacg

SEQ ID NO: 2911701 - DNA, 25 bp, Homo sapien
gtgccaacggtcagcatcacacctg

SEQ ID NO: 2911702 - DNA, 25 bp, Homo sapien
agcatcacacctgcccgctgcttct

SEQ ID NO: 2911703 - DNA, 25 bp, Homo sapien
ctggcttagtgccaacggtcagcat

SEQ ID NO: 2911704 - DNA, 25 bp, Homo sapien
ttcctgcaccaccaatagccattct

SEQ ID NO: 2911705 - DNA, 25 bp, Homo sapien
tgcagagatgctctggtggacacag

SEQ ID NO: 2911706 - DNA, 25 bp, Homo sapien
ggagactatgcagagatgctctggt

SEQ ID NO: 2911707 - DNA, 25 bp, Homo sapien
aggtttgcctgctttgaccgcctcc

SEQ ID NO: 2911708 - DNA, 25 bp, Homo sapien
tggccccccaaattgggagactatg

SEQ ID NO: 2911709 - DNA, 25 bp, Homo sapien
acacagcgtaggcagcgtctgctcc

SEQ ID NO: 2911710 - DNA, 25 bp, Homo sapien
ggacacctgcccctgacgggtcctc

SEQ ID NO: 2911711 - DNA, 25 bp, Homo sapien
cctgacgggtcctcacacagcgtag

SEQ ID NO: 2911712 - DNA, 25 bp, Homo sapien
gcgtctgctcccatgaagcccagtt

SEQ ID NO: 2911713 - DNA, 25 bp, Homo sapien
gggaatgtcacattggaggccccag

SEQ ID NO: 2911714 - DNA, 25 bp, Homo sapien
tgactttcagaggtgactttcctgg

SEQ ID NO: 2911715 - DNA, 25 bp, Homo sapien
gaagggaaacctatctgtatgtgag

SEQ ID NO: 2911716 - DNA, 25 bp, Homo sapien
gggtcaaggacactcagctccaggt

SEQ ID NO: 2911717 - DNA, 25 bp, Homo sapien
ggaggcattgtgtagcgtgggctgc

SEQ ID NO: 2911718 - DNA, 25 bp, Homo sapien
ccattctgagcagtgcggccttcca

SEQ ID NO: 2911719 - DNA, 25 bp, Homo sapien
gtgggaggcattgtgtagcgtgggc

SEQ ID NO: 2911720 - DNA, 25 bp, Homo sapien
agcagtgcggccttccaggtagtgg

SEQ ID NO: 2911721 - DNA, 25 bp, Homo sapien
caagcactgtagcttaacccttgag

SEQ ID NO: 2911722 - DNA, 25 bp, Homo sapien
ggaagagcacttccgacagagacga

SEQ ID NO: 2911723 - DNA, 25 bp, Homo sapien
tcatgaaaacacgtcatgccgtggg

SEQ ID NO: 2911724 - DNA, 25 bp, Homo sapien
caaggagtactgcagacatgtggat

SEQ ID NO: 2911725 - DNA, 25 bp, Homo sapien
ggacgggcacatagttttcctcaga

SEQ ID NO: 2911726 - DNA, 25 bp, Homo sapien
gctggacgggcacatagttttcctc

SEQ ID NO: 2911727 - DNA, 25 bp, Homo sapien
gagctggacgggcacatagttttcc

SEQ ID NO: 2911728 - DNA, 25 bp, Homo sapien
tggaggagctggacgggcacatagt

SEQ ID NO: 2911729 - DNA, 25 bp, Homo sapien
gccaccagaattcactgggacccca

SEQ ID NO: 2911730 - DNA, 25 bp, Homo sapien
atttgccaccagaattcactgggac

SEQ ID NO: 2911731 - DNA, 25 bp, Homo sapien
ttgccaccagaattcactgggaccc

SEQ ID NO: 2911732 - DNA, 25 bp, Homo sapien
gatgtggttggaaagatcctctgct

SEQ ID NO: 2911733 - DNA, 25 bp, Homo sapien
tgcgccaggcccttaaggagtcgga

SEQ ID NO: 2911734 - DNA, 25 bp, Homo sapien
ttatgtgcgccaggcccttaaggag

SEQ ID NO: 2911735 - DNA, 25 bp, Homo sapien
cttatgtgcgccaggcccttaagga

SEQ ID NO: 2911736 - DNA, 25 bp, Homo sapien
ccaggcccttaaggagtcggaatat

SEQ ID NO: 2911737 - DNA, 25 bp, Homo sapien
taacaacgggaatgaaaaggtcaca

SEQ ID NO: 2911738 - DNA, 25 bp, Homo sapien
cataacaacgggaatgaaaaggtca

SEQ ID NO: 2911739 - DNA, 25 bp, Homo sapien
ctccataacaacgggaatgaaaagg

SEQ ID NO: 2911740 - DNA, 25 bp, Homo sapien
tactcccagattcctagagagccta

SEQ ID NO: 2911741 - DNA, 25 bp, Homo sapien
tctttatttgctcttgccccccagc

SEQ ID NO: 2911742 - DNA, 25 bp, Homo sapien
acagaagctcgagctctttatttgc

SEQ ID NO: 2911743 - DNA, 25 bp, Homo sapien
agagaccacagaagctcgagctctt

SEQ ID NO: 2911744 - DNA, 25 bp, Homo sapien
ctgccctccgccctctagacaggct

SEQ ID NO: 2911745 - DNA, 25 bp, Homo sapien
tgccctccgccctctagacaggctt

SEQ ID NO: 2911746 - DNA, 25 bp, Homo sapien
ccctccgccctctagacaggcttcc

SEQ ID NO: 2911747 - DNA, 25 bp, Homo sapien
gccctccgccctctagacaggcttc

SEQ ID NO: 2911748 - DNA, 25 bp, Homo sapien
gcgcccgccgcgaaagccacgcggg

SEQ ID NO: 2911749 - DNA, 25 bp, Homo sapien
agcgcccgccgcgaaagccacgcgg

SEQ ID NO: 2911750 - DNA, 25 bp, Homo sapien
cagcgcccgccgcgaaagccacgcg

SEQ ID NO: 2911751 - DNA, 25 bp, Homo sapien
cgcccgccgcgaaagccacgcgggc

SEQ ID NO: 2911752 - DNA, 25 bp, Homo sapien
cacaaaagagtgatccatgagcctc

SEQ ID NO: 2911753 - DNA, 25 bp, Homo sapien
gatccatgagcctcagccacggcag

SEQ ID NO: 2911754 - DNA, 25 bp, Homo sapien
gagtgatccatgagcctcagccacg

SEQ ID NO: 2911755 - DNA, 25 bp, Homo sapien
ccacggcagccggattcggccccgc

SEQ ID NO: 2911756 - DNA, 25 bp, Homo sapien
cgggtcccggccttcgcagactcca

SEQ ID NO: 2911757 - DNA, 25 bp, Homo sapien
tctcgggtttgcacacccccactgt

SEQ ID NO: 2911758 - DNA, 25 bp, Homo sapien
tcgggtttgcacacccccactgtgg

SEQ ID NO: 2911759 - DNA, 25 bp, Homo sapien
ccagttctctcgggtttgcacaccc

SEQ ID NO: 2911760 - DNA, 25 bp, Homo sapien
tcatcaggacagtcgaataagtctt

SEQ ID NO: 2911761 - DNA, 25 bp, Homo sapien
tgttacaatcttaccgacgtacacc

SEQ ID NO: 2911762 - DNA, 25 bp, Homo sapien
ctattacaagtatcatcaggacagt

SEQ ID NO: 2911763 - DNA, 25 bp, Homo sapien
tactgttacaatcttaccgacgtac

SEQ ID NO: 2911764 - DNA, 25 bp, Homo sapien
cagatagacattagacgtcgtcagt

SEQ ID NO: 2911765 - DNA, 25 bp, Homo sapien
gacattagacgtcgtcagttatcgc

SEQ ID NO: 2911766 - DNA, 25 bp, Homo sapien
ctgcggtcagatagacattagacgt

SEQ ID NO: 2911767 - DNA, 25 bp, Homo sapien
ggtcagatagacattagacgtcgtc

SEQ ID NO: 2911768 - DNA, 25 bp, Homo sapien
taaggacaggaattcagggcagggc

SEQ ID NO: 2911769 - DNA, 25 bp, Homo sapien
aactaagttgtagaggtttcagcga

SEQ ID NO: 2911770 - DNA, 25 bp, Homo sapien
ctggcagttacggtcaactaagttg

SEQ ID NO: 2911771 - DNA, 25 bp, Homo sapien
ggagtaaggacaggaattcagggca

SEQ ID NO: 2911772 - DNA, 25 bp, Homo sapien
cagcactctgcagtgggtacgcaat

SEQ ID NO: 2911773 - DNA, 25 bp, Homo sapien
taccccgtcttcagcactctgcagt

SEQ ID NO: 2911774 - DNA, 25 bp, Homo sapien
gtggctaccccgtcttcagcactct

SEQ ID NO: 2911775 - DNA, 25 bp, Homo sapien
tcttcagcactctgcagtgggtacg

SEQ ID NO: 2911776 - DNA, 25 bp, Homo sapien
tgcaatgacatgataacgttaccct

SEQ ID NO: 2911777 - DNA, 25 bp, Homo sapien
ttaagttccaccctatgcaatgaca

SEQ ID NO: 2911778 - DNA, 25 bp, Homo sapien
catgttaaaccctacaccagagagc

SEQ ID NO: 2911779 - DNA, 25 bp, Homo sapien
taagctaaccctgctactggagaca

SEQ ID NO: 2911780 - DNA, 25 bp, Homo sapien
ggagtagtcttcgtcagttatcgct

SEQ ID NO: 2911781 - DNA, 25 bp, Homo sapien
aatcagacaggagtagtcttcgtca

SEQ ID NO: 2911782 - DNA, 25 bp, Homo sapien
ggcacttcctattagtgatttcatc

SEQ ID NO: 2911783 - DNA, 25 bp, Homo sapien
tctgacggcacttcctattagtgat

SEQ ID NO: 2911784 - DNA, 25 bp, Homo sapien
tcctgggaaccagcaagtggtgaag

SEQ ID NO: 2911785 - DNA, 25 bp, Homo sapien
gaaccagcaagtggtgaagacttga

SEQ ID NO: 2911786 - DNA, 25 bp, Homo sapien
caccgttcaaacaagtttactcctg

SEQ ID NO: 2911787 - DNA, 25 bp, Homo sapien
ggtgaatatagcaattaggtcaccg

SEQ ID NO: 2911788 - DNA, 25 bp, Homo sapien
caaacatgatgctgattcttcacga

SEQ ID NO: 2911789 - DNA, 25 bp, Homo sapien
tactcagctgccaaacatgatgctg

SEQ ID NO: 2911790 - DNA, 25 bp, Homo sapien
ctggctccaatactcagctgccaaa

SEQ ID NO: 2911791 - DNA, 25 bp, Homo sapien
gatgctgattcttcacgaatttgca

SEQ ID NO: 2911792 - DNA, 25 bp, Homo sapien
gctgccagctctaaaacagcactct

SEQ ID NO: 2911793 - DNA, 25 bp, Homo sapien
tgccagctctaaaacagcactctgt

SEQ ID NO: 2911794 - DNA, 25 bp, Homo sapien
gccagctctaaaacagcactctgtt

SEQ ID NO: 2911795 - DNA, 25 bp, Homo sapien
ctgctgccagctctaaaacagcact

SEQ ID NO: 2911796 - DNA, 25 bp, Homo sapien
gggatcattggccagctcaaggctt

SEQ ID NO: 2911797 - DNA, 25 bp, Homo sapien
ggttgaagggatcattggccagctc

SEQ ID NO: 2911798 - DNA, 25 bp, Homo sapien
gatcattggccagctcaaggcttac

SEQ ID NO: 2911799 - DNA, 25 bp, Homo sapien
tcattccactatggggttgaaggga

SEQ ID NO: 2911800 - DNA, 25 bp, Homo sapien
tcttcagaaaaccataggttcacca

SEQ ID NO: 2911801 - DNA, 25 bp, Homo sapien
caactgacagtcaatcacagggtaa

SEQ ID NO: 2911802 - DNA, 25 bp, Homo sapien
tgaagcgagttttaacaagatcagc

SEQ ID NO: 2911803 - DNA, 25 bp, Homo sapien
actacacaatctgccggtaattcca

SEQ ID NO: 2911804 - DNA, 25 bp, Homo sapien
ggacaaagctacaacttggcctgtg

SEQ ID NO: 2911805 - DNA, 25 bp, Homo sapien
aaggcaagcatgtttctacacccag

SEQ ID NO: 2911806 - DNA, 25 bp, Homo sapien
caaactgatggcagctactggtcct

SEQ ID NO: 2911807 - DNA, 25 bp, Homo sapien
tagaacctcttgttgggcatgatgg

SEQ ID NO: 2911808 - DNA, 25 bp, Homo sapien
gtagggcccctacatgtactgcatt

SEQ ID NO: 2911809 - DNA, 25 bp, Homo sapien
tttgacagagcagcctacgatgcca

SEQ ID NO: 2911810 - DNA, 25 bp, Homo sapien
gagaccccagttccatctatgctag

SEQ ID NO: 2911811 - DNA, 25 bp, Homo sapien
gggaacaagctccaaccagaggaat

SEQ ID NO: 2911812 - DNA, 25 bp, Homo sapien
tccgggaagggacagtaggccagga

SEQ ID NO: 2911813 - DNA, 25 bp, Homo sapien
gaagggacagtaggccaggaggacc

SEQ ID NO: 2911814 - DNA, 25 bp, Homo sapien
gggacagtaggccaggaggaccctg

SEQ ID NO: 2911815 - DNA, 25 bp, Homo sapien
ggaagggacagtaggccaggaggac

SEQ ID NO: 2911816 - DNA, 25 bp, Homo sapien
caagcagaagcaaggagcaaggcac

SEQ ID NO: 2911817 - DNA, 25 bp, Homo sapien
gggctctgtcccaagaacaagcaga

SEQ ID NO: 2911818 - DNA, 25 bp, Homo sapien
tcagcttgaactgcctgggctctgt

SEQ ID NO: 2911819 - DNA, 25 bp, Homo sapien
cttggagccagcaaacagatggcgg

SEQ ID NO: 2911820 - DNA, 25 bp, Homo sapien
gacaaatgtaccctgtgttgccagg

SEQ ID NO: 2911821 - DNA, 25 bp, Homo sapien
gccatgacctttgagctgttgacag

SEQ ID NO: 2911822 - DNA, 25 bp, Homo sapien
ctggttaggatcacccaactggtaa

SEQ ID NO: 2911823 - DNA, 25 bp, Homo sapien
tgttgccaggaagtacaagccatga

SEQ ID NO: 2911824 - DNA, 25 bp, Homo sapien
gggactgttggattgactttcctag

SEQ ID NO: 2911825 - DNA, 25 bp, Homo sapien
tgttggattgactttcctagggatg

SEQ ID NO: 2911826 - DNA, 25 bp, Homo sapien
ttgactttcctagggatgtagttgg

SEQ ID NO: 2911827 - DNA, 25 bp, Homo sapien
tggattgactttcctagggatgtag

SEQ ID NO: 2911828 - DNA, 25 bp, Homo sapien
tgagctccatctgcggctttgtcgg

SEQ ID NO: 2911829 - DNA, 25 bp, Homo sapien
gggagtgagatggttcccaagccca

SEQ ID NO: 2911830 - DNA, 25 bp, Homo sapien
gactgtggtcctacagtgagctgga

SEQ ID NO: 2911831 - DNA, 25 bp, Homo sapien
aagcctcgaggcctgattggtgcca

SEQ ID NO: 2911832 - DNA, 25 bp, Homo sapien
aattttgccaccatagagaagcagc

SEQ ID NO: 2911833 - DNA, 25 bp, Homo sapien
gacgttctgtatcgctacgccagct

SEQ ID NO: 2911834 - DNA, 25 bp, Homo sapien
gcatggagtcgacctcgctagacga

SEQ ID NO: 2911835 - DNA, 25 bp, Homo sapien
tccactgtcccaagccggtagggtg

SEQ ID NO: 2911836 - DNA, 25 bp, Homo sapien
aaggcaaaggaacactgaggctgca

SEQ ID NO: 2911837 - DNA, 25 bp, Homo sapien
caaaggaacactgaggctgcatcgg

SEQ ID NO: 2911838 - DNA, 25 bp, Homo sapien
tggcaggatctgcttacaaccccac

SEQ ID NO: 2911839 - DNA, 25 bp, Homo sapien
ccttctgggtgcctggcaggatctg

SEQ ID NO: 2911840 - DNA, 25 bp, Homo sapien
cgatcactccgttttaagctcaggg

SEQ ID NO: 2911841 - DNA, 25 bp, Homo sapien
tagatgaaggtcacaggattcttca

SEQ ID NO: 2911842 - DNA, 25 bp, Homo sapien
ttctccaaagccgatcactccgttt

SEQ ID NO: 2911843 - DNA, 25 bp, Homo sapien
gggtctcatgacctactttagatga

SEQ ID NO: 2911844 - DNA, 25 bp, Homo sapien
gggcaggcacgtcatgtctccttac

SEQ ID NO: 2911845 - DNA, 25 bp, Homo sapien
cgtggagtggcacgaagtttagtcc

SEQ ID NO: 2911846 - DNA, 25 bp, Homo sapien
ttcacgtggagtggcacgaagttta

SEQ ID NO: 2911847 - DNA, 25 bp, Homo sapien
gagtggcacgaagtttagtccccac

SEQ ID NO: 2911848 - DNA, 25 bp, Homo sapien
gtgcagggcaccaagctagggtcag

SEQ ID NO: 2911849 - DNA, 25 bp, Homo sapien
aactcagctggttacccacacattc

SEQ ID NO: 2911850 - DNA, 25 bp, Homo sapien
tgctttgcctccctacccagggatg

SEQ ID NO: 2911851 - DNA, 25 bp, Homo sapien
acagtctccggatgggaatgtcagc

SEQ ID NO: 2911852 - DNA, 25 bp, Homo sapien
tgtctccatctgtagagaatatatg

SEQ ID NO: 2911853 - DNA, 25 bp, Homo sapien
tatatgatgatgtccagcctgcgtg

SEQ ID NO: 2911854 - DNA, 25 bp, Homo sapien
cccctggcagataagagcagtgcaa

SEQ ID NO: 2911855 - DNA, 25 bp, Homo sapien
tgaaattccaacagcacagaaggcg

SEQ ID NO: 2911856 - DNA, 25 bp, Homo sapien
taagcaacaaccacatgaacccaga

SEQ ID NO: 2911857 - DNA, 25 bp, Homo sapien
tgccgagtctgaaaggagcccattc

SEQ ID NO: 2911858 - DNA, 25 bp, Homo sapien
ggtcctcaggactatgaagtgccct

SEQ ID NO: 2911859 - DNA, 25 bp, Homo sapien
caagactagtacagtgcacaggagg

SEQ ID NO: 2911860 - DNA, 25 bp, Homo sapien
agagtgactcggtgtcaggccagcc

SEQ ID NO: 2911861 - DNA, 25 bp, Homo sapien
ccttctttgaaatgccgtgtgctgc

SEQ ID NO: 2911862 - DNA, 25 bp, Homo sapien
gtcattggaaaagaggtccccacag

SEQ ID NO: 2911863 - DNA, 25 bp, Homo sapien
tccaagctccagttatgtagggccc

SEQ ID NO: 2911864 - DNA, 25 bp, Homo sapien
gcttgctctccggactctaattaat

SEQ ID NO: 2911865 - DNA, 25 bp, Homo sapien
tcccggtggtttcgatattgaagca

SEQ ID NO: 2911866 - DNA, 25 bp, Homo sapien
tagctttgcacatgcgggtcccggt

SEQ ID NO: 2911867 - DNA, 25 bp, Homo sapien
taatattcagcgcttgctgcgtcct

SEQ ID NO: 2911868 - DNA, 25 bp, Homo sapien
gaggcctcaccttcaaacagggttc

SEQ ID NO: 2911869 - DNA, 25 bp, Homo sapien
tccttgtggtccagaaatcctgcct

SEQ ID NO: 2911870 - DNA, 25 bp, Homo sapien
cacgtaagtggcctcatgcggtatt

SEQ ID NO: 2911871 - DNA, 25 bp, Homo sapien
aatgcccaccttagacatcagcagg

SEQ ID NO: 2911872 - DNA, 25 bp, Homo sapien
gtttccagaggcctgtttcacacag

SEQ ID NO: 2911873 - DNA, 25 bp, Homo sapien
ttaagttacacttggcaacggctgg

SEQ ID NO: 2911874 - DNA, 25 bp, Homo sapien
gaggcctgtttcacacagagggtgt

SEQ ID NO: 2911875 - DNA, 25 bp, Homo sapien
caacggctgggcatctgtttccaga

SEQ ID NO: 2911876 - DNA, 25 bp, Homo sapien
ttagggagaggccagtccatgagcc

SEQ ID NO: 2911877 - DNA, 25 bp, Homo sapien
agaggccagtccatgagccaggacc

SEQ ID NO: 2911878 - DNA, 25 bp, Homo sapien
ggccagtccatgagccaggaccaga

SEQ ID NO: 2911879 - DNA, 25 bp, Homo sapien
atgagccaggaccagaagagggctc

SEQ ID NO: 2911880 - DNA, 25 bp, Homo sapien
tctctccagaaaaggtccagcaggg

SEQ ID NO: 2911881 - DNA, 25 bp, Homo sapien
ccagcagggcgaggcgaatagaaat

SEQ ID NO: 2911882 - DNA, 25 bp, Homo sapien
cagggcgaggcgaatagaaatggct

SEQ ID NO: 2911883 - DNA, 25 bp, Homo sapien
tagaaatggctttggtgtcgcatgt

SEQ ID NO: 2911884 - DNA, 25 bp, Homo sapien
caccgagggcaccagcggaggcatc

SEQ ID NO: 2911885 - DNA, 25 bp, Homo sapien
accgagggcaccagcggaggcatca

SEQ ID NO: 2911886 - DNA, 25 bp, Homo sapien
gcaccgagggcaccagcggaggcat

SEQ ID NO: 2911887 - DNA, 25 bp, Homo sapien
aggggcaccgagggcaccagcggag

SEQ ID NO: 2911888 - DNA, 25 bp, Homo sapien
tagattttcgctacagctctgctgc

SEQ ID NO: 2911889 - DNA, 25 bp, Homo sapien
gacctgaagaggtgttcccagcgag

SEQ ID NO: 2911890 - DNA, 25 bp, Homo sapien
tggcagccttggtgagaccacacag

SEQ ID NO: 2911891 - DNA, 25 bp, Homo sapien
cctgaggcaatgaactgtggaacac

SEQ ID NO: 2911892 - DNA, 25 bp, Homo sapien
caggcagcgctgaggctctaatgtc

SEQ ID NO: 2911893 - DNA, 25 bp, Homo sapien
tggagactggacaggtcgttactac

SEQ ID NO: 2911894 - DNA, 25 bp, Homo sapien
gaatattgggttttccagaccatgg

SEQ ID NO: 2911895 - DNA, 25 bp, Homo sapien
gggagagtagataagcccctgcagc

SEQ ID NO: 2911896 - DNA, 25 bp, Homo sapien
tgaaaattggaagctgacatatggc

SEQ ID NO: 2911897 - DNA, 25 bp, Homo sapien
cccactgtgggatccttgaaacaag

SEQ ID NO: 2911898 - DNA, 25 bp, Homo sapien
cagacggtcatctccagttgctgaa

SEQ ID NO: 2911899 - DNA, 25 bp, Homo sapien
tacaacctgtttagccagaatcccc

SEQ ID NO: 2911900 - DNA, 25 bp, Homo sapien
gactgatagcaaagagtgtgcctgt

SEQ ID NO: 2911901 - DNA, 25 bp, Homo sapien
catctggttcctgttggcatgaggc

SEQ ID NO: 2911902 - DNA, 25 bp, Homo sapien
aggtgtccttggtggccactttgtc

SEQ ID NO: 2911903 - DNA, 25 bp, Homo sapien
tccttggtggccactttgtctggtg

SEQ ID NO: 2911904 - DNA, 25 bp, Homo sapien
tcaataggtgtccttggtggccact

SEQ ID NO: 2911905 - DNA, 25 bp, Homo sapien
ataggtgtccttggtggccactttg

SEQ ID NO: 2911906 - DNA, 25 bp, Homo sapien
cttcttgcttcatcacctttccaga

SEQ ID NO: 2911907 - DNA, 25 bp, Homo sapien
ttccagacaatatttcacaggtcat

SEQ ID NO: 2911908 - DNA, 25 bp, Homo sapien
ttgcttcatcacctttccagacaat

SEQ ID NO: 2911909 - DNA, 25 bp, Homo sapien
cgtccctggattccttcttgcttca

SEQ ID NO: 2911910 - DNA, 25 bp, Homo sapien
tagagcatgtactggaagtcgtgag

SEQ ID NO: 2911911 - DNA, 25 bp, Homo sapien
tactggaagtcgtgaggtgtgtagt

SEQ ID NO: 2911912 - DNA, 25 bp, Homo sapien
tgtactggaagtcgtgaggtgtgta

SEQ ID NO: 2911913 - DNA, 25 bp, Homo sapien
tcatagagcatgtactggaagtcgt

SEQ ID NO: 2911914 - DNA, 25 bp, Homo sapien
tccaggtgatcagagcgtagaggct

SEQ ID NO: 2911915 - DNA, 25 bp, Homo sapien
tacaagtaaccgcacagatgagccc

SEQ ID NO: 2911916 - DNA, 25 bp, Homo sapien
taaacacacctaacgggactctggc

SEQ ID NO: 2911917 - DNA, 25 bp, Homo sapien
cattacaggtaaggagtattcaggc

SEQ ID NO: 2911918 - DNA, 25 bp, Homo sapien
tactcgtggtccgacctttggcggt

SEQ ID NO: 2911919 - DNA, 25 bp, Homo sapien
accgccaaaggtcggaccacgagta

SEQ ID NO: 2911920 - DNA, 25 bp, Homo sapien
aaatggcccgcagtttggctgagac

SEQ ID NO: 2911921 - DNA, 25 bp, Homo sapien
taacggcctaggtgcaagagctacc

SEQ ID NO: 2911922 - DNA, 25 bp, Homo sapien
tcctcaggtttcagagcggacagct

SEQ ID NO: 2911923 - DNA, 25 bp, Homo sapien
ttaactgagactcgtaactgcaccc

SEQ ID NO: 2911924 - DNA, 25 bp, Homo sapien
ttagaaaccatggcccaagagccat

SEQ ID NO: 2911925 - DNA, 25 bp, Homo sapien
agagccatgcaattggaggctacaa

SEQ ID NO: 2911926 - DNA, 25 bp, Homo sapien
tgaccctccctaaacggctgttatg

SEQ ID NO: 2911927 - DNA, 25 bp, Homo sapien
ctccctaaacggctgttatgatcag

SEQ ID NO: 2911928 - DNA, 25 bp, Homo sapien
ttacacgaaaccttatagattattc

SEQ ID NO: 2911929 - DNA, 25 bp, Homo sapien
atagattattccatcaaatcctaac

SEQ ID NO: 2911930 - DNA, 25 bp, Homo sapien
tatagattattccatcaaatcctaa

SEQ ID NO: 2911931 - DNA, 25 bp, Homo sapien
aactgaagaaattattgccagctga

SEQ ID NO: 2911932 - DNA, 25 bp, Homo sapien
tgagagggaacgaagctggtgtcca

SEQ ID NO: 2911933 - DNA, 25 bp, Homo sapien
ctgagagggaacgaagctggtgtcc

SEQ ID NO: 2911934 - DNA, 25 bp, Homo sapien
aggacgcggccctggatcgtccgaa

SEQ ID NO: 2911935 - DNA, 25 bp, Homo sapien
tcgtccgaagccgaagccgtgtggc

SEQ ID NO: 2911936 - DNA, 25 bp, Homo sapien
ctggatcgtccgaagccgaagccgt

SEQ ID NO: 2911937 - DNA, 25 bp, Homo sapien
ccgaagccgtgtggcgcttcccgag

SEQ ID NO: 2911938 - DNA, 25 bp, Homo sapien
tcctcagccgtcacagctgtttcct

SEQ ID NO: 2911939 - DNA, 25 bp, Homo sapien
cctcctcagccgtcacagctgtttc

SEQ ID NO: 2911940 - DNA, 25 bp, Homo sapien
ctcctcagccgtcacagctgtttcc

SEQ ID NO: 2911941 - DNA, 25 bp, Homo sapien
ctggggccgagtcctccgtgaggaa

SEQ ID NO: 2911942 - DNA, 25 bp, Homo sapien
gggccgagtcctccgtgaggaaaca

SEQ ID NO: 2911943 - DNA, 25 bp, Homo sapien
cgtgaggaaacagcctgtgcgggcc

SEQ ID NO: 2911944 - DNA, 25 bp, Homo sapien
ctccgtgaggaaacagcctgtgcgg

SEQ ID NO: 2911945 - DNA, 25 bp, Homo sapien
gatccaccatgtccagattccccag

SEQ ID NO: 2911946 - DNA, 25 bp, Homo sapien
taatttcgttacagattgttcgttg

SEQ ID NO: 2911947 - DNA, 25 bp, Homo sapien
gattccccagtatttttactattga

SEQ ID NO: 2911948 - DNA, 25 bp, Homo sapien
tcttaatttcgttacagattgttcg

SEQ ID NO: 2911949 - DNA, 25 bp, Homo sapien
aatgtggggacattgccacttatgg

SEQ ID NO: 2911950 - DNA, 25 bp, Homo sapien
tgggaatgtggggacattgccactt

SEQ ID NO: 2911951 - DNA, 25 bp, Homo sapien
tggggacattgccacttatggggct

SEQ ID NO: 2911952 - DNA, 25 bp, Homo sapien
gacattgccacttatggggctgagg

SEQ ID NO: 2911953 - DNA, 25 bp, Homo sapien
tcagcatctcatggtggtagtcatt

SEQ ID NO: 2911954 - DNA, 25 bp, Homo sapien
caaatccaatgaacagcagcctgcg

SEQ ID NO: 2911955 - DNA, 25 bp, Homo sapien
gccaagctgttggtggcaaagatgt

SEQ ID NO: 2911956 - DNA, 25 bp, Homo sapien
tcattgcatagttgtgccaagctgt

SEQ ID NO: 2911957 - DNA, 25 bp, Homo sapien
gctcagggatgaatgtctggatcat

SEQ ID NO: 2911958 - DNA, 25 bp, Homo sapien
ggtgaccaggggctcagggatgaat

SEQ ID NO: 2911959 - DNA, 25 bp, Homo sapien
caggggctcagggatgaatgtctgg

SEQ ID NO: 2911960 - DNA, 25 bp, Homo sapien
tgaccaggggctcagggatgaatgt

SEQ ID NO: 2911961 - DNA, 25 bp, Homo sapien
cccattttcatagtaaatagataag

SEQ ID NO: 2911962 - DNA, 25 bp, Homo sapien
atagataagtgcagtagccatagcc

SEQ ID NO: 2911963 - DNA, 25 bp, Homo sapien
tagtaaatagataagtgcagtagcc

SEQ ID NO: 2911964 - DNA, 25 bp, Homo sapien
agtgcagtagccatagcctgagagg

SEQ ID NO: 2911965 - DNA, 25 bp, Homo sapien
catttgtggaaacaacgtaaattct

SEQ ID NO: 2911966 - DNA, 25 bp, Homo sapien
attctactttagtgtaaacaaggca

SEQ ID NO: 2911967 - DNA, 25 bp, Homo sapien
cctcagaccagcaataaattattca

SEQ ID NO: 2911968 - DNA, 25 bp, Homo sapien
tattcagtttggataacattatttt

SEQ ID NO: 2911969 - DNA, 25 bp, Homo sapien
agggagaacccaattttcaattatg

SEQ ID NO: 2911970 - DNA, 25 bp, Homo sapien
tagatcaaagagcaaatctaagccc

SEQ ID NO: 2911971 - DNA, 25 bp, Homo sapien
aatctagatcaaagagcaaatctaa

SEQ ID NO: 2911972 - DNA, 25 bp, Homo sapien
aaatctaagcccaagtctgatcggg

SEQ ID NO: 2911973 - DNA, 25 bp, Homo sapien
gttccaggtcgcggagcaaaggtcg

SEQ ID NO: 2911974 - DNA, 25 bp, Homo sapien
tccgatgatcatgcatgttagtgtc

SEQ ID NO: 2911975 - DNA, 25 bp, Homo sapien
taggagaactgaccccttacacaat

SEQ ID NO: 2911976 - DNA, 25 bp, Homo sapien
tggactatgtctcgttgtatgcttt

SEQ ID NO: 2911977 - DNA, 25 bp, Homo sapien
tacgtttgactaggagccttaccaa

SEQ ID NO: 2911978 - DNA, 25 bp, Homo sapien
ttccttcactaacgcagacaaaagg

SEQ ID NO: 2911979 - DNA, 25 bp, Homo sapien
tccttcactaacgcagacaaaaggg

SEQ ID NO: 2911980 - DNA, 25 bp, Homo sapien
attccttcactaacgcagacaaaag

SEQ ID NO: 2911981 - DNA, 25 bp, Homo sapien
caattccttcactaacgcagacaaa

SEQ ID NO: 2911982 - DNA, 25 bp, Homo sapien
caacagaagtgtatccaattggaat

SEQ ID NO: 2911983 - DNA, 25 bp, Homo sapien
caagggttgtgtcattatttgtatc

SEQ ID NO: 2911984 - DNA, 25 bp, Homo sapien
cttttgacacatagtcaaggcttct

SEQ ID NO: 2911985 - DNA, 25 bp, Homo sapien
tgttccaagacaagggttgtgtcat

SEQ ID NO: 2911986 - DNA, 25 bp, Homo sapien
gggaactgggatctccaaaagacat

SEQ ID NO: 2911987 - DNA, 25 bp, Homo sapien
gaagatgtacctcattccgtgtgca

SEQ ID NO: 2911988 - DNA, 25 bp, Homo sapien
taatatagctcttggacgagcagcc

SEQ ID NO: 2911989 - DNA, 25 bp, Homo sapien
cgagcagcccttgaataagtggtca

SEQ ID NO: 2911990 - DNA, 25 bp, Homo sapien
aatttttaatcaaatgagctctgcc

SEQ ID NO: 2911991 - DNA, 25 bp, Homo sapien
atctatcatgtccttaaacatttta

SEQ ID NO: 2911992 - DNA, 25 bp, Homo sapien
gtgctttgcactcattcccggtcag

SEQ ID NO: 2911993 - DNA, 25 bp, Homo sapien
ctgtgctttgcactcattcccggtc

SEQ ID NO: 2911994 - DNA, 25 bp, Homo sapien
tgtgctttgcactcattcccggtca

SEQ ID NO: 2911995 - DNA, 25 bp, Homo sapien
tgctttgcactcattcccggtcaga

SEQ ID NO: 2911996 - DNA, 25 bp, Homo sapien
gcttcatgtgcttgcatatggctct

SEQ ID NO: 2911997 - DNA, 25 bp, Homo sapien
ggcttcatgtgcttgcatatggctc

SEQ ID NO: 2911998 - DNA, 25 bp, Homo sapien
cggcttcatgtgcttgcatatggct

SEQ ID NO: 2911999 - DNA, 25 bp, Homo sapien
catgtaggaaaacgtgtctctgcta

SEQ ID NO: 2912000 - DNA, 25 bp, Homo sapien
atgtaggaaaacgtgtctctgctaa

SEQ ID NO: 2912001 - DNA, 25 bp, Homo sapien
ccatgtaggaaaacgtgtctctgct

SEQ ID NO: 2912002 - DNA, 25 bp, Homo sapien
atttccgctctttggtttgtctgcc

SEQ ID NO: 2912003 - DNA, 25 bp, Homo sapien
aatttccgctctttggtttgtctgc

SEQ ID NO: 2912004 - DNA, 25 bp, Homo sapien
gaatttccgctctttggtttgtctg

SEQ ID NO: 2912005 - DNA, 25 bp, Homo sapien
atgaatttccgctctttggtttgtc

SEQ ID NO: 2912006 - DNA, 25 bp, Homo sapien
acccagttagttataccatttatcg

SEQ ID NO: 2912007 - DNA, 25 bp, Homo sapien
cttgaacccagttagttataccatt

SEQ ID NO: 2912008 - DNA, 25 bp, Homo sapien
ttagttataccatttatcgtaaaca

SEQ ID NO: 2912009 - DNA, 25 bp, Homo sapien
gttataccatttatcgtaaacatac

SEQ ID NO: 2912010 - DNA, 25 bp, Homo sapien
tccatcccctgggtcagcctctcca

SEQ ID NO: 2912011 - DNA, 25 bp, Homo sapien
cacttgtcttccacccatttttctt

SEQ ID NO: 2912012 - DNA, 25 bp, Homo sapien
tcctctttgttgatcacctctttcc

SEQ ID NO: 2912013 - DNA, 25 bp, Homo sapien
tctccagtgccacgaagtcctcttt

SEQ ID NO: 2912014 - DNA, 25 bp, Homo sapien
acaatagccatgggacatgaacatt

SEQ ID NO: 2912015 - DNA, 25 bp, Homo sapien
aatagccatgggacatgaacattta

SEQ ID NO: 2912016 - DNA, 25 bp, Homo sapien
caatctagtgtgctctttatagaca

SEQ ID NO: 2912017 - DNA, 25 bp, Homo sapien
aagtgctgggtacaatctagtgtgc

SEQ ID NO: 2912018 - DNA, 25 bp, Homo sapien
tgctgggtacaatctagtgtgctct

SEQ ID NO: 2912019 - DNA, 25 bp, Homo sapien
gggtacaatctagtgtgctctttat

SEQ ID NO: 2912020 - DNA, 25 bp, Homo sapien
tcccagcaggatagcccgcggtttc

SEQ ID NO: 2912021 - DNA, 25 bp, Homo sapien
gtctaaggcgccctcaccgtgcttg

SEQ ID NO: 2912022 - DNA, 25 bp, Homo sapien
cagtagcgagctactgcctcggcca

SEQ ID NO: 2912023 - DNA, 25 bp, Homo sapien
tgtggagctcgccaagatcttccag

SEQ ID NO: 2912024 - DNA, 25 bp, Homo sapien
aaaatctgtgcatcatccttatgca

SEQ ID NO: 2912025 - DNA, 25 bp, Homo sapien
ctctccattttgttccaatttcagt

SEQ ID NO: 2912026 - DNA, 25 bp, Homo sapien
tatggaccacttcaaaaatctgtgc

SEQ ID NO: 2912027 - DNA, 25 bp, Homo sapien
gccatgctaatttctctccattttg

SEQ ID NO: 2912028 - DNA, 25 bp, Homo sapien
cttatattcaggaactagttgctga

SEQ ID NO: 2912029 - DNA, 25 bp, Homo sapien
ccttatattcaggaactagttgctg

SEQ ID NO: 2912030 - DNA, 25 bp, Homo sapien
tccttatattcaggaactagttgct

SEQ ID NO: 2912031 - DNA, 25 bp, Homo sapien
ctaagggtcaaattagtaggatgcc

SEQ ID NO: 2912032 - DNA, 25 bp, Homo sapien
tatcattccctgagagaagtacaac

SEQ ID NO: 2912033 - DNA, 25 bp, Homo sapien
tcccagttctttggttgctgactga

SEQ ID NO: 2912034 - DNA, 25 bp, Homo sapien
tctggtagctgtgattggcacaggt

SEQ ID NO: 2912035 - DNA, 25 bp, Homo sapien
cattcagttaaactacttagaacag

SEQ ID NO: 2912036 - DNA, 25 bp, Homo sapien
cttagaacagttagataaaagacat

SEQ ID NO: 2912037 - DNA, 25 bp, Homo sapien
caaacattcagttaaactacttaga

SEQ ID NO: 2912038 - DNA, 25 bp, Homo sapien
aatccaaacattcagttaaactact

SEQ ID NO: 2912039 - DNA, 25 bp, Homo sapien
gcttattttcgcatcctttaagtct

SEQ ID NO: 2912040 - DNA, 25 bp, Homo sapien
cttattttcgcatcctttaagtctt

SEQ ID NO: 2912041 - DNA, 25 bp, Homo sapien
tgcacatgaggaagtactggatata

SEQ ID NO: 2912042 - DNA, 25 bp, Homo sapien
gatatataggtatatcctctctatc

SEQ ID NO: 2912043 - DNA, 25 bp, Homo sapien
ttcctcagatttttgcacatgagga

SEQ ID NO: 2912044 - DNA, 25 bp, Homo sapien
catgaggaagtactggatatatagg

SEQ ID NO: 2912045 - DNA, 25 bp, Homo sapien
gaactcttcttctaatgtgttgacc

SEQ ID NO: 2912046 - DNA, 25 bp, Homo sapien
gagttatcaagtagtggctcttcct

SEQ ID NO: 2912047 - DNA, 25 bp, Homo sapien
ggaaatgtctcgaataccactgaga

SEQ ID NO: 2912048 - DNA, 25 bp, Homo sapien
tcctcaggacaagccggaattttgt

SEQ ID NO: 2912049 - DNA, 25 bp, Homo sapien
cttagcaaatctggtggtgccccgc

SEQ ID NO: 2912050 - DNA, 25 bp, Homo sapien
ggagttacttatgacctgctccact

SEQ ID NO: 2912051 - DNA, 25 bp, Homo sapien
cactacggcccagaatgcctggcct

SEQ ID NO: 2912052 - DNA, 25 bp, Homo sapien
cagcacaggagttacttatgacctg

SEQ ID NO: 2912053 - DNA, 25 bp, Homo sapien
ttgagtgagagtttgatgttcagga

SEQ ID NO: 2912054 - DNA, 25 bp, Homo sapien
gatgttcaggatgattgttattgct

SEQ ID NO: 2912055 - DNA, 25 bp, Homo sapien
tgttattgctttattcaatacaaag

SEQ ID NO: 2912056 - DNA, 25 bp, Homo sapien
tattgctttattcaatacaaagaac

SEQ ID NO: 2912057 - DNA, 25 bp, Homo sapien
taccatcagttagggttcctgataa

SEQ ID NO: 2912058 - DNA, 25 bp, Homo sapien
tctgctgatttagtccatcatcatc

SEQ ID NO: 2912059 - DNA, 25 bp, Homo sapien
catcatcattgccaacagtagtacc

SEQ ID NO: 2912060 - DNA, 25 bp, Homo sapien
gtgctattacttctgtgcttctcca

SEQ ID NO: 2912061 - DNA, 25 bp, Homo sapien
gctacttattgcaagctaggccctt

SEQ ID NO: 2912062 - DNA, 25 bp, Homo sapien
caataaccatagatagattaggcaa

SEQ ID NO: 2912063 - DNA, 25 bp, Homo sapien
caatacaccgaagggtaaacttcag

SEQ ID NO: 2912064 - DNA, 25 bp, Homo sapien
catcctactcatgggagtgaaataa

SEQ ID NO: 2912065 - DNA, 25 bp, Homo sapien
ttcattagatgttttatctgcaggc

SEQ ID NO: 2912066 - DNA, 25 bp, Homo sapien
ctcgttcttttcattagatgtttta

SEQ ID NO: 2912067 - DNA, 25 bp, Homo sapien
tcttttcattagatgttttatctgc

SEQ ID NO: 2912068 - DNA, 25 bp, Homo sapien
cgttcttttcattagatgttttatc

SEQ ID NO: 2912069 - DNA, 25 bp, Homo sapien
aggctatttcagatggctccattga

SEQ ID NO: 2912070 - DNA, 25 bp, Homo sapien
gctccattgagtcagcaaagtcagc

SEQ ID NO: 2912071 - DNA, 25 bp, Homo sapien
attctcataaacagagtgagacaat

SEQ ID NO: 2912072 - DNA, 25 bp, Homo sapien
gctatttcagatggctccattgagt

SEQ ID NO: 2912073 - DNA, 25 bp, Homo sapien
gaacacagattagacatcaccaaag

SEQ ID NO: 2912074 - DNA, 25 bp, Homo sapien
caaatccagaagtatctggctggga

SEQ ID NO: 2912075 - DNA, 25 bp, Homo sapien
gagacatcagtgaactatgagaaaa

SEQ ID NO: 2912076 - DNA, 25 bp, Homo sapien
gctaaaatggatggaagtgaacaca

SEQ ID NO: 2912077 - DNA, 25 bp, Homo sapien
tcttaagtttcagtaagtgttcaca

SEQ ID NO: 2912078 - DNA, 25 bp, Homo sapien
ctcaaatcgtacagctctttctccc

SEQ ID NO: 2912079 - DNA, 25 bp, Homo sapien
taagttttactgtaagttggtcaca

SEQ ID NO: 2912080 - DNA, 25 bp, Homo sapien
tcattttgtagtacactgaccatat

SEQ ID NO: 2912081 - DNA, 25 bp, Homo sapien
taagctgtctataactgttacccca

SEQ ID NO: 2912082 - DNA, 25 bp, Homo sapien
taatccaagactagcctaagctgtc

SEQ ID NO: 2912083 - DNA, 25 bp, Homo sapien
tcacttcgatctcttccaagggaca

SEQ ID NO: 2912084 - DNA, 25 bp, Homo sapien
tgtaagataacaccttcagatgtca

SEQ ID NO: 2912085 - DNA, 25 bp, Homo sapien
caacatatcggcatttcttttctcc

SEQ ID NO: 2912086 - DNA, 25 bp, Homo sapien
ccttaacaagtcttctcagattcca

SEQ ID NO: 2912087 - DNA, 25 bp, Homo sapien
ctgttcactatctttattatacaac

SEQ ID NO: 2912088 - DNA, 25 bp, Homo sapien
ttgttgctttgtttcaaccactttc

SEQ ID NO: 2912089 - DNA, 25 bp, Homo sapien
gaaagttgcttctgggcatcgtttc

SEQ ID NO: 2912090 - DNA, 25 bp, Homo sapien
ttgcttctgggcatcgtttctctcc

SEQ ID NO: 2912091 - DNA, 25 bp, Homo sapien
gttgcttctgggcatcgtttctctc

SEQ ID NO: 2912092 - DNA, 25 bp, Homo sapien
aagttgcttctgggcatcgtttctc

SEQ ID NO: 2912093 - DNA, 25 bp, Homo sapien
tccttttctttctgatgcctatgag

SEQ ID NO: 2912094 - DNA, 25 bp, Homo sapien
tgcaatcttcatgaaagagatcctt

SEQ ID NO: 2912095 - DNA, 25 bp, Homo sapien
tcttcatgaaagagatccttttctt

SEQ ID NO: 2912096 - DNA, 25 bp, Homo sapien
ctgcaacatgcaatcttcatgaaag

SEQ ID NO: 2912097 - DNA, 25 bp, Homo sapien
cagattgttcagctgtccactgtac

SEQ ID NO: 2912098 - DNA, 25 bp, Homo sapien
ggaaatcaagttttaggtctcttgc

SEQ ID NO: 2912099 - DNA, 25 bp, Homo sapien
tagcttgtaggccagacatatcaac

SEQ ID NO: 2912100 - DNA, 25 bp, Homo sapien
cattttgtcatgtaaacgaacccac

SEQ ID NO: 2912101 - DNA, 25 bp, Homo sapien
tgattatattcatccatcagctcct

SEQ ID NO: 2912102 - DNA, 25 bp, Homo sapien
ttaaatgattatattcatccatcag

SEQ ID NO: 2912103 - DNA, 25 bp, Homo sapien
tgaaagaatctgcttttcactctca

SEQ ID NO: 2912104 - DNA, 25 bp, Homo sapien
aatgattatattcatccatcagctc

SEQ ID NO: 2912105 - DNA, 25 bp, Homo sapien
gccataaccaaatattactttacat

SEQ ID NO: 2912106 - DNA, 25 bp, Homo sapien
ttacattttctttcaggaaggttga

SEQ ID NO: 2912107 - DNA, 25 bp, Homo sapien
ttagccataaccaaatattacttta

SEQ ID NO: 2912108 - DNA, 25 bp, Homo sapien
tacattttctttcaggaaggttgaa

SEQ ID NO: 2912109 - DNA, 25 bp, Homo sapien
gttttaggagatcggtccattcttg

SEQ ID NO: 2912110 - DNA, 25 bp, Homo sapien
tgaggtagcctctgacgtaggttgt

SEQ ID NO: 2912111 - DNA, 25 bp, Homo sapien
tgacgtaggttgttgttttaggaga

SEQ ID NO: 2912112 - DNA, 25 bp, Homo sapien
tgtgacaacgtgaggtagcctctga

SEQ ID NO: 2912113 - DNA, 25 bp, Homo sapien
tgtagacatcgtgaaggtacagttt

SEQ ID NO: 2912114 - DNA, 25 bp, Homo sapien
gaataatgtctgttgaagttgaaga

SEQ ID NO: 2912115 - DNA, 25 bp, Homo sapien
tcatagagaataatgtctgttgaag

SEQ ID NO: 2912116 - DNA, 25 bp, Homo sapien
tagacatcgtgaaggtacagtttcc

SEQ ID NO: 2912117 - DNA, 25 bp, Homo sapien
agtcggcttgcgaagtttttattct

SEQ ID NO: 2912118 - DNA, 25 bp, Homo sapien
actgagttcatttgacaaggattct

SEQ ID NO: 2912119 - DNA, 25 bp, Homo sapien
gttcatttgacaaggattctctaac

SEQ ID NO: 2912120 - DNA, 25 bp, Homo sapien
tcggcttgcgaagtttttattctgg

SEQ ID NO: 2912121 - DNA, 25 bp, Homo sapien
tactgacctctgctatcatctcatt

SEQ ID NO: 2912122 - DNA, 25 bp, Homo sapien
tccatgtccttaagagcagacctct

SEQ ID NO: 2912123 - DNA, 25 bp, Homo sapien
tggccttgtagcataagcagtgaat

SEQ ID NO: 2912124 - DNA, 25 bp, Homo sapien
ttcaacaagtagctctccatgtcct

SEQ ID NO: 2912125 - DNA, 25 bp, Homo sapien
gttgagaccttcactatcattaaga

SEQ ID NO: 2912126 - DNA, 25 bp, Homo sapien
gcagtgccgtagctactcacaggaa

SEQ ID NO: 2912127 - DNA, 25 bp, Homo sapien
ttgttaggacacgaaatagccaggt

SEQ ID NO: 2912128 - DNA, 25 bp, Homo sapien
catgactgaggcatttggacgctga

SEQ ID NO: 2912129 - DNA, 25 bp, Homo sapien
cacaacaaggttgaggttcattcca

SEQ ID NO: 2912130 - DNA, 25 bp, Homo sapien
tttagtcaggcagcactacttctgt

SEQ ID NO: 2912131 - DNA, 25 bp, Homo sapien
aaatctaaggttccacagaggatgc

SEQ ID NO: 2912132 - DNA, 25 bp, Homo sapien
tgacaacagcattaccatccaggcc

SEQ ID NO: 2912133 - DNA, 25 bp, Homo sapien
gatccttttcaagctatgtcccaca

SEQ ID NO: 2912134 - DNA, 25 bp, Homo sapien
ctgcagttagatcattttgcaactt

SEQ ID NO: 2912135 - DNA, 25 bp, Homo sapien
tgctacttctgcagttagatcattt

SEQ ID NO: 2912136 - DNA, 25 bp, Homo sapien
acttctgcagttagatcattttgca

SEQ ID NO: 2912137 - DNA, 25 bp, Homo sapien
tacttctgcagttagatcattttgc

SEQ ID NO: 2912138 - DNA, 25 bp, Homo sapien
acttccaaaactggatcttgattca

SEQ ID NO: 2912139 - DNA, 25 bp, Homo sapien
tccttgtgtgtaaatcctagaggag

SEQ ID NO: 2912140 - DNA, 25 bp, Homo sapien
aggatccaggttcatatttagtagc

SEQ ID NO: 2912141 - DNA, 25 bp, Homo sapien
ccaaaactggatcttgattcagatt

SEQ ID NO: 2912142 - DNA, 25 bp, Homo sapien
gaatgggatccttctgctacaaaga

SEQ ID NO: 2912143 - DNA, 25 bp, Homo sapien
cagcaaacatttgggcagttcgagt

SEQ ID NO: 2912144 - DNA, 25 bp, Homo sapien
tgggaatacccacataccagatgtg

SEQ ID NO: 2912145 - DNA, 25 bp, Homo sapien
caatgaccacagtaccagtatacca

SEQ ID NO: 2912146 - DNA, 25 bp, Homo sapien
gaatgtcccgtgttctgatgtatac

SEQ ID NO: 2912147 - DNA, 25 bp, Homo sapien
tgtgtccatttagacgaagtgtctt

SEQ ID NO: 2912148 - DNA, 25 bp, Homo sapien
tgctgccagcggagtattaacatcc

SEQ ID NO: 2912149 - DNA, 25 bp, Homo sapien
ttgcctgagtacctgaaaacctgga

SEQ ID NO: 2912150 - DNA, 25 bp, Homo sapien
ggatttggactgttctagtttctcc

SEQ ID NO: 2912151 - DNA, 25 bp, Homo sapien
tctatatcttcctaatttaatccag

SEQ ID NO: 2912152 - DNA, 25 bp, Homo sapien
tttctagtttatggatgtgaagatg

SEQ ID NO: 2912153 - DNA, 25 bp, Homo sapien
gttttctagtttatggatgtgaaga

SEQ ID NO: 2912154 - DNA, 25 bp, Homo sapien
atcttcctaatttaatccaggaggg

SEQ ID NO: 2912155 - DNA, 25 bp, Homo sapien
caggtcttaagttcttgatccatct

SEQ ID NO: 2912156 - DNA, 25 bp, Homo sapien
ggtcttaagttcttgatccatcttg

SEQ ID NO: 2912157 - DNA, 25 bp, Homo sapien
gtcttaagttcttgatccatcttga

SEQ ID NO: 2912158 - DNA, 25 bp, Homo sapien
aggtcttaagttcttgatccatctt

SEQ ID NO: 2912159 - DNA, 25 bp, Homo sapien
aggaatgaggtgatatcgcattgtg

SEQ ID NO: 2912160 - DNA, 25 bp, Homo sapien
caggaatgaggtgatatcgcattgt

SEQ ID NO: 2912161 - DNA, 25 bp, Homo sapien
gcactacctgttggtaaagggttca

SEQ ID NO: 2912162 - DNA, 25 bp, Homo sapien
ggagactttaacaccacaatgacaa

SEQ ID NO: 2912163 - DNA, 25 bp, Homo sapien
aaaacagagcttgcaatcctagttt

SEQ ID NO: 2912164 - DNA, 25 bp, Homo sapien
tgcaccctatacaagagcacccagg

SEQ ID NO: 2912165 - DNA, 25 bp, Homo sapien
tgaacagccgacctctcagtggaaa

SEQ ID NO: 2912166 - DNA, 25 bp, Homo sapien
gggaaccccatcagatgaacagccg

SEQ ID NO: 2912167 - DNA, 25 bp, Homo sapien
tacaagtcagaagatactgggaacc

SEQ ID NO: 2912168 - DNA, 25 bp, Homo sapien
ggaacttgttactaccagacctgtc

SEQ ID NO: 2912169 - DNA, 25 bp, Homo sapien
tcgagccagcaataagtcagtacgc

SEQ ID NO: 2912170 - DNA, 25 bp, Homo sapien
atgcactttcgagccagcaataagt

SEQ ID NO: 2912171 - DNA, 25 bp, Homo sapien
gcaactagggtatagtgcgaacccc

SEQ ID NO: 2912172 - DNA, 25 bp, Homo sapien
ctccagctatgggaaaaaccgaggc

SEQ ID NO: 2912173 - DNA, 25 bp, Homo sapien
aaaagtctatattatgcacctacat

SEQ ID NO: 2912174 - DNA, 25 bp, Homo sapien
gaaaaagtctatattatgcacctac

SEQ ID NO: 2912175 - DNA, 25 bp, Homo sapien
agtctatattatgcacctacattta

SEQ ID NO: 2912176 - DNA, 25 bp, Homo sapien
attatgcacctacatttatatttac

SEQ ID NO: 2912177 - DNA, 25 bp, Homo sapien
gacagacctggtagattctcaaaca

SEQ ID NO: 2912178 - DNA, 25 bp, Homo sapien
gagcctcaaactatgttcacgtaag

SEQ ID NO: 2912179 - DNA, 25 bp, Homo sapien
gaggaagcctatgagcaatgacaac

SEQ ID NO: 2912180 - DNA, 25 bp, Homo sapien
tcaaagcggagggaacctgaacagc

SEQ ID NO: 2912181 - DNA, 25 bp, Homo sapien
ccaagaaggctacgaaaaaaatgct

SEQ ID NO: 2912182 - DNA, 25 bp, Homo sapien
ttggaggagtggagcacacacgtta

SEQ ID NO: 2912183 - DNA, 25 bp, Homo sapien
gacgtttatgcacttctggtgggaa

SEQ ID NO: 2912184 - DNA, 25 bp, Homo sapien
taggaaataccattgcggacgtagg

SEQ ID NO: 2912185 - DNA, 25 bp, Homo sapien
aatctggtggaattgctccagcttc

SEQ ID NO: 2912186 - DNA, 25 bp, Homo sapien
cagaatctggtggaattgctccagc

SEQ ID NO: 2912187 - DNA, 25 bp, Homo sapien
atctgttgtacagaatctggtggaa

SEQ ID NO: 2912188 - DNA, 25 bp, Homo sapien
tgtacagaatctggtggaattgctc

SEQ ID NO: 2912189 - DNA, 25 bp, Homo sapien
tgtgtaagatgctcccaggtgccat

SEQ ID NO: 2912190 - DNA, 25 bp, Homo sapien
tgtaagatgctcccaggtgccatag

SEQ ID NO: 2912191 - DNA, 25 bp, Homo sapien
aagatgctcccaggtgccatagagc

SEQ ID NO: 2912192 - DNA, 25 bp, Homo sapien
ctgtgtaagatgctcccaggtgcca

SEQ ID NO: 2912193 - DNA, 25 bp, Homo sapien
tgatctgcagagaatagtgacccca

SEQ ID NO: 2912194 - DNA, 25 bp, Homo sapien
ctctcagacatgctgatctgcagag

SEQ ID NO: 2912195 - DNA, 25 bp, Homo sapien
tctcagacatgctgatctgcagaga

SEQ ID NO: 2912196 - DNA, 25 bp, Homo sapien
ctgcagagaatagtgaccccagatc

SEQ ID NO: 2912197 - DNA, 25 bp, Homo sapien
gtgtcagacataaaatgacttaact

SEQ ID NO: 2912198 - DNA, 25 bp, Homo sapien
gacataaaatgacttaactttgtat

SEQ ID NO: 2912199 - DNA, 25 bp, Homo sapien
gctgtgacaagcaggacctgttagt

SEQ ID NO: 2912200 - DNA, 25 bp, Homo sapien
tgacttaactttgtatcatggaggg

SEQ ID NO: 2912201 - DNA, 25 bp, Homo sapien
gctgacccttgaggaccgggaaggc

SEQ ID NO: 2912202 - DNA, 25 bp, Homo sapien
tgacccttgaggaccgggaaggcaa

SEQ ID NO: 2912203 - DNA, 25 bp, Homo sapien
ctgacccttgaggaccgggaaggca

SEQ ID NO: 2912204 - DNA, 25 bp, Homo sapien
ccaggacctgatccggctttatgac

SEQ ID NO: 2912205 - DNA, 25 bp, Homo sapien
tgatccggctttatgacatcatctt

SEQ ID NO: 2912206 - DNA, 25 bp, Homo sapien
gacctgatccggctttatgacatca

SEQ ID NO: 2912207 - DNA, 25 bp, Homo sapien
gccccaggacctgatccggctttat

SEQ ID NO: 2912208 - DNA, 25 bp, Homo sapien
ggccaaaggtctgcagagggctctg

SEQ ID NO: 2912209 - DNA, 25 bp, Homo sapien
atcaagctgtcaatggcaatcaagt

SEQ ID NO: 2912210 - DNA, 25 bp, Homo sapien
caatggcaatcaagtgtaatgagag

SEQ ID NO: 2912211 - DNA, 25 bp, Homo sapien
tggcaatcaagtgtaatgagagcat

SEQ ID NO: 2912212 - DNA, 25 bp, Homo sapien
gctgtcaatggcaatcaagtgtaat

SEQ ID NO: 2912213 - DNA, 25 bp, Homo sapien
tcggcatcgtcggaatcagccagca

SEQ ID NO: 2912214 - DNA, 25 bp, Homo sapien
ttcatcggcatcgtcggaatcagcc

SEQ ID NO: 2912215 - DNA, 25 bp, Homo sapien
ctggcaattcatcggcatcgtcgga

SEQ ID NO: 2912216 - DNA, 25 bp, Homo sapien
atcgtcggaatcagccagcagcttg

SEQ ID NO: 2912217 - DNA, 25 bp, Homo sapien
agagctctctgctaggttctctggg

SEQ ID NO: 2912218 - DNA, 25 bp, Homo sapien
catggctggccaaggctgtctttta

SEQ ID NO: 2912219 - DNA, 25 bp, Homo sapien
gctaaaaatgtgttggttcaagacc

SEQ ID NO: 2912220 - DNA, 25 bp, Homo sapien
gccggaatgcagtgaggtaatcaca

SEQ ID NO: 2912221 - DNA, 25 bp, Homo sapien
aaaatgtgttggttcaagaccagtc

SEQ ID NO: 2912222 - DNA, 25 bp, Homo sapien
ttcaccctcagcttctatttgttca

SEQ ID NO: 2912223 - DNA, 25 bp, Homo sapien
tcaccctcagcttctatttgttcac

SEQ ID NO: 2912224 - DNA, 25 bp, Homo sapien
caggtgagcggtgagctgtatttat

SEQ ID NO: 2912225 - DNA, 25 bp, Homo sapien
gccctccttacgagaatttaatgcc

SEQ ID NO: 2912226 - DNA, 25 bp, Homo sapien
aggttgtgccctccttacgagaatt

SEQ ID NO: 2912227 - DNA, 25 bp, Homo sapien
gcaatctaggttgtgccctccttac

SEQ ID NO: 2912228 - DNA, 25 bp, Homo sapien
tttggggtcctgttaatcagcatgt

SEQ ID NO: 2912229 - DNA, 25 bp, Homo sapien
gggtcctgttaatcagcatgttagg

SEQ ID NO: 2912230 - DNA, 25 bp, Homo sapien
tggggtcctgttaatcagcatgtta

SEQ ID NO: 2912231 - DNA, 25 bp, Homo sapien
acctttggggtcctgttaatcagca

SEQ ID NO: 2912232 - DNA, 25 bp, Homo sapien
ggcctttttatctgagatggcaaca

SEQ ID NO: 2912233 - DNA, 25 bp, Homo sapien
tctgatcccatgtaacacagagtta

SEQ ID NO: 2912234 - DNA, 25 bp, Homo sapien
cagagttatcagaataccaagtcta

SEQ ID NO: 2912235 - DNA, 25 bp, Homo sapien
caagagtgtgctgcttttgttgaga

SEQ ID NO: 2912236 - DNA, 25 bp, Homo sapien
tgtaacattctggataaaatttcta

SEQ ID NO: 2912237 - DNA, 25 bp, Homo sapien
gggtgatgatagtaagccatttatc

SEQ ID NO: 2912238 - DNA, 25 bp, Homo sapien
ttaatcagaaagccagagcattatt

SEQ ID NO: 2912239 - DNA, 25 bp, Homo sapien
ctttggaatcctataagggattaca

SEQ ID NO: 2912240 - DNA, 25 bp, Homo sapien
tgggaaggcatttaaactggtgatc

SEQ ID NO: 2912241 - DNA, 25 bp, Homo sapien
tctcggtcactcacccttattttac

SEQ ID NO: 2912242 - DNA, 25 bp, Homo sapien
tctagctatgcatcaacctctcggt

SEQ ID NO: 2912243 - DNA, 25 bp, Homo sapien
taaactggtgatctagctatgcatc

SEQ ID NO: 2912244 - DNA, 25 bp, Homo sapien
aaagcacggagacagctgtccaggt

SEQ ID NO: 2912245 - DNA, 25 bp, Homo sapien
gaaagcacggagacagctgtccagg

SEQ ID NO: 2912246 - DNA, 25 bp, Homo sapien
agcacggagacagctgtccaggttg

SEQ ID NO: 2912247 - DNA, 25 bp, Homo sapien
acggagacagctgtccaggttgatg

SEQ ID NO: 2912248 - DNA, 25 bp, Homo sapien
tccagagatccagcttctttgttgc

SEQ ID NO: 2912249 - DNA, 25 bp, Homo sapien
tttgttgctaagcagtgggtcttac

SEQ ID NO: 2912250 - DNA, 25 bp, Homo sapien
gtggaagcctccagagatccagctt

SEQ ID NO: 2912251 - DNA, 25 bp, Homo sapien
ccagcttctttgttgctaagcagtg

SEQ ID NO: 2912252 - DNA, 25 bp, Homo sapien
aatgtttgggaatatataacagaac

SEQ ID NO: 2912253 - DNA, 25 bp, Homo sapien
gcattaaagcgttctgaagatacaa

SEQ ID NO: 2912254 - DNA, 25 bp, Homo sapien
aaaacattgcattaaagcgttctga

SEQ ID NO: 2912255 - DNA, 25 bp, Homo sapien
aaaacaagtcaaatacatgtgaatg

SEQ ID NO: 2912256 - DNA, 25 bp, Homo sapien
cagagagccgggtctcgtggtacca

SEQ ID NO: 2912257 - DNA, 25 bp, Homo sapien
aagcactcaggtcaaaactttcccg

SEQ ID NO: 2912258 - DNA, 25 bp, Homo sapien
cactcaggtcaaaactttcccgagg

SEQ ID NO: 2912259 - DNA, 25 bp, Homo sapien
gagagccgggtctcgtggtaccaaa

SEQ ID NO: 2912260 - DNA, 25 bp, Homo sapien
tagcgctgagtgaggatgggctttt

SEQ ID NO: 2912261 - DNA, 25 bp, Homo sapien
tgttagcgctgagtgaggatgggct

SEQ ID NO: 2912262 - DNA, 25 bp, Homo sapien
tgatgttagcgctgagtgaggatgg

SEQ ID NO: 2912263 - DNA, 25 bp, Homo sapien
atgttagcgctgagtgaggatgggc

SEQ ID NO: 2912264 - DNA, 25 bp, Homo sapien
caggaggttcacttgggtgcaggag

SEQ ID NO: 2912265 - DNA, 25 bp, Homo sapien
ccgaagcaggaggttcacttgggtg

SEQ ID NO: 2912266 - DNA, 25 bp, Homo sapien
ggttcacttgggtgcaggagttcga

SEQ ID NO: 2912267 - DNA, 25 bp, Homo sapien
cctgggaaacatggcgaagcaccat

SEQ ID NO: 2912268 - DNA, 25 bp, Homo sapien
gggagtcgtgactggctacccttta

SEQ ID NO: 2912269 - DNA, 25 bp, Homo sapien
tagggactcagaaaatagcagaaag

SEQ ID NO: 2912270 - DNA, 25 bp, Homo sapien
gagtccctataagcaacaatgtcct

SEQ ID NO: 2912271 - DNA, 25 bp, Homo sapien
cctattgtgtagcaggtaagttaca

SEQ ID NO: 2912272 - DNA, 25 bp, Homo sapien
gctggcatccaagttcttcttacta

SEQ ID NO: 2912273 - DNA, 25 bp, Homo sapien
aaggcgtcagccagctcacagatct

SEQ ID NO: 2912274 - DNA, 25 bp, Homo sapien
tccgtgggctgctattagggctgct

SEQ ID NO: 2912275 - DNA, 25 bp, Homo sapien
cgcatatgccctcggctcaaggcgt

SEQ ID NO: 2912276 - DNA, 25 bp, Homo sapien
ctcatggtcctgaggagtgaccagc

SEQ ID NO: 2912277 - DNA, 25 bp, Homo sapien
tgaggagtgaccagctctggttggc

SEQ ID NO: 2912278 - DNA, 25 bp, Homo sapien
tcatggtcctgaggagtgaccagct

SEQ ID NO: 2912279 - DNA, 25 bp, Homo sapien
gagtgaccagctctggttggctgcc

SEQ ID NO: 2912280 - DNA, 25 bp, Homo sapien
tgcttcatgctcataaaggaatcca

SEQ ID NO: 2912281 - DNA, 25 bp, Homo sapien
ttcatgctcataaaggaatccattg

SEQ ID NO: 2912282 - DNA, 25 bp, Homo sapien
gcttcatgctcataaaggaatccat

SEQ ID NO: 2912283 - DNA, 25 bp, Homo sapien
atgcttcatgctcataaaggaatcc

SEQ ID NO: 2912284 - DNA, 25 bp, Homo sapien
tgcatataaataggcttaatatgag

SEQ ID NO: 2912285 - DNA, 25 bp, Homo sapien
aaattgcatataaataggcttaata

SEQ ID NO: 2912286 - DNA, 25 bp, Homo sapien
catataaataggcttaatatgagtg

SEQ ID NO: 2912287 - DNA, 25 bp, Homo sapien
tatgagtgtcttctctttggtcatc

SEQ ID NO: 2912288 - DNA, 25 bp, Homo sapien
ctaagctcaatgctaggaaataagc

SEQ ID NO: 2912289 - DNA, 25 bp, Homo sapien
tctctatcactaagctcaatgctag

SEQ ID NO: 2912290 - DNA, 25 bp, Homo sapien
gctcaatgctaggaaataagcagga

SEQ ID NO: 2912291 - DNA, 25 bp, Homo sapien
tcactaagctcaatgctaggaaata

SEQ ID NO: 2912292 - DNA, 25 bp, Homo sapien
taagagagtggatgtatgttagtag

SEQ ID NO: 2912293 - DNA, 25 bp, Homo sapien
ctgtaagagataagagagtggatgt

SEQ ID NO: 2912294 - DNA, 25 bp, Homo sapien
taagagataagagagtggatgtatg

SEQ ID NO: 2912295 - DNA, 25 bp, Homo sapien
ggatgtatgttagtagttaactgta

SEQ ID NO: 2912296 - DNA, 25 bp, Homo sapien
agatgctgccattgtagcagtacca

SEQ ID NO: 2912297 - DNA, 25 bp, Homo sapien
ttggcataagtgacgtaatggcccc

SEQ ID NO: 2912298 - DNA, 25 bp, Homo sapien
gccattgtagcagtaccacttgcag

SEQ ID NO: 2912299 - DNA, 25 bp, Homo sapien
ccacttgcagtttgggtttttggca

SEQ ID NO: 2912300 - DNA, 25 bp, Homo sapien
tggtgtcaatttcatcagggtgacg

SEQ ID NO: 2912301 - DNA, 25 bp, Homo sapien
cagaaattgtgcgtagtctatcctc

SEQ ID NO: 2912302 - DNA, 25 bp, Homo sapien
tcatccatactgcttgtgtctgcca

SEQ ID NO: 2912303 - DNA, 25 bp, Homo sapien
tgtaatcagactcaaagtcttcatc

SEQ ID NO: 2912304 - DNA, 25 bp, Homo sapien
ctagcagccagagtggtagctttgc

SEQ ID NO: 2912305 - DNA, 25 bp, Homo sapien
cagccagagtggtagctttgctgta

SEQ ID NO: 2912306 - DNA, 25 bp, Homo sapien
gagtggtagctttgctgtaacacac

SEQ ID NO: 2912307 - DNA, 25 bp, Homo sapien
cagagtggtagctttgctgtaacac

SEQ ID NO: 2912308 - DNA, 25 bp, Homo sapien
tcagtgacatctttgccaagtatca

SEQ ID NO: 2912309 - DNA, 25 bp, Homo sapien
agtgacatctttgccaagtatcagc

SEQ ID NO: 2912310 - DNA, 25 bp, Homo sapien
acatctttgccaagtatcagctaca

SEQ ID NO: 2912311 - DNA, 25 bp, Homo sapien
tatcagctacaaggagtcatctccc

SEQ ID NO: 2912312 - DNA, 25 bp, Homo sapien
ttagaatttgtattctaacaggata

SEQ ID NO: 2912313 - DNA, 25 bp, Homo sapien
gataaaataactacatttagcttgc

SEQ ID NO: 2912314 - DNA, 25 bp, Homo sapien
ttaattagaatttgtattctaacag

SEQ ID NO: 2912315 - DNA, 25 bp, Homo sapien
aattagaatttgtattctaacagga

SEQ ID NO: 2912316 - DNA, 25 bp, Homo sapien
ttcttatttggtcccaggtggctgg

SEQ ID NO: 2912317 - DNA, 25 bp, Homo sapien
ttaagagagcctccctttcagactg

SEQ ID NO: 2912318 - DNA, 25 bp, Homo sapien
aattcttatttggtcccaggtggct

SEQ ID NO: 2912319 - DNA, 25 bp, Homo sapien
attcttatttggtcccaggtggctg

SEQ ID NO: 2912320 - DNA, 25 bp, Homo sapien
aagatggtgcaaatattggcaactg

SEQ ID NO: 2912321 - DNA, 25 bp, Homo sapien
catgtgaagatggtgcaaatattgg

SEQ ID NO: 2912322 - DNA, 25 bp, Homo sapien
aaatattggcaactgctccccttcc

SEQ ID NO: 2912323 - DNA, 25 bp, Homo sapien
tgcaaatattggcaactgctcccct

SEQ ID NO: 2912324 - DNA, 25 bp, Homo sapien
acttatgaactcctaatgtctggga

SEQ ID NO: 2912325 - DNA, 25 bp, Homo sapien
gaactcctaatgtctgggatgtgtt

SEQ ID NO: 2912326 - DNA, 25 bp, Homo sapien
agtggacatgcaaacaaagcaaaac

SEQ ID NO: 2912327 - DNA, 25 bp, Homo sapien
caacttgcagggtctaaatgaataa

SEQ ID NO: 2912328 - DNA, 25 bp, Homo sapien
ttttaatgggacatgtccaggtagg

SEQ ID NO: 2912329 - DNA, 25 bp, Homo sapien
cactttttaatgggacatgtccagg

SEQ ID NO: 2912330 - DNA, 25 bp, Homo sapien
ctttttaatgggacatgtccaggta

SEQ ID NO: 2912331 - DNA, 25 bp, Homo sapien
actttttaatgggacatgtccaggt

SEQ ID NO: 2912332 - DNA, 25 bp, Homo sapien
acttgtatgaggaaaaacagtacat

SEQ ID NO: 2912333 - DNA, 25 bp, Homo sapien
ttgtatgaggaaaaacagtacatag

SEQ ID NO: 2912334 - DNA, 25 bp, Homo sapien
tacttgtatgaggaaaaacagtaca

SEQ ID NO: 2912335 - DNA, 25 bp, Homo sapien
tttacttgtatgaggaaaaacagta

SEQ ID NO: 2912336 - DNA, 25 bp, Homo sapien
atcctgctctacagagtttccaacc

SEQ ID NO: 2912337 - DNA, 25 bp, Homo sapien
taacaggccatggacggtgctggtc

SEQ ID NO: 2912338 - DNA, 25 bp, Homo sapien
catggacggtgctggtctgtagccc

SEQ ID NO: 2912339 - DNA, 25 bp, Homo sapien
caggagttagggaatcctgctctac

SEQ ID NO: 2912340 - DNA, 25 bp, Homo sapien
tctgccgaagccatgcccaagcagt

SEQ ID NO: 2912341 - DNA, 25 bp, Homo sapien
tgcccaagcagttccctttgcctgg

SEQ ID NO: 2912342 - DNA, 25 bp, Homo sapien
gttctctgccgaagccatgcccaag

SEQ ID NO: 2912343 - DNA, 25 bp, Homo sapien
gaagccatgcccaagcagttccctt

SEQ ID NO: 2912344 - DNA, 25 bp, Homo sapien
cattagtgagccatccggacacaaa

SEQ ID NO: 2912345 - DNA, 25 bp, Homo sapien
tgctggtccatgcactcgacaaaga

SEQ ID NO: 2912346 - DNA, 25 bp, Homo sapien
tattgcctcgcagctcttgactacg

SEQ ID NO: 2912347 - DNA, 25 bp, Homo sapien
ggtctaggcaccacagatacattag

SEQ ID NO: 2912348 - DNA, 25 bp, Homo sapien
cacggattacacaaaacattggttc

SEQ ID NO: 2912349 - DNA, 25 bp, Homo sapien
caccacggattacacaaaacattgg

SEQ ID NO: 2912350 - DNA, 25 bp, Homo sapien
cccaccacggattacacaaaacatt

SEQ ID NO: 2912351 - DNA, 25 bp, Homo sapien
agctttccccaccacggattacaca

SEQ ID NO: 2912352 - DNA, 25 bp, Homo sapien
ggtgtccacgatgcatgtgccagga

SEQ ID NO: 2912353 - DNA, 25 bp, Homo sapien
gcttcctggtgtccacgatgcatgt

SEQ ID NO: 2912354 - DNA, 25 bp, Homo sapien
atgcatgtgccaggagccgagcaga

SEQ ID NO: 2912355 - DNA, 25 bp, Homo sapien
cacgatgcatgtgccaggagccgag

SEQ ID NO: 2912356 - DNA, 25 bp, Homo sapien
ttaggaagaaatgcaacaggggctc

SEQ ID NO: 2912357 - DNA, 25 bp, Homo sapien
ctgacattaggaagaaatgcaacag

SEQ ID NO: 2912358 - DNA, 25 bp, Homo sapien
gacattaggaagaaatgcaacaggg

SEQ ID NO: 2912359 - DNA, 25 bp, Homo sapien
aggaagaaatgcaacaggggctcac

SEQ ID NO: 2912360 - DNA, 25 bp, Homo sapien
gcagggatgggaactcctccagcag

SEQ ID NO: 2912361 - DNA, 25 bp, Homo sapien
gctgatggagtaaaacctgggcttc

SEQ ID NO: 2912362 - DNA, 25 bp, Homo sapien
tcgagtgtggtacatgagcacggcc

SEQ ID NO: 2912363 - DNA, 25 bp, Homo sapien
acttccacttgctgtactctgagga

SEQ ID NO: 2912364 - DNA, 25 bp, Homo sapien
ctctcctggtctgggtgggtgttct

SEQ ID NO: 2912365 - DNA, 25 bp, Homo sapien
tctctagcaggacaaacagagtctc

SEQ ID NO: 2912366 - DNA, 25 bp, Homo sapien
aacagagtctctggccagtttttag

SEQ ID NO: 2912367 - DNA, 25 bp, Homo sapien
ggtgggtgttctctagcaggacaaa

SEQ ID NO: 2912368 - DNA, 25 bp, Homo sapien
tgctgcctcgggctgagtgaggctt

SEQ ID NO: 2912369 - DNA, 25 bp, Homo sapien
tgcctcgggctgagtgaggcttcgg

SEQ ID NO: 2912370 - DNA, 25 bp, Homo sapien
tcgggctgagtgaggcttcggacag

SEQ ID NO: 2912371 - DNA, 25 bp, Homo sapien
cctcgggctgagtgaggcttcggac

SEQ ID NO: 2912372 - DNA, 25 bp, Homo sapien
ggtgccgtgggctctatggtttcca

SEQ ID NO: 2912373 - DNA, 25 bp, Homo sapien
tgcagccttgcatgttggctggaga

SEQ ID NO: 2912374 - DNA, 25 bp, Homo sapien
ttctcattgggtctcaggtgccggg

SEQ ID NO: 2912375 - DNA, 25 bp, Homo sapien
tcattctttggagggttcccatggg

SEQ ID NO: 2912376 - DNA, 25 bp, Homo sapien
gaatcagtgttgacagacaggtgca

SEQ ID NO: 2912377 - DNA, 25 bp, Homo sapien
tccccagtggacgatacctttgcct

SEQ ID NO: 2912378 - DNA, 25 bp, Homo sapien
cctagatggctcatggaggctccag

SEQ ID NO: 2912379 - DNA, 25 bp, Homo sapien
gctttacactatgacctgcctggct

SEQ ID NO: 2912380 - DNA, 25 bp, Homo sapien
tgtaccaggtcatatgtggcgtctc

SEQ ID NO: 2912381 - DNA, 25 bp, Homo sapien
tcagaagacaaagatagatgtgtgt

SEQ ID NO: 2912382 - DNA, 25 bp, Homo sapien
gtgtaccaggtcatatgtggcgtct

SEQ ID NO: 2912383 - DNA, 25 bp, Homo sapien
tccctcctcggcaccatgagcacct

SEQ ID NO: 2912384 - DNA, 25 bp, Homo sapien
ctcctcggcaccatgagcacctgca

SEQ ID NO: 2912385 - DNA, 25 bp, Homo sapien
atgagcacctgcagccgccagttca

SEQ ID NO: 2912386 - DNA, 25 bp, Homo sapien
ctccctcctcggcaccatgagcacc

SEQ ID NO: 2912387 - DNA, 25 bp, Homo sapien
ttgctggcagatttggggagcccac

SEQ ID NO: 2912388 - DNA, 25 bp, Homo sapien
ctttgctggcagatttggggagccc

SEQ ID NO: 2912389 - DNA, 25 bp, Homo sapien
tttgctggcagatttggggagccca

SEQ ID NO: 2912390 - DNA, 25 bp, Homo sapien
tgctggcagatttggggagcccaca

SEQ ID NO: 2912391 - DNA, 25 bp, Homo sapien
gatcaggcttatattccatgctaga

SEQ ID NO: 2912392 - DNA, 25 bp, Homo sapien
gggatcaggcttatattccatgcta

SEQ ID NO: 2912393 - DNA, 25 bp, Homo sapien
caggcttatattccatgctagagct

SEQ ID NO: 2912394 - DNA, 25 bp, Homo sapien
tgggggatcaggcttatattccatg

SEQ ID NO: 2912395 - DNA, 25 bp, Homo sapien
tcaggctccaggttaggccacggtt

SEQ ID NO: 2912396 - DNA, 25 bp, Homo sapien
tggccgggctgtttgcagctccttg

SEQ ID NO: 2912397 - DNA, 25 bp, Homo sapien
gcatcaggggcggctccagccgcat

SEQ ID NO: 2912398 - DNA, 25 bp, Homo sapien
cagatccatgaagggctcctgcagc

SEQ ID NO: 2912399 - DNA, 25 bp, Homo sapien
tcctccagatccatgaagggctcct

SEQ ID NO: 2912400 - DNA, 25 bp, Homo sapien
tcctgcagcatcgggggcagcatca

SEQ ID NO: 2912401 - DNA, 25 bp, Homo sapien
tccctccttggcacgatgagcacct

SEQ ID NO: 2912402 - DNA, 25 bp, Homo sapien
tgagcacctgcagccaccagttcac

SEQ ID NO: 2912403 - DNA, 25 bp, Homo sapien
ctccttggcacgatgagcacctgca

SEQ ID NO: 2912404 - DNA, 25 bp, Homo sapien
ctccctccttggcacgatgagcacc

SEQ ID NO: 2912405 - DNA, 25 bp, Homo sapien
cacagcggagttgatcctgggctga

SEQ ID NO: 2912406 - DNA, 25 bp, Homo sapien
tgagccagcacacagcggagttgat

SEQ ID NO: 2912407 - DNA, 25 bp, Homo sapien
gctccacactctcaaagctgggtgg

SEQ ID NO: 2912408 - DNA, 25 bp, Homo sapien
tctctcagctccacactctcaaagc

SEQ ID NO: 2912409 - DNA, 25 bp, Homo sapien
cgcgtagcggttcgggagggtgcca

SEQ ID NO: 2912410 - DNA, 25 bp, Homo sapien
cctgtgattaggagagggcggtaga

SEQ ID NO: 2912411 - DNA, 25 bp, Homo sapien
gggcggtagaggagtggaggagcta

SEQ ID NO: 2912412 - DNA, 25 bp, Homo sapien
gccagtgtgtagaggtgagtgtgag

SEQ ID NO: 2912413 - DNA, 25 bp, Homo sapien
agtgggcccatgaccggtgctctcc

SEQ ID NO: 2912414 - DNA, 25 bp, Homo sapien
tgagtgggcccatgaccggtgctct

SEQ ID NO: 2912415 - DNA, 25 bp, Homo sapien
cctgagtgggcccatgaccggtgct

SEQ ID NO: 2912416 - DNA, 25 bp, Homo sapien
gtgcctgagtgggcccatgaccggt

SEQ ID NO: 2912417 - DNA, 25 bp, Homo sapien
cctgctcacagaaccgtacaacaca

SEQ ID NO: 2912418 - DNA, 25 bp, Homo sapien
tccctgctcacagaaccgtacaaca

SEQ ID NO: 2912419 - DNA, 25 bp, Homo sapien
gctcacagaaccgtacaacacacac

SEQ ID NO: 2912420 - DNA, 25 bp, Homo sapien
tgctcacagaaccgtacaacacaca

SEQ ID NO: 2912421 - DNA, 25 bp, Homo sapien
aaaaccctggttctgctgagacaag

SEQ ID NO: 2912422 - DNA, 25 bp, Homo sapien
gagacaaggaattgcctgccccagt

SEQ ID NO: 2912423 - DNA, 25 bp, Homo sapien
gggagatgtagcagcgacaaaaccc

SEQ ID NO: 2912424 - DNA, 25 bp, Homo sapien
tagcagcgacaaaaccctggttctg

SEQ ID NO: 2912425 - DNA, 25 bp, Homo sapien
ggcccaccctgacacctgaacgctg

SEQ ID NO: 2912426 - DNA, 25 bp, Homo sapien
gaacgctgaggtttttgtccaagat

SEQ ID NO: 2912427 - DNA, 25 bp, Homo sapien
gggtctgtggttggactggaactcc

SEQ ID NO: 2912428 - DNA, 25 bp, Homo sapien
cacctgaacgctgaggtttttgtcc

SEQ ID NO: 2912429 - DNA, 25 bp, Homo sapien
caggggttgacctggcagcatgtct

SEQ ID NO: 2912430 - DNA, 25 bp, Homo sapien
ccaggcccatgccagtggtagctgc

SEQ ID NO: 2912431 - DNA, 25 bp, Homo sapien
ccccttgcaggggttgacctggcag

SEQ ID NO: 2912432 - DNA, 25 bp, Homo sapien
gccagtggtagctgcctccggaccc

SEQ ID NO: 2912433 - DNA, 25 bp, Homo sapien
tccctggcggtctggatcctctttg

SEQ ID NO: 2912434 - DNA, 25 bp, Homo sapien
ggtctggatcctctttggttcccca

SEQ ID NO: 2912435 - DNA, 25 bp, Homo sapien
agctgttgctcaggatgcggacagg

SEQ ID NO: 2912436 - DNA, 25 bp, Homo sapien
ctcaggatgcggacagggcagagtg

SEQ ID NO: 2912437 - DNA, 25 bp, Homo sapien
aacagggacgatgatggagccgtca

SEQ ID NO: 2912438 - DNA, 25 bp, Homo sapien
tgcccaacagggacgatgatggagc

SEQ ID NO: 2912439 - DNA, 25 bp, Homo sapien
tgctccttgcccaacagggacgatg

SEQ ID NO: 2912440 - DNA, 25 bp, Homo sapien
tgatggccaagccatcgtctcgcgc

SEQ ID NO: 2912441 - DNA, 25 bp, Homo sapien
accaaggtattgacgttcttgccga

SEQ ID NO: 2912442 - DNA, 25 bp, Homo sapien
ccttcaccaaggtattgacgttctt

SEQ ID NO: 2912443 - DNA, 25 bp, Homo sapien
ctccatctgggcgttgtaattgatt

SEQ ID NO: 2912444 - DNA, 25 bp, Homo sapien
aattgattcccccagtcttcttcag

SEQ ID NO: 2912445 - DNA, 25 bp, Homo sapien
cgattccaacacctgaccaagatcc

SEQ ID NO: 2912446 - DNA, 25 bp, Homo sapien
gattccaacacctgaccaagatccc

SEQ ID NO: 2912447 - DNA, 25 bp, Homo sapien
agggtgccaagtagccaaccatcca

SEQ ID NO: 2912448 - DNA, 25 bp, Homo sapien
gggtgccaagtagccaaccatccag

SEQ ID NO: 2912449 - DNA, 25 bp, Homo sapien
gtgccaagtagccaaccatccagca

SEQ ID NO: 2912450 - DNA, 25 bp, Homo sapien
aagggtgccaagtagccaaccatcc

SEQ ID NO: 2912451 - DNA, 25 bp, Homo sapien
gtggaaagggcagctattcaaaccc

SEQ ID NO: 2912452 - DNA, 25 bp, Homo sapien
gccatcaggttacacgtggcagcgc

SEQ ID NO: 2912453 - DNA, 25 bp, Homo sapien
gctattcaaaccctgcgagggtgcc

SEQ ID NO: 2912454 - DNA, 25 bp, Homo sapien
aaaggcccctggctgacttgtaggc

SEQ ID NO: 2912455 - DNA, 25 bp, Homo sapien
tagctggcattacattgaggacaca

SEQ ID NO: 2912456 - DNA, 25 bp, Homo sapien
tgtcacctctttcataaacagtgtg

SEQ ID NO: 2912457 - DNA, 25 bp, Homo sapien
tggaccaggacacattatggaacac

SEQ ID NO: 2912458 - DNA, 25 bp, Homo sapien
agaagtaaaactcccagctcataat

SEQ ID NO: 2912459 - DNA, 25 bp, Homo sapien
tgtggtgccagaatcttcgaaaagt

SEQ ID NO: 2912460 - DNA, 25 bp, Homo sapien
gtgactgctgatatgatggagactc

SEQ ID NO: 2912461 - DNA, 25 bp, Homo sapien
tacaaaaagcattaaccgttagaga

SEQ ID NO: 2912462 - DNA, 25 bp, Homo sapien
tgcaggaaaacatacgacagtatct

SEQ ID NO: 2912463 - DNA, 25 bp, Homo sapien
cacacgtggctgtccccatttacca

SEQ ID NO: 2912464 - DNA, 25 bp, Homo sapien
atggcggttccccacacgtggctgt

SEQ ID NO: 2912465 - DNA, 25 bp, Homo sapien
gtgagcatggcggttccccacacgt

SEQ ID NO: 2912466 - DNA, 25 bp, Homo sapien
tgtcacaagcagtccgtgagcatgg

SEQ ID NO: 2912467 - DNA, 25 bp, Homo sapien
tgcagccttctgcagtgagttctgg

SEQ ID NO: 2912468 - DNA, 25 bp, Homo sapien
tgtgcagccttctgcagtgagttct

SEQ ID NO: 2912469 - DNA, 25 bp, Homo sapien
ctgtgcagccttctgcagtgagttc

SEQ ID NO: 2912470 - DNA, 25 bp, Homo sapien
agccttctgcagtgagttctggggc

SEQ ID NO: 2912471 - DNA, 25 bp, Homo sapien
caggtgcagcctcagatgccggagg

SEQ ID NO: 2912472 - DNA, 25 bp, Homo sapien
ggtgcagcctcagatgccggaggca

SEQ ID NO: 2912473 - DNA, 25 bp, Homo sapien
gtgcagcctcagatgccggaggcat

SEQ ID NO: 2912474 - DNA, 25 bp, Homo sapien
gccaggtgcagcctcagatgccgga

SEQ ID NO: 2912475 - DNA, 25 bp, Homo sapien
gaggcgtcagcatgacgctcagccc

SEQ ID NO: 2912476 - DNA, 25 bp, Homo sapien
cactgctcagagataaaggtttcca

SEQ ID NO: 2912477 - DNA, 25 bp, Homo sapien
accatgagccgtgcggccttttcca

SEQ ID NO: 2912478 - DNA, 25 bp, Homo sapien
aaggtttccagaggcgtcagcatga

SEQ ID NO: 2912479 - DNA, 25 bp, Homo sapien
gagctttgacttaagccctgctgca

SEQ ID NO: 2912480 - DNA, 25 bp, Homo sapien
gagctccaccagtgcttgagctttg

SEQ ID NO: 2912481 - DNA, 25 bp, Homo sapien
cacccctgcacgttgtaggtgctta

SEQ ID NO: 2912482 - DNA, 25 bp, Homo sapien
cgcacccctgcacgttgtaggtgct

SEQ ID NO: 2912483 - DNA, 25 bp, Homo sapien
gctccctctcgttggctgtgcctgt

SEQ ID NO: 2912484 - DNA, 25 bp, Homo sapien
tcatctggccaacccacagaagtgg

SEQ ID NO: 2912485 - DNA, 25 bp, Homo sapien
cataggaaaaagactcctgggtccg

SEQ ID NO: 2912486 - DNA, 25 bp, Homo sapien
ggtggagccgggtctgtgctgggct

SEQ ID NO: 2912487 - DNA, 25 bp, Homo sapien
gcctgtccgcgctcgttgctgtgtg

SEQ ID NO: 2912488 - DNA, 25 bp, Homo sapien
tcccggttactatatcaggcaggac

SEQ ID NO: 2912489 - DNA, 25 bp, Homo sapien
cattcatccctttcccggttactat

SEQ ID NO: 2912490 - DNA, 25 bp, Homo sapien
tctgtgatgctccattacaagagca

SEQ ID NO: 2912491 - DNA, 25 bp, Homo sapien
agcacaagtgcactgctgagcacct

SEQ ID NO: 2912492 - DNA, 25 bp, Homo sapien
gagcacctgaaatgtacctgatggg

SEQ ID NO: 2912493 - DNA, 25 bp, Homo sapien
caaagcacaagtgcactgctgagca

SEQ ID NO: 2912494 - DNA, 25 bp, Homo sapien
cacaaagcacaagtgcactgctgag

SEQ ID NO: 2912495 - DNA, 25 bp, Homo sapien
agtggaggagagcagccaagacagg

SEQ ID NO: 2912496 - DNA, 25 bp, Homo sapien
gtggaggagagcagccaagacagga

SEQ ID NO: 2912497 - DNA, 25 bp, Homo sapien
gcgtgacccactgcagatctgcatt

SEQ ID NO: 2912498 - DNA, 25 bp, Homo sapien
gttctctgcaacattccggctccag

SEQ ID NO: 2912499 - DNA, 25 bp, Homo sapien
aagaagccgggtccacccgtgctca

SEQ ID NO: 2912500 - DNA, 25 bp, Homo sapien
cacctgctggtgaccattgggaggc

SEQ ID NO: 2912501 - DNA, 25 bp, Homo sapien
gataggggctcaggcatgctgagga

SEQ ID NO: 2912502 - DNA, 25 bp, Homo sapien
ctcaggcatgctgaggaggtaggtg

SEQ ID NO: 2912503 - DNA, 25 bp, Homo sapien
aaagcgataggggctcaggcatgct

SEQ ID NO: 2912504 - DNA, 25 bp, Homo sapien
ggacatgaatacagcaggtcttgga

SEQ ID NO: 2912505 - DNA, 25 bp, Homo sapien
gaagccatcggtgtcagaccagagt

SEQ ID NO: 2912506 - DNA, 25 bp, Homo sapien
tctctggactcgtggtctgcaagga

SEQ ID NO: 2912507 - DNA, 25 bp, Homo sapien
tggtaacgggcagtggatgagccag

SEQ ID NO: 2912508 - DNA, 25 bp, Homo sapien
gaaataacaatctcgaatccagggc

SEQ ID NO: 2912509 - DNA, 25 bp, Homo sapien
tagctcagtgctaaagggccggagc

SEQ ID NO: 2912510 - DNA, 25 bp, Homo sapien
cactgagtgctcatattggatgaca

SEQ ID NO: 2912511 - DNA, 25 bp, Homo sapien
tgagtgccaggtaaagccatccgtg

SEQ ID NO: 2912512 - DNA, 25 bp, Homo sapien
gccggagcagatgctgagttcactg

SEQ ID NO: 2912513 - DNA, 25 bp, Homo sapien
ggcaccctcgcagggtttgaatagc

SEQ ID NO: 2912514 - DNA, 25 bp, Homo sapien
tcgcagggtttgaatagctgccctt

SEQ ID NO: 2912515 - DNA, 25 bp, Homo sapien
cctcgcagggtttgaatagctgccc

SEQ ID NO: 2912516 - DNA, 25 bp, Homo sapien
caccctcgcagggtttgaatagctg

SEQ ID NO: 2912517 - DNA, 25 bp, Homo sapien
aggagtgctcactcccacatagtca

SEQ ID NO: 2912518 - DNA, 25 bp, Homo sapien
tcccacatagtcacatctctcaccc

SEQ ID NO: 2912519 - DNA, 25 bp, Homo sapien
agtgctcactcccacatagtcacat

SEQ ID NO: 2912520 - DNA, 25 bp, Homo sapien
ggaaggagtgctcactcccacatag

SEQ ID NO: 2912521 - DNA, 25 bp, Homo sapien
tggagctggttctgcggttccccgt

SEQ ID NO: 2912522 - DNA, 25 bp, Homo sapien
gaagcacggcccatatccttgtggc

SEQ ID NO: 2912523 - DNA, 25 bp, Homo sapien
gcaatgtgtcgcagagaaagcccca

SEQ ID NO: 2912524 - DNA, 25 bp, Homo sapien
cacgggcattggctgccagcagttc

SEQ ID NO: 2912525 - DNA, 25 bp, Homo sapien
agtggccgaacaagctggccaggcc

SEQ ID NO: 2912526 - DNA, 25 bp, Homo sapien
gcccagagtggccgaacaagctggc

SEQ ID NO: 2912527 - DNA, 25 bp, Homo sapien
cagagtggccgaacaagctggccag

SEQ ID NO: 2912528 - DNA, 25 bp, Homo sapien
gtggccgaacaagctggccaggccc

SEQ ID NO: 2912529 - DNA, 25 bp, Homo sapien
cgtcaggctggcttgcccagacttg

SEQ ID NO: 2912530 - DNA, 25 bp, Homo sapien
aagctggtggccatgcggtttccgt

SEQ ID NO: 2912531 - DNA, 25 bp, Homo sapien
ggccgtcaggctggcttgcccagac

SEQ ID NO: 2912532 - DNA, 25 bp, Homo sapien
tgcggtttccgtgacaggcactggt

SEQ ID NO: 2912533 - DNA, 25 bp, Homo sapien
cacaggctcctttgacaatgtgaag

SEQ ID NO: 2912534 - DNA, 25 bp, Homo sapien
cggcatgggatttgtctggagccca

SEQ ID NO: 2912535 - DNA, 25 bp, Homo sapien
atggctggcatggtctgctcggcat

SEQ ID NO: 2912536 - DNA, 25 bp, Homo sapien
aattctagacccattactccaatgc

SEQ ID NO: 2912537 - DNA, 25 bp, Homo sapien
tttttcacccaagatgatgccttat

SEQ ID NO: 2912538 - DNA, 25 bp, Homo sapien
ggcaaacactgtgccgtgatgggtt

SEQ ID NO: 2912539 - DNA, 25 bp, Homo sapien
cttatctggcaaacactgtgccgtg

SEQ ID NO: 2912540 - DNA, 25 bp, Homo sapien
cacccaagatgatgccttatctggc

SEQ ID NO: 2912541 - DNA, 25 bp, Homo sapien
gtctccataagtccatttggatttc

SEQ ID NO: 2912542 - DNA, 25 bp, Homo sapien
atagaagcttttggggggccttgtg

SEQ ID NO: 2912543 - DNA, 25 bp, Homo sapien
gtctgtgtctccataagtccatttg

SEQ ID NO: 2912544 - DNA, 25 bp, Homo sapien
tgttgaaacaaaggtgtctgtgtct

SEQ ID NO: 2912545 - DNA, 25 bp, Homo sapien
tcgggggcttcgtggcaccaagggc

SEQ ID NO: 2912546 - DNA, 25 bp, Homo sapien
ggcttcgtggcaccaagggcctacc

SEQ ID NO: 2912547 - DNA, 25 bp, Homo sapien
taccaggcttttcgggaatttagca

SEQ ID NO: 2912548 - DNA, 25 bp, Homo sapien
ggggcttcgtggcaccaagggccta

SEQ ID NO: 2912549 - DNA, 25 bp, Homo sapien
gaccagagtacccattgccacctga

SEQ ID NO: 2912550 - DNA, 25 bp, Homo sapien
gaaaaaggaccagagtacccattgc

SEQ ID NO: 2912551 - DNA, 25 bp, Homo sapien
tgtccaggcggacaagggcagctga

SEQ ID NO: 2912552 - DNA, 25 bp, Homo sapien
gtgaggcgccctaggaagtctgacc

SEQ ID NO: 2912553 - DNA, 25 bp, Homo sapien
cattgtcagcgatggggcaggattc

SEQ ID NO: 2912554 - DNA, 25 bp, Homo sapien
gcagctcattgtcagcgatggggca

SEQ ID NO: 2912555 - DNA, 25 bp, Homo sapien
aggattccttcgcaatggccacacc

SEQ ID NO: 2912556 - DNA, 25 bp, Homo sapien
gggcaggattccttcgcaatggcca

SEQ ID NO: 2912557 - DNA, 25 bp, Homo sapien
gcggttcgctgcacgcgccgaggct

SEQ ID NO: 2912558 - DNA, 25 bp, Homo sapien
ctccttcccggcgggcggttcgctg

SEQ ID NO: 2912559 - DNA, 25 bp, Homo sapien
cgggcccatggacgcggcctcgggc

SEQ ID NO: 2912560 - DNA, 25 bp, Homo sapien
gctgcggcccgcctctcaggctccg

SEQ ID NO: 2912561 - DNA, 25 bp, Homo sapien
tttcctgcacgggttctccttggct

SEQ ID NO: 2912562 - DNA, 25 bp, Homo sapien
tgttgaagatgttggcctggaattt

SEQ ID NO: 2912563 - DNA, 25 bp, Homo sapien
gttgaagatgttggcctggaatttc

SEQ ID NO: 2912564 - DNA, 25 bp, Homo sapien
ctggaatttcctgcacgggttctcc

SEQ ID NO: 2912565 - DNA, 25 bp, Homo sapien
gggagggtaccgaggcacatcccaa

SEQ ID NO: 2912566 - DNA, 25 bp, Homo sapien
gcacatcccaaggaggtgcacacaa

SEQ ID NO: 2912567 - DNA, 25 bp, Homo sapien
gtaccgaggcacatcccaaggaggt

SEQ ID NO: 2912568 - DNA, 25 bp, Homo sapien
ggaggtgcacacaaggctcggaatc

SEQ ID NO: 2912569 - DNA, 25 bp, Homo sapien
tacggctgcctttgtgatgagacgg

SEQ ID NO: 2912570 - DNA, 25 bp, Homo sapien
acagagaccatatagcccacagaca

SEQ ID NO: 2912571 - DNA, 25 bp, Homo sapien
gatgagacggcaaagtctgcacagt

SEQ ID NO: 2912572 - DNA, 25 bp, Homo sapien
cgttaatgtgttgtctacggctgcc

SEQ ID NO: 2912573 - DNA, 25 bp, Homo sapien
gggtttcgctgatgacaacgctgag

SEQ ID NO: 2912574 - DNA, 25 bp, Homo sapien
gaacttctacgaatgtctacaggaa

SEQ ID NO: 2912575 - DNA, 25 bp, Homo sapien
gagatttttgacacgctccctgcca

SEQ ID NO: 2912576 - DNA, 25 bp, Homo sapien
gcttggccgtctgaaatgggatttt

SEQ ID NO: 2912577 - DNA, 25 bp, Homo sapien
ctccccattccatcagcacactact

SEQ ID NO: 2912578 - DNA, 25 bp, Homo sapien
caccacatggggggctcaggaactc

SEQ ID NO: 2912579 - DNA, 25 bp, Homo sapien
atggggggctcaggaactccccatt

SEQ ID NO: 2912580 - DNA, 25 bp, Homo sapien
ggggctcaggaactccccattccat

SEQ ID NO: 2912581 - DNA, 25 bp, Homo sapien
tccttcaacatgagaacattcgtgc

SEQ ID NO: 2912582 - DNA, 25 bp, Homo sapien
tcgtgcatcatatatgtgagctcca

SEQ ID NO: 2912583 - DNA, 25 bp, Homo sapien
tatatcagcggctcttcaaactgtg

SEQ ID NO: 2912584 - DNA, 25 bp, Homo sapien
gtgagctccacgtttcatttcaagg

SEQ ID NO: 2912585 - DNA, 25 bp, Homo sapien
tgaagaaggacccacacctgtaggg

SEQ ID NO: 2912586 - DNA, 25 bp, Homo sapien
aaagcagtgttcacgggagtgctcc

SEQ ID NO: 2912587 - DNA, 25 bp, Homo sapien
taagcagaatgcgtgcaaaccgtgg

SEQ ID NO: 2912588 - DNA, 25 bp, Homo sapien
gcaaagacttctctggaccaaaggt

SEQ ID NO: 2912589 - DNA, 25 bp, Homo sapien
gaagtgtgcaacagaatttctccag

SEQ ID NO: 2912590 - DNA, 25 bp, Homo sapien
actatcaacgcagctggcctgtcct

SEQ ID NO: 2912591 - DNA, 25 bp, Homo sapien
cagcgaggacaaggattcaagatgc

SEQ ID NO: 2912592 - DNA, 25 bp, Homo sapien
gaacggcaccccctggaagtgtgca

SEQ ID NO: 2912593 - DNA, 25 bp, Homo sapien
gcactgaggcgcaagtagacacaag

SEQ ID NO: 2912594 - DNA, 25 bp, Homo sapien
tcactaggacaacgctggtcagcac

SEQ ID NO: 2912595 - DNA, 25 bp, Homo sapien
ccaggagtgagggacgatcagcact

SEQ ID NO: 2912596 - DNA, 25 bp, Homo sapien
catggctgaatccaacttgtacttc

SEQ ID NO: 2912597 - DNA, 25 bp, Homo sapien
catggccctgggtgctgtataccag

SEQ ID NO: 2912598 - DNA, 25 bp, Homo sapien
tgctcaggaaccccgtgtgcatggc

SEQ ID NO: 2912599 - DNA, 25 bp, Homo sapien
acccaggcatcgtcagcaaacctct

SEQ ID NO: 2912600 - DNA, 25 bp, Homo sapien
cgagccctggtctcaacccaggcat

SEQ ID NO: 2912601 - DNA, 25 bp, Homo sapien
cagaggctagcctgccaagccattc

SEQ ID NO: 2912602 - DNA, 25 bp, Homo sapien
gccaaccgccataaatgggttttgc

SEQ ID NO: 2912603 - DNA, 25 bp, Homo sapien
agccaaccgccataaatgggttttg

SEQ ID NO: 2912604 - DNA, 25 bp, Homo sapien
gttgtcaaagtcggtcccatctgga

SEQ ID NO: 2912605 - DNA, 25 bp, Homo sapien
ttgtcaaagtcggtcccatctggag

SEQ ID NO: 2912606 - DNA, 25 bp, Homo sapien
tatccaaggagtgaccaactggcac

SEQ ID NO: 2912607 - DNA, 25 bp, Homo sapien
ccataatgcgagtctgctggcccag

SEQ ID NO: 2912608 - DNA, 25 bp, Homo sapien
tcctcaggagcagaaacaacgtgtg

SEQ ID NO: 2912609 - DNA, 25 bp, Homo sapien
tgtccacggcggtcagatgccatca

SEQ ID NO: 2912610 - DNA, 25 bp, Homo sapien
catctcatccagggcgtagcgcaag

SEQ ID NO: 2912611 - DNA, 25 bp, Homo sapien
catccagggcgtagcgcaagaggcc

SEQ ID NO: 2912612 - DNA, 25 bp, Homo sapien
tctcatccagggcgtagcgcaagag

SEQ ID NO: 2912613 - DNA, 25 bp, Homo sapien
ctcatccagggcgtagcgcaagagg

SEQ ID NO: 2912614 - DNA, 25 bp, Homo sapien
gggagtgggcaaggataacacttac

SEQ ID NO: 2912615 - DNA, 25 bp, Homo sapien
ggacagggagtgggcaaggataaca

SEQ ID NO: 2912616 - DNA, 25 bp, Homo sapien
acagggagtgggcaaggataacact

SEQ ID NO: 2912617 - DNA, 25 bp, Homo sapien
cagggagtgggcaaggataacactt

SEQ ID NO: 2912618 - DNA, 25 bp, Homo sapien
tcactcaagaccacagaagatgatg

SEQ ID NO: 2912619 - DNA, 25 bp, Homo sapien
ttcctctcactcaagaccacagaag

SEQ ID NO: 2912620 - DNA, 25 bp, Homo sapien
ctccagcaggtgccacaagttcttc

SEQ ID NO: 2912621 - DNA, 25 bp, Homo sapien
gctctcacatgacaacgcaagggca

SEQ ID NO: 2912622 - DNA, 25 bp, Homo sapien
aacactcatccagcccaggaagcaa

SEQ ID NO: 2912623 - DNA, 25 bp, Homo sapien
cagcagcaaacactcatccagccca

SEQ ID NO: 2912624 - DNA, 25 bp, Homo sapien
gcctctggggcaacagcagcaaaca

SEQ ID NO: 2912625 - DNA, 25 bp, Homo sapien
ctagttgattttcaggtttggcctc

SEQ ID NO: 2912626 - DNA, 25 bp, Homo sapien
tatgagcttcaccacagaagaggcc

SEQ ID NO: 2912627 - DNA, 25 bp, Homo sapien
tctgtgatgagcgaaaaggcagcca

SEQ ID NO: 2912628 - DNA, 25 bp, Homo sapien
tcaaccgctctgttacggacacagc

SEQ ID NO: 2912629 - DNA, 25 bp, Homo sapien
ccaaagaatcagatgcccgggaggt

SEQ ID NO: 2912630 - DNA, 25 bp, Homo sapien
gtgctccgcatgctctgacaggtgt

SEQ ID NO: 2912631 - DNA, 25 bp, Homo sapien
caaggtgctccgcatgctctgacag

SEQ ID NO: 2912632 - DNA, 25 bp, Homo sapien
atcctcgtggaagttaagggcaagg

SEQ ID NO: 2912633 - DNA, 25 bp, Homo sapien
ctgtagagggagatcctcgtggaag

SEQ ID NO: 2912634 - DNA, 25 bp, Homo sapien
taacaggaaggtaagcgcacgggac

SEQ ID NO: 2912635 - DNA, 25 bp, Homo sapien
tatgtaacaggaaggtaagcgcacg

SEQ ID NO: 2912636 - DNA, 25 bp, Homo sapien
aacaggaaggtaagcgcacgggaca

SEQ ID NO: 2912637 - DNA, 25 bp, Homo sapien
cacttatgtaacaggaaggtaagcg

SEQ ID NO: 2912638 - DNA, 25 bp, Homo sapien
aggagctcagcgcagggtctgatcc

SEQ ID NO: 2912639 - DNA, 25 bp, Homo sapien
gagctcagcgcagggtctgatccca

SEQ ID NO: 2912640 - DNA, 25 bp, Homo sapien
gctcagcgcagggtctgatcccatg

SEQ ID NO: 2912641 - DNA, 25 bp, Homo sapien
tcagcgcagggtctgatcccatggg

SEQ ID NO: 2912642 - DNA, 25 bp, Homo sapien
tcccagcagccgacgagattctaga

SEQ ID NO: 2912643 - DNA, 25 bp, Homo sapien
ccaaggagagtcactgggaagacat

SEQ ID NO: 2912644 - DNA, 25 bp, Homo sapien
aatgggtgaatgaatccaagctccc

SEQ ID NO: 2912645 - DNA, 25 bp, Homo sapien
tcagtgcttatgctccctgcgatgg

SEQ ID NO: 2912646 - DNA, 25 bp, Homo sapien
caaaaggtgcgtgaatgccactact

SEQ ID NO: 2912647 - DNA, 25 bp, Homo sapien
aatgccactacttggcattggaacc

SEQ ID NO: 2912648 - DNA, 25 bp, Homo sapien
ggcaggtggatgaaggcccatcacc

SEQ ID NO: 2912649 - DNA, 25 bp, Homo sapien
tgccagcggtttcctcgcttatcaa

SEQ ID NO: 2912650 - DNA, 25 bp, Homo sapien
cagaggaacccatgcaagctggaag

SEQ ID NO: 2912651 - DNA, 25 bp, Homo sapien
gaaatggcccttgcaggtatgtgag

SEQ ID NO: 2912652 - DNA, 25 bp, Homo sapien
gccatgccagccacaagaaaacgaa

SEQ ID NO: 2912653 - DNA, 25 bp, Homo sapien
taagcgggcataccataggttctca

SEQ ID NO: 2912654 - DNA, 25 bp, Homo sapien
gggctgaggcataggaattcttaaa

SEQ ID NO: 2912655 - DNA, 25 bp, Homo sapien
gaccttgatctatatttgatgccag

SEQ ID NO: 2912656 - DNA, 25 bp, Homo sapien
gaaccactgcctcaaagggagacct

SEQ ID NO: 2912657 - DNA, 25 bp, Homo sapien
gcttctctagtgattctaatgttca

SEQ ID NO: 2912658 - DNA, 25 bp, Homo sapien
ccacgacactgtgcctagaggtttt

SEQ ID NO: 2912659 - DNA, 25 bp, Homo sapien
acatcagtgcagtgcatttgctaca

SEQ ID NO: 2912660 - DNA, 25 bp, Homo sapien
tgtgaaacagggctctcccacgaca

SEQ ID NO: 2912661 - DNA, 25 bp, Homo sapien
caacttgattcaggtggcctcagct

SEQ ID NO: 2912662 - DNA, 25 bp, Homo sapien
gctgcctcggtttaacaggcagaag

SEQ ID NO: 2912663 - DNA, 25 bp, Homo sapien
cgtaacagctgagtcagtccgcagt

SEQ ID NO: 2912664 - DNA, 25 bp, Homo sapien
ttggtaccgcccgtaacagctgagt

SEQ ID NO: 2912665 - DNA, 25 bp, Homo sapien
gagtcagtccgcagttcccacttgg

SEQ ID NO: 2912666 - DNA, 25 bp, Homo sapien
aacagacccttgagagctataccac

SEQ ID NO: 2912667 - DNA, 25 bp, Homo sapien
gctataccactagtgatggactcag

SEQ ID NO: 2912668 - DNA, 25 bp, Homo sapien
tgacctataccccagctacctttct

SEQ ID NO: 2912669 - DNA, 25 bp, Homo sapien
ccttgagagctataccactagtgat

SEQ ID NO: 2912670 - DNA, 25 bp, Homo sapien
ccccttcccagtcgtcaccgccagt

SEQ ID NO: 2912671 - DNA, 25 bp, Homo sapien
agtcgtcaccgccagtcctggtgta

SEQ ID NO: 2912672 - DNA, 25 bp, Homo sapien
cgccagtcctggtgtactccacagt

SEQ ID NO: 2912673 - DNA, 25 bp, Homo sapien
tcctggtgtactccacagtcctcat

SEQ ID NO: 2912674 - DNA, 25 bp, Homo sapien
gtatttatgtactgcttctaaccag

SEQ ID NO: 2912675 - DNA, 25 bp, Homo sapien
gacaggtccaggtacgtactgagga

SEQ ID NO: 2912676 - DNA, 25 bp, Homo sapien
gcttctaaccagcactcttggaaga

SEQ ID NO: 2912677 - DNA, 25 bp, Homo sapien
gtccaggtacgtactgaggacctgc

SEQ ID NO: 2912678 - DNA, 25 bp, Homo sapien
ttcaatggcttttagcatcatgttc

SEQ ID NO: 2912679 - DNA, 25 bp, Homo sapien
acatacaatttacctaaagtgtaca

SEQ ID NO: 2912680 - DNA, 25 bp, Homo sapien
cagttcaatggcttttagcatcatg

SEQ ID NO: 2912681 - DNA, 25 bp, Homo sapien
acaggcgcgaagccaccgcccctgg

SEQ ID NO: 2912682 - DNA, 25 bp, Homo sapien
gggccatagcagagcccagcaaagg

SEQ ID NO: 2912683 - DNA, 25 bp, Homo sapien
cttcccagggccatagcagagccca

SEQ ID NO: 2912684 - DNA, 25 bp, Homo sapien
catagcagagcccagcaaaggctgc

SEQ ID NO: 2912685 - DNA, 25 bp, Homo sapien
agggccatagcagagcccagcaaag

SEQ ID NO: 2912686 - DNA, 25 bp, Homo sapien
ctggttcatgttgatggtgccctga

SEQ ID NO: 2912687 - DNA, 25 bp, Homo sapien
caggcgtcagaatacacagggagaa

SEQ ID NO: 2912688 - DNA, 25 bp, Homo sapien
tctccgcccggatgaaatgctcctt

SEQ ID NO: 2912689 - DNA, 25 bp, Homo sapien
cacatctgtgcactggttcatgttg

SEQ ID NO: 2912690 - DNA, 25 bp, Homo sapien
ttagggaccagctttgatgtgacca

SEQ ID NO: 2912691 - DNA, 25 bp, Homo sapien
ttcttagggaccagctttgatgtga

SEQ ID NO: 2912692 - DNA, 25 bp, Homo sapien
ctcccagctgcctggtggaagtgtc

SEQ ID NO: 2912693 - DNA, 25 bp, Homo sapien
cctggtggaagtgtctgcaccttct

SEQ ID NO: 2912694 - DNA, 25 bp, Homo sapien
caggtcttctttcagcaccagggtc

SEQ ID NO: 2912695 - DNA, 25 bp, Homo sapien
agggtccacgctgggcctgctggca

SEQ ID NO: 2912696 - DNA, 25 bp, Homo sapien
gctccaggtcttctttcagcaccag

SEQ ID NO: 2912697 - DNA, 25 bp, Homo sapien
tgggggggtctgtactgctgtatcc

SEQ ID NO: 2912698 - DNA, 25 bp, Homo sapien
cggggatagaccatgagcatctcca

SEQ ID NO: 2912699 - DNA, 25 bp, Homo sapien
ttggtccggggatagaccatgagca

SEQ ID NO: 2912700 - DNA, 25 bp, Homo sapien
ctgattctgcttgttggtccgggga

SEQ ID NO: 2912701 - DNA, 25 bp, Homo sapien
tctgcttgttggtccggggatagac

SEQ ID NO: 2912702 - DNA, 25 bp, Homo sapien
caggagggccaatacagcagcccag

SEQ ID NO: 2912703 - DNA, 25 bp, Homo sapien
cccagggcaggtatatccaagggca

SEQ ID NO: 2912704 - DNA, 25 bp, Homo sapien
ggcaggtatatccaagggcagccca

SEQ ID NO: 2912705 - DNA, 25 bp, Homo sapien
gcaggagggccaatacagcagccca

SEQ ID NO: 2912706 - DNA, 25 bp, Homo sapien
cacaagttgctctagagccttgctt

SEQ ID NO: 2912707 - DNA, 25 bp, Homo sapien
gcttccccaaagcacaagttgctct

SEQ ID NO: 2912708 - DNA, 25 bp, Homo sapien
tgggaaaccagcagctgtgctgccc

SEQ ID NO: 2912709 - DNA, 25 bp, Homo sapien
caaagcacaagttgctctagagcct

SEQ ID NO: 2912710 - DNA, 25 bp, Homo sapien
agctgttggcacttttgcaaggatt

SEQ ID NO: 2912711 - DNA, 25 bp, Homo sapien
gcatgggggtctgagtgtttccacc

SEQ ID NO: 2912712 - DNA, 25 bp, Homo sapien
aggccgcaggcgctgacagaagagg

SEQ ID NO: 2912713 - DNA, 25 bp, Homo sapien
tggcacttttgcaaggattccaggc

SEQ ID NO: 2912714 - DNA, 25 bp, Homo sapien
gctggtaacagccaccttggcaggc

SEQ ID NO: 2912715 - DNA, 25 bp, Homo sapien
tggtaacagccaccttggcaggccc

SEQ ID NO: 2912716 - DNA, 25 bp, Homo sapien
tgctgctggtaacagccaccttggc

SEQ ID NO: 2912717 - DNA, 25 bp, Homo sapien
gctgctgctggtaacagccaccttg

SEQ ID NO: 2912718 - DNA, 25 bp, Homo sapien
ctgccagagtgtggacttggtggtg

SEQ ID NO: 2912719 - DNA, 25 bp, Homo sapien
tctagcccaggttcccgcagggagc

SEQ ID NO: 2912720 - DNA, 25 bp, Homo sapien
ttctttgctctctagcccaggttcc

SEQ ID NO: 2912721 - DNA, 25 bp, Homo sapien
ctctggctgggactctgagctggac

SEQ ID NO: 2912722 - DNA, 25 bp, Homo sapien
ctggctggtccttggtcctcatttc

SEQ ID NO: 2912723 - DNA, 25 bp, Homo sapien
ggctctacaggccttggctgaatcc

SEQ ID NO: 2912724 - DNA, 25 bp, Homo sapien
gaatcgaggtccaggcttgcgactg

SEQ ID NO: 2912725 - DNA, 25 bp, Homo sapien
ctgatggacaaagggaatcgaggtc

SEQ ID NO: 2912726 - DNA, 25 bp, Homo sapien
caggcttgcgactgggctctacagg

SEQ ID NO: 2912727 - DNA, 25 bp, Homo sapien
ggccacagtccatgcggtcgctact

SEQ ID NO: 2912728 - DNA, 25 bp, Homo sapien
tgcggtcgctactcatggcgctctc

SEQ ID NO: 2912729 - DNA, 25 bp, Homo sapien
ggactttgcggccacagtccatgcg

SEQ ID NO: 2912730 - DNA, 25 bp, Homo sapien
tccatgcggtcgctactcatggcgc

SEQ ID NO: 2912731 - DNA, 25 bp, Homo sapien
aggaagaggaccaccgagctcctgg

SEQ ID NO: 2912732 - DNA, 25 bp, Homo sapien
gaagaggaccaccgagctcctggga

SEQ ID NO: 2912733 - DNA, 25 bp, Homo sapien
tgcagaccatttggtgggggagtcg

SEQ ID NO: 2912734 - DNA, 25 bp, Homo sapien
ccgagctcctgggagggcgactcgg

SEQ ID NO: 2912735 - DNA, 25 bp, Homo sapien
cgtcggccagggtggcatattgcct

SEQ ID NO: 2912736 - DNA, 25 bp, Homo sapien
catattgcctgctggctttaaaggc

SEQ ID NO: 2912737 - DNA, 25 bp, Homo sapien
ctgatggccttagggacgtcggcca

SEQ ID NO: 2912738 - DNA, 25 bp, Homo sapien
aaggcttctcggtggctgatcctga

SEQ ID NO: 2912739 - DNA, 25 bp, Homo sapien
ggttcccagggcactaaccgctgtg

SEQ ID NO: 2912740 - DNA, 25 bp, Homo sapien
agctgcaagaagtcaccctggtggg

SEQ ID NO: 2912741 - DNA, 25 bp, Homo sapien
tgtctacggccggagacggagctta

SEQ ID NO: 2912742 - DNA, 25 bp, Homo sapien
tttcatgtgaaagggctggcggcct

SEQ ID NO: 2912743 - DNA, 25 bp, Homo sapien
ctctggacaagaggataagaaccca

SEQ ID NO: 2912744 - DNA, 25 bp, Homo sapien
ctgcattggtctccatgtgctctgc

SEQ ID NO: 2912745 - DNA, 25 bp, Homo sapien
aatgtccaaggcctcaaacttttca

SEQ ID NO: 2912746 - DNA, 25 bp, Homo sapien
gagggccccactgcattggtctcca

SEQ ID NO: 2912747 - DNA, 25 bp, Homo sapien
caaggcctcaaacttttcaatcacc

SEQ ID NO: 2912748 - DNA, 25 bp, Homo sapien
cttcagcagagacggagaaggctct

SEQ ID NO: 2912749 - DNA, 25 bp, Homo sapien
gagagtgatcctaattaaatctggg

SEQ ID NO: 2912750 - DNA, 25 bp, Homo sapien
gctctgatatgaagctgcaggagac

SEQ ID NO: 2912751 - DNA, 25 bp, Homo sapien
taggaaggtgtgacattcagccttg

SEQ ID NO: 2912752 - DNA, 25 bp, Homo sapien
tggagaaacgaggggtgtagttgta

SEQ ID NO: 2912753 - DNA, 25 bp, Homo sapien
agtggagaaacgaggggtgtagttg

SEQ ID NO: 2912754 - DNA, 25 bp, Homo sapien
ggctgagtggagaaacgaggggtgt

SEQ ID NO: 2912755 - DNA, 25 bp, Homo sapien
tgagtggagaaacgaggggtgtagt

SEQ ID NO: 2912756 - DNA, 25 bp, Homo sapien
aggagaagatgagcttagacttggc

SEQ ID NO: 2912757 - DNA, 25 bp, Homo sapien
ggaggatttcagaagccgagtctac

SEQ ID NO: 2912758 - DNA, 25 bp, Homo sapien
gacttggccggctacaaaagcagca

SEQ ID NO: 2912759 - DNA, 25 bp, Homo sapien
gagcttagacttggccggctacaaa

SEQ ID NO: 2912760 - DNA, 25 bp, Homo sapien
gggggaagccgaggcgtctgggaga

SEQ ID NO: 2912761 - DNA, 25 bp, Homo sapien
aagccgaggcgtctgggagaggagc

SEQ ID NO: 2912762 - DNA, 25 bp, Homo sapien
cagtgacttggctcttcggtgtgga

SEQ ID NO: 2912763 - DNA, 25 bp, Homo sapien
tgacttggctcttcggtgtggagac

SEQ ID NO: 2912764 - DNA, 25 bp, Homo sapien
tgcttagtcagccagcctttcttga

SEQ ID NO: 2912765 - DNA, 25 bp, Homo sapien
tggccgtcctcatactgcttagtca

SEQ ID NO: 2912766 - DNA, 25 bp, Homo sapien
ctttcttgaaattcagcaggtcggg

SEQ ID NO: 2912767 - DNA, 25 bp, Homo sapien
cttagtcagccagcctttcttgaaa

SEQ ID NO: 2912768 - DNA, 25 bp, Homo sapien
tctcaggctttgatcggcgaggaca

SEQ ID NO: 2912769 - DNA, 25 bp, Homo sapien
tcaggctttgatcggcgaggacaaa

SEQ ID NO: 2912770 - DNA, 25 bp, Homo sapien
tccctgtagtatctcaggctttgat

SEQ ID NO: 2912771 - DNA, 25 bp, Homo sapien
cactgaatccctgtagtatctcagg

SEQ ID NO: 2912772 - DNA, 25 bp, Homo sapien
gaagcagatctactagccccagatg

SEQ ID NO: 2912773 - DNA, 25 bp, Homo sapien
cttcggcaaggtaacaccaccgaag

SEQ ID NO: 2912774 - DNA, 25 bp, Homo sapien
ccgaagggcgctgtcctcagaagtg

SEQ ID NO: 2912775 - DNA, 25 bp, Homo sapien
gcagatctactagccccagatgccg

SEQ ID NO: 2912776 - DNA, 25 bp, Homo sapien
tctacagaccacactcggaagtgct

SEQ ID NO: 2912777 - DNA, 25 bp, Homo sapien
taaacgtggtgctccaaaagaagct

SEQ ID NO: 2912778 - DNA, 25 bp, Homo sapien
cacactctagtatgcagccaggcga

SEQ ID NO: 2912779 - DNA, 25 bp, Homo sapien
cactggtccagcctgttgctacaga

SEQ ID NO: 2912780 - DNA, 25 bp, Homo sapien
tgaactggatactctgtgacatcgt

SEQ ID NO: 2912781 - DNA, 25 bp, Homo sapien
actggatactctgtgacatcgtaac

SEQ ID NO: 2912782 - DNA, 25 bp, Homo sapien
tggatactctgtgacatcgtaacat

SEQ ID NO: 2912783 - DNA, 25 bp, Homo sapien
gatactctgtgacatcgtaacatgc

SEQ ID NO: 2912784 - DNA, 25 bp, Homo sapien
cagttccgccgaatcccagatgtca

SEQ ID NO: 2912785 - DNA, 25 bp, Homo sapien
gtctggatccagttccgccgaatcc

SEQ ID NO: 2912786 - DNA, 25 bp, Homo sapien
ggtctggatccagttccgccgaatc

SEQ ID NO: 2912787 - DNA, 25 bp, Homo sapien
gatccagttccgccgaatcccagat

SEQ ID NO: 2912788 - DNA, 25 bp, Homo sapien
gaaggccaagacaaagaagcactgg

SEQ ID NO: 2912789 - DNA, 25 bp, Homo sapien
tgcacagaaatcaaacagacgtagg

SEQ ID NO: 2912790 - DNA, 25 bp, Homo sapien
taggtctttaaccttcagggcagga

SEQ ID NO: 2912791 - DNA, 25 bp, Homo sapien
cactgggtggcctatggatgccgca

SEQ ID NO: 2912792 - DNA, 25 bp, Homo sapien
agcggcagccagcaacgggacatga

SEQ ID NO: 2912793 - DNA, 25 bp, Homo sapien
ctgcgcaggtcgtgctcatggtgct

SEQ ID NO: 2912794 - DNA, 25 bp, Homo sapien
ccttgagcaggcaagcggcagccag

SEQ ID NO: 2912795 - DNA, 25 bp, Homo sapien
cagcaacgggacatgagctgcgcag

SEQ ID NO: 2912796 - DNA, 25 bp, Homo sapien
tgacagatggatcagtatgaaagac

SEQ ID NO: 2912797 - DNA, 25 bp, Homo sapien
catgacagatggatcagtatgaaag

SEQ ID NO: 2912798 - DNA, 25 bp, Homo sapien
atgacagatggatcagtatgaaaga

SEQ ID NO: 2912799 - DNA, 25 bp, Homo sapien
tgcttctcagtaggcctcgggcagg

SEQ ID NO: 2912800 - DNA, 25 bp, Homo sapien
tcttgcttctcagtaggcctcgggc

SEQ ID NO: 2912801 - DNA, 25 bp, Homo sapien
taggcctcgggcaggtctcaaaaga

SEQ ID NO: 2912802 - DNA, 25 bp, Homo sapien
ctcagtaggcctcgggcaggtctca

SEQ ID NO: 2912803 - DNA, 25 bp, Homo sapien
cctgctggatgggacggaactcagc

SEQ ID NO: 2912804 - DNA, 25 bp, Homo sapien
ctggcccgtctgtggcgtcgagcat

SEQ ID NO: 2912805 - DNA, 25 bp, Homo sapien
caatctccacgtggacgttatgcgt

SEQ ID NO: 2912806 - DNA, 25 bp, Homo sapien
ttgaggtcgctcataggcagccctg

SEQ ID NO: 2912807 - DNA, 25 bp, Homo sapien
gcagagaggtcagctcgtgtgtgga

SEQ ID NO: 2912808 - DNA, 25 bp, Homo sapien
catcttcagaagacaggtggacggg

SEQ ID NO: 2912809 - DNA, 25 bp, Homo sapien
ccccatcttcagaagacaggtggac

SEQ ID NO: 2912810 - DNA, 25 bp, Homo sapien
gtcacccccatcttcagaagacagg

SEQ ID NO: 2912811 - DNA, 25 bp, Homo sapien
gatgagaagcttgaggcatacccaa

SEQ ID NO: 2912812 - DNA, 25 bp, Homo sapien
gggccagcttgttcatctatgtacc

SEQ ID NO: 2912813 - DNA, 25 bp, Homo sapien
tggtggtaactcagcctcatacagt

SEQ ID NO: 2912814 - DNA, 25 bp, Homo sapien
tgttgaaaactgtccctaaatggag

SEQ ID NO: 2912815 - DNA, 25 bp, Homo sapien
tgcaggagccggttctgctccagaa

SEQ ID NO: 2912816 - DNA, 25 bp, Homo sapien
tgctccagaaggtctgaggcctcct

SEQ ID NO: 2912817 - DNA, 25 bp, Homo sapien
ttctgctccagaaggtctgaggcct

SEQ ID NO: 2912818 - DNA, 25 bp, Homo sapien
gagccggttctgctccagaaggtct

SEQ ID NO: 2912819 - DNA, 25 bp, Homo sapien
gtagccctcacgggcgctctgctcc

SEQ ID NO: 2912820 - DNA, 25 bp, Homo sapien
ccctcacgggcgctctgctcccggc

SEQ ID NO: 2912821 - DNA, 25 bp, Homo sapien
agccctcacgggcgctctgctcccg

SEQ ID NO: 2912822 - DNA, 25 bp, Homo sapien
ctcacgggcgctctgctcccggccc

SEQ ID NO: 2912823 - DNA, 25 bp, Homo sapien
gcctgccaggtgtggtatagaaaca

SEQ ID NO: 2912824 - DNA, 25 bp, Homo sapien
tgagcatgaacccttcacactgaag

SEQ ID NO: 2912825 - DNA, 25 bp, Homo sapien
ctagtagtggtaagagccccagctc

SEQ ID NO: 2912826 - DNA, 25 bp, Homo sapien
tgttggttgtaagcaggcactggac

SEQ ID NO: 2912827 - DNA, 25 bp, Homo sapien
aaagactaaaggacaagagagcgcc

SEQ ID NO: 2912828 - DNA, 25 bp, Homo sapien
taaacaagcgcaggacacaaggtgt

SEQ ID NO: 2912829 - DNA, 25 bp, Homo sapien
tgagtgtcacacctctggccaggaa

SEQ ID NO: 2912830 - DNA, 25 bp, Homo sapien
tactggttagtaacactcgggcctc

SEQ ID NO: 2912831 - DNA, 25 bp, Homo sapien
cacccgatggggaggcggccacttc

SEQ ID NO: 2912832 - DNA, 25 bp, Homo sapien
ggcacccgatggggaggcggccact

SEQ ID NO: 2912833 - DNA, 25 bp, Homo sapien
ccgatggggaggcggccacttcagt

SEQ ID NO: 2912834 - DNA, 25 bp, Homo sapien
acccgatggggaggcggccacttca

SEQ ID NO: 2912835 - DNA, 25 bp, Homo sapien
ttcaggtcgcccttgagcttggcca

SEQ ID NO: 2912836 - DNA, 25 bp, Homo sapien
tgctcactgccctcgaaagtggcgc

SEQ ID NO: 2912837 - DNA, 25 bp, Homo sapien
ccatagctacgcttcagggtctgaa

SEQ ID NO: 2912838 - DNA, 25 bp, Homo sapien
ttgatggctagctcagcggccgcat

SEQ ID NO: 2912839 - DNA, 25 bp, Homo sapien
tcatcctcgagccttgtgtgtggga

SEQ ID NO: 2912840 - DNA, 25 bp, Homo sapien
cctagtggcttggactggttggcct

SEQ ID NO: 2912841 - DNA, 25 bp, Homo sapien
cccttggtcgagtttggctgtgccc

SEQ ID NO: 2912842 - DNA, 25 bp, Homo sapien
cctgggagcaaagtgccatcccttt

SEQ ID NO: 2912843 - DNA, 25 bp, Homo sapien
tacgtgtcagagtcgccagttgcag

SEQ ID NO: 2912844 - DNA, 25 bp, Homo sapien
gggcctgactattcttgacctggaa

SEQ ID NO: 2912845 - DNA, 25 bp, Homo sapien
cagttgcaggcagtacactgggtgc

SEQ ID NO: 2912846 - DNA, 25 bp, Homo sapien
cttggatggcgctgacgagtgcact

SEQ ID NO: 2912847 - DNA, 25 bp, Homo sapien
gtctccagctgtgcacgggccccgc

SEQ ID NO: 2912848 - DNA, 25 bp, Homo sapien
ctctgtcaactcagactgggagcac

SEQ ID NO: 2912849 - DNA, 25 bp, Homo sapien
ctgtctccagctgtgcacgggcccc

SEQ ID NO: 2912850 - DNA, 25 bp, Homo sapien
tccagctgtgcacgggccccgccat

SEQ ID NO: 2912851 - DNA, 25 bp, Homo sapien
tctggtcagacacatcgaagggctc

SEQ ID NO: 2912852 - DNA, 25 bp, Homo sapien
aatgaagaatactgaccgaggcctc

SEQ ID NO: 2912853 - DNA, 25 bp, Homo sapien
tctctcagcgattccacaggtggca

SEQ ID NO: 2912854 - DNA, 25 bp, Homo sapien
tattctagccggattctgcaggacg

SEQ ID NO: 2912855 - DNA, 25 bp, Homo sapien
gcacctcaggctctgcgagtagtgc

SEQ ID NO: 2912856 - DNA, 25 bp, Homo sapien
aggctctgcgagtagtgctcctgca

SEQ ID NO: 2912857 - DNA, 25 bp, Homo sapien
acctcaggctctgcgagtagtgctc

SEQ ID NO: 2912858 - DNA, 25 bp, Homo sapien
tctgcgagtagtgctcctgcagggt

SEQ ID NO: 2912859 - DNA, 25 bp, Homo sapien
agtgtggccgcgtcgccctccaggt

SEQ ID NO: 2912860 - DNA, 25 bp, Homo sapien
tccaggtccttgtgtcccagctcct

SEQ ID NO: 2912861 - DNA, 25 bp, Homo sapien
tcccgcatgacatccatctgggcct

SEQ ID NO: 2912862 - DNA, 25 bp, Homo sapien
ctcagccccgtcatggagtcagcct

SEQ ID NO: 2912863 - DNA, 25 bp, Homo sapien
ttaaggctctccaagtccctctggt

SEQ ID NO: 2912864 - DNA, 25 bp, Homo sapien
tctccaagtccctctggtacttctc

SEQ ID NO: 2912865 - DNA, 25 bp, Homo sapien
aaggctctccaagtccctctggtac

SEQ ID NO: 2912866 - DNA, 25 bp, Homo sapien
tccaagtccctctggtacttctcac

SEQ ID NO: 2912867 - DNA, 25 bp, Homo sapien
agatctgctctgcaaattgaatggg

SEQ ID NO: 2912868 - DNA, 25 bp, Homo sapien
gaagatctgctctgcaaattgaatg

SEQ ID NO: 2912869 - DNA, 25 bp, Homo sapien
aggaagatctgctctgcaaattgaa

SEQ ID NO: 2912870 - DNA, 25 bp, Homo sapien
tgcaaattgaatggggcgttaagac

SEQ ID NO: 2912871 - DNA, 25 bp, Homo sapien
ggccgagtccgtcacacagaggtga

SEQ ID NO: 2912872 - DNA, 25 bp, Homo sapien
tcagagctacaggagtaacgggctg

SEQ ID NO: 2912873 - DNA, 25 bp, Homo sapien
tgccacatgagcgtggaaggcacca

SEQ ID NO: 2912874 - DNA, 25 bp, Homo sapien
gcaccacctgaacatggcttttgag

SEQ ID NO: 2912875 - DNA, 25 bp, Homo sapien
gggacactatgcaacggcagctaag

SEQ ID NO: 2912876 - DNA, 25 bp, Homo sapien
cagggaagggcactagcaagcgtat

SEQ ID NO: 2912877 - DNA, 25 bp, Homo sapien
cagaggacggctgttaggccaagac

SEQ ID NO: 2912878 - DNA, 25 bp, Homo sapien
taacctaaagcagcctcggtgtgga

SEQ ID NO: 2912879 - DNA, 25 bp, Homo sapien
tatatatgctgctaaaacgagcaca

SEQ ID NO: 2912880 - DNA, 25 bp, Homo sapien
atccttgtaaaggggccatactaat

SEQ ID NO: 2912881 - DNA, 25 bp, Homo sapien
agtatatatgctgctaaaacgagca

SEQ ID NO: 2912882 - DNA, 25 bp, Homo sapien
gtcatccttgtaaaggggccatact

SEQ ID NO: 2912883 - DNA, 25 bp, Homo sapien
accatgggcgccctgaacaggatcc

SEQ ID NO: 2912884 - DNA, 25 bp, Homo sapien
aggaatcccaccctgtccaggccca

SEQ ID NO: 2912885 - DNA, 25 bp, Homo sapien
tgggcgccctgaacaggatccctgg

SEQ ID NO: 2912886 - DNA, 25 bp, Homo sapien
tccaccatgggcgccctgaacagga

SEQ ID NO: 2912887 - DNA, 25 bp, Homo sapien
ctgcaaaccctcgctcgcacgtggc

SEQ ID NO: 2912888 - DNA, 25 bp, Homo sapien
gctgcaaaccctcgctcgcacgtgg

SEQ ID NO: 2912889 - DNA, 25 bp, Homo sapien
tgctgcaaaccctcgctcgcacgtg

SEQ ID NO: 2912890 - DNA, 25 bp, Homo sapien
gtttctctagctcccgctggtgctg

SEQ ID NO: 2912891 - DNA, 25 bp, Homo sapien
ctgagatggtggccgctgtctcctc

SEQ ID NO: 2912892 - DNA, 25 bp, Homo sapien
gcctctggagatcttcaatcttctt

SEQ ID NO: 2912893 - DNA, 25 bp, Homo sapien
caatcttcttctggtgcgtttcttc

SEQ ID NO: 2912894 - DNA, 25 bp, Homo sapien
caaggacacggcctcagcaccgagg

SEQ ID NO: 2912895 - DNA, 25 bp, Homo sapien
ctgcaggcaaggacacggcctcagc

SEQ ID NO: 2912896 - DNA, 25 bp, Homo sapien
cctcagcaccgagggaccacgccct

SEQ ID NO: 2912897 - DNA, 25 bp, Homo sapien
acggcctcagcaccgagggaccacg

SEQ ID NO: 2912898 - DNA, 25 bp, Homo sapien
atctgggaccgctggctcttctcca

SEQ ID NO: 2912899 - DNA, 25 bp, Homo sapien
aacatccgagttgacgctgctgatc

SEQ ID NO: 2912900 - DNA, 25 bp, Homo sapien
tcccggtgggcgttcttcatggctt

SEQ ID NO: 2912901 - DNA, 25 bp, Homo sapien
agggcctcaacatccgagttgacgc

SEQ ID NO: 2912902 - DNA, 25 bp, Homo sapien
gctcctggttctcacgctggcactg

SEQ ID NO: 2912903 - DNA, 25 bp, Homo sapien
cagatgggcattctccaggcacttc

SEQ ID NO: 2912904 - DNA, 25 bp, Homo sapien
gagtactgctccgagaggacctcca

SEQ ID NO: 2912905 - DNA, 25 bp, Homo sapien
ccagttcccgctgcaccgactgcag

SEQ ID NO: 2912906 - DNA, 25 bp, Homo sapien
cttcccagtagatgggactataggc

SEQ ID NO: 2912907 - DNA, 25 bp, Homo sapien
cccaccaccacacccagctaatttt

SEQ ID NO: 2912908 - DNA, 25 bp, Homo sapien
ttcccagtagatgggactataggcg

SEQ ID NO: 2912909 - DNA, 25 bp, Homo sapien
cagtcagcagcgtccgcaaccgtgt

SEQ ID NO: 2912910 - DNA, 25 bp, Homo sapien
gcgtccgcaaccgtgtgatctctgc

SEQ ID NO: 2912911 - DNA, 25 bp, Homo sapien
tgccctgtgcaaggggtgacccagt

SEQ ID NO: 2912912 - DNA, 25 bp, Homo sapien
agcagcgtccgcaaccgtgtgatct

SEQ ID NO: 2912913 - DNA, 25 bp, Homo sapien
tgtatttccgattcctttacccgca

SEQ ID NO: 2912914 - DNA, 25 bp, Homo sapien
tccgattcctttacccgcaataaga

SEQ ID NO: 2912915 - DNA, 25 bp, Homo sapien
agggagctaatctcctgtttcaggt

SEQ ID NO: 2912916 - DNA, 25 bp, Homo sapien
gagggagctaatctcctgtttcagg

SEQ ID NO: 2912917 - DNA, 25 bp, Homo sapien
gggagctaatctcctgtttcaggta

SEQ ID NO: 2912918 - DNA, 25 bp, Homo sapien
ggaaagaggagcacatacaacatgg

SEQ ID NO: 2912919 - DNA, 25 bp, Homo sapien
gaggcttgctgtgggcggaagagga

SEQ ID NO: 2912920 - DNA, 25 bp, Homo sapien
actgaacacggtagggaggcttgct

SEQ ID NO: 2912921 - DNA, 25 bp, Homo sapien
gaatggtagttacatccaggaaaga

SEQ ID NO: 2912922 - DNA, 25 bp, Homo sapien
cctgctgatgtcacagtcagcctta

SEQ ID NO: 2912923 - DNA, 25 bp, Homo sapien
tgctgatgtcacagtcagccttagc

SEQ ID NO: 2912924 - DNA, 25 bp, Homo sapien
gcgatgctgagctctgtgtagatgt

SEQ ID NO: 2912925 - DNA, 25 bp, Homo sapien
tgatgtcacagtcagccttagcctt

SEQ ID NO: 2912926 - DNA, 25 bp, Homo sapien
atcccctactcgcaggaggtcacca

SEQ ID NO: 2912927 - DNA, 25 bp, Homo sapien
gtgtgtgactgcctagaactcctgg

SEQ ID NO: 2912928 - DNA, 25 bp, Homo sapien
ctttgtgtgtgactgcctagaactc

SEQ ID NO: 2912929 - DNA, 25 bp, Homo sapien
ggacacctgatcgacttagctttgt

SEQ ID NO: 2912930 - DNA, 25 bp, Homo sapien
ggtgacacaggatctgtctttcttc

SEQ ID NO: 2912931 - DNA, 25 bp, Homo sapien
tgacacaggatctgtctttcttcaa

SEQ ID NO: 2912932 - DNA, 25 bp, Homo sapien
ttcttcaagaagtcagggttgcttt

SEQ ID NO: 2912933 - DNA, 25 bp, Homo sapien
tcagggttgcttttagatttcatta

SEQ ID NO: 2912934 - DNA, 25 bp, Homo sapien
ggagctgatcatgccaagcactgct

SEQ ID NO: 2912935 - DNA, 25 bp, Homo sapien
atcatctcttggaggcggcaccagt

SEQ ID NO: 2912936 - DNA, 25 bp, Homo sapien
gggagcactcatacttcaatttggg

SEQ ID NO: 2912937 - DNA, 25 bp, Homo sapien
caacagtgatgtgcaaggaacaaca

SEQ ID NO: 2912938 - DNA, 25 bp, Homo sapien
atcccacgagacctgctcaattacg

SEQ ID NO: 2912939 - DNA, 25 bp, Homo sapien
ggtatcccacgagacctgctcaatt

SEQ ID NO: 2912940 - DNA, 25 bp, Homo sapien
gtatcccacgagacctgctcaatta

SEQ ID NO: 2912941 - DNA, 25 bp, Homo sapien
cccacgagacctgctcaattacgga

SEQ ID NO: 2912942 - DNA, 25 bp, Homo sapien
tgcatgggccgggaagcgggtgcat

SEQ ID NO: 2912943 - DNA, 25 bp, Homo sapien
gcatgggccgggaagcgggtgcatt

SEQ ID NO: 2912944 - DNA, 25 bp, Homo sapien
taaattccacctcgtgacagagggc

SEQ ID NO: 2912945 - DNA, 25 bp, Homo sapien
actaagtggctcactaggtgggcga

SEQ ID NO: 2912946 - DNA, 25 bp, Homo sapien
tgagttcagccgttgtgcacagatt

SEQ ID NO: 2912947 - DNA, 25 bp, Homo sapien
gacggtagacttcacttgccagtgt

SEQ ID NO: 2912948 - DNA, 25 bp, Homo sapien
cattcctagaatgaccaccctgtta

SEQ ID NO: 2912949 - DNA, 25 bp, Homo sapien
gcttgtagttatcacgctcttctga

SEQ ID NO: 2912950 - DNA, 25 bp, Homo sapien
tagtcctggtttatccattcctaga

SEQ ID NO: 2912951 - DNA, 25 bp, Homo sapien
tctgaaccatcttcaccaagctcta

SEQ ID NO: 2912952 - DNA, 25 bp, Homo sapien
cattccgggatgaacgagatcaagc

SEQ ID NO: 2912953 - DNA, 25 bp, Homo sapien
tgttgcaccacagacatctaggaag

SEQ ID NO: 2912954 - DNA, 25 bp, Homo sapien
ttattacggaaacccagccaagcca

SEQ ID NO: 2912955 - DNA, 25 bp, Homo sapien
gagatcaagctactgagccggcaac

SEQ ID NO: 2912956 - DNA, 25 bp, Homo sapien
tagcagctgagacttgcggtccttt

SEQ ID NO: 2912957 - DNA, 25 bp, Homo sapien
tgtgctgctcctaagcaacttgctg

SEQ ID NO: 2912958 - DNA, 25 bp, Homo sapien
taagaaccccgagggaagcattctc

SEQ ID NO: 2912959 - DNA, 25 bp, Homo sapien
cctttcgagcgaggcaggacagaaa

SEQ ID NO: 2912960 - DNA, 25 bp, Homo sapien
tctctctacgtcctctggattctct

SEQ ID NO: 2912961 - DNA, 25 bp, Homo sapien
tacgtcctctggattctctcccggt

SEQ ID NO: 2912962 - DNA, 25 bp, Homo sapien
gattctctcccggtggctgctcagc

SEQ ID NO: 2912963 - DNA, 25 bp, Homo sapien
gctgtttctctctctacgtcctctg

SEQ ID NO: 2912964 - DNA, 25 bp, Homo sapien
gatgtgggaacacgccaacgtatct

SEQ ID NO: 2912965 - DNA, 25 bp, Homo sapien
gaagtcgccagcttaggctcaggca

SEQ ID NO: 2912966 - DNA, 25 bp, Homo sapien
aatgaagggcattccagtactgact

SEQ ID NO: 2912967 - DNA, 25 bp, Homo sapien
tgagcaacgtgaaactgcaggctgt

SEQ ID NO: 2912968 - DNA, 25 bp, Homo sapien
cttcaaccgttcttgcaccgtcagg

SEQ ID NO: 2912969 - DNA, 25 bp, Homo sapien
gcaccgtcaggccttccttcagact

SEQ ID NO: 2912970 - DNA, 25 bp, Homo sapien
aaccgttcttgcaccgtcaggcctt

SEQ ID NO: 2912971 - DNA, 25 bp, Homo sapien
gttcttgcaccgtcaggccttcctt

SEQ ID NO: 2912972 - DNA, 25 bp, Homo sapien
ctagtctttcttcaagtccctggat

SEQ ID NO: 2912973 - DNA, 25 bp, Homo sapien
gtctttcttcaagtccctggattca

SEQ ID NO: 2912974 - DNA, 25 bp, Homo sapien
ttcttcaagtccctggattcaaaga

SEQ ID NO: 2912975 - DNA, 25 bp, Homo sapien
ctttcttcaagtccctggattcaaa

SEQ ID NO: 2912976 - DNA, 25 bp, Homo sapien
gggaaggcgcgtgctcaacttggat

SEQ ID NO: 2912977 - DNA, 25 bp, Homo sapien
aaacaaaggtacaggtgaaaagcag

SEQ ID NO: 2912978 - DNA, 25 bp, Homo sapien
ttccatgcccacagttaacgatgac

SEQ ID NO: 2912979 - DNA, 25 bp, Homo sapien
cgtgctcaacttggatgggacacac

SEQ ID NO: 2912980 - DNA, 25 bp, Homo sapien
aaaataggaatggttgctttcaaca

SEQ ID NO: 2912981 - DNA, 25 bp, Homo sapien
aaataggaatggttgctttcaacat

SEQ ID NO: 2912982 - DNA, 25 bp, Homo sapien
ataggaatggttgctttcaacattt

SEQ ID NO: 2912983 - DNA, 25 bp, Homo sapien
caaaaataggaatggttgctttcaa

SEQ ID NO: 2912984 - DNA, 25 bp, Homo sapien
caatctcgagcagttatgaaaagac

SEQ ID NO: 2912985 - DNA, 25 bp, Homo sapien
ccttttccaaagcaatgtgacggtt

SEQ ID NO: 2912986 - DNA, 25 bp, Homo sapien
gaccagggttactggagaccaagaa

SEQ ID NO: 2912987 - DNA, 25 bp, Homo sapien
tgggctgcaggtcaacaatctcgag

SEQ ID NO: 2912988 - DNA, 25 bp, Homo sapien
ggagcattcgtgtgacccagcagtg

SEQ ID NO: 2912989 - DNA, 25 bp, Homo sapien
tccaggtgcaacatgaagaacatcg

SEQ ID NO: 2912990 - DNA, 25 bp, Homo sapien
aacttgtggaaagggctcgatgcca

SEQ ID NO: 2912991 - DNA, 25 bp, Homo sapien
cagatgatcctgtctccaagcatgg

SEQ ID NO: 2912992 - DNA, 25 bp, Homo sapien
taggaccatgttaggcaaactcttc

SEQ ID NO: 2912993 - DNA, 25 bp, Homo sapien
taaagtcacccaacatacaaaggag

SEQ ID NO: 2912994 - DNA, 25 bp, Homo sapien
tgcaaaacctaggaggccaaacagg

SEQ ID NO: 2912995 - DNA, 25 bp, Homo sapien
caaattaggctgcaggtcatatgca

SEQ ID NO: 2912996 - DNA, 25 bp, Homo sapien
gactcggacccaagacgtgttcaga

SEQ ID NO: 2912997 - DNA, 25 bp, Homo sapien
gctgtgcaaggaagaacggccatct

SEQ ID NO: 2912998 - DNA, 25 bp, Homo sapien
gaaacgaaacgttgtctctggcctg

SEQ ID NO: 2912999 - DNA, 25 bp, Homo sapien
tattacctactggagacgctcgcgc

SEQ ID NO: 2913000 - DNA, 25 bp, Homo sapien
cgctcagccagttctataggttttt

SEQ ID NO: 2913001 - DNA, 25 bp, Homo sapien
caccacgctcagccagttctatagg

SEQ ID NO: 2913002 - DNA, 25 bp, Homo sapien
ccacgctcagccagttctataggtt

SEQ ID NO: 2913003 - DNA, 25 bp, Homo sapien
cacgctcagccagttctataggttt

SEQ ID NO: 2913004 - DNA, 25 bp, Homo sapien
catcctgaggtctgctagccatgtg

SEQ ID NO: 2913005 - DNA, 25 bp, Homo sapien
tctcctaaatgcgaagccgcgtgac

SEQ ID NO: 2913006 - DNA, 25 bp, Homo sapien
tgtgtgtcatatacagatagctccg

SEQ ID NO: 2913007 - DNA, 25 bp, Homo sapien
gactcacagtgttaggcaagccagc

SEQ ID NO: 2913008 - DNA, 25 bp, Homo sapien
tcccaggtagaacaggtgtcgtaca

SEQ ID NO: 2913009 - DNA, 25 bp, Homo sapien
ttagtgcgtgcacattgctggctca

SEQ ID NO: 2913010 - DNA, 25 bp, Homo sapien
taacacctgtggagttagtgcgtgc

SEQ ID NO: 2913011 - DNA, 25 bp, Homo sapien
agcgtaacccatcacgggaccggag

SEQ ID NO: 2913012 - DNA, 25 bp, Homo sapien
ttgttgtgtgtttagaagtgacctt

SEQ ID NO: 2913013 - DNA, 25 bp, Homo sapien
cgccagggttgtgcttggacttcca

SEQ ID NO: 2913014 - DNA, 25 bp, Homo sapien
ttagaggcggagcagattcccctag

SEQ ID NO: 2913015 - DNA, 25 bp, Homo sapien
gaaagcagcgccaggacattcggtt

SEQ ID NO: 2913016 - DNA, 25 bp, Homo sapien
gaactgtcccggcatgctggaagca

SEQ ID NO: 2913017 - DNA, 25 bp, Homo sapien
tctgctgtgctccatgcgaggaaag

SEQ ID NO: 2913018 - DNA, 25 bp, Homo sapien
gcttctagcgcggagagcggtctct

SEQ ID NO: 2913019 - DNA, 25 bp, Homo sapien
ggtacaatgcgattaagctccagac

SEQ ID NO: 2913020 - DNA, 25 bp, Homo sapien
ctcttgggctaggaaaaaacctctg

SEQ ID NO: 2913021 - DNA, 25 bp, Homo sapien
tgtcgagggccctacagcttgcttt

SEQ ID NO: 2913022 - DNA, 25 bp, Homo sapien
tcttagaagccgtgagacagcaggc

SEQ ID NO: 2913023 - DNA, 25 bp, Homo sapien
ccatgatgggtcctgtagtatctcc

SEQ ID NO: 2913024 - DNA, 25 bp, Homo sapien
tggatgtcagatgcgtccgtccagg

SEQ ID NO: 2913025 - DNA, 25 bp, Homo sapien
gagtaggggtccgagctgctggcag

SEQ ID NO: 2913026 - DNA, 25 bp, Homo sapien
agagtatagtgggactgatcctcca

SEQ ID NO: 2913027 - DNA, 25 bp, Homo sapien
ttggctgtgaacgagtaggggtccg

SEQ ID NO: 2913028 - DNA, 25 bp, Homo sapien
tggcttaaagaggccatcccttccc

SEQ ID NO: 2913029 - DNA, 25 bp, Homo sapien
gcaggagaaacgcttgaacccatga

SEQ ID NO: 2913030 - DNA, 25 bp, Homo sapien
cccgtctcttccagaaatacaaaat

SEQ ID NO: 2913031 - DNA, 25 bp, Homo sapien
aatcccagctacttgggaggctgag

SEQ ID NO: 2913032 - DNA, 25 bp, Homo sapien
gctgggcatggtggtgcatgcctgt

SEQ ID NO: 2913033 - DNA, 25 bp, Homo sapien
tctttgctgcagtcagacccctggt

SEQ ID NO: 2913034 - DNA, 25 bp, Homo sapien
gaatcatcgatgagctccagggcaa

SEQ ID NO: 2913035 - DNA, 25 bp, Homo sapien
tgagttgcaccaccgaatgtaggcc

SEQ ID NO: 2913036 - DNA, 25 bp, Homo sapien
cagggcaaggcgctcaaggtgaatt

SEQ ID NO: 2913037 - DNA, 25 bp, Homo sapien
cccttgtccagaattgcgggaggag

SEQ ID NO: 2913038 - DNA, 25 bp, Homo sapien
cagctcttcagcattgtccgccagg

SEQ ID NO: 2913039 - DNA, 25 bp, Homo sapien
tgggctcggagccagcattgcacag

SEQ ID NO: 2913040 - DNA, 25 bp, Homo sapien
acagggtacaggacgcctcccttgt

SEQ ID NO: 2913041 - DNA, 25 bp, Homo sapien
gaagaagcagttccaggcatgggcc

SEQ ID NO: 2913042 - DNA, 25 bp, Homo sapien
tgtcaggagcgaagacagaacgtct

SEQ ID NO: 2913043 - DNA, 25 bp, Homo sapien
gcagccaactgcagaaacgtcaggt

SEQ ID NO: 2913044 - DNA, 25 bp, Homo sapien
tagagttagcggctttggcaggcca

SEQ ID NO: 2913045 - DNA, 25 bp, Homo sapien
gagtcacgcgcctgggtgtcggcgg

SEQ ID NO: 2913046 - DNA, 25 bp, Homo sapien
ctctgggtgtgattccgccggtccg

SEQ ID NO: 2913047 - DNA, 25 bp, Homo sapien
accgcgagtgagtgtggtcgctcct

SEQ ID NO: 2913048 - DNA, 25 bp, Homo sapien
cgggtgacatccctgccgtgggctt

SEQ ID NO: 2913049 - DNA, 25 bp, Homo sapien
tcccagtcagacctcggagttgtag

SEQ ID NO: 2913050 - DNA, 25 bp, Homo sapien
ggtgcggtctgaaccattcggaact

SEQ ID NO: 2913051 - DNA, 25 bp, Homo sapien
tactcccgcgcttaatgaaatggtt

SEQ ID NO: 2913052 - DNA, 25 bp, Homo sapien
ttttaagtttcagcatactcccgcg

SEQ ID NO: 2913053 - DNA, 25 bp, Homo sapien
catggcccaggtgttaaaggtctca

SEQ ID NO: 2913054 - DNA, 25 bp, Homo sapien
gggtatagcccttgtagatgggcac

SEQ ID NO: 2913055 - DNA, 25 bp, Homo sapien
gccacgtacatggcccaggtgttaa

SEQ ID NO: 2913056 - DNA, 25 bp, Homo sapien
ccatgggggagggtatagcccttgt

SEQ ID NO: 2913057 - DNA, 25 bp, Homo sapien
cgtggtgatcaagctgtagccaagc

SEQ ID NO: 2913058 - DNA, 25 bp, Homo sapien
cctgctcgaagggcaacacagcttc

SEQ ID NO: 2913059 - DNA, 25 bp, Homo sapien
gattttcatggggtagtcaggtcct

SEQ ID NO: 2913060 - DNA, 25 bp, Homo sapien
cccactcggccgtggtgatcaagct

SEQ ID NO: 2913061 - DNA, 25 bp, Homo sapien
aactgcttgttgccaatggcgatga

SEQ ID NO: 2913062 - DNA, 25 bp, Homo sapien
gaactgcttgttgccaatggcgatg

SEQ ID NO: 2913063 - DNA, 25 bp, Homo sapien
actgcttgttgccaatggcgatgac

SEQ ID NO: 2913064 - DNA, 25 bp, Homo sapien
acatggtggtgccgccagacagcac

SEQ ID NO: 2913065 - DNA, 25 bp, Homo sapien
ctgtcaggatgccccagtacatggt

SEQ ID NO: 2913066 - DNA, 25 bp, Homo sapien
gtcaggatgccccagtacatggtgg

SEQ ID NO: 2913067 - DNA, 25 bp, Homo sapien
gtacatggtggtgccgccagacagc

SEQ ID NO: 2913068 - DNA, 25 bp, Homo sapien
tcttgatcttcgtggtgctgggcac

SEQ ID NO: 2913069 - DNA, 25 bp, Homo sapien
acactgagtacctgtgcttggggcg

SEQ ID NO: 2913070 - DNA, 25 bp, Homo sapien
gatggaactgccgatccacactgag

SEQ ID NO: 2913071 - DNA, 25 bp, Homo sapien
tggggcggggcacaatgatcttgat

SEQ ID NO: 2913072 - DNA, 25 bp, Homo sapien
aacttctttcaaaggcttattccag

SEQ ID NO: 2913073 - DNA, 25 bp, Homo sapien
gtttcgtgaggctagtatgaggtgt

SEQ ID NO: 2913074 - DNA, 25 bp, Homo sapien
ttattccagtttcgtgaggctagta

SEQ ID NO: 2913075 - DNA, 25 bp, Homo sapien
tatgaggtgtatgcatttgccaggg

SEQ ID NO: 2913076 - DNA, 25 bp, Homo sapien
tccaacctttagtgggtgctacact

SEQ ID NO: 2913077 - DNA, 25 bp, Homo sapien
gcattttgattatgttcagggcctc

SEQ ID NO: 2913078 - DNA, 25 bp, Homo sapien
gtttttaagagacaaatggcaggct

SEQ ID NO: 2913079 - DNA, 25 bp, Homo sapien
ctgatttagccctggaatggtgtgg

SEQ ID NO: 2913080 - DNA, 25 bp, Homo sapien
atcttcagtcctgtgtgctttcaga

SEQ ID NO: 2913081 - DNA, 25 bp, Homo sapien
gtcctgtgtgctttcagaaaaccat

SEQ ID NO: 2913082 - DNA, 25 bp, Homo sapien
gtgtgctttcagaaaaccattttct

SEQ ID NO: 2913083 - DNA, 25 bp, Homo sapien
acatcttcagtcctgtgtgctttca

SEQ ID NO: 2913084 - DNA, 25 bp, Homo sapien
tggaccaggagatcacagtgaaccc

SEQ ID NO: 2913085 - DNA, 25 bp, Homo sapien
gaacctatagcacccttgtgaacag

SEQ ID NO: 2913086 - DNA, 25 bp, Homo sapien
gaattgcctgcccttgttcacaggg

SEQ ID NO: 2913087 - DNA, 25 bp, Homo sapien
tacctttacagagtatgggctcaca

SEQ ID NO: 2913088 - DNA, 25 bp, Homo sapien
tgaggatcagtcaaataattcccca

SEQ ID NO: 2913089 - DNA, 25 bp, Homo sapien
gaatctaccttggaatccccagtgg

SEQ ID NO: 2913090 - DNA, 25 bp, Homo sapien
gaatcggaagatagtttccactggg

SEQ ID NO: 2913091 - DNA, 25 bp, Homo sapien
taattccccagtaactgatgcaaat

SEQ ID NO: 2913092 - DNA, 25 bp, Homo sapien
gctagtcagaaggttacatctgtga

SEQ ID NO: 2913093 - DNA, 25 bp, Homo sapien
gcaggaaccgtgtctttaaaggaca

SEQ ID NO: 2913094 - DNA, 25 bp, Homo sapien
ctaccataaggtatggtgggcagga

SEQ ID NO: 2913095 - DNA, 25 bp, Homo sapien
ggacatagctagtcagaaggttaca

SEQ ID NO: 2913096 - DNA, 25 bp, Homo sapien
tactgtcaagtacacggttacaagg

SEQ ID NO: 2913097 - DNA, 25 bp, Homo sapien
gaatcccagcgtaagtgaagccaga

SEQ ID NO: 2913098 - DNA, 25 bp, Homo sapien
tgaaacatggcaagtgcacctgaat

SEQ ID NO: 2913099 - DNA, 25 bp, Homo sapien
tatctgcagtggtggaaatgttaca

SEQ ID NO: 2913100 - DNA, 25 bp, Homo sapien
tagatcagggcaggatcgagcgcgg

SEQ ID NO: 2913101 - DNA, 25 bp, Homo sapien
tcgagcgcggccgagtgtaggcagc

SEQ ID NO: 2913102 - DNA, 25 bp, Homo sapien
gggttgcggcgtttagatcagggca

SEQ ID NO: 2913103 - DNA, 25 bp, Homo sapien
gacggctggaacagcccttttagtc

SEQ ID NO: 2913104 - DNA, 25 bp, Homo sapien
tctcagctcaaggtaacgccctagg

SEQ ID NO: 2913105 - DNA, 25 bp, Homo sapien
aaaacatggcgtctgccctggagca

SEQ ID NO: 2913106 - DNA, 25 bp, Homo sapien
gtccgacagctctcagctcaaggta

SEQ ID NO: 2913107 - DNA, 25 bp, Homo sapien
cagttcgtgaacagtgtccgacagc

SEQ ID NO: 2913108 - DNA, 25 bp, Homo sapien
tggctccagagtctaatatcacggg

SEQ ID NO: 2913109 - DNA, 25 bp, Homo sapien
tatctgtccaggtggaaaaccgcag

SEQ ID NO: 2913110 - DNA, 25 bp, Homo sapien
aaacctcacgggagacgtggcaacg

SEQ ID NO: 2913111 - DNA, 25 bp, Homo sapien
caaagtgctttaggcgacaagcgga

SEQ ID NO: 2913112 - DNA, 25 bp, Homo sapien
tagtcgaagttatagaactagaaag

SEQ ID NO: 2913113 - DNA, 25 bp, Homo sapien
gccaggcttagtagtgtatgtctgt

SEQ ID NO: 2913114 - DNA, 25 bp, Homo sapien
gagtcttagatgaggtatttagagt

SEQ ID NO: 2913115 - DNA, 25 bp, Homo sapien
ttagccaggcttagtagtgtatgtc

SEQ ID NO: 2913116 - DNA, 25 bp, Homo sapien
ggccagacattcccgccgcggagga

SEQ ID NO: 2913117 - DNA, 25 bp, Homo sapien
ggtgcgggcgcgcaagtaccggccc

SEQ ID NO: 2913118 - DNA, 25 bp, Homo sapien
aagtaccggccccagagcgaggccg

SEQ ID NO: 2913119 - DNA, 25 bp, Homo sapien
cgcgcggtccctaaaggaacacgcg

SEQ ID NO: 2913120 - DNA, 25 bp, Homo sapien
gccccgcgggaaccgccgcgctgca

SEQ ID NO: 2913121 - DNA, 25 bp, Homo sapien
gtccaccagcacccgtagggcgcgg

SEQ ID NO: 2913122 - DNA, 25 bp, Homo sapien
gccgccgcgcacaccagccgcccag

SEQ ID NO: 2913123 - DNA, 25 bp, Homo sapien
accagcacccgtagggcgcggcctc

SEQ ID NO: 2913124 - DNA, 25 bp, Homo sapien
agggctggtcgggaaagcgcgcgcg

SEQ ID NO: 2913125 - DNA, 25 bp, Homo sapien
cctccagcgcgatgaagggctggtc

SEQ ID NO: 2913126 - DNA, 25 bp, Homo sapien
aggaatccgccctcgaagtcagcca

SEQ ID NO: 2913127 - DNA, 25 bp, Homo sapien
agcgcgcgcggaacttcctgaggaa

SEQ ID NO: 2913128 - DNA, 25 bp, Homo sapien
tgaagtcagctttaaatgcagagtt

SEQ ID NO: 2913129 - DNA, 25 bp, Homo sapien
ttttcagaaaccttggatggcagcc

SEQ ID NO: 2913130 - DNA, 25 bp, Homo sapien
cagaccctattctatcagagggcca

SEQ ID NO: 2913131 - DNA, 25 bp, Homo sapien
gggccgcatcttcccggtgcgctgt

SEQ ID NO: 2913132 - DNA, 25 bp, Homo sapien
caagatctgtgtgtaaacgtccctc

SEQ ID NO: 2913133 - DNA, 25 bp, Homo sapien
agaacacctcgggagtcggatggta

SEQ ID NO: 2913134 - DNA, 25 bp, Homo sapien
tttcccctctatccatcctggacag

SEQ ID NO: 2913135 - DNA, 25 bp, Homo sapien
ctgtgtgtaaacgtccctccttgga

SEQ ID NO: 2913136 - DNA, 25 bp, Homo sapien
gccgagcgctgcctataaatgaaca

SEQ ID NO: 2913137 - DNA, 25 bp, Homo sapien
caagccgtgcctcaggaagggaagt

SEQ ID NO: 2913138 - DNA, 25 bp, Homo sapien
ggaagccagcagattactcccaagg

SEQ ID NO: 2913139 - DNA, 25 bp, Homo sapien
cacgttaatacactcccgggcggat

SEQ ID NO: 2913140 - DNA, 25 bp, Homo sapien
cacacccaaggacgtacttcctggg

SEQ ID NO: 2913141 - DNA, 25 bp, Homo sapien
gaccagcaaaggtgtcaggcccatg

SEQ ID NO: 2913142 - DNA, 25 bp, Homo sapien
cggagagtatgtggacttcgaaccc

SEQ ID NO: 2913143 - DNA, 25 bp, Homo sapien
tgacttcgtcgggatccagcagaga

SEQ ID NO: 2913144 - DNA, 25 bp, Homo sapien
ccatctccttgacagcttccacggc

SEQ ID NO: 2913145 - DNA, 25 bp, Homo sapien
gccatctccttgacagcttccacgg

SEQ ID NO: 2913146 - DNA, 25 bp, Homo sapien
atctccttgacagcttccacggccc

SEQ ID NO: 2913147 - DNA, 25 bp, Homo sapien
catctccttgacagcttccacggcc

SEQ ID NO: 2913148 - DNA, 25 bp, Homo sapien
atagggacagtacttgaacatcttg

SEQ ID NO: 2913149 - DNA, 25 bp, Homo sapien
tcatagggacagtacttgaacatct

SEQ ID NO: 2913150 - DNA, 25 bp, Homo sapien
tctcatagggacagtacttgaacat

SEQ ID NO: 2913151 - DNA, 25 bp, Homo sapien
cttctcatagggacagtacttgaac

SEQ ID NO: 2913152 - DNA, 25 bp, Homo sapien
tgggggagtgctgtgagggtccatc

SEQ ID NO: 2913153 - DNA, 25 bp, Homo sapien
tgctgtgagggtccatcccctttcc

SEQ ID NO: 2913154 - DNA, 25 bp, Homo sapien
caggcaggctgagccccgtacccct

SEQ ID NO: 2913155 - DNA, 25 bp, Homo sapien
acaggcaggctgagccccgtacccc

SEQ ID NO: 2913156 - DNA, 25 bp, Homo sapien
gctggagaggtccttggggagcaga

SEQ ID NO: 2913157 - DNA, 25 bp, Homo sapien
ctcaggctggagaggtccttgggga

SEQ ID NO: 2913158 - DNA, 25 bp, Homo sapien
gaggtccttggggagcagaaagccg

SEQ ID NO: 2913159 - DNA, 25 bp, Homo sapien
agcctcaggctggagaggtccttgg

SEQ ID NO: 2913160 - DNA, 25 bp, Homo sapien
tggagaacctgcatcataagaggcc

SEQ ID NO: 2913161 - DNA, 25 bp, Homo sapien
gaacctgcatcataagaggccccat

SEQ ID NO: 2913162 - DNA, 25 bp, Homo sapien
gtgacaggcacccttcctggagaac

SEQ ID NO: 2913163 - DNA, 25 bp, Homo sapien
caggcacccttcctggagaacctgc

SEQ ID NO: 2913164 - DNA, 25 bp, Homo sapien
gaagtaccagtccatagggttggga

SEQ ID NO: 2913165 - DNA, 25 bp, Homo sapien
gaaggctaaatggatcactacaggg

SEQ ID NO: 2913166 - DNA, 25 bp, Homo sapien
gtgagagacctcacagcagtcaggt

SEQ ID NO: 2913167 - DNA, 25 bp, Homo sapien
tgttaactattaccgagcaatctgg

SEQ ID NO: 2913168 - DNA, 25 bp, Homo sapien
gcctaagtcctacagggagtaactg

SEQ ID NO: 2913169 - DNA, 25 bp, Homo sapien
tctttacatgccaagagaaagtgcc

SEQ ID NO: 2913170 - DNA, 25 bp, Homo sapien
gaaacacgccaagaaagacaccatg

SEQ ID NO: 2913171 - DNA, 25 bp, Homo sapien
gtaactggaaaacgtactggagcaa

SEQ ID NO: 2913172 - DNA, 25 bp, Homo sapien
ttaaaataccaatgacaggccaggt

SEQ ID NO: 2913173 - DNA, 25 bp, Homo sapien
aataccaatgacaggccaggtgcgg

SEQ ID NO: 2913174 - DNA, 25 bp, Homo sapien
tccctattaaaataccaatgacagg

SEQ ID NO: 2913175 - DNA, 25 bp, Homo sapien
tattaaaataccaatgacaggccag

SEQ ID NO: 2913176 - DNA, 25 bp, Homo sapien
ggacaaattcctagatacatgcaat

SEQ ID NO: 2913177 - DNA, 25 bp, Homo sapien
tagatacatgcaatctaccaagatt

SEQ ID NO: 2913178 - DNA, 25 bp, Homo sapien
cagagatgacaaaggaaacactaca

SEQ ID NO: 2913179 - DNA, 25 bp, Homo sapien
gacaaaggaaacactacaactgata

SEQ ID NO: 2913180 - DNA, 25 bp, Homo sapien
agcgaacactgcacagcataaccca

SEQ ID NO: 2913181 - DNA, 25 bp, Homo sapien
acagcataacccaaacacagggagc

SEQ ID NO: 2913182 - DNA, 25 bp, Homo sapien
gcgaacactgcacagcataacccaa

SEQ ID NO: 2913183 - DNA, 25 bp, Homo sapien
cataacccaaacacagggagcagag

SEQ ID NO: 2913184 - DNA, 25 bp, Homo sapien
ctggacgcaaacaggcaagggcagg

SEQ ID NO: 2913185 - DNA, 25 bp, Homo sapien
caggtggtgagaagaaagtgacatc

SEQ ID NO: 2913186 - DNA, 25 bp, Homo sapien
tggacgcaaacaggcaagggcaggt

SEQ ID NO: 2913187 - DNA, 25 bp, Homo sapien
gtggtgagaagaaagtgacatcaga

SEQ ID NO: 2913188 - DNA, 25 bp, Homo sapien
acggtcttgtctctggtcagcacaa

SEQ ID NO: 2913189 - DNA, 25 bp, Homo sapien
aggtcagcagagaccacggtcttgt

SEQ ID NO: 2913190 - DNA, 25 bp, Homo sapien
tcgtctatgagaaggtcagcagaga

SEQ ID NO: 2913191 - DNA, 25 bp, Homo sapien
atgtccggccggtcgtctatgagaa

SEQ ID NO: 2913192 - DNA, 25 bp, Homo sapien
tccctgcaggagctctgctctgccc

SEQ ID NO: 2913193 - DNA, 25 bp, Homo sapien
tgcaggagctctgctctgccctcct

SEQ ID NO: 2913194 - DNA, 25 bp, Homo sapien
cttccctgcaggagctctgctctgc

SEQ ID NO: 2913195 - DNA, 25 bp, Homo sapien
cctgcaggagctctgctctgccctc

SEQ ID NO: 2913196 - DNA, 25 bp, Homo sapien
tctacggcagttcaaggttgactgg

SEQ ID NO: 2913197 - DNA, 25 bp, Homo sapien
ctttctacggcagttcaaggttgac

SEQ ID NO: 2913198 - DNA, 25 bp, Homo sapien
tacggcagttcaaggttgactggct

SEQ ID NO: 2913199 - DNA, 25 bp, Homo sapien
tcctttctacggcagttcaaggttg

SEQ ID NO: 2913200 - DNA, 25 bp, Homo sapien
caagggacatgtgccccgcctcctg

SEQ ID NO: 2913201 - DNA, 25 bp, Homo sapien
gggacatgtgccccgcctcctgatg

SEQ ID NO: 2913202 - DNA, 25 bp, Homo sapien
ccgcctcctgatggcttacaccaca

SEQ ID NO: 2913203 - DNA, 25 bp, Homo sapien
gtgccccgcctcctgatggcttaca

SEQ ID NO: 2913204 - DNA, 25 bp, Homo sapien
cagggactgactgcgggtcactgtc

SEQ ID NO: 2913205 - DNA, 25 bp, Homo sapien
gcagccagtgctcagtcaacaggga

SEQ ID NO: 2913206 - DNA, 25 bp, Homo sapien
aggccgtcagcacgcgcagccagtg

SEQ ID NO: 2913207 - DNA, 25 bp, Homo sapien
cacgagatgcggcaaggaggccgtc

SEQ ID NO: 2913208 - DNA, 25 bp, Homo sapien
ctctgtaaaggggtgactgcacgca

SEQ ID NO: 2913209 - DNA, 25 bp, Homo sapien
tctgtaaaggggtgactgcacgcac

SEQ ID NO: 2913210 - DNA, 25 bp, Homo sapien
ctagggtggaaacctgggtatccag

SEQ ID NO: 2913211 - DNA, 25 bp, Homo sapien
tgtaaaggggtgactgcacgcacac

SEQ ID NO: 2913212 - DNA, 25 bp, Homo sapien
agcagtggagacctggagcgcagcc

SEQ ID NO: 2913213 - DNA, 25 bp, Homo sapien
cagtggagacctggagcgcagccgc

SEQ ID NO: 2913214 - DNA, 25 bp, Homo sapien
tgggaaagcggcattcagctcagca

SEQ ID NO: 2913215 - DNA, 25 bp, Homo sapien
tgtgggtgggaaagcggcattcagc

SEQ ID NO: 2913216 - DNA, 25 bp, Homo sapien
agtcgtccgcccacgagtgcagcct

SEQ ID NO: 2913217 - DNA, 25 bp, Homo sapien
gcccacgagtgcagcctgcggcggg

SEQ ID NO: 2913218 - DNA, 25 bp, Homo sapien
aggcggtgaagaggacatgctccca

SEQ ID NO: 2913219 - DNA, 25 bp, Homo sapien
tgtggcaggcggtgaagaggacatg

SEQ ID NO: 2913220 - DNA, 25 bp, Homo sapien
tcaacacatgttcaagcctacggac

SEQ ID NO: 2913221 - DNA, 25 bp, Homo sapien
acgtgtctatgtccaagcgcccaga

SEQ ID NO: 2913222 - DNA, 25 bp, Homo sapien
tggtggccgctgtcacctagtgagt

SEQ ID NO: 2913223 - DNA, 25 bp, Homo sapien
cccgtgatcaggttaaggcctggca

SEQ ID NO: 2913224 - DNA, 25 bp, Homo sapien
ctctggtcctagagctctgaatctt

SEQ ID NO: 2913225 - DNA, 25 bp, Homo sapien
gattcctacatgctccacaaacctg

SEQ ID NO: 2913226 - DNA, 25 bp, Homo sapien
tgagcgtgcggccacgattcctaca

SEQ ID NO: 2913227 - DNA, 25 bp, Homo sapien
caactttcaccgagagctgagtcac

SEQ ID NO: 2913228 - DNA, 25 bp, Homo sapien
agctgctcgctcagagcatgggcat

SEQ ID NO: 2913229 - DNA, 25 bp, Homo sapien
cagctgctcgctcagagcatgggca

SEQ ID NO: 2913230 - DNA, 25 bp, Homo sapien
gggcaaaaagagccaaggaagccgc

SEQ ID NO: 2913231 - DNA, 25 bp, Homo sapien
aagagccaaggaagccgcagaacag

SEQ ID NO: 2913232 - DNA, 25 bp, Homo sapien
aagccgcagaacaggatgttgaaaa

SEQ ID NO: 2913233 - DNA, 25 bp, Homo sapien
aaggaagccgcagaacaggatgttg

SEQ ID NO: 2913234 - DNA, 25 bp, Homo sapien
tttcaaagccttcgctagtctccgt

SEQ ID NO: 2913235 - DNA, 25 bp, Homo sapien
tagtctccgtatggcccgtgccaac

SEQ ID NO: 2913236 - DNA, 25 bp, Homo sapien
gtgccaacgcccggctcttcggcat

SEQ ID NO: 2913237 - DNA, 25 bp, Homo sapien
cttcgctagtctccgtatggcccgt

SEQ ID NO: 2913238 - DNA, 25 bp, Homo sapien
ccggaatggcatggtcttgaagccc

SEQ ID NO: 2913239 - DNA, 25 bp, Homo sapien
ggtcatgcccatccggaatgtctat

SEQ ID NO: 2913240 - DNA, 25 bp, Homo sapien
ccggccgcggcttcaatctggagga

SEQ ID NO: 2913241 - DNA, 25 bp, Homo sapien
cggcccggaagatccgcagacgtaa

SEQ ID NO: 2913242 - DNA, 25 bp, Homo sapien
cagccggtccaagcatgcacagtcc

SEQ ID NO: 2913243 - DNA, 25 bp, Homo sapien
gccggtccaagcatgcacagtccag

SEQ ID NO: 2913244 - DNA, 25 bp, Homo sapien
agccggtccaagcatgcacagtcca

SEQ ID NO: 2913245 - DNA, 25 bp, Homo sapien
ctggccctttgaccttgagacccat

SEQ ID NO: 2913246 - DNA, 25 bp, Homo sapien
aggccttgaggtacagccaggtctc

SEQ ID NO: 2913247 - DNA, 25 bp, Homo sapien
aaggccttgaggtacagccaggtct

SEQ ID NO: 2913248 - DNA, 25 bp, Homo sapien
ggtctcagaggattccagaagcccc

SEQ ID NO: 2913249 - DNA, 25 bp, Homo sapien
ccaggtctcagaggattccagaagc

SEQ ID NO: 2913250 - DNA, 25 bp, Homo sapien
tgcttcaattctccaccaaggattc

SEQ ID NO: 2913251 - DNA, 25 bp, Homo sapien
cttcaattctccaccaaggattcca

SEQ ID NO: 2913252 - DNA, 25 bp, Homo sapien
tctgcttcaattctccaccaaggat

SEQ ID NO: 2913253 - DNA, 25 bp, Homo sapien
atctgcttcaattctccaccaagga

SEQ ID NO: 2913254 - DNA, 25 bp, Homo sapien
ctgcggcctcacaatgatgatgatg

SEQ ID NO: 2913255 - DNA, 25 bp, Homo sapien
cggcctcacaatgatgatgatgatt

SEQ ID NO: 2913256 - DNA, 25 bp, Homo sapien
gcctcacaatgatgatgatgattgc

SEQ ID NO: 2913257 - DNA, 25 bp, Homo sapien
ctcacaatgatgatgatgattgccc

SEQ ID NO: 2913258 - DNA, 25 bp, Homo sapien
tgatcccatttggaccggctgctcc

SEQ ID NO: 2913259 - DNA, 25 bp, Homo sapien
cttgaatttatcttgtggtccactg

SEQ ID NO: 2913260 - DNA, 25 bp, Homo sapien
gtgctttgtggctcatgatcccatt

SEQ ID NO: 2913261 - DNA, 25 bp, Homo sapien
gtccactgagacacttggatttggg

SEQ ID NO: 2913262 - DNA, 25 bp, Homo sapien
cctgccacggtaactgcagggagtt

SEQ ID NO: 2913263 - DNA, 25 bp, Homo sapien
ggtagctgctctccttacgcagtca

SEQ ID NO: 2913264 - DNA, 25 bp, Homo sapien
gtgaaggatcccttggtgtgcacca

SEQ ID NO: 2913265 - DNA, 25 bp, Homo sapien
gtcacccaccgaggcactatctggg

SEQ ID NO: 2913266 - DNA, 25 bp, Homo sapien
tggacacaaaacctctggtgacagc

SEQ ID NO: 2913267 - DNA, 25 bp, Homo sapien
gtcaccagacgcatgcaggataggt

SEQ ID NO: 2913268 - DNA, 25 bp, Homo sapien
agctctgagccagggctggacacaa

SEQ ID NO: 2913269 - DNA, 25 bp, Homo sapien
tgcaggataggttgagctctgagcc

SEQ ID NO: 2913270 - DNA, 25 bp, Homo sapien
tagtggacaaggtttcccactccca

SEQ ID NO: 2913271 - DNA, 25 bp, Homo sapien
caaagccatagtggacaaggtttcc

SEQ ID NO: 2913272 - DNA, 25 bp, Homo sapien
gccatagtggacaaggtttcccact

SEQ ID NO: 2913273 - DNA, 25 bp, Homo sapien
ctgcaaagccatagtggacaaggtt

SEQ ID NO: 2913274 - DNA, 25 bp, Homo sapien
ctgagccttcctgcacctggggagt

SEQ ID NO: 2913275 - DNA, 25 bp, Homo sapien
gagccttcctgcacctggggagtag

SEQ ID NO: 2913276 - DNA, 25 bp, Homo sapien
ccttcctgcacctggggagtaggca

SEQ ID NO: 2913277 - DNA, 25 bp, Homo sapien
agccttcctgcacctggggagtagg

SEQ ID NO: 2913278 - DNA, 25 bp, Homo sapien
agaggcccaatggcgatgacaaaga

SEQ ID NO: 2913279 - DNA, 25 bp, Homo sapien
gagaggcccaatggcgatgacaaag

SEQ ID NO: 2913280 - DNA, 25 bp, Homo sapien
gtgtcctagtttggttgctctggcc

SEQ ID NO: 2913281 - DNA, 25 bp, Homo sapien
tggttgtacgagttgctggattgct

SEQ ID NO: 2913282 - DNA, 25 bp, Homo sapien
aagggctgtgtcctagtttggttgc

SEQ ID NO: 2913283 - DNA, 25 bp, Homo sapien
gttgctggattgctcaaagggctgt

SEQ ID NO: 2913284 - DNA, 25 bp, Homo sapien
atgaccgatgctgccggacagcttt

SEQ ID NO: 2913285 - DNA, 25 bp, Homo sapien
tgaccgatgctgccggacagctttc

SEQ ID NO: 2913286 - DNA, 25 bp, Homo sapien
gatgaccgatgctgccggacagctt

SEQ ID NO: 2913287 - DNA, 25 bp, Homo sapien
ctcgattatttttggaaagatttgc

SEQ ID NO: 2913288 - DNA, 25 bp, Homo sapien
atttttggaaagatttgcttctaat

SEQ ID NO: 2913289 - DNA, 25 bp, Homo sapien
ttatttttggaaagatttgcttcta

SEQ ID NO: 2913290 - DNA, 25 bp, Homo sapien
tttggaaagatttgcttctaattgt

SEQ ID NO: 2913291 - DNA, 25 bp, Homo sapien
ccctggttagctcggttggcgacta

SEQ ID NO: 2913292 - DNA, 25 bp, Homo sapien
gagagactttgctaatgtccatccc

SEQ ID NO: 2913293 - DNA, 25 bp, Homo sapien
catcagcataatggagaggctttca

SEQ ID NO: 2913294 - DNA, 25 bp, Homo sapien
tgcagagcgtagttgtgagagactt

SEQ ID NO: 2913295 - DNA, 25 bp, Homo sapien
gcaaatcacatggcagctgtcatcc

SEQ ID NO: 2913296 - DNA, 25 bp, Homo sapien
caattttattccaagctgttccttg

SEQ ID NO: 2913297 - DNA, 25 bp, Homo sapien
aatcagccacactaccatctagcac

SEQ ID NO: 2913298 - DNA, 25 bp, Homo sapien
tcaatcagccacactaccatctagc

SEQ ID NO: 2913299 - DNA, 25 bp, Homo sapien
caatcagccacactaccatctagca

SEQ ID NO: 2913300 - DNA, 25 bp, Homo sapien
gagctaccatctgtaccccattggc

SEQ ID NO: 2913301 - DNA, 25 bp, Homo sapien
aggtcatcccatcgttctctgaagc

SEQ ID NO: 2913302 - DNA, 25 bp, Homo sapien
gactggcatgtcagcattgcactga

SEQ ID NO: 2913303 - DNA, 25 bp, Homo sapien
tgagtgtgtgtatacctggccaggc

SEQ ID NO: 2913304 - DNA, 25 bp, Homo sapien
tctttgggtctgcagtttccccgcc

SEQ ID NO: 2913305 - DNA, 25 bp, Homo sapien
gctcaaaaccataaccacatctgaa

SEQ ID NO: 2913306 - DNA, 25 bp, Homo sapien
tccacgattgcctcctaagtgagtg

SEQ ID NO: 2913307 - DNA, 25 bp, Homo sapien
gctctttttcagacataagctcaaa

SEQ ID NO: 2913308 - DNA, 25 bp, Homo sapien
aaaagcaataaacagcctggtctct

SEQ ID NO: 2913309 - DNA, 25 bp, Homo sapien
aagcaataaacagcctggtctctct

SEQ ID NO: 2913310 - DNA, 25 bp, Homo sapien
agcctggtctctctcatcttcagac

SEQ ID NO: 2913311 - DNA, 25 bp, Homo sapien
tgatgcctcccaaaagcaataaaca

SEQ ID NO: 2913312 - DNA, 25 bp, Homo sapien
tgattccagggactccaggtaccat

SEQ ID NO: 2913313 - DNA, 25 bp, Homo sapien
ctgctccaggtacttagtgattcca

SEQ ID NO: 2913314 - DNA, 25 bp, Homo sapien
ccaggtacttagtgattccagggac

SEQ ID NO: 2913315 - DNA, 25 bp, Homo sapien
tacttagtgattccagggactccag

SEQ ID NO: 2913316 - DNA, 25 bp, Homo sapien
gcttgaaattgccacgctcctccat

SEQ ID NO: 2913317 - DNA, 25 bp, Homo sapien
gccaaagccgcgaacgccacacaga

SEQ ID NO: 2913318 - DNA, 25 bp, Homo sapien
ccaggggtcagcttgaaattgccac

SEQ ID NO: 2913319 - DNA, 25 bp, Homo sapien
gaacgccacacagacccaggccact

SEQ ID NO: 2913320 - DNA, 25 bp, Homo sapien
gttttgctttctatgaggtccagat

SEQ ID NO: 2913321 - DNA, 25 bp, Homo sapien
cacagtttagttcatgccagttttg

SEQ ID NO: 2913322 - DNA, 25 bp, Homo sapien
tatgaggtccagataaaccaagaat

SEQ ID NO: 2913323 - DNA, 25 bp, Homo sapien
tggtaatctgacacagtttagttca

SEQ ID NO: 2913324 - DNA, 25 bp, Homo sapien
tcaattagttgtaaatgctactgcg

SEQ ID NO: 2913325 - DNA, 25 bp, Homo sapien
ggagaaggaacaaagagatctgtaa

SEQ ID NO: 2913326 - DNA, 25 bp, Homo sapien
gcaagtcgagtgaagcagtggaagt

SEQ ID NO: 2913327 - DNA, 25 bp, Homo sapien
ctgcttgtgatcaattagttgtaaa

SEQ ID NO: 2913328 - DNA, 25 bp, Homo sapien
tcttcgtgtcttacataatgccccg

SEQ ID NO: 2913329 - DNA, 25 bp, Homo sapien
ggtacacatgtgtggatcttcgtgt

SEQ ID NO: 2913330 - DNA, 25 bp, Homo sapien
gtcttacataatgccccgcagaatg

SEQ ID NO: 2913331 - DNA, 25 bp, Homo sapien
gctggatctatggagtgggtacaca

SEQ ID NO: 2913332 - DNA, 25 bp, Homo sapien
cacctgagggagtaaccctggaagg

SEQ ID NO: 2913333 - DNA, 25 bp, Homo sapien
ccacctgagggagtaaccctggaag

SEQ ID NO: 2913334 - DNA, 25 bp, Homo sapien
ctgccgaactcctttatgaacccac

SEQ ID NO: 2913335 - DNA, 25 bp, Homo sapien
ctcctttatgaacccacctgaggga

SEQ ID NO: 2913336 - DNA, 25 bp, Homo sapien
cactgagtctggtctgaatgatgcg

SEQ ID NO: 2913337 - DNA, 25 bp, Homo sapien
gatgcgggccacgtcaaggaaccca

SEQ ID NO: 2913338 - DNA, 25 bp, Homo sapien
agatgccactgagtctggtctgaat

SEQ ID NO: 2913339 - DNA, 25 bp, Homo sapien
gggccacgtcaaggaacccagccag

SEQ ID NO: 2913340 - DNA, 25 bp, Homo sapien
tggcgttagccaaggattaatttcc

SEQ ID NO: 2913341 - DNA, 25 bp, Homo sapien
gggacactgcttatgtaatggcctt

SEQ ID NO: 2913342 - DNA, 25 bp, Homo sapien
tttccggtggccttggtgacagctg

SEQ ID NO: 2913343 - DNA, 25 bp, Homo sapien
gcaagggacactgcttatgtaatgg

SEQ ID NO: 2913344 - DNA, 25 bp, Homo sapien
atatgtcttgatttttccggtggcc

SEQ ID NO: 2913345 - DNA, 25 bp, Homo sapien
tgtgggcaccggcttcatgcccagg

SEQ ID NO: 2913346 - DNA, 25 bp, Homo sapien
tgcgaggaaatacccctggccatcc

SEQ ID NO: 2913347 - DNA, 25 bp, Homo sapien
ctaagagctgcgaggaaatacccct

SEQ ID NO: 2913348 - DNA, 25 bp, Homo sapien
ctggccatccacacgccaggtgtgg

SEQ ID NO: 2913349 - DNA, 25 bp, Homo sapien
ctccaacaaacggtgtggtccctca

SEQ ID NO: 2913350 - DNA, 25 bp, Homo sapien
tccaacaaacggtgtggtccctcac

SEQ ID NO: 2913351 - DNA, 25 bp, Homo sapien
ttctggctccaacaaacggtgtggt

SEQ ID NO: 2913352 - DNA, 25 bp, Homo sapien
tggctccaacaaacggtgtggtccc

SEQ ID NO: 2913353 - DNA, 25 bp, Homo sapien
tctgcagatcaggaatcctcacact

SEQ ID NO: 2913354 - DNA, 25 bp, Homo sapien
gacgcagcggttgtaatctatgaca

SEQ ID NO: 2913355 - DNA, 25 bp, Homo sapien
tttaagtgggtcaggtggaggacgc

SEQ ID NO: 2913356 - DNA, 25 bp, Homo sapien
tgcgggcgatgcagagtgaaccctc

SEQ ID NO: 2913357 - DNA, 25 bp, Homo sapien
tcatcttgtcacctacagggacctg

SEQ ID NO: 2913358 - DNA, 25 bp, Homo sapien
gaaccctgagctgccgagttcttag

SEQ ID NO: 2913359 - DNA, 25 bp, Homo sapien
agttcttagatacagctcactcatc

SEQ ID NO: 2913360 - DNA, 25 bp, Homo sapien
tcactcatcttgtcacctacaggga

SEQ ID NO: 2913361 - DNA, 25 bp, Homo sapien
cccacagtgcaagacatcgagacct

SEQ ID NO: 2913362 - DNA, 25 bp, Homo sapien
tgctgggtgaggcaccaaacccggc

SEQ ID NO: 2913363 - DNA, 25 bp, Homo sapien
cagcccacagtgcaagacatcgaga

SEQ ID NO: 2913364 - DNA, 25 bp, Homo sapien
agacatcgagacctcgagtttagcc

SEQ ID NO: 2913365 - DNA, 25 bp, Homo sapien
aaaagcgtcgcgcactctacacgtc

SEQ ID NO: 2913366 - DNA, 25 bp, Homo sapien
aaagcgtcgcgcactctacacgtca

SEQ ID NO: 2913367 - DNA, 25 bp, Homo sapien
gtcgccaaaagcgtcgcgcactcta

SEQ ID NO: 2913368 - DNA, 25 bp, Homo sapien
aggtcgggtcgccaaaagcgtcgcg

SEQ ID NO: 2913369 - DNA, 25 bp, Homo sapien
tcgcccggctgccaccccagcagag

SEQ ID NO: 2913370 - DNA, 25 bp, Homo sapien
ctgtcgcccggctgccaccccagca

SEQ ID NO: 2913371 - DNA, 25 bp, Homo sapien
cccggctgccaccccagcagaggcc

SEQ ID NO: 2913372 - DNA, 25 bp, Homo sapien
cggctgccaccccagcagaggccat

SEQ ID NO: 2913373 - DNA, 25 bp, Homo sapien
ggcaggtgactgaggccgtggcgcc

SEQ ID NO: 2913374 - DNA, 25 bp, Homo sapien
ccggcgactgctgcggttgaggcgc

SEQ ID NO: 2913375 - DNA, 25 bp, Homo sapien
cttggtgtcaggcagcggctggtcg

SEQ ID NO: 2913376 - DNA, 25 bp, Homo sapien
ctggtcggacgttggcggcaataca

SEQ ID NO: 2913377 - DNA, 25 bp, Homo sapien
ggatgaacatttgagccgctggaca

SEQ ID NO: 2913378 - DNA, 25 bp, Homo sapien
caaatcgtttgcttaactcatggaa

SEQ ID NO: 2913379 - DNA, 25 bp, Homo sapien
taaggatatcgcacctctcgaggct

SEQ ID NO: 2913380 - DNA, 25 bp, Homo sapien
aatttgctcaagatcgctgggatga

SEQ ID NO: 2913381 - DNA, 25 bp, Homo sapien
tcagtacacagatttgaacacaggg

SEQ ID NO: 2913382 - DNA, 25 bp, Homo sapien
tctcttttgaggtccactatggaca

SEQ ID NO: 2913383 - DNA, 25 bp, Homo sapien
tatgtttcacaggtacactcctgag

SEQ ID NO: 2913384 - DNA, 25 bp, Homo sapien
gaagctaagctacttgccaaggtca

SEQ ID NO: 2913385 - DNA, 25 bp, Homo sapien
ctgacccgtgtctttcttaccaggg

SEQ ID NO: 2913386 - DNA, 25 bp, Homo sapien
tagtggaagctctgcaaatgagtga

SEQ ID NO: 2913387 - DNA, 25 bp, Homo sapien
ttcctatgcttagtgaccttggcca

SEQ ID NO: 2913388 - DNA, 25 bp, Homo sapien
acactaaaaggcttagtggaagctc

SEQ ID NO: 2913389 - DNA, 25 bp, Homo sapien
gctcaacgacctggccaatgagtag

SEQ ID NO: 2913390 - DNA, 25 bp, Homo sapien
taatactcaaaagcgaggctcaacg

SEQ ID NO: 2913391 - DNA, 25 bp, Homo sapien
catgatctagcatcaggcaggctgc

SEQ ID NO: 2913392 - DNA, 25 bp, Homo sapien
ggctgctagaaaactccacgggaaa

SEQ ID NO: 2913393 - DNA, 25 bp, Homo sapien
tcctcgcacggtactaactccagtg

SEQ ID NO: 2913394 - DNA, 25 bp, Homo sapien
ctcgcacggtactaactccagtggc

SEQ ID NO: 2913395 - DNA, 25 bp, Homo sapien
aggctctcctcgcacggtactaact

SEQ ID NO: 2913396 - DNA, 25 bp, Homo sapien
cacaggctctcctcgcacggtacta

SEQ ID NO: 2913397 - DNA, 25 bp, Homo sapien
caggaggctttatcagttagcaaga

SEQ ID NO: 2913398 - DNA, 25 bp, Homo sapien
taggtcactacaggcactcaagaaa

SEQ ID NO: 2913399 - DNA, 25 bp, Homo sapien
gagccatttctaggccaatcaggag

SEQ ID NO: 2913400 - DNA, 25 bp, Homo sapien
tgatgctggcttgaacctgttaaca

SEQ ID NO: 2913401 - DNA, 25 bp, Homo sapien
acttgcttttgagggcgttcaggtc

SEQ ID NO: 2913402 - DNA, 25 bp, Homo sapien
tccttggggatttcgaacatgcaga

SEQ ID NO: 2913403 - DNA, 25 bp, Homo sapien
ggctcttgtacttttgcagaagctc

SEQ ID NO: 2913404 - DNA, 25 bp, Homo sapien
tcttggtcctgacttgctcccggag

SEQ ID NO: 2913405 - DNA, 25 bp, Homo sapien
tcttcagatctgtcagtggggccgg

SEQ ID NO: 2913406 - DNA, 25 bp, Homo sapien
tattatgcatctagacatatggatc

SEQ ID NO: 2913407 - DNA, 25 bp, Homo sapien
catatggatctacacgaggaacccc

SEQ ID NO: 2913408 - DNA, 25 bp, Homo sapien
accagcaggcactccagttattatg

SEQ ID NO: 2913409 - DNA, 25 bp, Homo sapien
taagcccctaaactggtcagcgcag

SEQ ID NO: 2913410 - DNA, 25 bp, Homo sapien
tctgacagtcaagggagagcacaca

SEQ ID NO: 2913411 - DNA, 25 bp, Homo sapien
gagtgcaggcttaattcgtccagtg

SEQ ID NO: 2913412 - DNA, 25 bp, Homo sapien
tacaggtctacactaatggaagctc

SEQ ID NO: 2913413 - DNA, 25 bp, Homo sapien
taaaaggcaactaaggacagcccag

SEQ ID NO: 2913414 - DNA, 25 bp, Homo sapien
aagagcctgagaccccatctggaaa

SEQ ID NO: 2913415 - DNA, 25 bp, Homo sapien
caaactttcggactgttggaggcat

SEQ ID NO: 2913416 - DNA, 25 bp, Homo sapien
tgctgtctccgtctcatggctaagg

SEQ ID NO: 2913417 - DNA, 25 bp, Homo sapien
ccataactttgggagcgagggccca

SEQ ID NO: 2913418 - DNA, 25 bp, Homo sapien
tcaaagacctaagagtgagcgcggg

SEQ ID NO: 2913419 - DNA, 25 bp, Homo sapien
tgaagttatccagcctctgctaggc

SEQ ID NO: 2913420 - DNA, 25 bp, Homo sapien
aagaaaccgtcatgcccgcttgagg

SEQ ID NO: 2913421 - DNA, 25 bp, Homo sapien
tcttcacaacccagcatccgtaggg

SEQ ID NO: 2913422 - DNA, 25 bp, Homo sapien
tcagtcatcccaagttagagcccgg

SEQ ID NO: 2913423 - DNA, 25 bp, Homo sapien
catatcaaatggaccctcttgggac

SEQ ID NO: 2913424 - DNA, 25 bp, Homo sapien
tgctgcttgaggagtaaagtcccag

SEQ ID NO: 2913425 - DNA, 25 bp, Homo sapien
catgggactgtgatcaacctggaca

SEQ ID NO: 2913426 - DNA, 25 bp, Homo sapien
tgattagccagcctagggtagggcc

SEQ ID NO: 2913427 - DNA, 25 bp, Homo sapien
caaatgccgcgatggctgacagggc

SEQ ID NO: 2913428 - DNA, 25 bp, Homo sapien
taagacttccttcatgcagttggga

SEQ ID NO: 2913429 - DNA, 25 bp, Homo sapien
ttggtgtccggcttctctcactcgg

SEQ ID NO: 2913430 - DNA, 25 bp, Homo sapien
tgaggttcagctgcgtagtgccatg

SEQ ID NO: 2913431 - DNA, 25 bp, Homo sapien
gaatcacggtatttgtccattggtg

SEQ ID NO: 2913432 - DNA, 25 bp, Homo sapien
gtaactcacacattggacccactga

SEQ ID NO: 2913433 - DNA, 25 bp, Homo sapien
ggatctttgcttacgtctgccctgc

SEQ ID NO: 2913434 - DNA, 25 bp, Homo sapien
tcctgcttcgtgttgtgcaatcagg

SEQ ID NO: 2913435 - DNA, 25 bp, Homo sapien
gacaggcagaccagtgtgaggtcca

SEQ ID NO: 2913436 - DNA, 25 bp, Homo sapien
tgttgtgcaatcagggactcctgtc

SEQ ID NO: 2913437 - DNA, 25 bp, Homo sapien
gagatgagccattatctggccagac

SEQ ID NO: 2913438 - DNA, 25 bp, Homo sapien
gagagatggcatcaatggtccagga

SEQ ID NO: 2913439 - DNA, 25 bp, Homo sapien
gaggacatcagccatgcagcgtgct

SEQ ID NO: 2913440 - DNA, 25 bp, Homo sapien
tgcaggcttagggttcccaacacac

SEQ ID NO: 2913441 - DNA, 25 bp, Homo sapien
agccactgtggcaaacagtttcaca

SEQ ID NO: 2913442 - DNA, 25 bp, Homo sapien
ccacccctgaaggctataatttttg

SEQ ID NO: 2913443 - DNA, 25 bp, Homo sapien
ccactgtggcaaacagtttcacagc

SEQ ID NO: 2913444 - DNA, 25 bp, Homo sapien
cacccctgaaggctataatttttga

SEQ ID NO: 2913445 - DNA, 25 bp, Homo sapien
tgggatagagcgcagagtccacctg

SEQ ID NO: 2913446 - DNA, 25 bp, Homo sapien
tctgggcaaagcaggcgcagaggag

SEQ ID NO: 2913447 - DNA, 25 bp, Homo sapien
gaggcactgggatagagcgcagagt

SEQ ID NO: 2913448 - DNA, 25 bp, Homo sapien
gctctgggcaaagcaggcgcagagg

SEQ ID NO: 2913449 - DNA, 25 bp, Homo sapien
cccctctcatggtagtaaagcaaac

SEQ ID NO: 2913450 - DNA, 25 bp, Homo sapien
gtttgctttactaccatgagagggg

SEQ ID NO: 2913451 - DNA, 25 bp, Homo sapien
ccacatgcttggaagggccactgaa

SEQ ID NO: 2913452 - DNA, 25 bp, Homo sapien
ggtactgagcctgttgagacttctg

SEQ ID NO: 2913453 - DNA, 25 bp, Homo sapien
gatccaggtggcgtgcgctgccttc

SEQ ID NO: 2913454 - DNA, 25 bp, Homo sapien
gccactgaatgtggtgaagggctgg

SEQ ID NO: 2913455 - DNA, 25 bp, Homo sapien
gaagaaggatccatttccgtcagca

SEQ ID NO: 2913456 - DNA, 25 bp, Homo sapien
caccctgtgaagaaggatccatttc

SEQ ID NO: 2913457 - DNA, 25 bp, Homo sapien
gaaggatccatttccgtcagcaccc

SEQ ID NO: 2913458 - DNA, 25 bp, Homo sapien
tgtgaagaaggatccatttccgtca

SEQ ID NO: 2913459 - DNA, 25 bp, Homo sapien
ctgggccgccctccagccaaggctc

SEQ ID NO: 2913460 - DNA, 25 bp, Homo sapien
ggggcgctgggccgccctccagcca

SEQ ID NO: 2913461 - DNA, 25 bp, Homo sapien
gcgctgggccgccctccagccaagg

SEQ ID NO: 2913462 - DNA, 25 bp, Homo sapien
gctgggccgccctccagccaaggct

SEQ ID NO: 2913463 - DNA, 25 bp, Homo sapien
gccacgcgtgggagctgaactgagc

SEQ ID NO: 2913464 - DNA, 25 bp, Homo sapien
gggagctgaactgagcagggggtgc

SEQ ID NO: 2913465 - DNA, 25 bp, Homo sapien
gggtgctgggtcaggttagtgctgg

SEQ ID NO: 2913466 - DNA, 25 bp, Homo sapien
ggtgctgggtcaggttagtgctggc

SEQ ID NO: 2913467 - DNA, 25 bp, Homo sapien
acatctgactgccaagtgctgccgg

SEQ ID NO: 2913468 - DNA, 25 bp, Homo sapien
ggaccgtctggccacatctgactgc

SEQ ID NO: 2913469 - DNA, 25 bp, Homo sapien
tctggccacatctgactgccaagtg

SEQ ID NO: 2913470 - DNA, 25 bp, Homo sapien
ctggaagggaccgtctggccacatc

SEQ ID NO: 2913471 - DNA, 25 bp, Homo sapien
tctgccttccgaacacgttcctgta

SEQ ID NO: 2913472 - DNA, 25 bp, Homo sapien
cggagggccacgttcatgcctttgg

SEQ ID NO: 2913473 - DNA, 25 bp, Homo sapien
tcctgtactgcttgccgtgcacgga

SEQ ID NO: 2913474 - DNA, 25 bp, Homo sapien
gcctttggggccacgacagctctct

SEQ ID NO: 2913475 - DNA, 25 bp, Homo sapien
cagccagagcagggaggcaagctgc

SEQ ID NO: 2913476 - DNA, 25 bp, Homo sapien
ccagagcagggaggcaagctgccca

SEQ ID NO: 2913477 - DNA, 25 bp, Homo sapien
cagagcagggaggcaagctgcccac

SEQ ID NO: 2913478 - DNA, 25 bp, Homo sapien
ttaaaagcagccagagcagggaggc

SEQ ID NO: 2913479 - DNA, 25 bp, Homo sapien
aaactgttgaggtggagggcacttg

SEQ ID NO: 2913480 - DNA, 25 bp, Homo sapien
ggaaactgttgaggtggagggcact

SEQ ID NO: 2913481 - DNA, 25 bp, Homo sapien
actgttgaggtggagggcacttgtc

SEQ ID NO: 2913482 - DNA, 25 bp, Homo sapien
gaaactgttgaggtggagggcactt

SEQ ID NO: 2913483 - DNA, 25 bp, Homo sapien
tcagagccgatgtgaccaaattggc

SEQ ID NO: 2913484 - DNA, 25 bp, Homo sapien
gccccagagggcgagcatttgcttc

SEQ ID NO: 2913485 - DNA, 25 bp, Homo sapien
gcagaaaaacaggtggcttccgccc

SEQ ID NO: 2913486 - DNA, 25 bp, Homo sapien
tgagtggaacccaagcaccagcata

SEQ ID NO: 2913487 - DNA, 25 bp, Homo sapien
aatttgtatgtgtcacccttgtgca

SEQ ID NO: 2913488 - DNA, 25 bp, Homo sapien
cagttctgagacgttcttcaccact

SEQ ID NO: 2913489 - DNA, 25 bp, Homo sapien
ttctgagacgttcttcaccactgat

SEQ ID NO: 2913490 - DNA, 25 bp, Homo sapien
gttctgagacgttcttcaccactga

SEQ ID NO: 2913491 - DNA, 25 bp, Homo sapien
aaacagttctgagacgttcttcacc

SEQ ID NO: 2913492 - DNA, 25 bp, Homo sapien
taatgggtctcaaaaatctgtgaca

SEQ ID NO: 2913493 - DNA, 25 bp, Homo sapien
ttaatgggtctcaaaaatctgtgac

SEQ ID NO: 2913494 - DNA, 25 bp, Homo sapien
aatgggtctcaaaaatctgtgacaa

SEQ ID NO: 2913495 - DNA, 25 bp, Homo sapien
ttttaatgggtctcaaaaatctgtg

SEQ ID NO: 2913496 - DNA, 25 bp, Homo sapien
ccgggagccgaggtaacgaacagct

SEQ ID NO: 2913497 - DNA, 25 bp, Homo sapien
gcgtgaaggcttgcggcgcctcaaa

SEQ ID NO: 2913498 - DNA, 25 bp, Homo sapien
ctgcggaggcctcggcaatattgat

SEQ ID NO: 2913499 - DNA, 25 bp, Homo sapien
tagacaggtactgaccgcaccggac

SEQ ID NO: 2913500 - DNA, 25 bp, Homo sapien
tgttgttccctaccgtaccctcagc

SEQ ID NO: 2913501 - DNA, 25 bp, Homo sapien
ctggttcagaaaatactcgagagtg

SEQ ID NO: 2913502 - DNA, 25 bp, Homo sapien
ttatctcagtcaggaggaagcgagg

SEQ ID NO: 2913503 - DNA, 25 bp, Homo sapien
ctcagcgcacagtctggttcagaaa

SEQ ID NO: 2913504 - DNA, 25 bp, Homo sapien
ggacattttcttagaacccactgta

SEQ ID NO: 2913505 - DNA, 25 bp, Homo sapien
acgagttattacctctaatcctcac

SEQ ID NO: 2913506 - DNA, 25 bp, Homo sapien
cctgccgctttagtttcccgagtag

SEQ ID NO: 2913507 - DNA, 25 bp, Homo sapien
cacaacagcctcactcgagatatta

SEQ ID NO: 2913508 - DNA, 25 bp, Homo sapien
caccatctcccagcttggattcaag

SEQ ID NO: 2913509 - DNA, 25 bp, Homo sapien
ggagggcaggtctcctccccttgag

SEQ ID NO: 2913510 - DNA, 25 bp, Homo sapien
cacaggccccatgatccatccaggg

SEQ ID NO: 2913511 - DNA, 25 bp, Homo sapien
gattcaagggagggcaggtctcctc

SEQ ID NO: 2913512 - DNA, 25 bp, Homo sapien
cgtaatcaacacaaacaaaggaaga

SEQ ID NO: 2913513 - DNA, 25 bp, Homo sapien
acaaacaaaggaagacagggcgcgg

SEQ ID NO: 2913514 - DNA, 25 bp, Homo sapien
ctgggcatcatagcgagactcccat

SEQ ID NO: 2913515 - DNA, 25 bp, Homo sapien
atcaacacaaacaaaggaagacagg

SEQ ID NO: 2913516 - DNA, 25 bp, Homo sapien
taattccatttcctcggaattctgg

SEQ ID NO: 2913517 - DNA, 25 bp, Homo sapien
attccatttcctcggaattctggat

SEQ ID NO: 2913518 - DNA, 25 bp, Homo sapien
aattccatttcctcggaattctgga

SEQ ID NO: 2913519 - DNA, 25 bp, Homo sapien
tgtcctttgaatactcccccaccat

SEQ ID NO: 2913520 - DNA, 25 bp, Homo sapien
ttcctgggcacggcccattgacgcc

SEQ ID NO: 2913521 - DNA, 25 bp, Homo sapien
tgggcacggcccattgacgccagca

SEQ ID NO: 2913522 - DNA, 25 bp, Homo sapien
ctgggcacggcccattgacgccagc

SEQ ID NO: 2913523 - DNA, 25 bp, Homo sapien
acctcccccgtactctcaattcttg

SEQ ID NO: 2913524 - DNA, 25 bp, Homo sapien
ctcaattcttgagtggacttttgac

SEQ ID NO: 2913525 - DNA, 25 bp, Homo sapien
gcttgtgctaaaagtttgtgcagca

SEQ ID NO: 2913526 - DNA, 25 bp, Homo sapien
gcttggcttgtgctaaaagtttgtg

SEQ ID NO: 2913527 - DNA, 25 bp, Homo sapien
ccagtgcctggaatatgtgaagaca

SEQ ID NO: 2913528 - DNA, 25 bp, Homo sapien
gtcttgcggcgaaccagctgcgtgt

SEQ ID NO: 2913529 - DNA, 25 bp, Homo sapien
agctgcgtgtaccttgttgctgaca

SEQ ID NO: 2913530 - DNA, 25 bp, Homo sapien
tgaagacagcacgacatgggtggcc

SEQ ID NO: 2913531 - DNA, 25 bp, Homo sapien
ttcagtgcattgagtgagggctctg

SEQ ID NO: 2913532 - DNA, 25 bp, Homo sapien
gcatgagagaagctgacgctggtga

SEQ ID NO: 2913533 - DNA, 25 bp, Homo sapien
tcagttattcagtgcattgagtgag

SEQ ID NO: 2913534 - DNA, 25 bp, Homo sapien
tgggcatggtgcaagagtcagagct

SEQ ID NO: 2913535 - DNA, 25 bp, Homo sapien
tgacgggtcataggaaactcgaagg

SEQ ID NO: 2913536 - DNA, 25 bp, Homo sapien
gcacctcgtgccaaagagctgtcct

SEQ ID NO: 2913537 - DNA, 25 bp, Homo sapien
gaagcttggccccatgactactggg

SEQ ID NO: 2913538 - DNA, 25 bp, Homo sapien
tctgttagggcccttcagggaccca

SEQ ID NO: 2913539 - DNA, 25 bp, Homo sapien
tggtcgtttggctgagggctcctgg

SEQ ID NO: 2913540 - DNA, 25 bp, Homo sapien
tgtggaactgactgccgggggcggt

SEQ ID NO: 2913541 - DNA, 25 bp, Homo sapien
cctgggcattgggtcagcacggaca

SEQ ID NO: 2913542 - DNA, 25 bp, Homo sapien
actgtgcctgggcattgggtcagca

SEQ ID NO: 2913543 - DNA, 25 bp, Homo sapien
ttcatcccggtgaggatcaagccag

SEQ ID NO: 2913544 - DNA, 25 bp, Homo sapien
cttgctcttcatcccggtgaggatc

SEQ ID NO: 2913545 - DNA, 25 bp, Homo sapien
gctcttcatcccggtgaggatcaag

SEQ ID NO: 2913546 - DNA, 25 bp, Homo sapien
tcttcatcccggtgaggatcaagcc

SEQ ID NO: 2913547 - DNA, 25 bp, Homo sapien
ccttggtcaggggcccatcgtcagg

SEQ ID NO: 2913548 - DNA, 25 bp, Homo sapien
tgaggcgttgacctgtcccaggaat

SEQ ID NO: 2913549 - DNA, 25 bp, Homo sapien
aggctctgaggcgttgacctgtccc

SEQ ID NO: 2913550 - DNA, 25 bp, Homo sapien
tctgcatacacacgtcctccataag

SEQ ID NO: 2913551 - DNA, 25 bp, Homo sapien
taagcattcttctgcggctgtctgc

SEQ ID NO: 2913552 - DNA, 25 bp, Homo sapien
tctgagagccccactgttctgggga

SEQ ID NO: 2913553 - DNA, 25 bp, Homo sapien
ctctgagagccccactgttctgggg

SEQ ID NO: 2913554 - DNA, 25 bp, Homo sapien
acgtaactctcatcaacttcaagaa

SEQ ID NO: 2913555 - DNA, 25 bp, Homo sapien
ttgctaccagcttgcataagcagac

SEQ ID NO: 2913556 - DNA, 25 bp, Homo sapien
ggagctctccaacgtaactctcatc

SEQ ID NO: 2913557 - DNA, 25 bp, Homo sapien
gaacccaggagctctccaacgtaac

SEQ ID NO: 2913558 - DNA, 25 bp, Homo sapien
tgcactcgctctcccactcgtctct

SEQ ID NO: 2913559 - DNA, 25 bp, Homo sapien
gaggaatgcgatcccctccgcacag

SEQ ID NO: 2913560 - DNA, 25 bp, Homo sapien
tggtgtccgcgggtgccgcgaggaa

SEQ ID NO: 2913561 - DNA, 25 bp, Homo sapien
ggccttgggtctggcgctgcgactt

SEQ ID NO: 2913562 - DNA, 25 bp, Homo sapien
gcgcgctcggcgtccgaacccgcct

SEQ ID NO: 2913563 - DNA, 25 bp, Homo sapien
acatctccacccagcgcgcgcgctc

SEQ ID NO: 2913564 - DNA, 25 bp, Homo sapien
accccacatctccacccagcgcgcg

SEQ ID NO: 2913565 - DNA, 25 bp, Homo sapien
tcggcgtccgaacccgcctcggctc

SEQ ID NO: 2913566 - DNA, 25 bp, Homo sapien
tcagccgcggcgcagggcgccccca

SEQ ID NO: 2913567 - DNA, 25 bp, Homo sapien
cagccgcggcgcagggcgcccccac

SEQ ID NO: 2913568 - DNA, 25 bp, Homo sapien
cacgctccgcaaagactccgcgcct

SEQ ID NO: 2913569 - DNA, 25 bp, Homo sapien
gcgcaagcagatcccttgccacact

SEQ ID NO: 2913570 - DNA, 25 bp, Homo sapien
gcctcggcgcaagcagatcccttgc

SEQ ID NO: 2913571 - DNA, 25 bp, Homo sapien
aagactccgcgcctcggcgcaagca

SEQ ID NO: 2913572 - DNA, 25 bp, Homo sapien
tcaaggcgcgtgagagggggggccg

SEQ ID NO: 2913573 - DNA, 25 bp, Homo sapien
cttcaaggcgcgtgagagggggggc

SEQ ID NO: 2913574 - DNA, 25 bp, Homo sapien
ttcaaggcgcgtgagagggggggcc

SEQ ID NO: 2913575 - DNA, 25 bp, Homo sapien
caaggcgcgtgagagggggggccgg

SEQ ID NO: 2913576 - DNA, 25 bp, Homo sapien
tccaaggcttttgcttgtgagagct

SEQ ID NO: 2913577 - DNA, 25 bp, Homo sapien
cctgggccccgaatataccggcttg

SEQ ID NO: 2913578 - DNA, 25 bp, Homo sapien
cctgagatcagaatgatgtgtccac

SEQ ID NO: 2913579 - DNA, 25 bp, Homo sapien
ttctgtgtcacgcaaaaggccactt

SEQ ID NO: 2913580 - DNA, 25 bp, Homo sapien
tatgagagccccacagtctagtgga

SEQ ID NO: 2913581 - DNA, 25 bp, Homo sapien
gaaaggtcctattttgcccactcca

SEQ ID NO: 2913582 - DNA, 25 bp, Homo sapien
caaaaaggattacagaccagcagac

SEQ ID NO: 2913583 - DNA, 25 bp, Homo sapien
tactataggtcacgggcaagaattt

SEQ ID NO: 2913584 - DNA, 25 bp, Homo sapien
gatgttgccgacagatgtcttgagg

SEQ ID NO: 2913585 - DNA, 25 bp, Homo sapien
tggctctgtgagagcaaaagggccc

SEQ ID NO: 2913586 - DNA, 25 bp, Homo sapien
tccagcattccaaagtcaaggatgt

SEQ ID NO: 2913587 - DNA, 25 bp, Homo sapien
caggctttcttcgatccaggtggct

SEQ ID NO: 2913588 - DNA, 25 bp, Homo sapien
tattcaacaacgatagcagccaagg

SEQ ID NO: 2913589 - DNA, 25 bp, Homo sapien
caagagccccaggagtagtggatac

SEQ ID NO: 2913590 - DNA, 25 bp, Homo sapien
agagccagaggtttcacagggccca

SEQ ID NO: 2913591 - DNA, 25 bp, Homo sapien
tgagctttgaacctcgacagtctgg

SEQ ID NO: 2913592 - DNA, 25 bp, Homo sapien
tagaaacagattggtaataaagttc

SEQ ID NO: 2913593 - DNA, 25 bp, Homo sapien
cactgagcagttgccaccttgactt

SEQ ID NO: 2913594 - DNA, 25 bp, Homo sapien
gaatcagtcaggatgtgctagccat

SEQ ID NO: 2913595 - DNA, 25 bp, Homo sapien
ggaaagtgagttctgtggatcctca

SEQ ID NO: 2913596 - DNA, 25 bp, Homo sapien
tttgagagagggagtcttgcactgt

SEQ ID NO: 2913597 - DNA, 25 bp, Homo sapien
agtgcccggcacactaggccctcca

SEQ ID NO: 2913598 - DNA, 25 bp, Homo sapien
gcacactaggccctccatcagtcat

SEQ ID NO: 2913599 - DNA, 25 bp, Homo sapien
atgctacgccctccttggggtctct

SEQ ID NO: 2913600 - DNA, 25 bp, Homo sapien
tcctgtggacacagatgctacgccc

SEQ ID NO: 2913601 - DNA, 25 bp, Homo sapien
tgtatgtgtgaaagtgcacgtgacc

SEQ ID NO: 2913602 - DNA, 25 bp, Homo sapien
tgaaaagcaggcttctcagtcacct

SEQ ID NO: 2913603 - DNA, 25 bp, Homo sapien
cacgtgaccaggtgcgtgtctgtgt

SEQ ID NO: 2913604 - DNA, 25 bp, Homo sapien
gctgccaccctggtgccaagtgtat

SEQ ID NO: 2913605 - DNA, 25 bp, Homo sapien
taaagcccccgctgggttctgattc

SEQ ID NO: 2913606 - DNA, 25 bp, Homo sapien
gctaaagcccccgctgggttctgat

SEQ ID NO: 2913607 - DNA, 25 bp, Homo sapien
ctaaagcccccgctgggttctgatt

SEQ ID NO: 2913608 - DNA, 25 bp, Homo sapien
aaagcccccgctgggttctgattct

SEQ ID NO: 2913609 - DNA, 25 bp, Homo sapien
tgtggccgtatatccacgtagggat

SEQ ID NO: 2913610 - DNA, 25 bp, Homo sapien
gcaactgtggccgtatatccacgta

SEQ ID NO: 2913611 - DNA, 25 bp, Homo sapien
taccccggggtctccatggggctca

SEQ ID NO: 2913612 - DNA, 25 bp, Homo sapien
cgtatatccacgtagggatggatgt

SEQ ID NO: 2913613 - DNA, 25 bp, Homo sapien
tctgtgccatacagactgatctgca

SEQ ID NO: 2913614 - DNA, 25 bp, Homo sapien
ctgtgccatacagactgatctgcaa

SEQ ID NO: 2913615 - DNA, 25 bp, Homo sapien
tcagcgccagcgtctgagtgaagtc

SEQ ID NO: 2913616 - DNA, 25 bp, Homo sapien
cgccagcgtctgagtgaagtcaaat

SEQ ID NO: 2913617 - DNA, 25 bp, Homo sapien
gtgaagtcaaatctgctgaacttaa

SEQ ID NO: 2913618 - DNA, 25 bp, Homo sapien
tgctgaacttaaaagaggcaaggcc

SEQ ID NO: 2913619 - DNA, 25 bp, Homo sapien
gcgcagcgcgacgtgtagtagcggt

SEQ ID NO: 2913620 - DNA, 25 bp, Homo sapien
ccgcatcagagacgcagcttggaga

SEQ ID NO: 2913621 - DNA, 25 bp, Homo sapien
gcttggagatcctgccgcttgccgg

SEQ ID NO: 2913622 - DNA, 25 bp, Homo sapien
gcagaagagccgcttaaggcgccaa

SEQ ID NO: 2913623 - DNA, 25 bp, Homo sapien
gtgtatcaatgtggctgtatatttc

SEQ ID NO: 2913624 - DNA, 25 bp, Homo sapien
ctgtgcgtttaggtccgtgtgtgta

SEQ ID NO: 2913625 - DNA, 25 bp, Homo sapien
taggtccgtgtgtgtatcaatgtgg

SEQ ID NO: 2913626 - DNA, 25 bp, Homo sapien
tcttggctgtgcgtttaggtccgtg

SEQ ID NO: 2913627 - DNA, 25 bp, Homo sapien
gcgcgtctcgccgtctccctttccc

SEQ ID NO: 2913628 - DNA, 25 bp, Homo sapien
gcctcttccagaacgcggtggccag

SEQ ID NO: 2913629 - DNA, 25 bp, Homo sapien
cggcgctgcgcgtctcgccgtctcc

SEQ ID NO: 2913630 - DNA, 25 bp, Homo sapien
tctcctctcgcgcacgctctccctc

SEQ ID NO: 2913631 - DNA, 25 bp, Homo sapien
gggccgcagcggcccgaggaagcgc

SEQ ID NO: 2913632 - DNA, 25 bp, Homo sapien
ttaagcgctggcgggcggcgaggag

SEQ ID NO: 2913633 - DNA, 25 bp, Homo sapien
gaggaggggccgcagcggcccgagg

SEQ ID NO: 2913634 - DNA, 25 bp, Homo sapien
gcggcgaggaggggccgcagcggcc

SEQ ID NO: 2913635 - DNA, 25 bp, Homo sapien
tcagccactagggtctcatggtcca

SEQ ID NO: 2913636 - DNA, 25 bp, Homo sapien
cttgaaaacggaaactcgaggtctg

SEQ ID NO: 2913637 - DNA, 25 bp, Homo sapien
tgccatagggcatgagcagcagtga

SEQ ID NO: 2913638 - DNA, 25 bp, Homo sapien
cacaagggctagatgcttccaattg

SEQ ID NO: 2913639 - DNA, 25 bp, Homo sapien
gtgtgtggccctgcaatgccgacct

SEQ ID NO: 2913640 - DNA, 25 bp, Homo sapien
tagctctgccgatagtgccctgtgg

SEQ ID NO: 2913641 - DNA, 25 bp, Homo sapien
caacctctggcctatgtgctcaagc

SEQ ID NO: 2913642 - DNA, 25 bp, Homo sapien
gatagaatctgcctcggatcaggga

SEQ ID NO: 2913643 - DNA, 25 bp, Homo sapien
ggcatgtgactgtaagtcccaacta

SEQ ID NO: 2913644 - DNA, 25 bp, Homo sapien
ttatcaagtgcctacccatggtgag

SEQ ID NO: 2913645 - DNA, 25 bp, Homo sapien
catagcactgggtacagattcctcc

SEQ ID NO: 2913646 - DNA, 25 bp, Homo sapien
caagcaatgcttaggatgtggaacc

SEQ ID NO: 2913647 - DNA, 25 bp, Homo sapien
tgaatgaaaaccacgccaaggctgc

SEQ ID NO: 2913648 - DNA, 25 bp, Homo sapien
ttgaatgaaaaccacgccaaggctg

SEQ ID NO: 2913649 - DNA, 25 bp, Homo sapien
ttttgaatgaaaaccacgccaaggc

SEQ ID NO: 2913650 - DNA, 25 bp, Homo sapien
gaatgaaaaccacgccaaggctgcc

SEQ ID NO: 2913651 - DNA, 25 bp, Homo sapien
cagctcacttacctccctgcttaaa

SEQ ID NO: 2913652 - DNA, 25 bp, Homo sapien
tttaaaaacacatgctggaccagct

SEQ ID NO: 2913653 - DNA, 25 bp, Homo sapien
ttaaaaacacatgctggaccagctc

SEQ ID NO: 2913654 - DNA, 25 bp, Homo sapien
taaaaacacatgctggaccagctca

SEQ ID NO: 2913655 - DNA, 25 bp, Homo sapien
gtttggcagccgtatctttcaaaaa

SEQ ID NO: 2913656 - DNA, 25 bp, Homo sapien
ttgtttggcagccgtatctttcaaa

SEQ ID NO: 2913657 - DNA, 25 bp, Homo sapien
tgtttggcagccgtatctttcaaaa

SEQ ID NO: 2913658 - DNA, 25 bp, Homo sapien
tttggcagccgtatctttcaaaaac

SEQ ID NO: 2913659 - DNA, 25 bp, Homo sapien
taagtgcctttttactgggccctca

SEQ ID NO: 2913660 - DNA, 25 bp, Homo sapien
ggagttctaatcatggctaagccag

SEQ ID NO: 2913661 - DNA, 25 bp, Homo sapien
caatgacttatttgggcatctgccc

SEQ ID NO: 2913662 - DNA, 25 bp, Homo sapien
tgaaaagcacctaatagcatgtggc

SEQ ID NO: 2913663 - DNA, 25 bp, Homo sapien
cctggagctactcttccatacagac

SEQ ID NO: 2913664 - DNA, 25 bp, Homo sapien
cacttcctggagctactcttccata

SEQ ID NO: 2913665 - DNA, 25 bp, Homo sapien
tcctggagctactcttccatacaga

SEQ ID NO: 2913666 - DNA, 25 bp, Homo sapien
ctggagctactcttccatacagacc

SEQ ID NO: 2913667 - DNA, 25 bp, Homo sapien
tgcttgagatccaccactataagag

SEQ ID NO: 2913668 - DNA, 25 bp, Homo sapien
gcctactatgttcgggtgcttgaga

SEQ ID NO: 2913669 - DNA, 25 bp, Homo sapien
tccgcagtgtgacggccaatcaggg

SEQ ID NO: 2913670 - DNA, 25 bp, Homo sapien
caaaaggcaggaaatacgagtagtc

SEQ ID NO: 2913671 - DNA, 25 bp, Homo sapien
gagcagaaatgactgggatcaaacc

SEQ ID NO: 2913672 - DNA, 25 bp, Homo sapien
taaagtgaatgctgagagccagatc

SEQ ID NO: 2913673 - DNA, 25 bp, Homo sapien
gggatcaaacccctggccagtcaca

SEQ ID NO: 2913674 - DNA, 25 bp, Homo sapien
tggcgagtctctgagcaagcacctc

SEQ ID NO: 2913675 - DNA, 25 bp, Homo sapien
ttatcgactctgccaatcatcgggc

SEQ ID NO: 2913676 - DNA, 25 bp, Homo sapien
tcgactctgccaatcatcgggccag

SEQ ID NO: 2913677 - DNA, 25 bp, Homo sapien
ccaatcatcgggccagcccccatgg

SEQ ID NO: 2913678 - DNA, 25 bp, Homo sapien
cagcccccatgggagcctcttgctt

SEQ ID NO: 2913679 - DNA, 25 bp, Homo sapien
ccagctacaaatgccagcggggaac

SEQ ID NO: 2913680 - DNA, 25 bp, Homo sapien
tctggcctcggaatcccagctacaa

SEQ ID NO: 2913681 - DNA, 25 bp, Homo sapien
aatgccagcggggaaccacctggag

SEQ ID NO: 2913682 - DNA, 25 bp, Homo sapien
tgtgataaatgatctctgggttcag

SEQ ID NO: 2913683 - DNA, 25 bp, Homo sapien
cagactgcttttgctccttggccac

SEQ ID NO: 2913684 - DNA, 25 bp, Homo sapien
tgctttaggaagctccatgcatctg

SEQ ID NO: 2913685 - DNA, 25 bp, Homo sapien
tgtgccacgaaaatagccctaatgg

SEQ ID NO: 2913686 - DNA, 25 bp, Homo sapien
cctatcttgaggagtacaaccaggc

SEQ ID NO: 2913687 - DNA, 25 bp, Homo sapien
tgtccatgtgtgtgctatgccctcc

SEQ ID NO: 2913688 - DNA, 25 bp, Homo sapien
ccagggctcattgggaagcatgtcc

SEQ ID NO: 2913689 - DNA, 25 bp, Homo sapien
aagtcagtgctctggacggtgtgca

SEQ ID NO: 2913690 - DNA, 25 bp, Homo sapien
gaggattcagtaggctcctcaggcc

SEQ ID NO: 2913691 - DNA, 25 bp, Homo sapien
cccgggtgaccgcatctcctcccac

SEQ ID NO: 2913692 - DNA, 25 bp, Homo sapien
tcttcccgggtgaccgcatctcctc

SEQ ID NO: 2913693 - DNA, 25 bp, Homo sapien
cttcccgggtgaccgcatctcctcc

SEQ ID NO: 2913694 - DNA, 25 bp, Homo sapien
gggtgaccgcatctcctcccacaac

SEQ ID NO: 2913695 - DNA, 25 bp, Homo sapien
cagcagtgcacggataaagagcagt

SEQ ID NO: 2913696 - DNA, 25 bp, Homo sapien
tccggactctccattcagcatttgt

SEQ ID NO: 2913697 - DNA, 25 bp, Homo sapien
tgacagcagtgcacggataaagagc

SEQ ID NO: 2913698 - DNA, 25 bp, Homo sapien
tcctgacagcagtgcacggataaag

SEQ ID NO: 2913699 - DNA, 25 bp, Homo sapien
gagtgaacagaatactttctgcggt

SEQ ID NO: 2913700 - DNA, 25 bp, Homo sapien
ttgtaggagaatccctcttggcggg

SEQ ID NO: 2913701 - DNA, 25 bp, Homo sapien
tgtacatagctagcttggcctggcc

SEQ ID NO: 2913702 - DNA, 25 bp, Homo sapien
tctgcggttcagaatactctgtgca

SEQ ID NO: 2913703 - DNA, 25 bp, Homo sapien
cgcccctgcgcgggcatcgcacggc

SEQ ID NO: 2913704 - DNA, 25 bp, Homo sapien
cccgcccctgcgcgggcatcgcacg

SEQ ID NO: 2913705 - DNA, 25 bp, Homo sapien
ccgcccctgcgcgggcatcgcacgg

SEQ ID NO: 2913706 - DNA, 25 bp, Homo sapien
caaggtcacggcaacctcgggctct

SEQ ID NO: 2913707 - DNA, 25 bp, Homo sapien
cagttctccgccggcgaagggcgcc

SEQ ID NO: 2913708 - DNA, 25 bp, Homo sapien
gcaacctcgggctctgccggcagcg

SEQ ID NO: 2913709 - DNA, 25 bp, Homo sapien
gccagttctccgccggcgaagggcg

SEQ ID NO: 2913710 - DNA, 25 bp, Homo sapien
aatgctgacagaaccgatgcaaagg

SEQ ID NO: 2913711 - DNA, 25 bp, Homo sapien
gatctgcatgggctcgatggcaccc

SEQ ID NO: 2913712 - DNA, 25 bp, Homo sapien
aggaggaacagtgctcacgggccca

SEQ ID NO: 2913713 - DNA, 25 bp, Homo sapien
gggtcaaatgctgacagaaccgatg

SEQ ID NO: 2913714 - DNA, 25 bp, Homo sapien
gggtcgcagacagttaacagggcaa

SEQ ID NO: 2913715 - DNA, 25 bp, Homo sapien
gacacaatcagtcctgggcctagca

SEQ ID NO: 2913716 - DNA, 25 bp, Homo sapien
tattcaccactgaacaaaaagcgtc

SEQ ID NO: 2913717 - DNA, 25 bp, Homo sapien
gcccttgtaggaggctgcatgataa

SEQ ID NO: 2913718 - DNA, 25 bp, Homo sapien
accaaggcaactactgtcccctggg

SEQ ID NO: 2913719 - DNA, 25 bp, Homo sapien
cagcgaaatgggcacagtgtaggcc

SEQ ID NO: 2913720 - DNA, 25 bp, Homo sapien
aggccccagtcagcgaaatgggcac

SEQ ID NO: 2913721 - DNA, 25 bp, Homo sapien
cctcagggagaggtcactaggccta

SEQ ID NO: 2913722 - DNA, 25 bp, Homo sapien
ctttggaggaacagtctcttggagc

SEQ ID NO: 2913723 - DNA, 25 bp, Homo sapien
gggctcccactttggaggaacagtc

SEQ ID NO: 2913724 - DNA, 25 bp, Homo sapien
ctggaccacgggtggacacccctgt

SEQ ID NO: 2913725 - DNA, 25 bp, Homo sapien
agcagcggcagtgactggaccacgg

SEQ ID NO: 2913726 - DNA, 25 bp, Homo sapien
ataatagtccttggcgagcagccgc

SEQ ID NO: 2913727 - DNA, 25 bp, Homo sapien
taggcgtgatgtttcctgcgaggtc

SEQ ID NO: 2913728 - DNA, 25 bp, Homo sapien
gtaaggctgcgggttataatagtcc

SEQ ID NO: 2913729 - DNA, 25 bp, Homo sapien
gactcggctgcctgtaattctctag

SEQ ID NO: 2913730 - DNA, 25 bp, Homo sapien
gagcttggggtatgccaggggctgc

SEQ ID NO: 2913731 - DNA, 25 bp, Homo sapien
gtgagtccgaaagggcacctgggcg

SEQ ID NO: 2913732 - DNA, 25 bp, Homo sapien
agaggggaggcaatgtcgttctgca

SEQ ID NO: 2913733 - DNA, 25 bp, Homo sapien
ttctcatcatacttggccacccctg

SEQ ID NO: 2913734 - DNA, 25 bp, Homo sapien
tggggaaggactgggaatgctgagg

SEQ ID NO: 2913735 - DNA, 25 bp, Homo sapien
gtggggaaggactgggaatgctgag

SEQ ID NO: 2913736 - DNA, 25 bp, Homo sapien
cggtgctgtgcaactcttataggag

SEQ ID NO: 2913737 - DNA, 25 bp, Homo sapien
gctgtgcaactcttataggagtggg

SEQ ID NO: 2913738 - DNA, 25 bp, Homo sapien
cagtcggtgctgtgcaactcttata

SEQ ID NO: 2913739 - DNA, 25 bp, Homo sapien
gctggcagtcagcggcctgtcatgg

SEQ ID NO: 2913740 - DNA, 25 bp, Homo sapien
tggtcatagctgaggcggcccgact

SEQ ID NO: 2913741 - DNA, 25 bp, Homo sapien
aggcggcccgactggtaggcatgaa

SEQ ID NO: 2913742 - DNA, 25 bp, Homo sapien
ggcggcccgactggtaggcatgaag

SEQ ID NO: 2913743 - DNA, 25 bp, Homo sapien
ctgaggcggcccgactggtaggcat

SEQ ID NO: 2913744 - DNA, 25 bp, Homo sapien
aactgtaggaaggtgagcggcccac

SEQ ID NO: 2913745 - DNA, 25 bp, Homo sapien
gccttgctgcccgtagtgctgatac

SEQ ID NO: 2913746 - DNA, 25 bp, Homo sapien
ttctccaggtttggcatcagcggcg

SEQ ID NO: 2913747 - DNA, 25 bp, Homo sapien
gctgaaggtctggtagtactgctct

SEQ ID NO: 2913748 - DNA, 25 bp, Homo sapien
ggggcttgcagttgccagcctgggt

SEQ ID NO: 2913749 - DNA, 25 bp, Homo sapien
ctgagatccgacagcaggttctcag

SEQ ID NO: 2913750 - DNA, 25 bp, Homo sapien
aggggcttgcagttgccagcctggg

SEQ ID NO: 2913751 - DNA, 25 bp, Homo sapien
agatccgacagcaggttctcaggga

SEQ ID NO: 2913752 - DNA, 25 bp, Homo sapien
tagcgaaggccacggaagggtcttc

SEQ ID NO: 2913753 - DNA, 25 bp, Homo sapien
gccttcgagttgctgttgaccctgg

SEQ ID NO: 2913754 - DNA, 25 bp, Homo sapien
ccttggtaagctcgccagggtgcaa

SEQ ID NO: 2913755 - DNA, 25 bp, Homo sapien
tcctggacacgaggttcttgacacc

SEQ ID NO: 2913756 - DNA, 25 bp, Homo sapien
ccacctgcctcctccttcaccccac

SEQ ID NO: 2913757 - DNA, 25 bp, Homo sapien
agcagcccacctgcctcctccttca

SEQ ID NO: 2913758 - DNA, 25 bp, Homo sapien
ctgcagcagcccacctgcctcctcc

SEQ ID NO: 2913759 - DNA, 25 bp, Homo sapien
ctgcctcctccttcaccccacccac

SEQ ID NO: 2913760 - DNA, 25 bp, Homo sapien
ggacctttgactcggtgcccactgt

SEQ ID NO: 2913761 - DNA, 25 bp, Homo sapien
tggaacagcagtgccggctgtcctc

SEQ ID NO: 2913762 - DNA, 25 bp, Homo sapien
cccaggagctcacatagggaggagt

SEQ ID NO: 2913763 - DNA, 25 bp, Homo sapien
aggatgacggactcccctgagaggt

SEQ ID NO: 2913764 - DNA, 25 bp, Homo sapien
tgagcccacggtctttgtcggaaag

SEQ ID NO: 2913765 - DNA, 25 bp, Homo sapien
gaaggccgacttccttttgagcgca

SEQ ID NO: 2913766 - DNA, 25 bp, Homo sapien
tgagagaacgagtacacatcctggg

SEQ ID NO: 2913767 - DNA, 25 bp, Homo sapien
cgtgaccgaaggatcatggagcgct

SEQ ID NO: 2913768 - DNA, 25 bp, Homo sapien
tctgcataacggatcagccccagaa

SEQ ID NO: 2913769 - DNA, 25 bp, Homo sapien
ccagaagttgggagcttctgcccgg

SEQ ID NO: 2913770 - DNA, 25 bp, Homo sapien
ccttttaaggatctgttggttggat

SEQ ID NO: 2913771 - DNA, 25 bp, Homo sapien
agccccagaagttgggagcttctgc

SEQ ID NO: 2913772 - DNA, 25 bp, Homo sapien
tttgaaacagtcagtagaagacagt

SEQ ID NO: 2913773 - DNA, 25 bp, Homo sapien
tgaaacagtcagtagaagacagttt

SEQ ID NO: 2913774 - DNA, 25 bp, Homo sapien
cagtcagtagaagacagtttcttac

SEQ ID NO: 2913775 - DNA, 25 bp, Homo sapien
aacagtcagtagaagacagtttctt

SEQ ID NO: 2913776 - DNA, 25 bp, Homo sapien
aagatagggccgcttctccagcggg

SEQ ID NO: 2913777 - DNA, 25 bp, Homo sapien
tcaggagcagagccgggccaagata

SEQ ID NO: 2913778 - DNA, 25 bp, Homo sapien
tccagcgggcctttggagagtccat

SEQ ID NO: 2913779 - DNA, 25 bp, Homo sapien
ctcctcttcttaggcgccagggcag

SEQ ID NO: 2913780 - DNA, 25 bp, Homo sapien
cggccccgagtgaggcgcttccgct

SEQ ID NO: 2913781 - DNA, 25 bp, Homo sapien
actggccccttgtgtgccactggcc

SEQ ID NO: 2913782 - DNA, 25 bp, Homo sapien
gaggcgcttccgcttggaatagctg

SEQ ID NO: 2913783 - DNA, 25 bp, Homo sapien
ttccgcttggaatagctgctgtagt

SEQ ID NO: 2913784 - DNA, 25 bp, Homo sapien
gctgctgtcgtcgtcgcttggcacg

SEQ ID NO: 2913785 - DNA, 25 bp, Homo sapien
cggatttcaggctctgcgggatcca

SEQ ID NO: 2913786 - DNA, 25 bp, Homo sapien
aggaaatgtacttgaggcggatttc

SEQ ID NO: 2913787 - DNA, 25 bp, Homo sapien
gacctcagccgcttgcaagaggaaa

SEQ ID NO: 2913788 - DNA, 25 bp, Homo sapien
tctccaggggagttgacaacagtgc

SEQ ID NO: 2913789 - DNA, 25 bp, Homo sapien
tatggtggtgaacgcgtctcgcttc

SEQ ID NO: 2913790 - DNA, 25 bp, Homo sapien
tggtgaacgcgtctcgcttctccac

SEQ ID NO: 2913791 - DNA, 25 bp, Homo sapien
cagtgcatatggtggtgaacgcgtc

SEQ ID NO: 2913792 - DNA, 25 bp, Homo sapien
gatggagcctccagggagtgtggcc

SEQ ID NO: 2913793 - DNA, 25 bp, Homo sapien
agggagtgtggccagggaggccccg

SEQ ID NO: 2913794 - DNA, 25 bp, Homo sapien
tgcaggatggagcctccagggagtg

SEQ ID NO: 2913795 - DNA, 25 bp, Homo sapien
ggagcctccagggagtgtggccagg

SEQ ID NO: 2913796 - DNA, 25 bp, Homo sapien
gcactcatgtttgcgacccttgtcg

SEQ ID NO: 2913797 - DNA, 25 bp, Homo sapien
caggccccaagtgcatcgtggagga

SEQ ID NO: 2913798 - DNA, 25 bp, Homo sapien
gagtgttctctcaagcggcagcgag

SEQ ID NO: 2913799 - DNA, 25 bp, Homo sapien
cagtgttcagggtagtagggcccac

SEQ ID NO: 2913800 - DNA, 25 bp, Homo sapien
gtcaccaggcgccagagccacagtg

SEQ ID NO: 2913801 - DNA, 25 bp, Homo sapien
aagagtgaagcaaacctgaggccgg

SEQ ID NO: 2913802 - DNA, 25 bp, Homo sapien
ctggaccagctgcttggagtggacg

SEQ ID NO: 2913803 - DNA, 25 bp, Homo sapien
acaggacagtcacaccaagaaggcc

SEQ ID NO: 2913804 - DNA, 25 bp, Homo sapien
cctggccgcctactggctctaacag

SEQ ID NO: 2913805 - DNA, 25 bp, Homo sapien
gcgcctggccgcctactggctctaa

SEQ ID NO: 2913806 - DNA, 25 bp, Homo sapien
ggctctaacagccctctgtgggtcc

SEQ ID NO: 2913807 - DNA, 25 bp, Homo sapien
tggccgcctactggctctaacagcc

SEQ ID NO: 2913808 - DNA, 25 bp, Homo sapien
gtggcagcacccaatggtggccccg

SEQ ID NO: 2913809 - DNA, 25 bp, Homo sapien
tgtggaggcatcctttgtggcagca

SEQ ID NO: 2913810 - DNA, 25 bp, Homo sapien
catcgctggcacacgggtagtggta

SEQ ID NO: 2913811 - DNA, 25 bp, Homo sapien
ctgcatcgctggcacacgggtagtg

SEQ ID NO: 2913812 - DNA, 25 bp, Homo sapien
ttgcccagcagaggtctaggcagac

SEQ ID NO: 2913813 - DNA, 25 bp, Homo sapien
tatgcttctatcttccctcactgct

SEQ ID NO: 2913814 - DNA, 25 bp, Homo sapien
tccccctggactgcttggatgggct

SEQ ID NO: 2913815 - DNA, 25 bp, Homo sapien
ctcctgttcctgggcgggctcgtac

SEQ ID NO: 2913816 - DNA, 25 bp, Homo sapien
aactgtgtgcagaggtatcaaccaa

SEQ ID NO: 2913817 - DNA, 25 bp, Homo sapien
catcatacaggtagggaaactgtgt

SEQ ID NO: 2913818 - DNA, 25 bp, Homo sapien
gcagcaccgtgtgggtagtgttcat

SEQ ID NO: 2913819 - DNA, 25 bp, Homo sapien
gaggctggacccaaaataggactga

SEQ ID NO: 2913820 - DNA, 25 bp, Homo sapien
tacactttgtatgtccacagctgcc

SEQ ID NO: 2913821 - DNA, 25 bp, Homo sapien
ccgtgtggccaaagggaactgccgt

SEQ ID NO: 2913822 - DNA, 25 bp, Homo sapien
ctgatggtgggcgagactcgatcct

SEQ ID NO: 2913823 - DNA, 25 bp, Homo sapien
gatcctgagcccagctatctacact

SEQ ID NO: 2913824 - DNA, 25 bp, Homo sapien
cctgggcactcactgacaggttggc

SEQ ID NO: 2913825 - DNA, 25 bp, Homo sapien
agagaagtttcggtggttaggacag

SEQ ID NO: 2913826 - DNA, 25 bp, Homo sapien
aaagaaaagttctcttcgatgaata

SEQ ID NO: 2913827 - DNA, 25 bp, Homo sapien
aagttctcttcgatgaatatgcaac

SEQ ID NO: 2913828 - DNA, 25 bp, Homo sapien
agaaaagttctcttcgatgaatatg

SEQ ID NO: 2913829 - DNA, 25 bp, Homo sapien
aaaagttctcttcgatgaatatgca

SEQ ID NO: 2913830 - DNA, 25 bp, Homo sapien
ctgcccatgccccgacgcctgcggg

SEQ ID NO: 2913831 - DNA, 25 bp, Homo sapien
gctgcccatgccccgacgcctgcgg

SEQ ID NO: 2913832 - DNA, 25 bp, Homo sapien
tggctgcccatgccccgacgcctgc

SEQ ID NO: 2913833 - DNA, 25 bp, Homo sapien
ggctgcccatgccccgacgcctgcg

SEQ ID NO: 2913834 - DNA, 25 bp, Homo sapien
ccttcagctccgtgccaccgtcccg

SEQ ID NO: 2913835 - DNA, 25 bp, Homo sapien
agctccgtgccaccgtcccgcgccc

SEQ ID NO: 2913836 - DNA, 25 bp, Homo sapien
cttcagctccgtgccaccgtcccgc

SEQ ID NO: 2913837 - DNA, 25 bp, Homo sapien
tcagctccgtgccaccgtcccgcgc

SEQ ID NO: 2913838 - DNA, 25 bp, Homo sapien
ctccggcggctcctccggccgttgg

SEQ ID NO: 2913839 - DNA, 25 bp, Homo sapien
ggcgggcaggcgggctccggcggct

SEQ ID NO: 2913840 - DNA, 25 bp, Homo sapien
gctccggcggctcctccggccgttg

SEQ ID NO: 2913841 - DNA, 25 bp, Homo sapien
gggcaggcgggctccggcggctcct

SEQ ID NO: 2913842 - DNA, 25 bp, Homo sapien
cgtcgtcttgagattccagagggaa

SEQ ID NO: 2913843 - DNA, 25 bp, Homo sapien
tccagagggaaagtgtccccaggac

SEQ ID NO: 2913844 - DNA, 25 bp, Homo sapien
atcaaggatcggctctggaccagcg

SEQ ID NO: 2913845 - DNA, 25 bp, Homo sapien
cagcacccacgtggaatgtgtgcca

SEQ ID NO: 2913846 - DNA, 25 bp, Homo sapien
cgcacggtttgttccaaaggctccg

SEQ ID NO: 2913847 - DNA, 25 bp, Homo sapien
cagaggccaaagggtgtcccagtcc

SEQ ID NO: 2913848 - DNA, 25 bp, Homo sapien
gaaccgcacgagagatctggcaaag

SEQ ID NO: 2913849 - DNA, 25 bp, Homo sapien
aacccctaactgagcatagcccagg

SEQ ID NO: 2913850 - DNA, 25 bp, Homo sapien
gtccctggtggtgcacaacggtcgc

SEQ ID NO: 2913851 - DNA, 25 bp, Homo sapien
cctgctcccgtgcagagtaggcgcg

SEQ ID NO: 2913852 - DNA, 25 bp, Homo sapien
tacacgaaatctagcgctgtccctg

SEQ ID NO: 2913853 - DNA, 25 bp, Homo sapien
gggagaagcgagcatgttcccaaca

SEQ ID NO: 2913854 - DNA, 25 bp, Homo sapien
cagtcatatgtacaggaagttgcta

SEQ ID NO: 2913855 - DNA, 25 bp, Homo sapien
gacaagtggcgtcgcggtagcccct

SEQ ID NO: 2913856 - DNA, 25 bp, Homo sapien
gccagatataatacacacgtttacc

SEQ ID NO: 2913857 - DNA, 25 bp, Homo sapien
cctatcgaagcgtggacagagctga

SEQ ID NO: 2913858 - DNA, 25 bp, Homo sapien
aacatttacagtcttcatatatatt

SEQ ID NO: 2913859 - DNA, 25 bp, Homo sapien
atacatatatatacactatataacg

SEQ ID NO: 2913860 - DNA, 25 bp, Homo sapien
ttaacatttacagtcttcatatata

SEQ ID NO: 2913861 - DNA, 25 bp, Homo sapien
acatatatatacactatataacgag

SEQ ID NO: 2913862 - DNA, 25 bp, Homo sapien
caaaacaatcgttgtatctttattg

SEQ ID NO: 2913863 - DNA, 25 bp, Homo sapien
gaagcaatatactaataagaacact

SEQ ID NO: 2913864 - DNA, 25 bp, Homo sapien
cttttagaaacagctcgatacacac

SEQ ID NO: 2913865 - DNA, 25 bp, Homo sapien
cagtgtgaagcaatatactaataag

SEQ ID NO: 2913866 - DNA, 25 bp, Homo sapien
cacactcgagaagcttggcgatcgc

SEQ ID NO: 2913867 - DNA, 25 bp, Homo sapien
catagtgtaggtcagcgtgcttagc

SEQ ID NO: 2913868 - DNA, 25 bp, Homo sapien
cctgcgtcgaagctttgaaggccga

SEQ ID NO: 2913869 - DNA, 25 bp, Homo sapien
agaggcctctctctccgtcgtggga

SEQ ID NO: 2913870 - DNA, 25 bp, Homo sapien
caccacgtttggctcgttgcagaga

SEQ ID NO: 2913871 - DNA, 25 bp, Homo sapien
ggcagtaatgttgcaaagcagctcc

SEQ ID NO: 2913872 - DNA, 25 bp, Homo sapien
gaataagtgctcgagaccaccacgt

SEQ ID NO: 2913873 - DNA, 25 bp, Homo sapien
tgctactaggcgaggaacggttcag

SEQ ID NO: 2913874 - DNA, 25 bp, Homo sapien
aaattgtgcacccaaggtgcctcag

SEQ ID NO: 2913875 - DNA, 25 bp, Homo sapien
gagaggctcttccttaaattgtgca

SEQ ID NO: 2913876 - DNA, 25 bp, Homo sapien
tcagctgccttactctagactggcc

SEQ ID NO: 2913877 - DNA, 25 bp, Homo sapien
tgggccgcaatttgggtgccacagt

SEQ ID NO: 2913878 - DNA, 25 bp, Homo sapien
gggtcctgatagaatcagggcagga

SEQ ID NO: 2913879 - DNA, 25 bp, Homo sapien
ttgggtcctgatagaatcagggcag

SEQ ID NO: 2913880 - DNA, 25 bp, Homo sapien
tcctgatagaatcagggcaggagag

SEQ ID NO: 2913881 - DNA, 25 bp, Homo sapien
agagaggtttgaaggtagaactggg

SEQ ID NO: 2913882 - DNA, 25 bp, Homo sapien
aagcgcatgccatgaggcctgccca

SEQ ID NO: 2913883 - DNA, 25 bp, Homo sapien
ccttgtttgggttgtaggcttctgt

SEQ ID NO: 2913884 - DNA, 25 bp, Homo sapien
tcatggcctcacagaatacatcggc

SEQ ID NO: 2913885 - DNA, 25 bp, Homo sapien
tctgtgctggtcagcgttgggccct

SEQ ID NO: 2913886 - DNA, 25 bp, Homo sapien
gctgagaacacgaggaccgccgact

SEQ ID NO: 2913887 - DNA, 25 bp, Homo sapien
ccagttaggaggatcaaggaagtgc

SEQ ID NO: 2913888 - DNA, 25 bp, Homo sapien
ggtgcgtcccattccgggaagagct

SEQ ID NO: 2913889 - DNA, 25 bp, Homo sapien
tgccactgctggatacacgaccagc

SEQ ID NO: 2913890 - DNA, 25 bp, Homo sapien
ctagtggggaggaggaaacgtggct

SEQ ID NO: 2913891 - DNA, 25 bp, Homo sapien
tgctgagggtaattccgcacacctg

SEQ ID NO: 2913892 - DNA, 25 bp, Homo sapien
cagtgataagtatgtgccctgggcc

SEQ ID NO: 2913893 - DNA, 25 bp, Homo sapien
caaggtgtctgaattggtgccgacc

SEQ ID NO: 2913894 - DNA, 25 bp, Homo sapien
tgtaattgccatctcgcaggtgctg

SEQ ID NO: 2913895 - DNA, 25 bp, Homo sapien
agtagcttgggactataggtgcgtg

SEQ ID NO: 2913896 - DNA, 25 bp, Homo sapien
gagtagcttgggactataggtgcgt

SEQ ID NO: 2913897 - DNA, 25 bp, Homo sapien
tgcgtgccaccatgcctggctaatt

SEQ ID NO: 2913898 - DNA, 25 bp, Homo sapien
gaaaccagatgacgaaattccagcc

SEQ ID NO: 2913899 - DNA, 25 bp, Homo sapien
tatccctacagctggatctgggagg

SEQ ID NO: 2913900 - DNA, 25 bp, Homo sapien
tgctctgatctagtcccagcttgtg

SEQ ID NO: 2913901 - DNA, 25 bp, Homo sapien
gcctgcccgtgagaaagcatcatta

SEQ ID NO: 2913902 - DNA, 25 bp, Homo sapien
ccacgttccttgggcgtgctcaacg

SEQ ID NO: 2913903 - DNA, 25 bp, Homo sapien
gttccttgggcgtgctcaacgctcc

SEQ ID NO: 2913904 - DNA, 25 bp, Homo sapien
gtgctcaacgctccccagccaaccg

SEQ ID NO: 2913905 - DNA, 25 bp, Homo sapien
ccgagggtcttgtttggaggtctca

SEQ ID NO: 2913906 - DNA, 25 bp, Homo sapien
ctacctcccgggtagagcgggcgcg

SEQ ID NO: 2913907 - DNA, 25 bp, Homo sapien
ctggcggcattcctggccaggtgtc

SEQ ID NO: 2913908 - DNA, 25 bp, Homo sapien
cccgggtagagcgggcgcggcgcat

SEQ ID NO: 2913909 - DNA, 25 bp, Homo sapien
gccaggtgtctggactgggggctga

SEQ ID NO: 2913910 - DNA, 25 bp, Homo sapien
cttggctcccacagcagtgaaggat

SEQ ID NO: 2913911 - DNA, 25 bp, Homo sapien
gggcaggtcccagcttggctcccac

SEQ ID NO: 2913912 - DNA, 25 bp, Homo sapien
tggctcccacagcagtgaaggatat

SEQ ID NO: 2913913 - DNA, 25 bp, Homo sapien
agcttggctcccacagcagtgaagg

SEQ ID NO: 2913914 - DNA, 25 bp, Homo sapien
cattgtgggagcctgtggtttttcc

SEQ ID NO: 2913915 - DNA, 25 bp, Homo sapien
aagcattgtgggagcctgtggtttt

SEQ ID NO: 2913916 - DNA, 25 bp, Homo sapien
gcattgtgggagcctgtggtttttc

SEQ ID NO: 2913917 - DNA, 25 bp, Homo sapien
agcattgtgggagcctgtggttttt

SEQ ID NO: 2913918 - DNA, 25 bp, Homo sapien
aatggcgctatgtgcagttgggccc

SEQ ID NO: 2913919 - DNA, 25 bp, Homo sapien
taccagcgtgcatgggacaaggagc

SEQ ID NO: 2913920 - DNA, 25 bp, Homo sapien
gagagaatgactggctcgcttacca

SEQ ID NO: 2913921 - DNA, 25 bp, Homo sapien
tattagcgcctccatgtgagtgatg

SEQ ID NO: 2913922 - DNA, 25 bp, Homo sapien
tccttggaggttcccagtgactgag

SEQ ID NO: 2913923 - DNA, 25 bp, Homo sapien
ccttggaggttcccagtgactgaga

SEQ ID NO: 2913924 - DNA, 25 bp, Homo sapien
agctttgtggcatccttggaggttc

SEQ ID NO: 2913925 - DNA, 25 bp, Homo sapien
gcaaacagctttgtggcatccttgg

SEQ ID NO: 2913926 - DNA, 25 bp, Homo sapien
ggcctcccactagtcaggaccagct

SEQ ID NO: 2913927 - DNA, 25 bp, Homo sapien
tcagaggatgccctcttcgccctgt

SEQ ID NO: 2913928 - DNA, 25 bp, Homo sapien
ccttctggccggaagaagccagagc

SEQ ID NO: 2913929 - DNA, 25 bp, Homo sapien
atgccaccgtgtctgctcccaggcc

SEQ ID NO: 2913930 - DNA, 25 bp, Homo sapien
tcaaggcctcatgcggtttccagct

SEQ ID NO: 2913931 - DNA, 25 bp, Homo sapien
tccagctattggtgtcaacagcgtc

SEQ ID NO: 2913932 - DNA, 25 bp, Homo sapien
tgttgtgttgggcacacgtgaccct

SEQ ID NO: 2913933 - DNA, 25 bp, Homo sapien
gataatataatctgggccacgggag

SEQ ID NO: 2913934 - DNA, 25 bp, Homo sapien
cagccattgaacacagggaagaaag

SEQ ID NO: 2913935 - DNA, 25 bp, Homo sapien
tcttgcaagtgagccccggaagggt

SEQ ID NO: 2913936 - DNA, 25 bp, Homo sapien
gggtgaagccagctatagacagagc

SEQ ID NO: 2913937 - DNA, 25 bp, Homo sapien
tacaccttagtatgcctggaagctg

SEQ ID NO: 2913938 - DNA, 25 bp, Homo sapien
tggatagccaacacagaagttaact

SEQ ID NO: 2913939 - DNA, 25 bp, Homo sapien
tgttggaacccttatgctcctggga

SEQ ID NO: 2913940 - DNA, 25 bp, Homo sapien
tctggaaatagtacacctgagctac

SEQ ID NO: 2913941 - DNA, 25 bp, Homo sapien
tctcagggagactgctaggcttgtg

SEQ ID NO: 2913942 - DNA, 25 bp, Homo sapien
gcaaaaattagggccgggcacaatg

SEQ ID NO: 2913943 - DNA, 25 bp, Homo sapien
aatgcaaaaattagggccgggcaca

SEQ ID NO: 2913944 - DNA, 25 bp, Homo sapien
ctgggcgtggcagcgcatgcttgta

SEQ ID NO: 2913945 - DNA, 25 bp, Homo sapien
gctgggcgtggcagcgcatgcttgt

SEQ ID NO: 2913946 - DNA, 25 bp, Homo sapien
ccaatgaggaggtcaccgaggagct

SEQ ID NO: 2913947 - DNA, 25 bp, Homo sapien
tccctaggagctcaacaggacctgt

SEQ ID NO: 2913948 - DNA, 25 bp, Homo sapien
tccttcgatacgagaggtgggagcc

SEQ ID NO: 2913949 - DNA, 25 bp, Homo sapien
tcatctcccgcgtgtccaatgagga

SEQ ID NO: 2913950 - DNA, 25 bp, Homo sapien
gataactgagctggtaatttgcggg

SEQ ID NO: 2913951 - DNA, 25 bp, Homo sapien
tataagtgcttactgctggttcagt

SEQ ID NO: 2913952 - DNA, 25 bp, Homo sapien
gatcctggatgaacaagaattcccc

SEQ ID NO: 2913953 - DNA, 25 bp, Homo sapien
cattctctgagtgaagagtgctgag

SEQ ID NO: 2913954 - DNA, 25 bp, Homo sapien
ggatattgaaaccatcctgactaac

SEQ ID NO: 2913955 - DNA, 25 bp, Homo sapien
tcaggatattgaaaccatcctgact

SEQ ID NO: 2913956 - DNA, 25 bp, Homo sapien
gactccatctcaacatattaaataa

SEQ ID NO: 2913957 - DNA, 25 bp, Homo sapien
aaataaataagtaatggctgggcgt

SEQ ID NO: 2913958 - DNA, 25 bp, Homo sapien
aaggccaaagctgaagtcgtcagcg

SEQ ID NO: 2913959 - DNA, 25 bp, Homo sapien
gtcagcgtttaggaaattcctgtcc

SEQ ID NO: 2913960 - DNA, 25 bp, Homo sapien
tcttccctctgttgaggaccagaaa

SEQ ID NO: 2913961 - DNA, 25 bp, Homo sapien
ctgaagtcgtcagcgtttaggaaat

SEQ ID NO: 2913962 - DNA, 25 bp, Homo sapien
tccaccagtagaagctttcagggca

SEQ ID NO: 2913963 - DNA, 25 bp, Homo sapien
tgggatttttcgatttgggcacaca

SEQ ID NO: 2913964 - DNA, 25 bp, Homo sapien
gacatttttggcagcggacatcatg

SEQ ID NO: 2913965 - DNA, 25 bp, Homo sapien
tgctttttaggatgcaccaccgtgc

SEQ ID NO: 2913966 - DNA, 25 bp, Homo sapien
tgaccacttggccattaaccagcta

SEQ ID NO: 2913967 - DNA, 25 bp, Homo sapien
gaaggcttccagtgaactgaccact

SEQ ID NO: 2913968 - DNA, 25 bp, Homo sapien
caggcttcaggttaagcactccaag

SEQ ID NO: 2913969 - DNA, 25 bp, Homo sapien
gagtggccagacctcctgaggcttg

SEQ ID NO: 2913970 - DNA, 25 bp, Homo sapien
tccttgtggccaaccgagatttcat

SEQ ID NO: 2913971 - DNA, 25 bp, Homo sapien
ccaccattgtacaggacaaagtgct

SEQ ID NO: 2913972 - DNA, 25 bp, Homo sapien
tgctggagacatgtgtgaagaactg

SEQ ID NO: 2913973 - DNA, 25 bp, Homo sapien
tctgatccaggtaggttggacccct

SEQ ID NO: 2913974 - DNA, 25 bp, Homo sapien
aaccttcacatctcaggttcaagca

SEQ ID NO: 2913975 - DNA, 25 bp, Homo sapien
aattctcttgcctcagcctccagag

SEQ ID NO: 2913976 - DNA, 25 bp, Homo sapien
tcaccatgcccagctaatttttttg

SEQ ID NO: 2913977 - DNA, 25 bp, Homo sapien
tacctgggactacaggcacacatca

SEQ ID NO: 2913978 - DNA, 25 bp, Homo sapien
ttgtaaagtgctgacctctctggtg

SEQ ID NO: 2913979 - DNA, 25 bp, Homo sapien
ccagccctctggacggataattgta

SEQ ID NO: 2913980 - DNA, 25 bp, Homo sapien
tgatatgctaatggccaaggactgg

SEQ ID NO: 2913981 - DNA, 25 bp, Homo sapien
ggtgcaacagcagaaacacaagtgt

SEQ ID NO: 2913982 - DNA, 25 bp, Homo sapien
acctgggtcacacacagcaggggca

SEQ ID NO: 2913983 - DNA, 25 bp, Homo sapien
cctgggtcacacacagcaggggcat

SEQ ID NO: 2913984 - DNA, 25 bp, Homo sapien
cacctgggtcacacacagcaggggc

SEQ ID NO: 2913985 - DNA, 25 bp, Homo sapien
ggcaccaggctggcagttacagaag

SEQ ID NO: 2913986 - DNA, 25 bp, Homo sapien
gcaccaggctggcagttacagaagc

SEQ ID NO: 2913987 - DNA, 25 bp, Homo sapien
caccaggctggcagttacagaagca

SEQ ID NO: 2913988 - DNA, 25 bp, Homo sapien
acattagagcacagcctgctaggct

SEQ ID NO: 2913989 - DNA, 25 bp, Homo sapien
ctgtctgacattagagcacagcctg

SEQ ID NO: 2913990 - DNA, 25 bp, Homo sapien
cagcctgctaggctgggacaagctg

SEQ ID NO: 2913991 - DNA, 25 bp, Homo sapien
agcacagcctgctaggctgggacaa

SEQ ID NO: 2913992 - DNA, 25 bp, Homo sapien
tacttcaacacactgattattttca

SEQ ID NO: 2913993 - DNA, 25 bp, Homo sapien
cttccaggcattatccatatgcatg

SEQ ID NO: 2913994 - DNA, 25 bp, Homo sapien
tatcttccaggcattatccatatgc

SEQ ID NO: 2913995 - DNA, 25 bp, Homo sapien
cttagtcttttgctgtataatatcc

SEQ ID NO: 2913996 - DNA, 25 bp, Homo sapien
actagctgggtaccctgggtgacct

SEQ ID NO: 2913997 - DNA, 25 bp, Homo sapien
ttggtcctccttaactagctgggta

SEQ ID NO: 2913998 - DNA, 25 bp, Homo sapien
ctccttaactagctgggtaccctgg

SEQ ID NO: 2913999 - DNA, 25 bp, Homo sapien
tctcagtttggtcctccttaactag

SEQ ID NO: 2914000 - DNA, 25 bp, Homo sapien
gaggttgagttctttatcaagaaag

SEQ ID NO: 2914001 - DNA, 25 bp, Homo sapien
ttcagggaatgtttcccttgatgta

SEQ ID NO: 2914002 - DNA, 25 bp, Homo sapien
ggaatgtttcccttgatgtatcaca

SEQ ID NO: 2914003 - DNA, 25 bp, Homo sapien
gatgtatcacattgaggttgagttc

SEQ ID NO: 2914004 - DNA, 25 bp, Homo sapien
gagatcccagaagagtgcaattaat

SEQ ID NO: 2914005 - DNA, 25 bp, Homo sapien
gagtgcaattaattcatctcgtgtg

SEQ ID NO: 2914006 - DNA, 25 bp, Homo sapien
gcaattaattcatctcgtgtgtgca

SEQ ID NO: 2914007 - DNA, 25 bp, Homo sapien
taattcatctcgtgtgtgcatgctc

SEQ ID NO: 2914008 - DNA, 25 bp, Homo sapien
agaaatggaagcattgttctctgat

SEQ ID NO: 2914009 - DNA, 25 bp, Homo sapien
gatactgaggaatgcctttcctgaa

SEQ ID NO: 2914010 - DNA, 25 bp, Homo sapien
aacccacgtagcagaagcactttgt

SEQ ID NO: 2914011 - DNA, 25 bp, Homo sapien
tggtccagcaaggatctagacagaa

SEQ ID NO: 2914012 - DNA, 25 bp, Homo sapien
tatgtgcaggatagctgagtgcagc

SEQ ID NO: 2914013 - DNA, 25 bp, Homo sapien
tctgatggctgtataggtcgacaca

SEQ ID NO: 2914014 - DNA, 25 bp, Homo sapien
catgcccttgctttggatgccgttc

SEQ ID NO: 2914015 - DNA, 25 bp, Homo sapien
cacggtggctgagtaatgaacccgc

SEQ ID NO: 2914016 - DNA, 25 bp, Homo sapien
tcctctcagagggtggctggctttg

SEQ ID NO: 2914017 - DNA, 25 bp, Homo sapien
ggctggctttgtatgcagtgcacat

SEQ ID NO: 2914018 - DNA, 25 bp, Homo sapien
tttggttcctctcagagggtggctg

SEQ ID NO: 2914019 - DNA, 25 bp, Homo sapien
ggtggctggctttgtatgcagtgca

SEQ ID NO: 2914020 - DNA, 25 bp, Homo sapien
ctgaggaaattgtgggcaagggttt

SEQ ID NO: 2914021 - DNA, 25 bp, Homo sapien
cttaatagctggctgctttctatgc

SEQ ID NO: 2914022 - DNA, 25 bp, Homo sapien
caagggtttgccgagaatgtaccaa

SEQ ID NO: 2914023 - DNA, 25 bp, Homo sapien
catccaacttgtagatcttgcctat

SEQ ID NO: 2914024 - DNA, 25 bp, Homo sapien
tcccctaatccgagcctgatgggac

SEQ ID NO: 2914025 - DNA, 25 bp, Homo sapien
gaaagtcccctaatccgagcctgat

SEQ ID NO: 2914026 - DNA, 25 bp, Homo sapien
tgtgaaagtcccctaatccgagcct

SEQ ID NO: 2914027 - DNA, 25 bp, Homo sapien
aagtcccctaatccgagcctgatgg

SEQ ID NO: 2914028 - DNA, 25 bp, Homo sapien
cgtccatagtcatccgagggcagag

SEQ ID NO: 2914029 - DNA, 25 bp, Homo sapien
ggaagccaagcatataagggagtcg

SEQ ID NO: 2914030 - DNA, 25 bp, Homo sapien
gccaggacacaagtgccatccttgg

SEQ ID NO: 2914031 - DNA, 25 bp, Homo sapien
tggactgcgaccagtcctcttcctg

SEQ ID NO: 2914032 - DNA, 25 bp, Homo sapien
gcagccactttgtgccaggcaccat

SEQ ID NO: 2914033 - DNA, 25 bp, Homo sapien
ggcagccactttgtgccaggcacca

SEQ ID NO: 2914034 - DNA, 25 bp, Homo sapien
gtatttgcaaaggtcagatgagcta

SEQ ID NO: 2914035 - DNA, 25 bp, Homo sapien
tccacggccctgattaatgggaaat

SEQ ID NO: 2914036 - DNA, 25 bp, Homo sapien
cattggccccggaggatgaaggatt

SEQ ID NO: 2914037 - DNA, 25 bp, Homo sapien
tgagctattttggtgtccacggccc

SEQ ID NO: 2914038 - DNA, 25 bp, Homo sapien
gtttcttagctaatgactgcataaa

SEQ ID NO: 2914039 - DNA, 25 bp, Homo sapien
tctgtttcttagctaatgactgcat

SEQ ID NO: 2914040 - DNA, 25 bp, Homo sapien
aatgactgcataaaatcatctctga

SEQ ID NO: 2914041 - DNA, 25 bp, Homo sapien
cttagctaatgactgcataaaatca

SEQ ID NO: 2914042 - DNA, 25 bp, Homo sapien
ttcagtaatgtcgtggatggtgagc

SEQ ID NO: 2914043 - DNA, 25 bp, Homo sapien
tatgctctatgctctgccgtgctag

SEQ ID NO: 2914044 - DNA, 25 bp, Homo sapien
ggcattgtctgcactgggccctatg

SEQ ID NO: 2914045 - DNA, 25 bp, Homo sapien
gctgggttttcctggcacgagttcc

SEQ ID NO: 2914046 - DNA, 25 bp, Homo sapien
ctccttttctgtgctcagcatggcc

SEQ ID NO: 2914047 - DNA, 25 bp, Homo sapien
cagcatggcctttggccctgcaaag

SEQ ID NO: 2914048 - DNA, 25 bp, Homo sapien
cctgcaaagcatcccttctctcttg

SEQ ID NO: 2914049 - DNA, 25 bp, Homo sapien
tttggccctgcaaagcatcccttct

SEQ ID NO: 2914050 - DNA, 25 bp, Homo sapien
gctgggcatcctggtcgtctggcct

SEQ ID NO: 2914051 - DNA, 25 bp, Homo sapien
actgggcgtcggtgccacctcacgg

SEQ ID NO: 2914052 - DNA, 25 bp, Homo sapien
gccttcgccgggtgccggtgctatc

SEQ ID NO: 2914053 - DNA, 25 bp, Homo sapien
ccggtgctatcccacgggcaggcag

SEQ ID NO: 2914054 - DNA, 25 bp, Homo sapien
ccgcgggtgccactccacgagcggg

SEQ ID NO: 2914055 - DNA, 25 bp, Homo sapien
gcgccggtgccacttcacgagcggg

SEQ ID NO: 2914056 - DNA, 25 bp, Homo sapien
tttgccgggcgcttgtgccacctca

SEQ ID NO: 2914057 - DNA, 25 bp, Homo sapien
tcgtcgggcctttgccgggcgcttg

SEQ ID NO: 2914058 - DNA, 25 bp, Homo sapien
aaagttgacaagtcacgtgaccaca

SEQ ID NO: 2914059 - DNA, 25 bp, Homo sapien
gaaagttgacaagtcacgtgaccac

SEQ ID NO: 2914060 - DNA, 25 bp, Homo sapien
ttctcaagcgctgggaactcggcgg

SEQ ID NO: 2914061 - DNA, 25 bp, Homo sapien
ggaaccaagcgccgcgacttggttg

SEQ ID NO: 2914062 - DNA, 25 bp, Homo sapien
gcggttccacgcagcagacgcgtct

SEQ ID NO: 2914063 - DNA, 25 bp, Homo sapien
ggaactcggcggttccacgcagcag

SEQ ID NO: 2914064 - DNA, 25 bp, Homo sapien
gaggtggaaggactgcttgagttca

SEQ ID NO: 2914065 - DNA, 25 bp, Homo sapien
ggtggaaggactgcttgagttcagg

SEQ ID NO: 2914066 - DNA, 25 bp, Homo sapien
gtggaaggactgcttgagttcagga

SEQ ID NO: 2914067 - DNA, 25 bp, Homo sapien
ccgaggtggaaggactgcttgagtt

SEQ ID NO: 2914068 - DNA, 25 bp, Homo sapien
taacctgaagtcaacaggatctgaa

SEQ ID NO: 2914069 - DNA, 25 bp, Homo sapien
ctgaaaactatagtccctattggcc

SEQ ID NO: 2914070 - DNA, 25 bp, Homo sapien
actatagtccctattggccatgaat

SEQ ID NO: 2914071 - DNA, 25 bp, Homo sapien
aaattggttgggcgagatggcttac

SEQ ID NO: 2914072 - DNA, 25 bp, Homo sapien
tcctcacagataacagatccagaat

SEQ ID NO: 2914073 - DNA, 25 bp, Homo sapien
caacggagtggcctcctcacagata

SEQ ID NO: 2914074 - DNA, 25 bp, Homo sapien
ctgtcaacggagtggcctcctcaca

SEQ ID NO: 2914075 - DNA, 25 bp, Homo sapien
ggagtggcctcctcacagataacag

SEQ ID NO: 2914076 - DNA, 25 bp, Homo sapien
gatagtgttgttgaagaccagagag

SEQ ID NO: 2914077 - DNA, 25 bp, Homo sapien
agtgttgttgaagaccagagaggtt

SEQ ID NO: 2914078 - DNA, 25 bp, Homo sapien
ctgatgatagtgttgttgaagacca

SEQ ID NO: 2914079 - DNA, 25 bp, Homo sapien
gatgatagtgttgttgaagaccaga

SEQ ID NO: 2914080 - DNA, 25 bp, Homo sapien
cagggtactggggactatcattgcc

SEQ ID NO: 2914081 - DNA, 25 bp, Homo sapien
gactatcattgccacagctcacagt

SEQ ID NO: 2914082 - DNA, 25 bp, Homo sapien
atcttatagtttaccacccaacctg

SEQ ID NO: 2914083 - DNA, 25 bp, Homo sapien
tcctcttctatggggatcttatagt

SEQ ID NO: 2914084 - DNA, 25 bp, Homo sapien
tgcccattcacgtcctccccgtggg

SEQ ID NO: 2914085 - DNA, 25 bp, Homo sapien
tcctccccgtgggagatgtgaagtt

SEQ ID NO: 2914086 - DNA, 25 bp, Homo sapien
atgagagtgcccatcggagctggct

SEQ ID NO: 2914087 - DNA, 25 bp, Homo sapien
cattcacgtcctccccgtgggagat

SEQ ID NO: 2914088 - DNA, 25 bp, Homo sapien
aacaccgcattcttccttcacggcc

SEQ ID NO: 2914089 - DNA, 25 bp, Homo sapien
tccccgacggccagcttgagcatgt

SEQ ID NO: 2914090 - DNA, 25 bp, Homo sapien
tcggctccatcgagttgcacggctg

SEQ ID NO: 2914091 - DNA, 25 bp, Homo sapien
tgagcatgtcatcgtccatcaccct

SEQ ID NO: 2914092 - DNA, 25 bp, Homo sapien
ccatcgagttgcacggctggttcat

SEQ ID NO: 2914093 - DNA, 25 bp, Homo sapien
accacccctgaaccttggatacata

SEQ ID NO: 2914094 - DNA, 25 bp, Homo sapien
ggccaccacccctgaaccttggata

SEQ ID NO: 2914095 - DNA, 25 bp, Homo sapien
tggccaccacccctgaaccttggat

SEQ ID NO: 2914096 - DNA, 25 bp, Homo sapien
ccaccacccctgaaccttggataca

SEQ ID NO: 2914097 - DNA, 25 bp, Homo sapien
cttgaagatggagcagagaaagcca

SEQ ID NO: 2914098 - DNA, 25 bp, Homo sapien
agcagagaaagccagggagggccca

SEQ ID NO: 2914099 - DNA, 25 bp, Homo sapien
aagatggagcagagaaagccaggga

SEQ ID NO: 2914100 - DNA, 25 bp, Homo sapien
tgaagatggagcagagaaagccagg

SEQ ID NO: 2914101 - DNA, 25 bp, Homo sapien
tgggaacctcgaccgtggactttgc

SEQ ID NO: 2914102 - DNA, 25 bp, Homo sapien
tcgaccgtggactttgcatggaatc

SEQ ID NO: 2914103 - DNA, 25 bp, Homo sapien
tatgccttgtaacccaggtaggccc

SEQ ID NO: 2914104 - DNA, 25 bp, Homo sapien
cctaatgctgatgtgggaacctcga

SEQ ID NO: 2914105 - DNA, 25 bp, Homo sapien
tattcaaatgatgaagacactaagt

SEQ ID NO: 2914106 - DNA, 25 bp, Homo sapien
tcagaatccggagcgtcgtggatat

SEQ ID NO: 2914107 - DNA, 25 bp, Homo sapien
ctaagtatgacgctttacaaacatc

SEQ ID NO: 2914108 - DNA, 25 bp, Homo sapien
gagcgtcgtggatattcaaatgatg

SEQ ID NO: 2914109 - DNA, 25 bp, Homo sapien
ccatcatcctgttcccctttgggtt

SEQ ID NO: 2914110 - DNA, 25 bp, Homo sapien
atcctgttcccctttgggttcatct

SEQ ID NO: 2914111 - DNA, 25 bp, Homo sapien
gaatcctcctggccatcatcctgtt

SEQ ID NO: 2914112 - DNA, 25 bp, Homo sapien
cccctttgggttcatctgctgtttt

SEQ ID NO: 2914113 - DNA, 25 bp, Homo sapien
catcgccatcatgagaggctgtccc

SEQ ID NO: 2914114 - DNA, 25 bp, Homo sapien
gaccacagctggactatcacttggt

SEQ ID NO: 2914115 - DNA, 25 bp, Homo sapien
ccgtctgcagggatagggtgctgga

SEQ ID NO: 2914116 - DNA, 25 bp, Homo sapien
tatcacttggtaccctgccaatgcc

SEQ ID NO: 2914117 - DNA, 25 bp, Homo sapien
tccatatttgcttttgtaatgattt

SEQ ID NO: 2914118 - DNA, 25 bp, Homo sapien
tgtttatatgctccttttttccata

SEQ ID NO: 2914119 - DNA, 25 bp, Homo sapien
gttgtttatatgctccttttttcca

SEQ ID NO: 2914120 - DNA, 25 bp, Homo sapien
tctgttgtttatatgctcctttttt

SEQ ID NO: 2914121 - DNA, 25 bp, Homo sapien
gggatcggtactgccacccagagcc

SEQ ID NO: 2914122 - DNA, 25 bp, Homo sapien
taataggtttactagggtggagcta

SEQ ID NO: 2914123 - DNA, 25 bp, Homo sapien
tccctatgaggtgggcggggatcgg

SEQ ID NO: 2914124 - DNA, 25 bp, Homo sapien
cacagaaagacctaataggtttact

SEQ ID NO: 2914125 - DNA, 25 bp, Homo sapien
tggagatgtcggctgagcatcgagg

SEQ ID NO: 2914126 - DNA, 25 bp, Homo sapien
tgccctggagtacgcaggcaccctg

SEQ ID NO: 2914127 - DNA, 25 bp, Homo sapien
ctgccctggagtacgcaggcaccct

SEQ ID NO: 2914128 - DNA, 25 bp, Homo sapien
ccctggagtacgcaggcaccctgga

SEQ ID NO: 2914129 - DNA, 25 bp, Homo sapien
gaggagtgaggcagaaccacacaaa

SEQ ID NO: 2914130 - DNA, 25 bp, Homo sapien
tgaggcagaaccacacaaaagggac

SEQ ID NO: 2914131 - DNA, 25 bp, Homo sapien
ctagtgtacaggaggagtgaggcag

SEQ ID NO: 2914132 - DNA, 25 bp, Homo sapien
tgtacaggaggagtgaggcagaacc

SEQ ID NO: 2914133 - DNA, 25 bp, Homo sapien
ctgaaataatggaaggtgatttcag

SEQ ID NO: 2914134 - DNA, 25 bp, Homo sapien
gatttcagtctcaggttagggtcag

SEQ ID NO: 2914135 - DNA, 25 bp, Homo sapien
cagtctcaggttagggtcagagttt

SEQ ID NO: 2914136 - DNA, 25 bp, Homo sapien
tctcaggttagggtcagagttttgt

SEQ ID NO: 2914137 - DNA, 25 bp, Homo sapien
caatgatgttattgtccagctgcag

SEQ ID NO: 2914138 - DNA, 25 bp, Homo sapien
ccagaccaggtgtgcgaggttctcc

SEQ ID NO: 2914139 - DNA, 25 bp, Homo sapien
tgcagcttcctcaagttctcaaact

SEQ ID NO: 2914140 - DNA, 25 bp, Homo sapien
aactgccagaggttgtctatgcgga

SEQ ID NO: 2914141 - DNA, 25 bp, Homo sapien
atccggttgttgaacaagctcaggt

SEQ ID NO: 2914142 - DNA, 25 bp, Homo sapien
gttcatcatgttgtcaatccggttg

SEQ ID NO: 2914143 - DNA, 25 bp, Homo sapien
tccagggagtcgatcttggagatcc

SEQ ID NO: 2914144 - DNA, 25 bp, Homo sapien
ttgttgcccagcgacaacacctgca

SEQ ID NO: 2914145 - DNA, 25 bp, Homo sapien
gatgaacatcttgtaatcctctgcc

SEQ ID NO: 2914146 - DNA, 25 bp, Homo sapien
gctgagcgtccgcaggcacttgaac

SEQ ID NO: 2914147 - DNA, 25 bp, Homo sapien
tgaggtcaggaaggtaggcacagat

SEQ ID NO: 2914148 - DNA, 25 bp, Homo sapien
caggcacttgaaccgccggaggtag

SEQ ID NO: 2914149 - DNA, 25 bp, Homo sapien
catcaatgcgccggtagtccaggta

SEQ ID NO: 2914150 - DNA, 25 bp, Homo sapien
tgtgtggtcatcaatgcgccggtag

SEQ ID NO: 2914151 - DNA, 25 bp, Homo sapien
atcaatgcgccggtagtccaggtac

SEQ ID NO: 2914152 - DNA, 25 bp, Homo sapien
gtggtcatcaatgcgccggtagtcc

SEQ ID NO: 2914153 - DNA, 25 bp, Homo sapien
agggctgggagactgagagggagac

SEQ ID NO: 2914154 - DNA, 25 bp, Homo sapien
tgggggcttgaggaatctgtctcac

SEQ ID NO: 2914155 - DNA, 25 bp, Homo sapien
ctactcttcaatgccccttttccaa

SEQ ID NO: 2914156 - DNA, 25 bp, Homo sapien
actcttcaatgccccttttccaaga

SEQ ID NO: 2914157 - DNA, 25 bp, Homo sapien
tcttcaatgccccttttccaagaaa

SEQ ID NO: 2914158 - DNA, 25 bp, Homo sapien
tactcttcaatgccccttttccaag

SEQ ID NO: 2914159 - DNA, 25 bp, Homo sapien
tcactctgacagagtcaggtaaagg

SEQ ID NO: 2914160 - DNA, 25 bp, Homo sapien
tggaatcactctgacagagtcaggt

SEQ ID NO: 2914161 - DNA, 25 bp, Homo sapien
tgctggaatcactctgacagagtca

SEQ ID NO: 2914162 - DNA, 25 bp, Homo sapien
tctgacagagtcaggtaaagggatt

SEQ ID NO: 2914163 - DNA, 25 bp, Homo sapien
tgggaacgcacacaaaacagtactt

SEQ ID NO: 2914164 - DNA, 25 bp, Homo sapien
taatattgctcctgggatgacacca

SEQ ID NO: 2914165 - DNA, 25 bp, Homo sapien
gcattgttaccagaggttcctccga

SEQ ID NO: 2914166 - DNA, 25 bp, Homo sapien
ggtgatcccacctgtaccatggctt

SEQ ID NO: 2914167 - DNA, 25 bp, Homo sapien
ggtgcttagcctccgcaagcttttt

SEQ ID NO: 2914168 - DNA, 25 bp, Homo sapien
tggtgcttagcctccgcaagctttt

SEQ ID NO: 2914169 - DNA, 25 bp, Homo sapien
ctggtgcttagcctccgcaagcttt

SEQ ID NO: 2914170 - DNA, 25 bp, Homo sapien
cctggtgcttcagctcgtcgatgct

SEQ ID NO: 2914171 - DNA, 25 bp, Homo sapien
ggtgcttcagctcgtcgatgctgta

SEQ ID NO: 2914172 - DNA, 25 bp, Homo sapien
ttctctagctcctcccgctgcgcct

SEQ ID NO: 2914173 - DNA, 25 bp, Homo sapien
tcctggtgcttcagctcgtcgatgc

SEQ ID NO: 2914174 - DNA, 25 bp, Homo sapien
aggcaggtaggacagattgttgccc

SEQ ID NO: 2914175 - DNA, 25 bp, Homo sapien
cagcgtacatgctgtcaaacaggaa

SEQ ID NO: 2914176 - DNA, 25 bp, Homo sapien
gattgttgccctctgagtcctcagc

SEQ ID NO: 2914177 - DNA, 25 bp, Homo sapien
gagtcctcagcgtacatgctgtcaa

SEQ ID NO: 2914178 - DNA, 25 bp, Homo sapien
aaggaggcagaaaccattgcggagt

SEQ ID NO: 2914179 - DNA, 25 bp, Homo sapien
gaaggaaggaggcagaaaccattgc

SEQ ID NO: 2914180 - DNA, 25 bp, Homo sapien
ggaaggaggcagaaaccattgcgga

SEQ ID NO: 2914181 - DNA, 25 bp, Homo sapien
aaggaaggaggcagaaaccattgcg

SEQ ID NO: 2914182 - DNA, 25 bp, Homo sapien
ctcagcctgagggattcaggaatgg

SEQ ID NO: 2914183 - DNA, 25 bp, Homo sapien
agcctgagggattcaggaatggggc

SEQ ID NO: 2914184 - DNA, 25 bp, Homo sapien
tcagcctgagggattcaggaatggg

SEQ ID NO: 2914185 - DNA, 25 bp, Homo sapien
cctcagcctgagggattcaggaatg

SEQ ID NO: 2914186 - DNA, 25 bp, Homo sapien
caagtgcttctcctcgaatttggca

SEQ ID NO: 2914187 - DNA, 25 bp, Homo sapien
gctgtttcaggccatactcaaaaat

SEQ ID NO: 2914188 - DNA, 25 bp, Homo sapien
gatggcctcacggacacattcactg

SEQ ID NO: 2914189 - DNA, 25 bp, Homo sapien
caaaaatattcacgcagatgatgac

SEQ ID NO: 2914190 - DNA, 25 bp, Homo sapien
atagtaacgatgatgataagttggg

SEQ ID NO: 2914191 - DNA, 25 bp, Homo sapien
cacaggccacacgtcaagcagtggg

SEQ ID NO: 2914192 - DNA, 25 bp, Homo sapien
gggccgaccttgaatcccaagggca

SEQ ID NO: 2914193 - DNA, 25 bp, Homo sapien
actttgtgtgacaaagacccacagg

SEQ ID NO: 2914194 - DNA, 25 bp, Homo sapien
cgtcatgagcgcatcgaacaactca

SEQ ID NO: 2914195 - DNA, 25 bp, Homo sapien
gaacaactcactgatgtcagcactg

SEQ ID NO: 2914196 - DNA, 25 bp, Homo sapien
catcttctcaatgttgggcagttcc

SEQ ID NO: 2914197 - DNA, 25 bp, Homo sapien
tcagcactgcattctaggatcatct

SEQ ID NO: 2914198 - DNA, 25 bp, Homo sapien
atgtgcagctgcatcgccagattct

SEQ ID NO: 2914199 - DNA, 25 bp, Homo sapien
gtgcagctgcatcgccagattctgg

SEQ ID NO: 2914200 - DNA, 25 bp, Homo sapien
gcagctgcatcgccagattctggca

SEQ ID NO: 2914201 - DNA, 25 bp, Homo sapien
gctgcatcgccagattctggcactt

SEQ ID NO: 2914202 - DNA, 25 bp, Homo sapien
cgctgagtcgtgctggacgtttcca

SEQ ID NO: 2914203 - DNA, 25 bp, Homo sapien
tttgcctttagagtacccggatagc

SEQ ID NO: 2914204 - DNA, 25 bp, Homo sapien
tgatgagcaagaaagctacagcctg

SEQ ID NO: 2914205 - DNA, 25 bp, Homo sapien
tcagaagaatgagctcacctctcat

SEQ ID NO: 2914206 - DNA, 25 bp, Homo sapien
tcacctgagaagcggcaactgcagg

SEQ ID NO: 2914207 - DNA, 25 bp, Homo sapien
cgtcacctgagaagcggcaactgca

SEQ ID NO: 2914208 - DNA, 25 bp, Homo sapien
acgtcacctgagaagcggcaactgc

SEQ ID NO: 2914209 - DNA, 25 bp, Homo sapien
gtcacctgagaagcggcaactgcag

SEQ ID NO: 2914210 - DNA, 25 bp, Homo sapien
gattaggtgctatcacttggcccag

SEQ ID NO: 2914211 - DNA, 25 bp, Homo sapien
taatacaagtaggatggcacatggg

SEQ ID NO: 2914212 - DNA, 25 bp, Homo sapien
tcatctgggaaataggttacctgca

SEQ ID NO: 2914213 - DNA, 25 bp, Homo sapien
gatggttgtgaactgacccctctgc

SEQ ID NO: 2914214 - DNA, 25 bp, Homo sapien
atgttcctttcaaacatgtttatag

SEQ ID NO: 2914215 - DNA, 25 bp, Homo sapien
gttcctttcaaacatgtttatagtc

SEQ ID NO: 2914216 - DNA, 25 bp, Homo sapien
tcctttcaaacatgtttatagtctc

SEQ ID NO: 2914217 - DNA, 25 bp, Homo sapien
catgtcaacaatgttcctttcaaac

SEQ ID NO: 2914218 - DNA, 25 bp, Homo sapien
ggacattttcgataaacagtcctac

SEQ ID NO: 2914219 - DNA, 25 bp, Homo sapien
ctttggacattttcgataaacagtc

SEQ ID NO: 2914220 - DNA, 25 bp, Homo sapien
tggacattttcgataaacagtccta

SEQ ID NO: 2914221 - DNA, 25 bp, Homo sapien
aggctttggacattttcgataaaca

SEQ ID NO: 2914222 - DNA, 25 bp, Homo sapien
tccccatggggaaggtcatcacaga

SEQ ID NO: 2914223 - DNA, 25 bp, Homo sapien
gggaaggtcatcacagaaaggatat

SEQ ID NO: 2914224 - DNA, 25 bp, Homo sapien
atggggaaggtcatcacagaaagga

SEQ ID NO: 2914225 - DNA, 25 bp, Homo sapien
ctccccatggggaaggtcatcacag

SEQ ID NO: 2914226 - DNA, 25 bp, Homo sapien
aaccccagagtgtgcttgcctgcaa

SEQ ID NO: 2914227 - DNA, 25 bp, Homo sapien
tgctgggagcctactgcaaacagtt

SEQ ID NO: 2914228 - DNA, 25 bp, Homo sapien
gaacattcttttgtccagaggccgg

SEQ ID NO: 2914229 - DNA, 25 bp, Homo sapien
tcattgttctgagggtcgggaaacc

SEQ ID NO: 2914230 - DNA, 25 bp, Homo sapien
cccaaggcgagctcggaaattctgg

SEQ ID NO: 2914231 - DNA, 25 bp, Homo sapien
actttaagggcccaaggcgagctcg

SEQ ID NO: 2914232 - DNA, 25 bp, Homo sapien
cagccccgagttaagcaaaggcccg

SEQ ID NO: 2914233 - DNA, 25 bp, Homo sapien
aggcccggcgcgtccctgatgctct

SEQ ID NO: 2914234 - DNA, 25 bp, Homo sapien
cagggtgctgatagagatctccagg

SEQ ID NO: 2914235 - DNA, 25 bp, Homo sapien
gcttctcgtggtggtgattctccag

SEQ ID NO: 2914236 - DNA, 25 bp, Homo sapien
cgcgcaggtcgttaggcaggtcctc

SEQ ID NO: 2914237 - DNA, 25 bp, Homo sapien
ggtcgccctcgacaatcttctccag

SEQ ID NO: 2914238 - DNA, 25 bp, Homo sapien
cagaagcctccacataattgaactt

SEQ ID NO: 2914239 - DNA, 25 bp, Homo sapien
cacataattgaacttttggaaacga

SEQ ID NO: 2914240 - DNA, 25 bp, Homo sapien
gaagcctccacataattgaactttt

SEQ ID NO: 2914241 - DNA, 25 bp, Homo sapien
gcctccacataattgaacttttgga

SEQ ID NO: 2914242 - DNA, 25 bp, Homo sapien
tgtgctggtgcaaaccggatggcat

SEQ ID NO: 2914243 - DNA, 25 bp, Homo sapien
gccgaccctgctgattttgtgacca

SEQ ID NO: 2914244 - DNA, 25 bp, Homo sapien
ttagcgtgcagaccccagggatgga

SEQ ID NO: 2914245 - DNA, 25 bp, Homo sapien
gacatccgggagagccttcttagcg

SEQ ID NO: 2914246 - DNA, 25 bp, Homo sapien
cctgtgtctggtcaatagcaattag

SEQ ID NO: 2914247 - DNA, 25 bp, Homo sapien
tcacagggaaggtggtgttttcctg

SEQ ID NO: 2914248 - DNA, 25 bp, Homo sapien
cagggaaggtggtgttttcctgtgt

SEQ ID NO: 2914249 - DNA, 25 bp, Homo sapien
gttttcctgtgtctggtcaatagca

SEQ ID NO: 2914250 - DNA, 25 bp, Homo sapien
ttagaaattgggcacgtttcagtcc

SEQ ID NO: 2914251 - DNA, 25 bp, Homo sapien
gaaattgggcacgtttcagtcctgt

SEQ ID NO: 2914252 - DNA, 25 bp, Homo sapien
tgtcctagtcattagaaattgggca

SEQ ID NO: 2914253 - DNA, 25 bp, Homo sapien
tctgtgtgtcctagtcattagaaat

SEQ ID NO: 2914254 - DNA, 25 bp, Homo sapien
tataactgcaggcgtaaagccacag

SEQ ID NO: 2914255 - DNA, 25 bp, Homo sapien
taactgcaggcgtaaagccacagga

SEQ ID NO: 2914256 - DNA, 25 bp, Homo sapien
ataactgcaggcgtaaagccacagg

SEQ ID NO: 2914257 - DNA, 25 bp, Homo sapien
ggaccaccaggtgcgcatcacctaa

SEQ ID NO: 2914258 - DNA, 25 bp, Homo sapien
tcctgagaagggtaggtcacatttt

SEQ ID NO: 2914259 - DNA, 25 bp, Homo sapien
ggtattactcatatagtcagagcat

SEQ ID NO: 2914260 - DNA, 25 bp, Homo sapien
cttaggccatggtataaggtcctgg

SEQ ID NO: 2914261 - DNA, 25 bp, Homo sapien
atgggcatccactcctttgcctgga

SEQ ID NO: 2914262 - DNA, 25 bp, Homo sapien
atccactcctttgcctggaccttgc

SEQ ID NO: 2914263 - DNA, 25 bp, Homo sapien
ttggtgatgggcatccactcctttg

SEQ ID NO: 2914264 - DNA, 25 bp, Homo sapien
tgatgggcatccactcctttgcctg

SEQ ID NO: 2914265 - DNA, 25 bp, Homo sapien
gagtgacacggccattgtaatccct

SEQ ID NO: 2914266 - DNA, 25 bp, Homo sapien
ttaacacccagagtgacacggccat

SEQ ID NO: 2914267 - DNA, 25 bp, Homo sapien
cacccagagtgacacggccattgta

SEQ ID NO: 2914268 - DNA, 25 bp, Homo sapien
gacacggccattgtaatccctgatg

SEQ ID NO: 2914269 - DNA, 25 bp, Homo sapien
tcaggacagtgatccctctgacagc

SEQ ID NO: 2914270 - DNA, 25 bp, Homo sapien
gacagtagagagcttggtcaggaca

SEQ ID NO: 2914271 - DNA, 25 bp, Homo sapien
agagcttggtcaggacagtgatccc

SEQ ID NO: 2914272 - DNA, 25 bp, Homo sapien
gacagtgatccctctgacagcagtg

SEQ ID NO: 2914273 - DNA, 25 bp, Homo sapien
gcttgcaatcttggtcccccagtgg

SEQ ID NO: 2914274 - DNA, 25 bp, Homo sapien
tgtggggcttgcaatcttggtcccc

SEQ ID NO: 2914275 - DNA, 25 bp, Homo sapien
ttgcaatcttggtcccccagtggcc

SEQ ID NO: 2914276 - DNA, 25 bp, Homo sapien
gggcttgcaatcttggtcccccagt

SEQ ID NO: 2914277 - DNA, 25 bp, Homo sapien
tgtcaatactggacatcagcagcat

SEQ ID NO: 2914278 - DNA, 25 bp, Homo sapien
gtcaatactggacatcagcagcatc

SEQ ID NO: 2914279 - DNA, 25 bp, Homo sapien
ctgaatgctctgtattgcagggagg

SEQ ID NO: 2914280 - DNA, 25 bp, Homo sapien
tgtattgcagggaggatttgcaagt

SEQ ID NO: 2914281 - DNA, 25 bp, Homo sapien
gctctgtattgcagggaggatttgc

SEQ ID NO: 2914282 - DNA, 25 bp, Homo sapien
gaatgctctgtattgcagggaggat

SEQ ID NO: 2914283 - DNA, 25 bp, Homo sapien
cactgtggctattgttgcctgggat

SEQ ID NO: 2914284 - DNA, 25 bp, Homo sapien
tgttgacactgtggctattgttgcc

SEQ ID NO: 2914285 - DNA, 25 bp, Homo sapien
tggttctaggtgttgacactgtggc

SEQ ID NO: 2914286 - DNA, 25 bp, Homo sapien
taggtgttgacactgtggctattgt

SEQ ID NO: 2914287 - DNA, 25 bp, Homo sapien
ctccagggtgaaggcagatggctgc

SEQ ID NO: 2914288 - DNA, 25 bp, Homo sapien
agggtgaaggcagatggctgcccag

SEQ ID NO: 2914289 - DNA, 25 bp, Homo sapien
cagatggctgcccagggggcacctc

SEQ ID NO: 2914290 - DNA, 25 bp, Homo sapien
gatggctgcccagggggcacctcac

SEQ ID NO: 2914291 - DNA, 25 bp, Homo sapien
gttactttgcagtccccgctggaag

SEQ ID NO: 2914292 - DNA, 25 bp, Homo sapien
tttgcagtccccgctggaagcatgt

SEQ ID NO: 2914293 - DNA, 25 bp, Homo sapien
gcagtccccgctggaagcatgtttc

SEQ ID NO: 2914294 - DNA, 25 bp, Homo sapien
ttactttgcagtccccgctggaagc

SEQ ID NO: 2914295 - DNA, 25 bp, Homo sapien
actctgccgattcatctgtgaattc

SEQ ID NO: 2914296 - DNA, 25 bp, Homo sapien
tttgtatcagcgcactctgccgatt

SEQ ID NO: 2914297 - DNA, 25 bp, Homo sapien
gcgcactctgccgattcatctgtga

SEQ ID NO: 2914298 - DNA, 25 bp, Homo sapien
tcagcgcactctgccgattcatctg

SEQ ID NO: 2914299 - DNA, 25 bp, Homo sapien
gaacacaaagggagctgaacagaga

SEQ ID NO: 2914300 - DNA, 25 bp, Homo sapien
aaagtgtgtgtcattataccgtgaa

SEQ ID NO: 2914301 - DNA, 25 bp, Homo sapien
tataccgtgaacacaaagggagctg

SEQ ID NO: 2914302 - DNA, 25 bp, Homo sapien
ctggtgagtgaaaagaatccaatga

SEQ ID NO: 2914303 - DNA, 25 bp, Homo sapien
caatcgtatctttatcgacaaaaag

SEQ ID NO: 2914304 - DNA, 25 bp, Homo sapien
tattaaacgtgtacaccaagagttg

SEQ ID NO: 2914305 - DNA, 25 bp, Homo sapien
tggatgtcgtgcgatgccccgacag

SEQ ID NO: 2914306 - DNA, 25 bp, Homo sapien
caagagttgattctggtcaccagct

SEQ ID NO: 2914307 - DNA, 25 bp, Homo sapien
tgggttttaaagtctctgggcaatg

SEQ ID NO: 2914308 - DNA, 25 bp, Homo sapien
caaagcccgattccttacatcagat

SEQ ID NO: 2914309 - DNA, 25 bp, Homo sapien
cccaggttctgctgatctctgtata

SEQ ID NO: 2914310 - DNA, 25 bp, Homo sapien
tgaaaattctatccactacctaggg

SEQ ID NO: 2914311 - DNA, 25 bp, Homo sapien
tagtctaggatgtcgccacattcca

SEQ ID NO: 2914312 - DNA, 25 bp, Homo sapien
cacattccaggttgtccagttcgct

SEQ ID NO: 2914313 - DNA, 25 bp, Homo sapien
gattgatctccttcacgcgcttgcg

SEQ ID NO: 2914314 - DNA, 25 bp, Homo sapien
catgtggtcgatgtactgattgatc

SEQ ID NO: 2914315 - DNA, 25 bp, Homo sapien
ctagaggtgcgggtgaggcgtgtgc

SEQ ID NO: 2914316 - DNA, 25 bp, Homo sapien
agcaactctctagaggtgcgggtga

SEQ ID NO: 2914317 - DNA, 25 bp, Homo sapien
gatcgcggttgagagatgcccagca

SEQ ID NO: 2914318 - DNA, 25 bp, Homo sapien
gatgcccagcaactctctagaggtg

SEQ ID NO: 2914319 - DNA, 25 bp, Homo sapien
catggcgtgtttggatatctgctgc

SEQ ID NO: 2914320 - DNA, 25 bp, Homo sapien
taaacagcttatctcccatggcgtg

SEQ ID NO: 2914321 - DNA, 25 bp, Homo sapien
ccctgttttcacgtatgcctctgca

SEQ ID NO: 2914322 - DNA, 25 bp, Homo sapien
tcctgttttgtctaggttccagagg

SEQ ID NO: 2914323 - DNA, 25 bp, Homo sapien
ggttcacgggtggataaagaccatc

SEQ ID NO: 2914324 - DNA, 25 bp, Homo sapien
taagtgctaccgctgtgttcctgca

SEQ ID NO: 2914325 - DNA, 25 bp, Homo sapien
ccaggtctggtgattttagggccaa

SEQ ID NO: 2914326 - DNA, 25 bp, Homo sapien
aacaggccctgccaagatgactgag

SEQ ID NO: 2914327 - DNA, 25 bp, Homo sapien
tcagagttggctttgtctgcaccaa

SEQ ID NO: 2914328 - DNA, 25 bp, Homo sapien
ggattcccagcaggataccatcaag

SEQ ID NO: 2914329 - DNA, 25 bp, Homo sapien
atcaagtactacaccatgcacctgg

SEQ ID NO: 2914330 - DNA, 25 bp, Homo sapien
agtggctactgagtgggattcccag

SEQ ID NO: 2914331 - DNA, 25 bp, Homo sapien
tcttgcctgaaatgggtctctagct

SEQ ID NO: 2914332 - DNA, 25 bp, Homo sapien
cagacaccgactttaggtttgaact

SEQ ID NO: 2914333 - DNA, 25 bp, Homo sapien
tatcctgccgatgtatcacacacgc

SEQ ID NO: 2914334 - DNA, 25 bp, Homo sapien
cacaagcaagctggttaattaggtt

SEQ ID NO: 2914335 - DNA, 25 bp, Homo sapien
ggcgcttccgcccattggcgggagg

SEQ ID NO: 2914336 - DNA, 25 bp, Homo sapien
cttccgcccattggcgggaggagaa

SEQ ID NO: 2914337 - DNA, 25 bp, Homo sapien
gaggagaaaacacgtggcgcggtgc

SEQ ID NO: 2914338 - DNA, 25 bp, Homo sapien
ccattggcgggaggagaaaacacgt

SEQ ID NO: 2914339 - DNA, 25 bp, Homo sapien
acccagggacctgcgagcagggcct

SEQ ID NO: 2914340 - DNA, 25 bp, Homo sapien
tcccgacttgccctcgcgcacacat

SEQ ID NO: 2914341 - DNA, 25 bp, Homo sapien
cctgcggagcaagcgctccggccgc

SEQ ID NO: 2914342 - DNA, 25 bp, Homo sapien
gaggggcgaccacccgcccgctgcc

SEQ ID NO: 2914343 - DNA, 25 bp, Homo sapien
aacttggagccgctgtagagcaggc

SEQ ID NO: 2914344 - DNA, 25 bp, Homo sapien
agcaccacctctacgtcgtacgagt

SEQ ID NO: 2914345 - DNA, 25 bp, Homo sapien
cgtcgtacgagttccccttgctctt

SEQ ID NO: 2914346 - DNA, 25 bp, Homo sapien
cgggatgagtgaggccgcggaggca

SEQ ID NO: 2914347 - DNA, 25 bp, Homo sapien
aggagccgaagcgggcacggcccgt

SEQ ID NO: 2914348 - DNA, 25 bp, Homo sapien
gagccgaagcgggcacggcccgtga

SEQ ID NO: 2914349 - DNA, 25 bp, Homo sapien
agccgaagcgggcacggcccgtgag

SEQ ID NO: 2914350 - DNA, 25 bp, Homo sapien
ccgaagcgggcacggcccgtgagcg

SEQ ID NO: 2914351 - DNA, 25 bp, Homo sapien
tcccgggtgggaagcgccgggtgca

SEQ ID NO: 2914352 - DNA, 25 bp, Homo sapien
ggctcggagagtgtgagacacaggc

SEQ ID NO: 2914353 - DNA, 25 bp, Homo sapien
acacaggctgggaaggtcccgggtg

SEQ ID NO: 2914354 - DNA, 25 bp, Homo sapien
ccaggagccggtcacgacgggctct

SEQ ID NO: 2914355 - DNA, 25 bp, Homo sapien
aaacggcaggcgagcatctcaagaa

SEQ ID NO: 2914356 - DNA, 25 bp, Homo sapien
tattcctttcacagcgaccagggct

SEQ ID NO: 2914357 - DNA, 25 bp, Homo sapien
cacgtgtttagcaagaaggtgtcac

SEQ ID NO: 2914358 - DNA, 25 bp, Homo sapien
tctcaagaaagataacagggcacgt

SEQ ID NO: 2914359 - DNA, 25 bp, Homo sapien
gggcagtccaaggctcacccagtct

SEQ ID NO: 2914360 - DNA, 25 bp, Homo sapien
caaatcctgtgaggccagactggtg

SEQ ID NO: 2914361 - DNA, 25 bp, Homo sapien
gtctctggaatcttgataagttctc

SEQ ID NO: 2914362 - DNA, 25 bp, Homo sapien
ctggtggtcagtgaacacccagggc

SEQ ID NO: 2914363 - DNA, 25 bp, Homo sapien
ctttaatcttcaagtacccacaaag

SEQ ID NO: 2914364 - DNA, 25 bp, Homo sapien
atcttcaagtacccacaaaggtaag

SEQ ID NO: 2914365 - DNA, 25 bp, Homo sapien
cagtaaggcctttaatcttcaagta

SEQ ID NO: 2914366 - DNA, 25 bp, Homo sapien
ctcagtaaggcctttaatcttcaag

SEQ ID NO: 2914367 - DNA, 25 bp, Homo sapien
ttgctgattatttctccttcgaaga

SEQ ID NO: 2914368 - DNA, 25 bp, Homo sapien
atctgcatcccacttgcgagttaag

SEQ ID NO: 2914369 - DNA, 25 bp, Homo sapien
ccacttgcgagttaagaaagggtgt

SEQ ID NO: 2914370 - DNA, 25 bp, Homo sapien
tgattatttctccttcgaagaaggt

SEQ ID NO: 2914371 - DNA, 25 bp, Homo sapien
atgtttcagtccagtctagcagagt

SEQ ID NO: 2914372 - DNA, 25 bp, Homo sapien
gcagatccagatatcttccaatgtt

SEQ ID NO: 2914373 - DNA, 25 bp, Homo sapien
gtctgcagatccagatatcttccaa

SEQ ID NO: 2914374 - DNA, 25 bp, Homo sapien
gagtctgcagatccagatatcttcc

SEQ ID NO: 2914375 - DNA, 25 bp, Homo sapien
tagactgaatatatggaatcctgac

SEQ ID NO: 2914376 - DNA, 25 bp, Homo sapien
aatgctgagtactacaaaagcagcc

SEQ ID NO: 2914377 - DNA, 25 bp, Homo sapien
gaggaagcactccataggttcagct

SEQ ID NO: 2914378 - DNA, 25 bp, Homo sapien
gaaaaaatgacagcctaggtgaagt

SEQ ID NO: 2914379 - DNA, 25 bp, Homo sapien
cttccacctcatgaagacgtagtct

SEQ ID NO: 2914380 - DNA, 25 bp, Homo sapien
aagacgtagtctccattcttcagct

SEQ ID NO: 2914381 - DNA, 25 bp, Homo sapien
taaatgattttgcatactgataaaa

SEQ ID NO: 2914382 - DNA, 25 bp, Homo sapien
ttttgcatactgataaaaagccaga

SEQ ID NO: 2914383 - DNA, 25 bp, Homo sapien
gaaagcagatgtagtagaacccggc

SEQ ID NO: 2914384 - DNA, 25 bp, Homo sapien
gtctttgatcgtgtgatctgggacc

SEQ ID NO: 2914385 - DNA, 25 bp, Homo sapien
tatggtagtagtagccctctatgga

SEQ ID NO: 2914386 - DNA, 25 bp, Homo sapien
aacccggcaaaagaagcaccactga

SEQ ID NO: 2914387 - DNA, 25 bp, Homo sapien
aaagcacagaatctatacagagaca

SEQ ID NO: 2914388 - DNA, 25 bp, Homo sapien
gacaggctaagatgttgcttttggg

SEQ ID NO: 2914389 - DNA, 25 bp, Homo sapien
taaggccttattgtgagcaactgag

SEQ ID NO: 2914390 - DNA, 25 bp, Homo sapien
gaaataagctctcagcatccaaata

SEQ ID NO: 2914391 - DNA, 25 bp, Homo sapien
ggaaccctcatacatgccggtagga

SEQ ID NO: 2914392 - DNA, 25 bp, Homo sapien
tagagacatgataacaagtgccagg

SEQ ID NO: 2914393 - DNA, 25 bp, Homo sapien
tcatacaggagtgtggaagaacgta

SEQ ID NO: 2914394 - DNA, 25 bp, Homo sapien
tatagcaataccgtatgacctagca

SEQ ID NO: 2914395 - DNA, 25 bp, Homo sapien
atatctgaggtgtttgcctcccctg

SEQ ID NO: 2914396 - DNA, 25 bp, Homo sapien
taatgccaggctctcatatcctaag

SEQ ID NO: 2914397 - DNA, 25 bp, Homo sapien
aaaggagacctcaataagctgtggg

SEQ ID NO: 2914398 - DNA, 25 bp, Homo sapien
tatggctagcataggcataaactga

SEQ ID NO: 2914399 - DNA, 25 bp, Homo sapien
ggaacatgggttagattgagggact

SEQ ID NO: 2914400 - DNA, 25 bp, Homo sapien
gttcaggaacatgggttagattgag

SEQ ID NO: 2914401 - DNA, 25 bp, Homo sapien
catgggttagattgagggactgata

SEQ ID NO: 2914402 - DNA, 25 bp, Homo sapien
ttcatagatgggtgcactgtgttca

SEQ ID NO: 2914403 - DNA, 25 bp, Homo sapien
tttatttggttgctgttctgaaccg

SEQ ID NO: 2914404 - DNA, 25 bp, Homo sapien
cagttttatttggttgctgttctga

SEQ ID NO: 2914405 - DNA, 25 bp, Homo sapien
tatttggttgctgttctgaaccgtt

SEQ ID NO: 2914406 - DNA, 25 bp, Homo sapien
caagttcagttttatttggttgctg

SEQ ID NO: 2914407 - DNA, 25 bp, Homo sapien
tttgagtagcaaaaggaggcggcac

SEQ ID NO: 2914408 - DNA, 25 bp, Homo sapien
gagcagaccttctattcggctggag

SEQ ID NO: 2914409 - DNA, 25 bp, Homo sapien
cacactttggcacgtgagcctcgag

SEQ ID NO: 2914410 - DNA, 25 bp, Homo sapien
ggtgaagaccaaactgccactgagg

SEQ ID NO: 2914411 - DNA, 25 bp, Homo sapien
ttgaatttcaggattgaggagactg

SEQ ID NO: 2914412 - DNA, 25 bp, Homo sapien
gattgaggagactgttctgactcat

SEQ ID NO: 2914413 - DNA, 25 bp, Homo sapien
caggattgaggagactgttctgact

SEQ ID NO: 2914414 - DNA, 25 bp, Homo sapien
tttcaggattgaggagactgttctg

SEQ ID NO: 2914415 - DNA, 25 bp, Homo sapien
ccacagccagcccttctgatgcctt

SEQ ID NO: 2914416 - DNA, 25 bp, Homo sapien
cacagccagcccttctgatgccttg

SEQ ID NO: 2914417 - DNA, 25 bp, Homo sapien
ttgtccatcagctcaaccaaggcca

SEQ ID NO: 2914418 - DNA, 25 bp, Homo sapien
aggccatcagctcaacaagaccaca

SEQ ID NO: 2914419 - DNA, 25 bp, Homo sapien
ctgaagagagtggaatggcacgtac

SEQ ID NO: 2914420 - DNA, 25 bp, Homo sapien
caagaccacagtgagcatctcctca

SEQ ID NO: 2914421 - DNA, 25 bp, Homo sapien
ccctcacaggcctggaaaaatgcag

SEQ ID NO: 2914422 - DNA, 25 bp, Homo sapien
tcagggatgacctccggactcagtg

SEQ ID NO: 2914423 - DNA, 25 bp, Homo sapien
cagcatgagccgtggatgagctcag

SEQ ID NO: 2914424 - DNA, 25 bp, Homo sapien
aaaaatgcagaaggtatgggctcgc

SEQ ID NO: 2914425 - DNA, 25 bp, Homo sapien
agaacagccaaacccctaggatcct

SEQ ID NO: 2914426 - DNA, 25 bp, Homo sapien
tctgagcagtggagtaagaacagcc

SEQ ID NO: 2914427 - DNA, 25 bp, Homo sapien
gatgaagatgattccccaaagttcc

SEQ ID NO: 2914428 - DNA, 25 bp, Homo sapien
tattgcacatagtttcagaggcatg

SEQ ID NO: 2914429 - DNA, 25 bp, Homo sapien
ttcctgtgcgttggagtcacccggg

SEQ ID NO: 2914430 - DNA, 25 bp, Homo sapien
taaaaacatcgacaggttgtgagga

SEQ ID NO: 2914431 - DNA, 25 bp, Homo sapien
tagttacgctcaaagcttcctgtgc

SEQ ID NO: 2914432 - DNA, 25 bp, Homo sapien
ggagaagtccgtgtaagctgtttta

SEQ ID NO: 2914433 - DNA, 25 bp, Homo sapien
attccggtctgacggcggcgacaga

SEQ ID NO: 2914434 - DNA, 25 bp, Homo sapien
agtgccagacactatcggttccgcc

SEQ ID NO: 2914435 - DNA, 25 bp, Homo sapien
tccaggattcagagtccgggcgagc

SEQ ID NO: 2914436 - DNA, 25 bp, Homo sapien
agaacagcgttctcgtgggcgcctg

SEQ ID NO: 2914437 - DNA, 25 bp, Homo sapien
gttcttctgtgtccgagcgatctcc

SEQ ID NO: 2914438 - DNA, 25 bp, Homo sapien
tctccgagatcttctctaagatccc

SEQ ID NO: 2914439 - DNA, 25 bp, Homo sapien
tcgatctccgagatcttctctaaga

SEQ ID NO: 2914440 - DNA, 25 bp, Homo sapien
ccgagatcttctctaagatccccat

SEQ ID NO: 2914441 - DNA, 25 bp, Homo sapien
gaccgtgcctctacaaaaaacataa

SEQ ID NO: 2914442 - DNA, 25 bp, Homo sapien
gatcaactgaggtccggagtccgaa

SEQ ID NO: 2914443 - DNA, 25 bp, Homo sapien
actgaggtccggagtccgaaaccag

SEQ ID NO: 2914444 - DNA, 25 bp, Homo sapien
gagaccgtgcctctacaaaaaacat

SEQ ID NO: 2914445 - DNA, 25 bp, Homo sapien
gatggaaagcaagacagaagatgag

SEQ ID NO: 2914446 - DNA, 25 bp, Homo sapien
ccagggtgtccaagcccaggggtca

SEQ ID NO: 2914447 - DNA, 25 bp, Homo sapien
aagatgagtggccagggtgtccaag

SEQ ID NO: 2914448 - DNA, 25 bp, Homo sapien
ctaaaggatggaaagcaagacagaa

SEQ ID NO: 2914449 - DNA, 25 bp, Homo sapien
cagagggaaatccaatcagcgccac

SEQ ID NO: 2914450 - DNA, 25 bp, Homo sapien
gagcttagctttcagcaggcccaga

SEQ ID NO: 2914451 - DNA, 25 bp, Homo sapien
tctcctttggacgaggccgatttgg

SEQ ID NO: 2914452 - DNA, 25 bp, Homo sapien
tgggcccgatacttggcgagcttag

SEQ ID NO: 2914453 - DNA, 25 bp, Homo sapien
actgagtcggaagaccaagtagggc

SEQ ID NO: 2914454 - DNA, 25 bp, Homo sapien
catgacaccgctagagatacacact

SEQ ID NO: 2914455 - DNA, 25 bp, Homo sapien
tgctggcaagaggaaagagcgtcct

SEQ ID NO: 2914456 - DNA, 25 bp, Homo sapien
gatacacactcgagaagtatttgtg

SEQ ID NO: 2914457 - DNA, 25 bp, Homo sapien
ctggccgtggaggtcatcagactca

SEQ ID NO: 2914458 - DNA, 25 bp, Homo sapien
aatgaccccaggaatacacgtcaga

SEQ ID NO: 2914459 - DNA, 25 bp, Homo sapien
aggtcatcagactcaagaatgtgga

SEQ ID NO: 2914460 - DNA, 25 bp, Homo sapien
cagagtggtgaactcataggacgct

SEQ ID NO: 2914461 - DNA, 25 bp, Homo sapien
ttgggctgcgccttcaatgattcca

SEQ ID NO: 2914462 - DNA, 25 bp, Homo sapien
gggctgcgccttcaatgattccagg

SEQ ID NO: 2914463 - DNA, 25 bp, Homo sapien
cttgggctgcgccttcaatgattcc

SEQ ID NO: 2914464 - DNA, 25 bp, Homo sapien
tgggctgcgccttcaatgattccag

SEQ ID NO: 2914465 - DNA, 25 bp, Homo sapien
ctgccacatactagcacaagcttgg

SEQ ID NO: 2914466 - DNA, 25 bp, Homo sapien
cacatgttttactgacggagactta

SEQ ID NO: 2914467 - DNA, 25 bp, Homo sapien
tatgtggacccatgtgactgctacc

SEQ ID NO: 2914468 - DNA, 25 bp, Homo sapien
tcagaagaaaatccgacaccaccat

SEQ ID NO: 2914469 - DNA, 25 bp, Homo sapien
cttggtggcatccagcatcatgatg

SEQ ID NO: 2914470 - DNA, 25 bp, Homo sapien
gtgcgcgccacagcgatcacctgcc

SEQ ID NO: 2914471 - DNA, 25 bp, Homo sapien
acagcgatcacctgccggccacggc

SEQ ID NO: 2914472 - DNA, 25 bp, Homo sapien
atgatgacgtcagccgtgcgcgcca

SEQ ID NO: 2914473 - DNA, 25 bp, Homo sapien
tacgagctcagggacacattggccc

SEQ ID NO: 2914474 - DNA, 25 bp, Homo sapien
cacaggccgcctagtacgagctcag

SEQ ID NO: 2914475 - DNA, 25 bp, Homo sapien
cgcctagtacgagctcagggacaca

SEQ ID NO: 2914476 - DNA, 25 bp, Homo sapien
cccagacatgtgagcctgccccatg

SEQ ID NO: 2914477 - DNA, 25 bp, Homo sapien
caagccttgaggagaagacgccata

SEQ ID NO: 2914478 - DNA, 25 bp, Homo sapien
gtttacggtcggcatgcacaggcaa

SEQ ID NO: 2914479 - DNA, 25 bp, Homo sapien
caagatacctctgtgctggctggac

SEQ ID NO: 2914480 - DNA, 25 bp, Homo sapien
tggtgtacccctctgccaggatgtg

SEQ ID NO: 2914481 - DNA, 25 bp, Homo sapien
tgtccacagagccagatgcacagct

SEQ ID NO: 2914482 - DNA, 25 bp, Homo sapien
gctgtccacagagccagatgcacag

SEQ ID NO: 2914483 - DNA, 25 bp, Homo sapien
tccacagagccagatgcacagcttc

SEQ ID NO: 2914484 - DNA, 25 bp, Homo sapien
agagtaccccttaagcccctcacag

SEQ ID NO: 2914485 - DNA, 25 bp, Homo sapien
gaggcggatgcccacagactccagc

SEQ ID NO: 2914486 - DNA, 25 bp, Homo sapien
atgttaggcttgtgcttgttgaggc

SEQ ID NO: 2914487 - DNA, 25 bp, Homo sapien
gtagatgttaggcttgtgcttgttg

SEQ ID NO: 2914488 - DNA, 25 bp, Homo sapien
cttgtgcttgttgaggcggatgccc

SEQ ID NO: 2914489 - DNA, 25 bp, Homo sapien
actgggtcagcgtgactgtcgagtt

SEQ ID NO: 2914490 - DNA, 25 bp, Homo sapien
cagcttttccgagcactgggtcagc

SEQ ID NO: 2914491 - DNA, 25 bp, Homo sapien
tgcaccagcttttccgagcactggg

SEQ ID NO: 2914492 - DNA, 25 bp, Homo sapien
tgactgtcgagttaaaggagatgcc

SEQ ID NO: 2914493 - DNA, 25 bp, Homo sapien
cgattaagggcaacctgtgcaccag

SEQ ID NO: 2914494 - DNA, 25 bp, Homo sapien
ctgaggggctccgattaagggcaac

SEQ ID NO: 2914495 - DNA, 25 bp, Homo sapien
tccgattaagggcaacctgtgcacc

SEQ ID NO: 2914496 - DNA, 25 bp, Homo sapien
gggctccgattaagggcaacctgtg

SEQ ID NO: 2914497 - DNA, 25 bp, Homo sapien
cggttgcccacgatcacatcgatga

SEQ ID NO: 2914498 - DNA, 25 bp, Homo sapien
catcgatgaactcgtccggggagca

SEQ ID NO: 2914499 - DNA, 25 bp, Homo sapien
caggcagggcatgtacacccggttg

SEQ ID NO: 2914500 - DNA, 25 bp, Homo sapien
gggagcagtcttctcggaaaagcac

SEQ ID NO: 2914501 - DNA, 25 bp, Homo sapien
gagattgagaaggtggaggccggtg

SEQ ID NO: 2914502 - DNA, 25 bp, Homo sapien
ctgagattgagaaggtggaggccgg

SEQ ID NO: 2914503 - DNA, 25 bp, Homo sapien
tgagattgagaaggtggaggccggt

SEQ ID NO: 2914504 - DNA, 25 bp, Homo sapien
ggccaggcggtccacctcttccatg

SEQ ID NO: 2914505 - DNA, 25 bp, Homo sapien
tccatggagatctggtcgattttgt

SEQ ID NO: 2914506 - DNA, 25 bp, Homo sapien
catggagatctggtcgattttgtta

SEQ ID NO: 2914507 - DNA, 25 bp, Homo sapien
agatctggtcgattttgttataaac

SEQ ID NO: 2914508 - DNA, 25 bp, Homo sapien
agcccattactatgatggcagcctg

SEQ ID NO: 2914509 - DNA, 25 bp, Homo sapien
gaaacaagcccattactatgatggc

SEQ ID NO: 2914510 - DNA, 25 bp, Homo sapien
ctcctaggggctggcaagcctgtgc

SEQ ID NO: 2914511 - DNA, 25 bp, Homo sapien
gggaaacaagcccattactatgatg

SEQ ID NO: 2914512 - DNA, 25 bp, Homo sapien
tattggagcggataacctccactgg

SEQ ID NO: 2914513 - DNA, 25 bp, Homo sapien
gagcggataacctccactggccagg

SEQ ID NO: 2914514 - DNA, 25 bp, Homo sapien
actggccaggtggcccgctggtacc

SEQ ID NO: 2914515 - DNA, 25 bp, Homo sapien
ttggagcggataacctccactggcc

SEQ ID NO: 2914516 - DNA, 25 bp, Homo sapien
ccagcagatagtccaggttcagctt

SEQ ID NO: 2914517 - DNA, 25 bp, Homo sapien
tccagcagatagtccaggttcagct

SEQ ID NO: 2914518 - DNA, 25 bp, Homo sapien
ggcaggatggggagaacgtcagcca

SEQ ID NO: 2914519 - DNA, 25 bp, Homo sapien
gcaggatggggagaacgtcagccac

SEQ ID NO: 2914520 - DNA, 25 bp, Homo sapien
aatgatggcgtctgtgaagtctggc

SEQ ID NO: 2914521 - DNA, 25 bp, Homo sapien
gagaatgatggcgtctgtgaagtct

SEQ ID NO: 2914522 - DNA, 25 bp, Homo sapien
cactgaggcccctttccggagaatg

SEQ ID NO: 2914523 - DNA, 25 bp, Homo sapien
cctttccggagaatgatggcgtctg

SEQ ID NO: 2914524 - DNA, 25 bp, Homo sapien
cagcaattgccctgagagtgtagac

SEQ ID NO: 2914525 - DNA, 25 bp, Homo sapien
gacagggtgatagcttggagtcccc

SEQ ID NO: 2914526 - DNA, 25 bp, Homo sapien
catataaaactggaaggagaccctg

SEQ ID NO: 2914527 - DNA, 25 bp, Homo sapien
taaacttcagtgctccttggtaggg

SEQ ID NO: 2914528 - DNA, 25 bp, Homo sapien
gctggcgagtgaccggtggatgcgg

SEQ ID NO: 2914529 - DNA, 25 bp, Homo sapien
ggctggcgagtgaccggtggatgcg

SEQ ID NO: 2914530 - DNA, 25 bp, Homo sapien
tggctggcgagtgaccggtggatgc

SEQ ID NO: 2914531 - DNA, 25 bp, Homo sapien
ccgctgcggactgtacttggtgctg

SEQ ID NO: 2914532 - DNA, 25 bp, Homo sapien
tcatgctccatggtgtgggtcaggc

SEQ ID NO: 2914533 - DNA, 25 bp, Homo sapien
ccacccgctgcggactgtacttggt

SEQ ID NO: 2914534 - DNA, 25 bp, Homo sapien
cgatctggatgacgtcctcatgctc

SEQ ID NO: 2914535 - DNA, 25 bp, Homo sapien
tgtcagctgggcctttgaagccact

SEQ ID NO: 2914536 - DNA, 25 bp, Homo sapien
taaccactggttcccatcatggaga

SEQ ID NO: 2914537 - DNA, 25 bp, Homo sapien
gagggctcagtcttatgggaaatgc

SEQ ID NO: 2914538 - DNA, 25 bp, Homo sapien
taggacaccccttaggctgtggagg

SEQ ID NO: 2914539 - DNA, 25 bp, Homo sapien
agcagctcagtgttatggggaaggg

SEQ ID NO: 2914540 - DNA, 25 bp, Homo sapien
gcagctcagtgttatggggaaggga

SEQ ID NO: 2914541 - DNA, 25 bp, Homo sapien
ctgcgttctgtggcctgctccccgc

SEQ ID NO: 2914542 - DNA, 25 bp, Homo sapien
tgcgttctgtggcctgctccccgcc

SEQ ID NO: 2914543 - DNA, 25 bp, Homo sapien
gcgttctgtggcctgctccccgcct

SEQ ID NO: 2914544 - DNA, 25 bp, Homo sapien
cgttctgtggcctgctccccgcctg

SEQ ID NO: 2914545 - DNA, 25 bp, Homo sapien
tgagcagacccgactggccctgggt

SEQ ID NO: 2914546 - DNA, 25 bp, Homo sapien
ttcatctcctctagagcgccttggg

SEQ ID NO: 2914547 - DNA, 25 bp, Homo sapien
tccgggagggcggatccataattca

SEQ ID NO: 2914548 - DNA, 25 bp, Homo sapien
ggtgtcacgggctcagggacttgga

SEQ ID NO: 2914549 - DNA, 25 bp, Homo sapien
cgcatagggatccaggtagtagcca

SEQ ID NO: 2914550 - DNA, 25 bp, Homo sapien
tcgtaatcgtcgtagccgtagccgt

SEQ ID NO: 2914551 - DNA, 25 bp, Homo sapien
tagtagccataagggtgcgcctcgc

SEQ ID NO: 2914552 - DNA, 25 bp, Homo sapien
tagctgtaaggagacgagtaccccg

SEQ ID NO: 2914553 - DNA, 25 bp, Homo sapien
cgcgcaagcgaggtggcagggcgag

SEQ ID NO: 2914554 - DNA, 25 bp, Homo sapien
gacagcgcgcgctggaggttgcgct

SEQ ID NO: 2914555 - DNA, 25 bp, Homo sapien
gtgggcgccgaaggccgacagcgcg

SEQ ID NO: 2914556 - DNA, 25 bp, Homo sapien
gaaagggtggccgtagggcacagcg

SEQ ID NO: 2914557 - DNA, 25 bp, Homo sapien
cctgagccgcgcgatgggcttcttc

SEQ ID NO: 2914558 - DNA, 25 bp, Homo sapien
cttcttctccgacagcgtcttcttg

SEQ ID NO: 2914559 - DNA, 25 bp, Homo sapien
gcgcgatgggcttcttctccgacag

SEQ ID NO: 2914560 - DNA, 25 bp, Homo sapien
gatgggcttcttctccgacagcgtc

SEQ ID NO: 2914561 - DNA, 25 bp, Homo sapien
cagcttgtagccgaagcgtttgtag

SEQ ID NO: 2914562 - DNA, 25 bp, Homo sapien
tagccgaagcgtttgtaggccgcct

SEQ ID NO: 2914563 - DNA, 25 bp, Homo sapien
gccgaagcgtttgtaggccgcctcc

SEQ ID NO: 2914564 - DNA, 25 bp, Homo sapien
cttgtagccgaagcgtttgtaggcc

SEQ ID NO: 2914565 - DNA, 25 bp, Homo sapien
gcggagggagccgtagggcgaggcc

SEQ ID NO: 2914566 - DNA, 25 bp, Homo sapien
gacaggagcgcgctccagtgggaga

SEQ ID NO: 2914567 - DNA, 25 bp, Homo sapien
tgcggcgccggtggcacgtgcgctg

SEQ ID NO: 2914568 - DNA, 25 bp, Homo sapien
cgttgctgctgcgagcgcgtggctg

SEQ ID NO: 2914569 - DNA, 25 bp, Homo sapien
cctccgggctcacggcagggggctc

SEQ ID NO: 2914570 - DNA, 25 bp, Homo sapien
cacctccgggctcacggcagggggc

SEQ ID NO: 2914571 - DNA, 25 bp, Homo sapien
acctccgggctcacggcagggggct

SEQ ID NO: 2914572 - DNA, 25 bp, Homo sapien
gctcgcctccgcgacgcccgtggag

SEQ ID NO: 2914573 - DNA, 25 bp, Homo sapien
caagctcgcctccgcgacgcccgtg

SEQ ID NO: 2914574 - DNA, 25 bp, Homo sapien
cgcgacgcccgtggagaggccccgg

SEQ ID NO: 2914575 - DNA, 25 bp, Homo sapien
tcgcctccgcgacgcccgtggagag

SEQ ID NO: 2914576 - DNA, 25 bp, Homo sapien
gggcccgtgcgcaaggacagctgag

SEQ ID NO: 2914577 - DNA, 25 bp, Homo sapien
gacagctgaggcgacgggggcgcca

SEQ ID NO: 2914578 - DNA, 25 bp, Homo sapien
ggcccggcgagctcctcagcgaggg

SEQ ID NO: 2914579 - DNA, 25 bp, Homo sapien
acgggggcgccaagggtgagcagta

SEQ ID NO: 2914580 - DNA, 25 bp, Homo sapien
gggtgggcccaggcgcccagcggct

SEQ ID NO: 2914581 - DNA, 25 bp, Homo sapien
agcggcgagccgggtgggcccaggc

SEQ ID NO: 2914582 - DNA, 25 bp, Homo sapien
cggcagcggcgagccgggtgggccc

SEQ ID NO: 2914583 - DNA, 25 bp, Homo sapien
cccggcagcggcgagccgggtgggc

SEQ ID NO: 2914584 - DNA, 25 bp, Homo sapien
ctgtggcagagccccaggggcggcg

SEQ ID NO: 2914585 - DNA, 25 bp, Homo sapien
gtggcagagccccaggggcggcgag

SEQ ID NO: 2914586 - DNA, 25 bp, Homo sapien
cagagccccaggggcggcgagggcg

SEQ ID NO: 2914587 - DNA, 25 bp, Homo sapien
ggcagagccccaggggcggcgaggg

SEQ ID NO: 2914588 - DNA, 25 bp, Homo sapien
agcccgagtgggtggctcgctgagg

SEQ ID NO: 2914589 - DNA, 25 bp, Homo sapien
ccacgtgtgcgggaggcgcgagggc

SEQ ID NO: 2914590 - DNA, 25 bp, Homo sapien
ggcgcgagggcagattcagggagct

SEQ ID NO: 2914591 - DNA, 25 bp, Homo sapien
tgggtggctcgctgaggcgccgcca

SEQ ID NO: 2914592 - DNA, 25 bp, Homo sapien
gagtcctcgggttctcgcgggctct

SEQ ID NO: 2914593 - DNA, 25 bp, Homo sapien
ggtgggcgttgggtgggaggcatgt

SEQ ID NO: 2914594 - DNA, 25 bp, Homo sapien
agtccagggcgtctctgagtcctcg

SEQ ID NO: 2914595 - DNA, 25 bp, Homo sapien
tcggtggaagggcaggcgcacttgc

SEQ ID NO: 2914596 - DNA, 25 bp, Homo sapien
tggaaaagcctcggcggctgcctgc

SEQ ID NO: 2914597 - DNA, 25 bp, Homo sapien
cctggaaaagcctcggcggctgcct

SEQ ID NO: 2914598 - DNA, 25 bp, Homo sapien
ctggaaaagcctcggcggctgcctg

SEQ ID NO: 2914599 - DNA, 25 bp, Homo sapien
gaggctgggccttaatgtcttttgc

SEQ ID NO: 2914600 - DNA, 25 bp, Homo sapien
gaccctggtcatatcagcagctgga

SEQ ID NO: 2914601 - DNA, 25 bp, Homo sapien
tggtcacacgcagccagtgggtatg

SEQ ID NO: 2914602 - DNA, 25 bp, Homo sapien
acgaggcatgaccacagcaaaacgc

SEQ ID NO: 2914603 - DNA, 25 bp, Homo sapien
tgtactcgtggccagggtccatagg

SEQ ID NO: 2914604 - DNA, 25 bp, Homo sapien
caggaccagcgaagactacaggctc

SEQ ID NO: 2914605 - DNA, 25 bp, Homo sapien
tgcaggcccaactcgctggaaagag

SEQ ID NO: 2914606 - DNA, 25 bp, Homo sapien
ttgttccgccagcttggcgggccga

SEQ ID NO: 2914607 - DNA, 25 bp, Homo sapien
aaaccctccgtgtaatctgtgcctc

SEQ ID NO: 2914608 - DNA, 25 bp, Homo sapien
tcaaaccctccgtgtaatctgtgcc

SEQ ID NO: 2914609 - DNA, 25 bp, Homo sapien
accctcaaaccctccgtgtaatctg

SEQ ID NO: 2914610 - DNA, 25 bp, Homo sapien
cctcaaaccctccgtgtaatctgtg

SEQ ID NO: 2914611 - DNA, 25 bp, Homo sapien
agagacctggatgtgcggtggaaca

SEQ ID NO: 2914612 - DNA, 25 bp, Homo sapien
gatggataggcatgtccggcagttt

SEQ ID NO: 2914613 - DNA, 25 bp, Homo sapien
cacatctggcttggccaaaatctct

SEQ ID NO: 2914614 - DNA, 25 bp, Homo sapien
taggggccagacctgtcatccagat

SEQ ID NO: 2914615 - DNA, 25 bp, Homo sapien
acagcgcggggcatccgccgccggg

SEQ ID NO: 2914616 - DNA, 25 bp, Homo sapien
ctcacccctagacgccctgcgcccc

SEQ ID NO: 2914617 - DNA, 25 bp, Homo sapien
aggcatccttgcccctcacccctag

SEQ ID NO: 2914618 - DNA, 25 bp, Homo sapien
cagggtaaggaggacccaggcatcc

SEQ ID NO: 2914619 - DNA, 25 bp, Homo sapien
ttccagggtaaggaggacccaggca

SEQ ID NO: 2914620 - DNA, 25 bp, Homo sapien
ctgctcacggaaccgcatggatggc

SEQ ID NO: 2914621 - DNA, 25 bp, Homo sapien
tgctgctcacggaaccgcatggatg

SEQ ID NO: 2914622 - DNA, 25 bp, Homo sapien
tcacggaaccgcatggatggcaggt

SEQ ID NO: 2914623 - DNA, 25 bp, Homo sapien
ccgtgctgctcacggaaccgcatgg

SEQ ID NO: 2914624 - DNA, 25 bp, Homo sapien
aatctaatcttgaggttggacagca

SEQ ID NO: 2914625 - DNA, 25 bp, Homo sapien
gaggttccgttcaaatctaatcttg

SEQ ID NO: 2914626 - DNA, 25 bp, Homo sapien
gtagatgaggttccgttcaaatcta

SEQ ID NO: 2914627 - DNA, 25 bp, Homo sapien
atcttgaggttggacagcacagtgg

SEQ ID NO: 2914628 - DNA, 25 bp, Homo sapien
agggcccgtccgttgtactgctgca

SEQ ID NO: 2914629 - DNA, 25 bp, Homo sapien
tcaccgacaccaggatgctcccaat

SEQ ID NO: 2914630 - DNA, 25 bp, Homo sapien
catttggtatgggttcaccgacacc

SEQ ID NO: 2914631 - DNA, 25 bp, Homo sapien
catagattccaaacatttggtatgg

SEQ ID NO: 2914632 - DNA, 25 bp, Homo sapien
ggcgaaggcgagatttgcaacagca

SEQ ID NO: 2914633 - DNA, 25 bp, Homo sapien
catcgagcattttggcgaaggcgag

SEQ ID NO: 2914634 - DNA, 25 bp, Homo sapien
tctgtttggcatcgagcattttggc

SEQ ID NO: 2914635 - DNA, 25 bp, Homo sapien
cattttggcgaaggcgagatttgca

SEQ ID NO: 2914636 - DNA, 25 bp, Homo sapien
ctgctgcatgacctcccgtttctgg

SEQ ID NO: 2914637 - DNA, 25 bp, Homo sapien
tcagttttgccagagccgctctctc

SEQ ID NO: 2914638 - DNA, 25 bp, Homo sapien
caggtagcgcagaatcagcttggtg

SEQ ID NO: 2914639 - DNA, 25 bp, Homo sapien
ccgtttctggttcatggcggccagg

SEQ ID NO: 2914640 - DNA, 25 bp, Homo sapien
cagaaggagatgtgggaattgaggg

SEQ ID NO: 2914641 - DNA, 25 bp, Homo sapien
agaaggagatgtgggaattgagggg

SEQ ID NO: 2914642 - DNA, 25 bp, Homo sapien
ccagaaggagatgtgggaattgagg

SEQ ID NO: 2914643 - DNA, 25 bp, Homo sapien
agcggctggagttgtcgttcctgac

SEQ ID NO: 2914644 - DNA, 25 bp, Homo sapien
gcattaccgaaggactccaagaggg

SEQ ID NO: 2914645 - DNA, 25 bp, Homo sapien
tgacggttttggcattaccgaagga

SEQ ID NO: 2914646 - DNA, 25 bp, Homo sapien
tcgttcctgacggttttggcattac

SEQ ID NO: 2914647 - DNA, 25 bp, Homo sapien
gggagcacagtcagctctcagtgag

SEQ ID NO: 2914648 - DNA, 25 bp, Homo sapien
cacagtcagctctcagtgagggtag

SEQ ID NO: 2914649 - DNA, 25 bp, Homo sapien
aggagggctggtgttggctccgagg

SEQ ID NO: 2914650 - DNA, 25 bp, Homo sapien
cagtcagctctcagtgagggtagga

SEQ ID NO: 2914651 - DNA, 25 bp, Homo sapien
tactgggaggttatggcaccagaga

SEQ ID NO: 2914652 - DNA, 25 bp, Homo sapien
ctgggaggttatggcaccagagatc

SEQ ID NO: 2914653 - DNA, 25 bp, Homo sapien
cctggatttctcaagcaggtactgg

SEQ ID NO: 2914654 - DNA, 25 bp, Homo sapien
tttctcaagcaggtactgggaggtt

SEQ ID NO: 2914655 - DNA, 25 bp, Homo sapien
aggcaacccggccagcaactcgtag

SEQ ID NO: 2914656 - DNA, 25 bp, Homo sapien
cagcaactcgtagaagatgtggtaa

SEQ ID NO: 2914657 - DNA, 25 bp, Homo sapien
tcagcctcttgcaggctaaaggcct

SEQ ID NO: 2914658 - DNA, 25 bp, Homo sapien
cctcttgcaggctaaaggcctgcct

SEQ ID NO: 2914659 - DNA, 25 bp, Homo sapien
gcagccaggagccggcgaaagtcat

SEQ ID NO: 2914660 - DNA, 25 bp, Homo sapien
actgctgaagcccaacacctccatg

SEQ ID NO: 2914661 - DNA, 25 bp, Homo sapien
ctcactgctgaagcccaacacctcc

SEQ ID NO: 2914662 - DNA, 25 bp, Homo sapien
aggagccggcgaaagtcatctgcat

SEQ ID NO: 2914663 - DNA, 25 bp, Homo sapien
acggcctggatctctcgggcactca

SEQ ID NO: 2914664 - DNA, 25 bp, Homo sapien
gcctggatctctcgggcactcacca

SEQ ID NO: 2914665 - DNA, 25 bp, Homo sapien
cacggcctggatctctcgggcactc

SEQ ID NO: 2914666 - DNA, 25 bp, Homo sapien
ggatctctcgggcactcaccactga

SEQ ID NO: 2914667 - DNA, 25 bp, Homo sapien
tgaagatcttctctcgcattgtctc

SEQ ID NO: 2914668 - DNA, 25 bp, Homo sapien
cagttaggggcgtgaagatcttctc

SEQ ID NO: 2914669 - DNA, 25 bp, Homo sapien
gggcgtgaagatcttctctcgcatt

SEQ ID NO: 2914670 - DNA, 25 bp, Homo sapien
cacagcgctctccacagttaggggc

SEQ ID NO: 2914671 - DNA, 25 bp, Homo sapien
ccaggatggcgatggacagtgtgtc

SEQ ID NO: 2914672 - DNA, 25 bp, Homo sapien
agcagtgcatacaagaccttggcga

SEQ ID NO: 2914673 - DNA, 25 bp, Homo sapien
cgatggacagtgtgtcctgccttgg

SEQ ID NO: 2914674 - DNA, 25 bp, Homo sapien
gacaccagcgcgttgaccctggtga

SEQ ID NO: 2914675 - DNA, 25 bp, Homo sapien
tagttaatacacagctgctcaaagc

SEQ ID NO: 2914676 - DNA, 25 bp, Homo sapien
tgctcaaagctgttgaagctcaggt

SEQ ID NO: 2914677 - DNA, 25 bp, Homo sapien
gctcaaagctgttgaagctcaggtc

SEQ ID NO: 2914678 - DNA, 25 bp, Homo sapien
agctgctcaaagctgttgaagctca

SEQ ID NO: 2914679 - DNA, 25 bp, Homo sapien
aaggtactgaaggttctcgtttgcg

SEQ ID NO: 2914680 - DNA, 25 bp, Homo sapien
ggaagacgatcttgttgaaaaggta

SEQ ID NO: 2914681 - DNA, 25 bp, Homo sapien
tggaagacgatcttgttgaaaaggt

SEQ ID NO: 2914682 - DNA, 25 bp, Homo sapien
gaagacgatcttgttgaaaaggtac

SEQ ID NO: 2914683 - DNA, 25 bp, Homo sapien
tctatctgctcacggatgtactcct

SEQ ID NO: 2914684 - DNA, 25 bp, Homo sapien
gcaggatgccataaggcttcagtga

SEQ ID NO: 2914685 - DNA, 25 bp, Homo sapien
gttgtcagcaaaggtgatctcctgc

SEQ ID NO: 2914686 - DNA, 25 bp, Homo sapien
tggtcgtcaaggatccgcaggatgc

SEQ ID NO: 2914687 - DNA, 25 bp, Homo sapien
gatggtgaactcaggcagcggcatc

SEQ ID NO: 2914688 - DNA, 25 bp, Homo sapien
ctcaggcagcggcatcttgggtttg

SEQ ID NO: 2914689 - DNA, 25 bp, Homo sapien
atggtagtggcacttctgtaggaag

SEQ ID NO: 2914690 - DNA, 25 bp, Homo sapien
catcttgggtttggaatagagcggg

SEQ ID NO: 2914691 - DNA, 25 bp, Homo sapien
atggcctgggtaatcctggcctctg

SEQ ID NO: 2914692 - DNA, 25 bp, Homo sapien
ctgaaaaggggaacaatggcctggg

SEQ ID NO: 2914693 - DNA, 25 bp, Homo sapien
caatggcctgggtaatcctggcctc

SEQ ID NO: 2914694 - DNA, 25 bp, Homo sapien
ggaacaatggcctgggtaatcctgg

SEQ ID NO: 2914695 - DNA, 25 bp, Homo sapien
acttggtcgtggttcttgtccagga

SEQ ID NO: 2914696 - DNA, 25 bp, Homo sapien
gtacgaacaggtccagcacatcctg

SEQ ID NO: 2914697 - DNA, 25 bp, Homo sapien
gtgtccggctccgtacgaacaggtc

SEQ ID NO: 2914698 - DNA, 25 bp, Homo sapien
cacatcctggcgcacttggtcgtgg

SEQ ID NO: 2914699 - DNA, 25 bp, Homo sapien
gagccaggacgtggcaacacggtcc

SEQ ID NO: 2914700 - DNA, 25 bp, Homo sapien
agccaagctaggtgggaacaggcca

SEQ ID NO: 2914701 - DNA, 25 bp, Homo sapien
tctttgtctggccaaagctaagcgg

SEQ ID NO: 2914702 - DNA, 25 bp, Homo sapien
aacagggtgtccaggccacccttgt

SEQ ID NO: 2914703 - DNA, 25 bp, Homo sapien
tggggcatggctggagaagaggtgt

SEQ ID NO: 2914704 - DNA, 25 bp, Homo sapien
gcatggctggagaagaggtgtgcca

SEQ ID NO: 2914705 - DNA, 25 bp, Homo sapien
tggctggagaagaggtgtgccacca

SEQ ID NO: 2914706 - DNA, 25 bp, Homo sapien
tgtggggcatggctggagaagaggt

SEQ ID NO: 2914707 - DNA, 25 bp, Homo sapien
tgactgctggaacttggcggccaca

SEQ ID NO: 2914708 - DNA, 25 bp, Homo sapien
gaacttggcggccacagtgtgcgcc

SEQ ID NO: 2914709 - DNA, 25 bp, Homo sapien
cggccacagtgtgcgccttgtagag

SEQ ID NO: 2914710 - DNA, 25 bp, Homo sapien
ccttgtagagccgagtgacggagct

SEQ ID NO: 2914711 - DNA, 25 bp, Homo sapien
ttcttgtggttgggcttcaggcaac

SEQ ID NO: 2914712 - DNA, 25 bp, Homo sapien
tgtggttgggcttcaggcaacgcat

SEQ ID NO: 2914713 - DNA, 25 bp, Homo sapien
cttgtggttgggcttcaggcaacgc

SEQ ID NO: 2914714 - DNA, 25 bp, Homo sapien
tcaggcaacgcatgaacaaggggtt

SEQ ID NO: 2914715 - DNA, 25 bp, Homo sapien
aaaggcaggcgcactggaaatccct

SEQ ID NO: 2914716 - DNA, 25 bp, Homo sapien
cccctgaatagcgtaattgtgccat

SEQ ID NO: 2914717 - DNA, 25 bp, Homo sapien
taccacatctggctcaaagagacct

SEQ ID NO: 2914718 - DNA, 25 bp, Homo sapien
tcgatgaacccctggaaaggcaggc

SEQ ID NO: 2914719 - DNA, 25 bp, Homo sapien
cttgagggccactagacagcagtac

SEQ ID NO: 2914720 - DNA, 25 bp, Homo sapien
ttgctgaccccaacacggtacatgt

SEQ ID NO: 2914721 - DNA, 25 bp, Homo sapien
atgtccccattagccggcaggtcat

SEQ ID NO: 2914722 - DNA, 25 bp, Homo sapien
tgtttggcatgactttgcacaggcg

SEQ ID NO: 2914723 - DNA, 25 bp, Homo sapien
agcagctggtataggtgttccttaa

SEQ ID NO: 2914724 - DNA, 25 bp, Homo sapien
ggaatcgccgcttaatgaagaagcc

SEQ ID NO: 2914725 - DNA, 25 bp, Homo sapien
tcaggacatgctctcgcatactctc

SEQ ID NO: 2914726 - DNA, 25 bp, Homo sapien
ttgcagcaggatgatcttgtggcgc

SEQ ID NO: 2914727 - DNA, 25 bp, Homo sapien
taccagggaccggaacttcaccaga

SEQ ID NO: 2914728 - DNA, 25 bp, Homo sapien
cttgagatagcgtcggcggctcacg

SEQ ID NO: 2914729 - DNA, 25 bp, Homo sapien
tgtaccagggaccggaacttcacca

SEQ ID NO: 2914730 - DNA, 25 bp, Homo sapien
cgtcggcggctcacgtatgcgtgta

SEQ ID NO: 2914731 - DNA, 25 bp, Homo sapien
ccacctggcacctccactctgccct

SEQ ID NO: 2914732 - DNA, 25 bp, Homo sapien
acagcagcgccccctccacctggca

SEQ ID NO: 2914733 - DNA, 25 bp, Homo sapien
acctggcacctccactctgccctca

SEQ ID NO: 2914734 - DNA, 25 bp, Homo sapien
tcctgctcccacagcagcgccccct

SEQ ID NO: 2914735 - DNA, 25 bp, Homo sapien
actgcttgcaagagcccagccagct

SEQ ID NO: 2914736 - DNA, 25 bp, Homo sapien
cagcgactacctcccgcttgctcag

SEQ ID NO: 2914737 - DNA, 25 bp, Homo sapien
ggtacctccaggtgccccacagcga

SEQ ID NO: 2914738 - DNA, 25 bp, Homo sapien
tcagccggtacctccaggtgcccca

SEQ ID NO: 2914739 - DNA, 25 bp, Homo sapien
tgaagtggcactggacaaacttggc

SEQ ID NO: 2914740 - DNA, 25 bp, Homo sapien
caaacttggccataggatagttgtt

SEQ ID NO: 2914741 - DNA, 25 bp, Homo sapien
gctcagcctggagtcgaggagtcct

SEQ ID NO: 2914742 - DNA, 25 bp, Homo sapien
agcctggagtcgaggagtcctcaca

SEQ ID NO: 2914743 - DNA, 25 bp, Homo sapien
cagcttgaagatgctcacggcttct

SEQ ID NO: 2914744 - DNA, 25 bp, Homo sapien
ttctgcatggtgctcggctggcagc

SEQ ID NO: 2914745 - DNA, 25 bp, Homo sapien
ctgcatggtgctcggctggcagctg

SEQ ID NO: 2914746 - DNA, 25 bp, Homo sapien
gcttgaagatgctcacggcttctgc

SEQ ID NO: 2914747 - DNA, 25 bp, Homo sapien
cattgtgggcattgtgattgtgcca

SEQ ID NO: 2914748 - DNA, 25 bp, Homo sapien
tgttctcccgggcaccatgcaggtg

SEQ ID NO: 2914749 - DNA, 25 bp, Homo sapien
tgagaaggtacttgttgaagcacgg

SEQ ID NO: 2914750 - DNA, 25 bp, Homo sapien
tctgcacgatgtagttcccgaagat

SEQ ID NO: 2914751 - DNA, 25 bp, Homo sapien
acacatctcatgcctgagcatgaaa

SEQ ID NO: 2914752 - DNA, 25 bp, Homo sapien
tgacacatctcatgcctgagcatga

SEQ ID NO: 2914753 - DNA, 25 bp, Homo sapien
gacacatctcatgcctgagcatgaa

SEQ ID NO: 2914754 - DNA, 25 bp, Homo sapien
cttctcataggtcgctgtccactcg

SEQ ID NO: 2914755 - DNA, 25 bp, Homo sapien
tcgctgtccactcgagctgggtcgg

SEQ ID NO: 2914756 - DNA, 25 bp, Homo sapien
ctggaagccattccgcccataatca

SEQ ID NO: 2914757 - DNA, 25 bp, Homo sapien
ctgcatgaggcggtgctgacacaca

SEQ ID NO: 2914758 - DNA, 25 bp, Homo sapien
gggccctgctgactcccactgccct

SEQ ID NO: 2914759 - DNA, 25 bp, Homo sapien
tgggccctgctgactcccactgccc

SEQ ID NO: 2914760 - DNA, 25 bp, Homo sapien
ggccctgctgactcccactgccctc

SEQ ID NO: 2914761 - DNA, 25 bp, Homo sapien
gccctgctgactcccactgccctca

SEQ ID NO: 2914762 - DNA, 25 bp, Homo sapien
tactccaggagtgcaccgggcagga

SEQ ID NO: 2914763 - DNA, 25 bp, Homo sapien
ccccgtactccaggagtgcaccggg

SEQ ID NO: 2914764 - DNA, 25 bp, Homo sapien
tgtgcctcagaatgtctccagccac

SEQ ID NO: 2914765 - DNA, 25 bp, Homo sapien
tcttcccccgtactccaggagtgca

SEQ ID NO: 2914766 - DNA, 25 bp, Homo sapien
ggtccgacaccaggtctaacacgta

SEQ ID NO: 2914767 - DNA, 25 bp, Homo sapien
attcttcatggccacggtccagccg

SEQ ID NO: 2914768 - DNA, 25 bp, Homo sapien
tgcccactggacaccattcttcatg

SEQ ID NO: 2914769 - DNA, 25 bp, Homo sapien
tgtcgagggaagtccctgagcagct

SEQ ID NO: 2914770 - DNA, 25 bp, Homo sapien
ctgctggctgcaggcccctctgtgc

SEQ ID NO: 2914771 - DNA, 25 bp, Homo sapien
gctggctgcaggcccctctgtgccc

SEQ ID NO: 2914772 - DNA, 25 bp, Homo sapien
actttggggcctcccctgctggctg

SEQ ID NO: 2914773 - DNA, 25 bp, Homo sapien
ccctgctggctgcaggcccctctgt

SEQ ID NO: 2914774 - DNA, 25 bp, Homo sapien
tgtcctcatccgagtcccagctgtt

SEQ ID NO: 2914775 - DNA, 25 bp, Homo sapien
cctggggctggggtctagtggacat

SEQ ID NO: 2914776 - DNA, 25 bp, Homo sapien
ctggggtctagtggacatgtcctca

SEQ ID NO: 2914777 - DNA, 25 bp, Homo sapien
tagtggacatgtcctcatccgagtc

SEQ ID NO: 2914778 - DNA, 25 bp, Homo sapien
agtctccccatttgtaccgtcctga

SEQ ID NO: 2914779 - DNA, 25 bp, Homo sapien
gctgctgtacccatcagagtcaagt

SEQ ID NO: 2914780 - DNA, 25 bp, Homo sapien
catttgtaccgtcctgattgtggct

SEQ ID NO: 2914781 - DNA, 25 bp, Homo sapien
taccgtcctgattgtggctgctgta

SEQ ID NO: 2914782 - DNA, 25 bp, Homo sapien
gaggctatccaggtagcagtccagc

SEQ ID NO: 2914783 - DNA, 25 bp, Homo sapien
gcagtccagccccttgtggggcaca

SEQ ID NO: 2914784 - DNA, 25 bp, Homo sapien
gggtcaaagaggctatccaggtagc

SEQ ID NO: 2914785 - DNA, 25 bp, Homo sapien
ccgtaggacagcacagggtcaaaga

SEQ ID NO: 2914786 - DNA, 25 bp, Homo sapien
ctgggggtgtcttcagtaccactac

SEQ ID NO: 2914787 - DNA, 25 bp, Homo sapien
gggggtgtcttcagtaccactactg

SEQ ID NO: 2914788 - DNA, 25 bp, Homo sapien
ccccctttcatgcggtaggcaatgg

SEQ ID NO: 2914789 - DNA, 25 bp, Homo sapien
ctccccctttcatgcggtaggcaat

SEQ ID NO: 2914790 - DNA, 25 bp, Homo sapien
tgcagagccaatgtggaggcatcca

SEQ ID NO: 2914791 - DNA, 25 bp, Homo sapien
tttgtggatgaaggcttgctgcaga

SEQ ID NO: 2914792 - DNA, 25 bp, Homo sapien
gtttgtggatgaaggcttgctgcag

SEQ ID NO: 2914793 - DNA, 25 bp, Homo sapien
tctgcgggcaaggatctcagggcag

SEQ ID NO: 2914794 - DNA, 25 bp, Homo sapien
ctctgcgggcaaggatctcagggca

SEQ ID NO: 2914795 - DNA, 25 bp, Homo sapien
gagtggcacgcaggagcacgggttt

SEQ ID NO: 2914796 - DNA, 25 bp, Homo sapien
ggaccggtgcctacagacgtcggct

SEQ ID NO: 2914797 - DNA, 25 bp, Homo sapien
ccaagggctttggagtggcacgcag

SEQ ID NO: 2914798 - DNA, 25 bp, Homo sapien
cctgatcctgagctagaacaggggc

SEQ ID NO: 2914799 - DNA, 25 bp, Homo sapien
tggtactgcctgacaatattcttga

SEQ ID NO: 2914800 - DNA, 25 bp, Homo sapien
ttgagcgtagagtaccggaccagct

SEQ ID NO: 2914801 - DNA, 25 bp, Homo sapien
tgctggtactgcctgacaatattct

SEQ ID NO: 2914802 - DNA, 25 bp, Homo sapien
gctgtgggaagtgctcagagttgag

SEQ ID NO: 2914803 - DNA, 25 bp, Homo sapien
ctgccaggtgggtcatctgcccttt

SEQ ID NO: 2914804 - DNA, 25 bp, Homo sapien
tgccctttcaggatcatcagggcct

SEQ ID NO: 2914805 - DNA, 25 bp, Homo sapien
catgaacactttcccgccatccttc

SEQ ID NO: 2914806 - DNA, 25 bp, Homo sapien
gcctcctcatgagggtctggccgct

SEQ ID NO: 2914807 - DNA, 25 bp, Homo sapien
tgtcccaccccaaagagactgctca

SEQ ID NO: 2914808 - DNA, 25 bp, Homo sapien
gtcccaccccaaagagactgctcag

SEQ ID NO: 2914809 - DNA, 25 bp, Homo sapien
ccaccccaaagagactgctcagggg

SEQ ID NO: 2914810 - DNA, 25 bp, Homo sapien
cccaccccaaagagactgctcaggg

SEQ ID NO: 2914811 - DNA, 25 bp, Homo sapien
agtgggtgccatggatggccttggt

SEQ ID NO: 2914812 - DNA, 25 bp, Homo sapien
accggcttcaccagggccacggcct

SEQ ID NO: 2914813 - DNA, 25 bp, Homo sapien
gtcaccggcttcaccagggccacgg

SEQ ID NO: 2914814 - DNA, 25 bp, Homo sapien
ctgaagtgggtgccatggatggcct

SEQ ID NO: 2914815 - DNA, 25 bp, Homo sapien
ggctccagcgatcgcgagggcagag

SEQ ID NO: 2914816 - DNA, 25 bp, Homo sapien
gggcgtcctgatagccgtagaagtt

SEQ ID NO: 2914817 - DNA, 25 bp, Homo sapien
caggaagatcttccagggggcgtcc

SEQ ID NO: 2914818 - DNA, 25 bp, Homo sapien
gccgcgtctgcgtgagttcctcagg

SEQ ID NO: 2914819 - DNA, 25 bp, Homo sapien
tgcacaggatggctgtagctgtcct

SEQ ID NO: 2914820 - DNA, 25 bp, Homo sapien
tcctcagagatgcgaaggcaggcct

SEQ ID NO: 2914821 - DNA, 25 bp, Homo sapien
ctcagagatgcgaaggcaggcctcg

SEQ ID NO: 2914822 - DNA, 25 bp, Homo sapien
cctcggagagcgtgtcgtgcaggat

SEQ ID NO: 2914823 - DNA, 25 bp, Homo sapien
ggcaggcctcggagagcgtgtcgtg

SEQ ID NO: 2914824 - DNA, 25 bp, Homo sapien
cctcccaggtgtctcgtgcagtgct

SEQ ID NO: 2914825 - DNA, 25 bp, Homo sapien
gctttccgttaccagaggcttctgt

SEQ ID NO: 2914826 - DNA, 25 bp, Homo sapien
gggaagatgcgggagaagtagacct

SEQ ID NO: 2914827 - DNA, 25 bp, Homo sapien
gcttcacgctttccgttaccagagg

SEQ ID NO: 2914828 - DNA, 25 bp, Homo sapien
ggccacccttgaccatcctcaggag

SEQ ID NO: 2914829 - DNA, 25 bp, Homo sapien
cagctaggagctgcacaccagtgcc

SEQ ID NO: 2914830 - DNA, 25 bp, Homo sapien
agctaggagctgcacaccagtgccc

SEQ ID NO: 2914831 - DNA, 25 bp, Homo sapien
cacccttgaccatcctcaggagttt

SEQ ID NO: 2914832 - DNA, 25 bp, Homo sapien
gaagtcatctaccagggtcttgacc

SEQ ID NO: 2914833 - DNA, 25 bp, Homo sapien
ggttgaactccagcatgttctggga

SEQ ID NO: 2914834 - DNA, 25 bp, Homo sapien
gggcatggtcacaaacaggatatct

SEQ ID NO: 2914835 - DNA, 25 bp, Homo sapien
gatgaccttctcactggccaggttg

SEQ ID NO: 2914836 - DNA, 25 bp, Homo sapien
gcaggaagttcctcacagcgaccac

SEQ ID NO: 2914837 - DNA, 25 bp, Homo sapien
ggaaagccagcagcgcagggtcctc

SEQ ID NO: 2914838 - DNA, 25 bp, Homo sapien
tcacagcgaccacgtagtcagagtc

SEQ ID NO: 2914839 - DNA, 25 bp, Homo sapien
atgtcacccttgtggaaagccagca

SEQ ID NO: 2914840 - DNA, 25 bp, Homo sapien
caaagtcggggcctctacgtcgcag

SEQ ID NO: 2914841 - DNA, 25 bp, Homo sapien
caccaccttcctgcgaaccacgcag

SEQ ID NO: 2914842 - DNA, 25 bp, Homo sapien
gcgaaccacgcagccagcactgtag

SEQ ID NO: 2914843 - DNA, 25 bp, Homo sapien
gcctctacgtcgcagctcctccagg

SEQ ID NO: 2914844 - DNA, 25 bp, Homo sapien
gaagcggcccacgcgcccgtggatg

SEQ ID NO: 2914845 - DNA, 25 bp, Homo sapien
cccgtggatggtcccgaacctccag

SEQ ID NO: 2914846 - DNA, 25 bp, Homo sapien
ggctgcaccagctccgaagggaagc

SEQ ID NO: 2914847 - DNA, 25 bp, Homo sapien
tgcaccagctccgaagggaagcggc

SEQ ID NO: 2914848 - DNA, 25 bp, Homo sapien
ctgagggtctcggaaatacttctgg

SEQ ID NO: 2914849 - DNA, 25 bp, Homo sapien
gccagggcgtcctccccatggtcag

SEQ ID NO: 2914850 - DNA, 25 bp, Homo sapien
caaactcgagcattgtgtagggtgg

SEQ ID NO: 2914851 - DNA, 25 bp, Homo sapien
catggtcagcagagcgggccctgac

SEQ ID NO: 2914852 - DNA, 25 bp, Homo sapien
tggctacatccttttccacatggga

SEQ ID NO: 2914853 - DNA, 25 bp, Homo sapien
gggttcttgacccaccactgatcag

SEQ ID NO: 2914854 - DNA, 25 bp, Homo sapien
caagccttggctacatccttttcca

SEQ ID NO: 2914855 - DNA, 25 bp, Homo sapien
cacatgggaaagaacccccagggag

SEQ ID NO: 2914856 - DNA, 25 bp, Homo sapien
gcatgtcctccaaggttctggactc

SEQ ID NO: 2914857 - DNA, 25 bp, Homo sapien
ggactcccgaggctccttggatttc

SEQ ID NO: 2914858 - DNA, 25 bp, Homo sapien
aaagcatgtcctccaaggttctgga

SEQ ID NO: 2914859 - DNA, 25 bp, Homo sapien
agcaaagcatgtcctccaaggttct

SEQ ID NO: 2914860 - DNA, 25 bp, Homo sapien
gctgctgtcgctgagttcgatgagg

SEQ ID NO: 2914861 - DNA, 25 bp, Homo sapien
ggaacatgtcggtggccatcttgct

SEQ ID NO: 2914862 - DNA, 25 bp, Homo sapien
ctaggaacatgtcggtggccatctt

SEQ ID NO: 2914863 - DNA, 25 bp, Homo sapien
cgctgagttcgatgagggattcctg

SEQ ID NO: 2914864 - DNA, 25 bp, Homo sapien
atctgaagatcagggaggagtggca

SEQ ID NO: 2914865 - DNA, 25 bp, Homo sapien
ggaaagacctatcccactcagaccc

SEQ ID NO: 2914866 - DNA, 25 bp, Homo sapien
gggagcttctattctcttaaatgtg

SEQ ID NO: 2914867 - DNA, 25 bp, Homo sapien
atgtgttccatgtctgagctggcgg

SEQ ID NO: 2914868 - DNA, 25 bp, Homo sapien
gaggttacaaagcacgtccaggtca

SEQ ID NO: 2914869 - DNA, 25 bp, Homo sapien
ggaggttacaaagcacgtccaggtc

SEQ ID NO: 2914870 - DNA, 25 bp, Homo sapien
tcaggaggttacaaagcacgtccag

SEQ ID NO: 2914871 - DNA, 25 bp, Homo sapien
cttcaggaggttacaaagcacgtcc

SEQ ID NO: 2914872 - DNA, 25 bp, Homo sapien
agaggtttcccaccctaatgtcctg

SEQ ID NO: 2914873 - DNA, 25 bp, Homo sapien
tgtcctgtgactcattgatagatgg

SEQ ID NO: 2914874 - DNA, 25 bp, Homo sapien
catataccaggtacataagaacagg

SEQ ID NO: 2914875 - DNA, 25 bp, Homo sapien
gcattcctctttggaccatgggaga

SEQ ID NO: 2914876 - DNA, 25 bp, Homo sapien
gcagtaacattcatcccgcatgacc

SEQ ID NO: 2914877 - DNA, 25 bp, Homo sapien
tggcagtaacattcatcccgcatga

SEQ ID NO: 2914878 - DNA, 25 bp, Homo sapien
cattcatcccgcatgacctcatggt

SEQ ID NO: 2914879 - DNA, 25 bp, Homo sapien
aacttggcagtaacattcatcccgc

SEQ ID NO: 2914880 - DNA, 25 bp, Homo sapien
caagagcatgcacacattgggcacg

SEQ ID NO: 2914881 - DNA, 25 bp, Homo sapien
gacagattccaactctcaggcagct

SEQ ID NO: 2914882 - DNA, 25 bp, Homo sapien
cctcctgggattgagctgagacaga

SEQ ID NO: 2914883 - DNA, 25 bp, Homo sapien
tccctgcgcagtgatatgcaaaagg

SEQ ID NO: 2914884 - DNA, 25 bp, Homo sapien
gtccggctcacgtcttggaggaagc

SEQ ID NO: 2914885 - DNA, 25 bp, Homo sapien
ggtcacgatatacagcagcctccag

SEQ ID NO: 2914886 - DNA, 25 bp, Homo sapien
ccggctcacgtcttggaggaagcga

SEQ ID NO: 2914887 - DNA, 25 bp, Homo sapien
ctcagagcagctgtggtaggcggtc

SEQ ID NO: 2914888 - DNA, 25 bp, Homo sapien
tcccacgtaccacatattcccactc

SEQ ID NO: 2914889 - DNA, 25 bp, Homo sapien
acgtaccacatattcccactcctgt

SEQ ID NO: 2914890 - DNA, 25 bp, Homo sapien
gtaccacatattcccactcctgtct

SEQ ID NO: 2914891 - DNA, 25 bp, Homo sapien
ttctcccacgtaccacatattccca

SEQ ID NO: 2914892 - DNA, 25 bp, Homo sapien
tgcaggttctgctcgcaggccttgg

SEQ ID NO: 2914893 - DNA, 25 bp, Homo sapien
gggagctccagacgacctccgaagc

SEQ ID NO: 2914894 - DNA, 25 bp, Homo sapien
caacatggcccgaagctctatgctg

SEQ ID NO: 2914895 - DNA, 25 bp, Homo sapien
tccgaagcgcaaggttttctgcagg

SEQ ID NO: 2914896 - DNA, 25 bp, Homo sapien
ttgagatggcgttcaaggcctccag

SEQ ID NO: 2914897 - DNA, 25 bp, Homo sapien
tgattttgagatggcgttcaaggcc

SEQ ID NO: 2914898 - DNA, 25 bp, Homo sapien
agaagaaagagttgcctcttggaac

SEQ ID NO: 2914899 - DNA, 25 bp, Homo sapien
gaagaaagagttgcctcttggaact

SEQ ID NO: 2914900 - DNA, 25 bp, Homo sapien
tcagggcgtgtcagagccatctcag

SEQ ID NO: 2914901 - DNA, 25 bp, Homo sapien
cacggttggtgacaacgaagataac

SEQ ID NO: 2914902 - DNA, 25 bp, Homo sapien
gataacatattcattgaaggcctca

SEQ ID NO: 2914903 - DNA, 25 bp, Homo sapien
tcattgaaggcctcagggcgtgtca

SEQ ID NO: 2914904 - DNA, 25 bp, Homo sapien
tgagagagggctctcatcataaggt

SEQ ID NO: 2914905 - DNA, 25 bp, Homo sapien
tgcttggtacacacagagatccttc

SEQ ID NO: 2914906 - DNA, 25 bp, Homo sapien
gaagtggcacctgacttgggcccta

SEQ ID NO: 2914907 - DNA, 25 bp, Homo sapien
aggcaaactaagcaaagcagaaagg

SEQ ID NO: 2914908 - DNA, 25 bp, Homo sapien
tgtaatctccttgagggcacggcct

SEQ ID NO: 2914909 - DNA, 25 bp, Homo sapien
tttccaggatgtaatctccttgagg

SEQ ID NO: 2914910 - DNA, 25 bp, Homo sapien
agggcacggcctgtgtcctcacatt

SEQ ID NO: 2914911 - DNA, 25 bp, Homo sapien
cctgtgtcctcacattgagcatgtc

SEQ ID NO: 2914912 - DNA, 25 bp, Homo sapien
tcctataggttccataatatgcggc

SEQ ID NO: 2914913 - DNA, 25 bp, Homo sapien
gctttgggatgcatgacggtcacct

SEQ ID NO: 2914914 - DNA, 25 bp, Homo sapien
aatatgcggcgctattaatggaaac

SEQ ID NO: 2914915 - DNA, 25 bp, Homo sapien
gaaggcttgcacctataggttccta

SEQ ID NO: 2914916 - DNA, 25 bp, Homo sapien
catccaggatgtaagcacggcgact

SEQ ID NO: 2914917 - DNA, 25 bp, Homo sapien
tctcgaacttgagtggctgatccca

SEQ ID NO: 2914918 - DNA, 25 bp, Homo sapien
cggaaccagagcatgtagccgccgt

SEQ ID NO: 2914919 - DNA, 25 bp, Homo sapien
cgactgagtgggcacacatgctggc

SEQ ID NO: 2914920 - DNA, 25 bp, Homo sapien
tggacatgtatctatcaggcctgct

SEQ ID NO: 2914921 - DNA, 25 bp, Homo sapien
ttgatgcccatgagggagtccccac

SEQ ID NO: 2914922 - DNA, 25 bp, Homo sapien
cacgggagggcttgccaaaacagac

SEQ ID NO: 2914923 - DNA, 25 bp, Homo sapien
tgccagtccacaagcctcaggttga

SEQ ID NO: 2914924 - DNA, 25 bp, Homo sapien
tgaagccagcttggacacctgctgc

SEQ ID NO: 2914925 - DNA, 25 bp, Homo sapien
ggcacactgctgaagagtcccttca

SEQ ID NO: 2914926 - DNA, 25 bp, Homo sapien
cgctcggcaggtagaagtggtcctt

SEQ ID NO: 2914927 - DNA, 25 bp, Homo sapien
gtccttggcgcgatgctgcagtgaa

SEQ ID NO: 2914928 - DNA, 25 bp, Homo sapien
gccccactggtataagaggggagcc

SEQ ID NO: 2914929 - DNA, 25 bp, Homo sapien
cactggtataagaggggagcctgag

SEQ ID NO: 2914930 - DNA, 25 bp, Homo sapien
ccactggtataagaggggagcctga

SEQ ID NO: 2914931 - DNA, 25 bp, Homo sapien
cccactggtataagaggggagcctg

SEQ ID NO: 2914932 - DNA, 25 bp, Homo sapien
attacctttgctctgagctaataat

SEQ ID NO: 2914933 - DNA, 25 bp, Homo sapien
tacctttgctctgagctaataatac

SEQ ID NO: 2914934 - DNA, 25 bp, Homo sapien
cattacctttgctctgagctaataa

SEQ ID NO: 2914935 - DNA, 25 bp, Homo sapien
ttacctttgctctgagctaataata

SEQ ID NO: 2914936 - DNA, 25 bp, Homo sapien
aaatgctagggagtgtaaatgggct

SEQ ID NO: 2914937 - DNA, 25 bp, Homo sapien
aagactaaatgctagggagtgtaaa

SEQ ID NO: 2914938 - DNA, 25 bp, Homo sapien
ctaaatgctagggagtgtaaatggg

SEQ ID NO: 2914939 - DNA, 25 bp, Homo sapien
gctgaaagtggggtagaggtgccca

SEQ ID NO: 2914940 - DNA, 25 bp, Homo sapien
ctgggctgggatgtactcctggact

SEQ ID NO: 2914941 - DNA, 25 bp, Homo sapien
tgaccaggttgagccaggtcgagcc

SEQ ID NO: 2914942 - DNA, 25 bp, Homo sapien
ccagaaactgggcacgggcctggtg

SEQ ID NO: 2914943 - DNA, 25 bp, Homo sapien
gagcctgccgttgtacggtagagct

SEQ ID NO: 2914944 - DNA, 25 bp, Homo sapien
ggaggagccgaacataggtaaggcg

SEQ ID NO: 2914945 - DNA, 25 bp, Homo sapien
aggagccgaacataggtaaggcgct

SEQ ID NO: 2914946 - DNA, 25 bp, Homo sapien
gaaggaggagccgaacataggtaag

SEQ ID NO: 2914947 - DNA, 25 bp, Homo sapien
aagaaggaggagccgaacataggta

SEQ ID NO: 2914948 - DNA, 25 bp, Homo sapien
tgagtctctgtgctgagaaagttga

SEQ ID NO: 2914949 - DNA, 25 bp, Homo sapien
ctggcacagcaatgttgctgcagct

SEQ ID NO: 2914950 - DNA, 25 bp, Homo sapien
tgctgagaaagttgaggccattgtg

SEQ ID NO: 2914951 - DNA, 25 bp, Homo sapien
tgtggttgatggcaaggatgcaagg

SEQ ID NO: 2914952 - DNA, 25 bp, Homo sapien
ggcttcggcggctggaggtcttggc

SEQ ID NO: 2914953 - DNA, 25 bp, Homo sapien
ggaccagggaacagagggtggcgat

SEQ ID NO: 2914954 - DNA, 25 bp, Homo sapien
gagggtggcgatggcagtgccaggc

SEQ ID NO: 2914955 - DNA, 25 bp, Homo sapien
tcatgaaggtggtaagcagtggaac

SEQ ID NO: 2914956 - DNA, 25 bp, Homo sapien
gagtgcatagagtatgttttacctc

SEQ ID NO: 2914957 - DNA, 25 bp, Homo sapien
ggtggggctcaactcttatcctcat

SEQ ID NO: 2914958 - DNA, 25 bp, Homo sapien
cagatgtactatttgagtgcataga

SEQ ID NO: 2914959 - DNA, 25 bp, Homo sapien
gcagcctaagcacacagatgtacta

SEQ ID NO: 2914960 - DNA, 25 bp, Homo sapien
tgcaaggtgcgctgggccgccacgt

SEQ ID NO: 2914961 - DNA, 25 bp, Homo sapien
tccttcagggggaacttcaccatca

SEQ ID NO: 2914962 - DNA, 25 bp, Homo sapien
gtccgcgtcgactggatctccttca

SEQ ID NO: 2914963 - DNA, 25 bp, Homo sapien
ccagcgcaatctccacataggggta

SEQ ID NO: 2914964 - DNA, 25 bp, Homo sapien
tgagccgcttctcatgggcactgag

SEQ ID NO: 2914965 - DNA, 25 bp, Homo sapien
acggccaccacacgacacagttcca

SEQ ID NO: 2914966 - DNA, 25 bp, Homo sapien
aggttctccacgtgcacggccacca

SEQ ID NO: 2914967 - DNA, 25 bp, Homo sapien
gggggcaatgtgagccgcttctcat

SEQ ID NO: 2914968 - DNA, 25 bp, Homo sapien
ggcagaggccagttcatctgggcaa

SEQ ID NO: 2914969 - DNA, 25 bp, Homo sapien
tgcacagtgggccagacttttgaaa

SEQ ID NO: 2914970 - DNA, 25 bp, Homo sapien
gttttccggccacttagcaactcca

SEQ ID NO: 2914971 - DNA, 25 bp, Homo sapien
catcagaccctgagtaaaccaaagg

SEQ ID NO: 2914972 - DNA, 25 bp, Homo sapien
tcctggcctttgcccaggctgtttg

SEQ ID NO: 2914973 - DNA, 25 bp, Homo sapien
ggcctttgcccaggctgtttgccat

SEQ ID NO: 2914974 - DNA, 25 bp, Homo sapien
ctggcctttgcccaggctgtttgcc

SEQ ID NO: 2914975 - DNA, 25 bp, Homo sapien
ctcctggcctttgcccaggctgttt

SEQ ID NO: 2914976 - DNA, 25 bp, Homo sapien
cggagcggacgtttcacgagtcacg

SEQ ID NO: 2914977 - DNA, 25 bp, Homo sapien
ccagataggaacgtccggcagaagc

SEQ ID NO: 2914978 - DNA, 25 bp, Homo sapien
ggccccagttctgaacccagatagg

SEQ ID NO: 2914979 - DNA, 25 bp, Homo sapien
cggcagaagccagacgcgcgttgtc

SEQ ID NO: 2914980 - DNA, 25 bp, Homo sapien
caggccctgactggagtttccggaa

SEQ ID NO: 2914981 - DNA, 25 bp, Homo sapien
gggtgcgctcatattgccaacagtg

SEQ ID NO: 2914982 - DNA, 25 bp, Homo sapien
tggtaatcatgcgtgtcaatcaggc

SEQ ID NO: 2914983 - DNA, 25 bp, Homo sapien
aaatagcaacctgtcttcacgccgc

SEQ ID NO: 2914984 - DNA, 25 bp, Homo sapien
cgccgaacccccatgcgtgagtggg

SEQ ID NO: 2914985 - DNA, 25 bp, Homo sapien
cgggtcatgcaacggtggcgacaac

SEQ ID NO: 2914986 - DNA, 25 bp, Homo sapien
ggtagggcctcaggagcggcgggtc

SEQ ID NO: 2914987 - DNA, 25 bp, Homo sapien
caacggtggcgacaacggggcttct

SEQ ID NO: 2914988 - DNA, 25 bp, Homo sapien
gcccccacgacgctgctctagggtc

SEQ ID NO: 2914989 - DNA, 25 bp, Homo sapien
caggtccgtgtagccgctggcggcc

SEQ ID NO: 2914990 - DNA, 25 bp, Homo sapien
ggtccgtgtagccgctggcggccgc

SEQ ID NO: 2914991 - DNA, 25 bp, Homo sapien
aggtccgtgtagccgctggcggccg

SEQ ID NO: 2914992 - DNA, 25 bp, Homo sapien
gcaggtccgtgtagccgctggcggc

SEQ ID NO: 2914993 - DNA, 25 bp, Homo sapien
ccgggacgtcatggacttgagcttc

SEQ ID NO: 2914994 - DNA, 25 bp, Homo sapien
ggctgcccgccttatagttgtcccg

SEQ ID NO: 2914995 - DNA, 25 bp, Homo sapien
gccttatagttgtcccgggacgtca

SEQ ID NO: 2914996 - DNA, 25 bp, Homo sapien
cacagggtaaggttcggcggcagcg

SEQ ID NO: 2914997 - DNA, 25 bp, Homo sapien
tcctggctgaagaggcgcatctggc

SEQ ID NO: 2914998 - DNA, 25 bp, Homo sapien
tgaactggaacttgcagccgaagca

SEQ ID NO: 2914999 - DNA, 25 bp, Homo sapien
tgatgacggcgctgttgacgaagcc

SEQ ID NO: 2915000 - DNA, 25 bp, Homo sapien
cgtaagtgtagccttcgccgaagaa

SEQ ID NO: 2915001 - DNA, 25 bp, Homo sapien
gcacagtcacgcttcccctgcgcac

SEQ ID NO: 2915002 - DNA, 25 bp, Homo sapien
agcacagtcacgcttcccctgcgca

SEQ ID NO: 2915003 - DNA, 25 bp, Homo sapien
gagcacagtcacgcttcccctgcgc

SEQ ID NO: 2915004 - DNA, 25 bp, Homo sapien
caggatctgggaaccgaatataggc

SEQ ID NO: 2915005 - DNA, 25 bp, Homo sapien
ggccagggcactgagctaattctca

SEQ ID NO: 2915006 - DNA, 25 bp, Homo sapien
taaacagcaaaggtgttcccaatgg

SEQ ID NO: 2915007 - DNA, 25 bp, Homo sapien
ccgaatataggccaaaagcctaagt

SEQ ID NO: 2915008 - DNA, 25 bp, Homo sapien
gagaacgcctacaagatcccaaagc

SEQ ID NO: 2915009 - DNA, 25 bp, Homo sapien
gaactacacgaagggaaactgtcat

SEQ ID NO: 2915010 - DNA, 25 bp, Homo sapien
gaagccctgatctagagttcaccag

SEQ ID NO: 2915011 - DNA, 25 bp, Homo sapien
gctttggaagttggcatcatcccca

SEQ ID NO: 2915012 - DNA, 25 bp, Homo sapien
taaatgcccaggtttagacactgct

SEQ ID NO: 2915013 - DNA, 25 bp, Homo sapien
tactaataggcaggtgttcacccac

SEQ ID NO: 2915014 - DNA, 25 bp, Homo sapien
caaggtaagctaagtatgcaggtgc

SEQ ID NO: 2915015 - DNA, 25 bp, Homo sapien
tatgcaggatttgacgacgggcact

SEQ ID NO: 2915016 - DNA, 25 bp, Homo sapien
gtctgttttaatctgccccatgcag

SEQ ID NO: 2915017 - DNA, 25 bp, Homo sapien
gcaagtaagcaattagccttgaagt

SEQ ID NO: 2915018 - DNA, 25 bp, Homo sapien
atgcagccaacagggaataggagaa

SEQ ID NO: 2915019 - DNA, 25 bp, Homo sapien
cgtagcagtgattaaagatagcagc

SEQ ID NO: 2915020 - DNA, 25 bp, Homo sapien
tcatttccagacggctggcctaggc

SEQ ID NO: 2915021 - DNA, 25 bp, Homo sapien
catttccagacggctggcctaggcc

SEQ ID NO: 2915022 - DNA, 25 bp, Homo sapien
atttccagacggctggcctaggcct

SEQ ID NO: 2915023 - DNA, 25 bp, Homo sapien
ccaaccgttaactggaagagtcaca

SEQ ID NO: 2915024 - DNA, 25 bp, Homo sapien
tcagactatcccagaactgacaggg

SEQ ID NO: 2915025 - DNA, 25 bp, Homo sapien
caccatggttcactgttagcttcct

SEQ ID NO: 2915026 - DNA, 25 bp, Homo sapien
tcagaagagtccacacaagagatgt

SEQ ID NO: 2915027 - DNA, 25 bp, Homo sapien
ggccccagaggcacgtttctaagtc

SEQ ID NO: 2915028 - DNA, 25 bp, Homo sapien
gctatatgcataaccaagggccctg

SEQ ID NO: 2915029 - DNA, 25 bp, Homo sapien
caaggaaccacttttcttaatgcag

SEQ ID NO: 2915030 - DNA, 25 bp, Homo sapien
cccaaagggctctagaacaaacaat

SEQ ID NO: 2915031 - DNA, 25 bp, Homo sapien
ttctctcataatacctattaatacc

SEQ ID NO: 2915032 - DNA, 25 bp, Homo sapien
tctcataatacctattaatacccat

SEQ ID NO: 2915033 - DNA, 25 bp, Homo sapien
ccttctctcataatacctattaata

SEQ ID NO: 2915034 - DNA, 25 bp, Homo sapien
tctctcataatacctattaataccc

SEQ ID NO: 2915035 - DNA, 25 bp, Homo sapien
aagagtagacagacaaccaaagttc

SEQ ID NO: 2915036 - DNA, 25 bp, Homo sapien
ccatgaagagtagacagacaaccaa

SEQ ID NO: 2915037 - DNA, 25 bp, Homo sapien
cacagaacatgtgaccatgaagagt

SEQ ID NO: 2915038 - DNA, 25 bp, Homo sapien
acatgtgaccatgaagagtagacag

SEQ ID NO: 2915039 - DNA, 25 bp, Homo sapien
gactgctcggcgctccttgatgtcc

SEQ ID NO: 2915040 - DNA, 25 bp, Homo sapien
tgatgactgctcggcgctccttgat

SEQ ID NO: 2915041 - DNA, 25 bp, Homo sapien
tccttgatgtcctgaggccgtatgc

SEQ ID NO: 2915042 - DNA, 25 bp, Homo sapien
ggccgtatgcagtgagtgatttcat

SEQ ID NO: 2915043 - DNA, 25 bp, Homo sapien
tgctaggccccagatgaacagggat

SEQ ID NO: 2915044 - DNA, 25 bp, Homo sapien
cggcctgaattgttctccacactag

SEQ ID NO: 2915045 - DNA, 25 bp, Homo sapien
tgggctgcacctcatgctaggcccc

SEQ ID NO: 2915046 - DNA, 25 bp, Homo sapien
tccacactagttgatgcctcctctg

SEQ ID NO: 2915047 - DNA, 25 bp, Homo sapien
caggggccagatctaccaagctcac

SEQ ID NO: 2915048 - DNA, 25 bp, Homo sapien
gccagatctaccaagctcaccttta

SEQ ID NO: 2915049 - DNA, 25 bp, Homo sapien
agcaatttctagctcaggggccaga

SEQ ID NO: 2915050 - DNA, 25 bp, Homo sapien
gcaatttctagctcaggggccagat

SEQ ID NO: 2915051 - DNA, 25 bp, Homo sapien
attccgggtactagcacagagccta

SEQ ID NO: 2915052 - DNA, 25 bp, Homo sapien
gagctgagttccacttgaccaaaag

SEQ ID NO: 2915053 - DNA, 25 bp, Homo sapien
gggtgccctagtcaccaactcaagg

SEQ ID NO: 2915054 - DNA, 25 bp, Homo sapien
tcacagtgcaatcctgagggcctcc

SEQ ID NO: 2915055 - DNA, 25 bp, Homo sapien
caggtgatctgcccgtcctggcttc

SEQ ID NO: 2915056 - DNA, 25 bp, Homo sapien
ggcatgcaccccaacgcctggctac

SEQ ID NO: 2915057 - DNA, 25 bp, Homo sapien
ccaaagtgctgaaattaaaggcgtg

SEQ ID NO: 2915058 - DNA, 25 bp, Homo sapien
tgctgaaattaaaggcgtgagccac

SEQ ID NO: 2915059 - DNA, 25 bp, Homo sapien
taggacatagctagcagagaccctg

SEQ ID NO: 2915060 - DNA, 25 bp, Homo sapien
gggagctggcatggaaaacctcaaa

SEQ ID NO: 2915061 - DNA, 25 bp, Homo sapien
cactggctggcctactgtacataga

SEQ ID NO: 2915062 - DNA, 25 bp, Homo sapien
tctgaacgtgggtaggaaatctctc

SEQ ID NO: 2915063 - DNA, 25 bp, Homo sapien
tggtgggtcccaacacaggaaggat

SEQ ID NO: 2915064 - DNA, 25 bp, Homo sapien
atttgccagaggaccaacggcccca

SEQ ID NO: 2915065 - DNA, 25 bp, Homo sapien
gggccatctacttcatttgccagag

SEQ ID NO: 2915066 - DNA, 25 bp, Homo sapien
tccacttggacccacaggttctctg

SEQ ID NO: 2915067 - DNA, 25 bp, Homo sapien
gattggtctagctgactttcaaaga

SEQ ID NO: 2915068 - DNA, 25 bp, Homo sapien
tgtgggcaccatcagaccaattctc

SEQ ID NO: 2915069 - DNA, 25 bp, Homo sapien
tcaagtccacctttaggagtaagga

SEQ ID NO: 2915070 - DNA, 25 bp, Homo sapien
gagccagctagacctggaagccagc

SEQ ID NO: 2915071 - DNA, 25 bp, Homo sapien
ctgggtggtaacacggagctgctca

SEQ ID NO: 2915072 - DNA, 25 bp, Homo sapien
gcttgggtttcagagcagggtccct

SEQ ID NO: 2915073 - DNA, 25 bp, Homo sapien
caaccggggtgcatctaatcttgtc

SEQ ID NO: 2915074 - DNA, 25 bp, Homo sapien
cagggtctgccttgcggtgggaccg

SEQ ID NO: 2915075 - DNA, 25 bp, Homo sapien
tcagagcagtcctctgaggactcgt

SEQ ID NO: 2915076 - DNA, 25 bp, Homo sapien
tgaagctacccctccgccggtgtgt

SEQ ID NO: 2915077 - DNA, 25 bp, Homo sapien
agcagcaccgagcgccggttctctt

SEQ ID NO: 2915078 - DNA, 25 bp, Homo sapien
tatgacttgcgccagtagttctcag

SEQ ID NO: 2915079 - DNA, 25 bp, Homo sapien
tgagaacctaggtcctggccaattc

SEQ ID NO: 2915080 - DNA, 25 bp, Homo sapien
tacgtaaggatgagccagagttccc

SEQ ID NO: 2915081 - DNA, 25 bp, Homo sapien
ttgatgccaacagcctttccatcca

SEQ ID NO: 2915082 - DNA, 25 bp, Homo sapien
tcttcagccctaacaggcaacaaaa

SEQ ID NO: 2915083 - DNA, 25 bp, Homo sapien
caggagacctcaaccaagtgcagac

SEQ ID NO: 2915084 - DNA, 25 bp, Homo sapien
tcttgataagagaggtcaggaccac

SEQ ID NO: 2915085 - DNA, 25 bp, Homo sapien
tgatacagccccacttaaaagatgg

SEQ ID NO: 2915086 - DNA, 25 bp, Homo sapien
caaatgctagacttggaaggacacc

SEQ ID NO: 2915087 - DNA, 25 bp, Homo sapien
agctctggccttggatgcatgctgc

SEQ ID NO: 2915088 - DNA, 25 bp, Homo sapien
tggatgcatgctgccggcagacaag

SEQ ID NO: 2915089 - DNA, 25 bp, Homo sapien
taccctgaagcggaggaggcaccag

SEQ ID NO: 2915090 - DNA, 25 bp, Homo sapien
ggcaggcgccttcctagaaggatga

SEQ ID NO: 2915091 - DNA, 25 bp, Homo sapien
ggatctgagtggatagaagctacca

SEQ ID NO: 2915092 - DNA, 25 bp, Homo sapien
catatcagggcgaagtgctgcacac

SEQ ID NO: 2915093 - DNA, 25 bp, Homo sapien
ccaaagtggtggtatcctggttgct

SEQ ID NO: 2915094 - DNA, 25 bp, Homo sapien
gatttctgcagcctatgaggtctca

SEQ ID NO: 2915095 - DNA, 25 bp, Homo sapien
tagggcctcctcaatctacagagag

SEQ ID NO: 2915096 - DNA, 25 bp, Homo sapien
ggagtgaatacctcatcccatgtgg

SEQ ID NO: 2915097 - DNA, 25 bp, Homo sapien
gaaagggtgggcttactgagactcc

SEQ ID NO: 2915098 - DNA, 25 bp, Homo sapien
tccatgaaagaaaggccagacaggt

SEQ ID NO: 2915099 - DNA, 25 bp, Homo sapien
agggggcagagattggcacagatgg

SEQ ID NO: 2915100 - DNA, 25 bp, Homo sapien
agccccagggggcagagattggcac

SEQ ID NO: 2915101 - DNA, 25 bp, Homo sapien
ggggcagagattggcacagatggcc

SEQ ID NO: 2915102 - DNA, 25 bp, Homo sapien
ggcagagattggcacagatggccat

SEQ ID NO: 2915103 - DNA, 25 bp, Homo sapien
aggacagtgcacatgggttgtaatg

SEQ ID NO: 2915104 - DNA, 25 bp, Homo sapien
gagcccagaagaggcatctggccca

SEQ ID NO: 2915105 - DNA, 25 bp, Homo sapien
cacatgggttgtaatgggtaaggag

SEQ ID NO: 2915106 - DNA, 25 bp, Homo sapien
ggagaggacagtgcacatgggttgt

SEQ ID NO: 2915107 - DNA, 25 bp, Homo sapien
acccacgccaggccggcggtgttca

SEQ ID NO: 2915108 - DNA, 25 bp, Homo sapien
ccacgccaggccggcggtgttcagc

SEQ ID NO: 2915109 - DNA, 25 bp, Homo sapien
gccaggccggcggtgttcagccctt

SEQ ID NO: 2915110 - DNA, 25 bp, Homo sapien
acgccaggccggcggtgttcagccc

SEQ ID NO: 2915111 - DNA, 25 bp, Homo sapien
gccgcccgcaggatgcgccgcgcgg

SEQ ID NO: 2915112 - DNA, 25 bp, Homo sapien
cgcccgcaggatgcgccgcgcggcc

SEQ ID NO: 2915113 - DNA, 25 bp, Homo sapien
ccgcccgcaggatgcgccgcgcggc

SEQ ID NO: 2915114 - DNA, 25 bp, Homo sapien
gagcttctcgcgctgcgggtcggcg

SEQ ID NO: 2915115 - DNA, 25 bp, Homo sapien
ctgccgccggaaccgaaacttcatc

SEQ ID NO: 2915116 - DNA, 25 bp, Homo sapien
tgcttgagcttctcgcgctgcgggt

SEQ ID NO: 2915117 - DNA, 25 bp, Homo sapien
gaaggcgaaaagctcctgcttgagc

SEQ ID NO: 2915118 - DNA, 25 bp, Homo sapien
gacagaggtcgagagactccacaga

SEQ ID NO: 2915119 - DNA, 25 bp, Homo sapien
ggacgcaatggagcccctaagaaaa

SEQ ID NO: 2915120 - DNA, 25 bp, Homo sapien
tgcgaagtgcagtgtagtacacagc

SEQ ID NO: 2915121 - DNA, 25 bp, Homo sapien
aagaagactcagagacgcacaggca

SEQ ID NO: 2915122 - DNA, 25 bp, Homo sapien
tagccagagtgggctgagcttcacc

SEQ ID NO: 2915123 - DNA, 25 bp, Homo sapien
ccaccccaaggctagccagagtggg

SEQ ID NO: 2915124 - DNA, 25 bp, Homo sapien
gccagagtgggctgagcttcacccc

SEQ ID NO: 2915125 - DNA, 25 bp, Homo sapien
tttccgccaccccaaggctagccag

SEQ ID NO: 2915126 - DNA, 25 bp, Homo sapien
catcaggggcggagatggtgttaag

SEQ ID NO: 2915127 - DNA, 25 bp, Homo sapien
tcccataaccatcaggggcggagat

SEQ ID NO: 2915128 - DNA, 25 bp, Homo sapien
aacatgactcccataaccatcaggg

SEQ ID NO: 2915129 - DNA, 25 bp, Homo sapien
gcaacatgactcccataaccatcag

SEQ ID NO: 2915130 - DNA, 25 bp, Homo sapien
ctggtgccgatggccatgatgcgaa

SEQ ID NO: 2915131 - DNA, 25 bp, Homo sapien
ccatgatgcgaagttccgggtcgaa

SEQ ID NO: 2915132 - DNA, 25 bp, Homo sapien
tggccatgatgcgaagttccgggtc

SEQ ID NO: 2915133 - DNA, 25 bp, Homo sapien
tgccgatggccatgatgcgaagttc

SEQ ID NO: 2915134 - DNA, 25 bp, Homo sapien
aagaagtgcatctgtgtgacagtgg

SEQ ID NO: 2915135 - DNA, 25 bp, Homo sapien
cctgtgaactccacgccaggtgcac

SEQ ID NO: 2915136 - DNA, 25 bp, Homo sapien
tgtgacagtggctgcatcccggtgc

SEQ ID NO: 2915137 - DNA, 25 bp, Homo sapien
cagtggctgcatcccggtgcaggcc

SEQ ID NO: 2915138 - DNA, 25 bp, Homo sapien
tatggtggacaatctcccagagatg

SEQ ID NO: 2915139 - DNA, 25 bp, Homo sapien
cagctggaaactgagtgcttcttcc

SEQ ID NO: 2915140 - DNA, 25 bp, Homo sapien
cccagagatgcagactgctgtcatc

SEQ ID NO: 2915141 - DNA, 25 bp, Homo sapien
tgctgtcatcaagcagggacaggag

SEQ ID NO: 2915142 - DNA, 25 bp, Homo sapien
tctgcccctcgagcagggtcagggt

SEQ ID NO: 2915143 - DNA, 25 bp, Homo sapien
gcaggaccactgtgactcgggtaag

SEQ ID NO: 2915144 - DNA, 25 bp, Homo sapien
accactgtgactcgggtaaggctga

SEQ ID NO: 2915145 - DNA, 25 bp, Homo sapien
gggcaagcgtctgcccctcgagcag

SEQ ID NO: 2915146 - DNA, 25 bp, Homo sapien
tcccacagcggtagtcgtctggcac

SEQ ID NO: 2915147 - DNA, 25 bp, Homo sapien
aatgagaatctttgtggggtcccgc

SEQ ID NO: 2915148 - DNA, 25 bp, Homo sapien
cagtgccttcccacagcggtagtcg

SEQ ID NO: 2915149 - DNA, 25 bp, Homo sapien
cctggagtgactccacggggcccag

SEQ ID NO: 2915150 - DNA, 25 bp, Homo sapien
ggtgtggtggctaccgtgggctgca

SEQ ID NO: 2915151 - DNA, 25 bp, Homo sapien
cagacagcatagctgccatcgctgt

SEQ ID NO: 2915152 - DNA, 25 bp, Homo sapien
ggcatccacagaccagacagcatag

SEQ ID NO: 2915153 - DNA, 25 bp, Homo sapien
ccgtgggctgcagcgttgggaagct

SEQ ID NO: 2915154 - DNA, 25 bp, Homo sapien
ccagattcacagttccgccacagaa

SEQ ID NO: 2915155 - DNA, 25 bp, Homo sapien
tcacagttccgccacagaatcttgt

SEQ ID NO: 2915156 - DNA, 25 bp, Homo sapien
gaatcttgttaatggccttgcaggg

SEQ ID NO: 2915157 - DNA, 25 bp, Homo sapien
cagattcacagttccgccacagaat

SEQ ID NO: 2915158 - DNA, 25 bp, Homo sapien
aagtccagcgtcaccaatgtctcgg

SEQ ID NO: 2915159 - DNA, 25 bp, Homo sapien
tcgatgatgcgggaagtgaagtcca

SEQ ID NO: 2915160 - DNA, 25 bp, Homo sapien
ggcatgccaccgctgaagatgataa

SEQ ID NO: 2915161 - DNA, 25 bp, Homo sapien
cacttacacagtggcggtcaccata

SEQ ID NO: 2915162 - DNA, 25 bp, Homo sapien
acaatgcgggcccacagcttggcgg

SEQ ID NO: 2915163 - DNA, 25 bp, Homo sapien
gggacactggccacgtgggccgagc

SEQ ID NO: 2915164 - DNA, 25 bp, Homo sapien
gctcacaatgcgggcccacagcttg

SEQ ID NO: 2915165 - DNA, 25 bp, Homo sapien
cactggccacgtgggccgagcaagt

SEQ ID NO: 2915166 - DNA, 25 bp, Homo sapien
gcacattctgacctccgggcttaga

SEQ ID NO: 2915167 - DNA, 25 bp, Homo sapien
tatggcacattctgacctccgggct

SEQ ID NO: 2915168 - DNA, 25 bp, Homo sapien
cctccgggcttagaactgaaactct

SEQ ID NO: 2915169 - DNA, 25 bp, Homo sapien
tcctcaagactccaccctgtaagac

SEQ ID NO: 2915170 - DNA, 25 bp, Homo sapien
gcagccctcgctgtgacggctcctg

SEQ ID NO: 2915171 - DNA, 25 bp, Homo sapien
cagcagccctcgctgtgacggctcc

SEQ ID NO: 2915172 - DNA, 25 bp, Homo sapien
agccctcgctgtgacggctcctggg

SEQ ID NO: 2915173 - DNA, 25 bp, Homo sapien
agcagcagccctcgctgtgacggct

SEQ ID NO: 2915174 - DNA, 25 bp, Homo sapien
aacagcaaggggcccactcacccac

SEQ ID NO: 2915175 - DNA, 25 bp, Homo sapien
cactcacccacataagcacgcacac

SEQ ID NO: 2915176 - DNA, 25 bp, Homo sapien
ccactcacccacataagcacgcaca

SEQ ID NO: 2915177 - DNA, 25 bp, Homo sapien
cagcaaggggcccactcacccacat

SEQ ID NO: 2915178 - DNA, 25 bp, Homo sapien
ccaggggccaggcctgagtctcctg

SEQ ID NO: 2915179 - DNA, 25 bp, Homo sapien
gccaggcctgagtctcctggcacct

SEQ ID NO: 2915180 - DNA, 25 bp, Homo sapien
caggggccaggcctgagtctcctgg

SEQ ID NO: 2915181 - DNA, 25 bp, Homo sapien
gggccaggcctgagtctcctggcac

SEQ ID NO: 2915182 - DNA, 25 bp, Homo sapien
taaggcagtcacagaacagagcatg

SEQ ID NO: 2915183 - DNA, 25 bp, Homo sapien
cagatgtcagggctacccgagttcc

SEQ ID NO: 2915184 - DNA, 25 bp, Homo sapien
aaagccacggcaagctcttcagcag

SEQ ID NO: 2915185 - DNA, 25 bp, Homo sapien
tagacaaatctagggcgcagccttg

SEQ ID NO: 2915186 - DNA, 25 bp, Homo sapien
aagggtggccagtcgtcctcggcag

SEQ ID NO: 2915187 - DNA, 25 bp, Homo sapien
agaacctcacggtgccgtcctcatg

SEQ ID NO: 2915188 - DNA, 25 bp, Homo sapien
tgtcagcgtgctcacagtctgtctg

SEQ ID NO: 2915189 - DNA, 25 bp, Homo sapien
tgtgctcagcttatagagcggccgc

SEQ ID NO: 2915190 - DNA, 25 bp, Homo sapien
ggatcgtcactgtagggatcgaagc

SEQ ID NO: 2915191 - DNA, 25 bp, Homo sapien
ttctgcacgccaagccggggatcgt

SEQ ID NO: 2915192 - DNA, 25 bp, Homo sapien
ggctgtatacttgcagagagcaacc

SEQ ID NO: 2915193 - DNA, 25 bp, Homo sapien
tcactgtagggatcgaagcagccca

SEQ ID NO: 2915194 - DNA, 25 bp, Homo sapien
tctgagggcaaagtgtccaccctta

SEQ ID NO: 2915195 - DNA, 25 bp, Homo sapien
tgagcacctcctgtatgtcatgtga

SEQ ID NO: 2915196 - DNA, 25 bp, Homo sapien
ggtgaccaagacacactagtccctg

SEQ ID NO: 2915197 - DNA, 25 bp, Homo sapien
caaggtggttctaggactgtcttca

SEQ ID NO: 2915198 - DNA, 25 bp, Homo sapien
ggaggtctatgatggccacgctgac

SEQ ID NO: 2915199 - DNA, 25 bp, Homo sapien
caaagccatgactggtgccaaaagc

SEQ ID NO: 2915200 - DNA, 25 bp, Homo sapien
cttgcgctggtagtcgaagaggcca

SEQ ID NO: 2915201 - DNA, 25 bp, Homo sapien
acagcggttacagcagctggcggca

SEQ ID NO: 2915202 - DNA, 25 bp, Homo sapien
ttcttgccagagacacgactcttgc

SEQ ID NO: 2915203 - DNA, 25 bp, Homo sapien
gagacacgactcttgcgaatgcgcc

SEQ ID NO: 2915204 - DNA, 25 bp, Homo sapien
gactcttgcgaatgcgccggaaaga

SEQ ID NO: 2915205 - DNA, 25 bp, Homo sapien
cgaatgcgccggaaagactggcgca

SEQ ID NO: 2915206 - DNA, 25 bp, Homo sapien
aatgtgtcggcaaagtataggcaac

SEQ ID NO: 2915207 - DNA, 25 bp, Homo sapien
gcaaagtataggcaacgcacgacac

SEQ ID NO: 2915208 - DNA, 25 bp, Homo sapien
ccgacaaggagtcatcggcagagcg

SEQ ID NO: 2915209 - DNA, 25 bp, Homo sapien
gcacgggcgtcatctccacgtcgtg

SEQ ID NO: 2915210 - DNA, 25 bp, Homo sapien
gtgcataggcgaacacagagcctga

SEQ ID NO: 2915211 - DNA, 25 bp, Homo sapien
tcagatgcgatgagcacagcgtgac

SEQ ID NO: 2915212 - DNA, 25 bp, Homo sapien
tgcatgtcaggtgcctgcgccaggt

SEQ ID NO: 2915213 - DNA, 25 bp, Homo sapien
acagcgtgaccaccctgcatgtcag

SEQ ID NO: 2915214 - DNA, 25 bp, Homo sapien
aatcaatcacagagttatgccaagg

SEQ ID NO: 2915215 - DNA, 25 bp, Homo sapien
aggccctctctcgatctgtgacaaa

SEQ ID NO: 2915216 - DNA, 25 bp, Homo sapien
caaggttatgcagctggtatcccca

SEQ ID NO: 2915217 - DNA, 25 bp, Homo sapien
tgtggcacagtgagataggactaga

SEQ ID NO: 2915218 - DNA, 25 bp, Homo sapien
aggtctcagcatagtcctcgcaggc

SEQ ID NO: 2915219 - DNA, 25 bp, Homo sapien
gagaagacgtggacgtcacccaggt

SEQ ID NO: 2915220 - DNA, 25 bp, Homo sapien
taaagacgcacgaagcgatgccgct

SEQ ID NO: 2915221 - DNA, 25 bp, Homo sapien
tcatgggccgtcagcttgaacttgg

SEQ ID NO: 2915222 - DNA, 25 bp, Homo sapien
ccactcagttcgctcgcctgaggaa

SEQ ID NO: 2915223 - DNA, 25 bp, Homo sapien
gtactggtcccactcagttcgctcg

SEQ ID NO: 2915224 - DNA, 25 bp, Homo sapien
cagtactggtcccactcagttcgct

SEQ ID NO: 2915225 - DNA, 25 bp, Homo sapien
actcagttcgctcgcctgaggaagg

SEQ ID NO: 2915226 - DNA, 25 bp, Homo sapien
cagaagaatgaggagtgcagttaga

SEQ ID NO: 2915227 - DNA, 25 bp, Homo sapien
aagaatgaggagtgcagttagaaga

SEQ ID NO: 2915228 - DNA, 25 bp, Homo sapien
aatgaggagtgcagttagaagatac

SEQ ID NO: 2915229 - DNA, 25 bp, Homo sapien
gggcagaagaatgaggagtgcagtt

SEQ ID NO: 2915230 - DNA, 25 bp, Homo sapien
tctgatggggatatcaggtaaaagc

SEQ ID NO: 2915231 - DNA, 25 bp, Homo sapien
tgatgttccgggcacttagggagaa

SEQ ID NO: 2915232 - DNA, 25 bp, Homo sapien
agcagagcggctctgtgatgttccg

SEQ ID NO: 2915233 - DNA, 25 bp, Homo sapien
ggagaagcgttcaaattctgatggg

SEQ ID NO: 2915234 - DNA, 25 bp, Homo sapien
ccagcaggatgcttggggtcccgtt

SEQ ID NO: 2915235 - DNA, 25 bp, Homo sapien
gggtcccgttagcctggctcagctt

SEQ ID NO: 2915236 - DNA, 25 bp, Homo sapien
gcttggggtcccgttagcctggctc

SEQ ID NO: 2915237 - DNA, 25 bp, Homo sapien
ctggctcagcttgggtgactctcgg

SEQ ID NO: 2915238 - DNA, 25 bp, Homo sapien
cagggagcaagtcatcagcccctac

SEQ ID NO: 2915239 - DNA, 25 bp, Homo sapien
ggagcaagtcatcagcccctaccag

SEQ ID NO: 2915240 - DNA, 25 bp, Homo sapien
ctacagggagcaagtcatcagcccc

SEQ ID NO: 2915241 - DNA, 25 bp, Homo sapien
ctaccaggacccttagcaccctctg

SEQ ID NO: 2915242 - DNA, 25 bp, Homo sapien
actggtggctgagtcgatggacatg

SEQ ID NO: 2915243 - DNA, 25 bp, Homo sapien
ccctgtcgtgtccagcgtggtgtca

SEQ ID NO: 2915244 - DNA, 25 bp, Homo sapien
tgagagtgcagcctcgggtggctcc

SEQ ID NO: 2915245 - DNA, 25 bp, Homo sapien
gtcgatggacatgggtgagagtgca

SEQ ID NO: 2915246 - DNA, 25 bp, Homo sapien
gatggcacaggcgtgggcctcgtct

SEQ ID NO: 2915247 - DNA, 25 bp, Homo sapien
atggcacaggcgtgggcctcgtctt

SEQ ID NO: 2915248 - DNA, 25 bp, Homo sapien
agcccaggcgctagaaaaatactct

SEQ ID NO: 2915249 - DNA, 25 bp, Homo sapien
ggaggtcgggatagttctggccttc

SEQ ID NO: 2915250 - DNA, 25 bp, Homo sapien
cctacaggttagcaggcgtggttct

SEQ ID NO: 2915251 - DNA, 25 bp, Homo sapien
cacacctgactaggccccagatgtg

SEQ ID NO: 2915252 - DNA, 25 bp, Homo sapien
tcttccgctagggataaagcagatg

SEQ ID NO: 2915253 - DNA, 25 bp, Homo sapien
cagtgtgagtgcacgtgtgaagccc

SEQ ID NO: 2915254 - DNA, 25 bp, Homo sapien
aagaatgtactcaggtgacaccacc

SEQ ID NO: 2915255 - DNA, 25 bp, Homo sapien
agtagcctcaagcagcaccaatggg

SEQ ID NO: 2915256 - DNA, 25 bp, Homo sapien
tctgcgagagagtgtcttggtggcc

SEQ ID NO: 2915257 - DNA, 25 bp, Homo sapien
tgcgagagagtgtcttggtggcctc

SEQ ID NO: 2915258 - DNA, 25 bp, Homo sapien
ctgcgagagagtgtcttggtggcct

SEQ ID NO: 2915259 - DNA, 25 bp, Homo sapien
ttccgcacgacgaccggaggaggca

SEQ ID NO: 2915260 - DNA, 25 bp, Homo sapien
gagtccagcgcacaggtgccaaaat

SEQ ID NO: 2915261 - DNA, 25 bp, Homo sapien
gaatggaacgtgaaggaccctggaa

SEQ ID NO: 2915262 - DNA, 25 bp, Homo sapien
gacttcgcagcacgcagacaagcag

SEQ ID NO: 2915263 - DNA, 25 bp, Homo sapien
cagccccatctctggcggggtcgcg

SEQ ID NO: 2915264 - DNA, 25 bp, Homo sapien
agccccatctctggcggggtcgcgc

SEQ ID NO: 2915265 - DNA, 25 bp, Homo sapien
taaattgggactcagccccatctct

SEQ ID NO: 2915266 - DNA, 25 bp, Homo sapien
ctgtctaaattgggactcagcccca

SEQ ID NO: 2915267 - DNA, 25 bp, Homo sapien
gctgcccagcccttcgtcgctacgc

SEQ ID NO: 2915268 - DNA, 25 bp, Homo sapien
ccagcccttcgtcgctacgccgctt

SEQ ID NO: 2915269 - DNA, 25 bp, Homo sapien
tgcccagcccttcgtcgctacgccg

SEQ ID NO: 2915270 - DNA, 25 bp, Homo sapien
agcccttcgtcgctacgccgcttcc

SEQ ID NO: 2915271 - DNA, 25 bp, Homo sapien
gccagggtggcaatgcccagcacag

SEQ ID NO: 2915272 - DNA, 25 bp, Homo sapien
ccgcttcacggccagggtggcaatg

SEQ ID NO: 2915273 - DNA, 25 bp, Homo sapien
cattggccaggaggaagtccaccat

SEQ ID NO: 2915274 - DNA, 25 bp, Homo sapien
ccagcaccaggcgggcattggccag

SEQ ID NO: 2915275 - DNA, 25 bp, Homo sapien
ttggtgtcatcctcatcccgcgggc

SEQ ID NO: 2915276 - DNA, 25 bp, Homo sapien
tggtgtcatcctcatcccgcgggct

SEQ ID NO: 2915277 - DNA, 25 bp, Homo sapien
ctggggcagacgacgagggggccaa

SEQ ID NO: 2915278 - DNA, 25 bp, Homo sapien
tgtcatcctcatcccgcgggctagt

SEQ ID NO: 2915279 - DNA, 25 bp, Homo sapien
ctgagctgtggtgtcacctcaggat

SEQ ID NO: 2915280 - DNA, 25 bp, Homo sapien
gtggtgtcacctcaggatcagtttc

SEQ ID NO: 2915281 - DNA, 25 bp, Homo sapien
gagctgtggtgtcacctcaggatca

SEQ ID NO: 2915282 - DNA, 25 bp, Homo sapien
ggagctgagctgtggtgtcacctca

SEQ ID NO: 2915283 - DNA, 25 bp, Homo sapien
cacagtgagctccaggcgttcgtgc

SEQ ID NO: 2915284 - DNA, 25 bp, Homo sapien
agtcccagcgtcatggtcgtccagg

SEQ ID NO: 2915285 - DNA, 25 bp, Homo sapien
cctgtaggccactgtatagcgcata

SEQ ID NO: 2915286 - DNA, 25 bp, Homo sapien
aacttgctccgaaagtaggcctgca

SEQ ID NO: 2915287 - DNA, 25 bp, Homo sapien
gacgcctcaaaacgcctggagctag

SEQ ID NO: 2915288 - DNA, 25 bp, Homo sapien
tgtgcacaccggacctctctagtgg

SEQ ID NO: 2915289 - DNA, 25 bp, Homo sapien
tggaacagctccagtgagatgcccc

SEQ ID NO: 2915290 - DNA, 25 bp, Homo sapien
tgcttgcaggaatggctggcactcc

SEQ ID NO: 2915291 - DNA, 25 bp, Homo sapien
tcaacagctgcgtatgaaagcacca

SEQ ID NO: 2915292 - DNA, 25 bp, Homo sapien
aaagcaccaagactcccttatccag

SEQ ID NO: 2915293 - DNA, 25 bp, Homo sapien
ttgccaaagtgccaggacaagccac

SEQ ID NO: 2915294 - DNA, 25 bp, Homo sapien
cacccggccaagatgctacttttta

SEQ ID NO: 2915295 - DNA, 25 bp, Homo sapien
taatatcctctacaaggagccctcg

SEQ ID NO: 2915296 - DNA, 25 bp, Homo sapien
tgaccctccccagttaagagatgag

SEQ ID NO: 2915297 - DNA, 25 bp, Homo sapien
gaggcctacaccactattccatttg

SEQ ID NO: 2915298 - DNA, 25 bp, Homo sapien
cagcccacatgtgtcatctggtgat

SEQ ID NO: 2915299 - DNA, 25 bp, Homo sapien
tctggtcgtcgaaggagtggcactc

SEQ ID NO: 2915300 - DNA, 25 bp, Homo sapien
tctctggctagaaacggaagaccca

SEQ ID NO: 2915301 - DNA, 25 bp, Homo sapien
tagactgagcttgcttcctggacag

SEQ ID NO: 2915302 - DNA, 25 bp, Homo sapien
tttagagctacctgaagcaagtggc

SEQ ID NO: 2915303 - DNA, 25 bp, Homo sapien
ggctgtggtaacactgatccttcag

SEQ ID NO: 2915304 - DNA, 25 bp, Homo sapien
gacggtgtaatgcaaggaaatggct

SEQ ID NO: 2915305 - DNA, 25 bp, Homo sapien
gttagcagaggattggtgcagtccc

SEQ ID NO: 2915306 - DNA, 25 bp, Homo sapien
taatctagttaagccaggacatcca

SEQ ID NO: 2915307 - DNA, 25 bp, Homo sapien
tgaagagacttaacccacagacacg

SEQ ID NO: 2915308 - DNA, 25 bp, Homo sapien
tacatggcagagtcctagtgtgtcc

SEQ ID NO: 2915309 - DNA, 25 bp, Homo sapien
gatgtgataactgtgcagcacccgc

SEQ ID NO: 2915310 - DNA, 25 bp, Homo sapien
tatggaccaggtacacttcgttatg

SEQ ID NO: 2915311 - DNA, 25 bp, Homo sapien
gctctctaccaagttggtgacggtg

SEQ ID NO: 2915312 - DNA, 25 bp, Homo sapien
taggtggtctcttagtagcgacatc

SEQ ID NO: 2915313 - DNA, 25 bp, Homo sapien
cggtgtcaacccctgctcgaagtgt

SEQ ID NO: 2915314 - DNA, 25 bp, Homo sapien
ccttcatgctctctaccaagttggt

SEQ ID NO: 2915315 - DNA, 25 bp, Homo sapien
tctaggttggtaatgcaagctacag

SEQ ID NO: 2915316 - DNA, 25 bp, Homo sapien
tcttgacggtgcagtagagaatccc

SEQ ID NO: 2915317 - DNA, 25 bp, Homo sapien
gaatttgacaccacagtcttgacgg

SEQ ID NO: 2915318 - DNA, 25 bp, Homo sapien
cagcagatctcatatgtcgttgtaa

SEQ ID NO: 2915319 - DNA, 25 bp, Homo sapien
tcaggtgaaccctttctctttgact

SEQ ID NO: 2915320 - DNA, 25 bp, Homo sapien
ctggcacttcaggtgaaccctttct

SEQ ID NO: 2915321 - DNA, 25 bp, Homo sapien
gttctcacaaagtgtacttccctca

SEQ ID NO: 2915322 - DNA, 25 bp, Homo sapien
gtacttccctcaatggaacaggctg

SEQ ID NO: 2915323 - DNA, 25 bp, Homo sapien
cacccgaggagaagaactctagcag

SEQ ID NO: 2915324 - DNA, 25 bp, Homo sapien
aagaatgcggtgttaatcgacgcgc

SEQ ID NO: 2915325 - DNA, 25 bp, Homo sapien
cacaagaaacctgctgcgaaatcac

SEQ ID NO: 2915326 - DNA, 25 bp, Homo sapien
tgaacaaggcttaacgcgaggctac

SEQ ID NO: 2915327 - DNA, 25 bp, Homo sapien
tggagtcctccacgaagttcagctt

SEQ ID NO: 2915328 - DNA, 25 bp, Homo sapien
taatccacagacatgatacgcaggg

SEQ ID NO: 2915329 - DNA, 25 bp, Homo sapien
tggtgcacgtatgcaaaggcgccct

SEQ ID NO: 2915330 - DNA, 25 bp, Homo sapien
tagagaactggaaggcggcctgtct

SEQ ID NO: 2915331 - DNA, 25 bp, Homo sapien
ggagtggagggcagcaccaactgac

SEQ ID NO: 2915332 - DNA, 25 bp, Homo sapien
tggagtggagggcagcaccaactga

SEQ ID NO: 2915333 - DNA, 25 bp, Homo sapien
ctggagtggagggcagcaccaactg

SEQ ID NO: 2915334 - DNA, 25 bp, Homo sapien
tcacaactgttgtctcgggaagaag

SEQ ID NO: 2915335 - DNA, 25 bp, Homo sapien
ctgaaaagtctacacggaacccctg

SEQ ID NO: 2915336 - DNA, 25 bp, Homo sapien
gaattttaaggcgttctggccagcc

SEQ ID NO: 2915337 - DNA, 25 bp, Homo sapien
tcgggtccagctcataagcgggaaa

SEQ ID NO: 2915338 - DNA, 25 bp, Homo sapien
cttgatctgtgtgcggtggtctgcc

SEQ ID NO: 2915339 - DNA, 25 bp, Homo sapien
caaggtccaggatgctcgtgtagcg

SEQ ID NO: 2915340 - DNA, 25 bp, Homo sapien
taggaagctcatctggcggctggct

SEQ ID NO: 2915341 - DNA, 25 bp, Homo sapien
tctgtctccttgtcgtgggtaggca

SEQ ID NO: 2915342 - DNA, 25 bp, Homo sapien
tttatacaaaaagctggggacatag

SEQ ID NO: 2915343 - DNA, 25 bp, Homo sapien
tatacaaaaagctggggacatagtc

SEQ ID NO: 2915344 - DNA, 25 bp, Homo sapien
attttatacaaaaagctggggacat

SEQ ID NO: 2915345 - DNA, 25 bp, Homo sapien
atacaaaaagctggggacatagtca

SEQ ID NO: 2915346 - DNA, 25 bp, Homo sapien
ttggtcacagtgtctgggaccgacc

SEQ ID NO: 2915347 - DNA, 25 bp, Homo sapien
ctgaatacagccagtgtgctcctcc

SEQ ID NO: 2915348 - DNA, 25 bp, Homo sapien
cagtgtgctcctcccatcaggcttt

SEQ ID NO: 2915349 - DNA, 25 bp, Homo sapien
aatacagccagtgtgctcctcccat

SEQ ID NO: 2915350 - DNA, 25 bp, Homo sapien
tgtgctcctcccatcaggctttggc

SEQ ID NO: 2915351 - DNA, 25 bp, Homo sapien
gctgtcaccctcgttcattttgcca

SEQ ID NO: 2915352 - DNA, 25 bp, Homo sapien
accacaacagttacctggctgtcac

SEQ ID NO: 2915353 - DNA, 25 bp, Homo sapien
agggcctcccctaggacagtgggct

SEQ ID NO: 2915354 - DNA, 25 bp, Homo sapien
gggtctgaaggaggcgatgggtgtt

SEQ ID NO: 2915355 - DNA, 25 bp, Homo sapien
tggtgactgaggtgcacacagcctc

SEQ ID NO: 2915356 - DNA, 25 bp, Homo sapien
caaaccagtggccattgcctaagga

SEQ ID NO: 2915357 - DNA, 25 bp, Homo sapien
tggtagctcatccaggaaatccgtg

SEQ ID NO: 2915358 - DNA, 25 bp, Homo sapien
tttgagttctcatcggctgggccaa

SEQ ID NO: 2915359 - DNA, 25 bp, Homo sapien
tgtgtgccagcaaatacctcaagtg

SEQ ID NO: 2915360 - DNA, 25 bp, Homo sapien
tatttagtggcagacaatcccggtg

SEQ ID NO: 2915361 - DNA, 25 bp, Homo sapien
taagggagcccacgattagaagcag

SEQ ID NO: 2915362 - DNA, 25 bp, Homo sapien
cagagtaggtttcagttccccggag

SEQ ID NO: 2915363 - DNA, 25 bp, Homo sapien
aactgttgacactcgggccctttga

SEQ ID NO: 2915364 - DNA, 25 bp, Homo sapien
aaagtatggtgtagaaatggcctcc

SEQ ID NO: 2915365 - DNA, 25 bp, Homo sapien
ctgacttctaaaggagcgggcccac

SEQ ID NO: 2915366 - DNA, 25 bp, Homo sapien
tctcacagctggacataattctagg

SEQ ID NO: 2915367 - DNA, 25 bp, Homo sapien
caactatgaccagctggaggagaac

SEQ ID NO: 2915368 - DNA, 25 bp, Homo sapien
ccatacttggttgagcaggctgaac

SEQ ID NO: 2915369 - DNA, 25 bp, Homo sapien
tccacaggtgaacccagatactggc

SEQ ID NO: 2915370 - DNA, 25 bp, Homo sapien
cctcttgtcatggtgggtggagcca

SEQ ID NO: 2915371 - DNA, 25 bp, Homo sapien
tatctttcttgcttttatatacttt

SEQ ID NO: 2915372 - DNA, 25 bp, Homo sapien
ttcttgcttttatatactttttggc

SEQ ID NO: 2915373 - DNA, 25 bp, Homo sapien
cttgcttttatatactttttggctt

SEQ ID NO: 2915374 - DNA, 25 bp, Homo sapien
ctttcttgcttttatatactttttg

SEQ ID NO: 2915375 - DNA, 25 bp, Homo sapien
ccttccatgaatgcgtgctgcctta

SEQ ID NO: 2915376 - DNA, 25 bp, Homo sapien
gcccagttgacctagtgccattgat

SEQ ID NO: 2915377 - DNA, 25 bp, Homo sapien
actgcagcgtcaccactggcatgga

SEQ ID NO: 2915378 - DNA, 25 bp, Homo sapien
ggcgggcatccagataacatttttg

SEQ ID NO: 2915379 - DNA, 25 bp, Homo sapien
tgacgttgaggatcatgccacacat

SEQ ID NO: 2915380 - DNA, 25 bp, Homo sapien
cagttccaggcacattcggtatgat

SEQ ID NO: 2915381 - DNA, 25 bp, Homo sapien
cctctgcagccgcaatgacgggagg

SEQ ID NO: 2915382 - DNA, 25 bp, Homo sapien
tgcgcgggccgtgttccggtaggtg

SEQ ID NO: 2915383 - DNA, 25 bp, Homo sapien
agcgcttgggtcgcgcctgggctgg

SEQ ID NO: 2915384 - DNA, 25 bp, Homo sapien
tgcgctctctgattgggcgcctccg

SEQ ID NO: 2915385 - DNA, 25 bp, Homo sapien
ccgcagccaatagcgcgggtgcgtt

SEQ ID NO: 2915386 - DNA, 25 bp, Homo sapien
tggcggcccatgcttggctgcgctc

SEQ ID NO: 2915387 - DNA, 25 bp, Homo sapien
cagagtgcaccttcctgagctcgag

SEQ ID NO: 2915388 - DNA, 25 bp, Homo sapien
caggcctcgctgaggacaaaacagc

SEQ ID NO: 2915389 - DNA, 25 bp, Homo sapien
cctggcaggcctcgctgaggacaaa

SEQ ID NO: 2915390 - DNA, 25 bp, Homo sapien
ggcaggcctcgctgaggacaaaaca

SEQ ID NO: 2915391 - DNA, 25 bp, Homo sapien
tggcaggcctcgctgaggacaaaac

SEQ ID NO: 2915392 - DNA, 25 bp, Homo sapien
ttgctggctggtcagctaagtctgg

SEQ ID NO: 2915393 - DNA, 25 bp, Homo sapien
gctggctggtcagctaagtctggca

SEQ ID NO: 2915394 - DNA, 25 bp, Homo sapien
tgctggctggtcagctaagtctggc

SEQ ID NO: 2915395 - DNA, 25 bp, Homo sapien
ctggctggtcagctaagtctggcaa

SEQ ID NO: 2915396 - DNA, 25 bp, Homo sapien
aggcaggtgctggctcaggctgggc

SEQ ID NO: 2915397 - DNA, 25 bp, Homo sapien
ggtcataaaggcaggtgctggctca

SEQ ID NO: 2915398 - DNA, 25 bp, Homo sapien
aggtgctggctcaggctgggcttgg

SEQ ID NO: 2915399 - DNA, 25 bp, Homo sapien
gcaggtgctggctcaggctgggctt

SEQ ID NO: 2915400 - DNA, 25 bp, Homo sapien
cctgggagcctttgctcagtccctt

SEQ ID NO: 2915401 - DNA, 25 bp, Homo sapien
cttcccctgggagcctttgctcagt

SEQ ID NO: 2915402 - DNA, 25 bp, Homo sapien
tgggagcctttgctcagtcccttga

SEQ ID NO: 2915403 - DNA, 25 bp, Homo sapien
gagcctttgctcagtcccttgaaca

SEQ ID NO: 2915404 - DNA, 25 bp, Homo sapien
tgagcttatctcgacaccctggacc

SEQ ID NO: 2915405 - DNA, 25 bp, Homo sapien
gcttttcatccctgagcttatctcg

SEQ ID NO: 2915406 - DNA, 25 bp, Homo sapien
tgagtgggaagagcgccacccaatc

SEQ ID NO: 2915407 - DNA, 25 bp, Homo sapien
tgggaagagcgccacccaatccatc

SEQ ID NO: 2915408 - DNA, 25 bp, Homo sapien
cctgggaggggcagttgggctggct

SEQ ID NO: 2915409 - DNA, 25 bp, Homo sapien
gggaggggcagttgggctggctggg

SEQ ID NO: 2915410 - DNA, 25 bp, Homo sapien
ctgagccagcctggctgggccctgg

SEQ ID NO: 2915411 - DNA, 25 bp, Homo sapien
ggggcagttgggctggctggggcag

SEQ ID NO: 2915412 - DNA, 25 bp, Homo sapien
ggtgggtggaggggacagtgggcag

SEQ ID NO: 2915413 - DNA, 25 bp, Homo sapien
ttggtgggtggaggggacagtgggc

SEQ ID NO: 2915414 - DNA, 25 bp, Homo sapien
tggtgggtggaggggacagtgggca

SEQ ID NO: 2915415 - DNA, 25 bp, Homo sapien
cttggtgggtggaggggacagtggg

SEQ ID NO: 2915416 - DNA, 25 bp, Homo sapien
gcagcctcttctgcgtctccaggat

SEQ ID NO: 2915417 - DNA, 25 bp, Homo sapien
cgctccacctggtcggcgctggctt

SEQ ID NO: 2915418 - DNA, 25 bp, Homo sapien
catgtgggagatgagcagggtcagc

SEQ ID NO: 2915419 - DNA, 25 bp, Homo sapien
ctggcttgcatgtgggagatgagca

SEQ ID NO: 2915420 - DNA, 25 bp, Homo sapien
ctcagcctgcgggtgcttgagccgc

SEQ ID NO: 2915421 - DNA, 25 bp, Homo sapien
ctcctcagcctgcgggtgcttgagc

SEQ ID NO: 2915422 - DNA, 25 bp, Homo sapien
tccaggaagaggtccttgagcagca

SEQ ID NO: 2915423 - DNA, 25 bp, Homo sapien
tcagcctgcgggtgcttgagccgcc

SEQ ID NO: 2915424 - DNA, 25 bp, Homo sapien
tgggtcacccgctcgtgcagctgct

SEQ ID NO: 2915425 - DNA, 25 bp, Homo sapien
catcttctcgtacagggcacagtac

SEQ ID NO: 2915426 - DNA, 25 bp, Homo sapien
tctcgtacagggcacagtactccgc

SEQ ID NO: 2915427 - DNA, 25 bp, Homo sapien
gtacagggcacagtactccgcacac

SEQ ID NO: 2915428 - DNA, 25 bp, Homo sapien
cgtgtgcccagtcgaccttggatcc

SEQ ID NO: 2915429 - DNA, 25 bp, Homo sapien
cacgtgtgcccagtcgaccttggat

SEQ ID NO: 2915430 - DNA, 25 bp, Homo sapien
gcacgtgtgcccagtcgaccttgga

SEQ ID NO: 2915431 - DNA, 25 bp, Homo sapien
tgtgcccagtcgaccttggatccca

SEQ ID NO: 2915432 - DNA, 25 bp, Homo sapien
tctgatcacactggggtgtgacttt

SEQ ID NO: 2915433 - DNA, 25 bp, Homo sapien
cacactggggtgtgactttgagctc

SEQ ID NO: 2915434 - DNA, 25 bp, Homo sapien
ctctgatcacactggggtgtgactt

SEQ ID NO: 2915435 - DNA, 25 bp, Homo sapien
gatcacactggggtgtgactttgag

SEQ ID NO: 2915436 - DNA, 25 bp, Homo sapien
gagctccgcgatctgttcctccagc

SEQ ID NO: 2915437 - DNA, 25 bp, Homo sapien
agctccgcgatctgttcctccagct

SEQ ID NO: 2915438 - DNA, 25 bp, Homo sapien
ctgctctccttggtcgttgatctcc

SEQ ID NO: 2915439 - DNA, 25 bp, Homo sapien
gctgctctccttggtcgttgatctc

SEQ ID NO: 2915440 - DNA, 25 bp, Homo sapien
tagctccggctctgactggaaaaac

SEQ ID NO: 2915441 - DNA, 25 bp, Homo sapien
cggatgtaacatcttcccggctcac

SEQ ID NO: 2915442 - DNA, 25 bp, Homo sapien
agggcccagccgatctagctccggc

SEQ ID NO: 2915443 - DNA, 25 bp, Homo sapien
ggctggccccggatgtaacatcttc

SEQ ID NO: 2915444 - DNA, 25 bp, Homo sapien
cagtaggtctcggtattggctccgg

SEQ ID NO: 2915445 - DNA, 25 bp, Homo sapien
ctcggtattggctccggatggtggc

SEQ ID NO: 2915446 - DNA, 25 bp, Homo sapien
tctcggtattggctccggatggtgg

SEQ ID NO: 2915447 - DNA, 25 bp, Homo sapien
taggtctcggtattggctccggatg

SEQ ID NO: 2915448 - DNA, 25 bp, Homo sapien
ctgcagtgcgtgtacaggctgccca

SEQ ID NO: 2915449 - DNA, 25 bp, Homo sapien
tgcagtgcgtgtacaggctgcccag

SEQ ID NO: 2915450 - DNA, 25 bp, Homo sapien
tctgcccgcgccacgacgccgccct

SEQ ID NO: 2915451 - DNA, 25 bp, Homo sapien
cccaggctctgcccgcgccacgacg

SEQ ID NO: 2915452 - DNA, 25 bp, Homo sapien
acgcccgcagggtcggccatgaggt

SEQ ID NO: 2915453 - DNA, 25 bp, Homo sapien
ccatgaggtcgctccagtcctgctg

SEQ ID NO: 2915454 - DNA, 25 bp, Homo sapien
cagggtcggccatgaggtcgctcca

SEQ ID NO: 2915455 - DNA, 25 bp, Homo sapien
tcggccatgaggtcgctccagtcct

SEQ ID NO: 2915456 - DNA, 25 bp, Homo sapien
tggatgggccccaccgcggggtgcc

SEQ ID NO: 2915457 - DNA, 25 bp, Homo sapien
cgcggggtgccgcagctccaccatg

SEQ ID NO: 2915458 - DNA, 25 bp, Homo sapien
gggtgccgcagctccaccatgcgct

SEQ ID NO: 2915459 - DNA, 25 bp, Homo sapien
ctggatgggccccaccgcggggtgc

SEQ ID NO: 2915460 - DNA, 25 bp, Homo sapien
tctcctggcagatgcacaggttcag

SEQ ID NO: 2915461 - DNA, 25 bp, Homo sapien
ccggctgtagtcctccacgtgctgg

SEQ ID NO: 2915462 - DNA, 25 bp, Homo sapien
ggtctcctggcagatgcacaggttc

SEQ ID NO: 2915463 - DNA, 25 bp, Homo sapien
tggcagatgcacaggttcaggaagt

SEQ ID NO: 2915464 - DNA, 25 bp, Homo sapien
cctgttgagaatgtgcccatgcctt

SEQ ID NO: 2915465 - DNA, 25 bp, Homo sapien
ttccttccctctgggaccgagtggc

SEQ ID NO: 2915466 - DNA, 25 bp, Homo sapien
tgggaacggcttcaccctgttgaga

SEQ ID NO: 2915467 - DNA, 25 bp, Homo sapien
aatgcagtggaccattctcggccca

SEQ ID NO: 2915468 - DNA, 25 bp, Homo sapien
tgcttcatgccctcattaaggaggc

SEQ ID NO: 2915469 - DNA, 25 bp, Homo sapien
gcttcatgccctcattaaggaggca

SEQ ID NO: 2915470 - DNA, 25 bp, Homo sapien
tgccctcattaaggaggcacagaag

SEQ ID NO: 2915471 - DNA, 25 bp, Homo sapien
tcatgccctcattaaggaggcacag

SEQ ID NO: 2915472 - DNA, 25 bp, Homo sapien
ctgtagacaaagatgacgcagaggt

SEQ ID NO: 2915473 - DNA, 25 bp, Homo sapien
tgtagacaaagatgacgcagaggtg

SEQ ID NO: 2915474 - DNA, 25 bp, Homo sapien
caaagatgacgcagaggtggcctca

SEQ ID NO: 2915475 - DNA, 25 bp, Homo sapien
agacaaagatgacgcagaggtggcc

SEQ ID NO: 2915476 - DNA, 25 bp, Homo sapien
tgtgtccaccgttataagaaggcag

SEQ ID NO: 2915477 - DNA, 25 bp, Homo sapien
ttgtgtccaccgttataagaaggca

SEQ ID NO: 2915478 - DNA, 25 bp, Homo sapien
ttcacccacagccggcaagcaactg

SEQ ID NO: 2915479 - DNA, 25 bp, Homo sapien
atggggctacttcacccacagccgg

SEQ ID NO: 2915480 - DNA, 25 bp, Homo sapien
acttcacccacagccggcaagcaac

SEQ ID NO: 2915481 - DNA, 25 bp, Homo sapien
acccacagccggcaagcaactgcac

SEQ ID NO: 2915482 - DNA, 25 bp, Homo sapien
tccccttcatgcagagtcaatgagg

SEQ ID NO: 2915483 - DNA, 25 bp, Homo sapien
ctgctacccttactccaccagaaat

SEQ ID NO: 2915484 - DNA, 25 bp, Homo sapien
cccttcatgcagagtcaatgaggag

SEQ ID NO: 2915485 - DNA, 25 bp, Homo sapien
tgctacccttactccaccagaaatc

SEQ ID NO: 2915486 - DNA, 25 bp, Homo sapien
ttgcctgcctgttaagaagagcccg

SEQ ID NO: 2915487 - DNA, 25 bp, Homo sapien
cagaagcccagtagtggacagacct

SEQ ID NO: 2915488 - DNA, 25 bp, Homo sapien
catagcgggcactggaagttcctct

SEQ ID NO: 2915489 - DNA, 25 bp, Homo sapien
gaagagcccgtaccagggagcaaat

SEQ ID NO: 2915490 - DNA, 25 bp, Homo sapien
tttacatatcatttgcataaactgg

SEQ ID NO: 2915491 - DNA, 25 bp, Homo sapien
catttgcataaactggtaatttaac

SEQ ID NO: 2915492 - DNA, 25 bp, Homo sapien
gaagatttggtactgtaccctttga

SEQ ID NO: 2915493 - DNA, 25 bp, Homo sapien
gatttggtactgtaccctttgaagc

SEQ ID NO: 2915494 - DNA, 25 bp, Homo sapien
ggatgtggatgtgaactgcggtcag

SEQ ID NO: 2915495 - DNA, 25 bp, Homo sapien
tgtgaactgcggtcaggcaccagag

SEQ ID NO: 2915496 - DNA, 25 bp, Homo sapien
tggatgtgaactgcggtcaggcacc

SEQ ID NO: 2915497 - DNA, 25 bp, Homo sapien
tgtggatgtgaactgcggtcaggca

SEQ ID NO: 2915498 - DNA, 25 bp, Homo sapien
ctgatacttcataattatgtcctcc

SEQ ID NO: 2915499 - DNA, 25 bp, Homo sapien
acttcataattatgtcctcccgctc

SEQ ID NO: 2915500 - DNA, 25 bp, Homo sapien
gatacttcataattatgtcctcccg

SEQ ID NO: 2915501 - DNA, 25 bp, Homo sapien
cttctgatacttcataattatgtcc

SEQ ID NO: 2915502 - DNA, 25 bp, Homo sapien
agcgatcaacgctgctgtagattcc

SEQ ID NO: 2915503 - DNA, 25 bp, Homo sapien
tcccaaagcgatcaacgctgctgta

SEQ ID NO: 2915504 - DNA, 25 bp, Homo sapien
gcagaatcccaaagcgatcaacgct

SEQ ID NO: 2915505 - DNA, 25 bp, Homo sapien
gtagattccaacaggttcaggcccc

SEQ ID NO: 2915506 - DNA, 25 bp, Homo sapien
ccccatggggacagtgagggctgta

SEQ ID NO: 2915507 - DNA, 25 bp, Homo sapien
cccccttccccatggggacagtgag

SEQ ID NO: 2915508 - DNA, 25 bp, Homo sapien
catggggacagtgagggctgtagtt

SEQ ID NO: 2915509 - DNA, 25 bp, Homo sapien
tcccccttccccatggggacagtga

SEQ ID NO: 2915510 - DNA, 25 bp, Homo sapien
ctctggtctcaccatgagatgccca

SEQ ID NO: 2915511 - DNA, 25 bp, Homo sapien
gcctctctggtctcaccatgagatg

SEQ ID NO: 2915512 - DNA, 25 bp, Homo sapien
ctctctggtctcaccatgagatgcc

SEQ ID NO: 2915513 - DNA, 25 bp, Homo sapien
gctgcctctctggtctcaccatgag

SEQ ID NO: 2915514 - DNA, 25 bp, Homo sapien
tcttgcaggttctgacctcccagca

SEQ ID NO: 2915515 - DNA, 25 bp, Homo sapien
gcctctccctgcatctgagccacac

SEQ ID NO: 2915516 - DNA, 25 bp, Homo sapien
ttgacagccccaaggctcttgcagg

SEQ ID NO: 2915517 - DNA, 25 bp, Homo sapien
gcccggtgtactctgggtgcaccag

SEQ ID NO: 2915518 - DNA, 25 bp, Homo sapien
ctgtaaggcaactcaggcagagctg

SEQ ID NO: 2915519 - DNA, 25 bp, Homo sapien
gcacagggcctggagccacccaagc

SEQ ID NO: 2915520 - DNA, 25 bp, Homo sapien
gagctgaggacctgcacagggcctg

SEQ ID NO: 2915521 - DNA, 25 bp, Homo sapien
aggacctgcacagggcctggagcca

SEQ ID NO: 2915522 - DNA, 25 bp, Homo sapien
agtcacaggaggcagctccgtctca

SEQ ID NO: 2915523 - DNA, 25 bp, Homo sapien
tttgcctcccgtgcagtcacaggag

SEQ ID NO: 2915524 - DNA, 25 bp, Homo sapien
tgcagtcacaggaggcagctccgtc

SEQ ID NO: 2915525 - DNA, 25 bp, Homo sapien
ctttgcctcccgtgcagtcacagga

SEQ ID NO: 2915526 - DNA, 25 bp, Homo sapien
tgaggaatgttggagttagcggagc

SEQ ID NO: 2915527 - DNA, 25 bp, Homo sapien
ttcccagagccgcccgtggatgctg

SEQ ID NO: 2915528 - DNA, 25 bp, Homo sapien
agagccgcccgtggatgctgggtct

SEQ ID NO: 2915529 - DNA, 25 bp, Homo sapien
caaatgaggaatgttggagttagcg

SEQ ID NO: 2915530 - DNA, 25 bp, Homo sapien
ttatatgtctcgcatttgcccagca

SEQ ID NO: 2915531 - DNA, 25 bp, Homo sapien
tatgtctcgcatttgcccagcattt

SEQ ID NO: 2915532 - DNA, 25 bp, Homo sapien
gtttttatatgtctcgcatttgccc

SEQ ID NO: 2915533 - DNA, 25 bp, Homo sapien
gctgtttttatatgtctcgcatttg

SEQ ID NO: 2915534 - DNA, 25 bp, Homo sapien
ggaatgcccttatagatgcgatcta

SEQ ID NO: 2915535 - DNA, 25 bp, Homo sapien
gggaatgcccttatagatgcgatct

SEQ ID NO: 2915536 - DNA, 25 bp, Homo sapien
tgcccttatagatgcgatctatgag

SEQ ID NO: 2915537 - DNA, 25 bp, Homo sapien
aatgcccttatagatgcgatctatg

SEQ ID NO: 2915538 - DNA, 25 bp, Homo sapien
tcctgaatgttcaggaggactgaca

SEQ ID NO: 2915539 - DNA, 25 bp, Homo sapien
gatttcctgaatgttcaggaggact

SEQ ID NO: 2915540 - DNA, 25 bp, Homo sapien
tttcctgaatgttcaggaggactga

SEQ ID NO: 2915541 - DNA, 25 bp, Homo sapien
tgatttcctgaatgttcaggaggac

SEQ ID NO: 2915542 - DNA, 25 bp, Homo sapien
ggcagggccaagaggaggaagcagc

SEQ ID NO: 2915543 - DNA, 25 bp, Homo sapien
tagggcagggccaagaggaggaagc

SEQ ID NO: 2915544 - DNA, 25 bp, Homo sapien
ctgtagggcagggccaagaggagga

SEQ ID NO: 2915545 - DNA, 25 bp, Homo sapien
gggcagggccaagaggaggaagcag

SEQ ID NO: 2915546 - DNA, 25 bp, Homo sapien
ctgctcacgtccagtttgatctggt

SEQ ID NO: 2915547 - DNA, 25 bp, Homo sapien
cacaaggatgtagaatagttcccgc

SEQ ID NO: 2915548 - DNA, 25 bp, Homo sapien
atatgccacaaggatgtagaatagt

SEQ ID NO: 2915549 - DNA, 25 bp, Homo sapien
gggttatactctgaatatgccacaa

SEQ ID NO: 2915550 - DNA, 25 bp, Homo sapien
ctctgaatatgccacaaggatgtag

SEQ ID NO: 2915551 - DNA, 25 bp, Homo sapien
aaaggagaaacaaggtggcaatgtg

SEQ ID NO: 2915552 - DNA, 25 bp, Homo sapien
aaacaaggtggcaatgtggctcagg

SEQ ID NO: 2915553 - DNA, 25 bp, Homo sapien
aggagaaacaaggtggcaatgtggc

SEQ ID NO: 2915554 - DNA, 25 bp, Homo sapien
gagaaacaaggtggcaatgtggctc

SEQ ID NO: 2915555 - DNA, 25 bp, Homo sapien
tgtccccagatctggctgcatgagg

SEQ ID NO: 2915556 - DNA, 25 bp, Homo sapien
ccagatctggctgcatgaggcccca

SEQ ID NO: 2915557 - DNA, 25 bp, Homo sapien
agatctggctgcatgaggccccacg

SEQ ID NO: 2915558 - DNA, 25 bp, Homo sapien
ctggccacggtggctgtccccagat

SEQ ID NO: 2915559 - DNA, 25 bp, Homo sapien
ctgggcttggttagcccattcgtgg

SEQ ID NO: 2915560 - DNA, 25 bp, Homo sapien
gcttggttagcccattcgtgggcac

SEQ ID NO: 2915561 - DNA, 25 bp, Homo sapien
cattcgtgggcaccaagggcagcag

SEQ ID NO: 2915562 - DNA, 25 bp, Homo sapien
tagcccattcgtgggcaccaagggc

SEQ ID NO: 2915563 - DNA, 25 bp, Homo sapien
gtcttgggttgtgacttgggtacca

SEQ ID NO: 2915564 - DNA, 25 bp, Homo sapien
tgggttgtgacttgggtaccacatg

SEQ ID NO: 2915565 - DNA, 25 bp, Homo sapien
gttgtgacttgggtaccacatgctc

SEQ ID NO: 2915566 - DNA, 25 bp, Homo sapien
tgccacatggtcttgggttgtgact

SEQ ID NO: 2915567 - DNA, 25 bp, Homo sapien
aggcagcctaatgaggaacactgtc

SEQ ID NO: 2915568 - DNA, 25 bp, Homo sapien
tgaggaacactgtccgcatagacct

SEQ ID NO: 2915569 - DNA, 25 bp, Homo sapien
ttgaatcaacatccggagaaggcag

SEQ ID NO: 2915570 - DNA, 25 bp, Homo sapien
cccttgaatcaacatccggagaagg

SEQ ID NO: 2915571 - DNA, 25 bp, Homo sapien
gcttctgatcggcatcaacacctgt

SEQ ID NO: 2915572 - DNA, 25 bp, Homo sapien
aatgcttctgatcggcatcaacacc

SEQ ID NO: 2915573 - DNA, 25 bp, Homo sapien
gcaatgcttctgatcggcatcaaca

SEQ ID NO: 2915574 - DNA, 25 bp, Homo sapien
aaaagcaatgcttctgatcggcatc

SEQ ID NO: 2915575 - DNA, 25 bp, Homo sapien
gaagaactggttccgaaaacatgcc

SEQ ID NO: 2915576 - DNA, 25 bp, Homo sapien
agaactggttccgaaaacatgccaa

SEQ ID NO: 2915577 - DNA, 25 bp, Homo sapien
atggaagaactggttccgaaaacat

SEQ ID NO: 2915578 - DNA, 25 bp, Homo sapien
actggttccgaaaacatgccaaaag

SEQ ID NO: 2915579 - DNA, 25 bp, Homo sapien
gaggggacatggcactggagcccac

SEQ ID NO: 2915580 - DNA, 25 bp, Homo sapien
ggtgacatgggaggggacatggcac

SEQ ID NO: 2915581 - DNA, 25 bp, Homo sapien
ctattgactgccccagagggtgaca

SEQ ID NO: 2915582 - DNA, 25 bp, Homo sapien
ttgactgccccagagggtgacatgg

SEQ ID NO: 2915583 - DNA, 25 bp, Homo sapien
ttctgtggcacggtgtgaaacttca

SEQ ID NO: 2915584 - DNA, 25 bp, Homo sapien
tggcacggtgtgaaacttcatctgc

SEQ ID NO: 2915585 - DNA, 25 bp, Homo sapien
tgccttttctgtggcacggtgtgaa

SEQ ID NO: 2915586 - DNA, 25 bp, Homo sapien
ccttttctgtggcacggtgtgaaac

SEQ ID NO: 2915587 - DNA, 25 bp, Homo sapien
ttctgatcattgatcagatggttac

SEQ ID NO: 2915588 - DNA, 25 bp, Homo sapien
tgatcattgatcagatggttacaga

SEQ ID NO: 2915589 - DNA, 25 bp, Homo sapien
tcattgatcagatggttacagatgc

SEQ ID NO: 2915590 - DNA, 25 bp, Homo sapien
cattgatcagatggttacagatgca

SEQ ID NO: 2915591 - DNA, 25 bp, Homo sapien
tagaggtgtgtacctttggcattgg

SEQ ID NO: 2915592 - DNA, 25 bp, Homo sapien
gaggtgtgtacctttggcattggac

SEQ ID NO: 2915593 - DNA, 25 bp, Homo sapien
aaaatagaggtgtgtacctttggca

SEQ ID NO: 2915594 - DNA, 25 bp, Homo sapien
ggtgtgtacctttggcattggacat

SEQ ID NO: 2915595 - DNA, 25 bp, Homo sapien
gaaggaaaagctgccgccacaggaa

SEQ ID NO: 2915596 - DNA, 25 bp, Homo sapien
gactggaagccagcgggtggagaga

SEQ ID NO: 2915597 - DNA, 25 bp, Homo sapien
aagaagacagtagggagacggcaga

SEQ ID NO: 2915598 - DNA, 25 bp, Homo sapien
acaggaacccgtgctgcgaggaatg

SEQ ID NO: 2915599 - DNA, 25 bp, Homo sapien
tgggaagaagattgcgactgacaga

SEQ ID NO: 2915600 - DNA, 25 bp, Homo sapien
gaagattgcgactgacagacgctgc

SEQ ID NO: 2915601 - DNA, 25 bp, Homo sapien
actgacagacgctgctgcgagacgg

SEQ ID NO: 2915602 - DNA, 25 bp, Homo sapien
gctgcgagacggtgggaggacatgg

SEQ ID NO: 2915603 - DNA, 25 bp, Homo sapien
gaagaagatggcggagaataagagg

SEQ ID NO: 2915604 - DNA, 25 bp, Homo sapien
acaggcgggcgcacgcgtggagcgc

SEQ ID NO: 2915605 - DNA, 25 bp, Homo sapien
caagaagacgatcgggggcgaagac

SEQ ID NO: 2915606 - DNA, 25 bp, Homo sapien
aagggggtgggcaagaagacgatcg

SEQ ID NO: 2915607 - DNA, 25 bp, Homo sapien
acgcgtggagcgcttctaggtgaaa

SEQ ID NO: 2915608 - DNA, 25 bp, Homo sapien
atggccctggcagcgactctcctgg

SEQ ID NO: 2915609 - DNA, 25 bp, Homo sapien
cagccgtgatggccctggcagcgac

SEQ ID NO: 2915610 - DNA, 25 bp, Homo sapien
tgttcagttctgaggtagcggcggg

SEQ ID NO: 2915611 - DNA, 25 bp, Homo sapien
cgtgatggccctggcagcgactctc

SEQ ID NO: 2915612 - DNA, 25 bp, Homo sapien
tctccccgcagtcttccgggcccca

SEQ ID NO: 2915613 - DNA, 25 bp, Homo sapien
ccccgcagtcttccgggccccactg

SEQ ID NO: 2915614 - DNA, 25 bp, Homo sapien
cccgcagtcttccgggccccactgc

SEQ ID NO: 2915615 - DNA, 25 bp, Homo sapien
tctcctcaccgttttcctccactgt

SEQ ID NO: 2915616 - DNA, 25 bp, Homo sapien
ttctcctcaccgttttcctccactg

SEQ ID NO: 2915617 - DNA, 25 bp, Homo sapien
agaaaagaatataccaactggaaga

SEQ ID NO: 2915618 - DNA, 25 bp, Homo sapien
aactgaggaatgttcagtgacacaa

SEQ ID NO: 2915619 - DNA, 25 bp, Homo sapien
taactttaactgaggaatgttcagt

SEQ ID NO: 2915620 - DNA, 25 bp, Homo sapien
ccaactggaagagcaaaagttgaaa

SEQ ID NO: 2915621 - DNA, 25 bp, Homo sapien
caacatgggaaacatgcgtgtattt

SEQ ID NO: 2915622 - DNA, 25 bp, Homo sapien
tacagcccaccctaatgcattgtga

SEQ ID NO: 2915623 - DNA, 25 bp, Homo sapien
tggacatgactttctgcgggacact

SEQ ID NO: 2915624 - DNA, 25 bp, Homo sapien
gagttctgcctctgttataaagccc

SEQ ID NO: 2915625 - DNA, 25 bp, Homo sapien
ccctgtaggtctctgtatgttccca

SEQ ID NO: 2915626 - DNA, 25 bp, Homo sapien
ggaggtgtgagtatgattgatttct

SEQ ID NO: 2915627 - DNA, 25 bp, Homo sapien
tgactgtaggcagcgtaactccaga

SEQ ID NO: 2915628 - DNA, 25 bp, Homo sapien
ttttttcaccattcacgaggccaga

SEQ ID NO: 2915629 - DNA, 25 bp, Homo sapien
gtttgtccagtgcatccagcacgtc

SEQ ID NO: 2915630 - DNA, 25 bp, Homo sapien
tgccagtgtcagctactggaatgag

SEQ ID NO: 2915631 - DNA, 25 bp, Homo sapien
ttgccagtgtcagctactggaatga

SEQ ID NO: 2915632 - DNA, 25 bp, Homo sapien
ggtgtttgtccagtgcatccagcac

SEQ ID NO: 2915633 - DNA, 25 bp, Homo sapien
aagtactaggcagtcataaaaaaga

SEQ ID NO: 2915634 - DNA, 25 bp, Homo sapien
ggtgcatatacaccacaaagtacta

SEQ ID NO: 2915635 - DNA, 25 bp, Homo sapien
cagcaaggtcatggaaccaaggtaa

SEQ ID NO: 2915636 - DNA, 25 bp, Homo sapien
aggtaagtatccaccaacggttcat

SEQ ID NO: 2915637 - DNA, 25 bp, Homo sapien
tcttttccgggccatacctcctgcc

SEQ ID NO: 2915638 - DNA, 25 bp, Homo sapien
gcggtggtaggtgtcaattagttca

SEQ ID NO: 2915639 - DNA, 25 bp, Homo sapien
tccgggccatacctcctgccttctc

SEQ ID NO: 2915640 - DNA, 25 bp, Homo sapien
tttccgggccatacctcctgccttc

SEQ ID NO: 2915641 - DNA, 25 bp, Homo sapien
catgggtaaagacggatgccaggag

SEQ ID NO: 2915642 - DNA, 25 bp, Homo sapien
tcacagccaccacgatcggggagag

SEQ ID NO: 2915643 - DNA, 25 bp, Homo sapien
caacatccttcttgcagcctttttg

SEQ ID NO: 2915644 - DNA, 25 bp, Homo sapien
ggaatttctgggacccagccaaggc

SEQ ID NO: 2915645 - DNA, 25 bp, Homo sapien
aagtcatcggcagccaggtgggcat

SEQ ID NO: 2915646 - DNA, 25 bp, Homo sapien
ttggtgcagaagtcatcggcagcca

SEQ ID NO: 2915647 - DNA, 25 bp, Homo sapien
tgcagaagtcatcggcagccaggtg

SEQ ID NO: 2915648 - DNA, 25 bp, Homo sapien
gtgcagaagtcatcggcagccaggt

SEQ ID NO: 2915649 - DNA, 25 bp, Homo sapien
gctccaggcagggtcagcttgtcca

SEQ ID NO: 2915650 - DNA, 25 bp, Homo sapien
ttggctccaggcagggtcagcttgt

SEQ ID NO: 2915651 - DNA, 25 bp, Homo sapien
caggcagggtcagcttgtccagccc

SEQ ID NO: 2915652 - DNA, 25 bp, Homo sapien
ggcagggtcagcttgtccagcccct

SEQ ID NO: 2915653 - DNA, 25 bp, Homo sapien
tcttcttcaggtagaccaggtcctc

SEQ ID NO: 2915654 - DNA, 25 bp, Homo sapien
aggtagaccaggtcctccttgaggt

SEQ ID NO: 2915655 - DNA, 25 bp, Homo sapien
cttcaggtagaccaggtcctccttg

SEQ ID NO: 2915656 - DNA, 25 bp, Homo sapien
tcaggtagaccaggtcctccttgag

SEQ ID NO: 2915657 - DNA, 25 bp, Homo sapien
catcttcacactgacatccttgtcc

SEQ ID NO: 2915658 - DNA, 25 bp, Homo sapien
cacgcatctcattcaggatgcagct

SEQ ID NO: 2915659 - DNA, 25 bp, Homo sapien
tgggcatccttgcagctcttctcca

SEQ ID NO: 2915660 - DNA, 25 bp, Homo sapien
acgctgaagaaccagccctgggcat

SEQ ID NO: 2915661 - DNA, 25 bp, Homo sapien
cagcctgtgaatctgccggtgttcc

SEQ ID NO: 2915662 - DNA, 25 bp, Homo sapien
gcctgtgaatctgccggtgttccaa

SEQ ID NO: 2915663 - DNA, 25 bp, Homo sapien
ctgcaccagcacacggcgtatgtgc

SEQ ID NO: 2915664 - DNA, 25 bp, Homo sapien
gcacacggcgtatgtgcccacacgt

SEQ ID NO: 2915665 - DNA, 25 bp, Homo sapien
tgcacacaaagactctctgcaccca

SEQ ID NO: 2915666 - DNA, 25 bp, Homo sapien
ttcttactcctaccgaactacagca

SEQ ID NO: 2915667 - DNA, 25 bp, Homo sapien
atttcttactcctaccgaactacag

SEQ ID NO: 2915668 - DNA, 25 bp, Homo sapien
ccaagggtatgtgtatgtactcaaa

SEQ ID NO: 2915669 - DNA, 25 bp, Homo sapien
tggtggccaccttgcagttcagccc

SEQ ID NO: 2915670 - DNA, 25 bp, Homo sapien
gagatgtagagctccacatctccat

SEQ ID NO: 2915671 - DNA, 25 bp, Homo sapien
gcacagagatgtagagctccacatc

SEQ ID NO: 2915672 - DNA, 25 bp, Homo sapien
agctgggacggctcaggttctgcac

SEQ ID NO: 2915673 - DNA, 25 bp, Homo sapien
caagagataggtggtgcgatgagat

SEQ ID NO: 2915674 - DNA, 25 bp, Homo sapien
ggccaagagataggtggtgcgatga

SEQ ID NO: 2915675 - DNA, 25 bp, Homo sapien
gagataggtggtgcgatgagatgga

SEQ ID NO: 2915676 - DNA, 25 bp, Homo sapien
tgtgggccaagagataggtggtgcg

SEQ ID NO: 2915677 - DNA, 25 bp, Homo sapien
ggtcctggtgctctgcatcacagca

SEQ ID NO: 2915678 - DNA, 25 bp, Homo sapien
gtcctggtgctctgcatcacagcag

SEQ ID NO: 2915679 - DNA, 25 bp, Homo sapien
gtgatctagtccagacgctttaact

SEQ ID NO: 2915680 - DNA, 25 bp, Homo sapien
tgatctagtccagacgctttaactt

SEQ ID NO: 2915681 - DNA, 25 bp, Homo sapien
ggaatgcacagaaattagcacaggc

SEQ ID NO: 2915682 - DNA, 25 bp, Homo sapien
gaaaaatcacagttgggaatgcaca

SEQ ID NO: 2915683 - DNA, 25 bp, Homo sapien
acaggcccaagaatgaaagggcagg

SEQ ID NO: 2915684 - DNA, 25 bp, Homo sapien
cagaaattagcacaggcccaagaat

SEQ ID NO: 2915685 - DNA, 25 bp, Homo sapien
gaggagcacccatcgacccagggat

SEQ ID NO: 2915686 - DNA, 25 bp, Homo sapien
ggagcacccatcgacccagggatgc

SEQ ID NO: 2915687 - DNA, 25 bp, Homo sapien
cagggagaggagcacccatcgaccc

SEQ ID NO: 2915688 - DNA, 25 bp, Homo sapien
gagaggagcacccatcgacccaggg

SEQ ID NO: 2915689 - DNA, 25 bp, Homo sapien
ggtgggctgcgaggccagggacaag

SEQ ID NO: 2915690 - DNA, 25 bp, Homo sapien
agcctctccgccgccttggggtcca

SEQ ID NO: 2915691 - DNA, 25 bp, Homo sapien
ctcagcctctccgccgccttggggt

SEQ ID NO: 2915692 - DNA, 25 bp, Homo sapien
tccccccacctgcccgagtctgtgg

SEQ ID NO: 2915693 - DNA, 25 bp, Homo sapien
ccacctgcccgagtctgtggtcccc

SEQ ID NO: 2915694 - DNA, 25 bp, Homo sapien
agaagaccacctctccaacctggac

SEQ ID NO: 2915695 - DNA, 25 bp, Homo sapien
tctccaacctggacttcctccacga

SEQ ID NO: 2915696 - DNA, 25 bp, Homo sapien
aacctggacttcctccacgatggca

SEQ ID NO: 2915697 - DNA, 25 bp, Homo sapien
tccaacctggacttcctccacgatg

SEQ ID NO: 2915698 - DNA, 25 bp, Homo sapien
cacaggcagaaaggggcctcagtgg

SEQ ID NO: 2915699 - DNA, 25 bp, Homo sapien
agacaacaggtcatggaccagtgcc

SEQ ID NO: 2915700 - DNA, 25 bp, Homo sapien
cagctgatggctgtgccatgaccct

SEQ ID NO: 2915701 - DNA, 25 bp, Homo sapien
tcatggaccagtgcccagacggaca

SEQ ID NO: 2915702 - DNA, 25 bp, Homo sapien
caacaggtcatggaccagtgcccag

SEQ ID NO: 2915703 - DNA, 25 bp, Homo sapien
gaacttggagcaaagctttaatagc

SEQ ID NO: 2915704 - DNA, 25 bp, Homo sapien
gctttaatagcaggcactggacaaa

SEQ ID NO: 2915705 - DNA, 25 bp, Homo sapien
ttaatagcaggcactggacaaaccc

SEQ ID NO: 2915706 - DNA, 25 bp, Homo sapien
aagctttaatagcaggcactggaca

SEQ ID NO: 2915707 - DNA, 25 bp, Homo sapien
gcaggaggcaggcacacaggagaag

SEQ ID NO: 2915708 - DNA, 25 bp, Homo sapien
aggaggcaggcacacaggagaaggg

SEQ ID NO: 2915709 - DNA, 25 bp, Homo sapien
caggaggcaggcacacaggagaagg

SEQ ID NO: 2915710 - DNA, 25 bp, Homo sapien
ggtggcggcggcaggaggcaggcac

SEQ ID NO: 2915711 - DNA, 25 bp, Homo sapien
tcctgtagtactggctgtagtcacg

SEQ ID NO: 2915712 - DNA, 25 bp, Homo sapien
ctgtgaggatcagcggagatgggag

SEQ ID NO: 2915713 - DNA, 25 bp, Homo sapien
cagcggagatgggagagtagtcagg

SEQ ID NO: 2915714 - DNA, 25 bp, Homo sapien
gggagagtagtcaggtcatcggatg

SEQ ID NO: 2915715 - DNA, 25 bp, Homo sapien
gatcagcggagatgggagagtagtc

SEQ ID NO: 2915716 - DNA, 25 bp, Homo sapien
gcaggatgttggcattgtccacggt

SEQ ID NO: 2915717 - DNA, 25 bp, Homo sapien
tagcaggatgttggcattgtccacg

SEQ ID NO: 2915718 - DNA, 25 bp, Homo sapien
ctgtagcaggatgttggcattgtcc

SEQ ID NO: 2915719 - DNA, 25 bp, Homo sapien
caggatgttggcattgtccacggtg

SEQ ID NO: 2915720 - DNA, 25 bp, Homo sapien
cagcagcagccagatgggcattgtc

SEQ ID NO: 2915721 - DNA, 25 bp, Homo sapien
cagcagccagatgggcattgtcatt

SEQ ID NO: 2915722 - DNA, 25 bp, Homo sapien
tcagcagcagccagatgggcattgt

SEQ ID NO: 2915723 - DNA, 25 bp, Homo sapien
ttggtgcggaagtcagcagcagcca

SEQ ID NO: 2915724 - DNA, 25 bp, Homo sapien
tgcttggaattgcaggtccaggtcc

SEQ ID NO: 2915725 - DNA, 25 bp, Homo sapien
aggctgcttggaattgcaggtccag

SEQ ID NO: 2915726 - DNA, 25 bp, Homo sapien
caggctgcttggaattgcaggtcca

SEQ ID NO: 2915727 - DNA, 25 bp, Homo sapien
agcaccctgcacgggccattgatgt

SEQ ID NO: 2915728 - DNA, 25 bp, Homo sapien
tgaggttctcaatgtgcatctccgg

SEQ ID NO: 2915729 - DNA, 25 bp, Homo sapien
cacgggccattgatgtcggcctcca

SEQ ID NO: 2915730 - DNA, 25 bp, Homo sapien
gcatctccgggtcggctctggccag

SEQ ID NO: 2915731 - DNA, 25 bp, Homo sapien
tcatactgctcacgcatctcgttca

SEQ ID NO: 2915732 - DNA, 25 bp, Homo sapien
tactgctcacgcatctcgttcagga

SEQ ID NO: 2915733 - DNA, 25 bp, Homo sapien
atcttctcatactgctcacgcatct

SEQ ID NO: 2915734 - DNA, 25 bp, Homo sapien
gaagaaccaatcctcggcatccttg

SEQ ID NO: 2915735 - DNA, 25 bp, Homo sapien
aaatctcgctcttgccgctctggac

SEQ ID NO: 2915736 - DNA, 25 bp, Homo sapien
tggtgcaccggagctccgaaatctc

SEQ ID NO: 2915737 - DNA, 25 bp, Homo sapien
gctctggaccagctcactgttggta

SEQ ID NO: 2915738 - DNA, 25 bp, Homo sapien
ttggtagccacctcgcggttcagct

SEQ ID NO: 2915739 - DNA, 25 bp, Homo sapien
ctctgtctccgccaggttgccctcc

SEQ ID NO: 2915740 - DNA, 25 bp, Homo sapien
tctgtctccgccaggttgccctcca

SEQ ID NO: 2915741 - DNA, 25 bp, Homo sapien
aagatgcttatgttctttcttgtac

SEQ ID NO: 2915742 - DNA, 25 bp, Homo sapien
atgttctttcttgtactgagtcagg

SEQ ID NO: 2915743 - DNA, 25 bp, Homo sapien
cttatgttctttcttgtactgagtc

SEQ ID NO: 2915744 - DNA, 25 bp, Homo sapien
caagatgcttatgttctttcttgta

SEQ ID NO: 2915745 - DNA, 25 bp, Homo sapien
ccatcagactgggatcgccaagaca

SEQ ID NO: 2915746 - DNA, 25 bp, Homo sapien
gaggagccatgtagactccatgaaa

SEQ ID NO: 2915747 - DNA, 25 bp, Homo sapien
tagccctcatggacaggagccggct

SEQ ID NO: 2915748 - DNA, 25 bp, Homo sapien
cctctgccggtggccctgtgtgagt

SEQ ID NO: 2915749 - DNA, 25 bp, Homo sapien
aagcaggcaatttaaagtgggtagg

SEQ ID NO: 2915750 - DNA, 25 bp, Homo sapien
ctgcaggagaagcaggcaatttaaa

SEQ ID NO: 2915751 - DNA, 25 bp, Homo sapien
ggagaagcaggcaatttaaagtggg

SEQ ID NO: 2915752 - DNA, 25 bp, Homo sapien
gaagcaggcaatttaaagtgggtag

SEQ ID NO: 2915753 - DNA, 25 bp, Homo sapien
tggacctcttccacaatggtaggca

SEQ ID NO: 2915754 - DNA, 25 bp, Homo sapien
cctcttccacaatggtaggcacctg

SEQ ID NO: 2915755 - DNA, 25 bp, Homo sapien
tcttccacaatggtaggcacctgac

SEQ ID NO: 2915756 - DNA, 25 bp, Homo sapien
tccacaatggtaggcacctgacagg

SEQ ID NO: 2915757 - DNA, 25 bp, Homo sapien
tgctcgcgggaggagatgaccttac

SEQ ID NO: 2915758 - DNA, 25 bp, Homo sapien
ctgctcgcgggaggagatgacctta

SEQ ID NO: 2915759 - DNA, 25 bp, Homo sapien
tgtcatcacgcagggaagcatggcg

SEQ ID NO: 2915760 - DNA, 25 bp, Homo sapien
catcacgcagggaagcatggcgaag

SEQ ID NO: 2915761 - DNA, 25 bp, Homo sapien
cgcagggaagcatggcgaagggact

SEQ ID NO: 2915762 - DNA, 25 bp, Homo sapien
cacgcagggaagcatggcgaaggga

SEQ ID NO: 2915763 - DNA, 25 bp, Homo sapien
tatgctggtctaagctgacctctga

SEQ ID NO: 2915764 - DNA, 25 bp, Homo sapien
gctggtctaagctgacctctgacct

SEQ ID NO: 2915765 - DNA, 25 bp, Homo sapien
gccagtcaacaacggggtctccacg

SEQ ID NO: 2915766 - DNA, 25 bp, Homo sapien
ctctgacctgccagtcaacaacggg

SEQ ID NO: 2915767 - DNA, 25 bp, Homo sapien
tgccgctgcaggtgcaagtccccga

SEQ ID NO: 2915768 - DNA, 25 bp, Homo sapien
gcaggtgcaagtccccgactccagg

SEQ ID NO: 2915769 - DNA, 25 bp, Homo sapien
cttgctttgagtcgtgcagatgccg

SEQ ID NO: 2915770 - DNA, 25 bp, Homo sapien
cagcctccaacggagcagagcttgc

SEQ ID NO: 2915771 - DNA, 25 bp, Homo sapien
cctcctcactcacgccatcagtaat

SEQ ID NO: 2915772 - DNA, 25 bp, Homo sapien
cctcactcacgccatcagtaattgt

SEQ ID NO: 2915773 - DNA, 25 bp, Homo sapien
ctcactcacgccatcagtaattgtg

SEQ ID NO: 2915774 - DNA, 25 bp, Homo sapien
gacccctcctcactcacgccatcag

SEQ ID NO: 2915775 - DNA, 25 bp, Homo sapien
tgtcatgccatggatgagtgtcccc

SEQ ID NO: 2915776 - DNA, 25 bp, Homo sapien
tccgtctccgtagaagacatgctgc

SEQ ID NO: 2915777 - DNA, 25 bp, Homo sapien
tcagtgcaaaccagacgcagagcga

SEQ ID NO: 2915778 - DNA, 25 bp, Homo sapien
gtcaggaccggtgtctcctcctttc

SEQ ID NO: 2915779 - DNA, 25 bp, Homo sapien
gatcactggcatgaggtctgcccag

SEQ ID NO: 2915780 - DNA, 25 bp, Homo sapien
cacgatcactggcatgaggtctgcc

SEQ ID NO: 2915781 - DNA, 25 bp, Homo sapien
cccacgatcactggcatgaggtctg

SEQ ID NO: 2915782 - DNA, 25 bp, Homo sapien
tccccacgatcactggcatgaggtc

SEQ ID NO: 2915783 - DNA, 25 bp, Homo sapien
ctgtgtccacagatcccacgctggg

SEQ ID NO: 2915784 - DNA, 25 bp, Homo sapien
tcctgtgtccacagatcccacgctg

SEQ ID NO: 2915785 - DNA, 25 bp, Homo sapien
cctgtgtccacagatcccacgctgg

SEQ ID NO: 2915786 - DNA, 25 bp, Homo sapien
tgtgtccacagatcccacgctgggc

SEQ ID NO: 2915787 - DNA, 25 bp, Homo sapien
ggctcagagttcccacccagctttg

SEQ ID NO: 2915788 - DNA, 25 bp, Homo sapien
ccaggatcaactccgctgtgtgctg

SEQ ID NO: 2915789 - DNA, 25 bp, Homo sapien
agcccaggatcaactccgctgtgtg

SEQ ID NO: 2915790 - DNA, 25 bp, Homo sapien
aggatcaactccgctgtgtgctggc

SEQ ID NO: 2915791 - DNA, 25 bp, Homo sapien
tgcaggtgctcatcgtgccaaggag

SEQ ID NO: 2915792 - DNA, 25 bp, Homo sapien
ttggctgaaaaaagggaaggtgctc

SEQ ID NO: 2915793 - DNA, 25 bp, Homo sapien
agaagcgagagaaggagacacacag

SEQ ID NO: 2915794 - DNA, 25 bp, Homo sapien
caggagcccttcatggatctggagg

SEQ ID NO: 2915795 - DNA, 25 bp, Homo sapien
acccaagccaccaccgaagccagca

SEQ ID NO: 2915796 - DNA, 25 bp, Homo sapien
cggtcaccgaggtgctgcatggtca

SEQ ID NO: 2915797 - DNA, 25 bp, Homo sapien
aggccaggcggtcaccgaggtgctg

SEQ ID NO: 2915798 - DNA, 25 bp, Homo sapien
agggactatagtctttgatctcact

SEQ ID NO: 2915799 - DNA, 25 bp, Homo sapien
caccgaggtgctgcatggtcacctt

SEQ ID NO: 2915800 - DNA, 25 bp, Homo sapien
gcaaaatgggctgcgcattctcaat

SEQ ID NO: 2915801 - DNA, 25 bp, Homo sapien
aaatgggctgcgcattctcaatggt

SEQ ID NO: 2915802 - DNA, 25 bp, Homo sapien
aaaatgggctgcgcattctcaatgg

SEQ ID NO: 2915803 - DNA, 25 bp, Homo sapien
ctgcaaaatgggctgcgcattctca

SEQ ID NO: 2915804 - DNA, 25 bp, Homo sapien
cctgaagtcatcagctgccagcctg

SEQ ID NO: 2915805 - DNA, 25 bp, Homo sapien
ttggtcctgaagtcatcagctgcca

SEQ ID NO: 2915806 - DNA, 25 bp, Homo sapien
ggtcctgaagtcatcagctgccagc

SEQ ID NO: 2915807 - DNA, 25 bp, Homo sapien
tcctgaagtcatcagctgccagcct

SEQ ID NO: 2915808 - DNA, 25 bp, Homo sapien
cggcacaggccattgacgccagcct

SEQ ID NO: 2915809 - DNA, 25 bp, Homo sapien
ggcacaggccattgacgccagcctc

SEQ ID NO: 2915810 - DNA, 25 bp, Homo sapien
ccggcacaggccattgacgccagcc

SEQ ID NO: 2915811 - DNA, 25 bp, Homo sapien
gcacaggccattgacgccagcctcc

SEQ ID NO: 2915812 - DNA, 25 bp, Homo sapien
caggtgcggcatccgtctccacgtt

SEQ ID NO: 2915813 - DNA, 25 bp, Homo sapien
ggtccacgccaggtgcggcatccgt

SEQ ID NO: 2915814 - DNA, 25 bp, Homo sapien
gatgcagctcaggtccacgccaggt

SEQ ID NO: 2915815 - DNA, 25 bp, Homo sapien
ggcatccgtctccacgttcacttct

SEQ ID NO: 2915816 - DNA, 25 bp, Homo sapien
tctgtggttgtgctttgccatctgc

SEQ ID NO: 2915817 - DNA, 25 bp, Homo sapien
gtggttgtgctttgccatctgctcg

SEQ ID NO: 2915818 - DNA, 25 bp, Homo sapien
ctctgtggttgtgctttgccatctg

SEQ ID NO: 2915819 - DNA, 25 bp, Homo sapien
gttgtgctttgccatctgctcgtac

SEQ ID NO: 2915820 - DNA, 25 bp, Homo sapien
ggcccactgagggcccaagccccac

SEQ ID NO: 2915821 - DNA, 25 bp, Homo sapien
ctgggaagtgctgcaggcccactga

SEQ ID NO: 2915822 - DNA, 25 bp, Homo sapien
caggcccactgagggcccaagcccc

SEQ ID NO: 2915823 - DNA, 25 bp, Homo sapien
tgcaggcccactgagggcccaagcc

SEQ ID NO: 2915824 - DNA, 25 bp, Homo sapien
gtgaaaggtgaggctctcccaaagc

SEQ ID NO: 2915825 - DNA, 25 bp, Homo sapien
gaaaggtgaggctctcccaaagccc

SEQ ID NO: 2915826 - DNA, 25 bp, Homo sapien
tgaaaggtgaggctctcccaaagcc

SEQ ID NO: 2915827 - DNA, 25 bp, Homo sapien
gctggaggccacttttttgttcagc

SEQ ID NO: 2915828 - DNA, 25 bp, Homo sapien
actgctggaggccacttttttgttc

SEQ ID NO: 2915829 - DNA, 25 bp, Homo sapien
ctgctctgtaccagttcactgctgg

SEQ ID NO: 2915830 - DNA, 25 bp, Homo sapien
actgcggctgctctgtaccagttca

SEQ ID NO: 2915831 - DNA, 25 bp, Homo sapien
ctggaacaccctctggagctccgtc

SEQ ID NO: 2915832 - DNA, 25 bp, Homo sapien
ccctggaacaccctctggagctccg

SEQ ID NO: 2915833 - DNA, 25 bp, Homo sapien
tggaacaccctctggagctccgtca

SEQ ID NO: 2915834 - DNA, 25 bp, Homo sapien
aggccctggaacaccctctggagct

SEQ ID NO: 2915835 - DNA, 25 bp, Homo sapien
gaaaaagagtcaatggaggtggtca

SEQ ID NO: 2915836 - DNA, 25 bp, Homo sapien
aatggaggtggtcactcctgtccct

SEQ ID NO: 2915837 - DNA, 25 bp, Homo sapien
agagagaaaaagagtcaatggaggt

SEQ ID NO: 2915838 - DNA, 25 bp, Homo sapien
atggaggtggtcactcctgtccctc

SEQ ID NO: 2915839 - DNA, 25 bp, Homo sapien
tgtcttcatgtccagcaagatctgg

SEQ ID NO: 2915840 - DNA, 25 bp, Homo sapien
cgtgtcttcatgtccagcaagatct

SEQ ID NO: 2915841 - DNA, 25 bp, Homo sapien
gccgtgtcttcatgtccagcaagat

SEQ ID NO: 2915842 - DNA, 25 bp, Homo sapien
gtgtcttcatgtccagcaagatctg

SEQ ID NO: 2915843 - DNA, 25 bp, Homo sapien
ggattggccagatgcgtgtggggag

SEQ ID NO: 2915844 - DNA, 25 bp, Homo sapien
gattggccagatgcgtgtggggagg

SEQ ID NO: 2915845 - DNA, 25 bp, Homo sapien
tgagagctaagccaactccagggca

SEQ ID NO: 2915846 - DNA, 25 bp, Homo sapien
gggtctgagagctaagccaactcca

SEQ ID NO: 2915847 - DNA, 25 bp, Homo sapien
tgccggggagcctcaggagccttac

SEQ ID NO: 2915848 - DNA, 25 bp, Homo sapien
aaggggtctgagagctaagccaact

SEQ ID NO: 2915849 - DNA, 25 bp, Homo sapien
tctgacggctcgaagaggacgaaga

SEQ ID NO: 2915850 - DNA, 25 bp, Homo sapien
ttgaggatgggccaggtctgacggc

SEQ ID NO: 2915851 - DNA, 25 bp, Homo sapien
tcagttctaggagcactggccctgg

SEQ ID NO: 2915852 - DNA, 25 bp, Homo sapien
ctgaagctggatgagccctgctcct

SEQ ID NO: 2915853 - DNA, 25 bp, Homo sapien
aagtcagctttattagcccatcacc

SEQ ID NO: 2915854 - DNA, 25 bp, Homo sapien
tttgcatcaaccagaaagtcagctt

SEQ ID NO: 2915855 - DNA, 25 bp, Homo sapien
gacagctgggaactgcgctgggaga

SEQ ID NO: 2915856 - DNA, 25 bp, Homo sapien
cccatcaccagtagaggagcaggga

SEQ ID NO: 2915857 - DNA, 25 bp, Homo sapien
tgctcatcagcacgcaattcaccag

SEQ ID NO: 2915858 - DNA, 25 bp, Homo sapien
gtgctcatcagcacgcaattcacca

SEQ ID NO: 2915859 - DNA, 25 bp, Homo sapien
ggacccagttaggctgtgcccaggt

SEQ ID NO: 2915860 - DNA, 25 bp, Homo sapien
aattgaatgtggatgagattgactc

SEQ ID NO: 2915861 - DNA, 25 bp, Homo sapien
cattctggtggaaatcattcagtgg

SEQ ID NO: 2915862 - DNA, 25 bp, Homo sapien
tcttgatcctgaccacattctggtg

SEQ ID NO: 2915863 - DNA, 25 bp, Homo sapien
tcagtggaaattgaatgtggatgag

SEQ ID NO: 2915864 - DNA, 25 bp, Homo sapien
ccagaacatccctagtgtaggcaga

SEQ ID NO: 2915865 - DNA, 25 bp, Homo sapien
tcaggtgccctcgtttgagcccctt

SEQ ID NO: 2915866 - DNA, 25 bp, Homo sapien
ttgagccccttgtggaactggccca

SEQ ID NO: 2915867 - DNA, 25 bp, Homo sapien
taggcagaagtctggctcaggtgcc

SEQ ID NO: 2915868 - DNA, 25 bp, Homo sapien
aggagacagacaggccacccctgta

SEQ ID NO: 2915869 - DNA, 25 bp, Homo sapien
ccacccctgtaggtgctggtggcgc

SEQ ID NO: 2915870 - DNA, 25 bp, Homo sapien
gctgctgaagctaccgccatagccg

SEQ ID NO: 2915871 - DNA, 25 bp, Homo sapien
aaagccactagcaaagctgctgctg

SEQ ID NO: 2915872 - DNA, 25 bp, Homo sapien
gtcttgaagtagggactgtagtctt

SEQ ID NO: 2915873 - DNA, 25 bp, Homo sapien
tcccagaaggagctagctggaatgg

SEQ ID NO: 2915874 - DNA, 25 bp, Homo sapien
gaaggagctagctggaatggcacct

SEQ ID NO: 2915875 - DNA, 25 bp, Homo sapien
ctattgttcccagaaggagctagct

SEQ ID NO: 2915876 - DNA, 25 bp, Homo sapien
tagctggaatggcaccttctgctgc

SEQ ID NO: 2915877 - DNA, 25 bp, Homo sapien
cactgattgtctctgcaggctctcc

SEQ ID NO: 2915878 - DNA, 25 bp, Homo sapien
aggggccacactgattgtctctgca

SEQ ID NO: 2915879 - DNA, 25 bp, Homo sapien
tcaaggggccacactgattgtctct

SEQ ID NO: 2915880 - DNA, 25 bp, Homo sapien
acactgattgtctctgcaggctctc

SEQ ID NO: 2915881 - DNA, 25 bp, Homo sapien
cagaggcaaaggtatcgtccacggg

SEQ ID NO: 2915882 - DNA, 25 bp, Homo sapien
ccccagaggcaaaggtatcgtccac

SEQ ID NO: 2915883 - DNA, 25 bp, Homo sapien
gcaaaggtatcgtccacgggggaca

SEQ ID NO: 2915884 - DNA, 25 bp, Homo sapien
caaaggtatcgtccacgggggacat

SEQ ID NO: 2915885 - DNA, 25 bp, Homo sapien
gtacattcagaatgtcgccacagat

SEQ ID NO: 2915886 - DNA, 25 bp, Homo sapien
cattcagaatgtcgccacagattaa

SEQ ID NO: 2915887 - DNA, 25 bp, Homo sapien
cagtgttagctgctggaataaggtg

SEQ ID NO: 2915888 - DNA, 25 bp, Homo sapien
taaggtgtttgtccagtacattcag

SEQ ID NO: 2915889 - DNA, 25 bp, Homo sapien
caaggttttctattaggaaatgtag

SEQ ID NO: 2915890 - DNA, 25 bp, Homo sapien
gacaaacacctcactccagtagctg

SEQ ID NO: 2915891 - DNA, 25 bp, Homo sapien
taatctgtggcgaggtgctggatgc

SEQ ID NO: 2915892 - DNA, 25 bp, Homo sapien
gaggtgctggatgcactggacaaac

SEQ ID NO: 2915893 - DNA, 25 bp, Homo sapien
tcgtactccaccttggtttgctgga

SEQ ID NO: 2915894 - DNA, 25 bp, Homo sapien
ggtttgctggagtgccccaaaggaa

SEQ ID NO: 2915895 - DNA, 25 bp, Homo sapien
tctcggacagtgaaacccagtggaa

SEQ ID NO: 2915896 - DNA, 25 bp, Homo sapien
cttgcttatcagatttccattcgta

SEQ ID NO: 2915897 - DNA, 25 bp, Homo sapien
atgaagtttgttgcaccatttggga

SEQ ID NO: 2915898 - DNA, 25 bp, Homo sapien
gaagtttgttgcaccatttgggaag

SEQ ID NO: 2915899 - DNA, 25 bp, Homo sapien
tgaagtttgttgcaccatttgggaa

SEQ ID NO: 2915900 - DNA, 25 bp, Homo sapien
ctcttggaggctatagctgtgatcg

SEQ ID NO: 2915901 - DNA, 25 bp, Homo sapien
aggtggtgtaatcgtcagaatccaa

SEQ ID NO: 2915902 - DNA, 25 bp, Homo sapien
ggtgtaatcgtcagaatccaacagg

SEQ ID NO: 2915903 - DNA, 25 bp, Homo sapien
gctgtgatcgaaataccaacagtgg

SEQ ID NO: 2915904 - DNA, 25 bp, Homo sapien
cacaaatcttctgaagggtgccaaa

SEQ ID NO: 2915905 - DNA, 25 bp, Homo sapien
gcttgagtcctgatgataaactgat

SEQ ID NO: 2915906 - DNA, 25 bp, Homo sapien
ttggactactgtgcttgaagaactg

SEQ ID NO: 2915907 - DNA, 25 bp, Homo sapien
caatgtgcaacatcagagcttgagt

SEQ ID NO: 2915908 - DNA, 25 bp, Homo sapien
tgtgagggagcaggcgatccactca

SEQ ID NO: 2915909 - DNA, 25 bp, Homo sapien
actcaaacttcgaacaacatcacaa

SEQ ID NO: 2915910 - DNA, 25 bp, Homo sapien
ggcgatccactcaaacttcgaacaa

SEQ ID NO: 2915911 - DNA, 25 bp, Homo sapien
gggagcaggcgatccactcaaactt

SEQ ID NO: 2915912 - DNA, 25 bp, Homo sapien
cagctaaagttagccaaaattcaca

SEQ ID NO: 2915913 - DNA, 25 bp, Homo sapien
taaagttagccaaaattcacaggct

SEQ ID NO: 2915914 - DNA, 25 bp, Homo sapien
gttcagctaaagttagccaaaattc

SEQ ID NO: 2915915 - DNA, 25 bp, Homo sapien
gctaaagttagccaaaattcacagg

SEQ ID NO: 2915916 - DNA, 25 bp, Homo sapien
acttcatgccattcactaacacagg

SEQ ID NO: 2915917 - DNA, 25 bp, Homo sapien
tatatcctgttcactatcaggaatc

SEQ ID NO: 2915918 - DNA, 25 bp, Homo sapien
gccattcactaacacaggaatcaac

SEQ ID NO: 2915919 - DNA, 25 bp, Homo sapien
tctgagtacttcatgccattcacta

SEQ ID NO: 2915920 - DNA, 25 bp, Homo sapien
ccagtcagaaattgtatcatcatca

SEQ ID NO: 2915921 - DNA, 25 bp, Homo sapien
catcttcatcatgctgctgagccac

SEQ ID NO: 2915922 - DNA, 25 bp, Homo sapien
ctcttcaattccatcttcatcatgc

SEQ ID NO: 2915923 - DNA, 25 bp, Homo sapien
catcatcatcaatttcattatcatc

SEQ ID NO: 2915924 - DNA, 25 bp, Homo sapien
ctgaataaggtgaggaataagctca

SEQ ID NO: 2915925 - DNA, 25 bp, Homo sapien
cagactgcagcaccgtggcaactga

SEQ ID NO: 2915926 - DNA, 25 bp, Homo sapien
ccagactgcagcaccgtggcaactg

SEQ ID NO: 2915927 - DNA, 25 bp, Homo sapien
atctgctaatgtccctctggcattg

SEQ ID NO: 2915928 - DNA, 25 bp, Homo sapien
aatctgctaatgtccctctggcatt

SEQ ID NO: 2915929 - DNA, 25 bp, Homo sapien
aggtttacccaatgctgatacatag

SEQ ID NO: 2915930 - DNA, 25 bp, Homo sapien
taggtttacccaatgctgatacata

SEQ ID NO: 2915931 - DNA, 25 bp, Homo sapien
ggtttacccaatgctgatacatagg

SEQ ID NO: 2915932 - DNA, 25 bp, Homo sapien
ctaggtttacccaatgctgatacat

SEQ ID NO: 2915933 - DNA, 25 bp, Homo sapien
gccaggccactcagtaaatcaagag

SEQ ID NO: 2915934 - DNA, 25 bp, Homo sapien
ctgcatgcactgatatgttagtgtt

SEQ ID NO: 2915935 - DNA, 25 bp, Homo sapien
cactgatatgttagtgttaggatgt

SEQ ID NO: 2915936 - DNA, 25 bp, Homo sapien
tatcctgcatgcactgatatgttag

SEQ ID NO: 2915937 - DNA, 25 bp, Homo sapien
atgcactgatatgttagtgttagga

SEQ ID NO: 2915938 - DNA, 25 bp, Homo sapien
aggttggttcccaatattggcatga

SEQ ID NO: 2915939 - DNA, 25 bp, Homo sapien
taggttggttcccaatattggcatg

SEQ ID NO: 2915940 - DNA, 25 bp, Homo sapien
ttatgccatggggattcacactgat

SEQ ID NO: 2915941 - DNA, 25 bp, Homo sapien
cttccccccatgaagggtagcattt

SEQ ID NO: 2915942 - DNA, 25 bp, Homo sapien
taaaatcttggattatgccatgggg

SEQ ID NO: 2915943 - DNA, 25 bp, Homo sapien
agagaaatgcctcccattttcattg

SEQ ID NO: 2915944 - DNA, 25 bp, Homo sapien
ggctggggctgtccaatgaccaaga

SEQ ID NO: 2915945 - DNA, 25 bp, Homo sapien
gaagaacaattaggcagagcgcaca

SEQ ID NO: 2915946 - DNA, 25 bp, Homo sapien
ctgtccaatgaccaagagaagaaca

SEQ ID NO: 2915947 - DNA, 25 bp, Homo sapien
caagagaagaacaattaggcagagc

SEQ ID NO: 2915948 - DNA, 25 bp, Homo sapien
ctagagtgttgtcacgggccgtcca

SEQ ID NO: 2915949 - DNA, 25 bp, Homo sapien
gggccgtccacatgctgcgagcatt

SEQ ID NO: 2915950 - DNA, 25 bp, Homo sapien
tgatgcgttgccagagctcacgtgg

SEQ ID NO: 2915951 - DNA, 25 bp, Homo sapien
gagcattgaacgtgatgcgttgcca

SEQ ID NO: 2915952 - DNA, 25 bp, Homo sapien
gtgggcgggaagtggaaatctacat

SEQ ID NO: 2915953 - DNA, 25 bp, Homo sapien
ggatgtgggcgggaagtggaaatct

SEQ ID NO: 2915954 - DNA, 25 bp, Homo sapien
atgtgggcgggaagtggaaatctac

SEQ ID NO: 2915955 - DNA, 25 bp, Homo sapien
ggtgggatgtgggcgggaagtggaa

SEQ ID NO: 2915956 - DNA, 25 bp, Homo sapien
gcagcttcactagtgagtccagccc

SEQ ID NO: 2915957 - DNA, 25 bp, Homo sapien
tgagccttggaggtgagtcacagtt

SEQ ID NO: 2915958 - DNA, 25 bp, Homo sapien
cagcccataaaggagggccctctgc

SEQ ID NO: 2915959 - DNA, 25 bp, Homo sapien
agttaagcagcttcactagtgagtc

SEQ ID NO: 2915960 - DNA, 25 bp, Homo sapien
gttcccatagactgaggccgtgtgt

SEQ ID NO: 2915961 - DNA, 25 bp, Homo sapien
gacgaactcctttgagatgttccca

SEQ ID NO: 2915962 - DNA, 25 bp, Homo sapien
cctgtgttctgcctagatgcactag

SEQ ID NO: 2915963 - DNA, 25 bp, Homo sapien
cgggtaaggaccatacaggctcgag

SEQ ID NO: 2915964 - DNA, 25 bp, Homo sapien
caggtcccaacgatgtgctggcgag

SEQ ID NO: 2915965 - DNA, 25 bp, Homo sapien
ttgaccaggtcccaacgatgtgctg

SEQ ID NO: 2915966 - DNA, 25 bp, Homo sapien
ctgaagttgaccaggtcccaacgat

SEQ ID NO: 2915967 - DNA, 25 bp, Homo sapien
ccaacgatgtgctggcgagaaggcc

SEQ ID NO: 2915968 - DNA, 25 bp, Homo sapien
tgggctcagatagggagcctggcaa

SEQ ID NO: 2915969 - DNA, 25 bp, Homo sapien
ctggcaaccgctgaaggccatctct

SEQ ID NO: 2915970 - DNA, 25 bp, Homo sapien
ctccaccgcctctgtggccaccact

SEQ ID NO: 2915971 - DNA, 25 bp, Homo sapien
gctcagatagggagcctggcaaccg

SEQ ID NO: 2915972 - DNA, 25 bp, Homo sapien
ctggaagtcaaagcagagctgagcc

SEQ ID NO: 2915973 - DNA, 25 bp, Homo sapien
ttcccagatgccctccgcagccccg

SEQ ID NO: 2915974 - DNA, 25 bp, Homo sapien
cttcagcagagcctcttcccagatg

SEQ ID NO: 2915975 - DNA, 25 bp, Homo sapien
cagccccgagccccagcgtagtttc

SEQ ID NO: 2915976 - DNA, 25 bp, Homo sapien
cgcagccccgagccccagcgtagtt

SEQ ID NO: 2915977 - DNA, 25 bp, Homo sapien
atccgtcctggagacccccttggat

SEQ ID NO: 2915978 - DNA, 25 bp, Homo sapien
taggcccaggaaaagcaaatagtct

SEQ ID NO: 2915979 - DNA, 25 bp, Homo sapien
aggcccaggaaaagcaaatagtctt

SEQ ID NO: 2915980 - DNA, 25 bp, Homo sapien
ctaggcccaggaaaagcaaatagtc

SEQ ID NO: 2915981 - DNA, 25 bp, Homo sapien
ccttctggaagggcatgtgcatctt

SEQ ID NO: 2915982 - DNA, 25 bp, Homo sapien
cgtcttcaaaccgagggttgaagtg

SEQ ID NO: 2915983 - DNA, 25 bp, Homo sapien
gaaggcaatgtcgtttccactgaag

SEQ ID NO: 2915984 - DNA, 25 bp, Homo sapien
tctgcctcgtgttgcacaccacata

SEQ ID NO: 2915985 - DNA, 25 bp, Homo sapien
cacattcacctgatagggctgggag

SEQ ID NO: 2915986 - DNA, 25 bp, Homo sapien
attcacctgatagggctgggagtcc

SEQ ID NO: 2915987 - DNA, 25 bp, Homo sapien
tgggagtcccgtgggcgagaggtgg

SEQ ID NO: 2915988 - DNA, 25 bp, Homo sapien
ttcacattcacctgatagggctggg

SEQ ID NO: 2915989 - DNA, 25 bp, Homo sapien
gaacaatgtcgctgaaaaataaatg

SEQ ID NO: 2915990 - DNA, 25 bp, Homo sapien
agggctggaacaatgtcgctgaaaa

SEQ ID NO: 2915991 - DNA, 25 bp, Homo sapien
tagactctggataagggctggaaca

SEQ ID NO: 2915992 - DNA, 25 bp, Homo sapien
gaactataaccgtaatagactctgg

SEQ ID NO: 2915993 - DNA, 25 bp, Homo sapien
caaaggtaatttgcaatgtgcttac

SEQ ID NO: 2915994 - DNA, 25 bp, Homo sapien
tgcaaaggtaatttgcaatgtgctt

SEQ ID NO: 2915995 - DNA, 25 bp, Homo sapien
gcttgcaaaggtaatttgcaatgtg

SEQ ID NO: 2915996 - DNA, 25 bp, Homo sapien
tgtgcttgcaaaggtaatttgcaat

SEQ ID NO: 2915997 - DNA, 25 bp, Homo sapien
agccattgacggagatggtgtccac

SEQ ID NO: 2915998 - DNA, 25 bp, Homo sapien
cacagagccattgacggagatggtg

SEQ ID NO: 2915999 - DNA, 25 bp, Homo sapien
cacacggtggaagggcacgcggtgg

SEQ ID NO: 2916000 - DNA, 25 bp, Homo sapien
cacgcggtggaagtactgcacgaag

SEQ ID NO: 2916001 - DNA, 25 bp, Homo sapien
atcccagcccctgggaccggtgcca

SEQ ID NO: 2916002 - DNA, 25 bp, Homo sapien
cagcccctgggaccggtgccaggtg

SEQ ID NO: 2916003 - DNA, 25 bp, Homo sapien
gcccctgggaccggtgccaggtgga

SEQ ID NO: 2916004 - DNA, 25 bp, Homo sapien
cccagcccctgggaccggtgccagg

SEQ ID NO: 2916005 - DNA, 25 bp, Homo sapien
ctgggtaggagattggcttgggtcc

SEQ ID NO: 2916006 - DNA, 25 bp, Homo sapien
gggcgggcaggtactgggacaggga

SEQ ID NO: 2916007 - DNA, 25 bp, Homo sapien
aggatggaaattgacggatgaagag

SEQ ID NO: 2916008 - DNA, 25 bp, Homo sapien
aaggggcgggcaggtactgggacag

SEQ ID NO: 2916009 - DNA, 25 bp, Homo sapien
caggatggaaattgacggatgaaga

SEQ ID NO: 2916010 - DNA, 25 bp, Homo sapien
ggctgggagaacggcaccgtggaga

SEQ ID NO: 2916011 - DNA, 25 bp, Homo sapien
aggctgggagaacggcaccgtggag

SEQ ID NO: 2916012 - DNA, 25 bp, Homo sapien
gctgggagaacggcaccgtggagaa

SEQ ID NO: 2916013 - DNA, 25 bp, Homo sapien
ctgggagaacggcaccgtggagaag

SEQ ID NO: 2916014 - DNA, 25 bp, Homo sapien
cccagggcctctgtgttgaactcac

SEQ ID NO: 2916015 - DNA, 25 bp, Homo sapien
tgctgtctgctcagccacccagggc

SEQ ID NO: 2916016 - DNA, 25 bp, Homo sapien
cacccagggcctctgtgttgaactc

SEQ ID NO: 2916017 - DNA, 25 bp, Homo sapien
gccacccagggcctctgtgttgaac

SEQ ID NO: 2916018 - DNA, 25 bp, Homo sapien
tgggagctgggttggcaggccgcac

SEQ ID NO: 2916019 - DNA, 25 bp, Homo sapien
aatgggagctgggttggcaggccgc

SEQ ID NO: 2916020 - DNA, 25 bp, Homo sapien
tgggttggcaggccgcacgctggga

SEQ ID NO: 2916021 - DNA, 25 bp, Homo sapien
gagctgggttggcaggccgcacgct

SEQ ID NO: 2916022 - DNA, 25 bp, Homo sapien
tctgtccagaggcactctgcaccgt

SEQ ID NO: 2916023 - DNA, 25 bp, Homo sapien
gtccagaggcactctgcaccgtgtg

SEQ ID NO: 2916024 - DNA, 25 bp, Homo sapien
cagaggcactctgcaccgtgtggat

SEQ ID NO: 2916025 - DNA, 25 bp, Homo sapien
gaggcactctgcaccgtgtggatga

SEQ ID NO: 2916026 - DNA, 25 bp, Homo sapien
tacatcataggtgggatggcgggag

SEQ ID NO: 2916027 - DNA, 25 bp, Homo sapien
gcagggtgggggtacatcataggtg

SEQ ID NO: 2916028 - DNA, 25 bp, Homo sapien
gggtacatcataggtgggatggcgg

SEQ ID NO: 2916029 - DNA, 25 bp, Homo sapien
ataggcagggtgggggtacatcata

SEQ ID NO: 2916030 - DNA, 25 bp, Homo sapien
attttgaaagcccttcgcttttcat

SEQ ID NO: 2916031 - DNA, 25 bp, Homo sapien
gatccccccgtagcggcccttcatc

SEQ ID NO: 2916032 - DNA, 25 bp, Homo sapien
cccgtagcggcccttcatccctagc

SEQ ID NO: 2916033 - DNA, 25 bp, Homo sapien
cattttgaaagcccttcgcttttca

SEQ ID NO: 2916034 - DNA, 25 bp, Homo sapien
ttcccatgaatttaggctgtcagct

SEQ ID NO: 2916035 - DNA, 25 bp, Homo sapien
atgatggacttggatgggtacagcc

SEQ ID NO: 2916036 - DNA, 25 bp, Homo sapien
gaatggtggtgatgaaaggcatcgg

SEQ ID NO: 2916037 - DNA, 25 bp, Homo sapien
ggacttggatgggtacagccctccc

SEQ ID NO: 2916038 - DNA, 25 bp, Homo sapien
tggatgggtacagccctcccggaat

SEQ ID NO: 2916039 - DNA, 25 bp, Homo sapien
cttgaagggctctctcttcccagag

SEQ ID NO: 2916040 - DNA, 25 bp, Homo sapien
gaagggctctctcttcccagaggtc

SEQ ID NO: 2916041 - DNA, 25 bp, Homo sapien
aagggctctctcttcccagaggtca

SEQ ID NO: 2916042 - DNA, 25 bp, Homo sapien
tgaagggctctctcttcccagaggt

SEQ ID NO: 2916043 - DNA, 25 bp, Homo sapien
ctggacctttgtccactgagttctg

SEQ ID NO: 2916044 - DNA, 25 bp, Homo sapien
gtccactgagttctgagccccattt

SEQ ID NO: 2916045 - DNA, 25 bp, Homo sapien
tttgtccactgagttctgagcccca

SEQ ID NO: 2916046 - DNA, 25 bp, Homo sapien
ggacctttgtccactgagttctgag

SEQ ID NO: 2916047 - DNA, 25 bp, Homo sapien
ttcggggcagacttcgctcctcaga

SEQ ID NO: 2916048 - DNA, 25 bp, Homo sapien
gcattctcatcaaaacgggggttca

SEQ ID NO: 2916049 - DNA, 25 bp, Homo sapien
cccagagcacaggttgatgtggaac

SEQ ID NO: 2916050 - DNA, 25 bp, Homo sapien
cgaagggcatttttcggggcagact

SEQ ID NO: 2916051 - DNA, 25 bp, Homo sapien
gaggcagtgagcttcacacaagatc

SEQ ID NO: 2916052 - DNA, 25 bp, Homo sapien
ttgaggcagtgagcttcacacaaga

SEQ ID NO: 2916053 - DNA, 25 bp, Homo sapien
tgaggcagtgagcttcacacaagat

SEQ ID NO: 2916054 - DNA, 25 bp, Homo sapien
ggcagtgagcttcacacaagatcca

SEQ ID NO: 2916055 - DNA, 25 bp, Homo sapien
tcctcaggcgatggtagtattcaaa

SEQ ID NO: 2916056 - DNA, 25 bp, Homo sapien
ctcaggcgatggtagtattcaaaca

SEQ ID NO: 2916057 - DNA, 25 bp, Homo sapien
ggttcctcaggcgatggtagtattc

SEQ ID NO: 2916058 - DNA, 25 bp, Homo sapien
gcaggttcctcaggcgatggtagta

SEQ ID NO: 2916059 - DNA, 25 bp, Homo sapien
tgaagagaacactctggtcagttgg

SEQ ID NO: 2916060 - DNA, 25 bp, Homo sapien
gagaacactctggtcagttggtgga

SEQ ID NO: 2916061 - DNA, 25 bp, Homo sapien
ccctgaagagaacactctggtcagt

SEQ ID NO: 2916062 - DNA, 25 bp, Homo sapien
cactctggtcagttggtggaggcca

SEQ ID NO: 2916063 - DNA, 25 bp, Homo sapien
ccccagcccgcctcccatctcagag

SEQ ID NO: 2916064 - DNA, 25 bp, Homo sapien
tctcagaggcatggggctgtttcct

SEQ ID NO: 2916065 - DNA, 25 bp, Homo sapien
cagcccgcctcccatctcagaggca

SEQ ID NO: 2916066 - DNA, 25 bp, Homo sapien
atctcagaggcatggggctgtttcc

SEQ ID NO: 2916067 - DNA, 25 bp, Homo sapien
tgggaacgcagggtgtcaaagcgag

SEQ ID NO: 2916068 - DNA, 25 bp, Homo sapien
gtttggccagtacagatgtggcctc

SEQ ID NO: 2916069 - DNA, 25 bp, Homo sapien
caaagcgagtgtgggccacagcatc

SEQ ID NO: 2916070 - DNA, 25 bp, Homo sapien
tgagtttggccagtacagatgtggc

SEQ ID NO: 2916071 - DNA, 25 bp, Homo sapien
cagaacttaacgatggagccagctc

SEQ ID NO: 2916072 - DNA, 25 bp, Homo sapien
tgccagcacagaacttaacgatgga

SEQ ID NO: 2916073 - DNA, 25 bp, Homo sapien
gcaaagaaggacagggcggcggtgc

SEQ ID NO: 2916074 - DNA, 25 bp, Homo sapien
agcctggagatgtcagcgctctgag

SEQ ID NO: 2916075 - DNA, 25 bp, Homo sapien
gcctggacttgacacattggtctct

SEQ ID NO: 2916076 - DNA, 25 bp, Homo sapien
tccatgacgatatctttggtgctgt

SEQ ID NO: 2916077 - DNA, 25 bp, Homo sapien
tctctgtttttacctaaaagagcca

SEQ ID NO: 2916078 - DNA, 25 bp, Homo sapien
cctaaaagagccagaagcacttcca

SEQ ID NO: 2916079 - DNA, 25 bp, Homo sapien
taagcggcatcggagctagatcacg

SEQ ID NO: 2916080 - DNA, 25 bp, Homo sapien
tggctccaagggctataaattacaa

SEQ ID NO: 2916081 - DNA, 25 bp, Homo sapien
cacatcccagacattaggagttcat

SEQ ID NO: 2916082 - DNA, 25 bp, Homo sapien
tattcatttagaccctgcaagttga

SEQ ID NO: 2916083 - DNA, 25 bp, Homo sapien
catcatagcattttttaggagagta

SEQ ID NO: 2916084 - DNA, 25 bp, Homo sapien
aatgattaccaggagtttttgctaa

SEQ ID NO: 2916085 - DNA, 25 bp, Homo sapien
ttgctaacatttatgggaacatgct

SEQ ID NO: 2916086 - DNA, 25 bp, Homo sapien
gacataaagttgcatatactggaaa

SEQ ID NO: 2916087 - DNA, 25 bp, Homo sapien
catgaactattccttttaataacct

SEQ ID NO: 2916088 - DNA, 25 bp, Homo sapien
atacatgaactattccttttaataa

SEQ ID NO: 2916089 - DNA, 25 bp, Homo sapien
ataaagtggcatttccattgggcat

SEQ ID NO: 2916090 - DNA, 25 bp, Homo sapien
ataacctttggaaataaagtggcat

SEQ ID NO: 2916091 - DNA, 25 bp, Homo sapien
tgacagcttgatgtaagtcaggtaa

SEQ ID NO: 2916092 - DNA, 25 bp, Homo sapien
gatgatgtcataaagccagatcagg

SEQ ID NO: 2916093 - DNA, 25 bp, Homo sapien
atgtcataaagccagatcaggtcct

SEQ ID NO: 2916094 - DNA, 25 bp, Homo sapien
aagggtcagctgtaagatgatgtca

SEQ ID NO: 2916095 - DNA, 25 bp, Homo sapien
taagatgatgtcataaagccagatc

SEQ ID NO: 2916096 - DNA, 25 bp, Homo sapien
tgtacaacagatgcaacaagaaaat

SEQ ID NO: 2916097 - DNA, 25 bp, Homo sapien
caacagatgcaacaagaaaattcat

SEQ ID NO: 2916098 - DNA, 25 bp, Homo sapien
tacaacagatgcaacaagaaaattc

SEQ ID NO: 2916099 - DNA, 25 bp, Homo sapien
ctgtacaacagatgcaacaagaaaa

SEQ ID NO: 2916100 - DNA, 25 bp, Homo sapien
caggaagctggagcaattccaccag

SEQ ID NO: 2916101 - DNA, 25 bp, Homo sapien
gaagctggagcaattccaccagatt

SEQ ID NO: 2916102 - DNA, 25 bp, Homo sapien
gaataatggtttatagttatccttg

SEQ ID NO: 2916103 - DNA, 25 bp, Homo sapien
tcatgatttttctctcggcttgcct

SEQ ID NO: 2916104 - DNA, 25 bp, Homo sapien
gttgcttatcagctaagaggttttt

SEQ ID NO: 2916105 - DNA, 25 bp, Homo sapien
cctaggtattatactcttcttgtgg

SEQ ID NO: 2916106 - DNA, 25 bp, Homo sapien
aggaggtgtgaaggatcgaccctta

SEQ ID NO: 2916107 - DNA, 25 bp, Homo sapien
tttgcagtgcacgaggaggtgtgaa

SEQ ID NO: 2916108 - DNA, 25 bp, Homo sapien
cacgaggaggtgtgaaggatcgacc

SEQ ID NO: 2916109 - DNA, 25 bp, Homo sapien
gtgaaggatcgacccttagaaagga

SEQ ID NO: 2916110 - DNA, 25 bp, Homo sapien
aaagggtgagcacgtcgccctcgcg

SEQ ID NO: 2916111 - DNA, 25 bp, Homo sapien
ttctcgctctgactccaaaagggtg

SEQ ID NO: 2916112 - DNA, 25 bp, Homo sapien
aagggtgagcacgtcgccctcgcgc

SEQ ID NO: 2916113 - DNA, 25 bp, Homo sapien
cattcccatcggccaagtggtcgaa

SEQ ID NO: 2916114 - DNA, 25 bp, Homo sapien
ttcccatcggccaagtggtcgaacc

SEQ ID NO: 2916115 - DNA, 25 bp, Homo sapien
attcccatcggccaagtggtcgaac

SEQ ID NO: 2916116 - DNA, 25 bp, Homo sapien
aatcctctcctctagctttttaaat

SEQ ID NO: 2916117 - DNA, 25 bp, Homo sapien
tgtggacctgtataattgtacatat

SEQ ID NO: 2916118 - DNA, 25 bp, Homo sapien
cctccatggctcaagaattcttcct

SEQ ID NO: 2916119 - DNA, 25 bp, Homo sapien
tattagctagccaaaccaggtgtag

SEQ ID NO: 2916120 - DNA, 25 bp, Homo sapien
ggcacggatcatggcctcgcagaag

SEQ ID NO: 2916121 - DNA, 25 bp, Homo sapien
cgcgacagcgtggagcaggtggtgc

SEQ ID NO: 2916122 - DNA, 25 bp, Homo sapien
ctgccctttgctggcgttgggcacg

SEQ ID NO: 2916123 - DNA, 25 bp, Homo sapien
tttgctggcgttgggcacggatcat

SEQ ID NO: 2916124 - DNA, 25 bp, Homo sapien
cacttgcacataagacgcacacagg

SEQ ID NO: 2916125 - DNA, 25 bp, Homo sapien
tgtgcagcacttgcacataagacgc

SEQ ID NO: 2916126 - DNA, 25 bp, Homo sapien
gcagcacttgcacataagacgcaca

SEQ ID NO: 2916127 - DNA, 25 bp, Homo sapien
tgttgtgcagcacttgcacataaga

SEQ ID NO: 2916128 - DNA, 25 bp, Homo sapien
ctagcctctgggcaggtgccgagga

SEQ ID NO: 2916129 - DNA, 25 bp, Homo sapien
gcagggctagcctctgggcaggtgc

SEQ ID NO: 2916130 - DNA, 25 bp, Homo sapien
gcctctgggcaggtgccgaggaggg

SEQ ID NO: 2916131 - DNA, 25 bp, Homo sapien
ctctgggcaggtgccgaggagggtc

SEQ ID NO: 2916132 - DNA, 25 bp, Homo sapien
ctggtgccgcgcccgctcagcaggc

SEQ ID NO: 2916133 - DNA, 25 bp, Homo sapien
gggctttgggttgcggcggctggtg

SEQ ID NO: 2916134 - DNA, 25 bp, Homo sapien
cggggacctcgcactgggcccctgg

SEQ ID NO: 2916135 - DNA, 25 bp, Homo sapien
acctcgcactgggcccctggcggcg

SEQ ID NO: 2916136 - DNA, 25 bp, Homo sapien
gggacctcgcactgggcccctggcg

SEQ ID NO: 2916137 - DNA, 25 bp, Homo sapien
ggacctcgcactgggcccctggcgg

SEQ ID NO: 2916138 - DNA, 25 bp, Homo sapien
ctgtgaactaggtggagctctcagg

SEQ ID NO: 2916139 - DNA, 25 bp, Homo sapien
ggagctctcagggacctcgtttgct

SEQ ID NO: 2916140 - DNA, 25 bp, Homo sapien
tgaactaggtggagctctcagggac

SEQ ID NO: 2916141 - DNA, 25 bp, Homo sapien
taggtggagctctcagggacctcgt

SEQ ID NO: 2916142 - DNA, 25 bp, Homo sapien
gaaatttgggatagacgtggcctgt

SEQ ID NO: 2916143 - DNA, 25 bp, Homo sapien
aatttgggatagacgtggcctgttg

SEQ ID NO: 2916144 - DNA, 25 bp, Homo sapien
aaatttgggatagacgtggcctgtt

SEQ ID NO: 2916145 - DNA, 25 bp, Homo sapien
tctgttttacatctctactgcagtt

SEQ ID NO: 2916146 - DNA, 25 bp, Homo sapien
atctgttttacatctctactgcagt

SEQ ID NO: 2916147 - DNA, 25 bp, Homo sapien
ttttacatctctactgcagtttgca

SEQ ID NO: 2916148 - DNA, 25 bp, Homo sapien
tgttttacatctctactgcagtttg

SEQ ID NO: 2916149 - DNA, 25 bp, Homo sapien
tcaccagccccggataaatctgttc

SEQ ID NO: 2916150 - DNA, 25 bp, Homo sapien
tcaagtaattcttggtatttctctt

SEQ ID NO: 2916151 - DNA, 25 bp, Homo sapien
tctctatatgttgaagttgcatgga

SEQ ID NO: 2916152 - DNA, 25 bp, Homo sapien
ccagttacttgaccggagttctaca

SEQ ID NO: 2916153 - DNA, 25 bp, Homo sapien
tgtgttctgctaaatcaccatacct

SEQ ID NO: 2916154 - DNA, 25 bp, Homo sapien
caccatacctaaactgctttataaa

SEQ ID NO: 2916155 - DNA, 25 bp, Homo sapien
aaatcaccatacctaaactgcttta

SEQ ID NO: 2916156 - DNA, 25 bp, Homo sapien
aatcaccatacctaaactgctttat

SEQ ID NO: 2916157 - DNA, 25 bp, Homo sapien
ggataagcatctaaccaactagcaa

SEQ ID NO: 2916158 - DNA, 25 bp, Homo sapien
atttattagggctgaggtggtacca

SEQ ID NO: 2916159 - DNA, 25 bp, Homo sapien
taaaaagcccttggtatcaaatagc

SEQ ID NO: 2916160 - DNA, 25 bp, Homo sapien
tctagtaaaaaagtcgatgcaaccc

SEQ ID NO: 2916161 - DNA, 25 bp, Homo sapien
ggagataccgtcagcaacccaagta

SEQ ID NO: 2916162 - DNA, 25 bp, Homo sapien
tcaggataccaatcccatttctagc

SEQ ID NO: 2916163 - DNA, 25 bp, Homo sapien
tcccatttctagctggtcatctggc

SEQ ID NO: 2916164 - DNA, 25 bp, Homo sapien
atgggatgggagataccgtcagcaa

SEQ ID NO: 2916165 - DNA, 25 bp, Homo sapien
ctaatagttaatcagttgccatggc

SEQ ID NO: 2916166 - DNA, 25 bp, Homo sapien
cggatactgttattgccctctctta

SEQ ID NO: 2916167 - DNA, 25 bp, Homo sapien
aacttatccagtatcacacagctag

SEQ ID NO: 2916168 - DNA, 25 bp, Homo sapien
tgccatggcatcattggaaaaacaa

SEQ ID NO: 2916169 - DNA, 25 bp, Homo sapien
tattgccttgtgtattccacttaaa

SEQ ID NO: 2916170 - DNA, 25 bp, Homo sapien
aagagatggtgacgcatgtaaataa

SEQ ID NO: 2916171 - DNA, 25 bp, Homo sapien
gatattgccttgtgtattccactta

SEQ ID NO: 2916172 - DNA, 25 bp, Homo sapien
tgtaaaagagatggtgacgcatgta

SEQ ID NO: 2916173 - DNA, 25 bp, Homo sapien
ccttctttggtagacggaatagttg

SEQ ID NO: 2916174 - DNA, 25 bp, Homo sapien
gaaattggtataacgatgctctgat

SEQ ID NO: 2916175 - DNA, 25 bp, Homo sapien
tctccaaagtgatatatgaagactc

SEQ ID NO: 2916176 - DNA, 25 bp, Homo sapien
aaaagttatggtgctgtataggtgc

SEQ ID NO: 2916177 - DNA, 25 bp, Homo sapien
gcagaccctcaaactgacacaagac

SEQ ID NO: 2916178 - DNA, 25 bp, Homo sapien
gggaacttcactggtgctaagcagg

SEQ ID NO: 2916179 - DNA, 25 bp, Homo sapien
cactggtgctaagcaggcctcatct

SEQ ID NO: 2916180 - DNA, 25 bp, Homo sapien
gggcaaagcagaccctcaaactgac

SEQ ID NO: 2916181 - DNA, 25 bp, Homo sapien
ttcaaggataagggcaacagcaaca

SEQ ID NO: 2916182 - DNA, 25 bp, Homo sapien
caaggataagggcaacagcaacagc

SEQ ID NO: 2916183 - DNA, 25 bp, Homo sapien
aaggataagggcaacagcaacagct

SEQ ID NO: 2916184 - DNA, 25 bp, Homo sapien
tcaaggataagggcaacagcaacag

SEQ ID NO: 2916185 - DNA, 25 bp, Homo sapien
agtccctcttgagcacgttgacgca

SEQ ID NO: 2916186 - DNA, 25 bp, Homo sapien
ccagtccctcttgagcacgttgacg

SEQ ID NO: 2916187 - DNA, 25 bp, Homo sapien
cagtccctcttgagcacgttgacgc

SEQ ID NO: 2916188 - DNA, 25 bp, Homo sapien
cagcagtacgtgtcggatgcccagc

SEQ ID NO: 2916189 - DNA, 25 bp, Homo sapien
agcagtacgtgtcggatgcccagct

SEQ ID NO: 2916190 - DNA, 25 bp, Homo sapien
cgcctcctcgttgagtgcagactcg

SEQ ID NO: 2916191 - DNA, 25 bp, Homo sapien
agcgcccgcttcttgtccgtctttt

SEQ ID NO: 2916192 - DNA, 25 bp, Homo sapien
tcttatcgcgctcgccagcatgctt

SEQ ID NO: 2916193 - DNA, 25 bp, Homo sapien
ccccgtggatctctgtgagcagacg

SEQ ID NO: 2916194 - DNA, 25 bp, Homo sapien
gaaaaacaaatccaggtctcagtgc

SEQ ID NO: 2916195 - DNA, 25 bp, Homo sapien
gccataatttaaataacttagagac

SEQ ID NO: 2916196 - DNA, 25 bp, Homo sapien
taaataacttagagacagagttgga

SEQ ID NO: 2916197 - DNA, 25 bp, Homo sapien
tcagtgccccctgtaccctccccga

SEQ ID NO: 2916198 - DNA, 25 bp, Homo sapien
tctggcgatgccaaggcgcttctgg

SEQ ID NO: 2916199 - DNA, 25 bp, Homo sapien
gagtctggcgatgccaaggcgcttc

SEQ ID NO: 2916200 - DNA, 25 bp, Homo sapien
tgccaaggcgcttctgggaattgta

SEQ ID NO: 2916201 - DNA, 25 bp, Homo sapien
tgcggagaaccggagtctggcgatg

SEQ ID NO: 2916202 - DNA, 25 bp, Homo sapien
agcgtctgctcctcccccgtccaga

SEQ ID NO: 2916203 - DNA, 25 bp, Homo sapien
tcctcccccgtccagacacagagag

SEQ ID NO: 2916204 - DNA, 25 bp, Homo sapien
ccgtccagacacagagagggttctc

SEQ ID NO: 2916205 - DNA, 25 bp, Homo sapien
acacagagagggttctctgctctgg

SEQ ID NO: 2916206 - DNA, 25 bp, Homo sapien
gacgcagtatcttttgagctaaagc

SEQ ID NO: 2916207 - DNA, 25 bp, Homo sapien
cagaacgcagagtctgacgcagtat

SEQ ID NO: 2916208 - DNA, 25 bp, Homo sapien
agggccctgcagagtcagacactgg

SEQ ID NO: 2916209 - DNA, 25 bp, Homo sapien
tgggtgacctacaacaagctacttt

SEQ ID NO: 2916210 - DNA, 25 bp, Homo sapien
ggaattgccagcattttgccaaaaa

SEQ ID NO: 2916211 - DNA, 25 bp, Homo sapien
cctgggaattgccagcattttgcca

SEQ ID NO: 2916212 - DNA, 25 bp, Homo sapien
ttcctgggaattgccagcattttgc

SEQ ID NO: 2916213 - DNA, 25 bp, Homo sapien
tgggaattgccagcattttgccaaa

SEQ ID NO: 2916214 - DNA, 25 bp, Homo sapien
tctgtgctgcccacacacattttac

SEQ ID NO: 2916215 - DNA, 25 bp, Homo sapien
ctctgtgctgcccacacacatttta

SEQ ID NO: 2916216 - DNA, 25 bp, Homo sapien
ctgtgctgcccacacacattttaca

SEQ ID NO: 2916217 - DNA, 25 bp, Homo sapien
tgctgtccggcaaagagcagccata

SEQ ID NO: 2916218 - DNA, 25 bp, Homo sapien
gctgtccggcaaagagcagccatat

SEQ ID NO: 2916219 - DNA, 25 bp, Homo sapien
ctgtccggcaaagagcagccatatt

SEQ ID NO: 2916220 - DNA, 25 bp, Homo sapien
cattacatccctgtacaagactctc

SEQ ID NO: 2916221 - DNA, 25 bp, Homo sapien
ttacatccctgtacaagactctctg

SEQ ID NO: 2916222 - DNA, 25 bp, Homo sapien
cagcattacatccctgtacaagact

SEQ ID NO: 2916223 - DNA, 25 bp, Homo sapien
gcattacatccctgtacaagactct

SEQ ID NO: 2916224 - DNA, 25 bp, Homo sapien
gagatgataccaggtttggaaaatg

SEQ ID NO: 2916225 - DNA, 25 bp, Homo sapien
tgataccaggtttggaaaatggaaa

SEQ ID NO: 2916226 - DNA, 25 bp, Homo sapien
cttccaactaggagatgataccagg

SEQ ID NO: 2916227 - DNA, 25 bp, Homo sapien
taccacttcttccaactaggagatg

SEQ ID NO: 2916228 - DNA, 25 bp, Homo sapien
taggagaggagggattttcatccct

SEQ ID NO: 2916229 - DNA, 25 bp, Homo sapien
ggcactatttccatcagtacaagaa

SEQ ID NO: 2916230 - DNA, 25 bp, Homo sapien
ttaggctagtccagatttcagttca

SEQ ID NO: 2916231 - DNA, 25 bp, Homo sapien
aaagcgaacaaaagctgcccacagg

SEQ ID NO: 2916232 - DNA, 25 bp, Homo sapien
tcagagtggtctgtctcaccgctaa

SEQ ID NO: 2916233 - DNA, 25 bp, Homo sapien
taaattaccaaagatgaggactctg

SEQ ID NO: 2916234 - DNA, 25 bp, Homo sapien
gaatttcaagctgtactaacaccga

SEQ ID NO: 2916235 - DNA, 25 bp, Homo sapien
gacagacactcttatagacgaccct

SEQ ID NO: 2916236 - DNA, 25 bp, Homo sapien
gctgaggttcagcatcgtggcctgg

SEQ ID NO: 2916237 - DNA, 25 bp, Homo sapien
tgctgaggttcagcatcgtggcctg

SEQ ID NO: 2916238 - DNA, 25 bp, Homo sapien
cacagaaggacacgggcactctcca

SEQ ID NO: 2916239 - DNA, 25 bp, Homo sapien
cagccctgacatccccgcccttctt

SEQ ID NO: 2916240 - DNA, 25 bp, Homo sapien
tccagccctgacatccccgcccttc

SEQ ID NO: 2916241 - DNA, 25 bp, Homo sapien
acacagaaggacacgggcactctcc

SEQ ID NO: 2916242 - DNA, 25 bp, Homo sapien
gacttttggttagcctggagcctgg

SEQ ID NO: 2916243 - DNA, 25 bp, Homo sapien
cagacttttggttagcctggagcct

SEQ ID NO: 2916244 - DNA, 25 bp, Homo sapien
ccaagtctaactgggtgcactggag

SEQ ID NO: 2916245 - DNA, 25 bp, Homo sapien
tcattcaacttgagtttccgctcca

SEQ ID NO: 2916246 - DNA, 25 bp, Homo sapien
cacgaaaatgatgacaagcagaaat

SEQ ID NO: 2916247 - DNA, 25 bp, Homo sapien
gagaggcctcaatacattcaaggag

SEQ ID NO: 2916248 - DNA, 25 bp, Homo sapien
aaatgatgacaagcagaaatagtac

SEQ ID NO: 2916249 - DNA, 25 bp, Homo sapien
aaatagtacagagaggagaggcctc

SEQ ID NO: 2916250 - DNA, 25 bp, Homo sapien
ttccaggacaagcatgtatatgcag

SEQ ID NO: 2916251 - DNA, 25 bp, Homo sapien
tgtggactcttttgcatggtaagca

SEQ ID NO: 2916252 - DNA, 25 bp, Homo sapien
catcagggctccaaagtgagtcaaa

SEQ ID NO: 2916253 - DNA, 25 bp, Homo sapien
tcccaatgttaagggcaagctctga

SEQ ID NO: 2916254 - DNA, 25 bp, Homo sapien
ctccaagaactggacagtgttgctg

SEQ ID NO: 2916255 - DNA, 25 bp, Homo sapien
tcttctccatctcggcactcctgta

SEQ ID NO: 2916256 - DNA, 25 bp, Homo sapien
caggtgggccttgataccgttggcc

SEQ ID NO: 2916257 - DNA, 25 bp, Homo sapien
ttggcctggctcagcgcagcttgct

SEQ ID NO: 2916258 - DNA, 25 bp, Homo sapien
gattaagtgtacagtggattccgtg

SEQ ID NO: 2916259 - DNA, 25 bp, Homo sapien
ttccgtgataactttgcggatgccc

SEQ ID NO: 2916260 - DNA, 25 bp, Homo sapien
aacactagggaaggtgatgtcttca

SEQ ID NO: 2916261 - DNA, 25 bp, Homo sapien
gatgcccgagagtttatccttcagc

SEQ ID NO: 2916262 - DNA, 25 bp, Homo sapien
ggcagacacttgagttctgatgtca

SEQ ID NO: 2916263 - DNA, 25 bp, Homo sapien
tggaggaactgttccctggtgctgg

SEQ ID NO: 2916264 - DNA, 25 bp, Homo sapien
ggaagtccaatatttgcgctgaaca

SEQ ID NO: 2916265 - DNA, 25 bp, Homo sapien
ggtgctgggctcaggtttggaagtc

SEQ ID NO: 2916266 - DNA, 25 bp, Homo sapien
ccgggtcgaacgtgatgtcatgcac

SEQ ID NO: 2916267 - DNA, 25 bp, Homo sapien
cgggtcgaacgtgatgtcatgcaca

SEQ ID NO: 2916268 - DNA, 25 bp, Homo sapien
tacgccatagaaggaaaggatccct

SEQ ID NO: 2916269 - DNA, 25 bp, Homo sapien
gacggtgctggcttctcgggttcct

SEQ ID NO: 2916270 - DNA, 25 bp, Homo sapien
tacaatccggatggcgttttccttc

SEQ ID NO: 2916271 - DNA, 25 bp, Homo sapien
gcaggcaaacttgtgaaccagagtc

SEQ ID NO: 2916272 - DNA, 25 bp, Homo sapien
cagagaccccataggatttcaaaag

SEQ ID NO: 2916273 - DNA, 25 bp, Homo sapien
tgcaaatcccatcactgtagctggc

SEQ ID NO: 2916274 - DNA, 25 bp, Homo sapien
gaccccataggatttcaaaagccag

SEQ ID NO: 2916275 - DNA, 25 bp, Homo sapien
gcaaacacatagagaacagcaccat

SEQ ID NO: 2916276 - DNA, 25 bp, Homo sapien
gatttggtgcctaaaaattactaca

SEQ ID NO: 2916277 - DNA, 25 bp, Homo sapien
aagatgagggagatttggtgcctaa

SEQ ID NO: 2916278 - DNA, 25 bp, Homo sapien
gagaatggcactagaagatgaggga

SEQ ID NO: 2916279 - DNA, 25 bp, Homo sapien
ttactacaaacaggcagggcgcagt

SEQ ID NO: 2916280 - DNA, 25 bp, Homo sapien
ttattatgataactctgcaatcttt

SEQ ID NO: 2916281 - DNA, 25 bp, Homo sapien
gttagcaatttattatgataactct

SEQ ID NO: 2916282 - DNA, 25 bp, Homo sapien
tacgcaagttagcaatttattatga

SEQ ID NO: 2916283 - DNA, 25 bp, Homo sapien
gcaagttagcaatttattatgataa

SEQ ID NO: 2916284 - DNA, 25 bp, Homo sapien
caacctcttctgtctgaagaggaat

SEQ ID NO: 2916285 - DNA, 25 bp, Homo sapien
gctcaacctcttctgtctgaagagg

SEQ ID NO: 2916286 - DNA, 25 bp, Homo sapien
agctcaacctcttctgtctgaagag

SEQ ID NO: 2916287 - DNA, 25 bp, Homo sapien
tcaacctcttctgtctgaagaggaa

SEQ ID NO: 2916288 - DNA, 25 bp, Homo sapien
ggaaagcctatctctctcagtaact

SEQ ID NO: 2916289 - DNA, 25 bp, Homo sapien
tggatggaaagcctatctctctcag

SEQ ID NO: 2916290 - DNA, 25 bp, Homo sapien
gatggaaagcctatctctctcagta

SEQ ID NO: 2916291 - DNA, 25 bp, Homo sapien
gagcaaaagtaaatggctgccatgg

SEQ ID NO: 2916292 - DNA, 25 bp, Homo sapien
tttagccctgcgcacttgcaacggc

SEQ ID NO: 2916293 - DNA, 25 bp, Homo sapien
tagccctgcgcacttgcaacggcaa

SEQ ID NO: 2916294 - DNA, 25 bp, Homo sapien
cattttagccctgcgcacttgcaac

SEQ ID NO: 2916295 - DNA, 25 bp, Homo sapien
cttgcaacggcaacgccaccaaaca

SEQ ID NO: 2916296 - DNA, 25 bp, Homo sapien
gaatcggttcccttctcacaacgaa

SEQ ID NO: 2916297 - DNA, 25 bp, Homo sapien
gaatgccaactagaaacctcctctg

SEQ ID NO: 2916298 - DNA, 25 bp, Homo sapien
cgtctcacacttccggcatagaggg

SEQ ID NO: 2916299 - DNA, 25 bp, Homo sapien
gatatgtcattgatcctgcagaacc

SEQ ID NO: 2916300 - DNA, 25 bp, Homo sapien
taagagagtataattcgccttggtc

SEQ ID NO: 2916301 - DNA, 25 bp, Homo sapien
tcaaggaggacttcacaactttccc

SEQ ID NO: 2916302 - DNA, 25 bp, Homo sapien
cctgttatagatgaaatcctttccc

SEQ ID NO: 2916303 - DNA, 25 bp, Homo sapien
tctgatcacattggcagcagtgagc

SEQ ID NO: 2916304 - DNA, 25 bp, Homo sapien
tcttcgggggccctctagtctctgc

SEQ ID NO: 2916305 - DNA, 25 bp, Homo sapien
tgccttctggtcttcgggggccctc

SEQ ID NO: 2916306 - DNA, 25 bp, Homo sapien
tggtcttcgggggccctctagtctc

SEQ ID NO: 2916307 - DNA, 25 bp, Homo sapien
tctggtcttcgggggccctctagtc

SEQ ID NO: 2916308 - DNA, 25 bp, Homo sapien
cttgtgaggtcgcagacttggagct

SEQ ID NO: 2916309 - DNA, 25 bp, Homo sapien
tgtgctgagttttggctgtccaata

SEQ ID NO: 2916310 - DNA, 25 bp, Homo sapien
tttggctgtccaatagacttgtgag

SEQ ID NO: 2916311 - DNA, 25 bp, Homo sapien
aaacacacatctgtgatgtcttgat

SEQ ID NO: 2916312 - DNA, 25 bp, Homo sapien
ctgccccaagcaagtgttcattttc

SEQ ID NO: 2916313 - DNA, 25 bp, Homo sapien
tagatgctgccccaagcaagtgttc

SEQ ID NO: 2916314 - DNA, 25 bp, Homo sapien
cagggttagatgctgccccaagcaa

SEQ ID NO: 2916315 - DNA, 25 bp, Homo sapien
gggttagatgctgccccaagcaagt

SEQ ID NO: 2916316 - DNA, 25 bp, Homo sapien
gaaaacagcctattcatttcggata

SEQ ID NO: 2916317 - DNA, 25 bp, Homo sapien
ttcatttcggatatacaccggagtg

SEQ ID NO: 2916318 - DNA, 25 bp, Homo sapien
ttttccagaaaacagcctattcatt

SEQ ID NO: 2916319 - DNA, 25 bp, Homo sapien
tacaccggagtgaattcctccatgg

SEQ ID NO: 2916320 - DNA, 25 bp, Homo sapien
tcaaccaatagattgcagggatcgt

SEQ ID NO: 2916321 - DNA, 25 bp, Homo sapien
gggatcgtaccctggcttggttatg

SEQ ID NO: 2916322 - DNA, 25 bp, Homo sapien
atccaggtcaaccaatagattgcag

SEQ ID NO: 2916323 - DNA, 25 bp, Homo sapien
tagattgcagggatcgtaccctggc

SEQ ID NO: 2916324 - DNA, 25 bp, Homo sapien
gtaacggatgaagtctcggtatttg

SEQ ID NO: 2916325 - DNA, 25 bp, Homo sapien
atgggcaggtaacggatgaagtctc

SEQ ID NO: 2916326 - DNA, 25 bp, Homo sapien
gcaggtaacggatgaagtctcggta

SEQ ID NO: 2916327 - DNA, 25 bp, Homo sapien
aggtggatgggcaggtaacggatga

SEQ ID NO: 2916328 - DNA, 25 bp, Homo sapien
ggaaatcccctcatacaccccagca

SEQ ID NO: 2916329 - DNA, 25 bp, Homo sapien
gaaatcccctcatacaccccagcat

SEQ ID NO: 2916330 - DNA, 25 bp, Homo sapien
aaatcccctcatacaccccagcata

SEQ ID NO: 2916331 - DNA, 25 bp, Homo sapien
gggaaatcccctcatacaccccagc

SEQ ID NO: 2916332 - DNA, 25 bp, Homo sapien
tcacagaggcgcacttgttcagggt

SEQ ID NO: 2916333 - DNA, 25 bp, Homo sapien
tcttgacctgttgagccatggcggc

SEQ ID NO: 2916334 - DNA, 25 bp, Homo sapien
tgaagccgtgcgctgacaagtccat

SEQ ID NO: 2916335 - DNA, 25 bp, Homo sapien
ctgcaagaaggtaatctggttctga

SEQ ID NO: 2916336 - DNA, 25 bp, Homo sapien
tggcataattaggatcaattcctct

SEQ ID NO: 2916337 - DNA, 25 bp, Homo sapien
ggcataattaggatcaattcctctt

SEQ ID NO: 2916338 - DNA, 25 bp, Homo sapien
cataattaggatcaattcctcttgt

SEQ ID NO: 2916339 - DNA, 25 bp, Homo sapien
gcataattaggatcaattcctcttg

SEQ ID NO: 2916340 - DNA, 25 bp, Homo sapien
cacttcggatgtttcacacgcatgc

SEQ ID NO: 2916341 - DNA, 25 bp, Homo sapien
tcggatgtttcacacgcatgctctt

SEQ ID NO: 2916342 - DNA, 25 bp, Homo sapien
cttccacttcggatgtttcacacgc

SEQ ID NO: 2916343 - DNA, 25 bp, Homo sapien
ggatgtttcacacgcatgctcttcc

SEQ ID NO: 2916344 - DNA, 25 bp, Homo sapien
gtcagagagaatgcgaacattgtag

SEQ ID NO: 2916345 - DNA, 25 bp, Homo sapien
tgctgcgtttcctcgttctggtatg

SEQ ID NO: 2916346 - DNA, 25 bp, Homo sapien
atgcagtccacaggttgtactcatt

SEQ ID NO: 2916347 - DNA, 25 bp, Homo sapien
gcgaacattgtaggtcccacagaaa

SEQ ID NO: 2916348 - DNA, 25 bp, Homo sapien
gcatggcctcggaattcaacgggta

SEQ ID NO: 2916349 - DNA, 25 bp, Homo sapien
gatacttaggtcatagctcccgctt

SEQ ID NO: 2916350 - DNA, 25 bp, Homo sapien
gatgacacagctatcagatctcccc

SEQ ID NO: 2916351 - DNA, 25 bp, Homo sapien
ccccggaatagtggatgactcggtt

SEQ ID NO: 2916352 - DNA, 25 bp, Homo sapien
gcaagtgatagtcccctggtgacca

SEQ ID NO: 2916353 - DNA, 25 bp, Homo sapien
tcttcctccagatacgagcctgttc

SEQ ID NO: 2916354 - DNA, 25 bp, Homo sapien
ctccagatacgagcctgttcttaca

SEQ ID NO: 2916355 - DNA, 25 bp, Homo sapien
gaagattcgtgtgcaaaccccactt

SEQ ID NO: 2916356 - DNA, 25 bp, Homo sapien
tctttgtgtctaaacgtcttcaggc

SEQ ID NO: 2916357 - DNA, 25 bp, Homo sapien
cacagctgctcacaatgtaggtatc

SEQ ID NO: 2916358 - DNA, 25 bp, Homo sapien
taggtatcattgatcctggtggcca

SEQ ID NO: 2916359 - DNA, 25 bp, Homo sapien
gtgtctaaacgtcttcaggcacttc

SEQ ID NO: 2916360 - DNA, 25 bp, Homo sapien
aggccatcaggcagcgctcgtactt

SEQ ID NO: 2916361 - DNA, 25 bp, Homo sapien
aggcagcgctcgtacttccccacca

SEQ ID NO: 2916362 - DNA, 25 bp, Homo sapien
agcgctcgtacttccccaccatgct

SEQ ID NO: 2916363 - DNA, 25 bp, Homo sapien
ggccatcaggcagcgctcgtacttc

SEQ ID NO: 2916364 - DNA, 25 bp, Homo sapien
tctgcacaggcgctgatgacccgga

SEQ ID NO: 2916365 - DNA, 25 bp, Homo sapien
tgtaaattcggatcttgccatctgc

SEQ ID NO: 2916366 - DNA, 25 bp, Homo sapien
ctgttgccctgaataaagaaggaca

SEQ ID NO: 2916367 - DNA, 25 bp, Homo sapien
aagagaagggacacgtcgagcacct

SEQ ID NO: 2916368 - DNA, 25 bp, Homo sapien
cggcttcaggagtactcgggacttg

SEQ ID NO: 2916369 - DNA, 25 bp, Homo sapien
tcaaactggaacatgagaacattgc

SEQ ID NO: 2916370 - DNA, 25 bp, Homo sapien
tcgttttttccacggcatactgcca

SEQ ID NO: 2916371 - DNA, 25 bp, Homo sapien
cacttagagagaatttccatgagac

SEQ ID NO: 2916372 - DNA, 25 bp, Homo sapien
actttgaagttcctctattaacact

SEQ ID NO: 2916373 - DNA, 25 bp, Homo sapien
atctcttcggggtgattttgacttt

SEQ ID NO: 2916374 - DNA, 25 bp, Homo sapien
catctcttcggggtgattttgactt

SEQ ID NO: 2916375 - DNA, 25 bp, Homo sapien
ctttgaagttcctctattaacactg

SEQ ID NO: 2916376 - DNA, 25 bp, Homo sapien
caggagtttccaattgtccttgttt

SEQ ID NO: 2916377 - DNA, 25 bp, Homo sapien
tacagggataggcaaattccccgga

SEQ ID NO: 2916378 - DNA, 25 bp, Homo sapien
ctacagggataggcaaattccccgg

SEQ ID NO: 2916379 - DNA, 25 bp, Homo sapien
gaacctggagcggataatcatgggc

SEQ ID NO: 2916380 - DNA, 25 bp, Homo sapien
tcaagggctgtatagatgcgaggcc

SEQ ID NO: 2916381 - DNA, 25 bp, Homo sapien
ttcacggtcaacagcacgaactcag

SEQ ID NO: 2916382 - DNA, 25 bp, Homo sapien
ggtatgaaattgaaggtccccagac

SEQ ID NO: 2916383 - DNA, 25 bp, Homo sapien
tattgtaaaacattgtaatttccca

SEQ ID NO: 2916384 - DNA, 25 bp, Homo sapien
tccgcttggctttctgtttattgta

SEQ ID NO: 2916385 - DNA, 25 bp, Homo sapien
aaacattgtaatttcccaaggctgg

SEQ ID NO: 2916386 - DNA, 25 bp, Homo sapien
tctgtttattgtaaaacattgtaat

SEQ ID NO: 2916387 - DNA, 25 bp, Homo sapien
acagtgggctctaagtggaaagctt

SEQ ID NO: 2916388 - DNA, 25 bp, Homo sapien
agggaaaggtattggggccacagtg

SEQ ID NO: 2916389 - DNA, 25 bp, Homo sapien
gagcggcccggacacggcggaggcg

SEQ ID NO: 2916390 - DNA, 25 bp, Homo sapien
agtggaaagcttcatggtctgtttt

SEQ ID NO: 2916391 - DNA, 25 bp, Homo sapien
aaaatagcatcgcacccctgggtgt

SEQ ID NO: 2916392 - DNA, 25 bp, Homo sapien
tactggtcacaaccctatccctggg

SEQ ID NO: 2916393 - DNA, 25 bp, Homo sapien
caagaagtacttgctctgcgccgca

SEQ ID NO: 2916394 - DNA, 25 bp, Homo sapien
ggtgtcgccgattcctacaaaatag

SEQ ID NO: 2916395 - DNA, 25 bp, Homo sapien
caagtcacagagcaagccgaggcta

SEQ ID NO: 2916396 - DNA, 25 bp, Homo sapien
gaaaactctagggtgcagatgaggc

SEQ ID NO: 2916397 - DNA, 25 bp, Homo sapien
cagagaataatcgaagtctcagctc

SEQ ID NO: 2916398 - DNA, 25 bp, Homo sapien
aataatgtggttacagcatcaggaa

SEQ ID NO: 2916399 - DNA, 25 bp, Homo sapien
cttttcttggtctattagtcgtctc

SEQ ID NO: 2916400 - DNA, 25 bp, Homo sapien
ctcctcttccgcatcaaacagtgaa

SEQ ID NO: 2916401 - DNA, 25 bp, Homo sapien
gcacattgaaacaactctgccttga

SEQ ID NO: 2916402 - DNA, 25 bp, Homo sapien
tctttgtcgtacactaaacgtcaaa

SEQ ID NO: 2916403 - DNA, 25 bp, Homo sapien
taaaactcagtattaagtatgccaa

SEQ ID NO: 2916404 - DNA, 25 bp, Homo sapien
tggacactaacacagctcatgcaac

SEQ ID NO: 2916405 - DNA, 25 bp, Homo sapien
tagtacattcacagatttgtacaac

SEQ ID NO: 2916406 - DNA, 25 bp, Homo sapien
aacaatctaatggtttttagtacat

SEQ ID NO: 2916407 - DNA, 25 bp, Homo sapien
caaccatcactccaattttacaact

SEQ ID NO: 2916408 - DNA, 25 bp, Homo sapien
tcatacaatttacttatttaaggta

SEQ ID NO: 2916409 - DNA, 25 bp, Homo sapien
taagtggaaaaacgatgctactgga

SEQ ID NO: 2916410 - DNA, 25 bp, Homo sapien
gaataagtggaaaaacgatgctact

SEQ ID NO: 2916411 - DNA, 25 bp, Homo sapien
agaataagtggaaaaacgatgctac

SEQ ID NO: 2916412 - DNA, 25 bp, Homo sapien
gtggaaaaacgatgctactggatgt

SEQ ID NO: 2916413 - DNA, 25 bp, Homo sapien
acaagataattgtcaccatacaggt

SEQ ID NO: 2916414 - DNA, 25 bp, Homo sapien
tgtcaccatacaggtaataaagctg

SEQ ID NO: 2916415 - DNA, 25 bp, Homo sapien
gtcacacgacaacaacaagataatt

SEQ ID NO: 2916416 - DNA, 25 bp, Homo sapien
aaaagtcacacgacaacaacaagat

SEQ ID NO: 2916417 - DNA, 25 bp, Homo sapien
agaaacgtgtatcaaaactgtgagc

SEQ ID NO: 2916418 - DNA, 25 bp, Homo sapien
ttctcagcattatgcggcctatgga

SEQ ID NO: 2916419 - DNA, 25 bp, Homo sapien
caaagaagactggacaacagaaaaa

SEQ ID NO: 2916420 - DNA, 25 bp, Homo sapien
gcctatggaaactggccatcaccaa

SEQ ID NO: 2916421 - DNA, 25 bp, Homo sapien
gaactgttttacttgctccatcttc

SEQ ID NO: 2916422 - DNA, 25 bp, Homo sapien
gatttctgaccaatcttagtattct

SEQ ID NO: 2916423 - DNA, 25 bp, Homo sapien
tgatttaagcttccttgacagttgc

SEQ ID NO: 2916424 - DNA, 25 bp, Homo sapien
tgttgcagaagatacacgactggtt

SEQ ID NO: 2916425 - DNA, 25 bp, Homo sapien
ccacgaaagggaacactcaaagaag

SEQ ID NO: 2916426 - DNA, 25 bp, Homo sapien
tgagtctatgaaagggacccatggc

SEQ ID NO: 2916427 - DNA, 25 bp, Homo sapien
taagatataagttgcctggccaggc

SEQ ID NO: 2916428 - DNA, 25 bp, Homo sapien
ggcactgatgccctaatgaagaaag

SEQ ID NO: 2916429 - DNA, 25 bp, Homo sapien
cacgcacggcctcaaaatactattt

SEQ ID NO: 2916430 - DNA, 25 bp, Homo sapien
tgtatagcagtaactgaaaccgcag

SEQ ID NO: 2916431 - DNA, 25 bp, Homo sapien
tcagtcagtctctcaagttaccaag

SEQ ID NO: 2916432 - DNA, 25 bp, Homo sapien
actgagttaagtcctgcaagggaaa

SEQ ID NO: 2916433 - DNA, 25 bp, Homo sapien
tcaatgtgattccaccaacgtaggc

SEQ ID NO: 2916434 - DNA, 25 bp, Homo sapien
tgtgattccaccaacgtaggccaac

SEQ ID NO: 2916435 - DNA, 25 bp, Homo sapien
ctttccatcttcatcaatgtgattc

SEQ ID NO: 2916436 - DNA, 25 bp, Homo sapien
catcaatgtgattccaccaacgtag

SEQ ID NO: 2916437 - DNA, 25 bp, Homo sapien
tactggacaggcaataagtcccaac

SEQ ID NO: 2916438 - DNA, 25 bp, Homo sapien
aagcaaatatcacccacagtactgg

SEQ ID NO: 2916439 - DNA, 25 bp, Homo sapien
ggagaagagtgcactaaaagcaaat

SEQ ID NO: 2916440 - DNA, 25 bp, Homo sapien
gaagagtgcactaaaagcaaatatc

SEQ ID NO: 2916441 - DNA, 25 bp, Homo sapien
tcagacatcttaatggattatttga

SEQ ID NO: 2916442 - DNA, 25 bp, Homo sapien
gagccccactaaggaagagaacgca

SEQ ID NO: 2916443 - DNA, 25 bp, Homo sapien
gccacgtgcctcagacatcaggaga

SEQ ID NO: 2916444 - DNA, 25 bp, Homo sapien
ggttaacacaggatcaaactggctt

SEQ ID NO: 2916445 - DNA, 25 bp, Homo sapien
caagagcctggcaagttctccacat

SEQ ID NO: 2916446 - DNA, 25 bp, Homo sapien
aggaagaggaagctctgcaaagcca

SEQ ID NO: 2916447 - DNA, 25 bp, Homo sapien
ggaagaggaagctctgcaaagccat

SEQ ID NO: 2916448 - DNA, 25 bp, Homo sapien
tctctgtgccataaatgagacaagg

SEQ ID NO: 2916449 - DNA, 25 bp, Homo sapien
caaggcagactgtcatgagaaagag

SEQ ID NO: 2916450 - DNA, 25 bp, Homo sapien
aggttggcaccttgtagcaccacac

SEQ ID NO: 2916451 - DNA, 25 bp, Homo sapien
tcaggaagtctgatcatctccagtg

SEQ ID NO: 2916452 - DNA, 25 bp, Homo sapien
caggaagtctgatcatctccagtgt

SEQ ID NO: 2916453 - DNA, 25 bp, Homo sapien
aggaagtctgatcatctccagtgtt

SEQ ID NO: 2916454 - DNA, 25 bp, Homo sapien
ggaatgtgcatacctacaccacaga

SEQ ID NO: 2916455 - DNA, 25 bp, Homo sapien
tgcaacatggactaagctctaaaag

SEQ ID NO: 2916456 - DNA, 25 bp, Homo sapien
tacatggccgtgtgcatacctatgg

SEQ ID NO: 2916457 - DNA, 25 bp, Homo sapien
gccaacactcctcgttgcaacatgg

SEQ ID NO: 2916458 - DNA, 25 bp, Homo sapien
tagaagcaaaactttctcctgaaaa

SEQ ID NO: 2916459 - DNA, 25 bp, Homo sapien
agcaaaactttctcctgaaaacaat

SEQ ID NO: 2916460 - DNA, 25 bp, Homo sapien
catagaagcaaaactttctcctgaa

SEQ ID NO: 2916461 - DNA, 25 bp, Homo sapien
gaagcaaaactttctcctgaaaaca

SEQ ID NO: 2916462 - DNA, 25 bp, Homo sapien
ataccactggccctaattgttttca

SEQ ID NO: 2916463 - DNA, 25 bp, Homo sapien
accactggccctaattgttttcact

SEQ ID NO: 2916464 - DNA, 25 bp, Homo sapien
ttcacttgcttgcatacgtctaaga

SEQ ID NO: 2916465 - DNA, 25 bp, Homo sapien
tgcatacgtctaagaaatttcccca

SEQ ID NO: 2916466 - DNA, 25 bp, Homo sapien
atataaagttttgcaccttcaaagc

SEQ ID NO: 2916467 - DNA, 25 bp, Homo sapien
aatctgctgattaagacttcaacaa

SEQ ID NO: 2916468 - DNA, 25 bp, Homo sapien
cataatctgctgattaagacttcaa

SEQ ID NO: 2916469 - DNA, 25 bp, Homo sapien
cacaacataatctgctgattaagac

SEQ ID NO: 2916470 - DNA, 25 bp, Homo sapien
agggctactatacccacaagatggg

SEQ ID NO: 2916471 - DNA, 25 bp, Homo sapien
tattagggaatacagggtagctcct

SEQ ID NO: 2916472 - DNA, 25 bp, Homo sapien
cctggaagtgtatccattggcccaa

SEQ ID NO: 2916473 - DNA, 25 bp, Homo sapien
gtggccacaccaagatacagcgata

SEQ ID NO: 2916474 - DNA, 25 bp, Homo sapien
aatataatagcctagccattagggc

SEQ ID NO: 2916475 - DNA, 25 bp, Homo sapien
taagttccaacatgcctatggagtg

SEQ ID NO: 2916476 - DNA, 25 bp, Homo sapien
ttagggctaaatcagcttccagctg

SEQ ID NO: 2916477 - DNA, 25 bp, Homo sapien
tattcagcgaggttcaaagaagtca

SEQ ID NO: 2916478 - DNA, 25 bp, Homo sapien
caatataacttacgtgaggcatatt

SEQ ID NO: 2916479 - DNA, 25 bp, Homo sapien
aaacacaaacaatataacttacgtg

SEQ ID NO: 2916480 - DNA, 25 bp, Homo sapien
tataacttacgtgaggcatattttt

SEQ ID NO: 2916481 - DNA, 25 bp, Homo sapien
caaacaatataacttacgtgaggca

SEQ ID NO: 2916482 - DNA, 25 bp, Homo sapien
gagggcctaagggacagactgttca

SEQ ID NO: 2916483 - DNA, 25 bp, Homo sapien
aaatttcatagaatgtccatgctgg

SEQ ID NO: 2916484 - DNA, 25 bp, Homo sapien
ctggtttccaaagcacatggcatct

SEQ ID NO: 2916485 - DNA, 25 bp, Homo sapien
gcaacacagaatattagaacaccag

SEQ ID NO: 2916486 - DNA, 25 bp, Homo sapien
ggaccaccactcggctcttggcagt

SEQ ID NO: 2916487 - DNA, 25 bp, Homo sapien
caggaccaccactcggctcttggca

SEQ ID NO: 2916488 - DNA, 25 bp, Homo sapien
aggaccaccactcggctcttggcag

SEQ ID NO: 2916489 - DNA, 25 bp, Homo sapien
cctaagatacaaggttgcaaatagc

SEQ ID NO: 2916490 - DNA, 25 bp, Homo sapien
ttgcaaatagcaccaagagctggaa

SEQ ID NO: 2916491 - DNA, 25 bp, Homo sapien
agagctggaaacagatgccagctga

SEQ ID NO: 2916492 - DNA, 25 bp, Homo sapien
ttatgccttcatcctaagatacaag

SEQ ID NO: 2916493 - DNA, 25 bp, Homo sapien
tgagcactgcacctggctggaagat

SEQ ID NO: 2916494 - DNA, 25 bp, Homo sapien
agcactgcacctggctggaagattt

SEQ ID NO: 2916495 - DNA, 25 bp, Homo sapien
catgagcactgcacctggctggaag

SEQ ID NO: 2916496 - DNA, 25 bp, Homo sapien
tgcacctggctggaagatttttttt

SEQ ID NO: 2916497 - DNA, 25 bp, Homo sapien
ctaagggtcaaattagtaggatgcc

SEQ ID NO: 2916498 - DNA, 25 bp, Homo sapien
tatcattccctgagagaagtacaac

SEQ ID NO: 2916499 - DNA, 25 bp, Homo sapien
tcccagttctttggttgctgactga

SEQ ID NO: 2916500 - DNA, 25 bp, Homo sapien
tctggtagctgtgattggcacaggt

SEQ ID NO: 2916501 - DNA, 25 bp, Homo sapien
agcaggacaggaccagcagttcagt

SEQ ID NO: 2916502 - DNA, 25 bp, Homo sapien
gaccagcagttcagtaaggccagag

SEQ ID NO: 2916503 - DNA, 25 bp, Homo sapien
cagagaaggggcacacgggggaaag

SEQ ID NO: 2916504 - DNA, 25 bp, Homo sapien
caggacaggaccagcagttcagtaa

SEQ ID NO: 2916505 - DNA, 25 bp, Homo sapien
tgcaaaatccaaacgttcagttaaa

SEQ ID NO: 2916506 - DNA, 25 bp, Homo sapien
actacttagaacagttagataaaag

SEQ ID NO: 2916507 - DNA, 25 bp, Homo sapien
cgttcagttaaactacttagaacag

SEQ ID NO: 2916508 - DNA, 25 bp, Homo sapien
ctgcaaaatccaaacgttcagttaa

SEQ ID NO: 2916509 - DNA, 25 bp, Homo sapien
gcttattttcgcatcctttaagtct

SEQ ID NO: 2916510 - DNA, 25 bp, Homo sapien
cttattttcgcatcctttaagtctt

SEQ ID NO: 2916511 - DNA, 25 bp, Homo sapien
ctctgttgggctacatgttttaaaa

SEQ ID NO: 2916512 - DNA, 25 bp, Homo sapien
tctctgttgggctacatgttttaaa

SEQ ID NO: 2916513 - DNA, 25 bp, Homo sapien
tctgttgggctacatgttttaaaaa

SEQ ID NO: 2916514 - DNA, 25 bp, Homo sapien
cttctctgttgggctacatgtttta

SEQ ID NO: 2916515 - DNA, 25 bp, Homo sapien
tgcacatgaggaagtactggatata

SEQ ID NO: 2916516 - DNA, 25 bp, Homo sapien
gatatataggtatatcctctctatc

SEQ ID NO: 2916517 - DNA, 25 bp, Homo sapien
catgaggaagtactggatatatagg

SEQ ID NO: 2916518 - DNA, 25 bp, Homo sapien
ttcctcagatttttgcacatgagga

SEQ ID NO: 2916519 - DNA, 25 bp, Homo sapien
gaactcttcttctaatgtgttgacc

SEQ ID NO: 2916520 - DNA, 25 bp, Homo sapien
gagttatcaagtagtggctcttcct

SEQ ID NO: 2916521 - DNA, 25 bp, Homo sapien
ggaaatgtctcgaataccactgaga

SEQ ID NO: 2916522 - DNA, 25 bp, Homo sapien
tcctcaggacaagccggaattttgt

SEQ ID NO: 2916523 - DNA, 25 bp, Homo sapien
cttagcaaatctggtggtgccccgc

SEQ ID NO: 2916524 - DNA, 25 bp, Homo sapien
cagcacaggagttacttatgacctg

SEQ ID NO: 2916525 - DNA, 25 bp, Homo sapien
cactacggcccagaatgcctggcct

SEQ ID NO: 2916526 - DNA, 25 bp, Homo sapien
gagttacttatgacctgctccattt

SEQ ID NO: 2916527 - DNA, 25 bp, Homo sapien
aactgctgagctagggtggaattct

SEQ ID NO: 2916528 - DNA, 25 bp, Homo sapien
ggcctgccctaatcaatgtagaaga

SEQ ID NO: 2916529 - DNA, 25 bp, Homo sapien
taatgctgaatcagacaaattcggc

SEQ ID NO: 2916530 - DNA, 25 bp, Homo sapien
taatttaatgccttagcggagggtg

SEQ ID NO: 2916531 - DNA, 25 bp, Homo sapien
tctgctgatttagtccatcatcatc

SEQ ID NO: 2916532 - DNA, 25 bp, Homo sapien
taccatcagttagggttcctgataa

SEQ ID NO: 2916533 - DNA, 25 bp, Homo sapien
catcatcattgccaacagtagtacc

SEQ ID NO: 2916534 - DNA, 25 bp, Homo sapien
gtgctattacttctgtgcttctcca

SEQ ID NO: 2916535 - DNA, 25 bp, Homo sapien
ctgcccagtacagaggtgtgcctgg

SEQ ID NO: 2916536 - DNA, 25 bp, Homo sapien
aaagaaagccaggaggctatctgag

SEQ ID NO: 2916537 - DNA, 25 bp, Homo sapien
gaagagcaagaagtttagtgtagct

SEQ ID NO: 2916538 - DNA, 25 bp, Homo sapien
gggtgtttaagcaactgtgatagat

SEQ ID NO: 2916539 - DNA, 25 bp, Homo sapien
aagtacttaactcatgccaggccca

SEQ ID NO: 2916540 - DNA, 25 bp, Homo sapien
tagatgatccactgcatgctaagag

SEQ ID NO: 2916541 - DNA, 25 bp, Homo sapien
ggctgccttgctagctgacttttac

SEQ ID NO: 2916542 - DNA, 25 bp, Homo sapien
aggctgcctgtagctaccctggctg

SEQ ID NO: 2916543 - DNA, 25 bp, Homo sapien
gcccacttggatgtttgcagtcaga

SEQ ID NO: 2916544 - DNA, 25 bp, Homo sapien
ggtcagttccacacgaatgcagttt

SEQ ID NO: 2916545 - DNA, 25 bp, Homo sapien
gctaaacttgataatcccttgccca

SEQ ID NO: 2916546 - DNA, 25 bp, Homo sapien
cagcttgctgcaacacgtcattggc

SEQ ID NO: 2916547 - DNA, 25 bp, Homo sapien
aaattgattcctcttcagcggtacc

SEQ ID NO: 2916548 - DNA, 25 bp, Homo sapien
cgctggcatctaactccggtcacaa

SEQ ID NO: 2916549 - DNA, 25 bp, Homo sapien
ttcagcggtacctcggctgggctca

SEQ ID NO: 2916550 - DNA, 25 bp, Homo sapien
tgggctcacgtcccttctgcgctgg

SEQ ID NO: 2916551 - DNA, 25 bp, Homo sapien
catgagcccagtgattatctgcata

SEQ ID NO: 2916552 - DNA, 25 bp, Homo sapien
aagagcaagacccatgagcccagtg

SEQ ID NO: 2916553 - DNA, 25 bp, Homo sapien
gacccatgagcccagtgattatctg

SEQ ID NO: 2916554 - DNA, 25 bp, Homo sapien
tctttgtaaagagcaagacccatga

SEQ ID NO: 2916555 - DNA, 25 bp, Homo sapien
tccactggcctgtaaccttggacaa

SEQ ID NO: 2916556 - DNA, 25 bp, Homo sapien
tctctaggagcaaaatggcgactcc

SEQ ID NO: 2916557 - DNA, 25 bp, Homo sapien
gcaaaatggcgactccatgcacaag

SEQ ID NO: 2916558 - DNA, 25 bp, Homo sapien
cacaagattggcgtccgcggtgact

SEQ ID NO: 2916559 - DNA, 25 bp, Homo sapien
actccatgcacaagattggcgtccg

SEQ ID NO: 2916560 - DNA, 25 bp, Homo sapien
gcatacagagagcaaaataggacaa

SEQ ID NO: 2916561 - DNA, 25 bp, Homo sapien
acagagagcaaaataggacaaatac

SEQ ID NO: 2916562 - DNA, 25 bp, Homo sapien
ctgcatacagagagcaaaataggac

SEQ ID NO: 2916563 - DNA, 25 bp, Homo sapien
atacagagagcaaaataggacaaat

SEQ ID NO: 2916564 - DNA, 25 bp, Homo sapien
tctaagcagcaaaaatagctcggtc

SEQ ID NO: 2916565 - DNA, 25 bp, Homo sapien
tagttagtcctatgcaacagtgggc

SEQ ID NO: 2916566 - DNA, 25 bp, Homo sapien
tcaaggctgcaaagcctctaagcag

SEQ ID NO: 2916567 - DNA, 25 bp, Homo sapien
agctcggtctcagcatgatttgtag

SEQ ID NO: 2916568 - DNA, 25 bp, Homo sapien
acctgacaaacgtggtgacaccctg

SEQ ID NO: 2916569 - DNA, 25 bp, Homo sapien
tgtatgatcccaggctctgcttatc

SEQ ID NO: 2916570 - DNA, 25 bp, Homo sapien
acaatgcttatgacaacccagtgaa

SEQ ID NO: 2916571 - DNA, 25 bp, Homo sapien
tgaagcaagcactagaatgagaccc

SEQ ID NO: 2916572 - DNA, 25 bp, Homo sapien
taaagtcaattatggacaacctcct

SEQ ID NO: 2916573 - DNA, 25 bp, Homo sapien
tgcttaaagtcaattatggacaacc

SEQ ID NO: 2916574 - DNA, 25 bp, Homo sapien
tgctgcttaaagtcaattatggaca

SEQ ID NO: 2916575 - DNA, 25 bp, Homo sapien
ttaaagtcaattatggacaacctcc

SEQ ID NO: 2916576 - DNA, 25 bp, Homo sapien
aaaactgccatatgatatgaaatat

SEQ ID NO: 2916577 - DNA, 25 bp, Homo sapien
aaaaactgccatatgatatgaaata

SEQ ID NO: 2916578 - DNA, 25 bp, Homo sapien
taaaaactgccatatgatatgaaat

SEQ ID NO: 2916579 - DNA, 25 bp, Homo sapien
cttcttggttttccaattttcagag

SEQ ID NO: 2916580 - DNA, 25 bp, Homo sapien
ttcttggttttccaattttcagagc

SEQ ID NO: 2916581 - DNA, 25 bp, Homo sapien
caccagaccacctttggttatgttc

SEQ ID NO: 2916582 - DNA, 25 bp, Homo sapien
tctttgatagctccatacatgatga

SEQ ID NO: 2916583 - DNA, 25 bp, Homo sapien
ggtttctaattcaggtggcgtcaca

SEQ ID NO: 2916584 - DNA, 25 bp, Homo sapien
catgatgaattcgagtttgctgaaa

SEQ ID NO: 2916585 - DNA, 25 bp, Homo sapien
cctggtaaacctgcactttgcccat

SEQ ID NO: 2916586 - DNA, 25 bp, Homo sapien
ttcctggtaaacctgcactttgccc

SEQ ID NO: 2916587 - DNA, 25 bp, Homo sapien
tcctggtaaacctgcactttgccca

SEQ ID NO: 2916588 - DNA, 25 bp, Homo sapien
gactcttgaatttgtactcttgttt

SEQ ID NO: 2916589 - DNA, 25 bp, Homo sapien
agtttggatgatgaaaacatctttt

SEQ ID NO: 2916590 - DNA, 25 bp, Homo sapien
ctcacagactcttgaatttgtactc

SEQ ID NO: 2916591 - DNA, 25 bp, Homo sapien
tttcccctcacagactcttgaattt

SEQ ID NO: 2916592 - DNA, 25 bp, Homo sapien
tgatcaggagctccatgatggtggt

SEQ ID NO: 2916593 - DNA, 25 bp, Homo sapien
tacatgcatacaccatgatcaggag

SEQ ID NO: 2916594 - DNA, 25 bp, Homo sapien
tgtaaggaaagtagggtatcacgcc

SEQ ID NO: 2916595 - DNA, 25 bp, Homo sapien
tggaagccagcaatttagagacaat

SEQ ID NO: 2916596 - DNA, 25 bp, Homo sapien
tgtcaacaggaatattgaagaagcc

SEQ ID NO: 2916597 - DNA, 25 bp, Homo sapien
gagatgctcttaaattgtcaacagg

SEQ ID NO: 2916598 - DNA, 25 bp, Homo sapien
tccatagtaataagatgagttagac

SEQ ID NO: 2916599 - DNA, 25 bp, Homo sapien
tccttctggtgtaaatccatagtaa

SEQ ID NO: 2916600 - DNA, 25 bp, Homo sapien
tgtgtcctgaatggaaacatcccct

SEQ ID NO: 2916601 - DNA, 25 bp, Homo sapien
tacaggcaatgactagcgttaggct

SEQ ID NO: 2916602 - DNA, 25 bp, Homo sapien
accgggcatcccttaagaggtgcaa

SEQ ID NO: 2916603 - DNA, 25 bp, Homo sapien
tgtcgacagcaacccacataagtct

SEQ ID NO: 2916604 - DNA, 25 bp, Homo sapien
ttggccacgattactgcattcctgt

SEQ ID NO: 2916605 - DNA, 25 bp, Homo sapien
gacttggccacgattactgcattcc

SEQ ID NO: 2916606 - DNA, 25 bp, Homo sapien
ggccacgattactgcattcctgtaa

SEQ ID NO: 2916607 - DNA, 25 bp, Homo sapien
tggagacttggccacgattactgca

SEQ ID NO: 2916608 - DNA, 25 bp, Homo sapien
cagtggaagtatcatggtcctcatg

SEQ ID NO: 2916609 - DNA, 25 bp, Homo sapien
ggaagtatcatggtcctcatgagtg

SEQ ID NO: 2916610 - DNA, 25 bp, Homo sapien
gaagtatcatggtcctcatgagtgt

SEQ ID NO: 2916611 - DNA, 25 bp, Homo sapien
gtggaagtatcatggtcctcatgag

SEQ ID NO: 2916612 - DNA, 25 bp, Homo sapien
gggtgttccagacccaggcatggtc

SEQ ID NO: 2916613 - DNA, 25 bp, Homo sapien
cactcgttggcgaagtcggcgtggg

SEQ ID NO: 2916614 - DNA, 25 bp, Homo sapien
gtgcattctcaatattcaggaagtg

SEQ ID NO: 2916615 - DNA, 25 bp, Homo sapien
aatattcaggaagtggatggccagc

SEQ ID NO: 2916616 - DNA, 25 bp, Homo sapien
ttctctccgatctctttcttgcatt

SEQ ID NO: 2916617 - DNA, 25 bp, Homo sapien
agtccgactcggcatcctgcgcctc

SEQ ID NO: 2916618 - DNA, 25 bp, Homo sapien
gaatcactgcaattcccaggcgcag

SEQ ID NO: 2916619 - DNA, 25 bp, Homo sapien
aggcgcaggcgctcagcaaaagact

SEQ ID NO: 2916620 - DNA, 25 bp, Homo sapien
gtggggaatgccgtccatccaccaa

SEQ ID NO: 2916621 - DNA, 25 bp, Homo sapien
tggggatctccaggctggggtggat

SEQ ID NO: 2916622 - DNA, 25 bp, Homo sapien
gtggatggcagccacacttctgacc

SEQ ID NO: 2916623 - DNA, 25 bp, Homo sapien
caggctggggtggatggcagccaca

SEQ ID NO: 2916624 - DNA, 25 bp, Homo sapien
ggatctccaggctggggtggatggc

SEQ ID NO: 2916625 - DNA, 25 bp, Homo sapien
gcatgtaccggtagtcccagctacc

SEQ ID NO: 2916626 - DNA, 25 bp, Homo sapien
ggaggccgaggttgcagtgtgccat

SEQ ID NO: 2916627 - DNA, 25 bp, Homo sapien
cagctacccaggagaatcgcctgaa

SEQ ID NO: 2916628 - DNA, 25 bp, Homo sapien
aggccgaggttgcagtgtgccatga

SEQ ID NO: 2916629 - DNA, 25 bp, Homo sapien
ctgagggctcgtcctgggctttcca

SEQ ID NO: 2916630 - DNA, 25 bp, Homo sapien
cctgagggctcgtcctgggctttcc

SEQ ID NO: 2916631 - DNA, 25 bp, Homo sapien
gtcctgagggctcgtcctgggcttt

SEQ ID NO: 2916632 - DNA, 25 bp, Homo sapien
tgggtcctgagggctcgtcctgggc

SEQ ID NO: 2916633 - DNA, 25 bp, Homo sapien
attcaaccaactaggaatacaaggg

SEQ ID NO: 2916634 - DNA, 25 bp, Homo sapien
tcatactggatactctagcaagggt

SEQ ID NO: 2916635 - DNA, 25 bp, Homo sapien
ctcaatctgattaagggcaactaca

SEQ ID NO: 2916636 - DNA, 25 bp, Homo sapien
cttgatactttatggccgaaggcca

SEQ ID NO: 2916637 - DNA, 25 bp, Homo sapien
cacgatgatggcaatccttcctcca

SEQ ID NO: 2916638 - DNA, 25 bp, Homo sapien
gatgatggcaatccttcctccaaca

SEQ ID NO: 2916639 - DNA, 25 bp, Homo sapien
cacaaccgtgattgggggcttttct

SEQ ID NO: 2916640 - DNA, 25 bp, Homo sapien
tcacccacaaccgtgattgggggct

SEQ ID NO: 2916641 - DNA, 25 bp, Homo sapien
caatcaatcaacagaataacaatgg

SEQ ID NO: 2916642 - DNA, 25 bp, Homo sapien
tcaatcaacagaataacaatggcaa

SEQ ID NO: 2916643 - DNA, 25 bp, Homo sapien
aatcaatcaacagaataacaatggc

SEQ ID NO: 2916644 - DNA, 25 bp, Homo sapien
atcaatcaacagaataacaatggca

SEQ ID NO: 2916645 - DNA, 25 bp, Homo sapien
ccataactggccaacattgtgctgt

SEQ ID NO: 2916646 - DNA, 25 bp, Homo sapien
taaaagatgtttttgactctgggta

SEQ ID NO: 2916647 - DNA, 25 bp, Homo sapien
caggtcacaccagaaatgatggagg

SEQ ID NO: 2916648 - DNA, 25 bp, Homo sapien
taatagaattatgggtgcctctttc

SEQ ID NO: 2916649 - DNA, 25 bp, Homo sapien
cttggccttgtgcagacggcatggc

SEQ ID NO: 2916650 - DNA, 25 bp, Homo sapien
cacttggccttgtgcagacggcatg

SEQ ID NO: 2916651 - DNA, 25 bp, Homo sapien
tccacttggccttgtgcagacggca

SEQ ID NO: 2916652 - DNA, 25 bp, Homo sapien
gccttgtgcagacggcatggcccca

SEQ ID NO: 2916653 - DNA, 25 bp, Homo sapien
aagaatgtatatgagcacttctaca

SEQ ID NO: 2916654 - DNA, 25 bp, Homo sapien
gagcacttctacaataataggttag

SEQ ID NO: 2916655 - DNA, 25 bp, Homo sapien
caataataggttagacaaccaggaa

SEQ ID NO: 2916656 - DNA, 25 bp, Homo sapien
tatgagcacttctacaataataggt

SEQ ID NO: 2916657 - DNA, 25 bp, Homo sapien
tcacaaagatcttatatgcacctct

SEQ ID NO: 2916658 - DNA, 25 bp, Homo sapien
gcaagaaagctgtcaacatcatcaa

SEQ ID NO: 2916659 - DNA, 25 bp, Homo sapien
cagactcttcaatccgccggggggc

SEQ ID NO: 2916660 - DNA, 25 bp, Homo sapien
ccggggggcgtcagaagacaacaag

SEQ ID NO: 2916661 - DNA, 25 bp, Homo sapien
acccagcccttgaatcgtttctcag

SEQ ID NO: 2916662 - DNA, 25 bp, Homo sapien
ctctgtaactaaagatcaagatgtg

SEQ ID NO: 2916663 - DNA, 25 bp, Homo sapien
cagcccttgaatcgtttctcagcca

SEQ ID NO: 2916664 - DNA, 25 bp, Homo sapien
agatcaagatgtgccaaaagcccag

SEQ ID NO: 2916665 - DNA, 25 bp, Homo sapien
cacacccactaggataggtatggca

SEQ ID NO: 2916666 - DNA, 25 bp, Homo sapien
caaatctgaggcttgccacgacagg

SEQ ID NO: 2916667 - DNA, 25 bp, Homo sapien
tattatgttgagtgaagacagccag

SEQ ID NO: 2916668 - DNA, 25 bp, Homo sapien
taataacaagtactggagggatgca

SEQ ID NO: 2916669 - DNA, 25 bp, Homo sapien
gcttctggacttcatgtggaattgt

SEQ ID NO: 2916670 - DNA, 25 bp, Homo sapien
tggactccccattgtggatccgacg

SEQ ID NO: 2916671 - DNA, 25 bp, Homo sapien
gtggaattgtattggtgaccaccac

SEQ ID NO: 2916672 - DNA, 25 bp, Homo sapien
gatccgacggatcgcctctgaaagg

SEQ ID NO: 2916673 - DNA, 25 bp, Homo sapien
catctaagcctatgtttctgaaaag

SEQ ID NO: 2916674 - DNA, 25 bp, Homo sapien
agcctatgtttctgaaaaggtagga

SEQ ID NO: 2916675 - DNA, 25 bp, Homo sapien
tctaagcctatgtttctgaaaaggt

SEQ ID NO: 2916676 - DNA, 25 bp, Homo sapien
tcagtcatctaagcctatgtttctg

SEQ ID NO: 2916677 - DNA, 25 bp, Homo sapien
tgtgaaatccatcccaccgagcagt

SEQ ID NO: 2916678 - DNA, 25 bp, Homo sapien
gacttgacagtataatcttttcggc

SEQ ID NO: 2916679 - DNA, 25 bp, Homo sapien
cacttggctcaagcaactttggaag

SEQ ID NO: 2916680 - DNA, 25 bp, Homo sapien
caagcatgacggttcctgtgaaatc

SEQ ID NO: 2916681 - DNA, 25 bp, Homo sapien
tataaaacgattgccaaaacacaaa

SEQ ID NO: 2916682 - DNA, 25 bp, Homo sapien
ataaaacgattgccaaaacacaaag

SEQ ID NO: 2916683 - DNA, 25 bp, Homo sapien
acttccctccactccgctgctctgc

SEQ ID NO: 2916684 - DNA, 25 bp, Homo sapien
cttccaggcggccttcacttccctc

SEQ ID NO: 2916685 - DNA, 25 bp, Homo sapien
catctgcattggttggtcacctccc

SEQ ID NO: 2916686 - DNA, 25 bp, Homo sapien
ctgctctgctggccgagcgctgcat

SEQ ID NO: 2916687 - DNA, 25 bp, Homo sapien
ccacttagtgataactgccgccttt

SEQ ID NO: 2916688 - DNA, 25 bp, Homo sapien
ttagtgataactgccgcctttggat

SEQ ID NO: 2916689 - DNA, 25 bp, Homo sapien
acttagtgataactgccgcctttgg

SEQ ID NO: 2916690 - DNA, 25 bp, Homo sapien
aaccacttagtgataactgccgcct

SEQ ID NO: 2916691 - DNA, 25 bp, Homo sapien
tagagtagttgtaccagcagcattg

SEQ ID NO: 2916692 - DNA, 25 bp, Homo sapien
aactatcccattaatagagtagttg

SEQ ID NO: 2916693 - DNA, 25 bp, Homo sapien
tcccattaatagagtagttgtacca

SEQ ID NO: 2916694 - DNA, 25 bp, Homo sapien
attggctctgagaccgttggctagg

SEQ ID NO: 2916695 - DNA, 25 bp, Homo sapien
aaggaagtcactgctgagagaaccc

SEQ ID NO: 2916696 - DNA, 25 bp, Homo sapien
tttgcactgatcaggaggacccagc

SEQ ID NO: 2916697 - DNA, 25 bp, Homo sapien
ccagcgagcctcagatggtgtttac

SEQ ID NO: 2916698 - DNA, 25 bp, Homo sapien
ctcacatacaggactaggcagaaga

SEQ ID NO: 2916699 - DNA, 25 bp, Homo sapien
acacagcccaggctcagaggcagcc

SEQ ID NO: 2916700 - DNA, 25 bp, Homo sapien
gtccagccaacacagcccaggctca

SEQ ID NO: 2916701 - DNA, 25 bp, Homo sapien
acagcccaggctcagaggcagcccc

SEQ ID NO: 2916702 - DNA, 25 bp, Homo sapien
agcccaggctcagaggcagccccat

SEQ ID NO: 2916703 - DNA, 25 bp, Homo sapien
atggtggggtgcagatcccagagcg

SEQ ID NO: 2916704 - DNA, 25 bp, Homo sapien
gtgcagatcccagagcgcaggagtc

SEQ ID NO: 2916705 - DNA, 25 bp, Homo sapien
cagttcagcttcctcaccccatggt

SEQ ID NO: 2916706 - DNA, 25 bp, Homo sapien
catgcagttcagcttcctcacccca

SEQ ID NO: 2916707 - DNA, 25 bp, Homo sapien
tgcgtcccgggagtgtggaggtcgc

SEQ ID NO: 2916708 - DNA, 25 bp, Homo sapien
ggagtgtggaggtcgctggtggagt

SEQ ID NO: 2916709 - DNA, 25 bp, Homo sapien
ggtcgctggtggagttggcggccat

SEQ ID NO: 2916710 - DNA, 25 bp, Homo sapien
gctgcgtcccgggagtgtggaggtc

SEQ ID NO: 2916711 - DNA, 25 bp, Homo sapien
gctgagataagggtcagtgagtaca

SEQ ID NO: 2916712 - DNA, 25 bp, Homo sapien
ggttagtacacgtagcatgctgaga

SEQ ID NO: 2916713 - DNA, 25 bp, Homo sapien
aaccctcacagggtttttatgagct

SEQ ID NO: 2916714 - DNA, 25 bp, Homo sapien
caaggaaggagggttactcaagcca

SEQ ID NO: 2916715 - DNA, 25 bp, Homo sapien
attcaccgtgttcctactggcccga

SEQ ID NO: 2916716 - DNA, 25 bp, Homo sapien
gaagtagccattcaccgtgttccta

SEQ ID NO: 2916717 - DNA, 25 bp, Homo sapien
tgccaggaagtagccattcaccgtg

SEQ ID NO: 2916718 - DNA, 25 bp, Homo sapien
cgtgttcctactggcccgacaagag

SEQ ID NO: 2916719 - DNA, 25 bp, Homo sapien
ctgagcccgccagtccaatgaagag

SEQ ID NO: 2916720 - DNA, 25 bp, Homo sapien
caatgaagaggccagagccctcgct

SEQ ID NO: 2916721 - DNA, 25 bp, Homo sapien
gctgctggcgaagagggaggctcca

SEQ ID NO: 2916722 - DNA, 25 bp, Homo sapien
attccactcgaagcctgccacggcc

SEQ ID NO: 2916723 - DNA, 25 bp, Homo sapien
caggccgccagtcctccaggactca

SEQ ID NO: 2916724 - DNA, 25 bp, Homo sapien
ctggacatcggctgacaccagccac

SEQ ID NO: 2916725 - DNA, 25 bp, Homo sapien
ctccagtgctgcgaccacatcctgt

SEQ ID NO: 2916726 - DNA, 25 bp, Homo sapien
ggccctcccacaggccgccagtcct

SEQ ID NO: 2916727 - DNA, 25 bp, Homo sapien
agatgggcacgaacacccatgccag

SEQ ID NO: 2916728 - DNA, 25 bp, Homo sapien
tgtagatgggcacgaacacccatgc

SEQ ID NO: 2916729 - DNA, 25 bp, Homo sapien
gagatgtagatgggcacgaacaccc

SEQ ID NO: 2916730 - DNA, 25 bp, Homo sapien
tagatgggcacgaacacccatgcca

SEQ ID NO: 2916731 - DNA, 25 bp, Homo sapien
cccgtagcgcttctgaatgtactca

SEQ ID NO: 2916732 - DNA, 25 bp, Homo sapien
gaatgtactcaggtaaggtgacgat

SEQ ID NO: 2916733 - DNA, 25 bp, Homo sapien
aggtacatgcggatccgctggcccc

SEQ ID NO: 2916734 - DNA, 25 bp, Homo sapien
caggacagacaggtacatgcggatc

SEQ ID NO: 2916735 - DNA, 25 bp, Homo sapien
taaactcagccttaagggcaggcca

SEQ ID NO: 2916736 - DNA, 25 bp, Homo sapien
gagtcacctagcaacaccagtgcag

SEQ ID NO: 2916737 - DNA, 25 bp, Homo sapien
gcccacacgaaggatgagacactct

SEQ ID NO: 2916738 - DNA, 25 bp, Homo sapien
tacagtacgccaagggcatctggcg

SEQ ID NO: 2916739 - DNA, 25 bp, Homo sapien
agggctgtgatgccgagcgtgagga

SEQ ID NO: 2916740 - DNA, 25 bp, Homo sapien
tggagaggtagaagttccagcccag

SEQ ID NO: 2916741 - DNA, 25 bp, Homo sapien
ctgtgatgccgagcgtgaggatggt

SEQ ID NO: 2916742 - DNA, 25 bp, Homo sapien
acaaacagagcccccgcgtacaggt

SEQ ID NO: 2916743 - DNA, 25 bp, Homo sapien
accaccatgatgagcgtctgcaggg

SEQ ID NO: 2916744 - DNA, 25 bp, Homo sapien
gtagcctctaccagccagggcagtc

SEQ ID NO: 2916745 - DNA, 25 bp, Homo sapien
gagttcctgagtcagctccttgcca

SEQ ID NO: 2916746 - DNA, 25 bp, Homo sapien
catcaagcgctgagccaatgcgggt

SEQ ID NO: 2916747 - DNA, 25 bp, Homo sapien
cagcagggtgggtagcctctaccag

SEQ ID NO: 2916748 - DNA, 25 bp, Homo sapien
tctcagccaggtttccgattgtcga

SEQ ID NO: 2916749 - DNA, 25 bp, Homo sapien
ccatatagaccatctggcgggctca

SEQ ID NO: 2916750 - DNA, 25 bp, Homo sapien
taagcattttgcacatgggcacccc

SEQ ID NO: 2916751 - DNA, 25 bp, Homo sapien
ctggacactcatcggccttgggcaa

SEQ ID NO: 2916752 - DNA, 25 bp, Homo sapien
catgtgcatggcgtctgtacgtggc

SEQ ID NO: 2916753 - DNA, 25 bp, Homo sapien
tgcccgtaaccaccgatctggtcaa

SEQ ID NO: 2916754 - DNA, 25 bp, Homo sapien
tgcaccagtaccaggtggccatgat

SEQ ID NO: 2916755 - DNA, 25 bp, Homo sapien
atggtcaggccaaaggtcatcccgg

SEQ ID NO: 2916756 - DNA, 25 bp, Homo sapien
cggcagcccaagactggcccaaaat

SEQ ID NO: 2916757 - DNA, 25 bp, Homo sapien
accgaggagcatccgagtcccttcg

SEQ ID NO: 2916758 - DNA, 25 bp, Homo sapien
aaaatgcccgccccatgaccgatgg

SEQ ID NO: 2916759 - DNA, 25 bp, Homo sapien
ctccaaactgtctcagtcgaagcac

SEQ ID NO: 2916760 - DNA, 25 bp, Homo sapien
actggcaggccaagggaggtcaggt

SEQ ID NO: 2916761 - DNA, 25 bp, Homo sapien
tggcaggccaagggaggtcaggtac

SEQ ID NO: 2916762 - DNA, 25 bp, Homo sapien
cactggcaggccaagggaggtcagg

SEQ ID NO: 2916763 - DNA, 25 bp, Homo sapien
ctggcaggccaagggaggtcaggta

SEQ ID NO: 2916764 - DNA, 25 bp, Homo sapien
gacagcgtccagagctctaccagaa

SEQ ID NO: 2916765 - DNA, 25 bp, Homo sapien
tgctgacagcgtccagagctctacc

SEQ ID NO: 2916766 - DNA, 25 bp, Homo sapien
ctgacagcgtccagagctctaccag

SEQ ID NO: 2916767 - DNA, 25 bp, Homo sapien
gctgctgacagcgtccagagctcta

SEQ ID NO: 2916768 - DNA, 25 bp, Homo sapien
actagggataaagacggcttcccag

SEQ ID NO: 2916769 - DNA, 25 bp, Homo sapien
ctagggataaagacggcttcccagg

SEQ ID NO: 2916770 - DNA, 25 bp, Homo sapien
tagggataaagacggcttcccagga

SEQ ID NO: 2916771 - DNA, 25 bp, Homo sapien
gactagggataaagacggcttccca

SEQ ID NO: 2916772 - DNA, 25 bp, Homo sapien
aaactcctgcattgcctccaacaac

SEQ ID NO: 2916773 - DNA, 25 bp, Homo sapien
tcagcccatttccaaccacgtccca

SEQ ID NO: 2916774 - DNA, 25 bp, Homo sapien
tgcattgcctccaacaaccccattc

SEQ ID NO: 2916775 - DNA, 25 bp, Homo sapien
tcaccccctgcactcaacagaaact

SEQ ID NO: 2916776 - DNA, 25 bp, Homo sapien
gagcaggaagcctctatgatttttt

SEQ ID NO: 2916777 - DNA, 25 bp, Homo sapien
tcacaaagttgtacgacctatgact

SEQ ID NO: 2916778 - DNA, 25 bp, Homo sapien
gacctatgactctgaaacgtaacta

SEQ ID NO: 2916779 - DNA, 25 bp, Homo sapien
ggttccacagtttaagtcaccagct

SEQ ID NO: 2916780 - DNA, 25 bp, Homo sapien
agcatcttgaggtagctggccagga

SEQ ID NO: 2916781 - DNA, 25 bp, Homo sapien
tcatgcccggcatgatgatcaggcc

SEQ ID NO: 2916782 - DNA, 25 bp, Homo sapien
aacaatgcgcggctgatcatgcccg

SEQ ID NO: 2916783 - DNA, 25 bp, Homo sapien
tcaggtcccgggctgacagtgatcg

SEQ ID NO: 2916784 - DNA, 25 bp, Homo sapien
ggcacatacactattcccggtcctg

SEQ ID NO: 2916785 - DNA, 25 bp, Homo sapien
acgttcgtgtgctgctcggctatca

SEQ ID NO: 2916786 - DNA, 25 bp, Homo sapien
accagcagatttgagtagttgtgac

SEQ ID NO: 2916787 - DNA, 25 bp, Homo sapien
cgtgagcaccagcaattgttccagc

SEQ ID NO: 2916788 - DNA, 25 bp, Homo sapien
gtcccttcttagatgcccagcccat

SEQ ID NO: 2916789 - DNA, 25 bp, Homo sapien
ctctgctcagtgagatttgctggtg

SEQ ID NO: 2916790 - DNA, 25 bp, Homo sapien
ctcagtgagatttgctggtgttagc

SEQ ID NO: 2916791 - DNA, 25 bp, Homo sapien
tgagatttgctggtgttagcagtcg

SEQ ID NO: 2916792 - DNA, 25 bp, Homo sapien
agatttgctggtgttagcagtcgtg

SEQ ID NO: 2916793 - DNA, 25 bp, Homo sapien
cagccggcttgagtgtgctgtcaca

SEQ ID NO: 2916794 - DNA, 25 bp, Homo sapien
aacaagtcgcgtctgtccatgggca

SEQ ID NO: 2916795 - DNA, 25 bp, Homo sapien
tcagcgacaagtcaacaagtcgcgt

SEQ ID NO: 2916796 - DNA, 25 bp, Homo sapien
gggctttgtgttcactcagcgacaa

SEQ ID NO: 2916797 - DNA, 25 bp, Homo sapien
tgctgtgtgaggtccgccattagag

SEQ ID NO: 2916798 - DNA, 25 bp, Homo sapien
gctgtgtgaggtccgccattagagt

SEQ ID NO: 2916799 - DNA, 25 bp, Homo sapien
ggtccgccattagagtctacctggg

SEQ ID NO: 2916800 - DNA, 25 bp, Homo sapien
tgtgaggtccgccattagagtctac

SEQ ID NO: 2916801 - DNA, 25 bp, Homo sapien
agggcatggcctctgaaaatccttt

SEQ ID NO: 2916802 - DNA, 25 bp, Homo sapien
tcgagagacggacacttggtgtctc

SEQ ID NO: 2916803 - DNA, 25 bp, Homo sapien
gacggacacttggtgtctctcctca

SEQ ID NO: 2916804 - DNA, 25 bp, Homo sapien
gagacggacacttggtgtctctcct

SEQ ID NO: 2916805 - DNA, 25 bp, Homo sapien
cgagagacggacacttggtgtctct

SEQ ID NO: 2916806 - DNA, 25 bp, Homo sapien
gatgttggagcagccgacctcggcc

SEQ ID NO: 2916807 - DNA, 25 bp, Homo sapien
gacggcaccacgcagcccacatcat

SEQ ID NO: 2916808 - DNA, 25 bp, Homo sapien
aggcccgcaggcactcggacggcac

SEQ ID NO: 2916809 - DNA, 25 bp, Homo sapien
gcaggcactcggacggcaccacgca

SEQ ID NO: 2916810 - DNA, 25 bp, Homo sapien
ggaggtcagcgacgacatgagcgcc

SEQ ID NO: 2916811 - DNA, 25 bp, Homo sapien
aggagctcccgctcgccggagcggg

SEQ ID NO: 2916812 - DNA, 25 bp, Homo sapien
tcagcgacgacatgagcgccgccag

SEQ ID NO: 2916813 - DNA, 25 bp, Homo sapien
aggtcagcgacgacatgagcgccgc

SEQ ID NO: 2916814 - DNA, 25 bp, Homo sapien
taggagataccgctccaatggtggt

SEQ ID NO: 2916815 - DNA, 25 bp, Homo sapien
cgctccaatggtggtgtttcgggca

SEQ ID NO: 2916816 - DNA, 25 bp, Homo sapien
ccatgaccacgaggcctaggagata

SEQ ID NO: 2916817 - DNA, 25 bp, Homo sapien
aggaggaagctgagacggctttgag

SEQ ID NO: 2916818 - DNA, 25 bp, Homo sapien
ggacaaagactgcagtcactggtgg

SEQ ID NO: 2916819 - DNA, 25 bp, Homo sapien
catgtagatgaagagttgcccgctg

SEQ ID NO: 2916820 - DNA, 25 bp, Homo sapien
ctcacgccgatgagtgccactatga

SEQ ID NO: 2916821 - DNA, 25 bp, Homo sapien
tgctcgttggcacgtcgccagaaga

SEQ ID NO: 2916822 - DNA, 25 bp, Homo sapien
caggtagtggatgctccccaggacg

SEQ ID NO: 2916823 - DNA, 25 bp, Homo sapien
cgcgtgtctggctctccgcacggtg

SEQ ID NO: 2916824 - DNA, 25 bp, Homo sapien
cccaggacggctggccgcgtgtctg

SEQ ID NO: 2916825 - DNA, 25 bp, Homo sapien
agggcgacagcgaagtgcaggtagt

SEQ ID NO: 2916826 - DNA, 25 bp, Homo sapien
ttcccaagggcacatcctgagccag

SEQ ID NO: 2916827 - DNA, 25 bp, Homo sapien
tgctttagttcccaagggcacatcc

SEQ ID NO: 2916828 - DNA, 25 bp, Homo sapien
tttagttcccaagggcacatcctga

SEQ ID NO: 2916829 - DNA, 25 bp, Homo sapien
agttcccaagggcacatcctgagcc

SEQ ID NO: 2916830 - DNA, 25 bp, Homo sapien
cacgggcccagaaggcgtgtttctg

SEQ ID NO: 2916831 - DNA, 25 bp, Homo sapien
tcaggcgaagtaggcataaaagaat

SEQ ID NO: 2916832 - DNA, 25 bp, Homo sapien
gaggatggcattgaagccacagaca

SEQ ID NO: 2916833 - DNA, 25 bp, Homo sapien
cgtgtttctggggtgtttggccatc

SEQ ID NO: 2916834 - DNA, 25 bp, Homo sapien
gctttgctggcttggccagttcttg

SEQ ID NO: 2916835 - DNA, 25 bp, Homo sapien
aatttttcagggctcccgctttgct

SEQ ID NO: 2916836 - DNA, 25 bp, Homo sapien
ggtggacctgaggactcagagctcc

SEQ ID NO: 2916837 - DNA, 25 bp, Homo sapien
aaatgggtggacctgaggactcaga

SEQ ID NO: 2916838 - DNA, 25 bp, Homo sapien
tggcttcttcccacggagttacgtg

SEQ ID NO: 2916839 - DNA, 25 bp, Homo sapien
ttgaggtcctggagcgcccagaccc

SEQ ID NO: 2916840 - DNA, 25 bp, Homo sapien
gagttacgtgcagcccgtgcacctg

SEQ ID NO: 2916841 - DNA, 25 bp, Homo sapien
tccgccgtggcgacatcattgaggt

SEQ ID NO: 2916842 - DNA, 25 bp, Homo sapien
tggagtcaaaagctaccatggctgc

SEQ ID NO: 2916843 - DNA, 25 bp, Homo sapien
gaggcccagtggtggcactaccatt

SEQ ID NO: 2916844 - DNA, 25 bp, Homo sapien
ttaaagttcaactccggtgctgccc

SEQ ID NO: 2916845 - DNA, 25 bp, Homo sapien
gaaagccgtgttctatgtagatgca

SEQ ID NO: 2916846 - DNA, 25 bp, Homo sapien
tgggttgtacacagcaccagcaggt

SEQ ID NO: 2916847 - DNA, 25 bp, Homo sapien
caggtggagcccttgacccttggct

SEQ ID NO: 2916848 - DNA, 25 bp, Homo sapien
gcaccagcaggtggagcccttgacc

SEQ ID NO: 2916849 - DNA, 25 bp, Homo sapien
gggttgtacacagcaccagcaggtg

SEQ ID NO: 2916850 - DNA, 25 bp, Homo sapien
tgcccaggtcaaaactgtcaggagc

SEQ ID NO: 2916851 - DNA, 25 bp, Homo sapien
tggaagcgaccctcagagaaatcct

SEQ ID NO: 2916852 - DNA, 25 bp, Homo sapien
gagccagcaccggtgtttcctggga

SEQ ID NO: 2916853 - DNA, 25 bp, Homo sapien
tgtccaaggcatactggccaagtgt

SEQ ID NO: 2916854 - DNA, 25 bp, Homo sapien
ttggcgcacaaggagagtagatgat

SEQ ID NO: 2916855 - DNA, 25 bp, Homo sapien
caggaaacagcatgagtagagatct

SEQ ID NO: 2916856 - DNA, 25 bp, Homo sapien
gttgggctctaaagcatgagtagga

SEQ ID NO: 2916857 - DNA, 25 bp, Homo sapien
acatagtgaaggcaccagggaggaa

SEQ ID NO: 2916858 - DNA, 25 bp, Homo sapien
ttgaaacaagctcaagctgttcact

SEQ ID NO: 2916859 - DNA, 25 bp, Homo sapien
cactgtgtgggatcagcacgtctgc

SEQ ID NO: 2916860 - DNA, 25 bp, Homo sapien
tcagccggcctgttttgaaacaagc

SEQ ID NO: 2916861 - DNA, 25 bp, Homo sapien
tgggatcagcacgtctgctgctagc

SEQ ID NO: 2916862 - DNA, 25 bp, Homo sapien
caaaacactacaagaggcagaaaaa

SEQ ID NO: 2916863 - DNA, 25 bp, Homo sapien
tatcaacatccctttgcatatcagt

SEQ ID NO: 2916864 - DNA, 25 bp, Homo sapien
tatatcaacatccctttgcatatca

SEQ ID NO: 2916865 - DNA, 25 bp, Homo sapien
atatcaacatccctttgcatatcag

SEQ ID NO: 2916866 - DNA, 25 bp, Homo sapien
ttgcagccaagcaacgccagaaagc

SEQ ID NO: 2916867 - DNA, 25 bp, Homo sapien
ccaagcaacgccagaaagccggctt

SEQ ID NO: 2916868 - DNA, 25 bp, Homo sapien
cactccccaatacggagagaagaac

SEQ ID NO: 2916869 - DNA, 25 bp, Homo sapien
ctcagaccgcgttctctccctctca

SEQ ID NO: 2916870 - DNA, 25 bp, Homo sapien
cgctgaaacaggaggcgaaaacctt

SEQ ID NO: 2916871 - DNA, 25 bp, Homo sapien
cccggagtttacgagctagtctctg

SEQ ID NO: 2916872 - DNA, 25 bp, Homo sapien
tctctgtcattgagccatcaagaag

SEQ ID NO: 2916873 - DNA, 25 bp, Homo sapien
gcctcgcgccaagactaaaattaaa

SEQ ID NO: 2916874 - DNA, 25 bp, Homo sapien
ctgaactcaggtgttcaggagcagc

SEQ ID NO: 2916875 - DNA, 25 bp, Homo sapien
taacatgctgacaccccgtttctgc

SEQ ID NO: 2916876 - DNA, 25 bp, Homo sapien
cctggagtggcgtgtgcgcctttaa

SEQ ID NO: 2916877 - DNA, 25 bp, Homo sapien
gatcacctgagatcacgcgttggag

SEQ ID NO: 2916878 - DNA, 25 bp, Homo sapien
catgccaatggctacacgaatgtac

SEQ ID NO: 2916879 - DNA, 25 bp, Homo sapien
tctgcaacatgttacaacgtgaatg

SEQ ID NO: 2916880 - DNA, 25 bp, Homo sapien
cagtgagctgtcacatcatgcatca

SEQ ID NO: 2916881 - DNA, 25 bp, Homo sapien
ggacaatattgcatgtttccactta

SEQ ID NO: 2916882 - DNA, 25 bp, Homo sapien
tgggttcgaacctgggctcctccat

SEQ ID NO: 2916883 - DNA, 25 bp, Homo sapien
gtgggttcgaacctgggctcctcca

SEQ ID NO: 2916884 - DNA, 25 bp, Homo sapien
ccgcaagagggcagaggcggccata

SEQ ID NO: 2916885 - DNA, 25 bp, Homo sapien
gaccggaaggcgacctgtagttcca

SEQ ID NO: 2916886 - DNA, 25 bp, Homo sapien
tgagatgcggctaagaaacccggca

SEQ ID NO: 2916887 - DNA, 25 bp, Homo sapien
gtagttccagaagccgccgcaagag

SEQ ID NO: 2916888 - DNA, 25 bp, Homo sapien
gtctgcggcaatcccgtcatttctg

SEQ ID NO: 2916889 - DNA, 25 bp, Homo sapien
tctgcctcggtctctgcgtctatgg

SEQ ID NO: 2916890 - DNA, 25 bp, Homo sapien
cagagtctgcggagccgctgtctgt

SEQ ID NO: 2916891 - DNA, 25 bp, Homo sapien
gtcagtctctctcttgcgttctgtg

SEQ ID NO: 2916892 - DNA, 25 bp, Homo sapien
gtgagaacacgagagtggcctcagc

SEQ ID NO: 2916893 - DNA, 25 bp, Homo sapien
tattaggtagttatagttgagagag

SEQ ID NO: 2916894 - DNA, 25 bp, Homo sapien
gaacacgagagtggcctcagcccag

SEQ ID NO: 2916895 - DNA, 25 bp, Homo sapien
tatagttgagagagggtgtggtgag

SEQ ID NO: 2916896 - DNA, 25 bp, Homo sapien
gagttggaatatgaaacatgtttgc

SEQ ID NO: 2916897 - DNA, 25 bp, Homo sapien
tgtcctcacactttgctaaaactcg

SEQ ID NO: 2916898 - DNA, 25 bp, Homo sapien
aaactcgtttttgaacagagcactc

SEQ ID NO: 2916899 - DNA, 25 bp, Homo sapien
gaaaaattgtgtctactgagttgga

SEQ ID NO: 2916900 - DNA, 25 bp, Homo sapien
gccagcgctgcacgactccaggggg

SEQ ID NO: 2916901 - DNA, 25 bp, Homo sapien
caaggccagcgctgcacgactccag

SEQ ID NO: 2916902 - DNA, 25 bp, Homo sapien
tctgctatcattgcgcctccatggg

SEQ ID NO: 2916903 - DNA, 25 bp, Homo sapien
tgccagtaattctgctatcattgcg

SEQ ID NO: 2916904 - DNA, 25 bp, Homo sapien
ccagcaggttaacagtgccagtaat

SEQ ID NO: 2916905 - DNA, 25 bp, Homo sapien
ttcccactccagcaggttaacagtg

SEQ ID NO: 2916906 - DNA, 25 bp, Homo sapien
caaagtgacctcagggatgcggaag

SEQ ID NO: 2916907 - DNA, 25 bp, Homo sapien
gggatcagtaaatgtctcttactca

SEQ ID NO: 2916908 - DNA, 25 bp, Homo sapien
caactataaaaagggatcagtaaat

SEQ ID NO: 2916909 - DNA, 25 bp, Homo sapien
cggaagtacaggagccagattgcca

SEQ ID NO: 2916910 - DNA, 25 bp, Homo sapien
tgcagttgcaggtggaagaacctgg

SEQ ID NO: 2916911 - DNA, 25 bp, Homo sapien
ggaagaacctggacttcggaatcac

SEQ ID NO: 2916912 - DNA, 25 bp, Homo sapien
tggaagaacctggacttcggaatca

SEQ ID NO: 2916913 - DNA, 25 bp, Homo sapien
gtggaagaacctggacttcggaatc

SEQ ID NO: 2916914 - DNA, 25 bp, Homo sapien
tgcatctgcaggttagctgaaggtc

SEQ ID NO: 2916915 - DNA, 25 bp, Homo sapien
gggggacaatcttctcacagcagaa

SEQ ID NO: 2916916 - DNA, 25 bp, Homo sapien
tgtggaagtgcacctcaagcctttg

SEQ ID NO: 2916917 - DNA, 25 bp, Homo sapien
tctggctgttccatgtgtctcttgg

SEQ ID NO: 2916918 - DNA, 25 bp, Homo sapien
tacgggatgaactaatgagtgacag

SEQ ID NO: 2916919 - DNA, 25 bp, Homo sapien
taggttgatgccagcagatacggga

SEQ ID NO: 2916920 - DNA, 25 bp, Homo sapien
taagaaattctaacagccaggaagg

SEQ ID NO: 2916921 - DNA, 25 bp, Homo sapien
cttcaagttggggtgatactggagc

SEQ ID NO: 2916922 - DNA, 25 bp, Homo sapien
taaagataaatcaactggaggcaga

SEQ ID NO: 2916923 - DNA, 25 bp, Homo sapien
gataaatcaactggaggcagatcct

SEQ ID NO: 2916924 - DNA, 25 bp, Homo sapien
ctaaagataaatcaactggaggcag

SEQ ID NO: 2916925 - DNA, 25 bp, Homo sapien
aagataaatcaactggaggcagatc

SEQ ID NO: 2916926 - DNA, 25 bp, Homo sapien
tcttcgtgaccataggctcccattt

SEQ ID NO: 2916927 - DNA, 25 bp, Homo sapien
tttccaggaaatagatagcattttc

SEQ ID NO: 2916928 - DNA, 25 bp, Homo sapien
attttgccccactcaactagctctt

SEQ ID NO: 2916929 - DNA, 25 bp, Homo sapien
tctgtatcccaaggatgctgccttc

SEQ ID NO: 2916930 - DNA, 25 bp, Homo sapien
tctgccagcacctgccccgggtggg

SEQ ID NO: 2916931 - DNA, 25 bp, Homo sapien
gccagcacctgccccgggtgggccc

SEQ ID NO: 2916932 - DNA, 25 bp, Homo sapien
cacctgccccgggtgggccctgcag

SEQ ID NO: 2916933 - DNA, 25 bp, Homo sapien
ccgggtgggccctgcagcatggcca

SEQ ID NO: 2916934 - DNA, 25 bp, Homo sapien
gaagcaggacatggccccagtgagg

SEQ ID NO: 2916935 - DNA, 25 bp, Homo sapien
tgacagtagcatccctagaacctag

SEQ ID NO: 2916936 - DNA, 25 bp, Homo sapien
ggctgcacccctcaggagtctaggt

SEQ ID NO: 2916937 - DNA, 25 bp, Homo sapien
cagagatgcgctcaggaacccagtt

SEQ ID NO: 2916938 - DNA, 25 bp, Homo sapien
tcaggcctgactcacagtgtgtgct

SEQ ID NO: 2916939 - DNA, 25 bp, Homo sapien
gcactgagcagaaagaagaacacaa

SEQ ID NO: 2916940 - DNA, 25 bp, Homo sapien
tgcaaatgtccttaactgagaggca

SEQ ID NO: 2916941 - DNA, 25 bp, Homo sapien
ggctgactgctaattggctttagga

SEQ ID NO: 2916942 - DNA, 25 bp, Homo sapien
tgccagcttacctgttggcacacct

SEQ ID NO: 2916943 - DNA, 25 bp, Homo sapien
tcatgcaactgtagttttcttagcc

SEQ ID NO: 2916944 - DNA, 25 bp, Homo sapien
tgtgagggaggctgacgcggacaca

SEQ ID NO: 2916945 - DNA, 25 bp, Homo sapien
atgcaactgtagttttcttagcccc

SEQ ID NO: 2916946 - DNA, 25 bp, Homo sapien
ggacacagtaggtaagaggccaaga

SEQ ID NO: 2916947 - DNA, 25 bp, Homo sapien
cactccttaaggcaaactacttggg

SEQ ID NO: 2916948 - DNA, 25 bp, Homo sapien
tcaagactgagatgtcaggccaggt

SEQ ID NO: 2916949 - DNA, 25 bp, Homo sapien
tagttgtattcatccagtgccctcc

SEQ ID NO: 2916950 - DNA, 25 bp, Homo sapien
actttgggagccgatggatcactca

SEQ ID NO: 2916951 - DNA, 25 bp, Homo sapien
aataaacagctgaccgagcacagtg

SEQ ID NO: 2916952 - DNA, 25 bp, Homo sapien
caccgtgctggcttgcctttggttc

SEQ ID NO: 2916953 - DNA, 25 bp, Homo sapien
ttcccctttggttaatcagaatcca

SEQ ID NO: 2916954 - DNA, 25 bp, Homo sapien
cagatcaaagaaccctacccgatga

SEQ ID NO: 2916955 - DNA, 25 bp, Homo sapien
catacatgttcttgcgcaaatttaa

SEQ ID NO: 2916956 - DNA, 25 bp, Homo sapien
ttctcatacatgttcttgcgcaaat

SEQ ID NO: 2916957 - DNA, 25 bp, Homo sapien
catgttcttgcgcaaatttaactgc

SEQ ID NO: 2916958 - DNA, 25 bp, Homo sapien
cttgcgcaaatttaactgcagggta

SEQ ID NO: 2916959 - DNA, 25 bp, Homo sapien
taaccagtccccagcagatgacgta

SEQ ID NO: 2916960 - DNA, 25 bp, Homo sapien
aaccagtccccagcagatgacgtac

SEQ ID NO: 2916961 - DNA, 25 bp, Homo sapien
ttaaccagtccccagcagatgacgt

SEQ ID NO: 2916962 - DNA, 25 bp, Homo sapien
cagtcacttgagataagcagtttga

SEQ ID NO: 2916963 - DNA, 25 bp, Homo sapien
ggcagacagtcagtcacttgagata

SEQ ID NO: 2916964 - DNA, 25 bp, Homo sapien
ttcctgaatagagccagcggctgtg

SEQ ID NO: 2916965 - DNA, 25 bp, Homo sapien
tgaatagagccagcggctgtggctt

SEQ ID NO: 2916966 - DNA, 25 bp, Homo sapien
gagactagctcgtaaactccgggcc

SEQ ID NO: 2916967 - DNA, 25 bp, Homo sapien
cctgcttggcaatgtcgcgagaaag

SEQ ID NO: 2916968 - DNA, 25 bp, Homo sapien
taattttagtcttggcgcgaggcgg

SEQ ID NO: 2916969 - DNA, 25 bp, Homo sapien
gcaactgccgtcagccattgatgat

SEQ ID NO: 2916970 - DNA, 25 bp, Homo sapien
ctatttgtttcctaatggcatcgga

SEQ ID NO: 2916971 - DNA, 25 bp, Homo sapien
tcgacaagctgttattgccaaacta

SEQ ID NO: 2916972 - DNA, 25 bp, Homo sapien
ccatcagttaaaagtttgcggcaga

SEQ ID NO: 2916973 - DNA, 25 bp, Homo sapien
tggcatcggaactagcgaaagtttc

SEQ ID NO: 2916974 - DNA, 25 bp, Homo sapien
catgccaatggctacacgaatgtac

SEQ ID NO: 2916975 - DNA, 25 bp, Homo sapien
tctgcaacatgttacaacgtgaatg

SEQ ID NO: 2916976 - DNA, 25 bp, Homo sapien
cagtgagctgtcacatcatgcatca

SEQ ID NO: 2916977 - DNA, 25 bp, Homo sapien
ggacaatattgcatgtttccactta

SEQ ID NO: 2916978 - DNA, 25 bp, Homo sapien
cataagaaaatccgttaacgtaatg

SEQ ID NO: 2916979 - DNA, 25 bp, Homo sapien
tgcagggggtggttcaacataagaa

SEQ ID NO: 2916980 - DNA, 25 bp, Homo sapien
gtgagacaacgattcttgccaagga

SEQ ID NO: 2916981 - DNA, 25 bp, Homo sapien
aatcagtgagacaacgattcttgcc

SEQ ID NO: 2916982 - DNA, 25 bp, Homo sapien
cctgggctacgtagcaagactccat

SEQ ID NO: 2916983 - DNA, 25 bp, Homo sapien
gtataacagcccagataaaactcat

SEQ ID NO: 2916984 - DNA, 25 bp, Homo sapien
tctcagatgtataacagcccagata

SEQ ID NO: 2916985 - DNA, 25 bp, Homo sapien
cccctggacgtttctcagatgtata

SEQ ID NO: 2916986 - DNA, 25 bp, Homo sapien
gacgtttctcagatgtataacagcc

SEQ ID NO: 2916987 - DNA, 25 bp, Homo sapien
tcttctctgagctccaaatgcctct

SEQ ID NO: 2916988 - DNA, 25 bp, Homo sapien
ttctctgagctccaaatgcctcttg

SEQ ID NO: 2916989 - DNA, 25 bp, Homo sapien
tctgagctccaaatgcctcttgggc

SEQ ID NO: 2916990 - DNA, 25 bp, Homo sapien
tgagctccaaatgcctcttgggcgc

SEQ ID NO: 2916991 - DNA, 25 bp, Homo sapien
tgggaggatcgtttcggtcctggat

SEQ ID NO: 2916992 - DNA, 25 bp, Homo sapien
ttgtactcctgcctctgaggacaga

SEQ ID NO: 2916993 - DNA, 25 bp, Homo sapien
gtgggaggatcgtttcggtcctgga

SEQ ID NO: 2916994 - DNA, 25 bp, Homo sapien
attgtactcctgcctctgaggacag

SEQ ID NO: 2916995 - DNA, 25 bp, Homo sapien
cctttgttttgagtgcgcgtttgtt

SEQ ID NO: 2916996 - DNA, 25 bp, Homo sapien
cagtcgaggacggtcttcctttgtt

SEQ ID NO: 2916997 - DNA, 25 bp, Homo sapien
tgagtgcgcgtttgttcttttgaag

SEQ ID NO: 2916998 - DNA, 25 bp, Homo sapien
tgcttcctctgcagtcgaggacggt

SEQ ID NO: 2916999 - DNA, 25 bp, Homo sapien
tgtagcctgaaagctgtacagggcc

SEQ ID NO: 2917000 - DNA, 25 bp, Homo sapien
gagtgtgtctcccttgttgaaggcc

SEQ ID NO: 2917001 - DNA, 25 bp, Homo sapien
tgaaagctgtacagggccacggact

SEQ ID NO: 2917002 - DNA, 25 bp, Homo sapien
gctcgtcgctctctgtagcctgaaa

SEQ ID NO: 2917003 - DNA, 25 bp, Homo sapien
gccacgcactgagccttggggtgaa

SEQ ID NO: 2917004 - DNA, 25 bp, Homo sapien
atgccacgcactgagccttggggtg

SEQ ID NO: 2917005 - DNA, 25 bp, Homo sapien
cactgagccttggggtgaaggtcgg

SEQ ID NO: 2917006 - DNA, 25 bp, Homo sapien
ctgagccttggggtgaaggtcgggg

SEQ ID NO: 2917007 - DNA, 25 bp, Homo sapien
tagaagccctcgttcctcagtgctg

SEQ ID NO: 2917008 - DNA, 25 bp, Homo sapien
gaattagaagccctcgttcctcagt

SEQ ID NO: 2917009 - DNA, 25 bp, Homo sapien
gattctcaggctccgacaccaggag

SEQ ID NO: 2917010 - DNA, 25 bp, Homo sapien
acagtcggggactcgtaggaggctt

SEQ ID NO: 2917011 - DNA, 25 bp, Homo sapien
ggcttgacgcggatgtagttcttgg

SEQ ID NO: 2917012 - DNA, 25 bp, Homo sapien
tcgacaccccggagctcggccttgt

SEQ ID NO: 2917013 - DNA, 25 bp, Homo sapien
ccggagctcggccttgtaccagttc

SEQ ID NO: 2917014 - DNA, 25 bp, Homo sapien
tcttgggaataaatccctcgacacc

SEQ ID NO: 2917015 - DNA, 25 bp, Homo sapien
tcccagatggttccgcttcatcaga

SEQ ID NO: 2917016 - DNA, 25 bp, Homo sapien
ggagctctcactctcccggatcagg

SEQ ID NO: 2917017 - DNA, 25 bp, Homo sapien
tcatcagaatctcttcggccagctg

SEQ ID NO: 2917018 - DNA, 25 bp, Homo sapien
gctgccgggaaatcctgcccgagta

SEQ ID NO: 2917019 - DNA, 25 bp, Homo sapien
gagactaactaggagcctgaccctg

SEQ ID NO: 2917020 - DNA, 25 bp, Homo sapien
ggattcctcaatcactccagggtgg

SEQ ID NO: 2917021 - DNA, 25 bp, Homo sapien
gagggccgccctaatacaatgccag

SEQ ID NO: 2917022 - DNA, 25 bp, Homo sapien
tagattctaccaaggcctaagagta

SEQ ID NO: 2917023 - DNA, 25 bp, Homo sapien
ccctggacagccgacacttggaaga

SEQ ID NO: 2917024 - DNA, 25 bp, Homo sapien
agactgccacgtcctgcctccgcag

SEQ ID NO: 2917025 - DNA, 25 bp, Homo sapien
tggacagccgacacttggaagactg

SEQ ID NO: 2917026 - DNA, 25 bp, Homo sapien
aggccctggacagccgacacttgga

SEQ ID NO: 2917027 - DNA, 25 bp, Homo sapien
tcataaagggcagctagctatggcc

SEQ ID NO: 2917028 - DNA, 25 bp, Homo sapien
tgtgagtatgccagagatgccatgc

SEQ ID NO: 2917029 - DNA, 25 bp, Homo sapien
cattttccgaggtggccatcaggtc

SEQ ID NO: 2917030 - DNA, 25 bp, Homo sapien
gagttcccaagtaccaaccagcaag

SEQ ID NO: 2917031 - DNA, 25 bp, Homo sapien
cgctgggcgatctccatcaggcatg

SEQ ID NO: 2917032 - DNA, 25 bp, Homo sapien
ccgctgggcgatctccatcaggcat

SEQ ID NO: 2917033 - DNA, 25 bp, Homo sapien
gctgggcgatctccatcaggcatgg

SEQ ID NO: 2917034 - DNA, 25 bp, Homo sapien
tgcccgctgggcgatctccatcagg

SEQ ID NO: 2917035 - DNA, 25 bp, Homo sapien
tcagtaaatggcaaatcttgcccct

SEQ ID NO: 2917036 - DNA, 25 bp, Homo sapien
tctctgtctagtcttgaccttagcc

SEQ ID NO: 2917037 - DNA, 25 bp, Homo sapien
tgtctagtcttgaccttagccatcc

SEQ ID NO: 2917038 - DNA, 25 bp, Homo sapien
agcatttgagaatcccccagactgg

SEQ ID NO: 2917039 - DNA, 25 bp, Homo sapien
tgcacacagtatttcctccaactgg

SEQ ID NO: 2917040 - DNA, 25 bp, Homo sapien
cgcatcctgtgagagctgcatcaga

SEQ ID NO: 2917041 - DNA, 25 bp, Homo sapien
taaatacacctccaggcatttgcac

SEQ ID NO: 2917042 - DNA, 25 bp, Homo sapien
aggcccaggtaaaatggcgcatcct

SEQ ID NO: 2917043 - DNA, 25 bp, Homo sapien
ccaaatgtgggcgatagtgcactcc

SEQ ID NO: 2917044 - DNA, 25 bp, Homo sapien
ggctaaatgagatccaaccaccagt

SEQ ID NO: 2917045 - DNA, 25 bp, Homo sapien
tgtcctatccctgcctgtggttgag

SEQ ID NO: 2917046 - DNA, 25 bp, Homo sapien
tgaccactgggaggtagatagcccc

SEQ ID NO: 2917047 - DNA, 25 bp, Homo sapien
ccatgttgctacctgggctgtgccc

SEQ ID NO: 2917048 - DNA, 25 bp, Homo sapien
tgaggcatagggcaaaacaggattc

SEQ ID NO: 2917049 - DNA, 25 bp, Homo sapien
gcatttgcacacagagtgtcctcca

SEQ ID NO: 2917050 - DNA, 25 bp, Homo sapien
taaaacgttgcctaatgccctcctg

SEQ ID NO: 2917051 - DNA, 25 bp, Homo sapien
gactgggcagaggaactaactggaa

SEQ ID NO: 2917052 - DNA, 25 bp, Homo sapien
tgctctttcaaactggccagaggca

SEQ ID NO: 2917053 - DNA, 25 bp, Homo sapien
gaggaactaactggaacctctcaca

SEQ ID NO: 2917054 - DNA, 25 bp, Homo sapien
ctctttcaaactggccagaggcaga

SEQ ID NO: 2917055 - DNA, 25 bp, Homo sapien
aatgcacgtgaaatgttttgtccag

SEQ ID NO: 2917056 - DNA, 25 bp, Homo sapien
ctgtttactaaaacaatgcacgtga

SEQ ID NO: 2917057 - DNA, 25 bp, Homo sapien
cctgaagccaaggttgtgtctgttt

SEQ ID NO: 2917058 - DNA, 25 bp, Homo sapien
cacgtgaaatgttttgtccaggtag

SEQ ID NO: 2917059 - DNA, 25 bp, Homo sapien
gaaaatctcagcctatcagctgggc

SEQ ID NO: 2917060 - DNA, 25 bp, Homo sapien
tctcttgtagaaaggtgctatgcac

SEQ ID NO: 2917061 - DNA, 25 bp, Homo sapien
caggtgaggagctacggctttctca

SEQ ID NO: 2917062 - DNA, 25 bp, Homo sapien
tagtggatagatgttggtccctggc

SEQ ID NO: 2917063 - DNA, 25 bp, Homo sapien
gtattgctctgtcacccaggctgga

SEQ ID NO: 2917064 - DNA, 25 bp, Homo sapien
gtgcagtgatgcgatgtcagctcac

SEQ ID NO: 2917065 - DNA, 25 bp, Homo sapien
tgatgcgatgtcagctcactgcaaa

SEQ ID NO: 2917066 - DNA, 25 bp, Homo sapien
ctttttcttcgagatggagtattgc

SEQ ID NO: 2917067 - DNA, 25 bp, Homo sapien
tactgtttccatgcgtgggggtgaa

SEQ ID NO: 2917068 - DNA, 25 bp, Homo sapien
taatgatataagcatgaggtagtgt

SEQ ID NO: 2917069 - DNA, 25 bp, Homo sapien
caatctccaagagttacactgttaa

SEQ ID NO: 2917070 - DNA, 25 bp, Homo sapien
gattatgtcagaatctctgttacac

SEQ ID NO: 2917071 - DNA, 25 bp, Homo sapien
gagtatgttattgattttgtgaatg

SEQ ID NO: 2917072 - DNA, 25 bp, Homo sapien
gagaagggatcatcgggtagggttc

SEQ ID NO: 2917073 - DNA, 25 bp, Homo sapien
agaactggagtagttcagagaacca

SEQ ID NO: 2917074 - DNA, 25 bp, Homo sapien
atggattctgattaaccaaagggga

SEQ ID NO: 2917075 - DNA, 25 bp, Homo sapien
aaaataatcgagtgtaaggcaggcc

SEQ ID NO: 2917076 - DNA, 25 bp, Homo sapien
cacaaaacatgattgggagggcact

SEQ ID NO: 2917077 - DNA, 25 bp, Homo sapien
gaataggcacagatctccacagctg

SEQ ID NO: 2917078 - DNA, 25 bp, Homo sapien
taacataaaaacagcctgggacagg

SEQ ID NO: 2917079 - DNA, 25 bp, Homo sapien
tgaggataagcagccagagaagacc

SEQ ID NO: 2917080 - DNA, 25 bp, Homo sapien
gagaagacccctaacttgatctgtg

SEQ ID NO: 2917081 - DNA, 25 bp, Homo sapien
gctgtctgtcacatccgggagcagg

SEQ ID NO: 2917082 - DNA, 25 bp, Homo sapien
caattagcagtcagccaggacagct

SEQ ID NO: 2917083 - DNA, 25 bp, Homo sapien
gggtacggatgcgacttggatgcag

SEQ ID NO: 2917084 - DNA, 25 bp, Homo sapien
cggatgcgacttggatgcagtcctt

SEQ ID NO: 2917085 - DNA, 25 bp, Homo sapien
ctgggtacggatgcgacttggatgc

SEQ ID NO: 2917086 - DNA, 25 bp, Homo sapien
tacggatgcgacttggatgcagtcc

SEQ ID NO: 2917087 - DNA, 25 bp, Homo sapien
tgccaggcacgtaggaagagctctt

SEQ ID NO: 2917088 - DNA, 25 bp, Homo sapien
taaaatggtggctcctcataacccc

SEQ ID NO: 2917089 - DNA, 25 bp, Homo sapien
ccatgcttttcagaggctagagggc

SEQ ID NO: 2917090 - DNA, 25 bp, Homo sapien
taaatgggtgcttgacggaagccac

SEQ ID NO: 2917091 - DNA, 25 bp, Homo sapien
tggagctcttattaacacttcattc

SEQ ID NO: 2917092 - DNA, 25 bp, Homo sapien
cgtggagctcttattaacacttcat

SEQ ID NO: 2917093 - DNA, 25 bp, Homo sapien
tacgtggagctcttattaacacttc

SEQ ID NO: 2917094 - DNA, 25 bp, Homo sapien
aactgggattcgaacgtgtgctact

SEQ ID NO: 2917095 - DNA, 25 bp, Homo sapien
tgtgctactgtaacatgagccccta

SEQ ID NO: 2917096 - DNA, 25 bp, Homo sapien
ccagccactggtgggagatcttgcc

SEQ ID NO: 2917097 - DNA, 25 bp, Homo sapien
gagcccctaaccacaggagtctctg

SEQ ID NO: 2917098 - DNA, 25 bp, Homo sapien
gcggaggcagatgcaacgccaggag

SEQ ID NO: 2917099 - DNA, 25 bp, Homo sapien
aatgcggaggcagatgcaacgccag

SEQ ID NO: 2917100 - DNA, 25 bp, Homo sapien
aaatgcggaggcagatgcaacgcca

SEQ ID NO: 2917101 - DNA, 25 bp, Homo sapien
gaggcagatgcaacgccaggagcag

SEQ ID NO: 2917102 - DNA, 25 bp, Homo sapien
cagcctagtgtgcagactggagtga

SEQ ID NO: 2917103 - DNA, 25 bp, Homo sapien
accgcgcctggcaagagacgctgtt

SEQ ID NO: 2917104 - DNA, 25 bp, Homo sapien
ctcaaggctacagtgttcacaccac

SEQ ID NO: 2917105 - DNA, 25 bp, Homo sapien
ggcaagagacgctgtttctacaaaa

SEQ ID NO: 2917106 - DNA, 25 bp, Homo sapien
caccgccgcgtctggctcagtttga

SEQ ID NO: 2917107 - DNA, 25 bp, Homo sapien
cggcagcgctcgagaggcgggagcg

SEQ ID NO: 2917108 - DNA, 25 bp, Homo sapien
gcgggagcgaccgtagcccgcggag

SEQ ID NO: 2917109 - DNA, 25 bp, Homo sapien
tccgggccggcgtgggtgcgccgct

SEQ ID NO: 2917110 - DNA, 25 bp, Homo sapien
tcgagctgctgcaacgtgcaactac

SEQ ID NO: 2917111 - DNA, 25 bp, Homo sapien
tcagctatcgagctgctgcaacgtg

SEQ ID NO: 2917112 - DNA, 25 bp, Homo sapien
tatcgagctgctgcaacgtgcaact

SEQ ID NO: 2917113 - DNA, 25 bp, Homo sapien
gctatcgagctgctgcaacgtgcaa

SEQ ID NO: 2917114 - DNA, 25 bp, Homo sapien
agctccagataacttcggttgttct

SEQ ID NO: 2917115 - DNA, 25 bp, Homo sapien
acttcggttgttcttcaacagcaga

SEQ ID NO: 2917116 - DNA, 25 bp, Homo sapien
ggctctttttagctccccactttca

SEQ ID NO: 2917117 - DNA, 25 bp, Homo sapien
ttctcaagtgggctctttttagctc

SEQ ID NO: 2917118 - DNA, 25 bp, Homo sapien
gcattccaaacaatctccatgggac

SEQ ID NO: 2917119 - DNA, 25 bp, Homo sapien
tttccgaattttctctgatgaccat

SEQ ID NO: 2917120 - DNA, 25 bp, Homo sapien
aaaacaggcattccaaacaatctcc

SEQ ID NO: 2917121 - DNA, 25 bp, Homo sapien
tctgatgaccattaaaacaggcatt

SEQ ID NO: 2917122 - DNA, 25 bp, Homo sapien
tgcttttgacgggccctcttcaggt

SEQ ID NO: 2917123 - DNA, 25 bp, Homo sapien
atgcttttgacgggccctcttcagg

SEQ ID NO: 2917124 - DNA, 25 bp, Homo sapien
gcttttgacgggccctcttcaggtc

SEQ ID NO: 2917125 - DNA, 25 bp, Homo sapien
tgaatcttgatcaagcagcagtggg

SEQ ID NO: 2917126 - DNA, 25 bp, Homo sapien
gggcagaggcggaagtaggaagaca

SEQ ID NO: 2917127 - DNA, 25 bp, Homo sapien
tggtatttctgaatcttgatcaagc

SEQ ID NO: 2917128 - DNA, 25 bp, Homo sapien
aaaggattagggcagaggcggaagt

SEQ ID NO: 2917129 - DNA, 25 bp, Homo sapien
cttgaaatgtggaaggttctacacg

SEQ ID NO: 2917130 - DNA, 25 bp, Homo sapien
ggaacacggtagatttctgaacaat

SEQ ID NO: 2917131 - DNA, 25 bp, Homo sapien
tgcctccaggaggtcacatctaact

SEQ ID NO: 2917132 - DNA, 25 bp, Homo sapien
tgagcctcatctaagcagcactgcg

SEQ ID NO: 2917133 - DNA, 25 bp, Homo sapien
gatggttgatgtccgctgagcctca

SEQ ID NO: 2917134 - DNA, 25 bp, Homo sapien
gggagtaggaggtccaccctcaaga

SEQ ID NO: 2917135 - DNA, 25 bp, Homo sapien
cctcaagaagccacctaggcagctt

SEQ ID NO: 2917136 - DNA, 25 bp, Homo sapien
aagaagccacctaggcagcttctcc

SEQ ID NO: 2917137 - DNA, 25 bp, Homo sapien
gagtaggaggtccaccctcaagaag

SEQ ID NO: 2917138 - DNA, 25 bp, Homo sapien
tgcaggacacctgaatgtgtgcaat

SEQ ID NO: 2917139 - DNA, 25 bp, Homo sapien
gcaatcctcaattcactggctttat

SEQ ID NO: 2917140 - DNA, 25 bp, Homo sapien
ctttcctgaggtgcagtccacgagt

SEQ ID NO: 2917141 - DNA, 25 bp, Homo sapien
tgtgtgcaatactccgcaatcctca

SEQ ID NO: 2917142 - DNA, 25 bp, Homo sapien
gaactgcttgagcccgagaggtgga

SEQ ID NO: 2917143 - DNA, 25 bp, Homo sapien
acgagaactgcttgagcccgagagg

SEQ ID NO: 2917144 - DNA, 25 bp, Homo sapien
ggttgtagtgagccaagattgcgcc

SEQ ID NO: 2917145 - DNA, 25 bp, Homo sapien
aggcacgagaactgcttgagcccga

SEQ ID NO: 2917146 - DNA, 25 bp, Homo sapien
tgcctcatcaccagtgagcacccag

SEQ ID NO: 2917147 - DNA, 25 bp, Homo sapien
gaggctcctgtccacaagtttggta

SEQ ID NO: 2917148 - DNA, 25 bp, Homo sapien
aggtccacgtctctgatatgaggct

SEQ ID NO: 2917149 - DNA, 25 bp, Homo sapien
gcactgtgcccgacacagaaatgaa

SEQ ID NO: 2917150 - DNA, 25 bp, Homo sapien
gatccctgaatggtcatttcctcct

SEQ ID NO: 2917151 - DNA, 25 bp, Homo sapien
tcagattcgaaaagctggaagccat

SEQ ID NO: 2917152 - DNA, 25 bp, Homo sapien
taatcaagctggagtaagatccctg

SEQ ID NO: 2917153 - DNA, 25 bp, Homo sapien
taagtgcgcaccctatgaaggttca

SEQ ID NO: 2917154 - DNA, 25 bp, Homo sapien
catcagagaactggacgggccccac

SEQ ID NO: 2917155 - DNA, 25 bp, Homo sapien
gtaattgttcacgatgtttttcatc

SEQ ID NO: 2917156 - DNA, 25 bp, Homo sapien
actggacgggccccacgggtcattg

SEQ ID NO: 2917157 - DNA, 25 bp, Homo sapien
taattgttcacgatgtttttcatct

SEQ ID NO: 2917158 - DNA, 25 bp, Homo sapien
ggtcagcgccttgtacacatgccgc

SEQ ID NO: 2917159 - DNA, 25 bp, Homo sapien
cttgatgaggtagtccagcagggtc

SEQ ID NO: 2917160 - DNA, 25 bp, Homo sapien
cagggtcagcgccttgtacacatgc

SEQ ID NO: 2917161 - DNA, 25 bp, Homo sapien
ttgatgaggtagtccagcagggtca

SEQ ID NO: 2917162 - DNA, 25 bp, Homo sapien
gtctggatggcgaagatgttctccc

SEQ ID NO: 2917163 - DNA, 25 bp, Homo sapien
actcctgctccgagtggctggtgga

SEQ ID NO: 2917164 - DNA, 25 bp, Homo sapien
ggagcctcgcccaaaggtgatctgg

SEQ ID NO: 2917165 - DNA, 25 bp, Homo sapien
tcgtccttgaggagagccaccagtt

SEQ ID NO: 2917166 - DNA, 25 bp, Homo sapien
tcgggctgcgcggtcacaagtgagg

SEQ ID NO: 2917167 - DNA, 25 bp, Homo sapien
cagtcgccatttgggcgggaggcca

SEQ ID NO: 2917168 - DNA, 25 bp, Homo sapien
tcactctgacccagcggggcccctg

SEQ ID NO: 2917169 - DNA, 25 bp, Homo sapien
gaaggggtggcgctggctcagtggc

SEQ ID NO: 2917170 - DNA, 25 bp, Homo sapien
acatttccggtccaacaagccaagt

SEQ ID NO: 2917171 - DNA, 25 bp, Homo sapien
cactgaggatcttatatttgtctgg

SEQ ID NO: 2917172 - DNA, 25 bp, Homo sapien
atttgtctggtgttgtgaggtttaa

SEQ ID NO: 2917173 - DNA, 25 bp, Homo sapien
ataatggcttccaatgaccatcact

SEQ ID NO: 2917174 - DNA, 25 bp, Homo sapien
tccgtctaccccaagaacttctgta

SEQ ID NO: 2917175 - DNA, 25 bp, Homo sapien
gatgtaggttccgtctaccccaaga

SEQ ID NO: 2917176 - DNA, 25 bp, Homo sapien
ccatctgcctccctttgatgtaggt

SEQ ID NO: 2917177 - DNA, 25 bp, Homo sapien
tggtgagaggacagcagcaatcttt

SEQ ID NO: 2917178 - DNA, 25 bp, Homo sapien
gctgtgactatgctagccaatctga

SEQ ID NO: 2917179 - DNA, 25 bp, Homo sapien
tcaaccttaaagcatcgagaaacct

SEQ ID NO: 2917180 - DNA, 25 bp, Homo sapien
tatatggcctacttcccatgggaag

SEQ ID NO: 2917181 - DNA, 25 bp, Homo sapien
tgaataaagacaccgtcagcagctg

SEQ ID NO: 2917182 - DNA, 25 bp, Homo sapien
aggcttatttagcactcatgcatga

SEQ ID NO: 2917183 - DNA, 25 bp, Homo sapien
tcaggtgttgtgctaaagacactag

SEQ ID NO: 2917184 - DNA, 25 bp, Homo sapien
acctggctattttgcgcgcacgcgc

SEQ ID NO: 2917185 - DNA, 25 bp, Homo sapien
gaagtatgttctgagcacctttcct

SEQ ID NO: 2917186 - DNA, 25 bp, Homo sapien
gttctaatccgttcaactgcttcca

SEQ ID NO: 2917187 - DNA, 25 bp, Homo sapien
gcatgttctaatccgttcaactgct

SEQ ID NO: 2917188 - DNA, 25 bp, Homo sapien
aatccgttcaactgcttccagccgg

SEQ ID NO: 2917189 - DNA, 25 bp, Homo sapien
ctgtagctgcatgttctaatccgtt

SEQ ID NO: 2917190 - DNA, 25 bp, Homo sapien
ttcagacaacttgaaaaatgtgacc

SEQ ID NO: 2917191 - DNA, 25 bp, Homo sapien
ctttcagacaacttgaaaaatgtga

SEQ ID NO: 2917192 - DNA, 25 bp, Homo sapien
cagcagcaagacactttcagacaac

SEQ ID NO: 2917193 - DNA, 25 bp, Homo sapien
gctgatcagcagcaagacactttca

SEQ ID NO: 2917194 - DNA, 25 bp, Homo sapien
tgtggagaaggcagggtgaggtcct

SEQ ID NO: 2917195 - DNA, 25 bp, Homo sapien
tgaggtcctggttttcctatgtccc

SEQ ID NO: 2917196 - DNA, 25 bp, Homo sapien
tcctggttttcctatgtccctgggc

SEQ ID NO: 2917197 - DNA, 25 bp, Homo sapien
agggtgaggtcctggttttcctatg

SEQ ID NO: 2917198 - DNA, 25 bp, Homo sapien
cactggtacgtgagcgtcacagacc

SEQ ID NO: 2917199 - DNA, 25 bp, Homo sapien
tgactgcactggtacgtgagcgtca

SEQ ID NO: 2917200 - DNA, 25 bp, Homo sapien
catgactgcactggtacgtgagcgt

SEQ ID NO: 2917201 - DNA, 25 bp, Homo sapien
actgcactggtacgtgagcgtcaca

SEQ ID NO: 2917202 - DNA, 25 bp, Homo sapien
ttggccaccaaccattgaacatcag

SEQ ID NO: 2917203 - DNA, 25 bp, Homo sapien
caccaaccattgaacatcagctgag

SEQ ID NO: 2917204 - DNA, 25 bp, Homo sapien
cttggccaccaaccattgaacatca

SEQ ID NO: 2917205 - DNA, 25 bp, Homo sapien
gccaccaaccattgaacatcagctg

SEQ ID NO: 2917206 - DNA, 25 bp, Homo sapien
tcatagctcgtcacatcaatgtaga

SEQ ID NO: 2917207 - DNA, 25 bp, Homo sapien
taaagacaatgggtattcccctgaa

SEQ ID NO: 2917208 - DNA, 25 bp, Homo sapien
ggttttcataaacggatgtacagct

SEQ ID NO: 2917209 - DNA, 25 bp, Homo sapien
gaataacgcacagctggcacatact

SEQ ID NO: 2917210 - DNA, 25 bp, Homo sapien
cagctcggaggacactcgcggggag

SEQ ID NO: 2917211 - DNA, 25 bp, Homo sapien
tctccactagtctggggccgggctt

SEQ ID NO: 2917212 - DNA, 25 bp, Homo sapien
ctcttctccactagtctggggccgg

SEQ ID NO: 2917213 - DNA, 25 bp, Homo sapien
gggccgggcttgctccagctcggag

SEQ ID NO: 2917214 - DNA, 25 bp, Homo sapien
ggcagttactggtggcctgtttccc

SEQ ID NO: 2917215 - DNA, 25 bp, Homo sapien
cagcacgggagtttgaacttgctcc

SEQ ID NO: 2917216 - DNA, 25 bp, Homo sapien
caggctgctacacagtagctattca

SEQ ID NO: 2917217 - DNA, 25 bp, Homo sapien
catggtattacccaggctgctacac

SEQ ID NO: 2917218 - DNA, 25 bp, Homo sapien
cacgggagtttgaacttgctccctt

SEQ ID NO: 2917219 - DNA, 25 bp, Homo sapien
cagggagactatggctcaggtacca

SEQ ID NO: 2917220 - DNA, 25 bp, Homo sapien
ccctcatggcgactcctgtgacttg

SEQ ID NO: 2917221 - DNA, 25 bp, Homo sapien
caggaaatgcacattgtatgatgca

SEQ ID NO: 2917222 - DNA, 25 bp, Homo sapien
tgtgtgtgtacccagaaggcccctc

SEQ ID NO: 2917223 - DNA, 25 bp, Homo sapien
tctgaggtcatcaccccgcctgagg

SEQ ID NO: 2917224 - DNA, 25 bp, Homo sapien
tgtcccttcggctttcttccagggc

SEQ ID NO: 2917225 - DNA, 25 bp, Homo sapien
tctgtaatctgaggtcatcaccccg

SEQ ID NO: 2917226 - DNA, 25 bp, Homo sapien
gccatctgtaatctgaggtcatcac

SEQ ID NO: 2917227 - DNA, 25 bp, Homo sapien
gctcacttgacagctgccgtagcca

SEQ ID NO: 2917228 - DNA, 25 bp, Homo sapien
ttgaggcaacaactacaggacaggg

SEQ ID NO: 2917229 - DNA, 25 bp, Homo sapien
ggctctcgctcactacaggcatgaa

SEQ ID NO: 2917230 - DNA, 25 bp, Homo sapien
tgtgcatcacgccatccaggcaagt

SEQ ID NO: 2917231 - DNA, 25 bp, Homo sapien
ccattaaatccaacagcgtagtctg

SEQ ID NO: 2917232 - DNA, 25 bp, Homo sapien
ctgctttctgggccgcggggcccga

SEQ ID NO: 2917233 - DNA, 25 bp, Homo sapien
tctgctttctgggccgcggggcccg

SEQ ID NO: 2917234 - DNA, 25 bp, Homo sapien
aggggtctgaagtactcgcaggagc

SEQ ID NO: 2917235 - DNA, 25 bp, Homo sapien
ggggtctgaagtactcgcaggagcc

SEQ ID NO: 2917236 - DNA, 25 bp, Homo sapien
ggtctggttagtggaggctgacggg

SEQ ID NO: 2917237 - DNA, 25 bp, Homo sapien
tggtctggttagtggaggctgacgg

SEQ ID NO: 2917238 - DNA, 25 bp, Homo sapien
cacgggagaccagtaatggggtctt

SEQ ID NO: 2917239 - DNA, 25 bp, Homo sapien
gcacgggagaccagtaatggggtct

SEQ ID NO: 2917240 - DNA, 25 bp, Homo sapien
cacaatcgaccagacccaagtgggt

SEQ ID NO: 2917241 - DNA, 25 bp, Homo sapien
cgctgaggctgcaagagttgaaaca

SEQ ID NO: 2917242 - DNA, 25 bp, Homo sapien
cagttggatatcactgctgagggct

SEQ ID NO: 2917243 - DNA, 25 bp, Homo sapien
tcagcagtggtggtaagcacatcat

SEQ ID NO: 2917244 - DNA, 25 bp, Homo sapien
tgttgtctcaggggtcatgcacagc

SEQ ID NO: 2917245 - DNA, 25 bp, Homo sapien
ctgtcacttggtacattttagcaaa

SEQ ID NO: 2917246 - DNA, 25 bp, Homo sapien
ctgttgtctcaggggtcatgcacag

SEQ ID NO: 2917247 - DNA, 25 bp, Homo sapien
acagcagaacacagcctgtcacttg

SEQ ID NO: 2917248 - DNA, 25 bp, Homo sapien
tttgaacatagagtgaagtctgtgc

SEQ ID NO: 2917249 - DNA, 25 bp, Homo sapien
gaagtctgtgcttgaatcaaatcct

SEQ ID NO: 2917250 - DNA, 25 bp, Homo sapien
cagacagctttgaacatagagtgaa

SEQ ID NO: 2917251 - DNA, 25 bp, Homo sapien
cccacacagacaaagttggtcacag

SEQ ID NO: 2917252 - DNA, 25 bp, Homo sapien
tgtgcctggataacagactggagcc

SEQ ID NO: 2917253 - DNA, 25 bp, Homo sapien
ggtattcatgcaccctgggccaggg

SEQ ID NO: 2917254 - DNA, 25 bp, Homo sapien
taaagtcaatctgcaaagtgtcccc

SEQ ID NO: 2917255 - DNA, 25 bp, Homo sapien
gaatcacactgtagagacaagccct

SEQ ID NO: 2917256 - DNA, 25 bp, Homo sapien
tactggctagctgtagcagcactag

SEQ ID NO: 2917257 - DNA, 25 bp, Homo sapien
acttttggccgggatcagctactgg

SEQ ID NO: 2917258 - DNA, 25 bp, Homo sapien
ggtctcacaggtttcagttgtccca

SEQ ID NO: 2917259 - DNA, 25 bp, Homo sapien
attggccaggcgcaaggagacactg

SEQ ID NO: 2917260 - DNA, 25 bp, Homo sapien
tagggtggcacccagcaagcttgtg

SEQ ID NO: 2917261 - DNA, 25 bp, Homo sapien
agccctggcaccagacattagggtg

SEQ ID NO: 2917262 - DNA, 25 bp, Homo sapien
caccagacattagggtggcacccag

SEQ ID NO: 2917263 - DNA, 25 bp, Homo sapien
cattagggtggcacccagcaagctt

SEQ ID NO: 2917264 - DNA, 25 bp, Homo sapien
tctgtggtacagatgtgctggcaac

SEQ ID NO: 2917265 - DNA, 25 bp, Homo sapien
tccaattgctgggaacaacaaattc

SEQ ID NO: 2917266 - DNA, 25 bp, Homo sapien
cataagcttatggattgtgccgctc

SEQ ID NO: 2917267 - DNA, 25 bp, Homo sapien
cattctgtcctgaagatctgagttt

SEQ ID NO: 2917268 - DNA, 25 bp, Homo sapien
gaagccctttatcaggttatggaag

SEQ ID NO: 2917269 - DNA, 25 bp, Homo sapien
gcattggctaggatcaccagttaca

SEQ ID NO: 2917270 - DNA, 25 bp, Homo sapien
tactcttttgtacccagcaatcttg

SEQ ID NO: 2917271 - DNA, 25 bp, Homo sapien
tgtacaatcccatcacctgcaaatg

SEQ ID NO: 2917272 - DNA, 25 bp, Homo sapien
ttctcgcggagcactgcaagtgttc

SEQ ID NO: 2917273 - DNA, 25 bp, Homo sapien
gatgtgcatctttatgtatagacac

SEQ ID NO: 2917274 - DNA, 25 bp, Homo sapien
aagtgcctccccaatgacattccta

SEQ ID NO: 2917275 - DNA, 25 bp, Homo sapien
aagtgtcaacgctgtgatgtgcatc

SEQ ID NO: 2917276 - DNA, 25 bp, Homo sapien
cctcggcccaggctctgtagaggca

SEQ ID NO: 2917277 - DNA, 25 bp, Homo sapien
tcccacctcggcccaggctctgtag

SEQ ID NO: 2917278 - DNA, 25 bp, Homo sapien
ctcggcccaggctctgtagaggcac

SEQ ID NO: 2917279 - DNA, 25 bp, Homo sapien
cacctcggcccaggctctgtagagg

SEQ ID NO: 2917280 - DNA, 25 bp, Homo sapien
cagagacagacacgggcttggtggt

SEQ ID NO: 2917281 - DNA, 25 bp, Homo sapien
ggacagattgtacggtggctccagt

SEQ ID NO: 2917282 - DNA, 25 bp, Homo sapien
cacgcgtcagaagctcttttcccag

SEQ ID NO: 2917283 - DNA, 25 bp, Homo sapien
agctgcccaggggtccgagttcttg

SEQ ID NO: 2917284 - DNA, 25 bp, Homo sapien
ctgggatctggggatcaggaacaaa

SEQ ID NO: 2917285 - DNA, 25 bp, Homo sapien
tgggatctggggatcaggaacaaag

SEQ ID NO: 2917286 - DNA, 25 bp, Homo sapien
gggatctggggatcaggaacaaagg

SEQ ID NO: 2917287 - DNA, 25 bp, Homo sapien
aatgactgggggcatctcacaggac

SEQ ID NO: 2917288 - DNA, 25 bp, Homo sapien
tctgagagccaaagaggcaagacag

SEQ ID NO: 2917289 - DNA, 25 bp, Homo sapien
gacttcatggcaactccactgccca

SEQ ID NO: 2917290 - DNA, 25 bp, Homo sapien
cacagaagccaatgactgggggcat

SEQ ID NO: 2917291 - DNA, 25 bp, Homo sapien
gtccgaaggttgtcaaattcagaaa

SEQ ID NO: 2917292 - DNA, 25 bp, Homo sapien
ttgaagtccgaaggttgtcaaattc

SEQ ID NO: 2917293 - DNA, 25 bp, Homo sapien
aagtccgaaggttgtcaaattcaga

SEQ ID NO: 2917294 - DNA, 25 bp, Homo sapien
gaagtccgaaggttgtcaaattcag

SEQ ID NO: 2917295 - DNA, 25 bp, Homo sapien
tgcacggaggattatggaaaccatc

SEQ ID NO: 2917296 - DNA, 25 bp, Homo sapien
ggctcccaagatcaaaatacaaaga

SEQ ID NO: 2917297 - DNA, 25 bp, Homo sapien
cactgatgcccaaaggtggttgtct

SEQ ID NO: 2917298 - DNA, 25 bp, Homo sapien
taactcagctggtcaaatgcacgga

SEQ ID NO: 2917299 - DNA, 25 bp, Homo sapien
aaacaggtctggagactggactgtg

SEQ ID NO: 2917300 - DNA, 25 bp, Homo sapien
actgcatccacctgatatccttcca

SEQ ID NO: 2917301 - DNA, 25 bp, Homo sapien
cacctgatatccttccatcccagag

SEQ ID NO: 2917302 - DNA, 25 bp, Homo sapien
aggaaaacaggtctggagactggac

SEQ ID NO: 2917303 - DNA, 25 bp, Homo sapien
cacgacgggatgcttcacggtacag

SEQ ID NO: 2917304 - DNA, 25 bp, Homo sapien
taggaatgtgattgccacgacggga

SEQ ID NO: 2917305 - DNA, 25 bp, Homo sapien
tctgttaatccacaaaagttgaggc

SEQ ID NO: 2917306 - DNA, 25 bp, Homo sapien
cctgggcgatcgatcaaggctcact

SEQ ID NO: 2917307 - DNA, 25 bp, Homo sapien
ttccattgttttgggatggcagaga

SEQ ID NO: 2917308 - DNA, 25 bp, Homo sapien
cattgttttgggatggcagagaggt

SEQ ID NO: 2917309 - DNA, 25 bp, Homo sapien
agttccattgttttgggatggcaga

SEQ ID NO: 2917310 - DNA, 25 bp, Homo sapien
ggttgagactcaaaggggtcagggc

SEQ ID NO: 2917311 - DNA, 25 bp, Homo sapien
tggtgccaggaaagggttgagggac

SEQ ID NO: 2917312 - DNA, 25 bp, Homo sapien
tgttttccgggcactgctgggcttg

SEQ ID NO: 2917313 - DNA, 25 bp, Homo sapien
actcaggtgttttccgggcactgct

SEQ ID NO: 2917314 - DNA, 25 bp, Homo sapien
tccaggttcaccagggccgcgttgg

SEQ ID NO: 2917315 - DNA, 25 bp, Homo sapien
agatcctcagatccctacatggtgg

SEQ ID NO: 2917316 - DNA, 25 bp, Homo sapien
gacttcctagaagggagtcatctga

SEQ ID NO: 2917317 - DNA, 25 bp, Homo sapien
tcagtggtaattctcctctgcaagg

SEQ ID NO: 2917318 - DNA, 25 bp, Homo sapien
tcacaagggtttcatgcacacagga

SEQ ID NO: 2917319 - DNA, 25 bp, Homo sapien
gcatgaatctgcactttaaggatga

SEQ ID NO: 2917320 - DNA, 25 bp, Homo sapien
gaggctgagccgtcagggtgtggct

SEQ ID NO: 2917321 - DNA, 25 bp, Homo sapien
gtgccggccgagtccatggcagaca

SEQ ID NO: 2917322 - DNA, 25 bp, Homo sapien
gactgcatgcgggtgttctggtccc

SEQ ID NO: 2917323 - DNA, 25 bp, Homo sapien
acaggggccgaggtggcgggagcac

SEQ ID NO: 2917324 - DNA, 25 bp, Homo sapien
taacaggggccgaggtggcgggagc

SEQ ID NO: 2917325 - DNA, 25 bp, Homo sapien
aacaggggccgaggtggcgggagca

SEQ ID NO: 2917326 - DNA, 25 bp, Homo sapien
cgaagctggttcagtgtcagcggct

SEQ ID NO: 2917327 - DNA, 25 bp, Homo sapien
tgggctcccccgaagctggttcagt

SEQ ID NO: 2917328 - DNA, 25 bp, Homo sapien
gcggaggtcatcgaggccacagcca

SEQ ID NO: 2917329 - DNA, 25 bp, Homo sapien
atcattgcagggcccagtggtgtca

SEQ ID NO: 2917330 - DNA, 25 bp, Homo sapien
ggaaagggttggttgtgccagtggc

SEQ ID NO: 2917331 - DNA, 25 bp, Homo sapien
caggcaacatcctggagaccctcgg

SEQ ID NO: 2917332 - DNA, 25 bp, Homo sapien
caaagacaaggccactgtcccaagt

SEQ ID NO: 2917333 - DNA, 25 bp, Homo sapien
acgtcctcgtccaaggcctcagagg

SEQ ID NO: 2917334 - DNA, 25 bp, Homo sapien
tggatcccgtcccacagacgagagt

SEQ ID NO: 2917335 - DNA, 25 bp, Homo sapien
tacacaagcatagagccacgttggg

SEQ ID NO: 2917336 - DNA, 25 bp, Homo sapien
gagccggtgcttcatcgtgtccaca

SEQ ID NO: 2917337 - DNA, 25 bp, Homo sapien
aaaaggtgtcttatggagccggtgc

SEQ ID NO: 2917338 - DNA, 25 bp, Homo sapien
taattcaagagttgtccacggtggt

SEQ ID NO: 2917339 - DNA, 25 bp, Homo sapien
tctactgacctgtaaggctggccca

SEQ ID NO: 2917340 - DNA, 25 bp, Homo sapien
ggaactctagacacggctcctggga

SEQ ID NO: 2917341 - DNA, 25 bp, Homo sapien
tacccaaatggcagcgggagcctaa

SEQ ID NO: 2917342 - DNA, 25 bp, Homo sapien
aagatctctcctgtgccggtgcgaa

SEQ ID NO: 2917343 - DNA, 25 bp, Homo sapien
aacagggacatgcactcgggatggc

SEQ ID NO: 2917344 - DNA, 25 bp, Homo sapien
gccggtggcttcatgatcagtgcag

SEQ ID NO: 2917345 - DNA, 25 bp, Homo sapien
ctctgggactgagaaacagctgggt

SEQ ID NO: 2917346 - DNA, 25 bp, Homo sapien
cacaggtgcaacatgcgtggcagtg

SEQ ID NO: 2917347 - DNA, 25 bp, Homo sapien
gcttgagttgtccattgctgtgtaa

SEQ ID NO: 2917348 - DNA, 25 bp, Homo sapien
gaatgctatcacagtaaggaggaaa

SEQ ID NO: 2917349 - DNA, 25 bp, Homo sapien
ccagatggcctcatggtagctacca

SEQ ID NO: 2917350 - DNA, 25 bp, Homo sapien
ggctagtttgcaagcagaaatgaaa

SEQ ID NO: 2917351 - DNA, 25 bp, Homo sapien
tcttcaccactgagaggtctgaccc

SEQ ID NO: 2917352 - DNA, 25 bp, Homo sapien
tgtccatgctgtcggtgtcacaaag

SEQ ID NO: 2917353 - DNA, 25 bp, Homo sapien
tgggtagttctagccaaagcaaagt

SEQ ID NO: 2917354 - DNA, 25 bp, Homo sapien
tccatgaggacagtcgaggcatacg

SEQ ID NO: 2917355 - DNA, 25 bp, Homo sapien
gaaaagcctgtaggaaatgacggag

SEQ ID NO: 2917356 - DNA, 25 bp, Homo sapien
cgtcggtgaagtacccaagttctct

SEQ ID NO: 2917357 - DNA, 25 bp, Homo sapien
aacatctcaggaggagggaatggcc

SEQ ID NO: 2917358 - DNA, 25 bp, Homo sapien
gagatcatcatttcacccatcagtg

SEQ ID NO: 2917359 - DNA, 25 bp, Homo sapien
tctatggtcccaagagagcccagca

SEQ ID NO: 2917360 - DNA, 25 bp, Homo sapien
gcctggagttccaccattggtgctg

SEQ ID NO: 2917361 - DNA, 25 bp, Homo sapien
gtgggggaacctggtcacatcctgt

SEQ ID NO: 2917362 - DNA, 25 bp, Homo sapien
tggtgctgcagtcctctatggtccc

SEQ ID NO: 2917363 - DNA, 25 bp, Homo sapien
tcagcacagccaggctgaccacaga

SEQ ID NO: 2917364 - DNA, 25 bp, Homo sapien
ccctgcttccaccattcagcacagc

SEQ ID NO: 2917365 - DNA, 25 bp, Homo sapien
cattcagcacagccaggctgaccac

SEQ ID NO: 2917366 - DNA, 25 bp, Homo sapien
cctgcttccaccattcagcacagcc

SEQ ID NO: 2917367 - DNA, 25 bp, Homo sapien
ctcacggccagatggctccagacac

SEQ ID NO: 2917368 - DNA, 25 bp, Homo sapien
tcacggccagatggctccagacacc

SEQ ID NO: 2917369 - DNA, 25 bp, Homo sapien
cagatggctccagacacctctcggg

SEQ ID NO: 2917370 - DNA, 25 bp, Homo sapien
ggctccagacacctctcggggcctc

SEQ ID NO: 2917371 - DNA, 25 bp, Homo sapien
gagggggactcgggtgatgcatcat

SEQ ID NO: 2917372 - DNA, 25 bp, Homo sapien
tgagggggactcgggtgatgcatca

SEQ ID NO: 2917373 - DNA, 25 bp, Homo sapien
ctgagggggactcgggtgatgcatc

SEQ ID NO: 2917374 - DNA, 25 bp, Homo sapien
agggggactcgggtgatgcatcatt

SEQ ID NO: 2917375 - DNA, 25 bp, Homo sapien
ccagtccctgcggtgttccagcagc

SEQ ID NO: 2917376 - DNA, 25 bp, Homo sapien
tgtgtaagcgtttctaccttcatct

SEQ ID NO: 2917377 - DNA, 25 bp, Homo sapien
tcagtgtgtaagcgtttctaccttc

SEQ ID NO: 2917378 - DNA, 25 bp, Homo sapien
cgctccgcccagtccctgcggtgtt

SEQ ID NO: 2917379 - DNA, 25 bp, Homo sapien
tatgcaggaagaataccagaagtgg

SEQ ID NO: 2917380 - DNA, 25 bp, Homo sapien
ccagaagtgggagtgtcaagttaaa

SEQ ID NO: 2917381 - DNA, 25 bp, Homo sapien
ctgatttagacacccaccagtggta

SEQ ID NO: 2917382 - DNA, 25 bp, Homo sapien
gcacacagcaagtgtatatgcagga

SEQ ID NO: 2917383 - DNA, 25 bp, Homo sapien
cctctaaggctcagtgccgggaggc

SEQ ID NO: 2917384 - DNA, 25 bp, Homo sapien
ggtggacatggtggatactgtgagc

SEQ ID NO: 2917385 - DNA, 25 bp, Homo sapien
tctaaagggagctcgaggtagggcc

SEQ ID NO: 2917386 - DNA, 25 bp, Homo sapien
gtttatggagcaccgcccctctaag

SEQ ID NO: 2917387 - DNA, 25 bp, Homo sapien
caagttggactgcagctcgcggttt

SEQ ID NO: 2917388 - DNA, 25 bp, Homo sapien
gctttgggctgcagcggagttaacc

SEQ ID NO: 2917389 - DNA, 25 bp, Homo sapien
tgtccgccatttgcttggtcccagg

SEQ ID NO: 2917390 - DNA, 25 bp, Homo sapien
gtcctccgggattctagagcgtccg

SEQ ID NO: 2917391 - DNA, 25 bp, Homo sapien
ctactgcgtccaatcctagcccacc

SEQ ID NO: 2917392 - DNA, 25 bp, Homo sapien
agaaagccacgcctggcgcgcgccg

SEQ ID NO: 2917393 - DNA, 25 bp, Homo sapien
ggagccgcccaaagggtgcccggca

SEQ ID NO: 2917394 - DNA, 25 bp, Homo sapien
aatcctagcccaccggccgagaaag

SEQ ID NO: 2917395 - DNA, 25 bp, Homo sapien
gccaatcgctgagctactgctgcgg

SEQ ID NO: 2917396 - DNA, 25 bp, Homo sapien
gctcctggccaatcgctgagctact

SEQ ID NO: 2917397 - DNA, 25 bp, Homo sapien
aatcgctgagctactgctgcggagg

SEQ ID NO: 2917398 - DNA, 25 bp, Homo sapien
cctggccaatcgctgagctactgct

SEQ ID NO: 2917399 - DNA, 25 bp, Homo sapien
ggctttcagaggtcccgaggctcgc

SEQ ID NO: 2917400 - DNA, 25 bp, Homo sapien
ctcctcaaggctttcagaggtcccg

SEQ ID NO: 2917401 - DNA, 25 bp, Homo sapien
aaggctttcagaggtcccgaggctc

SEQ ID NO: 2917402 - DNA, 25 bp, Homo sapien
tcaaggctttcagaggtcccgaggc

SEQ ID NO: 2917403 - DNA, 25 bp, Homo sapien
tcttggccgctacagaggcagcggt

SEQ ID NO: 2917404 - DNA, 25 bp, Homo sapien
tcaaaggtcacatcgaaggagcggg

SEQ ID NO: 2917405 - DNA, 25 bp, Homo sapien
gtactcgtcgcccacgtcaaaggtc

SEQ ID NO: 2917406 - DNA, 25 bp, Homo sapien
gccccgttgcctatggtctcgatga

SEQ ID NO: 2917407 - DNA, 25 bp, Homo sapien
caggatgtccttgatggcgatgatg

SEQ ID NO: 2917408 - DNA, 25 bp, Homo sapien
tggtcaccacatcgaaagcattagg

SEQ ID NO: 2917409 - DNA, 25 bp, Homo sapien
tgagggtccgcttggcattggtcac

SEQ ID NO: 2917410 - DNA, 25 bp, Homo sapien
cagatttgaattcgccatagggcac

SEQ ID NO: 2917411 - DNA, 25 bp, Homo sapien
caggcttgtccactgtctgtaggaa

SEQ ID NO: 2917412 - DNA, 25 bp, Homo sapien
ccagaacttcggcaacatggttgca

SEQ ID NO: 2917413 - DNA, 25 bp, Homo sapien
tcagaaaagtcccaagtctggctcc

SEQ ID NO: 2917414 - DNA, 25 bp, Homo sapien
cagacctagtttccccatcagataa

SEQ ID NO: 2917415 - DNA, 25 bp, Homo sapien
tccttaatgcgctcccgagtgaggg

SEQ ID NO: 2917416 - DNA, 25 bp, Homo sapien
ggcaagctctggatataggcccgca

SEQ ID NO: 2917417 - DNA, 25 bp, Homo sapien
ggcttcgcggtcaaaggcaaagtca

SEQ ID NO: 2917418 - DNA, 25 bp, Homo sapien
ggcacagtcaggctcatcatcagga

SEQ ID NO: 2917419 - DNA, 25 bp, Homo sapien
ggtaaaagcctgaagccttgtccaa

SEQ ID NO: 2917420 - DNA, 25 bp, Homo sapien
gaaggtaaaagcctgaagccttgtc

SEQ ID NO: 2917421 - DNA, 25 bp, Homo sapien
aggtaaaagcctgaagccttgtcca

SEQ ID NO: 2917422 - DNA, 25 bp, Homo sapien
gagaaggtaaaagcctgaagccttg

SEQ ID NO: 2917423 - DNA, 25 bp, Homo sapien
ggagcctccaggggtgcgctggggc

SEQ ID NO: 2917424 - DNA, 25 bp, Homo sapien
caggagcctccaggggtgcgctggg

SEQ ID NO: 2917425 - DNA, 25 bp, Homo sapien
tcaggagcctccaggggtgcgctgg

SEQ ID NO: 2917426 - DNA, 25 bp, Homo sapien
gcctccaggggtgcgctggggccat

SEQ ID NO: 2917427 - DNA, 25 bp, Homo sapien
ccttggctcgttcttgccgcctccg

SEQ ID NO: 2917428 - DNA, 25 bp, Homo sapien
tccttggctcgttcttgccgcctcc

SEQ ID NO: 2917429 - DNA, 25 bp, Homo sapien
cccgctccttggctcgttcttgccg

SEQ ID NO: 2917430 - DNA, 25 bp, Homo sapien
gctccttggctcgttcttgccgcct

SEQ ID NO: 2917431 - DNA, 25 bp, Homo sapien
tggcgttggcgctggggcaggggcc

SEQ ID NO: 2917432 - DNA, 25 bp, Homo sapien
ttggggttggcgttggcgctggggc

SEQ ID NO: 2917433 - DNA, 25 bp, Homo sapien
gggctgcgggccgggccattcgagt

SEQ ID NO: 2917434 - DNA, 25 bp, Homo sapien
ggccggcacagaggtgagggctggg

SEQ ID NO: 2917435 - DNA, 25 bp, Homo sapien
tagagcccgcagattgtggttgcgg

SEQ ID NO: 2917436 - DNA, 25 bp, Homo sapien
ggtagagcccgcagattgtggttgc

SEQ ID NO: 2917437 - DNA, 25 bp, Homo sapien
cagattgtggttgcgggccagtggg

SEQ ID NO: 2917438 - DNA, 25 bp, Homo sapien
cccgcagattgtggttgcgggccag

SEQ ID NO: 2917439 - DNA, 25 bp, Homo sapien
ctgtgacttagatagctgctgggtc

SEQ ID NO: 2917440 - DNA, 25 bp, Homo sapien
gtaaggcaaaactcctggggtgctg

SEQ ID NO: 2917441 - DNA, 25 bp, Homo sapien
tggcacaagtgactgggcagccagg

SEQ ID NO: 2917442 - DNA, 25 bp, Homo sapien
gctgggtcacaaggttgacatcagg

SEQ ID NO: 2917443 - DNA, 25 bp, Homo sapien
agccacgcccatgtcgaaagactgg

SEQ ID NO: 2917444 - DNA, 25 bp, Homo sapien
cccatgtcgaaagactggtttaaga

SEQ ID NO: 2917445 - DNA, 25 bp, Homo sapien
tgtggcccatcagccacgcccatgt

SEQ ID NO: 2917446 - DNA, 25 bp, Homo sapien
tgtcgaaagactggtttaagaattc

SEQ ID NO: 2917447 - DNA, 25 bp, Homo sapien
tcacgctgcagggactcaatatcgg

SEQ ID NO: 2917448 - DNA, 25 bp, Homo sapien
aatatcggcagggttcatgccatgg

SEQ ID NO: 2917449 - DNA, 25 bp, Homo sapien
catggccttcgagccagtcagcaag

SEQ ID NO: 2917450 - DNA, 25 bp, Homo sapien
tcatgccatggccttcgagccagtc

SEQ ID NO: 2917451 - DNA, 25 bp, Homo sapien
gaagggaaccttgtatttcacaggc

SEQ ID NO: 2917452 - DNA, 25 bp, Homo sapien
tgcagaataatccaagccgagcctc

SEQ ID NO: 2917453 - DNA, 25 bp, Homo sapien
taggtctactgtggcagcaaggcac

SEQ ID NO: 2917454 - DNA, 25 bp, Homo sapien
cacatgagggagcagaggacaatct

SEQ ID NO: 2917455 - DNA, 25 bp, Homo sapien
taagagattcaatatccaactaata

SEQ ID NO: 2917456 - DNA, 25 bp, Homo sapien
caattgcatattattcagtgttgaa

SEQ ID NO: 2917457 - DNA, 25 bp, Homo sapien
taacacaccgtgagaagacatgcag

SEQ ID NO: 2917458 - DNA, 25 bp, Homo sapien
cagtgttgaaaagaagtaagctaac

SEQ ID NO: 2917459 - DNA, 25 bp, Homo sapien
accctcacaacccttgaggtggata

SEQ ID NO: 2917460 - DNA, 25 bp, Homo sapien
aggtggatataagccgcccactacc

SEQ ID NO: 2917461 - DNA, 25 bp, Homo sapien
tggagccccatctttttaaccctca

SEQ ID NO: 2917462 - DNA, 25 bp, Homo sapien
cccttgaggtggatataagccgccc

SEQ ID NO: 2917463 - DNA, 25 bp, Homo sapien
ggctgccttccccatccgggtcctg

SEQ ID NO: 2917464 - DNA, 25 bp, Homo sapien
tgaccctggccccaaggtgcagcag

SEQ ID NO: 2917465 - DNA, 25 bp, Homo sapien
tccccatccgggtcctgaccctggc

SEQ ID NO: 2917466 - DNA, 25 bp, Homo sapien
ctgccttccccatccgggtcctgac

SEQ ID NO: 2917467 - DNA, 25 bp, Homo sapien
gctgctggctgtagtgagctggtgt

SEQ ID NO: 2917468 - DNA, 25 bp, Homo sapien
tgctgaaccaatggcctctgggtgc

SEQ ID NO: 2917469 - DNA, 25 bp, Homo sapien
tcctgctgaaccaatggcctctggg

SEQ ID NO: 2917470 - DNA, 25 bp, Homo sapien
tgtcctgctgaaccaatggcctctg

SEQ ID NO: 2917471 - DNA, 25 bp, Homo sapien
caggtggagacacccctgaagctgg

SEQ ID NO: 2917472 - DNA, 25 bp, Homo sapien
agcaggtggagacacccctgaagct

SEQ ID NO: 2917473 - DNA, 25 bp, Homo sapien
cttcagcaggtggagacacccctga

SEQ ID NO: 2917474 - DNA, 25 bp, Homo sapien
tcagcaggtggagacacccctgaag

SEQ ID NO: 2917475 - DNA, 25 bp, Homo sapien
gaggagacacggctgcgggtagcag

SEQ ID NO: 2917476 - DNA, 25 bp, Homo sapien
gcagggctccgaggagggagggatg

SEQ ID NO: 2917477 - DNA, 25 bp, Homo sapien
gcaagccgaggtggtgagtcgccat

SEQ ID NO: 2917478 - DNA, 25 bp, Homo sapien
ggatggagcccggctcagaatccct

SEQ ID NO: 2917479 - DNA, 25 bp, Homo sapien
ttcaaccagaggtaaggatgccttt

SEQ ID NO: 2917480 - DNA, 25 bp, Homo sapien
gctgactcccggtcagagctggaaa

SEQ ID NO: 2917481 - DNA, 25 bp, Homo sapien
gatggtatccccgaggagctgactc

SEQ ID NO: 2917482 - DNA, 25 bp, Homo sapien
ttctcccggaaaggctagcaggctg

SEQ ID NO: 2917483 - DNA, 25 bp, Homo sapien
ccgtttgccaagccgatgacaaaag

SEQ ID NO: 2917484 - DNA, 25 bp, Homo sapien
aaaggaagtgactgacaaggcgggc

SEQ ID NO: 2917485 - DNA, 25 bp, Homo sapien
agccgatgacaaaaggaagtgactg

SEQ ID NO: 2917486 - DNA, 25 bp, Homo sapien
tgccaagccgatgacaaaaggaagt

SEQ ID NO: 2917487 - DNA, 25 bp, Homo sapien
cccactctccttcccgatcttagga

SEQ ID NO: 2917488 - DNA, 25 bp, Homo sapien
ccactctccttcccgatcttaggac

SEQ ID NO: 2917489 - DNA, 25 bp, Homo sapien
gtcgtggccacagtccagcgagatg

SEQ ID NO: 2917490 - DNA, 25 bp, Homo sapien
cagcgagatggggtcgcgcaacctc

SEQ ID NO: 2917491 - DNA, 25 bp, Homo sapien
tgtgtgctgaagcaccgtatgcaga

SEQ ID NO: 2917492 - DNA, 25 bp, Homo sapien
caggcctagctccaacttggggaaa

SEQ ID NO: 2917493 - DNA, 25 bp, Homo sapien
ttctgcttgcatatcttccggcact

SEQ ID NO: 2917494 - DNA, 25 bp, Homo sapien
atatcttccggcactcaggacagca

SEQ ID NO: 2917495 - DNA, 25 bp, Homo sapien
cttgcatatcttccggcactcagga

SEQ ID NO: 2917496 - DNA, 25 bp, Homo sapien
catatcttccggcactcaggacagc

SEQ ID NO: 2917497 - DNA, 25 bp, Homo sapien
ctgggccaggagaagagaggggccc

SEQ ID NO: 2917498 - DNA, 25 bp, Homo sapien
agaggcattgatgcgaaccagcagc

SEQ ID NO: 2917499 - DNA, 25 bp, Homo sapien
cccagaggcattgatgcgaaccagc

SEQ ID NO: 2917500 - DNA, 25 bp, Homo sapien
gcattgatgcgaaccagcagcagcg

SEQ ID NO: 2917501 - DNA, 25 bp, Homo sapien
ggctccgccctcacaggacacgtct

SEQ ID NO: 2917502 - DNA, 25 bp, Homo sapien
ccccaggacagcgaggaggcagact

SEQ ID NO: 2917503 - DNA, 25 bp, Homo sapien
tccctggccagagggtgcttcaggc

SEQ ID NO: 2917504 - DNA, 25 bp, Homo sapien
ggacttccctgagtgctgctccccc

SEQ ID NO: 2917505 - DNA, 25 bp, Homo sapien
cccggcaagccctgaagcaaatggt

SEQ ID NO: 2917506 - DNA, 25 bp, Homo sapien
tccacatccatatgcccctggcgag

SEQ ID NO: 2917507 - DNA, 25 bp, Homo sapien
ccatatgcccctggcgaggccattg

SEQ ID NO: 2917508 - DNA, 25 bp, Homo sapien
atccatatgcccctggcgaggccat

SEQ ID NO: 2917509 - DNA, 25 bp, Homo sapien
tggcgaggccattggcgccccacct

SEQ ID NO: 2917510 - DNA, 25 bp, Homo sapien
gagagcacagagcttgatccttgtt

SEQ ID NO: 2917511 - DNA, 25 bp, Homo sapien
ggtaggagctcagcatcgtggtgag

SEQ ID NO: 2917512 - DNA, 25 bp, Homo sapien
tgagagcacagagcttgatccttgt

SEQ ID NO: 2917513 - DNA, 25 bp, Homo sapien
cagatagtccaggtctgtatccttc

SEQ ID NO: 2917514 - DNA, 25 bp, Homo sapien
ctccagatagtccaggtctgtatcc

SEQ ID NO: 2917515 - DNA, 25 bp, Homo sapien
gtccaggtctgtatccttcagctcc

SEQ ID NO: 2917516 - DNA, 25 bp, Homo sapien
gatagtccaggtctgtatccttcag

SEQ ID NO: 2917517 - DNA, 25 bp, Homo sapien
ccatcccataatgcttgcccatcac

SEQ ID NO: 2917518 - DNA, 25 bp, Homo sapien
ctggattggcaccatcccataatgc

SEQ ID NO: 2917519 - DNA, 25 bp, Homo sapien
ttggcaccatcccataatgcttgcc

SEQ ID NO: 2917520 - DNA, 25 bp, Homo sapien
gattggcaccatcccataatgcttg

SEQ ID NO: 2917521 - DNA, 25 bp, Homo sapien
ctggaagatgttgcctacatgcccc

SEQ ID NO: 2917522 - DNA, 25 bp, Homo sapien
agtcacgaactaagaggtccagatg

SEQ ID NO: 2917523 - DNA, 25 bp, Homo sapien
ccttgttggggtgggatgagtcacg

SEQ ID NO: 2917524 - DNA, 25 bp, Homo sapien
gatgagtcacgaactaagaggtcca

SEQ ID NO: 2917525 - DNA, 25 bp, Homo sapien
caccagggcttgcatggccttggtt

SEQ ID NO: 2917526 - DNA, 25 bp, Homo sapien
ttgcatggccttggttcatccgccg

SEQ ID NO: 2917527 - DNA, 25 bp, Homo sapien
caccttggggtatctgccagacaat

SEQ ID NO: 2917528 - DNA, 25 bp, Homo sapien
ggcagcaacgggctcgcttcccttg

SEQ ID NO: 2917529 - DNA, 25 bp, Homo sapien
agggagagatgtgcatgctgagaga

SEQ ID NO: 2917530 - DNA, 25 bp, Homo sapien
gagggagagatgtgcatgctgagag

SEQ ID NO: 2917531 - DNA, 25 bp, Homo sapien
tgagggagagatgtgcatgctgaga

SEQ ID NO: 2917532 - DNA, 25 bp, Homo sapien
ctgagggagagatgtgcatgctgag

SEQ ID NO: 2917533 - DNA, 25 bp, Homo sapien
gtacccctggcagcggctcttagcg

SEQ ID NO: 2917534 - DNA, 25 bp, Homo sapien
gtgagtaggcgtctgtcccccctgg

SEQ ID NO: 2917535 - DNA, 25 bp, Homo sapien
cagaaggtggcggaagtcatcatct

SEQ ID NO: 2917536 - DNA, 25 bp, Homo sapien
ctggggggccgcactcagcacatct

SEQ ID NO: 2917537 - DNA, 25 bp, Homo sapien
ctcatccggagaggtgaaaccgggc

SEQ ID NO: 2917538 - DNA, 25 bp, Homo sapien
tcatccggagaggtgaaaccgggcc

SEQ ID NO: 2917539 - DNA, 25 bp, Homo sapien
ctgctgcctcacatactcctcgaac

SEQ ID NO: 2917540 - DNA, 25 bp, Homo sapien
gctgcctcacatactcctcgaactc

SEQ ID NO: 2917541 - DNA, 25 bp, Homo sapien
tactcctcgaactccctcttggcag

SEQ ID NO: 2917542 - DNA, 25 bp, Homo sapien
actcctcgaactccctcttggcagc

SEQ ID NO: 2917543 - DNA, 25 bp, Homo sapien
gcaggacccgcagcgcagagaatat

SEQ ID NO: 2917544 - DNA, 25 bp, Homo sapien
ggagaggaggttccgcatggtgtct

SEQ ID NO: 2917545 - DNA, 25 bp, Homo sapien
cgcagagaatatgcgcttggtggct

SEQ ID NO: 2917546 - DNA, 25 bp, Homo sapien
agaatatgcgcttggtggctacgtc

SEQ ID NO: 2917547 - DNA, 25 bp, Homo sapien
agctcagcttccagtgcctccaagg

SEQ ID NO: 2917548 - DNA, 25 bp, Homo sapien
cagcagctaggtggccacagaagcg

SEQ ID NO: 2917549 - DNA, 25 bp, Homo sapien
catcgtgtaggagtccatgaaggcc

SEQ ID NO: 2917550 - DNA, 25 bp, Homo sapien
cagtgcctccaaggtctgatctctc

SEQ ID NO: 2917551 - DNA, 25 bp, Homo sapien
gtgacaagggcagatcggcaaccat

SEQ ID NO: 2917552 - DNA, 25 bp, Homo sapien
atctgcaaccagaaacaggccgggt

SEQ ID NO: 2917553 - DNA, 25 bp, Homo sapien
tcgcatttgggcacttcacagaggg

SEQ ID NO: 2917554 - DNA, 25 bp, Homo sapien
tcgaccagggcagtgcagtacatgg

SEQ ID NO: 2917555 - DNA, 25 bp, Homo sapien
gaagggaaaccagccagacgtcagc

SEQ ID NO: 2917556 - DNA, 25 bp, Homo sapien
aagggaaaccagccagacgtcagca

SEQ ID NO: 2917557 - DNA, 25 bp, Homo sapien
agggaaaccagccagacgtcagcat

SEQ ID NO: 2917558 - DNA, 25 bp, Homo sapien
tagatgtcgcatccccttcatgcag

SEQ ID NO: 2917559 - DNA, 25 bp, Homo sapien
ccttcatgcagtaaaagtttattcc

SEQ ID NO: 2917560 - DNA, 25 bp, Homo sapien
tgggtgatggtgtactaagtcgacc

SEQ ID NO: 2917561 - DNA, 25 bp, Homo sapien
taagtcgacctagatgtcgcatccc

SEQ ID NO: 2917562 - DNA, 25 bp, Homo sapien
cagggacctcacagcagctggattc

SEQ ID NO: 2917563 - DNA, 25 bp, Homo sapien
gggacctcacagcagctggattctg

SEQ ID NO: 2917564 - DNA, 25 bp, Homo sapien
ccactccccaggtacatacagaagg

SEQ ID NO: 2917565 - DNA, 25 bp, Homo sapien
cccaggtacatacagaaggttctct

SEQ ID NO: 2917566 - DNA, 25 bp, Homo sapien
gctgagcaggtagcatcatccaaaa

SEQ ID NO: 2917567 - DNA, 25 bp, Homo sapien
catccaaaacatgttgatgtgcggg

SEQ ID NO: 2917568 - DNA, 25 bp, Homo sapien
tctgactggactatgggaattagct

SEQ ID NO: 2917569 - DNA, 25 bp, Homo sapien
ccagtgaaaagtgatcttaaaggca

SEQ ID NO: 2917570 - DNA, 25 bp, Homo sapien
aaacctcctcgttcagctcatcgga

SEQ ID NO: 2917571 - DNA, 25 bp, Homo sapien
tttagccagcatgataggacatccc

SEQ ID NO: 2917572 - DNA, 25 bp, Homo sapien
cacatacaggatgcaaatagccaac

SEQ ID NO: 2917573 - DNA, 25 bp, Homo sapien
cagatcacatttgccgatgggtcac

SEQ ID NO: 2917574 - DNA, 25 bp, Homo sapien
gatctaccactgtaatctggtttgg

SEQ ID NO: 2917575 - DNA, 25 bp, Homo sapien
tccagacctgggaaagattaactga

SEQ ID NO: 2917576 - DNA, 25 bp, Homo sapien
atctgcactgacgaagccgggccgt

SEQ ID NO: 2917577 - DNA, 25 bp, Homo sapien
tcaagggccgctacctgtgaggctt

SEQ ID NO: 2917578 - DNA, 25 bp, Homo sapien
agctgctcatgatggctggtatcga

SEQ ID NO: 2917579 - DNA, 25 bp, Homo sapien
ggctggtatcgatgactgctacacc

SEQ ID NO: 2917580 - DNA, 25 bp, Homo sapien
gctcatgatggctggtatcgatgac

SEQ ID NO: 2917581 - DNA, 25 bp, Homo sapien
catgatggctggtatcgatgactgc

SEQ ID NO: 2917582 - DNA, 25 bp, Homo sapien
gagacctgctggtatatgggccacg

SEQ ID NO: 2917583 - DNA, 25 bp, Homo sapien
tgaatttattctagcacgccctgca

SEQ ID NO: 2917584 - DNA, 25 bp, Homo sapien
tcactgacagcgattgaggccaatg

SEQ ID NO: 2917585 - DNA, 25 bp, Homo sapien
actcctttgggatgatgctcgcctg

SEQ ID NO: 2917586 - DNA, 25 bp, Homo sapien
catgaacatcaacacagaggcctta

SEQ ID NO: 2917587 - DNA, 25 bp, Homo sapien
gggaatcaggtgtgcctcattatac

SEQ ID NO: 2917588 - DNA, 25 bp, Homo sapien
aagcctgctacgtggaggcttcgcc

SEQ ID NO: 2917589 - DNA, 25 bp, Homo sapien
acgtggaggcttcgcctgcctaaaa

SEQ ID NO: 2917590 - DNA, 25 bp, Homo sapien
cacttgaccaggctactgcggtggg

SEQ ID NO: 2917591 - DNA, 25 bp, Homo sapien
taggcctgagtcctgaagtctccac

SEQ ID NO: 2917592 - DNA, 25 bp, Homo sapien
ggctcttcacaaggacgcgagtaaa

SEQ ID NO: 2917593 - DNA, 25 bp, Homo sapien
gatgaaaacctgtccgtagagcacg

SEQ ID NO: 2917594 - DNA, 25 bp, Homo sapien
ccacattagtagcctgtgcctgtgc

SEQ ID NO: 2917595 - DNA, 25 bp, Homo sapien
tgtgccacggattcctgctggcagg

SEQ ID NO: 2917596 - DNA, 25 bp, Homo sapien
tgctcactcttgttaacacccacat

SEQ ID NO: 2917597 - DNA, 25 bp, Homo sapien
ctgtgccacggattcctgctggcag

SEQ ID NO: 2917598 - DNA, 25 bp, Homo sapien
ggagcatttgggctaagagcctgca

SEQ ID NO: 2917599 - DNA, 25 bp, Homo sapien
catttgggctaagagcctgcagcac

SEQ ID NO: 2917600 - DNA, 25 bp, Homo sapien
gcatttgggctaagagcctgcagca

SEQ ID NO: 2917601 - DNA, 25 bp, Homo sapien
aggggagcatttgggctaagagcct

SEQ ID NO: 2917602 - DNA, 25 bp, Homo sapien
tttcccgtgtggcagggcgttcagc

SEQ ID NO: 2917603 - DNA, 25 bp, Homo sapien
atcatttgtgctgctcgcctggcgg

SEQ ID NO: 2917604 - DNA, 25 bp, Homo sapien
gagtatttagccagaccctgttcca

SEQ ID NO: 2917605 - DNA, 25 bp, Homo sapien
ggtggcttcgatccatccattctaa

SEQ ID NO: 2917606 - DNA, 25 bp, Homo sapien
aatccaagcacgagaagggagctgg

SEQ ID NO: 2917607 - DNA, 25 bp, Homo sapien
ctgagtgcgcgaatccaagcacgag

SEQ ID NO: 2917608 - DNA, 25 bp, Homo sapien
cacgagaagggagctgggaatctcc

SEQ ID NO: 2917609 - DNA, 25 bp, Homo sapien
tgcgcgaatccaagcacgagaaggg

SEQ ID NO: 2917610 - DNA, 25 bp, Homo sapien
ggtgctgcgtccaagaggcccaccc

SEQ ID NO: 2917611 - DNA, 25 bp, Homo sapien
acttgcccgggatcactttgccaat

SEQ ID NO: 2917612 - DNA, 25 bp, Homo sapien
ccgggatcactttgccaattggaaa

SEQ ID NO: 2917613 - DNA, 25 bp, Homo sapien
gcccgggatcactttgccaattgga

SEQ ID NO: 2917614 - DNA, 25 bp, Homo sapien
tcactttgccaattggaaaggagga

SEQ ID NO: 2917615 - DNA, 25 bp, Homo sapien
cttcctctccagttcggtccaccac

SEQ ID NO: 2917616 - DNA, 25 bp, Homo sapien
ttgctgccccatcgcgagagtcctt

SEQ ID NO: 2917617 - DNA, 25 bp, Homo sapien
tgtcccacaccttatagaggcatac

SEQ ID NO: 2917618 - DNA, 25 bp, Homo sapien
tgtggaaccaggagctgtcccacac

SEQ ID NO: 2917619 - DNA, 25 bp, Homo sapien
gtgtgctcgtctggaaccgcccgtc

SEQ ID NO: 2917620 - DNA, 25 bp, Homo sapien
ccgtgtgctcgtctggaaccgcccg

SEQ ID NO: 2917621 - DNA, 25 bp, Homo sapien
cccgtgtgctcgtctggaaccgccc

SEQ ID NO: 2917622 - DNA, 25 bp, Homo sapien
cgtgtgctcgtctggaaccgcccgt

SEQ ID NO: 2917623 - DNA, 25 bp, Homo sapien
ggagcagcaggagcagcaggagcag

SEQ ID NO: 2917624 - DNA, 25 bp, Homo sapien
ctagaggggaggccgggcaggagca

SEQ ID NO: 2917625 - DNA, 25 bp, Homo sapien
gaggggaggccgggcaggagcagca

SEQ ID NO: 2917626 - DNA, 25 bp, Homo sapien
agcagcagcaggagcagcagagact

SEQ ID NO: 2917627 - DNA, 25 bp, Homo sapien
caaaggttcaatgggtttcagtcta

SEQ ID NO: 2917628 - DNA, 25 bp, Homo sapien
tcccggaggctctagagatgtccag

SEQ ID NO: 2917629 - DNA, 25 bp, Homo sapien
gcgagaagcctggaatgcagtcaga

SEQ ID NO: 2917630 - DNA, 25 bp, Homo sapien
ttcagtctaaatttgtcccggaggc

SEQ ID NO: 2917631 - DNA, 25 bp, Homo sapien
tcttgtcatcatgagcaaaaaggca

SEQ ID NO: 2917632 - DNA, 25 bp, Homo sapien
aaaggcagcctctctgcacctgtac

SEQ ID NO: 2917633 - DNA, 25 bp, Homo sapien
tctaagccctgttttgaggttctga

SEQ ID NO: 2917634 - DNA, 25 bp, Homo sapien
aacacttcaataaattctgggccag

SEQ ID NO: 2917635 - DNA, 25 bp, Homo sapien
tggatcacaactatgaatcgcatac

SEQ ID NO: 2917636 - DNA, 25 bp, Homo sapien
ttggatcacaactatgaatcgcata

SEQ ID NO: 2917637 - DNA, 25 bp, Homo sapien
cagtggcatatcttcggtgctttgt

SEQ ID NO: 2917638 - DNA, 25 bp, Homo sapien
ggtccagtggcatatcttcggtgct

SEQ ID NO: 2917639 - DNA, 25 bp, Homo sapien
tccagtggcatatcttcggtgcttt

SEQ ID NO: 2917640 - DNA, 25 bp, Homo sapien
taggtccagtggcatatcttcggtg

SEQ ID NO: 2917641 - DNA, 25 bp, Homo sapien
ttaattgcacttattttaatgctga

SEQ ID NO: 2917642 - DNA, 25 bp, Homo sapien
ccttttaattgcacttattttaatg

SEQ ID NO: 2917643 - DNA, 25 bp, Homo sapien
ttttaattgcacttattttaatgct

SEQ ID NO: 2917644 - DNA, 25 bp, Homo sapien
aattgcacttattttaatgctgaat

SEQ ID NO: 2917645 - DNA, 25 bp, Homo sapien
gaagctgaccctcgtgagagctggc

SEQ ID NO: 2917646 - DNA, 25 bp, Homo sapien
actgagaaaaacacgcacagcttgg

SEQ ID NO: 2917647 - DNA, 25 bp, Homo sapien
tatgacagtgacgactcagagtgac

SEQ ID NO: 2917648 - DNA, 25 bp, Homo sapien
caacctagatttccagggcatgagg

SEQ ID NO: 2917649 - DNA, 25 bp, Homo sapien
ggcaaggactaggagtgaggcaagc

SEQ ID NO: 2917650 - DNA, 25 bp, Homo sapien
gggcaaggactaggagtgaggcaag

SEQ ID NO: 2917651 - DNA, 25 bp, Homo sapien
gatctggagtcagacgcgctaccat

SEQ ID NO: 2917652 - DNA, 25 bp, Homo sapien
tgaccccgacgtgacttgaacacgc

SEQ ID NO: 2917653 - DNA, 25 bp, Homo sapien
gcgctaccattgcgccacgaggtca

SEQ ID NO: 2917654 - DNA, 25 bp, Homo sapien
gacgtgacttgaacacgcaaccttc

SEQ ID NO: 2917655 - DNA, 25 bp, Homo sapien
tcaattcaggtgtcagagaaaggac

SEQ ID NO: 2917656 - DNA, 25 bp, Homo sapien
tgtcaattcaggtgtcagagaaagg

SEQ ID NO: 2917657 - DNA, 25 bp, Homo sapien
tggccgaatcatagacctgctgaga

SEQ ID NO: 2917658 - DNA, 25 bp, Homo sapien
gctgtggccgaatcatagacctgct

SEQ ID NO: 2917659 - DNA, 25 bp, Homo sapien
agtctctccatagcaggttttgacc

SEQ ID NO: 2917660 - DNA, 25 bp, Homo sapien
gaatgttattgctccgtctgctctg

SEQ ID NO: 2917661 - DNA, 25 bp, Homo sapien
ctccggggccatgcaaagaccttgg

SEQ ID NO: 2917662 - DNA, 25 bp, Homo sapien
cctttgggttgacttggctgagtga

SEQ ID NO: 2917663 - DNA, 25 bp, Homo sapien
cgcggaggccggcagtgagtaccgc

SEQ ID NO: 2917664 - DNA, 25 bp, Homo sapien
ctgcggccgggtagcgcggaggccg

SEQ ID NO: 2917665 - DNA, 25 bp, Homo sapien
cgggtagcgcggaggccggcagtgg

SEQ ID NO: 2917666 - DNA, 25 bp, Homo sapien
cgcggaggccggcagtgggtaccgc

SEQ ID NO: 2917667 - DNA, 25 bp, Homo sapien
gagcgcccgcagctcttctcggaag

SEQ ID NO: 2917668 - DNA, 25 bp, Homo sapien
ctcggaaggcggacagccgcaagca

SEQ ID NO: 2917669 - DNA, 25 bp, Homo sapien
cacggacctcaagggtggcctccgg

SEQ ID NO: 2917670 - DNA, 25 bp, Homo sapien
gcgcgacccacggacctcaagggtg

SEQ ID NO: 2917671 - DNA, 25 bp, Homo sapien
ctgccactgaggccaccttactcac

SEQ ID NO: 2917672 - DNA, 25 bp, Homo sapien
cggcctgccactgaggccaccttac

SEQ ID NO: 2917673 - DNA, 25 bp, Homo sapien
gcctgccactgaggccaccttactc

SEQ ID NO: 2917674 - DNA, 25 bp, Homo sapien
ggcctgccactgaggccaccttact

SEQ ID NO: 2917675 - DNA, 25 bp, Homo sapien
cagccgttcccgcagtgccccgcgg

SEQ ID NO: 2917676 - DNA, 25 bp, Homo sapien
tggtgcggagcggaaagcggccggg

SEQ ID NO: 2917677 - DNA, 25 bp, Homo sapien
agcccgccggcggacagctcgctcg

SEQ ID NO: 2917678 - DNA, 25 bp, Homo sapien
aagtcacccgcggaggcagaaatca

SEQ ID NO: 2917679 - DNA, 25 bp, Homo sapien
gcaacttgcgttttattggccggaa

SEQ ID NO: 2917680 - DNA, 25 bp, Homo sapien
gaagaaatcatttcgcagctctgag

SEQ ID NO: 2917681 - DNA, 25 bp, Homo sapien
gattatttagatcgcagagctcccg

SEQ ID NO: 2917682 - DNA, 25 bp, Homo sapien
cataccagttgcttcttgtgccgcg

SEQ ID NO: 2917683 - DNA, 25 bp, Homo sapien
cagtctagtgctcatccctggagac

SEQ ID NO: 2917684 - DNA, 25 bp, Homo sapien
catcaaggggatcaggctactggga

SEQ ID NO: 2917685 - DNA, 25 bp, Homo sapien
ccacatcaaggggatcaggctactg

SEQ ID NO: 2917686 - DNA, 25 bp, Homo sapien
gaggtccccagcatgtcagtctagt

SEQ ID NO: 2917687 - DNA, 25 bp, Homo sapien
gcttatgaagctgatcaggaacacc

SEQ ID NO: 2917688 - DNA, 25 bp, Homo sapien
caggtggccacagaacacggagctt

SEQ ID NO: 2917689 - DNA, 25 bp, Homo sapien
gattgccagcgtgactgcatccagc

SEQ ID NO: 2917690 - DNA, 25 bp, Homo sapien
gcgattgccagcgtgactgcatcca

SEQ ID NO: 2917691 - DNA, 25 bp, Homo sapien
tggaacctggtacctccacttgact

SEQ ID NO: 2917692 - DNA, 25 bp, Homo sapien
caaaccagggagtggtatcacagga

SEQ ID NO: 2917693 - DNA, 25 bp, Homo sapien
caaaccctgaagtttcgaggagcct

SEQ ID NO: 2917694 - DNA, 25 bp, Homo sapien
tgaagtccggactagtgccagaggc

SEQ ID NO: 2917695 - DNA, 25 bp, Homo sapien
ctgcaaataaacccaaagataaggc

SEQ ID NO: 2917696 - DNA, 25 bp, Homo sapien
tgcaaataaacccaaagataaggcc

SEQ ID NO: 2917697 - DNA, 25 bp, Homo sapien
gataagccgaatcccactgagacac

SEQ ID NO: 2917698 - DNA, 25 bp, Homo sapien
tgggagatgagggtgtcacaggcag

SEQ ID NO: 2917699 - DNA, 25 bp, Homo sapien
gtgtcacaggcagaagataagccga

SEQ ID NO: 2917700 - DNA, 25 bp, Homo sapien
ctgagacaccagtgacattgataac

SEQ ID NO: 2917701 - DNA, 25 bp, Homo sapien
ctacacttgagaaaagatgtttgag

SEQ ID NO: 2917702 - DNA, 25 bp, Homo sapien
gtcactgtgagcgtgtgaccacttc

SEQ ID NO: 2917703 - DNA, 25 bp, Homo sapien
aggtcactgtgagcgtgtgaccact

SEQ ID NO: 2917704 - DNA, 25 bp, Homo sapien
actgtgagcgtgtgaccacttccat

SEQ ID NO: 2917705 - DNA, 25 bp, Homo sapien
gtgcacacagccaaaatgagcccat

SEQ ID NO: 2917706 - DNA, 25 bp, Homo sapien
ctggggtgcacacagccaaaatgag

SEQ ID NO: 2917707 - DNA, 25 bp, Homo sapien
gggtgcacacagccaaaatgagccc

SEQ ID NO: 2917708 - DNA, 25 bp, Homo sapien
tggggtgcacacagccaaaatgagc

SEQ ID NO: 2917709 - DNA, 25 bp, Homo sapien
gcccacgtgcttcaggttctggctc

SEQ ID NO: 2917710 - DNA, 25 bp, Homo sapien
gagcaggacgagcgcactccgctgc

SEQ ID NO: 2917711 - DNA, 25 bp, Homo sapien
aggagcaggacgagcgcactccgct

SEQ ID NO: 2917712 - DNA, 25 bp, Homo sapien
acgcccacgtgcttcaggttctggc

SEQ ID NO: 2917713 - DNA, 25 bp, Homo sapien
gaatgaagatcgtgacataggtctg

SEQ ID NO: 2917714 - DNA, 25 bp, Homo sapien
gatcgtgacataggtctgggtaagc

SEQ ID NO: 2917715 - DNA, 25 bp, Homo sapien
gaagagctggaatgaagatcgtgac

SEQ ID NO: 2917716 - DNA, 25 bp, Homo sapien
gagctggaatgaagatcgtgacata

SEQ ID NO: 2917717 - DNA, 25 bp, Homo sapien
ccttgagatgaacatctgttgtgtc

SEQ ID NO: 2917718 - DNA, 25 bp, Homo sapien
cttggtgttccttgagatgaacatc

SEQ ID NO: 2917719 - DNA, 25 bp, Homo sapien
tactccagacgtcctggagtagcct

SEQ ID NO: 2917720 - DNA, 25 bp, Homo sapien
tggagtagcctcaatcttggtgttc

SEQ ID NO: 2917721 - DNA, 25 bp, Homo sapien
gcaaatatttaacttgtaacatata

SEQ ID NO: 2917722 - DNA, 25 bp, Homo sapien
ctggttgagcaaatatttaacttgt

SEQ ID NO: 2917723 - DNA, 25 bp, Homo sapien
cttgtaacatataaagaaaggttgc

SEQ ID NO: 2917724 - DNA, 25 bp, Homo sapien
tatttaacttgtaacatataaagaa

SEQ ID NO: 2917725 - DNA, 25 bp, Homo sapien
gatggagaaacagatagttggcgag

SEQ ID NO: 2917726 - DNA, 25 bp, Homo sapien
cgagggcattgacaaggttggctgc

SEQ ID NO: 2917727 - DNA, 25 bp, Homo sapien
gaaacagatagttggcgagggcatt

SEQ ID NO: 2917728 - DNA, 25 bp, Homo sapien
cagttacgatctggggcagtacaat

SEQ ID NO: 2917729 - DNA, 25 bp, Homo sapien
acagtcccaatgagagggaggtacc

SEQ ID NO: 2917730 - DNA, 25 bp, Homo sapien
tgagagggaggtaccttcctgcgcc

SEQ ID NO: 2917731 - DNA, 25 bp, Homo sapien
agagggaggtaccttcctgcgcctc

SEQ ID NO: 2917732 - DNA, 25 bp, Homo sapien
gaacagtcccaatgagagggaggta

SEQ ID NO: 2917733 - DNA, 25 bp, Homo sapien
ggtgtactgggaaatcaagtttgcc

SEQ ID NO: 2917734 - DNA, 25 bp, Homo sapien
ctccccatgtagcttgatgcagttt

SEQ ID NO: 2917735 - DNA, 25 bp, Homo sapien
tagagccagggtgtactgggaaatc

SEQ ID NO: 2917736 - DNA, 25 bp, Homo sapien
aatcaagtttgccagtgcagagcct

SEQ ID NO: 2917737 - DNA, 25 bp, Homo sapien
tttccaggagatctggccatcgggc

SEQ ID NO: 2917738 - DNA, 25 bp, Homo sapien
acacacatttccaggagatctggcc

SEQ ID NO: 2917739 - DNA, 25 bp, Homo sapien
tgtgggggggacacacacatttcca

SEQ ID NO: 2917740 - DNA, 25 bp, Homo sapien
acacatttccaggagatctggccat

SEQ ID NO: 2917741 - DNA, 25 bp, Homo sapien
actgaggaagctcccgacctcatag

SEQ ID NO: 2917742 - DNA, 25 bp, Homo sapien
cactgaggaagctcccgacctcata

SEQ ID NO: 2917743 - DNA, 25 bp, Homo sapien
cttgcacccagacagggcccccagg

SEQ ID NO: 2917744 - DNA, 25 bp, Homo sapien
ttgcacccagacagggcccccaggt

SEQ ID NO: 2917745 - DNA, 25 bp, Homo sapien
tgcacccagacagggcccccaggtt

SEQ ID NO: 2917746 - DNA, 25 bp, Homo sapien
gcacccagacagggcccccaggttc

SEQ ID NO: 2917747 - DNA, 25 bp, Homo sapien
tgatggccagttcatacacgatgga

SEQ ID NO: 2917748 - DNA, 25 bp, Homo sapien
cagttcatacacgatggactgagcg

SEQ ID NO: 2917749 - DNA, 25 bp, Homo sapien
tcatacacgatggactgagcgccca

SEQ ID NO: 2917750 - DNA, 25 bp, Homo sapien
tacacgatggactgagcgcccagct

SEQ ID NO: 2917751 - DNA, 25 bp, Homo sapien
cacatatagtggaatcctatatacc

SEQ ID NO: 2917752 - DNA, 25 bp, Homo sapien
tccttgaagagttgttaatattgaa

SEQ ID NO: 2917753 - DNA, 25 bp, Homo sapien
aataaactattcaaccataggaaat

SEQ ID NO: 2917754 - DNA, 25 bp, Homo sapien
aatcagacaagtatatgaagatatt

SEQ ID NO: 2917755 - DNA, 25 bp, Homo sapien
taactgaggcacaaacgttgtgagg

SEQ ID NO: 2917756 - DNA, 25 bp, Homo sapien
ttgttaccctcactacatctacggg

SEQ ID NO: 2917757 - DNA, 25 bp, Homo sapien
caacgagagtaagtattgttaccct

SEQ ID NO: 2917758 - DNA, 25 bp, Homo sapien
gctgttccttatcaccaacgagagt

SEQ ID NO: 2917759 - DNA, 25 bp, Homo sapien
gagctccagtgctttcttcgatttg

SEQ ID NO: 2917760 - DNA, 25 bp, Homo sapien
tggtgcactgaagaatcccattttg

SEQ ID NO: 2917761 - DNA, 25 bp, Homo sapien
aattattgagcatgctagatgctac

SEQ ID NO: 2917762 - DNA, 25 bp, Homo sapien
gagcatgctagatgctactagaaca

SEQ ID NO: 2917763 - DNA, 25 bp, Homo sapien
gcagccacactgaagcctgcaggga

SEQ ID NO: 2917764 - DNA, 25 bp, Homo sapien
cagccacactgaagcctgcagggac

SEQ ID NO: 2917765 - DNA, 25 bp, Homo sapien
tggcagccacactgaagcctgcagg

SEQ ID NO: 2917766 - DNA, 25 bp, Homo sapien
actggcagccacactgaagcctgca

SEQ ID NO: 2917767 - DNA, 25 bp, Homo sapien
atgtctccagcacccagagcgtttc

SEQ ID NO: 2917768 - DNA, 25 bp, Homo sapien
atcagcagggaaacggtagaggact

SEQ ID NO: 2917769 - DNA, 25 bp, Homo sapien
aaacggtagaggacttccgtgcctg

SEQ ID NO: 2917770 - DNA, 25 bp, Homo sapien
agaggacttccgtgcctgctccatg

SEQ ID NO: 2917771 - DNA, 25 bp, Homo sapien
acaacacagtgaacaagaagatcca

SEQ ID NO: 2917772 - DNA, 25 bp, Homo sapien
ttttgcatgcagagactgcaccaag

SEQ ID NO: 2917773 - DNA, 25 bp, Homo sapien
agagactgcaccaagagcctcgggt

SEQ ID NO: 2917774 - DNA, 25 bp, Homo sapien
tgcaccaagagcctcgggtaaaggg

SEQ ID NO: 2917775 - DNA, 25 bp, Homo sapien
ggacactgaaggctacagcaaagag

SEQ ID NO: 2917776 - DNA, 25 bp, Homo sapien
ccttacagcttaacagcaggacact

SEQ ID NO: 2917777 - DNA, 25 bp, Homo sapien
tagtaaaaatgtaccccacgtgatc

SEQ ID NO: 2917778 - DNA, 25 bp, Homo sapien
acactgaaggctacagcaaagagca

SEQ ID NO: 2917779 - DNA, 25 bp, Homo sapien
tggccgatactaagaaaccaagagg

SEQ ID NO: 2917780 - DNA, 25 bp, Homo sapien
gaaattagttctgtccgctccacca

SEQ ID NO: 2917781 - DNA, 25 bp, Homo sapien
gaatgtacacactagcatcgctgat

SEQ ID NO: 2917782 - DNA, 25 bp, Homo sapien
tattatgcaactactacaaaccggg

SEQ ID NO: 2917783 - DNA, 25 bp, Homo sapien
cctgagccaccagattaatgatgtc

SEQ ID NO: 2917784 - DNA, 25 bp, Homo sapien
aaccacctgagccaccagattaatg

SEQ ID NO: 2917785 - DNA, 25 bp, Homo sapien
ctgagccaccagattaatgatgtct

SEQ ID NO: 2917786 - DNA, 25 bp, Homo sapien
cacctgagccaccagattaatgatg

SEQ ID NO: 2917787 - DNA, 25 bp, Homo sapien
ttgcaaacatcagcgcgatcccgat

SEQ ID NO: 2917788 - DNA, 25 bp, Homo sapien
tagtacccaatggtattcacaatgg

SEQ ID NO: 2917789 - DNA, 25 bp, Homo sapien
gatcccgatggggaggccaaccaca

SEQ ID NO: 2917790 - DNA, 25 bp, Homo sapien
tattcacaatggctccaaccttctg

SEQ ID NO: 2917791 - DNA, 25 bp, Homo sapien
aagggcactggccacccattgccct

SEQ ID NO: 2917792 - DNA, 25 bp, Homo sapien
ctccaaggatccagccatgctgctt

SEQ ID NO: 2917793 - DNA, 25 bp, Homo sapien
tgctgcttggtgagcacatggggca

SEQ ID NO: 2917794 - DNA, 25 bp, Homo sapien
cggagtgcgatgagggtgatgagaa

SEQ ID NO: 2917795 - DNA, 25 bp, Homo sapien
tcacaccgaccacgtgtatggcctt

SEQ ID NO: 2917796 - DNA, 25 bp, Homo sapien
cacaccgaccacgtgtatggccttg

SEQ ID NO: 2917797 - DNA, 25 bp, Homo sapien
caccgaccacgtgtatggccttgtg

SEQ ID NO: 2917798 - DNA, 25 bp, Homo sapien
ccgaccacgtgtatggccttgtggg

SEQ ID NO: 2917799 - DNA, 25 bp, Homo sapien
tcaaagctgggcagtcatttatttc

SEQ ID NO: 2917800 - DNA, 25 bp, Homo sapien
tagctctggtaatttcagatgctgt

SEQ ID NO: 2917801 - DNA, 25 bp, Homo sapien
taaaaagattagctctggtaatttc

SEQ ID NO: 2917802 - DNA, 25 bp, Homo sapien
tgggcagtcatttatttccgtactt

SEQ ID NO: 2917803 - DNA, 25 bp, Homo sapien
ctgctgacaggcttttttccaattt

SEQ ID NO: 2917804 - DNA, 25 bp, Homo sapien
cagcttgaaagactgtacagatgat

SEQ ID NO: 2917805 - DNA, 25 bp, Homo sapien
ccaatttagctgaataataaagcct

SEQ ID NO: 2917806 - DNA, 25 bp, Homo sapien
cacagcttgaaagactgtacagatg

SEQ ID NO: 2917807 - DNA, 25 bp, Homo sapien
ttaatatggtattttacttgaccac

SEQ ID NO: 2917808 - DNA, 25 bp, Homo sapien
ccatcaggcttcacaatagtgttaa

SEQ ID NO: 2917809 - DNA, 25 bp, Homo sapien
tgaaactcagtccatcaggcttcac

SEQ ID NO: 2917810 - DNA, 25 bp, Homo sapien
cagtccatcaggcttcacaatagtg

SEQ ID NO: 2917811 - DNA, 25 bp, Homo sapien
ccactccgaggcacgttgtttactt

SEQ ID NO: 2917812 - DNA, 25 bp, Homo sapien
tactttcaaattggcgtgtacctga

SEQ ID NO: 2917813 - DNA, 25 bp, Homo sapien
gaagcggatcctgagggagagcaga

SEQ ID NO: 2917814 - DNA, 25 bp, Homo sapien
agagcagaattcccactccgaggca

SEQ ID NO: 2917815 - DNA, 25 bp, Homo sapien
actgaggctcgcctgtctttccaac

SEQ ID NO: 2917816 - DNA, 25 bp, Homo sapien
catcgttcgttaaaattccttcaag

SEQ ID NO: 2917817 - DNA, 25 bp, Homo sapien
ctgctgatctgactgaggctcgcct

SEQ ID NO: 2917818 - DNA, 25 bp, Homo sapien
tggatgttccggcaaaggttcttct

SEQ ID NO: 2917819 - DNA, 25 bp, Homo sapien
gcaagattaagaagacccccaggag

SEQ ID NO: 2917820 - DNA, 25 bp, Homo sapien
agattaagaagacccccaggagcag

SEQ ID NO: 2917821 - DNA, 25 bp, Homo sapien
cagcaagattaagaagacccccagg

SEQ ID NO: 2917822 - DNA, 25 bp, Homo sapien
aagattaagaagacccccaggagca

SEQ ID NO: 2917823 - DNA, 25 bp, Homo sapien
tcactgaattctgacatagaatctc

SEQ ID NO: 2917824 - DNA, 25 bp, Homo sapien
gtcttgggccacaatatagctttta

SEQ ID NO: 2917825 - DNA, 25 bp, Homo sapien
cacattgatccttgcttggttcaga

SEQ ID NO: 2917826 - DNA, 25 bp, Homo sapien
cacagtaaattgtcactggtgggcc

SEQ ID NO: 2917827 - DNA, 25 bp, Homo sapien
tagcagaagtatcaaagccattggc

SEQ ID NO: 2917828 - DNA, 25 bp, Homo sapien
ctcagctactctggtggctgacaca

SEQ ID NO: 2917829 - DNA, 25 bp, Homo sapien
ctactctggtggctgacacaggagg

SEQ ID NO: 2917830 - DNA, 25 bp, Homo sapien
cttgaagcccaagagttcgaggctg

SEQ ID NO: 2917831 - DNA, 25 bp, Homo sapien
tgcttgaagcccaagagttcgaggc

SEQ ID NO: 2917832 - DNA, 25 bp, Homo sapien
tgaattaacggtgtgtaccgcaccc

SEQ ID NO: 2917833 - DNA, 25 bp, Homo sapien
cgcaccccaggaaggcttaatgaag

SEQ ID NO: 2917834 - DNA, 25 bp, Homo sapien
taaaattttgtcctctggccagtcg

SEQ ID NO: 2917835 - DNA, 25 bp, Homo sapien
tatgtgcctgaggtgcttttatccc

SEQ ID NO: 2917836 - DNA, 25 bp, Homo sapien
tgagcaaccgggcaggcaaaattat

SEQ ID NO: 2917837 - DNA, 25 bp, Homo sapien
gcaagttctctcagcagttatggac

SEQ ID NO: 2917838 - DNA, 25 bp, Homo sapien
tcccagcttacagcacgcagtttca

SEQ ID NO: 2917839 - DNA, 25 bp, Homo sapien
tattcctagagcttcagcaagttct

SEQ ID NO: 2917840 - DNA, 25 bp, Homo sapien
catgtagaccagttggtcctcggta

SEQ ID NO: 2917841 - DNA, 25 bp, Homo sapien
tcggtatgtcggaacaacacagaga

SEQ ID NO: 2917842 - DNA, 25 bp, Homo sapien
catccatgtagaccagttggtcctc

SEQ ID NO: 2917843 - DNA, 25 bp, Homo sapien
ccagttggtcctcggtatgtcggaa

SEQ ID NO: 2917844 - DNA, 25 bp, Homo sapien
ctatgggggccggtccttggcggcg

SEQ ID NO: 2917845 - DNA, 25 bp, Homo sapien
tggcggcggcggggagctcggcggg

SEQ ID NO: 2917846 - DNA, 25 bp, Homo sapien
cttggcggcggcggggagctcggcg

SEQ ID NO: 2917847 - DNA, 25 bp, Homo sapien
tccttggcggcggcggggagctcgg

SEQ ID NO: 2917848 - DNA, 25 bp, Homo sapien
cccgcaggccccacaagccgtcacg

SEQ ID NO: 2917849 - DNA, 25 bp, Homo sapien
gtcacgccatccgagggcccggagc

SEQ ID NO: 2917850 - DNA, 25 bp, Homo sapien
caggccccacaagccgtcacgccat

SEQ ID NO: 2917851 - DNA, 25 bp, Homo sapien
cacaagccgtcacgccatccgaggg

SEQ ID NO: 2917852 - DNA, 25 bp, Homo sapien
ggctcgaccttgcccagatgtccac

SEQ ID NO: 2917853 - DNA, 25 bp, Homo sapien
taaagatcatcaactgcgcaagaaa

SEQ ID NO: 2917854 - DNA, 25 bp, Homo sapien
gtgacggcgagcgtgacagcgtccg

SEQ ID NO: 2917855 - DNA, 25 bp, Homo sapien
ataaagatcatcaactgcgcaagaa

SEQ ID NO: 2917856 - DNA, 25 bp, Homo sapien
tccgtgttcttagggtgtgtaccca

SEQ ID NO: 2917857 - DNA, 25 bp, Homo sapien
tagctgaatgagaagctccggtggc

SEQ ID NO: 2917858 - DNA, 25 bp, Homo sapien
tgtgtgactgattccacctggcaag

SEQ ID NO: 2917859 - DNA, 25 bp, Homo sapien
gcaaggtcttggctcccatgtagct

SEQ ID NO: 2917860 - DNA, 25 bp, Homo sapien
cttcaggggacgacgccagttcagg

SEQ ID NO: 2917861 - DNA, 25 bp, Homo sapien
gacgccagttcagggtcgcatcaga

SEQ ID NO: 2917862 - DNA, 25 bp, Homo sapien
ccagttcagggtcgcatcagacagc

SEQ ID NO: 2917863 - DNA, 25 bp, Homo sapien
ggacgacgccagttcagggtcgcat

SEQ ID NO: 2917864 - DNA, 25 bp, Homo sapien
ctgcaagagaaccacagacctggtg

SEQ ID NO: 2917865 - DNA, 25 bp, Homo sapien
taagctgaggctaagccagtgccaa

SEQ ID NO: 2917866 - DNA, 25 bp, Homo sapien
tgagacatgagggtgtcataagctg

SEQ ID NO: 2917867 - DNA, 25 bp, Homo sapien
gtgtcataagctgaggctaagccag

SEQ ID NO: 2917868 - DNA, 25 bp, Homo sapien
ctgcaatcccagtaacgttcaccac

SEQ ID NO: 2917869 - DNA, 25 bp, Homo sapien
gatccccacgcgcttgaggttcttg

SEQ ID NO: 2917870 - DNA, 25 bp, Homo sapien
gaagtatgatccccacgcgcttgag

SEQ ID NO: 2917871 - DNA, 25 bp, Homo sapien
gtatgatccccacgcgcttgaggtt

SEQ ID NO: 2917872 - DNA, 25 bp, Homo sapien
gacccctctctgaagtatgatcccc

SEQ ID NO: 2917873 - DNA, 25 bp, Homo sapien
aggatgcgctcggtgttgaccaagt

SEQ ID NO: 2917874 - DNA, 25 bp, Homo sapien
caggaggatgcgctcggtgttgacc

SEQ ID NO: 2917875 - DNA, 25 bp, Homo sapien
aagagcaggaggatgcgctcggtgt

SEQ ID NO: 2917876 - DNA, 25 bp, Homo sapien
tgcgctcggtgttgaccaagtcggc

SEQ ID NO: 2917877 - DNA, 25 bp, Homo sapien
gaaaatcagcacataaatttgggct

SEQ ID NO: 2917878 - DNA, 25 bp, Homo sapien
atgaaaatcagcacataaatttggg

SEQ ID NO: 2917879 - DNA, 25 bp, Homo sapien
aatcagcacataaatttgggctatc

SEQ ID NO: 2917880 - DNA, 25 bp, Homo sapien
aaaatcagcacataaatttgggcta

SEQ ID NO: 2917881 - DNA, 25 bp, Homo sapien
tgtactccctgaagaattgacacag

SEQ ID NO: 2917882 - DNA, 25 bp, Homo sapien
ttgacatttcgaacggctccgaggg

SEQ ID NO: 2917883 - DNA, 25 bp, Homo sapien
tcacatgagacaatgctagggcact

SEQ ID NO: 2917884 - DNA, 25 bp, Homo sapien
ttgacacaggccgattccaactggc

SEQ ID NO: 2917885 - DNA, 25 bp, Homo sapien
tctgcagctggaacaagaatgctgc

SEQ ID NO: 2917886 - DNA, 25 bp, Homo sapien
gtctgcagctggaacaagaatgctg

SEQ ID NO: 2917887 - DNA, 25 bp, Homo sapien
ttgtctgcagctggaacaagaatgc

SEQ ID NO: 2917888 - DNA, 25 bp, Homo sapien
tgtctgcagctggaacaagaatgct

SEQ ID NO: 2917889 - DNA, 25 bp, Homo sapien
cactctgaagtccagggcatacagc

SEQ ID NO: 2917890 - DNA, 25 bp, Homo sapien
gcccacgttgatgacattagctgca

SEQ ID NO: 2917891 - DNA, 25 bp, Homo sapien
gcaagagggcattcatgcccacgtt

SEQ ID NO: 2917892 - DNA, 25 bp, Homo sapien
ctggtaataacttgaggcatgctga

SEQ ID NO: 2917893 - DNA, 25 bp, Homo sapien
aataaccaggtggatgtaggagccc

SEQ ID NO: 2917894 - DNA, 25 bp, Homo sapien
tgcaaggaagtttccgatctcaaag

SEQ ID NO: 2917895 - DNA, 25 bp, Homo sapien
tccactgctcagtgcacaccatgaa

SEQ ID NO: 2917896 - DNA, 25 bp, Homo sapien
gaacatactgggaataaccaggtgg

SEQ ID NO: 2917897 - DNA, 25 bp, Homo sapien
tatattgaaaagctccacaagagcc

SEQ ID NO: 2917898 - DNA, 25 bp, Homo sapien
gatgtgactggccgggctgaggaca

SEQ ID NO: 2917899 - DNA, 25 bp, Homo sapien
ggatgagggcttaaacctatattga

SEQ ID NO: 2917900 - DNA, 25 bp, Homo sapien
ggagcttcctgggaatctctggaga

SEQ ID NO: 2917901 - DNA, 25 bp, Homo sapien
gccgagctccatcacatcaatcagt

SEQ ID NO: 2917902 - DNA, 25 bp, Homo sapien
cactgacgccagctcacagatgatg

SEQ ID NO: 2917903 - DNA, 25 bp, Homo sapien
gagtgccgagctccatcacatcaat

SEQ ID NO: 2917904 - DNA, 25 bp, Homo sapien
ctgagtgccgagctccatcacatca

SEQ ID NO: 2917905 - DNA, 25 bp, Homo sapien
ggttcctcccttcccatggtgcaca

SEQ ID NO: 2917906 - DNA, 25 bp, Homo sapien
gttcctcccttcccatggtgcacat

SEQ ID NO: 2917907 - DNA, 25 bp, Homo sapien
tatatgcgctatgcaatattaagaa

SEQ ID NO: 2917908 - DNA, 25 bp, Homo sapien
caatgaacgaatatatgcgctatgc

SEQ ID NO: 2917909 - DNA, 25 bp, Homo sapien
cagaggatatccatgttgacaaggg

SEQ ID NO: 2917910 - DNA, 25 bp, Homo sapien
gagcgggatgatgatttattggagg

SEQ ID NO: 2917911 - DNA, 25 bp, Homo sapien
gagatggggggttgcggatttaatc

SEQ ID NO: 2917912 - DNA, 25 bp, Homo sapien
agatggggggttgcggatttaatcg

SEQ ID NO: 2917913 - DNA, 25 bp, Homo sapien
gtcagagatggggggttgcggattt

SEQ ID NO: 2917914 - DNA, 25 bp, Homo sapien
cagagatggggggttgcggatttaa

SEQ ID NO: 2917915 - DNA, 25 bp, Homo sapien
gggatgtgcagacccatctagacat

SEQ ID NO: 2917916 - DNA, 25 bp, Homo sapien
gtttatggggatgtgcagacccatc

SEQ ID NO: 2917917 - DNA, 25 bp, Homo sapien
tatggggatgtgcagacccatctag

SEQ ID NO: 2917918 - DNA, 25 bp, Homo sapien
tggggatgtgcagacccatctagac

SEQ ID NO: 2917919 - DNA, 25 bp, Homo sapien
tgaaattttccggatgaaagccgga

SEQ ID NO: 2917920 - DNA, 25 bp, Homo sapien
tgatgaaattttccggatgaaagcc

SEQ ID NO: 2917921 - DNA, 25 bp, Homo sapien
tttccggatgaaagccggatgcttt

SEQ ID NO: 2917922 - DNA, 25 bp, Homo sapien
ggtcgtgatgaaattttccggatga

SEQ ID NO: 2917923 - DNA, 25 bp, Homo sapien
ttatgcaattgctgggctctgccat

SEQ ID NO: 2917924 - DNA, 25 bp, Homo sapien
gttttatgcaattgctgggctctgc

SEQ ID NO: 2917925 - DNA, 25 bp, Homo sapien
tttaagttttatgcaattgctgggc

SEQ ID NO: 2917926 - DNA, 25 bp, Homo sapien
taagttttatgcaattgctgggctc

SEQ ID NO: 2917927 - DNA, 25 bp, Homo sapien
cgagatcatcctggcaaaacatggt

SEQ ID NO: 2917928 - DNA, 25 bp, Homo sapien
attagccaggcatggtggtgggtgc

SEQ ID NO: 2917929 - DNA, 25 bp, Homo sapien
catctccactaaaaaatatcgaaaa

SEQ ID NO: 2917930 - DNA, 25 bp, Homo sapien
gagaatggtgtgaactcaggaggtg

SEQ ID NO: 2917931 - DNA, 25 bp, Homo sapien
acctctgattataagttttaagttg

SEQ ID NO: 2917932 - DNA, 25 bp, Homo sapien
agttgaacctctgattataagtttt

SEQ ID NO: 2917933 - DNA, 25 bp, Homo sapien
gaggagttgaacctctgattataag

SEQ ID NO: 2917934 - DNA, 25 bp, Homo sapien
tgaacctctgattataagttttaag

SEQ ID NO: 2917935 - DNA, 25 bp, Homo sapien
atagtgattagagtaggaatgatga

SEQ ID NO: 2917936 - DNA, 25 bp, Homo sapien
tatagtgattagagtaggaatgatg

SEQ ID NO: 2917937 - DNA, 25 bp, Homo sapien
agcctaagattttccgttcagtgag

SEQ ID NO: 2917938 - DNA, 25 bp, Homo sapien
tccatagggacctacaatgtcaggt

SEQ ID NO: 2917939 - DNA, 25 bp, Homo sapien
aagaggacaatgatagaaagggcca

SEQ ID NO: 2917940 - DNA, 25 bp, Homo sapien
tactgcatcagtgaatggttgaagc

SEQ ID NO: 2917941 - DNA, 25 bp, Homo sapien
taacctctattatttactctatcaa

SEQ ID NO: 2917942 - DNA, 25 bp, Homo sapien
taattcttttgtcagacatatttcc

SEQ ID NO: 2917943 - DNA, 25 bp, Homo sapien
gtaattcttttgtcagacatatttc

SEQ ID NO: 2917944 - DNA, 25 bp, Homo sapien
ataagaggattttaacctctattat

SEQ ID NO: 2917945 - DNA, 25 bp, Homo sapien
catttttggggtatgggcccgatag

SEQ ID NO: 2917946 - DNA, 25 bp, Homo sapien
gtatgggaagggtatgaccaacatt

SEQ ID NO: 2917947 - DNA, 25 bp, Homo sapien
tggggtatgggcccgatagcttatt

SEQ ID NO: 2917948 - DNA, 25 bp, Homo sapien
tagtatgggaagggtatgaccaaca

SEQ ID NO: 2917949 - DNA, 25 bp, Homo sapien
tgatgcctctcagtatttgctggaa

SEQ ID NO: 2917950 - DNA, 25 bp, Homo sapien
attgttctgactatcctgggtccct

SEQ ID NO: 2917951 - DNA, 25 bp, Homo sapien
tcttttgagaacaatagtatagctg

SEQ ID NO: 2917952 - DNA, 25 bp, Homo sapien
gggtcccttgcatctccatgagttt

SEQ ID NO: 2917953 - DNA, 25 bp, Homo sapien
cagagcattgcccactcggatgctg

SEQ ID NO: 2917954 - DNA, 25 bp, Homo sapien
gcattgcccactcggatgctggctg

SEQ ID NO: 2917955 - DNA, 25 bp, Homo sapien
ggagcaccaagcctcctctacattc

SEQ ID NO: 2917956 - DNA, 25 bp, Homo sapien
caggagcaccaagcctcctctacat

SEQ ID NO: 2917957 - DNA, 25 bp, Homo sapien
tttcacctgattcaaacctgcccag

SEQ ID NO: 2917958 - DNA, 25 bp, Homo sapien
gctcctagctcagcagtaaccttga

SEQ ID NO: 2917959 - DNA, 25 bp, Homo sapien
tggttccctagaagaccccacttga

SEQ ID NO: 2917960 - DNA, 25 bp, Homo sapien
taacagttccaggacttgaggagga

SEQ ID NO: 2917961 - DNA, 25 bp, Homo sapien
atagatgaaaaggggcaaaaatagg

SEQ ID NO: 2917962 - DNA, 25 bp, Homo sapien
tgcaagtgcatcaaatagatgaaaa

SEQ ID NO: 2917963 - DNA, 25 bp, Homo sapien
ggggcaaaaataggtatcacttggc

SEQ ID NO: 2917964 - DNA, 25 bp, Homo sapien
tgaaaaggggcaaaaataggtatca

SEQ ID NO: 2917965 - DNA, 25 bp, Homo sapien
gttttcctgtacctctcaggactcc

SEQ ID NO: 2917966 - DNA, 25 bp, Homo sapien
tagtggcaaacatcagagatactcc

SEQ ID NO: 2917967 - DNA, 25 bp, Homo sapien
gagatactccaatgggaaaaccaaa

SEQ ID NO: 2917968 - DNA, 25 bp, Homo sapien
ggcattcaagatagcgccaatgttt

SEQ ID NO: 2917969 - DNA, 25 bp, Homo sapien
gcactggttggatacagaacaaaag

SEQ ID NO: 2917970 - DNA, 25 bp, Homo sapien
cctagtaaaagtaatgcactggttg

SEQ ID NO: 2917971 - DNA, 25 bp, Homo sapien
aaaagacgataagaaacagccgctg

SEQ ID NO: 2917972 - DNA, 25 bp, Homo sapien
cagccgctgtgtttgtgttgacaca

SEQ ID NO: 2917973 - DNA, 25 bp, Homo sapien
gatgtacaccagatagaaaagggct

SEQ ID NO: 2917974 - DNA, 25 bp, Homo sapien
tcctcaagatgtacaccagatagaa

SEQ ID NO: 2917975 - DNA, 25 bp, Homo sapien
caagatgtacaccagatagaaaagg

SEQ ID NO: 2917976 - DNA, 25 bp, Homo sapien
cctcaagatgtacaccagatagaaa

SEQ ID NO: 2917977 - DNA, 25 bp, Homo sapien
ctgaggaggtaggcatggtctcttt

SEQ ID NO: 2917978 - DNA, 25 bp, Homo sapien
cttttagtccagcttgaacctgtgc

SEQ ID NO: 2917979 - DNA, 25 bp, Homo sapien
ctctttattcccttttagtccagct

SEQ ID NO: 2917980 - DNA, 25 bp, Homo sapien
ggaggtaggcatggtctctttattc

SEQ ID NO: 2917981 - DNA, 25 bp, Homo sapien
ctctccagcggtggacattgcatac

SEQ ID NO: 2917982 - DNA, 25 bp, Homo sapien
cagcggtggacattgcatactgggt

SEQ ID NO: 2917983 - DNA, 25 bp, Homo sapien
aaatgattccatcagttacttctct

SEQ ID NO: 2917984 - DNA, 25 bp, Homo sapien
ttcttctggtctcatcagtcgaggg

SEQ ID NO: 2917985 - DNA, 25 bp, Homo sapien
catgatagaatatcagctgcctcac

SEQ ID NO: 2917986 - DNA, 25 bp, Homo sapien
gagctaaagccattccatgatagaa

SEQ ID NO: 2917987 - DNA, 25 bp, Homo sapien
tggaataaccaaggaaacatccctg

SEQ ID NO: 2917988 - DNA, 25 bp, Homo sapien
tgtatagctccaaatattgtcagca

SEQ ID NO: 2917989 - DNA, 25 bp, Homo sapien
ggacagcggtcatttccttcttgca

SEQ ID NO: 2917990 - DNA, 25 bp, Homo sapien
acagcggtcatttccttcttgcaca

SEQ ID NO: 2917991 - DNA, 25 bp, Homo sapien
cgggacagcggtcatttccttcttg

SEQ ID NO: 2917992 - DNA, 25 bp, Homo sapien
gccgggacagcggtcatttccttct

SEQ ID NO: 2917993 - DNA, 25 bp, Homo sapien
cctgctgagagcgccccggggcggc

SEQ ID NO: 2917994 - DNA, 25 bp, Homo sapien
ctgagagcgccccggggcggcccca

SEQ ID NO: 2917995 - DNA, 25 bp, Homo sapien
gcggccccagaaagggcgaagagga

SEQ ID NO: 2917996 - DNA, 25 bp, Homo sapien
tgctgagagcgccccggggcggccc

SEQ ID NO: 2917997 - DNA, 25 bp, Homo sapien
gtgacagccgctgttcacggcctcg

SEQ ID NO: 2917998 - DNA, 25 bp, Homo sapien
ggagtgagcagtgcgggagccgagc

SEQ ID NO: 2917999 - DNA, 25 bp, Homo sapien
ggtggagtgagcagtgcgggagccg

SEQ ID NO: 2918000 - DNA, 25 bp, Homo sapien
ggagccgagcgcggccacgggccag

SEQ ID NO: 2918001 - DNA, 25 bp, Homo sapien
gggaggactgagctcgacccaaagc

SEQ ID NO: 2918002 - DNA, 25 bp, Homo sapien
agcctcacccctattggcctgggcg

SEQ ID NO: 2918003 - DNA, 25 bp, Homo sapien
ctcacccctattggcctgggcggcc

SEQ ID NO: 2918004 - DNA, 25 bp, Homo sapien
ggactgagctcgacccaaagcctca

SEQ ID NO: 2918005 - DNA, 25 bp, Homo sapien
gctcgctcgctcagccgcgacctcc

SEQ ID NO: 2918006 - DNA, 25 bp, Homo sapien
agccacaattcactcgcccagggct

SEQ ID NO: 2918007 - DNA, 25 bp, Homo sapien
gccgcgacctccacgcccgctgagt

SEQ ID NO: 2918008 - DNA, 25 bp, Homo sapien
ccacaattcactcgcccagggctcg

SEQ ID NO: 2918009 - DNA, 25 bp, Homo sapien
gggaggcgggaagcatgcaggtgca

SEQ ID NO: 2918010 - DNA, 25 bp, Homo sapien
ggagtgggaggcgggaagcatgcag

SEQ ID NO: 2918011 - DNA, 25 bp, Homo sapien
gcaggtgcaggcctcgcctcccttc

SEQ ID NO: 2918012 - DNA, 25 bp, Homo sapien
caggtgcaggcctcgcctcccttcc

SEQ ID NO: 2918013 - DNA, 25 bp, Homo sapien
tgcagagaactgcacggtccggggg

SEQ ID NO: 2918014 - DNA, 25 bp, Homo sapien
cagagaactgcacggtccgggggcg

SEQ ID NO: 2918015 - DNA, 25 bp, Homo sapien
gcagagaactgcacggtccgggggc

SEQ ID NO: 2918016 - DNA, 25 bp, Homo sapien
ctgcagagaactgcacggtccgggg

SEQ ID NO: 2918017 - DNA, 25 bp, Homo sapien
aggatatccttctcgcgctcctgca

SEQ ID NO: 2918018 - DNA, 25 bp, Homo sapien
tgtcggacccgccggacttcgagct

SEQ ID NO: 2918019 - DNA, 25 bp, Homo sapien
gcgatggccgtcaggatatccttct

SEQ ID NO: 2918020 - DNA, 25 bp, Homo sapien
gaccggccggacaggaacgcctgtc

SEQ ID NO: 2918021 - DNA, 25 bp, Homo sapien
gcgatggctcctatcagtggctgaa

SEQ ID NO: 2918022 - DNA, 25 bp, Homo sapien
ggtaattccaagctccgattatcag

SEQ ID NO: 2918023 - DNA, 25 bp, Homo sapien
ttagcagtaacccattcaggaagat

SEQ ID NO: 2918024 - DNA, 25 bp, Homo sapien
tggtgagcacgttcttcttaactgg

SEQ ID NO: 2918025 - DNA, 25 bp, Homo sapien
ctggtctaaatactgagggagaagc

SEQ ID NO: 2918026 - DNA, 25 bp, Homo sapien
gaagctttgccaagatcttggctgt

SEQ ID NO: 2918027 - DNA, 25 bp, Homo sapien
tcagaaggctttataatcacagcat

SEQ ID NO: 2918028 - DNA, 25 bp, Homo sapien
ttttcactcagttcagaaggcttta

SEQ ID NO: 2918029 - DNA, 25 bp, Homo sapien
tgtagcaactgcatgtagaactcag

SEQ ID NO: 2918030 - DNA, 25 bp, Homo sapien
aaagctaaatgaagactcctccctg

SEQ ID NO: 2918031 - DNA, 25 bp, Homo sapien
tcacaagttgatgtacagaatacag

SEQ ID NO: 2918032 - DNA, 25 bp, Homo sapien
gaactggcctcaatccatcacaagt

SEQ ID NO: 2918033 - DNA, 25 bp, Homo sapien
tatcttctggttctacgtcctattc

SEQ ID NO: 2918034 - DNA, 25 bp, Homo sapien
ggatcatcacagctattagaacaaa

SEQ ID NO: 2918035 - DNA, 25 bp, Homo sapien
tggttctacgtcctattcaatcctt

SEQ ID NO: 2918036 - DNA, 25 bp, Homo sapien
tctttcttgattggatcatcacagc

SEQ ID NO: 2918037 - DNA, 25 bp, Homo sapien
cctaacacggtaactgaagctggta

SEQ ID NO: 2918038 - DNA, 25 bp, Homo sapien
tatccggcacagtagctgagagcgc

SEQ ID NO: 2918039 - DNA, 25 bp, Homo sapien
cacaacacagagtgggcttagccca

SEQ ID NO: 2918040 - DNA, 25 bp, Homo sapien
tctgaatgaatggtatatccggcac

SEQ ID NO: 2918041 - DNA, 25 bp, Homo sapien
tcaaagaaagagaaacacaaactct

SEQ ID NO: 2918042 - DNA, 25 bp, Homo sapien
agaaagagaaacacaaactcttgca

SEQ ID NO: 2918043 - DNA, 25 bp, Homo sapien
ctcaaagaaagagaaacacaaactc

SEQ ID NO: 2918044 - DNA, 25 bp, Homo sapien
aaagaaagagaaacacaaactcttg

SEQ ID NO: 2918045 - DNA, 25 bp, Homo sapien
caaccgcagtgtttcccgtatagaa

SEQ ID NO: 2918046 - DNA, 25 bp, Homo sapien
aaatgtggtcaaatcgctgcttcag

SEQ ID NO: 2918047 - DNA, 25 bp, Homo sapien
ggtttcctcaacaccaccattaata

SEQ ID NO: 2918048 - DNA, 25 bp, Homo sapien
gcttccatgacaattttgccaaccg

SEQ ID NO: 2918049 - DNA, 25 bp, Homo sapien
ggcacttcttagtagctaaaccgga

SEQ ID NO: 2918050 - DNA, 25 bp, Homo sapien
caaatggatttctacttaggaagcc

SEQ ID NO: 2918051 - DNA, 25 bp, Homo sapien
taaaccggatttagcagagagaacc

SEQ ID NO: 2918052 - DNA, 25 bp, Homo sapien
cctggaaccctgacctggaatctct

SEQ ID NO: 2918053 - DNA, 25 bp, Homo sapien
gaatatagtcgggtgcaatgcaggt

SEQ ID NO: 2918054 - DNA, 25 bp, Homo sapien
gcaatgcaggtttggccacaattca

SEQ ID NO: 2918055 - DNA, 25 bp, Homo sapien
cttccatacaatttgattttggagg

SEQ ID NO: 2918056 - DNA, 25 bp, Homo sapien
ttcacagagaatatagtcgggtgca

SEQ ID NO: 2918057 - DNA, 25 bp, Homo sapien
ggcaacattccctcaaaaccacgga

SEQ ID NO: 2918058 - DNA, 25 bp, Homo sapien
ttcagcagcaatggccaatatgcca

SEQ ID NO: 2918059 - DNA, 25 bp, Homo sapien
gatttaacaccaatgcaaccttgct

SEQ ID NO: 2918060 - DNA, 25 bp, Homo sapien
tatacctaaagggttggcaacattc

SEQ ID NO: 2918061 - DNA, 25 bp, Homo sapien
ctatgtagcgtgtggcctcatcagt

SEQ ID NO: 2918062 - DNA, 25 bp, Homo sapien
tgtccttcaagcaaacttagtatcc

SEQ ID NO: 2918063 - DNA, 25 bp, Homo sapien
aatgacgaagattgatgatcctttc

SEQ ID NO: 2918064 - DNA, 25 bp, Homo sapien
ttagtatcctcttaaaatgacgaag

SEQ ID NO: 2918065 - DNA, 25 bp, Homo sapien
tgttaataagtagtgtcagcaaaaa

SEQ ID NO: 2918066 - DNA, 25 bp, Homo sapien
acaaaagctacaggtacagtatacc

SEQ ID NO: 2918067 - DNA, 25 bp, Homo sapien
agctacaggtacagtataccagaaa

SEQ ID NO: 2918068 - DNA, 25 bp, Homo sapien
tcagcaaaaactgccaaattgccat

SEQ ID NO: 2918069 - DNA, 25 bp, Homo sapien
aaggcacaaggattgttttcttttg

SEQ ID NO: 2918070 - DNA, 25 bp, Homo sapien
tagaaggcacaaggattgttttctt

SEQ ID NO: 2918071 - DNA, 25 bp, Homo sapien
aggcacaaggattgttttcttttgc

SEQ ID NO: 2918072 - DNA, 25 bp, Homo sapien
agaaggcacaaggattgttttcttt

SEQ ID NO: 2918073 - DNA, 25 bp, Homo sapien
cgtggatgaactgtgcacatactca

SEQ ID NO: 2918074 - DNA, 25 bp, Homo sapien
tgcggatacttgtgcaaaccaaggg

SEQ ID NO: 2918075 - DNA, 25 bp, Homo sapien
aaaccaagggaacgatacacactca

SEQ ID NO: 2918076 - DNA, 25 bp, Homo sapien
tgtgaatcacaaccctgcggatact

SEQ ID NO: 2918077 - DNA, 25 bp, Homo sapien
taggatcaacatcggtaagtactgt

SEQ ID NO: 2918078 - DNA, 25 bp, Homo sapien
caggcactattggaagaattggtcc

SEQ ID NO: 2918079 - DNA, 25 bp, Homo sapien
aaatttcttcttgcatcaccttggt

SEQ ID NO: 2918080 - DNA, 25 bp, Homo sapien
cgaaaatacataaagagccagaggc

SEQ ID NO: 2918081 - DNA, 25 bp, Homo sapien
tggatgtctcatcaatcatccgttt

SEQ ID NO: 2918082 - DNA, 25 bp, Homo sapien
tgcctgtgacacctccactggatgt

SEQ ID NO: 2918083 - DNA, 25 bp, Homo sapien
agttgagcgtgaagtgcataatgac

SEQ ID NO: 2918084 - DNA, 25 bp, Homo sapien
tccaaatgggaaagagttgagcgtg

SEQ ID NO: 2918085 - DNA, 25 bp, Homo sapien
tcagtcatctcacatgtgggagagg

SEQ ID NO: 2918086 - DNA, 25 bp, Homo sapien
gagtcagtcatctcacatgtgggag

SEQ ID NO: 2918087 - DNA, 25 bp, Homo sapien
gtcagtcatctcacatgtgggagag

SEQ ID NO: 2918088 - DNA, 25 bp, Homo sapien
agtcagtcatctcacatgtgggaga

SEQ ID NO: 2918089 - DNA, 25 bp, Homo sapien
ctgggtgctggcaatatgtttacct

SEQ ID NO: 2918090 - DNA, 25 bp, Homo sapien
ggctatataggtcaaggctccttgg

SEQ ID NO: 2918091 - DNA, 25 bp, Homo sapien
ttacctcctagacaaggacctgtgg

SEQ ID NO: 2918092 - DNA, 25 bp, Homo sapien
ggctccttggtcataggacaaggtt

SEQ ID NO: 2918093 - DNA, 25 bp, Homo sapien
tacttctgtctaacaacgaccggga

SEQ ID NO: 2918094 - DNA, 25 bp, Homo sapien
gatgatgcaagctacttctgtctaa

SEQ ID NO: 2918095 - DNA, 25 bp, Homo sapien
tgcaagctacttctgtctaacaacg

SEQ ID NO: 2918096 - DNA, 25 bp, Homo sapien
gcttcactgtagatgatgcaagcta

SEQ ID NO: 2918097 - DNA, 25 bp, Homo sapien
tgttttccgtgataagctcccatcc

SEQ ID NO: 2918098 - DNA, 25 bp, Homo sapien
tgagcaacaggagaccgagtttttc

SEQ ID NO: 2918099 - DNA, 25 bp, Homo sapien
caatacccaggaaagtgagcaacag

SEQ ID NO: 2918100 - DNA, 25 bp, Homo sapien
gaggatatctgagtttgttagcacc

SEQ ID NO: 2918101 - DNA, 25 bp, Homo sapien
agggcctttctcctcagcacagctt

SEQ ID NO: 2918102 - DNA, 25 bp, Homo sapien
ttctcctcagcacagcttggtattt

SEQ ID NO: 2918103 - DNA, 25 bp, Homo sapien
ctaccagaaaaatcaacagggcctt

SEQ ID NO: 2918104 - DNA, 25 bp, Homo sapien
gcctttctcctcagcacagcttggt

SEQ ID NO: 2918105 - DNA, 25 bp, Homo sapien
ttactggaccaacgcagtctgtgaa

SEQ ID NO: 2918106 - DNA, 25 bp, Homo sapien
tctgcttactggaccaacgcagtct

SEQ ID NO: 2918107 - DNA, 25 bp, Homo sapien
gcttactggaccaacgcagtctgtg

SEQ ID NO: 2918108 - DNA, 25 bp, Homo sapien
catctctgcttactggaccaacgca

SEQ ID NO: 2918109 - DNA, 25 bp, Homo sapien
tcactcttaacagacagggctgggt

SEQ ID NO: 2918110 - DNA, 25 bp, Homo sapien
ctcactcttaacagacagggctggg

SEQ ID NO: 2918111 - DNA, 25 bp, Homo sapien
aaacctacccacaaccagccttgca

SEQ ID NO: 2918112 - DNA, 25 bp, Homo sapien
aacctacccacaaccagccttgcaa

SEQ ID NO: 2918113 - DNA, 25 bp, Homo sapien
acctacccacaaccagccttgcaac

SEQ ID NO: 2918114 - DNA, 25 bp, Homo sapien
ctaggaggttgaacaggatcattct

SEQ ID NO: 2918115 - DNA, 25 bp, Homo sapien
attcagtagaggcactaggaggttg

SEQ ID NO: 2918116 - DNA, 25 bp, Homo sapien
aggcactaggaggttgaacaggatc

SEQ ID NO: 2918117 - DNA, 25 bp, Homo sapien
cagtagaggcactaggaggttgaac

SEQ ID NO: 2918118 - DNA, 25 bp, Homo sapien
taagtttgatcacagagtgtttgca

SEQ ID NO: 2918119 - DNA, 25 bp, Homo sapien
tgatcacagagtgtttgcatatttt

SEQ ID NO: 2918120 - DNA, 25 bp, Homo sapien
tttgatcacagagtgtttgcatatt

SEQ ID NO: 2918121 - DNA, 25 bp, Homo sapien
agtttgatcacagagtgtttgcata

SEQ ID NO: 2918122 - DNA, 25 bp, Homo sapien
ttcagtatgaccaaccgcagtggct

SEQ ID NO: 2918123 - DNA, 25 bp, Homo sapien
tctggactacagaggactgccggta

SEQ ID NO: 2918124 - DNA, 25 bp, Homo sapien
tgaggttccataccaggagcgtcat

SEQ ID NO: 2918125 - DNA, 25 bp, Homo sapien
gccctgggaagtaccaagctcttga

SEQ ID NO: 2918126 - DNA, 25 bp, Homo sapien
cacaaaacaagtaggaacagagcac

SEQ ID NO: 2918127 - DNA, 25 bp, Homo sapien
aacggctccgcggtcaaggaagtct

SEQ ID NO: 2918128 - DNA, 25 bp, Homo sapien
ggatgccactggaaaaacctattta

SEQ ID NO: 2918129 - DNA, 25 bp, Homo sapien
cacttgttctagatcagcaactggg

SEQ ID NO: 2918130 - DNA, 25 bp, Homo sapien
cacaggacacagactactaattttg

SEQ ID NO: 2918131 - DNA, 25 bp, Homo sapien
acaggacacagactactaattttgg

SEQ ID NO: 2918132 - DNA, 25 bp, Homo sapien
gatttaataggactggtattggttc

SEQ ID NO: 2918133 - DNA, 25 bp, Homo sapien
ttttgaacagatttaataggactgg

SEQ ID NO: 2918134 - DNA, 25 bp, Homo sapien
cctgggcttttgcttgctaggagac

SEQ ID NO: 2918135 - DNA, 25 bp, Homo sapien
atttggtatgctagtatttttgttg

SEQ ID NO: 2918136 - DNA, 25 bp, Homo sapien
gagacccactcaccttggactccca

SEQ ID NO: 2918137 - DNA, 25 bp, Homo sapien
taaatgggaatactctcttgatttt

SEQ ID NO: 2918138 - DNA, 25 bp, Homo sapien
tcaagagacccactcaccttggact

SEQ ID NO: 2918139 - DNA, 25 bp, Homo sapien
tggtctcaagagacccactcacctt

SEQ ID NO: 2918140 - DNA, 25 bp, Homo sapien
tacttaggttgcttgcaaatctcgg

SEQ ID NO: 2918141 - DNA, 25 bp, Homo sapien
gcctgccttttgaatagaagccatt

SEQ ID NO: 2918142 - DNA, 25 bp, Homo sapien
tttatgtctcctacaaacgagtgag

SEQ ID NO: 2918143 - DNA, 25 bp, Homo sapien
cgagtgagaatgtacaaagtctggc

SEQ ID NO: 2918144 - DNA, 25 bp, Homo sapien
gtttaattcctttgcatgaagttgc

SEQ ID NO: 2918145 - DNA, 25 bp, Homo sapien
tcaatctatttacttggtataggtc

SEQ ID NO: 2918146 - DNA, 25 bp, Homo sapien
tacaattcatcggtaaggtcatgtg

SEQ ID NO: 2918147 - DNA, 25 bp, Homo sapien
aacattggctttacagaatgagttt

SEQ ID NO: 2918148 - DNA, 25 bp, Homo sapien
tacaaagaggagattatgacagacg

SEQ ID NO: 2918149 - DNA, 25 bp, Homo sapien
ggaataccaggcgtcagcagtgcgt

SEQ ID NO: 2918150 - DNA, 25 bp, Homo sapien
tgagagcagtgacacccgtggaata

SEQ ID NO: 2918151 - DNA, 25 bp, Homo sapien
aggtgtcacgatgcagagccctgct

SEQ ID NO: 2918152 - DNA, 25 bp, Homo sapien
ctaggtgaccggtgcaatccttaga

SEQ ID NO: 2918153 - DNA, 25 bp, Homo sapien
gacgtcgagtcacagccttgctggg

SEQ ID NO: 2918154 - DNA, 25 bp, Homo sapien
tgatccaggactgggctaggtgacc

SEQ ID NO: 2918155 - DNA, 25 bp, Homo sapien
tagtgagctgctttcccaagcactg

SEQ ID NO: 2918156 - DNA, 25 bp, Homo sapien
gaaattagtcacgtgaaggcagggc

SEQ ID NO: 2918157 - DNA, 25 bp, Homo sapien
gactgtacttggcaggactccagga

SEQ ID NO: 2918158 - DNA, 25 bp, Homo sapien
caaagaggtcctcgatatgcgtgag

SEQ ID NO: 2918159 - DNA, 25 bp, Homo sapien
cccgtggtgcatgaggaggtcctat

SEQ ID NO: 2918160 - DNA, 25 bp, Homo sapien
tctgggggtcttgccgccacttgct

SEQ ID NO: 2918161 - DNA, 25 bp, Homo sapien
ttgctgagggctttgccagctggct

SEQ ID NO: 2918162 - DNA, 25 bp, Homo sapien
tcttgccgccacttgctgagggctt

SEQ ID NO: 2918163 - DNA, 25 bp, Homo sapien
catcttccagcacttggcagtgtct

SEQ ID NO: 2918164 - DNA, 25 bp, Homo sapien
cagaaataatgcgaggtatccacca

SEQ ID NO: 2918165 - DNA, 25 bp, Homo sapien
tacaggatcctacagaatagtgtct

SEQ ID NO: 2918166 - DNA, 25 bp, Homo sapien
cattgacatcttgcatgaggatagt

SEQ ID NO: 2918167 - DNA, 25 bp, Homo sapien
gatagtagtacgtttgttaccactg

SEQ ID NO: 2918168 - DNA, 25 bp, Homo sapien
accacgccttccaggccgtgggcag

SEQ ID NO: 2918169 - DNA, 25 bp, Homo sapien
ggccacgcgtcctggggagacctgt

SEQ ID NO: 2918170 - DNA, 25 bp, Homo sapien
gggcgttccaggcggcggatgtccc

SEQ ID NO: 2918171 - DNA, 25 bp, Homo sapien
ggatgtcccccgcaggcctcggtat

SEQ ID NO: 2918172 - DNA, 25 bp, Homo sapien
ggatccaaccagttctccctcatgt

SEQ ID NO: 2918173 - DNA, 25 bp, Homo sapien
cactggcaggccttagcatgtgcct

SEQ ID NO: 2918174 - DNA, 25 bp, Homo sapien
ggtgacctcacacatgtagagggca

SEQ ID NO: 2918175 - DNA, 25 bp, Homo sapien
ggacagcgaacttcaggtgacctca

SEQ ID NO: 2918176 - DNA, 25 bp, Homo sapien
gacggcttgtctcaggtgacacccc

SEQ ID NO: 2918177 - DNA, 25 bp, Homo sapien
ggaggccatccaggacggcttgtct

SEQ ID NO: 2918178 - DNA, 25 bp, Homo sapien
gggagccgacagcatgtcagcagtg

SEQ ID NO: 2918179 - DNA, 25 bp, Homo sapien
gacttggagctaataagggtggttg

SEQ ID NO: 2918180 - DNA, 25 bp, Homo sapien
gcataaatgggttcccccaaccaga

SEQ ID NO: 2918181 - DNA, 25 bp, Homo sapien
catgaggcggtcaaagcacatggcc

SEQ ID NO: 2918182 - DNA, 25 bp, Homo sapien
catccagcgcattgcacatggtgtg

SEQ ID NO: 2918183 - DNA, 25 bp, Homo sapien
gcacatggccagctcgttgtcatcc

SEQ ID NO: 2918184 - DNA, 25 bp, Homo sapien
tctggcgctgagcatcttagtgagg

SEQ ID NO: 2918185 - DNA, 25 bp, Homo sapien
gctctggcgctgagcatcttagtga

SEQ ID NO: 2918186 - DNA, 25 bp, Homo sapien
ctggcgctgagcatcttagtgagga

SEQ ID NO: 2918187 - DNA, 25 bp, Homo sapien
ggcgctgagcatcttagtgaggagg

SEQ ID NO: 2918188 - DNA, 25 bp, Homo sapien
gtctcacccttaggaagcccaaatg

SEQ ID NO: 2918189 - DNA, 25 bp, Homo sapien
acttggacagtaatttccacaagga

SEQ ID NO: 2918190 - DNA, 25 bp, Homo sapien
ttgagcagcttggtgcaaccccatg

SEQ ID NO: 2918191 - DNA, 25 bp, Homo sapien
gctggacccatctgcctagtggaag

SEQ ID NO: 2918192 - DNA, 25 bp, Homo sapien
tagagacttggccatgaatatcctt

SEQ ID NO: 2918193 - DNA, 25 bp, Homo sapien
tgagccaggtacttccttagtgagt

SEQ ID NO: 2918194 - DNA, 25 bp, Homo sapien
gacaaagtgtttctagggtgtagct

SEQ ID NO: 2918195 - DNA, 25 bp, Homo sapien
tagatcttggctactgtcatgcagg

SEQ ID NO: 2918196 - DNA, 25 bp, Homo sapien
tagctagtcatggagaatgcaggca

SEQ ID NO: 2918197 - DNA, 25 bp, Homo sapien
tctgacagttcaccaaatagctagt

SEQ ID NO: 2918198 - DNA, 25 bp, Homo sapien
cagttaacttaatatccctccagga

SEQ ID NO: 2918199 - DNA, 25 bp, Homo sapien
tggagttcctacatgcagtgagtgg

SEQ ID NO: 2918200 - DNA, 25 bp, Homo sapien
cagccactcagtgtcttttaactca

SEQ ID NO: 2918201 - DNA, 25 bp, Homo sapien
ctctggtggtatcactgattttctt

SEQ ID NO: 2918202 - DNA, 25 bp, Homo sapien
tattcaatgtttgtattggtaagta

SEQ ID NO: 2918203 - DNA, 25 bp, Homo sapien
tgtattggtaagtaaggacttaatc

SEQ ID NO: 2918204 - DNA, 25 bp, Homo sapien
gctcttatggccaactgctcaactt

SEQ ID NO: 2918205 - DNA, 25 bp, Homo sapien
caacttgcgcccgtcgggtgtccgg

SEQ ID NO: 2918206 - DNA, 25 bp, Homo sapien
tatggccaactgctcaacttgcgcc

SEQ ID NO: 2918207 - DNA, 25 bp, Homo sapien
actgctcaacttgcgcccgtcgggt

SEQ ID NO: 2918208 - DNA, 25 bp, Homo sapien
gatcttcgatgagccctctgcggtt

SEQ ID NO: 2918209 - DNA, 25 bp, Homo sapien
caggatcttcgatgagccctctgcg

SEQ ID NO: 2918210 - DNA, 25 bp, Homo sapien
caaatgcacacagagcgcccaagag

SEQ ID NO: 2918211 - DNA, 25 bp, Homo sapien
aatgcacacagagcgcccaagagtg

SEQ ID NO: 2918212 - DNA, 25 bp, Homo sapien
cgtggagttctcttagataggtgaa

SEQ ID NO: 2918213 - DNA, 25 bp, Homo sapien
aatacctgcgtctctcgagaggaaa

SEQ ID NO: 2918214 - DNA, 25 bp, Homo sapien
aaattgatgtggtgtgcttactggc

SEQ ID NO: 2918215 - DNA, 25 bp, Homo sapien
ggagctctaaatatgaatacctgcg

SEQ ID NO: 2918216 - DNA, 25 bp, Homo sapien
atcgaacctgggtctcctgcgtggg

SEQ ID NO: 2918217 - DNA, 25 bp, Homo sapien
cattggccaggaatcgaacctgggt

SEQ ID NO: 2918218 - DNA, 25 bp, Homo sapien
tggccaggaatcgaacctgggtctc

SEQ ID NO: 2918219 - DNA, 25 bp, Homo sapien
tcgaacctgggtctcctgcgtggga

SEQ ID NO: 2918220 - DNA, 25 bp, Homo sapien
ccgcccgtccgctgtgtgccccggg

SEQ ID NO: 2918221 - DNA, 25 bp, Homo sapien
cccgcccgtccgctgtgtgccccgg

SEQ ID NO: 2918222 - DNA, 25 bp, Homo sapien
tacctgcgccgcactgcgccgcccg

SEQ ID NO: 2918223 - DNA, 25 bp, Homo sapien
ctgatacctgcgccgcactgcgccg

SEQ ID NO: 2918224 - DNA, 25 bp, Homo sapien
cgctccggtctctcggcatgagagt

SEQ ID NO: 2918225 - DNA, 25 bp, Homo sapien
gtttccgctccggtctctcggcatg

SEQ ID NO: 2918226 - DNA, 25 bp, Homo sapien
tctctcggcatgagagtccgcccgg

SEQ ID NO: 2918227 - DNA, 25 bp, Homo sapien
agacccgccgcacgctggcgcgctc

SEQ ID NO: 2918228 - DNA, 25 bp, Homo sapien
caggggccgggccgggcctcgctga

SEQ ID NO: 2918229 - DNA, 25 bp, Homo sapien
gcaggggccgggccgggcctcgctg

SEQ ID NO: 2918230 - DNA, 25 bp, Homo sapien
gcggtgcgggttctagggcggcggc

SEQ ID NO: 2918231 - DNA, 25 bp, Homo sapien
tcactgcctcagagcgcgtgtgcgg

SEQ ID NO: 2918232 - DNA, 25 bp, Homo sapien
acagtgacggtgacggcacccctgg

SEQ ID NO: 2918233 - DNA, 25 bp, Homo sapien
ggatggagagtaccgggcccctcac

SEQ ID NO: 2918234 - DNA, 25 bp, Homo sapien
gatgaggaagtaagagctgtggaca

SEQ ID NO: 2918235 - DNA, 25 bp, Homo sapien
agatgaggaagtaagagctgtggac

SEQ ID NO: 2918236 - DNA, 25 bp, Homo sapien
atgaggaagtaagagctgtggacaa

SEQ ID NO: 2918237 - DNA, 25 bp, Homo sapien
gccagcgcttcctcaatgcacatga

SEQ ID NO: 2918238 - DNA, 25 bp, Homo sapien
ctttaggatagtaagagactcactc

SEQ ID NO: 2918239 - DNA, 25 bp, Homo sapien
ggcacactgtttcatcgacagaaga

SEQ ID NO: 2918240 - DNA, 25 bp, Homo sapien
ggtgagcacactccattgaccacgt

SEQ ID NO: 2918241 - DNA, 25 bp, Homo sapien
tagcctactggaatagacagggacc

SEQ ID NO: 2918242 - DNA, 25 bp, Homo sapien
ggtaactcatccctaatcagcattg

SEQ ID NO: 2918243 - DNA, 25 bp, Homo sapien
catttatgagagtgttttagcctac

SEQ ID NO: 2918244 - DNA, 25 bp, Homo sapien
gaactgatacttgatgcacactcgt

SEQ ID NO: 2918245 - DNA, 25 bp, Homo sapien
tatattgagtttcaggagtccttta

SEQ ID NO: 2918246 - DNA, 25 bp, Homo sapien
gtgtgagccacacgcaacctgtctt

SEQ ID NO: 2918247 - DNA, 25 bp, Homo sapien
aatagctagggccatagatacacac

SEQ ID NO: 2918248 - DNA, 25 bp, Homo sapien
gataaatgtcccttatcaaattata

SEQ ID NO: 2918249 - DNA, 25 bp, Homo sapien
caataagttctacttcagtgtggtt

SEQ ID NO: 2918250 - DNA, 25 bp, Homo sapien
ccacatttcattggaacttattatc

SEQ ID NO: 2918251 - DNA, 25 bp, Homo sapien
ttggcctttgttctagctttggaaa

SEQ ID NO: 2918252 - DNA, 25 bp, Homo sapien
taaaaatgatagtcattccaataag

SEQ ID NO: 2918253 - DNA, 25 bp, Homo sapien
tgttacccaatgatgataatatttt

SEQ ID NO: 2918254 - DNA, 25 bp, Homo sapien
aatagagtgtcagctgttacccaat

SEQ ID NO: 2918255 - DNA, 25 bp, Homo sapien
gaagtcaaatcattaaatagctagt

SEQ ID NO: 2918256 - DNA, 25 bp, Homo sapien
gtagtaaacagaatagagtgtcagc

SEQ ID NO: 2918257 - DNA, 25 bp, Homo sapien
tttttgccagttgattgtgccacac

SEQ ID NO: 2918258 - DNA, 25 bp, Homo sapien
cagtgaggctaaaagccggtaccaa

SEQ ID NO: 2918259 - DNA, 25 bp, Homo sapien
taccaaagtctctaggcatcagggc

SEQ ID NO: 2918260 - DNA, 25 bp, Homo sapien
caagagtctcacgaccagtgggcaa

SEQ ID NO: 2918261 - DNA, 25 bp, Homo sapien
gaacaagtcttgcacgacactattg

SEQ ID NO: 2918262 - DNA, 25 bp, Homo sapien
taagagcacacagtctaaacacagt

SEQ ID NO: 2918263 - DNA, 25 bp, Homo sapien
gactcaagagaccaaatcaagcctt

SEQ ID NO: 2918264 - DNA, 25 bp, Homo sapien
caacttggtcgcgaataagagcaca

SEQ ID NO: 2918265 - DNA, 25 bp, Homo sapien
ggcatgagccgtcatccctggctgg

SEQ ID NO: 2918266 - DNA, 25 bp, Homo sapien
gcactctgtatttatcccagataaa

SEQ ID NO: 2918267 - DNA, 25 bp, Homo sapien
ttaccttccaataaaaacctgtgca

SEQ ID NO: 2918268 - DNA, 25 bp, Homo sapien
gacgtgaaacatgcaattaccatat

SEQ ID NO: 2918269 - DNA, 25 bp, Homo sapien
aattattgctctggtaataattaaa

SEQ ID NO: 2918270 - DNA, 25 bp, Homo sapien
gaaaattattgctctggtaataatt

SEQ ID NO: 2918271 - DNA, 25 bp, Homo sapien
aaattattgctctggtaataattaa

SEQ ID NO: 2918272 - DNA, 25 bp, Homo sapien
ttgaaaattattgctctggtaataa

SEQ ID NO: 2918273 - DNA, 25 bp, Homo sapien
gctcattaacctagggcaaagtatt

SEQ ID NO: 2918274 - DNA, 25 bp, Homo sapien
gcttgcctaacagaaccaaaacagg

SEQ ID NO: 2918275 - DNA, 25 bp, Homo sapien
gattgatacctaccttctggcttgc

SEQ ID NO: 2918276 - DNA, 25 bp, Homo sapien
gacttaggtcctgccctcattgaac

SEQ ID NO: 2918277 - DNA, 25 bp, Homo sapien
aagtccgggccggttgctgaatgag

SEQ ID NO: 2918278 - DNA, 25 bp, Homo sapien
ccgggcgggcggcttgttgataata

SEQ ID NO: 2918279 - DNA, 25 bp, Homo sapien
aagggtcccttttcgcgctagtgca

SEQ ID NO: 2918280 - DNA, 25 bp, Homo sapien
tgttgataatatggcggctggagct

SEQ ID NO: 2918281 - DNA, 25 bp, Homo sapien
agagcaggggagatcaggcctgttc

SEQ ID NO: 2918282 - DNA, 25 bp, Homo sapien
ctgagagcaggggagatcaggcctg

SEQ ID NO: 2918283 - DNA, 25 bp, Homo sapien
gcaggggagatcaggcctgttcagg

SEQ ID NO: 2918284 - DNA, 25 bp, Homo sapien
agcaggggagatcaggcctgttcag

SEQ ID NO: 2918285 - DNA, 25 bp, Homo sapien
caaggagcccggtcttgcctgtggc

SEQ ID NO: 2918286 - DNA, 25 bp, Homo sapien
cgccccgcaaggagcccggtcttgc

SEQ ID NO: 2918287 - DNA, 25 bp, Homo sapien
gcctgtggcgctagccgcacacgga

SEQ ID NO: 2918288 - DNA, 25 bp, Homo sapien
ggtcttgcctgtggcgctagccgca

SEQ ID NO: 2918289 - DNA, 25 bp, Homo sapien
ggcgcctccagccatcgccgccagg

SEQ ID NO: 2918290 - DNA, 25 bp, Homo sapien
ccggcgcctccagccatcgccgcca

SEQ ID NO: 2918291 - DNA, 25 bp, Homo sapien
acggctccgggcgctcactgatgct

SEQ ID NO: 2918292 - DNA, 25 bp, Homo sapien
gctccgggcgctcactgatgctcag

SEQ ID NO: 2918293 - DNA, 25 bp, Homo sapien
gacaggccaggacgtccctcctggg

SEQ ID NO: 2918294 - DNA, 25 bp, Homo sapien
tgcggcaccggtcccaccgctccgg

SEQ ID NO: 2918295 - DNA, 25 bp, Homo sapien
cctgcggcaccggtcccaccgctcc

SEQ ID NO: 2918296 - DNA, 25 bp, Homo sapien
ctgccacctgcggcaccggtcccac

SEQ ID NO: 2918297 - DNA, 25 bp, Homo sapien
aataagatattcagagtcaaacttc

SEQ ID NO: 2918298 - DNA, 25 bp, Homo sapien
gagctccagcaaaataagatattca

SEQ ID NO: 2918299 - DNA, 25 bp, Homo sapien
atggagctccagcaaaataagatat

SEQ ID NO: 2918300 - DNA, 25 bp, Homo sapien
gtgctggcaaatggagctccagcaa

SEQ ID NO: 2918301 - DNA, 25 bp, Homo sapien
ataagcctgccaaccagctcggcgt

SEQ ID NO: 2918302 - DNA, 25 bp, Homo sapien
gtggataagcctgccaaccagctcg

SEQ ID NO: 2918303 - DNA, 25 bp, Homo sapien
tgccaaccagctcggcgtaattctt

SEQ ID NO: 2918304 - DNA, 25 bp, Homo sapien
gctggtggataagcctgccaaccag

SEQ ID NO: 2918305 - DNA, 25 bp, Homo sapien
aatagtcaacactgcagcgagagta

SEQ ID NO: 2918306 - DNA, 25 bp, Homo sapien
tagtcaacactgcagcgagagtaat

SEQ ID NO: 2918307 - DNA, 25 bp, Homo sapien
atagtcaacactgcagcgagagtaa

SEQ ID NO: 2918308 - DNA, 25 bp, Homo sapien
cgtagaatcctatacccagtcaaga

SEQ ID NO: 2918309 - DNA, 25 bp, Homo sapien
gaaacgagagtcagacgcgtgcact

SEQ ID NO: 2918310 - DNA, 25 bp, Homo sapien
tttaaacatgcaagggttcagaaag

SEQ ID NO: 2918311 - DNA, 25 bp, Homo sapien
gcacttcttcctagataccagcaga

SEQ ID NO: 2918312 - DNA, 25 bp, Homo sapien
gaatggtgggaacaccttttgtgtc

SEQ ID NO: 2918313 - DNA, 25 bp, Homo sapien
aggaatggtgggaacaccttttgtg

SEQ ID NO: 2918314 - DNA, 25 bp, Homo sapien
atggtgggaacaccttttgtgtccg

SEQ ID NO: 2918315 - DNA, 25 bp, Homo sapien
tgcccaattgtgtgctctcccgtgt

SEQ ID NO: 2918316 - DNA, 25 bp, Homo sapien
taagcattcacgattccacgtgtgg

SEQ ID NO: 2918317 - DNA, 25 bp, Homo sapien
taggagttaccaccatcaaccttgg

SEQ ID NO: 2918318 - DNA, 25 bp, Homo sapien
tactctcaccccatggaatttgcag

SEQ ID NO: 2918319 - DNA, 25 bp, Homo sapien
aataatctggtttttatatgggcaa

SEQ ID NO: 2918320 - DNA, 25 bp, Homo sapien
tccaggcaaagatcttatggctaaa

SEQ ID NO: 2918321 - DNA, 25 bp, Homo sapien
gactagtatccagaacacacaagtg

SEQ ID NO: 2918322 - DNA, 25 bp, Homo sapien
aactatccatccatcaagggactag

SEQ ID NO: 2918323 - DNA, 25 bp, Homo sapien
tgaatgaactagcagtagtaccagt

SEQ ID NO: 2918324 - DNA, 25 bp, Homo sapien
tcaaagcgtcacaaaaactggagat

SEQ ID NO: 2918325 - DNA, 25 bp, Homo sapien
tagtaccagttccagttaggcacag

SEQ ID NO: 2918326 - DNA, 25 bp, Homo sapien
gaattaaatctcatggtctgggtta

SEQ ID NO: 2918327 - DNA, 25 bp, Homo sapien
gtgaaaaacaatggctagagagtga

SEQ ID NO: 2918328 - DNA, 25 bp, Homo sapien
gttatgatcatgtatagagaggtaa

SEQ ID NO: 2918329 - DNA, 25 bp, Homo sapien
tatgatcatgtatagagaggtaaag

SEQ ID NO: 2918330 - DNA, 25 bp, Homo sapien
gatcatgtatagagaggtaaagtta

SEQ ID NO: 2918331 - DNA, 25 bp, Homo sapien
tggagaactctcacagtcagaacgg

SEQ ID NO: 2918332 - DNA, 25 bp, Homo sapien
gggcccagtgggactaacataaaga

SEQ ID NO: 2918333 - DNA, 25 bp, Homo sapien
taaagaggctcagccctaagcaggc

SEQ ID NO: 2918334 - DNA, 25 bp, Homo sapien
ggtctgagacccacatagcacttcc

SEQ ID NO: 2918335 - DNA, 25 bp, Homo sapien
gcctcacaggctggatgtcaccatt

SEQ ID NO: 2918336 - DNA, 25 bp, Homo sapien
catcattggttcttcccagagtgca

SEQ ID NO: 2918337 - DNA, 25 bp, Homo sapien
taaaataggcccataaatgcacagc

SEQ ID NO: 2918338 - DNA, 25 bp, Homo sapien
tgagctcctggcaggctgtaccaat

SEQ ID NO: 2918339 - DNA, 25 bp, Homo sapien
ccattttaagcttaggtgaggtgtc

SEQ ID NO: 2918340 - DNA, 25 bp, Homo sapien
catatcatcgcggaattcattcggc

SEQ ID NO: 2918341 - DNA, 25 bp, Homo sapien
ggaaacctctatgacaacttactct

SEQ ID NO: 2918342 - DNA, 25 bp, Homo sapien
gaagcacaatcgaaaaagccctgga

SEQ ID NO: 2918343 - DNA, 25 bp, Homo sapien
tcgggagctgccgacctcaatcagc

SEQ ID NO: 2918344 - DNA, 25 bp, Homo sapien
agccactctattctgggtttggtgc

SEQ ID NO: 2918345 - DNA, 25 bp, Homo sapien
ggagctgccgacctcaatcagcaag

SEQ ID NO: 2918346 - DNA, 25 bp, Homo sapien
aatcagcaagtcagccactctattc

SEQ ID NO: 2918347 - DNA, 25 bp, Homo sapien
cagagcaccgtgagttctggatttc

SEQ ID NO: 2918348 - DNA, 25 bp, Homo sapien
aatatccatccactcgcacatgcag

SEQ ID NO: 2918349 - DNA, 25 bp, Homo sapien
atcccgccgtgggtacccagagtcg

SEQ ID NO: 2918350 - DNA, 25 bp, Homo sapien
cacatgcagcgggagtccgccattg

SEQ ID NO: 2918351 - DNA, 25 bp, Homo sapien
gcagaggccttcagtgtcatggaca

SEQ ID NO: 2918352 - DNA, 25 bp, Homo sapien
agcagaggccttcagtgtcatggac

SEQ ID NO: 2918353 - DNA, 25 bp, Homo sapien
cagaggccttcagtgtcatggacat

SEQ ID NO: 2918354 - DNA, 25 bp, Homo sapien
cacaggtacagtgtctacggtcgcc

SEQ ID NO: 2918355 - DNA, 25 bp, Homo sapien
gtacagtgtctacggtcgcctgcgc

SEQ ID NO: 2918356 - DNA, 25 bp, Homo sapien
ctacggtcgcctgcgctggtgcaga

SEQ ID NO: 2918357 - DNA, 25 bp, Homo sapien
agtgtctacggtcgcctgcgctggt

SEQ ID NO: 2918358 - DNA, 25 bp, Homo sapien
ctgttgacattgtgaactcagccat

SEQ ID NO: 2918359 - DNA, 25 bp, Homo sapien
cactgttgacattgtgaactcagcc

SEQ ID NO: 2918360 - DNA, 25 bp, Homo sapien
actgttgacattgtgaactcagcca

SEQ ID NO: 2918361 - DNA, 25 bp, Homo sapien
aggcggcgtaatttgttttccacag

SEQ ID NO: 2918362 - DNA, 25 bp, Homo sapien
tgatggcagcggctctgtgaatgct

SEQ ID NO: 2918363 - DNA, 25 bp, Homo sapien
gaccctattgaaacagtgaccagct

SEQ ID NO: 2918364 - DNA, 25 bp, Homo sapien
tagttcccgaccatctagttcccga

SEQ ID NO: 2918365 - DNA, 25 bp, Homo sapien
accggcactgtgattcctgagcaag

SEQ ID NO: 2918366 - DNA, 25 bp, Homo sapien
tgttcaaaccagcaagatacagctg

SEQ ID NO: 2918367 - DNA, 25 bp, Homo sapien
cccatggactcagggtgtgacacag

SEQ ID NO: 2918368 - DNA, 25 bp, Homo sapien
cagggcaccaaacccatgatgttct

SEQ ID NO: 2918369 - DNA, 25 bp, Homo sapien
gatggctgggttccagggcttggct

SEQ ID NO: 2918370 - DNA, 25 bp, Homo sapien
ccggtctgggccgtggccccctgct

SEQ ID NO: 2918371 - DNA, 25 bp, Homo sapien
tccagggcttggctgcactccgcat

SEQ ID NO: 2918372 - DNA, 25 bp, Homo sapien
ctgctctgatggctgggttccaggg

SEQ ID NO: 2918373 - DNA, 25 bp, Homo sapien
cggaagaggctgcaggcagaggccg

SEQ ID NO: 2918374 - DNA, 25 bp, Homo sapien
gaagaggctgcaggcagaggccgca

SEQ ID NO: 2918375 - DNA, 25 bp, Homo sapien
aagaggctgcaggcagaggccgcac

SEQ ID NO: 2918376 - DNA, 25 bp, Homo sapien
ggaagaggctgcaggcagaggccgc

SEQ ID NO: 2918377 - DNA, 25 bp, Homo sapien
cctgctgagtcgggactcaaaagcc

SEQ ID NO: 2918378 - DNA, 25 bp, Homo sapien
gaagttgaagacttagaactcttca

SEQ ID NO: 2918379 - DNA, 25 bp, Homo sapien
tgctgagtcgggactcaaaagccaa

SEQ ID NO: 2918380 - DNA, 25 bp, Homo sapien
tcaaaagccaaggaagttgaagact

SEQ ID NO: 2918381 - DNA, 25 bp, Homo sapien
gggggcatgacccaactggtcacaa

SEQ ID NO: 2918382 - DNA, 25 bp, Homo sapien
agagccactagagggttgacgcaga

SEQ ID NO: 2918383 - DNA, 25 bp, Homo sapien
ctcaggtgttccaaggaccaggact

SEQ ID NO: 2918384 - DNA, 25 bp, Homo sapien
cactagagggttgacgcagagaagt

SEQ ID NO: 2918385 - DNA, 25 bp, Homo sapien
gctccttcagttcaggccaatgttg

SEQ ID NO: 2918386 - DNA, 25 bp, Homo sapien
gtcaggtatttagacacttctcaaa

SEQ ID NO: 2918387 - DNA, 25 bp, Homo sapien
gaaagtcaggtatttagacacttct

SEQ ID NO: 2918388 - DNA, 25 bp, Homo sapien
actgctccttcagttcaggccaatg

SEQ ID NO: 2918389 - DNA, 25 bp, Homo sapien
aagaggtggttttcaggaaggagcg

SEQ ID NO: 2918390 - DNA, 25 bp, Homo sapien
gagttggaaggaaagagagaggatg

SEQ ID NO: 2918391 - DNA, 25 bp, Homo sapien
gagagttggaaggaaagagagagga

SEQ ID NO: 2918392 - DNA, 25 bp, Homo sapien
ctgagagagttggaaggaaagagag

SEQ ID NO: 2918393 - DNA, 25 bp, Homo sapien
gagagagttggaaggaaagagagag

SEQ ID NO: 2918394 - DNA, 25 bp, Homo sapien
ggcggtcttcttcaggcgaaccacc

SEQ ID NO: 2918395 - DNA, 25 bp, Homo sapien
tgagctccgagatggctccggcagt

SEQ ID NO: 2918396 - DNA, 25 bp, Homo sapien
ggcggctctccgtgagctccgagat

SEQ ID NO: 2918397 - DNA, 25 bp, Homo sapien
cctggcttgttgagcgtgtcctcac

SEQ ID NO: 2918398 - DNA, 25 bp, Homo sapien
tgttgccactgccgtccaagccact

SEQ ID NO: 2918399 - DNA, 25 bp, Homo sapien
gttgccactgccgtccaagccactc

SEQ ID NO: 2918400 - DNA, 25 bp, Homo sapien
cctgttgccactgccgtccaagcca

SEQ ID NO: 2918401 - DNA, 25 bp, Homo sapien
tcctgttgccactgccgtccaagcc

SEQ ID NO: 2918402 - DNA, 25 bp, Homo sapien
tatgccaagtttaccactggccaca

SEQ ID NO: 2918403 - DNA, 25 bp, Homo sapien
atgccaagtttaccactggccacag

SEQ ID NO: 2918404 - DNA, 25 bp, Homo sapien
ttatgccaagtttaccactggccac

SEQ ID NO: 2918405 - DNA, 25 bp, Homo sapien
atctgtcaggatcaataaatggctc

SEQ ID NO: 2918406 - DNA, 25 bp, Homo sapien
gaatctgtcaggatcaataaatggc

SEQ ID NO: 2918407 - DNA, 25 bp, Homo sapien
agaatctgtcaggatcaataaatgg

SEQ ID NO: 2918408 - DNA, 25 bp, Homo sapien
ttagaatctgtcaggatcaataaat

SEQ ID NO: 2918409 - DNA, 25 bp, Homo sapien
aagctctccatgacacaagtagttc

SEQ ID NO: 2918410 - DNA, 25 bp, Homo sapien
taatgccatcatgtacaataagctc

SEQ ID NO: 2918411 - DNA, 25 bp, Homo sapien
tgcttatttcccagacatctttgtc

SEQ ID NO: 2918412 - DNA, 25 bp, Homo sapien
atgtacaataagctctccatgacac

SEQ ID NO: 2918413 - DNA, 25 bp, Homo sapien
agatcagcttgtttaagatttgcac

SEQ ID NO: 2918414 - DNA, 25 bp, Homo sapien
gagatcagcttgtttaagatttgca

SEQ ID NO: 2918415 - DNA, 25 bp, Homo sapien
ctgatccagagagatcagcttgttt

SEQ ID NO: 2918416 - DNA, 25 bp, Homo sapien
ccagagagatcagcttgtttaagat

SEQ ID NO: 2918417 - DNA, 25 bp, Homo sapien
cattagaacagagtgtcttgactcc

SEQ ID NO: 2918418 - DNA, 25 bp, Homo sapien
ctacattagaacagagtgtcttgac

SEQ ID NO: 2918419 - DNA, 25 bp, Homo sapien
acattagaacagagtgtcttgactc

SEQ ID NO: 2918420 - DNA, 25 bp, Homo sapien
tacattagaacagagtgtcttgact

SEQ ID NO: 2918421 - DNA, 25 bp, Homo sapien
ttcaaatctagctcccttcatgttg

SEQ ID NO: 2918422 - DNA, 25 bp, Homo sapien
tatccacacctttcaggttagcacc

SEQ ID NO: 2918423 - DNA, 25 bp, Homo sapien
gtggtgttagcatctcttcaaatct

SEQ ID NO: 2918424 - DNA, 25 bp, Homo sapien
tgcattttttaaggtagtcactctc

SEQ ID NO: 2918425 - DNA, 25 bp, Homo sapien
ctagacaactgagcgggtggagaaa

SEQ ID NO: 2918426 - DNA, 25 bp, Homo sapien
caactgagcgggtggagaaagaaaa

SEQ ID NO: 2918427 - DNA, 25 bp, Homo sapien
ttcttctagacaactgagcgggtgg

SEQ ID NO: 2918428 - DNA, 25 bp, Homo sapien
tcatcttgtacatgttcctccagcc

SEQ ID NO: 2918429 - DNA, 25 bp, Homo sapien
agacctttttcccaacatcactgta

SEQ ID NO: 2918430 - DNA, 25 bp, Homo sapien
ggaacttgtctactttaggagccaa

SEQ ID NO: 2918431 - DNA, 25 bp, Homo sapien
caaacaatttgtataactaggagaa

SEQ ID NO: 2918432 - DNA, 25 bp, Homo sapien
gacaaataaaggatgccaatgcccc

SEQ ID NO: 2918433 - DNA, 25 bp, Homo sapien
acagcataaggcctggaaaccagaa

SEQ ID NO: 2918434 - DNA, 25 bp, Homo sapien
caggtggcagggctcaaaaatagaa

SEQ ID NO: 2918435 - DNA, 25 bp, Homo sapien
ggagcaaactttggcatagccccag

SEQ ID NO: 2918436 - DNA, 25 bp, Homo sapien
gctgtgttcttgctattgttggagc

SEQ ID NO: 2918437 - DNA, 25 bp, Homo sapien
tgcgcacgtgcagaatggtgtgtcc

SEQ ID NO: 2918438 - DNA, 25 bp, Homo sapien
caaagtgtagctcaaaccttagtgg

SEQ ID NO: 2918439 - DNA, 25 bp, Homo sapien
aaaccctctggatgctctttcagct

SEQ ID NO: 2918440 - DNA, 25 bp, Homo sapien
cacggagataacttgggaatgaggc

SEQ ID NO: 2918441 - DNA, 25 bp, Homo sapien
tttccaggtgaacagcatatccatc

SEQ ID NO: 2918442 - DNA, 25 bp, Homo sapien
ggtcctttccaggtgaacagcatat

SEQ ID NO: 2918443 - DNA, 25 bp, Homo sapien
ctatgagcgggtcctttccaggtga

SEQ ID NO: 2918444 - DNA, 25 bp, Homo sapien
aggtgaacagcatatccatcaaggt

SEQ ID NO: 2918445 - DNA, 25 bp, Homo sapien
ggagctatacggataaaaaacagat

SEQ ID NO: 2918446 - DNA, 25 bp, Homo sapien
agtcaagggaggagctatacggata

SEQ ID NO: 2918447 - DNA, 25 bp, Homo sapien
tgatggttgtaactcagtcaattca

SEQ ID NO: 2918448 - DNA, 25 bp, Homo sapien
ttaaaactcatctgcggtgatggtt

SEQ ID NO: 2918449 - DNA, 25 bp, Homo sapien
gaaggtggcctgttcttagctgagt

SEQ ID NO: 2918450 - DNA, 25 bp, Homo sapien
tgcacagcctacgttaatcctggtg

SEQ ID NO: 2918451 - DNA, 25 bp, Homo sapien
taatggtggatacgtgtcaaaaccc

SEQ ID NO: 2918452 - DNA, 25 bp, Homo sapien
aaggatgctatgagacccagttctg

SEQ ID NO: 2918453 - DNA, 25 bp, Homo sapien
aatgagctgaaaacttaggtctaca

SEQ ID NO: 2918454 - DNA, 25 bp, Homo sapien
catgcccagcgtcagtttcttacaa

SEQ ID NO: 2918455 - DNA, 25 bp, Homo sapien
cagcagttgagcttcttgatatcta

SEQ ID NO: 2918456 - DNA, 25 bp, Homo sapien
tcttgatatctacccaaatgagctg

SEQ ID NO: 2918457 - DNA, 25 bp, Homo sapien
cagatcacctgaggttgtgagatcg

SEQ ID NO: 2918458 - DNA, 25 bp, Homo sapien
agatcacctgaggttgtgagatcga

SEQ ID NO: 2918459 - DNA, 25 bp, Homo sapien
tcacctgaggttgtgagatcgagac

SEQ ID NO: 2918460 - DNA, 25 bp, Homo sapien
aggcagatcacctgaggttgtgaga

SEQ ID NO: 2918461 - DNA, 25 bp, Homo sapien
cggcgggtccgctccagtcaaagaa

SEQ ID NO: 2918462 - DNA, 25 bp, Homo sapien
gctggctccggctggcgaggcggtt

SEQ ID NO: 2918463 - DNA, 25 bp, Homo sapien
gtccaccgtgccgagctcgcgctgg

SEQ ID NO: 2918464 - DNA, 25 bp, Homo sapien
ttgccggcctcggaccgggtgtcca

SEQ ID NO: 2918465 - DNA, 25 bp, Homo sapien
cgggccgtcctgagtggttgcccat

SEQ ID NO: 2918466 - DNA, 25 bp, Homo sapien
tcgggccgtcctgagtggttgccca

SEQ ID NO: 2918467 - DNA, 25 bp, Homo sapien
ttgtcatccacttataatcaggcct

SEQ ID NO: 2918468 - DNA, 25 bp, Homo sapien
ccagagtggactgtgcatccttatt

SEQ ID NO: 2918469 - DNA, 25 bp, Homo sapien
tagcccaagtcttcatttgaccaac

SEQ ID NO: 2918470 - DNA, 25 bp, Homo sapien
ggactcactagagcgtacaacagaa

SEQ ID NO: 2918471 - DNA, 25 bp, Homo sapien
tagtggcttaggcatgtaaacagca

SEQ ID NO: 2918472 - DNA, 25 bp, Homo sapien
aggtgtagtggcttaggcatgtaaa

SEQ ID NO: 2918473 - DNA, 25 bp, Homo sapien
tggcttaggcatgtaaacagcactt

SEQ ID NO: 2918474 - DNA, 25 bp, Homo sapien
tgtagtggcttaggcatgtaaacag

SEQ ID NO: 2918475 - DNA, 25 bp, Homo sapien
ttctgaatcttcagccgtgttaata

SEQ ID NO: 2918476 - DNA, 25 bp, Homo sapien
tctgaatcttcagccgtgttaatat

SEQ ID NO: 2918477 - DNA, 25 bp, Homo sapien
ggcctgcttacctctgtgctcacta

SEQ ID NO: 2918478 - DNA, 25 bp, Homo sapien
gttcttgcatcttgctctgacacta

SEQ ID NO: 2918479 - DNA, 25 bp, Homo sapien
tagtacctcttagtcctgttcaatg

SEQ ID NO: 2918480 - DNA, 25 bp, Homo sapien
tgctcactatcatccttgatccctg

SEQ ID NO: 2918481 - DNA, 25 bp, Homo sapien
tctgtaaatactccctagacctagg

SEQ ID NO: 2918482 - DNA, 25 bp, Homo sapien
tccctgtacattttcgcaataaata

SEQ ID NO: 2918483 - DNA, 25 bp, Homo sapien
gacaggacaggttattgcatacaaa

SEQ ID NO: 2918484 - DNA, 25 bp, Homo sapien
gataaatgacatgatcaacttctgt

SEQ ID NO: 2918485 - DNA, 25 bp, Homo sapien
cagaacacatgatattgagaacagc

SEQ ID NO: 2918486 - DNA, 25 bp, Homo sapien
ctggttggtctgtgagtaatgttac

SEQ ID NO: 2918487 - DNA, 25 bp, Homo sapien
tttatgattacatctgtgcaataaa

SEQ ID NO: 2918488 - DNA, 25 bp, Homo sapien
caggagttagccaaactgtatatga

SEQ ID NO: 2918489 - DNA, 25 bp, Homo sapien
gatggtcttggttgtgcacccacca

SEQ ID NO: 2918490 - DNA, 25 bp, Homo sapien
gtaaagagcaacagccctacagctt

SEQ ID NO: 2918491 - DNA, 25 bp, Homo sapien
cctcctcgtgggtactgacagggaa

SEQ ID NO: 2918492 - DNA, 25 bp, Homo sapien
tacagcttacgacacctccttgaag

SEQ ID NO: 2918493 - DNA, 25 bp, Homo sapien
ctgatcatcacactggcatttgtta

SEQ ID NO: 2918494 - DNA, 25 bp, Homo sapien
taacatcactaaattaaggctgact

SEQ ID NO: 2918495 - DNA, 25 bp, Homo sapien
catcactaaattaaggctgactttt

SEQ ID NO: 2918496 - DNA, 25 bp, Homo sapien
tccaggactgatcatcacactggca

SEQ ID NO: 2918497 - DNA, 25 bp, Homo sapien
gattagcatcacagtaccttccaag

SEQ ID NO: 2918498 - DNA, 25 bp, Homo sapien
tactgcgatctgaggtgtactggag

SEQ ID NO: 2918499 - DNA, 25 bp, Homo sapien
gcatcatactacacactcaacgagg

SEQ ID NO: 2918500 - DNA, 25 bp, Homo sapien
tgagcgcactgcaacaacatcagga

SEQ ID NO: 2918501 - DNA, 25 bp, Homo sapien
gaagtggtcatcaacctgtaggcct

SEQ ID NO: 2918502 - DNA, 25 bp, Homo sapien
gggtgccaacctttcatgcagtcaa

SEQ ID NO: 2918503 - DNA, 25 bp, Homo sapien
ggttccacacctaacaagatgggca

SEQ ID NO: 2918504 - DNA, 25 bp, Homo sapien
gaccggaagcctgactgaaaacata

SEQ ID NO: 2918505 - DNA, 25 bp, Homo sapien
gacatgatatagacataatacagaa

SEQ ID NO: 2918506 - DNA, 25 bp, Homo sapien
aaatgtaaggtgtaaataattctct

SEQ ID NO: 2918507 - DNA, 25 bp, Homo sapien
ctatgttacttgacatgatatagac

SEQ ID NO: 2918508 - DNA, 25 bp, Homo sapien
tacttgtaacagcaaatgtaaggtg

SEQ ID NO: 2918509 - DNA, 25 bp, Homo sapien
cgaacttgggactcaagcgcagcct

SEQ ID NO: 2918510 - DNA, 25 bp, Homo sapien
gaactcccagcagtagaacactttg

SEQ ID NO: 2918511 - DNA, 25 bp, Homo sapien
gcatctggcgacaaagaagctttgg

SEQ ID NO: 2918512 - DNA, 25 bp, Homo sapien
gatgttccatcgacatttgggccca

SEQ ID NO: 2918513 - DNA, 25 bp, Homo sapien
gaaaggatgtctctaaaatcgtctt

SEQ ID NO: 2918514 - DNA, 25 bp, Homo sapien
tcaattcctgtaccatttgttgctg

SEQ ID NO: 2918515 - DNA, 25 bp, Homo sapien
tgtagagtagcctgtagttcttctg

SEQ ID NO: 2918516 - DNA, 25 bp, Homo sapien
cattttcttgacttagctgctctgc

SEQ ID NO: 2918517 - DNA, 25 bp, Homo sapien
tccagtagatctttctctgctcggg

SEQ ID NO: 2918518 - DNA, 25 bp, Homo sapien
caaagcggccctgttcaagaatacc

SEQ ID NO: 2918519 - DNA, 25 bp, Homo sapien
tccgcaagctacaggtcaactgctg

SEQ ID NO: 2918520 - DNA, 25 bp, Homo sapien
tctgctcgggctactttcaacattt

SEQ ID NO: 2918521 - DNA, 25 bp, Homo sapien
ccaagaactcggactggagagagaa

SEQ ID NO: 2918522 - DNA, 25 bp, Homo sapien
cacgcaggtacttcccaagaactcg

SEQ ID NO: 2918523 - DNA, 25 bp, Homo sapien
gcaacaccaggttcgcagatgagtc

SEQ ID NO: 2918524 - DNA, 25 bp, Homo sapien
ctggtagggacctttcgaagcaaca

SEQ ID NO: 2918525 - DNA, 25 bp, Homo sapien
gaatagacactgctgataatcatcc

SEQ ID NO: 2918526 - DNA, 25 bp, Homo sapien
tgttctggcatctagcttgggtact

SEQ ID NO: 2918527 - DNA, 25 bp, Homo sapien
tattttggccaatgctgctccacca

SEQ ID NO: 2918528 - DNA, 25 bp, Homo sapien
gctcggttcttagccctgttgtgaa

SEQ ID NO: 2918529 - DNA, 25 bp, Homo sapien
ggtatccttgttagctccagcagat

SEQ ID NO: 2918530 - DNA, 25 bp, Homo sapien
gaagcagcacaaccgcacattcaat

SEQ ID NO: 2918531 - DNA, 25 bp, Homo sapien
tctgtggctgcatcggcagttgctg

SEQ ID NO: 2918532 - DNA, 25 bp, Homo sapien
caaagagagacctcaggcacgaggc

SEQ ID NO: 2918533 - DNA, 25 bp, Homo sapien
actgtggaggctcctcacaaacctc

SEQ ID NO: 2918534 - DNA, 25 bp, Homo sapien
agtcgcaacctcctctgacactgtg

SEQ ID NO: 2918535 - DNA, 25 bp, Homo sapien
ctcatcttcagagtcgcaacctcct

SEQ ID NO: 2918536 - DNA, 25 bp, Homo sapien
acctcagcatatgtgaaatgcattc

SEQ ID NO: 2918537 - DNA, 25 bp, Homo sapien
tagaatcctatcaagggtcacctcc

SEQ ID NO: 2918538 - DNA, 25 bp, Homo sapien
gaatcacactcttagacacccagca

SEQ ID NO: 2918539 - DNA, 25 bp, Homo sapien
gatatggagccagtggaattgcact

SEQ ID NO: 2918540 - DNA, 25 bp, Homo sapien
ggagaccacccaacatgtctgactg

SEQ ID NO: 2918541 - DNA, 25 bp, Homo sapien
gggcctgtcacctggagtctagaaa

SEQ ID NO: 2918542 - DNA, 25 bp, Homo sapien
tgtggccttctgcataactacctgg

SEQ ID NO: 2918543 - DNA, 25 bp, Homo sapien
taaactgaggatgtaacgaggcagc

SEQ ID NO: 2918544 - DNA, 25 bp, Homo sapien
catgcatgtggtttggctgggacaa

SEQ ID NO: 2918545 - DNA, 25 bp, Homo sapien
ttcttagcctcagaaacagccaagg

SEQ ID NO: 2918546 - DNA, 25 bp, Homo sapien
aacacgatgtatgcttccaaatggc

SEQ ID NO: 2918547 - DNA, 25 bp, Homo sapien
caaagacgcccttggcatgtgctgt

SEQ ID NO: 2918548 - DNA, 25 bp, Homo sapien
ggacatagtagcaaagacgcccttg

SEQ ID NO: 2918549 - DNA, 25 bp, Homo sapien
tgattattgtgtaacttgacagccc

SEQ ID NO: 2918550 - DNA, 25 bp, Homo sapien
ggcttggtgatcacatatctccttc

SEQ ID NO: 2918551 - DNA, 25 bp, Homo sapien
tgacagcccggtgctgttccacctg

SEQ ID NO: 2918552 - DNA, 25 bp, Homo sapien
tctgctcagctgttcggcttggtga

SEQ ID NO: 2918553 - DNA, 25 bp, Homo sapien
cttcatctgcttggtcagagtcttc

SEQ ID NO: 2918554 - DNA, 25 bp, Homo sapien
tgcctctccaggtctgacttctgtt

SEQ ID NO: 2918555 - DNA, 25 bp, Homo sapien
gtcagagtcttcagctgcctctcca

SEQ ID NO: 2918556 - DNA, 25 bp, Homo sapien
tgttcctccagcttgatcacactac

SEQ ID NO: 2918557 - DNA, 25 bp, Homo sapien
gctgggcctcacacttgatgtcatt

SEQ ID NO: 2918558 - DNA, 25 bp, Homo sapien
ctgcaaccgggcattcttctcctcc

SEQ ID NO: 2918559 - DNA, 25 bp, Homo sapien
accaccactgcggtctgcagatccg

SEQ ID NO: 2918560 - DNA, 25 bp, Homo sapien
gtttcctcttcacggtgcgcagctc

SEQ ID NO: 2918561 - DNA, 25 bp, Homo sapien
atagtgattgagaagcaagcacggc

SEQ ID NO: 2918562 - DNA, 25 bp, Homo sapien
tagtgattgagaagcaagcacggcc

SEQ ID NO: 2918563 - DNA, 25 bp, Homo sapien
gattgagaagcaagcacggccctgg

SEQ ID NO: 2918564 - DNA, 25 bp, Homo sapien
gtgattgagaagcaagcacggccct

SEQ ID NO: 2918565 - DNA, 25 bp, Homo sapien
ggagttacctaaggcaatacagtct

SEQ ID NO: 2918566 - DNA, 25 bp, Homo sapien
gaatttccagcttacactgtcccac

SEQ ID NO: 2918567 - DNA, 25 bp, Homo sapien
ccacagggaaaagctaatgtccagg

SEQ ID NO: 2918568 - DNA, 25 bp, Homo sapien
tacagtcttagttcacaaacgcaag

SEQ ID NO: 2918569 - DNA, 25 bp, Homo sapien
gactcgacggcaatgactctgagaa

SEQ ID NO: 2918570 - DNA, 25 bp, Homo sapien
tctttataaagaggcaatttctcct

SEQ ID NO: 2918571 - DNA, 25 bp, Homo sapien
acatcatctttgatcatgcagtaag

SEQ ID NO: 2918572 - DNA, 25 bp, Homo sapien
agatggctgcggctcccaatcatgg

SEQ ID NO: 2918573 - DNA, 25 bp, Homo sapien
taatggctccatgctgtgtacactg

SEQ ID NO: 2918574 - DNA, 25 bp, Homo sapien
tatagggtgcaaatacagcagtgcc

SEQ ID NO: 2918575 - DNA, 25 bp, Homo sapien
gaatctgaggtaaagagtgcccaaa

SEQ ID NO: 2918576 - DNA, 25 bp, Homo sapien
ttggaggcaccttgtttcagacgag

SEQ ID NO: 2918577 - DNA, 25 bp, Homo sapien
tgattaaaactaagcagcagacgct

SEQ ID NO: 2918578 - DNA, 25 bp, Homo sapien
gccctgcagaaacgtagctggtgat

SEQ ID NO: 2918579 - DNA, 25 bp, Homo sapien
ttaacactgatttcctcacaggtgg

SEQ ID NO: 2918580 - DNA, 25 bp, Homo sapien
gaacaaaacgacataaaggccctgc

SEQ ID NO: 2918581 - DNA, 25 bp, Homo sapien
tcaaggcttgctactgcctctaagg

SEQ ID NO: 2918582 - DNA, 25 bp, Homo sapien
cagccaggtatgtcttagcattaaa

SEQ ID NO: 2918583 - DNA, 25 bp, Homo sapien
tgcaaggtaccactactggagaaac

SEQ ID NO: 2918584 - DNA, 25 bp, Homo sapien
gggatcaattagtaacagcctcagc

SEQ ID NO: 2918585 - DNA, 25 bp, Homo sapien
taaatgactcagtaccaaaggcccc

SEQ ID NO: 2918586 - DNA, 25 bp, Homo sapien
caaacactaagtctacttggccaga

SEQ ID NO: 2918587 - DNA, 25 bp, Homo sapien
aaatggagacgcctacattctgctg

SEQ ID NO: 2918588 - DNA, 25 bp, Homo sapien
taagagtcagtatgagaaaaccctg

SEQ ID NO: 2918589 - DNA, 25 bp, Homo sapien
tgtgaaggagccaagacaagaactc

SEQ ID NO: 2918590 - DNA, 25 bp, Homo sapien
caacgagagtgcaatccattataca

SEQ ID NO: 2918591 - DNA, 25 bp, Homo sapien
agctttccaactgggtgggcagctt

SEQ ID NO: 2918592 - DNA, 25 bp, Homo sapien
tatcatattgccacagctgttttgc

SEQ ID NO: 2918593 - DNA, 25 bp, Homo sapien
tgaatgcagtggaccggctgccgac

SEQ ID NO: 2918594 - DNA, 25 bp, Homo sapien
ctactgtcaatggtgaatgcagtgg

SEQ ID NO: 2918595 - DNA, 25 bp, Homo sapien
caatggtgaatgcagtggaccggct

SEQ ID NO: 2918596 - DNA, 25 bp, Homo sapien
agtggaccggctgccgacatgtgct

SEQ ID NO: 2918597 - DNA, 25 bp, Homo sapien
caaatgacttgataagtgacttaac

SEQ ID NO: 2918598 - DNA, 25 bp, Homo sapien
gcatcgacctcagaggactctggct

SEQ ID NO: 2918599 - DNA, 25 bp, Homo sapien
ttggagatgttctgctaacacagac

SEQ ID NO: 2918600 - DNA, 25 bp, Homo sapien
cttaacggtggttgccgactctggg

SEQ ID NO: 2918601 - DNA, 25 bp, Homo sapien
gaaaaacgtctagcaggttgcaaga

SEQ ID NO: 2918602 - DNA, 25 bp, Homo sapien
ctcgtttcctaggagatgaagtctc

SEQ ID NO: 2918603 - DNA, 25 bp, Homo sapien
ccaggtgcagagatgtgatgtctcg

SEQ ID NO: 2918604 - DNA, 25 bp, Homo sapien
cagctgaccctcataattctcatga

SEQ ID NO: 2918605 - DNA, 25 bp, Homo sapien
tggtatcccacttaggggacttctg

SEQ ID NO: 2918606 - DNA, 25 bp, Homo sapien
ctggtatcccacttaggggacttct

SEQ ID NO: 2918607 - DNA, 25 bp, Homo sapien
tataatcatacgaagaagtgctcca

SEQ ID NO: 2918608 - DNA, 25 bp, Homo sapien
gtttccacaccgacacacaagagat

SEQ ID NO: 2918609 - DNA, 25 bp, Homo sapien
gatggtgtaattgtcctccagagag

SEQ ID NO: 2918610 - DNA, 25 bp, Homo sapien
cctggccatgcctggtattgtttaa

SEQ ID NO: 2918611 - DNA, 25 bp, Homo sapien
tcattctatacccaccatcacccac

SEQ ID NO: 2918612 - DNA, 25 bp, Homo sapien
agtcattctatacccaccatcaccc

SEQ ID NO: 2918613 - DNA, 25 bp, Homo sapien
aagtcattctatacccaccatcacc

SEQ ID NO: 2918614 - DNA, 25 bp, Homo sapien
gaagtcattctatacccaccatcac

SEQ ID NO: 2918615 - DNA, 25 bp, Homo sapien
gcacactgctgtaagtcgaatgcct

SEQ ID NO: 2918616 - DNA, 25 bp, Homo sapien
caggaaggtccaagcgttgagtcac

SEQ ID NO: 2918617 - DNA, 25 bp, Homo sapien
gctggctggccgcacactgctgtaa

SEQ ID NO: 2918618 - DNA, 25 bp, Homo sapien
gttgagtcacccctctgctggctgg

SEQ ID NO: 2918619 - DNA, 25 bp, Homo sapien
cacatacataggttctaagccccgt

SEQ ID NO: 2918620 - DNA, 25 bp, Homo sapien
caggcgaactgggtcagcagagaac

SEQ ID NO: 2918621 - DNA, 25 bp, Homo sapien
aaaggatttctgtccatgtgaccca

SEQ ID NO: 2918622 - DNA, 25 bp, Homo sapien
caagcctgattgtgtttgaccaaga

SEQ ID NO: 2918623 - DNA, 25 bp, Homo sapien
ttcttacactcttgactttacactg

SEQ ID NO: 2918624 - DNA, 25 bp, Homo sapien
ctctgtttgttcttacactcttgac

SEQ ID NO: 2918625 - DNA, 25 bp, Homo sapien
gaactctgtttgttcttacactctt

SEQ ID NO: 2918626 - DNA, 25 bp, Homo sapien
tcttgactttacactggcctttggt

SEQ ID NO: 2918627 - DNA, 25 bp, Homo sapien
gctttgtggtttccatgcccgggtg

SEQ ID NO: 2918628 - DNA, 25 bp, Homo sapien
gggtctgctcagtgactctagtgag

SEQ ID NO: 2918629 - DNA, 25 bp, Homo sapien
ggaagcactcagcagtcttgtgtcc

SEQ ID NO: 2918630 - DNA, 25 bp, Homo sapien
actctagtgagggactcttgcggag

SEQ ID NO: 2918631 - DNA, 25 bp, Homo sapien
tagagcattgcgcttggaaccaccg

SEQ ID NO: 2918632 - DNA, 25 bp, Homo sapien
tgcgcttggaaccaccgtattcccg

SEQ ID NO: 2918633 - DNA, 25 bp, Homo sapien
gcattgcgcttggaaccaccgtatt

SEQ ID NO: 2918634 - DNA, 25 bp, Homo sapien
tttcagtagagcattgcgcttggaa

SEQ ID NO: 2918635 - DNA, 25 bp, Homo sapien
gaaatacgcacaagaacataacagc

SEQ ID NO: 2918636 - DNA, 25 bp, Homo sapien
ggcaaagatacaggatacacatact

SEQ ID NO: 2918637 - DNA, 25 bp, Homo sapien
catgaccttgagtaaaaagactgac
